United States Patent Application Publication US 2007/0042381 A1 - sequence listing, part 25

SEQ ID NO: 1088027 - RNA, 22 nt, Human
acacauagaaaauaaauaguua

SEQ ID NO: 1088028 - RNA, 22 nt, Human
cagaauaugacaagauuuuccu

SEQ ID NO: 1088029 - RNA, 20 nt, Human
cugcucugcuuugcaggugg

SEQ ID NO: 1088030 - RNA, 22 nt, Human
ucaagugagcguagcugaaugg

SEQ ID NO: 1088031 - RNA, 22 nt, Human
ggcuucaagucguauauuuggg

SEQ ID NO: 1088032 - RNA, 22 nt, Human
aggacccugaggucuccuguga

SEQ ID NO: 1088033 - RNA, 22 nt, Human
gagaaggcuggucuuaagucga

SEQ ID NO: 1088034 - RNA, 22 nt, Human
caguggaggcucaagugugcuu

SEQ ID NO: 1088035 - RNA, 23 nt, Human
aggauguaggauguauggcagag

SEQ ID NO: 1088036 - RNA, 22 nt, Human
aggcacugcagauuacaggcgc

SEQ ID NO: 1088037 - RNA, 22 nt, Human
ugcagaaggccugacauugcac

SEQ ID NO: 1088038 - RNA, 22 nt, Human
uaaagcauuuuugaaauuauga

SEQ ID NO: 1088039 - RNA, 22 nt, Human
ggagguggagguugcaaugagc

SEQ ID NO: 1088040 - RNA, 22 nt, Human
gucccucugugucccugcaguc

SEQ ID NO: 1088041 - RNA, 22 nt, Human
aggccuguuccaggccccuuuu

SEQ ID NO: 1088042 - RNA, 22 nt, Human
uuggcagggccaggcucucucu

SEQ ID NO: 1088043 - RNA, 22 nt, Human
cacuauuuucucuucagauggc

SEQ ID NO: 1088044 - RNA, 22 nt, Human
agagcuguggauaguccuggau

SEQ ID NO: 1088045 - RNA, 22 nt, Human
ugauuucucuccguuauuucag

SEQ ID NO: 1088046 - RNA, 22 nt, Human
aaaguaaccuaguaauaguguc

SEQ ID NO: 1088047 - RNA, 22 nt, Human
uacacaaucuguuuuuccauuu

SEQ ID NO: 1088048 - RNA, 22 nt, Human
cagacacacaagcaaucuaagu

SEQ ID NO: 1088049 - RNA, 22 nt, Human
aggaagccuggaguccugccca

SEQ ID NO: 1088050 - RNA, 22 nt, Human
guuucuuauuugcagguugcuu

SEQ ID NO: 1088051 - RNA, 22 nt, Human
uugacagcuauuuugcuuugau

SEQ ID NO: 1088052 - RNA, 22 nt, Human
aucugggaauggaagccuucug

SEQ ID NO: 1088053 - RNA, 22 nt, Human
gcccugccggguauuuugugcu

SEQ ID NO: 1088054 - RNA, 22 nt, Human
cuacauaaauuuaucacagacu

SEQ ID NO: 1088055 - RNA, 22 nt, Human
agcugucuccagauacaggauu

SEQ ID NO: 1088056 - RNA, 22 nt, Human
ccugggcauucuuugaguucuc

SEQ ID NO: 1088057 - RNA, 22 nt, Human
ucccaggaaaacacucgaggac

SEQ ID NO: 1088058 - RNA, 22 nt, Human
aagugggaauagaaaugaaggu

SEQ ID NO: 1088059 - RNA, 22 nt, Human
gggcuggaggugagcaggacag

SEQ ID NO: 1088060 - RNA, 22 nt, Human
auagacuugaggauauaaugaa

SEQ ID NO: 1088061 - RNA, 22 nt, Human
ucuucauguuaguuggguuuuc

SEQ ID NO: 1088062 - RNA, 22 nt, Human
uaggcuggaggaagcagugccu

SEQ ID NO: 1088063 - RNA, 23 nt, Human
uccucccaaauuucagccucauu

SEQ ID NO: 1088064 - RNA, 22 nt, Human
gugugcaugcauagacaccaca

SEQ ID NO: 1088065 - RNA, 22 nt, Human
uuugugugugcucacauagaug

SEQ ID NO: 1088066 - RNA, 22 nt, Human
aaauagacaggcuuaaauagga

SEQ ID NO: 1088067 - RNA, 22 nt, Human
auuucuuaucugaggucuacau

SEQ ID NO: 1088068 - RNA, 22 nt, Human
ucuggccugaaaguccaugcuu

SEQ ID NO: 1088069 - RNA, 22 nt, Human
cgggcaguguggcuccagaguc

SEQ ID NO: 1088070 - RNA, 19 nt, Human
ccugggaggcggagguugc

SEQ ID NO: 1088071 - RNA, 22 nt, Human
aaagaaauaccuuucucagcuu

SEQ ID NO: 1088072 - RNA, 22 nt, Human
aaucacaguggguacuagauug

SEQ ID NO: 1088073 - RNA, 20 nt, Human
gcccugugaugucuugaccu

SEQ ID NO: 1088074 - RNA, 22 nt, Human
gcucagugcagccuuucuguau

SEQ ID NO: 1088075 - RNA, 17 nt, Human
aggugcuggagcaucag

SEQ ID NO: 1088076 - RNA, 22 nt, Human
uuucucugcugccugugucgau

SEQ ID NO: 1088077 - RNA, 22 nt, Human
ucauuuauaaggaugcaauuaa

SEQ ID NO: 1088078 - RNA, 22 nt, Human
acuuuugguucuguaacuguga

SEQ ID NO: 1088079 - RNA, 22 nt, Human
aggagccaggaaaccugcucug

SEQ ID NO: 1088080 - RNA, 22 nt, Human
ggaaaaauagaguauacuuuaa

SEQ ID NO: 1088081 - RNA, 21 nt, Human
aaaauguagacuuuucccuga

SEQ ID NO: 1088082 - RNA, 22 nt, Human
cugaaggauucaaaauggcagg

SEQ ID NO: 1088083 - RNA, 22 nt, Human
aaugcuuuuugcgaaaugugca

SEQ ID NO: 1088084 - RNA, 22 nt, Human
cuggggcucacuccagcccugg

SEQ ID NO: 1088085 - RNA, 22 nt, Human
ccuuuugcucucccauccagaa

SEQ ID NO: 1088086 - RNA, 22 nt, Human
acacaugagaaacaucaguugu

SEQ ID NO: 1088087 - RNA, 22 nt, Human
gcuguauuccugcacuguauag

SEQ ID NO: 1088088 - RNA, 19 nt, Human
uugaaauuguuugauaugg

SEQ ID NO: 1088089 - RNA, 22 nt, Human
ggagcagucuggugauacucag

SEQ ID NO: 1088090 - RNA, 22 nt, Human
gaaaugacaaggacauuccugu

SEQ ID NO: 1088091 - RNA, 22 nt, Human
auuuuaauaagauccauuuggu

SEQ ID NO: 1088092 - RNA, 22 nt, Human
gcucuguacgcaggaugagggg

SEQ ID NO: 1088093 - RNA, 22 nt, Human
agccacgucccugucaggguca

SEQ ID NO: 1088094 - RNA, 19 nt, Human
caugugcaugagcacagga

SEQ ID NO: 1088095 - RNA, 22 nt, Human
ccuggcacaagagcagcauugg

SEQ ID NO: 1088096 - RNA, 22 nt, Human
ucagagcuuaucucuugcugga

SEQ ID NO: 1088097 - RNA, 22 nt, Human
caaucaugguauaauuccuuuu

SEQ ID NO: 1088098 - RNA, 22 nt, Human
gaugguuuggaaugaaguagcu

SEQ ID NO: 1088099 - RNA, 22 nt, Human
cagcaagacaguuuccuaagug

SEQ ID NO: 1088100 - RNA, 22 nt, Human
ggggccagguccagcuuccaaa

SEQ ID NO: 1088101 - RNA, 22 nt, Human
acagaucacuugacuaaaauga

SEQ ID NO: 1088102 - RNA, 22 nt, Human
ucuggcuccugaguccaugcuc

SEQ ID NO: 1088103 - RNA, 22 nt, Human
ucagcaguggcucucaugcagu

SEQ ID NO: 1088104 - RNA, 22 nt, Human
agggugcagucacaggaaaugu

SEQ ID NO: 1088105 - RNA, 22 nt, Human
agagucuuccaggcagccugag

SEQ ID NO: 1088106 - RNA, 22 nt, Human
aaguaugacauuuaagacaauu

SEQ ID NO: 1088107 - RNA, 22 nt, Human
ucagaagccggaagugcuccuc

SEQ ID NO: 1088108 - RNA, 22 nt, Human
auuucaucucuggaacauaacu

SEQ ID NO: 1088109 - RNA, 22 nt, Human
gagcugaggcucaggcuggcgu

SEQ ID NO: 1088110 - RNA, 17 nt, Human
cacaggugugguuugag

SEQ ID NO: 1088111 - RNA, 17 nt, Human
caguggucugagguaug

SEQ ID NO: 1088112 - RNA, 22 nt, Human
gcucugagaggaugcugagcag

SEQ ID NO: 1088113 - RNA, 22 nt, Human
cacugccuccccaggcuccaca

SEQ ID NO: 1088114 - RNA, 22 nt, Human
gauuauuuugugcaauaaucgg

SEQ ID NO: 1088115 - RNA, 22 nt, Human
ucucuucucuagugagcaacug

SEQ ID NO: 1088116 - RNA, 22 nt, Human
aaagguuuauuuaaucagggag

SEQ ID NO: 1088117 - RNA, 22 nt, Human
uucugucugauggugccagaac

SEQ ID NO: 1088118 - RNA, 22 nt, Human
uaugaagcugauaaucacugau

SEQ ID NO: 1088119 - RNA, 22 nt, Human
caccagggcagcagccuagucu

SEQ ID NO: 1088120 - RNA, 22 nt, Human
cauguccauuuaugcacagaaa

SEQ ID NO: 1088121 - RNA, 22 nt, Human
uacacaguaaaugguaaauaca

SEQ ID NO: 1088122 - RNA, 22 nt, Human
cauucuaaaguguuuuauaccu

SEQ ID NO: 1088123 - RNA, 22 nt, Human
uccugcagagccgcccucaggu

SEQ ID NO: 1088124 - RNA, 22 nt, Human
ugugccugaguuggcugaguac

SEQ ID NO: 1088125 - RNA, 22 nt, Human
cacacuagucuauccauuagcu

SEQ ID NO: 1088126 - RNA, 22 nt, Human
uccaggcagcccuuccugacuc

SEQ ID NO: 1088127 - RNA, 22 nt, Human
ucugucacuauuggccagaaca

SEQ ID NO: 1088128 - RNA, 19 nt, Human
gucuucugaauguggcugc

SEQ ID NO: 1088129 - RNA, 22 nt, Human
cugugcaagcccaagauaaaac

SEQ ID NO: 1088130 - RNA, 21 nt, Human
ggccucugucauccugggaag

SEQ ID NO: 1088131 - RNA, 22 nt, Human
gcugggcucuuaucaccuguac

SEQ ID NO: 1088132 - RNA, 22 nt, Human
cagagcccuuggcuggagccca

SEQ ID NO: 1088133 - RNA, 22 nt, Human
ggcugcugggaauaugccagcu

SEQ ID NO: 1088134 - RNA, 22 nt, Human
gcagaggcaaucagguaugugg

SEQ ID NO: 1088135 - RNA, 22 nt, Human
gggcucugggaugcucuuagag

SEQ ID NO: 1088136 - RNA, 22 nt, Human
guugaaaguagaugcuauuugg

SEQ ID NO: 1088137 - RNA, 22 nt, Human
cuaguggaaacuaacuggaauu

SEQ ID NO: 1088138 - RNA, 22 nt, Human
ggaaaaggccauuguuucucug

SEQ ID NO: 1088139 - RNA, 22 nt, Human
caucaucaccugcuauacgauc

SEQ ID NO: 1088140 - RNA, 22 nt, Human
agaaauguugaauacacaaaau

SEQ ID NO: 1088141 - RNA, 22 nt, Human
cauuucacaaauggccacauca

SEQ ID NO: 1088142 - RNA, 21 nt, Human
agaauaaugguaucauuugcu

SEQ ID NO: 1088143 - RNA, 22 nt, Human
uguacauacauagauauacaca

SEQ ID NO: 1088144 - RNA, 22 nt, Human
ucaggcagaauuaucaaaagau

SEQ ID NO: 1088145 - RNA, 22 nt, Human
uaagcagagcccucuuuauuag

SEQ ID NO: 1088146 - RNA, 22 nt, Human
aaaucacagggucucuaaguau

SEQ ID NO: 1088147 - RNA, 22 nt, Human
acuucuguaaagggaagacagu

SEQ ID NO: 1088148 - RNA, 21 nt, Human
gcagaugggaagagacgaggc

SEQ ID NO: 1088149 - RNA, 19 nt, Human
uuugaauauaaugcagcua

SEQ ID NO: 1088150 - RNA, 22 nt, Human
cccuggcagaaugucucugggc

SEQ ID NO: 1088151 - RNA, 22 nt, Human
uaucuuuaaugcuuggagguua

SEQ ID NO: 1088152 - RNA, 22 nt, Human
cuuucuucaaccucauucugca

SEQ ID NO: 1088153 - RNA, 22 nt, Human
cagcauuuggaggagaggcuuu

SEQ ID NO: 1088154 - RNA, 22 nt, Human
uguugagacacagacacaagcc

SEQ ID NO: 1088155 - RNA, 22 nt, Human
ucugagcuggagcccaucaccu

SEQ ID NO: 1088156 - RNA, 19 nt, Human
cccagagcauccugaacuu

SEQ ID NO: 1088157 - RNA, 22 nt, Human
aaacaauuuccaccucuccuga

SEQ ID NO: 1088158 - RNA, 18 nt, Human
ggccucuggacuggcagc

SEQ ID NO: 1088159 - RNA, 22 nt, Human
cucugaagggagggccaagccc

SEQ ID NO: 1088160 - RNA, 22 nt, Human
ucugagacuccauaaguugaaa

SEQ ID NO: 1088161 - RNA, 22 nt, Human
aacuuccaggccuugaauuauu

SEQ ID NO: 1088162 - RNA, 22 nt, Human
gauuuaaaguagaccuuuguuu

SEQ ID NO: 1088163 - RNA, 22 nt, Human
gagcagcuguucugacuugucu

SEQ ID NO: 1088164 - RNA, 22 nt, Human
cagggacaggggagaaaagaug

SEQ ID NO: 1088165 - RNA, 22 nt, Human
acccaggacuuggcaaccucau

SEQ ID NO: 1088166 - RNA, 20 nt, Human
cugaaccaaggcuuucucag

SEQ ID NO: 1088167 - RNA, 22 nt, Human
augacaguucuacacuuaaucu

SEQ ID NO: 1088168 - RNA, 22 nt, Human
ccuccugggacaggcuggcaca

SEQ ID NO: 1088169 - RNA, 22 nt, Human
agguauuuuauagauaaguaaa

SEQ ID NO: 1088170 - RNA, 22 nt, Human
gagaaacaacacuugaugccuu

SEQ ID NO: 1088171 - RNA, 22 nt, Human
acagagccuccaggagugcugg

SEQ ID NO: 1088172 - RNA, 22 nt, Human
guguaaguaucuuuguaucuuu

SEQ ID NO: 1088173 - RNA, 22 nt, Human
gggaagggagggccuccaguca

SEQ ID NO: 1088174 - RNA, 22 nt, Human
aaacaucucaaagagguauuug

SEQ ID NO: 1088175 - RNA, 22 nt, Human
gaaggcugagcagacaggccaa

SEQ ID NO: 1088176 - RNA, 22 nt, Human
uucagucagugacuaagcaguu

SEQ ID NO: 1088177 - RNA, 22 nt, Human
uuugaauaucacaaacuuucaa

SEQ ID NO: 1088178 - RNA, 22 nt, Human
acccagaggugucuagcaagcu

SEQ ID NO: 1088179 - RNA, 22 nt, Human
uguuacaauauuaucaacugag

SEQ ID NO: 1088180 - RNA, 20 nt, Human
acacacuuugaucuugagcc

SEQ ID NO: 1088181 - RNA, 22 nt, Human
acaggaaauuggcauaucaguu

SEQ ID NO: 1088182 - RNA, 20 nt, Human
gugggcagaugugugcaugg

SEQ ID NO: 1088183 - RNA, 22 nt, Human
uguacauugucacucaucaagu

SEQ ID NO: 1088184 - RNA, 22 nt, Human
aaguaaauaucuguagucuuua

SEQ ID NO: 1088185 - RNA, 22 nt, Human
ccuacauucucugaguuuuccu

SEQ ID NO: 1088186 - RNA, 22 nt, Human
ugaaacuuauaagaauaugaau

SEQ ID NO: 1088187 - RNA, 22 nt, Human
ggcugagccuggagcaucuggu

SEQ ID NO: 1088188 - RNA, 22 nt, Human
gucucugucuuaggccaggccu

SEQ ID NO: 1088189 - RNA, 22 nt, Human
augcaagauguauagaagacuu

SEQ ID NO: 1088190 - RNA, 22 nt, Human
uuugugaacuuaggcaauuagg

SEQ ID NO: 1088191 - RNA, 22 nt, Human
acgcagaagggccuggcgugcc

SEQ ID NO: 1088192 - RNA, 22 nt, Human
aggcuggcgacaucuggcgggc

SEQ ID NO: 1088193 - RNA, 18 nt, Human
uuguuuuaagacucuguc

SEQ ID NO: 1088194 - RNA, 22 nt, Human
ggcucugccacuucuuggcugu

SEQ ID NO: 1088195 - RNA, 22 nt, Human
guggagccaggaucuccgcaca

SEQ ID NO: 1088196 - RNA, 21 nt, Human
agcugccacccuagcuucuga

SEQ ID NO: 1088197 - RNA, 22 nt, Human
aguggcuuggcugcacuacagg

SEQ ID NO: 1088198 - RNA, 22 nt, Human
ucagauggaaugaugccacugc

SEQ ID NO: 1088199 - RNA, 22 nt, Human
caagaaauucuguucagauagc

SEQ ID NO: 1088200 - RNA, 17 nt, Human
acacagccagguucucc

SEQ ID NO: 1088201 - RNA, 22 nt, Human
uuugcuuguucaagauuucugu

SEQ ID NO: 1088202 - RNA, 22 nt, Human
acaacugucaguaaagaauauu

SEQ ID NO: 1088203 - RNA, 22 nt, Human
acugugugggccgcucacuggg

SEQ ID NO: 1088204 - RNA, 22 nt, Human
uugccauuuaguaugcuuguau

SEQ ID NO: 1088205 - RNA, 22 nt, Human
cagcuguuccuggaaggagacc

SEQ ID NO: 1088206 - RNA, 22 nt, Human
ggcaaaaaguucccaucagugu

SEQ ID NO: 1088207 - RNA, 19 nt, Human
gcccucaggcagcuccauc

SEQ ID NO: 1088208 - RNA, 22 nt, Human
ggccugcugacccaaguccugu

SEQ ID NO: 1088209 - RNA, 22 nt, Human
uuuucacaugcuuggggacuua

SEQ ID NO: 1088210 - RNA, 22 nt, Human
cuuccagucuagagcuaucugu

SEQ ID NO: 1088211 - RNA, 22 nt, Human
auacagaugggucagauuucau

SEQ ID NO: 1088212 - RNA, 22 nt, Human
agcacuuuaagcaacagaucaa

SEQ ID NO: 1088213 - RNA, 21 nt, Human
ugaacacagauuugucugauu

SEQ ID NO: 1088214 - RNA, 22 nt, Human
uugaagagucuuucuuuccccc

SEQ ID NO: 1088215 - RNA, 22 nt, Human
gccuggaaugcaaugugacgaa

SEQ ID NO: 1088216 - RNA, 22 nt, Human
ugcugucccccgugucugggcu

SEQ ID NO: 1088217 - RNA, 22 nt, Human
auucaguucuaaggucagugcc

SEQ ID NO: 1088218 - RNA, 20 nt, Human
ggcagcaggaguuuccucuu

SEQ ID NO: 1088219 - RNA, 22 nt, Human
ccagcuggcacuguggcugccc

SEQ ID NO: 1088220 - RNA, 22 nt, Human
auacagaaaaugaugcagaguu

SEQ ID NO: 1088221 - RNA, 22 nt, Human
uucaacaaguauuuauugagca

SEQ ID NO: 1088222 - RNA, 22 nt, Human
cuguugucuccucucagauuau

SEQ ID NO: 1088223 - RNA, 22 nt, Human
agucugccuuuccaaucccgug

SEQ ID NO: 1088224 - RNA, 22 nt, Human
acagccaggagccaugggcagg

SEQ ID NO: 1088225 - RNA, 22 nt, Human
ccugcagaccacacucaguccu

SEQ ID NO: 1088226 - RNA, 22 nt, Human
caggaacaauaucuguccuggu

SEQ ID NO: 1088227 - RNA, 22 nt, Human
ucuuugaacuuuuuguaaguua

SEQ ID NO: 1088228 - RNA, 22 nt, Human
ccuccugcacuugcuuuccuuc

SEQ ID NO: 1088229 - RNA, 22 nt, Human
gcagggacugugaucucacaga

SEQ ID NO: 1088230 - RNA, 22 nt, Human
ucucaaacuaacaaugauuaua

SEQ ID NO: 1088231 - RNA, 22 nt, Human
gguaacaguuacaguaacagua

SEQ ID NO: 1088232 - RNA, 20 nt, Human
gagauccucaucuguaaagu

SEQ ID NO: 1088233 - RNA, 22 nt, Human
augggcagacagggagcucacg

SEQ ID NO: 1088234 - RNA, 22 nt, Human
auuuuuuagaaccuggccugau

SEQ ID NO: 1088235 - RNA, 22 nt, Human
aucagaaggggagguaaagaag

SEQ ID NO: 1088236 - RNA, 19 nt, Human
gaauuuaucucuucagucc

SEQ ID NO: 1088237 - RNA, 22 nt, Human
gagcagagucuauuuccacacu

SEQ ID NO: 1088238 - RNA, 22 nt, Human
uucaccacuuugcaccaggccu

SEQ ID NO: 1088239 - RNA, 22 nt, Human
aacauacuuauacuaaauaaug

SEQ ID NO: 1088240 - RNA, 22 nt, Human
cugcuuugaaaauaaacuuguc

SEQ ID NO: 1088241 - RNA, 22 nt, Human
ggcuccugggagaaguuuuauu

SEQ ID NO: 1088242 - RNA, 22 nt, Human
ccagucccaggcagaaauccag

SEQ ID NO: 1088243 - RNA, 22 nt, Human
uucugagagugccagaaguucu

SEQ ID NO: 1088244 - RNA, 22 nt, Human
uuggaagaucuaacagaggcau

SEQ ID NO: 1088245 - RNA, 20 nt, Human
cccucugcuacacugggagc

SEQ ID NO: 1088246 - RNA, 22 nt, Human
uguucuuagcaggagcaucuau

SEQ ID NO: 1088247 - RNA, 22 nt, Human
ccugaagagcacucuagaguug

SEQ ID NO: 1088248 - RNA, 22 nt, Human
gaccagagaaaggcacuggaag

SEQ ID NO: 1088249 - RNA, 22 nt, Human
aagggcagcugacagaugcuua

SEQ ID NO: 1088250 - RNA, 22 nt, Human
gacuggaaagccuguccucaga

SEQ ID NO: 1088251 - RNA, 18 nt, Human
agaugaaagcaaaugaca

SEQ ID NO: 1088252 - RNA, 18 nt, Human
ucauuuugucugccuuug

SEQ ID NO: 1088253 - RNA, 22 nt, Human
cccagaguggacgguggccccu

SEQ ID NO: 1088254 - RNA, 22 nt, Human
guggauggauuuugaggaaugg

SEQ ID NO: 1088255 - RNA, 22 nt, Human
caguggaaacuaugcugcugga

SEQ ID NO: 1088256 - RNA, 22 nt, Human
acugaaggguaaugugggagcc

SEQ ID NO: 1088257 - RNA, 22 nt, Human
guuccaauuccaaauuccaagg

SEQ ID NO: 1088258 - RNA, 22 nt, Human
gcagcaggcuuuucauaccuug

SEQ ID NO: 1088259 - RNA, 22 nt, Human
uggcagucuggguuggcaguua

SEQ ID NO: 1088260 - RNA, 22 nt, Human
gaacaaagacauggaggaggau

SEQ ID NO: 1088261 - RNA, 22 nt, Human
ggcugaggcucaugccaucuug

SEQ ID NO: 1088262 - RNA, 23 nt, Human
auaucacacccaguacagucucc

SEQ ID NO: 1088263 - RNA, 22 nt, Human
agucaguuaaccucacagcauc

SEQ ID NO: 1088264 - RNA, 22 nt, Human
cuauuucugccuaaugaccugu

SEQ ID NO: 1088265 - RNA, 22 nt, Human
auaauaacaccugaauaggaaa

SEQ ID NO: 1088266 - RNA, 22 nt, Human
aaggcagaaauucaacuacugg

SEQ ID NO: 1088267 - RNA, 22 nt, Human
guguggcuagaagugucuuguu

SEQ ID NO: 1088268 - RNA, 22 nt, Human
acagcagaugacaacuauuuau

SEQ ID NO: 1088269 - RNA, 22 nt, Human
agggaaggaaaagcugucgcuu

SEQ ID NO: 1088270 - RNA, 23 nt, Human
gauguguagggaaagucagacuc

SEQ ID NO: 1088271 - RNA, 22 nt, Human
uuacaucugcacuccaggacag

SEQ ID NO: 1088272 - RNA, 22 nt, Human
cugcagaggccucgccuccucu

SEQ ID NO: 1088273 - RNA, 22 nt, Human
guauacauagaugaugaacaag

SEQ ID NO: 1088274 - RNA, 22 nt, Human
uggagcaggacggggaguggua

SEQ ID NO: 1088275 - RNA, 22 nt, Human
uuucacauggaagcucucgaga

SEQ ID NO: 1088276 - RNA, 22 nt, Human
aaaugguaugaaaagagauuuc

SEQ ID NO: 1088277 - RNA, 22 nt, Human
uuucacaggggcaaccuccaug

SEQ ID NO: 1088278 - RNA, 22 nt, Human
agcacagagauuauuuacaaga

SEQ ID NO: 1088279 - RNA, 22 nt, Human
gugcccugugaacuguaaggaa

SEQ ID NO: 1088280 - RNA, 22 nt, Human
augagcccagggaauuccuuuc

SEQ ID NO: 1088281 - RNA, 22 nt, Human
aggagucagauaugggaaaguu

SEQ ID NO: 1088282 - RNA, 22 nt, Human
acuucagugugguauaaaacgu

SEQ ID NO: 1088283 - RNA, 22 nt, Human
cagaagcauuccagcaaauagu

SEQ ID NO: 1088284 - RNA, 22 nt, Human
uccugagaugagacagugcugc

SEQ ID NO: 1088285 - RNA, 22 nt, Human
acagagucuuacguggugauaa

SEQ ID NO: 1088286 - RNA, 22 nt, Human
ucagaagcauguggggagccug

SEQ ID NO: 1088287 - RNA, 22 nt, Human
agucagugaaggcauugcucaa

SEQ ID NO: 1088288 - RNA, 20 nt, Human
gucuuauuuaacacaugacu

SEQ ID NO: 1088289 - RNA, 22 nt, Human
auguguagaacuguaaugccca

SEQ ID NO: 1088290 - RNA, 22 nt, Human
guuucuuaaguuacaaaaucuu

SEQ ID NO: 1088291 - RNA, 22 nt, Human
gggcugagcacauacugacagc

SEQ ID NO: 1088292 - RNA, 22 nt, Human
caugcuuuucaaucuaucuuaa

SEQ ID NO: 1088293 - RNA, 22 nt, Human
cagccaggagccucugcaacua

SEQ ID NO: 1088294 - RNA, 22 nt, Human
uuguuuugcuaaagggucauca

SEQ ID NO: 1088295 - RNA, 22 nt, Human
acauacaugguucucagcccuu

SEQ ID NO: 1088296 - RNA, 22 nt, Human
agcccugcauagaagggaacac

SEQ ID NO: 1088297 - RNA, 22 nt, Human
aggacaggauugagcugaacug

SEQ ID NO: 1088298 - RNA, 22 nt, Human
uaguaacacauugaacgaucgc

SEQ ID NO: 1088299 - RNA, 22 nt, Human
gcaugagggggguuaggaaguu

SEQ ID NO: 1088300 - RNA, 22 nt, Human
aagauggaguaguguaaugguu

SEQ ID NO: 1088301 - RNA, 19 nt, Human
ccauauaaccagcaagugu

SEQ ID NO: 1088302 - RNA, 22 nt, Human
uuuguucaaauuuuccuaucug

SEQ ID NO: 1088303 - RNA, 22 nt, Human
aucaaagagugagauuuuuacu

SEQ ID NO: 1088304 - RNA, 22 nt, Human
uuuaaaaucagaugggaguugg

SEQ ID NO: 1088305 - RNA, 22 nt, Human
uguggcuguguccaccugcugc

SEQ ID NO: 1088306 - RNA, 20 nt, Human
ggcacuggaagcacacagga

SEQ ID NO: 1088307 - RNA, 22 nt, Human
gaggcagcauucgcauagacag

SEQ ID NO: 1088308 - RNA, 22 nt, Human
uggaacacugaucauugccuuu

SEQ ID NO: 1088309 - RNA, 22 nt, Human
aaccaggaacuuuugugagagc

SEQ ID NO: 1088310 - RNA, 22 nt, Human
gaaggcugaguggguacggagg

SEQ ID NO: 1088311 - RNA, 22 nt, Human
uggccuuccuggugacucauga

SEQ ID NO: 1088312 - RNA, 22 nt, Human
aggagggcuaggaaaaccagga

SEQ ID NO: 1088313 - RNA, 22 nt, Human
uauuuggaaaagggaagggaca

SEQ ID NO: 1088314 - RNA, 22 nt, Human
gggcaugccugcgcagugcaug

SEQ ID NO: 1088315 - RNA, 14 nt, Human
gcagguggaucacu

SEQ ID NO: 1088316 - RNA, 22 nt, Human
ggcacuuuccagucuauagagc

SEQ ID NO: 1088317 - RNA, 22 nt, Human
aggcccagacucagcggggcgg

SEQ ID NO: 1088318 - RNA, 22 nt, Human
ugcaccauacccauuccccucu

SEQ ID NO: 1088319 - RNA, 22 nt, Human
gcaggcuccaaggccugggaga

SEQ ID NO: 1088320 - RNA, 22 nt, Human
ucucuggggauggaccugggag

SEQ ID NO: 1088321 - RNA, 22 nt, Human
gcagggcugggugggagacaga

SEQ ID NO: 1088322 - RNA, 22 nt, Human
agcugggucuugggccaggaga

SEQ ID NO: 1088323 - RNA, 22 nt, Human
cuugccuguggcuaguuggcuc

SEQ ID NO: 1088324 - RNA, 22 nt, Human
aagccacuauggugauucucaa

SEQ ID NO: 1088325 - RNA, 21 nt, Human
cuggagucauuuucugaguag

SEQ ID NO: 1088326 - RNA, 22 nt, Human
uuucaaauaccauaaaccuaau

SEQ ID NO: 1088327 - RNA, 22 nt, Human
uccaauauuucucauauaugga

SEQ ID NO: 1088328 - RNA, 22 nt, Human
uaauacugaaaggaguaucagc

SEQ ID NO: 1088329 - RNA, 22 nt, Human
ucacuucacacccacuaucaug

SEQ ID NO: 1088330 - RNA, 22 nt, Human
cuggagcugcuguccuugggug

SEQ ID NO: 1088331 - RNA, 22 nt, Human
uuuuuccuaagcaguggagcug

SEQ ID NO: 1088332 - RNA, 22 nt, Human
ugaaaugagagcacagaauaaa

SEQ ID NO: 1088333 - RNA, 17 nt, Human
gucugggcuuuagagac

SEQ ID NO: 1088334 - RNA, 22 nt, Human
gcagggcagcuuagucccuguc

SEQ ID NO: 1088335 - RNA, 22 nt, Human
cagaccugagguugaguaccag

SEQ ID NO: 1088336 - RNA, 22 nt, Human
uuuuccaaaguaccaugucccu

SEQ ID NO: 1088337 - RNA, 22 nt, Human
aauauuuguuaguguuuuaaug

SEQ ID NO: 1088338 - RNA, 21 nt, Human
aucagcaaaugccugucuccc

SEQ ID NO: 1088339 - RNA, 22 nt, Human
ccuggccaaucuagggcuguua

SEQ ID NO: 1088340 - RNA, 22 nt, Human
agauguuuuagaguuugacuug

SEQ ID NO: 1088341 - RNA, 23 nt, Human
ugcagagggacugaagccagcuu

SEQ ID NO: 1088342 - RNA, 15 nt, Human
ggcagguggaucacu

SEQ ID NO: 1088343 - RNA, 22 nt, Human
acauacauauguuuaaaugcau

SEQ ID NO: 1088344 - RNA, 22 nt, Human
cuggccuggucuggccucucca

SEQ ID NO: 1088345 - RNA, 22 nt, Human
aggaggaauacaauccagcagc

SEQ ID NO: 1088346 - RNA, 22 nt, Human
ucaccuaauugaagucaggagu

SEQ ID NO: 1088347 - RNA, 22 nt, Human
guccuggguccccgcaggucag

SEQ ID NO: 1088348 - RNA, 22 nt, Human
agacacagaacacaaaagcaua

SEQ ID NO: 1088349 - RNA, 22 nt, Human
gucaugccagcggagcucggga

SEQ ID NO: 1088350 - RNA, 19 nt, Human
caucucugcaaggagcugc

SEQ ID NO: 1088351 - RNA, 20 nt, Human
agcugaggcaccugagguua

SEQ ID NO: 1088352 - RNA, 22 nt, Human
acacugaaagaagccagcuugu

SEQ ID NO: 1088353 - RNA, 21 nt, Human
uguaaguuucaucugaauugg

SEQ ID NO: 1088354 - RNA, 22 nt, Human
uuccaaauuccaauccccugaa

SEQ ID NO: 1088355 - RNA, 22 nt, Human
uugcaaauucauggaucugaau

SEQ ID NO: 1088356 - RNA, 22 nt, Human
aauuauguggaagaggauuaaa

SEQ ID NO: 1088357 - RNA, 22 nt, Human
guuucacauaauuuuaaauugu

SEQ ID NO: 1088358 - RNA, 22 nt, Human
auucuucauguugaagcuguca

SEQ ID NO: 1088359 - RNA, 22 nt, Human
aagcacauuauagcuaucuagg

SEQ ID NO: 1088360 - RNA, 22 nt, Human
acaucacagagcccagauaaag

SEQ ID NO: 1088361 - RNA, 22 nt, Human
ucugccugagaaguggggugcc

SEQ ID NO: 1088362 - RNA, 22 nt, Human
gagccuucaucgcagccuuguu

SEQ ID NO: 1088363 - RNA, 22 nt, Human
caaaugauagagccgauuauca

SEQ ID NO: 1088364 - RNA, 22 nt, Human
cuggacagugggcagaggagac

SEQ ID NO: 1088365 - RNA, 22 nt, Human
uccagggaucuuuagagucuuu

SEQ ID NO: 1088366 - RNA, 22 nt, Human
gggcuugcugauuugggcagga

SEQ ID NO: 1088367 - RNA, 22 nt, Human
cuuccugcauugugccagaguu

SEQ ID NO: 1088368 - RNA, 22 nt, Human
agccuggacagcuacggagaac

SEQ ID NO: 1088369 - RNA, 22 nt, Human
acaagaaagguaggauucaggu

SEQ ID NO: 1088370 - RNA, 22 nt, Human
ucugcagauuuaucagcagcug

SEQ ID NO: 1088371 - RNA, 22 nt, Human
cagaagagaugaaauaguauua

SEQ ID NO: 1088372 - RNA, 22 nt, Human
caggaaggcccaccuguccugu

SEQ ID NO: 1088373 - RNA, 19 nt, Human
cucuccagcuccaguagcu

SEQ ID NO: 1088374 - RNA, 22 nt, Human
ugccucagaguugucccuacca

SEQ ID NO: 1088375 - RNA, 22 nt, Human
aguucuggcccaggguuucuug

SEQ ID NO: 1088376 - RNA, 22 nt, Human
ggagagcuagugccugccagua

SEQ ID NO: 1088377 - RNA, 22 nt, Human
gagcaggcuugcagagaagggg

SEQ ID NO: 1088378 - RNA, 22 nt, Human
aaacaugagcacuugcuucaua

SEQ ID NO: 1088379 - RNA, 22 nt, Human
ccuggcccacauggcuucuccc

SEQ ID NO: 1088380 - RNA, 19 nt, Human
accaggaacuucccuaggc

SEQ ID NO: 1088381 - RNA, 22 nt, Human
agcuuaggaggaugaugaacau

SEQ ID NO: 1088382 - RNA, 22 nt, Human
uccagccaugcaugacaaucac

SEQ ID NO: 1088383 - RNA, 22 nt, Human
uucacaaagcuggagcauuucc

SEQ ID NO: 1088384 - RNA, 22 nt, Human
acaaaguuucuucuaacaucug

SEQ ID NO: 1088385 - RNA, 20 nt, Human
gcuaggaaggggaaaaagug

SEQ ID NO: 1088386 - RNA, 22 nt, Human
aacaggcaaacugugggauccc

SEQ ID NO: 1088387 - RNA, 22 nt, Human
ucucaggggauucacuggcacc

SEQ ID NO: 1088388 - RNA, 22 nt, Human
auucagcaguuccugcuucagu

SEQ ID NO: 1088389 - RNA, 22 nt, Human
auaacagaugugaagugcuaau

SEQ ID NO: 1088390 - RNA, 22 nt, Human
cagcccuggcuagggcgagggc

SEQ ID NO: 1088391 - RNA, 20 nt, Human
agagagaccuaggccuaguc

SEQ ID NO: 1088392 - RNA, 21 nt, Human
ugcugaaucugccauauuuuc

SEQ ID NO: 1088393 - RNA, 22 nt, Human
ugggccaggggccucuucugau

SEQ ID NO: 1088394 - RNA, 22 nt, Human
uagucuuuugagaaguauaucu

SEQ ID NO: 1088395 - RNA, 22 nt, Human
ugacaccacaacuagccauuga

SEQ ID NO: 1088396 - RNA, 22 nt, Human
ccaguugguuucaaugggacag

SEQ ID NO: 1088397 - RNA, 22 nt, Human
aggaugggccugggauaugcuu

SEQ ID NO: 1088398 - RNA, 22 nt, Human
augaaauauuucagagcagagu

SEQ ID NO: 1088399 - RNA, 22 nt, Human
aagaaaaucaguucuggucagu

SEQ ID NO: 1088400 - RNA, 22 nt, Human
uagauaaauuagaaaguuuacu

SEQ ID NO: 1088401 - RNA, 22 nt, Human
aauuaacagagggcuuauuacu

SEQ ID NO: 1088402 - RNA, 20 nt, Human
cagaggcauuuucagacucu

SEQ ID NO: 1088403 - RNA, 22 nt, Human
caaguuauuucauuggaacaau

SEQ ID NO: 1088404 - RNA, 22 nt, Human
uucaugccagcccuguguggua

SEQ ID NO: 1088405 - RNA, 22 nt, Human
agaggcugagaaacccucuucu

SEQ ID NO: 1088406 - RNA, 22 nt, Human
gugcaggugaccuaauccaugu

SEQ ID NO: 1088407 - RNA, 22 nt, Human
uuauacauguuuauaagguuga

SEQ ID NO: 1088408 - RNA, 22 nt, Human
gcagaagaccaugguggaaaga

SEQ ID NO: 1088409 - RNA, 22 nt, Human
gcuggagguuucaccugaguuu

SEQ ID NO: 1088410 - RNA, 22 nt, Human
ggagucagaacccaggcuucua

SEQ ID NO: 1088411 - RNA, 22 nt, Human
gcaggaguuaggcgucguggau

SEQ ID NO: 1088412 - RNA, 22 nt, Human
gaccauuucuaggaaucagacu

SEQ ID NO: 1088413 - RNA, 22 nt, Human
aucaggauuauuaaaucuggau

SEQ ID NO: 1088414 - RNA, 22 nt, Human
aggccuggccuuuauguucaag

SEQ ID NO: 1088415 - RNA, 22 nt, Human
cucaacauuuaacagugaaaaa

SEQ ID NO: 1088416 - RNA, 22 nt, Human
gacauguacuucaauuucucuu

SEQ ID NO: 1088417 - RNA, 22 nt, Human
ccugauuauuguaaauauauuu

SEQ ID NO: 1088418 - RNA, 22 nt, Human
aggcagcauuugaauccagguc

SEQ ID NO: 1088419 - RNA, 22 nt, Human
aggggcuccucucugagaguag

SEQ ID NO: 1088420 - RNA, 22 nt, Human
cuauugaauagcccaaaucauu

SEQ ID NO: 1088421 - RNA, 15 nt, Human
aaucuggcggcaagu

SEQ ID NO: 1088422 - RNA, 22 nt, Human
gcacuaaaccaacauguaauaa

SEQ ID NO: 1088423 - RNA, 22 nt, Human
uuccauaauuaaguggagagaa

SEQ ID NO: 1088424 - RNA, 22 nt, Human
aggugggguucagucucagccg

SEQ ID NO: 1088425 - RNA, 22 nt, Human
uuacacaacaucuguauuauua

SEQ ID NO: 1088426 - RNA, 22 nt, Human
uauauuaaagugcuuugcagug

SEQ ID NO: 1088427 - RNA, 23 nt, Human
gcacugggcucucagcaaggugu

SEQ ID NO: 1088428 - RNA, 22 nt, Human
gcuggccaggugcuuugguucu

SEQ ID NO: 1088429 - RNA, 22 nt, Human
augcuuuggccaaugagaagug

SEQ ID NO: 1088430 - RNA, 22 nt, Human
gugucccaggccucuggaauua

SEQ ID NO: 1088431 - RNA, 22 nt, Human
ggccuuggggaggauggugucc

SEQ ID NO: 1088432 - RNA, 22 nt, Human
caagaugggcaccccagcaccu

SEQ ID NO: 1088433 - RNA, 22 nt, Human
aaagagcaagcugagauuugaa

SEQ ID NO: 1088434 - RNA, 22 nt, Human
ggaaggaagugcagacuuuaaa

SEQ ID NO: 1088435 - RNA, 22 nt, Human
agcacagaaaguauugacugaa

SEQ ID NO: 1088436 - RNA, 22 nt, Human
aggagaguaccauugggccgca

SEQ ID NO: 1088437 - RNA, 22 nt, Human
gggggcuggaauauccaucaac

SEQ ID NO: 1088438 - RNA, 22 nt, Human
gagaagcaauuuccaacugugc

SEQ ID NO: 1088439 - RNA, 22 nt, Human
cagcuuuugcagacuucuugcc

SEQ ID NO: 1088440 - RNA, 22 nt, Human
uggcugccuagugucugagcag

SEQ ID NO: 1088441 - RNA, 22 nt, Human
auugucuucugucuuauaguuc

SEQ ID NO: 1088442 - RNA, 22 nt, Human
cugggcacauuuugacuagugu

SEQ ID NO: 1088443 - RNA, 22 nt, Human
ugaccaaagacuuuagauguuc

SEQ ID NO: 1088444 - RNA, 18 nt, Human
uuucugaaugucuauuuc

SEQ ID NO: 1088445 - RNA, 22 nt, Human
agugugugcaugcauucgugca

SEQ ID NO: 1088446 - RNA, 22 nt, Human
uaaggccauuauggugggcccg

SEQ ID NO: 1088447 - RNA, 20 nt, Human
aagauucugauuuguagcgu

SEQ ID NO: 1088448 - RNA, 22 nt, Human
cuuccuguugucacagucugcg

SEQ ID NO: 1088449 - RNA, 22 nt, Human
uauuuggaaaugauaaaguacu

SEQ ID NO: 1088450 - RNA, 22 nt, Human
gcagggccagggcucaggcugu

SEQ ID NO: 1088451 - RNA, 22 nt, Human
ugauuauauucuaacuucauaa

SEQ ID NO: 1088452 - RNA, 22 nt, Human
auucaaagagcugccagaacug

SEQ ID NO: 1088453 - RNA, 22 nt, Human
gggaccugcgccacucacuguc

SEQ ID NO: 1088454 - RNA, 22 nt, Human
ggcagggaaacagcugauccca

SEQ ID NO: 1088455 - RNA, 22 nt, Human
ccucuggcuguaccacuggcac

SEQ ID NO: 1088456 - RNA, 22 nt, Human
gaagcagaaguacgauuuacua

SEQ ID NO: 1088457 - RNA, 21 nt, Human
gauugaaaccauggcagugag

SEQ ID NO: 1088458 - RNA, 22 nt, Human
uagcuguuuuuugugaggaaau

SEQ ID NO: 1088459 - RNA, 22 nt, Human
uugugcaauccccucauuuuau

SEQ ID NO: 1088460 - RNA, 22 nt, Human
agagaagacuuacagccacagu

SEQ ID NO: 1088461 - RNA, 22 nt, Human
aucagcaaggcaaucacugcag

SEQ ID NO: 1088462 - RNA, 22 nt, Human
auuuugaaauacuugaaggaaa

SEQ ID NO: 1088463 - RNA, 22 nt, Human
caggaaagaaaugagaacacca

SEQ ID NO: 1088464 - RNA, 22 nt, Human
ccaggaggcucugacuggaccc

SEQ ID NO: 1088465 - RNA, 22 nt, Human
agcagaacauuuucagggcugu

SEQ ID NO: 1088466 - RNA, 22 nt, Human
agaucaaaaacuuaauggcuuu

SEQ ID NO: 1088467 - RNA, 22 nt, Human
caggccuuaguaggugcucccu

SEQ ID NO: 1088468 - RNA, 22 nt, Human
gucccagaugucuggaacuccc

SEQ ID NO: 1088469 - RNA, 22 nt, Human
ccagcuggugggucuuucucug

SEQ ID NO: 1088470 - RNA, 22 nt, Human
aggcagagcuaggaagaauugu

SEQ ID NO: 1088471 - RNA, 21 nt, Human
gggugcuguggucaugcagga

SEQ ID NO: 1088472 - RNA, 22 nt, Human
uuacaaagauuauauucaguua

SEQ ID NO: 1088473 - RNA, 20 nt, Human
ccaaauguggagaaaaagua

SEQ ID NO: 1088474 - RNA, 21 nt, Human
gccugccugcgugacccucuu

SEQ ID NO: 1088475 - RNA, 22 nt, Human
uugaaacugcuuauugaauuug

SEQ ID NO: 1088476 - RNA, 22 nt, Human
uacauaguguuuugaagaauua

SEQ ID NO: 1088477 - RNA, 22 nt, Human
ggauauaugcauguuaucauuu

SEQ ID NO: 1088478 - RNA, 22 nt, Human
ucauuuguacuugugugcuugu

SEQ ID NO: 1088479 - RNA, 22 nt, Human
auauuuguuuggcagaguucag

SEQ ID NO: 1088480 - RNA, 22 nt, Human
acucugccaucccaggugcugu

SEQ ID NO: 1088481 - RNA, 22 nt, Human
uaacuuugaagggaauuuuacu

SEQ ID NO: 1088482 - RNA, 22 nt, Human
ugcugcuguaucaugccuucau

SEQ ID NO: 1088483 - RNA, 22 nt, Human
aggacagauuuuuggccaccag

SEQ ID NO: 1088484 - RNA, 22 nt, Human
uaaggucauggugaauaauaag

SEQ ID NO: 1088485 - RNA, 22 nt, Human
acaucuuuuuucucuaauugug

SEQ ID NO: 1088486 - RNA, 21 nt, Human
auuuucauuaauucagugugg

SEQ ID NO: 1088487 - RNA, 22 nt, Human
cuucuggguugcaggucuuggc

SEQ ID NO: 1088488 - RNA, 22 nt, Human
cucagugguugagagccugggc

SEQ ID NO: 1088489 - RNA, 22 nt, Human
uagagcugcuggacuguaacag

SEQ ID NO: 1088490 - RNA, 22 nt, Human
caagagagaugcagcucacuca

SEQ ID NO: 1088491 - RNA, 22 nt, Human
guggccagaagacugcaaugcu

SEQ ID NO: 1088492 - RNA, 22 nt, Human
gucugcccugcagacaugccuc

SEQ ID NO: 1088493 - RNA, 22 nt, Human
gcccacacaccagcucaggagg

SEQ ID NO: 1088494 - RNA, 22 nt, Human
cagggcuguggcuuugugcugu

SEQ ID NO: 1088495 - RNA, 22 nt, Human
uucauuugugugccugaugcaa

SEQ ID NO: 1088496 - RNA, 22 nt, Human
cugggccugucagggcuuuuug

SEQ ID NO: 1088497 - RNA, 23 nt, Human
cagggcugguagggaagagcgug

SEQ ID NO: 1088498 - RNA, 22 nt, Human
ugcagcucauugcuggggucug

SEQ ID NO: 1088499 - RNA, 22 nt, Human
cucccagguuccgacgccucuu

SEQ ID NO: 1088500 - RNA, 22 nt, Human
uucagagccacuucaagucuaa

SEQ ID NO: 1088501 - RNA, 22 nt, Human
cugcucugugcacuuguucagg

SEQ ID NO: 1088502 - RNA, 22 nt, Human
cagaaacuuuugaugaguguau

SEQ ID NO: 1088503 - RNA, 22 nt, Human
uccuggaggcaaaugagcacau

SEQ ID NO: 1088504 - RNA, 22 nt, Human
gagcuguccgccccugggccga

SEQ ID NO: 1088505 - RNA, 22 nt, Human
gagagugaggccugggaaucua

SEQ ID NO: 1088506 - RNA, 22 nt, Human
cagcaaagguagaagcacagga

SEQ ID NO: 1088507 - RNA, 22 nt, Human
accaggaagcugugagaccuuu

SEQ ID NO: 1088508 - RNA, 20 nt, Human
caagcccucuuuagccugcc

SEQ ID NO: 1088509 - RNA, 22 nt, Human
cacucugagaaguacaagcucc

SEQ ID NO: 1088510 - RNA, 21 nt, Human
agagucugcauuucugacaag

SEQ ID NO: 1088511 - RNA, 22 nt, Human
uuuccauauuuggucuuuggga

SEQ ID NO: 1088512 - RNA, 22 nt, Human
uacauacagccaaguaugaagu

SEQ ID NO: 1088513 - RNA, 22 nt, Human
uuugaauaaucacugggcauua

SEQ ID NO: 1088514 - RNA, 22 nt, Human
cacaggagguuaggaagugguc

SEQ ID NO: 1088515 - RNA, 22 nt, Human
ucaggaguccugccugcagccu

SEQ ID NO: 1088516 - RNA, 22 nt, Human
aaaaugaugcuguaauuuggca

SEQ ID NO: 1088517 - RNA, 22 nt, Human
cagcugccacaggacuuucuga

SEQ ID NO: 1088518 - RNA, 22 nt, Human
agcagggggaguuagacuagau

SEQ ID NO: 1088519 - RNA, 19 nt, Human
aaaaggagagaucagaguu

SEQ ID NO: 1088520 - RNA, 22 nt, Human
cuggccacaugugugcugagca

SEQ ID NO: 1088521 - RNA, 22 nt, Human
auuuaauggguagacauuguua

SEQ ID NO: 1088522 - RNA, 22 nt, Human
auaaacucaugccaagaaauga

SEQ ID NO: 1088523 - RNA, 22 nt, Human
uaucuagcaaguaacaugcuga

SEQ ID NO: 1088524 - RNA, 22 nt, Human
uuacacaauauaugguacuugg

SEQ ID NO: 1088525 - RNA, 22 nt, Human
gcucugagcacugugcggcugg

SEQ ID NO: 1088526 - RNA, 22 nt, Human
uguacaaagaguauagcuuuga

SEQ ID NO: 1088527 - RNA, 22 nt, Human
cuuauucaaugcuggaaauguu

SEQ ID NO: 1088528 - RNA, 22 nt, Human
gaaaguuuucucacacaguaau

SEQ ID NO: 1088529 - RNA, 17 nt, Human
gagugcugguggagcuc

SEQ ID NO: 1088530 - RNA, 22 nt, Human
ucagcaguuuuauaugcagcuu

SEQ ID NO: 1088531 - RNA, 22 nt, Human
cugcccugccuggccagugugg

SEQ ID NO: 1088532 - RNA, 19 nt, Human
aguguuaacccaguguugg

SEQ ID NO: 1088533 - RNA, 22 nt, Human
acuucauguuguuuacaacuua

SEQ ID NO: 1088534 - RNA, 22 nt, Human
uaacacuucagaugauuuuguu

SEQ ID NO: 1088535 - RNA, 22 nt, Human
acuuuuuaguuuccucaaacau

SEQ ID NO: 1088536 - RNA, 22 nt, Human
gugggacagcuggagggucccu

SEQ ID NO: 1088537 - RNA, 22 nt, Human
uagcagaguaauacuuuggagc

SEQ ID NO: 1088538 - RNA, 22 nt, Human
agcugggcagacugcagugguu

SEQ ID NO: 1088539 - RNA, 22 nt, Human
ugggaagaugaggugccauggg

SEQ ID NO: 1088540 - RNA, 22 nt, Human
caucuuuaacaauuuacaaugu

SEQ ID NO: 1088541 - RNA, 22 nt, Human
gaaggcuggaaggcaaguagga

SEQ ID NO: 1088542 - RNA, 22 nt, Human
uccagggguaccggccaggcag

SEQ ID NO: 1088543 - RNA, 22 nt, Human
gggcaggaacaaaucaaaugau

SEQ ID NO: 1088544 - RNA, 22 nt, Human
caacauuugugaugagcaaacu

SEQ ID NO: 1088545 - RNA, 20 nt, Human
ugcuggggacauacagggug

SEQ ID NO: 1088546 - RNA, 22 nt, Human
uucagaaaaaacuucaauaagu

SEQ ID NO: 1088547 - RNA, 22 nt, Human
accugucugcaugaucuaaaac

SEQ ID NO: 1088548 - RNA, 22 nt, Human
cacagauagaccuuaugagauu

SEQ ID NO: 1088549 - RNA, 22 nt, Human
acauugcugcauucuccuuccc

SEQ ID NO: 1088550 - RNA, 22 nt, Human
aacagcaguggcaggagaaggc

SEQ ID NO: 1088551 - RNA, 22 nt, Human
auuuauuaugggauuuggcuca

SEQ ID NO: 1088552 - RNA, 20 nt, Human
ucagccuugaaugcuugaaa

SEQ ID NO: 1088553 - RNA, 22 nt, Human
ucacuguaauagguuugaagau

SEQ ID NO: 1088554 - RNA, 22 nt, Human
cacagagacaugaugucauugc

SEQ ID NO: 1088555 - RNA, 22 nt, Human
cagguccccuccccuaccaggc

SEQ ID NO: 1088556 - RNA, 22 nt, Human
aggcugaggcuggcagcuccag

SEQ ID NO: 1088557 - RNA, 22 nt, Human
gcccugcccugagccguagacc

SEQ ID NO: 1088558 - RNA, 22 nt, Human
ugugaaugucuagguuuuaugu

SEQ ID NO: 1088559 - RNA, 22 nt, Human
ucaacacucuuuggcacaguua

SEQ ID NO: 1088560 - RNA, 22 nt, Human
uccaggaacagaauguuagugc

SEQ ID NO: 1088561 - RNA, 22 nt, Human
ccaggccagccuggagcauggc

SEQ ID NO: 1088562 - RNA, 21 nt, Human
uuacaaagcaagugcuguguc

SEQ ID NO: 1088563 - RNA, 22 nt, Human
ugcaugcaaaaaaaucugcauu

SEQ ID NO: 1088564 - RNA, 22 nt, Human
auagcaaaaggcaccagaguga

SEQ ID NO: 1088565 - RNA, 22 nt, Human
aggaggugagcggucauguggu

SEQ ID NO: 1088566 - RNA, 20 nt, Human
ggaaaucaccaggcuccacc

SEQ ID NO: 1088567 - RNA, 22 nt, Human
ccuuccuggagcccaugcagau

SEQ ID NO: 1088568 - RNA, 22 nt, Human
aguuuguaugccaacagcaaag

SEQ ID NO: 1088569 - RNA, 22 nt, Human
ucaggcugguggucagauggcu

SEQ ID NO: 1088570 - RNA, 22 nt, Human
agugaaauaugcccauugcugu

SEQ ID NO: 1088571 - RNA, 22 nt, Human
cugucucugucuuaacucccag

SEQ ID NO: 1088572 - RNA, 22 nt, Human
cacaggaaucgucacuuagcgc

SEQ ID NO: 1088573 - RNA, 22 nt, Human
aucaggaugcugucaguuacca

SEQ ID NO: 1088574 - RNA, 22 nt, Human
cauuacaaccccaaauuacaaa

SEQ ID NO: 1088575 - RNA, 22 nt, Human
cugaagaagucucuaggcuauu

SEQ ID NO: 1088576 - RNA, 22 nt, Human
gcacacagaacauuuggauccu

SEQ ID NO: 1088577 - RNA, 22 nt, Human
uuucacagauauaagauuucac

SEQ ID NO: 1088578 - RNA, 22 nt, Human
guuuauuaacugucaagugauu

SEQ ID NO: 1088579 - RNA, 22 nt, Human
gccucugcugacaagauggaca

SEQ ID NO: 1088580 - RNA, 22 nt, Human
ugugaaaugaguauauuugaau

SEQ ID NO: 1088581 - RNA, 22 nt, Human
cucugcaaggcccuccaguagc

SEQ ID NO: 1088582 - RNA, 21 nt, Human
agcugcuccagggagcucagg

SEQ ID NO: 1088583 - RNA, 22 nt, Human
gaaaaggaaauuuauagagauc

SEQ ID NO: 1088584 - RNA, 22 nt, Human
uauuuugacuauuaaaccaaca

SEQ ID NO: 1088585 - RNA, 22 nt, Human
gcccucucggcauagcaggggc

SEQ ID NO: 1088586 - RNA, 22 nt, Human
ggccagagaauaugccuuacgu

SEQ ID NO: 1088587 - RNA, 22 nt, Human
ucucccaagugaccaggaaaga

SEQ ID NO: 1088588 - RNA, 22 nt, Human
uacacaacugacaaccauucug

SEQ ID NO: 1088589 - RNA, 22 nt, Human
uacauugcuagaaauguauuuu

SEQ ID NO: 1088590 - RNA, 22 nt, Human
cuacagaaaaucagccacaggc

SEQ ID NO: 1088591 - RNA, 22 nt, Human
uccugggcccaggcugccaggg

SEQ ID NO: 1088592 - RNA, 22 nt, Human
ucuuuucuucuuaaugguuaau

SEQ ID NO: 1088593 - RNA, 22 nt, Human
uuuugugagcccauaaaugcca

SEQ ID NO: 1088594 - RNA, 22 nt, Human
ggcucugcccagaugaagagga

SEQ ID NO: 1088595 - RNA, 23 nt, Human
ggccucagcgcacagaaacugcu

SEQ ID NO: 1088596 - RNA, 22 nt, Human
uuuuacaggugaaaaaugaaga

SEQ ID NO: 1088597 - RNA, 22 nt, Human
caaaacauucucugcagcaggg

SEQ ID NO: 1088598 - RNA, 22 nt, Human
cauguuauuuauccauuaaaca

SEQ ID NO: 1088599 - RNA, 22 nt, Human
cugugcagugugggguaggccu

SEQ ID NO: 1088600 - RNA, 22 nt, Human
caaauacuuuauauacuucaaa

SEQ ID NO: 1088601 - RNA, 22 nt, Human
cagggccaguucucgcagcagu

SEQ ID NO: 1088602 - RNA, 22 nt, Human
acaaauaugguacucggagaaa

SEQ ID NO: 1088603 - RNA, 22 nt, Human
aggaacacacugagcaacuccu

SEQ ID NO: 1088604 - RNA, 22 nt, Human
gccugccuuuuggaggcacauu

SEQ ID NO: 1088605 - RNA, 22 nt, Human
uugaggaguguuuagggugagg

SEQ ID NO: 1088606 - RNA, 22 nt, Human
uuugcaaacacuuaagaagaga

SEQ ID NO: 1088607 - RNA, 22 nt, Human
aaaaacagaaugugucuaacuc

SEQ ID NO: 1088608 - RNA, 22 nt, Human
gcagcugggacacugaggccag

SEQ ID NO: 1088609 - RNA, 22 nt, Human
uuuuuuccaacuuaagacuuca

SEQ ID NO: 1088610 - RNA, 22 nt, Human
uagaacuuauuuggcauuauuu

SEQ ID NO: 1088611 - RNA, 22 nt, Human
agcuggugcugaagcucuugag

SEQ ID NO: 1088612 - RNA, 22 nt, Human
gaggaggcuguuucucugcauu

SEQ ID NO: 1088613 - RNA, 22 nt, Human
ugaauacaggaaaauauacuga

SEQ ID NO: 1088614 - RNA, 22 nt, Human
cugagcacugggcacauagcug

SEQ ID NO: 1088615 - RNA, 22 nt, Human
uuugaagacagaucaauauaag

SEQ ID NO: 1088616 - RNA, 22 nt, Human
acagggcagcaacuuugugccu

SEQ ID NO: 1088617 - RNA, 22 nt, Human
gccugagcaggcguggaccaug

SEQ ID NO: 1088618 - RNA, 22 nt, Human
ugggaaggacgugucaguggca

SEQ ID NO: 1088619 - RNA, 22 nt, Human
gcauggcaaauaucgagggcag

SEQ ID NO: 1088620 - RNA, 22 nt, Human
aaaaucucauuaucaggaaggg

SEQ ID NO: 1088621 - RNA, 21 nt, Human
uucagcaguccucuagagaua

SEQ ID NO: 1088622 - RNA, 22 nt, Human
ucagugcuucggcgagcaccua

SEQ ID NO: 1088623 - RNA, 22 nt, Human
gaacacucauggaagaguuuuu

SEQ ID NO: 1088624 - RNA, 18 nt, Human
gcagcugcaguuguagcu

SEQ ID NO: 1088625 - RNA, 22 nt, Human
guggccugggguuuguucugag

SEQ ID NO: 1088626 - RNA, 22 nt, Human
cagcuguuucaguagcguuacu

SEQ ID NO: 1088627 - RNA, 22 nt, Human
ggccaccucugcccuacugagu

SEQ ID NO: 1088628 - RNA, 22 nt, Human
cuggucaggaagguggggacag

SEQ ID NO: 1088629 - RNA, 22 nt, Human
uccucuucaaaauagcucugaa

SEQ ID NO: 1088630 - RNA, 22 nt, Human
ucauucagguugggcaaguguc

SEQ ID NO: 1088631 - RNA, 22 nt, Human
cugcaggucucugugugcauuc

SEQ ID NO: 1088632 - RNA, 22 nt, Human
gggcuccuggcagucaugcuca

SEQ ID NO: 1088633 - RNA, 22 nt, Human
ggcauuuaggcagauaacagac

SEQ ID NO: 1088634 - RNA, 22 nt, Human
uuagcaaaaauaucucauauua

SEQ ID NO: 1088635 - RNA, 22 nt, Human
uuggaauuaaaaggagaacuuc

SEQ ID NO: 1088636 - RNA, 22 nt, Human
aggaguguggccagggcucugg

SEQ ID NO: 1088637 - RNA, 22 nt, Human
agaggccagcagugccuaucug

SEQ ID NO: 1088638 - RNA, 20 nt, Human
acaguguaauauucacauuc

SEQ ID NO: 1088639 - RNA, 22 nt, Human
auacaugugggucuaaacauau

SEQ ID NO: 1088640 - RNA, 23 nt, Human
ucugggcaccuuguugacaugau

SEQ ID NO: 1088641 - RNA, 22 nt, Human
aaagaauaguuaaguuuagggc

SEQ ID NO: 1088642 - RNA, 22 nt, Human
ucaugaaaauagaucagaaauu

SEQ ID NO: 1088643 - RNA, 22 nt, Human
aucaguuucuaccauguggaau

SEQ ID NO: 1088644 - RNA, 22 nt, Human
ggaaggagggcggcaaugauga

SEQ ID NO: 1088645 - RNA, 22 nt, Human
acauuauaguugcuacagagua

SEQ ID NO: 1088646 - RNA, 22 nt, Human
auucucauuugcuggcuauaug

SEQ ID NO: 1088647 - RNA, 22 nt, Human
uuccuuaggcuguuugcagugc

SEQ ID NO: 1088648 - RNA, 22 nt, Human
uauuacaguucgaguuucuagg

SEQ ID NO: 1088649 - RNA, 22 nt, Human
ucuacugcacuggugucucauc

SEQ ID NO: 1088650 - RNA, 22 nt, Human
uuuggcauuuaauaggugauca

SEQ ID NO: 1088651 - RNA, 22 nt, Human
ugguaugaccguggugcaagca

SEQ ID NO: 1088652 - RNA, 22 nt, Human
uagcagaggaaaagagaacauu

SEQ ID NO: 1088653 - RNA, 22 nt, Human
uuauuuguuuucugagaaguau

SEQ ID NO: 1088654 - RNA, 22 nt, Human
ucugcagaauucgaggaagaaa

SEQ ID NO: 1088655 - RNA, 22 nt, Human
gucucccaaccccugugcccag

SEQ ID NO: 1088656 - RNA, 22 nt, Human
agguccuguguccaggggccug

SEQ ID NO: 1088657 - RNA, 21 nt, Human
gcagcuggucucagagcuugc

SEQ ID NO: 1088658 - RNA, 21 nt, Human
ccagggaagaaaugagggcag

SEQ ID NO: 1088659 - RNA, 22 nt, Human
aguuaacuaaacugugaguaaa

SEQ ID NO: 1088660 - RNA, 22 nt, Human
cugaggcaggggcagcuggaga

SEQ ID NO: 1088661 - RNA, 22 nt, Human
cuggauuuaggacuaguccaag

SEQ ID NO: 1088662 - RNA, 22 nt, Human
ugggcugaguguggaacuaguu

SEQ ID NO: 1088663 - RNA, 22 nt, Human
ccagccaguccagcauuggugu

SEQ ID NO: 1088664 - RNA, 22 nt, Human
gaagccacaacuuuuucuuagc

SEQ ID NO: 1088665 - RNA, 18 nt, Human
ugacagaaccuggagccu

SEQ ID NO: 1088666 - RNA, 22 nt, Human
uucagaaugcuauuucugaaau

SEQ ID NO: 1088667 - RNA, 22 nt, Human
aaguaacaaugcuguugaauug

SEQ ID NO: 1088668 - RNA, 21 nt, Human
ugaaaguuggagucaaaugua

SEQ ID NO: 1088669 - RNA, 22 nt, Human
uuugaaagaaaccagugaguga

SEQ ID NO: 1088670 - RNA, 22 nt, Human
cuuccuuugguuggagcgccgu

SEQ ID NO: 1088671 - RNA, 22 nt, Human
uggcugaggucuggggcuucug

SEQ ID NO: 1088672 - RNA, 22 nt, Human
acccucagcuucuuggauuaau

SEQ ID NO: 1088673 - RNA, 22 nt, Human
gauccuugcacuugacuuggca

SEQ ID NO: 1088674 - RNA, 22 nt, Human
ggagauaguccaggugaaggga

SEQ ID NO: 1088675 - RNA, 16 nt, Human
acccucagaaacugcu

SEQ ID NO: 1088676 - RNA, 22 nt, Human
ggaagaaagguggacaacaggu

SEQ ID NO: 1088677 - RNA, 22 nt, Human
agagccacggcaggccuaggaa

SEQ ID NO: 1088678 - RNA, 22 nt, Human
gcuuuuucaaaugaaagcuggu

SEQ ID NO: 1088679 - RNA, 22 nt, Human
guauacauacuucuagauuaaa

SEQ ID NO: 1088680 - RNA, 22 nt, Human
cuuuacauuaauuucuacugau

SEQ ID NO: 1088681 - RNA, 22 nt, Human
cucuccucugaaguggugaccc

SEQ ID NO: 1088682 - RNA, 22 nt, Human
ccagguguagcacugcucacag

SEQ ID NO: 1088683 - RNA, 19 nt, Human
aggugcaggucacagggga

SEQ ID NO: 1088684 - RNA, 22 nt, Human
gccugcugcauccaggcuauug

SEQ ID NO: 1088685 - RNA, 22 nt, Human
ggcugugggaugcauaggagcu

SEQ ID NO: 1088686 - RNA, 22 nt, Human
gcaaagcaaaugccugaaggcg

SEQ ID NO: 1088687 - RNA, 22 nt, Human
ucccacuauuauccuauguggg

SEQ ID NO: 1088688 - RNA, 22 nt, Human
aaacacaucauucaugucguca

SEQ ID NO: 1088689 - RNA, 22 nt, Human
gaaggaaaucugugauuuaugc

SEQ ID NO: 1088690 - RNA, 22 nt, Human
uaagcaaauaaugcaucaaggg

SEQ ID NO: 1088691 - RNA, 22 nt, Human
augguuuguguggcccagauga

SEQ ID NO: 1088692 - RNA, 23 nt, Human
cagaggcaucggauucaacauca

SEQ ID NO: 1088693 - RNA, 22 nt, Human
ucacagaaagcuguguccugac

SEQ ID NO: 1088694 - RNA, 22 nt, Human
cucugcccacgucuugcccaga

SEQ ID NO: 1088695 - RNA, 22 nt, Human
aagggagcuuaggagaucaggc

SEQ ID NO: 1088696 - RNA, 22 nt, Human
uuuaagacuuagauuuauuggg

SEQ ID NO: 1088697 - RNA, 22 nt, Human
acaguaaaaagccuuagaauuu

SEQ ID NO: 1088698 - RNA, 22 nt, Human
gcugccugcaguguuuucccag

SEQ ID NO: 1088699 - RNA, 22 nt, Human
uggcagaaagaaccaugugcaa

SEQ ID NO: 1088700 - RNA, 22 nt, Human
gcagcugaauguccauugcugc

SEQ ID NO: 1088701 - RNA, 22 nt, Human
guuccuuuccuauuuggauaag

SEQ ID NO: 1088702 - RNA, 22 nt, Human
ugggugaggaugaugaggcagc

SEQ ID NO: 1088703 - RNA, 22 nt, Human
gcuggcuccucuguccucacgg

SEQ ID NO: 1088704 - RNA, 22 nt, Human
gagagcugauagaugagcuacu

SEQ ID NO: 1088705 - RNA, 20 nt, Human
agcaggaaugaugcuuucau

SEQ ID NO: 1088706 - RNA, 22 nt, Human
ggcuugggagcaggcaugugac

SEQ ID NO: 1088707 - RNA, 23 nt, Human
agggccugauggcucccgcuggc

SEQ ID NO: 1088708 - RNA, 22 nt, Human
agagugggacacgggcgcuguc

SEQ ID NO: 1088709 - RNA, 22 nt, Human
aaagguuugccgaccucugcuu

SEQ ID NO: 1088710 - RNA, 22 nt, Human
gucauuuuugacuuugaaguga

SEQ ID NO: 1088711 - RNA, 22 nt, Human
ggaagggcaauaaaaucucagg

SEQ ID NO: 1088712 - RNA, 22 nt, Human
uuacuacaagauucuguuuuau

SEQ ID NO: 1088713 - RNA, 22 nt, Human
cacauauuguaguucaccagga

SEQ ID NO: 1088714 - RNA, 22 nt, Human
ugaguccaagagccagugggaa

SEQ ID NO: 1088715 - RNA, 22 nt, Human
uucaaacucugaguaguucugc

SEQ ID NO: 1088716 - RNA, 22 nt, Human
uccucuacucgcuugcccuuug

SEQ ID NO: 1088717 - RNA, 22 nt, Human
agcagccauagauagcaugcaa

SEQ ID NO: 1088718 - RNA, 22 nt, Human
ggaugcaugugcauuuugaaaa

SEQ ID NO: 1088719 - RNA, 22 nt, Human
aaguauauuuuuugaagcauau

SEQ ID NO: 1088720 - RNA, 22 nt, Human
cauaaaagguagcaguuugaaa

SEQ ID NO: 1088721 - RNA, 20 nt, Human
acaguuuauccaguuagcag

SEQ ID NO: 1088722 - RNA, 22 nt, Human
agaagccacuggagguugagau

SEQ ID NO: 1088723 - RNA, 18 nt, Human
acaaggucaauugguuac

SEQ ID NO: 1088724 - RNA, 22 nt, Human
uauuugaagggagaaagugcca

SEQ ID NO: 1088725 - RNA, 23 nt, Human
cuguggcugaguccuguuggagu

SEQ ID NO: 1088726 - RNA, 22 nt, Human
cagcuugcuaauuuugacuuca

SEQ ID NO: 1088727 - RNA, 22 nt, Human
ggaggagacaguaaaaagcacg

SEQ ID NO: 1088728 - RNA, 22 nt, Human
uaugagaaauugcugauauuug

SEQ ID NO: 1088729 - RNA, 22 nt, Human
caggaggaaaugugacccugcu

SEQ ID NO: 1088730 - RNA, 22 nt, Human
accuucaaguaugugggcugaa

SEQ ID NO: 1088731 - RNA, 22 nt, Human
gcaucuucacacaaagccagug

SEQ ID NO: 1088732 - RNA, 22 nt, Human
aauauccuuuccagaguacagu

SEQ ID NO: 1088733 - RNA, 17 nt, Human
uggcucugaggcugaau

SEQ ID NO: 1088734 - RNA, 22 nt, Human
gacauuuagguagcuuccaguu

SEQ ID NO: 1088735 - RNA, 16 nt, Human
caggaaccugucuggc

SEQ ID NO: 1088736 - RNA, 20 nt, Human
cuguccccgaggucaccagg

SEQ ID NO: 1088737 - RNA, 22 nt, Human
cugggguggugcaggccucaug

SEQ ID NO: 1088738 - RNA, 22 nt, Human
gagcuggcuaauacugacuuau

SEQ ID NO: 1088739 - RNA, 22 nt, Human
caggguggcaggcaccauggcc

SEQ ID NO: 1088740 - RNA, 22 nt, Human
aucuucaaggaaaaaauacagu

SEQ ID NO: 1088741 - RNA, 22 nt, Human
ugggcuccagcaccugugcucu

SEQ ID NO: 1088742 - RNA, 22 nt, Human
auuuaucucuggaaacuaagca

SEQ ID NO: 1088743 - RNA, 22 nt, Human
uauuagguuggugcaaaauuaa

SEQ ID NO: 1088744 - RNA, 22 nt, Human
uauuagguuguugcaaaaguaa

SEQ ID NO: 1088745 - RNA, 22 nt, Human
gggcuggcaucaguugccgaga

SEQ ID NO: 1088746 - RNA, 22 nt, Human
agaagccaugguaugcaacuac

SEQ ID NO: 1088747 - RNA, 22 nt, Human
acuggcagccacaacuggcagg

SEQ ID NO: 1088748 - RNA, 21 nt, Human
uggcucugagccucauggcug

SEQ ID NO: 1088749 - RNA, 19 nt, Human
uccuucagucagaucuggg

SEQ ID NO: 1088750 - RNA, 22 nt, Human
uuucuuauacuauauugucauc

SEQ ID NO: 1088751 - RNA, 22 nt, Human
ccaggaaaauaccaagcuuuaa

SEQ ID NO: 1088752 - RNA, 22 nt, Human
cagcuauugguccacagguaug

SEQ ID NO: 1088753 - RNA, 22 nt, Human
cuguacaucccgagagccagua

SEQ ID NO: 1088754 - RNA, 22 nt, Human
cucacauucacaggacagaagg

SEQ ID NO: 1088755 - RNA, 22 nt, Human
acagagcauauaaagugcuuug

SEQ ID NO: 1088756 - RNA, 22 nt, Human
uagcaaguggcaccacauuucu

SEQ ID NO: 1088757 - RNA, 22 nt, Human
gaagauuucuuuaugaaagaug

SEQ ID NO: 1088758 - RNA, 22 nt, Human
cagcagagcauuugguaggagg

SEQ ID NO: 1088759 - RNA, 22 nt, Human
ggcagggcuugucucugugaug

SEQ ID NO: 1088760 - RNA, 22 nt, Human
ugggcugcggauaggccucgga

SEQ ID NO: 1088761 - RNA, 22 nt, Human
ugcagcugccuagggcuggcuu

SEQ ID NO: 1088762 - RNA, 22 nt, Human
caccaggaugggcagguagguc

SEQ ID NO: 1088763 - RNA, 22 nt, Human
gcucugcucuaacauuccugac

SEQ ID NO: 1088764 - RNA, 22 nt, Human
acuaaauacacacauuuguuca

SEQ ID NO: 1088765 - RNA, 22 nt, Human
aggcuuaacuuuacuguuaugc

SEQ ID NO: 1088766 - RNA, 22 nt, Human
auccuucagcugcccuguuacc

SEQ ID NO: 1088767 - RNA, 22 nt, Human
ucccagagcccaaguuggagag

SEQ ID NO: 1088768 - RNA, 22 nt, Human
uugugaauggugccgcaauaaa

SEQ ID NO: 1088769 - RNA, 22 nt, Human
ugacaucacguccuuucagaga

SEQ ID NO: 1088770 - RNA, 23 nt, Human
cacugggcccaggguguggaggc

SEQ ID NO: 1088771 - RNA, 22 nt, Human
uacuuucauggguuuucuuuau

SEQ ID NO: 1088772 - RNA, 22 nt, Human
ugcugggcuugaaagcugcuaa

SEQ ID NO: 1088773 - RNA, 22 nt, Human
ugaagauuuccaccaaaucaca

SEQ ID NO: 1088774 - RNA, 22 nt, Human
uccagggaaggugugaggcugg

SEQ ID NO: 1088775 - RNA, 22 nt, Human
aagcagaaaaacugagcuccaa

SEQ ID NO: 1088776 - RNA, 22 nt, Human
gauuuauuuuuaaucagcaggg

SEQ ID NO: 1088777 - RNA, 22 nt, Human
ugcaggagcagagauggcugga

SEQ ID NO: 1088778 - RNA, 22 nt, Human
ucuggcagggguucugcacuug

SEQ ID NO: 1088779 - RNA, 20 nt, Human
ccugaggguuuguguucuuu

SEQ ID NO: 1088780 - RNA, 22 nt, Human
uccuucaaagcuccuagugagc

SEQ ID NO: 1088781 - RNA, 23 nt, Human
ucuucaugcccaggccuuggugc

SEQ ID NO: 1088782 - RNA, 22 nt, Human
gaagcagcgaaguggaagggac

SEQ ID NO: 1088783 - RNA, 22 nt, Human
caaggaaaaagcgagcucgggg

SEQ ID NO: 1088784 - RNA, 22 nt, Human
uaagucauagauuaauggccac

SEQ ID NO: 1088785 - RNA, 22 nt, Human
aaguuuuacugaggacacaugu

SEQ ID NO: 1088786 - RNA, 22 nt, Human
aucuagauuagguauaagagcu

SEQ ID NO: 1088787 - RNA, 20 nt, Human
auauuucagguagugugccc

SEQ ID NO: 1088788 - RNA, 22 nt, Human
ugaaauguagugaagcauggaa

SEQ ID NO: 1088789 - RNA, 22 nt, Human
uagacacaagagaaggguauaa

SEQ ID NO: 1088790 - RNA, 20 nt, Human
ccucugccccggggcugcua

SEQ ID NO: 1088791 - RNA, 22 nt, Human
aucuccagcaauggggagcucu

SEQ ID NO: 1088792 - RNA, 22 nt, Human
aggcuggggaauugaauuugcu

SEQ ID NO: 1088793 - RNA, 22 nt, Human
gugauuccuauuaguacaugca

SEQ ID NO: 1088794 - RNA, 22 nt, Human
uagggcuauaagagaauaagac

SEQ ID NO: 1088795 - RNA, 22 nt, Human
cacagcuucaguuucugacuug

SEQ ID NO: 1088796 - RNA, 22 nt, Human
cccuggagggauuucucaauca

SEQ ID NO: 1088797 - RNA, 22 nt, Human
uuuauugagcacccguugugcg

SEQ ID NO: 1088798 - RNA, 21 nt, Human
cagagcagcguucugcugugg

SEQ ID NO: 1088799 - RNA, 22 nt, Human
caggaaaauggaaucaccugua

SEQ ID NO: 1088800 - RNA, 22 nt, Human
uggcaguccucuuccucgggcg

SEQ ID NO: 1088801 - RNA, 22 nt, Human
auuaauuuccaggcacugugcu

SEQ ID NO: 1088802 - RNA, 22 nt, Human
ugcucagcuggugccagggucc

SEQ ID NO: 1088803 - RNA, 22 nt, Human
ccaggccugcauucccucucag

SEQ ID NO: 1088804 - RNA, 22 nt, Human
gugcccugacacaccuggugug

SEQ ID NO: 1088805 - RNA, 22 nt, Human
aaauugcauuuuaaagguagau

SEQ ID NO: 1088806 - RNA, 17 nt, Human
gcccucagcuuuaacca

SEQ ID NO: 1088807 - RNA, 22 nt, Human
ucacgugagggaccugugucug

SEQ ID NO: 1088808 - RNA, 22 nt, Human
ggcagucuaguguccuugggcc

SEQ ID NO: 1088809 - RNA, 22 nt, Human
aggccugacuugaauuuagggc

SEQ ID NO: 1088810 - RNA, 22 nt, Human
agaggagugggaagcagugcaa

SEQ ID NO: 1088811 - RNA, 22 nt, Human
gcagccuuccugaccucuaccc

SEQ ID NO: 1088812 - RNA, 22 nt, Human
aagauuucugcuuuuggaggca

SEQ ID NO: 1088813 - RNA, 22 nt, Human
cucaggaugaaagucaugguga

SEQ ID NO: 1088814 - RNA, 22 nt, Human
ucuucaugucuugccugauaua

SEQ ID NO: 1088815 - RNA, 22 nt, Human
gcuggucagggagggcacccau

SEQ ID NO: 1088816 - RNA, 22 nt, Human
aagcacuuagaagagugccugc

SEQ ID NO: 1088817 - RNA, 22 nt, Human
aggagccuccuucucaugugca

SEQ ID NO: 1088818 - RNA, 23 nt, Human
acugggaaguuuggagagacgca

SEQ ID NO: 1088819 - RNA, 22 nt, Human
gcagagcaccaaagugaaagau

SEQ ID NO: 1088820 - RNA, 22 nt, Human
uucaaaguaccguacuuaaugg

SEQ ID NO: 1088821 - RNA, 22 nt, Human
cagggccuuuuagcaucuucuc

SEQ ID NO: 1088822 - RNA, 22 nt, Human
gaaauuaagcaggggucugugg

SEQ ID NO: 1088823 - RNA, 22 nt, Human
uuaagaauggaaugaggaauuu

SEQ ID NO: 1088824 - RNA, 22 nt, Human
ccagagggccuuuggaguuauc

SEQ ID NO: 1088825 - RNA, 22 nt, Human
agggcaaggguugaagauaaga

SEQ ID NO: 1088826 - RNA, 22 nt, Human
aaggcugauuagacugauagcu

SEQ ID NO: 1088827 - RNA, 22 nt, Human
cugucaucacaguugagcagcc

SEQ ID NO: 1088828 - RNA, 20 nt, Human
agacagaaucagagauaaag

SEQ ID NO: 1088829 - RNA, 22 nt, Human
uggggaaggcggagcuugcagc

SEQ ID NO: 1088830 - RNA, 22 nt, Human
aucucagggcuggagcccugga

SEQ ID NO: 1088831 - RNA, 22 nt, Human
caggaagagguggggcuaaagu

SEQ ID NO: 1088832 - RNA, 17 nt, Human
gagagcugcugcuuccg

SEQ ID NO: 1088833 - RNA, 22 nt, Human
aagcagaauuucccacuaguug

SEQ ID NO: 1088834 - RNA, 22 nt, Human
aaagaaguguugaauuugcaag

SEQ ID NO: 1088835 - RNA, 22 nt, Human
agggaaggaggccauguguccc

SEQ ID NO: 1088836 - RNA, 22 nt, Human
gugauuucuaaucaucugaaug

SEQ ID NO: 1088837 - RNA, 22 nt, Human
acugucacuccaacugagucgu

SEQ ID NO: 1088838 - RNA, 22 nt, Human
guggcagcggcccaggccgucu

SEQ ID NO: 1088839 - RNA, 22 nt, Human
uuguuacaucuuauguaagugg

SEQ ID NO: 1088840 - RNA, 22 nt, Human
agauauauuuccugcccaaggc

SEQ ID NO: 1088841 - RNA, 22 nt, Human
aacgucauugauugaugguagu

SEQ ID NO: 1088842 - RNA, 23 nt, Human
caugggagugagaaugccagcuc

SEQ ID NO: 1088843 - RNA, 22 nt, Human
ccauguggcuagcgugccugca

SEQ ID NO: 1088844 - RNA, 22 nt, Human
uaggaacccgcagcaguccgag

SEQ ID NO: 1088845 - RNA, 22 nt, Human
gugucccacucuggaggugaag

SEQ ID NO: 1088846 - RNA, 22 nt, Human
cggcagggcuccaugcauuucu

SEQ ID NO: 1088847 - RNA, 22 nt, Human
agugcagugguuaggagccagg

SEQ ID NO: 1088848 - RNA, 22 nt, Human
ugggccugacacuuacuaggga

SEQ ID NO: 1088849 - RNA, 22 nt, Human
cacugcagaucagaggcugaga

SEQ ID NO: 1088850 - RNA, 22 nt, Human
gccuuccugcagcucugagcgu

SEQ ID NO: 1088851 - RNA, 22 nt, Human
cucugcaggggaggcaugcacu

SEQ ID NO: 1088852 - RNA, 22 nt, Human
ggcaguguccuugcagcucuac

SEQ ID NO: 1088853 - RNA, 22 nt, Human
aaggcacauuccugaaaacaau

SEQ ID NO: 1088854 - RNA, 22 nt, Human
caaaugcaugagaaauaagagg

SEQ ID NO: 1088855 - RNA, 22 nt, Human
guucuuugacuccaagaaagua

SEQ ID NO: 1088856 - RNA, 22 nt, Human
uagcagggccaggcugggaacc

SEQ ID NO: 1088857 - RNA, 22 nt, Human
auucuccagcucacuguccaua

SEQ ID NO: 1088858 - RNA, 22 nt, Human
acacacuggcccccaguacuga

SEQ ID NO: 1088859 - RNA, 22 nt, Human
auacaucucauguaagagauaa

SEQ ID NO: 1088860 - RNA, 22 nt, Human
agauaugacuagaagcucauuu

SEQ ID NO: 1088861 - RNA, 22 nt, Human
gcugcagcccggcgcgccugag

SEQ ID NO: 1088862 - RNA, 22 nt, Human
acaacaaaaugaggaagugguc

SEQ ID NO: 1088863 - RNA, 22 nt, Human
aguuuuauguagacaauucauu

SEQ ID NO: 1088864 - RNA, 22 nt, Human
ucagagcuuuggagaccaggaa

SEQ ID NO: 1088865 - RNA, 22 nt, Human
cagagacagggcagggagugug

SEQ ID NO: 1088866 - RNA, 22 nt, Human
uucucagauauuuacugagcau

SEQ ID NO: 1088867 - RNA, 22 nt, Human
agucccagacuccaguuuucug

SEQ ID NO: 1088868 - RNA, 22 nt, Human
cagcucuggcgucagggagcga

SEQ ID NO: 1088869 - RNA, 22 nt, Human
acugugugacuguuauuacugu

SEQ ID NO: 1088870 - RNA, 22 nt, Human
gaggggccggcaugugccucuc

SEQ ID NO: 1088871 - RNA, 22 nt, Human
gguaugaaaugauuccauguua

SEQ ID NO: 1088872 - RNA, 22 nt, Human
aguguuauuuauuguuucauaa

SEQ ID NO: 1088873 - RNA, 22 nt, Human
uuugacaugcaaagcacuuuag

SEQ ID NO: 1088874 - RNA, 22 nt, Human
ccuuccucauccauuucucuug

SEQ ID NO: 1088875 - RNA, 22 nt, Human
ucaaaggaauuugauuuugaug

SEQ ID NO: 1088876 - RNA, 20 nt, Human
acauagcuauagaaagucga

SEQ ID NO: 1088877 - RNA, 22 nt, Human
guccucagagugggcagguccu

SEQ ID NO: 1088878 - RNA, 22 nt, Human
ucaggcugguccccacagugga

SEQ ID NO: 1088879 - RNA, 22 nt, Human
aaagguuuucaucacagcaaga

SEQ ID NO: 1088880 - RNA, 22 nt, Human
cagagacauuaagugccaugau

SEQ ID NO: 1088881 - RNA, 22 nt, Human
gauauuuucauucggaugcuca

SEQ ID NO: 1088882 - RNA, 19 nt, Human
ucaaaggcuuuuaggagac

SEQ ID NO: 1088883 - RNA, 22 nt, Human
ucaugucaguuucuucuauaaa

SEQ ID NO: 1088884 - RNA, 22 nt, Human
gcugagcugcuguucauccugc

SEQ ID NO: 1088885 - RNA, 22 nt, Human
cugcccuggucccauggcugau

SEQ ID NO: 1088886 - RNA, 22 nt, Human
aagagucagcuucuguaugggu

SEQ ID NO: 1088887 - RNA, 22 nt, Human
caaaugcauagaaagaugaaac

SEQ ID NO: 1088888 - RNA, 22 nt, Human
ccuggagcuuggucacgcugcg

SEQ ID NO: 1088889 - RNA, 22 nt, Human
uugagaaauguuuuuuaagcug

SEQ ID NO: 1088890 - RNA, 22 nt, Human
aaacauuguuaugauaaauuac

SEQ ID NO: 1088891 - RNA, 22 nt, Human
ucacauucucagcaucuauaca

SEQ ID NO: 1088892 - RNA, 22 nt, Human
cagguuggggacuuaggaugac

SEQ ID NO: 1088893 - RNA, 22 nt, Human
cagagcaguaaaucuggggcac

SEQ ID NO: 1088894 - RNA, 19 nt, Human
agccagggugagaaggagc

SEQ ID NO: 1088895 - RNA, 22 nt, Human
uaccacagacagauuucaguaa

SEQ ID NO: 1088896 - RNA, 22 nt, Human
ugagagcagaggugggcagccu

SEQ ID NO: 1088897 - RNA, 22 nt, Human
ccucauggaccucagacugucc

SEQ ID NO: 1088898 - RNA, 22 nt, Human
ugcccuggcacacacacagcug

SEQ ID NO: 1088899 - RNA, 22 nt, Human
ugcuggggguagcucugcguag

SEQ ID NO: 1088900 - RNA, 22 nt, Human
ucuuuucugccagcugagcccu

SEQ ID NO: 1088901 - RNA, 22 nt, Human
aggaccuguaccucagcaucua

SEQ ID NO: 1088902 - RNA, 22 nt, Human
aaagaugaccguaugucagagc

SEQ ID NO: 1088903 - RNA, 22 nt, Human
cuggaaagugcuuuucugagag

SEQ ID NO: 1088904 - RNA, 20 nt, Human
cugccaugauugauagagug

SEQ ID NO: 1088905 - RNA, 21 nt, Human
cugcugcuggggucugggcag

SEQ ID NO: 1088906 - RNA, 22 nt, Human
gagcucagcacuaaaaucaugu

SEQ ID NO: 1088907 - RNA, 22 nt, Human
ugaggcagaaauuccuguuuuc

SEQ ID NO: 1088908 - RNA, 22 nt, Human
ggcccugcugaagccgggucua

SEQ ID NO: 1088909 - RNA, 22 nt, Human
ucacaguuuccauaggucagca

SEQ ID NO: 1088910 - RNA, 22 nt, Human
gugcauuuaggucacaugaugu

SEQ ID NO: 1088911 - RNA, 22 nt, Human
uggccucucuaccaggcagccu

SEQ ID NO: 1088912 - RNA, 22 nt, Human
aagaucagcucccgagucugag

SEQ ID NO: 1088913 - RNA, 22 nt, Human
uuuccucugucaugacagcuga

SEQ ID NO: 1088914 - RNA, 22 nt, Human
aagaaggcggaccagaagggag

SEQ ID NO: 1088915 - RNA, 22 nt, Human
uggcagcuuccugcucauagga

SEQ ID NO: 1088916 - RNA, 22 nt, Human
uuuauuauagugguggggacug

SEQ ID NO: 1088917 - RNA, 22 nt, Human
agucaaacaaauguuuauugag

SEQ ID NO: 1088918 - RNA, 19 nt, Human
gcagaugaugaggcugguc

SEQ ID NO: 1088919 - RNA, 22 nt, Human
ccuggcagacugugagggcagg

SEQ ID NO: 1088920 - RNA, 19 nt, Human
aggcagcacccaguccuug

SEQ ID NO: 1088921 - RNA, 22 nt, Human
ucauggaaacagcaaugcuaau

SEQ ID NO: 1088922 - RNA, 22 nt, Human
aguuuacaacaguagcuaugga

SEQ ID NO: 1088923 - RNA, 22 nt, Human
ggcuguggcagcuggaaguggu

SEQ ID NO: 1088924 - RNA, 22 nt, Human
ccugucuggccaccagggcgau

SEQ ID NO: 1088925 - RNA, 22 nt, Human
auccagucaaaauuaguaaggu

SEQ ID NO: 1088926 - RNA, 22 nt, Human
agcaccugcacaguggaggaaa

SEQ ID NO: 1088927 - RNA, 22 nt, Human
gcuggccugaccagccacaggc

SEQ ID NO: 1088928 - RNA, 22 nt, Human
ggcaggaggaagaguuagcacc

SEQ ID NO: 1088929 - RNA, 22 nt, Human
aaaguucugagaagcaguuuac

SEQ ID NO: 1088930 - RNA, 22 nt, Human
cuuuggcaaggguuuuaauugu

SEQ ID NO: 1088931 - RNA, 22 nt, Human
caggaaauucuuuuguuugugc

SEQ ID NO: 1088932 - RNA, 22 nt, Human
uucauguuguaguauguaucag

SEQ ID NO: 1088933 - RNA, 22 nt, Human
gcuggugagcaaaggagaagga

SEQ ID NO: 1088934 - RNA, 22 nt, Human
uuaaauuuuagaaacagacucu

SEQ ID NO: 1088935 - RNA, 22 nt, Human
agguggagugaaggaaaggcag

SEQ ID NO: 1088936 - RNA, 22 nt, Human
ggcugcugaguuggccaggaga

SEQ ID NO: 1088937 - RNA, 22 nt, Human
cuuuauggagugacacaauggg

SEQ ID NO: 1088938 - RNA, 22 nt, Human
guuauauugccaaguauauugu

SEQ ID NO: 1088939 - RNA, 22 nt, Human
agaggggcucauauccugucau

SEQ ID NO: 1088940 - RNA, 22 nt, Human
cccagcauccucagggagcggg

SEQ ID NO: 1088941 - RNA, 22 nt, Human
cgcaggcugcagccaagaagag

SEQ ID NO: 1088942 - RNA, 22 nt, Human
gcugucacucuccggccuuccc

SEQ ID NO: 1088943 - RNA, 22 nt, Human
auuuaugacuggugaauagaac

SEQ ID NO: 1088944 - RNA, 22 nt, Human
gucccugcccuccugggacuca

SEQ ID NO: 1088945 - RNA, 22 nt, Human
cugucccagauguucucagcac

SEQ ID NO: 1088946 - RNA, 22 nt, Human
uggcuccuucauucuccugcca

SEQ ID NO: 1088947 - RNA, 22 nt, Human
uagcuuaucuauacagacuuuu

SEQ ID NO: 1088948 - RNA, 22 nt, Human
cucccugguguccccuccagga

SEQ ID NO: 1088949 - RNA, 22 nt, Human
cccuccagagcuugaccugcug

SEQ ID NO: 1088950 - RNA, 22 nt, Human
ucuggagcgaggucccugucug

SEQ ID NO: 1088951 - RNA, 20 nt, Human
cccuggagagaagcuccacg

SEQ ID NO: 1088952 - RNA, 22 nt, Human
uaauacacugcuuuuuguaacu

SEQ ID NO: 1088953 - RNA, 22 nt, Human
cugggccuuggauugacacugu

SEQ ID NO: 1088954 - RNA, 23 nt, Human
cggacaaccauuguuuuaguauc

SEQ ID NO: 1088955 - RNA, 22 nt, Human
cacauacauacguauguauaca

SEQ ID NO: 1088956 - RNA, 22 nt, Human
uuuauuagauuaucaaagaggu

SEQ ID NO: 1088957 - RNA, 22 nt, Human
ccagggugggaggcugaaggcg

SEQ ID NO: 1088958 - RNA, 22 nt, Human
augcccugugacucuccuggac

SEQ ID NO: 1088959 - RNA, 22 nt, Human
cuggaaagauuuacacggggaa

SEQ ID NO: 1088960 - RNA, 20 nt, Human
agcauuugaaauaugacuau

SEQ ID NO: 1088961 - RNA, 22 nt, Human
ugugaaaugcuauuuccaugag

SEQ ID NO: 1088962 - RNA, 22 nt, Human
uaaaggagugugaugaaaggga

SEQ ID NO: 1088963 - RNA, 22 nt, Human
agggccuggcgcguggccgccg

SEQ ID NO: 1088964 - RNA, 22 nt, Human
gggcugagccauuugaaccuug

SEQ ID NO: 1088965 - RNA, 23 nt, Human
auuuuaaccuugacuaacaugca

SEQ ID NO: 1088966 - RNA, 22 nt, Human
uccaauuuuacgucuguauaaa

SEQ ID NO: 1088967 - RNA, 22 nt, Human
uauuuccagcaguaagaagaca

SEQ ID NO: 1088968 - RNA, 22 nt, Human
cuuucuggcacagccgcgggau

SEQ ID NO: 1088969 - RNA, 22 nt, Human
ucucugguuauuaacuaacucc

SEQ ID NO: 1088970 - RNA, 22 nt, Human
gcuggcugaggucuagcucuuu

SEQ ID NO: 1088971 - RNA, 22 nt, Human
caggggaaggagccuugaaacu

SEQ ID NO: 1088972 - RNA, 22 nt, Human
ggcugggcaggucugcacaggg

SEQ ID NO: 1088973 - RNA, 22 nt, Human
ucagaaaucuugucaaggcauc

SEQ ID NO: 1088974 - RNA, 22 nt, Human
gcugagagcaaagcaugucuag

SEQ ID NO: 1088975 - RNA, 18 nt, Human
ggcucagcaggcucucuc

SEQ ID NO: 1088976 - RNA, 23 nt, Human
caacagcuguuagauaugggcuu

SEQ ID NO: 1088977 - RNA, 22 nt, Human
uaauaccuagagaugauacaaa

SEQ ID NO: 1088978 - RNA, 22 nt, Human
gaagcacugccauaauucagac

SEQ ID NO: 1088979 - RNA, 22 nt, Human
ccugagagccagugccugccca

SEQ ID NO: 1088980 - RNA, 21 nt, Human
ucagggcagcugcucuucaga

SEQ ID NO: 1088981 - RNA, 22 nt, Human
agggccugacacccuugccagc

SEQ ID NO: 1088982 - RNA, 22 nt, Human
ugagaucauauguacaaggucu

SEQ ID NO: 1088983 - RNA, 22 nt, Human
aagacuuucaaguaugcaugca

SEQ ID NO: 1088984 - RNA, 22 nt, Human
aaauaugacuagaaugccaggu

SEQ ID NO: 1088985 - RNA, 22 nt, Human
uccuucaugaugcuuagcagag

SEQ ID NO: 1088986 - RNA, 22 nt, Human
agcaggcugccuuccaaagccu

SEQ ID NO: 1088987 - RNA, 22 nt, Human
aaacuucaguaggagccaaccu

SEQ ID NO: 1088988 - RNA, 22 nt, Human
uuaguucuugggugaacuuuug

SEQ ID NO: 1088989 - RNA, 22 nt, Human
ccaggacuuuaaguccagcacu

SEQ ID NO: 1088990 - RNA, 22 nt, Human
cgugggcugcgcccaguucuuc

SEQ ID NO: 1088991 - RNA, 22 nt, Human
gagaagcaaucgugacaucucc

SEQ ID NO: 1088992 - RNA, 22 nt, Human
acugugaaucacuacuaguaga

SEQ ID NO: 1088993 - RNA, 22 nt, Human
gcccuuccuuagacagcaggau

SEQ ID NO: 1088994 - RNA, 22 nt, Human
ugagagcugccacgugaccaug

SEQ ID NO: 1088995 - RNA, 22 nt, Human
caaugucagaauuacaguugau

SEQ ID NO: 1088996 - RNA, 22 nt, Human
aucuuuuacauuacugcccaga

SEQ ID NO: 1088997 - RNA, 22 nt, Human
ccugggcucugucagaauuggg

SEQ ID NO: 1088998 - RNA, 22 nt, Human
acagagucauucacugaugaag

SEQ ID NO: 1088999 - RNA, 23 nt, Human
cuguccuuggucuuggcugagug

SEQ ID NO: 1089000 - RNA, 22 nt, Human
gcugcccaguucugcugcugcc

SEQ ID NO: 1089001 - RNA, 22 nt, Human
auuucauggcagacuuuaaccc

SEQ ID NO: 1089002 - RNA, 22 nt, Human
ggaagccagaaagugagaauau

SEQ ID NO: 1089003 - RNA, 20 nt, Human
aaggcacuaugucugcuagc

SEQ ID NO: 1089004 - RNA, 22 nt, Human
ggguggggccaggcaauuugca

SEQ ID NO: 1089005 - RNA, 22 nt, Human
auguccuucuccucuuaccugc

SEQ ID NO: 1089006 - RNA, 22 nt, Human
augaacuaagagucauuagugu

SEQ ID NO: 1089007 - RNA, 22 nt, Human
aaagguuuucuaggguugaggg

SEQ ID NO: 1089008 - RNA, 22 nt, Human
uuugucuugaggcuggggaagu

SEQ ID NO: 1089009 - RNA, 22 nt, Human
aaugcuuugagggaagaugaaa

SEQ ID NO: 1089010 - RNA, 22 nt, Human
gcaaaugaguuguaacauaaaa

SEQ ID NO: 1089011 - RNA, 22 nt, Human
gcugucccgcugacuuccagcu

SEQ ID NO: 1089012 - RNA, 22 nt, Human
aauaugaauuauuguuacaagu

SEQ ID NO: 1089013 - RNA, 22 nt, Human
uagauuccucuacaauaaauga

SEQ ID NO: 1089014 - RNA, 22 nt, Human
uuggcuuccaggaucucagcag

SEQ ID NO: 1089015 - RNA, 18 nt, Human
cucucuuuccacucuuug

SEQ ID NO: 1089016 - RNA, 20 nt, Human
ucucccaggcucagggaaga

SEQ ID NO: 1089017 - RNA, 22 nt, Human
caaaguaacugccuuuccaauu

SEQ ID NO: 1089018 - RNA, 22 nt, Human
gcaggaacuugggugaagucag

SEQ ID NO: 1089019 - RNA, 22 nt, Human
guuacauuuggugauuuggugc

SEQ ID NO: 1089020 - RNA, 22 nt, Human
acagguggcuuccauuuucuaa

SEQ ID NO: 1089021 - RNA, 19 nt, Human
uuuuaaguccucucuauuc

SEQ ID NO: 1089022 - RNA, 22 nt, Human
gugagcagcucaggguggucuc

SEQ ID NO: 1089023 - RNA, 22 nt, Human
ucccaggcaaaggcagcucauu

SEQ ID NO: 1089024 - RNA, 22 nt, Human
guuucuaagggagagcugccag

SEQ ID NO: 1089025 - RNA, 22 nt, Human
aauacaguagguaauaguucau

SEQ ID NO: 1089026 - RNA, 22 nt, Human
gaggcagccagagguucucauu

SEQ ID NO: 1089027 - RNA, 22 nt, Human
ggaggcagaauagagugugggu

SEQ ID NO: 1089028 - RNA, 22 nt, Human
uguaugaagguuuaccugcugu

SEQ ID NO: 1089029 - RNA, 22 nt, Human
acugugugcccugacgccaggg

SEQ ID NO: 1089030 - RNA, 21 nt, Human
gaaaggucuuaacuuacagag

SEQ ID NO: 1089031 - RNA, 22 nt, Human
ugggcaaguaucggacucugag

SEQ ID NO: 1089032 - RNA, 22 nt, Human
aggcucagcugguggugaucgc

SEQ ID NO: 1089033 - RNA, 21 nt, Human
augggcagaggcagagaggcu

SEQ ID NO: 1089034 - RNA, 22 nt, Human
uugaaaguuuauggagucugca

SEQ ID NO: 1089035 - RNA, 22 nt, Human
uagagcuggccgggacagcugg

SEQ ID NO: 1089036 - RNA, 22 nt, Human
ucuuugaugggagaucugagag

SEQ ID NO: 1089037 - RNA, 22 nt, Human
gcagggacaccuuugugaagcu

SEQ ID NO: 1089038 - RNA, 22 nt, Human
cccuguccuggaugggagcacu

SEQ ID NO: 1089039 - RNA, 21 nt, Human
agcugcuuucagcuccuagag

SEQ ID NO: 1089040 - RNA, 22 nt, Human
uauuuuagguaauauccauugu

SEQ ID NO: 1089041 - RNA, 22 nt, Human
ggcuggagauaugucuggaaca

SEQ ID NO: 1089042 - RNA, 22 nt, Human
aguaaacauuucagauuuauuu

SEQ ID NO: 1089043 - RNA, 22 nt, Human
uaaagcauguuucaguaagguu

SEQ ID NO: 1089044 - RNA, 22 nt, Human
acauaacauaguugacauuuuu

SEQ ID NO: 1089045 - RNA, 22 nt, Human
ugggaaggcguggaaguagaag

SEQ ID NO: 1089046 - RNA, 22 nt, Human
ucucauucauccaaggauuuau

SEQ ID NO: 1089047 - RNA, 22 nt, Human
augcugugguagacagcauucc

SEQ ID NO: 1089048 - RNA, 22 nt, Human
gguggagcuguggacaggaagg

SEQ ID NO: 1089049 - RNA, 22 nt, Human
aacacaaagaagcugcaggauc

SEQ ID NO: 1089050 - RNA, 22 nt, Human
ccaggcucugucuggucagaag

SEQ ID NO: 1089051 - RNA, 22 nt, Human
gucagaggggcagcugccaggc

SEQ ID NO: 1089052 - RNA, 22 nt, Human
agcacagaaagcacauuugaaa

SEQ ID NO: 1089053 - RNA, 22 nt, Human
cagcauggggcuuggagucagc

SEQ ID NO: 1089054 - RNA, 22 nt, Human
agugcugucuccuucccccggg

SEQ ID NO: 1089055 - RNA, 22 nt, Human
aauaacuucauguaacauuuaa

SEQ ID NO: 1089056 - RNA, 22 nt, Human
agggcugcccagugugagagcu

SEQ ID NO: 1089057 - RNA, 22 nt, Human
cugauuuacauauacaaaagau

SEQ ID NO: 1089058 - RNA, 22 nt, Human
uaguuuguagaaaucuagaaau

SEQ ID NO: 1089059 - RNA, 22 nt, Human
uguuacuuaucucacgugaugc

SEQ ID NO: 1089060 - RNA, 22 nt, Human
auucaaguccagcuucucuaca

SEQ ID NO: 1089061 - RNA, 22 nt, Human
uauaagaaugcuuguuuggggu

SEQ ID NO: 1089062 - RNA, 22 nt, Human
ggggcagauggaacagagcaca

SEQ ID NO: 1089063 - RNA, 22 nt, Human
aagagacaaugucuuuuggaua

SEQ ID NO: 1089064 - RNA, 22 nt, Human
acagagauggcacagagaaggu

SEQ ID NO: 1089065 - RNA, 22 nt, Human
caccugagugucaguauucuca

SEQ ID NO: 1089066 - RNA, 22 nt, Human
guagcuuauuagggauaauagu

SEQ ID NO: 1089067 - RNA, 22 nt, Human
aaaguaacaauaagguucuauu

SEQ ID NO: 1089068 - RNA, 22 nt, Human
cagaggccucacuuccagccag

SEQ ID NO: 1089069 - RNA, 22 nt, Human
caauuuuacucuuccucuucca

SEQ ID NO: 1089070 - RNA, 22 nt, Human
ccaccuccaccuauugccagcc

SEQ ID NO: 1089071 - RNA, 22 nt, Human
uccauuuuagaagaaaauccac

SEQ ID NO: 1089072 - RNA, 22 nt, Human
caucaguuuuagaggggugaaa

SEQ ID NO: 1089073 - RNA, 17 nt, Human
aaguccagccugcagcu

SEQ ID NO: 1089074 - RNA, 22 nt, Human
gccugagaaggauaggaagcga

SEQ ID NO: 1089075 - RNA, 22 nt, Human
cagcuugcaguacuuguuuuug

SEQ ID NO: 1089076 - RNA, 22 nt, Human
gccuuuuuuguugcucugucac

SEQ ID NO: 1089077 - RNA, 22 nt, Human
guguuuccucacuucucugacu

SEQ ID NO: 1089078 - RNA, 22 nt, Human
aagagcaguguuuuacucagcu

SEQ ID NO: 1089079 - RNA, 22 nt, Human
agggcagcucucaccucuggcc

SEQ ID NO: 1089080 - RNA, 22 nt, Human
uuacaguaauguauuauuuaac

SEQ ID NO: 1089081 - RNA, 22 nt, Human
cuguaugaaauugucauuuuua

SEQ ID NO: 1089082 - RNA, 22 nt, Human
ucuucucccaucuccaggcagg

SEQ ID NO: 1089083 - RNA, 22 nt, Human
acugggcucauaaugucauaga

SEQ ID NO: 1089084 - RNA, 22 nt, Human
ccuucuucuguguggcccaaga

SEQ ID NO: 1089085 - RNA, 22 nt, Human
aggcaguuguagagagggcucu

SEQ ID NO: 1089086 - RNA, 21 nt, Human
cugcuguggcccccgacaugc

SEQ ID NO: 1089087 - RNA, 22 nt, Human
aagcagcagaccugauuuugaa

SEQ ID NO: 1089088 - RNA, 22 nt, Human
caaaagaagcucuuggggcuag

SEQ ID NO: 1089089 - RNA, 22 nt, Human
aauuuugugugggaucaaagga

SEQ ID NO: 1089090 - RNA, 21 nt, Human
agguggggcugcaccucugcu

SEQ ID NO: 1089091 - RNA, 22 nt, Human
uuuccuuucuagaagccuaaau

SEQ ID NO: 1089092 - RNA, 22 nt, Human
gccuuguuucauuacacguggu

SEQ ID NO: 1089093 - RNA, 22 nt, Human
cuuccuccgaagaaguugcugg

SEQ ID NO: 1089094 - RNA, 22 nt, Human
guggcugguuuccugcaugcaa

SEQ ID NO: 1089095 - RNA, 22 nt, Human
ucagaccauccugcuguuagug

SEQ ID NO: 1089096 - RNA, 22 nt, Human
acugcccucccaucuauugcaa

SEQ ID NO: 1089097 - RNA, 22 nt, Human
cuucaguguucccaucuguaaa

SEQ ID NO: 1089098 - RNA, 19 nt, Human
uggcauugguccagauaaa

SEQ ID NO: 1089099 - RNA, 22 nt, Human
acuucaaaugugacaaugugaa

SEQ ID NO: 1089100 - RNA, 18 nt, Human
cccagcccaccauuucuc

SEQ ID NO: 1089101 - RNA, 22 nt, Human
cccuggcugccagucaccagac

SEQ ID NO: 1089102 - RNA, 20 nt, Human
agagagcacaggcaggaaag

SEQ ID NO: 1089103 - RNA, 22 nt, Human
ugcagugguguccagguguacu

SEQ ID NO: 1089104 - RNA, 17 nt, Human
ugauucaacuagaaacu

SEQ ID NO: 1089105 - RNA, 22 nt, Human
gccaccaggagcccaguccaaa

SEQ ID NO: 1089106 - RNA, 22 nt, Human
uuacagaugggguugcaauaaa

SEQ ID NO: 1089107 - RNA, 22 nt, Human
ucacauuuaaacaggaggauua

SEQ ID NO: 1089108 - RNA, 22 nt, Human
gcagagugccgagauggaagcg

SEQ ID NO: 1089109 - RNA, 22 nt, Human
uuuaauguuaaauuuguagaug

SEQ ID NO: 1089110 - RNA, 22 nt, Human
acaugcuuccaaauuauguugg

SEQ ID NO: 1089111 - RNA, 22 nt, Human
ccgaggaauuuuuauaagaucu

SEQ ID NO: 1089112 - RNA, 21 nt, Human
uuuauguacuucauagaguag

SEQ ID NO: 1089113 - RNA, 22 nt, Human
guauuuuauggcaugcaguggc

SEQ ID NO: 1089114 - RNA, 22 nt, Human
gagugcagaugaacagaagauu

SEQ ID NO: 1089115 - RNA, 22 nt, Human
ugaaagcaaccuguaacaguga

SEQ ID NO: 1089116 - RNA, 22 nt, Human
aacuuccaccaaauaguauaua

SEQ ID NO: 1089117 - RNA, 22 nt, Human
gccagaagggguggauccaggc

SEQ ID NO: 1089118 - RNA, 22 nt, Human
caagugucuauaucagugcuug

SEQ ID NO: 1089119 - RNA, 22 nt, Human
ucuuggcaguggaauaccagga

SEQ ID NO: 1089120 - RNA, 22 nt, Human
ggcagaagugaugggauauaac

SEQ ID NO: 1089121 - RNA, 22 nt, Human
cccuggagcuagucugagcaga

SEQ ID NO: 1089122 - RNA, 22 nt, Human
gggcucagggacacaugugugu

SEQ ID NO: 1089123 - RNA, 22 nt, Human
gcccagccuccaagcuccaagg

SEQ ID NO: 1089124 - RNA, 22 nt, Human
ccaggccaguguuugguccagg

SEQ ID NO: 1089125 - RNA, 22 nt, Human
ccacagggccuuuccugcuggc

SEQ ID NO: 1089126 - RNA, 22 nt, Human
guggcccugucccaggccuccu

SEQ ID NO: 1089127 - RNA, 19 nt, Human
gagguggguccccgcagcc

SEQ ID NO: 1089128 - RNA, 22 nt, Human
ucccagccuuccagucugguuu

SEQ ID NO: 1089129 - RNA, 22 nt, Human
uuuuuccaccguacuuccugag

SEQ ID NO: 1089130 - RNA, 22 nt, Human
acagcuauagacgauguauaga

SEQ ID NO: 1089131 - RNA, 22 nt, Human
aaacuguaaacacagcaguaca

SEQ ID NO: 1089132 - RNA, 22 nt, Human
auuuagcaaaaaaugaugaagc

SEQ ID NO: 1089133 - RNA, 22 nt, Human
ggccugaggcaauagucagaca

SEQ ID NO: 1089134 - RNA, 21 nt, Human
ucuggcagcaguuuguugagu

SEQ ID NO: 1089135 - RNA, 22 nt, Human
acuuccagcuagguucugcuaa

SEQ ID NO: 1089136 - RNA, 22 nt, Human
cauuuguaauacugacuugcag

SEQ ID NO: 1089137 - RNA, 22 nt, Human
aguggagugaguggcagaagga

SEQ ID NO: 1089138 - RNA, 22 nt, Human
auuucucaguguacauuauguu

SEQ ID NO: 1089139 - RNA, 22 nt, Human
uugaauaguuuuggauagcaua

SEQ ID NO: 1089140 - RNA, 22 nt, Human
gauuucuugaccccugucucag

SEQ ID NO: 1089141 - RNA, 22 nt, Human
cugggcgugucuuccagcuggc

SEQ ID NO: 1089142 - RNA, 19 nt, Human
gaaaggcugcugcuaccug

SEQ ID NO: 1089143 - RNA, 19 nt, Human
ucugaauuauuuauguacc

SEQ ID NO: 1089144 - RNA, 22 nt, Human
cagagcugcacauucuaugaug

SEQ ID NO: 1089145 - RNA, 18 nt, Human
cuaacagggaaaauagaa

SEQ ID NO: 1089146 - RNA, 22 nt, Human
gcagugaaacaauaggaucaaa

SEQ ID NO: 1089147 - RNA, 22 nt, Human
ugcaagagcccaaacuauauac

SEQ ID NO: 1089148 - RNA, 22 nt, Human
ugcuggcucuaggcugagacag

SEQ ID NO: 1089149 - RNA, 17 nt, Human
agcaaaaguaucaaagc

SEQ ID NO: 1089150 - RNA, 19 nt, Human
acucuuuuccuuuugaauc

SEQ ID NO: 1089151 - RNA, 21 nt, Human
uuauuucacauggacuuccag

SEQ ID NO: 1089152 - RNA, 23 nt, Human
caagucauggauuggaguuucag

SEQ ID NO: 1089153 - RNA, 22 nt, Human
gccaggaguucagaugcauguu

SEQ ID NO: 1089154 - RNA, 22 nt, Human
agcugccauccgaggugucaga

SEQ ID NO: 1089155 - RNA, 22 nt, Human
gaggaagcugcguggcauuuca

SEQ ID NO: 1089156 - RNA, 22 nt, Human
caucagaccugccagacuaggu

SEQ ID NO: 1089157 - RNA, 22 nt, Human
uacuuccuguuuccaugucugu

SEQ ID NO: 1089158 - RNA, 22 nt, Human
ucaguguuacauuauauagaac

SEQ ID NO: 1089159 - RNA, 22 nt, Human
uggcccugucccuggagccugg

SEQ ID NO: 1089160 - RNA, 22 nt, Human
agaucacagagccaagauucca

SEQ ID NO: 1089161 - RNA, 22 nt, Human
gcccauggcuucccuaggcaca

SEQ ID NO: 1089162 - RNA, 22 nt, Human
augccaggccccacgcugggca

SEQ ID NO: 1089163 - RNA, 22 nt, Human
ccagaacacaguggaagaauau

SEQ ID NO: 1089164 - RNA, 18 nt, Human
acagaggcagacauguau

SEQ ID NO: 1089165 - RNA, 22 nt, Human
ucagucauuguccuuaaaacac

SEQ ID NO: 1089166 - RNA, 22 nt, Human
aaaugacacuaggcuuuuugca

SEQ ID NO: 1089167 - RNA, 22 nt, Human
uggagguggcaucugacagcug

SEQ ID NO: 1089168 - RNA, 22 nt, Human
uuucagaauaucgauucaguga

SEQ ID NO: 1089169 - RNA, 22 nt, Human
auguaugaugcuaggcucucag

SEQ ID NO: 1089170 - RNA, 22 nt, Human
ggcagcuggguuggccagaaac

SEQ ID NO: 1089171 - RNA, 22 nt, Human
acuucaaacaauuaacagagaa

SEQ ID NO: 1089172 - RNA, 22 nt, Human
ugcuucuggaguaacaggguga

SEQ ID NO: 1089173 - RNA, 22 nt, Human
aaacacagguacugcagaagug

SEQ ID NO: 1089174 - RNA, 22 nt, Human
uguuaagaagaggcaguacuua

SEQ ID NO: 1089175 - RNA, 22 nt, Human
uuaggaguccagaugucuuggg

SEQ ID NO: 1089176 - RNA, 22 nt, Human
ucccagggacugggcuaggcuu

SEQ ID NO: 1089177 - RNA, 21 nt, Human
gaggccacuaauaggggcaga

SEQ ID NO: 1089178 - RNA, 22 nt, Human
ugcuggcucaguuugcagacuc

SEQ ID NO: 1089179 - RNA, 22 nt, Human
uucagaaucuaugugccagcuc

SEQ ID NO: 1089180 - RNA, 22 nt, Human
caagagcuggguggcaagcuag

SEQ ID NO: 1089181 - RNA, 21 nt, Human
gggugggaggacacagcaggc

SEQ ID NO: 1089182 - RNA, 22 nt, Human
gcugcgguggcuggcgauggga

SEQ ID NO: 1089183 - RNA, 21 nt, Human
gcagagccggggcgagaaggc

SEQ ID NO: 1089184 - RNA, 22 nt, Human
acauuucauguuuuccagagca

SEQ ID NO: 1089185 - RNA, 22 nt, Human
agcucccagcagagcuggccac

SEQ ID NO: 1089186 - RNA, 23 nt, Human
gcuuuuaaaccugugacugccgc

SEQ ID NO: 1089187 - RNA, 22 nt, Human
cacucucacugagcucaugcca

SEQ ID NO: 1089188 - RNA, 22 nt, Human
acaaagauucauuugcauuauu

SEQ ID NO: 1089189 - RNA, 22 nt, Human
ggagaagccacacauugggugu

SEQ ID NO: 1089190 - RNA, 21 nt, Human
uuagaguagagaacaugaucc

SEQ ID NO: 1089191 - RNA, 22 nt, Human
aagacccuauacucagugaccc

SEQ ID NO: 1089192 - RNA, 22 nt, Human
ccaagggcugcugaggugucca

SEQ ID NO: 1089193 - RNA, 22 nt, Human
uagauaauuuggcaucauauug

SEQ ID NO: 1089194 - RNA, 20 nt, Human
gugcccugugggcuauuuuc

SEQ ID NO: 1089195 - RNA, 22 nt, Human
acauaccauacauggugagaug

SEQ ID NO: 1089196 - RNA, 22 nt, Human
uucuuguauguaugcaaaauca

SEQ ID NO: 1089197 - RNA, 22 nt, Human
aaagagacugguggcauuuugc

SEQ ID NO: 1089198 - RNA, 22 nt, Human
caaaagauacuugcaucuaacu

SEQ ID NO: 1089199 - RNA, 22 nt, Human
uggcauuuauaucccaguuuau

SEQ ID NO: 1089200 - RNA, 22 nt, Human
agugggcuuacugagggagugu

SEQ ID NO: 1089201 - RNA, 22 nt, Human
uuugaaacccgucacuuugagu

SEQ ID NO: 1089202 - RNA, 22 nt, Human
uucuuauagaagcaaccauugu

SEQ ID NO: 1089203 - RNA, 17 nt, Human
auuuccucagggcugag

SEQ ID NO: 1089204 - RNA, 22 nt, Human
aucuacaggauaguuuaauauu

SEQ ID NO: 1089205 - RNA, 22 nt, Human
agagacaggauaucugcucaug

SEQ ID NO: 1089206 - RNA, 22 nt, Human
gaaagcacaguucaugagacaa

SEQ ID NO: 1089207 - RNA, 22 nt, Human
aaaaaauuccauucugugccuu

SEQ ID NO: 1089208 - RNA, 22 nt, Human
agagcugugaaaaugagguuug

SEQ ID NO: 1089209 - RNA, 22 nt, Human
uuucugaaacauggucuuugua

SEQ ID NO: 1089210 - RNA, 22 nt, Human
gcucugcugagauaucugggag

SEQ ID NO: 1089211 - RNA, 22 nt, Human
ugucagagcaaugagguucagc

SEQ ID NO: 1089212 - RNA, 22 nt, Human
guucauguuuguguauugcuca

SEQ ID NO: 1089213 - RNA, 22 nt, Human
ugcaguggcgccaucucagcuc

SEQ ID NO: 1089214 - RNA, 22 nt, Human
acuccaggcaucugcuucugcu

SEQ ID NO: 1089215 - RNA, 22 nt, Human
cagggcagagccaggauuucaa

SEQ ID NO: 1089216 - RNA, 21 nt, Human
agccaggcaagcacccccacu

SEQ ID NO: 1089217 - RNA, 22 nt, Human
cuccuuccugccccagugauaa

SEQ ID NO: 1089218 - RNA, 22 nt, Human
ggggcagagagaaggaagcuug

SEQ ID NO: 1089219 - RNA, 22 nt, Human
uucaggauccccaccgcguuua

SEQ ID NO: 1089220 - RNA, 22 nt, Human
ugagaagcugcugacuuagccu

SEQ ID NO: 1089221 - RNA, 22 nt, Human
ugaaacauuauagaauauuuau

SEQ ID NO: 1089222 - RNA, 22 nt, Human
agaagcagcuuucaaggugauu

SEQ ID NO: 1089223 - RNA, 22 nt, Human
cugguucagugaaaggcauggg

SEQ ID NO: 1089224 - RNA, 22 nt, Human
ucauccaguuguggagagggaa

SEQ ID NO: 1089225 - RNA, 22 nt, Human
guguccagggccguguugucuu

SEQ ID NO: 1089226 - RNA, 22 nt, Human
cauacauauguggaugucauau

SEQ ID NO: 1089227 - RNA, 22 nt, Human
uugcauccgggcuacuuccaca

SEQ ID NO: 1089228 - RNA, 22 nt, Human
ugucaugccaggaaauaguccc

SEQ ID NO: 1089229 - RNA, 22 nt, Human
acagaugaugugcacagauaga

SEQ ID NO: 1089230 - RNA, 22 nt, Human
ccugcucagagcgucuugugug

SEQ ID NO: 1089231 - RNA, 22 nt, Human
ucuaggagaaccaucagggagg

SEQ ID NO: 1089232 - RNA, 22 nt, Human
aaucacuuagaacccaggaagu

SEQ ID NO: 1089233 - RNA, 17 nt, Human
cacaacuggcugauuga

SEQ ID NO: 1089234 - RNA, 22 nt, Human
uauacagaacugcacgugcacg

SEQ ID NO: 1089235 - RNA, 22 nt, Human
aggcuggcuuggcucuccugug

SEQ ID NO: 1089236 - RNA, 22 nt, Human
aaugugagccaaugcccguggg

SEQ ID NO: 1089237 - RNA, 22 nt, Human
ccuuggcccuagccucaggcaa

SEQ ID NO: 1089238 - RNA, 22 nt, Human
gcuuuacauuuuggaaagguga

SEQ ID NO: 1089239 - RNA, 22 nt, Human
ggacagcauuccuaguuccaaa

SEQ ID NO: 1089240 - RNA, 20 nt, Human
cuagccuggccuugcucugg

SEQ ID NO: 1089241 - RNA, 22 nt, Human
uaaaugaagaaauggagauugu

SEQ ID NO: 1089242 - RNA, 22 nt, Human
agcucugugaagccagcaguuc

SEQ ID NO: 1089243 - RNA, 22 nt, Human
cuggcucaugugaugagggcaa

SEQ ID NO: 1089244 - RNA, 18 nt, Human
gcagaucauuagauaauu

SEQ ID NO: 1089245 - RNA, 22 nt, Human
cuucuggguaauucuucuucau

SEQ ID NO: 1089246 - RNA, 22 nt, Human
gccuggagggcucuagagaggc

SEQ ID NO: 1089247 - RNA, 22 nt, Human
ugaggcagauauuuauuggguu

SEQ ID NO: 1089248 - RNA, 22 nt, Human
gccaggaacacaaugccaagcu

SEQ ID NO: 1089249 - RNA, 22 nt, Human
caagacuuagagcaucuugaaa

SEQ ID NO: 1089250 - RNA, 18 nt, Human
ggaaaccacaggguucug

SEQ ID NO: 1089251 - RNA, 22 nt, Human
agagaacaaauuaaaggugguu

SEQ ID NO: 1089252 - RNA, 22 nt, Human
auggaauuucuccggcuccacc

SEQ ID NO: 1089253 - RNA, 22 nt, Human
gccugguguccagaggcgagug

SEQ ID NO: 1089254 - RNA, 22 nt, Human
ccaguggacaauuucugaggaa

SEQ ID NO: 1089255 - RNA, 22 nt, Human
agucuuuagagucuuaguguuu

SEQ ID NO: 1089256 - RNA, 22 nt, Human
caagggccuccaccuugcucgu

SEQ ID NO: 1089257 - RNA, 22 nt, Human
uccuggcagagagcaugaggcc

SEQ ID NO: 1089258 - RNA, 22 nt, Human
ugaguaggauaggguggggcuu

SEQ ID NO: 1089259 - RNA, 22 nt, Human
gagggcuuccauggggagcccc

SEQ ID NO: 1089260 - RNA, 22 nt, Human
guacaaaaguuauugcgguuuu

SEQ ID NO: 1089261 - RNA, 22 nt, Human
uccuuaaaugugaucuagauuu

SEQ ID NO: 1089262 - RNA, 22 nt, Human
agacagaacagaauaauuguug

SEQ ID NO: 1089263 - RNA, 22 nt, Human
ugagcuguagcagaugcuguug

SEQ ID NO: 1089264 - RNA, 18 nt, Human
ugagaggcagguagagga

SEQ ID NO: 1089265 - RNA, 22 nt, Human
aaauucucuaaagaaaacauga

SEQ ID NO: 1089266 - RNA, 22 nt, Human
acuguagaauggaaccaauugu

SEQ ID NO: 1089267 - RNA, 22 nt, Human
aaagaucagucugaagcaacau

SEQ ID NO: 1089268 - RNA, 22 nt, Human
uaaacauuuguuauucuuguuu

SEQ ID NO: 1089269 - RNA, 22 nt, Human
aucuggcuccuacacuugaaga

SEQ ID NO: 1089270 - RNA, 22 nt, Human
ggagccagaggcugcugcugug

SEQ ID NO: 1089271 - RNA, 22 nt, Human
ucaguguugugcacauacaaaa

SEQ ID NO: 1089272 - RNA, 22 nt, Human
gcagggcucauucuaguacaau

SEQ ID NO: 1089273 - RNA, 22 nt, Human
guauuuguaguagcauagaauu

SEQ ID NO: 1089274 - RNA, 22 nt, Human
uauugaaauucuucauguccuc

SEQ ID NO: 1089275 - RNA, 22 nt, Human
gcuggccuccugcuagauggaa

SEQ ID NO: 1089276 - RNA, 22 nt, Human
ucucaggcuaccuugcacaagg

SEQ ID NO: 1089277 - RNA, 22 nt, Human
agugcuuuauguuguugugcaa

SEQ ID NO: 1089278 - RNA, 22 nt, Human
caggagcaugcugaugccagaa

SEQ ID NO: 1089279 - RNA, 22 nt, Human
gcucaggaaacagcagggcuug

SEQ ID NO: 1089280 - RNA, 22 nt, Human
ucaggagucugugcaguuccac

SEQ ID NO: 1089281 - RNA, 22 nt, Human
aucaggaaauacuuauuuauaa

SEQ ID NO: 1089282 - RNA, 22 nt, Human
auggaauauuugacacauaggg

SEQ ID NO: 1089283 - RNA, 22 nt, Human
uggcucugggaaucuguugcuu

SEQ ID NO: 1089284 - RNA, 22 nt, Human
aggcuuaaugaguuaaaucacu

SEQ ID NO: 1089285 - RNA, 22 nt, Human
cugccugccacguucagcugua

SEQ ID NO: 1089286 - RNA, 22 nt, Human
cuaggaacaguucaacaguuua

SEQ ID NO: 1089287 - RNA, 20 nt, Human
cccucccagaugcuucccaa

SEQ ID NO: 1089288 - RNA, 22 nt, Human
agacuuuagaaucagauagccu

SEQ ID NO: 1089289 - RNA, 22 nt, Human
uucuucagcccauaucuuccag

SEQ ID NO: 1089290 - RNA, 22 nt, Human
ccagagucccuugcagcucagu

SEQ ID NO: 1089291 - RNA, 22 nt, Human
auauacuugauuuaacugagca

SEQ ID NO: 1089292 - RNA, 22 nt, Human
agcaggugccagguguacccgc

SEQ ID NO: 1089293 - RNA, 22 nt, Human
ggcugcagauagccagccacca

SEQ ID NO: 1089294 - RNA, 22 nt, Human
aggugcuggcgccccaggagac

SEQ ID NO: 1089295 - RNA, 22 nt, Human
gugcagagcaagggcugagggc

SEQ ID NO: 1089296 - RNA, 22 nt, Human
ggcaagaguugaagcuccagga

SEQ ID NO: 1089297 - RNA, 20 nt, Human
gccuggcacccggggcuggc

SEQ ID NO: 1089298 - RNA, 22 nt, Human
agcagccaauuggaggaugaag

SEQ ID NO: 1089299 - RNA, 22 nt, Human
acugggaggcaaagagcaagga

SEQ ID NO: 1089300 - RNA, 22 nt, Human
cuccagucauagucugucuugu

SEQ ID NO: 1089301 - RNA, 22 nt, Human
cugagaggcggagcuugcagug

SEQ ID NO: 1089302 - RNA, 22 nt, Human
auugacaaggaaacuauaccag

SEQ ID NO: 1089303 - RNA, 22 nt, Human
uucauacauuuuuacuaacagc

SEQ ID NO: 1089304 - RNA, 22 nt, Human
ugcaggugguccuuccucugcu

SEQ ID NO: 1089305 - RNA, 22 nt, Human
agcugagcugcagaugacugua

SEQ ID NO: 1089306 - RNA, 20 nt, Human
cucuuuucacucucaguggu

SEQ ID NO: 1089307 - RNA, 22 nt, Human
cagaggcuaagaugagugggug

SEQ ID NO: 1089308 - RNA, 22 nt, Human
uucauuugugguuauuuacaau

SEQ ID NO: 1089309 - RNA, 22 nt, Human
cugaagcagggagugaugaagu

SEQ ID NO: 1089310 - RNA, 22 nt, Human
gcugggcuggccgccgagaucg

SEQ ID NO: 1089311 - RNA, 22 nt, Human
agggccugugaauucucccugc

SEQ ID NO: 1089312 - RNA, 22 nt, Human
cagacagaaggcuccuugaggu

SEQ ID NO: 1089313 - RNA, 22 nt, Human
aaaugguccauccuaaagaagu

SEQ ID NO: 1089314 - RNA, 22 nt, Human
aauaggaagcaccaaauucucc

SEQ ID NO: 1089315 - RNA, 22 nt, Human
augggcagaguggggacaggaa

SEQ ID NO: 1089316 - RNA, 22 nt, Human
aagggcaggcagagaucauaua

SEQ ID NO: 1089317 - RNA, 22 nt, Human
auuucacaggccaguggugggg

SEQ ID NO: 1089318 - RNA, 22 nt, Human
uuuuacaggugugagccaccau

SEQ ID NO: 1089319 - RNA, 22 nt, Human
cguggggcggguggacacuugc

SEQ ID NO: 1089320 - RNA, 22 nt, Human
cuuccucacggugcaacaggaa

SEQ ID NO: 1089321 - RNA, 22 nt, Human
auuugaaccacucagaacucau

SEQ ID NO: 1089322 - RNA, 23 nt, Human
caugcaaacacuauugcauuugg

SEQ ID NO: 1089323 - RNA, 22 nt, Human
gcuguggcuguacagagaccau

SEQ ID NO: 1089324 - RNA, 22 nt, Human
ucuacugugguccuuguaacca

SEQ ID NO: 1089325 - RNA, 22 nt, Human
auuaagacuauugauauuuaca

SEQ ID NO: 1089326 - RNA, 22 nt, Human
auucuucauggcugugaguccu

SEQ ID NO: 1089327 - RNA, 22 nt, Human
ugcuugagacacauaugaauuu

SEQ ID NO: 1089328 - RNA, 22 nt, Human
gaugcugaagugaagugaucuu

SEQ ID NO: 1089329 - RNA, 22 nt, Human
ccugcagaggucaggccagaaa

SEQ ID NO: 1089330 - RNA, 22 nt, Human
ugggaagggagaguguccugga

SEQ ID NO: 1089331 - RNA, 22 nt, Human
gagcccagguucugcuuccagc

SEQ ID NO: 1089332 - RNA, 22 nt, Human
gaguccaggcaucccucccaua

SEQ ID NO: 1089333 - RNA, 22 nt, Human
agaggggaggcgaaccagaguc

SEQ ID NO: 1089334 - RNA, 22 nt, Human
cagaguguuucuuugggugggu

SEQ ID NO: 1089335 - RNA, 22 nt, Human
cgugggccccagccacucccuc

SEQ ID NO: 1089336 - RNA, 22 nt, Human
gccugagagacccauggggcaa

SEQ ID NO: 1089337 - RNA, 22 nt, Human
caggaaugaggucguaaguguc

SEQ ID NO: 1089338 - RNA, 22 nt, Human
uuugauaucuugguauacagau

SEQ ID NO: 1089339 - RNA, 22 nt, Human
ucauggagacuuugagccuguu

SEQ ID NO: 1089340 - RNA, 22 nt, Human
ugggccaggauuucaagacccu

SEQ ID NO: 1089341 - RNA, 22 nt, Human
uguuucuuacguuuuuagaggc

SEQ ID NO: 1089342 - RNA, 22 nt, Human
ucacugaauuucaagcuagugg

SEQ ID NO: 1089343 - RNA, 19 nt, Human
uacccucagggccucauuu

SEQ ID NO: 1089344 - RNA, 22 nt, Human
augaagauuucccagagacaug

SEQ ID NO: 1089345 - RNA, 22 nt, Human
cuguaugaggaucagacuggac

SEQ ID NO: 1089346 - RNA, 22 nt, Human
aacauucuuaagauuugugucu

SEQ ID NO: 1089347 - RNA, 22 nt, Human
auuauaaagaacaugugugugg

SEQ ID NO: 1089348 - RNA, 22 nt, Human
ggagcacccugcucagccaagc

SEQ ID NO: 1089349 - RNA, 22 nt, Human
uacauguggccagaaauuugag

SEQ ID NO: 1089350 - RNA, 22 nt, Human
cagaaauggagcccaggaaucu

SEQ ID NO: 1089351 - RNA, 22 nt, Human
ucagcugaaguggagaagcaga

SEQ ID NO: 1089352 - RNA, 22 nt, Human
ucccagccuuucuuuucugcug

SEQ ID NO: 1089353 - RNA, 22 nt, Human
caaugacauggauaaucauauu

SEQ ID NO: 1089354 - RNA, 22 nt, Human
aagcugccaccagcccagggca

SEQ ID NO: 1089355 - RNA, 22 nt, Human
cuuuguuuuacucagaggcaug

SEQ ID NO: 1089356 - RNA, 22 nt, Human
acagaacuuccagggaacauac

SEQ ID NO: 1089357 - RNA, 22 nt, Human
auucucaaacaagugguuugau

SEQ ID NO: 1089358 - RNA, 22 nt, Human
augcagaaggagccaugcuugc

SEQ ID NO: 1089359 - RNA, 18 nt, Human
cuuucagauggauaugcu

SEQ ID NO: 1089360 - RNA, 22 nt, Human
uuacacaguauccaagguucuu

SEQ ID NO: 1089361 - RNA, 19 nt, Human
gccugccuggguuucugag

SEQ ID NO: 1089362 - RNA, 22 nt, Human
uuagcuuuggauugcauuuagu

SEQ ID NO: 1089363 - RNA, 22 nt, Human
uccacuguggucccuugcugcc

SEQ ID NO: 1089364 - RNA, 22 nt, Human
uauuacguaacuacuuaaauug

SEQ ID NO: 1089365 - RNA, 22 nt, Human
uucaguuggccauaccccuaga

SEQ ID NO: 1089366 - RNA, 22 nt, Human
aaacugaaguagauucugaaau

SEQ ID NO: 1089367 - RNA, 22 nt, Human
ugguuugcccacucgagugauu

SEQ ID NO: 1089368 - RNA, 22 nt, Human
agaguguuuuucugucaaggac

SEQ ID NO: 1089369 - RNA, 22 nt, Human
aggaaggagggcagauauuaag

SEQ ID NO: 1089370 - RNA, 22 nt, Human
gcugaguugaaagcagaggaua

SEQ ID NO: 1089371 - RNA, 22 nt, Human
auugucuuuggugcuuccagga

SEQ ID NO: 1089372 - RNA, 22 nt, Human
uuagaaaugucacagaucugau

SEQ ID NO: 1089373 - RNA, 19 nt, Human
ucugcagaaggcauacaug

SEQ ID NO: 1089374 - RNA, 22 nt, Human
gaugguuuaugauagaugggaa

SEQ ID NO: 1089375 - RNA, 22 nt, Human
caaacuauuguucacaagacaa

SEQ ID NO: 1089376 - RNA, 22 nt, Human
uuauuagagugcuuugagaaag

SEQ ID NO: 1089377 - RNA, 22 nt, Human
acuguagcugccacuggaugca

SEQ ID NO: 1089378 - RNA, 22 nt, Human
ugaguggacgugaggcugagua

SEQ ID NO: 1089379 - RNA, 22 nt, Human
ucaaaauuagugaccaaaggca

SEQ ID NO: 1089380 - RNA, 22 nt, Human
gccugagagucuccagaccuug

SEQ ID NO: 1089381 - RNA, 22 nt, Human
gaguggggcguggauccagcgu

SEQ ID NO: 1089382 - RNA, 22 nt, Human
gugagacaagauuuguaggcag

SEQ ID NO: 1089383 - RNA, 22 nt, Human
ugaugaaaauaugauucugagg

SEQ ID NO: 1089384 - RNA, 22 nt, Human
ugcuggaggccugacuguguuu

SEQ ID NO: 1089385 - RNA, 19 nt, Human
guggccagggcaggggcug

SEQ ID NO: 1089386 - RNA, 20 nt, Human
guuuuaugccaguucugugu

SEQ ID NO: 1089387 - RNA, 22 nt, Human
ugaagggguucagcaugggggu

SEQ ID NO: 1089388 - RNA, 22 nt, Human
guaauagguuuucuugcuccag

SEQ ID NO: 1089389 - RNA, 22 nt, Human
cagcuggcgccuggggaccaga

SEQ ID NO: 1089390 - RNA, 20 nt, Human
aaagagaagccucaccuugu

SEQ ID NO: 1089391 - RNA, 22 nt, Human
cagcauuuagaauuugaagugu

SEQ ID NO: 1089392 - RNA, 22 nt, Human
ugagcuucaaaauaugugaauc

SEQ ID NO: 1089393 - RNA, 22 nt, Human
caauacuauucggaccaucucu

SEQ ID NO: 1089394 - RNA, 22 nt, Human
ugagcuggcacuuuuccuggga

SEQ ID NO: 1089395 - RNA, 22 nt, Human
uugaagacacagacauauagag

SEQ ID NO: 1089396 - RNA, 18 nt, Human
cccagcuccacuucccuc

SEQ ID NO: 1089397 - RNA, 22 nt, Human
ggaagccagagugcugggcagg

SEQ ID NO: 1089398 - RNA, 20 nt, Human
cccuuuaagcuuuaguaugc

SEQ ID NO: 1089399 - RNA, 22 nt, Human
gcugccagcucacucuccugag

SEQ ID NO: 1089400 - RNA, 22 nt, Human
uuuugcaaaguacauuaucagg

SEQ ID NO: 1089401 - RNA, 22 nt, Human
gugccuggagcuaauguguaua

SEQ ID NO: 1089402 - RNA, 22 nt, Human
uggagguggggcucaggaaucu

SEQ ID NO: 1089403 - RNA, 22 nt, Human
aacuugaauucugccauucaga

SEQ ID NO: 1089404 - RNA, 22 nt, Human
uuacacaaacacauuccagaua

SEQ ID NO: 1089405 - RNA, 22 nt, Human
gagaaaugagugauucacuuuu

SEQ ID NO: 1089406 - RNA, 22 nt, Human
aacaguuaucucacauauggaa

SEQ ID NO: 1089407 - RNA, 22 nt, Human
ugcagggcagcuagggagcuuu

SEQ ID NO: 1089408 - RNA, 22 nt, Human
ccaugggcgcacaggccuggag

SEQ ID NO: 1089409 - RNA, 22 nt, Human
accaaucuccuauuuuguuuca

SEQ ID NO: 1089410 - RNA, 22 nt, Human
aauauuugcaucauuagcuauu

SEQ ID NO: 1089411 - RNA, 22 nt, Human
ugaaaucugucccacuuuagcu

SEQ ID NO: 1089412 - RNA, 22 nt, Human
aguguccccuccaagggccugg

SEQ ID NO: 1089413 - RNA, 22 nt, Human
uguuucauguggacauaguugu

SEQ ID NO: 1089414 - RNA, 21 nt, Human
cagaaguaaggguaacuucuc

SEQ ID NO: 1089415 - RNA, 22 nt, Human
agagugaaguaauuguuaggau

SEQ ID NO: 1089416 - RNA, 22 nt, Human
agcuguuuuuuccucaccacuu

SEQ ID NO: 1089417 - RNA, 22 nt, Human
uguuuccaaagucuuuucuuaa

SEQ ID NO: 1089418 - RNA, 22 nt, Human
aguuuuuccguggcuacgauaa

SEQ ID NO: 1089419 - RNA, 22 nt, Human
ucaaaguaccauuaucagugga

SEQ ID NO: 1089420 - RNA, 21 nt, Human
acaggcucacgauccauuucu

SEQ ID NO: 1089421 - RNA, 22 nt, Human
gcuggagccaagcugcucuugg

SEQ ID NO: 1089422 - RNA, 22 nt, Human
gcuggccugaccugaggcuggg

SEQ ID NO: 1089423 - RNA, 22 nt, Human
cauuuagagucuugcaauuuua

SEQ ID NO: 1089424 - RNA, 22 nt, Human
aggcagugcagaguccucuucu

SEQ ID NO: 1089425 - RNA, 22 nt, Human
gagagcccugcuccuaucccag

SEQ ID NO: 1089426 - RNA, 22 nt, Human
acaggaacuguuaucucagaug

SEQ ID NO: 1089427 - RNA, 22 nt, Human
ccagagucuuuauauuccugaa

SEQ ID NO: 1089428 - RNA, 22 nt, Human
gcuccuggucuggagcuucaag

SEQ ID NO: 1089429 - RNA, 22 nt, Human
caacucauguccaacuuucuuu

SEQ ID NO: 1089430 - RNA, 22 nt, Human
cugggcugagccugggcugugu

SEQ ID NO: 1089431 - RNA, 22 nt, Human
guuacaaaggaagcuucacugc

SEQ ID NO: 1089432 - RNA, 22 nt, Human
gagcagcuguccccaaagcuuc

SEQ ID NO: 1089433 - RNA, 22 nt, Human
gcaggccuccccugcuggagcu

SEQ ID NO: 1089434 - RNA, 22 nt, Human
uacuacaaggccgaagcucuca

SEQ ID NO: 1089435 - RNA, 22 nt, Human
uugcucuguaauaaucuggggu

SEQ ID NO: 1089436 - RNA, 22 nt, Human
uuucccaagugaagugaagcca

SEQ ID NO: 1089437 - RNA, 22 nt, Human
aagaggugccagggguuuugua

SEQ ID NO: 1089438 - RNA, 22 nt, Human
cccaggcucccaggugggacaa

SEQ ID NO: 1089439 - RNA, 22 nt, Human
gagggugguggcuuaaggugcu

SEQ ID NO: 1089440 - RNA, 22 nt, Human
uguaugaaugggaaaaggaaac

SEQ ID NO: 1089441 - RNA, 19 nt, Human
guuccaaaggccagaccuu

SEQ ID NO: 1089442 - RNA, 18 nt, Human
gagaggagccagaauuuu

SEQ ID NO: 1089443 - RNA, 22 nt, Human
gccaggaugacuauacaacagc

SEQ ID NO: 1089444 - RNA, 22 nt, Human
gcugagcuagaaaaggaccaca

SEQ ID NO: 1089445 - RNA, 22 nt, Human
uuacaagugucagguacuggca

SEQ ID NO: 1089446 - RNA, 22 nt, Human
agcuuccugaugcaagagggcu

SEQ ID NO: 1089447 - RNA, 22 nt, Human
uuuagagaguguaaaaauauau

SEQ ID NO: 1089448 - RNA, 22 nt, Human
ugagaggccccagcucuuggcc

SEQ ID NO: 1089449 - RNA, 22 nt, Human
uuucaucaccccaaaucuaugg

SEQ ID NO: 1089450 - RNA, 22 nt, Human
gaauuugucccuugauauaaaa

SEQ ID NO: 1089451 - RNA, 22 nt, Human
cagacagaccugcaagggcaca

SEQ ID NO: 1089452 - RNA, 22 nt, Human
ugccuuuuaccuuguaauucug

SEQ ID NO: 1089453 - RNA, 22 nt, Human
aauacuuugccaaguucgaaga

SEQ ID NO: 1089454 - RNA, 22 nt, Human
ccuggcugaaccaaugaagugg

SEQ ID NO: 1089455 - RNA, 22 nt, Human
gccuggaguagcauggcaagcc

SEQ ID NO: 1089456 - RNA, 22 nt, Human
agcgggugcugugucagcccuc

SEQ ID NO: 1089457 - RNA, 19 nt, Human
gcugugggacagcagggug

SEQ ID NO: 1089458 - RNA, 19 nt, Human
uggcaucuguaaaauggug

SEQ ID NO: 1089459 - RNA, 22 nt, Human
aacaauuacuaccaaggccugu

SEQ ID NO: 1089460 - RNA, 22 nt, Human
gugcccuggcucacagugucuc

SEQ ID NO: 1089461 - RNA, 22 nt, Human
uggcccugccgcacuauccuca

SEQ ID NO: 1089462 - RNA, 22 nt, Human
auaauucaugggccuuucaccu

SEQ ID NO: 1089463 - RNA, 22 nt, Human
accaggaagcaucccuuuguaa

SEQ ID NO: 1089464 - RNA, 22 nt, Human
ugccugggggacuaaggccaaa

SEQ ID NO: 1089465 - RNA, 22 nt, Human
uccuucagggcugaccacaggc

SEQ ID NO: 1089466 - RNA, 22 nt, Human
caucuggcuagcuaucauugug

SEQ ID NO: 1089467 - RNA, 22 nt, Human
aaggagucugggccauucagag

SEQ ID NO: 1089468 - RNA, 22 nt, Human
acuguggaugccaaaggggagg

SEQ ID NO: 1089469 - RNA, 22 nt, Human
acuuccagcuuuauaauucagu

SEQ ID NO: 1089470 - RNA, 22 nt, Human
aguauaauuagauaucaaaagu

SEQ ID NO: 1089471 - RNA, 22 nt, Human
gcggcaggaagagcgcagcccc

SEQ ID NO: 1089472 - RNA, 22 nt, Human
agacagcaggggagucugguuu

SEQ ID NO: 1089473 - RNA, 22 nt, Human
ugaguccauugauggauaguga

SEQ ID NO: 1089474 - RNA, 22 nt, Human
gucacacagggccuccaaauca

SEQ ID NO: 1089475 - RNA, 22 nt, Human
ggcaggagggcggacaaugacc

SEQ ID NO: 1089476 - RNA, 22 nt, Human
caaauguuuuuauucuacaaca

SEQ ID NO: 1089477 - RNA, 23 nt, Human
ccuccugggcacaggccugaugg

SEQ ID NO: 1089478 - RNA, 22 nt, Human
ucugucugcgcuugcccuggug

SEQ ID NO: 1089479 - RNA, 22 nt, Human
aaguauuucuggccugugaaag

SEQ ID NO: 1089480 - RNA, 22 nt, Human
aaauuucuguuguuuugagcca

SEQ ID NO: 1089481 - RNA, 22 nt, Human
ggcuuugggcccucaagucucc

SEQ ID NO: 1089482 - RNA, 22 nt, Human
gugccagcucuccccacaucug

SEQ ID NO: 1089483 - RNA, 21 nt, Human
agcugcagcccaaaggccugu

SEQ ID NO: 1089484 - RNA, 22 nt, Human
cuggagccccagacagggagag

SEQ ID NO: 1089485 - RNA, 22 nt, Human
gggauucaucaacuguuuuaca

SEQ ID NO: 1089486 - RNA, 22 nt, Human
acaugcaugucuaugggcaggu

SEQ ID NO: 1089487 - RNA, 22 nt, Human
uggaagauaugcugauucucug

SEQ ID NO: 1089488 - RNA, 22 nt, Human
augcacaagguagauuauuauu

SEQ ID NO: 1089489 - RNA, 18 nt, Human
gucacuguguuucugagc

SEQ ID NO: 1089490 - RNA, 22 nt, Human
uucugugaaucuuuuuucccac

SEQ ID NO: 1089491 - RNA, 22 nt, Human
cagaggcacagcuucuuuuaau

SEQ ID NO: 1089492 - RNA, 22 nt, Human
ucugccuguugcuagaauguca

SEQ ID NO: 1089493 - RNA, 22 nt, Human
caaaaaacaccugugugaguau

SEQ ID NO: 1089494 - RNA, 22 nt, Human
cacacugaccugaacuuagcau

SEQ ID NO: 1089495 - RNA, 22 nt, Human
gcaagcuguccuuuugcauggc

SEQ ID NO: 1089496 - RNA, 22 nt, Human
caguggagugggacuggucuga

SEQ ID NO: 1089497 - RNA, 22 nt, Human
gagcucugggaaacaaagugua

SEQ ID NO: 1089498 - RNA, 19 nt, Human
augucccaccgccccugag

SEQ ID NO: 1089499 - RNA, 22 nt, Human
agaaauacaaaguacuaagaua

SEQ ID NO: 1089500 - RNA, 22 nt, Human
ucuuagaugaauaaaaaguuau

SEQ ID NO: 1089501 - RNA, 22 nt, Human
gccuggcccagggcucuuguug

SEQ ID NO: 1089502 - RNA, 22 nt, Human
agguaggccugacgcuggggug

SEQ ID NO: 1089503 - RNA, 22 nt, Human
cccaggcuggagugcaauggug

SEQ ID NO: 1089504 - RNA, 17 nt, Human
uagagcugguucaggag

SEQ ID NO: 1089505 - RNA, 22 nt, Human
uaauuauuaugacaacaauugc

SEQ ID NO: 1089506 - RNA, 22 nt, Human
acagggcagguggcuacugguc

SEQ ID NO: 1089507 - RNA, 22 nt, Human
gcacagccagcaucugagggau

SEQ ID NO: 1089508 - RNA, 22 nt, Human
uuguuugaggucacugauauuu

SEQ ID NO: 1089509 - RNA, 22 nt, Human
ucaguuuuguauguuguaaguc

SEQ ID NO: 1089510 - RNA, 22 nt, Human
ucucugucugagccuggcagac

SEQ ID NO: 1089511 - RNA, 22 nt, Human
caaggcagucccuacucccugc

SEQ ID NO: 1089512 - RNA, 22 nt, Human
cccagguggguuggccucuguc

SEQ ID NO: 1089513 - RNA, 22 nt, Human
aaaucaguuaagaugaggccau

SEQ ID NO: 1089514 - RNA, 22 nt, Human
ucaggugguccuaagugccauc

SEQ ID NO: 1089515 - RNA, 22 nt, Human
cuuccaaaauuuauauguugaa

SEQ ID NO: 1089516 - RNA, 22 nt, Human
ugggcugcugucugcacaugcu

SEQ ID NO: 1089517 - RNA, 22 nt, Human
aaaggucagcugccaucguucu

SEQ ID NO: 1089518 - RNA, 22 nt, Human
uccuuagagauacugucuugaa

SEQ ID NO: 1089519 - RNA, 22 nt, Human
agccuccacagaugcaaagggc

SEQ ID NO: 1089520 - RNA, 22 nt, Human
agagcugcccacacagcagauu

SEQ ID NO: 1089521 - RNA, 22 nt, Human
gaggcuguguuucagugaggcc

SEQ ID NO: 1089522 - RNA, 22 nt, Human
cagucucucugaaguauuaaga

SEQ ID NO: 1089523 - RNA, 22 nt, Human
agcagccagaaauccagaggug

SEQ ID NO: 1089524 - RNA, 22 nt, Human
agggcagagacaugcuuccuga

SEQ ID NO: 1089525 - RNA, 22 nt, Human
cacaucagguagaccuacagag

SEQ ID NO: 1089526 - RNA, 23 nt, Human
cuuuuaacuugaucugagaccag

SEQ ID NO: 1089527 - RNA, 22 nt, Human
acagagcaacuuuauuucaugg

SEQ ID NO: 1089528 - RNA, 22 nt, Human
uccaagaucuacagcaguuuag

SEQ ID NO: 1089529 - RNA, 22 nt, Human
acaucacacgccuuccaggagg

SEQ ID NO: 1089530 - RNA, 22 nt, Human
caugcuuucuguccaaauguua

SEQ ID NO: 1089531 - RNA, 19 nt, Human
uugguucauggaugcccaa

SEQ ID NO: 1089532 - RNA, 22 nt, Human
ucaaagauggguuuuguuugau

SEQ ID NO: 1089533 - RNA, 22 nt, Human
ccucugaguccuuugggcucuc

SEQ ID NO: 1089534 - RNA, 22 nt, Human
cugugcugauucagcacaggcc

SEQ ID NO: 1089535 - RNA, 22 nt, Human
agccuucagcaguucaggugcc

SEQ ID NO: 1089536 - RNA, 22 nt, Human
ugagcagauggaggcuucugca

SEQ ID NO: 1089537 - RNA, 22 nt, Human
agaaaucacaggaggcagaagg

SEQ ID NO: 1089538 - RNA, 22 nt, Human
ggacuggccggcgcugaggccc

SEQ ID NO: 1089539 - RNA, 22 nt, Human
ggucccugcugaagccuuggug

SEQ ID NO: 1089540 - RNA, 22 nt, Human
ggcacagagcccagcuuccuag

SEQ ID NO: 1089541 - RNA, 22 nt, Human
guguccaucagcagccacugug

SEQ ID NO: 1089542 - RNA, 22 nt, Human
uucaaacaacucauuuaugcaa

SEQ ID NO: 1089543 - RNA, 22 nt, Human
agcagugaugcaugacagccua

SEQ ID NO: 1089544 - RNA, 22 nt, Human
ucuaguuuaagaucuguuaguc

SEQ ID NO: 1089545 - RNA, 22 nt, Human
aacuacuaccacagucaagaca

SEQ ID NO: 1089546 - RNA, 22 nt, Human
cuguaugaaauuaaguaaacag

SEQ ID NO: 1089547 - RNA, 22 nt, Human
uauaaagcugacucaugaaacu

SEQ ID NO: 1089548 - RNA, 22 nt, Human
uucuagauugccuguaaguaaa

SEQ ID NO: 1089549 - RNA, 21 nt, Human
aucaacauugaaagagcugga

SEQ ID NO: 1089550 - RNA, 22 nt, Human
uggugagagcugaccgugcgag

SEQ ID NO: 1089551 - RNA, 22 nt, Human
ugcccugcccuugcuauuucua

SEQ ID NO: 1089552 - RNA, 22 nt, Human
agaucugaguggcugcauguaa

SEQ ID NO: 1089553 - RNA, 22 nt, Human
gucauuccuauccauuugauac

SEQ ID NO: 1089554 - RNA, 19 nt, Human
agcuguggaugugggauuu

SEQ ID NO: 1089555 - RNA, 22 nt, Human
guuuggaccucugcuagaugga

SEQ ID NO: 1089556 - RNA, 22 nt, Human
ugaaguccuagaacuccuggua

SEQ ID NO: 1089557 - RNA, 22 nt, Human
ugggcuggcccaccacaccucg

SEQ ID NO: 1089558 - RNA, 22 nt, Human
uccuugaauauaauaacaguag

SEQ ID NO: 1089559 - RNA, 22 nt, Human
acuucauguacuguucaaggcc

SEQ ID NO: 1089560 - RNA, 22 nt, Human
gggccuugccauggagccugag

SEQ ID NO: 1089561 - RNA, 22 nt, Human
aagugauuuucuucuuaguuau

SEQ ID NO: 1089562 - RNA, 22 nt, Human
ccuccucugggaagauucagag

SEQ ID NO: 1089563 - RNA, 22 nt, Human
ugugcucuggaguugccuucac

SEQ ID NO: 1089564 - RNA, 22 nt, Human
cucagaguccauaguuuacagu

SEQ ID NO: 1089565 - RNA, 22 nt, Human
ccucagaggcagaugguaagaa

SEQ ID NO: 1089566 - RNA, 22 nt, Human
cauucccacguguucuuugcuu

SEQ ID NO: 1089567 - RNA, 22 nt, Human
agccacagcuccuugguggaga

SEQ ID NO: 1089568 - RNA, 22 nt, Human
augcccugaaagauucaaaggc

SEQ ID NO: 1089569 - RNA, 20 nt, Human
ucaggaugugcugagugaag

SEQ ID NO: 1089570 - RNA, 22 nt, Human
ugaggcugagauaucagggagg

SEQ ID NO: 1089571 - RNA, 22 nt, Human
ucagacagggcuucucaaacuu

SEQ ID NO: 1089572 - RNA, 22 nt, Human
cacagugucugugcuucagugu

SEQ ID NO: 1089573 - RNA, 21 nt, Human
ccuaaacaagacugacacaca

SEQ ID NO: 1089574 - RNA, 22 nt, Human
ugggcagaggcagcagaaaccu

SEQ ID NO: 1089575 - RNA, 19 nt, Human
uauauuugagugugcaugc

SEQ ID NO: 1089576 - RNA, 21 nt, Human
cagcccagcccauugacagug

SEQ ID NO: 1089577 - RNA, 22 nt, Human
agcagggcucugccaugggccc

SEQ ID NO: 1089578 - RNA, 22 nt, Human
ccuuccaggagucucugcaggu

SEQ ID NO: 1089579 - RNA, 22 nt, Human
aaacuucaaggauuugcaaauc

SEQ ID NO: 1089580 - RNA, 22 nt, Human
ucauccaaggauuuuauugcau

SEQ ID NO: 1089581 - RNA, 22 nt, Human
aaagaggauggaguagucagcu

SEQ ID NO: 1089582 - RNA, 22 nt, Human
ugaaaugaucaguuugguuacu

SEQ ID NO: 1089583 - RNA, 22 nt, Human
caggugcuguccugcacauguc

SEQ ID NO: 1089584 - RNA, 22 nt, Human
cagccucuugcacuuugaaggc

SEQ ID NO: 1089585 - RNA, 20 nt, Human
uguucacaguaguugcugcu

SEQ ID NO: 1089586 - RNA, 22 nt, Human
acaggcugacuuccugccaugu

SEQ ID NO: 1089587 - RNA, 22 nt, Human
uucuuuucccaauauuuugcug

SEQ ID NO: 1089588 - RNA, 22 nt, Human
gaagcacugcauuucaagauca

SEQ ID NO: 1089589 - RNA, 22 nt, Human
cugggcacugcaggguguugag

SEQ ID NO: 1089590 - RNA, 22 nt, Human
gcugaagggagugcugagucug

SEQ ID NO: 1089591 - RNA, 19 nt, Human
cucagcuguagcucaugug

SEQ ID NO: 1089592 - RNA, 22 nt, Human
ggccuuugcguccacgccgcuu

SEQ ID NO: 1089593 - RNA, 22 nt, Human
auuugucuucaguagguucuuc

SEQ ID NO: 1089594 - RNA, 22 nt, Human
ucucagugacacucuucauaca

SEQ ID NO: 1089595 - RNA, 22 nt, Human
gcuuuacacagcugguucuugu

SEQ ID NO: 1089596 - RNA, 19 nt, Human
ugaagcaauaccauuuuug

SEQ ID NO: 1089597 - RNA, 22 nt, Human
cugggcugcuguccacuagggu

SEQ ID NO: 1089598 - RNA, 22 nt, Human
accgaaggaaacuggaaccguu

SEQ ID NO: 1089599 - RNA, 22 nt, Human
cagggcagugaagaacacacgu

SEQ ID NO: 1089600 - RNA, 22 nt, Human
uaauaccuggccuugauacagu

SEQ ID NO: 1089601 - RNA, 22 nt, Human
aaggucauuuaacaauuuauga

SEQ ID NO: 1089602 - RNA, 22 nt, Human
cuucuggauuuauucauuccuu

SEQ ID NO: 1089603 - RNA, 22 nt, Human
uucuuauaaguuaauauuucca

SEQ ID NO: 1089604 - RNA, 20 nt, Human
cuuucucuaauuuauaagua

SEQ ID NO: 1089605 - RNA, 22 nt, Human
ucuggccuuaucuguccaagcc

SEQ ID NO: 1089606 - RNA, 22 nt, Human
auuuugcugugguacauuagga

SEQ ID NO: 1089607 - RNA, 22 nt, Human
uggcacuggcgcaggauggcgg

SEQ ID NO: 1089608 - RNA, 22 nt, Human
uaagcaaaagucgagugugagc

SEQ ID NO: 1089609 - RNA, 19 nt, Human
cuugcugggugguuucugc

SEQ ID NO: 1089610 - RNA, 22 nt, Human
acuaaacacaugagauuccugc

SEQ ID NO: 1089611 - RNA, 22 nt, Human
gcaggcugugaggcucagaugg

SEQ ID NO: 1089612 - RNA, 22 nt, Human
uuggaccaugguagggaacuug

SEQ ID NO: 1089613 - RNA, 22 nt, Human
ugaaagggguugaguuacagcu

SEQ ID NO: 1089614 - RNA, 22 nt, Human
cagaccuggaaaacaggcuugc

SEQ ID NO: 1089615 - RNA, 22 nt, Human
cccaggacucuucacugcagcc

SEQ ID NO: 1089616 - RNA, 22 nt, Human
gcucugcugucuucuugcaggc

SEQ ID NO: 1089617 - RNA, 22 nt, Human
cuuguaaaauauccaguuaagg

SEQ ID NO: 1089618 - RNA, 22 nt, Human
gagucuuugguaaagucugcug

SEQ ID NO: 1089619 - RNA, 21 nt, Human
ccagccucagaucagggagcu

SEQ ID NO: 1089620 - RNA, 22 nt, Human
caagcagagagguuagaacaca

SEQ ID NO: 1089621 - RNA, 22 nt, Human
ccugggcugggcgucucauggg

SEQ ID NO: 1089622 - RNA, 20 nt, Human
uggaggcaccuguggagauc

SEQ ID NO: 1089623 - RNA, 22 nt, Human
aggccucugcuggaaagaguug

SEQ ID NO: 1089624 - RNA, 22 nt, Human
ucaaagagcucuaucuucaaaa

SEQ ID NO: 1089625 - RNA, 22 nt, Human
gugccugugccaggggugugcu

SEQ ID NO: 1089626 - RNA, 22 nt, Human
auucuuuuaaauggcaguagua

SEQ ID NO: 1089627 - RNA, 22 nt, Human
aggcaggagcaagcccuacaag

SEQ ID NO: 1089628 - RNA, 22 nt, Human
ggaaaaggccacagggacacau

SEQ ID NO: 1089629 - RNA, 22 nt, Human
ugcugccuugaccuccugggcu

SEQ ID NO: 1089630 - RNA, 22 nt, Human
uaagagaacuggauagauagga

SEQ ID NO: 1089631 - RNA, 22 nt, Human
cacguuuuaugacagaagaagc

SEQ ID NO: 1089632 - RNA, 22 nt, Human
agcagggcuggggcacgagcca

SEQ ID NO: 1089633 - RNA, 22 nt, Human
ucugcuguucauucuuuuagcu

SEQ ID NO: 1089634 - RNA, 22 nt, Human
ugcagcuccucuggcugccuga

SEQ ID NO: 1089635 - RNA, 22 nt, Human
uagauuuugcauuucuaacaag

SEQ ID NO: 1089636 - RNA, 22 nt, Human
ucagcaaugagaacuggcauuu

SEQ ID NO: 1089637 - RNA, 22 nt, Human
aaaguucuccuggauugugcug

SEQ ID NO: 1089638 - RNA, 22 nt, Human
ugcaauaaagugcuauaaaucc

SEQ ID NO: 1089639 - RNA, 22 nt, Human
ccugggaggcggagguugcagu

SEQ ID NO: 1089640 - RNA, 22 nt, Human
ucauacauaacuuguacaguga

SEQ ID NO: 1089641 - RNA, 22 nt, Human
ugaaaugaagggcuuguucugg

SEQ ID NO: 1089642 - RNA, 23 nt, Human
auuuccuacuauaaaagagguaa

SEQ ID NO: 1089643 - RNA, 22 nt, Human
gauuucuuuagcucaucagauc

SEQ ID NO: 1089644 - RNA, 22 nt, Human
gauguaauagauauagauugcu

SEQ ID NO: 1089645 - RNA, 22 nt, Human
ggaggggcagccauggaacucc

SEQ ID NO: 1089646 - RNA, 22 nt, Human
caguuacaugcucaugucauca

SEQ ID NO: 1089647 - RNA, 22 nt, Human
ucuggcucuuugggugauugua

SEQ ID NO: 1089648 - RNA, 22 nt, Human
acagugaugagggaauuuugug

SEQ ID NO: 1089649 - RNA, 19 nt, Human
uugugugucagucagaguu

SEQ ID NO: 1089650 - RNA, 22 nt, Human
gggucaggcucagcagggcagc

SEQ ID NO: 1089651 - RNA, 18 nt, Human
acugccuggcgaagauag

SEQ ID NO: 1089652 - RNA, 22 nt, Human
acagaaauugcuaauagcucau

SEQ ID NO: 1089653 - RNA, 22 nt, Human
ggccaguggcucugugcuuggg

SEQ ID NO: 1089654 - RNA, 22 nt, Human
cagcugagaaaggcaggcucac

SEQ ID NO: 1089655 - RNA, 22 nt, Human
ugugaccucaucuuaacuggaa

SEQ ID NO: 1089656 - RNA, 22 nt, Human
gcugcagcagcugcaggguugu

SEQ ID NO: 1089657 - RNA, 22 nt, Human
ggcucuggucagugaggggccu

SEQ ID NO: 1089658 - RNA, 22 nt, Human
cuacaaauauaaaacacagaua

SEQ ID NO: 1089659 - RNA, 22 nt, Human
ucagccucagguguucagauuu

SEQ ID NO: 1089660 - RNA, 18 nt, Human
uggcagccagcugcuccu

SEQ ID NO: 1089661 - RNA, 22 nt, Human
cccacucccugcacgccugccg

SEQ ID NO: 1089662 - RNA, 22 nt, Human
ugcucuguaaggucagaaaagg

SEQ ID NO: 1089663 - RNA, 23 nt, Human
ggcugcgagugccugggccugug

SEQ ID NO: 1089664 - RNA, 22 nt, Human
uggagucugugaugcucugggu

SEQ ID NO: 1089665 - RNA, 22 nt, Human
ucugccugaaucucuuagaaca

SEQ ID NO: 1089666 - RNA, 22 nt, Human
ccagagagcuacaaggcauaaa

SEQ ID NO: 1089667 - RNA, 22 nt, Human
ucuucauuccguagauauuuau

SEQ ID NO: 1089668 - RNA, 22 nt, Human
aauuauauguuaaucuucaauu

SEQ ID NO: 1089669 - RNA, 22 nt, Human
aggugagguuugggagguguca

SEQ ID NO: 1089670 - RNA, 19 nt, Human
ucauaaggagagaggaaau

SEQ ID NO: 1089671 - RNA, 22 nt, Human
uauauucauuuuaaagccaucu

SEQ ID NO: 1089672 - RNA, 22 nt, Human
cacugcaguuccccagugcgca

SEQ ID NO: 1089673 - RNA, 22 nt, Human
aaaagucuugucaagguuccca

SEQ ID NO: 1089674 - RNA, 22 nt, Human
uuguuacacauaauaacauuuu

SEQ ID NO: 1089675 - RNA, 22 nt, Human
cucuucaggaauaugucaguca

SEQ ID NO: 1089676 - RNA, 22 nt, Human
uuuuauuaguggcuagaugggg

SEQ ID NO: 1089677 - RNA, 22 nt, Human
gaguuauuucagaaggaaagau

SEQ ID NO: 1089678 - RNA, 22 nt, Human
aagggcagagggaaucccacau

SEQ ID NO: 1089679 - RNA, 21 nt, Human
agcugccugcucuggaccugg

SEQ ID NO: 1089680 - RNA, 22 nt, Human
agcugucugucuccugaggaga

SEQ ID NO: 1089681 - RNA, 22 nt, Human
gauucccauccucagcagcagc

SEQ ID NO: 1089682 - RNA, 22 nt, Human
cagucauuuuauuugaaaauua

SEQ ID NO: 1089683 - RNA, 22 nt, Human
gcagcgagugcggcugccacag

SEQ ID NO: 1089684 - RNA, 22 nt, Human
uaacagaagagcaggcagcccu

SEQ ID NO: 1089685 - RNA, 22 nt, Human
gaguggggcccacugcugggug

SEQ ID NO: 1089686 - RNA, 22 nt, Human
ggcucagcuuaucugggcaggc

SEQ ID NO: 1089687 - RNA, 22 nt, Human
uuauuucauguaaaauuuaugu

SEQ ID NO: 1089688 - RNA, 22 nt, Human
uugaaaggugacauuguuagag

SEQ ID NO: 1089689 - RNA, 22 nt, Human
uugguuuaggaacuggcuugga

SEQ ID NO: 1089690 - RNA, 22 nt, Human
gaaugaguagaguauaaacaaa

SEQ ID NO: 1089691 - RNA, 22 nt, Human
cccagcaucccagugggcagca

SEQ ID NO: 1089692 - RNA, 22 nt, Human
cacuuugauuugugaugugaga

SEQ ID NO: 1089693 - RNA, 22 nt, Human
ccacccuggacaggccucugag

SEQ ID NO: 1089694 - RNA, 22 nt, Human
guggaggguuugcaaugugcag

SEQ ID NO: 1089695 - RNA, 22 nt, Human
aaaggcagugugauacuguggu

SEQ ID NO: 1089696 - RNA, 22 nt, Human
uuaaagcaucacacuauuaauu

SEQ ID NO: 1089697 - RNA, 22 nt, Human
uuuguaacuuuagaauugaucc

SEQ ID NO: 1089698 - RNA, 22 nt, Human
gcacauaacugaccacaucuaa

SEQ ID NO: 1089699 - RNA, 22 nt, Human
aagacaagcaucaaaucaggca

SEQ ID NO: 1089700 - RNA, 22 nt, Human
uucaagucauguuaacugcuuc

SEQ ID NO: 1089701 - RNA, 19 nt, Human
acagauggaggaaucuggg

SEQ ID NO: 1089702 - RNA, 22 nt, Human
agaggcccucucucuccugaug

SEQ ID NO: 1089703 - RNA, 22 nt, Human
ugcagggcaguuuguuucggca

SEQ ID NO: 1089704 - RNA, 22 nt, Human
guaauaauacuagucagccuug

SEQ ID NO: 1089705 - RNA, 22 nt, Human
gacagggcaagacucugucuaa

SEQ ID NO: 1089706 - RNA, 22 nt, Human
uguccucacaggaaugaacuuu

SEQ ID NO: 1089707 - RNA, 22 nt, Human
gugaaaucugaggcccaugaug

SEQ ID NO: 1089708 - RNA, 22 nt, Human
cagucacacaaguggacuuggg

SEQ ID NO: 1089709 - RNA, 22 nt, Human
ucccagcauaacaaacugcccg

SEQ ID NO: 1089710 - RNA, 22 nt, Human
auuugaagucuucaugauuucu

SEQ ID NO: 1089711 - RNA, 22 nt, Human
agccaggauggucucgaucggc

SEQ ID NO: 1089712 - RNA, 22 nt, Human
uaaggccagcaugaaugcagca

SEQ ID NO: 1089713 - RNA, 22 nt, Human
acagaacugcaggaggaaaagc

SEQ ID NO: 1089714 - RNA, 22 nt, Human
gaugguuugguaaaaguauguu

SEQ ID NO: 1089715 - RNA, 22 nt, Human
acagcaacuccugcuucugagu

SEQ ID NO: 1089716 - RNA, 22 nt, Human
caguggaggccuugggaccuuu

SEQ ID NO: 1089717 - RNA, 22 nt, Human
auuucucacugagcagauaaaa

SEQ ID NO: 1089718 - RNA, 21 nt, Human
ucucugguuggaguugugcca

SEQ ID NO: 1089719 - RNA, 22 nt, Human
uggcuggggccugaauccugca

SEQ ID NO: 1089720 - RNA, 22 nt, Human
ucuggagagucacagugccaga

SEQ ID NO: 1089721 - RNA, 22 nt, Human
acacacuucacccuugagcuaa

SEQ ID NO: 1089722 - RNA, 22 nt, Human
uucauguuugccuauuugacuu

SEQ ID NO: 1089723 - RNA, 22 nt, Human
acagugauuuuaggauagaugg

SEQ ID NO: 1089724 - RNA, 22 nt, Human
aaggccugaacaugaggagaug

SEQ ID NO: 1089725 - RNA, 22 nt, Human
gcccucugcacagcucugagca

SEQ ID NO: 1089726 - RNA, 22 nt, Human
agccuccaaaugucaggucccg

SEQ ID NO: 1089727 - RNA, 22 nt, Human
ugggcucucuggcaggaaggcu

SEQ ID NO: 1089728 - RNA, 19 nt, Human
cuaaggcaagaaacuggac

SEQ ID NO: 1089729 - RNA, 22 nt, Human
cucuggaguggguggccgggag

SEQ ID NO: 1089730 - RNA, 22 nt, Human
augacuuuccuggcaaaaguug

SEQ ID NO: 1089731 - RNA, 22 nt, Human
auuccaggauuccaggacaaau

SEQ ID NO: 1089732 - RNA, 22 nt, Human
uaaagcaggugcucagugacca

SEQ ID NO: 1089733 - RNA, 22 nt, Human
aaugagguuggcauaauuaaau

SEQ ID NO: 1089734 - RNA, 22 nt, Human
uaaagcaguaugauggaaggau

SEQ ID NO: 1089735 - RNA, 22 nt, Human
gggaccuggacaugugugugcu

SEQ ID NO: 1089736 - RNA, 22 nt, Human
ucugccuggauuccauucucca

SEQ ID NO: 1089737 - RNA, 22 nt, Human
ugcagguggcuccagggacugc

SEQ ID NO: 1089738 - RNA, 22 nt, Human
caguguaagcucuagacuagaa

SEQ ID NO: 1089739 - RNA, 22 nt, Human
acauaauaggugccugaauauu

SEQ ID NO: 1089740 - RNA, 22 nt, Human
agccugugugaagcccucagag

SEQ ID NO: 1089741 - RNA, 22 nt, Human
gguggcagugcuugcgggucua

SEQ ID NO: 1089742 - RNA, 20 nt, Human
cuguggcaucugucauggug

SEQ ID NO: 1089743 - RNA, 21 nt, Human
uugggccuuuucugguagcuu

SEQ ID NO: 1089744 - RNA, 23 nt, Human
aguggggaaucaacagauucuuu

SEQ ID NO: 1089745 - RNA, 20 nt, Human
cccugagaccagagagcagc

SEQ ID NO: 1089746 - RNA, 22 nt, Human
aauaaaucaauccuauugguag

SEQ ID NO: 1089747 - RNA, 22 nt, Human
cagaaguaagauuacugugagu

SEQ ID NO: 1089748 - RNA, 22 nt, Human
gcuuucugauugcgaaaacaaa

SEQ ID NO: 1089749 - RNA, 22 nt, Human
gcauuucagaagcaugcccucu

SEQ ID NO: 1089750 - RNA, 17 nt, Human
gcagugaaaagagauca

SEQ ID NO: 1089751 - RNA, 22 nt, Human
cugaaauuccauuucagccaca

SEQ ID NO: 1089752 - RNA, 20 nt, Human
acaaaguauugaggacaagu

SEQ ID NO: 1089753 - RNA, 22 nt, Human
uacaaagugagcaaccucuuuu

SEQ ID NO: 1089754 - RNA, 22 nt, Human
ucacacacauuugcugucugau

SEQ ID NO: 1089755 - RNA, 22 nt, Human
ugggcugaguggcagccagagu

SEQ ID NO: 1089756 - RNA, 22 nt, Human
uaggcuggaacuuaggcagagg

SEQ ID NO: 1089757 - RNA, 23 nt, Human
ggagccuggcauaugagacgcau

SEQ ID NO: 1089758 - RNA, 22 nt, Human
uuuucuaacuuuacacucgaaa

SEQ ID NO: 1089759 - RNA, 22 nt, Human
gggcaguagcuucguaggcauc

SEQ ID NO: 1089760 - RNA, 22 nt, Human
ugcuccugaacacagcccuaug

SEQ ID NO: 1089761 - RNA, 22 nt, Human
acuguucugcauguaccugagg

SEQ ID NO: 1089762 - RNA, 22 nt, Human
aacuuuuacaaauugucaucau

SEQ ID NO: 1089763 - RNA, 22 nt, Human
aauacuuuugaacugaaaggca

SEQ ID NO: 1089764 - RNA, 23 nt, Human
gcaucuuaaaaccuacauaugug

SEQ ID NO: 1089765 - RNA, 22 nt, Human
uggcaguggugucugcacaggc

SEQ ID NO: 1089766 - RNA, 22 nt, Human
ucuuauaugcacauacauuggg

SEQ ID NO: 1089767 - RNA, 22 nt, Human
caggccugcaggaaaggcuccc

SEQ ID NO: 1089768 - RNA, 22 nt, Human
aaaugaacaucaagaauagccu

SEQ ID NO: 1089769 - RNA, 22 nt, Human
uggagccaggagccugggaguc

SEQ ID NO: 1089770 - RNA, 21 nt, Human
ucuuccuccacagcgugccac

SEQ ID NO: 1089771 - RNA, 23 nt, Human
gggaccugguaggaggugauugg

SEQ ID NO: 1089772 - RNA, 22 nt, Human
agaauucuuggugguuagaaua

SEQ ID NO: 1089773 - RNA, 22 nt, Human
gaggcagagucacaaagagucu

SEQ ID NO: 1089774 - RNA, 22 nt, Human
ugccuguguaugugcaugcaca

SEQ ID NO: 1089775 - RNA, 22 nt, Human
gaggaugugucuggucugggca

SEQ ID NO: 1089776 - RNA, 22 nt, Human
ggcaggugcccagagagcacga

SEQ ID NO: 1089777 - RNA, 22 nt, Human
ugagagcuguccaccuguggga

SEQ ID NO: 1089778 - RNA, 22 nt, Human
uagcagagcugggacuagauua

SEQ ID NO: 1089779 - RNA, 22 nt, Human
uuuuuggcagcucagaaacuuc

SEQ ID NO: 1089780 - RNA, 22 nt, Human
augaggcaaucaugguccaguu

SEQ ID NO: 1089781 - RNA, 22 nt, Human
ugucagugauuuguagggaauu

SEQ ID NO: 1089782 - RNA, 22 nt, Human
gucucagaguccuacuuauucc

SEQ ID NO: 1089783 - RNA, 19 nt, Human
ccagcagcuuugauucucu

SEQ ID NO: 1089784 - RNA, 22 nt, Human
ucccacaccugucuauuccuag

SEQ ID NO: 1089785 - RNA, 23 nt, Human
uaauuauggaauaauuugcaacg

SEQ ID NO: 1089786 - RNA, 22 nt, Human
cagcuuaccucccacagcucuc

SEQ ID NO: 1089787 - RNA, 22 nt, Human
gggccaguagcaccugugugga

SEQ ID NO: 1089788 - RNA, 22 nt, Human
gucaggauuauuuuauuaaaag

SEQ ID NO: 1089789 - RNA, 22 nt, Human
aaauaaaggaacuguuuuccca

SEQ ID NO: 1089790 - RNA, 22 nt, Human
ucccacugugccuguuguaauc

SEQ ID NO: 1089791 - RNA, 20 nt, Human
ucaguuaggaagaggcacuc

SEQ ID NO: 1089792 - RNA, 22 nt, Human
aacccgggaggcagagguugug

SEQ ID NO: 1089793 - RNA, 22 nt, Human
ccucucuguaagggucccuccc

SEQ ID NO: 1089794 - RNA, 22 nt, Human
ccagcuccaaguuugggcauca

SEQ ID NO: 1089795 - RNA, 22 nt, Human
uccucacagaguggcaggcaau

SEQ ID NO: 1089796 - RNA, 22 nt, Human
uuuuuccaggguuagauguuua

SEQ ID NO: 1089797 - RNA, 22 nt, Human
cugggcacacagugacucugca

SEQ ID NO: 1089798 - RNA, 22 nt, Human
auuacacauagacauucguuca

SEQ ID NO: 1089799 - RNA, 22 nt, Human
gcucccagauuucagccuugug

SEQ ID NO: 1089800 - RNA, 22 nt, Human
gaguuauuaauggcugaguuug

SEQ ID NO: 1089801 - RNA, 22 nt, Human
ggcuccugauaggagaaugcgg

SEQ ID NO: 1089802 - RNA, 22 nt, Human
cucacugucuguacuagcugau

SEQ ID NO: 1089803 - RNA, 22 nt, Human
acaguauagggcuuauauugua

SEQ ID NO: 1089804 - RNA, 22 nt, Human
ugaagcagagaauuugacaguc

SEQ ID NO: 1089805 - RNA, 22 nt, Human
gaagagaagcaucaauagguaa

SEQ ID NO: 1089806 - RNA, 22 nt, Human
cagcaaaagccagcauaagcuc

SEQ ID NO: 1089807 - RNA, 22 nt, Human
ggcauguguugggaacagcaug

SEQ ID NO: 1089808 - RNA, 22 nt, Human
augcugugccuucucugugcca

SEQ ID NO: 1089809 - RNA, 22 nt, Human
acaggcuuacaggcugcaagua

SEQ ID NO: 1089810 - RNA, 22 nt, Human
gaaggccuaggaaggaagccuu

SEQ ID NO: 1089811 - RNA, 22 nt, Human
cagauaaaauuaauauuaccaa

SEQ ID NO: 1089812 - RNA, 22 nt, Human
cacagaguggaggcuuggccug

SEQ ID NO: 1089813 - RNA, 22 nt, Human
acugccuuauaugcugugugug

SEQ ID NO: 1089814 - RNA, 22 nt, Human
uauuuuaaagugaagggucuug

SEQ ID NO: 1089815 - RNA, 22 nt, Human
ucagggacugcagagggaagcu

SEQ ID NO: 1089816 - RNA, 22 nt, Human
uuuaucuuuaggacuuugcaga

SEQ ID NO: 1089817 - RNA, 22 nt, Human
gaggcagcaggcugaggaggau

SEQ ID NO: 1089818 - RNA, 22 nt, Human
gcaaauguucuauauuugcugu

SEQ ID NO: 1089819 - RNA, 22 nt, Human
uugaaacucccuuuugucuagu

SEQ ID NO: 1089820 - RNA, 22 nt, Human
ugagcugggcugggcugagcug

SEQ ID NO: 1089821 - RNA, 22 nt, Human
ugucugugaccucuuaggcaag

SEQ ID NO: 1089822 - RNA, 22 nt, Human
agacaaguucugugggucaccu

SEQ ID NO: 1089823 - RNA, 21 nt, Human
ucacauuucucauggguaaau

SEQ ID NO: 1089824 - RNA, 22 nt, Human
gguggccucugcaggccucgac

SEQ ID NO: 1089825 - RNA, 22 nt, Human
ggcacugagcugccuuggggca

SEQ ID NO: 1089826 - RNA, 22 nt, Human
aaggccaggacaccaggggacu

SEQ ID NO: 1089827 - RNA, 22 nt, Human
uaugaagugaguuaugguugcu

SEQ ID NO: 1089828 - RNA, 22 nt, Human
ccugagagcagcuuccugcuua

SEQ ID NO: 1089829 - RNA, 22 nt, Human
aguguucauuuauucauucacu

SEQ ID NO: 1089830 - RNA, 22 nt, Human
agcagagcggggccuccggaag

SEQ ID NO: 1089831 - RNA, 22 nt, Human
aucugguuuggggauccuugug

SEQ ID NO: 1089832 - RNA, 22 nt, Human
gagcaguggucacagggaggga

SEQ ID NO: 1089833 - RNA, 22 nt, Human
ugccuguguugauuacuuuguc

SEQ ID NO: 1089834 - RNA, 22 nt, Human
uugugguuaaccgcacauuuuu

SEQ ID NO: 1089835 - RNA, 22 nt, Human
gcacacagcuagauuaccauuc

SEQ ID NO: 1089836 - RNA, 22 nt, Human
cucaaguaauuagcaacaaaua

SEQ ID NO: 1089837 - RNA, 22 nt, Human
gaaaggugccccauaggcagga

SEQ ID NO: 1089838 - RNA, 22 nt, Human
ugcuucugcaggagcuccugau

SEQ ID NO: 1089839 - RNA, 22 nt, Human
caggcagaugcugacaagaguu

SEQ ID NO: 1089840 - RNA, 22 nt, Human
ggcaggagaauggcgugaacuc

SEQ ID NO: 1089841 - RNA, 22 nt, Human
uuaugcuaguugaaauaacaca

SEQ ID NO: 1089842 - RNA, 22 nt, Human
ucuggggaccauggcaucuaaa

SEQ ID NO: 1089843 - RNA, 22 nt, Human
cuuuuuuccuaaggcaacauga

SEQ ID NO: 1089844 - RNA, 22 nt, Human
uugugcaugacugugaauagcu

SEQ ID NO: 1089845 - RNA, 22 nt, Human
cacagcuaccugcaugccugcu

SEQ ID NO: 1089846 - RNA, 22 nt, Human
gcugccuguggcccuucugggu

SEQ ID NO: 1089847 - RNA, 15 nt, Human
cacacagacagcuug

SEQ ID NO: 1089848 - RNA, 22 nt, Human
uagaggcugggaauuauuuuca

SEQ ID NO: 1089849 - RNA, 22 nt, Human
gagcugccaguguaugaauucu

SEQ ID NO: 1089850 - RNA, 22 nt, Human
ucccagagccucugccacucug

SEQ ID NO: 1089851 - RNA, 22 nt, Human
cuuacauugucucuugcugagc

SEQ ID NO: 1089852 - RNA, 22 nt, Human
ugaggggagcccgcccuggacg

SEQ ID NO: 1089853 - RNA, 22 nt, Human
ucagugucuugggcuugaaugc

SEQ ID NO: 1089854 - RNA, 22 nt, Human
uuucaucucucuaaaagacagu

SEQ ID NO: 1089855 - RNA, 22 nt, Human
ccuccacaggagcugcagugcu

SEQ ID NO: 1089856 - RNA, 22 nt, Human
agcugugauuauccacuggaau

SEQ ID NO: 1089857 - RNA, 22 nt, Human
gaaaucuacuuuggguuagaca

SEQ ID NO: 1089858 - RNA, 22 nt, Human
caguuuuacccaagcuuauuuu

SEQ ID NO: 1089859 - RNA, 22 nt, Human
uggcagagugcagaagaggcau

SEQ ID NO: 1089860 - RNA, 22 nt, Human
guccuucauggaguuacagccu

SEQ ID NO: 1089861 - RNA, 22 nt, Human
ugaagaauguugcagugagcau

SEQ ID NO: 1089862 - RNA, 22 nt, Human
ugggcucagucugcaccugcgg

SEQ ID NO: 1089863 - RNA, 22 nt, Human
aaaaggaucagauuuugagcag

SEQ ID NO: 1089864 - RNA, 22 nt, Human
ccagagucaggagcucauguga

SEQ ID NO: 1089865 - RNA, 22 nt, Human
ggaggugggcuaaggacucucu

SEQ ID NO: 1089866 - RNA, 22 nt, Human
agcucagguagacucagcaucu

SEQ ID NO: 1089867 - RNA, 22 nt, Human
uuacaguacagaaaauaacaga

SEQ ID NO: 1089868 - RNA, 17 nt, Human
gcuguaguuugauaaga

SEQ ID NO: 1089869 - RNA, 22 nt, Human
cuagagaaaggcaguggagcaa

SEQ ID NO: 1089870 - RNA, 22 nt, Human
ugauuuguuuagugccaaguuu

SEQ ID NO: 1089871 - RNA, 22 nt, Human
aagcccagaugagaucccugga

SEQ ID NO: 1089872 - RNA, 20 nt, Human
cugcccagccacugagggau

SEQ ID NO: 1089873 - RNA, 20 nt, Human
ccaggccugggccugcucua

SEQ ID NO: 1089874 - RNA, 22 nt, Human
cucugggcacauuuuccaggac

SEQ ID NO: 1089875 - RNA, 22 nt, Human
ugagaagcagcuuacagguguc

SEQ ID NO: 1089876 - RNA, 22 nt, Human
uuucacagauguuuuggagucu

SEQ ID NO: 1089877 - RNA, 22 nt, Human
ucugucugacaggguaugaacu

SEQ ID NO: 1089878 - RNA, 22 nt, Human
augaaaacggaccagagcuauu

SEQ ID NO: 1089879 - RNA, 22 nt, Human
aacacucuacgugcagcuccua

SEQ ID NO: 1089880 - RNA, 21 nt, Human
ucauaaacuaguaucaaaguu

SEQ ID NO: 1089881 - RNA, 22 nt, Human
cccaggaagcccagaauucugg

SEQ ID NO: 1089882 - RNA, 22 nt, Human
uaacaguauagccuaacauuuc

SEQ ID NO: 1089883 - RNA, 22 nt, Human
ugaguaggugguuaagcaugga

SEQ ID NO: 1089884 - RNA, 22 nt, Human
guccucugggcagcugccccac

SEQ ID NO: 1089885 - RNA, 22 nt, Human
uucuggaguauuccuggcagcc

SEQ ID NO: 1089886 - RNA, 22 nt, Human
ugaagugaccuggggcagugua

SEQ ID NO: 1089887 - RNA, 22 nt, Human
aagacuuucucccaaauccuca

SEQ ID NO: 1089888 - RNA, 22 nt, Human
uuguucaugguuguaaguuuga

SEQ ID NO: 1089889 - RNA, 21 nt, Human
uacacaaagcgugguccagag

SEQ ID NO: 1089890 - RNA, 22 nt, Human
aucuuugugaaucucaacuugg

SEQ ID NO: 1089891 - RNA, 22 nt, Human
gaggcaggcagauugcuugagg

SEQ ID NO: 1089892 - RNA, 22 nt, Human
aguggcuggaauugcaggugcg

SEQ ID NO: 1089893 - RNA, 22 nt, Human
caaaagcaaagucccugaaugu

SEQ ID NO: 1089894 - RNA, 22 nt, Human
ccugggaggcggagguugcagg

SEQ ID NO: 1089895 - RNA, 22 nt, Human
ucagugccaguuugcuccuucu

SEQ ID NO: 1089896 - RNA, 22 nt, Human
gcuggagcugcagccugggccu

SEQ ID NO: 1089897 - RNA, 22 nt, Human
agacauuuccuagacaucaaug

SEQ ID NO: 1089898 - RNA, 22 nt, Human
gggcccuggcuuuccuguucuu

SEQ ID NO: 1089899 - RNA, 22 nt, Human
uuccagaaaucuuucagcucaa

SEQ ID NO: 1089900 - RNA, 22 nt, Human
uucaacacaggaacaugauaua

SEQ ID NO: 1089901 - RNA, 22 nt, Human
auucuucaucagagaugcacua

SEQ ID NO: 1089902 - RNA, 22 nt, Human
ccugccaggcuuugggcuucug

SEQ ID NO: 1089903 - RNA, 23 nt, Human
caaauucuaggcaggcucuuuug

SEQ ID NO: 1089904 - RNA, 22 nt, Human
gaguucaauuuccagcuguucu

SEQ ID NO: 1089905 - RNA, 22 nt, Human
gacacuucaccuuucccagccu

SEQ ID NO: 1089906 - RNA, 22 nt, Human
gccaggcagccacccucugcga

SEQ ID NO: 1089907 - RNA, 22 nt, Human
acaguagauggcucagagacag

SEQ ID NO: 1089908 - RNA, 22 nt, Human
gcugccugaaauguugccuagc

SEQ ID NO: 1089909 - RNA, 22 nt, Human
aagggaaauggccaggcagaga

SEQ ID NO: 1089910 - RNA, 22 nt, Human
ucacagaaguguguuucaggag

SEQ ID NO: 1089911 - RNA, 22 nt, Human
ucagagaggcaauacuguuuaa

SEQ ID NO: 1089912 - RNA, 22 nt, Human
uuuuuccuuagggguuacucac

SEQ ID NO: 1089913 - RNA, 22 nt, Human
ucagacagaaggacuauuugaa

SEQ ID NO: 1089914 - RNA, 22 nt, Human
uuccucagccagcacuuagggg

SEQ ID NO: 1089915 - RNA, 22 nt, Human
uguccucuaauuggccucuugc

SEQ ID NO: 1089916 - RNA, 22 nt, Human
agggagguaggagcuucuagcu

SEQ ID NO: 1089917 - RNA, 21 nt, Human
ggccugaguauaggacaggcc

SEQ ID NO: 1089918 - RNA, 22 nt, Human
uugaaaggugcugugugcugau

SEQ ID NO: 1089919 - RNA, 22 nt, Human
cauuuaaagguuguggguaaaa

SEQ ID NO: 1089920 - RNA, 22 nt, Human
cccagucauccugcaggugaaa

SEQ ID NO: 1089921 - RNA, 22 nt, Human
ccacagaagauggggagagugg

SEQ ID NO: 1089922 - RNA, 22 nt, Human
ugccugugguuccaguuuuuuc

SEQ ID NO: 1089923 - RNA, 21 nt, Human
auucuaaccaggagaggcuga

SEQ ID NO: 1089924 - RNA, 22 nt, Human
cccccaaggccaggcugagacc

SEQ ID NO: 1089925 - RNA, 22 nt, Human
accaucuuaaggggacuucuua

SEQ ID NO: 1089926 - RNA, 22 nt, Human
aagcaggaagcucagguccuug

SEQ ID NO: 1089927 - RNA, 22 nt, Human
aaauuuaaggaggugcucacuu

SEQ ID NO: 1089928 - RNA, 22 nt, Human
agugaccaacaaugcugagaag

SEQ ID NO: 1089929 - RNA, 22 nt, Human
aaauuacagaucaccaaugcau

SEQ ID NO: 1089930 - RNA, 22 nt, Human
ccucucaucauuaucgcuuugu

SEQ ID NO: 1089931 - RNA, 22 nt, Human
cuggaggagaacuugaggaagg

SEQ ID NO: 1089932 - RNA, 22 nt, Human
aggccugucuggggcucagcca

SEQ ID NO: 1089933 - RNA, 22 nt, Human
ucuuuucaucauuuaauaggua

SEQ ID NO: 1089934 - RNA, 22 nt, Human
caguagaauuauuauaaaacau

SEQ ID NO: 1089935 - RNA, 22 nt, Human
caggggcucugggugaugugag

SEQ ID NO: 1089936 - RNA, 22 nt, Human
uuccaaagaaauugaccaagac

SEQ ID NO: 1089937 - RNA, 22 nt, Human
uuuauuagugcuuguaucacug

SEQ ID NO: 1089938 - RNA, 22 nt, Human
aaauacuggcaagugcuaauuc

SEQ ID NO: 1089939 - RNA, 22 nt, Human
gcaggcuggucugaccaucccu

SEQ ID NO: 1089940 - RNA, 22 nt, Human
aacauguaaccagcauucaucu

SEQ ID NO: 1089941 - RNA, 21 nt, Human
agauuauaaagaaccuucuua

SEQ ID NO: 1089942 - RNA, 22 nt, Human
ucuggagugaaugaaguagugu

SEQ ID NO: 1089943 - RNA, 22 nt, Human
ugcugcuguauccuuaguguca

SEQ ID NO: 1089944 - RNA, 22 nt, Human
ucuuugaacucuguguauuaac

SEQ ID NO: 1089945 - RNA, 22 nt, Human
ugcugaggucaccuugcugcua

SEQ ID NO: 1089946 - RNA, 22 nt, Human
uagcagcugugaguaaaagcca

SEQ ID NO: 1089947 - RNA, 20 nt, Human
cugcuguguuauuguagaac

SEQ ID NO: 1089948 - RNA, 22 nt, Human
ugcacacacaugcagagggaga

SEQ ID NO: 1089949 - RNA, 22 nt, Human
aucuagaaguggcaugaauuac

SEQ ID NO: 1089950 - RNA, 17 nt, Human
aggcugcugggccaggg

SEQ ID NO: 1089951 - RNA, 22 nt, Human
aguacauauaguaauuuagcca

SEQ ID NO: 1089952 - RNA, 22 nt, Human
gcugccuuuugcuccucccacc

SEQ ID NO: 1089953 - RNA, 18 nt, Human
aauuucuuugacaacuua

SEQ ID NO: 1089954 - RNA, 22 nt, Human
acauguuagaaaugcagaaucu

SEQ ID NO: 1089955 - RNA, 22 nt, Human
uagagucagagaaucauuacag

SEQ ID NO: 1089956 - RNA, 19 nt, Human
ucaaggcucccugagggau

SEQ ID NO: 1089957 - RNA, 22 nt, Human
aagagcaacuuggaaacacuca

SEQ ID NO: 1089958 - RNA, 22 nt, Human
auugacaaucuacuauguucug

SEQ ID NO: 1089959 - RNA, 22 nt, Human
uccagccuaggggaacagcugc

SEQ ID NO: 1089960 - RNA, 22 nt, Human
ccacaucauggauacaguuaug

SEQ ID NO: 1089961 - RNA, 22 nt, Human
uauguacauaacaugaaaugca

SEQ ID NO: 1089962 - RNA, 22 nt, Human
ugugggcuguacugagggcagg

SEQ ID NO: 1089963 - RNA, 22 nt, Human
ucugugacugauggaggcuuuu

SEQ ID NO: 1089964 - RNA, 21 nt, Human
ucaccuggcuucugaccuggc

SEQ ID NO: 1089965 - RNA, 21 nt, Human
uguauacacacauauauguac

SEQ ID NO: 1089966 - RNA, 22 nt, Human
gggagggaggugaugcuuggcu

SEQ ID NO: 1089967 - RNA, 22 nt, Human
gugauuuugagaccuauauagu

SEQ ID NO: 1089968 - RNA, 21 nt, Human
gagacagacuuucguccccug

SEQ ID NO: 1089969 - RNA, 22 nt, Human
ugaggcuccagccaggccagca

SEQ ID NO: 1089970 - RNA, 22 nt, Human
aauuucaauuacuuuugcacca

SEQ ID NO: 1089971 - RNA, 22 nt, Human
gagcaggauggcacuucuguga

SEQ ID NO: 1089972 - RNA, 19 nt, Human
caaaguaccuggcacagug

SEQ ID NO: 1089973 - RNA, 19 nt, Human
uucaacaugcugaggcagc

SEQ ID NO: 1089974 - RNA, 22 nt, Human
ggcugaaguguaguggcucacu

SEQ ID NO: 1089975 - RNA, 22 nt, Human
ggagacacauauacagaaagag

SEQ ID NO: 1089976 - RNA, 22 nt, Human
caguuucagaaucaaaacauca

SEQ ID NO: 1089977 - RNA, 22 nt, Human
ugcuuucaugaagucuauagag

SEQ ID NO: 1089978 - RNA, 22 nt, Human
gcugccugcccugggucaucug

SEQ ID NO: 1089979 - RNA, 22 nt, Human
ucugcccacagccuccugucca

SEQ ID NO: 1089980 - RNA, 22 nt, Human
acucuucacacuugucuccagg

SEQ ID NO: 1089981 - RNA, 20 nt, Human
augauuuugcacuaacuuca

SEQ ID NO: 1089982 - RNA, 22 nt, Human
uauucaugggaggucacaacuu

SEQ ID NO: 1089983 - RNA, 22 nt, Human
gaggcacauauauacagagccc

SEQ ID NO: 1089984 - RNA, 22 nt, Human
ugggcacaggggaauggaugaa

SEQ ID NO: 1089985 - RNA, 22 nt, Human
aacucuauuuacccuacuaaac

SEQ ID NO: 1089986 - RNA, 22 nt, Human
gggcugccaagccugccugccu

SEQ ID NO: 1089987 - RNA, 22 nt, Human
aaugugaacuuugucauguaac

SEQ ID NO: 1089988 - RNA, 22 nt, Human
aagugaugcuacgacuuugaca

SEQ ID NO: 1089989 - RNA, 22 nt, Human
caacaguguugcaaucugaaaa

SEQ ID NO: 1089990 - RNA, 22 nt, Human
uuuuuguagucauuagaagagg

SEQ ID NO: 1089991 - RNA, 22 nt, Human
uccauugucuuugguccuagcc

SEQ ID NO: 1089992 - RNA, 22 nt, Human
ggaaggggccuugagcaaacug

SEQ ID NO: 1089993 - RNA, 22 nt, Human
gcucaggacuggaggagcgggg

SEQ ID NO: 1089994 - RNA, 22 nt, Human
cagaagcagugagagaugugca

SEQ ID NO: 1089995 - RNA, 20 nt, Human
ccuaggcaugcugagucucc

SEQ ID NO: 1089996 - RNA, 22 nt, Human
ucugaaaugaacucuugaacuu

SEQ ID NO: 1089997 - RNA, 22 nt, Human
cagccuucugaaugaacguacu

SEQ ID NO: 1089998 - RNA, 22 nt, Human
uuaccaaaucccgugcacauuc

SEQ ID NO: 1089999 - RNA, 22 nt, Human
uugaacaguccuaagagacccu

SEQ ID NO: 1090000 - RNA, 22 nt, Human
aaacuuaguagaguucauauua

SEQ ID NO: 1090001 - RNA, 21 nt, Human
auucaacuagaugauuauuuc

SEQ ID NO: 1090002 - RNA, 21 nt, Human
ugccagcauuaaacagucauu

SEQ ID NO: 1090003 - RNA, 22 nt, Human
ucaggguugcugugaucagucc

SEQ ID NO: 1090004 - RNA, 22 nt, Human
uugaagcauuucuuugagcuuc

SEQ ID NO: 1090005 - RNA, 22 nt, Human
agaggggcucaagcaguggucu

SEQ ID NO: 1090006 - RNA, 22 nt, Human
cagugagguagacagcuuuuuc

SEQ ID NO: 1090007 - RNA, 22 nt, Human
cagcucugcugggaggaugcag

SEQ ID NO: 1090008 - RNA, 22 nt, Human
uuuuccuacugauaaacaguua

SEQ ID NO: 1090009 - RNA, 21 nt, Human
uagaauacagguauuuuggau

SEQ ID NO: 1090010 - RNA, 21 nt, Human
caguugauagagaucuugagc

SEQ ID NO: 1090011 - RNA, 22 nt, Human
ucaguuuucaauuucaucagag

SEQ ID NO: 1090012 - RNA, 22 nt, Human
ugcaagguccaguauaacuuaa

SEQ ID NO: 1090013 - RNA, 22 nt, Human
acauucuguuuccccaaagaga

SEQ ID NO: 1090014 - RNA, 22 nt, Human
cagcugugauuccugcugucca

SEQ ID NO: 1090015 - RNA, 22 nt, Human
aacuuuacuugaaagaacaugu

SEQ ID NO: 1090016 - RNA, 19 nt, Human
uggcaggcccaggauggac

SEQ ID NO: 1090017 - RNA, 22 nt, Human
uucuuugcccauguuuccuaag

SEQ ID NO: 1090018 - RNA, 22 nt, Human
uugaaggacauccuauuucuag

SEQ ID NO: 1090019 - RNA, 20 nt, Human
ucagaugggagugagccauc

SEQ ID NO: 1090020 - RNA, 22 nt, Human
ucuagaaucuaaacuauaguuu

SEQ ID NO: 1090021 - RNA, 23 nt, Human
cccaggaagccaaagaaauauag

SEQ ID NO: 1090022 - RNA, 22 nt, Human
uuccucuccucccaccagguga

SEQ ID NO: 1090023 - RNA, 22 nt, Human
gccucauuacagccaggaagca

SEQ ID NO: 1090024 - RNA, 22 nt, Human
gccgaagcugccgucugguccu

SEQ ID NO: 1090025 - RNA, 22 nt, Human
gcuuggcauugaccauuaucau

SEQ ID NO: 1090026 - RNA, 22 nt, Human
gcucugugccacaugcaguguu

SEQ ID NO: 1090027 - RNA, 22 nt, Human
ggucccugguucccucugagcu

SEQ ID NO: 1090028 - RNA, 22 nt, Human
cuaggaaucaccaagauucuag

SEQ ID NO: 1090029 - RNA, 22 nt, Human
aaagggaggggcgauaagccgg

SEQ ID NO: 1090030 - RNA, 22 nt, Human
ccagcugagaaguguaaaguga

SEQ ID NO: 1090031 - RNA, 22 nt, Human
ugcuccugccguggucgggacu

SEQ ID NO: 1090032 - RNA, 22 nt, Human
ucucuuucuauugcaccaugcu

SEQ ID NO: 1090033 - RNA, 22 nt, Human
ucauuugguccucccaacaagc

SEQ ID NO: 1090034 - RNA, 22 nt, Human
uugaaagaggcaaaguuugauc

SEQ ID NO: 1090035 - RNA, 22 nt, Human
ucuuuaaugugauuguaauuau

SEQ ID NO: 1090036 - RNA, 22 nt, Human
aggcaggaacccugugugcgcc

SEQ ID NO: 1090037 - RNA, 22 nt, Human
ucagaggguggcugggagcauc

SEQ ID NO: 1090038 - RNA, 22 nt, Human
aucaggaagaagaauguguugg

SEQ ID NO: 1090039 - RNA, 22 nt, Human
ggagccagagggaugcaguuga

SEQ ID NO: 1090040 - RNA, 22 nt, Human
uggcugaguaaguugugauaug

SEQ ID NO: 1090041 - RNA, 22 nt, Human
ucagccucucugaguccagacc

SEQ ID NO: 1090042 - RNA, 22 nt, Human
guuaaagaagaauaguuccuuu

SEQ ID NO: 1090043 - RNA, 21 nt, Human
gcaggaacaggucaugaucug

SEQ ID NO: 1090044 - RNA, 22 nt, Human
uggccuccccuaacagccucuu

SEQ ID NO: 1090045 - RNA, 22 nt, Human
auggccugggcccgcuucagau

SEQ ID NO: 1090046 - RNA, 22 nt, Human
uugcugagucucuagguaugau

SEQ ID NO: 1090047 - RNA, 18 nt, Human
cuucaguggcugcucugc

SEQ ID NO: 1090048 - RNA, 22 nt, Human
caggaaagguagucacaaugua

SEQ ID NO: 1090049 - RNA, 22 nt, Human
ggagugaguacuggaguagcug

SEQ ID NO: 1090050 - RNA, 17 nt, Human
ugggggcccuguguaga

SEQ ID NO: 1090051 - RNA, 22 nt, Human
uuauauguuucuguuuggaggc

SEQ ID NO: 1090052 - RNA, 22 nt, Human
aauauuugaacagucacugagu

SEQ ID NO: 1090053 - RNA, 22 nt, Human
cugagggcccugaagcuuggca

SEQ ID NO: 1090054 - RNA, 22 nt, Human
aaggcaguagguguuucaaacu

SEQ ID NO: 1090055 - RNA, 22 nt, Human
gccugucugcgucacgcuuauu

SEQ ID NO: 1090056 - RNA, 22 nt, Human
ucaggcacugcuuucugauaug

SEQ ID NO: 1090057 - RNA, 22 nt, Human
gggagccagcagggcauggagc

SEQ ID NO: 1090058 - RNA, 18 nt, Human
cugucaccgccaccacac

SEQ ID NO: 1090059 - RNA, 22 nt, Human
gcacauacccacugucaagcac

SEQ ID NO: 1090060 - RNA, 22 nt, Human
gcugagucuugagcacugagca

SEQ ID NO: 1090061 - RNA, 22 nt, Human
ugucaugcagguuuguuauaga

SEQ ID NO: 1090062 - RNA, 22 nt, Human
gaagcagcagcuggggacaguu

SEQ ID NO: 1090063 - RNA, 18 nt, Human
gcuggcugcacuucugcu

SEQ ID NO: 1090064 - RNA, 22 nt, Human
gggagaaguggaaaucucauua

SEQ ID NO: 1090065 - RNA, 22 nt, Human
ugcagaguaaaagcagaugcua

SEQ ID NO: 1090066 - RNA, 22 nt, Human
cacaggcuccggccuugcagcc

SEQ ID NO: 1090067 - RNA, 22 nt, Human
aagacaaugaguccugauggga

SEQ ID NO: 1090068 - RNA, 18 nt, Human
gguggccuugacuucucu

SEQ ID NO: 1090069 - RNA, 22 nt, Human
gguaacaaacuucugacuuaag

SEQ ID NO: 1090070 - RNA, 22 nt, Human
cacaugaauaaggcuuuauugu

SEQ ID NO: 1090071 - RNA, 22 nt, Human
ggcugcugcccaccccugcaug

SEQ ID NO: 1090072 - RNA, 22 nt, Human
cauuugcuuccugggucuugaa

SEQ ID NO: 1090073 - RNA, 22 nt, Human
uguggcucucagauccuccaau

SEQ ID NO: 1090074 - RNA, 22 nt, Human
gucagcuaggcagcugugaugg

SEQ ID NO: 1090075 - RNA, 22 nt, Human
uuugacauuggcuuauucuguu

SEQ ID NO: 1090076 - RNA, 22 nt, Human
gucccacaccuugaggggucuu

SEQ ID NO: 1090077 - RNA, 22 nt, Human
uucaugaacgaacauauguaua

SEQ ID NO: 1090078 - RNA, 22 nt, Human
uggccagguugggcuuugcagc

SEQ ID NO: 1090079 - RNA, 22 nt, Human
ucccagagcucugacaccagcu

SEQ ID NO: 1090080 - RNA, 22 nt, Human
cugcagcuccucucugugcccc

SEQ ID NO: 1090081 - RNA, 22 nt, Human
gcugagacuggcagcaggaagu

SEQ ID NO: 1090082 - RNA, 23 nt, Human
ggccucuguguucugcccacaug

SEQ ID NO: 1090083 - RNA, 22 nt, Human
ccucagaugucuuaaggcacug

SEQ ID NO: 1090084 - RNA, 22 nt, Human
uugaaaaccgugggaggcugaa

SEQ ID NO: 1090085 - RNA, 22 nt, Human
aggcugagugcuccccuagaug

SEQ ID NO: 1090086 - RNA, 22 nt, Human
aggccugaaguguggagugggg

SEQ ID NO: 1090087 - RNA, 21 nt, Human
guccucagcugaugggagcug

SEQ ID NO: 1090088 - RNA, 22 nt, Human
acacagaggcuccagagauaga

SEQ ID NO: 1090089 - RNA, 22 nt, Human
gaggcucaguuauuuuagccug

SEQ ID NO: 1090090 - RNA, 22 nt, Human
ugcugccuuugggaccuggccu

SEQ ID NO: 1090091 - RNA, 19 nt, Human
ggagccuggagcacgugcc

SEQ ID NO: 1090092 - RNA, 22 nt, Human
aauguuacaguuuuaauucuga

SEQ ID NO: 1090093 - RNA, 22 nt, Human
ggacuggacucucaggcucaca

SEQ ID NO: 1090094 - RNA, 20 nt, Human
uucuggaggcuacaagucug

SEQ ID NO: 1090095 - RNA, 22 nt, Human
cauuaagauuuuuuucuacugg

SEQ ID NO: 1090096 - RNA, 22 nt, Human
guuucacagguuggagccagca

SEQ ID NO: 1090097 - RNA, 20 nt, Human
caggaaccaaagaggacucc

SEQ ID NO: 1090098 - RNA, 22 nt, Human
ugcauguuccaacuccaucacu

SEQ ID NO: 1090099 - RNA, 22 nt, Human
uuucuaaguaagauuaacuucu

SEQ ID NO: 1090100 - RNA, 22 nt, Human
uauagguacuuggaaaauaagg

SEQ ID NO: 1090101 - RNA, 22 nt, Human
aaacuucauggauaauauaaag

SEQ ID NO: 1090102 - RNA, 22 nt, Human
cugcccuguggcucugagucau

SEQ ID NO: 1090103 - RNA, 22 nt, Human
uucaaagugugaccugacaagc

SEQ ID NO: 1090104 - RNA, 22 nt, Human
cccaggaaaugaacuucugauu

SEQ ID NO: 1090105 - RNA, 22 nt, Human
augaagcuaaacccugcagcca

SEQ ID NO: 1090106 - RNA, 22 nt, Human
uaguccauuuucacacugcuga

SEQ ID NO: 1090107 - RNA, 22 nt, Human
aagaacagguucuagaaccauu

SEQ ID NO: 1090108 - RNA, 22 nt, Human
ugugugcauucacaugcaugcc

SEQ ID NO: 1090109 - RNA, 22 nt, Human
ucaggagcagcaugggugagag

SEQ ID NO: 1090110 - RNA, 22 nt, Human
aguggcuguuuauaggugggua

SEQ ID NO: 1090111 - RNA, 22 nt, Human
agccucuguagaaagcagugug

SEQ ID NO: 1090112 - RNA, 22 nt, Human
uacauacaagcauucaauuuua

SEQ ID NO: 1090113 - RNA, 22 nt, Human
ucauuuaauugguuuugcucgu

SEQ ID NO: 1090114 - RNA, 22 nt, Human
cuggcagcuuccuuugcaucug

SEQ ID NO: 1090115 - RNA, 22 nt, Human
cacagcuuaugccacugauugg

SEQ ID NO: 1090116 - RNA, 23 nt, Human
uggcugagcccacuaucuuggcc

SEQ ID NO: 1090117 - RNA, 22 nt, Human
agugacaaggugguaaugaagc

SEQ ID NO: 1090118 - RNA, 22 nt, Human
cugggccuuugggaguucggug

SEQ ID NO: 1090119 - RNA, 22 nt, Human
caaggccacguucugcaugcgg

SEQ ID NO: 1090120 - RNA, 21 nt, Human
augcacaaaaagacucuuucu

SEQ ID NO: 1090121 - RNA, 22 nt, Human
ggaggccacgguuuagcaccga

SEQ ID NO: 1090122 - RNA, 22 nt, Human
ugcaggcugggaagagggacaa

SEQ ID NO: 1090123 - RNA, 22 nt, Human
ugucauuuaaagcuuuccagau

SEQ ID NO: 1090124 - RNA, 22 nt, Human
ccugccuggagcugagugugga

SEQ ID NO: 1090125 - RNA, 17 nt, Human
ggccugcaagaacgaga

SEQ ID NO: 1090126 - RNA, 22 nt, Human
acagacauauuuggcccauagc

SEQ ID NO: 1090127 - RNA, 22 nt, Human
ucauugucuugauaugauuguc

SEQ ID NO: 1090128 - RNA, 22 nt, Human
uuuuagaaggaaugcuauggug

SEQ ID NO: 1090129 - RNA, 22 nt, Human
agagcccucuucacugccccuu

SEQ ID NO: 1090130 - RNA, 23 nt, Human
acuuccaguuauaggaacucuuc

SEQ ID NO: 1090131 - RNA, 22 nt, Human
ggugguggagccagcugggagu

SEQ ID NO: 1090132 - RNA, 22 nt, Human
agcccugccauucucuggagcu

SEQ ID NO: 1090133 - RNA, 22 nt, Human
gaaaucugaacaacagcuguca

SEQ ID NO: 1090134 - RNA, 22 nt, Human
cccagacuccucuggcuggugg

SEQ ID NO: 1090135 - RNA, 22 nt, Human
uggagaagcuguagguggacuc

SEQ ID NO: 1090136 - RNA, 22 nt, Human
uaugagaagguauggugacuug

SEQ ID NO: 1090137 - RNA, 22 nt, Human
uacagcuugauguuuguguguu

SEQ ID NO: 1090138 - RNA, 17 nt, Human
uucagcuacucaacaca

SEQ ID NO: 1090139 - RNA, 22 nt, Human
uuuucuuaugugcagcuauaug

SEQ ID NO: 1090140 - RNA, 22 nt, Human
gggaaauugucaacacucucaa

SEQ ID NO: 1090141 - RNA, 22 nt, Human
gaaggaagacugguuuaaaugu

SEQ ID NO: 1090142 - RNA, 22 nt, Human
gcagagccaggcuggggcaggu

SEQ ID NO: 1090143 - RNA, 22 nt, Human
agucccagugacuuggccagaa

SEQ ID NO: 1090144 - RNA, 22 nt, Human
aagagaaggauucugagccugg

SEQ ID NO: 1090145 - RNA, 22 nt, Human
acaggcucucagccaguuggca

SEQ ID NO: 1090146 - RNA, 22 nt, Human
uaagauuuuuaaaauguccuca

SEQ ID NO: 1090147 - RNA, 22 nt, Human
ugggugcaggaugagugcuggc

SEQ ID NO: 1090148 - RNA, 17 nt, Human
uggcuucccugggccac

SEQ ID NO: 1090149 - RNA, 22 nt, Human
agcaggagagcagugcgugguc

SEQ ID NO: 1090150 - RNA, 22 nt, Human
agugacugacaccuguaauccc

SEQ ID NO: 1090151 - RNA, 22 nt, Human
uaauauuucuacccugcugccu

SEQ ID NO: 1090152 - RNA, 22 nt, Human
cagcuugggucaggugccugcu

SEQ ID NO: 1090153 - RNA, 23 nt, Human
aucuaauuucuccaaaucucuac

SEQ ID NO: 1090154 - RNA, 22 nt, Human
ccuggcucucugcagauccugg

SEQ ID NO: 1090155 - RNA, 21 nt, Human
gugcugggacacagccaggcu

SEQ ID NO: 1090156 - RNA, 22 nt, Human
ggugcagaggagccagcugggg

SEQ ID NO: 1090157 - RNA, 22 nt, Human
ugagcccugaggaucuguucgg

SEQ ID NO: 1090158 - RNA, 22 nt, Human
aggggagccccugguccuggug

SEQ ID NO: 1090159 - RNA, 22 nt, Human
uaaggguucagaaugcaguggu

SEQ ID NO: 1090160 - RNA, 21 nt, Human
gcacagugccaggcacacagu

SEQ ID NO: 1090161 - RNA, 22 nt, Human
ccacagggcacagacaggaagc

SEQ ID NO: 1090162 - RNA, 22 nt, Human
uuggcagucagucuuggugcuu

SEQ ID NO: 1090163 - RNA, 22 nt, Human
uuuccuuugggagcaugaauuu

SEQ ID NO: 1090164 - RNA, 21 nt, Human
ccucuggcuugugcugugccc

SEQ ID NO: 1090165 - RNA, 22 nt, Human
ggggcagagucuggacuguugu

SEQ ID NO: 1090166 - RNA, 22 nt, Human
caggugccucaggaugagacaa

SEQ ID NO: 1090167 - RNA, 22 nt, Human
ccugccugcaccuucucugggg

SEQ ID NO: 1090168 - RNA, 22 nt, Human
ccagcucugcauguuucccuug

SEQ ID NO: 1090169 - RNA, 23 nt, Human
cugcauguccacugguguaaaug

SEQ ID NO: 1090170 - RNA, 22 nt, Human
uuuaacagguaaaguaaaugug

SEQ ID NO: 1090171 - RNA, 22 nt, Human
aaaggcauguggucaaggcuca

SEQ ID NO: 1090172 - RNA, 22 nt, Human
uugcuuugguagcagcuauaga

SEQ ID NO: 1090173 - RNA, 22 nt, Human
agucagagcaaacuggacagac

SEQ ID NO: 1090174 - RNA, 22 nt, Human
ucaggcugaaucauccuagcuu

SEQ ID NO: 1090175 - RNA, 22 nt, Human
cuggaguggccggugcuguggc

SEQ ID NO: 1090176 - RNA, 17 nt, Human
ucagagggaugagcagg

SEQ ID NO: 1090177 - RNA, 22 nt, Human
uuccucuccucacaugagucac

SEQ ID NO: 1090178 - RNA, 22 nt, Human
cagcagggaagcugugcuguuu

SEQ ID NO: 1090179 - RNA, 22 nt, Human
aauuugaaacauagucaccacu

SEQ ID NO: 1090180 - RNA, 22 nt, Human
auaguauuuaauaguuagcuca

SEQ ID NO: 1090181 - RNA, 22 nt, Human
agcuggaggauaacucacuucu

SEQ ID NO: 1090182 - RNA, 22 nt, Human
ugcagaagcugcaggucagugg

SEQ ID NO: 1090183 - RNA, 22 nt, Human
uuugcucugcuguugccaggug

SEQ ID NO: 1090184 - RNA, 22 nt, Human
ugcugucccuaagucucuucaa

SEQ ID NO: 1090185 - RNA, 22 nt, Human
uuaacaguggcuaagacugagg

SEQ ID NO: 1090186 - RNA, 22 nt, Human
aaaagagucuuaggcagucaua

SEQ ID NO: 1090187 - RNA, 22 nt, Human
uuccuucucagcccucgaggau

SEQ ID NO: 1090188 - RNA, 19 nt, Human
cuuugucagaacaugcuuc

SEQ ID NO: 1090189 - RNA, 22 nt, Human
agcaggcugagcacccaggggg

SEQ ID NO: 1090190 - RNA, 22 nt, Human
gcaagaccuaucuaguugcugu

SEQ ID NO: 1090191 - RNA, 22 nt, Human
ugcagggcacggugcgcguggg

SEQ ID NO: 1090192 - RNA, 22 nt, Human
cugaccuguaacuguaagagac

SEQ ID NO: 1090193 - RNA, 22 nt, Human
aucaggaugacuauaaggcugc

SEQ ID NO: 1090194 - RNA, 22 nt, Human
caaacuuucaguuauaacauga

SEQ ID NO: 1090195 - RNA, 22 nt, Human
ucaagaauuuuuaaugugacug

SEQ ID NO: 1090196 - RNA, 22 nt, Human
ugaacuucagugauuugcugca

SEQ ID NO: 1090197 - RNA, 22 nt, Human
auguguaugagugugcuucuuu

SEQ ID NO: 1090198 - RNA, 22 nt, Human
aaaguguugauaugugacaucc

SEQ ID NO: 1090199 - RNA, 20 nt, Human
cugcugagagccuggcuugc

SEQ ID NO: 1090200 - RNA, 22 nt, Human
gcucccacugcagcccugagcc

SEQ ID NO: 1090201 - RNA, 22 nt, Human
aggcagggucuugcuauguugc

SEQ ID NO: 1090202 - RNA, 22 nt, Human
gcugagcugaggcagggcuggg

SEQ ID NO: 1090203 - RNA, 16 nt, Human
gagggcagaggcggaa

SEQ ID NO: 1090204 - RNA, 22 nt, Human
uccaagaaguuuauguuguuuc

SEQ ID NO: 1090205 - RNA, 22 nt, Human
gcuccccauugaucugcaggcu

SEQ ID NO: 1090206 - RNA, 22 nt, Human
caggagcaaauccaaaagaauu

SEQ ID NO: 1090207 - RNA, 22 nt, Human
ucuguaaacaccauguuagagu

SEQ ID NO: 1090208 - RNA, 22 nt, Human
cacaauuuccaagucauguuau

SEQ ID NO: 1090209 - RNA, 22 nt, Human
ugggcaagucacuucugucuuu

SEQ ID NO: 1090210 - RNA, 22 nt, Human
agucucugcaugccugcugugc

SEQ ID NO: 1090211 - RNA, 22 nt, Human
ggcagggugccuggcuccuguu

SEQ ID NO: 1090212 - RNA, 22 nt, Human
agaaacuauuaugguaaacaaa

SEQ ID NO: 1090213 - RNA, 23 nt, Human
ucccaucuauugugaucaaugcc

SEQ ID NO: 1090214 - RNA, 22 nt, Human
auagggccuaaaaaguauugcu

SEQ ID NO: 1090215 - RNA, 22 nt, Human
cucucugagugagggacaagcu

SEQ ID NO: 1090216 - RNA, 22 nt, Human
gaccacacuuuggaaaucacga

SEQ ID NO: 1090217 - RNA, 21 nt, Human
agggaaagaaaaugagcuaau

SEQ ID NO: 1090218 - RNA, 20 nt, Human
ugaggcucagagagguugag

SEQ ID NO: 1090219 - RNA, 22 nt, Human
uuuccucauuuaucugcuggga

SEQ ID NO: 1090220 - RNA, 22 nt, Human
ucugauuagcuccauuugcuaa

SEQ ID NO: 1090221 - RNA, 22 nt, Human
uuucuaaguguguuucauagga

SEQ ID NO: 1090222 - RNA, 22 nt, Human
auguuuuugagauacaaacaga

SEQ ID NO: 1090223 - RNA, 22 nt, Human
auacaaagcuaaauaugguuuc

SEQ ID NO: 1090224 - RNA, 22 nt, Human
uuuauacuucauaaugucuauu

SEQ ID NO: 1090225 - RNA, 22 nt, Human
ggagguggagcuggaaguucca

SEQ ID NO: 1090226 - RNA, 21 nt, Human
augacagaugcugcagaucgu

SEQ ID NO: 1090227 - RNA, 22 nt, Human
uucuguuugccauauauaguag

SEQ ID NO: 1090228 - RNA, 22 nt, Human
gaaaaaugagcugaugucaggg

SEQ ID NO: 1090229 - RNA, 22 nt, Human
ggcugugaguuuguccuccaug

SEQ ID NO: 1090230 - RNA, 22 nt, Human
cagucucuuuauccaccaagcc

SEQ ID NO: 1090231 - RNA, 22 nt, Human
acagugaaaauaauaucuucaa

SEQ ID NO: 1090232 - RNA, 22 nt, Human
auuugucuuuggaccugugaga

SEQ ID NO: 1090233 - RNA, 22 nt, Human
cugggccucauccucagaguuu

SEQ ID NO: 1090234 - RNA, 20 nt, Human
ucauccaggacaggaguggc

SEQ ID NO: 1090235 - RNA, 23 nt, Human
gcccaugcuguugggcccgagca

SEQ ID NO: 1090236 - RNA, 22 nt, Human
cauuugcuggggucuugggagu

SEQ ID NO: 1090237 - RNA, 22 nt, Human
ggaugcaggacggcauggaugu

SEQ ID NO: 1090238 - RNA, 22 nt, Human
gaaauacaggaaugccacacag

SEQ ID NO: 1090239 - RNA, 22 nt, Human
agcagcauucucugguaugggg

SEQ ID NO: 1090240 - RNA, 22 nt, Human
uccaggccaauguagcaggccc

SEQ ID NO: 1090241 - RNA, 22 nt, Human
ucucccacuggccuuguaugau

SEQ ID NO: 1090242 - RNA, 21 nt, Human
cacacagugaucuauccacau

SEQ ID NO: 1090243 - RNA, 22 nt, Human
uggugcaaaacuaauugcgguu

SEQ ID NO: 1090244 - RNA, 22 nt, Human
aguacaauuuaaugaagauagc

SEQ ID NO: 1090245 - RNA, 22 nt, Human
caauauauaggaacaacuuagg

SEQ ID NO: 1090246 - RNA, 22 nt, Human
augcugugcuggcuaaccaugg

SEQ ID NO: 1090247 - RNA, 22 nt, Human
guccaagucuuccuucccaaac

SEQ ID NO: 1090248 - RNA, 22 nt, Human
aauguguuuaguuaaugaguug

SEQ ID NO: 1090249 - RNA, 19 nt, Human
ggccccucucacaggaguu

SEQ ID NO: 1090250 - RNA, 21 nt, Human
acaguuuuaaggagcacaugg

SEQ ID NO: 1090251 - RNA, 22 nt, Human
uuugaguuuuaccuguauuacu

SEQ ID NO: 1090252 - RNA, 22 nt, Human
cuucacaggcaagucuguuuuu

SEQ ID NO: 1090253 - RNA, 22 nt, Human
uccuucagcugcuaggaaauga

SEQ ID NO: 1090254 - RNA, 22 nt, Human
agcaggagacauggggguggug

SEQ ID NO: 1090255 - RNA, 18 nt, Human
ugggauggagaguaacug

SEQ ID NO: 1090256 - RNA, 22 nt, Human
aaggcccuggcaggaagcagga

SEQ ID NO: 1090257 - RNA, 22 nt, Human
gccagggaacccaagggccuca

SEQ ID NO: 1090258 - RNA, 22 nt, Human
auuggaaauacaguagaaaaau

SEQ ID NO: 1090259 - RNA, 23 nt, Human
aaauaugucugagggcaaagaau

SEQ ID NO: 1090260 - RNA, 22 nt, Human
ucuauauuccagauacagauua

SEQ ID NO: 1090261 - RNA, 22 nt, Human
ucaggaugguccuuuaugagaa

SEQ ID NO: 1090262 - RNA, 22 nt, Human
ugucauuuuagugcaucacuca

SEQ ID NO: 1090263 - RNA, 22 nt, Human
uguggcaggaagagcuucugag

SEQ ID NO: 1090264 - RNA, 22 nt, Human
uagcagaagaacaacaugaucu

SEQ ID NO: 1090265 - RNA, 22 nt, Human
uggcucugggcaccguguccac

SEQ ID NO: 1090266 - RNA, 22 nt, Human
uagguagcuuuggcguuucuug

SEQ ID NO: 1090267 - RNA, 22 nt, Human
uagcagcauccuguggugaugg

SEQ ID NO: 1090268 - RNA, 22 nt, Human
uggcugggccgggccuugugcc

SEQ ID NO: 1090269 - RNA, 22 nt, Human
auuuucagugaucauagcacac

SEQ ID NO: 1090270 - RNA, 22 nt, Human
cuucuggguguggagugaggac

SEQ ID NO: 1090271 - RNA, 22 nt, Human
gcagcuggacccacacggcuua

SEQ ID NO: 1090272 - RNA, 22 nt, Human
cugggaguugacgaggcuugua

SEQ ID NO: 1090273 - RNA, 22 nt, Human
ugcaggcuggaggagggacuaa

SEQ ID NO: 1090274 - RNA, 22 nt, Human
gacccagcuuaagucacauguu

SEQ ID NO: 1090275 - RNA, 22 nt, Human
ggcugagcacuuuaggcaggag

SEQ ID NO: 1090276 - RNA, 22 nt, Human
ugugaagaguagacauguggug

SEQ ID NO: 1090277 - RNA, 22 nt, Human
aucaguuuaaaugggcuguugg

SEQ ID NO: 1090278 - RNA, 22 nt, Human
ucaggacagccagggugcagac

SEQ ID NO: 1090279 - RNA, 22 nt, Human
aggcagccuuuagacagucugc

SEQ ID NO: 1090280 - RNA, 22 nt, Human
cagggacaugacuggucucugu

SEQ ID NO: 1090281 - RNA, 22 nt, Human
cuucugaaaugugagcaaaauc

SEQ ID NO: 1090282 - RNA, 22 nt, Human
cuuauauuugucaacuuuacaa

SEQ ID NO: 1090283 - RNA, 21 nt, Human
uccaggccaugguggggaggc

SEQ ID NO: 1090284 - RNA, 21 nt, Human
uaguguagcugcagcagcaga

SEQ ID NO: 1090285 - RNA, 22 nt, Human
ucacaggguaucugggauggau

SEQ ID NO: 1090286 - RNA, 22 nt, Human
cucuggagggaggcugagcugg

SEQ ID NO: 1090287 - RNA, 20 nt, Human
auaauuauuuacuuuugugc

SEQ ID NO: 1090288 - RNA, 22 nt, Human
aaacaacaugguggguguguag

SEQ ID NO: 1090289 - RNA, 22 nt, Human
aaggcagauauaaagacuagag

SEQ ID NO: 1090290 - RNA, 22 nt, Human
cucaggauucucgacacucaca

SEQ ID NO: 1090291 - RNA, 22 nt, Human
gagagcugcauucucagacaca

SEQ ID NO: 1090292 - RNA, 22 nt, Human
uuaaagcaugcugcuuuuccau

SEQ ID NO: 1090293 - RNA, 22 nt, Human
uggcaggguggcaacuuuuggu

SEQ ID NO: 1090294 - RNA, 22 nt, Human
ugcccugccaagaccaaguggu

SEQ ID NO: 1090295 - RNA, 22 nt, Human
cugggcuacguguugacagcau

SEQ ID NO: 1090296 - RNA, 22 nt, Human
ucagaaaaugaaauggacucuc

SEQ ID NO: 1090297 - RNA, 22 nt, Human
gagcugaguuaccuccagauca

SEQ ID NO: 1090298 - RNA, 22 nt, Human
aucagcuauuaugugaagaaag

SEQ ID NO: 1090299 - RNA, 22 nt, Human
cccuggccagcucaugucugag

SEQ ID NO: 1090300 - RNA, 22 nt, Human
acucaggaaaaauguagugaua

SEQ ID NO: 1090301 - RNA, 22 nt, Human
cagccuccugggacacucaccg

SEQ ID NO: 1090302 - RNA, 22 nt, Human
gaugcagggcuggcaggagcuu

SEQ ID NO: 1090303 - RNA, 22 nt, Human
uucacagcuccuuuuacucaac

SEQ ID NO: 1090304 - RNA, 20 nt, Human
uuguguaggucuaaugcaua

SEQ ID NO: 1090305 - RNA, 18 nt, Human
aagaggaggagcagguug

SEQ ID NO: 1090306 - RNA, 20 nt, Human
ggagagcagggaagacagua

SEQ ID NO: 1090307 - RNA, 22 nt, Human
caugaaauugcuccuuuggugc

SEQ ID NO: 1090308 - RNA, 22 nt, Human
agcugccacagagccuggccag

SEQ ID NO: 1090309 - RNA, 22 nt, Human
gggcagcugcagggauggugac

SEQ ID NO: 1090310 - RNA, 22 nt, Human
gaaaucugucuuuguuugaaua

SEQ ID NO: 1090311 - RNA, 22 nt, Human
uuuaauuguuguggguacauag

SEQ ID NO: 1090312 - RNA, 22 nt, Human
ggcuucuccccuuugagucuuc

SEQ ID NO: 1090313 - RNA, 22 nt, Human
guggggcuuccuggggcaaguu

SEQ ID NO: 1090314 - RNA, 22 nt, Human
ucaagaguuggucaaauccaaa

SEQ ID NO: 1090315 - RNA, 22 nt, Human
agugucugugcuuugcagcaaa

SEQ ID NO: 1090316 - RNA, 22 nt, Human
ucuuugaaaagauauuccuccu

SEQ ID NO: 1090317 - RNA, 22 nt, Human
ucugagaggauuccugucccga

SEQ ID NO: 1090318 - RNA, 22 nt, Human
uugucccauugcgaaugugagu

SEQ ID NO: 1090319 - RNA, 22 nt, Human
ucugcagaaggaaucagcugag

SEQ ID NO: 1090320 - RNA, 22 nt, Human
cccagggaaugacucuggccuu

SEQ ID NO: 1090321 - RNA, 22 nt, Human
cuggcaggaagaggaaagguca

SEQ ID NO: 1090322 - RNA, 22 nt, Human
aaaacaguuuaggcaucacagu

SEQ ID NO: 1090323 - RNA, 22 nt, Human
acaaaugugauuguuucugaaa

SEQ ID NO: 1090324 - RNA, 22 nt, Human
ggugggcacccgagacuggauc

SEQ ID NO: 1090325 - RNA, 19 nt, Human
uucauucuuucuacuuacc

SEQ ID NO: 1090326 - RNA, 19 nt, Human
agaggccucagcagcuggc

SEQ ID NO: 1090327 - RNA, 22 nt, Human
agaguucugcucuucucaguga

SEQ ID NO: 1090328 - RNA, 22 nt, Human
agcauuuaugacuaauguaaaa

SEQ ID NO: 1090329 - RNA, 22 nt, Human
gcuaucuaccacaucagccagg

SEQ ID NO: 1090330 - RNA, 22 nt, Human
ugaaaucaauugcaauguuuau

SEQ ID NO: 1090331 - RNA, 22 nt, Human
aagcagcaugauuguaauacua

SEQ ID NO: 1090332 - RNA, 22 nt, Human
uucaggaugcagagguuguagu

SEQ ID NO: 1090333 - RNA, 22 nt, Human
cgugaaaugaguugaauuauug

SEQ ID NO: 1090334 - RNA, 20 nt, Human
uacuugaauguugcagcagu

SEQ ID NO: 1090335 - RNA, 22 nt, Human
uucuccgcuaaguucucugcag

SEQ ID NO: 1090336 - RNA, 22 nt, Human
cuagucacucagcacugacaaa

SEQ ID NO: 1090337 - RNA, 22 nt, Human
aguuuuauuccaaugugcagca

SEQ ID NO: 1090338 - RNA, 22 nt, Human
gccagggcucgcggucccucgu

SEQ ID NO: 1090339 - RNA, 22 nt, Human
auggaauaauuguuucacagaa

SEQ ID NO: 1090340 - RNA, 22 nt, Human
auuuaggaauguucugcacaaa

SEQ ID NO: 1090341 - RNA, 22 nt, Human
agaugcugugaggaagcuagga

SEQ ID NO: 1090342 - RNA, 22 nt, Human
aaacagcuacuucuguauaaug

SEQ ID NO: 1090343 - RNA, 22 nt, Human
uuguaauuuguucccaagcaga

SEQ ID NO: 1090344 - RNA, 22 nt, Human
gcucaguguuucugguagaaaa

SEQ ID NO: 1090345 - RNA, 22 nt, Human
uagauggcguccauggccgcag

SEQ ID NO: 1090346 - RNA, 22 nt, Human
ugauucaguugguuuuguucag

SEQ ID NO: 1090347 - RNA, 22 nt, Human
aaacaaacauagguuugaaagu

SEQ ID NO: 1090348 - RNA, 22 nt, Human
gagccuguguuuccuguagcca

SEQ ID NO: 1090349 - RNA, 22 nt, Human
gaagcagcugccagagaugucu

SEQ ID NO: 1090350 - RNA, 22 nt, Human
cuucuggcaaaacaggcagaaa

SEQ ID NO: 1090351 - RNA, 20 nt, Human
auaaaauaacugccacaaga

SEQ ID NO: 1090352 - RNA, 22 nt, Human
agcugagagguggcaagcugua

SEQ ID NO: 1090353 - RNA, 22 nt, Human
uccaggaaucugugccuagccc

SEQ ID NO: 1090354 - RNA, 22 nt, Human
gcuggcugcacaggggcucacu

SEQ ID NO: 1090355 - RNA, 18 nt, Human
cacaggcucccagugagg

SEQ ID NO: 1090356 - RNA, 22 nt, Human
ugagguguguccccagggaggu

SEQ ID NO: 1090357 - RNA, 22 nt, Human
cagcagagguuuugcuccauga

SEQ ID NO: 1090358 - RNA, 22 nt, Human
ucagagucaggaaugcuugauu

SEQ ID NO: 1090359 - RNA, 22 nt, Human
acugcccuguaacugccaggua

SEQ ID NO: 1090360 - RNA, 22 nt, Human
ucauuuguuacagccacauacc

SEQ ID NO: 1090361 - RNA, 22 nt, Human
auacagaacucucaguuguaua

SEQ ID NO: 1090362 - RNA, 22 nt, Human
uccuucagucuucugagccaua

SEQ ID NO: 1090363 - RNA, 22 nt, Human
gagucacauacuauguaauaga

SEQ ID NO: 1090364 - RNA, 22 nt, Human
cccuaagcuuucgggcugagag

SEQ ID NO: 1090365 - RNA, 22 nt, Human
ucucagagagcuguguuuuccu

SEQ ID NO: 1090366 - RNA, 22 nt, Human
guugaaagagcauggacuugaa

SEQ ID NO: 1090367 - RNA, 22 nt, Human
cuuaaaaucuggcaguuagcua

SEQ ID NO: 1090368 - RNA, 23 nt, Human
ucccagccucuucucuugcauac

SEQ ID NO: 1090369 - RNA, 22 nt, Human
uugaaaguuaucuagauucuga

SEQ ID NO: 1090370 - RNA, 22 nt, Human
uccaggcuggccucgcgugaca

SEQ ID NO: 1090371 - RNA, 22 nt, Human
aacagaauugcugcugccaaug

SEQ ID NO: 1090372 - RNA, 22 nt, Human
acucagagcagagcagccugag

SEQ ID NO: 1090373 - RNA, 22 nt, Human
gaacaauacaggcuuuauuccu

SEQ ID NO: 1090374 - RNA, 22 nt, Human
uauuuauuggacaguguugcug

SEQ ID NO: 1090375 - RNA, 22 nt, Human
uagaauguuaagaauauguaua

SEQ ID NO: 1090376 - RNA, 22 nt, Human
gcagagucagguccaaggacug

SEQ ID NO: 1090377 - RNA, 22 nt, Human
agugauggugagugagaagcuc

SEQ ID NO: 1090378 - RNA, 22 nt, Human
agccucucuguuagucacuggg

SEQ ID NO: 1090379 - RNA, 22 nt, Human
cagcaacuccuauauugaaagc

SEQ ID NO: 1090380 - RNA, 22 nt, Human
ggggauggugggaaggcaaucu

SEQ ID NO: 1090381 - RNA, 22 nt, Human
ggugcagcugcagccugggagc

SEQ ID NO: 1090382 - RNA, 22 nt, Human
caguggcaugguugacugcagu

SEQ ID NO: 1090383 - RNA, 22 nt, Human
ugugggcccuaggcaccuuguc

SEQ ID NO: 1090384 - RNA, 22 nt, Human
agcuaccuggcuuaucacuguc

SEQ ID NO: 1090385 - RNA, 22 nt, Human
uuaagauuuucuucaguauuau

SEQ ID NO: 1090386 - RNA, 22 nt, Human
aggcauuuaaagauguaagacu

SEQ ID NO: 1090387 - RNA, 22 nt, Human
ucaggauguuaauauagcauua

SEQ ID NO: 1090388 - RNA, 22 nt, Human
caugagugugccagucugauau

SEQ ID NO: 1090389 - RNA, 22 nt, Human
aauuuguuacacagcaauauaa

SEQ ID NO: 1090390 - RNA, 22 nt, Human
ccugggcucaggcuugggcagc

SEQ ID NO: 1090391 - RNA, 22 nt, Human
uagggcaguuucauguuaucuu

SEQ ID NO: 1090392 - RNA, 22 nt, Human
aaagcacuuugagacugacagg

SEQ ID NO: 1090393 - RNA, 22 nt, Human
cagggcugcuggccgugcccuc

SEQ ID NO: 1090394 - RNA, 22 nt, Human
uacauauacugagugauuugcu

SEQ ID NO: 1090395 - RNA, 22 nt, Human
uggagcagagaugguggccuuc

SEQ ID NO: 1090396 - RNA, 22 nt, Human
aaaguaauugcaguuucugcca

SEQ ID NO: 1090397 - RNA, 22 nt, Human
cuggguggcuguccagccagcc

SEQ ID NO: 1090398 - RNA, 22 nt, Human
guuuuuaucuaauagcaguuau

SEQ ID NO: 1090399 - RNA, 22 nt, Human
ccugccugcggcccgcggggag

SEQ ID NO: 1090400 - RNA, 16 nt, Human
agcagccagcacugga

SEQ ID NO: 1090401 - RNA, 22 nt, Human
gauccuugcaacucugugaggu

SEQ ID NO: 1090402 - RNA, 22 nt, Human
agggaaaggcugaugcuguggg

SEQ ID NO: 1090403 - RNA, 21 nt, Human
aucugaaaugucaaagcagau

SEQ ID NO: 1090404 - RNA, 22 nt, Human
ucauaacaggcugagaggauuu

SEQ ID NO: 1090405 - RNA, 22 nt, Human
ucagaguguggugagaugugca

SEQ ID NO: 1090406 - RNA, 22 nt, Human
ucacaguagacuucucaagagc

SEQ ID NO: 1090407 - RNA, 22 nt, Human
auauuuucacagaacuugcaaa

SEQ ID NO: 1090408 - RNA, 22 nt, Human
cuucagaggggacucaaaguca

SEQ ID NO: 1090409 - RNA, 22 nt, Human
caaguagaaggaugugauugua

SEQ ID NO: 1090410 - RNA, 22 nt, Human
ugcuuuggccacuagaauucag

SEQ ID NO: 1090411 - RNA, 21 nt, Human
ugugucacuaacuagaggcua

SEQ ID NO: 1090412 - RNA, 19 nt, Human
ugaagcaggcagagaagau

SEQ ID NO: 1090413 - RNA, 22 nt, Human
cacaauuuccuugcuucacuuu

SEQ ID NO: 1090414 - RNA, 22 nt, Human
gaacgcacuuuguaaacuguaa

SEQ ID NO: 1090415 - RNA, 22 nt, Human
gcugccugcuucaugugggaga

SEQ ID NO: 1090416 - RNA, 22 nt, Human
gaguggagcaaaagagguagau

SEQ ID NO: 1090417 - RNA, 22 nt, Human
uuucuggaacaguaauugaaga

SEQ ID NO: 1090418 - RNA, 22 nt, Human
uucuuuuuaucuucccauaaga

SEQ ID NO: 1090419 - RNA, 22 nt, Human
gcuggcucuucaguggagauag

SEQ ID NO: 1090420 - RNA, 22 nt, Human
auauauuuuuugagacagaguc

SEQ ID NO: 1090421 - RNA, 22 nt, Human
cagggccagcgucucgggcuau

SEQ ID NO: 1090422 - RNA, 22 nt, Human
ccagcuggaacggcagcccagc

SEQ ID NO: 1090423 - RNA, 22 nt, Human
agacauaagugcuaugacauug

SEQ ID NO: 1090424 - RNA, 22 nt, Human
guuuuucuagaaaucuccuccu

SEQ ID NO: 1090425 - RNA, 22 nt, Human
ucagagagccucaggcacugcc

SEQ ID NO: 1090426 - RNA, 22 nt, Human
gcagagcucuguucuuaucucc

SEQ ID NO: 1090427 - RNA, 22 nt, Human
uauuuuguauuuaugcaagaaa

SEQ ID NO: 1090428 - RNA, 19 nt, Human
cagaccuguccagccugug

SEQ ID NO: 1090429 - RNA, 22 nt, Human
acuuauuucauggaucauaaug

SEQ ID NO: 1090430 - RNA, 20 nt, Human
uuacagaaaugauguuauuu

SEQ ID NO: 1090431 - RNA, 22 nt, Human
ucuccaagcagggcugcaaggc

SEQ ID NO: 1090432 - RNA, 22 nt, Human
cacaucaagcauccaugaguuu

SEQ ID NO: 1090433 - RNA, 22 nt, Human
accagagaugucuaauaggggc

SEQ ID NO: 1090434 - RNA, 22 nt, Human
cucagagucccuucccucgugg

SEQ ID NO: 1090435 - RNA, 23 nt, Human
ggcagagagcauggcuggggccc

SEQ ID NO: 1090436 - RNA, 22 nt, Human
acuuccagcaacuuggugcuau

SEQ ID NO: 1090437 - RNA, 22 nt, Human
gcccugggauuggguggaggcu

SEQ ID NO: 1090438 - RNA, 20 nt, Human
agcuggccuguccuaggccu

SEQ ID NO: 1090439 - RNA, 22 nt, Human
agaaaucauuuuaggcuugaug

SEQ ID NO: 1090440 - RNA, 19 nt, Human
aaaggcaguggguggcgug

SEQ ID NO: 1090441 - RNA, 18 nt, Human
gaugggagcaagagaaga

SEQ ID NO: 1090442 - RNA, 22 nt, Human
ggcuucagugagcugagcucac

SEQ ID NO: 1090443 - RNA, 22 nt, Human
ucccauggucuauauagaggca

SEQ ID NO: 1090444 - RNA, 20 nt, Human
ucuuuguuaauuuuaucucc

SEQ ID NO: 1090445 - RNA, 22 nt, Human
auaaauaucacuguugucccuc

SEQ ID NO: 1090446 - RNA, 20 nt, Human
ccacaggaguccagucgacc

SEQ ID NO: 1090447 - RNA, 22 nt, Human
ucacagcaacacuggggcagac

SEQ ID NO: 1090448 - RNA, 22 nt, Human
ggcagccagagggcagcuggau

SEQ ID NO: 1090449 - RNA, 22 nt, Human
cugucagaggcucucuguugcc

SEQ ID NO: 1090450 - RNA, 18 nt, Human
gcucugcccaggcugccc

SEQ ID NO: 1090451 - RNA, 19 nt, Human
uggcagaggacaaggacuu

SEQ ID NO: 1090452 - RNA, 22 nt, Human
cuuggaggaaaggcagggagac

SEQ ID NO: 1090453 - RNA, 22 nt, Human
ccaggacaauucgucacuuucu

SEQ ID NO: 1090454 - RNA, 22 nt, Human
gggccaggucggugaaugguca

SEQ ID NO: 1090455 - RNA, 22 nt, Human
uguaugaauauguuggggaggu

SEQ ID NO: 1090456 - RNA, 22 nt, Human
gugguaauuuaauccuacacug

SEQ ID NO: 1090457 - RNA, 22 nt, Human
gccuggcaaggcccuguugacu

SEQ ID NO: 1090458 - RNA, 22 nt, Human
ugcugcaggaauucucaaggga

SEQ ID NO: 1090459 - RNA, 22 nt, Human
cucaggaggugguagaggcccu

SEQ ID NO: 1090460 - RNA, 22 nt, Human
uuucacagaaaggauaacauua

SEQ ID NO: 1090461 - RNA, 22 nt, Human
acauuguaaauaccuuuaucac

SEQ ID NO: 1090462 - RNA, 22 nt, Human
ugcaugcacuaucuagaugaug

SEQ ID NO: 1090463 - RNA, 22 nt, Human
agagugauggguugugcugacc

SEQ ID NO: 1090464 - RNA, 22 nt, Human
cuuugaauugccguuucaucug

SEQ ID NO: 1090465 - RNA, 22 nt, Human
auuucauguuucaucuaccuaa

SEQ ID NO: 1090466 - RNA, 22 nt, Human
uuucuaaaggguagauuuggcc

SEQ ID NO: 1090467 - RNA, 22 nt, Human
gcuucuggugaggccucaggaa

SEQ ID NO: 1090468 - RNA, 22 nt, Human
caucuuuaauuugugacaacua

SEQ ID NO: 1090469 - RNA, 22 nt, Human
uuucacauucucugguuaucga

SEQ ID NO: 1090470 - RNA, 22 nt, Human
agagccuugaagaucuggaaaa

SEQ ID NO: 1090471 - RNA, 22 nt, Human
guuucuuagacauaugccauga

SEQ ID NO: 1090472 - RNA, 22 nt, Human
ugaaaggugacauuucuuggau

SEQ ID NO: 1090473 - RNA, 19 nt, Human
gcgaggaagucacuguggu

SEQ ID NO: 1090474 - RNA, 22 nt, Human
agccugucugucuccaaagcug

SEQ ID NO: 1090475 - RNA, 22 nt, Human
cuuccagcugauuggcauccag

SEQ ID NO: 1090476 - RNA, 22 nt, Human
uuugucuuuccccuccucauug

SEQ ID NO: 1090477 - RNA, 22 nt, Human
ggcaauaaugacauuuuaaaaa

SEQ ID NO: 1090478 - RNA, 22 nt, Human
aagagagaacucccuucgccag

SEQ ID NO: 1090479 - RNA, 22 nt, Human
aaaguauucuugacuguuuuuc

SEQ ID NO: 1090480 - RNA, 22 nt, Human
gacaaaggaucagagguuggga

SEQ ID NO: 1090481 - RNA, 22 nt, Human
agcccaaggcuucccugcuggc

SEQ ID NO: 1090482 - RNA, 22 nt, Human
caagaugaucccugaaggcagc

SEQ ID NO: 1090483 - RNA, 22 nt, Human
cuugaaaauaagaaagacuuuc

SEQ ID NO: 1090484 - RNA, 22 nt, Human
cagugggaagggcagaggcuuu

SEQ ID NO: 1090485 - RNA, 22 nt, Human
cugauuccugauucaugcucuu

SEQ ID NO: 1090486 - RNA, 22 nt, Human
ccaggaugacccccacuuuccu

SEQ ID NO: 1090487 - RNA, 22 nt, Human
caggaaauucuuuuuaacagaa

SEQ ID NO: 1090488 - RNA, 22 nt, Human
agggccagcugaugagaaugag

SEQ ID NO: 1090489 - RNA, 21 nt, Human
acuagcuuucuggagaagugu

SEQ ID NO: 1090490 - RNA, 22 nt, Human
acagcuaaucccccuagauucu

SEQ ID NO: 1090491 - RNA, 21 nt, Human
ugugaaauagcuaugcuacau

SEQ ID NO: 1090492 - RNA, 22 nt, Human
agagccaggacugugucucacu

SEQ ID NO: 1090493 - RNA, 22 nt, Human
uuauuuguggcauaugagacga

SEQ ID NO: 1090494 - RNA, 22 nt, Human
gcaucugauccaauagauauau

SEQ ID NO: 1090495 - RNA, 22 nt, Human
uagaaggaggacuggcaguguu

SEQ ID NO: 1090496 - RNA, 22 nt, Human
acauuucacuguucacagcagg

SEQ ID NO: 1090497 - RNA, 22 nt, Human
aggcacagagaaugcccuccau

SEQ ID NO: 1090498 - RNA, 22 nt, Human
aauguuuggcuagauagaugga

SEQ ID NO: 1090499 - RNA, 22 nt, Human
cuggccagccugucgaugcccu

SEQ ID NO: 1090500 - RNA, 19 nt, Human
aucuuuagcaacuuucaaa

SEQ ID NO: 1090501 - RNA, 18 nt, Human
cugaggcccagagagggc

SEQ ID NO: 1090502 - RNA, 22 nt, Human
ucugaaauuccuuccagacuuu

SEQ ID NO: 1090503 - RNA, 19 nt, Human
ggcucagggcgcugccgcc

SEQ ID NO: 1090504 - RNA, 22 nt, Human
caaagcagacgcaguaagggua

SEQ ID NO: 1090505 - RNA, 22 nt, Human
ucauggauggccgggaggugau

SEQ ID NO: 1090506 - RNA, 22 nt, Human
gaaaugucuuugacaagagagg

SEQ ID NO: 1090507 - RNA, 22 nt, Human
acuguguggaaauuugugaggg

SEQ ID NO: 1090508 - RNA, 22 nt, Human
uccagggccaagucauggaacc

SEQ ID NO: 1090509 - RNA, 22 nt, Human
gaagcagaagguuuggacgugc

SEQ ID NO: 1090510 - RNA, 22 nt, Human
uaauguuugagauguuggauuu

SEQ ID NO: 1090511 - RNA, 22 nt, Human
ugcaucuguucagagcugucga

SEQ ID NO: 1090512 - RNA, 22 nt, Human
cuaagaaaauagaagcaugcua

SEQ ID NO: 1090513 - RNA, 22 nt, Human
uggcagagcuggcugcggauga

SEQ ID NO: 1090514 - RNA, 22 nt, Human
acagagucucaaaccuacaaag

SEQ ID NO: 1090515 - RNA, 22 nt, Human
acagaauugaagcugaguaaau

SEQ ID NO: 1090516 - RNA, 21 nt, Human
auggagggaccagggaagcag

SEQ ID NO: 1090517 - RNA, 22 nt, Human
ccagcccuccuccaucagagga

SEQ ID NO: 1090518 - RNA, 22 nt, Human
uggagagcgugcuuagcacucu

SEQ ID NO: 1090519 - RNA, 22 nt, Human
uucuccccugacccugaugagg

SEQ ID NO: 1090520 - RNA, 22 nt, Human
ugcacacaccgugcuucacuga

SEQ ID NO: 1090521 - RNA, 22 nt, Human
agcagcucuguuuaccuggagg

SEQ ID NO: 1090522 - RNA, 22 nt, Human
agugggccaaauggaggcaagu

SEQ ID NO: 1090523 - RNA, 18 nt, Human
aucugaugcaauucaaua

SEQ ID NO: 1090524 - RNA, 22 nt, Human
cugaauaucauuuacauuugga

SEQ ID NO: 1090525 - RNA, 22 nt, Human
gagacguggccuuugccugagc

SEQ ID NO: 1090526 - RNA, 21 nt, Human
acauacauaccuuaccaccuu

SEQ ID NO: 1090527 - RNA, 22 nt, Human
uucuuuauccuauuuguaggug

SEQ ID NO: 1090528 - RNA, 22 nt, Human
aggcugaggcggguagaucacc

SEQ ID NO: 1090529 - RNA, 22 nt, Human
uuucugaacaaagccauuauca

SEQ ID NO: 1090530 - RNA, 22 nt, Human
acuuccugggcaugcagagucc

SEQ ID NO: 1090531 - RNA, 22 nt, Human
ggugcccuggaagcugcugcau

SEQ ID NO: 1090532 - RNA, 22 nt, Human
uucacaggugacuggggauaac

SEQ ID NO: 1090533 - RNA, 22 nt, Human
aagauuacuacggaacaugacc

SEQ ID NO: 1090534 - RNA, 22 nt, Human
gagcucauucauucauugccug

SEQ ID NO: 1090535 - RNA, 22 nt, Human
ugaggccaaugacccugggcag

SEQ ID NO: 1090536 - RNA, 21 nt, Human
cuccugggcuaagauauagug

SEQ ID NO: 1090537 - RNA, 22 nt, Human
ccacugccagcuuuguccuccc

SEQ ID NO: 1090538 - RNA, 22 nt, Human
uuucuacagaagauacacugcu

SEQ ID NO: 1090539 - RNA, 22 nt, Human
aaguaagucuuacauucacauu

SEQ ID NO: 1090540 - RNA, 22 nt, Human
aagcugccuugcugaggagaaa

SEQ ID NO: 1090541 - RNA, 22 nt, Human
uuuuaucugcuucauuaguuga

SEQ ID NO: 1090542 - RNA, 22 nt, Human
cugccagcacugccuccugagg

SEQ ID NO: 1090543 - RNA, 22 nt, Human
caaauguuugguggcauuuugu

SEQ ID NO: 1090544 - RNA, 22 nt, Human
uccugggcugcagggaagagca

SEQ ID NO: 1090545 - RNA, 22 nt, Human
uggaacacagugauugauagcg

SEQ ID NO: 1090546 - RNA, 22 nt, Human
aaggcacugaacuuaaauucug

SEQ ID NO: 1090547 - RNA, 22 nt, Human
aucaguuuggaacauucaggcc

SEQ ID NO: 1090548 - RNA, 22 nt, Human
uuucuuaguccuagagugauuu

SEQ ID NO: 1090549 - RNA, 22 nt, Human
auuuuauccccacuggauuaca

SEQ ID NO: 1090550 - RNA, 22 nt, Human
cagcuuggcuuccgcuuuacug

SEQ ID NO: 1090551 - RNA, 21 nt, Human
uccucugcucucauaccacaa

SEQ ID NO: 1090552 - RNA, 22 nt, Human
gcuguucuuugcaucucuggug

SEQ ID NO: 1090553 - RNA, 22 nt, Human
acuugguugcuucugaaaugac

SEQ ID NO: 1090554 - RNA, 22 nt, Human
gcagaggccuagguggaaggcc

SEQ ID NO: 1090555 - RNA, 22 nt, Human
cagagccccccuucugaucaca

SEQ ID NO: 1090556 - RNA, 21 nt, Human
cacagcaggguuccugggcuc

SEQ ID NO: 1090557 - RNA, 22 nt, Human
acuggggaguugaagcacuuuc

SEQ ID NO: 1090558 - RNA, 22 nt, Human
gcaccugggacccagaggcacc

SEQ ID NO: 1090559 - RNA, 22 nt, Human
ccaggacacugcuucacagcag

SEQ ID NO: 1090560 - RNA, 23 nt, Human
uggaagcaguuccagcacaaaua

SEQ ID NO: 1090561 - RNA, 19 nt, Human
cuuauacagauuuucucau

SEQ ID NO: 1090562 - RNA, 22 nt, Human
uguacagagacuaccauuaaua

SEQ ID NO: 1090563 - RNA, 22 nt, Human
ugcagugagaagcaguuaugau

SEQ ID NO: 1090564 - RNA, 22 nt, Human
cucaucugauaaaucacucuua

SEQ ID NO: 1090565 - RNA, 22 nt, Human
cacaggaaggccuucucacaau

SEQ ID NO: 1090566 - RNA, 22 nt, Human
cuuuccaaugucacuaugaauc

SEQ ID NO: 1090567 - RNA, 22 nt, Human
gugauuuucuccuccuagaagu

SEQ ID NO: 1090568 - RNA, 22 nt, Human
caguggaauauauaggggauuu

SEQ ID NO: 1090569 - RNA, 22 nt, Human
cagcagggcccccgggugcgcc

SEQ ID NO: 1090570 - RNA, 22 nt, Human
acugcuuacaaaaggaaagaau

SEQ ID NO: 1090571 - RNA, 22 nt, Human
gccagagcagaauagaguggcc

SEQ ID NO: 1090572 - RNA, 22 nt, Human
cagguggcuaacggccucauag

SEQ ID NO: 1090573 - RNA, 22 nt, Human
cucaggacccgguccagguggg

SEQ ID NO: 1090574 - RNA, 22 nt, Human
agaagcaguuauuuuuugcaca

SEQ ID NO: 1090575 - RNA, 22 nt, Human
auuuccaauuucauccaugucc

SEQ ID NO: 1090576 - RNA, 22 nt, Human
acagguggucuuugcuccuuuu

SEQ ID NO: 1090577 - RNA, 22 nt, Human
gagcaggaugggagcuggggcc

SEQ ID NO: 1090578 - RNA, 22 nt, Human
ccuggagugacagguguagccu

SEQ ID NO: 1090579 - RNA, 22 nt, Human
agcuuccaauuucuccaagaga

SEQ ID NO: 1090580 - RNA, 22 nt, Human
uucccagaccuguaggaucaga

SEQ ID NO: 1090581 - RNA, 22 nt, Human
gaggccucugucccgccaggga

SEQ ID NO: 1090582 - RNA, 22 nt, Human
uuacuuuguucucaagauaugu

SEQ ID NO: 1090583 - RNA, 22 nt, Human
cagcucuguucauagauggugc

SEQ ID NO: 1090584 - RNA, 22 nt, Human
aauagcauaagaugucaaauag

SEQ ID NO: 1090585 - RNA, 22 nt, Human
ggagcacuauaauagagauuuu

SEQ ID NO: 1090586 - RNA, 22 nt, Human
gcuggccauauauuuugcuguu

SEQ ID NO: 1090587 - RNA, 19 nt, Human
ugagcugccgucuucccug

SEQ ID NO: 1090588 - RNA, 22 nt, Human
aguguuuuuacaagcacucugg

SEQ ID NO: 1090589 - RNA, 22 nt, Human
gucauuguguggacauggagaa

SEQ ID NO: 1090590 - RNA, 22 nt, Human
augucuucuaagcucuaagcug

SEQ ID NO: 1090591 - RNA, 22 nt, Human
gggugggccugucuggccaugu

SEQ ID NO: 1090592 - RNA, 22 nt, Human
gcuuggaaguaggauugggaga

SEQ ID NO: 1090593 - RNA, 22 nt, Human
ugagaaaauuacuauaauuguc

SEQ ID NO: 1090594 - RNA, 23 nt, Human
ugauuuuaaaaaguaaguuauca

SEQ ID NO: 1090595 - RNA, 22 nt, Human
agaaggguagggacuuauccaa

SEQ ID NO: 1090596 - RNA, 22 nt, Human
aguguuucuggcaaaugaaagu

SEQ ID NO: 1090597 - RNA, 22 nt, Human
ucucucagaggccaggguccug

SEQ ID NO: 1090598 - RNA, 22 nt, Human
ucccaagacuauguucugugug

SEQ ID NO: 1090599 - RNA, 22 nt, Human
ggcagcugaccuagcaccaucc

SEQ ID NO: 1090600 - RNA, 22 nt, Human
auaacccucuggauaggacagg

SEQ ID NO: 1090601 - RNA, 22 nt, Human
ccuccaagcugguccucugugu

SEQ ID NO: 1090602 - RNA, 21 nt, Human
aagcaggaacuucaaagggac

SEQ ID NO: 1090603 - RNA, 22 nt, Human
uggcuccuaggauggugccugg

SEQ ID NO: 1090604 - RNA, 22 nt, Human
ucaaaacacuauuaccuuuaau

SEQ ID NO: 1090605 - RNA, 22 nt, Human
guguggcugauugacaugguca

SEQ ID NO: 1090606 - RNA, 22 nt, Human
ugggaagggaguuucuuggagu

SEQ ID NO: 1090607 - RNA, 22 nt, Human
uucuggagaucugccuauggga

SEQ ID NO: 1090608 - RNA, 22 nt, Human
cagggccauaucuugugcacca

SEQ ID NO: 1090609 - RNA, 22 nt, Human
uggggccugagguggagcugca

SEQ ID NO: 1090610 - RNA, 23 nt, Human
uacauucuguauuuuuauagagu

SEQ ID NO: 1090611 - RNA, 22 nt, Human
uuucuggacccuucugugagug

SEQ ID NO: 1090612 - RNA, 22 nt, Human
gucuguaucagaggagugaaug

SEQ ID NO: 1090613 - RNA, 20 nt, Human
ugcagagcuggcuggcuccu

SEQ ID NO: 1090614 - RNA, 22 nt, Human
aucccugcccucauggagcuua

SEQ ID NO: 1090615 - RNA, 22 nt, Human
aggcucagauucacauuugguu

SEQ ID NO: 1090616 - RNA, 22 nt, Human
gaagaacugacaaacuagauca

SEQ ID NO: 1090617 - RNA, 22 nt, Human
gcugguccacucccuggaggcu

SEQ ID NO: 1090618 - RNA, 22 nt, Human
aacaaaucuuaaaguaauucaa

SEQ ID NO: 1090619 - RNA, 19 nt, Human
ugcuuccucaccaucuccc

SEQ ID NO: 1090620 - RNA, 22 nt, Human
ugggcagacauugaguuuguuc

SEQ ID NO: 1090621 - RNA, 22 nt, Human
gauuuucauuauagcuaguuuc

SEQ ID NO: 1090622 - RNA, 22 nt, Human
aaaggcaauuucuucuuccuga

SEQ ID NO: 1090623 - RNA, 22 nt, Human
gucccugggaugcccuucuggg

SEQ ID NO: 1090624 - RNA, 22 nt, Human
ugagcccaggaguuggagaccg

SEQ ID NO: 1090625 - RNA, 22 nt, Human
uuacagaagagaaagaauucag

SEQ ID NO: 1090626 - RNA, 22 nt, Human
agcaugcacaugacuggcuuaa

SEQ ID NO: 1090627 - RNA, 22 nt, Human
agcuggcuccagaaggagucgu

SEQ ID NO: 1090628 - RNA, 22 nt, Human
uguuugacaccucaguguuucu

SEQ ID NO: 1090629 - RNA, 22 nt, Human
agauggggcugaaaguuccaau

SEQ ID NO: 1090630 - RNA, 22 nt, Human
ugaggccuuuucugucuggcua

SEQ ID NO: 1090631 - RNA, 22 nt, Human
cuguguccucccgcugcaccca

SEQ ID NO: 1090632 - RNA, 22 nt, Human
uguacaaugccagggaacacca

SEQ ID NO: 1090633 - RNA, 22 nt, Human
aguggaaggcugggaaaugcgg

SEQ ID NO: 1090634 - RNA, 22 nt, Human
cugggccugccaccaucuuagg

SEQ ID NO: 1090635 - RNA, 19 nt, Human
ccuggcugcugugggaugc

SEQ ID NO: 1090636 - RNA, 22 nt, Human
gcucaagagagaugcaguucuu

SEQ ID NO: 1090637 - RNA, 22 nt, Human
uucaagauggcugcaaauacuu

SEQ ID NO: 1090638 - RNA, 22 nt, Human
uuucaacucaugcuaaaggaag

SEQ ID NO: 1090639 - RNA, 22 nt, Human
uccugagagcagaguccaggug

SEQ ID NO: 1090640 - RNA, 22 nt, Human
agggcagauggaacuuccccga

SEQ ID NO: 1090641 - RNA, 22 nt, Human
uuugggaaacuuaggggucaga

SEQ ID NO: 1090642 - RNA, 22 nt, Human
uauggucauuuguuagugcuuu

SEQ ID NO: 1090643 - RNA, 22 nt, Human
aucuggcucacuuagucuagga

SEQ ID NO: 1090644 - RNA, 22 nt, Human
gcuuuauuuugugagggauuac

SEQ ID NO: 1090645 - RNA, 22 nt, Human
cagccugcagggcugccuguug

SEQ ID NO: 1090646 - RNA, 22 nt, Human
uaggaacacacauguguagcug

SEQ ID NO: 1090647 - RNA, 19 nt, Human
uggcugggcgugccuccgu

SEQ ID NO: 1090648 - RNA, 22 nt, Human
uaagucauuuggagccacugga

SEQ ID NO: 1090649 - RNA, 22 nt, Human
agauaauaaauguuuuagguuu

SEQ ID NO: 1090650 - RNA, 17 nt, Human
ggcugcugugcuggugc

SEQ ID NO: 1090651 - RNA, 22 nt, Human
ggccucaggguugggcccauua

SEQ ID NO: 1090652 - RNA, 22 nt, Human
ucaaaucuuugaccacuuaugu

SEQ ID NO: 1090653 - RNA, 22 nt, Human
gauacaaauucaugucugaauu

SEQ ID NO: 1090654 - RNA, 22 nt, Human
guucuccacugcagagucucuc

SEQ ID NO: 1090655 - RNA, 22 nt, Human
cagauuucuauuucaaauacau

SEQ ID NO: 1090656 - RNA, 22 nt, Human
gaggccagaaugagcugaaugc

SEQ ID NO: 1090657 - RNA, 22 nt, Human
uuugagaaggugacaaauucua

SEQ ID NO: 1090658 - RNA, 22 nt, Human
augguacuggggucccggaguu

SEQ ID NO: 1090659 - RNA, 22 nt, Human
uuuggaaugacagauaucaaua

SEQ ID NO: 1090660 - RNA, 22 nt, Human
ugaaaucugcaugcaaaguccu

SEQ ID NO: 1090661 - RNA, 22 nt, Human
ggaaggaggaugcucuggccuu

SEQ ID NO: 1090662 - RNA, 22 nt, Human
auggggcucugcggcugcuccc

SEQ ID NO: 1090663 - RNA, 22 nt, Human
uaagaaacaugauuaauggcag

SEQ ID NO: 1090664 - RNA, 22 nt, Human
ucacacagcugcucuguuuuau

SEQ ID NO: 1090665 - RNA, 17 nt, Human
ggagccaggagcccacc

SEQ ID NO: 1090666 - RNA, 22 nt, Human
cugcugcugcuaucuacccagg

SEQ ID NO: 1090667 - RNA, 20 nt, Human
agccugccagcuggcccaga

SEQ ID NO: 1090668 - RNA, 22 nt, Human
uuuagcagcaaauaaguagugc

SEQ ID NO: 1090669 - RNA, 22 nt, Human
uggcagggccugcucaucaucc

SEQ ID NO: 1090670 - RNA, 22 nt, Human
gugcauacuuuauuuuaauacu

SEQ ID NO: 1090671 - RNA, 22 nt, Human
cugagcagcaacccagagccuc

SEQ ID NO: 1090672 - RNA, 22 nt, Human
acaguacugcuguucuuguccu

SEQ ID NO: 1090673 - RNA, 22 nt, Human
auauaauuaauuuagcugccuc

SEQ ID NO: 1090674 - RNA, 22 nt, Human
gaaugauauuauuucgugcugg

SEQ ID NO: 1090675 - RNA, 20 nt, Human
ucaaagaagauucagcucaa

SEQ ID NO: 1090676 - RNA, 22 nt, Human
cauuugaauggcauuucacuuu

SEQ ID NO: 1090677 - RNA, 23 nt, Human
uucuuuguggauaaucuccagug

SEQ ID NO: 1090678 - RNA, 22 nt, Human
uggcccugagggcucggagcca

SEQ ID NO: 1090679 - RNA, 22 nt, Human
ccaggccuccugugaguggacc

SEQ ID NO: 1090680 - RNA, 22 nt, Human
aaagguaacugggguuuugcca

SEQ ID NO: 1090681 - RNA, 22 nt, Human
gggcuccaacggugagcaugga

SEQ ID NO: 1090682 - RNA, 22 nt, Human
cauccugcggggagcagagggc

SEQ ID NO: 1090683 - RNA, 22 nt, Human
ucuaagaaagauuaagaaauuu

SEQ ID NO: 1090684 - RNA, 20 nt, Human
uugcaacuguaagaagcagg

SEQ ID NO: 1090685 - RNA, 22 nt, Human
aagggcucuucuauuuauggcc

SEQ ID NO: 1090686 - RNA, 22 nt, Human
aacaaagucguugccuagaaga

SEQ ID NO: 1090687 - RNA, 22 nt, Human
cuacauuguuaucuguaagugu

SEQ ID NO: 1090688 - RNA, 22 nt, Human
acagaguacauucagagacuau

SEQ ID NO: 1090689 - RNA, 22 nt, Human
aagcccagcaucccugcaccag

SEQ ID NO: 1090690 - RNA, 22 nt, Human
augacuuuuaggagcagugcuc

SEQ ID NO: 1090691 - RNA, 22 nt, Human
cagcucugugggagcguaugug

SEQ ID NO: 1090692 - RNA, 18 nt, Human
acagacacuuaguaugag

SEQ ID NO: 1090693 - RNA, 22 nt, Human
gcugucugcaucucuagagcuu

SEQ ID NO: 1090694 - RNA, 20 nt, Human
gaguuccccauuucuccugg

SEQ ID NO: 1090695 - RNA, 22 nt, Human
uguauuaggagauuccauguuu

SEQ ID NO: 1090696 - RNA, 22 nt, Human
cugaggugagcuucccugggcu

SEQ ID NO: 1090697 - RNA, 22 nt, Human
agcccaggucuggcccagccug

SEQ ID NO: 1090698 - RNA, 18 nt, Human
ggagcugggccugguucc

SEQ ID NO: 1090699 - RNA, 22 nt, Human
cggggccuaccgcugcguggcc

SEQ ID NO: 1090700 - RNA, 22 nt, Human
ggaggggaacuaaucccgugac

SEQ ID NO: 1090701 - RNA, 22 nt, Human
ugcaagaggauuguaucaauaa

SEQ ID NO: 1090702 - RNA, 19 nt, Human
aucugccuguuaucacaua

SEQ ID NO: 1090703 - RNA, 22 nt, Human
acagacaguaaauaguguggcu

SEQ ID NO: 1090704 - RNA, 22 nt, Human
gugugccaccagucaaggugaa

SEQ ID NO: 1090705 - RNA, 22 nt, Human
acacugaaucagaaauuguugg

SEQ ID NO: 1090706 - RNA, 22 nt, Human
gggcagaggggcgcuucccucu

SEQ ID NO: 1090707 - RNA, 22 nt, Human
acaggaaagagcuaggcauagg

SEQ ID NO: 1090708 - RNA, 22 nt, Human
aggccuagaggaauggccaggg

SEQ ID NO: 1090709 - RNA, 22 nt, Human
uaagauaugguaggaaguuugg

SEQ ID NO: 1090710 - RNA, 22 nt, Human
aaaauuauagaucuagugccug

SEQ ID NO: 1090711 - RNA, 22 nt, Human
accacccucagcagagcugaaa

SEQ ID NO: 1090712 - RNA, 22 nt, Human
gggcacagcugcuacccagugc

SEQ ID NO: 1090713 - RNA, 22 nt, Human
uugcucaggcuuagagcuacua

SEQ ID NO: 1090714 - RNA, 19 nt, Human
gcuucccaccagccagccc

SEQ ID NO: 1090715 - RNA, 22 nt, Human
uggugagaugcagcaacagaca

SEQ ID NO: 1090716 - RNA, 22 nt, Human
uggcugagguuaugcugguugu

SEQ ID NO: 1090717 - RNA, 22 nt, Human
auagacauauggcuuuguuucu

SEQ ID NO: 1090718 - RNA, 19 nt, Human
cacaucagcagggcugugg

SEQ ID NO: 1090719 - RNA, 20 nt, Human
ccugcuguuuccauggggcc

SEQ ID NO: 1090720 - RNA, 22 nt, Human
agggucaacaggagucaagaug

SEQ ID NO: 1090721 - RNA, 23 nt, Human
acaaaguaauuccugcuuccaaa

SEQ ID NO: 1090722 - RNA, 22 nt, Human
ggcaggucagguccaugaccaa

SEQ ID NO: 1090723 - RNA, 22 nt, Human
cauaaaguguauaagugaagaa

SEQ ID NO: 1090724 - RNA, 22 nt, Human
agaggguggugaggccugguuc

SEQ ID NO: 1090725 - RNA, 22 nt, Human
ucuccugguauguaugcaccug

SEQ ID NO: 1090726 - RNA, 22 nt, Human
aguguuuaaacugaagugauga

SEQ ID NO: 1090727 - RNA, 22 nt, Human
ccuucaugauggaaaggguuca

SEQ ID NO: 1090728 - RNA, 22 nt, Human
gggugggagucuggcccucaaa

SEQ ID NO: 1090729 - RNA, 22 nt, Human
ugugggaaugacgaggaagagg

SEQ ID NO: 1090730 - RNA, 22 nt, Human
agcuggcccucgagagccaauu

SEQ ID NO: 1090731 - RNA, 22 nt, Human
uuuguaacaaguugaucuggua

SEQ ID NO: 1090732 - RNA, 22 nt, Human
caguuuuaaauuguuagauaau

SEQ ID NO: 1090733 - RNA, 22 nt, Human
cagggcuggcuguggcaaucuc

SEQ ID NO: 1090734 - RNA, 22 nt, Human
agggcugaccuaagcuccacuu

SEQ ID NO: 1090735 - RNA, 22 nt, Human
aagcccaguuucacacugagac

SEQ ID NO: 1090736 - RNA, 22 nt, Human
agggcuggagccacagcuggga

SEQ ID NO: 1090737 - RNA, 22 nt, Human
aucuagcaguguuauaauugga

SEQ ID NO: 1090738 - RNA, 22 nt, Human
uucugaaaacacacuuugcagc

SEQ ID NO: 1090739 - RNA, 22 nt, Human
guuggccugaauggucaagagg

SEQ ID NO: 1090740 - RNA, 22 nt, Human
acucagaggcagcugcucaccc

SEQ ID NO: 1090741 - RNA, 22 nt, Human
uuaaagcugcugaauccuauuu

SEQ ID NO: 1090742 - RNA, 22 nt, Human
cacagggcagugauuguccaca

SEQ ID NO: 1090743 - RNA, 22 nt, Human
gacagggcgcccagccuguuuc

SEQ ID NO: 1090744 - RNA, 22 nt, Human
acaucuuuguuucuuaguguau

SEQ ID NO: 1090745 - RNA, 22 nt, Human
ucauguaaguauagaaagcagu

SEQ ID NO: 1090746 - RNA, 22 nt, Human
aaaucugggucaagguggagug

SEQ ID NO: 1090747 - RNA, 22 nt, Human
cuucagcugcaguuauguuuag

SEQ ID NO: 1090748 - RNA, 22 nt, Human
cugugugugucugcagcauacu

SEQ ID NO: 1090749 - RNA, 22 nt, Human
agcacuuugugcauuucugaag

SEQ ID NO: 1090750 - RNA, 22 nt, Human
caggugggccaugaaaaaugac

SEQ ID NO: 1090751 - RNA, 22 nt, Human
cagaggcugaugugggaugggc

SEQ ID NO: 1090752 - RNA, 22 nt, Human
uuaguuaggaaacaaaguuguu

SEQ ID NO: 1090753 - RNA, 22 nt, Human
uguacuugaacuugacuguaga

SEQ ID NO: 1090754 - RNA, 22 nt, Human
acauuuaaguuaaaaccucagu

SEQ ID NO: 1090755 - RNA, 22 nt, Human
gagcucagauucuggugucaga

SEQ ID NO: 1090756 - RNA, 22 nt, Human
uaaggcuucuuggaauacugca

SEQ ID NO: 1090757 - RNA, 22 nt, Human
cuccagcuucccucagcugugg

SEQ ID NO: 1090758 - RNA, 22 nt, Human
ccagucugaggccuggugaggg

SEQ ID NO: 1090759 - RNA, 22 nt, Human
ucaauuauuuuggcuaugcuaa

SEQ ID NO: 1090760 - RNA, 22 nt, Human
ccuuuauucaauuaguccuaau

SEQ ID NO: 1090761 - RNA, 22 nt, Human
ucccagccuccugacaguuuug

SEQ ID NO: 1090762 - RNA, 22 nt, Human
acacauuucuaaauuuuuaccg

SEQ ID NO: 1090763 - RNA, 22 nt, Human
auuugguagugauugaaauuau

SEQ ID NO: 1090764 - RNA, 22 nt, Human
cagaaccaggaacugauggaga

SEQ ID NO: 1090765 - RNA, 22 nt, Human
uccaggaaacacucaagccaug

SEQ ID NO: 1090766 - RNA, 22 nt, Human
acuaaacauucuugucucucaa

SEQ ID NO: 1090767 - RNA, 22 nt, Human
ugaagccauuacuguguuaggg

SEQ ID NO: 1090768 - RNA, 22 nt, Human
auacaaauuuauagaugcauuu

SEQ ID NO: 1090769 - RNA, 22 nt, Human
agggacacacuccaguguuauu

SEQ ID NO: 1090770 - RNA, 22 nt, Human
uuccagcuaacucacaucccuu

SEQ ID NO: 1090771 - RNA, 22 nt, Human
ugaggcuggcaaggcugguauu

SEQ ID NO: 1090772 - RNA, 22 nt, Human
gcuguucugcgucccaggcugg

SEQ ID NO: 1090773 - RNA, 22 nt, Human
auuauuuuaugugcggccugau

SEQ ID NO: 1090774 - RNA, 20 nt, Human
ggggggcuucagggccugug

SEQ ID NO: 1090775 - RNA, 22 nt, Human
uuuaucuggacugugauauaaa

SEQ ID NO: 1090776 - RNA, 22 nt, Human
uuugaaaauuuaagugcuacac

SEQ ID NO: 1090777 - RNA, 22 nt, Human
auuauuaggugcucucugacaa

SEQ ID NO: 1090778 - RNA, 22 nt, Human
agauggugauagagcugggauu

SEQ ID NO: 1090779 - RNA, 20 nt, Human
cucuuuugacucuuugcaag

SEQ ID NO: 1090780 - RNA, 22 nt, Human
accaggaagaacaggcaaggca

SEQ ID NO: 1090781 - RNA, 22 nt, Human
cuucucucugcauaggcauggg

SEQ ID NO: 1090782 - RNA, 22 nt, Human
ccaaaaauuagauacacauaua

SEQ ID NO: 1090783 - RNA, 22 nt, Human
aaguacaaauuuugaagagcuu

SEQ ID NO: 1090784 - RNA, 22 nt, Human
ucccauauauguuuauauugga

SEQ ID NO: 1090785 - RNA, 22 nt, Human
acauacauaugacaacuuuccu

SEQ ID NO: 1090786 - RNA, 22 nt, Human
ucuuccugaaacccuguuccag

SEQ ID NO: 1090787 - RNA, 22 nt, Human
guugaaagaucauguggcugcc

SEQ ID NO: 1090788 - RNA, 22 nt, Human
ggccagagagccgcuguuagga

SEQ ID NO: 1090789 - RNA, 22 nt, Human
agcaucuggucaugagugagaa

SEQ ID NO: 1090790 - RNA, 22 nt, Human
agcucagcuuccucuccaugcu

SEQ ID NO: 1090791 - RNA, 22 nt, Human
ugggcuggcugaggcauucacu

SEQ ID NO: 1090792 - RNA, 22 nt, Human
ggggauggaggcgugugguccu

SEQ ID NO: 1090793 - RNA, 22 nt, Human
ucagagaaaugaaguagggauu

SEQ ID NO: 1090794 - RNA, 22 nt, Human
cugggcucaccuguggcuggca

SEQ ID NO: 1090795 - RNA, 22 nt, Human
cugguccuugacgcgugggagg

SEQ ID NO: 1090796 - RNA, 22 nt, Human
aggaggccccuccuggguugcu

SEQ ID NO: 1090797 - RNA, 21 nt, Human
gcugcaucaaucuacccaggg

SEQ ID NO: 1090798 - RNA, 22 nt, Human
gcugaaauucagauuccuaggc

SEQ ID NO: 1090799 - RNA, 22 nt, Human
uuguggcucgugagauguuagg

SEQ ID NO: 1090800 - RNA, 22 nt, Human
aggaggggcauagaaauguaau

SEQ ID NO: 1090801 - RNA, 22 nt, Human
gcugucugagaacaugguggaa

SEQ ID NO: 1090802 - RNA, 22 nt, Human
ggccagcccagugguccucucu

SEQ ID NO: 1090803 - RNA, 22 nt, Human
uacaugaacaaaauagcagaaa

SEQ ID NO: 1090804 - RNA, 22 nt, Human
uuauaucagaaggugagauuga

SEQ ID NO: 1090805 - RNA, 22 nt, Human
acaaagcacgagugccauggac

SEQ ID NO: 1090806 - RNA, 22 nt, Human
ggccucucaugcccagagccaa

SEQ ID NO: 1090807 - RNA, 22 nt, Human
uguauacauuuaacuagauaga

SEQ ID NO: 1090808 - RNA, 22 nt, Human
ccacucugauuuuggcuccacu

SEQ ID NO: 1090809 - RNA, 22 nt, Human
uuucagcugguaaaggaguagc

SEQ ID NO: 1090810 - RNA, 22 nt, Human
agcucccagagcucgagaguaa

SEQ ID NO: 1090811 - RNA, 22 nt, Human
gaacauuuggauuuguaaauuu

SEQ ID NO: 1090812 - RNA, 22 nt, Human
cagcugucuaaguugagcagga

SEQ ID NO: 1090813 - RNA, 22 nt, Human
gguuggacacuagguaggagcg

SEQ ID NO: 1090814 - RNA, 22 nt, Human
uguaaacauauguauguaugua

SEQ ID NO: 1090815 - RNA, 22 nt, Human
caaaauuagaaaugcagcuguu

SEQ ID NO: 1090816 - RNA, 22 nt, Human
uggaaagagguagaggaucugg

SEQ ID NO: 1090817 - RNA, 22 nt, Human
uaugcuuugauuuccucagcug

SEQ ID NO: 1090818 - RNA, 22 nt, Human
uuugcauuucuaaugagcuccg

SEQ ID NO: 1090819 - RNA, 22 nt, Human
uuugcauuguaauauuuaguuc

SEQ ID NO: 1090820 - RNA, 22 nt, Human
aauaugcauuaacuguguacau

SEQ ID NO: 1090821 - RNA, 22 nt, Human
caaauucucacccuguuugauu

SEQ ID NO: 1090822 - RNA, 22 nt, Human
cugggcuuugguacugugauua

SEQ ID NO: 1090823 - RNA, 22 nt, Human
cugggaaagcaagguuguggau

SEQ ID NO: 1090824 - RNA, 18 nt, Human
cagcucuucuccaguaac

SEQ ID NO: 1090825 - RNA, 22 nt, Human
agcaucugcuuaauggcuuaac

SEQ ID NO: 1090826 - RNA, 22 nt, Human
agcugggcaaaaugugagguug

SEQ ID NO: 1090827 - RNA, 22 nt, Human
gcagaggagcaaguugcuacag

SEQ ID NO: 1090828 - RNA, 22 nt, Human
ccaaaugugccuguuucaacaa

SEQ ID NO: 1090829 - RNA, 22 nt, Human
gauggggaugagaagugagcag

SEQ ID NO: 1090830 - RNA, 22 nt, Human
caggcccaucugcucccaggcu

SEQ ID NO: 1090831 - RNA, 22 nt, Human
acacuuuuguuugaagucucca

SEQ ID NO: 1090832 - RNA, 22 nt, Human
cagagcccuaguccugauggcc

SEQ ID NO: 1090833 - RNA, 22 nt, Human
ugcuggagaggaaggugggguc

SEQ ID NO: 1090834 - RNA, 22 nt, Human
cagcugccuguauuguccucau

SEQ ID NO: 1090835 - RNA, 22 nt, Human
ggugccaggcucccagcucagg

SEQ ID NO: 1090836 - RNA, 22 nt, Human
uuuccaaaguugccauaagcuu

SEQ ID NO: 1090837 - RNA, 22 nt, Human
auguucaaacuuuuuacacacc

SEQ ID NO: 1090838 - RNA, 23 nt, Human
ucggugggcguggaggccgaggc

SEQ ID NO: 1090839 - RNA, 22 nt, Human
augcaucuauucccaagggcag

SEQ ID NO: 1090840 - RNA, 22 nt, Human
aggugacugguuuaucuggcag

SEQ ID NO: 1090841 - RNA, 22 nt, Human
ugaggcagugugagauaauaaa

SEQ ID NO: 1090842 - RNA, 22 nt, Human
aucagaagaaauggaugugacu

SEQ ID NO: 1090843 - RNA, 22 nt, Human
uuuacacugugaaacagguauc

SEQ ID NO: 1090844 - RNA, 22 nt, Human
cagagguagaaggcaugcagug

SEQ ID NO: 1090845 - RNA, 22 nt, Human
ucuuuagaaacuuuucuucaug

SEQ ID NO: 1090846 - RNA, 23 nt, Human
aucaagauaauccagaugaccua

SEQ ID NO: 1090847 - RNA, 22 nt, Human
cagggccaggcugauggccugg

SEQ ID NO: 1090848 - RNA, 22 nt, Human
ccugccaggagcuggugcugca

SEQ ID NO: 1090849 - RNA, 22 nt, Human
aggauacacggggauuuaugua

SEQ ID NO: 1090850 - RNA, 22 nt, Human
ucucccagugucuggcagucag

SEQ ID NO: 1090851 - RNA, 18 nt, Human
gaaaggagagacaguagg

SEQ ID NO: 1090852 - RNA, 22 nt, Human
agaaaguuaucacaaaauugag

SEQ ID NO: 1090853 - RNA, 23 nt, Human
uuucugaaguugagauggacuuu

SEQ ID NO: 1090854 - RNA, 22 nt, Human
ugcaggcugaggcuggcucaac

SEQ ID NO: 1090855 - RNA, 22 nt, Human
aagugcaaaucuguggcugaaa

SEQ ID NO: 1090856 - RNA, 22 nt, Human
gaauacaaagcagaacucauac

SEQ ID NO: 1090857 - RNA, 22 nt, Human
uugcccugucuuaagcuggcaa

SEQ ID NO: 1090858 - RNA, 22 nt, Human
uuauuuucagcuaggaaagcca

SEQ ID NO: 1090859 - RNA, 22 nt, Human
cagcaccauuugcagccucuuu

SEQ ID NO: 1090860 - RNA, 22 nt, Human
auaauacaugguugaucuuuuc

SEQ ID NO: 1090861 - RNA, 22 nt, Human
aaacuuuaagacaguccucaag

SEQ ID NO: 1090862 - RNA, 22 nt, Human
gcagagcccuggggguauggug

SEQ ID NO: 1090863 - RNA, 22 nt, Human
uucaauuugugcuaaggcaccg

SEQ ID NO: 1090864 - RNA, 22 nt, Human
aaggagugcaugacucagagua

SEQ ID NO: 1090865 - RNA, 22 nt, Human
gggagggacacaaagaguuccc

SEQ ID NO: 1090866 - RNA, 22 nt, Human
uguggccagagguacuauuuua

SEQ ID NO: 1090867 - RNA, 22 nt, Human
uaaaugagggcugacaugauug

SEQ ID NO: 1090868 - RNA, 22 nt, Human
ccuggcaguuuugcccaggauu

SEQ ID NO: 1090869 - RNA, 22 nt, Human
gugcuaggauuacaggcauggg

SEQ ID NO: 1090870 - RNA, 22 nt, Human
aggccuggugaaugaaguaucu

SEQ ID NO: 1090871 - RNA, 22 nt, Human
ccagugccugugggcauggugc

SEQ ID NO: 1090872 - RNA, 22 nt, Human
gugucucuaucuaugccugaag

SEQ ID NO: 1090873 - RNA, 22 nt, Human
gcagggacaacugugcaccuga

SEQ ID NO: 1090874 - RNA, 22 nt, Human
cucccaggguagggagagacua

SEQ ID NO: 1090875 - RNA, 22 nt, Human
guaauuaggaauaaaaugggaa

SEQ ID NO: 1090876 - RNA, 22 nt, Human
ggcugcaggaugcccagccgug

SEQ ID NO: 1090877 - RNA, 22 nt, Human
auuugcuuguaaauguaugccu

SEQ ID NO: 1090878 - RNA, 22 nt, Human
cagaaaugugauguacacacac

SEQ ID NO: 1090879 - RNA, 22 nt, Human
cuguccugggggugguccuugc

SEQ ID NO: 1090880 - RNA, 19 nt, Human
agggcuaggcacauagggc

SEQ ID NO: 1090881 - RNA, 22 nt, Human
uucuacagacuauaacugugau

SEQ ID NO: 1090882 - RNA, 22 nt, Human
uguccacaucacucacuuguca

SEQ ID NO: 1090883 - RNA, 22 nt, Human
ggcuggccuguguggccgccac

SEQ ID NO: 1090884 - RNA, 22 nt, Human
aaacacugugggacaucuuacu

SEQ ID NO: 1090885 - RNA, 22 nt, Human
guaugaaguaagauauuguuca

SEQ ID NO: 1090886 - RNA, 22 nt, Human
ccaggaguuggagguugcagug

SEQ ID NO: 1090887 - RNA, 22 nt, Human
ucuuccucaauguaacaacccc

SEQ ID NO: 1090888 - RNA, 22 nt, Human
uugcaagggauaccauacuaag

SEQ ID NO: 1090889 - RNA, 22 nt, Human
uauuuccacccucaguaaggaa

SEQ ID NO: 1090890 - RNA, 22 nt, Human
uccucugcuggaagggcaagag

SEQ ID NO: 1090891 - RNA, 22 nt, Human
uuacaggggacauuggggacau

SEQ ID NO: 1090892 - RNA, 22 nt, Human
aggcagcuggcagcacccaggg

SEQ ID NO: 1090893 - RNA, 20 nt, Human
cugggcagguguuugaucuc

SEQ ID NO: 1090894 - RNA, 22 nt, Human
gcucuguaugagggugagagau

SEQ ID NO: 1090895 - RNA, 22 nt, Human
ccugagagcccuagccaggcgc

SEQ ID NO: 1090896 - RNA, 22 nt, Human
uagccucucuccuccacaaccu

SEQ ID NO: 1090897 - RNA, 20 nt, Human
uucuauggaccaguauauuu

SEQ ID NO: 1090898 - RNA, 22 nt, Human
guucuuaaagauucaucaagca

SEQ ID NO: 1090899 - RNA, 22 nt, Human
agaaucuaaguacacagacaga

SEQ ID NO: 1090900 - RNA, 22 nt, Human
agaaugcuccagagcugaaaga

SEQ ID NO: 1090901 - RNA, 22 nt, Human
acagaaggacuugagaaagaca

SEQ ID NO: 1090902 - RNA, 22 nt, Human
uucauauauaugcacuacguac

SEQ ID NO: 1090903 - RNA, 22 nt, Human
aggcuggcgucaggggcuguac

SEQ ID NO: 1090904 - RNA, 22 nt, Human
ugucccagacauaaguggacau

SEQ ID NO: 1090905 - RNA, 22 nt, Human
uggcuggcgccgggcuagccac

SEQ ID NO: 1090906 - RNA, 22 nt, Human
auauucaaauuacauuuacuaa

SEQ ID NO: 1090907 - RNA, 22 nt, Human
ccuuuuucaauauagaauugca

SEQ ID NO: 1090908 - RNA, 22 nt, Human
ucaccuuaacaaucugaccauc

SEQ ID NO: 1090909 - RNA, 22 nt, Human
cucaggaggaggaaguucauug

SEQ ID NO: 1090910 - RNA, 22 nt, Human
caggacaaagcccuuugagaaa

SEQ ID NO: 1090911 - RNA, 22 nt, Human
cccugugccuaguuggccuaaa

SEQ ID NO: 1090912 - RNA, 22 nt, Human
ggagcuggucagccuugagcau

SEQ ID NO: 1090913 - RNA, 22 nt, Human
ucacagaaaaguggagagccua

SEQ ID NO: 1090914 - RNA, 20 nt, Human
cacaagagaauacacacugg

SEQ ID NO: 1090915 - RNA, 22 nt, Human
auugcuguaaauuaucuuauua

SEQ ID NO: 1090916 - RNA, 22 nt, Human
cuuccuuucagaggaaggccug

SEQ ID NO: 1090917 - RNA, 20 nt, Human
acuuuacagagaagacugac

SEQ ID NO: 1090918 - RNA, 22 nt, Human
uugaaaggcacaggcaccuggg

SEQ ID NO: 1090919 - RNA, 22 nt, Human
caguuucuacgaaggucaaccc

SEQ ID NO: 1090920 - RNA, 22 nt, Human
cucagagaagauggaugaggua

SEQ ID NO: 1090921 - RNA, 22 nt, Human
gccacguugccacccgggugac

SEQ ID NO: 1090922 - RNA, 22 nt, Human
guuuacauugcuguuugugucu

SEQ ID NO: 1090923 - RNA, 22 nt, Human
uuguagauuggagaguguguga

SEQ ID NO: 1090924 - RNA, 22 nt, Human
acaaggaacaagcauguaguuu

SEQ ID NO: 1090925 - RNA, 21 nt, Human
ccacucaugacuccacucacc

SEQ ID NO: 1090926 - RNA, 22 nt, Human
ucccagcagagccagcaagccg

SEQ ID NO: 1090927 - RNA, 22 nt, Human
aggccucacauugggcuucaag

SEQ ID NO: 1090928 - RNA, 22 nt, Human
cuggccuuuaaaaugaccuuau

SEQ ID NO: 1090929 - RNA, 22 nt, Human
ccugggaggcagagguugcagu

SEQ ID NO: 1090930 - RNA, 22 nt, Human
cucucuguuaugcuuucaugaa

SEQ ID NO: 1090931 - RNA, 16 nt, Human
agccaggcugccucgg

SEQ ID NO: 1090932 - RNA, 22 nt, Human
aauguaaacagcaagagaaggg

SEQ ID NO: 1090933 - RNA, 22 nt, Human
aucagaauggagcccacauggu

SEQ ID NO: 1090934 - RNA, 22 nt, Human
agagccacugggagacagagca

SEQ ID NO: 1090935 - RNA, 22 nt, Human
acauucuaacauuguacagaua

SEQ ID NO: 1090936 - RNA, 22 nt, Human
ugaagcaggaaacuucuuguuu

SEQ ID NO: 1090937 - RNA, 22 nt, Human
guccucugacucagccuuggga

SEQ ID NO: 1090938 - RNA, 22 nt, Human
cuuugaaaggaagccacacagc

SEQ ID NO: 1090939 - RNA, 22 nt, Human
gugcugugcgcuuuuucuguau

SEQ ID NO: 1090940 - RNA, 22 nt, Human
ugauugauggaggugauuuacc

SEQ ID NO: 1090941 - RNA, 22 nt, Human
uacauguaagacaugagacucu

SEQ ID NO: 1090942 - RNA, 22 nt, Human
gcauuucaugcuccuuggaacc

SEQ ID NO: 1090943 - RNA, 22 nt, Human
cuauaucauaaaucugaagagg

SEQ ID NO: 1090944 - RNA, 22 nt, Human
cccagugccaggcacaggcagc

SEQ ID NO: 1090945 - RNA, 22 nt, Human
gcugggagugggcaagaugaga

SEQ ID NO: 1090946 - RNA, 16 nt, Human
ucacauacuuccuugc

SEQ ID NO: 1090947 - RNA, 22 nt, Human
cuuugcuacugugaauagugcc

SEQ ID NO: 1090948 - RNA, 22 nt, Human
gaagaaggugccagaggcuuac

SEQ ID NO: 1090949 - RNA, 22 nt, Human
agaauauucaucuguauucuua

SEQ ID NO: 1090950 - RNA, 22 nt, Human
gcuggcaggauagaagucuaau

SEQ ID NO: 1090951 - RNA, 22 nt, Human
ugucucugaggugagggucagc

SEQ ID NO: 1090952 - RNA, 19 nt, Human
cuccaaauacuuuucccuu

SEQ ID NO: 1090953 - RNA, 22 nt, Human
guggucaggcagugggagagaa

SEQ ID NO: 1090954 - RNA, 22 nt, Human
cagguggguacaucacagagac

SEQ ID NO: 1090955 - RNA, 17 nt, Human
gccuuccuuccuccaca

SEQ ID NO: 1090956 - RNA, 22 nt, Human
uggaaaaaacccagacucuaga

SEQ ID NO: 1090957 - RNA, 18 nt, Human
agagaugggaguuggaaa

SEQ ID NO: 1090958 - RNA, 22 nt, Human
uuugcauuucucguaaggaaac

SEQ ID NO: 1090959 - RNA, 22 nt, Human
ggagugacucacagcugggaca

SEQ ID NO: 1090960 - RNA, 22 nt, Human
uccagggaagagcagaggcuac

SEQ ID NO: 1090961 - RNA, 22 nt, Human
ggccugagcuugggcagcguau

SEQ ID NO: 1090962 - RNA, 22 nt, Human
cuuaagcaaaauauucuuucac

SEQ ID NO: 1090963 - RNA, 22 nt, Human
gccagagcugagacacgagucc

SEQ ID NO: 1090964 - RNA, 22 nt, Human
uuucugaagggcagcagacucu

SEQ ID NO: 1090965 - RNA, 22 nt, Human
uaacagaaaagaacugaguuug

SEQ ID NO: 1090966 - RNA, 23 nt, Human
uugggcuggcucucgaugccucu

SEQ ID NO: 1090967 - RNA, 22 nt, Human
ucugaggcuauguucaggcuaa

SEQ ID NO: 1090968 - RNA, 22 nt, Human
auacaucauuucccaucaaucg

SEQ ID NO: 1090969 - RNA, 22 nt, Human
caaagcaguauuggauucuuua

SEQ ID NO: 1090970 - RNA, 22 nt, Human
gccccaggugguaaaccuaaga

SEQ ID NO: 1090971 - RNA, 22 nt, Human
auuacugaggcaaaguaguuuu

SEQ ID NO: 1090972 - RNA, 22 nt, Human
augaaaugcugagaggugcuuc

SEQ ID NO: 1090973 - RNA, 22 nt, Human
ugggucuccaguucagggcagg

SEQ ID NO: 1090974 - RNA, 22 nt, Human
uccugugugcuuucuuuagguu

SEQ ID NO: 1090975 - RNA, 22 nt, Human
caagucugaccucugggugaag

SEQ ID NO: 1090976 - RNA, 22 nt, Human
gauacauuuuaucuccuaacag

SEQ ID NO: 1090977 - RNA, 22 nt, Human
acacauuuuggcuagguggaga

SEQ ID NO: 1090978 - RNA, 22 nt, Human
gaggcucaguuaugucaucagg

SEQ ID NO: 1090979 - RNA, 22 nt, Human
uaaaauugcggugaauauuucc

SEQ ID NO: 1090980 - RNA, 22 nt, Human
cagggaagagccgaugcugcag

SEQ ID NO: 1090981 - RNA, 22 nt, Human
agccuauucaucugaucuugaa

SEQ ID NO: 1090982 - RNA, 22 nt, Human
cuuucuaaauguuccuugauua

SEQ ID NO: 1090983 - RNA, 22 nt, Human
agauauuuaaaucagacaaaga

SEQ ID NO: 1090984 - RNA, 22 nt, Human
augaggcagguggaggcugcca

SEQ ID NO: 1090985 - RNA, 22 nt, Human
cuggcugcaggaugaggcugcc

SEQ ID NO: 1090986 - RNA, 22 nt, Human
uucaaguagcuaaauuagcugc

SEQ ID NO: 1090987 - RNA, 22 nt, Human
ccuggcagcgugccgagcugcg

SEQ ID NO: 1090988 - RNA, 22 nt, Human
uggcugagaccuucccaaauuc

SEQ ID NO: 1090989 - RNA, 22 nt, Human
ugaggcagaaaauagcaguuca

SEQ ID NO: 1090990 - RNA, 22 nt, Human
uguggggaggcugcagugcugc

SEQ ID NO: 1090991 - RNA, 22 nt, Human
auuguguaauuuucagcucaua

SEQ ID NO: 1090992 - RNA, 22 nt, Human
uuuagagaauuagaacaguacu

SEQ ID NO: 1090993 - RNA, 22 nt, Human
ggccucuguuuggagccaggau

SEQ ID NO: 1090994 - RNA, 22 nt, Human
gcagaggccaggccaccagcaa

SEQ ID NO: 1090995 - RNA, 19 nt, Human
ccuggcugugaagccugca

SEQ ID NO: 1090996 - RNA, 22 nt, Human
ucuuuauuuuaugcuugugcaa

SEQ ID NO: 1090997 - RNA, 22 nt, Human
uuguccuuggaugaagcuggga

SEQ ID NO: 1090998 - RNA, 22 nt, Human
ggaagagagggcugggccucaa

SEQ ID NO: 1090999 - RNA, 19 nt, Human
uguagcaguuuaaaacaac

SEQ ID NO: 1091000 - RNA, 22 nt, Human
uggcuggcuguccagcugggca

SEQ ID NO: 1091001 - RNA, 22 nt, Human
gcucugucuucagcacacagua

SEQ ID NO: 1091002 - RNA, 22 nt, Human
gggauggcuuuguggcugacuc

SEQ ID NO: 1091003 - RNA, 18 nt, Human
caggucagccuggccuca

SEQ ID NO: 1091004 - RNA, 22 nt, Human
gacuuucugagucaaagaaagg

SEQ ID NO: 1091005 - RNA, 22 nt, Human
ggaggugggauuaggaccuaaa

SEQ ID NO: 1091006 - RNA, 22 nt, Human
cuggccagacuacacaugugug

SEQ ID NO: 1091007 - RNA, 22 nt, Human
gugccugguuuggggaguguuc

SEQ ID NO: 1091008 - RNA, 22 nt, Human
agaagugccgaaaggaagacag

SEQ ID NO: 1091009 - RNA, 22 nt, Human
gcaugucaugucauguaggaau

SEQ ID NO: 1091010 - RNA, 22 nt, Human
acaguggaugacauccuuuugc

SEQ ID NO: 1091011 - RNA, 22 nt, Human
caugggcucuucuggacugcac

SEQ ID NO: 1091012 - RNA, 22 nt, Human
agcgugaaggcgggcagucggc

SEQ ID NO: 1091013 - RNA, 22 nt, Human
gcucccagcuggagccucaaca

SEQ ID NO: 1091014 - RNA, 22 nt, Human
gaggaagagcauggccaguuuc

SEQ ID NO: 1091015 - RNA, 22 nt, Human
cugagagaaucaugcugcaggu

SEQ ID NO: 1091016 - RNA, 22 nt, Human
gaggaagaauugguuauuggag

SEQ ID NO: 1091017 - RNA, 22 nt, Human
augaagcguucgagauagguag

SEQ ID NO: 1091018 - RNA, 22 nt, Human
auggagcacacgccaucacaua

SEQ ID NO: 1091019 - RNA, 22 nt, Human
gcagggugaaggucacauagaa

SEQ ID NO: 1091020 - RNA, 17 nt, Human
cagugcagagcccuuuc

SEQ ID NO: 1091021 - RNA, 22 nt, Human
acauuugaggauguuaagaaug

SEQ ID NO: 1091022 - RNA, 22 nt, Human
gccacaugucaugugcucagua

SEQ ID NO: 1091023 - RNA, 22 nt, Human
uguaaacaugcugaggcuggag

SEQ ID NO: 1091024 - RNA, 22 nt, Human
cgcagagggcaggcagugcugg

SEQ ID NO: 1091025 - RNA, 22 nt, Human
aggcugagagcaacgugucaga

SEQ ID NO: 1091026 - RNA, 22 nt, Human
caggccuccacuccacgcagac

SEQ ID NO: 1091027 - RNA, 22 nt, Human
gagcagcuggacaggccucccu

SEQ ID NO: 1091028 - RNA, 22 nt, Human
ucugccugugcuguguuuucau

SEQ ID NO: 1091029 - RNA, 22 nt, Human
ggacucuguuuuccugaucacu

SEQ ID NO: 1091030 - RNA, 22 nt, Human
acaguuaaucaaauggcauaug

SEQ ID NO: 1091031 - RNA, 22 nt, Human
guggagccaggggcuguaggua

SEQ ID NO: 1091032 - RNA, 22 nt, Human
ucugggcugcugugcagugacc

SEQ ID NO: 1091033 - RNA, 22 nt, Human
uggagcaagcuggagagaacau

SEQ ID NO: 1091034 - RNA, 22 nt, Human
ccuccaaguuugacucaggaca

SEQ ID NO: 1091035 - RNA, 22 nt, Human
ucuccuuuaagauuuccucagg

SEQ ID NO: 1091036 - RNA, 22 nt, Human
uggcugaaggaagauucuucua

SEQ ID NO: 1091037 - RNA, 18 nt, Human
gucaccuggaucagauua

SEQ ID NO: 1091038 - RNA, 22 nt, Human
gcuuccaaugcuucuaucacau

SEQ ID NO: 1091039 - RNA, 22 nt, Human
uguuacagucauuguuuucuga

SEQ ID NO: 1091040 - RNA, 22 nt, Human
cuauugaaaguguacaauucaa

SEQ ID NO: 1091041 - RNA, 22 nt, Human
acaucucaugaaugauaaauca

SEQ ID NO: 1091042 - RNA, 22 nt, Human
auauccuuuguguaggcaauuu

SEQ ID NO: 1091043 - RNA, 22 nt, Human
uacuuuggggacaauauggaau

SEQ ID NO: 1091044 - RNA, 22 nt, Human
caagauaucaaugacauaguau

SEQ ID NO: 1091045 - RNA, 22 nt, Human
acaucuguuugagaaaaagaag

SEQ ID NO: 1091046 - RNA, 22 nt, Human
uaaauuaugucacaugacucug

SEQ ID NO: 1091047 - RNA, 22 nt, Human
cuuaggaacgcucugccuagug

SEQ ID NO: 1091048 - RNA, 22 nt, Human
cagcuucccuuggcugagcaga

SEQ ID NO: 1091049 - RNA, 22 nt, Human
cagcagcagacauuugaucuuc

SEQ ID NO: 1091050 - RNA, 22 nt, Human
auucauuccaggucagucagac

SEQ ID NO: 1091051 - RNA, 22 nt, Human
gagacagagaucuugcugaguc

SEQ ID NO: 1091052 - RNA, 19 nt, Human
uucuaccuuacuguaggcu

SEQ ID NO: 1091053 - RNA, 22 nt, Human
ugcacagugaccccuggugacu

SEQ ID NO: 1091054 - RNA, 22 nt, Human
uggacagguugaguaggaggag

SEQ ID NO: 1091055 - RNA, 22 nt, Human
ggcugugaacacucuuagcauc

SEQ ID NO: 1091056 - RNA, 22 nt, Human
agccauggcgccacuagaggga

SEQ ID NO: 1091057 - RNA, 22 nt, Human
cucugggcaggaccaguggacc

SEQ ID NO: 1091058 - RNA, 22 nt, Human
gcugagguaggagguugcagug

SEQ ID NO: 1091059 - RNA, 22 nt, Human
agauggguaacuggagucugcu

SEQ ID NO: 1091060 - RNA, 22 nt, Human
cccuguacagucucuguggcac

SEQ ID NO: 1091061 - RNA, 22 nt, Human
acuucuugggacccuggcaccg

SEQ ID NO: 1091062 - RNA, 22 nt, Human
gaaaugaaacaggcuuuuaagg

SEQ ID NO: 1091063 - RNA, 22 nt, Human
uaaggcacuucaauguuuagaa

SEQ ID NO: 1091064 - RNA, 22 nt, Human
acugucuuuauuagaaucuuau

SEQ ID NO: 1091065 - RNA, 22 nt, Human
agucuuugguuauaagagacag

SEQ ID NO: 1091066 - RNA, 22 nt, Human
gcucucugggugugucuagaua

SEQ ID NO: 1091067 - RNA, 22 nt, Human
ucuuucucucuaaucaagcaca

SEQ ID NO: 1091068 - RNA, 22 nt, Human
agccacagucaaccuguccaua

SEQ ID NO: 1091069 - RNA, 22 nt, Human
uuuacauuucccucugucaguu

SEQ ID NO: 1091070 - RNA, 22 nt, Human
uuugugugguggauacugggua

SEQ ID NO: 1091071 - RNA, 22 nt, Human
auguuuaugcaaacaugugagu

SEQ ID NO: 1091072 - RNA, 22 nt, Human
aauucuagcauugugaaaauau

SEQ ID NO: 1091073 - RNA, 22 nt, Human
uuauuauugugaccugagaaug

SEQ ID NO: 1091074 - RNA, 22 nt, Human
uguaaauaauuccuaggcuuuu

SEQ ID NO: 1091075 - RNA, 18 nt, Human
uacaugcauaaaugaagc

SEQ ID NO: 1091076 - RNA, 22 nt, Human
augauuuccaguuguugcuaag

SEQ ID NO: 1091077 - RNA, 18 nt, Human
gaggauggaaggagaugc

SEQ ID NO: 1091078 - RNA, 23 nt, Human
ucuggcucuaugugacagcucuc

SEQ ID NO: 1091079 - RNA, 22 nt, Human
auauauaaccuggauaaggcuu

SEQ ID NO: 1091080 - RNA, 22 nt, Human
acuuugaaggggaacauuuuaa

SEQ ID NO: 1091081 - RNA, 16 nt, Human
gcacacacaucaauga

SEQ ID NO: 1091082 - RNA, 22 nt, Human
cuggcaugccuugggugccucu

SEQ ID NO: 1091083 - RNA, 23 nt, Human
ugauuuccagugagucaguggga

SEQ ID NO: 1091084 - RNA, 22 nt, Human
augaggcauucacagaaggcac

SEQ ID NO: 1091085 - RNA, 22 nt, Human
uuugaaaguucuucugacacua

SEQ ID NO: 1091086 - RNA, 22 nt, Human
uaugaagaaaucuuugaaaauc

SEQ ID NO: 1091087 - RNA, 22 nt, Human
cucagagucugcauuucuguca

SEQ ID NO: 1091088 - RNA, 22 nt, Human
gggaggugauuaggaccaugua

SEQ ID NO: 1091089 - RNA, 22 nt, Human
uaguaaaucucagaaaaagauc

SEQ ID NO: 1091090 - RNA, 22 nt, Human
ccaaagucugcauuuuaacaug

SEQ ID NO: 1091091 - RNA, 22 nt, Human
cagaagcacuaggaggaaacgu

SEQ ID NO: 1091092 - RNA, 22 nt, Human
cagacagguagggacagaacau

SEQ ID NO: 1091093 - RNA, 22 nt, Human
uuucuccugcuagaacaaggag

SEQ ID NO: 1091094 - RNA, 22 nt, Human
aaaucaaaagacauguguuuua

SEQ ID NO: 1091095 - RNA, 22 nt, Human
ggagcuguucaggacugcuuca

SEQ ID NO: 1091096 - RNA, 22 nt, Human
acauucuuucaccuugugucca

SEQ ID NO: 1091097 - RNA, 22 nt, Human
uugauguugcucuuaacaguau

SEQ ID NO: 1091098 - RNA, 22 nt, Human
agaauaaaauagucugaagaug

SEQ ID NO: 1091099 - RNA, 22 nt, Human
cuguccucaccuuggcaggggg

SEQ ID NO: 1091100 - RNA, 20 nt, Human
aagcaauauagugcaaaugu

SEQ ID NO: 1091101 - RNA, 21 nt, Human
cugccuugaaugguacuggga

SEQ ID NO: 1091102 - RNA, 22 nt, Human
agggccagaugaagccacaagc

SEQ ID NO: 1091103 - RNA, 22 nt, Human
agcucuggcuaagcugauaaau

SEQ ID NO: 1091104 - RNA, 22 nt, Human
uggagcagcuaagccucugaga

SEQ ID NO: 1091105 - RNA, 22 nt, Human
cuuccaaacccaggguaugggc

SEQ ID NO: 1091106 - RNA, 22 nt, Human
gcuuugccuugaacucucaugu

SEQ ID NO: 1091107 - RNA, 22 nt, Human
ugcaauaaggaguaauaguaaa

SEQ ID NO: 1091108 - RNA, 23 nt, Human
augacaaacaggacaucuugugc

SEQ ID NO: 1091109 - RNA, 22 nt, Human
ugugguggcuauucuggucuca

SEQ ID NO: 1091110 - RNA, 22 nt, Human
caauaaagaagauuuuugcaau

SEQ ID NO: 1091111 - RNA, 22 nt, Human
cccaggaagaaauucugauuug

SEQ ID NO: 1091112 - RNA, 22 nt, Human
uccauuuucuaaguaucacuua

SEQ ID NO: 1091113 - RNA, 22 nt, Human
cucuggcuucuaccuugcaguu

SEQ ID NO: 1091114 - RNA, 22 nt, Human
cagcugaacauguagagcaucu

SEQ ID NO: 1091115 - RNA, 22 nt, Human
augcuuaauacacuguuaaagg

SEQ ID NO: 1091116 - RNA, 22 nt, Human
agaaagaacguugguuaucuua

SEQ ID NO: 1091117 - RNA, 22 nt, Human
cagcagagguuggaacaguucu

SEQ ID NO: 1091118 - RNA, 19 nt, Human
cugaggcccauguaccaug

SEQ ID NO: 1091119 - RNA, 22 nt, Human
agaaaaggcuugaagagguuuu

SEQ ID NO: 1091120 - RNA, 22 nt, Human
ggcagauggaagaggcuggguc

SEQ ID NO: 1091121 - RNA, 22 nt, Human
ucuggggagugccuaaguggaa

SEQ ID NO: 1091122 - RNA, 22 nt, Human
auuuacagugugccuacuauau

SEQ ID NO: 1091123 - RNA, 22 nt, Human
augcuguggaugccuugcccca

SEQ ID NO: 1091124 - RNA, 22 nt, Human
ucauacaauucaaucucugauu

SEQ ID NO: 1091125 - RNA, 22 nt, Human
acauguuuaaguuuaaugaaaa

SEQ ID NO: 1091126 - RNA, 22 nt, Human
cacccagcagcacuuaagacua

SEQ ID NO: 1091127 - RNA, 22 nt, Human
gacuuuaaaaguuugugcuugg

SEQ ID NO: 1091128 - RNA, 22 nt, Human
cagacagacagccguggccacc

SEQ ID NO: 1091129 - RNA, 22 nt, Human
cucaggauagcugcgcagccug

SEQ ID NO: 1091130 - RNA, 22 nt, Human
agaggcugggaaggguccccgg

SEQ ID NO: 1091131 - RNA, 20 nt, Human
uacugggcaagcccacagac

SEQ ID NO: 1091132 - RNA, 22 nt, Human
agggccaccucucuggguuccc

SEQ ID NO: 1091133 - RNA, 22 nt, Human
auuucauguugaucuuucgagg

SEQ ID NO: 1091134 - RNA, 22 nt, Human
agaauaaaugcuaccuaucaca

SEQ ID NO: 1091135 - RNA, 22 nt, Human
cagauggaacacagaaaggaga

SEQ ID NO: 1091136 - RNA, 22 nt, Human
acagaauauugguuacuguugc

SEQ ID NO: 1091137 - RNA, 22 nt, Human
uguaugaaguuacugagccucu

SEQ ID NO: 1091138 - RNA, 22 nt, Human
cagcaucaccgccauuucugau

SEQ ID NO: 1091139 - RNA, 20 nt, Human
acucuugagaaauucucugu

SEQ ID NO: 1091140 - RNA, 23 nt, Human
ugugaagguggguccaagggcug

SEQ ID NO: 1091141 - RNA, 22 nt, Human
ggagugaggcauuuguagcuga

SEQ ID NO: 1091142 - RNA, 22 nt, Human
uguuuucagucauauagcaggu

SEQ ID NO: 1091143 - RNA, 22 nt, Human
uaagacacauucauaucugucu

SEQ ID NO: 1091144 - RNA, 22 nt, Human
uuccuguaugucagugaagagc

SEQ ID NO: 1091145 - RNA, 22 nt, Human
cuucugggauuuuugaagacuc

SEQ ID NO: 1091146 - RNA, 22 nt, Human
ugcucuguugugcaugugggau

SEQ ID NO: 1091147 - RNA, 22 nt, Human
uuccauuuauucuuguccagau

SEQ ID NO: 1091148 - RNA, 22 nt, Human
ggacacagcugcagccacaccc

SEQ ID NO: 1091149 - RNA, 22 nt, Human
ggagagcaggguccugagauac

SEQ ID NO: 1091150 - RNA, 22 nt, Human
aucuguuguuuguuugcuaaag

SEQ ID NO: 1091151 - RNA, 22 nt, Human
gcugcuggcaucuagggggugg

SEQ ID NO: 1091152 - RNA, 22 nt, Human
uucagcagugcagacacccagu

SEQ ID NO: 1091153 - RNA, 22 nt, Human
auuugcagagcucugaauuuug

SEQ ID NO: 1091154 - RNA, 22 nt, Human
uuucacagugcucuguaaguau

SEQ ID NO: 1091155 - RNA, 22 nt, Human
gcuggcaggagccuuucccuuu

SEQ ID NO: 1091156 - RNA, 22 nt, Human
aacagcuguauacuguagcugu

SEQ ID NO: 1091157 - RNA, 19 nt, Human
cgcaggcuucgggucgcuc

SEQ ID NO: 1091158 - RNA, 21 nt, Human
ugguuugcggccaaaguuaaa

SEQ ID NO: 1091159 - RNA, 22 nt, Human
ucucauuuacuuccacaggcug

SEQ ID NO: 1091160 - RNA, 22 nt, Human
aggaaagguucagugauugaaa

SEQ ID NO: 1091161 - RNA, 22 nt, Human
uggaagaaggcagagaggcauu

SEQ ID NO: 1091162 - RNA, 22 nt, Human
gccucugcucucagguagccuc

SEQ ID NO: 1091163 - RNA, 21 nt, Human
uggcagagugcagucuauaca

SEQ ID NO: 1091164 - RNA, 22 nt, Human
ggccugcucugcagccucuaca

SEQ ID NO: 1091165 - RNA, 22 nt, Human
ucugaaaucuaaugcucugugg

SEQ ID NO: 1091166 - RNA, 22 nt, Human
aucuacagccagucugguuugu

SEQ ID NO: 1091167 - RNA, 22 nt, Human
uaauacugacuaaagauaucaa

SEQ ID NO: 1091168 - RNA, 22 nt, Human
cagaacugggcucgcucugguu

SEQ ID NO: 1091169 - RNA, 22 nt, Human
cugcuguguuccuccugcaucu

SEQ ID NO: 1091170 - RNA, 22 nt, Human
agagggcaugcuugguggccug

SEQ ID NO: 1091171 - RNA, 22 nt, Human
uggcagaguucgcuccuauuca

SEQ ID NO: 1091172 - RNA, 22 nt, Human
gcugccugauguccagcaggac

SEQ ID NO: 1091173 - RNA, 22 nt, Human
cuguuuguuggcuauugacagu

SEQ ID NO: 1091174 - RNA, 22 nt, Human
ugggcuguggagcaccuuugca

SEQ ID NO: 1091175 - RNA, 22 nt, Human
ugggaagaggcgggaggcuguu

SEQ ID NO: 1091176 - RNA, 22 nt, Human
uccucaggcugccuggaagacu

SEQ ID NO: 1091177 - RNA, 22 nt, Human
agcagcaggagccgugggguga

SEQ ID NO: 1091178 - RNA, 22 nt, Human
auuucuagaggcagcuucuagg

SEQ ID NO: 1091179 - RNA, 19 nt, Human
gauauugcuugaguaacug

SEQ ID NO: 1091180 - RNA, 22 nt, Human
uggagcagagaugggagcccaa

SEQ ID NO: 1091181 - RNA, 23 nt, Human
aggaacugaggccuagggaggua

SEQ ID NO: 1091182 - RNA, 21 nt, Human
ccaugucagaugugggcugug

SEQ ID NO: 1091183 - RNA, 22 nt, Human
acagaugagauucauugaccac

SEQ ID NO: 1091184 - RNA, 22 nt, Human
acaugauauaugggaaaugcuu

SEQ ID NO: 1091185 - RNA, 22 nt, Human
uaaugacuaagcaucauuaaac

SEQ ID NO: 1091186 - RNA, 22 nt, Human
ccagggcauccucacaucgcag

SEQ ID NO: 1091187 - RNA, 17 nt, Human
uuggaccagauucuaaa

SEQ ID NO: 1091188 - RNA, 22 nt, Human
agugcugucccgacaacugagg

SEQ ID NO: 1091189 - RNA, 22 nt, Human
ccaggaaugaaauguagauaaa

SEQ ID NO: 1091190 - RNA, 22 nt, Human
ucuguuuucauuugucuugaga

SEQ ID NO: 1091191 - RNA, 22 nt, Human
ugacaugaaacuguguugcuac

SEQ ID NO: 1091192 - RNA, 22 nt, Human
auuaauauuugcaccuucuguc

SEQ ID NO: 1091193 - RNA, 22 nt, Human
cucacugacgaggaagcugaga

SEQ ID NO: 1091194 - RNA, 22 nt, Human
cuugaaagcacuuaguaaauua

SEQ ID NO: 1091195 - RNA, 22 nt, Human
gacaggguacgggcuaggcaca

SEQ ID NO: 1091196 - RNA, 22 nt, Human
aagcuaauuguacuucucacag

SEQ ID NO: 1091197 - RNA, 22 nt, Human
agaguggggaagguguugagaa

SEQ ID NO: 1091198 - RNA, 22 nt, Human
agagcugaggauccagcugagc

SEQ ID NO: 1091199 - RNA, 22 nt, Human
aauacuggcugucaaagaugga

SEQ ID NO: 1091200 - RNA, 22 nt, Human
cacuagaaccaaugacauuucu

SEQ ID NO: 1091201 - RNA, 22 nt, Human
aggcccaguagugcugccuuua

SEQ ID NO: 1091202 - RNA, 19 nt, Human
aggugaggggcaccauguc

SEQ ID NO: 1091203 - RNA, 22 nt, Human
ugcccaaggucaccuaguuagu

SEQ ID NO: 1091204 - RNA, 22 nt, Human
acagugauugguuuggggguga

SEQ ID NO: 1091205 - RNA, 22 nt, Human
ggcucugaccucccaggcaguu

SEQ ID NO: 1091206 - RNA, 22 nt, Human
acccagcucuuugauggucuug

SEQ ID NO: 1091207 - RNA, 22 nt, Human
gagaggccaaaaucccugcccc

SEQ ID NO: 1091208 - RNA, 22 nt, Human
cucagagaggcaguggaaguca

SEQ ID NO: 1091209 - RNA, 22 nt, Human
cugucaccuguucacugcagca

SEQ ID NO: 1091210 - RNA, 22 nt, Human
cagauggcugccaagaugggcu

SEQ ID NO: 1091211 - RNA, 18 nt, Human
uauauuucacacauauuc

SEQ ID NO: 1091212 - RNA, 22 nt, Human
gaggcuggcagaaaagcacagg

SEQ ID NO: 1091213 - RNA, 22 nt, Human
auuuauuaccucggaguuucug

SEQ ID NO: 1091214 - RNA, 16 nt, Human
uuuccaaagggcagcu

SEQ ID NO: 1091215 - RNA, 22 nt, Human
augauuuuuucuaacacagucg

SEQ ID NO: 1091216 - RNA, 22 nt, Human
cuccaaauacaauauuguuguu

SEQ ID NO: 1091217 - RNA, 22 nt, Human
gaggcucaaaccuggacagagc

SEQ ID NO: 1091218 - RNA, 22 nt, Human
ccuuggaggacugcugcuucuu

SEQ ID NO: 1091219 - RNA, 22 nt, Human
ucagggacauuuagacacugau

SEQ ID NO: 1091220 - RNA, 22 nt, Human
ccaggagcaccaggccugugcc

SEQ ID NO: 1091221 - RNA, 22 nt, Human
aacacaguuuuccaaaauagag

SEQ ID NO: 1091222 - RNA, 22 nt, Human
cccagcaguuguuggugcacau

SEQ ID NO: 1091223 - RNA, 22 nt, Human
gacuuucuaaugcucuguagau

SEQ ID NO: 1091224 - RNA, 22 nt, Human
ggcaggcuggcuuuguuccagg

SEQ ID NO: 1091225 - RNA, 22 nt, Human
cugccugggccggccacccucu

SEQ ID NO: 1091226 - RNA, 22 nt, Human
guuugcaaagaucauuuucucc

SEQ ID NO: 1091227 - RNA, 22 nt, Human
aggaaaaauaaggcagcagggc

SEQ ID NO: 1091228 - RNA, 22 nt, Human
gcuggccagggcugcucgcgga

SEQ ID NO: 1091229 - RNA, 22 nt, Human
cuguacagaagcuagagcaaau

SEQ ID NO: 1091230 - RNA, 22 nt, Human
aaggccagaguacuagaggcug

SEQ ID NO: 1091231 - RNA, 23 nt, Human
auucuaagaugugaucuuauaac

SEQ ID NO: 1091232 - RNA, 22 nt, Human
uuauaacaucaaucagaguuaa

SEQ ID NO: 1091233 - RNA, 22 nt, Human
ucucaguggacgugucugucuu

SEQ ID NO: 1091234 - RNA, 22 nt, Human
ucugccugaaccacucuuggag

SEQ ID NO: 1091235 - RNA, 22 nt, Human
cccucugaccuccugccacagu

SEQ ID NO: 1091236 - RNA, 20 nt, Human
agccaauacagcaaaauuug

SEQ ID NO: 1091237 - RNA, 22 nt, Human
agccaggauuggcugagccuua

SEQ ID NO: 1091238 - RNA, 22 nt, Human
ugaggccugaagccuggagccu

SEQ ID NO: 1091239 - RNA, 22 nt, Human
ucccugccuccuggcagugcca

SEQ ID NO: 1091240 - RNA, 22 nt, Human
ucacugggagaugugggaaggg

SEQ ID NO: 1091241 - RNA, 22 nt, Human
cucugggcaaagaugccucauc

SEQ ID NO: 1091242 - RNA, 22 nt, Human
ugggaagcuacucaugcaggca

SEQ ID NO: 1091243 - RNA, 22 nt, Human
gagaaaaucuugggucaagaau

SEQ ID NO: 1091244 - RNA, 22 nt, Human
uacaguaaucuggacaugauuu

SEQ ID NO: 1091245 - RNA, 22 nt, Human
cugccucuggccucaggcccag

SEQ ID NO: 1091246 - RNA, 22 nt, Human
ccuggcugagggaccucgggua

SEQ ID NO: 1091247 - RNA, 22 nt, Human
auacuuccugcuucccugaucu

SEQ ID NO: 1091248 - RNA, 22 nt, Human
agcugggaugauaaccucaguc

SEQ ID NO: 1091249 - RNA, 22 nt, Human
augggcagcagcugccauucau

SEQ ID NO: 1091250 - RNA, 19 nt, Human
acugccugcagguguuggg

SEQ ID NO: 1091251 - RNA, 22 nt, Human
gggaagggagggaccucagucu

SEQ ID NO: 1091252 - RNA, 22 nt, Human
ccaggagagcauugcacagagg

SEQ ID NO: 1091253 - RNA, 22 nt, Human
ucacacaucucagguguuuaau

SEQ ID NO: 1091254 - RNA, 22 nt, Human
aagaaagauaagguuugcuugg

SEQ ID NO: 1091255 - RNA, 22 nt, Human
gccugccucaaaaucccaguuc

SEQ ID NO: 1091256 - RNA, 22 nt, Human
aauuucacauaaggcucauugg

SEQ ID NO: 1091257 - RNA, 20 nt, Human
cucagcuaaacaacacugac

SEQ ID NO: 1091258 - RNA, 22 nt, Human
ucagagucauugcaaguagaag

SEQ ID NO: 1091259 - RNA, 19 nt, Human
ucaguggagaaaggggaag

SEQ ID NO: 1091260 - RNA, 22 nt, Human
auuuuuuguuaacucaggauag

SEQ ID NO: 1091261 - RNA, 22 nt, Human
aaauuguccuuuuaagaaacag

SEQ ID NO: 1091262 - RNA, 21 nt, Human
uguucacauggagcagaaugu

SEQ ID NO: 1091263 - RNA, 22 nt, Human
auuccugauuaacgaccuuuca

SEQ ID NO: 1091264 - RNA, 22 nt, Human
gggcugccugagcaucuccucc

SEQ ID NO: 1091265 - RNA, 22 nt, Human
gcguaaggccucuggucucgga

SEQ ID NO: 1091266 - RNA, 22 nt, Human
gaagucugcugcucaggaguuu

SEQ ID NO: 1091267 - RNA, 22 nt, Human
ggcagcagggcugucucccuac

SEQ ID NO: 1091268 - RNA, 22 nt, Human
uaaagcagucuguguaugugaa

SEQ ID NO: 1091269 - RNA, 22 nt, Human
uuucuaagugaacauucaaguu

SEQ ID NO: 1091270 - RNA, 22 nt, Human
uuacaaagugcugcaccauuuu

SEQ ID NO: 1091271 - RNA, 22 nt, Human
uuucacauguggaaugccaggu

SEQ ID NO: 1091272 - RNA, 17 nt, Human
ggugaguguccaggugg

SEQ ID NO: 1091273 - RNA, 20 nt, Human
auguagaugaaagcaaaggc

SEQ ID NO: 1091274 - RNA, 22 nt, Human
cagcucucacacccuccuccca

SEQ ID NO: 1091275 - RNA, 22 nt, Human
ggggcagaaguagugccccuga

SEQ ID NO: 1091276 - RNA, 22 nt, Human
acacugaauguuuaagaacuug

SEQ ID NO: 1091277 - RNA, 22 nt, Human
ccagagccggcucccucagcuu

SEQ ID NO: 1091278 - RNA, 22 nt, Human
acauucaccacacuuauagggc

SEQ ID NO: 1091279 - RNA, 22 nt, Human
ucucagugcagagaggcuaucu

SEQ ID NO: 1091280 - RNA, 17 nt, Human
gcuuccucaugcaguuc

SEQ ID NO: 1091281 - RNA, 22 nt, Human
uuuacuaagcccaguuauaugc

SEQ ID NO: 1091282 - RNA, 22 nt, Human
gcuggcaucacuggcuucggug

SEQ ID NO: 1091283 - RNA, 22 nt, Human
ucauuuaaaauguaccaggauu

SEQ ID NO: 1091284 - RNA, 22 nt, Human
gugcagugagcagugcagcacc

SEQ ID NO: 1091285 - RNA, 22 nt, Human
aguggcagagccaagauaugau

SEQ ID NO: 1091286 - RNA, 22 nt, Human
gugcuuucugcugcauuccucu

SEQ ID NO: 1091287 - RNA, 22 nt, Human
ccaggcagagggauccccaucc

SEQ ID NO: 1091288 - RNA, 22 nt, Human
caggggcugugggcggagccuc

SEQ ID NO: 1091289 - RNA, 21 nt, Human
uccuguaagcuuggguggcuc

SEQ ID NO: 1091290 - RNA, 22 nt, Human
gcacugcaucuacuggcaagua

SEQ ID NO: 1091291 - RNA, 22 nt, Human
cagauuuugaugaauguggaaa

SEQ ID NO: 1091292 - RNA, 22 nt, Human
ccagcuggggaaguggggcaua

SEQ ID NO: 1091293 - RNA, 22 nt, Human
gcaggagcaaacugcagugugg

SEQ ID NO: 1091294 - RNA, 22 nt, Human
cuccuuaaagggagcagcagcu

SEQ ID NO: 1091295 - RNA, 22 nt, Human
gagcagcugagcuggaaugaga

SEQ ID NO: 1091296 - RNA, 22 nt, Human
agcuggcagggguucacacugc

SEQ ID NO: 1091297 - RNA, 22 nt, Human
gagucugagucuaauggcccca

SEQ ID NO: 1091298 - RNA, 22 nt, Human
uuucucuggccucaguuuaaca

SEQ ID NO: 1091299 - RNA, 22 nt, Human
aggagcugugaaugggaggggu

SEQ ID NO: 1091300 - RNA, 22 nt, Human
aggauacaagucucagaaugcu

SEQ ID NO: 1091301 - RNA, 22 nt, Human
ggagucagaauggcaggguggu

SEQ ID NO: 1091302 - RNA, 22 nt, Human
guguuuggucagacguccgggg

SEQ ID NO: 1091303 - RNA, 22 nt, Human
aucaggaugacaacugcugggu

SEQ ID NO: 1091304 - RNA, 22 nt, Human
gcagccagggagagaaccaggg

SEQ ID NO: 1091305 - RNA, 22 nt, Human
acaauuucugaucagugaauuu

SEQ ID NO: 1091306 - RNA, 22 nt, Human
ugccuaggaaaccucaugcuuc

SEQ ID NO: 1091307 - RNA, 22 nt, Human
ccagcuccucuucccaguguca

SEQ ID NO: 1091308 - RNA, 18 nt, Human
ugucauugccagggaagc

SEQ ID NO: 1091309 - RNA, 22 nt, Human
uauuugaagacagggucuuuaa

SEQ ID NO: 1091310 - RNA, 22 nt, Human
cagucccagacccagaaggugg

SEQ ID NO: 1091311 - RNA, 22 nt, Human
uucuaaaaccaauucugcuucu

SEQ ID NO: 1091312 - RNA, 22 nt, Human
ugcugcugacauuuggggcuug

SEQ ID NO: 1091313 - RNA, 21 nt, Human
gcagccagccgagaccaugcc

SEQ ID NO: 1091314 - RNA, 22 nt, Human
uuucuucaauugcuaacaagga

SEQ ID NO: 1091315 - RNA, 22 nt, Human
uggcugagagcaauugacucug

SEQ ID NO: 1091316 - RNA, 22 nt, Human
cuguccuguggaccugaggacg

SEQ ID NO: 1091317 - RNA, 22 nt, Human
cacuguccaauagauacauaau

SEQ ID NO: 1091318 - RNA, 22 nt, Human
uuaugacaggaaaaucacagaa

SEQ ID NO: 1091319 - RNA, 22 nt, Human
gcuaucuucauggaaauacagg

SEQ ID NO: 1091320 - RNA, 22 nt, Human
uugugaaacauucauggauuug

SEQ ID NO: 1091321 - RNA, 22 nt, Human
caugggcugaaaaucugcaaac

SEQ ID NO: 1091322 - RNA, 22 nt, Human
ucuagaaaaaaacugcugugga

SEQ ID NO: 1091323 - RNA, 22 nt, Human
gaggcugggaaguccaagacca

SEQ ID NO: 1091324 - RNA, 22 nt, Human
auuuauugaagcuuauuacguu

SEQ ID NO: 1091325 - RNA, 22 nt, Human
uuuccaaauaaggucacauucu

SEQ ID NO: 1091326 - RNA, 22 nt, Human
uuggaaaugcauuuguuauuau

SEQ ID NO: 1091327 - RNA, 22 nt, Human
uagagcuagcuucaaaaugcga

SEQ ID NO: 1091328 - RNA, 22 nt, Human
cagcuguugucaccucacaucc

SEQ ID NO: 1091329 - RNA, 22 nt, Human
uuucuauaugaggagcuaaagu

SEQ ID NO: 1091330 - RNA, 22 nt, Human
accuucaauuauuuuuguucca

SEQ ID NO: 1091331 - RNA, 22 nt, Human
ugcuuucaaaggcuuucuagau

SEQ ID NO: 1091332 - RNA, 22 nt, Human
gggaaggagccugcuugcuaga

SEQ ID NO: 1091333 - RNA, 22 nt, Human
ugcuagaauaccuaccuggagg

SEQ ID NO: 1091334 - RNA, 22 nt, Human
guaugaaggcgagagcccacua

SEQ ID NO: 1091335 - RNA, 22 nt, Human
ccaggcucagcgcgcacgucug

SEQ ID NO: 1091336 - RNA, 22 nt, Human
gaaauacaauuuugucccagcu

SEQ ID NO: 1091337 - RNA, 22 nt, Human
auggagggugucagagagcgaa

SEQ ID NO: 1091338 - RNA, 22 nt, Human
augaaaauacugugguugauag

SEQ ID NO: 1091339 - RNA, 22 nt, Human
uuacacaaguucuuuaaccuau

SEQ ID NO: 1091340 - RNA, 22 nt, Human
ggccaggcugguuccuugaccu

SEQ ID NO: 1091341 - RNA, 16 nt, Human
cauauugcugaaagag

SEQ ID NO: 1091342 - RNA, 22 nt, Human
gcagugggaagguuggcacaug

SEQ ID NO: 1091343 - RNA, 22 nt, Human
ggcagccagcaaugagaaguuu

SEQ ID NO: 1091344 - RNA, 22 nt, Human
acagagcaguaagaacacagcu

SEQ ID NO: 1091345 - RNA, 22 nt, Human
agcccugcacaggucuguggcu

SEQ ID NO: 1091346 - RNA, 22 nt, Human
agugacagcugggaaggugaaa

SEQ ID NO: 1091347 - RNA, 22 nt, Human
agauucuacucuagauccaugg

SEQ ID NO: 1091348 - RNA, 22 nt, Human
acaauguucucugaguugugug

SEQ ID NO: 1091349 - RNA, 18 nt, Human
uggcucagauggcuuuaa

SEQ ID NO: 1091350 - RNA, 22 nt, Human
ugccccugaccucaggcgaagg

SEQ ID NO: 1091351 - RNA, 22 nt, Human
aagcaugcaaucugugauaagg

SEQ ID NO: 1091352 - RNA, 22 nt, Human
agaagccaauucugugugaguc

SEQ ID NO: 1091353 - RNA, 22 nt, Human
uucuucuucuggcugcaccugg

SEQ ID NO: 1091354 - RNA, 22 nt, Human
ccaaaggccaggcacugagguu

SEQ ID NO: 1091355 - RNA, 22 nt, Human
agcaccugucacaagcagaagg

SEQ ID NO: 1091356 - RNA, 23 nt, Human
agccacuucuaucuugcuccugg

SEQ ID NO: 1091357 - RNA, 22 nt, Human
ccaggguggggcaggcccacug

SEQ ID NO: 1091358 - RNA, 22 nt, Human
aggcugcagaacagucaggugc

SEQ ID NO: 1091359 - RNA, 22 nt, Human
aaauaauugaguuggucaauau

SEQ ID NO: 1091360 - RNA, 22 nt, Human
uugcaaggguguuuugaggugu

SEQ ID NO: 1091361 - RNA, 22 nt, Human
auacuguuuugugacuuaucuu

SEQ ID NO: 1091362 - RNA, 22 nt, Human
agcaggagcccuuaucaccagg

SEQ ID NO: 1091363 - RNA, 22 nt, Human
ugucuguaagguguuuauguua

SEQ ID NO: 1091364 - RNA, 22 nt, Human
ccugccuggcugucagcagagc

SEQ ID NO: 1091365 - RNA, 22 nt, Human
gcugagggcuguaacagcagag

SEQ ID NO: 1091366 - RNA, 22 nt, Human
ggcugucaauucauaggucaga

SEQ ID NO: 1091367 - RNA, 22 nt, Human
acuggcagcuguaggaugcaug

SEQ ID NO: 1091368 - RNA, 22 nt, Human
ggcugggagcuggacaggccgg

SEQ ID NO: 1091369 - RNA, 22 nt, Human
aguaaaacagagaaaucacuca

SEQ ID NO: 1091370 - RNA, 22 nt, Human
aggaucaaguugguugagcuuu

SEQ ID NO: 1091371 - RNA, 23 nt, Human
gggaaguggggauuugaagucau

SEQ ID NO: 1091372 - RNA, 22 nt, Human
ugcuucagaggaaaggcaaaag

SEQ ID NO: 1091373 - RNA, 22 nt, Human
acagcaggauuuggcgauguug

SEQ ID NO: 1091374 - RNA, 22 nt, Human
ucaaagcagcacauucgcaagc

SEQ ID NO: 1091375 - RNA, 22 nt, Human
agcaguggagcgagauguuuaa

SEQ ID NO: 1091376 - RNA, 23 nt, Human
uguaucuguacuauuccugccuc

SEQ ID NO: 1091377 - RNA, 22 nt, Human
ugcuucuguuuguuucugucau

SEQ ID NO: 1091378 - RNA, 22 nt, Human
gcuccugggcucuaccuugcua

SEQ ID NO: 1091379 - RNA, 22 nt, Human
gaaguuagucauugaagcccca

SEQ ID NO: 1091380 - RNA, 19 nt, Human
ucugugcugggaggcagca

SEQ ID NO: 1091381 - RNA, 20 nt, Human
cccagccccuaccuguugcc

SEQ ID NO: 1091382 - RNA, 22 nt, Human
cccuggagcaucucugcugucu

SEQ ID NO: 1091383 - RNA, 22 nt, Human
ucagaaucugcauuuaacaaaa

SEQ ID NO: 1091384 - RNA, 22 nt, Human
aggcaagggggcgccaccuucc

SEQ ID NO: 1091385 - RNA, 22 nt, Human
uccucuuuaaaugcuuuuaucu

SEQ ID NO: 1091386 - RNA, 22 nt, Human
gccugccuuugugaggaagcgg

SEQ ID NO: 1091387 - RNA, 22 nt, Human
gagagucuaggaaccucauaua

SEQ ID NO: 1091388 - RNA, 22 nt, Human
aucuuucaguuucauaccaauu

SEQ ID NO: 1091389 - RNA, 21 nt, Human
gcagccacagccaccaagcua

SEQ ID NO: 1091390 - RNA, 22 nt, Human
agugcccuggcccagcuggacc

SEQ ID NO: 1091391 - RNA, 22 nt, Human
uggcuuccuggacagaugcggu

SEQ ID NO: 1091392 - RNA, 21 nt, Human
agcaggcuuuggaguggggcu

SEQ ID NO: 1091393 - RNA, 22 nt, Human
cagcugauuugagaaagaauga

SEQ ID NO: 1091394 - RNA, 22 nt, Human
augaagcuguuuauuuuagcag

SEQ ID NO: 1091395 - RNA, 22 nt, Human
ccuaggccuuacuuuccugugc

SEQ ID NO: 1091396 - RNA, 22 nt, Human
cugggcugcgguucucugaagc

SEQ ID NO: 1091397 - RNA, 22 nt, Human
acacugaaugcuguuuagaaau

SEQ ID NO: 1091398 - RNA, 22 nt, Human
agacugaauaacaagcaaauaa

SEQ ID NO: 1091399 - RNA, 22 nt, Human
aguguuucccaguaggaugaaa

SEQ ID NO: 1091400 - RNA, 18 nt, Human
gaaaugugauucuagggc

SEQ ID NO: 1091401 - RNA, 22 nt, Human
cugccuggggaaugugaggauu

SEQ ID NO: 1091402 - RNA, 22 nt, Human
cugagccuguguuucucuggca

SEQ ID NO: 1091403 - RNA, 22 nt, Human
uccacugcagcuucugauggaa

SEQ ID NO: 1091404 - RNA, 22 nt, Human
uaaaucaagaauaucagcuugu

SEQ ID NO: 1091405 - RNA, 22 nt, Human
gagcagcugguaggugaaccca

SEQ ID NO: 1091406 - RNA, 22 nt, Human
gauauugcaccucuaauacauu

SEQ ID NO: 1091407 - RNA, 22 nt, Human
uucugucuguaaacuucucaau

SEQ ID NO: 1091408 - RNA, 22 nt, Human
agcucacaguguccuuccucaa

SEQ ID NO: 1091409 - RNA, 22 nt, Human
aaggagaaggcaucauucaagu

SEQ ID NO: 1091410 - RNA, 22 nt, Human
uaagcauucaaugcuuagcacu

SEQ ID NO: 1091411 - RNA, 20 nt, Human
gcaggcagggaaugggggug

SEQ ID NO: 1091412 - RNA, 22 nt, Human
gaagaagggagugcguguaaua

SEQ ID NO: 1091413 - RNA, 22 nt, Human
gucaggagauagggcaagcuuc

SEQ ID NO: 1091414 - RNA, 22 nt, Human
agugaaaaccuaaucaugcagu

SEQ ID NO: 1091415 - RNA, 22 nt, Human
uuucaugauccauuuacaaaau

SEQ ID NO: 1091416 - RNA, 22 nt, Human
uguuuauugcugcaauugugcc

SEQ ID NO: 1091417 - RNA, 17 nt, Human
cauaaaacaguucuauu

SEQ ID NO: 1091418 - RNA, 22 nt, Human
acuuuauuuccuauugcaucca

SEQ ID NO: 1091419 - RNA, 22 nt, Human
gaggcagaaguugcagugagca

SEQ ID NO: 1091420 - RNA, 22 nt, Human
acuaggaaguggcaaaacugga

SEQ ID NO: 1091421 - RNA, 22 nt, Human
uuuugguaauuaaguagauauu

SEQ ID NO: 1091422 - RNA, 22 nt, Human
uguuugaauaacuuggauauau

SEQ ID NO: 1091423 - RNA, 21 nt, Human
ggcagaaguagcauggacggg

SEQ ID NO: 1091424 - RNA, 22 nt, Human
aaguacauauauuuaugauucu

SEQ ID NO: 1091425 - RNA, 22 nt, Human
guguggggucuucucuuggccu

SEQ ID NO: 1091426 - RNA, 22 nt, Human
aggcacuuuaggaucagguuga

SEQ ID NO: 1091427 - RNA, 22 nt, Human
uucuaaaauaaguuuaucuggu

SEQ ID NO: 1091428 - RNA, 22 nt, Human
cuauucagguguccauuaaucc

SEQ ID NO: 1091429 - RNA, 22 nt, Human
ccugccugaaggucagccaccc

SEQ ID NO: 1091430 - RNA, 22 nt, Human
gauuccuuggcucugucucagg

SEQ ID NO: 1091431 - RNA, 22 nt, Human
cacauguuuggcaugucaccaa

SEQ ID NO: 1091432 - RNA, 22 nt, Human
ucuccucucuuaccugguacaa

SEQ ID NO: 1091433 - RNA, 22 nt, Human
gucuggaguggggccugagaau

SEQ ID NO: 1091434 - RNA, 22 nt, Human
gaagccaguguuugaagaauuu

SEQ ID NO: 1091435 - RNA, 22 nt, Human
uauugacagagggucagaagag

SEQ ID NO: 1091436 - RNA, 22 nt, Human
agaaacaacuuguuucucuugc

SEQ ID NO: 1091437 - RNA, 22 nt, Human
acaugaagcaagaaagaugcua

SEQ ID NO: 1091438 - RNA, 22 nt, Human
uauuuucuggggagagugaacc

SEQ ID NO: 1091439 - RNA, 22 nt, Human
ucacagaaacagaauggcacag

SEQ ID NO: 1091440 - RNA, 22 nt, Human
ucuaauccuugcuaccugggug

SEQ ID NO: 1091441 - RNA, 22 nt, Human
gucccuggaauggacucugcgc

SEQ ID NO: 1091442 - RNA, 22 nt, Human
gucugcccucacgccagcuggg

SEQ ID NO: 1091443 - RNA, 22 nt, Human
caggcaggugcagauuccucuu

SEQ ID NO: 1091444 - RNA, 22 nt, Human
uuaagcuaauuaguuccagcau

SEQ ID NO: 1091445 - RNA, 20 nt, Human
cuucaggacccauccucccc

SEQ ID NO: 1091446 - RNA, 22 nt, Human
ugaaggagcugauguaaggggu

SEQ ID NO: 1091447 - RNA, 22 nt, Human
auuguuaaaguaauaaccaugg

SEQ ID NO: 1091448 - RNA, 22 nt, Human
acagucucuccacacugcaggg

SEQ ID NO: 1091449 - RNA, 22 nt, Human
ucacuguaaaguaauacuguca

SEQ ID NO: 1091450 - RNA, 23 nt, Human
aaaaucuucugccuaugaagaaa

SEQ ID NO: 1091451 - RNA, 22 nt, Human
gcacugaacuuuaaucauuucu

SEQ ID NO: 1091452 - RNA, 22 nt, Human
ccaggaggcagagguuacagug

SEQ ID NO: 1091453 - RNA, 17 nt, Human
agggucaggugaaguuc

SEQ ID NO: 1091454 - RNA, 22 nt, Human
aaccaacauaggaaugcagaga

SEQ ID NO: 1091455 - RNA, 22 nt, Human
uggcacugccaaccugcuaggu

SEQ ID NO: 1091456 - RNA, 22 nt, Human
cagagaccccgcugcccuucug

SEQ ID NO: 1091457 - RNA, 22 nt, Human
caguaacagugaucaccugugg

SEQ ID NO: 1091458 - RNA, 22 nt, Human
auauaaagaaguggaaaaugag

SEQ ID NO: 1091459 - RNA, 20 nt, Human
cuaucuccuggcgugccuuc

SEQ ID NO: 1091460 - RNA, 22 nt, Human
aggagccaagcagaacuaagga

SEQ ID NO: 1091461 - RNA, 22 nt, Human
ucaggagaaucagggcuguccu

SEQ ID NO: 1091462 - RNA, 22 nt, Human
aacuaaaacugguuuguucucu

SEQ ID NO: 1091463 - RNA, 22 nt, Human
ccuggcuguuugagcggggaau

SEQ ID NO: 1091464 - RNA, 22 nt, Human
auucccaucgucaacuucacug

SEQ ID NO: 1091465 - RNA, 22 nt, Human
gggcucucgauuagacccuggg

SEQ ID NO: 1091466 - RNA, 22 nt, Human
uuuuccagauggauacuagaau

SEQ ID NO: 1091467 - RNA, 22 nt, Human
auuauauugaguauaaccagag

SEQ ID NO: 1091468 - RNA, 22 nt, Human
uuuuauucaaauaguucacacu

SEQ ID NO: 1091469 - RNA, 22 nt, Human
gcuucugggguucuggcaugcu

SEQ ID NO: 1091470 - RNA, 22 nt, Human
gcagggcagcucacugugguuc

SEQ ID NO: 1091471 - RNA, 22 nt, Human
acaaggcucuaauuucauugaa

SEQ ID NO: 1091472 - RNA, 22 nt, Human
uguuaccaaaaucuuguauauc

SEQ ID NO: 1091473 - RNA, 19 nt, Human
uaaaaugucuguggucagu

SEQ ID NO: 1091474 - RNA, 22 nt, Human
ucuuuucuagcaaauccaggag

SEQ ID NO: 1091475 - RNA, 22 nt, Human
uccucuuccuucuguccaaaug

SEQ ID NO: 1091476 - RNA, 22 nt, Human
cuggggcagagcccagcaauuu

SEQ ID NO: 1091477 - RNA, 22 nt, Human
acagacauucagcuaagucuau

SEQ ID NO: 1091478 - RNA, 22 nt, Human
auucauaacggcaaaugucacc

SEQ ID NO: 1091479 - RNA, 23 nt, Human
cagaccuggcagucauccucaac

SEQ ID NO: 1091480 - RNA, 22 nt, Human
ugccugcagcgucuccagcagg

SEQ ID NO: 1091481 - RNA, 22 nt, Human
agcucccauuaucuucugaaac

SEQ ID NO: 1091482 - RNA, 22 nt, Human
auuuggacauuuacaauaguga

SEQ ID NO: 1091483 - RNA, 22 nt, Human
gcacagaaccagacaugaggca

SEQ ID NO: 1091484 - RNA, 22 nt, Human
ucacagaacacaaaugccacuu

SEQ ID NO: 1091485 - RNA, 22 nt, Human
gcaggcuccaacuggaggaguu

SEQ ID NO: 1091486 - RNA, 22 nt, Human
ccagggugugggcgucggcacg

SEQ ID NO: 1091487 - RNA, 17 nt, Human
ucuucgggcgcuaggua

SEQ ID NO: 1091488 - RNA, 22 nt, Human
ucagaguccaugguacuuaauu

SEQ ID NO: 1091489 - RNA, 22 nt, Human
uggcccugacacgugguacugg

SEQ ID NO: 1091490 - RNA, 22 nt, Human
agcaggcuuguuaugucugaga

SEQ ID NO: 1091491 - RNA, 22 nt, Human
ugcagcaauuuuuuaggcauuc

SEQ ID NO: 1091492 - RNA, 22 nt, Human
cuuugcaugggucugaaggcuu

SEQ ID NO: 1091493 - RNA, 22 nt, Human
uuccugaugcacacagucauuu

SEQ ID NO: 1091494 - RNA, 22 nt, Human
uguggagacuauagccauaaca

SEQ ID NO: 1091495 - RNA, 22 nt, Human
ugggaauacaaguuauucaccu

SEQ ID NO: 1091496 - RNA, 22 nt, Human
caguuuuaggacauguggaugu

SEQ ID NO: 1091497 - RNA, 22 nt, Human
uucugagaaggcuguggacaca

SEQ ID NO: 1091498 - RNA, 22 nt, Human
gucauuucuguuucuucagugc

SEQ ID NO: 1091499 - RNA, 17 nt, Human
agcagcuggguugaucu

SEQ ID NO: 1091500 - RNA, 22 nt, Human
aaacacagggauauauauucca

SEQ ID NO: 1091501 - RNA, 22 nt, Human
cuauaaaucuacccagcauugg

SEQ ID NO: 1091502 - RNA, 22 nt, Human
acuacauuucucaguaccugaa

SEQ ID NO: 1091503 - RNA, 22 nt, Human
acugggcuuauuucuugugaac

SEQ ID NO: 1091504 - RNA, 22 nt, Human
uucauuuggccucugcuuaaaa

SEQ ID NO: 1091505 - RNA, 22 nt, Human
caacaucaguccucaugagaca

SEQ ID NO: 1091506 - RNA, 22 nt, Human
aauuaaaagauaacccaugagu

SEQ ID NO: 1091507 - RNA, 22 nt, Human
acugucucucuagcaguucagg

SEQ ID NO: 1091508 - RNA, 22 nt, Human
cugccaggcacgugcagcauca

SEQ ID NO: 1091509 - RNA, 22 nt, Human
ucccaagagggguuauuaugcc

SEQ ID NO: 1091510 - RNA, 22 nt, Human
ccaggugucaugcgugugaccc

SEQ ID NO: 1091511 - RNA, 22 nt, Human
cuuccuaaaagcuucaagagaa

SEQ ID NO: 1091512 - RNA, 22 nt, Human
uucacacagaaucugaggagcu

SEQ ID NO: 1091513 - RNA, 22 nt, Human
uuuauucaagaugagguucaug

SEQ ID NO: 1091514 - RNA, 22 nt, Human
ucagggcucaccagccucugcc

SEQ ID NO: 1091515 - RNA, 23 nt, Human
uucaugaguuggacaagacuggg

SEQ ID NO: 1091516 - RNA, 22 nt, Human
agcccuuuccaauuugauuuau

SEQ ID NO: 1091517 - RNA, 22 nt, Human
caggaacaaucuuacuacuauu

SEQ ID NO: 1091518 - RNA, 23 nt, Human
uuuauuuauuuaggcugagggau

SEQ ID NO: 1091519 - RNA, 22 nt, Human
gugcucugaucugucugacauc

SEQ ID NO: 1091520 - RNA, 22 nt, Human
cuggcagcucuacucagagccu

SEQ ID NO: 1091521 - RNA, 22 nt, Human
uuccauaauaggcuuaagugaa

SEQ ID NO: 1091522 - RNA, 22 nt, Human
gugggcagcaccagggaagugu

SEQ ID NO: 1091523 - RNA, 22 nt, Human
uuauuuguaaagguccauagua

SEQ ID NO: 1091524 - RNA, 22 nt, Human
ggagcugagcagcgauggcgga

SEQ ID NO: 1091525 - RNA, 21 nt, Human
caucagauuuagaaguucuau

SEQ ID NO: 1091526 - RNA, 22 nt, Human
ggcauggcucggagucagaaca

SEQ ID NO: 1091527 - RNA, 22 nt, Human
gucaggggaugugcugguggcc

SEQ ID NO: 1091528 - RNA, 22 nt, Human
gaaacaauacuuguccucacua

SEQ ID NO: 1091529 - RNA, 22 nt, Human
cacauacaaugguguuauuugg

SEQ ID NO: 1091530 - RNA, 22 nt, Human
uaccugggcccaccagugccug

SEQ ID NO: 1091531 - RNA, 22 nt, Human
gggcaaaaccugggcaucauga

SEQ ID NO: 1091532 - RNA, 22 nt, Human
cucuggaauguuuacaugcccu

SEQ ID NO: 1091533 - RNA, 20 nt, Human
auguaaaagacagggaguag

SEQ ID NO: 1091534 - RNA, 21 nt, Human
aacauuucugggagaacucac

SEQ ID NO: 1091535 - RNA, 22 nt, Human
aauuacugggucugagauuaau

SEQ ID NO: 1091536 - RNA, 22 nt, Human
ucuaaacauaacuuugugugau

SEQ ID NO: 1091537 - RNA, 23 nt, Human
guaaaauacgcagugcaguguga

SEQ ID NO: 1091538 - RNA, 22 nt, Human
cccagcucccauguucuccaau

SEQ ID NO: 1091539 - RNA, 21 nt, Human
gaccccagaccagcagacaca

SEQ ID NO: 1091540 - RNA, 22 nt, Human
cacauaagaaaugaauaugaga

SEQ ID NO: 1091541 - RNA, 22 nt, Human
cugaggccggagcacugaagag

SEQ ID NO: 1091542 - RNA, 22 nt, Human
gggaccuggcgagggucacaca

SEQ ID NO: 1091543 - RNA, 22 nt, Human
aaccauuugccauuaucuuaag

SEQ ID NO: 1091544 - RNA, 22 nt, Human
aggcuggcuggcaggggacaca

SEQ ID NO: 1091545 - RNA, 22 nt, Human
ugacauuuuuaaaaccacuagu

SEQ ID NO: 1091546 - RNA, 22 nt, Human
agcagcugaccagugaguccug

SEQ ID NO: 1091547 - RNA, 23 nt, Human
gcugagguacauuuacaggaaga

SEQ ID NO: 1091548 - RNA, 17 nt, Human
uagcuagaccgagucuc

SEQ ID NO: 1091549 - RNA, 22 nt, Human
uucagugucaauuuuuaaauau

SEQ ID NO: 1091550 - RNA, 22 nt, Human
agcaaagcucaugacauuacag

SEQ ID NO: 1091551 - RNA, 22 nt, Human
ccaggaaccgaugaucagaggg

SEQ ID NO: 1091552 - RNA, 22 nt, Human
caguguucccugaacauauguu

SEQ ID NO: 1091553 - RNA, 22 nt, Human
aaacaucuauuaugugcugagc

SEQ ID NO: 1091554 - RNA, 22 nt, Human
ucuucccagcugcugcgaugcc

SEQ ID NO: 1091555 - RNA, 22 nt, Human
ugauaugcauguaagggagaca

SEQ ID NO: 1091556 - RNA, 22 nt, Human
caaaguaaacuaccacuguuuc

SEQ ID NO: 1091557 - RNA, 22 nt, Human
cuggggacuuugguucuccaug

SEQ ID NO: 1091558 - RNA, 22 nt, Human
aacugaaaccaaacacuuuagg

SEQ ID NO: 1091559 - RNA, 22 nt, Human
auuccaaacuuaccccagagga

SEQ ID NO: 1091560 - RNA, 22 nt, Human
auuuuucucuuuccacugagau

SEQ ID NO: 1091561 - RNA, 22 nt, Human
ucuggcuccacaccucacugca

SEQ ID NO: 1091562 - RNA, 22 nt, Human
ugccaggcaggacccuagaacc

SEQ ID NO: 1091563 - RNA, 22 nt, Human
uccuugaagaaugauucuugga

SEQ ID NO: 1091564 - RNA, 22 nt, Human
uggguagagacacagucugggg

SEQ ID NO: 1091565 - RNA, 22 nt, Human
agacacauuuuacauuaacugu

SEQ ID NO: 1091566 - RNA, 22 nt, Human
ucucagagcucacaccuccugg

SEQ ID NO: 1091567 - RNA, 22 nt, Human
uaguuuuagcagcaaugggaug

SEQ ID NO: 1091568 - RNA, 22 nt, Human
cucuucaaaagucuaauccuua

SEQ ID NO: 1091569 - RNA, 22 nt, Human
ucuggcucccagccugcucuca

SEQ ID NO: 1091570 - RNA, 22 nt, Human
ugggcaggggcccugcuuccgu

SEQ ID NO: 1091571 - RNA, 22 nt, Human
cugccuggagcauucugaaggu

SEQ ID NO: 1091572 - RNA, 22 nt, Human
agagacuguacguggcaaguau

SEQ ID NO: 1091573 - RNA, 19 nt, Human
acuuucuccaggaccuguu

SEQ ID NO: 1091574 - RNA, 22 nt, Human
cagaagcaaaugccuugcugag

SEQ ID NO: 1091575 - RNA, 22 nt, Human
uaggaacaaagagccucacauu

SEQ ID NO: 1091576 - RNA, 22 nt, Human
gcagggcugagucaugugugcc

SEQ ID NO: 1091577 - RNA, 22 nt, Human
cagggcagagggaaacuccuuu

SEQ ID NO: 1091578 - RNA, 22 nt, Human
caauuucucgaacucuaaucca

SEQ ID NO: 1091579 - RNA, 22 nt, Human
uagcacaucuucuuggccugca

SEQ ID NO: 1091580 - RNA, 22 nt, Human
caggagaagucucuagggggug

SEQ ID NO: 1091581 - RNA, 19 nt, Human
gccagcagaaugaugaggc

SEQ ID NO: 1091582 - RNA, 22 nt, Human
ggcugugagcaggcagaaugcu

SEQ ID NO: 1091583 - RNA, 22 nt, Human
gucuuuuuuacaccuuacauca

SEQ ID NO: 1091584 - RNA, 22 nt, Human
gcugucugccgcaggcugccac

SEQ ID NO: 1091585 - RNA, 22 nt, Human
uuugcaaaaugaggugaagagu

SEQ ID NO: 1091586 - RNA, 22 nt, Human
ccugcccuguguuuggggacua

SEQ ID NO: 1091587 - RNA, 22 nt, Human
cugcugcccagugugcauuggg

SEQ ID NO: 1091588 - RNA, 22 nt, Human
ggccaggcugcccugggagcag

SEQ ID NO: 1091589 - RNA, 22 nt, Human
uucccacaguguugaauccucu

SEQ ID NO: 1091590 - RNA, 22 nt, Human
uggagccuguguuucugcccag

SEQ ID NO: 1091591 - RNA, 22 nt, Human
uaauaauagcaguagcugccac

SEQ ID NO: 1091592 - RNA, 22 nt, Human
agggcagagagaugaaugggau

SEQ ID NO: 1091593 - RNA, 22 nt, Human
acacucuuucugugggucacau

SEQ ID NO: 1091594 - RNA, 22 nt, Human
uccuuuucccugaagguauuua

SEQ ID NO: 1091595 - RNA, 22 nt, Human
ccucugcucccuggugucugag

SEQ ID NO: 1091596 - RNA, 22 nt, Human
gagcuagaguuuguaggguaga

SEQ ID NO: 1091597 - RNA, 22 nt, Human
aaauguaccuugauaguuuggu

SEQ ID NO: 1091598 - RNA, 22 nt, Human
uggcucagaggggaagugguuu

SEQ ID NO: 1091599 - RNA, 22 nt, Human
cgaaaucaaacuugggcuucug

SEQ ID NO: 1091600 - RNA, 22 nt, Human
aaacugauaaaauaaguacauu

SEQ ID NO: 1091601 - RNA, 22 nt, Human
aguggcagagugcacucaggca

SEQ ID NO: 1091602 - RNA, 22 nt, Human
cugggccucauccccagaguuu

SEQ ID NO: 1091603 - RNA, 22 nt, Human
uuucacaugguacugccuguuu

SEQ ID NO: 1091604 - RNA, 22 nt, Human
gauuuugucaaauuccaaaugu

SEQ ID NO: 1091605 - RNA, 22 nt, Human
cacuggcaaagccuguuccuua

SEQ ID NO: 1091606 - RNA, 22 nt, Human
uauugcagaagaaaugaaugaa

SEQ ID NO: 1091607 - RNA, 22 nt, Human
gagcacagccaaaguaagaagg

SEQ ID NO: 1091608 - RNA, 22 nt, Human
ucauuucacuucucuagggaga

SEQ ID NO: 1091609 - RNA, 22 nt, Human
gaggcucacugggcaaagacuc

SEQ ID NO: 1091610 - RNA, 18 nt, Human
ucccucccugcuguggcc

SEQ ID NO: 1091611 - RNA, 20 nt, Human
gccugagcuccgccuccugu

SEQ ID NO: 1091612 - RNA, 22 nt, Human
gaggccuguagucauggaugua

SEQ ID NO: 1091613 - RNA, 22 nt, Human
uugauuaaacaggcauauucaa

SEQ ID NO: 1091614 - RNA, 22 nt, Human
ggcugcaggcaggguauccacu

SEQ ID NO: 1091615 - RNA, 22 nt, Human
aauaauuuuagcucagaguugu

SEQ ID NO: 1091616 - RNA, 22 nt, Human
cagacccucuucuauugguggg

SEQ ID NO: 1091617 - RNA, 22 nt, Human
auguuacaauccaacaaaauua

SEQ ID NO: 1091618 - RNA, 22 nt, Human
ugaaggaaaugacggcagaaga

SEQ ID NO: 1091619 - RNA, 18 nt, Human
gcugaaauucuaaacaaa

SEQ ID NO: 1091620 - RNA, 21 nt, Human
acauuuucuguuuuaggaagu

SEQ ID NO: 1091621 - RNA, 22 nt, Human
uguuaacauacugcuuucuaau

SEQ ID NO: 1091622 - RNA, 22 nt, Human
uucacagauuucccugcacaug

SEQ ID NO: 1091623 - RNA, 17 nt, Human
gcccugccugcugcccu

SEQ ID NO: 1091624 - RNA, 22 nt, Human
gccugccuggagcuugagguga

SEQ ID NO: 1091625 - RNA, 22 nt, Human
gaaguuagucuugaaguuaguc

SEQ ID NO: 1091626 - RNA, 20 nt, Human
uuacucaguuccugccaugc

SEQ ID NO: 1091627 - RNA, 22 nt, Human
gaguaaaaguuggauuacaaag

SEQ ID NO: 1091628 - RNA, 22 nt, Human
uuucacagucaauuuggaguca

SEQ ID NO: 1091629 - RNA, 19 nt, Human
acuguucuaacuugcagcu

SEQ ID NO: 1091630 - RNA, 22 nt, Human
ucaacauuuaugaagcuguggc

SEQ ID NO: 1091631 - RNA, 22 nt, Human
cuuuugcagccauuauugcugc

SEQ ID NO: 1091632 - RNA, 22 nt, Human
uuccucucucuugccagaaugu

SEQ ID NO: 1091633 - RNA, 20 nt, Human
agagagagguaaauugagca

SEQ ID NO: 1091634 - RNA, 22 nt, Human
gccuucugauugcuggacugac

SEQ ID NO: 1091635 - RNA, 22 nt, Human
ccucaguguuaggauaagagaa

SEQ ID NO: 1091636 - RNA, 22 nt, Human
ugcauguuauuguggcaagaau

SEQ ID NO: 1091637 - RNA, 22 nt, Human
auuguaaguagaaauguuaugg

SEQ ID NO: 1091638 - RNA, 22 nt, Human
aacagcaugcuggguaacauug

SEQ ID NO: 1091639 - RNA, 22 nt, Human
gugggcucaggccucugugggg

SEQ ID NO: 1091640 - RNA, 22 nt, Human
caugaacaccaggcaugaacaa

SEQ ID NO: 1091641 - RNA, 22 nt, Human
ccagcaccuugaucuuggaguu

SEQ ID NO: 1091642 - RNA, 22 nt, Human
aacuucugaccucaagaacugu

SEQ ID NO: 1091643 - RNA, 22 nt, Human
uacaaagaguuuggucucuaga

SEQ ID NO: 1091644 - RNA, 22 nt, Human
caagaauauauauggaguggag

SEQ ID NO: 1091645 - RNA, 23 nt, Human
agcuuuggugaugugacagauaa

SEQ ID NO: 1091646 - RNA, 22 nt, Human
augugguugaagaauuacaucu

SEQ ID NO: 1091647 - RNA, 22 nt, Human
ugaggcucaagaauagacagua

SEQ ID NO: 1091648 - RNA, 18 nt, Human
ggagccagucugucucug

SEQ ID NO: 1091649 - RNA, 21 nt, Human
guggcccugguguggcugcac

SEQ ID NO: 1091650 - RNA, 22 nt, Human
uuuuaagugcaaucugaaugcg

SEQ ID NO: 1091651 - RNA, 22 nt, Human
aaaucuaggcucauccuggucc

SEQ ID NO: 1091652 - RNA, 22 nt, Human
uagaaacuacuagaauaagaga

SEQ ID NO: 1091653 - RNA, 17 nt, Human
gcuuuggaaggguagac

SEQ ID NO: 1091654 - RNA, 22 nt, Human
gugcaauccaguugauuuuuac

SEQ ID NO: 1091655 - RNA, 22 nt, Human
cagcagcaaaucuagaagagga

SEQ ID NO: 1091656 - RNA, 22 nt, Human
uuguacagggaaguaauacaag

SEQ ID NO: 1091657 - RNA, 22 nt, Human
cuugaaagcuuugcgucuucua

SEQ ID NO: 1091658 - RNA, 22 nt, Human
gccaggcuggucuugaacuccu

SEQ ID NO: 1091659 - RNA, 22 nt, Human
uacauucccccaauuaccaaug

SEQ ID NO: 1091660 - RNA, 22 nt, Human
guggcacagugggagagcccca

SEQ ID NO: 1091661 - RNA, 22 nt, Human
uagcacauaacuuagaauaguu

SEQ ID NO: 1091662 - RNA, 22 nt, Human
ugcaggagcccuugggcucugg

SEQ ID NO: 1091663 - RNA, 22 nt, Human
agagugaaggccagguuacagu

SEQ ID NO: 1091664 - RNA, 22 nt, Human
caaguccaacaguuuuucagac

SEQ ID NO: 1091665 - RNA, 22 nt, Human
uggccagucuguggaagccagg

SEQ ID NO: 1091666 - RNA, 22 nt, Human
uucuggagcuaaaguccacucu

SEQ ID NO: 1091667 - RNA, 22 nt, Human
cccaaccagaaauugacagaga

SEQ ID NO: 1091668 - RNA, 22 nt, Human
gccaguggucacugaggaagaa

SEQ ID NO: 1091669 - RNA, 22 nt, Human
uugcauuuaaguagauguuaca

SEQ ID NO: 1091670 - RNA, 22 nt, Human
augggcugcuuggcuuccaccc

SEQ ID NO: 1091671 - RNA, 22 nt, Human
uuuauauguuuguacaauuaag

SEQ ID NO: 1091672 - RNA, 22 nt, Human
agauuccuaaaguaagauauca

SEQ ID NO: 1091673 - RNA, 21 nt, Human
uccacaaguuagaaggaaauu

SEQ ID NO: 1091674 - RNA, 22 nt, Human
gggggccuuauucaucugccag

SEQ ID NO: 1091675 - RNA, 22 nt, Human
acagauuuauugaagcugcugc

SEQ ID NO: 1091676 - RNA, 22 nt, Human
ugagaggcagaauggugccugc

SEQ ID NO: 1091677 - RNA, 18 nt, Human
auauguuaauuagguagg

SEQ ID NO: 1091678 - RNA, 22 nt, Human
agcccccucccuagugacugga

SEQ ID NO: 1091679 - RNA, 22 nt, Human
gaagaucaagugucauucugug

SEQ ID NO: 1091680 - RNA, 22 nt, Human
ggccuugggcagacacgucaca

SEQ ID NO: 1091681 - RNA, 22 nt, Human
ucaggaacacaggggcccaugc

SEQ ID NO: 1091682 - RNA, 22 nt, Human
ugucucaggggcauugaaauaa

SEQ ID NO: 1091683 - RNA, 22 nt, Human
ggccagagagcagccaggauuc

SEQ ID NO: 1091684 - RNA, 22 nt, Human
cuaggaaugguaccucuuacaa

SEQ ID NO: 1091685 - RNA, 22 nt, Human
ccaguguuuccccagaagagag

SEQ ID NO: 1091686 - RNA, 22 nt, Human
aacuuucugucugagcugcaga

SEQ ID NO: 1091687 - RNA, 22 nt, Human
gccaggagaaugcuagcagagg

SEQ ID NO: 1091688 - RNA, 22 nt, Human
cagcaguggccaucuguguggu

SEQ ID NO: 1091689 - RNA, 22 nt, Human
cuuauuagaaagaaaagacaug

SEQ ID NO: 1091690 - RNA, 22 nt, Human
ccagcugagguugaagaaagag

SEQ ID NO: 1091691 - RNA, 22 nt, Human
cugccuggaccggcagcccucc

SEQ ID NO: 1091692 - RNA, 22 nt, Human
ugguccaggguguaguacagag

SEQ ID NO: 1091693 - RNA, 22 nt, Human
ccucugagagaaggccuucagc

SEQ ID NO: 1091694 - RNA, 22 nt, Human
ucucugggugauggcagggcac

SEQ ID NO: 1091695 - RNA, 22 nt, Human
guauuuuuagguaaggaaagua

SEQ ID NO: 1091696 - RNA, 22 nt, Human
auagaaauguauuuuggacuag

SEQ ID NO: 1091697 - RNA, 22 nt, Human
aaucagaaagaggucauguugc

SEQ ID NO: 1091698 - RNA, 22 nt, Human
acacaccaugauuuauuuaccc

SEQ ID NO: 1091699 - RNA, 22 nt, Human
ucccagagccaagcuauggaug

SEQ ID NO: 1091700 - RNA, 22 nt, Human
cccugagagugagugccaccuu

SEQ ID NO: 1091701 - RNA, 22 nt, Human
gaacacagugguuguuuggagg

SEQ ID NO: 1091702 - RNA, 22 nt, Human
ggggaccuucccagagcaguug

SEQ ID NO: 1091703 - RNA, 22 nt, Human
uggaagggggaagacagcucug

SEQ ID NO: 1091704 - RNA, 22 nt, Human
aauguuugcaucuauucacaug

SEQ ID NO: 1091705 - RNA, 22 nt, Human
cucugugauuuugugagccaga

SEQ ID NO: 1091706 - RNA, 22 nt, Human
aguuuuauugucccagagguga

SEQ ID NO: 1091707 - RNA, 17 nt, Human
acagggcagaaacagcu

SEQ ID NO: 1091708 - RNA, 20 nt, Human
agcaagaguaaggacagcga

SEQ ID NO: 1091709 - RNA, 20 nt, Human
ugcugucguguuuucugcuu

SEQ ID NO: 1091710 - RNA, 22 nt, Human
uggcucaggugugagcugaaga

SEQ ID NO: 1091711 - RNA, 20 nt, Human
agcuuugguuaagccagugg

SEQ ID NO: 1091712 - RNA, 22 nt, Human
cagaaguggccucagagggagu

SEQ ID NO: 1091713 - RNA, 21 nt, Human
auuauuauuucuguguccagc

SEQ ID NO: 1091714 - RNA, 22 nt, Human
aucaguguauucauagggaaua

SEQ ID NO: 1091715 - RNA, 22 nt, Human
cugacuuugacuuggucauuga

SEQ ID NO: 1091716 - RNA, 22 nt, Human
uauuccuuggcaaaaaauauau

SEQ ID NO: 1091717 - RNA, 22 nt, Human
cgaugguucuggcugcuuguau

SEQ ID NO: 1091718 - RNA, 20 nt, Human
aauguuucugaacagguagu

SEQ ID NO: 1091719 - RNA, 22 nt, Human
accuggccauccagcuggcauc

SEQ ID NO: 1091720 - RNA, 22 nt, Human
uucauuugcacuggauuacugg

SEQ ID NO: 1091721 - RNA, 22 nt, Human
ccugugucuuccccacuggugu

SEQ ID NO: 1091722 - RNA, 22 nt, Human
agcuuguuagaaauguagacuc

SEQ ID NO: 1091723 - RNA, 22 nt, Human
ccagaggaaaaauaucucccua

SEQ ID NO: 1091724 - RNA, 22 nt, Human
ugcugccagccaggccauggag

SEQ ID NO: 1091725 - RNA, 22 nt, Human
agggccugcucuaucacucuca

SEQ ID NO: 1091726 - RNA, 22 nt, Human
uuugaaaaaggccuuugguaug

SEQ ID NO: 1091727 - RNA, 22 nt, Human
ugaagggggagauauaugugug

SEQ ID NO: 1091728 - RNA, 22 nt, Human
uucacaggaggguggaugcaug

SEQ ID NO: 1091729 - RNA, 22 nt, Human
aaaugugaguuauagcaauaga

SEQ ID NO: 1091730 - RNA, 22 nt, Human
uucaugcugugucuacaacuua

SEQ ID NO: 1091731 - RNA, 19 nt, Human
gaacacuuacuauauuucu

SEQ ID NO: 1091732 - RNA, 22 nt, Human
auuauuauuguugauguuaggg

SEQ ID NO: 1091733 - RNA, 22 nt, Human
acccggagucggagguugcagu

SEQ ID NO: 1091734 - RNA, 18 nt, Human
uuugcaaaggaaguaugg

SEQ ID NO: 1091735 - RNA, 22 nt, Human
auugcaaagcguagacucuaaa

SEQ ID NO: 1091736 - RNA, 22 nt, Human
agcagccaguucucugugguag

SEQ ID NO: 1091737 - RNA, 22 nt, Human
aggugacaucccggcagcagag

SEQ ID NO: 1091738 - RNA, 22 nt, Human
ccacacagucaguuuccaagaa

SEQ ID NO: 1091739 - RNA, 22 nt, Human
ucucagagauucagggagaagu

SEQ ID NO: 1091740 - RNA, 22 nt, Human
ugaaauguuugaagaccacuga

SEQ ID NO: 1091741 - RNA, 22 nt, Human
ugcaacaguggggcaugcugaa

SEQ ID NO: 1091742 - RNA, 22 nt, Human
acagauaauaggauguacccug

SEQ ID NO: 1091743 - RNA, 22 nt, Human
cagagcagggugcaccuugggc

SEQ ID NO: 1091744 - RNA, 19 nt, Human
uucacauuggaagaaguag

SEQ ID NO: 1091745 - RNA, 18 nt, Human
uccugccugcgggcuccc

SEQ ID NO: 1091746 - RNA, 22 nt, Human
gcucccaccaggcagaccuacc

SEQ ID NO: 1091747 - RNA, 22 nt, Human
agccuucaguaaauccacugug

SEQ ID NO: 1091748 - RNA, 22 nt, Human
ugaaaucaugagauagugucac

SEQ ID NO: 1091749 - RNA, 23 nt, Human
agcuuuuagguggaaauggcacu

SEQ ID NO: 1091750 - RNA, 22 nt, Human
ugaggcuggaugggaugccucc

SEQ ID NO: 1091751 - RNA, 22 nt, Human
ugggcagacgggagcuugccuu

SEQ ID NO: 1091752 - RNA, 22 nt, Human
aaauucugcaauuugacaagau

SEQ ID NO: 1091753 - RNA, 22 nt, Human
gaaauucacuguauuucuuggg

SEQ ID NO: 1091754 - RNA, 22 nt, Human
gcuauacaaguguagaauagag

SEQ ID NO: 1091755 - RNA, 22 nt, Human
agggcugaaacauaauccuucu

SEQ ID NO: 1091756 - RNA, 22 nt, Human
uaacuagauauagacuuucuac

SEQ ID NO: 1091757 - RNA, 18 nt, Human
gcugccugcauuccucac

SEQ ID NO: 1091758 - RNA, 22 nt, Human
aaaaugacauuccagugauauu

SEQ ID NO: 1091759 - RNA, 22 nt, Human
cuggcaagugguugggauggau

SEQ ID NO: 1091760 - RNA, 22 nt, Human
gcacacaguacuauaugcuaca

SEQ ID NO: 1091761 - RNA, 22 nt, Human
ccugagugccaugagagcaccc

SEQ ID NO: 1091762 - RNA, 22 nt, Human
auggggggaugaaggaguccaa

SEQ ID NO: 1091763 - RNA, 22 nt, Human
gggaaggccgguccagucaggu

SEQ ID NO: 1091764 - RNA, 17 nt, Human
ugaaggccaugaccacg

SEQ ID NO: 1091765 - RNA, 22 nt, Human
cauauuucagucuaagaugugu

SEQ ID NO: 1091766 - RNA, 22 nt, Human
ugaaacaaaccaguaauuuugu

SEQ ID NO: 1091767 - RNA, 22 nt, Human
uugucaaguaaggcugacauuu

SEQ ID NO: 1091768 - RNA, 22 nt, Human
uuaauacacuauaugaucacau

SEQ ID NO: 1091769 - RNA, 22 nt, Human
ugaaacuugaguauauauggau

SEQ ID NO: 1091770 - RNA, 22 nt, Human
ucucaggguuuguacaagugua

SEQ ID NO: 1091771 - RNA, 22 nt, Human
uuuaauauucugcauucuccuu

SEQ ID NO: 1091772 - RNA, 22 nt, Human
uuccucagagggcgcuggggaa

SEQ ID NO: 1091773 - RNA, 19 nt, Human
ucauucaggaccaguggau

SEQ ID NO: 1091774 - RNA, 22 nt, Human
uuuccuuuaugacaucaccacu

SEQ ID NO: 1091775 - RNA, 22 nt, Human
accauuaaucucacaaggauaa

SEQ ID NO: 1091776 - RNA, 22 nt, Human
ugcugagacaguggauaggggc

SEQ ID NO: 1091777 - RNA, 22 nt, Human
gcucaggaaauaguuuaguguu

SEQ ID NO: 1091778 - RNA, 22 nt, Human
cuggcaggaaguuagaugguaa

SEQ ID NO: 1091779 - RNA, 22 nt, Human
cuuguacauagagaagaagccu

SEQ ID NO: 1091780 - RNA, 22 nt, Human
aguucugguuaaccugcaaccu

SEQ ID NO: 1091781 - RNA, 22 nt, Human
acagagucaugguagucaaagg

SEQ ID NO: 1091782 - RNA, 22 nt, Human
cugcugggccuggucucugagg

SEQ ID NO: 1091783 - RNA, 22 nt, Human
gccuggcaguugacaguuugcu

SEQ ID NO: 1091784 - RNA, 21 nt, Human
aggaaguggccagauugggaa

SEQ ID NO: 1091785 - RNA, 22 nt, Human
aaacaagcugcagacaagccau

SEQ ID NO: 1091786 - RNA, 22 nt, Human
ucuuggccagguguggugccuc

SEQ ID NO: 1091787 - RNA, 22 nt, Human
ggcagccaugucccagggcuuc

SEQ ID NO: 1091788 - RNA, 22 nt, Human
aaaauagauaaugccaggguca

SEQ ID NO: 1091789 - RNA, 22 nt, Human
acagagauguggaugagggauu

SEQ ID NO: 1091790 - RNA, 22 nt, Human
ucagaggacuaccuucuccagu

SEQ ID NO: 1091791 - RNA, 22 nt, Human
gacaauaaagugauacauggga

SEQ ID NO: 1091792 - RNA, 22 nt, Human
cucuccucagaacaggcccucu

SEQ ID NO: 1091793 - RNA, 22 nt, Human
ggcagaccucuccagccccaca

SEQ ID NO: 1091794 - RNA, 22 nt, Human
cugggcucugcaguugauguuu

SEQ ID NO: 1091795 - RNA, 22 nt, Human
uagcaggguaaauguagaugga

SEQ ID NO: 1091796 - RNA, 18 nt, Human
acagaaauagcugugccu

SEQ ID NO: 1091797 - RNA, 22 nt, Human
cuaauauuuuuagaaaucacga

SEQ ID NO: 1091798 - RNA, 22 nt, Human
ugcacacacaggagucuccucc

SEQ ID NO: 1091799 - RNA, 22 nt, Human
gugugcaguagagaaagagcag

SEQ ID NO: 1091800 - RNA, 22 nt, Human
aagaagcauggcuguagauucc

SEQ ID NO: 1091801 - RNA, 20 nt, Human
auauagagucaaaauggcuu

SEQ ID NO: 1091802 - RNA, 22 nt, Human
gggcagagguucaacuucaaca

SEQ ID NO: 1091803 - RNA, 22 nt, Human
ugaggcagguaagcaaguuuug

SEQ ID NO: 1091804 - RNA, 22 nt, Human
agcuugauaguggcuaucaagc

SEQ ID NO: 1091805 - RNA, 19 nt, Human
cuucuggauccgcagggcc

SEQ ID NO: 1091806 - RNA, 22 nt, Human
auuaauaucccccgccguucug

SEQ ID NO: 1091807 - RNA, 22 nt, Human
ggcucuggugcccuggcuccca

SEQ ID NO: 1091808 - RNA, 22 nt, Human
gucuacaaagcauauaaaagag

SEQ ID NO: 1091809 - RNA, 22 nt, Human
gacuacaggugugugccaccau

SEQ ID NO: 1091810 - RNA, 22 nt, Human
aggguggagggagucccugagc

SEQ ID NO: 1091811 - RNA, 22 nt, Human
agucagugaaaacuagaauguu

SEQ ID NO: 1091812 - RNA, 22 nt, Human
agggagcccugaaccagagggu

SEQ ID NO: 1091813 - RNA, 22 nt, Human
agaaaugaagcaggaguuauua

SEQ ID NO: 1091814 - RNA, 18 nt, Human
gcaggagauggguggggu

SEQ ID NO: 1091815 - RNA, 22 nt, Human
gggcugagcuaagcuggguuga

SEQ ID NO: 1091816 - RNA, 22 nt, Human
aguggggaagagcaugggcccu

SEQ ID NO: 1091817 - RNA, 22 nt, Human
ucugucaaaugagcaaguaacu

SEQ ID NO: 1091818 - RNA, 22 nt, Human
ccacugcccaccccgacgucua

SEQ ID NO: 1091819 - RNA, 22 nt, Human
cugggcugcagcgggagcgacg

SEQ ID NO: 1091820 - RNA, 22 nt, Human
gccucuggucccucaugcugug

SEQ ID NO: 1091821 - RNA, 22 nt, Human
ccugggagguggagguugcagu

SEQ ID NO: 1091822 - RNA, 22 nt, Human
ccagagagaaaauggagggcca

SEQ ID NO: 1091823 - RNA, 22 nt, Human
ugaaaucaugaacaagguaggu

SEQ ID NO: 1091824 - RNA, 22 nt, Human
gccacuggcgcugugcagagug

SEQ ID NO: 1091825 - RNA, 22 nt, Human
uagggcuguuuaaaagugaggu

SEQ ID NO: 1091826 - RNA, 19 nt, Human
gcaucagagcagaaggggu

SEQ ID NO: 1091827 - RNA, 20 nt, Human
agcaaaaugcaagauuuuca

SEQ ID NO: 1091828 - RNA, 22 nt, Human
cagccuguggcagaggucuaau

SEQ ID NO: 1091829 - RNA, 22 nt, Human
cuguccuccagacgacaguccc

SEQ ID NO: 1091830 - RNA, 22 nt, Human
gaaggccacaagagaaguuaag

SEQ ID NO: 1091831 - RNA, 21 nt, Human
ccuucuccacagggucuccgg

SEQ ID NO: 1091832 - RNA, 22 nt, Human
uuuuagauaguuuaacugcacu

SEQ ID NO: 1091833 - RNA, 20 nt, Human
ugcagcugcaggaggguggg

SEQ ID NO: 1091834 - RNA, 22 nt, Human
ggagcugcacgcucugaagccu

SEQ ID NO: 1091835 - RNA, 22 nt, Human
uaacauuuaaauuuuucacaua

SEQ ID NO: 1091836 - RNA, 21 nt, Human
cccagggaagccgcagucacc

SEQ ID NO: 1091837 - RNA, 15 nt, Human
uucaggauaugacuc

SEQ ID NO: 1091838 - RNA, 22 nt, Human
uucuuaaguuuagcaacuugug

SEQ ID NO: 1091839 - RNA, 22 nt, Human
cucaauaugccagaggggaaag

SEQ ID NO: 1091840 - RNA, 18 nt, Human
aggcuucuuggcucaguc

SEQ ID NO: 1091841 - RNA, 22 nt, Human
uguggcucucaugcacucccag

SEQ ID NO: 1091842 - RNA, 22 nt, Human
cuauauauaucaucuuccaguu

SEQ ID NO: 1091843 - RNA, 22 nt, Human
uagcagcaccuuucuaaucuga

SEQ ID NO: 1091844 - RNA, 22 nt, Human
auugaaaggcaaaguaggaagc

SEQ ID NO: 1091845 - RNA, 22 nt, Human
gcugagaggcagccagacccuc

SEQ ID NO: 1091846 - RNA, 22 nt, Human
acugaaaaagacaucuugguaa

SEQ ID NO: 1091847 - RNA, 21 nt, Human
gcagaugggagucaucaggcu

SEQ ID NO: 1091848 - RNA, 22 nt, Human
uacaaagugcuuuagaaaugaa

SEQ ID NO: 1091849 - RNA, 22 nt, Human
gggaugucguggguggcagcug

SEQ ID NO: 1091850 - RNA, 22 nt, Human
gcugagagaucaaggcaggauu

SEQ ID NO: 1091851 - RNA, 22 nt, Human
caggcacaggggaaugucuuuu

SEQ ID NO: 1091852 - RNA, 22 nt, Human
aucuuuaguagaggaauauauu

SEQ ID NO: 1091853 - RNA, 22 nt, Human
aucaguuuuuauuaauguagcu

SEQ ID NO: 1091854 - RNA, 22 nt, Human
acaguaccugcucucaagcaaa

SEQ ID NO: 1091855 - RNA, 19 nt, Human
gcacugaagaguuggucac

SEQ ID NO: 1091856 - RNA, 22 nt, Human
ucccaggcuggggccaggugac

SEQ ID NO: 1091857 - RNA, 22 nt, Human
caucagaacgugagcuccuugu

SEQ ID NO: 1091858 - RNA, 22 nt, Human
agugcuuuaccuagauaauguu

SEQ ID NO: 1091859 - RNA, 22 nt, Human
ugcauucugaacguaaauguga

SEQ ID NO: 1091860 - RNA, 22 nt, Human
uuccaaaugcccaucuacacag

SEQ ID NO: 1091861 - RNA, 22 nt, Human
ccuugaaucucugcucuagaac

SEQ ID NO: 1091862 - RNA, 21 nt, Human
uucauucauggcauaauauag

SEQ ID NO: 1091863 - RNA, 17 nt, Human
aaacaaugcagacaagc

SEQ ID NO: 1091864 - RNA, 22 nt, Human
gcucugagauugagccuuuggu

SEQ ID NO: 1091865 - RNA, 22 nt, Human
agaaaucaaugaagucugcuaa

SEQ ID NO: 1091866 - RNA, 22 nt, Human
uucuccagagggcucugcagga

SEQ ID NO: 1091867 - RNA, 22 nt, Human
ugccucgugucugagucuguuc

SEQ ID NO: 1091868 - RNA, 22 nt, Human
cucugcugaucucagcugggcu

SEQ ID NO: 1091869 - RNA, 22 nt, Human
cugugucuucaauguacuggga

SEQ ID NO: 1091870 - RNA, 22 nt, Human
ccugagagugagugccaccuua

SEQ ID NO: 1091871 - RNA, 22 nt, Human
ugcaauuuucagaaauuccaaa

SEQ ID NO: 1091872 - RNA, 22 nt, Human
acagaagcucaagagagcagug

SEQ ID NO: 1091873 - RNA, 22 nt, Human
uuugcaacagacucaucauuga

SEQ ID NO: 1091874 - RNA, 22 nt, Human
caauacaucaggucaaaaugug

SEQ ID NO: 1091875 - RNA, 22 nt, Human
uuuuaagaaauguaugacuguc

SEQ ID NO: 1091876 - RNA, 18 nt, Human
agcagagcccaugcauuc

SEQ ID NO: 1091877 - RNA, 22 nt, Human
ugaggcaguauucuccauucca

SEQ ID NO: 1091878 - RNA, 19 nt, Human
ggauccagaggaucugcca

SEQ ID NO: 1091879 - RNA, 22 nt, Human
cagugucuccagaugcuccaau

SEQ ID NO: 1091880 - RNA, 22 nt, Human
agccugcaggaugggcagcacc

SEQ ID NO: 1091881 - RNA, 22 nt, Human
auuucucaaguaaaugagucau

SEQ ID NO: 1091882 - RNA, 22 nt, Human
caucaguuccugccccugcccc

SEQ ID NO: 1091883 - RNA, 17 nt, Human
auguauauuaacucuga

SEQ ID NO: 1091884 - RNA, 20 nt, Human
uuuuagcacuuguuauggug

SEQ ID NO: 1091885 - RNA, 22 nt, Human
uuuacacauuauuuucagugug

SEQ ID NO: 1091886 - RNA, 22 nt, Human
gggcaguugauggaggucugga

SEQ ID NO: 1091887 - RNA, 22 nt, Human
cuguggcauugccgaggcuggc

SEQ ID NO: 1091888 - RNA, 22 nt, Human
uuacuaaguuuuaugcaacuua

SEQ ID NO: 1091889 - RNA, 22 nt, Human
uuguugucauuguagaggauuu

SEQ ID NO: 1091890 - RNA, 22 nt, Human
gagaaacacuguuaguuuauua

SEQ ID NO: 1091891 - RNA, 22 nt, Human
augagacuaccuguaauguggc

SEQ ID NO: 1091892 - RNA, 22 nt, Human
ugcauuguugaugaguugaaua

SEQ ID NO: 1091893 - RNA, 22 nt, Human
agugcagcucccucaccugcuu

SEQ ID NO: 1091894 - RNA, 22 nt, Human
cuccagggagcugcgggagcca

SEQ ID NO: 1091895 - RNA, 22 nt, Human
uuuacacaaaagauagcacacc

SEQ ID NO: 1091896 - RNA, 20 nt, Human
ugcucugucuaaaacuuccc

SEQ ID NO: 1091897 - RNA, 21 nt, Human
guggccugauuaugaaugggu

SEQ ID NO: 1091898 - RNA, 23 nt, Human
ugcugggguaguuuguggcacag

SEQ ID NO: 1091899 - RNA, 22 nt, Human
agcugccacugagggugcacag

SEQ ID NO: 1091900 - RNA, 22 nt, Human
agcugccaucagccuuuggaug

SEQ ID NO: 1091901 - RNA, 22 nt, Human
acugugugcuggacaugauguu

SEQ ID NO: 1091902 - RNA, 22 nt, Human
acuccugguuuguguccuggcu

SEQ ID NO: 1091903 - RNA, 22 nt, Human
ugaccugggcauuacaggugca

SEQ ID NO: 1091904 - RNA, 22 nt, Human
caccagcuacagacuacugugu

SEQ ID NO: 1091905 - RNA, 22 nt, Human
ccuccuuccugggacagagcug

SEQ ID NO: 1091906 - RNA, 22 nt, Human
uuacaugaauacauaaccauuc

SEQ ID NO: 1091907 - RNA, 22 nt, Human
ugagccuggggccugggcagcg

SEQ ID NO: 1091908 - RNA, 22 nt, Human
accauuugaaggaaucauugac

SEQ ID NO: 1091909 - RNA, 16 nt, Human
ccacagggcaaggggc

SEQ ID NO: 1091910 - RNA, 22 nt, Human
ccucagagguuuucauucugua

SEQ ID NO: 1091911 - RNA, 22 nt, Human
gaauacaugauacaugaacugc

SEQ ID NO: 1091912 - RNA, 22 nt, Human
gcugcagcuguaggacacaauu

SEQ ID NO: 1091913 - RNA, 18 nt, Human
aaacuguauuucuuucua

SEQ ID NO: 1091914 - RNA, 22 nt, Human
gcaggcuggaggcuguucuggg

SEQ ID NO: 1091915 - RNA, 22 nt, Human
gggcugucacgccccugcaccu

SEQ ID NO: 1091916 - RNA, 22 nt, Human
gccuuaggggucagacagagcu

SEQ ID NO: 1091917 - RNA, 22 nt, Human
gcacagccuugcccugugcccu

SEQ ID NO: 1091918 - RNA, 22 nt, Human
cagguggcuucucccuaggcca

SEQ ID NO: 1091919 - RNA, 22 nt, Human
gugaaaaaucaucaugacuuga

SEQ ID NO: 1091920 - RNA, 22 nt, Human
uauagccauuuccaguggcauc

SEQ ID NO: 1091921 - RNA, 22 nt, Human
cucagcuacuugggaagcuuag

SEQ ID NO: 1091922 - RNA, 22 nt, Human
ucacacagggucggaaagagug

SEQ ID NO: 1091923 - RNA, 22 nt, Human
uucagaaaggauaauuggaagg

SEQ ID NO: 1091924 - RNA, 22 nt, Human
aaaggugacacucugccagcug

SEQ ID NO: 1091925 - RNA, 22 nt, Human
uaacaguaccauuaacuuugau

SEQ ID NO: 1091926 - RNA, 20 nt, Human
gaaauguaucucuugauucu

SEQ ID NO: 1091927 - RNA, 22 nt, Human
ugccagucucacccuggguccu

SEQ ID NO: 1091928 - RNA, 22 nt, Human
cuuaaaguagaauacaagaccu

SEQ ID NO: 1091929 - RNA, 22 nt, Human
cuggcucuucagugcuugguuc

SEQ ID NO: 1091930 - RNA, 22 nt, Human
uucuuugugcauccaauuuucu

SEQ ID NO: 1091931 - RNA, 22 nt, Human
acagaggaagcauauagcacaa

SEQ ID NO: 1091932 - RNA, 19 nt, Human
uuugugaagaaaaugaugc

SEQ ID NO: 1091933 - RNA, 22 nt, Human
ccccacacucuuuacauucaua

SEQ ID NO: 1091934 - RNA, 22 nt, Human
uccaggccgcaggggcagcccc

SEQ ID NO: 1091935 - RNA, 17 nt, Human
cucagaguugcuuuguc

SEQ ID NO: 1091936 - RNA, 19 nt, Human
agcuggcagcuuccacuuc

SEQ ID NO: 1091937 - RNA, 22 nt, Human
caguaaugggcaagacaauaug

SEQ ID NO: 1091938 - RNA, 22 nt, Human
gggguguggacggcugugccag

SEQ ID NO: 1091939 - RNA, 22 nt, Human
aggcuggugcuuccuagggcag

SEQ ID NO: 1091940 - RNA, 22 nt, Human
agccuuuuggaguuauucuggg

SEQ ID NO: 1091941 - RNA, 22 nt, Human
uggagcugggguuugaaucugg

SEQ ID NO: 1091942 - RNA, 22 nt, Human
gcagagcuaucuucuggauuug

SEQ ID NO: 1091943 - RNA, 22 nt, Human
agggucagcuggcugucagggg

SEQ ID NO: 1091944 - RNA, 22 nt, Human
gcagcucuccucugugaggaac

SEQ ID NO: 1091945 - RNA, 22 nt, Human
uagaacagaggguugcccagau

SEQ ID NO: 1091946 - RNA, 22 nt, Human
acacauuuacauguuuacguau

SEQ ID NO: 1091947 - RNA, 22 nt, Human
acacuucuauucccugcacaaa

SEQ ID NO: 1091948 - RNA, 20 nt, Human
ucagaggcugccagcugggg

SEQ ID NO: 1091949 - RNA, 22 nt, Human
gcagcuuggauuucuguaguuu

SEQ ID NO: 1091950 - RNA, 22 nt, Human
gaggcagagugcaccccaggag

SEQ ID NO: 1091951 - RNA, 22 nt, Human
agcucugcaggcacagcugagg

SEQ ID NO: 1091952 - RNA, 22 nt, Human
ggaagagaaaugagucaagacu

SEQ ID NO: 1091953 - RNA, 22 nt, Human
ggaacagacugacuucuugaau

SEQ ID NO: 1091954 - RNA, 22 nt, Human
ucuucagucaauccagauguuu

SEQ ID NO: 1091955 - RNA, 22 nt, Human
gacauaaaccuugagauauuaa

SEQ ID NO: 1091956 - RNA, 22 nt, Human
aagaaagcugaauauucugugu

SEQ ID NO: 1091957 - RNA, 22 nt, Human
cugcugccggcgagccucccuu

SEQ ID NO: 1091958 - RNA, 22 nt, Human
uucauuuaaucagaaucucuaa

SEQ ID NO: 1091959 - RNA, 22 nt, Human
aaaucacuaaguuauagugugg

SEQ ID NO: 1091960 - RNA, 22 nt, Human
gagggagggacuagcauucucu

SEQ ID NO: 1091961 - RNA, 22 nt, Human
agaauuuuugauuaucuacucg

SEQ ID NO: 1091962 - RNA, 22 nt, Human
cugggaggugcagcaaaaauca

SEQ ID NO: 1091963 - RNA, 22 nt, Human
uggagcugggauuugaacugca

SEQ ID NO: 1091964 - RNA, 22 nt, Human
aagcuggcaugucaccugagaa

SEQ ID NO: 1091965 - RNA, 22 nt, Human
ucugaaauaagggagaagggaa

SEQ ID NO: 1091966 - RNA, 22 nt, Human
uggucucugacucugaagaccc

SEQ ID NO: 1091967 - RNA, 22 nt, Human
aauguacagcugcugcugaagg

SEQ ID NO: 1091968 - RNA, 22 nt, Human
ugagccagaggaggcugugugg

SEQ ID NO: 1091969 - RNA, 22 nt, Human
gcagggcuguucaggagggugg

SEQ ID NO: 1091970 - RNA, 18 nt, Human
uuugcuuuccuucuucag

SEQ ID NO: 1091971 - RNA, 21 nt, Human
aaguaaaucagagaaauaacc

SEQ ID NO: 1091972 - RNA, 20 nt, Human
cagggccacgcuccaaggca

SEQ ID NO: 1091973 - RNA, 22 nt, Human
ucuuagaaguuuauggcacgga

SEQ ID NO: 1091974 - RNA, 22 nt, Human
ugcaaggugcuuuuugguguca

SEQ ID NO: 1091975 - RNA, 22 nt, Human
ggcccugcaugagauuaagguu

SEQ ID NO: 1091976 - RNA, 22 nt, Human
gagaggcauggaacagauucuu

SEQ ID NO: 1091977 - RNA, 20 nt, Human
aggcacuguugucuguaucc

SEQ ID NO: 1091978 - RNA, 22 nt, Human
ugccugaagaaaacuugcagca

SEQ ID NO: 1091979 - RNA, 22 nt, Human
agucucuuuaaucacagugucu

SEQ ID NO: 1091980 - RNA, 22 nt, Human
auuccaaacucuuucccugucg

SEQ ID NO: 1091981 - RNA, 22 nt, Human
cugagaguucguuccacccucc

SEQ ID NO: 1091982 - RNA, 22 nt, Human
agaggcggagcuugcagugagc

SEQ ID NO: 1091983 - RNA, 21 nt, Human
agagaagggacucuuccaguc

SEQ ID NO: 1091984 - RNA, 22 nt, Human
gugugcaggccacaggccaggg

SEQ ID NO: 1091985 - RNA, 22 nt, Human
aucaaaguaauuaacacugaga

SEQ ID NO: 1091986 - RNA, 22 nt, Human
gcacagcagccgaaaugcccuu

SEQ ID NO: 1091987 - RNA, 22 nt, Human
ugaaaagugaucauggauuagg

SEQ ID NO: 1091988 - RNA, 23 nt, Human
aaaccuuuuguagaacaauugcu

SEQ ID NO: 1091989 - RNA, 22 nt, Human
agucucuuuguggacucugccu

SEQ ID NO: 1091990 - RNA, 22 nt, Human
augcaccugaacuccaucagcu

SEQ ID NO: 1091991 - RNA, 22 nt, Human
agugccuggaccccaugacaua

SEQ ID NO: 1091992 - RNA, 22 nt, Human
ugcugcuguuuccuacaucuca

SEQ ID NO: 1091993 - RNA, 22 nt, Human
aaaugcucaccacagggaugug

SEQ ID NO: 1091994 - RNA, 23 nt, Human
ucuguuuugcaacaugugacaag

SEQ ID NO: 1091995 - RNA, 22 nt, Human
cccuucccuucugggagaucca

SEQ ID NO: 1091996 - RNA, 17 nt, Human
cccuggcucuaggugga

SEQ ID NO: 1091997 - RNA, 21 nt, Human
gccaccccuggcacaggugcu

SEQ ID NO: 1091998 - RNA, 22 nt, Human
ccugcagaagaguccagcucau

SEQ ID NO: 1091999 - RNA, 22 nt, Human
acccuggguucccgcagcacca

SEQ ID NO: 1092000 - RNA, 22 nt, Human
gggaggugauggcaagcagcgg

SEQ ID NO: 1092001 - RNA, 22 nt, Human
ccugugagucaaccccuccuug

SEQ ID NO: 1092002 - RNA, 18 nt, Human
ccuggcacacuggcucau

SEQ ID NO: 1092003 - RNA, 22 nt, Human
aggcaguggcugagaccagggg

SEQ ID NO: 1092004 - RNA, 22 nt, Human
acagcucuguguauugucaucu

SEQ ID NO: 1092005 - RNA, 22 nt, Human
cagccagcuggcacugugagua

SEQ ID NO: 1092006 - RNA, 22 nt, Human
uuuccuuugcccaauacauguc

SEQ ID NO: 1092007 - RNA, 21 nt, Human
uccagcucuuauguucaugaa

SEQ ID NO: 1092008 - RNA, 22 nt, Human
cucagucaugacgcucaggacc

SEQ ID NO: 1092009 - RNA, 22 nt, Human
augcuuaaccuugguguacaau

SEQ ID NO: 1092010 - RNA, 22 nt, Human
ucccagcccagacuucuccagu

SEQ ID NO: 1092011 - RNA, 21 nt, Human
uagcagagaguuaacuucucc

SEQ ID NO: 1092012 - RNA, 22 nt, Human
cagggcuggauuucauuucuag

SEQ ID NO: 1092013 - RNA, 22 nt, Human
ugaacagauguggagguaccuu

SEQ ID NO: 1092014 - RNA, 22 nt, Human
acauuuuaauaugcuuagugug

SEQ ID NO: 1092015 - RNA, 22 nt, Human
uaacaugcuaggaagagugauu

SEQ ID NO: 1092016 - RNA, 20 nt, Human
gaacauggcagguggagggg

SEQ ID NO: 1092017 - RNA, 22 nt, Human
cuuuccuagaaauauauacuua

SEQ ID NO: 1092018 - RNA, 22 nt, Human
agcagcugccagagagaguucc

SEQ ID NO: 1092019 - RNA, 22 nt, Human
agguccagaacgugccuacucu

SEQ ID NO: 1092020 - RNA, 22 nt, Human
gcacuguucucagagcauuaga

SEQ ID NO: 1092021 - RNA, 22 nt, Human
cccagcaucuccaggcauggcc

SEQ ID NO: 1092022 - RNA, 22 nt, Human
agccaugcaccuuacucuugcu

SEQ ID NO: 1092023 - RNA, 22 nt, Human
cagcacagugcagaugcugacu

SEQ ID NO: 1092024 - RNA, 22 nt, Human
gauuucuuugaauuagagaggu

SEQ ID NO: 1092025 - RNA, 22 nt, Human
uaggaacaguuucaggauguuu

SEQ ID NO: 1092026 - RNA, 22 nt, Human
uugaacagcuguuacauuguua

SEQ ID NO: 1092027 - RNA, 22 nt, Human
auuucuauaggaggacaguauu

SEQ ID NO: 1092028 - RNA, 22 nt, Human
auagucuuagucuauaguuuug

SEQ ID NO: 1092029 - RNA, 22 nt, Human
ugucauguguucuuaaauacau

SEQ ID NO: 1092030 - RNA, 22 nt, Human
gagcuggcuccgccaugcugcu

SEQ ID NO: 1092031 - RNA, 22 nt, Human
aggggagaguuaaugugaaugu

SEQ ID NO: 1092032 - RNA, 22 nt, Human
ccagucagccaagcugcagcgg

SEQ ID NO: 1092033 - RNA, 22 nt, Human
augcaguguuuggaagcuuaag

SEQ ID NO: 1092034 - RNA, 22 nt, Human
cugagccagcuggcaugugcua

SEQ ID NO: 1092035 - RNA, 21 nt, Human
uucauuuguuauagacaaagu

SEQ ID NO: 1092036 - RNA, 22 nt, Human
acagugcuaaacacuucuugaa

SEQ ID NO: 1092037 - RNA, 22 nt, Human
uaccauuugagagagaacauaa

SEQ ID NO: 1092038 - RNA, 22 nt, Human
aggacuuuaucuucuagaccuc

SEQ ID NO: 1092039 - RNA, 22 nt, Human
guuacauuacuugugcaguugu

SEQ ID NO: 1092040 - RNA, 22 nt, Human
caggaagauuagaccaagagcu

SEQ ID NO: 1092041 - RNA, 22 nt, Human
guaaaauucuagcaucugaaag

SEQ ID NO: 1092042 - RNA, 22 nt, Human
agaucucaccucuguguauuau

SEQ ID NO: 1092043 - RNA, 22 nt, Human
cucuucaguuguugcauauucu

SEQ ID NO: 1092044 - RNA, 22 nt, Human
ugccaaauugcccuauaaauga

SEQ ID NO: 1092045 - RNA, 22 nt, Human
agcagggcucacauuaguggau

SEQ ID NO: 1092046 - RNA, 22 nt, Human
auuagcuugguaugccauaaag

SEQ ID NO: 1092047 - RNA, 22 nt, Human
ugggcagagaucuggaucaaac

SEQ ID NO: 1092048 - RNA, 22 nt, Human
aauauucauuugcagaagaagu

SEQ ID NO: 1092049 - RNA, 22 nt, Human
aucaacaugacaggagaagaga

SEQ ID NO: 1092050 - RNA, 22 nt, Human
aucuuuagauuagaaacucuaa

SEQ ID NO: 1092051 - RNA, 21 nt, Human
guuauuuuaagugagcuuugc

SEQ ID NO: 1092052 - RNA, 18 nt, Human
acagacaaaauggaaaug

SEQ ID NO: 1092053 - RNA, 22 nt, Human
gagauggggaauaggagcaagc

SEQ ID NO: 1092054 - RNA, 23 nt, Human
uggcucagggucucuuaugaagu

SEQ ID NO: 1092055 - RNA, 22 nt, Human
gauguagagggaagauuuuaaa

SEQ ID NO: 1092056 - RNA, 22 nt, Human
gaagacauguuuuuaauaugua

SEQ ID NO: 1092057 - RNA, 22 nt, Human
acagcaaaggacgaacacucug

SEQ ID NO: 1092058 - RNA, 22 nt, Human
gaaauucugugucccagagugc

SEQ ID NO: 1092059 - RNA, 23 nt, Human
auuaccagccugacaccaacaaa

SEQ ID NO: 1092060 - RNA, 22 nt, Human
aagcaaaacgugcucuaggagg

SEQ ID NO: 1092061 - RNA, 22 nt, Human
uauaacaccauguucuacagau

SEQ ID NO: 1092062 - RNA, 22 nt, Human
augagacaggacuguaugcagg

SEQ ID NO: 1092063 - RNA, 22 nt, Human
ucagauggucauucacuagggu

SEQ ID NO: 1092064 - RNA, 18 nt, Human
aaguccuuccuuugcuuu

SEQ ID NO: 1092065 - RNA, 22 nt, Human
uagaccaggggagucaacaggu

SEQ ID NO: 1092066 - RNA, 22 nt, Human
ucagggaaugugauacaggaag

SEQ ID NO: 1092067 - RNA, 22 nt, Human
cucuuucuggaaggcagagugg

SEQ ID NO: 1092068 - RNA, 22 nt, Human
ccaggcucugugugggcuagag

SEQ ID NO: 1092069 - RNA, 22 nt, Human
agcugcucuugggugacuucaa

SEQ ID NO: 1092070 - RNA, 19 nt, Human
ugggaguggggaagguccu

SEQ ID NO: 1092071 - RNA, 22 nt, Human
uucucuuagcuguaaagucaau

SEQ ID NO: 1092072 - RNA, 22 nt, Human
gugggagcuuuggcaucaggcu

SEQ ID NO: 1092073 - RNA, 22 nt, Human
cugugggagaaguugcuggagu

SEQ ID NO: 1092074 - RNA, 22 nt, Human
uuaagcauaauuaaagugaaau

SEQ ID NO: 1092075 - RNA, 22 nt, Human
ccuggggaaucuugcaggggaa

SEQ ID NO: 1092076 - RNA, 23 nt, Human
cacuccuguuucuaagccagcau

SEQ ID NO: 1092077 - RNA, 22 nt, Human
uuuaauguagcgugaaaugauu

SEQ ID NO: 1092078 - RNA, 22 nt, Human
uucacauugaaggugcuuucuu

SEQ ID NO: 1092079 - RNA, 22 nt, Human
gagucacaaaagaugcccaggg

SEQ ID NO: 1092080 - RNA, 22 nt, Human
guaggaagcucugaggcuaguu

SEQ ID NO: 1092081 - RNA, 22 nt, Human
ggaggagggguuuacauuggaa

SEQ ID NO: 1092082 - RNA, 22 nt, Human
ggcugagccacugcgccuggcu

SEQ ID NO: 1092083 - RNA, 22 nt, Human
ggagaaaggauaggaaugugcu

SEQ ID NO: 1092084 - RNA, 22 nt, Human
cauucacagagggggaagcauc

SEQ ID NO: 1092085 - RNA, 22 nt, Human
ugggaaauguguuucuggacca

SEQ ID NO: 1092086 - RNA, 20 nt, Human
guucacaggcuuccuuucag

SEQ ID NO: 1092087 - RNA, 22 nt, Human
cugucaguaggcucccaucauu

SEQ ID NO: 1092088 - RNA, 19 nt, Human
acaauaacucauugauugc

SEQ ID NO: 1092089 - RNA, 22 nt, Human
aaugcuuuaauugcauguagug

SEQ ID NO: 1092090 - RNA, 22 nt, Human
cuucccagaccuuagagugcag

SEQ ID NO: 1092091 - RNA, 23 nt, Human
gccugugccuaugcccagcucug

SEQ ID NO: 1092092 - RNA, 18 nt, Human
ggaccacaucaacuugaa

SEQ ID NO: 1092093 - RNA, 22 nt, Human
gcucccacaaccuucuugcucc

SEQ ID NO: 1092094 - RNA, 22 nt, Human
ggccucucauguccugggcuuc

SEQ ID NO: 1092095 - RNA, 22 nt, Human
aagcagcacaguaauauuggug

SEQ ID NO: 1092096 - RNA, 22 nt, Human
gccagccugugcuuggccaggc

SEQ ID NO: 1092097 - RNA, 22 nt, Human
uaguauucagcuucucaggcaa

SEQ ID NO: 1092098 - RNA, 22 nt, Human
gaggagagaagcuaacggugcu

SEQ ID NO: 1092099 - RNA, 22 nt, Human
guuucauaugcaguuaacagca

SEQ ID NO: 1092100 - RNA, 22 nt, Human
caacagaagguguacuacugaa

SEQ ID NO: 1092101 - RNA, 22 nt, Human
ugaaauuuaggugcagauaaau

SEQ ID NO: 1092102 - RNA, 22 nt, Human
agccaggcgggucuuugcuccu

SEQ ID NO: 1092103 - RNA, 22 nt, Human
auggaaauguaacuucugauuc

SEQ ID NO: 1092104 - RNA, 21 nt, Human
agcugcaggccucccagggau

SEQ ID NO: 1092105 - RNA, 22 nt, Human
ugggggugugccagggaccucc

SEQ ID NO: 1092106 - RNA, 22 nt, Human
ggacauuuagaacagaguauuu

SEQ ID NO: 1092107 - RNA, 23 nt, Human
aaacugcuuccaauuccugccau

SEQ ID NO: 1092108 - RNA, 22 nt, Human
caguccagcucaucaguggcac

SEQ ID NO: 1092109 - RNA, 22 nt, Human
caucuuuauuuauauagacagg

SEQ ID NO: 1092110 - RNA, 22 nt, Human
gaggcucugugaugugccaggc

SEQ ID NO: 1092111 - RNA, 22 nt, Human
gggccugcuggugcuuccauug

SEQ ID NO: 1092112 - RNA, 23 nt, Human
agacagaggcugaggcuggccgc

SEQ ID NO: 1092113 - RNA, 22 nt, Human
cccaggaaugaggggcggaggc

SEQ ID NO: 1092114 - RNA, 22 nt, Human
gcuggcagcauuagacccuggg

SEQ ID NO: 1092115 - RNA, 22 nt, Human
cuucacaguaaauccagaagaa

SEQ ID NO: 1092116 - RNA, 22 nt, Human
ccugcugguguccaggcuuugg

SEQ ID NO: 1092117 - RNA, 22 nt, Human
agcacugugauuuauaacauuu

SEQ ID NO: 1092118 - RNA, 22 nt, Human
cagcaaaauuugaggauugccu

SEQ ID NO: 1092119 - RNA, 22 nt, Human
gcagaugccagaucaugcaggg

SEQ ID NO: 1092120 - RNA, 22 nt, Human
cugagaaaauuucaggaagugu

SEQ ID NO: 1092121 - RNA, 22 nt, Human
uaguaucuuucuauauuuccca

SEQ ID NO: 1092122 - RNA, 22 nt, Human
uucaagaagcccaaagacuagc

SEQ ID NO: 1092123 - RNA, 22 nt, Human
caaagaugccaaaaggaagaca

SEQ ID NO: 1092124 - RNA, 22 nt, Human
ugaaggaaagagggaacauccc

SEQ ID NO: 1092125 - RNA, 20 nt, Human
agaauucuuacccuuugaug

SEQ ID NO: 1092126 - RNA, 22 nt, Human
gcaggggcuacucugagcuucc

SEQ ID NO: 1092127 - RNA, 22 nt, Human
ucagaggaauuugcuuuucaug

SEQ ID NO: 1092128 - RNA, 22 nt, Human
ucuucacaugaccuucaugucu

SEQ ID NO: 1092129 - RNA, 22 nt, Human
uuuggcucgauggacuuugaau

SEQ ID NO: 1092130 - RNA, 20 nt, Human
uguaagaaguaggaggguua

SEQ ID NO: 1092131 - RNA, 22 nt, Human
auaaugaaauaugaggaagguc

SEQ ID NO: 1092132 - RNA, 22 nt, Human
aggugggggcuguguccuugac

SEQ ID NO: 1092133 - RNA, 22 nt, Human
gcaggggcugcugggaacucgg

SEQ ID NO: 1092134 - RNA, 22 nt, Human
aacaugcucuguuucuuggaug

SEQ ID NO: 1092135 - RNA, 22 nt, Human
cuguuaaucugcuugcaugaug

SEQ ID NO: 1092136 - RNA, 22 nt, Human
ccuggcuggcaagaucgugaag

SEQ ID NO: 1092137 - RNA, 22 nt, Human
cucugcagauucaucccuucac

SEQ ID NO: 1092138 - RNA, 22 nt, Human
ucucugugguuugagagccggg

SEQ ID NO: 1092139 - RNA, 16 nt, Human
ccaccugcagcucuca

SEQ ID NO: 1092140 - RNA, 22 nt, Human
ggugcccuguaaaagccaugca

SEQ ID NO: 1092141 - RNA, 22 nt, Human
uauguacaaucagcaguucaua

SEQ ID NO: 1092142 - RNA, 22 nt, Human
cagagcugguguuacaagucca

SEQ ID NO: 1092143 - RNA, 19 nt, Human
ucccuucuauaguaauaaa

SEQ ID NO: 1092144 - RNA, 22 nt, Human
acacuuuacagcuuccuuugca

SEQ ID NO: 1092145 - RNA, 21 nt, Human
aaagagacaaauggcauauac

SEQ ID NO: 1092146 - RNA, 22 nt, Human
acucuucaagggccuagaggug

SEQ ID NO: 1092147 - RNA, 22 nt, Human
ucaauuaugccauugcaauauu

SEQ ID NO: 1092148 - RNA, 22 nt, Human
aagggccuccuggggagccugg

SEQ ID NO: 1092149 - RNA, 22 nt, Human
guucaaaggccuguggaaaggg

SEQ ID NO: 1092150 - RNA, 22 nt, Human
cugucuguucagauucauuacu

SEQ ID NO: 1092151 - RNA, 22 nt, Human
uuucuucagccacuccaaacug

SEQ ID NO: 1092152 - RNA, 17 nt, Human
gguguauggggagggaa

SEQ ID NO: 1092153 - RNA, 22 nt, Human
caggccugauacacugaacucu

SEQ ID NO: 1092154 - RNA, 20 nt, Human
caauuucaucauuuccugug

SEQ ID NO: 1092155 - RNA, 22 nt, Human
uucaagaucgaguuuaaaguga

SEQ ID NO: 1092156 - RNA, 22 nt, Human
ucauacaucuuguauaucuauc

SEQ ID NO: 1092157 - RNA, 22 nt, Human
cucuuaguuuaucuuugacaaa

SEQ ID NO: 1092158 - RNA, 22 nt, Human
augccaaauucucagccucuuu

SEQ ID NO: 1092159 - RNA, 22 nt, Human
cugccagcucgccacaaugaca

SEQ ID NO: 1092160 - RNA, 22 nt, Human
auguuucaagagaaaaagagac

SEQ ID NO: 1092161 - RNA, 22 nt, Human
uacaucaagauaaaaacuguca

SEQ ID NO: 1092162 - RNA, 20 nt, Human
ucagagucaucaaagauggu

SEQ ID NO: 1092163 - RNA, 22 nt, Human
ggagggugcagacccuuugcaa

SEQ ID NO: 1092164 - RNA, 22 nt, Human
gcugugggacagguccagccag

SEQ ID NO: 1092165 - RNA, 22 nt, Human
uuaacacuaucugucauaauua

SEQ ID NO: 1092166 - RNA, 22 nt, Human
acagcugauuggaucaaggaca

SEQ ID NO: 1092167 - RNA, 22 nt, Human
ccagcacugcucucagacugag

SEQ ID NO: 1092168 - RNA, 22 nt, Human
caauuucagugcuguggagagg

SEQ ID NO: 1092169 - RNA, 22 nt, Human
gggcuggucuggcuuagucagg

SEQ ID NO: 1092170 - RNA, 23 nt, Human
aaccagauaaauggcuccagggc

SEQ ID NO: 1092171 - RNA, 22 nt, Human
ccuggcucuguccucgcgcaaa

SEQ ID NO: 1092172 - RNA, 22 nt, Human
aaguucuuggaggaugaagagu

SEQ ID NO: 1092173 - RNA, 17 nt, Human
ucucuuucccuuucugc

SEQ ID NO: 1092174 - RNA, 22 nt, Human
agauuauuuaagacaggaacca

SEQ ID NO: 1092175 - RNA, 22 nt, Human
gcaccugguuuauauaaucaua

SEQ ID NO: 1092176 - RNA, 22 nt, Human
aggcuguguggaugagucuuac

SEQ ID NO: 1092177 - RNA, 22 nt, Human
ucagcaggcgguuccuuguggg

SEQ ID NO: 1092178 - RNA, 22 nt, Human
cugccugaguacaagucccaga

SEQ ID NO: 1092179 - RNA, 22 nt, Human
gucucccaauccgggacagccu

SEQ ID NO: 1092180 - RNA, 22 nt, Human
ccucacuuuccuuucuccuggg

SEQ ID NO: 1092181 - RNA, 22 nt, Human
acaacaaagacacuugaaauga

SEQ ID NO: 1092182 - RNA, 22 nt, Human
cugggccaucuccuuugugugg

SEQ ID NO: 1092183 - RNA, 22 nt, Human
cagccugcucucagauguugag

SEQ ID NO: 1092184 - RNA, 21 nt, Human
ggccuuggcgggggccgaauu

SEQ ID NO: 1092185 - RNA, 22 nt, Human
auacagauguuaaagcaauuuc

SEQ ID NO: 1092186 - RNA, 22 nt, Human
aauguuauuucugcauaguagu

SEQ ID NO: 1092187 - RNA, 22 nt, Human
aguggcugacaacuggguuaac

SEQ ID NO: 1092188 - RNA, 22 nt, Human
caggaaccagaaccuucccccg

SEQ ID NO: 1092189 - RNA, 22 nt, Human
gcugcugugugggagacaggcg

SEQ ID NO: 1092190 - RNA, 22 nt, Human
uaggcugggaagaaagauucuc

SEQ ID NO: 1092191 - RNA, 22 nt, Human
ccuggggagagaaagcccagcc

SEQ ID NO: 1092192 - RNA, 22 nt, Human
aggaggccgggauucuggagau

SEQ ID NO: 1092193 - RNA, 22 nt, Human
ucgggcuccugcacuuggagac

SEQ ID NO: 1092194 - RNA, 22 nt, Human
gcucagggcgcgagggacgugg

SEQ ID NO: 1092195 - RNA, 22 nt, Human
acugcagccuugaacucugggc

SEQ ID NO: 1092196 - RNA, 22 nt, Human
uuccuuaguguuagauucugug

SEQ ID NO: 1092197 - RNA, 22 nt, Human
uccuuggcagcagggagcauga

SEQ ID NO: 1092198 - RNA, 18 nt, Human
uugaauucuucuacaugu

SEQ ID NO: 1092199 - RNA, 22 nt, Human
cccuggagucagguuggccugg

SEQ ID NO: 1092200 - RNA, 22 nt, Human
uuuuggucagguuggucucgaa

SEQ ID NO: 1092201 - RNA, 22 nt, Human
ggccagaaguuggaaaagagcc

SEQ ID NO: 1092202 - RNA, 22 nt, Human
cuguucugaacugccugcaugc

SEQ ID NO: 1092203 - RNA, 22 nt, Human
uccuuucccuuuccauccuggc

SEQ ID NO: 1092204 - RNA, 22 nt, Human
uucuucucggcugucagauagu

SEQ ID NO: 1092205 - RNA, 22 nt, Human
uucaagaucuuccaaaggauac

SEQ ID NO: 1092206 - RNA, 20 nt, Human
aaccaggauagaccagggaa

SEQ ID NO: 1092207 - RNA, 21 nt, Human
agcaauuucauuugguuuaac

SEQ ID NO: 1092208 - RNA, 22 nt, Human
aucaagaacuuauuuuggaaau

SEQ ID NO: 1092209 - RNA, 22 nt, Human
uugcuauacucauuaguuauuu

SEQ ID NO: 1092210 - RNA, 21 nt, Human
guuuucuuugauagagggaag

SEQ ID NO: 1092211 - RNA, 22 nt, Human
ugacagagcuggagaauaauuu

SEQ ID NO: 1092212 - RNA, 22 nt, Human
auuuccuuugcaaagacugugc

SEQ ID NO: 1092213 - RNA, 22 nt, Human
caccaucagcagcaggugucaa

SEQ ID NO: 1092214 - RNA, 22 nt, Human
ggucccagcugcucaagaggcu

SEQ ID NO: 1092215 - RNA, 22 nt, Human
acguggagagaauagggcacca

SEQ ID NO: 1092216 - RNA, 22 nt, Human
aagaacuagucuuacagccuca

SEQ ID NO: 1092217 - RNA, 20 nt, Human
acagaaagagagaaugucag

SEQ ID NO: 1092218 - RNA, 22 nt, Human
ugcagggcuaagucagagccug

SEQ ID NO: 1092219 - RNA, 22 nt, Human
agguggagacccagagaaggcg

SEQ ID NO: 1092220 - RNA, 22 nt, Human
acuguugaagugccagcuugau

SEQ ID NO: 1092221 - RNA, 19 nt, Human
acugccugaggcucacagg

SEQ ID NO: 1092222 - RNA, 22 nt, Human
cugugccauccgcuugaccugg

SEQ ID NO: 1092223 - RNA, 17 nt, Human
ggcagcugccacuuuuu

SEQ ID NO: 1092224 - RNA, 22 nt, Human
aacuuucuccagugccaacuau

SEQ ID NO: 1092225 - RNA, 22 nt, Human
cauggccucucuccuggaaugg

SEQ ID NO: 1092226 - RNA, 22 nt, Human
gggaagggacuuguuuaagguc

SEQ ID NO: 1092227 - RNA, 22 nt, Human
aguuuucugauguguagugaga

SEQ ID NO: 1092228 - RNA, 22 nt, Human
agaugcugccucuccucacaag

SEQ ID NO: 1092229 - RNA, 22 nt, Human
cugggccugguguggcaccugc

SEQ ID NO: 1092230 - RNA, 22 nt, Human
gccuuggccuuccuaggccuga

SEQ ID NO: 1092231 - RNA, 22 nt, Human
uaucuguuguccaugcagaaag

SEQ ID NO: 1092232 - RNA, 22 nt, Human
uagguaagauguuaacagcuga

SEQ ID NO: 1092233 - RNA, 22 nt, Human
gcuggccugcgagggcaggcug

SEQ ID NO: 1092234 - RNA, 22 nt, Human
gcaaagcacacccucagaguuu

SEQ ID NO: 1092235 - RNA, 22 nt, Human
ccuggccucuccgaguaaccug

SEQ ID NO: 1092236 - RNA, 22 nt, Human
uuauuauaaugagggauaaaaa

SEQ ID NO: 1092237 - RNA, 22 nt, Human
ucugaaauuuuaguuauagaaa

SEQ ID NO: 1092238 - RNA, 22 nt, Human
ggugcccaccugucuuccugga

SEQ ID NO: 1092239 - RNA, 22 nt, Human
uuacauaaaaguucacguaggc

SEQ ID NO: 1092240 - RNA, 22 nt, Human
agggagcuuccgaacuacagcu

SEQ ID NO: 1092241 - RNA, 22 nt, Human
acuguaaauuacauaagaacag

SEQ ID NO: 1092242 - RNA, 22 nt, Human
uuucacagcugucuuccgucuc

SEQ ID NO: 1092243 - RNA, 22 nt, Human
cagggcugaagaaauucaaaag

SEQ ID NO: 1092244 - RNA, 22 nt, Human
agcugggaggugggcagugaga

SEQ ID NO: 1092245 - RNA, 22 nt, Human
ugagggaggcccuuugagcaga

SEQ ID NO: 1092246 - RNA, 20 nt, Human
gucucagaauggauuugcau

SEQ ID NO: 1092247 - RNA, 22 nt, Human
auacaagugagaaaacugaaga

SEQ ID NO: 1092248 - RNA, 22 nt, Human
gcucaaagaauauucagaauga

SEQ ID NO: 1092249 - RNA, 22 nt, Human
uuuugaaagccagguuuguaug

SEQ ID NO: 1092250 - RNA, 19 nt, Human
caggccagugucagggggc

SEQ ID NO: 1092251 - RNA, 22 nt, Human
aacuggaaagaucaguaggaag

SEQ ID NO: 1092252 - RNA, 17 nt, Human
gcuucuggagcuucugu

SEQ ID NO: 1092253 - RNA, 22 nt, Human
aaguuuaucccucucacaguua

SEQ ID NO: 1092254 - RNA, 22 nt, Human
gcugcucucagagcucaugcug

SEQ ID NO: 1092255 - RNA, 22 nt, Human
agcagccagugggagugauaca

SEQ ID NO: 1092256 - RNA, 22 nt, Human
cuguccuuacugcuucuggcuu

SEQ ID NO: 1092257 - RNA, 22 nt, Human
aacuccaggcagggaggccacu

SEQ ID NO: 1092258 - RNA, 22 nt, Human
ucuagaaaaacaaaguaucuga

SEQ ID NO: 1092259 - RNA, 22 nt, Human
cggcagcuccgcgccguaggac

SEQ ID NO: 1092260 - RNA, 22 nt, Human
cugagagguaagcagcgcagug

SEQ ID NO: 1092261 - RNA, 22 nt, Human
cuggggacgucgggcaguguuc

SEQ ID NO: 1092262 - RNA, 22 nt, Human
gcuagaaaaugaaagauaauuu

SEQ ID NO: 1092263 - RNA, 22 nt, Human
agagccaggcaggcaauguuga

SEQ ID NO: 1092264 - RNA, 22 nt, Human
uaauacagggcacuuugaguga

SEQ ID NO: 1092265 - RNA, 22 nt, Human
aggaacacauggacauuucuga

SEQ ID NO: 1092266 - RNA, 22 nt, Human
ggcuagggagacagagggcaug

SEQ ID NO: 1092267 - RNA, 22 nt, Human
ugcugucugcaacaguacuaca

SEQ ID NO: 1092268 - RNA, 22 nt, Human
uaucuguuguaguacagaugau

SEQ ID NO: 1092269 - RNA, 22 nt, Human
gcaauuauaucaccagagaucu

SEQ ID NO: 1092270 - RNA, 22 nt, Human
augucuuuuaugauuacgggau

SEQ ID NO: 1092271 - RNA, 22 nt, Human
gcccagggugcuuagaacccau

SEQ ID NO: 1092272 - RNA, 18 nt, Human
uccagcuugcacuuaaau

SEQ ID NO: 1092273 - RNA, 23 nt, Human
aguacauuugacccaaauaagcu

SEQ ID NO: 1092274 - RNA, 22 nt, Human
gggcugcugccaccagguggau

SEQ ID NO: 1092275 - RNA, 20 nt, Human
cagcaguggaugagaguuuu

SEQ ID NO: 1092276 - RNA, 22 nt, Human
cucuggaguucuucaagcuacu

SEQ ID NO: 1092277 - RNA, 22 nt, Human
ugcagaggaccauuguccugga

SEQ ID NO: 1092278 - RNA, 22 nt, Human
gugggcuucuguuagggaggcu

SEQ ID NO: 1092279 - RNA, 22 nt, Human
cacagggcaggccccaggccuc

SEQ ID NO: 1092280 - RNA, 22 nt, Human
cacagaggacuguagcggggag

SEQ ID NO: 1092281 - RNA, 22 nt, Human
uaauauauuucugcuaagcuca

SEQ ID NO: 1092282 - RNA, 22 nt, Human
aaagacugguguguuacauaua

SEQ ID NO: 1092283 - RNA, 23 nt, Human
uggaagcaaucacuguagugaau

SEQ ID NO: 1092284 - RNA, 22 nt, Human
auguaagguucagaguauguga

SEQ ID NO: 1092285 - RNA, 22 nt, Human
acuucaguuucccucaacaaga

SEQ ID NO: 1092286 - RNA, 22 nt, Human
uuccugauagaacacuuuccaa

SEQ ID NO: 1092287 - RNA, 18 nt, Human
ucauuuguuuugcaugaa

SEQ ID NO: 1092288 - RNA, 22 nt, Human
acacugugagcugaagggcugc

SEQ ID NO: 1092289 - RNA, 23 nt, Human
cuuugccacccagagccugacag

SEQ ID NO: 1092290 - RNA, 22 nt, Human
ucucccuagggccgcuggcuaa

SEQ ID NO: 1092291 - RNA, 22 nt, Human
gagagaggccuccauguacuga

SEQ ID NO: 1092292 - RNA, 22 nt, Human
gcccagcacagcuggaagaguc

SEQ ID NO: 1092293 - RNA, 22 nt, Human
acaaauguuacauaaguuugga

SEQ ID NO: 1092294 - RNA, 18 nt, Human
ccgggcuuuggugacaca

SEQ ID NO: 1092295 - RNA, 22 nt, Human
ggcuggcacugaggagagcucu

SEQ ID NO: 1092296 - RNA, 22 nt, Human
aaaaucugcacaggucaguuuu

SEQ ID NO: 1092297 - RNA, 22 nt, Human
cagguuucauuggcagcuucau

SEQ ID NO: 1092298 - RNA, 22 nt, Human
uuugaauagcauaggauuacau

SEQ ID NO: 1092299 - RNA, 22 nt, Human
auuucaguguugguuagcaagc

SEQ ID NO: 1092300 - RNA, 22 nt, Human
aaaguuacuaucacaaugaaau

SEQ ID NO: 1092301 - RNA, 22 nt, Human
ucaguguuugguuucagaauug

SEQ ID NO: 1092302 - RNA, 22 nt, Human
cuguacagaguucugaguguac

SEQ ID NO: 1092303 - RNA, 22 nt, Human
uucuuguacuggagauacauga

SEQ ID NO: 1092304 - RNA, 22 nt, Human
cagaaagaccugggcucaagag

SEQ ID NO: 1092305 - RNA, 22 nt, Human
ucuggcuccguguccgcuccca

SEQ ID NO: 1092306 - RNA, 22 nt, Human
acaggaagugcuggcacuuaca

SEQ ID NO: 1092307 - RNA, 22 nt, Human
ucucccaggucauacacagaga

SEQ ID NO: 1092308 - RNA, 22 nt, Human
agacucuuggagaagagcuaua

SEQ ID NO: 1092309 - RNA, 22 nt, Human
cuuuuugucucuguccugauga

SEQ ID NO: 1092310 - RNA, 22 nt, Human
agucagaggaaugggccaggcu

SEQ ID NO: 1092311 - RNA, 22 nt, Human
cuagagaggcagauguccugug

SEQ ID NO: 1092312 - RNA, 21 nt, Human
agcaggaggcagucacagcuc

SEQ ID NO: 1092313 - RNA, 22 nt, Human
uagcaaaaacugcaguuacuuu

SEQ ID NO: 1092314 - RNA, 21 nt, Human
ggccucugccuugccccacuc

SEQ ID NO: 1092315 - RNA, 22 nt, Human
agggccugggucuguacuccuc

SEQ ID NO: 1092316 - RNA, 22 nt, Human
agguaaaauagauaguauuucu

SEQ ID NO: 1092317 - RNA, 22 nt, Human
uuugggcucacuaugcugaaga

SEQ ID NO: 1092318 - RNA, 22 nt, Human
gcagaacauuucacaguaucuu

SEQ ID NO: 1092319 - RNA, 22 nt, Human
aagaaugauuacaaagcaacga

SEQ ID NO: 1092320 - RNA, 22 nt, Human
uuucuacauguuuucuauugaa

SEQ ID NO: 1092321 - RNA, 22 nt, Human
guuuauuauacaacaaaagcua

SEQ ID NO: 1092322 - RNA, 22 nt, Human
aauguaaaauaucuuguacuug

SEQ ID NO: 1092323 - RNA, 22 nt, Human
aaaugcaaggauuuuguuaggc

SEQ ID NO: 1092324 - RNA, 19 nt, Human
cauuuagaaguacauauua

SEQ ID NO: 1092325 - RNA, 22 nt, Human
ugcucagacaagcugaacagua

SEQ ID NO: 1092326 - RNA, 22 nt, Human
ccaauuguccuaauuaauuaga

SEQ ID NO: 1092327 - RNA, 22 nt, Human
uuuggaaaaagccugaacauag

SEQ ID NO: 1092328 - RNA, 22 nt, Human
ccugggcucuauccugacccag

SEQ ID NO: 1092329 - RNA, 18 nt, Human
cccagcuggugggucagu

SEQ ID NO: 1092330 - RNA, 22 nt, Human
ugccucuguugagccuuggcug

SEQ ID NO: 1092331 - RNA, 22 nt, Human
ccugcuggacagggguguucau

SEQ ID NO: 1092332 - RNA, 17 nt, Human
cuggucccaccaagccc

SEQ ID NO: 1092333 - RNA, 22 nt, Human
ccaggcucugacauagauggga

SEQ ID NO: 1092334 - RNA, 22 nt, Human
uucuuuguuguacuuuccuaca

SEQ ID NO: 1092335 - RNA, 21 nt, Human
acauggacugugaauggggac

SEQ ID NO: 1092336 - RNA, 22 nt, Human
ucccagauuguugauggcuuaa

SEQ ID NO: 1092337 - RNA, 22 nt, Human
acccgggaggcaggagucauag

SEQ ID NO: 1092338 - RNA, 22 nt, Human
ugcugccuaacagaacucuuuc

SEQ ID NO: 1092339 - RNA, 17 nt, Human
uugggagagaaagguau

SEQ ID NO: 1092340 - RNA, 20 nt, Human
gucaucgccggcagcaaaga

SEQ ID NO: 1092341 - RNA, 22 nt, Human
auaugaagaauuccaauuugga

SEQ ID NO: 1092342 - RNA, 22 nt, Human
aggaggaggcuggaguacaccc

SEQ ID NO: 1092343 - RNA, 22 nt, Human
ugagcuggucacuccuucugaa

SEQ ID NO: 1092344 - RNA, 22 nt, Human
cugccuagaaaaccaggcuccu

SEQ ID NO: 1092345 - RNA, 22 nt, Human
uugauuaaaaugagacaucauu

SEQ ID NO: 1092346 - RNA, 22 nt, Human
acaucuuuuuggaaacggcuga

SEQ ID NO: 1092347 - RNA, 22 nt, Human
gucuuuuuauuauagaguggag

SEQ ID NO: 1092348 - RNA, 22 nt, Human
cuguggggaagauagaaccgac

SEQ ID NO: 1092349 - RNA, 22 nt, Human
gcugccuuuuaaagccucgcuu

SEQ ID NO: 1092350 - RNA, 22 nt, Human
cucagaauuaauaaccacaagg

SEQ ID NO: 1092351 - RNA, 22 nt, Human
aaggagaguacaggaguuggua

SEQ ID NO: 1092352 - RNA, 22 nt, Human
ugaccugcagucaagaggggaa

SEQ ID NO: 1092353 - RNA, 22 nt, Human
agucccagugagaugagccacg

SEQ ID NO: 1092354 - RNA, 22 nt, Human
caugauuauguguuagaguuug

SEQ ID NO: 1092355 - RNA, 22 nt, Human
gggcugacaaucucuuuacuua

SEQ ID NO: 1092356 - RNA, 22 nt, Human
ggagccagagcacuggggagcc

SEQ ID NO: 1092357 - RNA, 22 nt, Human
aguuacaaccaugacacaagca

SEQ ID NO: 1092358 - RNA, 22 nt, Human
aaacuacugaugccugggcccu

SEQ ID NO: 1092359 - RNA, 22 nt, Human
cacauuuaagugcuuguucaga

SEQ ID NO: 1092360 - RNA, 22 nt, Human
gggcaugagaggcaggcaagug

SEQ ID NO: 1092361 - RNA, 22 nt, Human
uuccuguaguugugcaauguac

SEQ ID NO: 1092362 - RNA, 22 nt, Human
uggcugagaaugggaugaugcc

SEQ ID NO: 1092363 - RNA, 22 nt, Human
uaagucaucacauugcagagau

SEQ ID NO: 1092364 - RNA, 22 nt, Human
ccagguaaauuaccuacugaau

SEQ ID NO: 1092365 - RNA, 22 nt, Human
uggcagagaacacggcugaucu

SEQ ID NO: 1092366 - RNA, 22 nt, Human
caugcagugacucagacacagg

SEQ ID NO: 1092367 - RNA, 22 nt, Human
cccugagcccauaguugacauu

SEQ ID NO: 1092368 - RNA, 21 nt, Human
cucuugucuuugcucaguagc

SEQ ID NO: 1092369 - RNA, 22 nt, Human
gggucccaggaaggagcagugu

SEQ ID NO: 1092370 - RNA, 22 nt, Human
uucaagucugcccagagucagc

SEQ ID NO: 1092371 - RNA, 22 nt, Human
uucuguauguacauauguguau

SEQ ID NO: 1092372 - RNA, 22 nt, Human
acacaguggugagucuggaccu

SEQ ID NO: 1092373 - RNA, 22 nt, Human
cuguugugaaauguccaucaac

SEQ ID NO: 1092374 - RNA, 22 nt, Human
ggaaagccaggugcucuggugu

SEQ ID NO: 1092375 - RNA, 23 nt, Human
aucugaaaaggcauuuucuuccc

SEQ ID NO: 1092376 - RNA, 22 nt, Human
uccuuaaauccuucagagauua

SEQ ID NO: 1092377 - RNA, 22 nt, Human
gauuucuugauaauucaaaucc

SEQ ID NO: 1092378 - RNA, 22 nt, Human
gagcugccagacaugggaauga

SEQ ID NO: 1092379 - RNA, 22 nt, Human
gcccuggaaucucuccauggga

SEQ ID NO: 1092380 - RNA, 18 nt, Human
auggucucauacugggag

SEQ ID NO: 1092381 - RNA, 22 nt, Human
ugccaucacugaacuucugaaa

SEQ ID NO: 1092382 - RNA, 22 nt, Human
aggauggggucugcagccuggu

SEQ ID NO: 1092383 - RNA, 22 nt, Human
agggagccuuccuggcuguggu

SEQ ID NO: 1092384 - RNA, 22 nt, Human
uuaaaaugaauauugauuagca

SEQ ID NO: 1092385 - RNA, 22 nt, Human
ucccagaguucaaugggaaggu

SEQ ID NO: 1092386 - RNA, 17 nt, Human
uucaaagcuuaucaagg

SEQ ID NO: 1092387 - RNA, 22 nt, Human
cagcagcccacgcgugcugucc

SEQ ID NO: 1092388 - RNA, 22 nt, Human
uuuacuaaguacuuguaucccu

SEQ ID NO: 1092389 - RNA, 20 nt, Human
ucccucagcacuucuaccuc

SEQ ID NO: 1092390 - RNA, 19 nt, Human
uuuauucaccuuuaccuug

SEQ ID NO: 1092391 - RNA, 22 nt, Human
aggaggugacagccugcaucug

SEQ ID NO: 1092392 - RNA, 22 nt, Human
cugcugugcuuguggccacccg

SEQ ID NO: 1092393 - RNA, 22 nt, Human
ucccccucauuaccucauucaa

SEQ ID NO: 1092394 - RNA, 22 nt, Human
uuauucagcauuuagaggaagg

SEQ ID NO: 1092395 - RNA, 22 nt, Human
cagcagagcugugugggaaggg

SEQ ID NO: 1092396 - RNA, 22 nt, Human
ccaaaguccacaguuuacauua

SEQ ID NO: 1092397 - RNA, 22 nt, Human
gacacauaugcguauaguuuag

SEQ ID NO: 1092398 - RNA, 22 nt, Human
ucaggaucaggggccuuuccuu

SEQ ID NO: 1092399 - RNA, 22 nt, Human
ucccccacucuaaaggagccuu

SEQ ID NO: 1092400 - RNA, 22 nt, Human
auacuuuuaauuccuucugagu

SEQ ID NO: 1092401 - RNA, 22 nt, Human
gcugagagugagcacuggauau

SEQ ID NO: 1092402 - RNA, 22 nt, Human
ggccugagcucuggggaggcaa

SEQ ID NO: 1092403 - RNA, 22 nt, Human
ugaaaugucaguguuuuauaag

SEQ ID NO: 1092404 - RNA, 22 nt, Human
uucuaguguccuuggacuugcu

SEQ ID NO: 1092405 - RNA, 22 nt, Human
ccugggaggcuguuuccagccu

SEQ ID NO: 1092406 - RNA, 22 nt, Human
uaaagccacgcuggaaaucagg

SEQ ID NO: 1092407 - RNA, 22 nt, Human
aggaagcucggagagggcaaau

SEQ ID NO: 1092408 - RNA, 22 nt, Human
ugaaaugauuauaugguguuug

SEQ ID NO: 1092409 - RNA, 22 nt, Human
cagcucccagaacugaccaugu

SEQ ID NO: 1092410 - RNA, 22 nt, Human
agaccccauaccucagcaggua

SEQ ID NO: 1092411 - RNA, 22 nt, Human
ggagacacagagcaacaaaaua

SEQ ID NO: 1092412 - RNA, 22 nt, Human
acucuugucucaacuuuuguau

SEQ ID NO: 1092413 - RNA, 22 nt, Human
agauaacauguugcagauucug

SEQ ID NO: 1092414 - RNA, 22 nt, Human
uucaguuuguuugacuguuaga

SEQ ID NO: 1092415 - RNA, 18 nt, Human
agaaggagcuaugggcag

SEQ ID NO: 1092416 - RNA, 22 nt, Human
gugggcuccccuggcaugucca

SEQ ID NO: 1092417 - RNA, 22 nt, Human
caggcagccugagggaucuggg

SEQ ID NO: 1092418 - RNA, 22 nt, Human
cuugucagccaauuguggauuu

SEQ ID NO: 1092419 - RNA, 22 nt, Human
uuuuucuaauggcuuaggaugu

SEQ ID NO: 1092420 - RNA, 22 nt, Human
agcagggcacuggaaggcacug

SEQ ID NO: 1092421 - RNA, 22 nt, Human
ggaggugaggccguagggugug

SEQ ID NO: 1092422 - RNA, 22 nt, Human
cagcaugguggagcugcucuuu

SEQ ID NO: 1092423 - RNA, 22 nt, Human
gcagcagcucucaaaguggucu

SEQ ID NO: 1092424 - RNA, 19 nt, Human
guggccugcgcugggugcg

SEQ ID NO: 1092425 - RNA, 23 nt, Human
acgcccucgcauccugagagccc

SEQ ID NO: 1092426 - RNA, 16 nt, Human
uguaugaacgucucca

SEQ ID NO: 1092427 - RNA, 22 nt, Human
aagcagccucauuugugguaag

SEQ ID NO: 1092428 - RNA, 19 nt, Human
gaguuauugccagggcaug

SEQ ID NO: 1092429 - RNA, 22 nt, Human
ucaguaaaauuacagaucuaca

SEQ ID NO: 1092430 - RNA, 22 nt, Human
acacaucuaucucuacacaagg

SEQ ID NO: 1092431 - RNA, 22 nt, Human
cuccucccaauugccaagugcu

SEQ ID NO: 1092432 - RNA, 15 nt, Human
ugauuuccuacuaac

SEQ ID NO: 1092433 - RNA, 22 nt, Human
aauguuugugcauaaauauguu

SEQ ID NO: 1092434 - RNA, 22 nt, Human
cugaggaguuuggguuguucaa

SEQ ID NO: 1092435 - RNA, 22 nt, Human
aucuacaaccccucaaacugug

SEQ ID NO: 1092436 - RNA, 22 nt, Human
aggaagaguguuaccuaugggu

SEQ ID NO: 1092437 - RNA, 22 nt, Human
caaaagcaguucuaucugaguu

SEQ ID NO: 1092438 - RNA, 22 nt, Human
cuggcuuccaugcuguaguggc

SEQ ID NO: 1092439 - RNA, 17 nt, Human
ccuuucucuuucaucuc

SEQ ID NO: 1092440 - RNA, 22 nt, Human
ucagaaaagacucaggggcuga

SEQ ID NO: 1092441 - RNA, 22 nt, Human
ucucauugguauauacaugugu

SEQ ID NO: 1092442 - RNA, 22 nt, Human
augugaaagagguguucagugg

SEQ ID NO: 1092443 - RNA, 18 nt, Human
gugugcaguugcaggggu

SEQ ID NO: 1092444 - RNA, 22 nt, Human
cagccucugacaccacagucgu

SEQ ID NO: 1092445 - RNA, 22 nt, Human
acuuucuauucccacagagaua

SEQ ID NO: 1092446 - RNA, 23 nt, Human
ggggaaagaccaugcuugaggac

SEQ ID NO: 1092447 - RNA, 18 nt, Human
accaggaagcuucuuguc

SEQ ID NO: 1092448 - RNA, 22 nt, Human
gccuuuugaaauagaaaucuga

SEQ ID NO: 1092449 - RNA, 22 nt, Human
ggggauggaauguaguagugau

SEQ ID NO: 1092450 - RNA, 22 nt, Human
uuuaauaucucacacuuccaug

SEQ ID NO: 1092451 - RNA, 20 nt, Human
cagaaauuuguaaaagggau

SEQ ID NO: 1092452 - RNA, 21 nt, Human
ugacauaauccauaguacaaa

SEQ ID NO: 1092453 - RNA, 22 nt, Human
gcaaagcagucuucugugccua

SEQ ID NO: 1092454 - RNA, 22 nt, Human
uccuuagagacaagaccaguuu

SEQ ID NO: 1092455 - RNA, 22 nt, Human
caucacuguccaaaguucaguu

SEQ ID NO: 1092456 - RNA, 22 nt, Human
agggcagcugugagccacugug

SEQ ID NO: 1092457 - RNA, 22 nt, Human
ggcugccauaacugauaccaua

SEQ ID NO: 1092458 - RNA, 22 nt, Human
ugcugccucugcugauauggcc

SEQ ID NO: 1092459 - RNA, 19 nt, Human
ccuggguccacucagacua

SEQ ID NO: 1092460 - RNA, 22 nt, Human
aucacauugccagugauuaccc

SEQ ID NO: 1092461 - RNA, 22 nt, Human
ucucugaggacuugggguugcc

SEQ ID NO: 1092462 - RNA, 22 nt, Human
gucccagggaugcagacaugag

SEQ ID NO: 1092463 - RNA, 22 nt, Human
ucugggcagaagcagugcaaag

SEQ ID NO: 1092464 - RNA, 22 nt, Human
cacaccaaaguauuugguauuu

SEQ ID NO: 1092465 - RNA, 22 nt, Human
aaagagaacuuuuacccaagaa

SEQ ID NO: 1092466 - RNA, 22 nt, Human
gagcagugggaaggaacagggu

SEQ ID NO: 1092467 - RNA, 22 nt, Human
gacuuauucacgcagcuauacu

SEQ ID NO: 1092468 - RNA, 22 nt, Human
ucugggggcgaccagggacugc

SEQ ID NO: 1092469 - RNA, 22 nt, Human
gcccucuggggcacacagagga

SEQ ID NO: 1092470 - RNA, 22 nt, Human
gaaaugucauagucuucaagcc

SEQ ID NO: 1092471 - RNA, 22 nt, Human
aagauucucagagugaaagaau

SEQ ID NO: 1092472 - RNA, 22 nt, Human
ccuguguccuaauccaucaggc

SEQ ID NO: 1092473 - RNA, 19 nt, Human
cacagcucugcucagggaa

SEQ ID NO: 1092474 - RNA, 22 nt, Human
guaucgguuuauuuuugggaua

SEQ ID NO: 1092475 - RNA, 22 nt, Human
cucaggagaugacagaagguau

SEQ ID NO: 1092476 - RNA, 22 nt, Human
aaauuuucagagcacuagagaa

SEQ ID NO: 1092477 - RNA, 22 nt, Human
aacaguuacccuuaagaucuuu

SEQ ID NO: 1092478 - RNA, 22 nt, Human
gcagcucucuggccugcccugg

SEQ ID NO: 1092479 - RNA, 22 nt, Human
agauuuauguggucacacucag

SEQ ID NO: 1092480 - RNA, 22 nt, Human
aggcccagggcugcucucugaa

SEQ ID NO: 1092481 - RNA, 22 nt, Human
uauauuaaccauaggguucuag

SEQ ID NO: 1092482 - RNA, 22 nt, Human
auggcuagcaccgcguugcugg

SEQ ID NO: 1092483 - RNA, 22 nt, Human
ucucagggccccaaaggcuagu

SEQ ID NO: 1092484 - RNA, 22 nt, Human
ccaaaguaaggcaauuccuaaa

SEQ ID NO: 1092485 - RNA, 22 nt, Human
uaagcaggggucaaguguacaa

SEQ ID NO: 1092486 - RNA, 22 nt, Human
ucauugaauuugguucaauaug

SEQ ID NO: 1092487 - RNA, 22 nt, Human
uugccagugccagcccaggcag

SEQ ID NO: 1092488 - RNA, 22 nt, Human
acuuugaaaagacaguagcucu

SEQ ID NO: 1092489 - RNA, 22 nt, Human
uaagacagggagggcucucagc

SEQ ID NO: 1092490 - RNA, 22 nt, Human
ccugguuucaggaacauaaucu

SEQ ID NO: 1092491 - RNA, 22 nt, Human
agccucucuuucugguggcuaa

SEQ ID NO: 1092492 - RNA, 17 nt, Human
auacaaagccauaaacc

SEQ ID NO: 1092493 - RNA, 22 nt, Human
ggaccacagugcauggccugua

SEQ ID NO: 1092494 - RNA, 22 nt, Human
cagucccagcugcucagaaggc

SEQ ID NO: 1092495 - RNA, 22 nt, Human
uaggaacauaugcagugcuuuu

SEQ ID NO: 1092496 - RNA, 22 nt, Human
aagcccucauccccaugggcgu

SEQ ID NO: 1092497 - RNA, 17 nt, Human
ugagacagggcaggccc

SEQ ID NO: 1092498 - RNA, 22 nt, Human
cacacaggaugaagcagcagaa

SEQ ID NO: 1092499 - RNA, 23 nt, Human
ucuggcuccauccuuggggaucc

SEQ ID NO: 1092500 - RNA, 22 nt, Human
ugcaaagaacuaagcagccuua

SEQ ID NO: 1092501 - RNA, 22 nt, Human
gcaggcagagaaggaacauuua

SEQ ID NO: 1092502 - RNA, 22 nt, Human
aauucuaaauguaauuuagaau

SEQ ID NO: 1092503 - RNA, 22 nt, Human
uacauacauuaccucauuuagu

SEQ ID NO: 1092504 - RNA, 22 nt, Human
uggagguggaguuggaaacuga

SEQ ID NO: 1092505 - RNA, 22 nt, Human
agcuccugggagcaggugguac

SEQ ID NO: 1092506 - RNA, 22 nt, Human
acauuucuuuucaucucuauau

SEQ ID NO: 1092507 - RNA, 22 nt, Human
cucuggaauuaaggaagccugu

SEQ ID NO: 1092508 - RNA, 22 nt, Human
gagagggcucuguguggguacu

SEQ ID NO: 1092509 - RNA, 22 nt, Human
caauaagccagguguuuguguu

SEQ ID NO: 1092510 - RNA, 20 nt, Human
augcccuguccucuucuguu

SEQ ID NO: 1092511 - RNA, 22 nt, Human
auggaagggacagaagggcaag

SEQ ID NO: 1092512 - RNA, 22 nt, Human
cuggcugggguccauccucuaa

SEQ ID NO: 1092513 - RNA, 22 nt, Human
ucucuuaauuguaaugguuccu

SEQ ID NO: 1092514 - RNA, 18 nt, Human
uguagagccagguuugcc

SEQ ID NO: 1092515 - RNA, 22 nt, Human
uauggaaagcucuuuuugauug

SEQ ID NO: 1092516 - RNA, 22 nt, Human
cagaggaggcgguauacacugc

SEQ ID NO: 1092517 - RNA, 22 nt, Human
ucuguaaucagaguagcagaua

SEQ ID NO: 1092518 - RNA, 22 nt, Human
gaggcucacgacgggacgaacu

SEQ ID NO: 1092519 - RNA, 22 nt, Human
uggcagcagacaaaaggccauu

SEQ ID NO: 1092520 - RNA, 22 nt, Human
ccuucaaaacacuaguuuuuga

SEQ ID NO: 1092521 - RNA, 22 nt, Human
cagcaguguggaagcugagggg

SEQ ID NO: 1092522 - RNA, 22 nt, Human
gggcugacauauuuggugcucu

SEQ ID NO: 1092523 - RNA, 22 nt, Human
acugagaggugauagugacauu

SEQ ID NO: 1092524 - RNA, 22 nt, Human
uaacagcauaugaaauuacugg

SEQ ID NO: 1092525 - RNA, 22 nt, Human
uuuggaauuggaaagugcugug

SEQ ID NO: 1092526 - RNA, 22 nt, Human
uaguuaauucuuuaagaacaag

SEQ ID NO: 1092527 - RNA, 22 nt, Human
ggcuucuguccucuggaucugu

SEQ ID NO: 1092528 - RNA, 18 nt, Human
ucuuuguuuccuucuugc

SEQ ID NO: 1092529 - RNA, 22 nt, Human
ucuggggagggagccacagguc

SEQ ID NO: 1092530 - RNA, 22 nt, Human
acauuugugggggaacaggaua

SEQ ID NO: 1092531 - RNA, 22 nt, Human
cuuuccuagauggccaucuuuc

SEQ ID NO: 1092532 - RNA, 22 nt, Human
gggcaugguggugcacaccugu

SEQ ID NO: 1092533 - RNA, 22 nt, Human
uguaacauauagcauguucuug

SEQ ID NO: 1092534 - RNA, 22 nt, Human
cuuccuuuccccaaucauaucg

SEQ ID NO: 1092535 - RNA, 22 nt, Human
cucuggaaaaccacuagcagga

SEQ ID NO: 1092536 - RNA, 22 nt, Human
gccccugggagcagagccacca

SEQ ID NO: 1092537 - RNA, 21 nt, Human
acuggcugguggcuaagaauc

SEQ ID NO: 1092538 - RNA, 22 nt, Human
gcagaagcccggucagcgcacg

SEQ ID NO: 1092539 - RNA, 22 nt, Human
ucacagaaggagggaagcuagu

SEQ ID NO: 1092540 - RNA, 22 nt, Human
ccugucuggccuuccacggggg

SEQ ID NO: 1092541 - RNA, 23 nt, Human
gccugcugucacagcgggcccag

SEQ ID NO: 1092542 - RNA, 22 nt, Human
gagucaguaauggauaugucau

SEQ ID NO: 1092543 - RNA, 22 nt, Human
uuucuggaaacggguucaagcu

SEQ ID NO: 1092544 - RNA, 22 nt, Human
aaggcagcaccgccuccugaaa

SEQ ID NO: 1092545 - RNA, 22 nt, Human
acagcacuuauucagcacagug

SEQ ID NO: 1092546 - RNA, 22 nt, Human
uugggcugaaguagagggcaga

SEQ ID NO: 1092547 - RNA, 22 nt, Human
acacauauguaugcaucaugug

SEQ ID NO: 1092548 - RNA, 22 nt, Human
gaaggagagagacaucgucccu

SEQ ID NO: 1092549 - RNA, 22 nt, Human
auggccuggggagcaugggaag

SEQ ID NO: 1092550 - RNA, 23 nt, Human
aucuguugugccucuuauaugua

SEQ ID NO: 1092551 - RNA, 22 nt, Human
cucuguuucucagccuauuucc

SEQ ID NO: 1092552 - RNA, 22 nt, Human
aggaggcucucagguccucccc

SEQ ID NO: 1092553 - RNA, 22 nt, Human
uucugcuuauucaaaugaucuu

SEQ ID NO: 1092554 - RNA, 22 nt, Human
ugaggcagccugcauuaaagag

SEQ ID NO: 1092555 - RNA, 22 nt, Human
acagugauuuuuucgagcagaa

SEQ ID NO: 1092556 - RNA, 22 nt, Human
gagaggccaccugacgagcagu

SEQ ID NO: 1092557 - RNA, 22 nt, Human
agcacugauuuaaacuggauuu

SEQ ID NO: 1092558 - RNA, 23 nt, Human
ucccaugggcucacugcccugca

SEQ ID NO: 1092559 - RNA, 22 nt, Human
gucaccagucccagcuccugaa

SEQ ID NO: 1092560 - RNA, 22 nt, Human
uacaaagugggaaacgaagguu

SEQ ID NO: 1092561 - RNA, 22 nt, Human
uugaaaugagcaaacugucagc

SEQ ID NO: 1092562 - RNA, 22 nt, Human
gugcccaggcccaaggcaccac

SEQ ID NO: 1092563 - RNA, 22 nt, Human
cuucauuuccauccaacuggga

SEQ ID NO: 1092564 - RNA, 22 nt, Human
acugggcugguuaguuuuacua

SEQ ID NO: 1092565 - RNA, 22 nt, Human
cugcuccaggauuucaggccag

SEQ ID NO: 1092566 - RNA, 16 nt, Human
uaaaucugugaucaca

SEQ ID NO: 1092567 - RNA, 22 nt, Human
aauagcucacugauuucucuuu

SEQ ID NO: 1092568 - RNA, 17 nt, Human
uuguguguaguucugau

SEQ ID NO: 1092569 - RNA, 22 nt, Human
uggaaauuuauucaucauucau

SEQ ID NO: 1092570 - RNA, 22 nt, Human
acagauuuuaaaugacacuccc

SEQ ID NO: 1092571 - RNA, 22 nt, Human
augccuggacugacaugcacug

SEQ ID NO: 1092572 - RNA, 22 nt, Human
gcagggugccgacuucagggau

SEQ ID NO: 1092573 - RNA, 22 nt, Human
cuucucagaggccagaagcuau

SEQ ID NO: 1092574 - RNA, 22 nt, Human
ugcauacacaugugcacauacg

SEQ ID NO: 1092575 - RNA, 22 nt, Human
gccaggaaguugggccagucua

SEQ ID NO: 1092576 - RNA, 22 nt, Human
gggugcugacuggggccugaaa

SEQ ID NO: 1092577 - RNA, 22 nt, Human
ucaggcugaggucaucugcauc

SEQ ID NO: 1092578 - RNA, 22 nt, Human
ccuguguggccaggcuggaguc

SEQ ID NO: 1092579 - RNA, 20 nt, Human
uccagggcuagggagcucau

SEQ ID NO: 1092580 - RNA, 22 nt, Human
uuccaagugcugaggacaguag

SEQ ID NO: 1092581 - RNA, 22 nt, Human
aggacagagggaccagagccca

SEQ ID NO: 1092582 - RNA, 22 nt, Human
aguggagcaggcggcgcucacu

SEQ ID NO: 1092583 - RNA, 22 nt, Human
aaucuacaugcaauauuuuuag

SEQ ID NO: 1092584 - RNA, 22 nt, Human
acaggagugaaucuggcacuua

SEQ ID NO: 1092585 - RNA, 22 nt, Human
uggccuggaaccuggcagggac

SEQ ID NO: 1092586 - RNA, 20 nt, Human
ccugucuggagacaaagaga

SEQ ID NO: 1092587 - RNA, 22 nt, Human
auaauuuuuguuugauguccaa

SEQ ID NO: 1092588 - RNA, 22 nt, Human
cugggacacccaaggaaagagc

SEQ ID NO: 1092589 - RNA, 22 nt, Human
uguaaaauaauucuccauguuu

SEQ ID NO: 1092590 - RNA, 22 nt, Human
gugaggggaguaaagccauguu

SEQ ID NO: 1092591 - RNA, 22 nt, Human
uaaacugaagcucaacucaaau

SEQ ID NO: 1092592 - RNA, 22 nt, Human
ggcuacagggccuggccaaggu

SEQ ID NO: 1092593 - RNA, 18 nt, Human
augcccuguugacuucag

SEQ ID NO: 1092594 - RNA, 22 nt, Human
ccuuuucuagaaagggaggcaa

SEQ ID NO: 1092595 - RNA, 22 nt, Human
aacacuguggucuuuucaguaa

SEQ ID NO: 1092596 - RNA, 22 nt, Human
caggccugugacaccgugucug

SEQ ID NO: 1092597 - RNA, 22 nt, Human
agcugccauccuguucagcacc

SEQ ID NO: 1092598 - RNA, 22 nt, Human
caggguggggcuggcuaucaaa

SEQ ID NO: 1092599 - RNA, 20 nt, Human
gcugaccccugcugucaugc

SEQ ID NO: 1092600 - RNA, 23 nt, Human
gggugggccaaauuagguagccu

SEQ ID NO: 1092601 - RNA, 22 nt, Human
cucgggcuugaggcuguuuacc

SEQ ID NO: 1092602 - RNA, 23 nt, Human
uggagcugggcagcugggaaagu

SEQ ID NO: 1092603 - RNA, 22 nt, Human
gagguggcugcuugcugggaaa

SEQ ID NO: 1092604 - RNA, 22 nt, Human
aaagauuuaagaauaauuugug

SEQ ID NO: 1092605 - RNA, 22 nt, Human
cuccucuuuggggauuuacaca

SEQ ID NO: 1092606 - RNA, 22 nt, Human
ucugcgcugccuugauccuugg

SEQ ID NO: 1092607 - RNA, 22 nt, Human
cugaggcugcccagggccaggu

SEQ ID NO: 1092608 - RNA, 22 nt, Human
uuguguaagaugcaauauggua

SEQ ID NO: 1092609 - RNA, 14 nt, Human
gcagguggaucacc

SEQ ID NO: 1092610 - RNA, 22 nt, Human
guguauaaugcuguuuguacau

SEQ ID NO: 1092611 - RNA, 22 nt, Human
acaguguacuaaauaguaagag

SEQ ID NO: 1092612 - RNA, 22 nt, Human
gggcuggaggaccggccucgga

SEQ ID NO: 1092613 - RNA, 22 nt, Human
ugucaguguauacauacaguau

SEQ ID NO: 1092614 - RNA, 22 nt, Human
uuggaggcaaugggaaggaggc

SEQ ID NO: 1092615 - RNA, 22 nt, Human
cuggggcuucaaugcuucggug

SEQ ID NO: 1092616 - RNA, 22 nt, Human
ggcagggaggaggugaaaguga

SEQ ID NO: 1092617 - RNA, 22 nt, Human
uguaagauauucagcuuauuga

SEQ ID NO: 1092618 - RNA, 22 nt, Human
augggcucuaugucuaggagau

SEQ ID NO: 1092619 - RNA, 19 nt, Human
uguuggugcggauguggag

SEQ ID NO: 1092620 - RNA, 22 nt, Human
uucaaagaauuuugagaccuga

SEQ ID NO: 1092621 - RNA, 22 nt, Human
uggagccaagagucaaggggag

SEQ ID NO: 1092622 - RNA, 22 nt, Human
ugucccuggaacuauggcucca

SEQ ID NO: 1092623 - RNA, 22 nt, Human
aauagcaauuacccuucaacuc

SEQ ID NO: 1092624 - RNA, 22 nt, Human
cauaagaaucuuccagggcaug

SEQ ID NO: 1092625 - RNA, 18 nt, Human
gcaaggcucaggccaggc

SEQ ID NO: 1092626 - RNA, 22 nt, Human
cugggagauugaggccauggug

SEQ ID NO: 1092627 - RNA, 22 nt, Human
cacaugggcguaauguccaugg

SEQ ID NO: 1092628 - RNA, 22 nt, Human
cuacauuuguucaaauaagcug

SEQ ID NO: 1092629 - RNA, 22 nt, Human
auuuccuagccucucuugcagu

SEQ ID NO: 1092630 - RNA, 22 nt, Human
gcaaagcauucuguggagucua

SEQ ID NO: 1092631 - RNA, 22 nt, Human
uuggccuuguuaaggaggcccu

SEQ ID NO: 1092632 - RNA, 22 nt, Human
gccaccagcagaaaaggggcca

SEQ ID NO: 1092633 - RNA, 22 nt, Human
guuuacaugcagaaaaucaaug

SEQ ID NO: 1092634 - RNA, 22 nt, Human
uucccaguauuaccuucaggaa

SEQ ID NO: 1092635 - RNA, 22 nt, Human
uuacaauugagucuauuguaug

SEQ ID NO: 1092636 - RNA, 22 nt, Human
auuuguacaaauuuauguuagu

SEQ ID NO: 1092637 - RNA, 22 nt, Human
gugcuuaaggcagucugucaaa

SEQ ID NO: 1092638 - RNA, 22 nt, Human
gucccuaguggaaagacaugau

SEQ ID NO: 1092639 - RNA, 22 nt, Human
ucagacaguuugcagugugccu

SEQ ID NO: 1092640 - RNA, 22 nt, Human
cacauucagguggcauguuaga

SEQ ID NO: 1092641 - RNA, 22 nt, Human
gcaggcaggcuuccuugaacug

SEQ ID NO: 1092642 - RNA, 21 nt, Human
uuuucuggaguaugucuccuc

SEQ ID NO: 1092643 - RNA, 22 nt, Human
agucuaauguuuguaaaaucau

SEQ ID NO: 1092644 - RNA, 22 nt, Human
guuuuauaauugcuucauaaga

SEQ ID NO: 1092645 - RNA, 22 nt, Human
cuucacagucacccugcugugu

SEQ ID NO: 1092646 - RNA, 23 nt, Human
gcccugcuccuggcugggaggga

SEQ ID NO: 1092647 - RNA, 22 nt, Human
cuggccagagguuccucugccc

SEQ ID NO: 1092648 - RNA, 22 nt, Human
gcuguucucuguaacaugcauu

SEQ ID NO: 1092649 - RNA, 22 nt, Human
gcagcccagguguagcucuuug

SEQ ID NO: 1092650 - RNA, 22 nt, Human
ugccaggcuccggaacgacagu

SEQ ID NO: 1092651 - RNA, 22 nt, Human
auuguaaaguacuguguacaau

SEQ ID NO: 1092652 - RNA, 22 nt, Human
gccuggagaagauggaacuagc

SEQ ID NO: 1092653 - RNA, 22 nt, Human
gacauuuagaaguuagauucaa

SEQ ID NO: 1092654 - RNA, 22 nt, Human
aaugaugggaaggagaaaagca

SEQ ID NO: 1092655 - RNA, 22 nt, Human
uggccaaauuugguguaacuug

SEQ ID NO: 1092656 - RNA, 22 nt, Human
uuuaaaauuuagaccucuccac

SEQ ID NO: 1092657 - RNA, 22 nt, Human
ucuaagaaaucagaugaugagg

SEQ ID NO: 1092658 - RNA, 22 nt, Human
agaggcuccuucacucuggcac

SEQ ID NO: 1092659 - RNA, 22 nt, Human
ccagcagcuuuauuggcucucc

SEQ ID NO: 1092660 - RNA, 22 nt, Human
ccaguggccaugcacgagcagc

SEQ ID NO: 1092661 - RNA, 22 nt, Human
aagacugucuuuucugagugac

SEQ ID NO: 1092662 - RNA, 22 nt, Human
ccagcccuguaaggaugaggca

SEQ ID NO: 1092663 - RNA, 22 nt, Human
acagcugggugcugcucagagc

SEQ ID NO: 1092664 - RNA, 23 nt, Human
uugcuucugugcaauucaguacu

SEQ ID NO: 1092665 - RNA, 21 nt, Human
cucacaggaugcaguguuacu

SEQ ID NO: 1092666 - RNA, 22 nt, Human
uguuugcacauucguuucaaua

SEQ ID NO: 1092667 - RNA, 23 nt, Human
aggggcagcaaguuuugguguua

SEQ ID NO: 1092668 - RNA, 22 nt, Human
uauuuuugccucucagauaaaa

SEQ ID NO: 1092669 - RNA, 22 nt, Human
uacuauuuugacaugaaauuga

SEQ ID NO: 1092670 - RNA, 22 nt, Human
gaaggccacuuuguguugagaa

SEQ ID NO: 1092671 - RNA, 23 nt, Human
uagcaaaguuguuugggaaauuu

SEQ ID NO: 1092672 - RNA, 22 nt, Human
cccagcucaucaggagccgccc

SEQ ID NO: 1092673 - RNA, 22 nt, Human
ccagguacuugguaugcauuca

SEQ ID NO: 1092674 - RNA, 22 nt, Human
aguauuucuucauaugauuacu

SEQ ID NO: 1092675 - RNA, 22 nt, Human
uaauuucaccguugcuagaaau

SEQ ID NO: 1092676 - RNA, 19 nt, Human
aucauacauguuacacucu

SEQ ID NO: 1092677 - RNA, 22 nt, Human
cugucaacauuggugucuguca

SEQ ID NO: 1092678 - RNA, 22 nt, Human
ugcagugaugcuucuggcucag

SEQ ID NO: 1092679 - RNA, 18 nt, Human
aaggcacaggagaacauu

SEQ ID NO: 1092680 - RNA, 22 nt, Human
acagacacaggcguggagucgc

SEQ ID NO: 1092681 - RNA, 22 nt, Human
gagaaagcuucuuucccacagg

SEQ ID NO: 1092682 - RNA, 22 nt, Human
cagugggcugugauggauucac

SEQ ID NO: 1092683 - RNA, 22 nt, Human
uucuaaacuucaauucuaaauu

SEQ ID NO: 1092684 - RNA, 22 nt, Human
cagcaggcagccauuucacugu

SEQ ID NO: 1092685 - RNA, 20 nt, Human
agugcccuccgacauuguuu

SEQ ID NO: 1092686 - RNA, 22 nt, Human
caccugcccagcaccugggauc

SEQ ID NO: 1092687 - RNA, 22 nt, Human
ugacaagaggcagaaucagcug

SEQ ID NO: 1092688 - RNA, 22 nt, Human
caaguuuggauuaugaaaaagu

SEQ ID NO: 1092689 - RNA, 22 nt, Human
cuucugugcuucacaguugcca

SEQ ID NO: 1092690 - RNA, 22 nt, Human
guggcugcucgggcuccggccc

SEQ ID NO: 1092691 - RNA, 22 nt, Human
auccuuaauuuccugggccuca

SEQ ID NO: 1092692 - RNA, 17 nt, Human
ugaggcucggugaggag

SEQ ID NO: 1092693 - RNA, 22 nt, Human
aucuuagacccuugguagaaaa

SEQ ID NO: 1092694 - RNA, 22 nt, Human
caucuagaaaaaagaccuguug

SEQ ID NO: 1092695 - RNA, 23 nt, Human
aggcccugccugucccucuuuuu

SEQ ID NO: 1092696 - RNA, 22 nt, Human
ucucagggccucccucuguuuc

SEQ ID NO: 1092697 - RNA, 22 nt, Human
aguccauagaggcugcuuucau

SEQ ID NO: 1092698 - RNA, 22 nt, Human
cuccucugucuaccacgagggu

SEQ ID NO: 1092699 - RNA, 22 nt, Human
uggggcuguccuuagucugaga

SEQ ID NO: 1092700 - RNA, 22 nt, Human
uaaacaucugucauguguuuau

SEQ ID NO: 1092701 - RNA, 22 nt, Human
cggcugugucuucacaggagcc

SEQ ID NO: 1092702 - RNA, 22 nt, Human
ugcucugucaagaaaagaugcc

SEQ ID NO: 1092703 - RNA, 22 nt, Human
aggcugaggcagguggaucauu

SEQ ID NO: 1092704 - RNA, 22 nt, Human
uggcacugaagcuggaaagccu

SEQ ID NO: 1092705 - RNA, 22 nt, Human
ccacagaaaguugucuagagua

SEQ ID NO: 1092706 - RNA, 22 nt, Human
uuucacaggauucugauguagu

SEQ ID NO: 1092707 - RNA, 22 nt, Human
acagcugaacaagauaguguca

SEQ ID NO: 1092708 - RNA, 21 nt, Human
ucucugggcccuccugugggg

SEQ ID NO: 1092709 - RNA, 22 nt, Human
uucaaugagcccaagaacguga

SEQ ID NO: 1092710 - RNA, 22 nt, Human
acugugcaucuauugccauuua

SEQ ID NO: 1092711 - RNA, 22 nt, Human
gcccagggcgauggucggggcc

SEQ ID NO: 1092712 - RNA, 23 nt, Human
cagcugaagcagccugggcugga

SEQ ID NO: 1092713 - RNA, 16 nt, Human
uagggcugggaaggag

SEQ ID NO: 1092714 - RNA, 22 nt, Human
ucagaagcugguguccuuugaa

SEQ ID NO: 1092715 - RNA, 22 nt, Human
cuguggcucucugcaggguccc

SEQ ID NO: 1092716 - RNA, 22 nt, Human
aaauaacuuucuguguauaguc

SEQ ID NO: 1092717 - RNA, 22 nt, Human
uuucuggcagcgggacaggggu

SEQ ID NO: 1092718 - RNA, 22 nt, Human
uuuuaucagcagggauaacaag

SEQ ID NO: 1092719 - RNA, 22 nt, Human
cuaauuguaagcuccuugaggg

SEQ ID NO: 1092720 - RNA, 22 nt, Human
cauguuaaaauauacauucuga

SEQ ID NO: 1092721 - RNA, 22 nt, Human
agaaaacacugcccccucucuc

SEQ ID NO: 1092722 - RNA, 22 nt, Human
ggagccuggccuggcucugugu

SEQ ID NO: 1092723 - RNA, 22 nt, Human
agucucagggccacccggggaa

SEQ ID NO: 1092724 - RNA, 22 nt, Human
cagcugcuguuacugcuuauua

SEQ ID NO: 1092725 - RNA, 22 nt, Human
aauaaacaaauccuuccuuccc

SEQ ID NO: 1092726 - RNA, 23 nt, Human
gcugcagcuguggauguucucag

SEQ ID NO: 1092727 - RNA, 22 nt, Human
caugacauuuuaaaaagaacau

SEQ ID NO: 1092728 - RNA, 22 nt, Human
cugggggcaauggucagagugu

SEQ ID NO: 1092729 - RNA, 22 nt, Human
ugauuaacugucuauuaaucau

SEQ ID NO: 1092730 - RNA, 22 nt, Human
uucccacagagauuacauugaa

SEQ ID NO: 1092731 - RNA, 22 nt, Human
uuauuguaggccuauuguagaa

SEQ ID NO: 1092732 - RNA, 20 nt, Human
uccuggccuucucgggcagu

SEQ ID NO: 1092733 - RNA, 22 nt, Human
ugggcugaaaugcuguggacua

SEQ ID NO: 1092734 - RNA, 22 nt, Human
acagcagccuuguugguuucga

SEQ ID NO: 1092735 - RNA, 22 nt, Human
ggcgagggagcagugcgguggg

SEQ ID NO: 1092736 - RNA, 22 nt, Human
ugauuuuuggaucugagcugca

SEQ ID NO: 1092737 - RNA, 22 nt, Human
ggccugagaaccauggggccaa

SEQ ID NO: 1092738 - RNA, 22 nt, Human
uuuucaaagacuggaggcugau

SEQ ID NO: 1092739 - RNA, 22 nt, Human
ugcaccugagaggucucugagg

SEQ ID NO: 1092740 - RNA, 22 nt, Human
gcuugaaaauucauagguauuu

SEQ ID NO: 1092741 - RNA, 22 nt, Human
ucacaguaucacacaaggauua

SEQ ID NO: 1092742 - RNA, 19 nt, Human
gggcagaauggcaucucag

SEQ ID NO: 1092743 - RNA, 22 nt, Human
cacagggcagagaccugggugc

SEQ ID NO: 1092744 - RNA, 22 nt, Human
ggugcagaaggaagggagcugg

SEQ ID NO: 1092745 - RNA, 22 nt, Human
agcugcccugggucuugcugcu

SEQ ID NO: 1092746 - RNA, 22 nt, Human
agcaaggcagucagcuggcugg

SEQ ID NO: 1092747 - RNA, 22 nt, Human
caagggcucuuuugaggaaugu

SEQ ID NO: 1092748 - RNA, 22 nt, Human
uuauuuauuguguaccuacugu

SEQ ID NO: 1092749 - RNA, 22 nt, Human
ugcagggccuugggaugugucc

SEQ ID NO: 1092750 - RNA, 22 nt, Human
ugcugagagccagggcuggcau

SEQ ID NO: 1092751 - RNA, 22 nt, Human
agugcaaaaaaguguugugaca

SEQ ID NO: 1092752 - RNA, 20 nt, Human
aagagaagaagucuuugaaa

SEQ ID NO: 1092753 - RNA, 22 nt, Human
ugggccuuggaucgcuaagcug

SEQ ID NO: 1092754 - RNA, 22 nt, Human
gagggugggcuuuguuccucca

SEQ ID NO: 1092755 - RNA, 22 nt, Human
ccuggcugcugucacugaccau

SEQ ID NO: 1092756 - RNA, 22 nt, Human
caggaagggggauccuuggaag

SEQ ID NO: 1092757 - RNA, 22 nt, Human
uuucaaagucaauaucauuacc

SEQ ID NO: 1092758 - RNA, 22 nt, Human
gguggcaguuacaggggcaaau

SEQ ID NO: 1092759 - RNA, 22 nt, Human
guuauacauauguguuaacaaa

SEQ ID NO: 1092760 - RNA, 22 nt, Human
uccugaagaacgaagucaugua

SEQ ID NO: 1092761 - RNA, 22 nt, Human
gagaauaucuuggcagucucug

SEQ ID NO: 1092762 - RNA, 22 nt, Human
ugcuggcuggccuggccuggac

SEQ ID NO: 1092763 - RNA, 22 nt, Human
acugccugaugugguucuaaau

SEQ ID NO: 1092764 - RNA, 22 nt, Human
cuacuucuaaguacauggugau

SEQ ID NO: 1092765 - RNA, 22 nt, Human
caguauuuuccuuguuaacuua

SEQ ID NO: 1092766 - RNA, 22 nt, Human
gggcagugguuacacagcugag

SEQ ID NO: 1092767 - RNA, 22 nt, Human
ugaggccucauaaugagauuuc

SEQ ID NO: 1092768 - RNA, 22 nt, Human
uguuccaugucuuuguaggacu

SEQ ID NO: 1092769 - RNA, 22 nt, Human
uucugaggcauagaggaugaga

SEQ ID NO: 1092770 - RNA, 22 nt, Human
agucagcagugaaagcacagcc

SEQ ID NO: 1092771 - RNA, 22 nt, Human
gccuccuggaagucacauguuu

SEQ ID NO: 1092772 - RNA, 22 nt, Human
uggcugaaucugcagcaggaag

SEQ ID NO: 1092773 - RNA, 22 nt, Human
acaugcuuuaacuuauuuugau

SEQ ID NO: 1092774 - RNA, 22 nt, Human
cggcugaggaucuccaggccug

SEQ ID NO: 1092775 - RNA, 22 nt, Human
ucauuucuuaacuagagugaac

SEQ ID NO: 1092776 - RNA, 22 nt, Human
ccauggcauuuuaugugucuua

SEQ ID NO: 1092777 - RNA, 22 nt, Human
uaauuauuugaagacauuagag

SEQ ID NO: 1092778 - RNA, 22 nt, Human
uacuuaaaacugauagaaucuc

SEQ ID NO: 1092779 - RNA, 22 nt, Human
uauguaagugagaucauggagu

SEQ ID NO: 1092780 - RNA, 22 nt, Human
cugcuucuccaaaguaggacuu

SEQ ID NO: 1092781 - RNA, 22 nt, Human
aaaugcaugguaaaugauugcc

SEQ ID NO: 1092782 - RNA, 22 nt, Human
cucugucccagacccaccucuc

SEQ ID NO: 1092783 - RNA, 22 nt, Human
cuuugacauccuuguuccucag

SEQ ID NO: 1092784 - RNA, 22 nt, Human
cgcagguguucaguaaauguau

SEQ ID NO: 1092785 - RNA, 22 nt, Human
ugcaggugcugugucaagagag

SEQ ID NO: 1092786 - RNA, 18 nt, Human
ugaauuaguuugugguuu

SEQ ID NO: 1092787 - RNA, 22 nt, Human
agaaaucaugacuaagagcagu

SEQ ID NO: 1092788 - RNA, 22 nt, Human
auacaucaccuauauauucaca

SEQ ID NO: 1092789 - RNA, 20 nt, Human
uugugguuuagauuaucuga

SEQ ID NO: 1092790 - RNA, 22 nt, Human
caaaggcugccacuguggcugu

SEQ ID NO: 1092791 - RNA, 22 nt, Human
gggcuggcucugucuagaaagg

SEQ ID NO: 1092792 - RNA, 22 nt, Human
ccucagcugcuucccuggagcc

SEQ ID NO: 1092793 - RNA, 23 nt, Human
ggcucugugcugggccugcagga

SEQ ID NO: 1092794 - RNA, 22 nt, Human
uccuggaggggacagcaugggc

SEQ ID NO: 1092795 - RNA, 22 nt, Human
uacaaauggguuaaaauauagu

SEQ ID NO: 1092796 - RNA, 22 nt, Human
gaaauaagaguccaugccaggu

SEQ ID NO: 1092797 - RNA, 22 nt, Human
caggucccgccccgggcugacc

SEQ ID NO: 1092798 - RNA, 22 nt, Human
cugagcuuccaguuccuccagg

SEQ ID NO: 1092799 - RNA, 22 nt, Human
ucuuaagcagagaagaaguuga

SEQ ID NO: 1092800 - RNA, 17 nt, Human
aguggcaggcagauggg

SEQ ID NO: 1092801 - RNA, 18 nt, Human
cugcugugucgucugggc

SEQ ID NO: 1092802 - RNA, 22 nt, Human
gauuuucaugauaaacuuguga

SEQ ID NO: 1092803 - RNA, 22 nt, Human
ugggacagggaaucugaucccc

SEQ ID NO: 1092804 - RNA, 22 nt, Human
uccccucuggaggcugcagggg

SEQ ID NO: 1092805 - RNA, 22 nt, Human
aaaagagguuaaccaggugugu

SEQ ID NO: 1092806 - RNA, 22 nt, Human
auuuucaagggagaggccucug

SEQ ID NO: 1092807 - RNA, 22 nt, Human
cucagaguccccaguggguuug

SEQ ID NO: 1092808 - RNA, 22 nt, Human
caggaacaauguaagucucauu

SEQ ID NO: 1092809 - RNA, 22 nt, Human
agcucuggaccugacaucuggu

SEQ ID NO: 1092810 - RNA, 22 nt, Human
gugcagagaaaugagaagucga

SEQ ID NO: 1092811 - RNA, 22 nt, Human
ugugucagaaggcaauggggau

SEQ ID NO: 1092812 - RNA, 23 nt, Human
uauuuggaaagagggaagaagac

SEQ ID NO: 1092813 - RNA, 22 nt, Human
gaacaauagugguaacaaagcc

SEQ ID NO: 1092814 - RNA, 22 nt, Human
cuugaauugggggaagaucacu

SEQ ID NO: 1092815 - RNA, 22 nt, Human
uaacauccuacacuguugucuu

SEQ ID NO: 1092816 - RNA, 22 nt, Human
auguuucaggcgaacuaacaug

SEQ ID NO: 1092817 - RNA, 22 nt, Human
agcuguguccugaagacacugc

SEQ ID NO: 1092818 - RNA, 22 nt, Human
agcagacaacccagaugaccca

SEQ ID NO: 1092819 - RNA, 22 nt, Human
uuggccuucccuaccugggcca

SEQ ID NO: 1092820 - RNA, 22 nt, Human
uuuacacugcuugaacaaucuc

SEQ ID NO: 1092821 - RNA, 18 nt, Human
aggcccuggccucgaaca

SEQ ID NO: 1092822 - RNA, 22 nt, Human
uuugccaggcuugcaugaauuu

SEQ ID NO: 1092823 - RNA, 22 nt, Human
agagugcaaccgaaacaagcag

SEQ ID NO: 1092824 - RNA, 22 nt, Human
cuugggcucugugggccuuagu

SEQ ID NO: 1092825 - RNA, 23 nt, Human
cugucuccugggcuagguggaau

SEQ ID NO: 1092826 - RNA, 22 nt, Human
accuggagucauuugaggagua

SEQ ID NO: 1092827 - RNA, 22 nt, Human
ucuuuuauccuacauuuagcuc

SEQ ID NO: 1092828 - RNA, 22 nt, Human
ucaccagggagcuuguccucug

SEQ ID NO: 1092829 - RNA, 22 nt, Human
aucuucagcgagguuuccuuuc

SEQ ID NO: 1092830 - RNA, 20 nt, Human
cagauucuccacuaacauau

SEQ ID NO: 1092831 - RNA, 22 nt, Human
cugugcaaaggccuuauguuuu

SEQ ID NO: 1092832 - RNA, 22 nt, Human
gccucaggacuggcauacucau

SEQ ID NO: 1092833 - RNA, 22 nt, Human
ccagagcccgggaccuggacuu

SEQ ID NO: 1092834 - RNA, 21 nt, Human
uccaggccucaggaagggaug

SEQ ID NO: 1092835 - RNA, 22 nt, Human
ucccagacaaucauuggccacc

SEQ ID NO: 1092836 - RNA, 22 nt, Human
ucuuugaaagcuguucuagagu

SEQ ID NO: 1092837 - RNA, 22 nt, Human
uagcuucccuagcuaaagaggu

SEQ ID NO: 1092838 - RNA, 22 nt, Human
agcacagauuugucaacauaga

SEQ ID NO: 1092839 - RNA, 22 nt, Human
gcuuccaguaaguugcugccau

SEQ ID NO: 1092840 - RNA, 22 nt, Human
caaugaaagcaacugccuauaa

SEQ ID NO: 1092841 - RNA, 22 nt, Human
uuugaaagcuacuuucggguca

SEQ ID NO: 1092842 - RNA, 22 nt, Human
uuuucuaaaagaagucacugau

SEQ ID NO: 1092843 - RNA, 22 nt, Human
auugcaaaugagucuuaauaua

SEQ ID NO: 1092844 - RNA, 22 nt, Human
cuucuaagcugagaaugccuuu

SEQ ID NO: 1092845 - RNA, 22 nt, Human
gcucugagccgggggccugucc

SEQ ID NO: 1092846 - RNA, 22 nt, Human
ugaacacauuuucuucaguaga

SEQ ID NO: 1092847 - RNA, 22 nt, Human
ggcaggugcucaaaaauauuug

SEQ ID NO: 1092848 - RNA, 22 nt, Human
uuuuaacuuaaaauacauagau

SEQ ID NO: 1092849 - RNA, 22 nt, Human
agugaaauccuggucaacaggu

SEQ ID NO: 1092850 - RNA, 22 nt, Human
cagguggggcagcugugggagc

SEQ ID NO: 1092851 - RNA, 22 nt, Human
cuggcucauccagguguugcuc

SEQ ID NO: 1092852 - RNA, 22 nt, Human
uacauuguguuaaaacagaaga

SEQ ID NO: 1092853 - RNA, 22 nt, Human
gcaguggcagcugaggggguau

SEQ ID NO: 1092854 - RNA, 22 nt, Human
ucaguaaaugagcaaaaauuuc

SEQ ID NO: 1092855 - RNA, 22 nt, Human
agaugguguuuccccaggugga

SEQ ID NO: 1092856 - RNA, 22 nt, Human
uccaggaacgagaggcugggca

SEQ ID NO: 1092857 - RNA, 22 nt, Human
gggccugggaacuugcauuuag

SEQ ID NO: 1092858 - RNA, 22 nt, Human
aggugggcccagugggcuccag

SEQ ID NO: 1092859 - RNA, 22 nt, Human
gcaggagcugcucuccugacga

SEQ ID NO: 1092860 - RNA, 22 nt, Human
gggagaaggagcuaguucuuga

SEQ ID NO: 1092861 - RNA, 22 nt, Human
acagguggaaacaugguguugg

SEQ ID NO: 1092862 - RNA, 22 nt, Human
uuucuguuaggcaucauuuuaa

SEQ ID NO: 1092863 - RNA, 22 nt, Human
aaauagcacagcagcugaggcu

SEQ ID NO: 1092864 - RNA, 22 nt, Human
ucagaggauuggacuuuuaugu

SEQ ID NO: 1092865 - RNA, 22 nt, Human
cugucuggauauaccuuggcca

SEQ ID NO: 1092866 - RNA, 22 nt, Human
gcagugaguuaugaucaugcca

SEQ ID NO: 1092867 - RNA, 22 nt, Human
gcugcucugugacagccuccgg

SEQ ID NO: 1092868 - RNA, 22 nt, Human
acaguucccgucuugcacagcu

SEQ ID NO: 1092869 - RNA, 22 nt, Human
auacaagugauauaauuguuuc

SEQ ID NO: 1092870 - RNA, 22 nt, Human
uuucuauugaucuaauaaacau

SEQ ID NO: 1092871 - RNA, 22 nt, Human
uucuccaaguagaagcuaaguu

SEQ ID NO: 1092872 - RNA, 22 nt, Human
agcagggcccacuaggggagau

SEQ ID NO: 1092873 - RNA, 22 nt, Human
auuuacauuccauggugguuac

SEQ ID NO: 1092874 - RNA, 22 nt, Human
cucucccccacagcagccuucu

SEQ ID NO: 1092875 - RNA, 22 nt, Human
uccuggcccuguggccugcagu

SEQ ID NO: 1092876 - RNA, 22 nt, Human
ccaggaacuaagaauccuuuag

SEQ ID NO: 1092877 - RNA, 22 nt, Human
gaauaacagcaaguuugcaggc

SEQ ID NO: 1092878 - RNA, 22 nt, Human
gaggccuggagccgccuaggcg

SEQ ID NO: 1092879 - RNA, 22 nt, Human
uggcugaggcuuuucuuaaaga

SEQ ID NO: 1092880 - RNA, 22 nt, Human
uuccucagagagacagaaacua

SEQ ID NO: 1092881 - RNA, 22 nt, Human
ucaguuccucugcccaaggcag

SEQ ID NO: 1092882 - RNA, 19 nt, Human
cugguccugacugaggggu

SEQ ID NO: 1092883 - RNA, 22 nt, Human
gcucuugucaaaaauuaguuga

SEQ ID NO: 1092884 - RNA, 22 nt, Human
uggcccucagucuugcuccugc

SEQ ID NO: 1092885 - RNA, 22 nt, Human
uuuucauuuacauuagggaaga

SEQ ID NO: 1092886 - RNA, 22 nt, Human
ggcacagagcuuugucccaguu

SEQ ID NO: 1092887 - RNA, 22 nt, Human
gauuuacagaucuaagggucac

SEQ ID NO: 1092888 - RNA, 22 nt, Human
gccaggaaaaacguggugggag

SEQ ID NO: 1092889 - RNA, 22 nt, Human
gcucagagcuugaaguuccacu

SEQ ID NO: 1092890 - RNA, 22 nt, Human
gggcccuggggccugauuugca

SEQ ID NO: 1092891 - RNA, 22 nt, Human
cauuuccugucuggaggucaaa

SEQ ID NO: 1092892 - RNA, 22 nt, Human
aauuccaacagacaaaguuaga

SEQ ID NO: 1092893 - RNA, 22 nt, Human
ucagaacuuaaagccgauuggg

SEQ ID NO: 1092894 - RNA, 22 nt, Human
agggcagcagcggcccaggccu

SEQ ID NO: 1092895 - RNA, 22 nt, Human
gcucucuguuauuaagaucuuu

SEQ ID NO: 1092896 - RNA, 22 nt, Human
ucagcagucacauguuguccca

SEQ ID NO: 1092897 - RNA, 22 nt, Human
cugcccuguuuggacagcccgg

SEQ ID NO: 1092898 - RNA, 22 nt, Human
ucaaguguaguggugucagguc

SEQ ID NO: 1092899 - RNA, 18 nt, Human
gggcuguguucaugccca

SEQ ID NO: 1092900 - RNA, 22 nt, Human
aaguguuuaaauuauuugcagg

SEQ ID NO: 1092901 - RNA, 22 nt, Human
gcuccuggguguggcugccccu

SEQ ID NO: 1092902 - RNA, 22 nt, Human
acugcagccuuugggcucauaa

SEQ ID NO: 1092903 - RNA, 22 nt, Human
gggcagcaguugcccuaaucaa

SEQ ID NO: 1092904 - RNA, 22 nt, Human
aagaugauaggacuugcuuaag

SEQ ID NO: 1092905 - RNA, 22 nt, Human
uuccuggugguggugacagcac

SEQ ID NO: 1092906 - RNA, 22 nt, Human
uucagaaugugaccuuauuugg

SEQ ID NO: 1092907 - RNA, 22 nt, Human
aggaagccaugguggacgucua

SEQ ID NO: 1092908 - RNA, 16 nt, Human
ggcuuuaauuuauccc

SEQ ID NO: 1092909 - RNA, 22 nt, Human
guucacaguuuuauaccugaga

SEQ ID NO: 1092910 - RNA, 22 nt, Human
uuucacaucagagguagauuag

SEQ ID NO: 1092911 - RNA, 22 nt, Human
gcaccaugacagugaggagaac

SEQ ID NO: 1092912 - RNA, 20 nt, Human
guccaggacccagcaggagg

SEQ ID NO: 1092913 - RNA, 22 nt, Human
uacuuauugguucagaaguuua

SEQ ID NO: 1092914 - RNA, 22 nt, Human
cagucaggggugggaucaaggc

SEQ ID NO: 1092915 - RNA, 22 nt, Human
ucauuucaaugauacuacuaag

SEQ ID NO: 1092916 - RNA, 22 nt, Human
ggaggccuagccagcuccaguu

SEQ ID NO: 1092917 - RNA, 22 nt, Human
ucagacagaaagaugaguaugg

SEQ ID NO: 1092918 - RNA, 20 nt, Human
acagauauuugauuuucagu

SEQ ID NO: 1092919 - RNA, 22 nt, Human
agcacacagucuuccuuccucc

SEQ ID NO: 1092920 - RNA, 22 nt, Human
uagaaaucauuuagaaguauug

SEQ ID NO: 1092921 - RNA, 22 nt, Human
gugcugggugcugcagacaggu

SEQ ID NO: 1092922 - RNA, 22 nt, Human
gcagcaugagcuauacaaagua

SEQ ID NO: 1092923 - RNA, 22 nt, Human
gaguuaauucgaauauucuagc

SEQ ID NO: 1092924 - RNA, 22 nt, Human
uuuccuaggagauugaucacau

SEQ ID NO: 1092925 - RNA, 19 nt, Human
uguccuguccugcucugac

SEQ ID NO: 1092926 - RNA, 22 nt, Human
gggcuggcucccagguguugaa

SEQ ID NO: 1092927 - RNA, 22 nt, Human
aacaacuugcguucagagaugu

SEQ ID NO: 1092928 - RNA, 22 nt, Human
ugggccucugccacgcuccccc

SEQ ID NO: 1092929 - RNA, 22 nt, Human
gaacacuugcuguuaauaagug

SEQ ID NO: 1092930 - RNA, 22 nt, Human
ucuucuccagugcuucugcaca

SEQ ID NO: 1092931 - RNA, 22 nt, Human
gcuggcugguccagcaggggcu

SEQ ID NO: 1092932 - RNA, 22 nt, Human
auuccuuuggacuccuccuugc

SEQ ID NO: 1092933 - RNA, 20 nt, Human
ucaauuucagguagcauagu

SEQ ID NO: 1092934 - RNA, 22 nt, Human
gaguuguucaacgugugugaaa

SEQ ID NO: 1092935 - RNA, 22 nt, Human
gugggcuuugcuggauccuucc

SEQ ID NO: 1092936 - RNA, 22 nt, Human
ggcaggugcugggagcaucuca

SEQ ID NO: 1092937 - RNA, 22 nt, Human
aucuacaggcugaggugggagg

SEQ ID NO: 1092938 - RNA, 23 nt, Human
gcuauagguagaaggaaucuuuu

SEQ ID NO: 1092939 - RNA, 22 nt, Human
ccugaggcccuggcugugcuga

SEQ ID NO: 1092940 - RNA, 22 nt, Human
ccagugggugcugggcucugcc

SEQ ID NO: 1092941 - RNA, 22 nt, Human
caccagguggaaaugucacagc

SEQ ID NO: 1092942 - RNA, 22 nt, Human
aagucagcacuccaggaagcca

SEQ ID NO: 1092943 - RNA, 22 nt, Human
gcugccuguccugaggaguccg

SEQ ID NO: 1092944 - RNA, 22 nt, Human
ccauuuguaccauuucuuugua

SEQ ID NO: 1092945 - RNA, 22 nt, Human
cgcugggcgccgaccugcuggc

SEQ ID NO: 1092946 - RNA, 22 nt, Human
cagugguuauacuuacuguuuc

SEQ ID NO: 1092947 - RNA, 18 nt, Human
uccugccugugccccagg

SEQ ID NO: 1092948 - RNA, 22 nt, Human
ugugcuucaucacuucucaguu

SEQ ID NO: 1092949 - RNA, 22 nt, Human
caauguuuacuggggacccaga

SEQ ID NO: 1092950 - RNA, 22 nt, Human
caggaggcagagguugcagcga

SEQ ID NO: 1092951 - RNA, 22 nt, Human
gcuccuggcucucugagggcug

SEQ ID NO: 1092952 - RNA, 23 nt, Human
auauaaacaccagauagauugua

SEQ ID NO: 1092953 - RNA, 20 nt, Human
gcagagugugagagggugaa

SEQ ID NO: 1092954 - RNA, 22 nt, Human
aaauuagauaugugugagacuc

SEQ ID NO: 1092955 - RNA, 22 nt, Human
aaacacuucaaggacuucuguc

SEQ ID NO: 1092956 - RNA, 22 nt, Human
cuggccugugggcugucuccgg

SEQ ID NO: 1092957 - RNA, 22 nt, Human
uugaaggaggcuccuuuuuaaa

SEQ ID NO: 1092958 - RNA, 22 nt, Human
ccuucagaccuagacaggaauc

SEQ ID NO: 1092959 - RNA, 22 nt, Human
acuuuacagaugguuuccugac

SEQ ID NO: 1092960 - RNA, 22 nt, Human
auguaaggcugccuaugacacu

SEQ ID NO: 1092961 - RNA, 22 nt, Human
ccuggaaguuggagguugcagu

SEQ ID NO: 1092962 - RNA, 22 nt, Human
cgcaggcuccggggugcccugg

SEQ ID NO: 1092963 - RNA, 18 nt, Human
uaagucauuuugccagca

SEQ ID NO: 1092964 - RNA, 22 nt, Human
gagcucccuggagguucagaua

SEQ ID NO: 1092965 - RNA, 22 nt, Human
ccugcuguuuucuucacuucag

SEQ ID NO: 1092966 - RNA, 22 nt, Human
agcugagcucaggcugauguaa

SEQ ID NO: 1092967 - RNA, 22 nt, Human
uggagccaaaaagggaaggaga

SEQ ID NO: 1092968 - RNA, 22 nt, Human
aacuauacucuguaaaugugcu

SEQ ID NO: 1092969 - RNA, 22 nt, Human
ugacuuuaaagcucacucuuuu

SEQ ID NO: 1092970 - RNA, 21 nt, Human
ccaggguccagcugccauggu

SEQ ID NO: 1092971 - RNA, 22 nt, Human
gcugcugucacggugcuaaggg

SEQ ID NO: 1092972 - RNA, 22 nt, Human
aaaugcaugugcuauagaugug

SEQ ID NO: 1092973 - RNA, 20 nt, Human
auguuuaauguuguccaccc

SEQ ID NO: 1092974 - RNA, 22 nt, Human
aggccaggaauccuugucccag

SEQ ID NO: 1092975 - RNA, 22 nt, Human
ucaaugauuagaguuuagugug

SEQ ID NO: 1092976 - RNA, 21 nt, Human
ccagaggccucucuuggccac

SEQ ID NO: 1092977 - RNA, 18 nt, Human
augggaggggccaagaga

SEQ ID NO: 1092978 - RNA, 22 nt, Human
acuugauuuuuauaauaaaugg

SEQ ID NO: 1092979 - RNA, 22 nt, Human
ucuaaacauugugauagaccuu

SEQ ID NO: 1092980 - RNA, 22 nt, Human
ugagccuguccugugcauguga

SEQ ID NO: 1092981 - RNA, 18 nt, Human
ucagccuguugucugccu

SEQ ID NO: 1092982 - RNA, 22 nt, Human
aaacaugagcaucucuucaagc

SEQ ID NO: 1092983 - RNA, 22 nt, Human
auuuccuggaaugacuaguggg

SEQ ID NO: 1092984 - RNA, 22 nt, Human
uggcagcaaaaccagaaucaga

SEQ ID NO: 1092985 - RNA, 22 nt, Human
uaugaacugugagugugauggg

SEQ ID NO: 1092986 - RNA, 22 nt, Human
gagaaucucuuugacaagcaga

SEQ ID NO: 1092987 - RNA, 22 nt, Human
aacacauaggcagagcaugaca

SEQ ID NO: 1092988 - RNA, 22 nt, Human
aaguaucuuucuagcaacuaaa

SEQ ID NO: 1092989 - RNA, 22 nt, Human
cucugagagcggucuguggcuu

SEQ ID NO: 1092990 - RNA, 22 nt, Human
acaaggaggucuggggggcccu

SEQ ID NO: 1092991 - RNA, 22 nt, Human
gcagcuggggaggucgugggga

SEQ ID NO: 1092992 - RNA, 16 nt, Human
cagccugcagugguca

SEQ ID NO: 1092993 - RNA, 22 nt, Human
aagugacacauggcacuucuau

SEQ ID NO: 1092994 - RNA, 22 nt, Human
ucaacaguucuguccaauuaau

SEQ ID NO: 1092995 - RNA, 22 nt, Human
acuucuuucacaauguuucuag

SEQ ID NO: 1092996 - RNA, 22 nt, Human
uugcugugaaaccaugggaagu

SEQ ID NO: 1092997 - RNA, 23 nt, Human
ugcucugggaggcccuggagagc

SEQ ID NO: 1092998 - RNA, 18 nt, Human
ugaggcagucagugaugg

SEQ ID NO: 1092999 - RNA, 22 nt, Human
ucugagacugcagugagccgcu

SEQ ID NO: 1093000 - RNA, 22 nt, Human
accuuucauuaaagucuguagu

SEQ ID NO: 1093001 - RNA, 22 nt, Human
ucccuggaacagagagacaacg

SEQ ID NO: 1093002 - RNA, 22 nt, Human
ugggcucugaagggucccggau

SEQ ID NO: 1093003 - RNA, 22 nt, Human
ucauuuaucauuugugcuguag

SEQ ID NO: 1093004 - RNA, 22 nt, Human
ucugaaauauauuuugaguguu

SEQ ID NO: 1093005 - RNA, 21 nt, Human
cauuucaguaaggaagccugu

SEQ ID NO: 1093006 - RNA, 22 nt, Human
cauugcacagcccuguggugau

SEQ ID NO: 1093007 - RNA, 22 nt, Human
cugagcccuugaacccaagucc

SEQ ID NO: 1093008 - RNA, 22 nt, Human
ggaagcacugaggcagagaggg

SEQ ID NO: 1093009 - RNA, 22 nt, Human
gcaccaggcuuagagccccagg

SEQ ID NO: 1093010 - RNA, 22 nt, Human
uaaguggaagguuauaugcuaa

SEQ ID NO: 1093011 - RNA, 22 nt, Human
guuugaaaguggcaaguccuug

SEQ ID NO: 1093012 - RNA, 22 nt, Human
aguuuaauauccuucaacuuuc

SEQ ID NO: 1093013 - RNA, 22 nt, Human
ucccucagucccuggacaggca

SEQ ID NO: 1093014 - RNA, 22 nt, Human
aauguuugucaucacacagaua

SEQ ID NO: 1093015 - RNA, 22 nt, Human
uacauacauauucauacaggug

SEQ ID NO: 1093016 - RNA, 22 nt, Human
gagagcugugguuugaccaggc

SEQ ID NO: 1093017 - RNA, 22 nt, Human
uugugcaauuuaaaaucuuccu

SEQ ID NO: 1093018 - RNA, 22 nt, Human
ccucaggggugcccacagcugc

SEQ ID NO: 1093019 - RNA, 22 nt, Human
uucaaaguugcaugacagcuua

SEQ ID NO: 1093020 - RNA, 21 nt, Human
ucagcagcaucugccuagagu

SEQ ID NO: 1093021 - RNA, 22 nt, Human
gucccuuggcucacaaacagcu

SEQ ID NO: 1093022 - RNA, 22 nt, Human
uucaugaauaccccuucuguaa

SEQ ID NO: 1093023 - RNA, 22 nt, Human
ugguucauugagaagacugaag

SEQ ID NO: 1093024 - RNA, 22 nt, Human
auaguuugaaggcuguucuacu

SEQ ID NO: 1093025 - RNA, 22 nt, Human
uauacaaugaguacauucuggg

SEQ ID NO: 1093026 - RNA, 20 nt, Human
ucagacagucgcaguucugg

SEQ ID NO: 1093027 - RNA, 22 nt, Human
ucuacagacagagcagguggga

SEQ ID NO: 1093028 - RNA, 22 nt, Human
uggaggcauugugacugcugaa

SEQ ID NO: 1093029 - RNA, 22 nt, Human
gcucccugaaaagaacaaaguc

SEQ ID NO: 1093030 - RNA, 22 nt, Human
auaggcaaauuaauaagucaua

SEQ ID NO: 1093031 - RNA, 22 nt, Human
ucuucagugcaccugaugucuu

SEQ ID NO: 1093032 - RNA, 22 nt, Human
uguauaaacuuaagcaggaacc

SEQ ID NO: 1093033 - RNA, 22 nt, Human
ugaaaucaaugucuucugucuc

SEQ ID NO: 1093034 - RNA, 22 nt, Human
gaaagguuucaucuacuuuuca

SEQ ID NO: 1093035 - RNA, 22 nt, Human
ccucucuguguggccucuccau

SEQ ID NO: 1093036 - RNA, 22 nt, Human
ggugaaggucuacugugugcca

SEQ ID NO: 1093037 - RNA, 22 nt, Human
uuugcauuaucucacuuauaua

SEQ ID NO: 1093038 - RNA, 22 nt, Human
gcaggaaccugguaagcuucac

SEQ ID NO: 1093039 - RNA, 22 nt, Human
ugcaaucagguaccauuugauu

SEQ ID NO: 1093040 - RNA, 22 nt, Human
ugcuuuuuaguacugucuuauu

SEQ ID NO: 1093041 - RNA, 18 nt, Human
gaggaacauucaccuccu

SEQ ID NO: 1093042 - RNA, 22 nt, Human
gugcagggagcccagaaggucc

SEQ ID NO: 1093043 - RNA, 22 nt, Human
aucugguucuuuguauuuccuu

SEQ ID NO: 1093044 - RNA, 21 nt, Human
uuggacuuuugcgugauugag

SEQ ID NO: 1093045 - RNA, 22 nt, Human
gcugagugauugauauuuuagu

SEQ ID NO: 1093046 - RNA, 22 nt, Human
gccaggaauuucaagagccacu

SEQ ID NO: 1093047 - RNA, 22 nt, Human
agguggccggugccagccgggc

SEQ ID NO: 1093048 - RNA, 22 nt, Human
ugcccaugcaugacagauggcu

SEQ ID NO: 1093049 - RNA, 20 nt, Human
accuuucaaaugauucagca

SEQ ID NO: 1093050 - RNA, 22 nt, Human
ucagguggccaaaugggagcgc

SEQ ID NO: 1093051 - RNA, 22 nt, Human
cccauucauccucgcuuccuuc

SEQ ID NO: 1093052 - RNA, 23 nt, Human
aggcuuccuaucuuagagcuggg

SEQ ID NO: 1093053 - RNA, 22 nt, Human
auguuuccauuuucuuguauca

SEQ ID NO: 1093054 - RNA, 22 nt, Human
gucagcuacugcagggaacuuu

SEQ ID NO: 1093055 - RNA, 22 nt, Human
agccaauaaauuuacaacuaga

SEQ ID NO: 1093056 - RNA, 22 nt, Human
agaaaagggcaggagggauaca

SEQ ID NO: 1093057 - RNA, 22 nt, Human
ugcacacagcugggccuggcug

SEQ ID NO: 1093058 - RNA, 22 nt, Human
ugauuuccuaggucuggagaag

SEQ ID NO: 1093059 - RNA, 22 nt, Human
gaauagcuuccuuuuuuccaaa

SEQ ID NO: 1093060 - RNA, 22 nt, Human
ggcugcaagcaugcacagauac

SEQ ID NO: 1093061 - RNA, 22 nt, Human
guacacagaugcuugagaaucu

SEQ ID NO: 1093062 - RNA, 22 nt, Human
cucuugcagauaccuugaagga

SEQ ID NO: 1093063 - RNA, 22 nt, Human
uucugaaaugagauauaaggua

SEQ ID NO: 1093064 - RNA, 21 nt, Human
uuucaauguguucuuuguagu

SEQ ID NO: 1093065 - RNA, 22 nt, Human
ucucagucuuugcaaggaugcu

SEQ ID NO: 1093066 - RNA, 22 nt, Human
agcaccuggucuccuggcgcug

SEQ ID NO: 1093067 - RNA, 22 nt, Human
gcaaauauuucuaauuccugaa

SEQ ID NO: 1093068 - RNA, 19 nt, Human
caggagagcaugcacuuug

SEQ ID NO: 1093069 - RNA, 22 nt, Human
uccugccucuugccuucuucac

SEQ ID NO: 1093070 - RNA, 23 nt, Human
cauaugaauuuuagaggcaguuu

SEQ ID NO: 1093071 - RNA, 22 nt, Human
ggugauuuucgaguuucauguu

SEQ ID NO: 1093072 - RNA, 19 nt, Human
uguuuuguuaaagcagucc

SEQ ID NO: 1093073 - RNA, 22 nt, Human
aaagccuugggauuugugauca

SEQ ID NO: 1093074 - RNA, 22 nt, Human
uuacacaugcucacuuauuugu

SEQ ID NO: 1093075 - RNA, 22 nt, Human
ggguacagagagaugagguaac

SEQ ID NO: 1093076 - RNA, 22 nt, Human
cucaggaugucggugacuauug

SEQ ID NO: 1093077 - RNA, 20 nt, Human
uggagcugugguaaggagca

SEQ ID NO: 1093078 - RNA, 21 nt, Human
acagcaagccuuccuuucagg

SEQ ID NO: 1093079 - RNA, 23 nt, Human
uacaagguagcauuaguuucuuc

SEQ ID NO: 1093080 - RNA, 22 nt, Human
ccugccagggccuuggaagaaa

SEQ ID NO: 1093081 - RNA, 22 nt, Human
ggcaggugcgcauguugcauua

SEQ ID NO: 1093082 - RNA, 22 nt, Human
agggccugugcuuccugagaua

SEQ ID NO: 1093083 - RNA, 22 nt, Human
ucagaggaccuuacugagaacc

SEQ ID NO: 1093084 - RNA, 22 nt, Human
ggcucugcccagguggacagca

SEQ ID NO: 1093085 - RNA, 19 nt, Human
gcagccaggugcucuaccu

SEQ ID NO: 1093086 - RNA, 22 nt, Human
guauuuuaagugacuacuaggu

SEQ ID NO: 1093087 - RNA, 22 nt, Human
cuggugagacgguugacaggag

SEQ ID NO: 1093088 - RNA, 22 nt, Human
cagaagaguagcugaacaaguu

SEQ ID NO: 1093089 - RNA, 22 nt, Human
aaacaguuuauaacaugauacu

SEQ ID NO: 1093090 - RNA, 22 nt, Human
uuugugcaauuuauguacuaua

SEQ ID NO: 1093091 - RNA, 23 nt, Human
ugaugggaaggaacgacuaccac

SEQ ID NO: 1093092 - RNA, 22 nt, Human
cugggcugcaguuccugguccu

SEQ ID NO: 1093093 - RNA, 22 nt, Human
aagauucuugacuagaaugauu

SEQ ID NO: 1093094 - RNA, 22 nt, Human
cuuucugaucccugcaacccuc

SEQ ID NO: 1093095 - RNA, 20 nt, Human
uaacagaaguagaagugggu

SEQ ID NO: 1093096 - RNA, 22 nt, Human
acauauuuugaaagcuuucuaa

SEQ ID NO: 1093097 - RNA, 22 nt, Human
ucacaagacagaaaacauuuag

SEQ ID NO: 1093098 - RNA, 22 nt, Human
uguuacagaaauauugcuucuu

SEQ ID NO: 1093099 - RNA, 22 nt, Human
ggcaggugaggcaugugccugg

SEQ ID NO: 1093100 - RNA, 22 nt, Human
auuaaacaauguaaaguucuug

SEQ ID NO: 1093101 - RNA, 22 nt, Human
aggaaaaagaguugcugccuuc

SEQ ID NO: 1093102 - RNA, 22 nt, Human
uuuuuauaggucagggcaaguc

SEQ ID NO: 1093103 - RNA, 22 nt, Human
guguccacggcugagaaugauu

SEQ ID NO: 1093104 - RNA, 22 nt, Human
ggaccaaaauuacagucgcucc

SEQ ID NO: 1093105 - RNA, 22 nt, Human
uggcuggggccacaguuuuccu

SEQ ID NO: 1093106 - RNA, 22 nt, Human
caguauuuauggcuugaguauu

SEQ ID NO: 1093107 - RNA, 22 nt, Human
agggugucagccacggaauggg

SEQ ID NO: 1093108 - RNA, 22 nt, Human
ccugagagugagugccuccuua

SEQ ID NO: 1093109 - RNA, 22 nt, Human
uggcaggaaaguaacagagcac

SEQ ID NO: 1093110 - RNA, 22 nt, Human
ccugcuuaacauugccaugaca

SEQ ID NO: 1093111 - RNA, 22 nt, Human
ucuuuuaaccuaacuagcuugg

SEQ ID NO: 1093112 - RNA, 22 nt, Human
gccaguuccuguggagucagag

SEQ ID NO: 1093113 - RNA, 22 nt, Human
gcagauggugggggaggaguac

SEQ ID NO: 1093114 - RNA, 22 nt, Human
uuucaaaauuuugcagugguaa

SEQ ID NO: 1093115 - RNA, 22 nt, Human
ucacugucugaaagaaauggcc

SEQ ID NO: 1093116 - RNA, 22 nt, Human
augcugaagagagaacuacuca

SEQ ID NO: 1093117 - RNA, 22 nt, Human
uccuaaaugauucagaaauuuc

SEQ ID NO: 1093118 - RNA, 22 nt, Human
auuuuaucugcuuacuuucagg

SEQ ID NO: 1093119 - RNA, 22 nt, Human
acccugagggaugagaguugca

SEQ ID NO: 1093120 - RNA, 22 nt, Human
uuugaaagacagaauauuuuug

SEQ ID NO: 1093121 - RNA, 22 nt, Human
acagggcaugugcaagagacau

SEQ ID NO: 1093122 - RNA, 22 nt, Human
ucccagcgcggggggaggaucc

SEQ ID NO: 1093123 - RNA, 22 nt, Human
augaagucugcacaugcaugug

SEQ ID NO: 1093124 - RNA, 22 nt, Human
gcucugugcaguucagggacac

SEQ ID NO: 1093125 - RNA, 22 nt, Human
agcaggguauguuagagcugua

SEQ ID NO: 1093126 - RNA, 22 nt, Human
cugcuuuguggaaucacacugg

SEQ ID NO: 1093127 - RNA, 22 nt, Human
acuggcagagacccugauggcc

SEQ ID NO: 1093128 - RNA, 22 nt, Human
uuugacauugccaauuugcuca

SEQ ID NO: 1093129 - RNA, 22 nt, Human
ugcccucugcaggccgccaugg

SEQ ID NO: 1093130 - RNA, 22 nt, Human
ccagggcagccaacccagaugc

SEQ ID NO: 1093131 - RNA, 22 nt, Human
aaggaagaugaaaguacugcua

SEQ ID NO: 1093132 - RNA, 23 nt, Human
uggcugagguccagguaguuuca

SEQ ID NO: 1093133 - RNA, 22 nt, Human
gacagcagacaaaccauguuuu

SEQ ID NO: 1093134 - RNA, 22 nt, Human
cuguuuuaucucaagaguucaa

SEQ ID NO: 1093135 - RNA, 18 nt, Human
cugugcagcaaacugagc

SEQ ID NO: 1093136 - RNA, 22 nt, Human
uuaaacagagucugaaauguaa

SEQ ID NO: 1093137 - RNA, 22 nt, Human
cuuauacacgaacacaaggugu

SEQ ID NO: 1093138 - RNA, 22 nt, Human
ucagacagucaucagagcuugu

SEQ ID NO: 1093139 - RNA, 22 nt, Human
uucaguauuugaaaccauaggc

SEQ ID NO: 1093140 - RNA, 22 nt, Human
ccugcagguaaggcuaacugcc

SEQ ID NO: 1093141 - RNA, 22 nt, Human
cuacugaguccuucagcugcca

SEQ ID NO: 1093142 - RNA, 22 nt, Human
uacuuacagagcuuauaaguua

SEQ ID NO: 1093143 - RNA, 22 nt, Human
ugugaggagggucaaacugagu

SEQ ID NO: 1093144 - RNA, 22 nt, Human
caaggucagcgugaaguucugu

SEQ ID NO: 1093145 - RNA, 22 nt, Human
aaaaacacaacugucuuucucu

SEQ ID NO: 1093146 - RNA, 22 nt, Human
ucccucagcaggaauguggcag

SEQ ID NO: 1093147 - RNA, 23 nt, Human
aguuuuucugcaugguucuguau

SEQ ID NO: 1093148 - RNA, 22 nt, Human
cugcugcaggaugggcacucug

SEQ ID NO: 1093149 - RNA, 22 nt, Human
gaugggggccagggccugcuuu

SEQ ID NO: 1093150 - RNA, 22 nt, Human
caucagugaaagugaauguucu

SEQ ID NO: 1093151 - RNA, 22 nt, Human
uccagagcagguggucagaagg

SEQ ID NO: 1093152 - RNA, 22 nt, Human
cuuggagauacaagugguaccu

SEQ ID NO: 1093153 - RNA, 22 nt, Human
cuggcugugcagucuuccagaa

SEQ ID NO: 1093154 - RNA, 22 nt, Human
cugugcuugacagugggaagca

SEQ ID NO: 1093155 - RNA, 17 nt, Human
agagauaaggcggagaa

SEQ ID NO: 1093156 - RNA, 22 nt, Human
cuggccugagaaugcuacccuu

SEQ ID NO: 1093157 - RNA, 22 nt, Human
auguauuugcuuguuauggauu

SEQ ID NO: 1093158 - RNA, 22 nt, Human
gcagcuggagccagccagacac

SEQ ID NO: 1093159 - RNA, 23 nt, Human
uucaucaguugcuguugcagaac

SEQ ID NO: 1093160 - RNA, 22 nt, Human
cccuggccuccaggcaguccug

SEQ ID NO: 1093161 - RNA, 22 nt, Human
aaguccugugugcuuacacuug

SEQ ID NO: 1093162 - RNA, 20 nt, Human
cuguggcucaugcaucugcc

SEQ ID NO: 1093163 - RNA, 22 nt, Human
uacucagagucauugcccuucu

SEQ ID NO: 1093164 - RNA, 22 nt, Human
gccuaacuuggcuuuguucacc

SEQ ID NO: 1093165 - RNA, 22 nt, Human
auuuccuguugcuuuugccacu

SEQ ID NO: 1093166 - RNA, 22 nt, Human
gcagugugaccgagcuugcuuc

SEQ ID NO: 1093167 - RNA, 22 nt, Human
uuucacagguacaaacacuccu

SEQ ID NO: 1093168 - RNA, 22 nt, Human
cacagugcaugaugggcagaag

SEQ ID NO: 1093169 - RNA, 22 nt, Human
uauacagaaccgccugaagucu

SEQ ID NO: 1093170 - RNA, 22 nt, Human
ccagagcccagggucaugcagg

SEQ ID NO: 1093171 - RNA, 22 nt, Human
ugguccagaugccuuggcuuua

SEQ ID NO: 1093172 - RNA, 19 nt, Human
uccuuugaauaucaguuga

SEQ ID NO: 1093173 - RNA, 22 nt, Human
auccaggagggcugacuccuua

SEQ ID NO: 1093174 - RNA, 22 nt, Human
aucuuuccuguuuucagacagc

SEQ ID NO: 1093175 - RNA, 22 nt, Human
ggugagaggccugagagcugga

SEQ ID NO: 1093176 - RNA, 23 nt, Human
aaacaagcccuaaugaagagucc

SEQ ID NO: 1093177 - RNA, 22 nt, Human
ccuuccuggcuguccgccugau

SEQ ID NO: 1093178 - RNA, 22 nt, Human
ccucaggaaccacauugcugcu

SEQ ID NO: 1093179 - RNA, 19 nt, Human
gccucugcuggggacaggc

SEQ ID NO: 1093180 - RNA, 22 nt, Human
acacugcagaugaaagcauaag

SEQ ID NO: 1093181 - RNA, 22 nt, Human
ugggcugcuguuacaggggcug

SEQ ID NO: 1093182 - RNA, 20 nt, Human
ccaccuggccaaggcugugc

SEQ ID NO: 1093183 - RNA, 22 nt, Human
acagcuuuucaauucugcugag

SEQ ID NO: 1093184 - RNA, 22 nt, Human
ugccuggcaaugccagaagcca

SEQ ID NO: 1093185 - RNA, 22 nt, Human
uacuguuuucuauaauggcugu

SEQ ID NO: 1093186 - RNA, 22 nt, Human
ugaaaucuucacuaagucucuu

SEQ ID NO: 1093187 - RNA, 22 nt, Human
uauacacaaggugugcauuugu

SEQ ID NO: 1093188 - RNA, 22 nt, Human
gccaggaaaaaccggcccugcu

SEQ ID NO: 1093189 - RNA, 22 nt, Human
gcauccagagguagccacugug

SEQ ID NO: 1093190 - RNA, 22 nt, Human
acuugaaacccugagaugauaa

SEQ ID NO: 1093191 - RNA, 22 nt, Human
ugauggcuaucccuggaagggc

SEQ ID NO: 1093192 - RNA, 22 nt, Human
uauuuggaauagcuugcuaaug

SEQ ID NO: 1093193 - RNA, 21 nt, Human
ccuccaggugauuccgugcuc

SEQ ID NO: 1093194 - RNA, 22 nt, Human
uccagagccuauauguucaacu

SEQ ID NO: 1093195 - RNA, 22 nt, Human
agcagcagaggucagaaaggua

SEQ ID NO: 1093196 - RNA, 22 nt, Human
caggugggagccacagcguaca

SEQ ID NO: 1093197 - RNA, 22 nt, Human
gccuccuggccuuugcuccuca

SEQ ID NO: 1093198 - RNA, 22 nt, Human
uugcaucuagggcaacccagag

SEQ ID NO: 1093199 - RNA, 22 nt, Human
uggggcagcuccaucuauucca

SEQ ID NO: 1093200 - RNA, 22 nt, Human
cccagagcuccgguccugccca

SEQ ID NO: 1093201 - RNA, 22 nt, Human
acagaauuaucaggaaauguua

SEQ ID NO: 1093202 - RNA, 22 nt, Human
uggucuucuuuguugcuauuau

SEQ ID NO: 1093203 - RNA, 22 nt, Human
uuuuagcacuaagugauaugcu

SEQ ID NO: 1093204 - RNA, 22 nt, Human
aaaauaacuucuacuauuugca

SEQ ID NO: 1093205 - RNA, 21 nt, Human
uauguagacucguuagaaugc

SEQ ID NO: 1093206 - RNA, 22 nt, Human
uaccuugaaaagaaggugcuca

SEQ ID NO: 1093207 - RNA, 22 nt, Human
gaggacaggagacucacuguuu

SEQ ID NO: 1093208 - RNA, 22 nt, Human
ugggauggagccugaguauagu

SEQ ID NO: 1093209 - RNA, 22 nt, Human
uuucacauagaaagugauuuac

SEQ ID NO: 1093210 - RNA, 22 nt, Human
cauugaaaaacguugacugagu

SEQ ID NO: 1093211 - RNA, 22 nt, Human
ugcaauuuuuaucaauucagca

SEQ ID NO: 1093212 - RNA, 23 nt, Human
ccuggggagcuguauccagagug

SEQ ID NO: 1093213 - RNA, 22 nt, Human
ggucagagggugggcugccugu

SEQ ID NO: 1093214 - RNA, 22 nt, Human
aggccagcuguuacuagagcca

SEQ ID NO: 1093215 - RNA, 22 nt, Human
agccucucagagugcugggauu

SEQ ID NO: 1093216 - RNA, 22 nt, Human
uguauuuccugguuuagaucaa

SEQ ID NO: 1093217 - RNA, 22 nt, Human
ggccugaggccaccagcagccc

SEQ ID NO: 1093218 - RNA, 22 nt, Human
guggggcggcagaugcucccug

SEQ ID NO: 1093219 - RNA, 22 nt, Human
ucuuagcauuucauaacaacug

SEQ ID NO: 1093220 - RNA, 22 nt, Human
uuuccuuuuaagcagucggccu

SEQ ID NO: 1093221 - RNA, 22 nt, Human
gugcucuccuggcugcccugac

SEQ ID NO: 1093222 - RNA, 22 nt, Human
uuuuguuguaauauaccuaucc

SEQ ID NO: 1093223 - RNA, 22 nt, Human
ggcucagaaacuaaaggcgcug

SEQ ID NO: 1093224 - RNA, 22 nt, Human
uucauaaacaaauuaaggccug

SEQ ID NO: 1093225 - RNA, 22 nt, Human
guuucucugucuguuacauugg

SEQ ID NO: 1093226 - RNA, 22 nt, Human
uagcaaagaccaaagcuaguug

SEQ ID NO: 1093227 - RNA, 22 nt, Human
uuuacagcuacuguccuauuuc

SEQ ID NO: 1093228 - RNA, 22 nt, Human
aagcauuucagguagagauauu

SEQ ID NO: 1093229 - RNA, 22 nt, Human
ggagccugugggaugagaugug

SEQ ID NO: 1093230 - RNA, 22 nt, Human
acagcagcgugaaguguguuau

SEQ ID NO: 1093231 - RNA, 22 nt, Human
agacuaaaagaaggaagcuacc

SEQ ID NO: 1093232 - RNA, 22 nt, Human
guacuagaugagacagcguggg

SEQ ID NO: 1093233 - RNA, 22 nt, Human
uuugggcucuugcugaccuggg

SEQ ID NO: 1093234 - RNA, 22 nt, Human
aaugauauuuauugaauagaug

SEQ ID NO: 1093235 - RNA, 22 nt, Human
caacuuuugacacgugugcuaa

SEQ ID NO: 1093236 - RNA, 22 nt, Human
cuggagcuaauaauccaucuga

SEQ ID NO: 1093237 - RNA, 22 nt, Human
agcugcuguccuaggcacugua

SEQ ID NO: 1093238 - RNA, 22 nt, Human
gugugcagggaugagugcaggu

SEQ ID NO: 1093239 - RNA, 22 nt, Human
gcagcagaugcuuucauggaca

SEQ ID NO: 1093240 - RNA, 22 nt, Human
uuguuuaaaagaaaucauagaa

SEQ ID NO: 1093241 - RNA, 22 nt, Human
cagaagccugccucagaugcac

SEQ ID NO: 1093242 - RNA, 22 nt, Human
ggccccugcggacugccuagag

SEQ ID NO: 1093243 - RNA, 20 nt, Human
auucuacaagaauaagcaug

SEQ ID NO: 1093244 - RNA, 22 nt, Human
ucucuuauuuugccuuugacaa

SEQ ID NO: 1093245 - RNA, 22 nt, Human
uggaacaccuugcuccagaaag

SEQ ID NO: 1093246 - RNA, 22 nt, Human
ccacugggggcugcaggcacuc

SEQ ID NO: 1093247 - RNA, 22 nt, Human
cccauggagugccugagggcca

SEQ ID NO: 1093248 - RNA, 22 nt, Human
aggagacagaauuuaaauuugg

SEQ ID NO: 1093249 - RNA, 22 nt, Human
auggagggugguaagacagaga

SEQ ID NO: 1093250 - RNA, 22 nt, Human
cccagccucuguuugcuccucu

SEQ ID NO: 1093251 - RNA, 22 nt, Human
gagcagcagguggggcuggcuu

SEQ ID NO: 1093252 - RNA, 22 nt, Human
gcaaauguuuuugaguguuuac

SEQ ID NO: 1093253 - RNA, 22 nt, Human
guucuggaguggugccaggccu

SEQ ID NO: 1093254 - RNA, 21 nt, Human
accaggcuugugggagggagc

SEQ ID NO: 1093255 - RNA, 22 nt, Human
cugggagcggcugucacugguu

SEQ ID NO: 1093256 - RNA, 22 nt, Human
uuaaaugacuuuuauuauucuc

SEQ ID NO: 1093257 - RNA, 21 nt, Human
agcuggugucagagcucuggg

SEQ ID NO: 1093258 - RNA, 22 nt, Human
aauacagucuuacuagaaaauc

SEQ ID NO: 1093259 - RNA, 22 nt, Human
aagcagagccaccagcuuugga

SEQ ID NO: 1093260 - RNA, 22 nt, Human
ugcaaauagccugaugaaagaa

SEQ ID NO: 1093261 - RNA, 22 nt, Human
cagugagggaagaucucagcac

SEQ ID NO: 1093262 - RNA, 22 nt, Human
uucucuuuuagaggcuccauga

SEQ ID NO: 1093263 - RNA, 22 nt, Human
aaaugguaguagcauuccauau

SEQ ID NO: 1093264 - RNA, 22 nt, Human
cacauuucuaggaaauuaaaug

SEQ ID NO: 1093265 - RNA, 22 nt, Human
uaacugaauguauuacaacaga

SEQ ID NO: 1093266 - RNA, 22 nt, Human
uuuaaucuauucccuaaacacc

SEQ ID NO: 1093267 - RNA, 23 nt, Human
uccagggauuaaugaagucaguc

SEQ ID NO: 1093268 - RNA, 22 nt, Human
agcuccugcuugacagaagagg

SEQ ID NO: 1093269 - RNA, 22 nt, Human
agggacacaugugauuauuuau

SEQ ID NO: 1093270 - RNA, 22 nt, Human
acugcuuuagaccuagagcucu

SEQ ID NO: 1093271 - RNA, 22 nt, Human
uuucaucuucccagagaccuug

SEQ ID NO: 1093272 - RNA, 22 nt, Human
cagagagagucaaaucuuugcu

SEQ ID NO: 1093273 - RNA, 22 nt, Human
ggagaugccagaauugcaaauu

SEQ ID NO: 1093274 - RNA, 22 nt, Human
caggcucagaugcccugcgcug

SEQ ID NO: 1093275 - RNA, 22 nt, Human
ggccuugguaaagggaugcaug

SEQ ID NO: 1093276 - RNA, 22 nt, Human
acucuacagaaugaauaccugu

SEQ ID NO: 1093277 - RNA, 22 nt, Human
augcugaauugaugcgagggag

SEQ ID NO: 1093278 - RNA, 22 nt, Human
uacauauagacaguuacucuag

SEQ ID NO: 1093279 - RNA, 20 nt, Human
aauaaaagaagccuucaccc

SEQ ID NO: 1093280 - RNA, 22 nt, Human
ugaagcagcaccauuuuagagc

SEQ ID NO: 1093281 - RNA, 22 nt, Human
cccugggcaagcccuauuuucc

SEQ ID NO: 1093282 - RNA, 22 nt, Human
ugccucagagaccugacaguac

SEQ ID NO: 1093283 - RNA, 22 nt, Human
acauucuaugaagauaauuuua

SEQ ID NO: 1093284 - RNA, 22 nt, Human
uuuuuauaugaaggauagugcg

SEQ ID NO: 1093285 - RNA, 22 nt, Human
cagagccaugguaugggcuugu

SEQ ID NO: 1093286 - RNA, 22 nt, Human
aggcaggucacaugcuuggcga

SEQ ID NO: 1093287 - RNA, 22 nt, Human
cugauguuucuagaugcuugcc

SEQ ID NO: 1093288 - RNA, 22 nt, Human
ucucaccaaagccuugaccaua

SEQ ID NO: 1093289 - RNA, 18 nt, Human
ugugaacacauuuuucug

SEQ ID NO: 1093290 - RNA, 22 nt, Human
aggcuggcaaggcagaugugug

SEQ ID NO: 1093291 - RNA, 22 nt, Human
auuacaaaagaagggagaaggu

SEQ ID NO: 1093292 - RNA, 22 nt, Human
uucuucucagggucccacaugg

SEQ ID NO: 1093293 - RNA, 22 nt, Human
gaaguuaggcuuuccuaugcuu

SEQ ID NO: 1093294 - RNA, 20 nt, Human
caggaggcaaggucaagguc

SEQ ID NO: 1093295 - RNA, 22 nt, Human
guuuucaaggggauuuaacuga

SEQ ID NO: 1093296 - RNA, 22 nt, Human
uuuuauugucucccaguucugg

SEQ ID NO: 1093297 - RNA, 22 nt, Human
gcuuccagagagccccgccugg

SEQ ID NO: 1093298 - RNA, 22 nt, Human
uuugaacaugcugcaugauaau

SEQ ID NO: 1093299 - RNA, 22 nt, Human
agaaacuaaagccaagggcucu

SEQ ID NO: 1093300 - RNA, 22 nt, Human
caggaggcccaaagggcgcaga

SEQ ID NO: 1093301 - RNA, 22 nt, Human
auacacaugcacacaugugugu

SEQ ID NO: 1093302 - RNA, 22 nt, Human
aggcugaaaacgagauggcaau

SEQ ID NO: 1093303 - RNA, 22 nt, Human
ggagauuuauagcacacuucag

SEQ ID NO: 1093304 - RNA, 22 nt, Human
gcauuguccugcuucugagugu

SEQ ID NO: 1093305 - RNA, 22 nt, Human
uuacacagugguuaagucuggg

SEQ ID NO: 1093306 - RNA, 18 nt, Human
guaggucaguaccaagca

SEQ ID NO: 1093307 - RNA, 22 nt, Human
uucaacaugcaaacauguuugu

SEQ ID NO: 1093308 - RNA, 23 nt, Human
uuccugugguauauuuuauaggg

SEQ ID NO: 1093309 - RNA, 21 nt, Human
ucauuuuuauugcuaccuugc

SEQ ID NO: 1093310 - RNA, 22 nt, Human
caguggaauacgagcagauguc

SEQ ID NO: 1093311 - RNA, 23 nt, Human
uucacagauuaaauauuucuucu

SEQ ID NO: 1093312 - RNA, 22 nt, Human
aggcagcaugcucugcuucuac

SEQ ID NO: 1093313 - RNA, 22 nt, Human
agcugcccccagggcugugcuu

SEQ ID NO: 1093314 - RNA, 22 nt, Human
gcugcuguugauuuaguccaau

SEQ ID NO: 1093315 - RNA, 23 nt, Human
uugaauuucucuugcaauauuua

SEQ ID NO: 1093316 - RNA, 22 nt, Human
gcuaagugguuuucuucuccuc

SEQ ID NO: 1093317 - RNA, 22 nt, Human
acacaguucaggaucaaauagc

SEQ ID NO: 1093318 - RNA, 22 nt, Human
gcaaaaaaugcuuguugcuuag

SEQ ID NO: 1093319 - RNA, 22 nt, Human
agauacaucauuuauaccuuca

SEQ ID NO: 1093320 - RNA, 22 nt, Human
agaagccaauccuugucucucu

SEQ ID NO: 1093321 - RNA, 20 nt, Human
ugagugauggaggcggguca

SEQ ID NO: 1093322 - RNA, 22 nt, Human
ucucagagaggggccgggccuu

SEQ ID NO: 1093323 - RNA, 19 nt, Human
ggauaagguuggagugauc

SEQ ID NO: 1093324 - RNA, 22 nt, Human
uaauacugaaagggaaaugucc

SEQ ID NO: 1093325 - RNA, 22 nt, Human
gaggagcuggcagcgucuccgc

SEQ ID NO: 1093326 - RNA, 22 nt, Human
aguaaacaguaucuuuaguguc

SEQ ID NO: 1093327 - RNA, 22 nt, Human
gauuucuuuagguguaauagug

SEQ ID NO: 1093328 - RNA, 23 nt, Human
ugaguucucaucuuggcuucuau

SEQ ID NO: 1093329 - RNA, 22 nt, Human
cccaggaacuccagagcuccuc

SEQ ID NO: 1093330 - RNA, 23 nt, Human
agcuccagcugacgugggcagcc

SEQ ID NO: 1093331 - RNA, 21 nt, Human
gccugcugccuguggccgguc

SEQ ID NO: 1093332 - RNA, 22 nt, Human
agaaagacgugaugaagaagua

SEQ ID NO: 1093333 - RNA, 22 nt, Human
uuugcaaagugcuugcagagua

SEQ ID NO: 1093334 - RNA, 22 nt, Human
cugaggcuuugugugcaugccu

SEQ ID NO: 1093335 - RNA, 18 nt, Human
aacuucaacuacaaugga

SEQ ID NO: 1093336 - RNA, 22 nt, Human
uccaggcuagaagucacaggcc

SEQ ID NO: 1093337 - RNA, 22 nt, Human
uucacauugguucuugauagcu

SEQ ID NO: 1093338 - RNA, 22 nt, Human
caagcuccuuacauccacaggg

SEQ ID NO: 1093339 - RNA, 22 nt, Human
cuggccuggggccucagcugcu

SEQ ID NO: 1093340 - RNA, 22 nt, Human
caagaauauaaauacuuucaaa

SEQ ID NO: 1093341 - RNA, 22 nt, Human
gccuggagaaaggaagguggga

SEQ ID NO: 1093342 - RNA, 22 nt, Human
gucuggggaagucagggcauca

SEQ ID NO: 1093343 - RNA, 22 nt, Human
gaggggcugggguugacuccaa

SEQ ID NO: 1093344 - RNA, 22 nt, Human
uggcauuuuagacaugauggug

SEQ ID NO: 1093345 - RNA, 22 nt, Human
ucugaggaccuacugaagaguu

SEQ ID NO: 1093346 - RNA, 22 nt, Human
agggcugaagggaggugcucau

SEQ ID NO: 1093347 - RNA, 22 nt, Human
aaaugcuugcucuugauuauuu

SEQ ID NO: 1093348 - RNA, 22 nt, Human
ugcccagguuugagugcccaag

SEQ ID NO: 1093349 - RNA, 22 nt, Human
cugccagguuggcgcucgcucu

SEQ ID NO: 1093350 - RNA, 22 nt, Human
ccagggugcucuguggcgucgc

SEQ ID NO: 1093351 - RNA, 22 nt, Human
uucaagugaggcugucuuuaga

SEQ ID NO: 1093352 - RNA, 22 nt, Human
uguuacacagcagaauagcaag

SEQ ID NO: 1093353 - RNA, 22 nt, Human
ccugccuggguucaaaucccag

SEQ ID NO: 1093354 - RNA, 22 nt, Human
agggaauucacuggaacgcccu

SEQ ID NO: 1093355 - RNA, 22 nt, Human
uaucauuuagaguauuucuuca

SEQ ID NO: 1093356 - RNA, 22 nt, Human
uuagugcagcugagccccaugg

SEQ ID NO: 1093357 - RNA, 22 nt, Human
gcugucacaaauauuucucagc

SEQ ID NO: 1093358 - RNA, 22 nt, Human
ggcuggcacaaagcuccaaauc

SEQ ID NO: 1093359 - RNA, 22 nt, Human
cuucucccuggcuucugcacac

SEQ ID NO: 1093360 - RNA, 22 nt, Human
uauuaguugcaaaacauugacu

SEQ ID NO: 1093361 - RNA, 21 nt, Human
ccagcuccaggaccuuggauc

SEQ ID NO: 1093362 - RNA, 22 nt, Human
ugugauuauauuguaguacauu

SEQ ID NO: 1093363 - RNA, 22 nt, Human
agcugggcugaugacucauguu

SEQ ID NO: 1093364 - RNA, 22 nt, Human
aggucacuugguguuauucagc

SEQ ID NO: 1093365 - RNA, 22 nt, Human
agcagcagaagggagacccagg

SEQ ID NO: 1093366 - RNA, 21 nt, Human
cugagggccgcagcugggcuc

SEQ ID NO: 1093367 - RNA, 22 nt, Human
uauuucauucuuuaucaggagc

SEQ ID NO: 1093368 - RNA, 22 nt, Human
agggaaggagguuagaacccac

SEQ ID NO: 1093369 - RNA, 22 nt, Human
uuacaucuaaacugugaacaau

SEQ ID NO: 1093370 - RNA, 22 nt, Human
acagugaucaguuacugucugu

SEQ ID NO: 1093371 - RNA, 22 nt, Human
auucacaguuuccucauauucu

SEQ ID NO: 1093372 - RNA, 22 nt, Human
cuguggcugcagccuugguccu

SEQ ID NO: 1093373 - RNA, 19 nt, Human
agaggcugucaccuguagc

SEQ ID NO: 1093374 - RNA, 22 nt, Human
ugaggggaaggcaugauaaaua

SEQ ID NO: 1093375 - RNA, 22 nt, Human
uggagccugagucagcggaggc

SEQ ID NO: 1093376 - RNA, 22 nt, Human
caugaagcauguuuugucauga

SEQ ID NO: 1093377 - RNA, 19 nt, Human
gcugggcuuggguuuguag

SEQ ID NO: 1093378 - RNA, 22 nt, Human
acauacuuaacauuaaagucau

SEQ ID NO: 1093379 - RNA, 22 nt, Human
aagggagguaaagcuauuuaaa

SEQ ID NO: 1093380 - RNA, 22 nt, Human
uccuugaauccuagcauccuau

SEQ ID NO: 1093381 - RNA, 22 nt, Human
cacucugcagcugaagggcugg

SEQ ID NO: 1093382 - RNA, 22 nt, Human
ccuggggcucaagauggcgccg

SEQ ID NO: 1093383 - RNA, 22 nt, Human
ccagugggaacacuggcauugc

SEQ ID NO: 1093384 - RNA, 22 nt, Human
uggaucuucacaagagagggcg

SEQ ID NO: 1093385 - RNA, 22 nt, Human
ugaucugaaggacaugggaccc

SEQ ID NO: 1093386 - RNA, 22 nt, Human
acucagcugaugaagcacaagu

SEQ ID NO: 1093387 - RNA, 22 nt, Human
uuggcacuuugaaugagcucag

SEQ ID NO: 1093388 - RNA, 22 nt, Human
aagccacaaucugcaucagcau

SEQ ID NO: 1093389 - RNA, 22 nt, Human
aguaaugaggauguuugcaaaa

SEQ ID NO: 1093390 - RNA, 22 nt, Human
uacaaaugaaccaacuuugaug

SEQ ID NO: 1093391 - RNA, 22 nt, Human
aaagucacgcugaugggaaaug

SEQ ID NO: 1093392 - RNA, 22 nt, Human
gggcucaggaguuugaggcugc

SEQ ID NO: 1093393 - RNA, 22 nt, Human
caugggagguuggcuuggcaug

SEQ ID NO: 1093394 - RNA, 17 nt, Human
uucugagccacuuccuu

SEQ ID NO: 1093395 - RNA, 22 nt, Human
aguaugaaaguuaaucaauuua

SEQ ID NO: 1093396 - RNA, 22 nt, Human
gccuaggaguacagaaugguuu

SEQ ID NO: 1093397 - RNA, 22 nt, Human
ggaagggaguaguuggaaugca

SEQ ID NO: 1093398 - RNA, 22 nt, Human
agccaagcacucaacuccugga

SEQ ID NO: 1093399 - RNA, 22 nt, Human
ugggccucccaugucuuaggga

SEQ ID NO: 1093400 - RNA, 22 nt, Human
uaagguuuaacgcccugucucg

SEQ ID NO: 1093401 - RNA, 22 nt, Human
uguuaacacaauucuggagaga

SEQ ID NO: 1093402 - RNA, 22 nt, Human
uuucuaaggaaaguaccuggga

SEQ ID NO: 1093403 - RNA, 20 nt, Human
auauaauaaauuuugguuac

SEQ ID NO: 1093404 - RNA, 22 nt, Human
ugaggcucagaagugccaagug

SEQ ID NO: 1093405 - RNA, 22 nt, Human
ugcccuuggguaacuugcugau

SEQ ID NO: 1093406 - RNA, 22 nt, Human
gcuggcaguguauuguuagcug

SEQ ID NO: 1093407 - RNA, 22 nt, Human
gggagcugguuccugcccucca

SEQ ID NO: 1093408 - RNA, 20 nt, Human
aaggagaaugacacggcugc

SEQ ID NO: 1093409 - RNA, 22 nt, Human
gccuaggaguggggauggcggu

SEQ ID NO: 1093410 - RNA, 22 nt, Human
acagagaaacuaaggaguuugg

SEQ ID NO: 1093411 - RNA, 22 nt, Human
aaauuaucaugggggagaaaca

SEQ ID NO: 1093412 - RNA, 22 nt, Human
caaaguaauuuggagauauaua

SEQ ID NO: 1093413 - RNA, 22 nt, Human
cagaaggcuuuguggaguagac

SEQ ID NO: 1093414 - RNA, 22 nt, Human
augaguucaauuguuucaguca

SEQ ID NO: 1093415 - RNA, 20 nt, Human
ugcagggcugccucccagcu

SEQ ID NO: 1093416 - RNA, 22 nt, Human
uguacaaugccgagacuaacuc

SEQ ID NO: 1093417 - RNA, 22 nt, Human
guccaaauuuuucacauguaga

SEQ ID NO: 1093418 - RNA, 22 nt, Human
cuuacacagucuggcacuucuu

SEQ ID NO: 1093419 - RNA, 22 nt, Human
ggguccugcgugggcccaggac

SEQ ID NO: 1093420 - RNA, 19 nt, Human
acaagggcaggcaagguga

SEQ ID NO: 1093421 - RNA, 22 nt, Human
ucagagucugugcauucugcua

SEQ ID NO: 1093422 - RNA, 22 nt, Human
ucaagugcuugugagguauuug

SEQ ID NO: 1093423 - RNA, 22 nt, Human
guuuauaaauucugcuuuuguu

SEQ ID NO: 1093424 - RNA, 22 nt, Human
ggcuucauggaggaggugaguc

SEQ ID NO: 1093425 - RNA, 22 nt, Human
acaucagugcucuugguucuug

SEQ ID NO: 1093426 - RNA, 22 nt, Human
acuucaugaacauguggccugu

SEQ ID NO: 1093427 - RNA, 22 nt, Human
auccccacgauauagccaaagc

SEQ ID NO: 1093428 - RNA, 22 nt, Human
agauggggcagaauggagccau

SEQ ID NO: 1093429 - RNA, 22 nt, Human
agcauuuauuucuuagaaauug

SEQ ID NO: 1093430 - RNA, 22 nt, Human
aaagucauggaaaaucuuggaa

SEQ ID NO: 1093431 - RNA, 20 nt, Human
agaggccaguuaggagucua

SEQ ID NO: 1093432 - RNA, 23 nt, Human
ccagcuccgugagccucgggcuc

SEQ ID NO: 1093433 - RNA, 22 nt, Human
ccagagaagguggagcuugugu

SEQ ID NO: 1093434 - RNA, 22 nt, Human
gaggaggcuaagugggcucugg

SEQ ID NO: 1093435 - RNA, 22 nt, Human
acaaagaucuugcuuuccuacu

SEQ ID NO: 1093436 - RNA, 22 nt, Human
uucaagaugacccagucacacg

SEQ ID NO: 1093437 - RNA, 22 nt, Human
caagaaucaacauuauuuagug

SEQ ID NO: 1093438 - RNA, 22 nt, Human
ggcugaaacagauuucaagaca

SEQ ID NO: 1093439 - RNA, 22 nt, Human
auaggcuuauauaaaaacaucu

SEQ ID NO: 1093440 - RNA, 22 nt, Human
ccugccagucacuaugucaccu

SEQ ID NO: 1093441 - RNA, 22 nt, Human
cagacacaccaggcccauucug

SEQ ID NO: 1093442 - RNA, 22 nt, Human
uaaggcucauguaauuagagau

SEQ ID NO: 1093443 - RNA, 20 nt, Human
guugaaaguaauaugaugcu

SEQ ID NO: 1093444 - RNA, 22 nt, Human
agugucaaauuaaauaaucugg

SEQ ID NO: 1093445 - RNA, 22 nt, Human
auucaguggauaucuucacuuu

SEQ ID NO: 1093446 - RNA, 22 nt, Human
gcucagagauguucaguagcuu

SEQ ID NO: 1093447 - RNA, 17 nt, Human
uguuuucauucauugcu

SEQ ID NO: 1093448 - RNA, 22 nt, Human
uggggcagaguaggauuuuggc

SEQ ID NO: 1093449 - RNA, 22 nt, Human
cuacauggagaagaaaauucuu

SEQ ID NO: 1093450 - RNA, 22 nt, Human
auucugcauugcucacaaagau

SEQ ID NO: 1093451 - RNA, 22 nt, Human
ugcagaccucccauggcugccu

SEQ ID NO: 1093452 - RNA, 22 nt, Human
gccugagaaggacacagcaggu

SEQ ID NO: 1093453 - RNA, 22 nt, Human
aauuauauuguggugugaaugu

SEQ ID NO: 1093454 - RNA, 22 nt, Human
uuuuaacacucagcacuaucuc

SEQ ID NO: 1093455 - RNA, 22 nt, Human
cucagggaggccucugcugguu

SEQ ID NO: 1093456 - RNA, 22 nt, Human
agaagaaacugucggggauauu

SEQ ID NO: 1093457 - RNA, 22 nt, Human
gaaacaugucugacaauuuacc

SEQ ID NO: 1093458 - RNA, 22 nt, Human
ggcugucugugguggagcguug

SEQ ID NO: 1093459 - RNA, 22 nt, Human
aauagcauguucaugauaaaau

SEQ ID NO: 1093460 - RNA, 22 nt, Human
uggcucagaugcucuuccagug

SEQ ID NO: 1093461 - RNA, 22 nt, Human
cuuuucuuauguggacguaccu

SEQ ID NO: 1093462 - RNA, 22 nt, Human
ucuaacuugugaguauagauga

SEQ ID NO: 1093463 - RNA, 20 nt, Human
uauaaauucagagcuuuggu

SEQ ID NO: 1093464 - RNA, 22 nt, Human
gcauucaucuuccuccaugcag

SEQ ID NO: 1093465 - RNA, 22 nt, Human
uucagcuaaaggaaacucagau

SEQ ID NO: 1093466 - RNA, 22 nt, Human
gucuuugugguaguccucagcc

SEQ ID NO: 1093467 - RNA, 21 nt, Human
ugcagcagaguaagcagggga

SEQ ID NO: 1093468 - RNA, 23 nt, Human
uuucauaugguguggaugaagaa

SEQ ID NO: 1093469 - RNA, 22 nt, Human
gugggcagugguuugcgcgguc

SEQ ID NO: 1093470 - RNA, 22 nt, Human
uaauaguugugacuuuguaaag

SEQ ID NO: 1093471 - RNA, 23 nt, Human
agggccacugggaaggauuacug

SEQ ID NO: 1093472 - RNA, 22 nt, Human
caauuuuauugguccaaauaca

SEQ ID NO: 1093473 - RNA, 22 nt, Human
auuuccuauagauauggugagu

SEQ ID NO: 1093474 - RNA, 17 nt, Human
cacuuuguugcuguggg

SEQ ID NO: 1093475 - RNA, 22 nt, Human
acauacaugggauuaaaaaauu

SEQ ID NO: 1093476 - RNA, 23 nt, Human
uuguaaaacagugugacgguucc

SEQ ID NO: 1093477 - RNA, 22 nt, Human
gcugagggcauguguggcgacu

SEQ ID NO: 1093478 - RNA, 19 nt, Human
gacagugcaguuguaguac

SEQ ID NO: 1093479 - RNA, 22 nt, Human
aagcagaggaccgacggaggga

SEQ ID NO: 1093480 - RNA, 22 nt, Human
agucaggagcugcugcauugua

SEQ ID NO: 1093481 - RNA, 22 nt, Human
uaugcaguguacgauguuuagu

SEQ ID NO: 1093482 - RNA, 22 nt, Human
uuauuagguuuacauaaagguu

SEQ ID NO: 1093483 - RNA, 22 nt, Human
ucauuucagaugcauuuagaau

SEQ ID NO: 1093484 - RNA, 22 nt, Human
uggcucaguagcagugugguca

SEQ ID NO: 1093485 - RNA, 22 nt, Human
acacugugucuagcauuuuaca

SEQ ID NO: 1093486 - RNA, 22 nt, Human
acagcagcauaaacugacuaag

SEQ ID NO: 1093487 - RNA, 22 nt, Human
ccuggcaggcaagaggaaggga

SEQ ID NO: 1093488 - RNA, 22 nt, Human
caggggaagaugccaagggaga

SEQ ID NO: 1093489 - RNA, 22 nt, Human
uggaagcaacaacuauggacca

SEQ ID NO: 1093490 - RNA, 22 nt, Human
aaggcagcuucaccacagcauu

SEQ ID NO: 1093491 - RNA, 22 nt, Human
ggagcugggacccugucaucug

SEQ ID NO: 1093492 - RNA, 22 nt, Human
cagugauggauauggagaaguc

SEQ ID NO: 1093493 - RNA, 22 nt, Human
aguguccccuacagaggcauuc

SEQ ID NO: 1093494 - RNA, 21 nt, Human
gggugggguuccagccuuuuc

SEQ ID NO: 1093495 - RNA, 22 nt, Human
uccuugagccucccagacucag

SEQ ID NO: 1093496 - RNA, 22 nt, Human
aaaugcauguauguaauaugcu

SEQ ID NO: 1093497 - RNA, 22 nt, Human
uccagggauguccuguagcacu

SEQ ID NO: 1093498 - RNA, 22 nt, Human
uucuuuccucccagccuuugga

SEQ ID NO: 1093499 - RNA, 22 nt, Human
cuguccugcaguugggggcagg

SEQ ID NO: 1093500 - RNA, 22 nt, Human
uugaaaggaauacagaggccua

SEQ ID NO: 1093501 - RNA, 17 nt, Human
gaacagcagaggggaca

SEQ ID NO: 1093502 - RNA, 17 nt, Human
cugggccuccccugucc

SEQ ID NO: 1093503 - RNA, 22 nt, Human
aaagugcacucucagugcugcu

SEQ ID NO: 1093504 - RNA, 22 nt, Human
agaugaagauaucugcaggggc

SEQ ID NO: 1093505 - RNA, 22 nt, Human
cagugcaguuucccagaugcug

SEQ ID NO: 1093506 - RNA, 22 nt, Human
aauucuuguuguuaguauauuu

SEQ ID NO: 1093507 - RNA, 23 nt, Human
uucaaagcuuaagcucuuuccac

SEQ ID NO: 1093508 - RNA, 22 nt, Human
cacauugaaaugacccaauaau

SEQ ID NO: 1093509 - RNA, 22 nt, Human
aacacaguuaguaagggaaaua

SEQ ID NO: 1093510 - RNA, 23 nt, Human
ggacagggcccugcccuauggcc

SEQ ID NO: 1093511 - RNA, 22 nt, Human
caacagaaaucaauuuucccau

SEQ ID NO: 1093512 - RNA, 22 nt, Human
agcaggcuuaugguugaaggga

SEQ ID NO: 1093513 - RNA, 22 nt, Human
uugaggcacacacagguugcau

SEQ ID NO: 1093514 - RNA, 22 nt, Human
ucuuccaaugguuucuagauuu

SEQ ID NO: 1093515 - RNA, 17 nt, Human
ucuuuccugccaugcuc

SEQ ID NO: 1093516 - RNA, 22 nt, Human
cugugcccuuucgcugcacugu

SEQ ID NO: 1093517 - RNA, 22 nt, Human
acguuuucagugacugugcuuc

SEQ ID NO: 1093518 - RNA, 19 nt, Human
uggcauuuggaggcaaccu

SEQ ID NO: 1093519 - RNA, 19 nt, Human
ugcucauggggacuucucc

SEQ ID NO: 1093520 - RNA, 22 nt, Human
ggacagagcccugguggccuaa

SEQ ID NO: 1093521 - RNA, 22 nt, Human
uuucaaguaagauacauuucag

SEQ ID NO: 1093522 - RNA, 22 nt, Human
aggaaauugagaaucagaauaa

SEQ ID NO: 1093523 - RNA, 22 nt, Human
cccagguguuuguggcagaggu

SEQ ID NO: 1093524 - RNA, 22 nt, Human
uuuacacuugaggaaacugagg

SEQ ID NO: 1093525 - RNA, 22 nt, Human
acauagcauaaagaaugacucu

SEQ ID NO: 1093526 - RNA, 22 nt, Human
gcucagaggagcaucauaagga

SEQ ID NO: 1093527 - RNA, 19 nt, Human
cugaagucuuuucagcugg

SEQ ID NO: 1093528 - RNA, 22 nt, Human
ugugccuucucaguccugcuca

SEQ ID NO: 1093529 - RNA, 22 nt, Human
ucugucauaaacacacacaagc

SEQ ID NO: 1093530 - RNA, 22 nt, Human
uccuugaauggacauuacacug

SEQ ID NO: 1093531 - RNA, 21 nt, Human
ccagagccugcugagcccccu

SEQ ID NO: 1093532 - RNA, 22 nt, Human
acagccaggacuuggcccucuu

SEQ ID NO: 1093533 - RNA, 22 nt, Human
aucuugaagguucuaccauaca

SEQ ID NO: 1093534 - RNA, 22 nt, Human
auacaucuagagucauaaaaac

SEQ ID NO: 1093535 - RNA, 22 nt, Human
cagcucugugcaggccugggga

SEQ ID NO: 1093536 - RNA, 22 nt, Human
ucacaagagcuggacugucuuu

SEQ ID NO: 1093537 - RNA, 22 nt, Human
ggaguaggccccgggagagagu

SEQ ID NO: 1093538 - RNA, 22 nt, Human
ucaugcuuaaaagacacuugag

SEQ ID NO: 1093539 - RNA, 22 nt, Human
cuggccccaucuggagucugag

SEQ ID NO: 1093540 - RNA, 22 nt, Human
acugugugaaacaucaaugugu

SEQ ID NO: 1093541 - RNA, 22 nt, Human
gaggcugcugagagcccuguuu

SEQ ID NO: 1093542 - RNA, 22 nt, Human
ggacugaggacaugugaggcau

SEQ ID NO: 1093543 - RNA, 20 nt, Human
acccagcucugugcccuggg

SEQ ID NO: 1093544 - RNA, 19 nt, Human
agcauccagucaugggauc

SEQ ID NO: 1093545 - RNA, 22 nt, Human
ugggcaggauaauaucucaugu

SEQ ID NO: 1093546 - RNA, 22 nt, Human
uagaaaauggccaagcaggacu

SEQ ID NO: 1093547 - RNA, 22 nt, Human
ugccaggcccugcgggguccca

SEQ ID NO: 1093548 - RNA, 22 nt, Human
aagagcuggaguuugcagcccu

SEQ ID NO: 1093549 - RNA, 22 nt, Human
auuguuaauaacuauuacauug

SEQ ID NO: 1093550 - RNA, 22 nt, Human
acuauaaaaggauaaaccagaa

SEQ ID NO: 1093551 - RNA, 22 nt, Human
guggggcaguggccugggagca

SEQ ID NO: 1093552 - RNA, 22 nt, Human
aagaagcacuuuccuacauguu

SEQ ID NO: 1093553 - RNA, 22 nt, Human
aaaugguauaaugucauguauu

SEQ ID NO: 1093554 - RNA, 22 nt, Human
agauauuuugugugauguuuca

SEQ ID NO: 1093555 - RNA, 18 nt, Human
ugaggcucagcuccuggu

SEQ ID NO: 1093556 - RNA, 20 nt, Human
auuugcaucugaauaacuua

SEQ ID NO: 1093557 - RNA, 22 nt, Human
ucuuuguaagacauguaagucc

SEQ ID NO: 1093558 - RNA, 22 nt, Human
gaugauuacacuuuuaaaacag

SEQ ID NO: 1093559 - RNA, 22 nt, Human
ccugguggagaggggcggagcg

SEQ ID NO: 1093560 - RNA, 17 nt, Human
agagagagcaugccacc

SEQ ID NO: 1093561 - RNA, 23 nt, Human
aagaacuuugguccugcagaguc

SEQ ID NO: 1093562 - RNA, 20 nt, Human
gggagucuggaugaaagaug

SEQ ID NO: 1093563 - RNA, 21 nt, Human
gaacauuuggguuguuucuac

SEQ ID NO: 1093564 - RNA, 22 nt, Human
ggagacucaccccgcauucuag

SEQ ID NO: 1093565 - RNA, 22 nt, Human
aagucaaaccuugcucacagga

SEQ ID NO: 1093566 - RNA, 23 nt, Human
ucucaagaggaagcagggcucau

SEQ ID NO: 1093567 - RNA, 22 nt, Human
gugcuggccucagagggucaug

SEQ ID NO: 1093568 - RNA, 22 nt, Human
caggagaugacagggaagaacc

SEQ ID NO: 1093569 - RNA, 22 nt, Human
ucaauuauuugauaugaaaggg

SEQ ID NO: 1093570 - RNA, 22 nt, Human
ucugggcugaaaugaaggccuu

SEQ ID NO: 1093571 - RNA, 22 nt, Human
guuugucauuuguacuucuagc

SEQ ID NO: 1093572 - RNA, 22 nt, Human
uagcugccuuugggcuccugcu

SEQ ID NO: 1093573 - RNA, 22 nt, Human
uaucaccagagggauagucucu

SEQ ID NO: 1093574 - RNA, 20 nt, Human
aggcacuggauuucuuauau

SEQ ID NO: 1093575 - RNA, 22 nt, Human
cccuuucugccuucuaaaauaa

SEQ ID NO: 1093576 - RNA, 22 nt, Human
gaacaucaugaagaaaacauau

SEQ ID NO: 1093577 - RNA, 22 nt, Human
uggagcuggcuuguggaaguug

SEQ ID NO: 1093578 - RNA, 18 nt, Human
auuaaggaauucuuuaga

SEQ ID NO: 1093579 - RNA, 22 nt, Human
uuugcuuucuguugaacagagu

SEQ ID NO: 1093580 - RNA, 22 nt, Human
gccagaguugaggcaguuuauu

SEQ ID NO: 1093581 - RNA, 22 nt, Human
gccucugcggagcuguacauca

SEQ ID NO: 1093582 - RNA, 23 nt, Human
aaacuacauuuauaguuuuucuc

SEQ ID NO: 1093583 - RNA, 22 nt, Human
aaucuguauugcucauacuuga

SEQ ID NO: 1093584 - RNA, 22 nt, Human
ugcagaagaaugagcuuggagu

SEQ ID NO: 1093585 - RNA, 22 nt, Human
ugcccuggcucuccacuaguuu

SEQ ID NO: 1093586 - RNA, 22 nt, Human
augauuuucugauaaagaacug

SEQ ID NO: 1093587 - RNA, 22 nt, Human
uuucuaagugugauuuuagauu

SEQ ID NO: 1093588 - RNA, 22 nt, Human
ucuucaugucucugcuugaguc

SEQ ID NO: 1093589 - RNA, 22 nt, Human
ucuuccucucuaauugaucaga

SEQ ID NO: 1093590 - RNA, 22 nt, Human
gugcaauggggcaauaucagcu

SEQ ID NO: 1093591 - RNA, 22 nt, Human
acaauuucaccuuuugguucaa

SEQ ID NO: 1093592 - RNA, 22 nt, Human
cuguaugauuccauuucuauaa

SEQ ID NO: 1093593 - RNA, 22 nt, Human
acuaaagcucacagaguugaac

SEQ ID NO: 1093594 - RNA, 22 nt, Human
ucagacagcuugcagggaggug

SEQ ID NO: 1093595 - RNA, 22 nt, Human
uuguuacagcacuuaaccuuuu

SEQ ID NO: 1093596 - RNA, 22 nt, Human
auuucuguuugcuacuauaagu

SEQ ID NO: 1093597 - RNA, 19 nt, Human
ucagaacucagaaugugua

SEQ ID NO: 1093598 - RNA, 22 nt, Human
cagcccugccauggagccuccu

SEQ ID NO: 1093599 - RNA, 22 nt, Human
ugcagcaggcacaggacggaag

SEQ ID NO: 1093600 - RNA, 22 nt, Human
uaggaaccuacugugguuuuaa

SEQ ID NO: 1093601 - RNA, 22 nt, Human
guuuucagccaggagcacauuu

SEQ ID NO: 1093602 - RNA, 22 nt, Human
aggccuccugcagggaugagug

SEQ ID NO: 1093603 - RNA, 22 nt, Human
uugaaacuaugaagacaaccau

SEQ ID NO: 1093604 - RNA, 22 nt, Human
gagcagcucagaggacuagugu

SEQ ID NO: 1093605 - RNA, 22 nt, Human
uaugauuuguagacauuugauu

SEQ ID NO: 1093606 - RNA, 22 nt, Human
gugggagcauggucccagugcc

SEQ ID NO: 1093607 - RNA, 22 nt, Human
aaauuaagggugagaagaguug

SEQ ID NO: 1093608 - RNA, 22 nt, Human
agugcaaagggcuguugagaag

SEQ ID NO: 1093609 - RNA, 22 nt, Human
ucagaauuggaacgugaagauu

SEQ ID NO: 1093610 - RNA, 22 nt, Human
ucacagcuauucucauguauuu

SEQ ID NO: 1093611 - RNA, 22 nt, Human
agcagcuguacuuucaucuguu

SEQ ID NO: 1093612 - RNA, 22 nt, Human
uuguuuuaaccuaguguuuaug

SEQ ID NO: 1093613 - RNA, 22 nt, Human
aaaaugugaucuacaaaugcaa

SEQ ID NO: 1093614 - RNA, 22 nt, Human
acuggcuggccgcgcucuucgc

SEQ ID NO: 1093615 - RNA, 22 nt, Human
cugcuguggccagccaggucaa

SEQ ID NO: 1093616 - RNA, 22 nt, Human
uauuaacauuuuaugaaaauaa

SEQ ID NO: 1093617 - RNA, 22 nt, Human
cucacaggagaaagucaugguc

SEQ ID NO: 1093618 - RNA, 22 nt, Human
gggcacuguggggcccaugcug

SEQ ID NO: 1093619 - RNA, 22 nt, Human
ucucagaggugcccuggcaucu

SEQ ID NO: 1093620 - RNA, 17 nt, Human
ggcuggaggggacccgg

SEQ ID NO: 1093621 - RNA, 22 nt, Human
cacauaaguggguuccauugca

SEQ ID NO: 1093622 - RNA, 22 nt, Human
cugccugugcaugcagucagaa

SEQ ID NO: 1093623 - RNA, 19 nt, Human
uuaacagucaccaaggaga

SEQ ID NO: 1093624 - RNA, 22 nt, Human
auauguuagggaacaauuugag

SEQ ID NO: 1093625 - RNA, 22 nt, Human
gugucucuuagccugcuaaugc

SEQ ID NO: 1093626 - RNA, 22 nt, Human
ugagggcaaaguggugcugagg

SEQ ID NO: 1093627 - RNA, 22 nt, Human
acacaugaaauaauauuaugca

SEQ ID NO: 1093628 - RNA, 22 nt, Human
aguauauugcucuuaaucauag

SEQ ID NO: 1093629 - RNA, 22 nt, Human
aacuuuacacugcuuuacauga

SEQ ID NO: 1093630 - RNA, 22 nt, Human
ugggcugaacuucaucugauga

SEQ ID NO: 1093631 - RNA, 22 nt, Human
uuccuguauucuaaagggaaag

SEQ ID NO: 1093632 - RNA, 22 nt, Human
uggaaggggagcuggaaagggg

SEQ ID NO: 1093633 - RNA, 22 nt, Human
cuguauuucccacauucucuau

SEQ ID NO: 1093634 - RNA, 22 nt, Human
caaggccugccucuggcagaaa

SEQ ID NO: 1093635 - RNA, 22 nt, Human
acaaagucucuaauaaucuucu

SEQ ID NO: 1093636 - RNA, 22 nt, Human
gcugggcuccaggccaggguga

SEQ ID NO: 1093637 - RNA, 22 nt, Human
uaacacugauuuguucucaggg

SEQ ID NO: 1093638 - RNA, 22 nt, Human
caacacagggguuaugccaugg

SEQ ID NO: 1093639 - RNA, 22 nt, Human
gccugugcauagcagcggacuc

SEQ ID NO: 1093640 - RNA, 22 nt, Human
gccuucccaagacgccugaguu

SEQ ID NO: 1093641 - RNA, 22 nt, Human
agcagcugcagggagggucugc

SEQ ID NO: 1093642 - RNA, 22 nt, Human
uugcauugaucccagcuugggc

SEQ ID NO: 1093643 - RNA, 22 nt, Human
uggacucaaguccaaguucacg

SEQ ID NO: 1093644 - RNA, 22 nt, Human
gaauauuaguaucaguuauacc

SEQ ID NO: 1093645 - RNA, 22 nt, Human
caguguggugugcacagcuuag

SEQ ID NO: 1093646 - RNA, 22 nt, Human
ccaggguguagggauuccagau

SEQ ID NO: 1093647 - RNA, 22 nt, Human
gugucauggaaaauugcaaugg

SEQ ID NO: 1093648 - RNA, 22 nt, Human
uuucaaguucuguuccuaaacu

SEQ ID NO: 1093649 - RNA, 22 nt, Human
augaaaguaggguaaaaucaca

SEQ ID NO: 1093650 - RNA, 22 nt, Human
caguggauuagccagagcugga

SEQ ID NO: 1093651 - RNA, 22 nt, Human
acacaguaugcaucuagaaauu

SEQ ID NO: 1093652 - RNA, 22 nt, Human
uucuuauugggagaccuuuucu

SEQ ID NO: 1093653 - RNA, 22 nt, Human
uagcauuaaagguaagacauua

SEQ ID NO: 1093654 - RNA, 22 nt, Human
gcugcccagcaggccccagggg

SEQ ID NO: 1093655 - RNA, 22 nt, Human
uguguucuggaaagcucacuga

SEQ ID NO: 1093656 - RNA, 22 nt, Human
gaacauaugcauguuuguuuug

SEQ ID NO: 1093657 - RNA, 22 nt, Human
ugcuggagaucauuaauguuca

SEQ ID NO: 1093658 - RNA, 22 nt, Human
uaaaauuugucccugaguguug

SEQ ID NO: 1093659 - RNA, 22 nt, Human
uccaggagaggccugaccaggu

SEQ ID NO: 1093660 - RNA, 22 nt, Human
ucacuggggccuuuggucagga

SEQ ID NO: 1093661 - RNA, 22 nt, Human
cagaugaggggcauauaacaau

SEQ ID NO: 1093662 - RNA, 22 nt, Human
acaugacagugcuuagcaaacu

SEQ ID NO: 1093663 - RNA, 23 nt, Human
uccuuccuuugagaggcuccauc

SEQ ID NO: 1093664 - RNA, 22 nt, Human
uaacaucuuuagcagcucgaac

SEQ ID NO: 1093665 - RNA, 22 nt, Human
ccugcacuaccuggggcugcug

SEQ ID NO: 1093666 - RNA, 22 nt, Human
aucauacagaaccugagcacuu

SEQ ID NO: 1093667 - RNA, 22 nt, Human
ugugcucuaccucagugucauu

SEQ ID NO: 1093668 - RNA, 22 nt, Human
auuugcaauuacucaugucauu

SEQ ID NO: 1093669 - RNA, 22 nt, Human
ucuuuuggaaaugaugugcagg

SEQ ID NO: 1093670 - RNA, 22 nt, Human
agcagcagauucagcaggaaug

SEQ ID NO: 1093671 - RNA, 22 nt, Human
cccucugcaggcuggaccugcc

SEQ ID NO: 1093672 - RNA, 22 nt, Human
aacuuuuucugggauggagggu

SEQ ID NO: 1093673 - RNA, 20 nt, Human
cgugcugugaccuugagcau

SEQ ID NO: 1093674 - RNA, 22 nt, Human
caguaaaugguacguauauuuu

SEQ ID NO: 1093675 - RNA, 22 nt, Human
agucccaguucgguucuuccuc

SEQ ID NO: 1093676 - RNA, 22 nt, Human
uaaagucagggagauugaggcu

SEQ ID NO: 1093677 - RNA, 22 nt, Human
uaaaucacaucgaaaucugggu

SEQ ID NO: 1093678 - RNA, 22 nt, Human
gggcucugugguugugcuuugu

SEQ ID NO: 1093679 - RNA, 22 nt, Human
ggcugccuccucgagacaggau

SEQ ID NO: 1093680 - RNA, 22 nt, Human
auuauuagauucuuaauuguaa

SEQ ID NO: 1093681 - RNA, 22 nt, Human
ucuaauuuuaggcauuuguuca

SEQ ID NO: 1093682 - RNA, 22 nt, Human
cuggcucaggguggucuggguc

SEQ ID NO: 1093683 - RNA, 22 nt, Human
uuauacuuuauacuacaucauu

SEQ ID NO: 1093684 - RNA, 22 nt, Human
ugggcucuggagggccuaggau

SEQ ID NO: 1093685 - RNA, 22 nt, Human
uuucucuagcuauucauuaaau

SEQ ID NO: 1093686 - RNA, 17 nt, Human
agccccucagcgucacc

SEQ ID NO: 1093687 - RNA, 22 nt, Human
ccaaaggccaagcucagguaaa

SEQ ID NO: 1093688 - RNA, 22 nt, Human
aggcugugcaauuaggguaaga

SEQ ID NO: 1093689 - RNA, 22 nt, Human
cgcaggugaaagaggcugggca

SEQ ID NO: 1093690 - RNA, 22 nt, Human
gaguuuaaucauuguucuaucc

SEQ ID NO: 1093691 - RNA, 22 nt, Human
uagaggugagacuucagugaca

SEQ ID NO: 1093692 - RNA, 22 nt, Human
agcaguggaccucagugcuauu

SEQ ID NO: 1093693 - RNA, 22 nt, Human
accucagagggauguuacaggc

SEQ ID NO: 1093694 - RNA, 22 nt, Human
aacaggcaacaguugacucuga

SEQ ID NO: 1093695 - RNA, 22 nt, Human
uuuucacuuaaggaauuucaug

SEQ ID NO: 1093696 - RNA, 22 nt, Human
aaguacaugcuguaaugauugg

SEQ ID NO: 1093697 - RNA, 22 nt, Human
gacccauauaggacccuccaaa

SEQ ID NO: 1093698 - RNA, 22 nt, Human
auguauaugaagcuaguauuuu

SEQ ID NO: 1093699 - RNA, 22 nt, Human
aucuggcuggauucuuagcguu

SEQ ID NO: 1093700 - RNA, 22 nt, Human
uuaugugccacuuuuugaagau

SEQ ID NO: 1093701 - RNA, 22 nt, Human
cuggcucccucgcugaggugcu

SEQ ID NO: 1093702 - RNA, 22 nt, Human
gcuauaggaagaaauuuguuuu

SEQ ID NO: 1093703 - RNA, 22 nt, Human
gggcccugggauucagagcaag

SEQ ID NO: 1093704 - RNA, 22 nt, Human
uuugcauuaguuuagauuucaa

SEQ ID NO: 1093705 - RNA, 23 nt, Human
guucauuuuauugucugauugcu

SEQ ID NO: 1093706 - RNA, 22 nt, Human
ucuggggaugaggaccuagaug

SEQ ID NO: 1093707 - RNA, 22 nt, Human
ucugagccagccaccuccuuca

SEQ ID NO: 1093708 - RNA, 22 nt, Human
uucugagagcugaagaaauguu

SEQ ID NO: 1093709 - RNA, 21 nt, Human
cgggcuggccgggcccucacc

SEQ ID NO: 1093710 - RNA, 22 nt, Human
agagcuguucagcagccagguu

SEQ ID NO: 1093711 - RNA, 22 nt, Human
cacaguggauugggugaugccc

SEQ ID NO: 1093712 - RNA, 22 nt, Human
auguguccacaggugugagaga

SEQ ID NO: 1093713 - RNA, 22 nt, Human
auuaacuguacuuucuaauuuu

SEQ ID NO: 1093714 - RNA, 22 nt, Human
ccugggagguggagguugcagc

SEQ ID NO: 1093715 - RNA, 22 nt, Human
ugggcugcugcggugcucuugg

SEQ ID NO: 1093716 - RNA, 20 nt, Human
gccagcccugacacaggagc

SEQ ID NO: 1093717 - RNA, 22 nt, Human
ggcggguguaaguaggacagcg

SEQ ID NO: 1093718 - RNA, 22 nt, Human
ucuagauuccuccugcauccug

SEQ ID NO: 1093719 - RNA, 22 nt, Human
cucacagguaccagcacccucc

SEQ ID NO: 1093720 - RNA, 22 nt, Human
aaaugucuaucuggcauauucc

SEQ ID NO: 1093721 - RNA, 22 nt, Human
uggcagagucaucacaucugga

SEQ ID NO: 1093722 - RNA, 22 nt, Human
ccugggccuggcgggucggcuc

SEQ ID NO: 1093723 - RNA, 22 nt, Human
aagcaauauacugauaugauua

SEQ ID NO: 1093724 - RNA, 20 nt, Human
ugcuugucaugcacucaggc

SEQ ID NO: 1093725 - RNA, 22 nt, Human
ccucacagcuugggcaaacggc

SEQ ID NO: 1093726 - RNA, 18 nt, Human
cugagggcagccccuggg

SEQ ID NO: 1093727 - RNA, 22 nt, Human
gagcagcucugggugacccagu

SEQ ID NO: 1093728 - RNA, 22 nt, Human
ugauuucccucaucauaacaga

SEQ ID NO: 1093729 - RNA, 22 nt, Human
cuuccugcaggacagccaucug

SEQ ID NO: 1093730 - RNA, 22 nt, Human
ccuggggaccugccucagcccu

SEQ ID NO: 1093731 - RNA, 22 nt, Human
cuguuauuuagaacauggaauc

SEQ ID NO: 1093732 - RNA, 22 nt, Human
cugcaagauguugucauaugcu

SEQ ID NO: 1093733 - RNA, 22 nt, Human
cagagcccuuccucccacgggg

SEQ ID NO: 1093734 - RNA, 22 nt, Human
augacacauaaaacaaggacug

SEQ ID NO: 1093735 - RNA, 22 nt, Human
uuuaaagaaauuccucaucuuu

SEQ ID NO: 1093736 - RNA, 22 nt, Human
ugaaagcucugucaucauuccu

SEQ ID NO: 1093737 - RNA, 22 nt, Human
acugucaccaucagagcgggaa

SEQ ID NO: 1093738 - RNA, 22 nt, Human
cacugggcugauaccaggcuuc

SEQ ID NO: 1093739 - RNA, 22 nt, Human
acaggugagggguucuaggcug

SEQ ID NO: 1093740 - RNA, 22 nt, Human
cagucaccaccagguggcagua

SEQ ID NO: 1093741 - RNA, 22 nt, Human
cccugagaugccucacccuagu

SEQ ID NO: 1093742 - RNA, 19 nt, Human
agguuacaggugucacaga

SEQ ID NO: 1093743 - RNA, 22 nt, Human
caugcacagugauaucugaaga

SEQ ID NO: 1093744 - RNA, 22 nt, Human
ugagaaaaguacauggagaagc

SEQ ID NO: 1093745 - RNA, 22 nt, Human
uaagucaugauucuguguuacu

SEQ ID NO: 1093746 - RNA, 22 nt, Human
uggcccugcagaacuagccugg

SEQ ID NO: 1093747 - RNA, 22 nt, Human
cgcaggcaagagaguacaguua

SEQ ID NO: 1093748 - RNA, 22 nt, Human
uacauuugcuuugauuuucagc

SEQ ID NO: 1093749 - RNA, 22 nt, Human
aaaauuauucauggcuuuugga

SEQ ID NO: 1093750 - RNA, 22 nt, Human
aggcaggagugacccugacagg

SEQ ID NO: 1093751 - RNA, 22 nt, Human
cagcaagauuuuuaaagcaagg

SEQ ID NO: 1093752 - RNA, 22 nt, Human
acagaaagaugauuugaaaugg

SEQ ID NO: 1093753 - RNA, 22 nt, Human
uagcuauuuggaaaauuccaau

SEQ ID NO: 1093754 - RNA, 22 nt, Human
gcccagaaaugaacuugcugug

SEQ ID NO: 1093755 - RNA, 22 nt, Human
caagggcagaggcagggccccg

SEQ ID NO: 1093756 - RNA, 22 nt, Human
cagggccaagcugcagcaucug

SEQ ID NO: 1093757 - RNA, 22 nt, Human
agugcaaaaguaauuggaguuu

SEQ ID NO: 1093758 - RNA, 19 nt, Human
uuaugaauagcuucaucca

SEQ ID NO: 1093759 - RNA, 22 nt, Human
ucuucaaaugcuaguaauauca

SEQ ID NO: 1093760 - RNA, 22 nt, Human
ugccugcugcuaagcucuuugu

SEQ ID NO: 1093761 - RNA, 22 nt, Human
ccagccuccauguagauagcug

SEQ ID NO: 1093762 - RNA, 22 nt, Human
uugcacagaugagggugaugcu

SEQ ID NO: 1093763 - RNA, 22 nt, Human
uuuaauauccaguggauacaaa

SEQ ID NO: 1093764 - RNA, 22 nt, Human
agcauggggcaaugcaugugcu

SEQ ID NO: 1093765 - RNA, 22 nt, Human
ccagguggauaagguuucugga

SEQ ID NO: 1093766 - RNA, 22 nt, Human
aggcacugauucucagaguuac

SEQ ID NO: 1093767 - RNA, 22 nt, Human
aaagacuuucaccuagcaaaga

SEQ ID NO: 1093768 - RNA, 22 nt, Human
cuuuccaacucuagugaaauuu

SEQ ID NO: 1093769 - RNA, 22 nt, Human
uucacauugugcagauuauggu

SEQ ID NO: 1093770 - RNA, 22 nt, Human
gguggggccugcuccagcggcc

SEQ ID NO: 1093771 - RNA, 22 nt, Human
acugugggaaccacugaaucag

SEQ ID NO: 1093772 - RNA, 22 nt, Human
cacacagugggaaaaccugaag

SEQ ID NO: 1093773 - RNA, 22 nt, Human
uagaaacacagagagacccaug

SEQ ID NO: 1093774 - RNA, 22 nt, Human
gccagcaaggaggggaaaaaug

SEQ ID NO: 1093775 - RNA, 22 nt, Human
ggcagcuccuccuagucugccc

SEQ ID NO: 1093776 - RNA, 22 nt, Human
gaaaugguagaguaggaagauu

SEQ ID NO: 1093777 - RNA, 22 nt, Human
gucaccauggauaagaaucacu

SEQ ID NO: 1093778 - RNA, 20 nt, Human
agcagcuguguuuucauccu

SEQ ID NO: 1093779 - RNA, 22 nt, Human
gccaggugcuaucccugcgcug

SEQ ID NO: 1093780 - RNA, 22 nt, Human
agauauauuuaagguaauaagu

SEQ ID NO: 1093781 - RNA, 22 nt, Human
uuuuacaccuguuaacucuaag

SEQ ID NO: 1093782 - RNA, 22 nt, Human
agucucuuuugcgaagaguguu

SEQ ID NO: 1093783 - RNA, 22 nt, Human
agugggcagcccaggaggucuu

SEQ ID NO: 1093784 - RNA, 22 nt, Human
agaggcuggauugagcauagac

SEQ ID NO: 1093785 - RNA, 22 nt, Human
gcacagaacuucucuuaguagg

SEQ ID NO: 1093786 - RNA, 22 nt, Human
agacaaagacagcaucucaggu

SEQ ID NO: 1093787 - RNA, 22 nt, Human
gccuggcugagguggggaggca

SEQ ID NO: 1093788 - RNA, 22 nt, Human
acaaaucuguuuuauagacuuu

SEQ ID NO: 1093789 - RNA, 22 nt, Human
aggggccuggacauggacgcgc

SEQ ID NO: 1093790 - RNA, 22 nt, Human
cuggagaaguacugagacauuu

SEQ ID NO: 1093791 - RNA, 22 nt, Human
ugacaacucuaguuaaugaauu

SEQ ID NO: 1093792 - RNA, 17 nt, Human
gaaaggaggcaacacug

SEQ ID NO: 1093793 - RNA, 22 nt, Human
ugaauggucacugagcaucugu

SEQ ID NO: 1093794 - RNA, 22 nt, Human
uuaaaaucacagucacccagua

SEQ ID NO: 1093795 - RNA, 22 nt, Human
cuugcaggauuuugcugcugua

SEQ ID NO: 1093796 - RNA, 23 nt, Human
uuacagaaaguaugcuuuuguuu

SEQ ID NO: 1093797 - RNA, 22 nt, Human
aacauauuuggcugauauuccc

SEQ ID NO: 1093798 - RNA, 18 nt, Human
uucuuuucaugugaucuc

SEQ ID NO: 1093799 - RNA, 22 nt, Human
gagguggcuccuucagggaaua

SEQ ID NO: 1093800 - RNA, 22 nt, Human
ccugucuggugaggggguugca

SEQ ID NO: 1093801 - RNA, 22 nt, Human
cugcucugugguccaugagaca

SEQ ID NO: 1093802 - RNA, 22 nt, Human
cagguaggcagccggucucugg

SEQ ID NO: 1093803 - RNA, 22 nt, Human
ugcagagauugaacaagaagga

SEQ ID NO: 1093804 - RNA, 22 nt, Human
cugucuguuucugauucaaccu

SEQ ID NO: 1093805 - RNA, 22 nt, Human
ucaccaauaauaacuugagaau

SEQ ID NO: 1093806 - RNA, 21 nt, Human
aggcccagagucuugggggga

SEQ ID NO: 1093807 - RNA, 22 nt, Human
ccagcucuagccccauguggcu

SEQ ID NO: 1093808 - RNA, 22 nt, Human
agucaucaucugcccucacugg

SEQ ID NO: 1093809 - RNA, 22 nt, Human
ugcuucuggaaacaguggcugu

SEQ ID NO: 1093810 - RNA, 22 nt, Human
ccacugugcccagccucauggg

SEQ ID NO: 1093811 - RNA, 22 nt, Human
aagugaguggccuggagaggug

SEQ ID NO: 1093812 - RNA, 21 nt, Human
uugcaccaugauaaauucaga

SEQ ID NO: 1093813 - RNA, 22 nt, Human
guucaaguuucugagcuuuaau

SEQ ID NO: 1093814 - RNA, 22 nt, Human
uuacgaauguuagauugcaucu

SEQ ID NO: 1093815 - RNA, 22 nt, Human
cucuccagaauaugccgccgug

SEQ ID NO: 1093816 - RNA, 22 nt, Human
cucaaggacuuauucaugccug

SEQ ID NO: 1093817 - RNA, 22 nt, Human
uuucacagcuggguggcagagu

SEQ ID NO: 1093818 - RNA, 22 nt, Human
uuaaagcaaccucagcccucuu

SEQ ID NO: 1093819 - RNA, 20 nt, Human
ugucagugccugaggcacag

SEQ ID NO: 1093820 - RNA, 22 nt, Human
agggcccauagaucgucagcuu

SEQ ID NO: 1093821 - RNA, 22 nt, Human
uggcagggccugaaucuuauac

SEQ ID NO: 1093822 - RNA, 21 nt, Human
cacucaggguaugugccaggc

SEQ ID NO: 1093823 - RNA, 22 nt, Human
cagucacauugcccugcauuua

SEQ ID NO: 1093824 - RNA, 22 nt, Human
cagcagcugcaaauggaaacag

SEQ ID NO: 1093825 - RNA, 21 nt, Human
cugcuuuacuucagaggaucu

SEQ ID NO: 1093826 - RNA, 22 nt, Human
ggcuggcaggggaugucagaug

SEQ ID NO: 1093827 - RNA, 19 nt, Human
auacacauacguaaacuga

SEQ ID NO: 1093828 - RNA, 20 nt, Human
cugcacugaacaugucugag

SEQ ID NO: 1093829 - RNA, 22 nt, Human
uuauacagcauugcuagugaug

SEQ ID NO: 1093830 - RNA, 22 nt, Human
ggggauggauuccgggucccug

SEQ ID NO: 1093831 - RNA, 22 nt, Human
aagaauguuaguuucugauaca

SEQ ID NO: 1093832 - RNA, 22 nt, Human
ccugggaaguuguggcugcagu

SEQ ID NO: 1093833 - RNA, 22 nt, Human
uuacuguuugaaaaaugaaugu

SEQ ID NO: 1093834 - RNA, 22 nt, Human
ugaaaugacagucuuaagcucu

SEQ ID NO: 1093835 - RNA, 22 nt, Human
cucugcccagugcccacaggag

SEQ ID NO: 1093836 - RNA, 22 nt, Human
caguaacugaugugaucaaacg

SEQ ID NO: 1093837 - RNA, 22 nt, Human
uuuccaaagguggcaggaacaa

SEQ ID NO: 1093838 - RNA, 22 nt, Human
auggacaggaacucccuuggca

SEQ ID NO: 1093839 - RNA, 22 nt, Human
cagagugaaaacugagcucaaa

SEQ ID NO: 1093840 - RNA, 22 nt, Human
agacacugagcauuuuccuagc

SEQ ID NO: 1093841 - RNA, 22 nt, Human
uaauacuguauacugcaaauuu

SEQ ID NO: 1093842 - RNA, 22 nt, Human
ugccuuuuauggcuagccucag

SEQ ID NO: 1093843 - RNA, 22 nt, Human
auauauucuuaaagaaucugac

SEQ ID NO: 1093844 - RNA, 22 nt, Human
cccaggaagcggagauugcaga

SEQ ID NO: 1093845 - RNA, 22 nt, Human
agauuucacaugcugcucuauu

SEQ ID NO: 1093846 - RNA, 23 nt, Human
ucugggcugagacuuggaagguc

SEQ ID NO: 1093847 - RNA, 18 nt, Human
gcaggugccacugcuguu

SEQ ID NO: 1093848 - RNA, 23 nt, Human
uguccuaugcagcuaaaauuccu

SEQ ID NO: 1093849 - RNA, 22 nt, Human
ucuuuagccaguaucauaauga

SEQ ID NO: 1093850 - RNA, 22 nt, Human
ugcaggcuccaugaggacaggc

SEQ ID NO: 1093851 - RNA, 22 nt, Human
aaaauaugacugugcuccuuaa

SEQ ID NO: 1093852 - RNA, 22 nt, Human
cucagcuggcaauucuggcucc

SEQ ID NO: 1093853 - RNA, 22 nt, Human
cagcucccaguggcagcuccuu

SEQ ID NO: 1093854 - RNA, 21 nt, Human
uuugcauuuuacaugugggga

SEQ ID NO: 1093855 - RNA, 17 nt, Human
ccucccacaccgcccug

SEQ ID NO: 1093856 - RNA, 22 nt, Human
ggcuucucucccccagcuccac

SEQ ID NO: 1093857 - RNA, 22 nt, Human
aucuggcuuuuacugaauugcu

SEQ ID NO: 1093858 - RNA, 22 nt, Human
gaaaggaaauugagggacgcau

SEQ ID NO: 1093859 - RNA, 22 nt, Human
guggugcaggccagcaggggcg

SEQ ID NO: 1093860 - RNA, 22 nt, Human
agggcagagaucugagugggca

SEQ ID NO: 1093861 - RNA, 22 nt, Human
accagggcccgggagagcucuc

SEQ ID NO: 1093862 - RNA, 22 nt, Human
gccaggaaaagaagcuggugcu

SEQ ID NO: 1093863 - RNA, 22 nt, Human
uguguacaggccuugcuagacu

SEQ ID NO: 1093864 - RNA, 22 nt, Human
cauucauuagaauagauaugua

SEQ ID NO: 1093865 - RNA, 22 nt, Human
gacagaagaggaacuuggacag

SEQ ID NO: 1093866 - RNA, 23 nt, Human
gcaggaacucaggguaggcagca

SEQ ID NO: 1093867 - RNA, 22 nt, Human
ugcaggcuauccuuugcugcaa

SEQ ID NO: 1093868 - RNA, 22 nt, Human
cuuccccaaccccgacugugug

SEQ ID NO: 1093869 - RNA, 22 nt, Human
uuguaaacuuguuugaagguau

SEQ ID NO: 1093870 - RNA, 22 nt, Human
gcugaaggcccggaggacaggg

SEQ ID NO: 1093871 - RNA, 22 nt, Human
ucaaagcaauuucaccagugcc

SEQ ID NO: 1093872 - RNA, 22 nt, Human
ggagccagcagggugacacuga

SEQ ID NO: 1093873 - RNA, 22 nt, Human
uuggugggcacaggggagaagu

SEQ ID NO: 1093874 - RNA, 22 nt, Human
ucauaaaaauagacucuaaagu

SEQ ID NO: 1093875 - RNA, 21 nt, Human
cauucacagucuggcucuuga

SEQ ID NO: 1093876 - RNA, 22 nt, Human
cugccucugcgucccacagagu

SEQ ID NO: 1093877 - RNA, 22 nt, Human
uacacaucccagacucccagga

SEQ ID NO: 1093878 - RNA, 22 nt, Human
gcugggcuugguuucccugcuu

SEQ ID NO: 1093879 - RNA, 20 nt, Human
uucuuucaucuacacguugu

SEQ ID NO: 1093880 - RNA, 22 nt, Human
gcuuuucuucagcagccugaug

SEQ ID NO: 1093881 - RNA, 22 nt, Human
agugagcauucguuuggaaccc

SEQ ID NO: 1093882 - RNA, 22 nt, Human
aguaacaagugccaacguuaga

SEQ ID NO: 1093883 - RNA, 22 nt, Human
agggcaguucagccacaggcuc

SEQ ID NO: 1093884 - RNA, 22 nt, Human
cauugaaauauggaaacugaug

SEQ ID NO: 1093885 - RNA, 22 nt, Human
ccauuuguucgcccagcuccaa

SEQ ID NO: 1093886 - RNA, 22 nt, Human
cugguccuugcuacccagcaag

SEQ ID NO: 1093887 - RNA, 20 nt, Human
gucagugucuucaguaguga

SEQ ID NO: 1093888 - RNA, 22 nt, Human
cagaaucucugggaguggauca

SEQ ID NO: 1093889 - RNA, 22 nt, Human
aagcaaagaguuuaguggguga

SEQ ID NO: 1093890 - RNA, 22 nt, Human
ugaggaaguuguuucucuucua

SEQ ID NO: 1093891 - RNA, 22 nt, Human
ugaauacuauuucauaaugugg

SEQ ID NO: 1093892 - RNA, 22 nt, Human
uuucacauucuucugaaucuac

SEQ ID NO: 1093893 - RNA, 23 nt, Human
agaggggagcaucugcuggcuga

SEQ ID NO: 1093894 - RNA, 22 nt, Human
uacuuucuuguuccuuucauaa

SEQ ID NO: 1093895 - RNA, 22 nt, Human
gaggccugguuugcaugagaau

SEQ ID NO: 1093896 - RNA, 22 nt, Human
acugggcauuuugaacguucuu

SEQ ID NO: 1093897 - RNA, 22 nt, Human
cugggccagaccuuguggucuu

SEQ ID NO: 1093898 - RNA, 22 nt, Human
acagcaagccagcuugucacug

SEQ ID NO: 1093899 - RNA, 22 nt, Human
agccuggagcuugaguuaugag

SEQ ID NO: 1093900 - RNA, 22 nt, Human
ccagggcuggugggagaugcug

SEQ ID NO: 1093901 - RNA, 22 nt, Human
ucccuuaaccguaggacagucu

SEQ ID NO: 1093902 - RNA, 22 nt, Human
ggaccugccagaacucaggcua

SEQ ID NO: 1093903 - RNA, 22 nt, Human
gcucuggguagccacugccugg

SEQ ID NO: 1093904 - RNA, 22 nt, Human
augcugugaaaaagaaggcuga

SEQ ID NO: 1093905 - RNA, 22 nt, Human
cugucaaauggaaacuuauccu

SEQ ID NO: 1093906 - RNA, 22 nt, Human
auaauguacaacugcuuuuaau

SEQ ID NO: 1093907 - RNA, 22 nt, Human
uuguuaaggguuaugcagcuuu

SEQ ID NO: 1093908 - RNA, 22 nt, Human
gacagccucaugaggagcaaaa

SEQ ID NO: 1093909 - RNA, 22 nt, Human
uuaguuuccaccacacauguuc

SEQ ID NO: 1093910 - RNA, 22 nt, Human
uccaggcccauggagcagagcu

SEQ ID NO: 1093911 - RNA, 23 nt, Human
uuuaaaaguuguaauguaggcuu

SEQ ID NO: 1093912 - RNA, 22 nt, Human
gcagccagaagacucagaacaa

SEQ ID NO: 1093913 - RNA, 22 nt, Human
guggccuggcuggcaccaccuc

SEQ ID NO: 1093914 - RNA, 22 nt, Human
gccuccugagaagccacaggcu

SEQ ID NO: 1093915 - RNA, 22 nt, Human
gcagaggucuagcaccaagaau

SEQ ID NO: 1093916 - RNA, 22 nt, Human
aaaucuggccccuugccuauuu

SEQ ID NO: 1093917 - RNA, 22 nt, Human
gggcagguggcagggucucugg

SEQ ID NO: 1093918 - RNA, 22 nt, Human
uacaggaaggagcacaucggga

SEQ ID NO: 1093919 - RNA, 22 nt, Human
cagucucuaaaucaaucugaau

SEQ ID NO: 1093920 - RNA, 22 nt, Human
cuccuggaccaccuuguggcca

SEQ ID NO: 1093921 - RNA, 22 nt, Human
gugcaugaagacucagaaaguc

SEQ ID NO: 1093922 - RNA, 20 nt, Human
agcuugccccugucuuugcc

SEQ ID NO: 1093923 - RNA, 22 nt, Human
aucuggcugagcgaggcccaca

SEQ ID NO: 1093924 - RNA, 22 nt, Human
ucacacagugagcggggcucag

SEQ ID NO: 1093925 - RNA, 22 nt, Human
aagagcaggcugucaauggggc

SEQ ID NO: 1093926 - RNA, 22 nt, Human
ucuuccaaaugaauaugguuuu

SEQ ID NO: 1093927 - RNA, 22 nt, Human
cugagccaaaaagcagagcuug

SEQ ID NO: 1093928 - RNA, 22 nt, Human
acaauguucuacauauacauaa

SEQ ID NO: 1093929 - RNA, 22 nt, Human
uggcccugguggcacagccugc

SEQ ID NO: 1093930 - RNA, 22 nt, Human
ggaacccaugauuaugguuagg

SEQ ID NO: 1093931 - RNA, 22 nt, Human
ugggaagcuuuaaauggguguc

SEQ ID NO: 1093932 - RNA, 22 nt, Human
uugcauugugauuacagaggug

SEQ ID NO: 1093933 - RNA, 22 nt, Human
caccaggcugcccaggacaggg

SEQ ID NO: 1093934 - RNA, 22 nt, Human
aauuaggcaaauuaauuucucu

SEQ ID NO: 1093935 - RNA, 22 nt, Human
gcucccaggaagagaagggcca

SEQ ID NO: 1093936 - RNA, 20 nt, Human
aggucuuccaaucagcuccu

SEQ ID NO: 1093937 - RNA, 22 nt, Human
gucucuuagaaucgcauauugu

SEQ ID NO: 1093938 - RNA, 20 nt, Human
uccaguuuuggagacauucu

SEQ ID NO: 1093939 - RNA, 19 nt, Human
uggcuguggggaaaugcuu

SEQ ID NO: 1093940 - RNA, 22 nt, Human
augauauuuuaguaaagugaua

SEQ ID NO: 1093941 - RNA, 22 nt, Human
ccccauccuauucauguuucug

SEQ ID NO: 1093942 - RNA, 22 nt, Human
ccaggaacucagcucugcacuu

SEQ ID NO: 1093943 - RNA, 22 nt, Human
aaucaagaaaaugaggauucuu

SEQ ID NO: 1093944 - RNA, 22 nt, Human
uuuauagucgucucaguaauaa

SEQ ID NO: 1093945 - RNA, 22 nt, Human
uucuguuucuggggucucugac

SEQ ID NO: 1093946 - RNA, 22 nt, Human
ucuauacaugugcacacacauc

SEQ ID NO: 1093947 - RNA, 22 nt, Human
ugcuggcuuuuugugucaaaga

SEQ ID NO: 1093948 - RNA, 22 nt, Human
uuucacaugcagcagggaagug

SEQ ID NO: 1093949 - RNA, 17 nt, Human
aaacagugaguguuaug

SEQ ID NO: 1093950 - RNA, 22 nt, Human
ugaacgcagguccacauggcuc

SEQ ID NO: 1093951 - RNA, 22 nt, Human
auacaucuugucagauucaugu

SEQ ID NO: 1093952 - RNA, 22 nt, Human
cagcacagaguauuuuauugau

SEQ ID NO: 1093953 - RNA, 22 nt, Human
aacaucagaauauccauguugg

SEQ ID NO: 1093954 - RNA, 22 nt, Human
cugaaauuauuguuuaaucaaa

SEQ ID NO: 1093955 - RNA, 22 nt, Human
uugagaguuugggggcaauaug

SEQ ID NO: 1093956 - RNA, 22 nt, Human
aagcugccuagaguugaauguc

SEQ ID NO: 1093957 - RNA, 22 nt, Human
uaugacaagguggaguaugagu

SEQ ID NO: 1093958 - RNA, 22 nt, Human
uggcaagggauuguggagaacu

SEQ ID NO: 1093959 - RNA, 22 nt, Human
augaaacugggauaacuauagc

SEQ ID NO: 1093960 - RNA, 20 nt, Human
cgcccaggagggcccaugug

SEQ ID NO: 1093961 - RNA, 19 nt, Human
uuuaagcaauaguaucuug

SEQ ID NO: 1093962 - RNA, 22 nt, Human
aggcacagcacaccuggccccc

SEQ ID NO: 1093963 - RNA, 22 nt, Human
aggcuaauauggcacaugaaca

SEQ ID NO: 1093964 - RNA, 22 nt, Human
uggccaguugaagacaaugcuc

SEQ ID NO: 1093965 - RNA, 18 nt, Human
uggccuggagacaacucu

SEQ ID NO: 1093966 - RNA, 22 nt, Human
uucuggcuuugaccaaguucaa

SEQ ID NO: 1093967 - RNA, 22 nt, Human
accauugccuagaaaaauuccu

SEQ ID NO: 1093968 - RNA, 22 nt, Human
agugcuuucuugcuccaucagu

SEQ ID NO: 1093969 - RNA, 19 nt, Human
uuuugaaguaugagacagg

SEQ ID NO: 1093970 - RNA, 22 nt, Human
agcaaagucaguggaaccaucc

SEQ ID NO: 1093971 - RNA, 17 nt, Human
cagaaggaagcauggca

SEQ ID NO: 1093972 - RNA, 22 nt, Human
cacucccuucaggagccuagga

SEQ ID NO: 1093973 - RNA, 22 nt, Human
aggcuuccgaguagcugggacu

SEQ ID NO: 1093974 - RNA, 22 nt, Human
cgugucaucugagccuugggcg

SEQ ID NO: 1093975 - RNA, 22 nt, Human
ggcuuccuggagaaggucugag

SEQ ID NO: 1093976 - RNA, 22 nt, Human
ucagaggaaagggaacauaguc

SEQ ID NO: 1093977 - RNA, 22 nt, Human
cuggcuguauuaguuugauccu

SEQ ID NO: 1093978 - RNA, 22 nt, Human
uugcaaagagucauguaaguca

SEQ ID NO: 1093979 - RNA, 22 nt, Human
gugagcagagaucgcgugauug

SEQ ID NO: 1093980 - RNA, 22 nt, Human
gcaggugauucacccugggccu

SEQ ID NO: 1093981 - RNA, 22 nt, Human
agccaauacacugaagaucuaa

SEQ ID NO: 1093982 - RNA, 22 nt, Human
ugugcagcucuagagccaagcc

SEQ ID NO: 1093983 - RNA, 22 nt, Human
ccuuagacuggagcuaugccgu

SEQ ID NO: 1093984 - RNA, 22 nt, Human
auuauaggcuugagccaccgug

SEQ ID NO: 1093985 - RNA, 22 nt, Human
ccucaggguggcaucagaucuu

SEQ ID NO: 1093986 - RNA, 22 nt, Human
acacaggacagggauguguuuu

SEQ ID NO: 1093987 - RNA, 22 nt, Human
ccaggccuggaccaugccaggg

SEQ ID NO: 1093988 - RNA, 22 nt, Human
auugagaaaauaaguauggaua

SEQ ID NO: 1093989 - RNA, 22 nt, Human
ugaaaucaguaugucuuucuca

SEQ ID NO: 1093990 - RNA, 22 nt, Human
gugcaagaggacaguaagggug

SEQ ID NO: 1093991 - RNA, 22 nt, Human
gggcaguuuauucuagaugguu

SEQ ID NO: 1093992 - RNA, 22 nt, Human
guucauucaaucuauuugcuuc

SEQ ID NO: 1093993 - RNA, 22 nt, Human
cgggaaaguuccacagauggau

SEQ ID NO: 1093994 - RNA, 22 nt, Human
agaaaguuuauuccuaucuagc

SEQ ID NO: 1093995 - RNA, 22 nt, Human
cugggccuggcguuccaggcug

SEQ ID NO: 1093996 - RNA, 22 nt, Human
ccaggcagaugggccggcuuca

SEQ ID NO: 1093997 - RNA, 22 nt, Human
aucaaaguggaaguuuacuagg

SEQ ID NO: 1093998 - RNA, 22 nt, Human
gggcucuggaaggugcaccaug

SEQ ID NO: 1093999 - RNA, 22 nt, Human
gcagggcagugugucugugggg

SEQ ID NO: 1094000 - RNA, 22 nt, Human
uuucggccgcgugaaguuuucu

SEQ ID NO: 1094001 - RNA, 22 nt, Human
agugaccauuuucagcuagagg

SEQ ID NO: 1094002 - RNA, 22 nt, Human
acacacaugcaugcuugccauu

SEQ ID NO: 1094003 - RNA, 22 nt, Human
cuugggaggagaacaaagcucc

SEQ ID NO: 1094004 - RNA, 22 nt, Human
gcugggcucaccaggccacuag

SEQ ID NO: 1094005 - RNA, 22 nt, Human
cugcugagguccuugcucagac

SEQ ID NO: 1094006 - RNA, 22 nt, Human
ucaggcaggcucagaggaaaac

SEQ ID NO: 1094007 - RNA, 22 nt, Human
uggugcuguggaggggcagaag

SEQ ID NO: 1094008 - RNA, 22 nt, Human
cccugccuucuuggccuuuaaa

SEQ ID NO: 1094009 - RNA, 22 nt, Human
acagauggaauguguuauggga

SEQ ID NO: 1094010 - RNA, 22 nt, Human
ugcaaauuuaaugaaacuaugu

SEQ ID NO: 1094011 - RNA, 22 nt, Human
acagaagaccaagaaagcuucc

SEQ ID NO: 1094012 - RNA, 22 nt, Human
cacauuuauuugaggcuaauug

SEQ ID NO: 1094013 - RNA, 21 nt, Human
auuuccaaauaaggucacauu

SEQ ID NO: 1094014 - RNA, 22 nt, Human
cugggccuccagcucugccagc

SEQ ID NO: 1094015 - RNA, 22 nt, Human
aggccucucuccuuggcuugua

SEQ ID NO: 1094016 - RNA, 22 nt, Human
aggcugcguuagccucacuccc

SEQ ID NO: 1094017 - RNA, 22 nt, Human
cauugcucaggcccagcaggaa

SEQ ID NO: 1094018 - RNA, 22 nt, Human
caacaguuuauaguguuaucuu

SEQ ID NO: 1094019 - RNA, 22 nt, Human
cagcccagcagucuuagccugc

SEQ ID NO: 1094020 - RNA, 22 nt, Human
gcccucugcuggccucaccucg

SEQ ID NO: 1094021 - RNA, 22 nt, Human
cagcuguuguguaucaggcaga

SEQ ID NO: 1094022 - RNA, 19 nt, Human
cugaggugcaguaagaggc

SEQ ID NO: 1094023 - RNA, 20 nt, Human
uacauauuauaucagcugca

SEQ ID NO: 1094024 - RNA, 22 nt, Human
augguguugagucucucuucac

SEQ ID NO: 1094025 - RNA, 20 nt, Human
cccagggaccugagcuccau

SEQ ID NO: 1094026 - RNA, 22 nt, Human
ugggccugauucuugaauccug

SEQ ID NO: 1094027 - RNA, 22 nt, Human
guaacagagaacucagguguua

SEQ ID NO: 1094028 - RNA, 22 nt, Human
ugcagggcauaggguccaguuu

SEQ ID NO: 1094029 - RNA, 22 nt, Human
uggcccugggcaucuuucguga

SEQ ID NO: 1094030 - RNA, 22 nt, Human
ugaaaucaacuaggagacacca

SEQ ID NO: 1094031 - RNA, 22 nt, Human
agcagcugucccuuaacaucag

SEQ ID NO: 1094032 - RNA, 22 nt, Human
ucugaaaugcaaauuugacuga

SEQ ID NO: 1094033 - RNA, 22 nt, Human
augguuauuucauggaaaaauu

SEQ ID NO: 1094034 - RNA, 22 nt, Human
uggcagaauuuuaaagacagau

SEQ ID NO: 1094035 - RNA, 22 nt, Human
cugcuguguggugaaacucagu

SEQ ID NO: 1094036 - RNA, 22 nt, Human
caccaggaaguauucaaagggu

SEQ ID NO: 1094037 - RNA, 22 nt, Human
agaaaucaggaacaguaaggag

SEQ ID NO: 1094038 - RNA, 22 nt, Human
ugggcaggcaagugaauaccuu

SEQ ID NO: 1094039 - RNA, 22 nt, Human
uagcuagaaaguuucagcugug

SEQ ID NO: 1094040 - RNA, 22 nt, Human
aagcgccaugguuccugcgcag

SEQ ID NO: 1094041 - RNA, 22 nt, Human
ugaggcucaaggucugguggag

SEQ ID NO: 1094042 - RNA, 22 nt, Human
auuugaaaaccugagccucccg

SEQ ID NO: 1094043 - RNA, 22 nt, Human
ugagcagaaguuauaaauaaga

SEQ ID NO: 1094044 - RNA, 22 nt, Human
gucccuggggaaucagcuggag

SEQ ID NO: 1094045 - RNA, 22 nt, Human
ucccucuguguugggcaugccu

SEQ ID NO: 1094046 - RNA, 17 nt, Human
uuuucucucuuggauuc

SEQ ID NO: 1094047 - RNA, 22 nt, Human
ugcccaggauugugaggucagg

SEQ ID NO: 1094048 - RNA, 23 nt, Human
acugucugauauguuuuccauca

SEQ ID NO: 1094049 - RNA, 22 nt, Human
ugauuuccacagucaggggugc

SEQ ID NO: 1094050 - RNA, 22 nt, Human
ccuugcauauauuauaucuuug

SEQ ID NO: 1094051 - RNA, 22 nt, Human
ucugacuuggcgcucuugucuu

SEQ ID NO: 1094052 - RNA, 22 nt, Human
ucaagagauugaauaauaacug

SEQ ID NO: 1094053 - RNA, 22 nt, Human
agucucugccagcuuguccucu

SEQ ID NO: 1094054 - RNA, 22 nt, Human
gcuggggagggcgucaaggcca

SEQ ID NO: 1094055 - RNA, 22 nt, Human
guacacacuauuuaaaguguuu

SEQ ID NO: 1094056 - RNA, 22 nt, Human
ggcuguggacacugagcucaga

SEQ ID NO: 1094057 - RNA, 22 nt, Human
gugacagaguuuuagaucucau

SEQ ID NO: 1094058 - RNA, 22 nt, Human
ugagaaauggcagcauuacugg

SEQ ID NO: 1094059 - RNA, 19 nt, Human
gugcuuuuuaagagcucag

SEQ ID NO: 1094060 - RNA, 22 nt, Human
uaggaaccuugaucuuggauuu

SEQ ID NO: 1094061 - RNA, 22 nt, Human
uuccaagugaaaguagcuuugu

SEQ ID NO: 1094062 - RNA, 22 nt, Human
auucaaauuaaguuaauucagc

SEQ ID NO: 1094063 - RNA, 22 nt, Human
gauagcaacauagaacagaauu

SEQ ID NO: 1094064 - RNA, 22 nt, Human
cagaggaaggcucugggaaugu

SEQ ID NO: 1094065 - RNA, 21 nt, Human
ugauuuccagaaaauuggccc

SEQ ID NO: 1094066 - RNA, 18 nt, Human
cuccagggaacucaguca

SEQ ID NO: 1094067 - RNA, 22 nt, Human
ugcaagagauucaaaccauaaa

SEQ ID NO: 1094068 - RNA, 21 nt, Human
agccuggcccagggggaggcu

SEQ ID NO: 1094069 - RNA, 22 nt, Human
uuucacauuuaggcgugaauug

SEQ ID NO: 1094070 - RNA, 17 nt, Human
ucaugcccaacuauuac

SEQ ID NO: 1094071 - RNA, 22 nt, Human
uccaaauuuaccuuacagauau

SEQ ID NO: 1094072 - RNA, 22 nt, Human
gcugccugauuuacauagugaa

SEQ ID NO: 1094073 - RNA, 22 nt, Human
acauucuagaagucuuugcaau

SEQ ID NO: 1094074 - RNA, 22 nt, Human
gcugucucggggcuuucuccug

SEQ ID NO: 1094075 - RNA, 22 nt, Human
cugcugugcauauuuaucuagg

SEQ ID NO: 1094076 - RNA, 22 nt, Human
gaggcucagagaagucauggua

SEQ ID NO: 1094077 - RNA, 22 nt, Human
cuucacagaauaaacucauuau

SEQ ID NO: 1094078 - RNA, 20 nt, Human
ucccucccuccagcucuggg

SEQ ID NO: 1094079 - RNA, 22 nt, Human
acagauuugaucugagaacaaa

SEQ ID NO: 1094080 - RNA, 22 nt, Human
augcuuugauuugguuucucua

SEQ ID NO: 1094081 - RNA, 18 nt, Human
caugucugcgccacaagg

SEQ ID NO: 1094082 - RNA, 22 nt, Human
cucagggcuggaaagccaggaa

SEQ ID NO: 1094083 - RNA, 22 nt, Human
ugggcagaggcucugaagucca

SEQ ID NO: 1094084 - RNA, 22 nt, Human
aggcugccaaagcuucugucuc

SEQ ID NO: 1094085 - RNA, 22 nt, Human
gcaguguucuaaauugggugug

SEQ ID NO: 1094086 - RNA, 22 nt, Human
aauucugugcaggcagagcuau

SEQ ID NO: 1094087 - RNA, 22 nt, Human
ggcuagaacuuuacacuuugca

SEQ ID NO: 1094088 - RNA, 22 nt, Human
ccagcagagggucuuggccauu

SEQ ID NO: 1094089 - RNA, 22 nt, Human
cccaggaaccuaccagcucgag

SEQ ID NO: 1094090 - RNA, 22 nt, Human
acuuucuuaggcuguauaaaug

SEQ ID NO: 1094091 - RNA, 22 nt, Human
cuacagaaaccuuuuucauaca

SEQ ID NO: 1094092 - RNA, 20 nt, Human
cucucccagcacagcuuccu

SEQ ID NO: 1094093 - RNA, 21 nt, Human
caggaugaugauaauucaugg

SEQ ID NO: 1094094 - RNA, 19 nt, Human
auacacuaauauaaaccac

SEQ ID NO: 1094095 - RNA, 22 nt, Human
acauuuaaccaaacuguuuaau

SEQ ID NO: 1094096 - RNA, 22 nt, Human
gaggaaugucagcacaggccuc

SEQ ID NO: 1094097 - RNA, 22 nt, Human
aaaggccauuacuugcuuuuag

SEQ ID NO: 1094098 - RNA, 22 nt, Human
uauuuggagauaagauuuuuag

SEQ ID NO: 1094099 - RNA, 22 nt, Human
acacauuuaaaaaggaacauau

SEQ ID NO: 1094100 - RNA, 22 nt, Human
uugggccucacucuagaaggca

SEQ ID NO: 1094101 - RNA, 22 nt, Human
ucugaaaacuccaugagcucgu

SEQ ID NO: 1094102 - RNA, 22 nt, Human
ugguggggucaucgucagaugc

SEQ ID NO: 1094103 - RNA, 22 nt, Human
uaauggauuaacgucccugucg

SEQ ID NO: 1094104 - RNA, 22 nt, Human
ggaggccaugaggcucuaggug

SEQ ID NO: 1094105 - RNA, 22 nt, Human
aaagcaaucagauucagauguc

SEQ ID NO: 1094106 - RNA, 22 nt, Human
caagaaacuuuauucugccaua

SEQ ID NO: 1094107 - RNA, 22 nt, Human
aagacagagggaagcaaugaug

SEQ ID NO: 1094108 - RNA, 21 nt, Human
ccaggaaggacugagcucccu

SEQ ID NO: 1094109 - RNA, 22 nt, Human
gccugcaguucugugcuaggca

SEQ ID NO: 1094110 - RNA, 22 nt, Human
auauuacacacgguaucacggg

SEQ ID NO: 1094111 - RNA, 22 nt, Human
ugagcuucuuuauuuggccaga

SEQ ID NO: 1094112 - RNA, 22 nt, Human
ggcugagcggacuggggucccu

SEQ ID NO: 1094113 - RNA, 22 nt, Human
agagugggccucugagucccag

SEQ ID NO: 1094114 - RNA, 22 nt, Human
uuuguaaaagcccaagcuguag

SEQ ID NO: 1094115 - RNA, 22 nt, Human
ggcaggcagaggcugagacagg

SEQ ID NO: 1094116 - RNA, 22 nt, Human
aaaucaaggagggauuauauuu

SEQ ID NO: 1094117 - RNA, 23 nt, Human
ggagugcaauggcgccaucucgg

SEQ ID NO: 1094118 - RNA, 21 nt, Human
uggagcugccacuuguccucc

SEQ ID NO: 1094119 - RNA, 19 nt, Human
agcuggggcgguguguguu

SEQ ID NO: 1094120 - RNA, 22 nt, Human
ucccucagaaauucucucugaa

SEQ ID NO: 1094121 - RNA, 22 nt, Human
ggaggcucccacgcagcucaca

SEQ ID NO: 1094122 - RNA, 22 nt, Human
gcacauaaagggcaugggaggu

SEQ ID NO: 1094123 - RNA, 22 nt, Human
guccccugguggcuggagcugc

SEQ ID NO: 1094124 - RNA, 16 nt, Human
gggagugaaggagggu

SEQ ID NO: 1094125 - RNA, 23 nt, Human
acagcugcaccuggccgccuggc

SEQ ID NO: 1094126 - RNA, 22 nt, Human
gugauucauucgauuaguauuu

SEQ ID NO: 1094127 - RNA, 22 nt, Human
caggaacaggguguccuggcag

SEQ ID NO: 1094128 - RNA, 19 nt, Human
ggaagagaggaaaggugga

SEQ ID NO: 1094129 - RNA, 22 nt, Human
ugcucauuggcgaucugaggga

SEQ ID NO: 1094130 - RNA, 22 nt, Human
ugaacagaugccuucucccaug

SEQ ID NO: 1094131 - RNA, 22 nt, Human
acuucaugcuuuagagagauga

SEQ ID NO: 1094132 - RNA, 22 nt, Human
ucaggcagcuccaggaauggua

SEQ ID NO: 1094133 - RNA, 22 nt, Human
uuaaaacugcaaauccuacuga

SEQ ID NO: 1094134 - RNA, 22 nt, Human
gggcagccucggugccugcugc

SEQ ID NO: 1094135 - RNA, 19 nt, Human
gaauguuucugucucuucu

SEQ ID NO: 1094136 - RNA, 21 nt, Human
ccccucauacacucuccuugc

SEQ ID NO: 1094137 - RNA, 22 nt, Human
aaguguuuacuuaaagucaugg

SEQ ID NO: 1094138 - RNA, 22 nt, Human
uuguguguuuguagaaaaucca

SEQ ID NO: 1094139 - RNA, 22 nt, Human
cagcucugaagaaaggugucua

SEQ ID NO: 1094140 - RNA, 22 nt, Human
uucuaagaaauggaaaacgauu

SEQ ID NO: 1094141 - RNA, 22 nt, Human
cugggccuggacgggcagaucu

SEQ ID NO: 1094142 - RNA, 22 nt, Human
ucaauaaaauuguuuuccuauc

SEQ ID NO: 1094143 - RNA, 22 nt, Human
gcuuccuagaucugugguacuc

SEQ ID NO: 1094144 - RNA, 23 nt, Human
gaguguucauagcaggcucuugc

SEQ ID NO: 1094145 - RNA, 20 nt, Human
gcugccuuguccugcuuggu

SEQ ID NO: 1094146 - RNA, 22 nt, Human
auuagcuuaggcaugaagagaa

SEQ ID NO: 1094147 - RNA, 23 nt, Human
uuuaacauuugaacauguggcca

SEQ ID NO: 1094148 - RNA, 22 nt, Human
cugagcccuugcuuaugcuucc

SEQ ID NO: 1094149 - RNA, 20 nt, Human
gcuguugccaguacagaugg

SEQ ID NO: 1094150 - RNA, 22 nt, Human
gcugggcagccccuacagagag

SEQ ID NO: 1094151 - RNA, 22 nt, Human
cagguaacuuuagugaaagagc

SEQ ID NO: 1094152 - RNA, 22 nt, Human
aauaucaacaguguccuucuaa

SEQ ID NO: 1094153 - RNA, 23 nt, Human
ugcaauaugucagugcaaagugg

SEQ ID NO: 1094154 - RNA, 22 nt, Human
accaucagagcacaguccgugc

SEQ ID NO: 1094155 - RNA, 22 nt, Human
acuuccagcaccucaagcggaa

SEQ ID NO: 1094156 - RNA, 22 nt, Human
ggagaggugaauggcugcucua

SEQ ID NO: 1094157 - RNA, 22 nt, Human
gagacagcagggccagggccug

SEQ ID NO: 1094158 - RNA, 22 nt, Human
aaagucacaauauuggaaggug

SEQ ID NO: 1094159 - RNA, 22 nt, Human
gccaggaaugcauaaaugaccu

SEQ ID NO: 1094160 - RNA, 22 nt, Human
gagagugucgggggccccagga

SEQ ID NO: 1094161 - RNA, 22 nt, Human
agcugucucugguauuauguga

SEQ ID NO: 1094162 - RNA, 22 nt, Human
cucaggauccaucuccugcccu

SEQ ID NO: 1094163 - RNA, 22 nt, Human
ggcagaggugacagugucuuuu

SEQ ID NO: 1094164 - RNA, 22 nt, Human
ucugauuuauauaugcagauac

SEQ ID NO: 1094165 - RNA, 22 nt, Human
ucuuggaaucuccauagaguga

SEQ ID NO: 1094166 - RNA, 22 nt, Human
guggaggaaaagaaguugggug

SEQ ID NO: 1094167 - RNA, 22 nt, Human
acagaacauauugcuucucuca

SEQ ID NO: 1094168 - RNA, 22 nt, Human
cuucacaaaauauuucauuaua

SEQ ID NO: 1094169 - RNA, 22 nt, Human
ccccucauaggucagacacgca

SEQ ID NO: 1094170 - RNA, 22 nt, Human
ugacagaaagaguauuaaagau

SEQ ID NO: 1094171 - RNA, 22 nt, Human
uuuguaaugauaauguuaaauu

SEQ ID NO: 1094172 - RNA, 22 nt, Human
uugcugugucauuuguuuaauc

SEQ ID NO: 1094173 - RNA, 22 nt, Human
aguggugcccaccugagccuga

SEQ ID NO: 1094174 - RNA, 22 nt, Human
ucaagcaggguagcaagcuggu

SEQ ID NO: 1094175 - RNA, 22 nt, Human
gugcuuccaucuagagggucac

SEQ ID NO: 1094176 - RNA, 22 nt, Human
aggaagggcuguuucuccaaga

SEQ ID NO: 1094177 - RNA, 22 nt, Human
uggcauuugggcuggcuuuucu

SEQ ID NO: 1094178 - RNA, 19 nt, Human
uuuaaagugacugguauuu

SEQ ID NO: 1094179 - RNA, 22 nt, Human
agcacagccucugguuucugac

SEQ ID NO: 1094180 - RNA, 22 nt, Human
aacaugaaguuuucuauaguga

SEQ ID NO: 1094181 - RNA, 23 nt, Human
uggcagagacccagaaucuacau

SEQ ID NO: 1094182 - RNA, 22 nt, Human
uccucaguuauaaauaggaaac

SEQ ID NO: 1094183 - RNA, 22 nt, Human
gauucugagcugguguuuuacg

SEQ ID NO: 1094184 - RNA, 22 nt, Human
agcagcucuuaacaaagcaugg

SEQ ID NO: 1094185 - RNA, 22 nt, Human
ccagagcagauguggccuuggu

SEQ ID NO: 1094186 - RNA, 18 nt, Human
agcagguggauuuauugg

SEQ ID NO: 1094187 - RNA, 22 nt, Human
ggcaugggguguauguggcacg

SEQ ID NO: 1094188 - RNA, 22 nt, Human
ugauuuccuggcuuuggaguuc

SEQ ID NO: 1094189 - RNA, 18 nt, Human
aggcacagagcauacaua

SEQ ID NO: 1094190 - RNA, 22 nt, Human
caucugcuguaauuaacaagcc

SEQ ID NO: 1094191 - RNA, 20 nt, Human
uaaauuagccuugaagauua

SEQ ID NO: 1094192 - RNA, 22 nt, Human
ucucuuaaaggucuucagcuga

SEQ ID NO: 1094193 - RNA, 22 nt, Human
gggagcugaacugcugaaguug

SEQ ID NO: 1094194 - RNA, 22 nt, Human
uguaugaauauguauuuucaua

SEQ ID NO: 1094195 - RNA, 21 nt, Human
cugcucuggggaccggcugug

SEQ ID NO: 1094196 - RNA, 22 nt, Human
ugggccacaagccaugggacca

SEQ ID NO: 1094197 - RNA, 22 nt, Human
ccagccugguucagaauuggcu

SEQ ID NO: 1094198 - RNA, 22 nt, Human
gagcugggaagauagcuugagc

SEQ ID NO: 1094199 - RNA, 22 nt, Human
gagaaaaugucagacuuggucg

SEQ ID NO: 1094200 - RNA, 21 nt, Human
ggacaccagucacacuggauu

SEQ ID NO: 1094201 - RNA, 18 nt, Human
cagaugagaugcaaucuc

SEQ ID NO: 1094202 - RNA, 22 nt, Human
ugccaggagagugcaugcaggg

SEQ ID NO: 1094203 - RNA, 22 nt, Human
caaacauuuuaaauaagggaua

SEQ ID NO: 1094204 - RNA, 22 nt, Human
uggcugugggauaugugacuga

SEQ ID NO: 1094205 - RNA, 22 nt, Human
ugcuauuuuagacauacuuugu

SEQ ID NO: 1094206 - RNA, 22 nt, Human
ucugaacacugagugucaucac

SEQ ID NO: 1094207 - RNA, 22 nt, Human
ugaaaguuaggauguaguaauu

SEQ ID NO: 1094208 - RNA, 22 nt, Human
ugcaggugcuacaagaacucac

SEQ ID NO: 1094209 - RNA, 22 nt, Human
gagcuuccacucuagaaggagu

SEQ ID NO: 1094210 - RNA, 22 nt, Human
cagguggagcugacugagggca

SEQ ID NO: 1094211 - RNA, 22 nt, Human
agaugcagaaaaacuaagugau

SEQ ID NO: 1094212 - RNA, 22 nt, Human
caguucuggaggcuccacaucu

SEQ ID NO: 1094213 - RNA, 19 nt, Human
ugggaaaguaacauacaaa

SEQ ID NO: 1094214 - RNA, 22 nt, Human
uugaaauagaugcgucagagau

SEQ ID NO: 1094215 - RNA, 22 nt, Human
auacagaagaacuauagccacu

SEQ ID NO: 1094216 - RNA, 22 nt, Human
uccaaguccauuaugguggucu

SEQ ID NO: 1094217 - RNA, 22 nt, Human
gcuugggauaugcugauguaaa

SEQ ID NO: 1094218 - RNA, 22 nt, Human
cugugacuguguuggaugcaca

SEQ ID NO: 1094219 - RNA, 22 nt, Human
uaaagauugcucaaaacuguga

SEQ ID NO: 1094220 - RNA, 22 nt, Human
gacaaagugcuaaaccacagag

SEQ ID NO: 1094221 - RNA, 22 nt, Human
ugucugucugcaagccagaaag

SEQ ID NO: 1094222 - RNA, 22 nt, Human
ggcagagaugugggucagaauc

SEQ ID NO: 1094223 - RNA, 20 nt, Human
cuccagggaacagacuggag

SEQ ID NO: 1094224 - RNA, 22 nt, Human
ccagaagucaggaaugagucuu

SEQ ID NO: 1094225 - RNA, 22 nt, Human
gacucuuucaaacagaaagcca

SEQ ID NO: 1094226 - RNA, 19 nt, Human
aauaagcuuggguaaaacu

SEQ ID NO: 1094227 - RNA, 19 nt, Human
gcuuccagcacugcaggag

SEQ ID NO: 1094228 - RNA, 22 nt, Human
uuuggcaagcgaguacuuucug

SEQ ID NO: 1094229 - RNA, 22 nt, Human
ucacuguugaccuggaaguggg

SEQ ID NO: 1094230 - RNA, 22 nt, Human
uggcacugccuggcagggcccc

SEQ ID NO: 1094231 - RNA, 22 nt, Human
guaaaucagugucauuuuagaa

SEQ ID NO: 1094232 - RNA, 22 nt, Human
gcugggcccagaucccaggauc

SEQ ID NO: 1094233 - RNA, 22 nt, Human
uagaaucuaguucauucauuug

SEQ ID NO: 1094234 - RNA, 22 nt, Human
ggcggggguccaggagccugca

SEQ ID NO: 1094235 - RNA, 21 nt, Human
uauugcauaacaaauuacccu

SEQ ID NO: 1094236 - RNA, 22 nt, Human
gcaggaguggagaccaugggga

SEQ ID NO: 1094237 - RNA, 22 nt, Human
ggacagaggguugacagaguau

SEQ ID NO: 1094238 - RNA, 22 nt, Human
uucaacaugcaaacuuugggag

SEQ ID NO: 1094239 - RNA, 22 nt, Human
gggcacagaagucuaagacauc

SEQ ID NO: 1094240 - RNA, 22 nt, Human
agcugcugaaugacacugcaag

SEQ ID NO: 1094241 - RNA, 22 nt, Human
aucaaagagcuugacaauccua

SEQ ID NO: 1094242 - RNA, 22 nt, Human
ugcuucugacuaagcugcauga

SEQ ID NO: 1094243 - RNA, 22 nt, Human
uugcacuccagcccgagcaaca

SEQ ID NO: 1094244 - RNA, 22 nt, Human
cacaauguauauguauaucaaa

SEQ ID NO: 1094245 - RNA, 22 nt, Human
aaaaugaacagaacaaugggga

SEQ ID NO: 1094246 - RNA, 22 nt, Human
uuagugucuucuucauccucug

SEQ ID NO: 1094247 - RNA, 22 nt, Human
aggcugagccugggcguggugg

SEQ ID NO: 1094248 - RNA, 22 nt, Human
ucucuuaggagaaauucauaaa

SEQ ID NO: 1094249 - RNA, 22 nt, Human
gucaacauaggccucagugagg

SEQ ID NO: 1094250 - RNA, 22 nt, Human
uuuguuuacucauucauugaug

SEQ ID NO: 1094251 - RNA, 20 nt, Human
cagucccaauccagggccag

SEQ ID NO: 1094252 - RNA, 22 nt, Human
cuggaaagagauggcaggguuu

SEQ ID NO: 1094253 - RNA, 22 nt, Human
uagaggcauuaaugaauaaaca

SEQ ID NO: 1094254 - RNA, 22 nt, Human
uggcauguauuaguuggcaguu

SEQ ID NO: 1094255 - RNA, 22 nt, Human
gaaggccauugcguccugggau

SEQ ID NO: 1094256 - RNA, 22 nt, Human
gaggcaggguguugauuacaga

SEQ ID NO: 1094257 - RNA, 22 nt, Human
ucaaauauuggcuauuucacau

SEQ ID NO: 1094258 - RNA, 22 nt, Human
gcugcuggaugcgcuugauggu

SEQ ID NO: 1094259 - RNA, 22 nt, Human
gccuguuggugacuuucuguug

SEQ ID NO: 1094260 - RNA, 22 nt, Human
agccagugggauuagagccucu

SEQ ID NO: 1094261 - RNA, 22 nt, Human
uguaaagguaggugcaaaauga

SEQ ID NO: 1094262 - RNA, 22 nt, Human
gcugagguggagauugcaguga

SEQ ID NO: 1094263 - RNA, 22 nt, Human
cucagcuacgcuuucaccagcu

SEQ ID NO: 1094264 - RNA, 22 nt, Human
augaaggcaguuaaacgucauc

SEQ ID NO: 1094265 - RNA, 21 nt, Human
cagaggggcuagccuggcugc

SEQ ID NO: 1094266 - RNA, 22 nt, Human
cugaaggauuuaguucuuugcu

SEQ ID NO: 1094267 - RNA, 22 nt, Human
gcuggugccuuguuguuguuac

SEQ ID NO: 1094268 - RNA, 19 nt, Human
caguuuaacuaauuuuauc

SEQ ID NO: 1094269 - RNA, 22 nt, Human
cuguguccuccccaucacuucu

SEQ ID NO: 1094270 - RNA, 22 nt, Human
caguuuuauacacugcagcucc

SEQ ID NO: 1094271 - RNA, 22 nt, Human
cugcucuguuaauuaaacuuug

SEQ ID NO: 1094272 - RNA, 20 nt, Human
gcucugggagggaugugaug

SEQ ID NO: 1094273 - RNA, 22 nt, Human
aacuuuauuguuaggggcuaaa

SEQ ID NO: 1094274 - RNA, 22 nt, Human
uuuuauuggagugauaccaagc

SEQ ID NO: 1094275 - RNA, 22 nt, Human
cugggcugcaggaguggggcaa

SEQ ID NO: 1094276 - RNA, 19 nt, Human
gaagaagcuugagaaguag

SEQ ID NO: 1094277 - RNA, 22 nt, Human
auucuagaguuucaauccaagg

SEQ ID NO: 1094278 - RNA, 22 nt, Human
uugaagcaaggcgaaucuugug

SEQ ID NO: 1094279 - RNA, 22 nt, Human
ccuguggacauucuguguggaa

SEQ ID NO: 1094280 - RNA, 22 nt, Human
uaacaguagccuuauguggucu

SEQ ID NO: 1094281 - RNA, 22 nt, Human
aggaggugcuguuuguccugga

SEQ ID NO: 1094282 - RNA, 22 nt, Human
gggcugagcuguucugaguuua

SEQ ID NO: 1094283 - RNA, 22 nt, Human
ccuuucucuuugcugaucaugu

SEQ ID NO: 1094284 - RNA, 22 nt, Human
gccugagacagugugguccaau

SEQ ID NO: 1094285 - RNA, 22 nt, Human
ggcaggugaucuagagucaaua

SEQ ID NO: 1094286 - RNA, 22 nt, Human
uucaguuucguuaucuaugaga

SEQ ID NO: 1094287 - RNA, 17 nt, Human
uuccccugaccaagccu

SEQ ID NO: 1094288 - RNA, 18 nt, Human
gagaagugcauacauuau

SEQ ID NO: 1094289 - RNA, 22 nt, Human
ccuucauugcaucuuuaagaga

SEQ ID NO: 1094290 - RNA, 22 nt, Human
guuguuuuuguucucuauagcu

SEQ ID NO: 1094291 - RNA, 22 nt, Human
cacagcuagauggauagauaga

SEQ ID NO: 1094292 - RNA, 22 nt, Human
ugagucagucugcccuggcuuc

SEQ ID NO: 1094293 - RNA, 22 nt, Human
gcuugcucaacccccgucucuc

SEQ ID NO: 1094294 - RNA, 22 nt, Human
gaggccugguagccgagcccca

SEQ ID NO: 1094295 - RNA, 22 nt, Human
cagcugcccaagccccagaugu

SEQ ID NO: 1094296 - RNA, 22 nt, Human
uacaguuuguuacauuguuagu

SEQ ID NO: 1094297 - RNA, 22 nt, Human
agagaauacaggguaacaggaa

SEQ ID NO: 1094298 - RNA, 22 nt, Human
aaacuugagcagucagaugaag

SEQ ID NO: 1094299 - RNA, 23 nt, Human
cuucaugagagcccugaggaaaa

SEQ ID NO: 1094300 - RNA, 22 nt, Human
cagugcagucaaggaagaacca

SEQ ID NO: 1094301 - RNA, 22 nt, Human
aaggucauuguugcauguucuc

SEQ ID NO: 1094302 - RNA, 20 nt, Human
aggccacugaaugccaauca

SEQ ID NO: 1094303 - RNA, 22 nt, Human
aggauccugcgcuuugggggag

SEQ ID NO: 1094304 - RNA, 22 nt, Human
ugaacuuucacaagaauaugcu

SEQ ID NO: 1094305 - RNA, 22 nt, Human
guucaagguuuuacagagugua

SEQ ID NO: 1094306 - RNA, 22 nt, Human
uuuaugaaccacucuacaccuu

SEQ ID NO: 1094307 - RNA, 22 nt, Human
ggcagaguugguggagucaguu

SEQ ID NO: 1094308 - RNA, 22 nt, Human
aacuuccaacccagaagccuaa

SEQ ID NO: 1094309 - RNA, 22 nt, Human
gaaauuuacaacuuucucaugg

SEQ ID NO: 1094310 - RNA, 18 nt, Human
uaagucauuugaaaugcc

SEQ ID NO: 1094311 - RNA, 22 nt, Human
cagaggcccagugagagggcug

SEQ ID NO: 1094312 - RNA, 22 nt, Human
uaaaggcuucugcagggacuga

SEQ ID NO: 1094313 - RNA, 22 nt, Human
agcugcccuucucuugcccuug

SEQ ID NO: 1094314 - RNA, 22 nt, Human
caguuaaaggcccaauaucugg

SEQ ID NO: 1094315 - RNA, 22 nt, Human
auucuucacauggauaggaucu

SEQ ID NO: 1094316 - RNA, 22 nt, Human
ccugucauacuaacguaguggg

SEQ ID NO: 1094317 - RNA, 22 nt, Human
gcaaggcuuugugaauuuuaaa

SEQ ID NO: 1094318 - RNA, 22 nt, Human
uuugcaaagugacuauuauaug

SEQ ID NO: 1094319 - RNA, 22 nt, Human
ugugaaggagcaugcagagggg

SEQ ID NO: 1094320 - RNA, 22 nt, Human
ucagcagauggguuguguuggc

SEQ ID NO: 1094321 - RNA, 22 nt, Human
ucaaaucucauugccuaaaacu

SEQ ID NO: 1094322 - RNA, 22 nt, Human
ugugcaguuucuauguugucca

SEQ ID NO: 1094323 - RNA, 22 nt, Human
aucaacauacugcucaggcauu

SEQ ID NO: 1094324 - RNA, 22 nt, Human
agcagagucuucaagggcaggc

SEQ ID NO: 1094325 - RNA, 22 nt, Human
gagcccuggcagucugggaugg

SEQ ID NO: 1094326 - RNA, 22 nt, Human
uuguggaaauacagacuccaag

SEQ ID NO: 1094327 - RNA, 20 nt, Human
gcagggcaagggauaugaaa

SEQ ID NO: 1094328 - RNA, 22 nt, Human
agggcuggcaucucuaaugcug

SEQ ID NO: 1094329 - RNA, 18 nt, Human
gagcagaggaggguuuuu

SEQ ID NO: 1094330 - RNA, 22 nt, Human
agauggguaauugauggcagua

SEQ ID NO: 1094331 - RNA, 22 nt, Human
uuucauaauauccagagauuuu

SEQ ID NO: 1094332 - RNA, 22 nt, Human
aagaauaagaggauuuagaaca

SEQ ID NO: 1094333 - RNA, 22 nt, Human
uauucuuacucucgacugcauu

SEQ ID NO: 1094334 - RNA, 22 nt, Human
ccagcaugagacgaugaugaag

SEQ ID NO: 1094335 - RNA, 22 nt, Human
auccucagaccucagcaaagcc

SEQ ID NO: 1094336 - RNA, 22 nt, Human
agagcuggguggacuuguaguu

SEQ ID NO: 1094337 - RNA, 22 nt, Human
aauaugacauagaauugagaug

SEQ ID NO: 1094338 - RNA, 22 nt, Human
ugcuguguggaugugaagaauc

SEQ ID NO: 1094339 - RNA, 22 nt, Human
uacuuugaagacaauaucugga

SEQ ID NO: 1094340 - RNA, 22 nt, Human
uuguauuaauugaaaugaaugc

SEQ ID NO: 1094341 - RNA, 22 nt, Human
agaagccauugaagcagaccuc

SEQ ID NO: 1094342 - RNA, 21 nt, Human
uauacaugugugcauacgugu

SEQ ID NO: 1094343 - RNA, 22 nt, Human
uuuacacuuauuaugaagcuuu

SEQ ID NO: 1094344 - RNA, 22 nt, Human
ccagcccuugaggucuguccau

SEQ ID NO: 1094345 - RNA, 22 nt, Human
aaaagcagguacucagcuuggg

SEQ ID NO: 1094346 - RNA, 22 nt, Human
ugggugggagcacccugucugg

SEQ ID NO: 1094347 - RNA, 22 nt, Human
uuucaguguaucuuccaaaagc

SEQ ID NO: 1094348 - RNA, 22 nt, Human
aaauuauuaugccccucuauaa

SEQ ID NO: 1094349 - RNA, 22 nt, Human
uggugcccacucuggacccagc

SEQ ID NO: 1094350 - RNA, 22 nt, Human
ugccaggcccagcuccagagcu

SEQ ID NO: 1094351 - RNA, 22 nt, Human
cugaagccacgauagcuuccua

SEQ ID NO: 1094352 - RNA, 22 nt, Human
gcugucacauuuggagcacugg

SEQ ID NO: 1094353 - RNA, 22 nt, Human
aaaagcaauugcaguucuugcc

SEQ ID NO: 1094354 - RNA, 22 nt, Human
gcacugaaaauguuggauucca

SEQ ID NO: 1094355 - RNA, 22 nt, Human
auaauucuccaauuuuuguugu

SEQ ID NO: 1094356 - RNA, 22 nt, Human
ggagggagucagcugauuagaa

SEQ ID NO: 1094357 - RNA, 22 nt, Human
uuuaaggaugaugugauauaua

SEQ ID NO: 1094358 - RNA, 22 nt, Human
ggggcucucaggucuccccaaa

SEQ ID NO: 1094359 - RNA, 22 nt, Human
auaaacuauguaauuugcucua

SEQ ID NO: 1094360 - RNA, 20 nt, Human
gcacagcugaguucaggguc

SEQ ID NO: 1094361 - RNA, 22 nt, Human
uguccuuuuggcugucuauggu

SEQ ID NO: 1094362 - RNA, 22 nt, Human
guucauuuaggaaaggaagagu

SEQ ID NO: 1094363 - RNA, 22 nt, Human
augaagcugguuuuggcuuggg

SEQ ID NO: 1094364 - RNA, 22 nt, Human
ucaguguuggucaagaaucagu

SEQ ID NO: 1094365 - RNA, 22 nt, Human
ccagggccugccacuuagcaag

SEQ ID NO: 1094366 - RNA, 22 nt, Human
guuugcuaauuuaaagcuauuu

SEQ ID NO: 1094367 - RNA, 22 nt, Human
caugugggaagaggccagcugg

SEQ ID NO: 1094368 - RNA, 22 nt, Human
caggggcuguuugccucaggcc

SEQ ID NO: 1094369 - RNA, 22 nt, Human
aacugcuguggccuaguacuua

SEQ ID NO: 1094370 - RNA, 22 nt, Human
gcuggcagaauuucuucuugcu

SEQ ID NO: 1094371 - RNA, 22 nt, Human
ucaggcuggagugcaguggcgc

SEQ ID NO: 1094372 - RNA, 22 nt, Human
uggaacacaucuaaggaagcag

SEQ ID NO: 1094373 - RNA, 22 nt, Human
agcuugucuuucaaaggaguuu

SEQ ID NO: 1094374 - RNA, 22 nt, Human
agauacaucuugaacuucuaga

SEQ ID NO: 1094375 - RNA, 19 nt, Human
uuacuuggcaaagucaguc

SEQ ID NO: 1094376 - RNA, 22 nt, Human
aguggcagacacaaugugggca

SEQ ID NO: 1094377 - RNA, 22 nt, Human
caguuuuugccauuaagaguaa

SEQ ID NO: 1094378 - RNA, 18 nt, Human
cugaaggauccaggugua

SEQ ID NO: 1094379 - RNA, 18 nt, Human
ugacucacccugucagug

SEQ ID NO: 1094380 - RNA, 22 nt, Human
gaaaucaaacccuuuucugaua

SEQ ID NO: 1094381 - RNA, 22 nt, Human
aggcagugagaaauagcaagau

SEQ ID NO: 1094382 - RNA, 22 nt, Human
gggcugagaauucagcuuuccu

SEQ ID NO: 1094383 - RNA, 22 nt, Human
ccucuggggugagugggccacu

SEQ ID NO: 1094384 - RNA, 22 nt, Human
acuaaggaauaugacaaacuca

SEQ ID NO: 1094385 - RNA, 22 nt, Human
ugucaauaacuggagucauuau

SEQ ID NO: 1094386 - RNA, 22 nt, Human
ugacuccaaacagaaaacgaau

SEQ ID NO: 1094387 - RNA, 22 nt, Human
uccaugggaagauuuugagugg

SEQ ID NO: 1094388 - RNA, 22 nt, Human
ccagagaccagaacauggggau

SEQ ID NO: 1094389 - RNA, 22 nt, Human
gugaagguagacugggcuuccu

SEQ ID NO: 1094390 - RNA, 22 nt, Human
ugcuucugcucagcuuccuacu

SEQ ID NO: 1094391 - RNA, 22 nt, Human
ccacagggacuguuaaaacccu

SEQ ID NO: 1094392 - RNA, 22 nt, Human
cacugcuuaguugguaaaugug

SEQ ID NO: 1094393 - RNA, 22 nt, Human
cuucaguguugccagggccuag

SEQ ID NO: 1094394 - RNA, 22 nt, Human
uuguuuuuaugaacauccagga

SEQ ID NO: 1094395 - RNA, 22 nt, Human
auggcuaauacgccacuggaca

SEQ ID NO: 1094396 - RNA, 22 nt, Human
ugaugaauaaacuugagaguca

SEQ ID NO: 1094397 - RNA, 22 nt, Human
uuuauauaacagagacugcuau

SEQ ID NO: 1094398 - RNA, 22 nt, Human
ucaaaauuucagcacuagcccu

SEQ ID NO: 1094399 - RNA, 21 nt, Human
gcugcugccccuagugaggcc

SEQ ID NO: 1094400 - RNA, 22 nt, Human
cacagaacauccuuagcucaug

SEQ ID NO: 1094401 - RNA, 22 nt, Human
ccaggcaccaaaguaugcuuua

SEQ ID NO: 1094402 - RNA, 21 nt, Human
uccaggaaaguuuuaagagug

SEQ ID NO: 1094403 - RNA, 22 nt, Human
ccagucuggcaggagggggaac

SEQ ID NO: 1094404 - RNA, 23 nt, Human
cuggccuccgacacuggccaaga

SEQ ID NO: 1094405 - RNA, 22 nt, Human
agacaucagcuugugugcaggg

SEQ ID NO: 1094406 - RNA, 17 nt, Human
cugcuuugugcaacgcu

SEQ ID NO: 1094407 - RNA, 22 nt, Human
cucucaggcuugggucguggca

SEQ ID NO: 1094408 - RNA, 22 nt, Human
gcucugccucuuugcugcguca

SEQ ID NO: 1094409 - RNA, 22 nt, Human
cagagggagcccuccaggagca

SEQ ID NO: 1094410 - RNA, 22 nt, Human
uugggguguuggauggagcaag

SEQ ID NO: 1094411 - RNA, 22 nt, Human
augacacaauuuuagagcugaa

SEQ ID NO: 1094412 - RNA, 19 nt, Human
ccaguagagacagcugcag

SEQ ID NO: 1094413 - RNA, 22 nt, Human
uucugggggaauacagcuauga

SEQ ID NO: 1094414 - RNA, 23 nt, Human
ccuggcuggauucucugcauuca

SEQ ID NO: 1094415 - RNA, 22 nt, Human
auaaacaguagagaaagguggu

SEQ ID NO: 1094416 - RNA, 22 nt, Human
ucaggcugcuggccagcaggcu

SEQ ID NO: 1094417 - RNA, 22 nt, Human
gucauuuuaugggaacagauuu

SEQ ID NO: 1094418 - RNA, 18 nt, Human
cugaggcuggcaggagcc

SEQ ID NO: 1094419 - RNA, 22 nt, Human
uugccuauguaacuuuauauuu

SEQ ID NO: 1094420 - RNA, 22 nt, Human
accaaagggcagaacaugagca

SEQ ID NO: 1094421 - RNA, 22 nt, Human
ugggauaguggccaggaccccc

SEQ ID NO: 1094422 - RNA, 22 nt, Human
gaggaacccagcugggguugcc

SEQ ID NO: 1094423 - RNA, 21 nt, Human
augaagucuaugcuucugugu

SEQ ID NO: 1094424 - RNA, 22 nt, Human
aacuucagggggcacauucaag

SEQ ID NO: 1094425 - RNA, 22 nt, Human
uggcucucagcucccagcagcc

SEQ ID NO: 1094426 - RNA, 22 nt, Human
ggaaaucagggguguugcuuuc

SEQ ID NO: 1094427 - RNA, 22 nt, Human
guacauuucucuuguucuuauu

SEQ ID NO: 1094428 - RNA, 22 nt, Human
uacaggaagcacucaagaaaug

SEQ ID NO: 1094429 - RNA, 22 nt, Human
ucacacagugagaaagugcgga

SEQ ID NO: 1094430 - RNA, 22 nt, Human
ugaaacaaugugaaguugcuga

SEQ ID NO: 1094431 - RNA, 22 nt, Human
agcuguucccucacugcaguca

SEQ ID NO: 1094432 - RNA, 22 nt, Human
cuggaggcacccuuagagaggc

SEQ ID NO: 1094433 - RNA, 22 nt, Human
cuauuucuaaaccuauaaguga

SEQ ID NO: 1094434 - RNA, 22 nt, Human
ucuucagagugaaagucuguga

SEQ ID NO: 1094435 - RNA, 22 nt, Human
uuuaagauucaguaaggcaaac

SEQ ID NO: 1094436 - RNA, 22 nt, Human
agagcugugcuuugcaccacgu

SEQ ID NO: 1094437 - RNA, 22 nt, Human
gaagagcugacagugucauccu

SEQ ID NO: 1094438 - RNA, 22 nt, Human
cuaguuuuaagcuccuugaggu

SEQ ID NO: 1094439 - RNA, 21 nt, Human
aaauccaaacacuaguccaca

SEQ ID NO: 1094440 - RNA, 22 nt, Human
uuucaaagaguuguaaauuacu

SEQ ID NO: 1094441 - RNA, 22 nt, Human
acccugccugacaacagaggau

SEQ ID NO: 1094442 - RNA, 22 nt, Human
ucaggcugaaggaggccuaucu

SEQ ID NO: 1094443 - RNA, 22 nt, Human
cugaggcauguuacaggacaua

SEQ ID NO: 1094444 - RNA, 22 nt, Human
acuuuucaaaugggaaacucag

SEQ ID NO: 1094445 - RNA, 21 nt, Human
gggagcuggaaacugggugac

SEQ ID NO: 1094446 - RNA, 22 nt, Human
ggcuguccaccuaccaugccgg

SEQ ID NO: 1094447 - RNA, 22 nt, Human
uaauuuauuucaacugccaagg

SEQ ID NO: 1094448 - RNA, 22 nt, Human
ugcucuguaacaaauugacaug

SEQ ID NO: 1094449 - RNA, 22 nt, Human
ggcagagcucuggacugagaac

SEQ ID NO: 1094450 - RNA, 22 nt, Human
ucugcugugggucuauauuuua

SEQ ID NO: 1094451 - RNA, 22 nt, Human
ucuuggagaauggcagagaagc

SEQ ID NO: 1094452 - RNA, 22 nt, Human
gaggaagaagggauuagaacuc

SEQ ID NO: 1094453 - RNA, 22 nt, Human
aagaaaagauguuugguuuuca

SEQ ID NO: 1094454 - RNA, 22 nt, Human
uccucuucagagggaccucggg

SEQ ID NO: 1094455 - RNA, 22 nt, Human
ucuuuccuagaggcugaugagu

SEQ ID NO: 1094456 - RNA, 22 nt, Human
cuuaauuucaaacugcuaguga

SEQ ID NO: 1094457 - RNA, 22 nt, Human
uguuuacagggugauuuuaccu

SEQ ID NO: 1094458 - RNA, 22 nt, Human
aacuauaaugggguuaggaaau

SEQ ID NO: 1094459 - RNA, 22 nt, Human
uccccucugguugacccaggag

SEQ ID NO: 1094460 - RNA, 22 nt, Human
gggccacauugaagggugggua

SEQ ID NO: 1094461 - RNA, 22 nt, Human
cuuuuacauuuguugaagagua

SEQ ID NO: 1094462 - RNA, 22 nt, Human
uccuuuccagccucaccucagc

SEQ ID NO: 1094463 - RNA, 21 nt, Human
ucuuuuaacaccaggaauucc

SEQ ID NO: 1094464 - RNA, 22 nt, Human
ucauuucucccggccaaaaacu

SEQ ID NO: 1094465 - RNA, 22 nt, Human
cuucuuuugaagggcguugugu

SEQ ID NO: 1094466 - RNA, 22 nt, Human
ugcugccaggucuugcugucca

SEQ ID NO: 1094467 - RNA, 22 nt, Human
agggcagaggcggacacggaag

SEQ ID NO: 1094468 - RNA, 22 nt, Human
acuucaguaggugauaugugca

SEQ ID NO: 1094469 - RNA, 22 nt, Human
ucuugaagucacacagaaagug

SEQ ID NO: 1094470 - RNA, 22 nt, Human
aaaucaguuggaacacaagcag

SEQ ID NO: 1094471 - RNA, 18 nt, Human
agauuuugagaaauacaa

SEQ ID NO: 1094472 - RNA, 22 nt, Human
ugcugggcuaggguggagcucu

SEQ ID NO: 1094473 - RNA, 22 nt, Human
acugggaggcaucuggagcuga

SEQ ID NO: 1094474 - RNA, 22 nt, Human
uguuuuugucuccuugucugcu

SEQ ID NO: 1094475 - RNA, 22 nt, Human
auauuuuggcaaaugucuagau

SEQ ID NO: 1094476 - RNA, 22 nt, Human
uagaugcauagagcacagcaca

SEQ ID NO: 1094477 - RNA, 22 nt, Human
uaaagcaggcaucucucuccuc

SEQ ID NO: 1094478 - RNA, 22 nt, Human
uugcugcuuucauuuauacagu

SEQ ID NO: 1094479 - RNA, 22 nt, Human
uuccugcccugccugugccacu

SEQ ID NO: 1094480 - RNA, 22 nt, Human
aaaaguacuauuuuaacaaagu

SEQ ID NO: 1094481 - RNA, 22 nt, Human
uauucaaaguaccuucauugcc

SEQ ID NO: 1094482 - RNA, 22 nt, Human
aaagcagauucugaugcaguag

SEQ ID NO: 1094483 - RNA, 22 nt, Human
augcuggggccucagaccagaa

SEQ ID NO: 1094484 - RNA, 22 nt, Human
auuuccaagaaagcuuuaggau

SEQ ID NO: 1094485 - RNA, 22 nt, Human
ccugggccucacccagcucuug

SEQ ID NO: 1094486 - RNA, 20 nt, Human
gggugagauguaggagaggg

SEQ ID NO: 1094487 - RNA, 22 nt, Human
ugauuuccugugcgcccuuagg

SEQ ID NO: 1094488 - RNA, 22 nt, Human
ccucauggccuugagcugaggg

SEQ ID NO: 1094489 - RNA, 22 nt, Human
agcaggcuaaucuugcugaaca

SEQ ID NO: 1094490 - RNA, 22 nt, Human
cccagcccaucucaaaggucua

SEQ ID NO: 1094491 - RNA, 18 nt, Human
gaugaagcugcuggggau

SEQ ID NO: 1094492 - RNA, 22 nt, Human
ucugggcagcagcagcuaguag

SEQ ID NO: 1094493 - RNA, 19 nt, Human
cuguggcugaccucuggcc

SEQ ID NO: 1094494 - RNA, 22 nt, Human
uuucuuaggcucuaaaaugacu

SEQ ID NO: 1094495 - RNA, 22 nt, Human
agugguucuugaucuguagagu

SEQ ID NO: 1094496 - RNA, 22 nt, Human
aggacagaccuaggacuggagc

SEQ ID NO: 1094497 - RNA, 22 nt, Human
ccuucugcuggucaucccagug

SEQ ID NO: 1094498 - RNA, 22 nt, Human
acagagcuuaauucaggagcuu

SEQ ID NO: 1094499 - RNA, 22 nt, Human
agggaggauaguagucaguuua

SEQ ID NO: 1094500 - RNA, 20 nt, Human
cuccaaauuccugaggauaa

SEQ ID NO: 1094501 - RNA, 22 nt, Human
ugaguaggaaaggaaauguuuu

SEQ ID NO: 1094502 - RNA, 22 nt, Human
gaaggccauuuuuagguagaau

SEQ ID NO: 1094503 - RNA, 22 nt, Human
agggccaccagagcagggcagu

SEQ ID NO: 1094504 - RNA, 22 nt, Human
uagaucugauacaauucaucug

SEQ ID NO: 1094505 - RNA, 22 nt, Human
ugccuuuuagugcucaauaaag

SEQ ID NO: 1094506 - RNA, 22 nt, Human
aagaggaacugggggcugaguc

SEQ ID NO: 1094507 - RNA, 22 nt, Human
agaacacauagagaaguuuuau

SEQ ID NO: 1094508 - RNA, 22 nt, Human
aaaggagaaaacauacaggacu

SEQ ID NO: 1094509 - RNA, 22 nt, Human
aggcugcuuccuuacguggcug

SEQ ID NO: 1094510 - RNA, 22 nt, Human
cucugugcgggccauggucagg

SEQ ID NO: 1094511 - RNA, 22 nt, Human
aaacacuggcaauuucaugcac

SEQ ID NO: 1094512 - RNA, 22 nt, Human
gccuggagcucuccacuugggg

SEQ ID NO: 1094513 - RNA, 22 nt, Human
gacacagaguauuuuaaguacu

SEQ ID NO: 1094514 - RNA, 22 nt, Human
gcugucuggaggcucugaggga

SEQ ID NO: 1094515 - RNA, 22 nt, Human
gggugggaacaggaugccagga

SEQ ID NO: 1094516 - RNA, 22 nt, Human
augcuguguuugagaaccuagg

SEQ ID NO: 1094517 - RNA, 22 nt, Human
cuguuucacguguuuaagccca

SEQ ID NO: 1094518 - RNA, 22 nt, Human
gagugcaucguggccauuuuaa

SEQ ID NO: 1094519 - RNA, 22 nt, Human
uaccaaaaccaagccauuaucu

SEQ ID NO: 1094520 - RNA, 22 nt, Human
uccagcuuugagauuuuaugga

SEQ ID NO: 1094521 - RNA, 22 nt, Human
uuucugcugugcuuucuugcgu

SEQ ID NO: 1094522 - RNA, 23 nt, Human
cauaugaaaguagacacuuucca

SEQ ID NO: 1094523 - RNA, 22 nt, Human
caugaagauccuguauguuuuu

SEQ ID NO: 1094524 - RNA, 22 nt, Human
guuugcauaaaguggaugcagg

SEQ ID NO: 1094525 - RNA, 22 nt, Human
uuggcugaagguuaagugcugg

SEQ ID NO: 1094526 - RNA, 22 nt, Human
ggaggccagggacccagucagc

SEQ ID NO: 1094527 - RNA, 22 nt, Human
uuccaggaauucagcucucagu

SEQ ID NO: 1094528 - RNA, 23 nt, Human
uggggcugauggagacggaccag

SEQ ID NO: 1094529 - RNA, 19 nt, Human
ggagaagcccaggaauccu

SEQ ID NO: 1094530 - RNA, 22 nt, Human
gcaagcaguuguggcuucugag

SEQ ID NO: 1094531 - RNA, 22 nt, Human
cuggcucucugagauauugagu

SEQ ID NO: 1094532 - RNA, 22 nt, Human
ugggaguagaugaggagugggc

SEQ ID NO: 1094533 - RNA, 18 nt, Human
ucaggcucucuggcuaga

SEQ ID NO: 1094534 - RNA, 22 nt, Human
gaucaaagccagugaggaguga

SEQ ID NO: 1094535 - RNA, 22 nt, Human
ggaggcaggaaagacagguuca

SEQ ID NO: 1094536 - RNA, 22 nt, Human
aggaggggcaaugauagucugg

SEQ ID NO: 1094537 - RNA, 22 nt, Human
cacaggcagccuuguagaagaa

SEQ ID NO: 1094538 - RNA, 22 nt, Human
uaaagcaauuugagcaaguucu

SEQ ID NO: 1094539 - RNA, 22 nt, Human
uugcuugcuucuauuuuauaca

SEQ ID NO: 1094540 - RNA, 22 nt, Human
gcaggaugagugaguacauuua

SEQ ID NO: 1094541 - RNA, 21 nt, Human
ugguaucaaacuauacaauau

SEQ ID NO: 1094542 - RNA, 22 nt, Human
agccaggcagggcucucgcucu

SEQ ID NO: 1094543 - RNA, 19 nt, Human
ggacacagaaagcugcauu

SEQ ID NO: 1094544 - RNA, 22 nt, Human
aaaaccuucuagacuuuauauu

SEQ ID NO: 1094545 - RNA, 17 nt, Human
cagggcugucugccuag

SEQ ID NO: 1094546 - RNA, 22 nt, Human
gccuggagggucccucucugga

SEQ ID NO: 1094547 - RNA, 22 nt, Human
caauuauauuuagaaugauaca

SEQ ID NO: 1094548 - RNA, 22 nt, Human
ugcaggugcguuuucaagccuc

SEQ ID NO: 1094549 - RNA, 22 nt, Human
uuaauuuuuauguauagugugu

SEQ ID NO: 1094550 - RNA, 22 nt, Human
ucuucccauuaguaaugaagug

SEQ ID NO: 1094551 - RNA, 22 nt, Human
cugggagaggaaccucgagggu

SEQ ID NO: 1094552 - RNA, 19 nt, Human
ccucacccugcagaggagg

SEQ ID NO: 1094553 - RNA, 22 nt, Human
gaggaaaauggaguguaauuaa

SEQ ID NO: 1094554 - RNA, 22 nt, Human
ccucccacauugaggacaugcu

SEQ ID NO: 1094555 - RNA, 22 nt, Human
uaauaggagccaggucacauag

SEQ ID NO: 1094556 - RNA, 22 nt, Human
uuacaaaguucugaguucaaac

SEQ ID NO: 1094557 - RNA, 22 nt, Human
uugauuugauuguaauggcucu

SEQ ID NO: 1094558 - RNA, 22 nt, Human
gccuugcugauuaccuuccuuu

SEQ ID NO: 1094559 - RNA, 22 nt, Human
gacagcugcucccguuucugcu

SEQ ID NO: 1094560 - RNA, 22 nt, Human
gaaaggccauuucugaggguuu

SEQ ID NO: 1094561 - RNA, 22 nt, Human
uccuuuuuauaguuagagaaac

SEQ ID NO: 1094562 - RNA, 22 nt, Human
cagggcagaacauauagauagu

SEQ ID NO: 1094563 - RNA, 22 nt, Human
ugggacuugccucgagggcugc

SEQ ID NO: 1094564 - RNA, 22 nt, Human
ggacacaagcuccggggcugca

SEQ ID NO: 1094565 - RNA, 22 nt, Human
cacagggcuaaaugaaggguug

SEQ ID NO: 1094566 - RNA, 22 nt, Human
aagcuggagaguuaggugaaua

SEQ ID NO: 1094567 - RNA, 22 nt, Human
ccaggcugagcaugauuggagc

SEQ ID NO: 1094568 - RNA, 22 nt, Human
ugcuggccaauggcagaggcgg

SEQ ID NO: 1094569 - RNA, 22 nt, Human
acuuuguagguuucagugaaac

SEQ ID NO: 1094570 - RNA, 22 nt, Human
gccagcaguauguccuggcagu

SEQ ID NO: 1094571 - RNA, 22 nt, Human
aggaugaauaacugaaauggug

SEQ ID NO: 1094572 - RNA, 22 nt, Human
uaaguuagagcacaauucuuac

SEQ ID NO: 1094573 - RNA, 22 nt, Human
ugugccagaaaauaugcugagg

SEQ ID NO: 1094574 - RNA, 22 nt, Human
uaugaagacaaugauagcauga

SEQ ID NO: 1094575 - RNA, 22 nt, Human
ucagugaucuaaggguauggcc

SEQ ID NO: 1094576 - RNA, 22 nt, Human
agaaaacauuacauaggugugu

SEQ ID NO: 1094577 - RNA, 22 nt, Human
gagccuggauagccuuguucca

SEQ ID NO: 1094578 - RNA, 22 nt, Human
guccuggggauacagaagugaa

SEQ ID NO: 1094579 - RNA, 22 nt, Human
gugcccagugcaggcccgcagg

SEQ ID NO: 1094580 - RNA, 22 nt, Human
uuuucaguaaugucuacauaau

SEQ ID NO: 1094581 - RNA, 22 nt, Human
agaaguuaccacauacuucucu

SEQ ID NO: 1094582 - RNA, 22 nt, Human
acaguguagaauccuguacuua

SEQ ID NO: 1094583 - RNA, 22 nt, Human
aauuugacccaucuuggaauuu

SEQ ID NO: 1094584 - RNA, 22 nt, Human
guacuuccguggacuaauuguu

SEQ ID NO: 1094585 - RNA, 19 nt, Human
agcuuccauauucucuagu

SEQ ID NO: 1094586 - RNA, 22 nt, Human
uagaaacaucagcuaaccaaaa

SEQ ID NO: 1094587 - RNA, 22 nt, Human
gaaaugcauggaucuuggcaga

SEQ ID NO: 1094588 - RNA, 22 nt, Human
agauuuugucucaauacuucug

SEQ ID NO: 1094589 - RNA, 22 nt, Human
aaugacaugcuuuuuaauuaua

SEQ ID NO: 1094590 - RNA, 20 nt, Human
ucccuggaggugguggcauc

SEQ ID NO: 1094591 - RNA, 22 nt, Human
uggaagugcucuucugaccaac

SEQ ID NO: 1094592 - RNA, 22 nt, Human
ugcuggggcucugaccacucca

SEQ ID NO: 1094593 - RNA, 22 nt, Human
gccuuugccugcgacguggcug

SEQ ID NO: 1094594 - RNA, 22 nt, Human
aguggggacuuaugccagcauu

SEQ ID NO: 1094595 - RNA, 19 nt, Human
cugagcagcggcagcacuu

SEQ ID NO: 1094596 - RNA, 22 nt, Human
aaucuuaaagaauauucuacca

SEQ ID NO: 1094597 - RNA, 22 nt, Human
auuuucuauucugcugguuuag

SEQ ID NO: 1094598 - RNA, 22 nt, Human
uauguacaugauuucauuugcu

SEQ ID NO: 1094599 - RNA, 22 nt, Human
uuguuaaauggaugcagaauaa

SEQ ID NO: 1094600 - RNA, 22 nt, Human
uggccaaucacugacaaaaugc

SEQ ID NO: 1094601 - RNA, 22 nt, Human
aggaaaagugugaaguauggag

SEQ ID NO: 1094602 - RNA, 22 nt, Human
uuugcauugccucugacuuaug

SEQ ID NO: 1094603 - RNA, 22 nt, Human
ugccucagcugaggccgcucca

SEQ ID NO: 1094604 - RNA, 22 nt, Human
aguucuagaagacuuuuccauu

SEQ ID NO: 1094605 - RNA, 22 nt, Human
ucuugauucauguucccugcau

SEQ ID NO: 1094606 - RNA, 22 nt, Human
uacacauuagucaagaguuuga

SEQ ID NO: 1094607 - RNA, 22 nt, Human
uucauuugccaucaguguaaug

SEQ ID NO: 1094608 - RNA, 22 nt, Human
acagauaaauuuauaggagugu

SEQ ID NO: 1094609 - RNA, 22 nt, Human
aggaacacuuguggaaacauuc

SEQ ID NO: 1094610 - RNA, 22 nt, Human
acucuucuugcugcucauuaau

SEQ ID NO: 1094611 - RNA, 22 nt, Human
caucuuaaaaugugucauaacu

SEQ ID NO: 1094612 - RNA, 22 nt, Human
aucacuguguauguauaugcag

SEQ ID NO: 1094613 - RNA, 22 nt, Human
cacagagauuagaauuagacua

SEQ ID NO: 1094614 - RNA, 22 nt, Human
caggaaaaucugcccacacaag

SEQ ID NO: 1094615 - RNA, 22 nt, Human
aaagccuugagauccuauaguu

SEQ ID NO: 1094616 - RNA, 22 nt, Human
cagcagcaacaacggaagccuu

SEQ ID NO: 1094617 - RNA, 22 nt, Human
ucagaaaagaccacauuauucu

SEQ ID NO: 1094618 - RNA, 20 nt, Human
uugggccugucagcacuccc

SEQ ID NO: 1094619 - RNA, 22 nt, Human
aacaacagcugcuaaagaguug

SEQ ID NO: 1094620 - RNA, 22 nt, Human
cacuggggugggccugguagag

SEQ ID NO: 1094621 - RNA, 22 nt, Human
aaugaugaguucuaauagaccc

SEQ ID NO: 1094622 - RNA, 22 nt, Human
caguguuuaaucauugugaauu

SEQ ID NO: 1094623 - RNA, 22 nt, Human
uuucaaaguaaggauuuucauc

SEQ ID NO: 1094624 - RNA, 19 nt, Human
ggugaccaccuggucagug

SEQ ID NO: 1094625 - RNA, 22 nt, Human
uaucaauacauguuaucagugu

SEQ ID NO: 1094626 - RNA, 22 nt, Human
uugaagauggaucgccacucuc

SEQ ID NO: 1094627 - RNA, 19 nt, Human
cagagccucagagcuagaa

SEQ ID NO: 1094628 - RNA, 22 nt, Human
gcugauauaaaauuacagagga

SEQ ID NO: 1094629 - RNA, 22 nt, Human
ccagagcugcauccagcagguu

SEQ ID NO: 1094630 - RNA, 22 nt, Human
uugcauaaagauuuuauugcau

SEQ ID NO: 1094631 - RNA, 22 nt, Human
ccaggaggcuucguccguggag

SEQ ID NO: 1094632 - RNA, 22 nt, Human
acacacagaaggaagccccacu

SEQ ID NO: 1094633 - RNA, 22 nt, Human
guuucaaaggugucaggcaguu

SEQ ID NO: 1094634 - RNA, 22 nt, Human
ugcgcaggagcucugccaggag

SEQ ID NO: 1094635 - RNA, 22 nt, Human
cuucagugacauuccuucccuc

SEQ ID NO: 1094636 - RNA, 22 nt, Human
aaacaugaugccuguacuaaga

SEQ ID NO: 1094637 - RNA, 22 nt, Human
ugugggcuuuggagucaggaag

SEQ ID NO: 1094638 - RNA, 22 nt, Human
gcaggaaccacugccccccugu

SEQ ID NO: 1094639 - RNA, 22 nt, Human
augcuuuauacaaaacacuuaa

SEQ ID NO: 1094640 - RNA, 19 nt, Human
uuccaguucuaaucucuuc

SEQ ID NO: 1094641 - RNA, 22 nt, Human
aagaaugagcucaaagaucuua

SEQ ID NO: 1094642 - RNA, 22 nt, Human
cccaggcagggacgugcucugg

SEQ ID NO: 1094643 - RNA, 23 nt, Human
ugcuucucugcuugacaguucug

SEQ ID NO: 1094644 - RNA, 22 nt, Human
aggacacagcucuucaguaaga

SEQ ID NO: 1094645 - RNA, 22 nt, Human
gcugcuggccccacaugcucca

SEQ ID NO: 1094646 - RNA, 19 nt, Human
caaggguugggucugucau

SEQ ID NO: 1094647 - RNA, 22 nt, Human
agggccacaguggggccugaga

SEQ ID NO: 1094648 - RNA, 22 nt, Human
caaacuuugcaaaacuuacagu

SEQ ID NO: 1094649 - RNA, 22 nt, Human
ccagggcagggaccacgugucu

SEQ ID NO: 1094650 - RNA, 20 nt, Human
gccugccucagcuagcugag

SEQ ID NO: 1094651 - RNA, 22 nt, Human
gcuggcaccugcaccaagcagg

SEQ ID NO: 1094652 - RNA, 20 nt, Human
agccaggcucaagcuccccc

SEQ ID NO: 1094653 - RNA, 22 nt, Human
guuucaaagggaagacgcugga

SEQ ID NO: 1094654 - RNA, 22 nt, Human
uuccucuuauuuucccagugau

SEQ ID NO: 1094655 - RNA, 22 nt, Human
caggcuggucccagagcauugc

SEQ ID NO: 1094656 - RNA, 22 nt, Human
uggccucuuaggacauccucua

SEQ ID NO: 1094657 - RNA, 22 nt, Human
ggcaggugagagcucuuugaaa

SEQ ID NO: 1094658 - RNA, 18 nt, Human
agcuggggccucuggucc

SEQ ID NO: 1094659 - RNA, 22 nt, Human
ggggcucugcucugagccgugu

SEQ ID NO: 1094660 - RNA, 22 nt, Human
acccugccaaggauggccccga

SEQ ID NO: 1094661 - RNA, 22 nt, Human
ucaaacaugaaagcuugauuuu

SEQ ID NO: 1094662 - RNA, 22 nt, Human
uccucuggcucuuucccuagga

SEQ ID NO: 1094663 - RNA, 22 nt, Human
cacauuuacauauaaaacuuuc

SEQ ID NO: 1094664 - RNA, 22 nt, Human
uugcucugcaguccagacagua

SEQ ID NO: 1094665 - RNA, 22 nt, Human
auaaggcaucucucaguuagca

SEQ ID NO: 1094666 - RNA, 22 nt, Human
cucuggagcauuucaccuacau

SEQ ID NO: 1094667 - RNA, 22 nt, Human
ugcagggauccuagcugaagag

SEQ ID NO: 1094668 - RNA, 22 nt, Human
gagaaaggcauuccuaugcaaa

SEQ ID NO: 1094669 - RNA, 22 nt, Human
uaaaugaaaggguuuaauuuau

SEQ ID NO: 1094670 - RNA, 22 nt, Human
cacacccucgugcucccucccg

SEQ ID NO: 1094671 - RNA, 22 nt, Human
auuuuaaggcuuauuuaaaggc

SEQ ID NO: 1094672 - RNA, 22 nt, Human
agcucuuugacuaaucuugcuu

SEQ ID NO: 1094673 - RNA, 22 nt, Human
caggcuuuacuuucucucugaa

SEQ ID NO: 1094674 - RNA, 22 nt, Human
uguugagacugagggagucagc

SEQ ID NO: 1094675 - RNA, 22 nt, Human
uaaggcaaguuuuuaguggaca

SEQ ID NO: 1094676 - RNA, 19 nt, Human
ggaugagggucaggcauag

SEQ ID NO: 1094677 - RNA, 22 nt, Human
agaagagccuggggaccauggc

SEQ ID NO: 1094678 - RNA, 22 nt, Human
uggccugcuuucauuugaugcu

SEQ ID NO: 1094679 - RNA, 22 nt, Human
cuuacauaugcaagacaaaggg

SEQ ID NO: 1094680 - RNA, 22 nt, Human
aaacacacagaaaugaaugagg

SEQ ID NO: 1094681 - RNA, 22 nt, Human
ccccaccagcacccucucuauc

SEQ ID NO: 1094682 - RNA, 22 nt, Human
caggcagcuagauuuauaacaa

SEQ ID NO: 1094683 - RNA, 22 nt, Human
ucccagggucaguggugaggcc

SEQ ID NO: 1094684 - RNA, 22 nt, Human
cccaagggagugccuggucaac

SEQ ID NO: 1094685 - RNA, 20 nt, Human
aguuuucagcagaacaccca

SEQ ID NO: 1094686 - RNA, 22 nt, Human
cugcaggguuuuucaaggacaa

SEQ ID NO: 1094687 - RNA, 22 nt, Human
uaaagcagugugguuguguccc

SEQ ID NO: 1094688 - RNA, 22 nt, Human
ucccugccucucagacuuccuu

SEQ ID NO: 1094689 - RNA, 22 nt, Human
cacagaggcaaccuucuggggu

SEQ ID NO: 1094690 - RNA, 22 nt, Human
ugaggaaacuuacaaggcagaa

SEQ ID NO: 1094691 - RNA, 22 nt, Human
aaauuccauuaugauaauuucg

SEQ ID NO: 1094692 - RNA, 22 nt, Human
uugguccugcagaggggucugg

SEQ ID NO: 1094693 - RNA, 22 nt, Human
ugguugccucucagagauuccg

SEQ ID NO: 1094694 - RNA, 22 nt, Human
acuguaaagagguguaucuuua

SEQ ID NO: 1094695 - RNA, 22 nt, Human
gcaggugggggucggugcaucu

SEQ ID NO: 1094696 - RNA, 22 nt, Human
uguccaggucagcagcagggac

SEQ ID NO: 1094697 - RNA, 23 nt, Human
auagaagauuauugcaacagucc

SEQ ID NO: 1094698 - RNA, 22 nt, Human
ccaggcucugccaggcccuuga

SEQ ID NO: 1094699 - RNA, 22 nt, Human
ugggcagcauccuccacaguca

SEQ ID NO: 1094700 - RNA, 22 nt, Human
agagcuggcugugggugacuuu

SEQ ID NO: 1094701 - RNA, 22 nt, Human
ggaagggaaaauucauucggcu

SEQ ID NO: 1094702 - RNA, 22 nt, Human
ucuagggggacagcuggcugug

SEQ ID NO: 1094703 - RNA, 22 nt, Human
acugggaagacuggaauugcuc

SEQ ID NO: 1094704 - RNA, 22 nt, Human
cuggcugugcugcaggcuuugg

SEQ ID NO: 1094705 - RNA, 22 nt, Human
ucauuuaauagcuuuugucuuu

SEQ ID NO: 1094706 - RNA, 22 nt, Human
cucaguuucuucauauuguagg

SEQ ID NO: 1094707 - RNA, 17 nt, Human
aggggagagugggaaga

SEQ ID NO: 1094708 - RNA, 22 nt, Human
ccagcagcagcguccaaggaga

SEQ ID NO: 1094709 - RNA, 22 nt, Human
agagggagcccagucauagcug

SEQ ID NO: 1094710 - RNA, 22 nt, Human
caguacuuuucaaccaguauga

SEQ ID NO: 1094711 - RNA, 23 nt, Human
agaauuucuaacucuagcucugu

SEQ ID NO: 1094712 - RNA, 22 nt, Human
caagaaggcuauaugggccagg

SEQ ID NO: 1094713 - RNA, 22 nt, Human
uuuggaaugguaccuucaguug

SEQ ID NO: 1094714 - RNA, 22 nt, Human
gaaaggagugaauauuugugac

SEQ ID NO: 1094715 - RNA, 22 nt, Human
uggccaugaaggaggcagcaga

SEQ ID NO: 1094716 - RNA, 22 nt, Human
uauuacagcuuugauuaucugg

SEQ ID NO: 1094717 - RNA, 22 nt, Human
gggagcugagggaccucugugg

SEQ ID NO: 1094718 - RNA, 22 nt, Human
auuccaaagcacaucagaacua

SEQ ID NO: 1094719 - RNA, 22 nt, Human
agacauuuauugaacaccuagc

SEQ ID NO: 1094720 - RNA, 22 nt, Human
ucucagggagggcgagucagcg

SEQ ID NO: 1094721 - RNA, 22 nt, Human
aggcagugagugugacuucaca

SEQ ID NO: 1094722 - RNA, 22 nt, Human
ccuacagagcagcaggaccaga

SEQ ID NO: 1094723 - RNA, 22 nt, Human
caguuuuaaauuuugaaugucu

SEQ ID NO: 1094724 - RNA, 22 nt, Human
uuguuucuuugaaguuucuaga

SEQ ID NO: 1094725 - RNA, 22 nt, Human
cuuaauuuaaaauaguucaggc

SEQ ID NO: 1094726 - RNA, 19 nt, Human
auuugaaagcugugcuugc

SEQ ID NO: 1094727 - RNA, 22 nt, Human
cuuaaggcuucagcacagguau

SEQ ID NO: 1094728 - RNA, 22 nt, Human
ucucugagcucaggagcugcag

SEQ ID NO: 1094729 - RNA, 23 nt, Human
ccucccaggcugcgagucccgag

SEQ ID NO: 1094730 - RNA, 22 nt, Human
guguuuaacaucugguuuauac

SEQ ID NO: 1094731 - RNA, 20 nt, Human
cugggaggucuuccaaauca

SEQ ID NO: 1094732 - RNA, 22 nt, Human
uucugcagcccaacaguaguuu

SEQ ID NO: 1094733 - RNA, 22 nt, Human
cugcuguguaucauuuuagaug

SEQ ID NO: 1094734 - RNA, 22 nt, Human
uuuauauagagauuugugcaug

SEQ ID NO: 1094735 - RNA, 22 nt, Human
acagauggccauauuacuauau

SEQ ID NO: 1094736 - RNA, 22 nt, Human
acccaggccugagagacaggag

SEQ ID NO: 1094737 - RNA, 20 nt, Human
uagauguuuccugucauaaa

SEQ ID NO: 1094738 - RNA, 22 nt, Human
gagaggccauggcugugcagug

SEQ ID NO: 1094739 - RNA, 22 nt, Human
agcccucugcaaacaccugaua

SEQ ID NO: 1094740 - RNA, 22 nt, Human
uuuaggaaauacuguccuauga

SEQ ID NO: 1094741 - RNA, 22 nt, Human
aacagcagcaaguaagcagguc

SEQ ID NO: 1094742 - RNA, 22 nt, Human
gaaggccucacucugcagcaua

SEQ ID NO: 1094743 - RNA, 22 nt, Human
ucaaaaauuuucugaggaugag

SEQ ID NO: 1094744 - RNA, 22 nt, Human
auaaggcauauagucacuuuuu

SEQ ID NO: 1094745 - RNA, 22 nt, Human
ccugugugucugucacugcaca

SEQ ID NO: 1094746 - RNA, 22 nt, Human
gcagagaccccgcagugaggcc

SEQ ID NO: 1094747 - RNA, 22 nt, Human
agcuggccuguuagagcugagu

SEQ ID NO: 1094748 - RNA, 22 nt, Human
ugagagugguucagcucagaag

SEQ ID NO: 1094749 - RNA, 22 nt, Human
augcauaugugugcacacgugu

SEQ ID NO: 1094750 - RNA, 22 nt, Human
cacagcuucuccccgcugcggc

SEQ ID NO: 1094751 - RNA, 19 nt, Human
caguggccuggaggucucu

SEQ ID NO: 1094752 - RNA, 22 nt, Human
cccucacuucacgcucugcaga

SEQ ID NO: 1094753 - RNA, 22 nt, Human
cugauuucucaguucuaggaag

SEQ ID NO: 1094754 - RNA, 22 nt, Human
cccaggcuggagugcaauggca

SEQ ID NO: 1094755 - RNA, 22 nt, Human
cucugcugcccaggccugcuag

SEQ ID NO: 1094756 - RNA, 22 nt, Human
auaugaaguuacagguaagaaa

SEQ ID NO: 1094757 - RNA, 22 nt, Human
caggcccauucuaggcuugcua

SEQ ID NO: 1094758 - RNA, 22 nt, Human
gcacauccaaugauuguuuuga

SEQ ID NO: 1094759 - RNA, 22 nt, Human
ccuuucuugcuaagaguuuaug

SEQ ID NO: 1094760 - RNA, 22 nt, Human
gggcccuggggauguggacgcg

SEQ ID NO: 1094761 - RNA, 22 nt, Human
uucaacaauuaaguaucagccu

SEQ ID NO: 1094762 - RNA, 22 nt, Human
gcugccuucaguucugauucau

SEQ ID NO: 1094763 - RNA, 22 nt, Human
agcaggagaacacuguggcucu

SEQ ID NO: 1094764 - RNA, 22 nt, Human
agagauauggaugucagaaacu

SEQ ID NO: 1094765 - RNA, 19 nt, Human
ggcagucucaagcagcaca

SEQ ID NO: 1094766 - RNA, 23 nt, Human
gccucugcucugcguuggggacu

SEQ ID NO: 1094767 - RNA, 22 nt, Human
uuaaaaucuaaagcaguugucu

SEQ ID NO: 1094768 - RNA, 22 nt, Human
cauuugaaaccuggaaucuacc

SEQ ID NO: 1094769 - RNA, 22 nt, Human
aaaccacacuuagcaguuucgu

SEQ ID NO: 1094770 - RNA, 22 nt, Human
uggcaugauaggaggugcagaa

SEQ ID NO: 1094771 - RNA, 22 nt, Human
guauccuccccgcuggccuuca

SEQ ID NO: 1094772 - RNA, 22 nt, Human
aaucaaagaaugggcuaguugg

SEQ ID NO: 1094773 - RNA, 22 nt, Human
uucagaaauaaaauaucccaac

SEQ ID NO: 1094774 - RNA, 22 nt, Human
uacuuuaaagagguguaaugag

SEQ ID NO: 1094775 - RNA, 22 nt, Human
ggcaagggacggccgugagaca

SEQ ID NO: 1094776 - RNA, 22 nt, Human
agacauuuuggaaaguauuacu

SEQ ID NO: 1094777 - RNA, 20 nt, Human
gcagugaucucaucggucug

SEQ ID NO: 1094778 - RNA, 22 nt, Human
agcacaggaccaaggaagcugu

SEQ ID NO: 1094779 - RNA, 19 nt, Human
auucuucagcagugagacc

SEQ ID NO: 1094780 - RNA, 22 nt, Human
ccagggaggguccuguggcuuc

SEQ ID NO: 1094781 - RNA, 22 nt, Human
uugggccucggccaaggacggg

SEQ ID NO: 1094782 - RNA, 22 nt, Human
uucccaagucuccaauguggga

SEQ ID NO: 1094783 - RNA, 22 nt, Human
ggcacugaaccaggacacaagc

SEQ ID NO: 1094784 - RNA, 22 nt, Human
cucuggagguugagcccagcaa

SEQ ID NO: 1094785 - RNA, 22 nt, Human
aacacauagacguuugauauca

SEQ ID NO: 1094786 - RNA, 22 nt, Human
auauuccuguuuuuaacacuuu

SEQ ID NO: 1094787 - RNA, 22 nt, Human
ugcuuugugauaugcugugucu

SEQ ID NO: 1094788 - RNA, 22 nt, Human
auuuuguugaugguggaguagc

SEQ ID NO: 1094789 - RNA, 18 nt, Human
gugccaggaggcgcagcc

SEQ ID NO: 1094790 - RNA, 22 nt, Human
ucaaggaggugcuuggcuucac

SEQ ID NO: 1094791 - RNA, 22 nt, Human
uagaaaugaauguuuaaaaguc

SEQ ID NO: 1094792 - RNA, 22 nt, Human
cauugcacuccagcuugggcaa

SEQ ID NO: 1094793 - RNA, 22 nt, Human
uauucacaugaaaacaaauuuu

SEQ ID NO: 1094794 - RNA, 22 nt, Human
aucuuuaggcaaguuacuuaac

SEQ ID NO: 1094795 - RNA, 22 nt, Human
uuugcauuuuagauuuaggccu

SEQ ID NO: 1094796 - RNA, 22 nt, Human
ggggcuggcucacuaagagacu

SEQ ID NO: 1094797 - RNA, 23 nt, Human
aggcagugucucuuauccugucc

SEQ ID NO: 1094798 - RNA, 22 nt, Human
gccuguccuggaugcucugcaa

SEQ ID NO: 1094799 - RNA, 22 nt, Human
uacacagagacucaaaagggca

SEQ ID NO: 1094800 - RNA, 22 nt, Human
aggcugugggaguugagagucu

SEQ ID NO: 1094801 - RNA, 22 nt, Human
acauagcaagugcucaauaaau

SEQ ID NO: 1094802 - RNA, 22 nt, Human
cugggcucaaauccuggcccug

SEQ ID NO: 1094803 - RNA, 22 nt, Human
ucaggcagaugcagggauggau

SEQ ID NO: 1094804 - RNA, 22 nt, Human
gaauacauuggaaaucagaaua

SEQ ID NO: 1094805 - RNA, 22 nt, Human
gcagccuccgcacugcgagucc

SEQ ID NO: 1094806 - RNA, 22 nt, Human
cucaacagcucugccauacucc

SEQ ID NO: 1094807 - RNA, 23 nt, Human
ucucccaagccuggcaggggcac

SEQ ID NO: 1094808 - RNA, 22 nt, Human
aaugcuuuagaaaaccagcuuu

SEQ ID NO: 1094809 - RNA, 22 nt, Human
aggcagaggaaggguggauuug

SEQ ID NO: 1094810 - RNA, 21 nt, Human
ucagaacaauuccaugccucc

SEQ ID NO: 1094811 - RNA, 22 nt, Human
caauucuuuguagaagcucucc

SEQ ID NO: 1094812 - RNA, 22 nt, Human
ggcugccauaacagaguaccac

SEQ ID NO: 1094813 - RNA, 22 nt, Human
ccugggcuuuggaacaguacuu

SEQ ID NO: 1094814 - RNA, 22 nt, Human
ggaggggaugguuugacccugg

SEQ ID NO: 1094815 - RNA, 22 nt, Human
uaugcagugguaucauuuuaaa

SEQ ID NO: 1094816 - RNA, 22 nt, Human
acucccacuccagaguagaagc

SEQ ID NO: 1094817 - RNA, 22 nt, Human
agcuuccuacaaccaucucaga

SEQ ID NO: 1094818 - RNA, 22 nt, Human
ccagcugucugguuccagagcc

SEQ ID NO: 1094819 - RNA, 22 nt, Human
gcugucuuccuugcuccaaggg

SEQ ID NO: 1094820 - RNA, 22 nt, Human
gcacagccacugagugagaacc

SEQ ID NO: 1094821 - RNA, 22 nt, Human
ucuucauggucugguucuccag

SEQ ID NO: 1094822 - RNA, 22 nt, Human
aguuuccaaauauuguuuuagc

SEQ ID NO: 1094823 - RNA, 22 nt, Human
ccagggccaguaagauuggcau

SEQ ID NO: 1094824 - RNA, 22 nt, Human
acaugcuuugauguauuuugca

SEQ ID NO: 1094825 - RNA, 22 nt, Human
uggcucaggccuacgacgccuu

SEQ ID NO: 1094826 - RNA, 22 nt, Human
uggagggcucuuucaccuggua

SEQ ID NO: 1094827 - RNA, 22 nt, Human
auuucucagugugaucaggccu

SEQ ID NO: 1094828 - RNA, 22 nt, Human
agcugcagcguucauuuuucca

SEQ ID NO: 1094829 - RNA, 22 nt, Human
ucugaucugugccuuaggccug

SEQ ID NO: 1094830 - RNA, 22 nt, Human
uacaggcacugaaaugcuuauu

SEQ ID NO: 1094831 - RNA, 22 nt, Human
cagccaagaaccacagacccag

SEQ ID NO: 1094832 - RNA, 22 nt, Human
ugccuugguucucuacuuggag

SEQ ID NO: 1094833 - RNA, 22 nt, Human
uuauuauguggaugaaagaugu

SEQ ID NO: 1094834 - RNA, 22 nt, Human
uaauaacaauuguaggacauga

SEQ ID NO: 1094835 - RNA, 22 nt, Human
gggcugugcugaguaggaggug

SEQ ID NO: 1094836 - RNA, 22 nt, Human
aaauagaauuaacuagcuacug

SEQ ID NO: 1094837 - RNA, 22 nt, Human
uuucaaguggcgagauaaggaa

SEQ ID NO: 1094838 - RNA, 22 nt, Human
cuggccucauagccaagcugug

SEQ ID NO: 1094839 - RNA, 22 nt, Human
caacugcugacaccaucacucc

SEQ ID NO: 1094840 - RNA, 22 nt, Human
agauacauauagaaaacaucaa

SEQ ID NO: 1094841 - RNA, 22 nt, Human
augggcugacccagucguggca

SEQ ID NO: 1094842 - RNA, 22 nt, Human
ucauaaaaugcuccugauauug

SEQ ID NO: 1094843 - RNA, 22 nt, Human
auauaauacaaccugcuaagug

SEQ ID NO: 1094844 - RNA, 22 nt, Human
auugcugggaauauuuagccca

SEQ ID NO: 1094845 - RNA, 22 nt, Human
aggcacugggaauaugcugagg

SEQ ID NO: 1094846 - RNA, 22 nt, Human
auuuugcugcuaugccuugcaa

SEQ ID NO: 1094847 - RNA, 21 nt, Human
auacagaagguggcaaaguac

SEQ ID NO: 1094848 - RNA, 22 nt, Human
gcugcagcuuuaggauccagug

SEQ ID NO: 1094849 - RNA, 22 nt, Human
uauagguaugucgagaaaugaa

SEQ ID NO: 1094850 - RNA, 22 nt, Human
ugcaagagacagacaugacuca

SEQ ID NO: 1094851 - RNA, 22 nt, Human
gaagcccacguuuggugaugua

SEQ ID NO: 1094852 - RNA, 22 nt, Human
agggaggaguccucaaagucau

SEQ ID NO: 1094853 - RNA, 22 nt, Human
ggcaggcuuucagcaucaaguc

SEQ ID NO: 1094854 - RNA, 22 nt, Human
aaguagauagugcuacggaguu

SEQ ID NO: 1094855 - RNA, 20 nt, Human
ccugggguacacuggcaugu

SEQ ID NO: 1094856 - RNA, 22 nt, Human
aauggaacuuguaauuaugucc

SEQ ID NO: 1094857 - RNA, 22 nt, Human
acuaagugauucuaagcaucuu

SEQ ID NO: 1094858 - RNA, 20 nt, Human
ggcucuggaaucuggugggc

SEQ ID NO: 1094859 - RNA, 22 nt, Human
agaauaaacugcuuuagggcag

SEQ ID NO: 1094860 - RNA, 22 nt, Human
ucacagacauggugagguaaca

SEQ ID NO: 1094861 - RNA, 22 nt, Human
ggcucugguggcaauugacugg

SEQ ID NO: 1094862 - RNA, 22 nt, Human
gcagcuggggccacacuuaggc

SEQ ID NO: 1094863 - RNA, 22 nt, Human
acauuuguuucucuagaguagg

SEQ ID NO: 1094864 - RNA, 22 nt, Human
cuguccauuuucgugccuccuu

SEQ ID NO: 1094865 - RNA, 22 nt, Human
auaaagauuucuuuuucucuac

SEQ ID NO: 1094866 - RNA, 22 nt, Human
aucugggggagcugcucaugga

SEQ ID NO: 1094867 - RNA, 22 nt, Human
ugcuaucucuauauccauuuau

SEQ ID NO: 1094868 - RNA, 22 nt, Human
ugcugagugggauuccugugcu

SEQ ID NO: 1094869 - RNA, 22 nt, Human
agcccugcgcucacguucugca

SEQ ID NO: 1094870 - RNA, 22 nt, Human
aaguuaugaaauuuggacagcu

SEQ ID NO: 1094871 - RNA, 22 nt, Human
agaauucuguucuucgggugug

SEQ ID NO: 1094872 - RNA, 22 nt, Human
aauaaacugcucaauugcauca

SEQ ID NO: 1094873 - RNA, 22 nt, Human
guuaaagaguuuggcuuucuuc

SEQ ID NO: 1094874 - RNA, 22 nt, Human
cuguggaguggggaguacuggu

SEQ ID NO: 1094875 - RNA, 22 nt, Human
cccaggggagguccucagggaa

SEQ ID NO: 1094876 - RNA, 18 nt, Human
cagaggagagacauucag

SEQ ID NO: 1094877 - RNA, 22 nt, Human
aagcacagaccagaucuccagg

SEQ ID NO: 1094878 - RNA, 22 nt, Human
uaaaauagcaugugcagugaaa

SEQ ID NO: 1094879 - RNA, 22 nt, Human
ucuguuuuguaccagauacagc

SEQ ID NO: 1094880 - RNA, 22 nt, Human
gccauggcccauaccaggugca

SEQ ID NO: 1094881 - RNA, 22 nt, Human
cugggcugcgggcgccccucca

SEQ ID NO: 1094882 - RNA, 22 nt, Human
cagcucugccaucaucugccuu

SEQ ID NO: 1094883 - RNA, 23 nt, Human
gcaggaguuccuggacuccagga

SEQ ID NO: 1094884 - RNA, 19 nt, Human
cuggcucuuggguggagga

SEQ ID NO: 1094885 - RNA, 22 nt, Human
caggaacccaaugggccaggcc

SEQ ID NO: 1094886 - RNA, 21 nt, Human
agcuuguguguaucacagugu

SEQ ID NO: 1094887 - RNA, 22 nt, Human
ucaaaguauaucccuucgaaac

SEQ ID NO: 1094888 - RNA, 22 nt, Human
ugcuggaaaguuaaauuuugga

SEQ ID NO: 1094889 - RNA, 22 nt, Human
guggcagucuuuggcaaugaca

SEQ ID NO: 1094890 - RNA, 22 nt, Human
aagucauguggaagaauaaccu

SEQ ID NO: 1094891 - RNA, 22 nt, Human
uuucacaguuagcaugaggacu

SEQ ID NO: 1094892 - RNA, 22 nt, Human
aggguggcaguuacuggagcaa

SEQ ID NO: 1094893 - RNA, 22 nt, Human
acagauggcacuuuuuaggacu

SEQ ID NO: 1094894 - RNA, 22 nt, Human
ugugccuggcauucugggcuuc

SEQ ID NO: 1094895 - RNA, 22 nt, Human
uuucuucucgacaccuuauccc

SEQ ID NO: 1094896 - RNA, 22 nt, Human
aacaggaggccuuccaguccag

SEQ ID NO: 1094897 - RNA, 22 nt, Human
gucuucuguaagaugagguccc

SEQ ID NO: 1094898 - RNA, 22 nt, Human
ugauugaagaggugaggaaguu

SEQ ID NO: 1094899 - RNA, 22 nt, Human
gaaggaaaggucucaugccuuu

SEQ ID NO: 1094900 - RNA, 22 nt, Human
cuuaaauuuucaucuacaagaa

SEQ ID NO: 1094901 - RNA, 22 nt, Human
caguuuuaucaucugugaaaug

SEQ ID NO: 1094902 - RNA, 22 nt, Human
uggcugagugauauuugcaaag

SEQ ID NO: 1094903 - RNA, 23 nt, Human
agguacacauuauagaaauagac

SEQ ID NO: 1094904 - RNA, 22 nt, Human
gauuuuaucuuugugugcagua

SEQ ID NO: 1094905 - RNA, 22 nt, Human
gggcuguggagccgcgagggcu

SEQ ID NO: 1094906 - RNA, 22 nt, Human
cugaaugaggaaaagagugagg

SEQ ID NO: 1094907 - RNA, 22 nt, Human
aagggcuggaauaucucuuaga

SEQ ID NO: 1094908 - RNA, 21 nt, Human
gcugccaccgcgugcuccagg

SEQ ID NO: 1094909 - RNA, 22 nt, Human
ucuaaacagccucuuaccaacu

SEQ ID NO: 1094910 - RNA, 22 nt, Human
auuaaauuaaguggcuaauuua

SEQ ID NO: 1094911 - RNA, 21 nt, Human
aauaaaacaguuggugucaau

SEQ ID NO: 1094912 - RNA, 21 nt, Human
agucccaggggugagugaugu

SEQ ID NO: 1094913 - RNA, 22 nt, Human
cagaguacugggagaacagaag

SEQ ID NO: 1094914 - RNA, 22 nt, Human
ccaggcucaccuggagccccug

SEQ ID NO: 1094915 - RNA, 22 nt, Human
uuugaaacucugaacauguuuc

SEQ ID NO: 1094916 - RNA, 22 nt, Human
uacacacaugcauuugccuuau

SEQ ID NO: 1094917 - RNA, 22 nt, Human
cccuggcaugcaugucccuggc

SEQ ID NO: 1094918 - RNA, 22 nt, Human
uggcagagaacacacaugauuc

SEQ ID NO: 1094919 - RNA, 22 nt, Human
auuuccaugccuuagcuuaagg

SEQ ID NO: 1094920 - RNA, 22 nt, Human
cagccugacuauggcugcaggu

SEQ ID NO: 1094921 - RNA, 22 nt, Human
uccaggaacucuugauggugau

SEQ ID NO: 1094922 - RNA, 22 nt, Human
ucaaauaccagcuuuuccagaa

SEQ ID NO: 1094923 - RNA, 22 nt, Human
uuucuaaaugguggcugcauug

SEQ ID NO: 1094924 - RNA, 22 nt, Human
aggcccaguuauccuacuuguu

SEQ ID NO: 1094925 - RNA, 22 nt, Human
ucagggcacguuucugcaaugc

SEQ ID NO: 1094926 - RNA, 22 nt, Human
ucaggauguccaaaauccagcc

SEQ ID NO: 1094927 - RNA, 22 nt, Human
gggcagagaaauggacaguugg

SEQ ID NO: 1094928 - RNA, 22 nt, Human
guuuuauuuccaugagagaccg

SEQ ID NO: 1094929 - RNA, 22 nt, Human
ucacagaauaaauguacuggcc

SEQ ID NO: 1094930 - RNA, 22 nt, Human
uucuuaacucaaauauauaucc

SEQ ID NO: 1094931 - RNA, 23 nt, Human
cuccaaggcccaacugucuaggc

SEQ ID NO: 1094932 - RNA, 22 nt, Human
caggaaccuaaagagacauuac

SEQ ID NO: 1094933 - RNA, 22 nt, Human
uggcccucugcaagauucugga

SEQ ID NO: 1094934 - RNA, 23 nt, Human
aguacaauaaguauaauucuuuc

SEQ ID NO: 1094935 - RNA, 22 nt, Human
uauccauggccaaucaaauaca

SEQ ID NO: 1094936 - RNA, 22 nt, Human
aguucugggaaaaacauggcca

SEQ ID NO: 1094937 - RNA, 22 nt, Human
uuuaugccuccagaucuugcuu

SEQ ID NO: 1094938 - RNA, 22 nt, Human
cccuuuaauuccaacacaggaa

SEQ ID NO: 1094939 - RNA, 22 nt, Human
uucaauucugcucugaucuuag

SEQ ID NO: 1094940 - RNA, 22 nt, Human
cuggucagggcucuuugggagc

SEQ ID NO: 1094941 - RNA, 22 nt, Human
uggccugaggcucggcaugggu

SEQ ID NO: 1094942 - RNA, 22 nt, Human
ggagccagggaagcugcuuccu

SEQ ID NO: 1094943 - RNA, 23 nt, Human
ucugcuggugacacggucacauu

SEQ ID NO: 1094944 - RNA, 22 nt, Human
ggcuggcaagugucugcucaug

SEQ ID NO: 1094945 - RNA, 22 nt, Human
ccacagcuccucagccucuuuc

SEQ ID NO: 1094946 - RNA, 20 nt, Human
cauauauaccuagaagugga

SEQ ID NO: 1094947 - RNA, 22 nt, Human
ucaagcuggcuguugcuauuuc

SEQ ID NO: 1094948 - RNA, 22 nt, Human
augacaaacccaggauguaaca

SEQ ID NO: 1094949 - RNA, 22 nt, Human
aaagcccauguggaaguacagg

SEQ ID NO: 1094950 - RNA, 22 nt, Human
gugcagguguuuuggcugccag

SEQ ID NO: 1094951 - RNA, 22 nt, Human
ucagaggagaugguuaccaggg

SEQ ID NO: 1094952 - RNA, 22 nt, Human
ucagaauuggacaauagaagca

SEQ ID NO: 1094953 - RNA, 22 nt, Human
ugccuagcauaguauuugucac

SEQ ID NO: 1094954 - RNA, 22 nt, Human
uucuuaaaacuuauggacaggu

SEQ ID NO: 1094955 - RNA, 22 nt, Human
ugcugucuguuuacuggcuaua

SEQ ID NO: 1094956 - RNA, 22 nt, Human
uagcagcaaagcaggaucugcu

SEQ ID NO: 1094957 - RNA, 22 nt, Human
agcuggcauucuccuuguuauu

SEQ ID NO: 1094958 - RNA, 22 nt, Human
uggaggaaguggacaguugugu

SEQ ID NO: 1094959 - RNA, 21 nt, Human
gugcucugggcagcagagggc

SEQ ID NO: 1094960 - RNA, 22 nt, Human
auagaauuugcacuaaaucugc

SEQ ID NO: 1094961 - RNA, 22 nt, Human
aggcugagguaggaggaucgcu

SEQ ID NO: 1094962 - RNA, 22 nt, Human
aucaggaaugaauacuuuugga

SEQ ID NO: 1094963 - RNA, 22 nt, Human
uccaaauucuagggccuugguu

SEQ ID NO: 1094964 - RNA, 22 nt, Human
gcuggcagagcucugggcuggg

SEQ ID NO: 1094965 - RNA, 22 nt, Human
uuacuuuaagggugucuuauua

SEQ ID NO: 1094966 - RNA, 23 nt, Human
uagaacaucggugucuuggagca

SEQ ID NO: 1094967 - RNA, 22 nt, Human
ugcaauuuuaauacauuagagg

SEQ ID NO: 1094968 - RNA, 22 nt, Human
ggccaggcuggucucagacuuc

SEQ ID NO: 1094969 - RNA, 22 nt, Human
aggagcugcauggauaccuggu

SEQ ID NO: 1094970 - RNA, 22 nt, Human
agcaacuauauugaaagccacc

SEQ ID NO: 1094971 - RNA, 22 nt, Human
uuaaaugaugcauaucauuuag

SEQ ID NO: 1094972 - RNA, 22 nt, Human
cugaggaugguguggucuucuc

SEQ ID NO: 1094973 - RNA, 22 nt, Human
uuccagaggggagguggcagcc

SEQ ID NO: 1094974 - RNA, 22 nt, Human
acagagcaugcucaguguguga

SEQ ID NO: 1094975 - RNA, 22 nt, Human
aggcagcccacaggacacagga

SEQ ID NO: 1094976 - RNA, 22 nt, Human
gcuuccaaaucuguucaaaaug

SEQ ID NO: 1094977 - RNA, 22 nt, Human
cuuacauuuaaucaugugucau

SEQ ID NO: 1094978 - RNA, 22 nt, Human
gauuuuaauuauaggagguccu

SEQ ID NO: 1094979 - RNA, 22 nt, Human
cugccugcugacauucuuuaua

SEQ ID NO: 1094980 - RNA, 22 nt, Human
aggcgcagacauacagggucug

SEQ ID NO: 1094981 - RNA, 22 nt, Human
uugcccagagcugccuguuaca

SEQ ID NO: 1094982 - RNA, 22 nt, Human
gugugccaggaacuggcugcug

SEQ ID NO: 1094983 - RNA, 22 nt, Human
acagcacaggaguugaaugggc

SEQ ID NO: 1094984 - RNA, 22 nt, Human
accaaggaagaaucuauuugag

SEQ ID NO: 1094985 - RNA, 22 nt, Human
caguauagaaaguuuuaaauug

SEQ ID NO: 1094986 - RNA, 22 nt, Human
ucaguguuucaguuuggaaaug

SEQ ID NO: 1094987 - RNA, 22 nt, Human
cagcuguggagggaggaaaugc

SEQ ID NO: 1094988 - RNA, 22 nt, Human
cagucccuaguggagcucacag

SEQ ID NO: 1094989 - RNA, 21 nt, Human
acaguuuauuagaguaagugc

SEQ ID NO: 1094990 - RNA, 17 nt, Human
ggagcagauccaccauu

SEQ ID NO: 1094991 - RNA, 22 nt, Human
gcucuggacuggggccugagaa

SEQ ID NO: 1094992 - RNA, 22 nt, Human
uacacaguauaugggaucacag

SEQ ID NO: 1094993 - RNA, 21 nt, Human
aucuuaaaaggucuuaacuuu

SEQ ID NO: 1094994 - RNA, 22 nt, Human
auggcagauggcuggagcaggu

SEQ ID NO: 1094995 - RNA, 22 nt, Human
uguaacauauguaaaagcaccu

SEQ ID NO: 1094996 - RNA, 22 nt, Human
uacaaagucacauugaaaugaa

SEQ ID NO: 1094997 - RNA, 22 nt, Human
ugggaaagucuuuauuucucuu

SEQ ID NO: 1094998 - RNA, 22 nt, Human
aaaaguauuuugagcacuuuau

SEQ ID NO: 1094999 - RNA, 22 nt, Human
gccagggggucagcaggcacuu

SEQ ID NO: 1095000 - RNA, 22 nt, Human
uggugccaucauagcucacugc

SEQ ID NO: 1095001 - RNA, 22 nt, Human
uucugagacaauugagagucua

SEQ ID NO: 1095002 - RNA, 22 nt, Human
cacccaggcuagagugcagugg

SEQ ID NO: 1095003 - RNA, 21 nt, Human
gagugggcugagauggggcug

SEQ ID NO: 1095004 - RNA, 18 nt, Human
agcaggcguugccuggga

SEQ ID NO: 1095005 - RNA, 22 nt, Human
ugccugucuuggaguccuggcc

SEQ ID NO: 1095006 - RNA, 22 nt, Human
ugggagugaggcagagucuauc

SEQ ID NO: 1095007 - RNA, 23 nt, Human
ucuucagugagaccagcaaggcc

SEQ ID NO: 1095008 - RNA, 22 nt, Human
ggcugccagugagugcagaccg

SEQ ID NO: 1095009 - RNA, 18 nt, Human
ugcuuuaugcuuauauaa

SEQ ID NO: 1095010 - RNA, 18 nt, Human
caggagcaggaguugaac

SEQ ID NO: 1095011 - RNA, 20 nt, Human
ucucugcuguccacauuugc

SEQ ID NO: 1095012 - RNA, 22 nt, Human
ccuggagcccaaggcagugaga

SEQ ID NO: 1095013 - RNA, 22 nt, Human
uuugucaaucccuugaaaaccu

SEQ ID NO: 1095014 - RNA, 16 nt, Human
agaggccuugaggaag

SEQ ID NO: 1095015 - RNA, 22 nt, Human
cauguucuaacaaugagaaacc

SEQ ID NO: 1095016 - RNA, 22 nt, Human
aguaggcauagaaagaagcacc

SEQ ID NO: 1095017 - RNA, 20 nt, Human
ucacuguaauugccuacauu

SEQ ID NO: 1095018 - RNA, 17 nt, Human
gccaaaggguuccaauc

SEQ ID NO: 1095019 - RNA, 23 nt, Human
ugggaguguugggaucucugcuc

SEQ ID NO: 1095020 - RNA, 22 nt, Human
uguuuccaaaugguauaaagac

SEQ ID NO: 1095021 - RNA, 22 nt, Human
uccauuuuagagaugaagaaac

SEQ ID NO: 1095022 - RNA, 20 nt, Human
ugcuuugauggaaauacagc

SEQ ID NO: 1095023 - RNA, 19 nt, Human
gaauuauuuuuaugggaug

SEQ ID NO: 1095024 - RNA, 22 nt, Human
caauuucaagauucuguucuuu

SEQ ID NO: 1095025 - RNA, 22 nt, Human
cccuuuaaggaaaggaaggaug

SEQ ID NO: 1095026 - RNA, 22 nt, Human
gcagauggcagcccaggcuggg

SEQ ID NO: 1095027 - RNA, 19 nt, Human
ucuguucacauuguuucgc

SEQ ID NO: 1095028 - RNA, 23 nt, Human
uggcucugagcuuccugguggcc

SEQ ID NO: 1095029 - RNA, 22 nt, Human
ccuguucuguuaauuaaacuuu

SEQ ID NO: 1095030 - RNA, 22 nt, Human
augacagaaggccucccugaca

SEQ ID NO: 1095031 - RNA, 22 nt, Human
ugggagcccaagggagcugccg

SEQ ID NO: 1095032 - RNA, 22 nt, Human
ggugaaggucagagcaggaaaa

SEQ ID NO: 1095033 - RNA, 22 nt, Human
uggcugggcccccaccugccuc

SEQ ID NO: 1095034 - RNA, 18 nt, Human
ucccucagaauuauagaa

SEQ ID NO: 1095035 - RNA, 22 nt, Human
uggugagacaggaucaaccccu

SEQ ID NO: 1095036 - RNA, 22 nt, Human
auucuucacuguuucagaauga

SEQ ID NO: 1095037 - RNA, 22 nt, Human
cggcagcaaaggaagccagguc

SEQ ID NO: 1095038 - RNA, 22 nt, Human
uuggcucaccugucuacccaga

SEQ ID NO: 1095039 - RNA, 22 nt, Human
ucacagcuuucagauuguuccc

SEQ ID NO: 1095040 - RNA, 22 nt, Human
cagagacauguggccugcacgu

SEQ ID NO: 1095041 - RNA, 22 nt, Human
ugcccccuuuucuuguuacacu

SEQ ID NO: 1095042 - RNA, 22 nt, Human
aaagacauuagcuuagauguca

SEQ ID NO: 1095043 - RNA, 22 nt, Human
aaugauuggcacuagauacaca

SEQ ID NO: 1095044 - RNA, 22 nt, Human
ucaacauuggaggcaacauuca

SEQ ID NO: 1095045 - RNA, 22 nt, Human
acaucagacaauuaauuauuaa

SEQ ID NO: 1095046 - RNA, 22 nt, Human
gaugggaggaaccugggucccu

SEQ ID NO: 1095047 - RNA, 20 nt, Human
uauucaacuuuaaaaacuua

SEQ ID NO: 1095048 - RNA, 22 nt, Human
cuuacauugucuuaguuuucaa

SEQ ID NO: 1095049 - RNA, 22 nt, Human
auuuccaacuaccccuccauuu

SEQ ID NO: 1095050 - RNA, 23 nt, Human
agaugaggcuucuccauguuggu

SEQ ID NO: 1095051 - RNA, 22 nt, Human
gugagacucgccuuuguguagc

SEQ ID NO: 1095052 - RNA, 22 nt, Human
aacauuuccggccuuuuguucu

SEQ ID NO: 1095053 - RNA, 22 nt, Human
auacacugguuuaugauauugu

SEQ ID NO: 1095054 - RNA, 22 nt, Human
cgagaguggacagggcgcagcu

SEQ ID NO: 1095055 - RNA, 22 nt, Human
aucaggauggguuuggcuuagg

SEQ ID NO: 1095056 - RNA, 20 nt, Human
aucuggcucagauccugcag

SEQ ID NO: 1095057 - RNA, 22 nt, Human
agaggcugugcagagggagugc

SEQ ID NO: 1095058 - RNA, 22 nt, Human
aggugaguugguaggaaguuug

SEQ ID NO: 1095059 - RNA, 22 nt, Human
cuauacacuuuuugaaaauaga

SEQ ID NO: 1095060 - RNA, 22 nt, Human
cagagcccagggccuacguccc

SEQ ID NO: 1095061 - RNA, 22 nt, Human
caucaaaauuagacauuguuga

SEQ ID NO: 1095062 - RNA, 22 nt, Human
augauucaggauugaaccauuu

SEQ ID NO: 1095063 - RNA, 22 nt, Human
augaaguuccaguauaugcagu

SEQ ID NO: 1095064 - RNA, 22 nt, Human
agggcugccauuucuggcccaa

SEQ ID NO: 1095065 - RNA, 22 nt, Human
ucacacagcuccuuuccuuagu

SEQ ID NO: 1095066 - RNA, 22 nt, Human
aacauuuacaaauccuucugca

SEQ ID NO: 1095067 - RNA, 22 nt, Human
uucacaucucagcacugccucu

SEQ ID NO: 1095068 - RNA, 22 nt, Human
gggaggucagggugccugcugg

SEQ ID NO: 1095069 - RNA, 23 nt, Human
cacaacuaaucagaaucucuagg

SEQ ID NO: 1095070 - RNA, 19 nt, Human
aggaaagguggccuuagca

SEQ ID NO: 1095071 - RNA, 22 nt, Human
ggcccuguccuggcugucuccg

SEQ ID NO: 1095072 - RNA, 20 nt, Human
gaggcugcggacugcuggac

SEQ ID NO: 1095073 - RNA, 22 nt, Human
ucuaggagcuuaaaggaggcca

SEQ ID NO: 1095074 - RNA, 22 nt, Human
gggagagaugcugauugccaau

SEQ ID NO: 1095075 - RNA, 22 nt, Human
uagcuagaaugcuucgugauau

SEQ ID NO: 1095076 - RNA, 22 nt, Human
gcugccugaaugaaccuuguuc

SEQ ID NO: 1095077 - RNA, 20 nt, Human
ugggccugagccugugggcu

SEQ ID NO: 1095078 - RNA, 22 nt, Human
ggcagcaagcagaaguucuaug

SEQ ID NO: 1095079 - RNA, 22 nt, Human
uccuaagauagaagauagugaa

SEQ ID NO: 1095080 - RNA, 22 nt, Human
ggcagguggcacugcugcuccc

SEQ ID NO: 1095081 - RNA, 23 nt, Human
ucugucaccuauggcugcucuuc

SEQ ID NO: 1095082 - RNA, 22 nt, Human
acauucuuccagcuggcuguug

SEQ ID NO: 1095083 - RNA, 22 nt, Human
ucacugcagagaccucuaguca

SEQ ID NO: 1095084 - RNA, 22 nt, Human
ugcagggaaugcuugcagcaug

SEQ ID NO: 1095085 - RNA, 22 nt, Human
gggcugagugggccucuuacuu

SEQ ID NO: 1095086 - RNA, 22 nt, Human
ucuggaguugagagugugcgag

SEQ ID NO: 1095087 - RNA, 22 nt, Human
ccagaggcauguucaaagcaau

SEQ ID NO: 1095088 - RNA, 22 nt, Human
gucagcuagaggaugugacauu

SEQ ID NO: 1095089 - RNA, 22 nt, Human
gaguggagaucgugccacugca

SEQ ID NO: 1095090 - RNA, 22 nt, Human
auguuucaaugcacuuuagccu

SEQ ID NO: 1095091 - RNA, 22 nt, Human
ggagggacccacucuagaggug

SEQ ID NO: 1095092 - RNA, 22 nt, Human
guucuucaggcugugcucuaga

SEQ ID NO: 1095093 - RNA, 22 nt, Human
uaagugcaauguuuuacuuaaa

SEQ ID NO: 1095094 - RNA, 17 nt, Human
ggcagggugcuggguau

SEQ ID NO: 1095095 - RNA, 22 nt, Human
gaaagcuuccauuuuguacauu

SEQ ID NO: 1095096 - RNA, 22 nt, Human
auguguuaguuugugauuauac

SEQ ID NO: 1095097 - RNA, 22 nt, Human
ggcccagaagccagaagccucc

SEQ ID NO: 1095098 - RNA, 22 nt, Human
acagaggccgccucucucacgg

SEQ ID NO: 1095099 - RNA, 22 nt, Human
acaggcugccuaccaaguauca

SEQ ID NO: 1095100 - RNA, 22 nt, Human
cagaggcacaagaaagcaaggc

SEQ ID NO: 1095101 - RNA, 22 nt, Human
uuacagauguuucaggaauacu

SEQ ID NO: 1095102 - RNA, 22 nt, Human
uucauuccuucccuaagcaacu

SEQ ID NO: 1095103 - RNA, 22 nt, Human
uggcacuggaaucguagccuug

SEQ ID NO: 1095104 - RNA, 22 nt, Human
cggggcaggagucccuguagag

SEQ ID NO: 1095105 - RNA, 22 nt, Human
uagacaaaagggggcagauaug

SEQ ID NO: 1095106 - RNA, 20 nt, Human
agggacacaauauuucugug

SEQ ID NO: 1095107 - RNA, 22 nt, Human
caaggccauaagagauacaaaa

SEQ ID NO: 1095108 - RNA, 22 nt, Human
agccccugggaguagcugcugc

SEQ ID NO: 1095109 - RNA, 22 nt, Human
uagacacaucuucauccacaau

SEQ ID NO: 1095110 - RNA, 22 nt, Human
ggcagggagagcaugcugauaa

SEQ ID NO: 1095111 - RNA, 19 nt, Human
acacagggcuagaguuaca

SEQ ID NO: 1095112 - RNA, 22 nt, Human
ggcugggucccagcugggagga

SEQ ID NO: 1095113 - RNA, 22 nt, Human
gccugggagugcacagugaggu

SEQ ID NO: 1095114 - RNA, 22 nt, Human
ggcagugaaugaaacagaggcu

SEQ ID NO: 1095115 - RNA, 19 nt, Human
uggaacacucaaacugggu

SEQ ID NO: 1095116 - RNA, 22 nt, Human
acccagggaccccgcugacgcc

SEQ ID NO: 1095117 - RNA, 22 nt, Human
ggguggcagcuguugccaaggu

SEQ ID NO: 1095118 - RNA, 22 nt, Human
agguggagaagagaugggcagu

SEQ ID NO: 1095119 - RNA, 20 nt, Human
uugaggcaugucuagaagua

SEQ ID NO: 1095120 - RNA, 22 nt, Human
gacaauaagaacagauacugug

SEQ ID NO: 1095121 - RNA, 22 nt, Human
ugguucaggcaggguguugcug

SEQ ID NO: 1095122 - RNA, 22 nt, Human
uuauacuaaaacgcauugaauu

SEQ ID NO: 1095123 - RNA, 21 nt, Human
uggaccuguccuucucgcugu

SEQ ID NO: 1095124 - RNA, 22 nt, Human
uucaacauuacacaggcaauuc

SEQ ID NO: 1095125 - RNA, 22 nt, Human
ccuuuucuugccacugacucgg

SEQ ID NO: 1095126 - RNA, 22 nt, Human
caggggcugagaaggaacgucc

SEQ ID NO: 1095127 - RNA, 22 nt, Human
aguucugguugcccaugacauc

SEQ ID NO: 1095128 - RNA, 22 nt, Human
aacugaaacuuaggaaguaauc

SEQ ID NO: 1095129 - RNA, 22 nt, Human
agaguccacccuggggucaggc

SEQ ID NO: 1095130 - RNA, 22 nt, Human
caguuugucuugauucagaaca

SEQ ID NO: 1095131 - RNA, 22 nt, Human
ucaccacugaacagaccuuugg

SEQ ID NO: 1095132 - RNA, 22 nt, Human
cugggcuggguuuacccucuuc

SEQ ID NO: 1095133 - RNA, 22 nt, Human
ccuguucuguggcucucaaagg

SEQ ID NO: 1095134 - RNA, 22 nt, Human
aagagcugcacauauuuauauc

SEQ ID NO: 1095135 - RNA, 22 nt, Human
aauguuguguuucaguucaaga

SEQ ID NO: 1095136 - RNA, 20 nt, Human
acugagcugcauggagagga

SEQ ID NO: 1095137 - RNA, 22 nt, Human
uaaaguauauuuuuucucaaua

SEQ ID NO: 1095138 - RNA, 22 nt, Human
caggacagaaauaaggaauaua

SEQ ID NO: 1095139 - RNA, 22 nt, Human
cagggcuccccagagagccucu

SEQ ID NO: 1095140 - RNA, 20 nt, Human
gaagccagaggggaaaggag

SEQ ID NO: 1095141 - RNA, 22 nt, Human
aagcacaggggaaauaaguugu

SEQ ID NO: 1095142 - RNA, 22 nt, Human
ggccaggagauggacaccacau

SEQ ID NO: 1095143 - RNA, 22 nt, Human
ugugaaggcagcagcucugucc

SEQ ID NO: 1095144 - RNA, 22 nt, Human
aagucuggaagucucaguuuuc

SEQ ID NO: 1095145 - RNA, 22 nt, Human
cugugucggacgugggcagcag

SEQ ID NO: 1095146 - RNA, 22 nt, Human
uggcaggagccugcggggaggu

SEQ ID NO: 1095147 - RNA, 22 nt, Human
ggacaugaagcaaaaugggagg

SEQ ID NO: 1095148 - RNA, 22 nt, Human
auaauaauacugugcaauggau

SEQ ID NO: 1095149 - RNA, 22 nt, Human
aauauuuauauuucucuucccu

SEQ ID NO: 1095150 - RNA, 22 nt, Human
uuuguggcaggagcggagaccg

SEQ ID NO: 1095151 - RNA, 22 nt, Human
guuacaaaggucauaaaagugu

SEQ ID NO: 1095152 - RNA, 22 nt, Human
cagguggggcgcccucaggcag

SEQ ID NO: 1095153 - RNA, 22 nt, Human
cauucugacccuaugauuuaag

SEQ ID NO: 1095154 - RNA, 22 nt, Human
agccagcuggagaccacuguuu

SEQ ID NO: 1095155 - RNA, 22 nt, Human
aaucaagaggcgauggauggaa

SEQ ID NO: 1095156 - RNA, 22 nt, Human
uuucacaggaauacccggcuuu

SEQ ID NO: 1095157 - RNA, 22 nt, Human
ugcagcauuauucacaguagcc

SEQ ID NO: 1095158 - RNA, 22 nt, Human
cacuggugucugagcaggguga

SEQ ID NO: 1095159 - RNA, 22 nt, Human
cauggcagagaaggggaacugg

SEQ ID NO: 1095160 - RNA, 21 nt, Human
uggccucccacacuuccaugg

SEQ ID NO: 1095161 - RNA, 22 nt, Human
ccacugccgugggccuugggga

SEQ ID NO: 1095162 - RNA, 22 nt, Human
ccagcugguaagugauggagcc

SEQ ID NO: 1095163 - RNA, 22 nt, Human
ggagaugcuuuccaguggggau

SEQ ID NO: 1095164 - RNA, 22 nt, Human
aggagaaguaaggcuagaugau

SEQ ID NO: 1095165 - RNA, 22 nt, Human
acaugccagaacuuguaccaau

SEQ ID NO: 1095166 - RNA, 22 nt, Human
acugaugucuggggcagagucu

SEQ ID NO: 1095167 - RNA, 22 nt, Human
acauuucagaaucacacagcuu

SEQ ID NO: 1095168 - RNA, 22 nt, Human
cugcugcugagagcucagccug

SEQ ID NO: 1095169 - RNA, 19 nt, Human
aaagugauuuuuucuggca

SEQ ID NO: 1095170 - RNA, 22 nt, Human
uggggcucuccacagugucuca

SEQ ID NO: 1095171 - RNA, 22 nt, Human
acccucagaguaggcacugcug

SEQ ID NO: 1095172 - RNA, 22 nt, Human
ucaccaggcuccuguuaagaug

SEQ ID NO: 1095173 - RNA, 22 nt, Human
aagggcugcauuugauguguca

SEQ ID NO: 1095174 - RNA, 22 nt, Human
caggaacauuguagaauugaaa

SEQ ID NO: 1095175 - RNA, 22 nt, Human
cuaauacucauuucuguaacuc

SEQ ID NO: 1095176 - RNA, 22 nt, Human
uuuagacauuugugguuugcaa

SEQ ID NO: 1095177 - RNA, 22 nt, Human
caaaguuuggcucucaugacau

SEQ ID NO: 1095178 - RNA, 22 nt, Human
acagcuguggccacuugcaucc

SEQ ID NO: 1095179 - RNA, 22 nt, Human
ucaaugauaguacaaucagccu

SEQ ID NO: 1095180 - RNA, 23 nt, Human
ugaaacauuuaggguagaauuuc

SEQ ID NO: 1095181 - RNA, 22 nt, Human
caggagcagaggguggucagca

SEQ ID NO: 1095182 - RNA, 22 nt, Human
aagcagccuggacuugggcugg

SEQ ID NO: 1095183 - RNA, 22 nt, Human
acagugauucugcaaaccauau

SEQ ID NO: 1095184 - RNA, 22 nt, Human
agggcugagcccaggcauguag

SEQ ID NO: 1095185 - RNA, 22 nt, Human
gggcagguuauuggaguaggga

SEQ ID NO: 1095186 - RNA, 22 nt, Human
gaagagcuguagccugcucuuu

SEQ ID NO: 1095187 - RNA, 22 nt, Human
gcccagggcugcaaguggacgc

SEQ ID NO: 1095188 - RNA, 18 nt, Human
ggagacuaaacuguugac

SEQ ID NO: 1095189 - RNA, 22 nt, Human
ccucaggggucacugugaggag

SEQ ID NO: 1095190 - RNA, 22 nt, Human
cuauuuguaagagccccacacc

SEQ ID NO: 1095191 - RNA, 22 nt, Human
ggaagccacccagcuuugauag

SEQ ID NO: 1095192 - RNA, 22 nt, Human
gcuggugcauuagcugcaguuc

SEQ ID NO: 1095193 - RNA, 21 nt, Human
ucuugauuauuggccucacac

SEQ ID NO: 1095194 - RNA, 22 nt, Human
ucagaagcaaacaucacucuag

SEQ ID NO: 1095195 - RNA, 22 nt, Human
agggucugacugaauggaaaag

SEQ ID NO: 1095196 - RNA, 22 nt, Human
ggugggcaggcgaggcccaggu

SEQ ID NO: 1095197 - RNA, 22 nt, Human
cagcagugcuucagugugagau

SEQ ID NO: 1095198 - RNA, 22 nt, Human
cugcagugcaagcccagaugga

SEQ ID NO: 1095199 - RNA, 20 nt, Human
acuuucucgguuucucaccu

SEQ ID NO: 1095200 - RNA, 18 nt, Human
uuacuguuaucaaaacag

SEQ ID NO: 1095201 - RNA, 22 nt, Human
cugaggcuggcguuugaggaag

SEQ ID NO: 1095202 - RNA, 22 nt, Human
agaauuagaggccauguacuug

SEQ ID NO: 1095203 - RNA, 22 nt, Human
ggcacagggaggcccuggugug

SEQ ID NO: 1095204 - RNA, 22 nt, Human
uccugucuaaagaccugcaggc

SEQ ID NO: 1095205 - RNA, 22 nt, Human
cuuauuuuaagucaguuugggu

SEQ ID NO: 1095206 - RNA, 22 nt, Human
uggcacugagcagccgcggcag

SEQ ID NO: 1095207 - RNA, 22 nt, Human
uggcugcuuguuuuagugaggc

SEQ ID NO: 1095208 - RNA, 22 nt, Human
uuguaagacuguagaaugcaaa

SEQ ID NO: 1095209 - RNA, 22 nt, Human
gagaaccucuccacaagucugg

SEQ ID NO: 1095210 - RNA, 22 nt, Human
uaaguccacaggcugacagcgg

SEQ ID NO: 1095211 - RNA, 22 nt, Human
auagaauaugacuuuuagaucc

SEQ ID NO: 1095212 - RNA, 22 nt, Human
ucaguucuaagugcuuuacaug

SEQ ID NO: 1095213 - RNA, 22 nt, Human
ccagccagcugcccuuggggcc

SEQ ID NO: 1095214 - RNA, 22 nt, Human
aacacuuuuuauauauuguauc

SEQ ID NO: 1095215 - RNA, 22 nt, Human
uuggaccauugaccugaucuac

SEQ ID NO: 1095216 - RNA, 22 nt, Human
auucuuaauuccaaagacugag

SEQ ID NO: 1095217 - RNA, 22 nt, Human
uuuauggcacacaaauaucaaa

SEQ ID NO: 1095218 - RNA, 22 nt, Human
aaaucgcuugaacccaggaagu

SEQ ID NO: 1095219 - RNA, 22 nt, Human
uguggccucucaggcuugauca

SEQ ID NO: 1095220 - RNA, 22 nt, Human
aaagcaugacucaagaauuacu

SEQ ID NO: 1095221 - RNA, 22 nt, Human
cuuguguggucuggucuugcua

SEQ ID NO: 1095222 - RNA, 22 nt, Human
ggcugagccaugggcacugcag

SEQ ID NO: 1095223 - RNA, 22 nt, Human
ggucucagacuggcaggcagug

SEQ ID NO: 1095224 - RNA, 22 nt, Human
ugugaaauauuggcaauuucau

SEQ ID NO: 1095225 - RNA, 22 nt, Human
caugggaggucugcaaggugcu

SEQ ID NO: 1095226 - RNA, 22 nt, Human
agcccuagagcuggaggucagu

SEQ ID NO: 1095227 - RNA, 22 nt, Human
uuuaggaauauuuucuuucagg

SEQ ID NO: 1095228 - RNA, 22 nt, Human
caggaaauaucuccuggcagag

SEQ ID NO: 1095229 - RNA, 22 nt, Human
acaaauuugaauccugacuucu

SEQ ID NO: 1095230 - RNA, 22 nt, Human
ggcagcaguccauggcccaagg

SEQ ID NO: 1095231 - RNA, 22 nt, Human
cgcugggggaacagcgagggug

SEQ ID NO: 1095232 - RNA, 22 nt, Human
gcugcuggaagcaugcgaugaa

SEQ ID NO: 1095233 - RNA, 22 nt, Human
ugacacaggcagcucccagcac

SEQ ID NO: 1095234 - RNA, 22 nt, Human
guggccucuguuggcuccuagg

SEQ ID NO: 1095235 - RNA, 22 nt, Human
gggcacagagggucuugaagaa

SEQ ID NO: 1095236 - RNA, 22 nt, Human
cugugacuagaccugcaggaga

SEQ ID NO: 1095237 - RNA, 20 nt, Human
ugauuucucuucuauuccuu

SEQ ID NO: 1095238 - RNA, 22 nt, Human
aagauuucugcuccugagagaa

SEQ ID NO: 1095239 - RNA, 22 nt, Human
accaaggagaaggugcaagcuu

SEQ ID NO: 1095240 - RNA, 22 nt, Human
uuaaaaaccaucuuccuuuccu

SEQ ID NO: 1095241 - RNA, 22 nt, Human
uuaugauuugccacagauuggu

SEQ ID NO: 1095242 - RNA, 21 nt, Human
gugcuuuuccuuaauguucuu

SEQ ID NO: 1095243 - RNA, 18 nt, Human
gacuuuaaaacacugcuc

SEQ ID NO: 1095244 - RNA, 22 nt, Human
ucagcucacucugcuuccuggg

SEQ ID NO: 1095245 - RNA, 22 nt, Human
gcugugugcucacguaguggaa

SEQ ID NO: 1095246 - RNA, 22 nt, Human
acagagaucagaggcauaagca

SEQ ID NO: 1095247 - RNA, 22 nt, Human
uuuguaaaaggaggaagcaugg

SEQ ID NO: 1095248 - RNA, 22 nt, Human
acuagaaagaaguuuuuugaga

SEQ ID NO: 1095249 - RNA, 22 nt, Human
ccccuuccaggaagcagaaucg

SEQ ID NO: 1095250 - RNA, 21 nt, Human
agcuuugcuuuguacucauuu

SEQ ID NO: 1095251 - RNA, 22 nt, Human
uaaaggaaucaguuuuagagau

SEQ ID NO: 1095252 - RNA, 22 nt, Human
ucuugaaaguaucuuauuuugu

SEQ ID NO: 1095253 - RNA, 22 nt, Human
ucuuugaugcuucugaaggugu

SEQ ID NO: 1095254 - RNA, 22 nt, Human
cugugcuuaccugcccagguga

SEQ ID NO: 1095255 - RNA, 22 nt, Human
gggacaggcugagacuugagcu

SEQ ID NO: 1095256 - RNA, 22 nt, Human
uuguugcauuucaaguaugaga

SEQ ID NO: 1095257 - RNA, 22 nt, Human
gcaggcagagagggguuuccag

SEQ ID NO: 1095258 - RNA, 22 nt, Human
uuacauauuauccaaaacugcu

SEQ ID NO: 1095259 - RNA, 21 nt, Human
uacauugacuacaaauaaagc

SEQ ID NO: 1095260 - RNA, 22 nt, Human
gggcguggauggucagugcagg

SEQ ID NO: 1095261 - RNA, 22 nt, Human
uuugacaguaauaaagcacaag

SEQ ID NO: 1095262 - RNA, 22 nt, Human
ggcuuugacaugcugaauuaaa

SEQ ID NO: 1095263 - RNA, 22 nt, Human
ugcagcauucuuggccacuacu

SEQ ID NO: 1095264 - RNA, 22 nt, Human
cacgagaaccucucauuugauu

SEQ ID NO: 1095265 - RNA, 22 nt, Human
aggggcugggacagagccaagc

SEQ ID NO: 1095266 - RNA, 22 nt, Human
ggcuggccucaggguccucgcu

SEQ ID NO: 1095267 - RNA, 22 nt, Human
ugggaaagacucaggacaggag

SEQ ID NO: 1095268 - RNA, 22 nt, Human
gcccucagaggacagcugacuu

SEQ ID NO: 1095269 - RNA, 22 nt, Human
caugcuuaugauuugcuaagcc

SEQ ID NO: 1095270 - RNA, 22 nt, Human
agauguuuaaaaagaugacucu

SEQ ID NO: 1095271 - RNA, 18 nt, Human
ucaaagucuggcuccacu

SEQ ID NO: 1095272 - RNA, 22 nt, Human
aguaugaauggaaacuaccuau

SEQ ID NO: 1095273 - RNA, 23 nt, Human
ccagugauugccuggaaggaggu

SEQ ID NO: 1095274 - RNA, 22 nt, Human
uaucuuuaacuugcaguauuua

SEQ ID NO: 1095275 - RNA, 22 nt, Human
cuucacagaugcugagagggcu

SEQ ID NO: 1095276 - RNA, 22 nt, Human
cugccagcucaaagcgcagcua

SEQ ID NO: 1095277 - RNA, 22 nt, Human
caggcacuguguuaggcacugu

SEQ ID NO: 1095278 - RNA, 22 nt, Human
ccaggcucugagccucacucuu

SEQ ID NO: 1095279 - RNA, 22 nt, Human
uggcaagagcaaaauguacagu

SEQ ID NO: 1095280 - RNA, 22 nt, Human
caucaguguucacuauuccuuc

SEQ ID NO: 1095281 - RNA, 22 nt, Human
gcccagagagaugcuguagacc

SEQ ID NO: 1095282 - RNA, 22 nt, Human
caggauggagagugagggguca

SEQ ID NO: 1095283 - RNA, 22 nt, Human
gaggcagcugaagcuucaaaga

SEQ ID NO: 1095284 - RNA, 22 nt, Human
gcugccuugaacuuggccuggg

SEQ ID NO: 1095285 - RNA, 22 nt, Human
aagggaggccagagguuuugca

SEQ ID NO: 1095286 - RNA, 22 nt, Human
gcucugggaacugacugccuuc

SEQ ID NO: 1095287 - RNA, 22 nt, Human
cugcacugagcaucuaaccuua

SEQ ID NO: 1095288 - RNA, 22 nt, Human
aggaagaaccuaagaaagucuc

SEQ ID NO: 1095289 - RNA, 22 nt, Human
gaguuauuuguagggauuauau

SEQ ID NO: 1095290 - RNA, 22 nt, Human
augcccaggcccauaccuagau

SEQ ID NO: 1095291 - RNA, 22 nt, Human
aacugcuugagauauguuuguc

SEQ ID NO: 1095292 - RNA, 22 nt, Human
aggcccugggcaguucuguagc

SEQ ID NO: 1095293 - RNA, 22 nt, Human
aggcaagcauugggaacagggc

SEQ ID NO: 1095294 - RNA, 20 nt, Human
cucugcugcccgccggcugc

SEQ ID NO: 1095295 - RNA, 19 nt, Human
ugggcagguucaguaaugg

SEQ ID NO: 1095296 - RNA, 22 nt, Human
ucuacuuuauaaguauauaagu

SEQ ID NO: 1095297 - RNA, 22 nt, Human
guuuuccuucucagccauugcc

SEQ ID NO: 1095298 - RNA, 22 nt, Human
agccuggagguaaugaggaaac

SEQ ID NO: 1095299 - RNA, 22 nt, Human
cacagggcagaggguccguggc

SEQ ID NO: 1095300 - RNA, 22 nt, Human
agcuaggauaagcagagacugg

SEQ ID NO: 1095301 - RNA, 22 nt, Human
agacccugucaguguuaggaaa

SEQ ID NO: 1095302 - RNA, 22 nt, Human
ugaucagucccaugaucuucca

SEQ ID NO: 1095303 - RNA, 22 nt, Human
uucacauuugaaaggaaagaua

SEQ ID NO: 1095304 - RNA, 22 nt, Human
uuucccaggcuggaaugcagug

SEQ ID NO: 1095305 - RNA, 22 nt, Human
uggcagcacuugaacuugagcc

SEQ ID NO: 1095306 - RNA, 22 nt, Human
ucaccaggcaacuauguacucc

SEQ ID NO: 1095307 - RNA, 22 nt, Human
gucuaaacuuuacagagucaag

SEQ ID NO: 1095308 - RNA, 22 nt, Human
uuuaacauguaauugcugcuuu

SEQ ID NO: 1095309 - RNA, 22 nt, Human
aaaugguaaauuaguaguagcu

SEQ ID NO: 1095310 - RNA, 22 nt, Human
uuacaaagcgcuuuaccucuga

SEQ ID NO: 1095311 - RNA, 19 nt, Human
uacauuuguguacacuugu

SEQ ID NO: 1095312 - RNA, 22 nt, Human
agaaaguuaaacagugauaaga

SEQ ID NO: 1095313 - RNA, 22 nt, Human
gcaguggggaaugcuggggaga

SEQ ID NO: 1095314 - RNA, 22 nt, Human
cucuguccuugcacaguuccua

SEQ ID NO: 1095315 - RNA, 22 nt, Human
uguggcucuccuccugcugccc

SEQ ID NO: 1095316 - RNA, 22 nt, Human
aagaugauagaucugucaaugu

SEQ ID NO: 1095317 - RNA, 22 nt, Human
caauacugaguuuacauucauc

SEQ ID NO: 1095318 - RNA, 22 nt, Human
caacuauagggagagugguuaa

SEQ ID NO: 1095319 - RNA, 22 nt, Human
ccugcuggccacugcuccaccu

SEQ ID NO: 1095320 - RNA, 22 nt, Human
ugcucccaggcucuguggucug

SEQ ID NO: 1095321 - RNA, 22 nt, Human
caaagccaggcuuucuaaugua

SEQ ID NO: 1095322 - RNA, 22 nt, Human
uggccuggugucugcgaggccu

SEQ ID NO: 1095323 - RNA, 22 nt, Human
gaaagaagcuuuagauggcuau

SEQ ID NO: 1095324 - RNA, 17 nt, Human
auucucaguguacagug

SEQ ID NO: 1095325 - RNA, 22 nt, Human
ugcaugaugacuaaggugguga

SEQ ID NO: 1095326 - RNA, 22 nt, Human
ucagagucaacuguugccuguu

SEQ ID NO: 1095327 - RNA, 22 nt, Human
ccuggggaauagagucaagggg

SEQ ID NO: 1095328 - RNA, 22 nt, Human
aucuuuuuaucuguuuggaaca

SEQ ID NO: 1095329 - RNA, 22 nt, Human
aggcucauucuugccucugagc

SEQ ID NO: 1095330 - RNA, 22 nt, Human
cagaacagagucaaaaguaugu

SEQ ID NO: 1095331 - RNA, 18 nt, Human
caguuuuuauaucuggca

SEQ ID NO: 1095332 - RNA, 22 nt, Human
aguggguggcgcagaggaggaa

SEQ ID NO: 1095333 - RNA, 22 nt, Human
uugcaagguuucucucugccua

SEQ ID NO: 1095334 - RNA, 22 nt, Human
ucagcacugauguuucagaaga

SEQ ID NO: 1095335 - RNA, 22 nt, Human
guauuucuaguuucuuccacag

SEQ ID NO: 1095336 - RNA, 22 nt, Human
caguuacagcugcaccagagcc

SEQ ID NO: 1095337 - RNA, 22 nt, Human
uugcugaaaucuaugacauccu

SEQ ID NO: 1095338 - RNA, 22 nt, Human
ccagcucucagcgggagacuca

SEQ ID NO: 1095339 - RNA, 22 nt, Human
aaguguagauuauggagugucu

SEQ ID NO: 1095340 - RNA, 22 nt, Human
cucugggcugccuuuuagcucu

SEQ ID NO: 1095341 - RNA, 22 nt, Human
ucccucagcaggaacuggccug

SEQ ID NO: 1095342 - RNA, 22 nt, Human
gggaagagggagcuggaaugau

SEQ ID NO: 1095343 - RNA, 22 nt, Human
acacuuaaucuuacugaggauc

SEQ ID NO: 1095344 - RNA, 22 nt, Human
gugagggcagcuuggucagugu

SEQ ID NO: 1095345 - RNA, 21 nt, Human
cucuucaguggugagcucuuc

SEQ ID NO: 1095346 - RNA, 20 nt, Human
uugauucaagggcugaugga

SEQ ID NO: 1095347 - RNA, 22 nt, Human
agccuggaggaggaguugagca

SEQ ID NO: 1095348 - RNA, 20 nt, Human
ugaaaggugggaauuguggg

SEQ ID NO: 1095349 - RNA, 22 nt, Human
uccuggaggcaaaugaagacuc

SEQ ID NO: 1095350 - RNA, 22 nt, Human
gcagcuggagcaucuucucauc

SEQ ID NO: 1095351 - RNA, 22 nt, Human
caggcagagcaacugguccaga

SEQ ID NO: 1095352 - RNA, 22 nt, Human
auugagaaaggcuuauguuugc

SEQ ID NO: 1095353 - RNA, 22 nt, Human
auaucagacagaaagcauugac

SEQ ID NO: 1095354 - RNA, 22 nt, Human
gacuucuauuaauaccucuacu

SEQ ID NO: 1095355 - RNA, 22 nt, Human
aagagcugcaucuaagccauga

SEQ ID NO: 1095356 - RNA, 22 nt, Human
gcaccugggguacacagcuaca

SEQ ID NO: 1095357 - RNA, 22 nt, Human
agaaaucaugucuuauuucuau

SEQ ID NO: 1095358 - RNA, 22 nt, Human
ccugucugaggaggugcucuuu

SEQ ID NO: 1095359 - RNA, 22 nt, Human
cccagcucucgcacuuacuagc

SEQ ID NO: 1095360 - RNA, 22 nt, Human
gccuggagcagacgugucccgg

SEQ ID NO: 1095361 - RNA, 22 nt, Human
auuucucagugaaaugacaggc

SEQ ID NO: 1095362 - RNA, 20 nt, Human
aucaggauucuugcuuuguu

SEQ ID NO: 1095363 - RNA, 22 nt, Human
ccacugaaggucaacauagagc

SEQ ID NO: 1095364 - RNA, 22 nt, Human
gcugcugggucccucugugcca

SEQ ID NO: 1095365 - RNA, 22 nt, Human
guuucaaagucagaaaaggagg

SEQ ID NO: 1095366 - RNA, 22 nt, Human
aggccugcagcaggagcaaacc

SEQ ID NO: 1095367 - RNA, 22 nt, Human
cugaggccuaagacaugaauga

SEQ ID NO: 1095368 - RNA, 22 nt, Human
ccagggcacguugggacaguac

SEQ ID NO: 1095369 - RNA, 22 nt, Human
uccuuuccaugcuucuagaggc

SEQ ID NO: 1095370 - RNA, 22 nt, Human
uuaacagagaacauagaaguag

SEQ ID NO: 1095371 - RNA, 22 nt, Human
augucagauuccuaaauaucuu

SEQ ID NO: 1095372 - RNA, 22 nt, Human
aucuucccaggcuggggagagg

SEQ ID NO: 1095373 - RNA, 19 nt, Human
ccaggccaucccaguuccc

SEQ ID NO: 1095374 - RNA, 22 nt, Human
uggccuggcugcccugucugga

SEQ ID NO: 1095375 - RNA, 22 nt, Human
cuguggaagguuuagauaggua

SEQ ID NO: 1095376 - RNA, 22 nt, Human
aaagguuuuguucaucgauuuu

SEQ ID NO: 1095377 - RNA, 17 nt, Human
uagcugccccgaaugcu

SEQ ID NO: 1095378 - RNA, 22 nt, Human
ucaggcucucagaccaacagca

SEQ ID NO: 1095379 - RNA, 22 nt, Human
uguucuuaugaauucaagacac

SEQ ID NO: 1095380 - RNA, 22 nt, Human
ggagagcagggaggcugcucug

SEQ ID NO: 1095381 - RNA, 22 nt, Human
ucagggugaaccaggcaggaau

SEQ ID NO: 1095382 - RNA, 22 nt, Human
uagauggcaccuucuguguguc

SEQ ID NO: 1095383 - RNA, 22 nt, Human
aauucucagguaaaaguuaagu

SEQ ID NO: 1095384 - RNA, 22 nt, Human
agugaacaguuuggaacacaug

SEQ ID NO: 1095385 - RNA, 22 nt, Human
acuuuacauuugaucucucuaa

SEQ ID NO: 1095386 - RNA, 22 nt, Human
ccagggugaccagcuggccuag

SEQ ID NO: 1095387 - RNA, 22 nt, Human
cccaucaggaacccaggagccc

SEQ ID NO: 1095388 - RNA, 21 nt, Human
aagaggucaaauuauaaaugg

SEQ ID NO: 1095389 - RNA, 22 nt, Human
gaagaggaugacaggagccggu

SEQ ID NO: 1095390 - RNA, 22 nt, Human
gggaaacuggggacugaaucug

SEQ ID NO: 1095391 - RNA, 22 nt, Human
gaaauauugggacucagagcuu

SEQ ID NO: 1095392 - RNA, 22 nt, Human
uuucuaaguaaacacagcauac

SEQ ID NO: 1095393 - RNA, 15 nt, Human
gcccucaggcgacac

SEQ ID NO: 1095394 - RNA, 22 nt, Human
gccaccuggacagcugugcccu

SEQ ID NO: 1095395 - RNA, 22 nt, Human
gcugcugugccuggcguccugu

SEQ ID NO: 1095396 - RNA, 22 nt, Human
gcuggccugggcagccugucgg

SEQ ID NO: 1095397 - RNA, 22 nt, Human
aauauuucugcagaaugguuuu

SEQ ID NO: 1095398 - RNA, 22 nt, Human
uguuguagcuugacagcagcca

SEQ ID NO: 1095399 - RNA, 22 nt, Human
gggaccuggucuagcacugagc

SEQ ID NO: 1095400 - RNA, 22 nt, Human
cucaggcuugggaggaggccca

SEQ ID NO: 1095401 - RNA, 22 nt, Human
uuucuuuaucauagcaucuuug

SEQ ID NO: 1095402 - RNA, 22 nt, Human
ccagcccuucccaacuggccag

SEQ ID NO: 1095403 - RNA, 22 nt, Human
acagccagggcauugucgccga

SEQ ID NO: 1095404 - RNA, 22 nt, Human
aggugccagaugcacagcugaa

SEQ ID NO: 1095405 - RNA, 22 nt, Human
cugggcugcggugguagguugu

SEQ ID NO: 1095406 - RNA, 22 nt, Human
gaaguuagauguggucacugac

SEQ ID NO: 1095407 - RNA, 22 nt, Human
auaauacaugguuaaccucuuu

SEQ ID NO: 1095408 - RNA, 22 nt, Human
gggcugcacguauucugcucac

SEQ ID NO: 1095409 - RNA, 22 nt, Human
acaacuuugacccuuguucuua

SEQ ID NO: 1095410 - RNA, 22 nt, Human
gaggggcugggcagucccugga

SEQ ID NO: 1095411 - RNA, 22 nt, Human
ccuuuaaagacugcauaacuuc

SEQ ID NO: 1095412 - RNA, 22 nt, Human
cccugugccagagaggcaggag

SEQ ID NO: 1095413 - RNA, 22 nt, Human
uuacagauguaggaacugaagu

SEQ ID NO: 1095414 - RNA, 22 nt, Human
gaggccagaagucugagaucag

SEQ ID NO: 1095415 - RNA, 22 nt, Human
ccagauagaaaagaaggcagga

SEQ ID NO: 1095416 - RNA, 22 nt, Human
ccuucugcucccuggccagggc

SEQ ID NO: 1095417 - RNA, 22 nt, Human
aucuuucagggccauuuguauu

SEQ ID NO: 1095418 - RNA, 22 nt, Human
auucuaggcuugaaacaugaag

SEQ ID NO: 1095419 - RNA, 22 nt, Human
uccugggguccugacugcuucc

SEQ ID NO: 1095420 - RNA, 22 nt, Human
uggcccuguggaggucagugag

SEQ ID NO: 1095421 - RNA, 18 nt, Human
uguagaaaagauaggaau

SEQ ID NO: 1095422 - RNA, 22 nt, Human
ccugggagugucagacuugcuu

SEQ ID NO: 1095423 - RNA, 22 nt, Human
cacugaagccacuggaagagga

SEQ ID NO: 1095424 - RNA, 22 nt, Human
ugaaaucuuuaguuucuguccc

SEQ ID NO: 1095425 - RNA, 22 nt, Human
agggcugcuuugcuaaauaugg

SEQ ID NO: 1095426 - RNA, 22 nt, Human
gagacugauggggcucccagaa

SEQ ID NO: 1095427 - RNA, 22 nt, Human
acagcagugcacagagaacccu

SEQ ID NO: 1095428 - RNA, 22 nt, Human
ugcagcugguuuagaacuagau

SEQ ID NO: 1095429 - RNA, 22 nt, Human
ugcaggcuggcagauaucucau

SEQ ID NO: 1095430 - RNA, 22 nt, Human
cugcucuggcguacucggcauc

SEQ ID NO: 1095431 - RNA, 22 nt, Human
uguuuuaagagcgcacuuuaua

SEQ ID NO: 1095432 - RNA, 22 nt, Human
gagauuuucagcuugacuggga

SEQ ID NO: 1095433 - RNA, 22 nt, Human
cagggugccuguccucagcaaa

SEQ ID NO: 1095434 - RNA, 22 nt, Human
gaaggaagcugucuggaugugu

SEQ ID NO: 1095435 - RNA, 22 nt, Human
uucuggggacauaacaguaagc

SEQ ID NO: 1095436 - RNA, 22 nt, Human
ucagacuugacuuuguaaguuu

SEQ ID NO: 1095437 - RNA, 19 nt, Human
uagauaaggcauuuaaucu

SEQ ID NO: 1095438 - RNA, 22 nt, Human
aaagaaauagauggcauuuaaa

SEQ ID NO: 1095439 - RNA, 22 nt, Human
aaucuuucccuauuaaaugugg

SEQ ID NO: 1095440 - RNA, 22 nt, Human
aagcaaggcccagagcaucagc

SEQ ID NO: 1095441 - RNA, 21 nt, Human
ggagggcagcccagacuggcu

SEQ ID NO: 1095442 - RNA, 22 nt, Human
uugaagaggacuuugcagcugu

SEQ ID NO: 1095443 - RNA, 22 nt, Human
cuuuacauaaggauaaaccugg

SEQ ID NO: 1095444 - RNA, 22 nt, Human
gcagagucugggcagccuccau

SEQ ID NO: 1095445 - RNA, 22 nt, Human
ggugaggaauuggggacugacc

SEQ ID NO: 1095446 - RNA, 22 nt, Human
uuugcauuacuugacuuuaguu

SEQ ID NO: 1095447 - RNA, 20 nt, Human
ugacucugcaaccgucucuc

SEQ ID NO: 1095448 - RNA, 22 nt, Human
ugggaggagcccucugggaagg

SEQ ID NO: 1095449 - RNA, 22 nt, Human
cagagccaggucuaggagucuc

SEQ ID NO: 1095450 - RNA, 22 nt, Human
agugcaaagcagccuguacacc

SEQ ID NO: 1095451 - RNA, 21 nt, Human
cagcagaagcaucuauggaag

SEQ ID NO: 1095452 - RNA, 22 nt, Human
uuggaauugcuauugauaacaa

SEQ ID NO: 1095453 - RNA, 22 nt, Human
ugaagccaucccucagauggcc

SEQ ID NO: 1095454 - RNA, 22 nt, Human
guaagagcacugucuccugcug

SEQ ID NO: 1095455 - RNA, 22 nt, Human
agauacauuguucuaagcauug

SEQ ID NO: 1095456 - RNA, 23 nt, Human
auuuccuaaaagauaaucauuac

SEQ ID NO: 1095457 - RNA, 22 nt, Human
cauuucaagcauugacuucuau

SEQ ID NO: 1095458 - RNA, 22 nt, Human
cugcagccucaaccuccugagc

SEQ ID NO: 1095459 - RNA, 22 nt, Human
aggcugagacugugcauuagug

SEQ ID NO: 1095460 - RNA, 20 nt, Human
uucagcuaccagguaucuuc

SEQ ID NO: 1095461 - RNA, 22 nt, Human
gcaggaacuugcaaaaugagca

SEQ ID NO: 1095462 - RNA, 22 nt, Human
uggucgaccaguuggaaaguaa

SEQ ID NO: 1095463 - RNA, 22 nt, Human
acuuccagaaaugauuuaauuu

SEQ ID NO: 1095464 - RNA, 22 nt, Human
ugggcucagaagauaguuucca

SEQ ID NO: 1095465 - RNA, 22 nt, Human
acacaguaguguggaaaaacau

SEQ ID NO: 1095466 - RNA, 22 nt, Human
uaaaguuuauuugaacaucucu

SEQ ID NO: 1095467 - RNA, 22 nt, Human
aaggcaggaugcggacccaucu

SEQ ID NO: 1095468 - RNA, 22 nt, Human
cugccugcaucccacagugggg

SEQ ID NO: 1095469 - RNA, 22 nt, Human
guuacaaagcacuucaagugaa

SEQ ID NO: 1095470 - RNA, 22 nt, Human
gccucugcccauccaccaucag

SEQ ID NO: 1095471 - RNA, 18 nt, Human
acauacauucugucugca

SEQ ID NO: 1095472 - RNA, 22 nt, Human
aucaggaucaugcuggguggga

SEQ ID NO: 1095473 - RNA, 18 nt, Human
ugaauagggguuugcaga

SEQ ID NO: 1095474 - RNA, 19 nt, Human
gagcccucuccauggccac

SEQ ID NO: 1095475 - RNA, 22 nt, Human
aaauuccagaaacucaguauau

SEQ ID NO: 1095476 - RNA, 22 nt, Human
aguuuuauaaaggcaccucagu

SEQ ID NO: 1095477 - RNA, 22 nt, Human
ggcuccuggggaggugagcuug

SEQ ID NO: 1095478 - RNA, 22 nt, Human
ugauuacagucugacagauguu

SEQ ID NO: 1095479 - RNA, 22 nt, Human
uagagcuggaauuugcagcaag

SEQ ID NO: 1095480 - RNA, 22 nt, Human
acucuucauucaaguaugcaaa

SEQ ID NO: 1095481 - RNA, 22 nt, Human
gaggccaaucaauagggcaaua

SEQ ID NO: 1095482 - RNA, 21 nt, Human
ucaguuccuaagggaggccgc

SEQ ID NO: 1095483 - RNA, 22 nt, Human
ugggugcuucgucagcucugag

SEQ ID NO: 1095484 - RNA, 22 nt, Human
cacuggcaugugaggcgguggc

SEQ ID NO: 1095485 - RNA, 22 nt, Human
ucacaaaaggccauguggcuuc

SEQ ID NO: 1095486 - RNA, 22 nt, Human
uuuggaaaguugucacuuuaga

SEQ ID NO: 1095487 - RNA, 22 nt, Human
guuucauauaccaagcacuuga

SEQ ID NO: 1095488 - RNA, 22 nt, Human
guugggaaggcaagaaguagaa

SEQ ID NO: 1095489 - RNA, 22 nt, Human
acugccugcauccuuaggguag

SEQ ID NO: 1095490 - RNA, 22 nt, Human
acugggcuuaugcuguggagua

SEQ ID NO: 1095491 - RNA, 21 nt, Human
ucccucagaagcucuugguca

SEQ ID NO: 1095492 - RNA, 22 nt, Human
gaggcauaaaucacaguguuca

SEQ ID NO: 1095493 - RNA, 22 nt, Human
caugaaauuugaaguacagcaa

SEQ ID NO: 1095494 - RNA, 22 nt, Human
ccugggaagagcugacaggagg

SEQ ID NO: 1095495 - RNA, 22 nt, Human
gacagcauggugucuguucagg

SEQ ID NO: 1095496 - RNA, 22 nt, Human
uaaaacugaauacauacugagg

SEQ ID NO: 1095497 - RNA, 22 nt, Human
cugcuggggucagagcacuggg

SEQ ID NO: 1095498 - RNA, 22 nt, Human
uacauuguucaugcaugagaaa

SEQ ID NO: 1095499 - RNA, 22 nt, Human
acaugaaguggucagaucaaac

SEQ ID NO: 1095500 - RNA, 22 nt, Human
uggcagcuggagggcaauggcc

SEQ ID NO: 1095501 - RNA, 22 nt, Human
gcaggaguucaauugcccauga

SEQ ID NO: 1095502 - RNA, 22 nt, Human
acacagaugcauuacacaucua

SEQ ID NO: 1095503 - RNA, 22 nt, Human
cagagucaguauugaauugaaa

SEQ ID NO: 1095504 - RNA, 22 nt, Human
ggggcagcuaccggaaguaggg

SEQ ID NO: 1095505 - RNA, 22 nt, Human
caggucuguuuccaucagugcu

SEQ ID NO: 1095506 - RNA, 22 nt, Human
uaacaaguuucauuuauagaau

SEQ ID NO: 1095507 - RNA, 22 nt, Human
uuuagaaguucacacauuuaaa

SEQ ID NO: 1095508 - RNA, 22 nt, Human
gaacacaguacuuuuccugaug

SEQ ID NO: 1095509 - RNA, 22 nt, Human
ccagaggucuccugcacgggau

SEQ ID NO: 1095510 - RNA, 22 nt, Human
aagcuggcaauuaucaaaacug

SEQ ID NO: 1095511 - RNA, 20 nt, Human
agguuccuuuguggagaauu

SEQ ID NO: 1095512 - RNA, 22 nt, Human
cugcccugcuugaugacagcga

SEQ ID NO: 1095513 - RNA, 22 nt, Human
auuauucaaucauauuaaaagu

SEQ ID NO: 1095514 - RNA, 22 nt, Human
cucuccuugcagauggcugccu

SEQ ID NO: 1095515 - RNA, 22 nt, Human
aauaauauuugaagcuucaaag

SEQ ID NO: 1095516 - RNA, 22 nt, Human
ggugcccuucagacagugggca

SEQ ID NO: 1095517 - RNA, 22 nt, Human
uaugcacagaaguuugcugaau

SEQ ID NO: 1095518 - RNA, 22 nt, Human
gcccucagugaccacugauuca

SEQ ID NO: 1095519 - RNA, 21 nt, Human
gagacagcccagugccagggc

SEQ ID NO: 1095520 - RNA, 22 nt, Human
agguggggcccaccaauuugca

SEQ ID NO: 1095521 - RNA, 22 nt, Human
uccaggcugggcugaagggugc

SEQ ID NO: 1095522 - RNA, 22 nt, Human
ucacauacugaaaguccaguga

SEQ ID NO: 1095523 - RNA, 22 nt, Human
acauuuuacaccaagacuucuu

SEQ ID NO: 1095524 - RNA, 22 nt, Human
acauucuacaguuaaccauuag

SEQ ID NO: 1095525 - RNA, 22 nt, Human
aggggagaaaaaugccuucugu

SEQ ID NO: 1095526 - RNA, 22 nt, Human
aaacaagguacacaguaauggu

SEQ ID NO: 1095527 - RNA, 22 nt, Human
aggacccagaggcagaggacgu

SEQ ID NO: 1095528 - RNA, 22 nt, Human
ucauuuguuuagguagcaccau

SEQ ID NO: 1095529 - RNA, 22 nt, Human
cagcugugcugauugcucagua

SEQ ID NO: 1095530 - RNA, 22 nt, Human
cagccagguucaaguccuuaua

SEQ ID NO: 1095531 - RNA, 23 nt, Human
uccuccuggauacaaagggaaca

SEQ ID NO: 1095532 - RNA, 22 nt, Human
aacccaggagacagguugcagu

SEQ ID NO: 1095533 - RNA, 18 nt, Human
gccugggaggaggaaaug

SEQ ID NO: 1095534 - RNA, 22 nt, Human
agccucugcuuaugcaaaggua

SEQ ID NO: 1095535 - RNA, 22 nt, Human
aacaaaguacuuuucagugcuu

SEQ ID NO: 1095536 - RNA, 22 nt, Human
agaccaagacuauaaugagagg

SEQ ID NO: 1095537 - RNA, 22 nt, Human
agccacagugcaagagagaaaa

SEQ ID NO: 1095538 - RNA, 22 nt, Human
gcugugcuugggaagaaucucu

SEQ ID NO: 1095539 - RNA, 22 nt, Human
agggcucauaauuccugacuuc

SEQ ID NO: 1095540 - RNA, 22 nt, Human
gaagcacacugauuuuauuucu

SEQ ID NO: 1095541 - RNA, 22 nt, Human
ucaaugauagacaagaucuaag

SEQ ID NO: 1095542 - RNA, 22 nt, Human
gccaggacucuuccuagaaggu

SEQ ID NO: 1095543 - RNA, 22 nt, Human
agcuccagcccaucugcucgug

SEQ ID NO: 1095544 - RNA, 22 nt, Human
ucuuccuaguuacauaugcaca

SEQ ID NO: 1095545 - RNA, 22 nt, Human
uucuuucugggguccuucggcu

SEQ ID NO: 1095546 - RNA, 22 nt, Human
aaaugcuauuugggaacaacau

SEQ ID NO: 1095547 - RNA, 22 nt, Human
uuucuaagaaaguaaugguuau

SEQ ID NO: 1095548 - RNA, 22 nt, Human
gggcagcagcaggaggucucug

SEQ ID NO: 1095549 - RNA, 22 nt, Human
gugaaggacuagcauggagggc

SEQ ID NO: 1095550 - RNA, 22 nt, Human
uggccuggaagagaggucgagg

SEQ ID NO: 1095551 - RNA, 22 nt, Human
acauacauggauucauggauuc

SEQ ID NO: 1095552 - RNA, 20 nt, Human
uugcaaauaucuauugauug

SEQ ID NO: 1095553 - RNA, 21 nt, Human
ugcagaggcacaaacaagccc

SEQ ID NO: 1095554 - RNA, 22 nt, Human
uuuccucuuauacaguguuuau

SEQ ID NO: 1095555 - RNA, 22 nt, Human
guaaauaacugguaauuggggu

SEQ ID NO: 1095556 - RNA, 22 nt, Human
uguacacaaugauaaauuauua

SEQ ID NO: 1095557 - RNA, 22 nt, Human
ggccugugggaggacagcuggg

SEQ ID NO: 1095558 - RNA, 20 nt, Human
ggcugugcccuuccguggcc

SEQ ID NO: 1095559 - RNA, 20 nt, Human
cauuucauugugucuucacu

SEQ ID NO: 1095560 - RNA, 22 nt, Human
acaaagugcugacauuacaggc

SEQ ID NO: 1095561 - RNA, 22 nt, Human
agggcagacuaggauggaagug

SEQ ID NO: 1095562 - RNA, 22 nt, Human
uccuggccuugcuccugaugcc

SEQ ID NO: 1095563 - RNA, 22 nt, Human
uacagaauguguaucauuacca

SEQ ID NO: 1095564 - RNA, 23 nt, Human
ccugucugugcuggguggacaca

SEQ ID NO: 1095565 - RNA, 22 nt, Human
gaacacaugauuauaaaugcua

SEQ ID NO: 1095566 - RNA, 22 nt, Human
agcugggcuccaagagggaucu

SEQ ID NO: 1095567 - RNA, 22 nt, Human
ccagccuggguguuagaagaca

SEQ ID NO: 1095568 - RNA, 22 nt, Human
cugcaggauucucccaguugga

SEQ ID NO: 1095569 - RNA, 22 nt, Human
guguaugauuucaaauggcuag

SEQ ID NO: 1095570 - RNA, 22 nt, Human
uggccuuguguuuuagagaaag

SEQ ID NO: 1095571 - RNA, 22 nt, Human
ccagucagucaguugcuggcau

SEQ ID NO: 1095572 - RNA, 22 nt, Human
ccucugggugggaggccgggcg

SEQ ID NO: 1095573 - RNA, 22 nt, Human
uaauacauguauuccagagagu

SEQ ID NO: 1095574 - RNA, 22 nt, Human
gcugucacaucaaggcacuaaa

SEQ ID NO: 1095575 - RNA, 22 nt, Human
cacacaguaggcacucauuaau

SEQ ID NO: 1095576 - RNA, 22 nt, Human
agagccagcauuugggcccugc

SEQ ID NO: 1095577 - RNA, 22 nt, Human
aggucaccauggcaugcuccac

SEQ ID NO: 1095578 - RNA, 22 nt, Human
cagauacauuaaaaugaugauu

SEQ ID NO: 1095579 - RNA, 22 nt, Human
uuuaauacagaacuugucaggg

SEQ ID NO: 1095580 - RNA, 22 nt, Human
gagagcuggccagcuucaguau

SEQ ID NO: 1095581 - RNA, 22 nt, Human
uggagccagcccaggccccucu

SEQ ID NO: 1095582 - RNA, 22 nt, Human
aagaauguggguggauaugaug

SEQ ID NO: 1095583 - RNA, 19 nt, Human
gguggcagaacgugggucc

SEQ ID NO: 1095584 - RNA, 22 nt, Human
acaggcugcccgcuccccaccu

SEQ ID NO: 1095585 - RNA, 22 nt, Human
acuugguugaugucauaagguu

SEQ ID NO: 1095586 - RNA, 22 nt, Human
uacccagcuucaagucaggacu

SEQ ID NO: 1095587 - RNA, 22 nt, Human
guccugagaauacuaggcacaa

SEQ ID NO: 1095588 - RNA, 22 nt, Human
ucuguagcaagugagaggcauu

SEQ ID NO: 1095589 - RNA, 22 nt, Human
uaauacuuuugccuuguauuca

SEQ ID NO: 1095590 - RNA, 22 nt, Human
caaaugcaggucagcagguguc

SEQ ID NO: 1095591 - RNA, 20 nt, Human
agagccuggaaaaagacauc

SEQ ID NO: 1095592 - RNA, 22 nt, Human
uaaaugcaagggaaaggcaaga

SEQ ID NO: 1095593 - RNA, 22 nt, Human
acacaaauuguaggauaauugc

SEQ ID NO: 1095594 - RNA, 22 nt, Human
ugggggugaaagucuggacagu

SEQ ID NO: 1095595 - RNA, 22 nt, Human
ggacagcccauacacaugucug

SEQ ID NO: 1095596 - RNA, 22 nt, Human
caugaauuauuuuucacaagau

SEQ ID NO: 1095597 - RNA, 22 nt, Human
cagcuguuacugaaguaaaaug

SEQ ID NO: 1095598 - RNA, 22 nt, Human
uucaacauuuuugaguuuaggu

SEQ ID NO: 1095599 - RNA, 22 nt, Human
uauuuuaucugccagaguggag

SEQ ID NO: 1095600 - RNA, 22 nt, Human
aaaucugggagcagcucggcca

SEQ ID NO: 1095601 - RNA, 22 nt, Human
aguguaucuagguaucuauagu

SEQ ID NO: 1095602 - RNA, 22 nt, Human
ucuuuugugauucuuuaguuac

SEQ ID NO: 1095603 - RNA, 23 nt, Human
cccagagcacagccuccagaugc

SEQ ID NO: 1095604 - RNA, 22 nt, Human
cagaggcagccgggggagaacg

SEQ ID NO: 1095605 - RNA, 22 nt, Human
aaauaucauuuauaacuuuuaa

SEQ ID NO: 1095606 - RNA, 22 nt, Human
cucuuccucucaugcggucaua

SEQ ID NO: 1095607 - RNA, 22 nt, Human
uagcagcacauggugguuuuau

SEQ ID NO: 1095608 - RNA, 22 nt, Human
uacaaagauaguguuagaguaa

SEQ ID NO: 1095609 - RNA, 20 nt, Human
cacuacuuguuuuugucaau

SEQ ID NO: 1095610 - RNA, 22 nt, Human
ucacacaugcuaagccagagau

SEQ ID NO: 1095611 - RNA, 22 nt, Human
agcuccuccugugccaggccag

SEQ ID NO: 1095612 - RNA, 20 nt, Human
accagguggcugaugacacc

SEQ ID NO: 1095613 - RNA, 22 nt, Human
ugcccauggcaggauuucugaa

SEQ ID NO: 1095614 - RNA, 22 nt, Human
cccagcucugcagaccugcccu

SEQ ID NO: 1095615 - RNA, 22 nt, Human
agcugccaaguuucucaguuua

SEQ ID NO: 1095616 - RNA, 22 nt, Human
acagggccucagcugauucugg

SEQ ID NO: 1095617 - RNA, 22 nt, Human
agcaccuguugcacuucauaau

SEQ ID NO: 1095618 - RNA, 22 nt, Human
uauuucaagaacuucuauccau

SEQ ID NO: 1095619 - RNA, 22 nt, Human
auccuugagccuuaucuuuugu

SEQ ID NO: 1095620 - RNA, 22 nt, Human
auuacagaaauauggucaaaga

SEQ ID NO: 1095621 - RNA, 22 nt, Human
gcuggcagccaagugaagaggg

SEQ ID NO: 1095622 - RNA, 22 nt, Human
auaucuuuguaugguucagcag

SEQ ID NO: 1095623 - RNA, 22 nt, Human
gcugucugucucugugacuuaa

SEQ ID NO: 1095624 - RNA, 22 nt, Human
augaugguuguccuaggugcau

SEQ ID NO: 1095625 - RNA, 22 nt, Human
augcugaggacaaagagaucaa

SEQ ID NO: 1095626 - RNA, 22 nt, Human
gaugccugcauuucaggagagu

SEQ ID NO: 1095627 - RNA, 22 nt, Human
uuccaaagucauguugcugaua

SEQ ID NO: 1095628 - RNA, 23 nt, Human
cugugcugggucccaucuugggc

SEQ ID NO: 1095629 - RNA, 22 nt, Human
uaaggccaauuaacaaccaggg

SEQ ID NO: 1095630 - RNA, 21 nt, Human
agcaccaaaugcaggcucugg

SEQ ID NO: 1095631 - RNA, 22 nt, Human
cauacuuugggauaagagugga

SEQ ID NO: 1095632 - RNA, 22 nt, Human
ccuccugggcuccugucugcac

SEQ ID NO: 1095633 - RNA, 22 nt, Human
ccuccuagaggaaccccagggc

SEQ ID NO: 1095634 - RNA, 22 nt, Human
ggccugcuuuccgagccugcag

SEQ ID NO: 1095635 - RNA, 22 nt, Human
ggaagaagggucauuggcagcc

SEQ ID NO: 1095636 - RNA, 22 nt, Human
gccagagugauguaacauauau

SEQ ID NO: 1095637 - RNA, 22 nt, Human
aucauaaaauugcaccauuucu

SEQ ID NO: 1095638 - RNA, 22 nt, Human
ucuuccuagaaggaagaaaucu

SEQ ID NO: 1095639 - RNA, 22 nt, Human
gccaaaguaccuagcccucugc

SEQ ID NO: 1095640 - RNA, 22 nt, Human
cugcuguguuagcagguuuagu

SEQ ID NO: 1095641 - RNA, 22 nt, Human
gggauggcucaaaggagucagg

SEQ ID NO: 1095642 - RNA, 22 nt, Human
gaaaggucaguuccacuuccau

SEQ ID NO: 1095643 - RNA, 22 nt, Human
acacaugugauucuaagacagc

SEQ ID NO: 1095644 - RNA, 22 nt, Human
gcacaauaauuuuuuuaagagg

SEQ ID NO: 1095645 - RNA, 22 nt, Human
acacauuuucuaacagggauca

SEQ ID NO: 1095646 - RNA, 22 nt, Human
agcagcauaucagagaaaguca

SEQ ID NO: 1095647 - RNA, 22 nt, Human
uaugagauaauagauguguaaa

SEQ ID NO: 1095648 - RNA, 22 nt, Human
cccuucuuuguaauaaagauua

SEQ ID NO: 1095649 - RNA, 22 nt, Human
cuggucaggggauggggcucag

SEQ ID NO: 1095650 - RNA, 22 nt, Human
ugcccugucgcucacucccacc

SEQ ID NO: 1095651 - RNA, 22 nt, Human
gcccaagacuguacaguuaaag

SEQ ID NO: 1095652 - RNA, 22 nt, Human
uuucacaucaugggauggaagc

SEQ ID NO: 1095653 - RNA, 22 nt, Human
cugcugagcaucagggcugccc

SEQ ID NO: 1095654 - RNA, 22 nt, Human
cagagguugagcaaaaaugaua

SEQ ID NO: 1095655 - RNA, 22 nt, Human
aaucuuuaaggacucagucucu

SEQ ID NO: 1095656 - RNA, 22 nt, Human
aaacucaaggauuuagacgaag

SEQ ID NO: 1095657 - RNA, 22 nt, Human
uuugcauuguuucaaaagugaa

SEQ ID NO: 1095658 - RNA, 22 nt, Human
ucucuguaguugggcagcugcu

SEQ ID NO: 1095659 - RNA, 18 nt, Human
acugugugaauuagcucc

SEQ ID NO: 1095660 - RNA, 22 nt, Human
caggcccagcccagcccuucga

SEQ ID NO: 1095661 - RNA, 22 nt, Human
uagaaacauguucuguucuguu

SEQ ID NO: 1095662 - RNA, 22 nt, Human
ucaggccuucagaccuggcccg

SEQ ID NO: 1095663 - RNA, 22 nt, Human
ccacacagauaaguguuuucua

SEQ ID NO: 1095664 - RNA, 22 nt, Human
ugggaggacuugugggcuucau

SEQ ID NO: 1095665 - RNA, 22 nt, Human
cuggcuccacucccugccugac

SEQ ID NO: 1095666 - RNA, 22 nt, Human
ugggcagcagcaaagccagacu

SEQ ID NO: 1095667 - RNA, 22 nt, Human
uggagccaaugaacauuugcug

SEQ ID NO: 1095668 - RNA, 19 nt, Human
gcugugccccugccgcuug

SEQ ID NO: 1095669 - RNA, 22 nt, Human
cugcuggccuagcccauccucu

SEQ ID NO: 1095670 - RNA, 22 nt, Human
uucaguaugacagacgcauugg

SEQ ID NO: 1095671 - RNA, 22 nt, Human
gcugggcuuguggccagcuggg

SEQ ID NO: 1095672 - RNA, 22 nt, Human
cuggggacucauucagagcaua

SEQ ID NO: 1095673 - RNA, 22 nt, Human
uucuaagaggcuaaugaagaau

SEQ ID NO: 1095674 - RNA, 23 nt, Human
acaguuauagcugugaauaacau

SEQ ID NO: 1095675 - RNA, 22 nt, Human
agaacagcaguuaugguucauu

SEQ ID NO: 1095676 - RNA, 22 nt, Human
ugacaauauugagucuuagguu

SEQ ID NO: 1095677 - RNA, 21 nt, Human
cugaggcaugcaggccugggc

SEQ ID NO: 1095678 - RNA, 22 nt, Human
cagacagaggcuguaugagggc

SEQ ID NO: 1095679 - RNA, 21 nt, Human
ucccaagaauaugcauaaguu

SEQ ID NO: 1095680 - RNA, 22 nt, Human
uaagucauaagucaugauguua

SEQ ID NO: 1095681 - RNA, 22 nt, Human
cuccaggagcugugucuuucuu

SEQ ID NO: 1095682 - RNA, 22 nt, Human
cacagauaaggauguuaauuuu

SEQ ID NO: 1095683 - RNA, 22 nt, Human
agggcugagugggagagaguug

SEQ ID NO: 1095684 - RNA, 22 nt, Human
acccacacaucucuaauucagu

SEQ ID NO: 1095685 - RNA, 22 nt, Human
gcucaggaucagccaccucuuu

SEQ ID NO: 1095686 - RNA, 22 nt, Human
gggcccugcguccggaagucug

SEQ ID NO: 1095687 - RNA, 19 nt, Human
ugucccagacuccgugucu

SEQ ID NO: 1095688 - RNA, 22 nt, Human
gcaggaacaguuuaucucuggc

SEQ ID NO: 1095689 - RNA, 22 nt, Human
gagcuagaauuaggccaauuuc

SEQ ID NO: 1095690 - RNA, 22 nt, Human
auaaacaucuguuucucuucug

SEQ ID NO: 1095691 - RNA, 23 nt, Human
cugcccugaucuugaucuauugu

SEQ ID NO: 1095692 - RNA, 22 nt, Human
cugaguggaacauaggaugaua

SEQ ID NO: 1095693 - RNA, 22 nt, Human
ugcauuuccagauuucuggagu

SEQ ID NO: 1095694 - RNA, 22 nt, Human
ccugugcccucagccuggcucu

SEQ ID NO: 1095695 - RNA, 22 nt, Human
aggaccagaggccagagucagc

SEQ ID NO: 1095696 - RNA, 22 nt, Human
cagcuguucagcaacucgcaga

SEQ ID NO: 1095697 - RNA, 22 nt, Human
ucacugcucucuaagcaucgcc

SEQ ID NO: 1095698 - RNA, 22 nt, Human
cucaggauugugccuagggaga

SEQ ID NO: 1095699 - RNA, 22 nt, Human
ggcaggcugggugucauggagu

SEQ ID NO: 1095700 - RNA, 22 nt, Human
uucauuacugcgguagucacac

SEQ ID NO: 1095701 - RNA, 22 nt, Human
uauuuaaaauagugcuccagca

SEQ ID NO: 1095702 - RNA, 22 nt, Human
ggugaguugggguucacagguc

SEQ ID NO: 1095703 - RNA, 22 nt, Human
agcguggguccaaggcucuggu

SEQ ID NO: 1095704 - RNA, 22 nt, Human
agacacaguguugaaggcuagu

SEQ ID NO: 1095705 - RNA, 22 nt, Human
cuccuggaguccuuuccuauuc

SEQ ID NO: 1095706 - RNA, 22 nt, Human
gcucucugaggugcuggcagag

SEQ ID NO: 1095707 - RNA, 22 nt, Human
cuuccuugcugucugcuccagg

SEQ ID NO: 1095708 - RNA, 22 nt, Human
auuauucaaauucccacuauac

SEQ ID NO: 1095709 - RNA, 22 nt, Human
caauuuuuaaacuaugaaguug

SEQ ID NO: 1095710 - RNA, 22 nt, Human
ucaggaucggccuuuuuuuaag

SEQ ID NO: 1095711 - RNA, 22 nt, Human
uuugcaaaguccauugaaguua

SEQ ID NO: 1095712 - RNA, 22 nt, Human
acaucagucuuuugcauacaua

SEQ ID NO: 1095713 - RNA, 22 nt, Human
acugccuggcagagguuugcaa

SEQ ID NO: 1095714 - RNA, 22 nt, Human
gccuuucaguuccaucaaagga

SEQ ID NO: 1095715 - RNA, 22 nt, Human
cugaaacuggaguccuuauauc

SEQ ID NO: 1095716 - RNA, 19 nt, Human
uggccagguacugucugcu

SEQ ID NO: 1095717 - RNA, 22 nt, Human
aaugaacauggacaaguuaaua

SEQ ID NO: 1095718 - RNA, 22 nt, Human
gaucuguuauaaucucuuuuau

SEQ ID NO: 1095719 - RNA, 22 nt, Human
aagaauaacacuuagguuuugc

SEQ ID NO: 1095720 - RNA, 22 nt, Human
gguggagcuggaccaggagagg

SEQ ID NO: 1095721 - RNA, 22 nt, Human
ugggcuucugauguugagugcu

SEQ ID NO: 1095722 - RNA, 22 nt, Human
ugagauuuuccuaaauauaaug

SEQ ID NO: 1095723 - RNA, 22 nt, Human
uacagaaaaacaucuggagccg

SEQ ID NO: 1095724 - RNA, 22 nt, Human
uuuccaauaaggucaccuuccu

SEQ ID NO: 1095725 - RNA, 22 nt, Human
gggaacacagacuugaugauga

SEQ ID NO: 1095726 - RNA, 22 nt, Human
uuuacagagaauguacauaaag

SEQ ID NO: 1095727 - RNA, 22 nt, Human
uuuuaagaugcuaguauuucag

SEQ ID NO: 1095728 - RNA, 22 nt, Human
acaaaaaccguggauucagcau

SEQ ID NO: 1095729 - RNA, 21 nt, Human
ccuggcagaagccugauaugc

SEQ ID NO: 1095730 - RNA, 22 nt, Human
uacagaagcugagacacugaga

SEQ ID NO: 1095731 - RNA, 22 nt, Human
caggaaccuugucuguguuguu

SEQ ID NO: 1095732 - RNA, 22 nt, Human
uggcccugacuuggaggccuga

SEQ ID NO: 1095733 - RNA, 22 nt, Human
ugucaaaaugacuuuacuacag

SEQ ID NO: 1095734 - RNA, 22 nt, Human
aaucacaucacugagaaugagg

SEQ ID NO: 1095735 - RNA, 22 nt, Human
gcaagcugcucuuauguggagg

SEQ ID NO: 1095736 - RNA, 22 nt, Human
aucacaaaggguuuucucugag

SEQ ID NO: 1095737 - RNA, 22 nt, Human
uguagauacacacauauagugg

SEQ ID NO: 1095738 - RNA, 22 nt, Human
ugacuucaaaggcucuacuccu

SEQ ID NO: 1095739 - RNA, 22 nt, Human
gguggguauaguuagggccucu

SEQ ID NO: 1095740 - RNA, 22 nt, Human
cagucuuaggagaaacuacaga

SEQ ID NO: 1095741 - RNA, 22 nt, Human
uuuguuaauucuuauguuagag

SEQ ID NO: 1095742 - RNA, 22 nt, Human
aguaugaagaauacauagauga

SEQ ID NO: 1095743 - RNA, 22 nt, Human
aaauauguuuuccaguugucau

SEQ ID NO: 1095744 - RNA, 22 nt, Human
ucaugcuuauugcauauuugga

SEQ ID NO: 1095745 - RNA, 22 nt, Human
aaagucauacauggugcuuacu

SEQ ID NO: 1095746 - RNA, 22 nt, Human
gagcucagacucgggccugggg

SEQ ID NO: 1095747 - RNA, 22 nt, Human
agagauguucauucagcauguu

SEQ ID NO: 1095748 - RNA, 22 nt, Human
agugguggagagaugaggacac

SEQ ID NO: 1095749 - RNA, 22 nt, Human
gagggcugauaaaugcgcaugg

SEQ ID NO: 1095750 - RNA, 22 nt, Human
cugucacacugauaucaggcuu

SEQ ID NO: 1095751 - RNA, 21 nt, Human
uauacagaggggaacaggaga

SEQ ID NO: 1095752 - RNA, 22 nt, Human
uuucaguuguuuuagcucugug

SEQ ID NO: 1095753 - RNA, 22 nt, Human
auuuccauacacccauuucuga

SEQ ID NO: 1095754 - RNA, 22 nt, Human
agaaaucagaacccugaaguuc

SEQ ID NO: 1095755 - RNA, 16 nt, Human
gcagguggaucaccug

SEQ ID NO: 1095756 - RNA, 22 nt, Human
uguuuauucauggcuaaugaaa

SEQ ID NO: 1095757 - RNA, 20 nt, Human
ugugaggagcauggccgcug

SEQ ID NO: 1095758 - RNA, 22 nt, Human
agcccugccucuccaaugccca

SEQ ID NO: 1095759 - RNA, 22 nt, Human
gugggccucuugaggguggcua

SEQ ID NO: 1095760 - RNA, 22 nt, Human
auauaucugcaguacugaagaa

SEQ ID NO: 1095761 - RNA, 22 nt, Human
aggagcagcccacuccuguccu

SEQ ID NO: 1095762 - RNA, 22 nt, Human
ugcagugaggcaguuggguugg

SEQ ID NO: 1095763 - RNA, 22 nt, Human
ggccugcucuggcuguggucag

SEQ ID NO: 1095764 - RNA, 22 nt, Human
cacagcuaugagcagccuagcu

SEQ ID NO: 1095765 - RNA, 22 nt, Human
uuaagaagugauuuuccucauu

SEQ ID NO: 1095766 - RNA, 21 nt, Human
uccauaagagaccaucuccua

SEQ ID NO: 1095767 - RNA, 22 nt, Human
uguggaaaauuggaacguuccu

SEQ ID NO: 1095768 - RNA, 22 nt, Human
ucugucauugcaauaaaauuuc

SEQ ID NO: 1095769 - RNA, 22 nt, Human
agaaaagugcucuagugagagc

SEQ ID NO: 1095770 - RNA, 22 nt, Human
agauacauggaacgucaaaccu

SEQ ID NO: 1095771 - RNA, 22 nt, Human
agggcccaggacagcaucaggg

SEQ ID NO: 1095772 - RNA, 20 nt, Human
cuuuaguuauuaacagcacu

SEQ ID NO: 1095773 - RNA, 22 nt, Human
cugucucuguugccuguaggug

SEQ ID NO: 1095774 - RNA, 22 nt, Human
accagugcuuccugcuggagcu

SEQ ID NO: 1095775 - RNA, 22 nt, Human
cuguauauggcuuacuuuauau

SEQ ID NO: 1095776 - RNA, 22 nt, Human
uucugggcaguuggaaauuuca

SEQ ID NO: 1095777 - RNA, 22 nt, Human
gcucagugcaucauuccaggcu

SEQ ID NO: 1095778 - RNA, 22 nt, Human
cugccuugguucccagccagca

SEQ ID NO: 1095779 - RNA, 22 nt, Human
uuuauucuagcucagaauaguu

SEQ ID NO: 1095780 - RNA, 22 nt, Human
caagcagaaaucuagaacucca

SEQ ID NO: 1095781 - RNA, 22 nt, Human
uaugaaaauuuagcugaagcau

SEQ ID NO: 1095782 - RNA, 20 nt, Human
ccugcugggaacccucugaa

SEQ ID NO: 1095783 - RNA, 22 nt, Human
gcugacucuuugacaaaaugca

SEQ ID NO: 1095784 - RNA, 22 nt, Human
uuuccaaacccagcgagcuaca

SEQ ID NO: 1095785 - RNA, 22 nt, Human
agccucucugaugugacagcua

SEQ ID NO: 1095786 - RNA, 22 nt, Human
ugaugugugauucauucucaaa

SEQ ID NO: 1095787 - RNA, 22 nt, Human
ucccucuaaacuguaagauucu

SEQ ID NO: 1095788 - RNA, 22 nt, Human
gcagggugugucucauacaguu

SEQ ID NO: 1095789 - RNA, 22 nt, Human
augggcagcugcagcaguggug

SEQ ID NO: 1095790 - RNA, 22 nt, Human
uaggaguaacucucgucaucau

SEQ ID NO: 1095791 - RNA, 22 nt, Human
uccucuggggucagggcacuac

SEQ ID NO: 1095792 - RNA, 20 nt, Human
caggcagaggaugcugacca

SEQ ID NO: 1095793 - RNA, 22 nt, Human
auguuucaccagcaaauuaccu

SEQ ID NO: 1095794 - RNA, 22 nt, Human
ccagggaaacuuuggaguggag

SEQ ID NO: 1095795 - RNA, 17 nt, Human
uaaauacacaaggguau

SEQ ID NO: 1095796 - RNA, 22 nt, Human
acaauuuuucaaagaagcuuau

SEQ ID NO: 1095797 - RNA, 22 nt, Human
ccaggcaucacgggcauguggc

SEQ ID NO: 1095798 - RNA, 22 nt, Human
agccccucuguggcucugccuc

SEQ ID NO: 1095799 - RNA, 22 nt, Human
aaguuacuggcaagggcugcag

SEQ ID NO: 1095800 - RNA, 22 nt, Human
ugggccugacucaccugccucc

SEQ ID NO: 1095801 - RNA, 21 nt, Human
ggcuccugcuuugugaggggc

SEQ ID NO: 1095802 - RNA, 22 nt, Human
cagugagguggauggauggccu

SEQ ID NO: 1095803 - RNA, 18 nt, Human
uccaggccugaagugucc

SEQ ID NO: 1095804 - RNA, 22 nt, Human
agggcuggcuaggugcguuccc

SEQ ID NO: 1095805 - RNA, 22 nt, Human
aggaggcuguggagcacuccau

SEQ ID NO: 1095806 - RNA, 22 nt, Human
gaggcagugucgguggcaggau

SEQ ID NO: 1095807 - RNA, 19 nt, Human
gacucacaccuuccgcugu

SEQ ID NO: 1095808 - RNA, 19 nt, Human
guucuuuucaccucugugc

SEQ ID NO: 1095809 - RNA, 22 nt, Human
cagagcugagaauguugaugcu

SEQ ID NO: 1095810 - RNA, 22 nt, Human
agcagaggacaguucuuaggaa

SEQ ID NO: 1095811 - RNA, 19 nt, Human
gagcagcugcacccauuga

SEQ ID NO: 1095812 - RNA, 22 nt, Human
uucuuugaguuaguacagucca

SEQ ID NO: 1095813 - RNA, 22 nt, Human
agagcagcuggggcagagacca

SEQ ID NO: 1095814 - RNA, 22 nt, Human
ugcuggguuaccuaagccuaaa

SEQ ID NO: 1095815 - RNA, 22 nt, Human
acaauauaguccaugagcaugc

SEQ ID NO: 1095816 - RNA, 22 nt, Human
ugcagaaauaaagauauuauca

SEQ ID NO: 1095817 - RNA, 22 nt, Human
auguaacauaugugaucgcauu

SEQ ID NO: 1095818 - RNA, 22 nt, Human
agugagguggggucacagggac

SEQ ID NO: 1095819 - RNA, 22 nt, Human
ggcugccuugacccuggcuccg

SEQ ID NO: 1095820 - RNA, 22 nt, Human
ugaggcaggaauggggaaaagu

SEQ ID NO: 1095821 - RNA, 22 nt, Human
uggggaagaauaauguauguac

SEQ ID NO: 1095822 - RNA, 22 nt, Human
aggcugccucgugagcucgcug

SEQ ID NO: 1095823 - RNA, 22 nt, Human
aucuuuagacaggaagcaauca

SEQ ID NO: 1095824 - RNA, 22 nt, Human
gcagggcagaccuccagccuau

SEQ ID NO: 1095825 - RNA, 22 nt, Human
guggcaguugcuguggcaauaa

SEQ ID NO: 1095826 - RNA, 22 nt, Human
cacugaaggaaggacuacugca

SEQ ID NO: 1095827 - RNA, 22 nt, Human
auuuuuaugacaaaccauccuc

SEQ ID NO: 1095828 - RNA, 21 nt, Human
ccuucucuugcuucagcuuca

SEQ ID NO: 1095829 - RNA, 22 nt, Human
agggcccuaaggaaggcacaca

SEQ ID NO: 1095830 - RNA, 22 nt, Human
aagcagcauugugguaggggag

SEQ ID NO: 1095831 - RNA, 22 nt, Human
accagcagaguugaggaggaca

SEQ ID NO: 1095832 - RNA, 22 nt, Human
aguguuugagacacauuucacu

SEQ ID NO: 1095833 - RNA, 19 nt, Human
cccaaggcccugggcaggc

SEQ ID NO: 1095834 - RNA, 22 nt, Human
cuuccaaauguaaauaaguuuc

SEQ ID NO: 1095835 - RNA, 22 nt, Human
ccagcuuguuugaagcucguca

SEQ ID NO: 1095836 - RNA, 22 nt, Human
ucuucaugauacccuaagccac

SEQ ID NO: 1095837 - RNA, 22 nt, Human
ugaguaauaaacugucuugcuc

SEQ ID NO: 1095838 - RNA, 22 nt, Human
aucugacaaccuauugacuuga

SEQ ID NO: 1095839 - RNA, 22 nt, Human
gagaagguggaccugaaggagc

SEQ ID NO: 1095840 - RNA, 22 nt, Human
auaauuaucucagacacuuguu

SEQ ID NO: 1095841 - RNA, 20 nt, Human
auacacaugcagacagaugc

SEQ ID NO: 1095842 - RNA, 22 nt, Human
ggcucuggaaaguguccuugau

SEQ ID NO: 1095843 - RNA, 22 nt, Human
accuggacaccugcugucaucu

SEQ ID NO: 1095844 - RNA, 22 nt, Human
ucccuggagauaacuucuggga

SEQ ID NO: 1095845 - RNA, 22 nt, Human
agagaagagcaaugauaaauuu

SEQ ID NO: 1095846 - RNA, 22 nt, Human
gccagaagacuggagucagcug

SEQ ID NO: 1095847 - RNA, 22 nt, Human
augaaaguuugcauuccucagu

SEQ ID NO: 1095848 - RNA, 22 nt, Human
uuuucuaagggaaacguccucc

SEQ ID NO: 1095849 - RNA, 22 nt, Human
acccagcuggaugcauggaggc

SEQ ID NO: 1095850 - RNA, 22 nt, Human
acagguggcauaggcaguuuga

SEQ ID NO: 1095851 - RNA, 22 nt, Human
aguauuuagagacacaagaugg

SEQ ID NO: 1095852 - RNA, 22 nt, Human
ucuccaagaaaagaucucagcu

SEQ ID NO: 1095853 - RNA, 22 nt, Human
caagaaacaccaaugacugcug

SEQ ID NO: 1095854 - RNA, 22 nt, Human
acaguguacuagguacauguuc

SEQ ID NO: 1095855 - RNA, 22 nt, Human
ggaccacagcacuuggcuugag

SEQ ID NO: 1095856 - RNA, 22 nt, Human
uuaacacauauuuaucaauugc

SEQ ID NO: 1095857 - RNA, 22 nt, Human
caguguguggauccucccagga

SEQ ID NO: 1095858 - RNA, 22 nt, Human
uucaacauuugauacaagucag

SEQ ID NO: 1095859 - RNA, 22 nt, Human
aaggcacuguacuaguuaguua

SEQ ID NO: 1095860 - RNA, 22 nt, Human
ucugcagacaggaagcugaggc

SEQ ID NO: 1095861 - RNA, 22 nt, Human
ggcagauggagaagcagcaggu

SEQ ID NO: 1095862 - RNA, 23 nt, Human
aggcccaacucugugagggcugc

SEQ ID NO: 1095863 - RNA, 22 nt, Human
cuggccacaacuagcccaggac

SEQ ID NO: 1095864 - RNA, 22 nt, Human
gcugagguggcugccuuaguaa

SEQ ID NO: 1095865 - RNA, 20 nt, Human
caguccaggcugcagcaucu

SEQ ID NO: 1095866 - RNA, 22 nt, Human
cugagcagcguggggagcuggc

SEQ ID NO: 1095867 - RNA, 22 nt, Human
uggagccagcaggacucagagg

SEQ ID NO: 1095868 - RNA, 23 nt, Human
agcagcaaaaauuuaucuuucug

SEQ ID NO: 1095869 - RNA, 21 nt, Human
ucuugaaaaguuagauucucu

SEQ ID NO: 1095870 - RNA, 22 nt, Human
uggcugagaaguucugguggga

SEQ ID NO: 1095871 - RNA, 22 nt, Human
cagugggaagaaugcagccucc

SEQ ID NO: 1095872 - RNA, 22 nt, Human
ucuuagaaugucaacugauguu

SEQ ID NO: 1095873 - RNA, 22 nt, Human
ugcaugcaacaauucuucuaua

SEQ ID NO: 1095874 - RNA, 22 nt, Human
gcucugggugaacuuggagcaa

SEQ ID NO: 1095875 - RNA, 22 nt, Human
aaucacaucucauucaacagcc

SEQ ID NO: 1095876 - RNA, 21 nt, Human
ugaaacuaccuacaagcuacc

SEQ ID NO: 1095877 - RNA, 21 nt, Human
uuucacaaaaguaugugacaa

SEQ ID NO: 1095878 - RNA, 22 nt, Human
uaaaaucaugacagauugacau

SEQ ID NO: 1095879 - RNA, 22 nt, Human
cagagccugcucacgucucugu

SEQ ID NO: 1095880 - RNA, 22 nt, Human
uguacaauggcuauaauacccu

SEQ ID NO: 1095881 - RNA, 22 nt, Human
aagcugcagacccccugucuca

SEQ ID NO: 1095882 - RNA, 22 nt, Human
agggcccucuggcaggccaggc

SEQ ID NO: 1095883 - RNA, 22 nt, Human
ccauccugcauugcuauucaga

SEQ ID NO: 1095884 - RNA, 22 nt, Human
aaaaccaggcguuuccuauuau

SEQ ID NO: 1095885 - RNA, 22 nt, Human
cucaggaaaggccaugcaaggg

SEQ ID NO: 1095886 - RNA, 22 nt, Human
ggccaggaagggaagaucagca

SEQ ID NO: 1095887 - RNA, 22 nt, Human
aacuucuugguccugagcuguu

SEQ ID NO: 1095888 - RNA, 22 nt, Human
uggcccugacugauguggaggg

SEQ ID NO: 1095889 - RNA, 22 nt, Human
aaacacugcaggguuuacuuga

SEQ ID NO: 1095890 - RNA, 22 nt, Human
uucuauauuggaagugagaaau

SEQ ID NO: 1095891 - RNA, 22 nt, Human
caugggcuuuggaggcuggagg

SEQ ID NO: 1095892 - RNA, 22 nt, Human
cugggcacagcguugggcucuu

SEQ ID NO: 1095893 - RNA, 21 nt, Human
acagccugucaucucaugguc

SEQ ID NO: 1095894 - RNA, 22 nt, Human
ggcucuggagacauguggagag

SEQ ID NO: 1095895 - RNA, 23 nt, Human
agaguggccuacucacacucauu

SEQ ID NO: 1095896 - RNA, 22 nt, Human
agcaccaucagaugcaauaucu

SEQ ID NO: 1095897 - RNA, 22 nt, Human
gccaggcuccccggaucccugg

SEQ ID NO: 1095898 - RNA, 20 nt, Human
agucccuuuggucagguauu

SEQ ID NO: 1095899 - RNA, 22 nt, Human
gcugcugggcacccccugagcu

SEQ ID NO: 1095900 - RNA, 22 nt, Human
acugagagaacgggcugcuccc

SEQ ID NO: 1095901 - RNA, 22 nt, Human
gagcugccugugugccaugaug

SEQ ID NO: 1095902 - RNA, 22 nt, Human
ugggcugcccaagguggccaug

SEQ ID NO: 1095903 - RNA, 22 nt, Human
cagggcugguuugucgaagaaa

SEQ ID NO: 1095904 - RNA, 22 nt, Human
ccaaauauuaacaaaguaauuu

SEQ ID NO: 1095905 - RNA, 22 nt, Human
ccucugugucuugguuucaaga

SEQ ID NO: 1095906 - RNA, 20 nt, Human
aggcugaguucuaugcacuu

SEQ ID NO: 1095907 - RNA, 22 nt, Human
gcaguggaagccucuuuaagca

SEQ ID NO: 1095908 - RNA, 22 nt, Human
caaaauaccacgacuuguuuua

SEQ ID NO: 1095909 - RNA, 22 nt, Human
uagcagaggguagugccggggc

SEQ ID NO: 1095910 - RNA, 20 nt, Human
cacaggccuugugagcagac

SEQ ID NO: 1095911 - RNA, 22 nt, Human
gggcaggucugggucagccuga

SEQ ID NO: 1095912 - RNA, 18 nt, Human
acagugauuguucuaugc

SEQ ID NO: 1095913 - RNA, 22 nt, Human
acuuuacaggcacuucaaguau

SEQ ID NO: 1095914 - RNA, 22 nt, Human
guucacagcugggacaagacug

SEQ ID NO: 1095915 - RNA, 22 nt, Human
acaaagaaggaauuggucuuua

SEQ ID NO: 1095916 - RNA, 22 nt, Human
auauuuguugaguucuuaugau

SEQ ID NO: 1095917 - RNA, 22 nt, Human
caguggggaggccaggauagaa

SEQ ID NO: 1095918 - RNA, 22 nt, Human
aagccagguuccauggaggagc

SEQ ID NO: 1095919 - RNA, 22 nt, Human
augcugugccuggaaagcggcu

SEQ ID NO: 1095920 - RNA, 22 nt, Human
aggaacaucuaucacauaaacg

SEQ ID NO: 1095921 - RNA, 22 nt, Human
cuggcuggccggagcgaggcgg

SEQ ID NO: 1095922 - RNA, 22 nt, Human
cuguggcucauucuugguggca

SEQ ID NO: 1095923 - RNA, 22 nt, Human
ccagggaaaggagguugacuug

SEQ ID NO: 1095924 - RNA, 22 nt, Human
cagcauuggguuaccuuuguuu

SEQ ID NO: 1095925 - RNA, 22 nt, Human
caggcugcggucggcucugguc

SEQ ID NO: 1095926 - RNA, 22 nt, Human
auauugaacccuacagacugua

SEQ ID NO: 1095927 - RNA, 22 nt, Human
gcacagaacagagaaauagcca

SEQ ID NO: 1095928 - RNA, 22 nt, Human
ugugaaggagaugaagggagug

SEQ ID NO: 1095929 - RNA, 18 nt, Human
uuaucucuggcaugugcc

SEQ ID NO: 1095930 - RNA, 22 nt, Human
caggggcuguggcacauggugu

SEQ ID NO: 1095931 - RNA, 22 nt, Human
uccugggaagacugugaggaca

SEQ ID NO: 1095932 - RNA, 17 nt, Human
aggccagaugaggcaag

SEQ ID NO: 1095933 - RNA, 17 nt, Human
aaacugaaaaauucacu

SEQ ID NO: 1095934 - RNA, 22 nt, Human
uacacagacucuucaauucaga

SEQ ID NO: 1095935 - RNA, 21 nt, Human
guauugcagaguuaugugcuc

SEQ ID NO: 1095936 - RNA, 22 nt, Human
uugcauacugaccucuaagcuu

SEQ ID NO: 1095937 - RNA, 22 nt, Human
uggagcugagagccaggcuggc

SEQ ID NO: 1095938 - RNA, 22 nt, Human
aagagggguggucugugaggau

SEQ ID NO: 1095939 - RNA, 22 nt, Human
aaugaacaacuugauuuuugcc

SEQ ID NO: 1095940 - RNA, 22 nt, Human
cccuuuaaguccuggaacaaag

SEQ ID NO: 1095941 - RNA, 22 nt, Human
ggcaggaaguagcagucugagc

SEQ ID NO: 1095942 - RNA, 22 nt, Human
ugguggccaauucacagggcuc

SEQ ID NO: 1095943 - RNA, 22 nt, Human
ugucucugaacagcuuacuaaa

SEQ ID NO: 1095944 - RNA, 22 nt, Human
cagaggccaguggacaagggcc

SEQ ID NO: 1095945 - RNA, 22 nt, Human
aaaggaagaucuauacacccca

SEQ ID NO: 1095946 - RNA, 22 nt, Human
uccuggaguugugcagugcaca

SEQ ID NO: 1095947 - RNA, 22 nt, Human
guggcucuccauugacauggaa

SEQ ID NO: 1095948 - RNA, 22 nt, Human
gcuccccuugguccuccuggga

SEQ ID NO: 1095949 - RNA, 22 nt, Human
gcccagcugucuggcagggaug

SEQ ID NO: 1095950 - RNA, 22 nt, Human
ucagcuuggacagcuugguuga

SEQ ID NO: 1095951 - RNA, 20 nt, Human
uucuucucuaguuaucuuca

SEQ ID NO: 1095952 - RNA, 22 nt, Human
cccugcagaaccacagacaaac

SEQ ID NO: 1095953 - RNA, 22 nt, Human
ggcccaugcauccugugcagcc

SEQ ID NO: 1095954 - RNA, 22 nt, Human
uuucauagccuucuaaugaguu

SEQ ID NO: 1095955 - RNA, 22 nt, Human
ugaguucucacccauucuucuu

SEQ ID NO: 1095956 - RNA, 22 nt, Human
ugaagcaggugaauggaugucg

SEQ ID NO: 1095957 - RNA, 22 nt, Human
ccagagacgucggucagggcgc

SEQ ID NO: 1095958 - RNA, 22 nt, Human
uucagcuauggagucuuaguua

SEQ ID NO: 1095959 - RNA, 22 nt, Human
gggcuucucuuaugcuaacugg

SEQ ID NO: 1095960 - RNA, 22 nt, Human
agugcagcaacaaacugcccuc

SEQ ID NO: 1095961 - RNA, 20 nt, Human
uggagcuguaaucuugucug

SEQ ID NO: 1095962 - RNA, 22 nt, Human
gcucccagacugaccagaggug

SEQ ID NO: 1095963 - RNA, 22 nt, Human
gaacacaguuuagaaaaugcug

SEQ ID NO: 1095964 - RNA, 22 nt, Human
cuggcucacaggugagaugcau

SEQ ID NO: 1095965 - RNA, 22 nt, Human
uaacacuaagaaucuaaauuua

SEQ ID NO: 1095966 - RNA, 22 nt, Human
ugggggaagagcuuguuaaagu

SEQ ID NO: 1095967 - RNA, 22 nt, Human
gcugucugggaugucacugcug

SEQ ID NO: 1095968 - RNA, 22 nt, Human
ugaacacauaaggcuuuccugu

SEQ ID NO: 1095969 - RNA, 23 nt, Human
uggagaugccccacucccugucu

SEQ ID NO: 1095970 - RNA, 22 nt, Human
gagccaggcaccuucuguguug

SEQ ID NO: 1095971 - RNA, 22 nt, Human
ucuuuagagcucagaaauacag

SEQ ID NO: 1095972 - RNA, 22 nt, Human
ggcuucugcucagccugcacgc

SEQ ID NO: 1095973 - RNA, 22 nt, Human
auuguaaaaguauucuaagauu

SEQ ID NO: 1095974 - RNA, 22 nt, Human
agaggccagguccagaguuugu

SEQ ID NO: 1095975 - RNA, 22 nt, Human
cacugugucaguuugguuagac

SEQ ID NO: 1095976 - RNA, 22 nt, Human
uggccugaauuauggcagaucu

SEQ ID NO: 1095977 - RNA, 23 nt, Human
augaaaguucuuaaaaugucaug

SEQ ID NO: 1095978 - RNA, 22 nt, Human
ugguaauuuccgaagugaguaa

SEQ ID NO: 1095979 - RNA, 22 nt, Human
acugagcugcaagucagggagg

SEQ ID NO: 1095980 - RNA, 22 nt, Human
ggagugacucucggggccacua

SEQ ID NO: 1095981 - RNA, 22 nt, Human
uggaaggaacagaguuugaaac

SEQ ID NO: 1095982 - RNA, 22 nt, Human
acuguuuucuguaaagggccag

SEQ ID NO: 1095983 - RNA, 20 nt, Human
ggcugcugguuuggcucugu

SEQ ID NO: 1095984 - RNA, 22 nt, Human
uccucacauggugagccacaca

SEQ ID NO: 1095985 - RNA, 22 nt, Human
aacaggaaaacagcacaauagc

SEQ ID NO: 1095986 - RNA, 22 nt, Human
uaguggauguucagagauuuga

SEQ ID NO: 1095987 - RNA, 22 nt, Human
ucacucagaaauagaaugaacc

SEQ ID NO: 1095988 - RNA, 22 nt, Human
acaaaacaguguuccugccccu

SEQ ID NO: 1095989 - RNA, 22 nt, Human
gaggaguguauuccacaccacu

SEQ ID NO: 1095990 - RNA, 22 nt, Human
auugaaagauaggcuacugugg

SEQ ID NO: 1095991 - RNA, 22 nt, Human
cugcccugggaguaccuguccu

SEQ ID NO: 1095992 - RNA, 22 nt, Human
uuuuuuauagcaaugaacccac

SEQ ID NO: 1095993 - RNA, 22 nt, Human
ucagaggaacacuguuucaugc

SEQ ID NO: 1095994 - RNA, 23 nt, Human
gccagccuugcucuccugcagcc

SEQ ID NO: 1095995 - RNA, 17 nt, Human
uagcagcaguaauugug

SEQ ID NO: 1095996 - RNA, 22 nt, Human
ccaguggaauuaaaaauaagug

SEQ ID NO: 1095997 - RNA, 22 nt, Human
uggcuuccuccagagcaggagg

SEQ ID NO: 1095998 - RNA, 22 nt, Human
uuggaaggcccugccuagcagg

SEQ ID NO: 1095999 - RNA, 22 nt, Human
cagagcagaagcgguccucaca

SEQ ID NO: 1096000 - RNA, 22 nt, Human
aaaauaugaaguugucaguaug

SEQ ID NO: 1096001 - RNA, 21 nt, Human
gcccucaggggaggauggccu

SEQ ID NO: 1096002 - RNA, 22 nt, Human
gcagggccagguacaagaagca

SEQ ID NO: 1096003 - RNA, 22 nt, Human
cuugccuagguguauauuaaau

SEQ ID NO: 1096004 - RNA, 22 nt, Human
uuuuaauacugcuauuguagga

SEQ ID NO: 1096005 - RNA, 22 nt, Human
cagggcuguggaaaacuggugc

SEQ ID NO: 1096006 - RNA, 21 nt, Human
agcuggcaauguuguccucuu

SEQ ID NO: 1096007 - RNA, 22 nt, Human
cugagaguaauuuucuacuuga

SEQ ID NO: 1096008 - RNA, 22 nt, Human
uauuuucauucugugugacugu

SEQ ID NO: 1096009 - RNA, 20 nt, Human
ggcaggugcuguccccuccu

SEQ ID NO: 1096010 - RNA, 22 nt, Human
ggaaagauguaauauuaucuaa

SEQ ID NO: 1096011 - RNA, 22 nt, Human
ggaaccaguaacuggucauugc

SEQ ID NO: 1096012 - RNA, 22 nt, Human
cacagugaccucuuuaaaaggg

SEQ ID NO: 1096013 - RNA, 22 nt, Human
ucacaucauggagaauuauggg

SEQ ID NO: 1096014 - RNA, 22 nt, Human
ccacccuuggguucggaggccg

SEQ ID NO: 1096015 - RNA, 22 nt, Human
ugagagugccuuguaaaccugc

SEQ ID NO: 1096016 - RNA, 22 nt, Human
agacucaagcagauaggaauua

SEQ ID NO: 1096017 - RNA, 22 nt, Human
aaucaguuagaaggaagagaau

SEQ ID NO: 1096018 - RNA, 22 nt, Human
ucugccuggaugauggcagggc

SEQ ID NO: 1096019 - RNA, 22 nt, Human
uuccaagaagucaacagguagu

SEQ ID NO: 1096020 - RNA, 20 nt, Human
acacaaagcaauggaguaca

SEQ ID NO: 1096021 - RNA, 22 nt, Human
cuggccaguuguccuggcuugg

SEQ ID NO: 1096022 - RNA, 22 nt, Human
cagaagcauugacuccuugcuc

SEQ ID NO: 1096023 - RNA, 22 nt, Human
gccuggagugcaguggcgugau

SEQ ID NO: 1096024 - RNA, 22 nt, Human
cccugcugaaucccauggaguc

SEQ ID NO: 1096025 - RNA, 20 nt, Human
agcaccagugggggcagccc

SEQ ID NO: 1096026 - RNA, 22 nt, Human
accacccauucagaaacacuga

SEQ ID NO: 1096027 - RNA, 22 nt, Human
auaaugaaugcagaguuauuuu

SEQ ID NO: 1096028 - RNA, 22 nt, Human
cauuaacaauuguuuaugcugu

SEQ ID NO: 1096029 - RNA, 22 nt, Human
caguucagcuagaagaaacaaa

SEQ ID NO: 1096030 - RNA, 22 nt, Human
aauaugcauuauacagacugau

SEQ ID NO: 1096031 - RNA, 22 nt, Human
agcaaacagaugucuccuuuag

SEQ ID NO: 1096032 - RNA, 22 nt, Human
uauguucaucuggugcaucagu

SEQ ID NO: 1096033 - RNA, 23 nt, Human
cccuggagcuagucugagcagag

SEQ ID NO: 1096034 - RNA, 22 nt, Human
gccuccugacuuacacugagcu

SEQ ID NO: 1096035 - RNA, 22 nt, Human
uucuuuuuaaaguguguaugca

SEQ ID NO: 1096036 - RNA, 22 nt, Human
uuguucuugccaagacaugaag

SEQ ID NO: 1096037 - RNA, 22 nt, Human
acugcaggagacacagcugcug

SEQ ID NO: 1096038 - RNA, 22 nt, Human
ucucugcucugugccucaguuu

SEQ ID NO: 1096039 - RNA, 22 nt, Human
uaaaaucagccgaccauggugg

SEQ ID NO: 1096040 - RNA, 23 nt, Human
agccagggcacugguggagauug

SEQ ID NO: 1096041 - RNA, 22 nt, Human
cugggcagguauacaaaaaaug

SEQ ID NO: 1096042 - RNA, 22 nt, Human
gccaggugcaccugcccuggcc

SEQ ID NO: 1096043 - RNA, 18 nt, Human
uugauaaacaauuucauu

SEQ ID NO: 1096044 - RNA, 22 nt, Human
aauggacaggagagcauaguca

SEQ ID NO: 1096045 - RNA, 22 nt, Human
ucugaaauauugguaauacuuu

SEQ ID NO: 1096046 - RNA, 22 nt, Human
gcucaggauuucauccaugugu

SEQ ID NO: 1096047 - RNA, 22 nt, Human
acagggaaguucugcaacagga

SEQ ID NO: 1096048 - RNA, 19 nt, Human
gccuaugucuucaaaucau

SEQ ID NO: 1096049 - RNA, 22 nt, Human
cagaguuuugugaacaacuugg

SEQ ID NO: 1096050 - RNA, 22 nt, Human
aaggcacugacugugcagggga

SEQ ID NO: 1096051 - RNA, 22 nt, Human
accaagcuagaacauuacaggc

SEQ ID NO: 1096052 - RNA, 22 nt, Human
uuuuuaugccuacgcugaaaag

SEQ ID NO: 1096053 - RNA, 22 nt, Human
ggggaggaagcuggaacacggg

SEQ ID NO: 1096054 - RNA, 22 nt, Human
ugcucuggagggugaagcuuuu

SEQ ID NO: 1096055 - RNA, 22 nt, Human
aggcuucuaggguuggcagcgg

SEQ ID NO: 1096056 - RNA, 22 nt, Human
uggaaauuuugaacaguuucua

SEQ ID NO: 1096057 - RNA, 22 nt, Human
ucaggggcuugaggugcauguc

SEQ ID NO: 1096058 - RNA, 22 nt, Human
auauucuugugauuauaaagua

SEQ ID NO: 1096059 - RNA, 22 nt, Human
gagaagucauuugaccaccuag

SEQ ID NO: 1096060 - RNA, 22 nt, Human
ucaggaacauuuaaccacaggg

SEQ ID NO: 1096061 - RNA, 22 nt, Human
caucacccggaacugugucugc

SEQ ID NO: 1096062 - RNA, 22 nt, Human
acuggcucagaguuccuagaga

SEQ ID NO: 1096063 - RNA, 22 nt, Human
ccugcccagcuucccgagugca

SEQ ID NO: 1096064 - RNA, 22 nt, Human
ugaaagaacuagcaucuucaag

SEQ ID NO: 1096065 - RNA, 22 nt, Human
uuugaaacaggugauucagcua

SEQ ID NO: 1096066 - RNA, 23 nt, Human
uggacaguaggguagacagugcc

SEQ ID NO: 1096067 - RNA, 22 nt, Human
augucccaagauacagcuagag

SEQ ID NO: 1096068 - RNA, 22 nt, Human
cagaacauuccaugugcccugc

SEQ ID NO: 1096069 - RNA, 18 nt, Human
aggacuugccucaguugc

SEQ ID NO: 1096070 - RNA, 22 nt, Human
ggccagagucuauaugcagaca

SEQ ID NO: 1096071 - RNA, 22 nt, Human
cacaguguggcaaauuucaacu

SEQ ID NO: 1096072 - RNA, 22 nt, Human
aagaacaacugcuuuaaaagca

SEQ ID NO: 1096073 - RNA, 22 nt, Human
ggaggcccagagaggugaagug

SEQ ID NO: 1096074 - RNA, 22 nt, Human
cuuuuucugauguuccaugauu

SEQ ID NO: 1096075 - RNA, 22 nt, Human
cuggccacuggagguggcaccc

SEQ ID NO: 1096076 - RNA, 22 nt, Human
uuaacagaggacacaucaaacu

SEQ ID NO: 1096077 - RNA, 22 nt, Human
acaggcagguaauuuacauauu

SEQ ID NO: 1096078 - RNA, 22 nt, Human
ucacagcaacccugaggcgagu

SEQ ID NO: 1096079 - RNA, 22 nt, Human
gcaaaggcuucuuuuauucucc

SEQ ID NO: 1096080 - RNA, 22 nt, Human
uuaccagaugggggacuaugag

SEQ ID NO: 1096081 - RNA, 22 nt, Human
ucagggacuaggugcugccuga

SEQ ID NO: 1096082 - RNA, 22 nt, Human
cccuggagugccggaaucaaga

SEQ ID NO: 1096083 - RNA, 22 nt, Human
uagcacacugcauaugaagauu

SEQ ID NO: 1096084 - RNA, 22 nt, Human
uucucuacuugagauuuuaaug

SEQ ID NO: 1096085 - RNA, 22 nt, Human
acacagauaaugcucauauagg

SEQ ID NO: 1096086 - RNA, 22 nt, Human
augcacaagcaagagauaaugg

SEQ ID NO: 1096087 - RNA, 19 nt, Human
uggcagcauugguaccuug

SEQ ID NO: 1096088 - RNA, 22 nt, Human
ggggcaggagcccuucuucagc

SEQ ID NO: 1096089 - RNA, 22 nt, Human
ccugucugcaugaucccugcca

SEQ ID NO: 1096090 - RNA, 22 nt, Human
accucugcaguagggcugugcc

SEQ ID NO: 1096091 - RNA, 22 nt, Human
agaaacauccugcuuuccauuu

SEQ ID NO: 1096092 - RNA, 22 nt, Human
gagaugagugggggaucucuca

SEQ ID NO: 1096093 - RNA, 22 nt, Human
caggguggaaaagcuaguugga

SEQ ID NO: 1096094 - RNA, 22 nt, Human
uucuggagagaaaccuuacaaa

SEQ ID NO: 1096095 - RNA, 22 nt, Human
cugcuuugacuguuaagaacca

SEQ ID NO: 1096096 - RNA, 22 nt, Human
cagacaggaaguucagaagaaa

SEQ ID NO: 1096097 - RNA, 20 nt, Human
aguuugugugucuaugcgcu

SEQ ID NO: 1096098 - RNA, 22 nt, Human
gaacuuuauuccagaagaaagc

SEQ ID NO: 1096099 - RNA, 22 nt, Human
auucugaaguugcaggagaagc

SEQ ID NO: 1096100 - RNA, 22 nt, Human
gaguauuccucagucauuuugu

SEQ ID NO: 1096101 - RNA, 22 nt, Human
ucagaucauggaucuauuacuu

SEQ ID NO: 1096102 - RNA, 23 nt, Human
ugagaagccauuagagcaggugg

SEQ ID NO: 1096103 - RNA, 22 nt, Human
uuggccuuaaccucucugugcc

SEQ ID NO: 1096104 - RNA, 22 nt, Human
ucuauuaaugauucaauagugu

SEQ ID NO: 1096105 - RNA, 22 nt, Human
agcagagcgccugcucagaggg

SEQ ID NO: 1096106 - RNA, 22 nt, Human
auuuuccaaaauaauuguuacu

SEQ ID NO: 1096107 - RNA, 22 nt, Human
cugggaagccacaggguguggg

SEQ ID NO: 1096108 - RNA, 22 nt, Human
augaggcagauguugcaugagg

SEQ ID NO: 1096109 - RNA, 21 nt, Human
uaucagaagagaaagaaugau

SEQ ID NO: 1096110 - RNA, 22 nt, Human
agguggcaggaggucagagaaa

SEQ ID NO: 1096111 - RNA, 22 nt, Human
agcagggaggcggugugcuggc

SEQ ID NO: 1096112 - RNA, 22 nt, Human
gcugcugucagugguggcaguu

SEQ ID NO: 1096113 - RNA, 21 nt, Human
cuguccaaauuucauaacuuu

SEQ ID NO: 1096114 - RNA, 22 nt, Human
aauaaacaaaucuuuccugugg

SEQ ID NO: 1096115 - RNA, 22 nt, Human
cagcugcuuuaguuuuccaucc

SEQ ID NO: 1096116 - RNA, 22 nt, Human
ccagcagcucccucaggguccg

SEQ ID NO: 1096117 - RNA, 22 nt, Human
acauugaacauggcaggacauu

SEQ ID NO: 1096118 - RNA, 22 nt, Human
guaggcagucucucaggugauc

SEQ ID NO: 1096119 - RNA, 22 nt, Human
acucagaaugacugaugcugug

SEQ ID NO: 1096120 - RNA, 22 nt, Human
auucacaguuacugcugaacca

SEQ ID NO: 1096121 - RNA, 22 nt, Human
ucacaucacuagcugguaauga

SEQ ID NO: 1096122 - RNA, 22 nt, Human
agagccuggaccugagcuacaa

SEQ ID NO: 1096123 - RNA, 22 nt, Human
ccaucccuucucuggccagcag

SEQ ID NO: 1096124 - RNA, 22 nt, Human
acaacaguagccuuuacaaggc

SEQ ID NO: 1096125 - RNA, 22 nt, Human
ugcaugcacgugcuauguauga

SEQ ID NO: 1096126 - RNA, 22 nt, Human
agcagccacagcagaucugagu

SEQ ID NO: 1096127 - RNA, 23 nt, Human
acuuuagauaaauuaugugcaca

SEQ ID NO: 1096128 - RNA, 22 nt, Human
caguggucugugcuucuguaca

SEQ ID NO: 1096129 - RNA, 19 nt, Human
aguuggggcagggaagaga

SEQ ID NO: 1096130 - RNA, 22 nt, Human
aucagacaauuguugaguacug

SEQ ID NO: 1096131 - RNA, 22 nt, Human
aggaagcugggaaacugacauu

SEQ ID NO: 1096132 - RNA, 22 nt, Human
aguguuaaugguguauauuagg

SEQ ID NO: 1096133 - RNA, 22 nt, Human
ucccaggacaggccacauggaa

SEQ ID NO: 1096134 - RNA, 22 nt, Human
ccucccugcgcuccugcggcgg

SEQ ID NO: 1096135 - RNA, 22 nt, Human
cuggccagugccugugggcccc

SEQ ID NO: 1096136 - RNA, 22 nt, Human
ggggggugcugaucaguggagc

SEQ ID NO: 1096137 - RNA, 22 nt, Human
ccaaaucaggggccacaagcau

SEQ ID NO: 1096138 - RNA, 22 nt, Human
agcagcauguugggaugugaaa

SEQ ID NO: 1096139 - RNA, 22 nt, Human
ugaaaauauaguuuuccagacu

SEQ ID NO: 1096140 - RNA, 22 nt, Human
ccucuggguaucuguggaagua

SEQ ID NO: 1096141 - RNA, 22 nt, Human
uuuacaagucagggacuguucu

SEQ ID NO: 1096142 - RNA, 22 nt, Human
ccagagaauuuuagacaaaaau

SEQ ID NO: 1096143 - RNA, 22 nt, Human
aggcuucccaagcagcugcaaa

SEQ ID NO: 1096144 - RNA, 22 nt, Human
cagcucaaguuucccaggucag

SEQ ID NO: 1096145 - RNA, 22 nt, Human
ucacagaagcuugaagauuuuc

SEQ ID NO: 1096146 - RNA, 19 nt, Human
ugucacugucauggcccag

SEQ ID NO: 1096147 - RNA, 22 nt, Human
uacacaauucuggaugcauguc

SEQ ID NO: 1096148 - RNA, 22 nt, Human
auauuuucacugaaccaaagua

SEQ ID NO: 1096149 - RNA, 22 nt, Human
ugggcucagccaugaccuccac

SEQ ID NO: 1096150 - RNA, 22 nt, Human
agcccugcgugccaggggacug

SEQ ID NO: 1096151 - RNA, 22 nt, Human
uaaaguauccaguuauucuucu

SEQ ID NO: 1096152 - RNA, 22 nt, Human
gaacagagaagcuuuacuaaag

SEQ ID NO: 1096153 - RNA, 22 nt, Human
augaggcauuccacucaaacuc

SEQ ID NO: 1096154 - RNA, 22 nt, Human
gccuuugcaccaucagugcaau

SEQ ID NO: 1096155 - RNA, 22 nt, Human
aacauguaaauaucauuguacu

SEQ ID NO: 1096156 - RNA, 22 nt, Human
gagcuagacugggcucugaugu

SEQ ID NO: 1096157 - RNA, 22 nt, Human
gcagaagcugggagaagggauu

SEQ ID NO: 1096158 - RNA, 22 nt, Human
cagggguggcugcagcagaggu

SEQ ID NO: 1096159 - RNA, 22 nt, Human
ccagggcauguaacuaauggug

SEQ ID NO: 1096160 - RNA, 22 nt, Human
auggcagggaccaagcugucau

SEQ ID NO: 1096161 - RNA, 22 nt, Human
ugggaugggaucucgcuguguc

SEQ ID NO: 1096162 - RNA, 22 nt, Human
ucagcuuguuuaugauaagcag

SEQ ID NO: 1096163 - RNA, 22 nt, Human
cuccugagcucugaggaagcuu

SEQ ID NO: 1096164 - RNA, 22 nt, Human
gcagcugguuaaugggagaauu

SEQ ID NO: 1096165 - RNA, 22 nt, Human
agcagggcuucugugccugugc

SEQ ID NO: 1096166 - RNA, 22 nt, Human
ccuccagcugccucagucucuu

SEQ ID NO: 1096167 - RNA, 22 nt, Human
aggaaacuccccuacaucucaa

SEQ ID NO: 1096168 - RNA, 22 nt, Human
ggcagagacuggguuggcagag

SEQ ID NO: 1096169 - RNA, 22 nt, Human
cccugcuuugcacccaggcugg

SEQ ID NO: 1096170 - RNA, 22 nt, Human
ugaaggaaugaguauacuguuu

SEQ ID NO: 1096171 - RNA, 22 nt, Human
ucccagaggcuccagucucuau

SEQ ID NO: 1096172 - RNA, 22 nt, Human
cagggccagccauccugcuggg

SEQ ID NO: 1096173 - RNA, 22 nt, Human
cccaggcugauguucagcgggu

SEQ ID NO: 1096174 - RNA, 22 nt, Human
uuacaaacaagaucuuauucuu

SEQ ID NO: 1096175 - RNA, 22 nt, Human
cagcuggcagcccuggcccugc

SEQ ID NO: 1096176 - RNA, 20 nt, Human
ggcagcucacuacuuucugu

SEQ ID NO: 1096177 - RNA, 22 nt, Human
ugaaaauggccugaagaagcaa

SEQ ID NO: 1096178 - RNA, 22 nt, Human
aggcacuggguaauuaguagcu

SEQ ID NO: 1096179 - RNA, 21 nt, Human
ggagcugcaggagccgaaggc

SEQ ID NO: 1096180 - RNA, 22 nt, Human
gcugauccuuuuaugucuagcu

SEQ ID NO: 1096181 - RNA, 16 nt, Human
gggagggaguuggugg

SEQ ID NO: 1096182 - RNA, 22 nt, Human
ggugccaggcuguagucagggu

SEQ ID NO: 1096183 - RNA, 22 nt, Human
aaaagauuguuagggagaaugu

SEQ ID NO: 1096184 - RNA, 22 nt, Human
aauauuucaaaaggaaacacag

SEQ ID NO: 1096185 - RNA, 22 nt, Human
aaaugcuuagagguguucaaau

SEQ ID NO: 1096186 - RNA, 22 nt, Human
agaauauaguuaccaaauucug

SEQ ID NO: 1096187 - RNA, 22 nt, Human
aucagacagggaguucuguguc

SEQ ID NO: 1096188 - RNA, 22 nt, Human
acagcuuuuuacuaauagauug

SEQ ID NO: 1096189 - RNA, 22 nt, Human
ccguggaguugugcugaguaug

SEQ ID NO: 1096190 - RNA, 22 nt, Human
acuggcagcagcagcccuuggg

SEQ ID NO: 1096191 - RNA, 22 nt, Human
uaaccauauuuuccauuaaguu

SEQ ID NO: 1096192 - RNA, 18 nt, Human
cugggccuuuguauuuuu

SEQ ID NO: 1096193 - RNA, 22 nt, Human
ggcaggcauuagagauucccag

SEQ ID NO: 1096194 - RNA, 22 nt, Human
auauaaaguguuuagaaagcug

SEQ ID NO: 1096195 - RNA, 22 nt, Human
uuccaagagucagcugauccca

SEQ ID NO: 1096196 - RNA, 22 nt, Human
gggugcaggcagcccaggcagg

SEQ ID NO: 1096197 - RNA, 22 nt, Human
acagccagaggagccaggcugg

SEQ ID NO: 1096198 - RNA, 22 nt, Human
aggguagggcccggagacagac

SEQ ID NO: 1096199 - RNA, 22 nt, Human
agcagagaagacacaggcuuca

SEQ ID NO: 1096200 - RNA, 22 nt, Human
aauaacaggguugauuugcaau

SEQ ID NO: 1096201 - RNA, 22 nt, Human
uucaauaucauuguuuagucuc

SEQ ID NO: 1096202 - RNA, 19 nt, Human
cugcucaggucagucuguc

SEQ ID NO: 1096203 - RNA, 22 nt, Human
gucugggcaagggagauggcgc

SEQ ID NO: 1096204 - RNA, 22 nt, Human
agucucagaguaccugagggac

SEQ ID NO: 1096205 - RNA, 22 nt, Human
uauuccaagugccuagaagagu

SEQ ID NO: 1096206 - RNA, 22 nt, Human
cugcugugugaccauggacagg

SEQ ID NO: 1096207 - RNA, 22 nt, Human
cagggcugaacugagcuuguga

SEQ ID NO: 1096208 - RNA, 22 nt, Human
uuggauuacaugaaaugcagaa

SEQ ID NO: 1096209 - RNA, 22 nt, Human
ucauaaaacacaccagguaguu

SEQ ID NO: 1096210 - RNA, 22 nt, Human
ccagggcuggguuugucggugu

SEQ ID NO: 1096211 - RNA, 22 nt, Human
aauguauaaaguguuaauaacu

SEQ ID NO: 1096212 - RNA, 22 nt, Human
ugcugccuucuaggcgugcccu

SEQ ID NO: 1096213 - RNA, 22 nt, Human
cacuaaguaagcuccucuacaa

SEQ ID NO: 1096214 - RNA, 22 nt, Human
cagcuguucggggcuggcaugu

SEQ ID NO: 1096215 - RNA, 22 nt, Human
cagccaccauacagcagaagcu

SEQ ID NO: 1096216 - RNA, 22 nt, Human
gcaggagcuuugcuuacugcug

SEQ ID NO: 1096217 - RNA, 22 nt, Human
uggaguucauccaugacagcuu

SEQ ID NO: 1096218 - RNA, 19 nt, Human
uggaagaggaagggaaaua

SEQ ID NO: 1096219 - RNA, 22 nt, Human
auuguauaacagcauguauuuu

SEQ ID NO: 1096220 - RNA, 22 nt, Human
aguguuguaauaaauaucaucu

SEQ ID NO: 1096221 - RNA, 23 nt, Human
uuuauacaagaaaccgcuggccu

SEQ ID NO: 1096222 - RNA, 22 nt, Human
ucccaagagacagaaugguauc

SEQ ID NO: 1096223 - RNA, 22 nt, Human
ucucccaguccucugugcuuac

SEQ ID NO: 1096224 - RNA, 22 nt, Human
aguuauuuuggaaaaugaguca

SEQ ID NO: 1096225 - RNA, 22 nt, Human
uaggcugggcauucuggccagg

SEQ ID NO: 1096226 - RNA, 22 nt, Human
cugcugugccucuuuucacgug

SEQ ID NO: 1096227 - RNA, 22 nt, Human
ggagagaauucagcuuaagauu

SEQ ID NO: 1096228 - RNA, 22 nt, Human
ucuuuuccuugaugguuaaaua

SEQ ID NO: 1096229 - RNA, 20 nt, Human
uaaagcagccguggagggua

SEQ ID NO: 1096230 - RNA, 22 nt, Human
caugcuguguguuuuagcucca

SEQ ID NO: 1096231 - RNA, 22 nt, Human
uuccaacuuugucauauauuau

SEQ ID NO: 1096232 - RNA, 22 nt, Human
gugccuuccccgguggucuguu

SEQ ID NO: 1096233 - RNA, 21 nt, Human
agcuggcagauauggugucug

SEQ ID NO: 1096234 - RNA, 22 nt, Human
ggcuggcacccuuggggauagg

SEQ ID NO: 1096235 - RNA, 20 nt, Human
ucccucaggucauugggcug

SEQ ID NO: 1096236 - RNA, 18 nt, Human
gggcaagcggcugucacc

SEQ ID NO: 1096237 - RNA, 20 nt, Human
ggcaggcuuuauauggaggg

SEQ ID NO: 1096238 - RNA, 22 nt, Human
uacacagaaauuguguagggau

SEQ ID NO: 1096239 - RNA, 22 nt, Human
gccucugcucggacuuugccuc

SEQ ID NO: 1096240 - RNA, 20 nt, Human
ugcaggugggcccuucuggg

SEQ ID NO: 1096241 - RNA, 22 nt, Human
gaaaugaacugauuaucauugc

SEQ ID NO: 1096242 - RNA, 22 nt, Human
gccacaggcacuuaagggcugg

SEQ ID NO: 1096243 - RNA, 22 nt, Human
uagaaacacagaucugguguca

SEQ ID NO: 1096244 - RNA, 22 nt, Human
ggagccuguggcugcuugaagc

SEQ ID NO: 1096245 - RNA, 22 nt, Human
gcaggugggggagaaguuguga

SEQ ID NO: 1096246 - RNA, 22 nt, Human
gcaggagugacauggaugugga

SEQ ID NO: 1096247 - RNA, 22 nt, Human
gugcaugucggggugcauguca

SEQ ID NO: 1096248 - RNA, 22 nt, Human
ccaguguuggaggauggcuugc

SEQ ID NO: 1096249 - RNA, 22 nt, Human
ccuggaaggcaggcauggauug

SEQ ID NO: 1096250 - RNA, 22 nt, Human
guucugggaagguggaccuguu

SEQ ID NO: 1096251 - RNA, 22 nt, Human
uugaaacucaucuuagugaugu

SEQ ID NO: 1096252 - RNA, 22 nt, Human
acugggccuacccagauuggca

SEQ ID NO: 1096253 - RNA, 22 nt, Human
cgcuaggauuaggauuaauccu

SEQ ID NO: 1096254 - RNA, 22 nt, Human
cagcaucucuuuuugcauuccu

SEQ ID NO: 1096255 - RNA, 22 nt, Human
gaauucuaccagggcaagaggg

SEQ ID NO: 1096256 - RNA, 22 nt, Human
ggaacccagagcucauaaaauu

SEQ ID NO: 1096257 - RNA, 22 nt, Human
agacugaaguaagaaugcagcu

SEQ ID NO: 1096258 - RNA, 22 nt, Human
ucuuuugugauucuucaguuac

SEQ ID NO: 1096259 - RNA, 22 nt, Human
gugucccaaagauuagaaauca

SEQ ID NO: 1096260 - RNA, 22 nt, Human
aaggugaaacuggaagcuggcc

SEQ ID NO: 1096261 - RNA, 22 nt, Human
gcauccaaaccauucaucagcc

SEQ ID NO: 1096262 - RNA, 22 nt, Human
augaggcaggagugcaguggca

SEQ ID NO: 1096263 - RNA, 22 nt, Human
aacaguguuuugcucuuugccc

SEQ ID NO: 1096264 - RNA, 22 nt, Human
aaggaagggaaauagugauguc

SEQ ID NO: 1096265 - RNA, 22 nt, Human
ugucucaguauacgaaacacuu

SEQ ID NO: 1096266 - RNA, 22 nt, Human
cauuucauuccuuugaaagugg

SEQ ID NO: 1096267 - RNA, 22 nt, Human
auauuucuggggguguguuucu

SEQ ID NO: 1096268 - RNA, 22 nt, Human
ugucauuuggugccaggaaaga

SEQ ID NO: 1096269 - RNA, 22 nt, Human
auauacugauagcugcacuucu

SEQ ID NO: 1096270 - RNA, 22 nt, Human
gggcgagggcgaaagcgagagc

SEQ ID NO: 1096271 - RNA, 22 nt, Human
ggcacugaauuucuuggcaucu

SEQ ID NO: 1096272 - RNA, 22 nt, Human
ugcucagauuacagccccacau

SEQ ID NO: 1096273 - RNA, 22 nt, Human
ggcgcuggccacgguggcucug

SEQ ID NO: 1096274 - RNA, 22 nt, Human
ucacaguucaacuaguucagau

SEQ ID NO: 1096275 - RNA, 22 nt, Human
ucucaguguuuaaaaagauuuc

SEQ ID NO: 1096276 - RNA, 20 nt, Human
cugugcuuuggaaccuggaa

SEQ ID NO: 1096277 - RNA, 22 nt, Human
cuuuuucuaaucauaauugucu

SEQ ID NO: 1096278 - RNA, 23 nt, Human
agcacacuuguacaaugcccuag

SEQ ID NO: 1096279 - RNA, 22 nt, Human
gcuaaugugauagagcagaaag

SEQ ID NO: 1096280 - RNA, 22 nt, Human
cugagcugguggaagcaugcag

SEQ ID NO: 1096281 - RNA, 22 nt, Human
aagagcagaaguccuuggaucc

SEQ ID NO: 1096282 - RNA, 22 nt, Human
aggcacaggaaugucauccagu

SEQ ID NO: 1096283 - RNA, 22 nt, Human
acaggcauauuucuagauuaca

SEQ ID NO: 1096284 - RNA, 22 nt, Human
ucaugcaaucucuuguucagga

SEQ ID NO: 1096285 - RNA, 22 nt, Human
agcagggcagcugaugcgcacg

SEQ ID NO: 1096286 - RNA, 22 nt, Human
gaaaguauuuaaguccauauuu

SEQ ID NO: 1096287 - RNA, 22 nt, Human
caggaagauuguggaggugguu

SEQ ID NO: 1096288 - RNA, 20 nt, Human
aggaaaaauggaaacuggag

SEQ ID NO: 1096289 - RNA, 22 nt, Human
ugucucugguauuaggugaaaa

SEQ ID NO: 1096290 - RNA, 22 nt, Human
uggagcagaaauggccucuugu

SEQ ID NO: 1096291 - RNA, 22 nt, Human
cacagcugggaaaauuuguaca

SEQ ID NO: 1096292 - RNA, 19 nt, Human
uuugaaagaguuuuauugg

SEQ ID NO: 1096293 - RNA, 22 nt, Human
ccagacaggggcuguuccugcu

SEQ ID NO: 1096294 - RNA, 21 nt, Human
aaugaaguggcuauuuugagg

SEQ ID NO: 1096295 - RNA, 22 nt, Human
ugggccuguuucccuucagggc

SEQ ID NO: 1096296 - RNA, 22 nt, Human
uucaagucagagcaagccaagu

SEQ ID NO: 1096297 - RNA, 21 nt, Human
ucagaagagcugccucuuggu

SEQ ID NO: 1096298 - RNA, 22 nt, Human
uaugggucuggaaaauggcuug

SEQ ID NO: 1096299 - RNA, 22 nt, Human
ucagacagcuugggauaacuga

SEQ ID NO: 1096300 - RNA, 22 nt, Human
ucaggcuggaaugcaguggggc

SEQ ID NO: 1096301 - RNA, 22 nt, Human
ccuggcagcaggugggcccgug

SEQ ID NO: 1096302 - RNA, 22 nt, Human
ucugcugcugagcacacuccua

SEQ ID NO: 1096303 - RNA, 22 nt, Human
ggucccaguccucucccugcua

SEQ ID NO: 1096304 - RNA, 22 nt, Human
aagccaggggcugcuuaggaga

SEQ ID NO: 1096305 - RNA, 22 nt, Human
aucaggaucacugggagucuug

SEQ ID NO: 1096306 - RNA, 22 nt, Human
gcugucccaugguugcaagaug

SEQ ID NO: 1096307 - RNA, 22 nt, Human
gggccagagcuuggcagcuggg

SEQ ID NO: 1096308 - RNA, 22 nt, Human
aaggcauagucuuuaaguucug

SEQ ID NO: 1096309 - RNA, 23 nt, Human
acaugggagggacauggaggcug

SEQ ID NO: 1096310 - RNA, 22 nt, Human
uaaaggcagccuaggaaguguu

SEQ ID NO: 1096311 - RNA, 19 nt, Human
cuccucagucccagagguc

SEQ ID NO: 1096312 - RNA, 22 nt, Human
gggacuguaaauucauauggcc

SEQ ID NO: 1096313 - RNA, 22 nt, Human
uccaaaaaacguuugaauaguu

SEQ ID NO: 1096314 - RNA, 22 nt, Human
cugugucccccucagccaggug

SEQ ID NO: 1096315 - RNA, 22 nt, Human
aucaaagugauuuguaaacagg

SEQ ID NO: 1096316 - RNA, 22 nt, Human
ucuggcucuccagugcucuuag

SEQ ID NO: 1096317 - RNA, 19 nt, Human
ugaguucugugguucucaa

SEQ ID NO: 1096318 - RNA, 22 nt, Human
acaggaacccagaaacauuucu

SEQ ID NO: 1096319 - RNA, 22 nt, Human
aaacaucaccauuuuaccuaau

SEQ ID NO: 1096320 - RNA, 22 nt, Human
cugaaauucugccucugcacaa

SEQ ID NO: 1096321 - RNA, 22 nt, Human
aggagaguucacacuggucaga

SEQ ID NO: 1096322 - RNA, 22 nt, Human
uguaguaagugcgcaauaaaua

SEQ ID NO: 1096323 - RNA, 22 nt, Human
ccagaugguuugcaugggaggg

SEQ ID NO: 1096324 - RNA, 22 nt, Human
aucuaauuuucacucauuugcu

SEQ ID NO: 1096325 - RNA, 18 nt, Human
agcagguggcgucugcag

SEQ ID NO: 1096326 - RNA, 22 nt, Human
gaaaggucuuccggucuuccag

SEQ ID NO: 1096327 - RNA, 22 nt, Human
ugaggcaguauuuuagugacuu

SEQ ID NO: 1096328 - RNA, 22 nt, Human
aaagccaaaugaaagaugguuc

SEQ ID NO: 1096329 - RNA, 22 nt, Human
uccauuuuguagguaugcuaca

SEQ ID NO: 1096330 - RNA, 22 nt, Human
aaacucuuuugcauauuagagg

SEQ ID NO: 1096331 - RNA, 22 nt, Human
aaucuguucuacucuauucaga

SEQ ID NO: 1096332 - RNA, 22 nt, Human
ucuggcucagggcucugaggga

SEQ ID NO: 1096333 - RNA, 22 nt, Human
cacaggugcuccucggggagcu

SEQ ID NO: 1096334 - RNA, 22 nt, Human
agagcuguuuggacaucugagu

SEQ ID NO: 1096335 - RNA, 22 nt, Human
uucaguauguguaaacuacuuu

SEQ ID NO: 1096336 - RNA, 22 nt, Human
gcugggaggaauuuggggaaua

SEQ ID NO: 1096337 - RNA, 22 nt, Human
ucaggaugaccacgagccucua

SEQ ID NO: 1096338 - RNA, 22 nt, Human
ucacaucacaugacaguaggcc

SEQ ID NO: 1096339 - RNA, 22 nt, Human
gcugaagcugcagcaggaggaa

SEQ ID NO: 1096340 - RNA, 22 nt, Human
uuugugugggggaaacaaggua

SEQ ID NO: 1096341 - RNA, 22 nt, Human
ggaacuuuaggauccuggcuca

SEQ ID NO: 1096342 - RNA, 22 nt, Human
gacaucauagggugggaggaaa

SEQ ID NO: 1096343 - RNA, 22 nt, Human
auguucuuccaaaucuguaaca

SEQ ID NO: 1096344 - RNA, 23 nt, Human
aggcugcagaagaauagggucau

SEQ ID NO: 1096345 - RNA, 22 nt, Human
gcguuggggaccccgaagcugg

SEQ ID NO: 1096346 - RNA, 17 nt, Human
ugaaaucagcacccagg

SEQ ID NO: 1096347 - RNA, 22 nt, Human
ccugagggaaggaugcuaccca

SEQ ID NO: 1096348 - RNA, 22 nt, Human
ugaagaacgugagauccagaaa

SEQ ID NO: 1096349 - RNA, 23 nt, Human
ucaguuuuggcuguucaguguug

SEQ ID NO: 1096350 - RNA, 22 nt, Human
ccaggaggcggaagguacagug

SEQ ID NO: 1096351 - RNA, 22 nt, Human
uuuggcuugcacuggcaccaac

SEQ ID NO: 1096352 - RNA, 22 nt, Human
aggccucuguuccccauguuuu

SEQ ID NO: 1096353 - RNA, 19 nt, Human
uguggccaugguucagcug

SEQ ID NO: 1096354 - RNA, 22 nt, Human
aagaagagaaaugugcugcugg

SEQ ID NO: 1096355 - RNA, 22 nt, Human
ccugagauguguaacagauggu

SEQ ID NO: 1096356 - RNA, 22 nt, Human
gcucuccacugaccacggggca

SEQ ID NO: 1096357 - RNA, 22 nt, Human
uugaucagguugcuguggugua

SEQ ID NO: 1096358 - RNA, 22 nt, Human
uauuugaaaguguacaaaaacu

SEQ ID NO: 1096359 - RNA, 22 nt, Human
gagccagggcugugagcugagc

SEQ ID NO: 1096360 - RNA, 22 nt, Human
aagacaauauugcugugaacgu

SEQ ID NO: 1096361 - RNA, 22 nt, Human
auucuuauuuaaauagagucug

SEQ ID NO: 1096362 - RNA, 22 nt, Human
ucugaaauaggagccauguaga

SEQ ID NO: 1096363 - RNA, 19 nt, Human
ugaaauggcaguugcuaaa

SEQ ID NO: 1096364 - RNA, 22 nt, Human
gaacuacaguaagaauugaugu

SEQ ID NO: 1096365 - RNA, 19 nt, Human
agcagguggguaagaaaau

SEQ ID NO: 1096366 - RNA, 22 nt, Human
acuuccaggaggugucacugaa

SEQ ID NO: 1096367 - RNA, 22 nt, Human
ugccaggcccugugcuggaugc

SEQ ID NO: 1096368 - RNA, 22 nt, Human
ggcgguggcgugaagguggcug

SEQ ID NO: 1096369 - RNA, 21 nt, Human
aggcuguccuuugccagcccu

SEQ ID NO: 1096370 - RNA, 19 nt, Human
uggcugggugccaauggcc

SEQ ID NO: 1096371 - RNA, 22 nt, Human
gagaggaguagacacuuugguu

SEQ ID NO: 1096372 - RNA, 22 nt, Human
cggcuggggcuguccccaugac

SEQ ID NO: 1096373 - RNA, 22 nt, Human
cuuuggcacagucucauuugau

SEQ ID NO: 1096374 - RNA, 22 nt, Human
agacucaagacugcagaagacg

SEQ ID NO: 1096375 - RNA, 22 nt, Human
uuuggaaacacggucaucuucc

SEQ ID NO: 1096376 - RNA, 22 nt, Human
uuuucaagggcagggaaaucau

SEQ ID NO: 1096377 - RNA, 22 nt, Human
accugaaaccaacuuguguacu

SEQ ID NO: 1096378 - RNA, 22 nt, Human
cagaccaucuugaagcaaacug

SEQ ID NO: 1096379 - RNA, 22 nt, Human
gggcaguggcucacgccuguaa

SEQ ID NO: 1096380 - RNA, 22 nt, Human
aaacauuugcaacucgguuugg

SEQ ID NO: 1096381 - RNA, 20 nt, Human
ggaagcagagaacuguuuuc

SEQ ID NO: 1096382 - RNA, 22 nt, Human
aacaucuuguccuuagauuaaa

SEQ ID NO: 1096383 - RNA, 22 nt, Human
gagcuggguauauggcuuuaug

SEQ ID NO: 1096384 - RNA, 22 nt, Human
cagcuguucuugggacagacag

SEQ ID NO: 1096385 - RNA, 22 nt, Human
ccuggagcaggagcugcagagg

SEQ ID NO: 1096386 - RNA, 22 nt, Human
ccugggagugugccaucucugu

SEQ ID NO: 1096387 - RNA, 17 nt, Human
agcugagcuggccaggg

SEQ ID NO: 1096388 - RNA, 23 nt, Human
uuguacagcccagauuccucuuc

SEQ ID NO: 1096389 - RNA, 22 nt, Human
aauguuugaccaaaaaacugca

SEQ ID NO: 1096390 - RNA, 22 nt, Human
uggcaaagcuagacauucccuc

SEQ ID NO: 1096391 - RNA, 21 nt, Human
uucuuuccccagaggacuaaa

SEQ ID NO: 1096392 - RNA, 22 nt, Human
ucugggcugguugugcuugcuu

SEQ ID NO: 1096393 - RNA, 22 nt, Human
gucuuucuuaauucaagugcuu

SEQ ID NO: 1096394 - RNA, 19 nt, Human
uggcucugucgaaggcaca

SEQ ID NO: 1096395 - RNA, 22 nt, Human
agccucugucaagcuuuucaaa

SEQ ID NO: 1096396 - RNA, 22 nt, Human
uacaagaaauuucugcauauau

SEQ ID NO: 1096397 - RNA, 22 nt, Human
caccuaggguuucgccuuucuu

SEQ ID NO: 1096398 - RNA, 22 nt, Human
agggagaaugaccaagguauau

SEQ ID NO: 1096399 - RNA, 23 nt, Human
agcugaggcugugggugucagag

SEQ ID NO: 1096400 - RNA, 22 nt, Human
cccaggugggcaccucgaggaa

SEQ ID NO: 1096401 - RNA, 22 nt, Human
uuacaguuguagaaagugguug

SEQ ID NO: 1096402 - RNA, 23 nt, Human
gcucagagguuuuucucuggaug

SEQ ID NO: 1096403 - RNA, 22 nt, Human
gcuguggaaaugccuaacauga

SEQ ID NO: 1096404 - RNA, 21 nt, Human
cauuucuauugaugagaaaag

SEQ ID NO: 1096405 - RNA, 22 nt, Human
gaggcuggaggucaaagaugaa

SEQ ID NO: 1096406 - RNA, 22 nt, Human
uauucucagcaacacacaugga

SEQ ID NO: 1096407 - RNA, 22 nt, Human
uuauuuauggcacuguuggugg

SEQ ID NO: 1096408 - RNA, 22 nt, Human
cuggggaggcagggcugccccu

SEQ ID NO: 1096409 - RNA, 22 nt, Human
uaggaagaagcagccuugcuua

SEQ ID NO: 1096410 - RNA, 19 nt, Human
uugaaagauuagcuuucua

SEQ ID NO: 1096411 - RNA, 22 nt, Human
caucauuucacuuagaugaagu

SEQ ID NO: 1096412 - RNA, 22 nt, Human
ggaggccaaggcgggcggauca

SEQ ID NO: 1096413 - RNA, 22 nt, Human
ggcagcaggcgacuucccuauu

SEQ ID NO: 1096414 - RNA, 22 nt, Human
cauaggaaaagcauucuucuug

SEQ ID NO: 1096415 - RNA, 23 nt, Human
ugggcaucuccucugugccaggc

SEQ ID NO: 1096416 - RNA, 21 nt, Human
ccugccaggaaacugaguguc

SEQ ID NO: 1096417 - RNA, 22 nt, Human
uucauuugggaugagucagaag

SEQ ID NO: 1096418 - RNA, 22 nt, Human
uacagugucuggauaucaaagg

SEQ ID NO: 1096419 - RNA, 22 nt, Human
cagcucagcuuccugggugugu

SEQ ID NO: 1096420 - RNA, 22 nt, Human
uguggcagaaagcauguggaca

SEQ ID NO: 1096421 - RNA, 22 nt, Human
uuagccauugucagcacauggc

SEQ ID NO: 1096422 - RNA, 22 nt, Human
gagguggccucaagcagucuuc

SEQ ID NO: 1096423 - RNA, 22 nt, Human
guuaaguaaacuaugauuuauc

SEQ ID NO: 1096424 - RNA, 22 nt, Human
cugagcucuaaugucagccuug

SEQ ID NO: 1096425 - RNA, 22 nt, Human
agaaacuauccugaguagcaaa

SEQ ID NO: 1096426 - RNA, 22 nt, Human
uggggggauacuugcuacuggc

SEQ ID NO: 1096427 - RNA, 21 nt, Human
agcugagguaaggcaagagag

SEQ ID NO: 1096428 - RNA, 22 nt, Human
auaugagaauuggaaaauauca

SEQ ID NO: 1096429 - RNA, 22 nt, Human
uuuuauucucagcuccagagag

SEQ ID NO: 1096430 - RNA, 22 nt, Human
cagaaaaccugacucuagaacu

SEQ ID NO: 1096431 - RNA, 22 nt, Human
cuggaguuuuggaaaaaugcuu

SEQ ID NO: 1096432 - RNA, 22 nt, Human
caggacaguuugcuuugcccug

SEQ ID NO: 1096433 - RNA, 22 nt, Human
cugcccagaaucacucacucga

SEQ ID NO: 1096434 - RNA, 22 nt, Human
accagcuguguccuggcugcag

SEQ ID NO: 1096435 - RNA, 22 nt, Human
cgcugauaaacgucacguuccc

SEQ ID NO: 1096436 - RNA, 22 nt, Human
aaugggaaagagacuagaugcu

SEQ ID NO: 1096437 - RNA, 22 nt, Human
aggugcaggagcugugcaggga

SEQ ID NO: 1096438 - RNA, 22 nt, Human
uucuuuccccauggaguucgga

SEQ ID NO: 1096439 - RNA, 22 nt, Human
gagaauauuuuuagcuuuccuc

SEQ ID NO: 1096440 - RNA, 22 nt, Human
gggcugagagcuggaaucugag

SEQ ID NO: 1096441 - RNA, 22 nt, Human
caguagcacuagauaugugugg

SEQ ID NO: 1096442 - RNA, 22 nt, Human
aucagcuaauuagaauuaggau

SEQ ID NO: 1096443 - RNA, 22 nt, Human
auuuccaaaaccacuuauugcc

SEQ ID NO: 1096444 - RNA, 22 nt, Human
gcuuccagaccccagucccuca

SEQ ID NO: 1096445 - RNA, 22 nt, Human
gaagagcuaaaggcacaggcuu

SEQ ID NO: 1096446 - RNA, 22 nt, Human
gaggucaauaauaugugcuuua

SEQ ID NO: 1096447 - RNA, 22 nt, Human
cugugggagcacaugacagaua

SEQ ID NO: 1096448 - RNA, 20 nt, Human
agaaggcuccuuuugccaag

SEQ ID NO: 1096449 - RNA, 22 nt, Human
caagagcuagaaauugguuaga

SEQ ID NO: 1096450 - RNA, 22 nt, Human
aaugucugccagaacugaucau

SEQ ID NO: 1096451 - RNA, 22 nt, Human
uucuucaauaaauucccauaag

SEQ ID NO: 1096452 - RNA, 22 nt, Human
ccauuucauugccuguaaagug

SEQ ID NO: 1096453 - RNA, 20 nt, Human
gcugccuguuucuguaagua

SEQ ID NO: 1096454 - RNA, 22 nt, Human
uccagccuuccuuuucacucuc

SEQ ID NO: 1096455 - RNA, 22 nt, Human
caggcccugggcaggcacagag

SEQ ID NO: 1096456 - RNA, 22 nt, Human
cacacauucaccaugacugaaa

SEQ ID NO: 1096457 - RNA, 22 nt, Human
acauuucuaguuguucaucucc

SEQ ID NO: 1096458 - RNA, 21 nt, Human
gggggaagaggaguugcuagu

SEQ ID NO: 1096459 - RNA, 22 nt, Human
acauuuguaugcguuuuuacug

SEQ ID NO: 1096460 - RNA, 22 nt, Human
uucuuuaucaguuacucauagg

SEQ ID NO: 1096461 - RNA, 22 nt, Human
uauucccauuccacuuaucaag

SEQ ID NO: 1096462 - RNA, 22 nt, Human
gauauuuuuaggugaugcaggc

SEQ ID NO: 1096463 - RNA, 22 nt, Human
agcaggcuacuccuguguucgu

SEQ ID NO: 1096464 - RNA, 22 nt, Human
uuauugcagauggugugagaga

SEQ ID NO: 1096465 - RNA, 23 nt, Human
ugguggggucuuggagacagcac

SEQ ID NO: 1096466 - RNA, 22 nt, Human
uuguaauuaauggcagcaauua

SEQ ID NO: 1096467 - RNA, 22 nt, Human
ucuuuucuguaacucagugucu

SEQ ID NO: 1096468 - RNA, 22 nt, Human
auugacaagacaauggcucuua

SEQ ID NO: 1096469 - RNA, 22 nt, Human
cagaaauggaaguucugguuua

SEQ ID NO: 1096470 - RNA, 22 nt, Human
ugaugaaacugagguuccaaga

SEQ ID NO: 1096471 - RNA, 18 nt, Human
ugcucuggucucacuugg

SEQ ID NO: 1096472 - RNA, 22 nt, Human
uauuguacauuuccaaauugcu

SEQ ID NO: 1096473 - RNA, 22 nt, Human
gcaaggcugugcacuuugcauu

SEQ ID NO: 1096474 - RNA, 22 nt, Human
guaaacacuacaaaucaaggcu

SEQ ID NO: 1096475 - RNA, 22 nt, Human
uaaggcaccauaauauauuuaa

SEQ ID NO: 1096476 - RNA, 22 nt, Human
agccucugcacgggcacgggug

SEQ ID NO: 1096477 - RNA, 22 nt, Human
uauguacauggagagcaauuga

SEQ ID NO: 1096478 - RNA, 22 nt, Human
acugaaggucucagcaaggaug

SEQ ID NO: 1096479 - RNA, 22 nt, Human
agcugguggauuaugcuguaca

SEQ ID NO: 1096480 - RNA, 23 nt, Human
ucacauauguagaaguggaauuc

SEQ ID NO: 1096481 - RNA, 22 nt, Human
ggcuggcacagagggcuggugu

SEQ ID NO: 1096482 - RNA, 22 nt, Human
gaaggcugucagagaggagggc

SEQ ID NO: 1096483 - RNA, 21 nt, Human
gcucagaguauugcacuguuu

SEQ ID NO: 1096484 - RNA, 22 nt, Human
aagggcugaaagaccuugggca

SEQ ID NO: 1096485 - RNA, 22 nt, Human
aggcucaguuugguuuccauug

SEQ ID NO: 1096486 - RNA, 22 nt, Human
aagagacagagccauguuucua

SEQ ID NO: 1096487 - RNA, 22 nt, Human
gcacacaguagggauucaauga

SEQ ID NO: 1096488 - RNA, 22 nt, Human
gcccacagcucguuccucuccu

SEQ ID NO: 1096489 - RNA, 22 nt, Human
ucacacagcuaguaagggccga

SEQ ID NO: 1096490 - RNA, 22 nt, Human
gaggaagccccauugaagccag

SEQ ID NO: 1096491 - RNA, 22 nt, Human
gagagcugggggacuguggaug

SEQ ID NO: 1096492 - RNA, 22 nt, Human
ugcauauuguccuugauauuau

SEQ ID NO: 1096493 - RNA, 20 nt, Human
gugaccagaagacagugggu

SEQ ID NO: 1096494 - RNA, 22 nt, Human
ggucagcagugcagggcagagc

SEQ ID NO: 1096495 - RNA, 22 nt, Human
gcuuccucgcugggcagaggca

SEQ ID NO: 1096496 - RNA, 22 nt, Human
cucccagguuacaucugagccu

SEQ ID NO: 1096497 - RNA, 22 nt, Human
uggggcuucuccuguaggcuca

SEQ ID NO: 1096498 - RNA, 22 nt, Human
agaggccagaaaguaugccacc

SEQ ID NO: 1096499 - RNA, 22 nt, Human
gagguuggagggcuggccugca

SEQ ID NO: 1096500 - RNA, 19 nt, Human
aagaagcaauaagcuguga

SEQ ID NO: 1096501 - RNA, 22 nt, Human
cagucccaguuugagacucugg

SEQ ID NO: 1096502 - RNA, 22 nt, Human
acagauggggcacaaagccaca

SEQ ID NO: 1096503 - RNA, 22 nt, Human
acucacauuucaucaggccaag

SEQ ID NO: 1096504 - RNA, 17 nt, Human
ccauacugacauauuga

SEQ ID NO: 1096505 - RNA, 22 nt, Human
ccccuggguccaggcuucucug

SEQ ID NO: 1096506 - RNA, 20 nt, Human
aagggagaauaaugauugua

SEQ ID NO: 1096507 - RNA, 22 nt, Human
uggcagcuugaaugcagucuuu

SEQ ID NO: 1096508 - RNA, 22 nt, Human
uacaaagaggcagcuccauuuu

SEQ ID NO: 1096509 - RNA, 22 nt, Human
aaucagaacuucucaggguggg

SEQ ID NO: 1096510 - RNA, 22 nt, Human
ugggaggaagugcuaaugggag

SEQ ID NO: 1096511 - RNA, 22 nt, Human
gccccagcucugccacaacuag

SEQ ID NO: 1096512 - RNA, 22 nt, Human
acuccagggcuccaucccuugu

SEQ ID NO: 1096513 - RNA, 22 nt, Human
auuguucaaagugcuuugcaug

SEQ ID NO: 1096514 - RNA, 20 nt, Human
gccugagcuauugccaggau

SEQ ID NO: 1096515 - RNA, 17 nt, Human
acacagggagagggagc

SEQ ID NO: 1096516 - RNA, 18 nt, Human
cugaggcuuagagagguu

SEQ ID NO: 1096517 - RNA, 19 nt, Human
gggcucuggccucaguggg

SEQ ID NO: 1096518 - RNA, 22 nt, Human
ggcugcuugcuguuucuuggau

SEQ ID NO: 1096519 - RNA, 19 nt, Human
aauauuuuagccucuuccu

SEQ ID NO: 1096520 - RNA, 22 nt, Human
gaguaagagcuggcuuuggugu

SEQ ID NO: 1096521 - RNA, 22 nt, Human
gauuucuucucucccaagagga

SEQ ID NO: 1096522 - RNA, 22 nt, Human
aaauaugauacucccuuuuagu

SEQ ID NO: 1096523 - RNA, 22 nt, Human
gagacaaaaguuggagugcaag

SEQ ID NO: 1096524 - RNA, 22 nt, Human
caucagaacaaaucgguuaaga

SEQ ID NO: 1096525 - RNA, 22 nt, Human
uccugggaaguggcuggcugag

SEQ ID NO: 1096526 - RNA, 22 nt, Human
cccaggaagaggggucaggugu

SEQ ID NO: 1096527 - RNA, 22 nt, Human
auuggccugaaacugguucagc

SEQ ID NO: 1096528 - RNA, 22 nt, Human
aaauucugauuuaauaagugua

SEQ ID NO: 1096529 - RNA, 20 nt, Human
ccuggcuuugcaucugugau

SEQ ID NO: 1096530 - RNA, 22 nt, Human
acacaugaaagacauuaaggug

SEQ ID NO: 1096531 - RNA, 22 nt, Human
acauuugagcaucuacuaagug

SEQ ID NO: 1096532 - RNA, 22 nt, Human
aucagugaccugaaauguuuuu

SEQ ID NO: 1096533 - RNA, 22 nt, Human
auauugaucuuggaacugauuu

SEQ ID NO: 1096534 - RNA, 22 nt, Human
gucauaaagacagaaacauucc

SEQ ID NO: 1096535 - RNA, 22 nt, Human
gcauuucugugcauacacauga

SEQ ID NO: 1096536 - RNA, 22 nt, Human
aucuggcucuuccuggaguucc

SEQ ID NO: 1096537 - RNA, 22 nt, Human
gugcccuguucauuucucuccc

SEQ ID NO: 1096538 - RNA, 21 nt, Human
uggaaagauucaaagaccagg

SEQ ID NO: 1096539 - RNA, 22 nt, Human
ccagagaggccaaggucguggu

SEQ ID NO: 1096540 - RNA, 23 nt, Human
uaggaagacagcaaaagaaugga

SEQ ID NO: 1096541 - RNA, 22 nt, Human
ugcagguguaaauuuucaagag

SEQ ID NO: 1096542 - RNA, 22 nt, Human
uguucauugcccccuguguaaa

SEQ ID NO: 1096543 - RNA, 22 nt, Human
ugcccaaguguuuggcugaguc

SEQ ID NO: 1096544 - RNA, 22 nt, Human
uugcuagcugguguaugcauug

SEQ ID NO: 1096545 - RNA, 22 nt, Human
gccuggcaguguaauuccuguc

SEQ ID NO: 1096546 - RNA, 22 nt, Human
uucuucauucccuuacuuccga

SEQ ID NO: 1096547 - RNA, 22 nt, Human
auuuguaauuucuuaucugugu

SEQ ID NO: 1096548 - RNA, 22 nt, Human
aaagcagcagcaccugcauuuc

SEQ ID NO: 1096549 - RNA, 22 nt, Human
gccauuuggcaaaacugacuuc

SEQ ID NO: 1096550 - RNA, 22 nt, Human
uuaaagcaaccaucaauuugga

SEQ ID NO: 1096551 - RNA, 22 nt, Human
aaacucaagucuaugaacaagg

SEQ ID NO: 1096552 - RNA, 22 nt, Human
guuuuucuaggaccaugugauu

SEQ ID NO: 1096553 - RNA, 22 nt, Human
uguggucucguuauguugccca

SEQ ID NO: 1096554 - RNA, 22 nt, Human
caggugcccagcuccugcugug

SEQ ID NO: 1096555 - RNA, 22 nt, Human
cucaaggaaagucuggagaaga

SEQ ID NO: 1096556 - RNA, 22 nt, Human
ggaagagccuggggugucaggc

SEQ ID NO: 1096557 - RNA, 22 nt, Human
ucugggcucugucagcaccucu

SEQ ID NO: 1096558 - RNA, 22 nt, Human
agggcugccccaguccagccgg

SEQ ID NO: 1096559 - RNA, 22 nt, Human
auauuccugacuuaauuuuuga

SEQ ID NO: 1096560 - RNA, 22 nt, Human
gugcauugcgaugcagacgacc

SEQ ID NO: 1096561 - RNA, 22 nt, Human
uccucccacauaggacaauggg

SEQ ID NO: 1096562 - RNA, 22 nt, Human
ucaagaauuuggauaagaaaug

SEQ ID NO: 1096563 - RNA, 22 nt, Human
augcaaaugucaccacuucuaa

SEQ ID NO: 1096564 - RNA, 19 nt, Human
accaggccucagaggcccu

SEQ ID NO: 1096565 - RNA, 19 nt, Human
ccugccugaccccggcuac

SEQ ID NO: 1096566 - RNA, 22 nt, Human
aaggaagaagggaaguuacuua

SEQ ID NO: 1096567 - RNA, 22 nt, Human
guggauggauugaggcaguggg

SEQ ID NO: 1096568 - RNA, 22 nt, Human
agugcuuuccuucuugugacau

SEQ ID NO: 1096569 - RNA, 22 nt, Human
ggaggcugagaaguccaagauc

SEQ ID NO: 1096570 - RNA, 22 nt, Human
ggugggauggaggaucuuagac

SEQ ID NO: 1096571 - RNA, 22 nt, Human
ugaacauauucaccucuaaaua

SEQ ID NO: 1096572 - RNA, 22 nt, Human
auucuggacaaugagaaacugg

SEQ ID NO: 1096573 - RNA, 22 nt, Human
agcaggaacgaguucaugggga

SEQ ID NO: 1096574 - RNA, 22 nt, Human
aguucacauaucuguuuuauuu

SEQ ID NO: 1096575 - RNA, 22 nt, Human
ucuuuguaaaugccuagcauaa

SEQ ID NO: 1096576 - RNA, 22 nt, Human
acagaauagagacugccugcuc

SEQ ID NO: 1096577 - RNA, 22 nt, Human
acagggcagagugaaaugcuau

SEQ ID NO: 1096578 - RNA, 22 nt, Human
ucaaaguaccagagugaacuga

SEQ ID NO: 1096579 - RNA, 22 nt, Human
ucauguuuuaaugccuuuuucu

SEQ ID NO: 1096580 - RNA, 22 nt, Human
agagccugcuguguaagucaca

SEQ ID NO: 1096581 - RNA, 22 nt, Human
uggcagaggcucugugauguug

SEQ ID NO: 1096582 - RNA, 20 nt, Human
ccagguggugccuggagagg

SEQ ID NO: 1096583 - RNA, 22 nt, Human
uugcugugucugauggcugaga

SEQ ID NO: 1096584 - RNA, 22 nt, Human
gcugcggucacugcgggggcug

SEQ ID NO: 1096585 - RNA, 22 nt, Human
aaaugccucccauucuacugac

SEQ ID NO: 1096586 - RNA, 20 nt, Human
guaaaauauggucuuugggu

SEQ ID NO: 1096587 - RNA, 22 nt, Human
cucuuuccaggguaccccaggu

SEQ ID NO: 1096588 - RNA, 22 nt, Human
cccagggacagaugggcagcua

SEQ ID NO: 1096589 - RNA, 22 nt, Human
uagcugccuagacagcuauagc

SEQ ID NO: 1096590 - RNA, 22 nt, Human
cugccagucuaugcugcucggc

SEQ ID NO: 1096591 - RNA, 22 nt, Human
agugugcugcuuaaacaguugu

SEQ ID NO: 1096592 - RNA, 22 nt, Human
ugaaggccacuuccugugagcu

SEQ ID NO: 1096593 - RNA, 22 nt, Human
ucaaacauguuagcagucugug

SEQ ID NO: 1096594 - RNA, 22 nt, Human
acuguuuuccuaaugagcaaga

SEQ ID NO: 1096595 - RNA, 22 nt, Human
ugcaggaguccaaucaggagac

SEQ ID NO: 1096596 - RNA, 22 nt, Human
ucaugauuuccugguuaaggac

SEQ ID NO: 1096597 - RNA, 22 nt, Human
aaguggagccagggaaacugaa

SEQ ID NO: 1096598 - RNA, 22 nt, Human
ucucuucauuugcuauggguca

SEQ ID NO: 1096599 - RNA, 22 nt, Human
gagcugcccugagcuuugcaug

SEQ ID NO: 1096600 - RNA, 22 nt, Human
uacagauauuguacaguuauag

SEQ ID NO: 1096601 - RNA, 22 nt, Human
gucuaaacacaaugcaagaagu

SEQ ID NO: 1096602 - RNA, 22 nt, Human
ucuuugaauucaaacuguucaa

SEQ ID NO: 1096603 - RNA, 22 nt, Human
aaaaguguccagauuaugaaga

SEQ ID NO: 1096604 - RNA, 22 nt, Human
uccagaggcuccaaagggagau

SEQ ID NO: 1096605 - RNA, 22 nt, Human
cacuguccaugcuugcuaaccc

SEQ ID NO: 1096606 - RNA, 22 nt, Human
cugguucaauggggcugagccc

SEQ ID NO: 1096607 - RNA, 22 nt, Human
ugcauaguucuccuuccuccuc

SEQ ID NO: 1096608 - RNA, 22 nt, Human
cccuucuguaaaugcugacugg

SEQ ID NO: 1096609 - RNA, 22 nt, Human
guguggcugugggagauguuca

SEQ ID NO: 1096610 - RNA, 22 nt, Human
ugccagcccaccuuggggccuc

SEQ ID NO: 1096611 - RNA, 22 nt, Human
gaggugugguccucagccccca

SEQ ID NO: 1096612 - RNA, 23 nt, Human
cucccuggaguuucuggaagaug

SEQ ID NO: 1096613 - RNA, 22 nt, Human
uaacacuugggggcauccuuag

SEQ ID NO: 1096614 - RNA, 22 nt, Human
gcccuggccuucaucucagaca

SEQ ID NO: 1096615 - RNA, 22 nt, Human
gcuaagggacccuuucuaaugu

SEQ ID NO: 1096616 - RNA, 22 nt, Human
uagaaacauucaguugcagucc

SEQ ID NO: 1096617 - RNA, 22 nt, Human
ccacaaguuucagcacccagag

SEQ ID NO: 1096618 - RNA, 22 nt, Human
uugaaaacagcguagauucaca

SEQ ID NO: 1096619 - RNA, 20 nt, Human
ucuuuagauuuaucuuaugu

SEQ ID NO: 1096620 - RNA, 22 nt, Human
ggcugcuggggacgugggagag

SEQ ID NO: 1096621 - RNA, 21 nt, Human
aagccucaagcagaagacaga

SEQ ID NO: 1096622 - RNA, 22 nt, Human
cuacuucugugaugaaacuaca

SEQ ID NO: 1096623 - RNA, 22 nt, Human
acguuuucuagagaauaugcag

SEQ ID NO: 1096624 - RNA, 22 nt, Human
acaugcaaaugugcaugcaugu

SEQ ID NO: 1096625 - RNA, 22 nt, Human
ugcaggcugccuucacagagcc

SEQ ID NO: 1096626 - RNA, 22 nt, Human
ugcaggggcuugucugggccug

SEQ ID NO: 1096627 - RNA, 22 nt, Human
guuacauuuauuagaggucucu

SEQ ID NO: 1096628 - RNA, 22 nt, Human
aucaaauauaauaauuuucgcu

SEQ ID NO: 1096629 - RNA, 22 nt, Human
gcucagggaacuuuuugcaggc

SEQ ID NO: 1096630 - RNA, 22 nt, Human
gcucaggagcugacagccucaa

SEQ ID NO: 1096631 - RNA, 22 nt, Human
caacauauaauauuugaguucu

SEQ ID NO: 1096632 - RNA, 22 nt, Human
aggggaagauuauacuuuugaa

SEQ ID NO: 1096633 - RNA, 22 nt, Human
uauagcaucuaggaugauugca

SEQ ID NO: 1096634 - RNA, 22 nt, Human
agaauucucuuccauugaaaca

SEQ ID NO: 1096635 - RNA, 22 nt, Human
gggcacuguguucagagugcag

SEQ ID NO: 1096636 - RNA, 22 nt, Human
gcuucaggguuaugcaagagug

SEQ ID NO: 1096637 - RNA, 22 nt, Human
uugugcagaguugccuuuauuu

SEQ ID NO: 1096638 - RNA, 22 nt, Human
uguccucaaggagcuucagucu

SEQ ID NO: 1096639 - RNA, 22 nt, Human
caggagcucucaucgucagggc

SEQ ID NO: 1096640 - RNA, 22 nt, Human
aucagcaagcaugguuaggugu

SEQ ID NO: 1096641 - RNA, 22 nt, Human
uuccucucgcucuccggggccc

SEQ ID NO: 1096642 - RNA, 22 nt, Human
caggcagaaauuuuguuucauu

SEQ ID NO: 1096643 - RNA, 22 nt, Human
caggcugucugaauggaggccc

SEQ ID NO: 1096644 - RNA, 22 nt, Human
cuggagccacuuuuuauccuuu

SEQ ID NO: 1096645 - RNA, 22 nt, Human
gcccuggauggcaggagccauc

SEQ ID NO: 1096646 - RNA, 22 nt, Human
uguuaacagccagauuugguga

SEQ ID NO: 1096647 - RNA, 22 nt, Human
agcucuggaauaaugaugugau

SEQ ID NO: 1096648 - RNA, 22 nt, Human
uacauguauguguuaauaucug

SEQ ID NO: 1096649 - RNA, 20 nt, Human
cugggcugggcuacaggguc

SEQ ID NO: 1096650 - RNA, 22 nt, Human
ucuuacauauacgucauuuagu

SEQ ID NO: 1096651 - RNA, 22 nt, Human
uacacauccauguuuugacuuu

SEQ ID NO: 1096652 - RNA, 19 nt, Human
acauucccaucagcaaugu

SEQ ID NO: 1096653 - RNA, 22 nt, Human
aguccuuugggaaaaaugacua

SEQ ID NO: 1096654 - RNA, 22 nt, Human
uuccucugaaauggcuuggaaa

SEQ ID NO: 1096655 - RNA, 22 nt, Human
gugacagucaaagacaugacuu

SEQ ID NO: 1096656 - RNA, 22 nt, Human
cugagcccuggcucgccuggag

SEQ ID NO: 1096657 - RNA, 22 nt, Human
guggcaugacagugaaugggca

SEQ ID NO: 1096658 - RNA, 22 nt, Human
acugagccuugaagcuagauag

SEQ ID NO: 1096659 - RNA, 23 nt, Human
gcagauggccccagagugcugcc

SEQ ID NO: 1096660 - RNA, 22 nt, Human
agauuucugucaccuucuaugc

SEQ ID NO: 1096661 - RNA, 22 nt, Human
uauauucaaugauuaguaucag

SEQ ID NO: 1096662 - RNA, 22 nt, Human
ugcaggcucacccuggagcuga

SEQ ID NO: 1096663 - RNA, 22 nt, Human
ugaagcagcuucuuucugucaa

SEQ ID NO: 1096664 - RNA, 22 nt, Human
aaccaggaauugcagggcugca

SEQ ID NO: 1096665 - RNA, 22 nt, Human
ggcagucagugugguucauaaa

SEQ ID NO: 1096666 - RNA, 22 nt, Human
aagcagcaacaaacuggauaaa

SEQ ID NO: 1096667 - RNA, 17 nt, Human
uucacauccgagaacaa

SEQ ID NO: 1096668 - RNA, 22 nt, Human
agucagauuuaaagcuguuuga

SEQ ID NO: 1096669 - RNA, 21 nt, Human
gcaaggcuuuuguguuuccca

SEQ ID NO: 1096670 - RNA, 22 nt, Human
ggcuccagauguccccuggcaa

SEQ ID NO: 1096671 - RNA, 22 nt, Human
acaaagcuagagaagagaauug

SEQ ID NO: 1096672 - RNA, 22 nt, Human
ggaggggagguccagcugaucu

SEQ ID NO: 1096673 - RNA, 22 nt, Human
cuucacugaugggacagcucaa

SEQ ID NO: 1096674 - RNA, 22 nt, Human
ugcugguggagaaaguggaggu

SEQ ID NO: 1096675 - RNA, 22 nt, Human
ggcagggguccugguguugacu

SEQ ID NO: 1096676 - RNA, 22 nt, Human
caggugggagcgaggagcuacu

SEQ ID NO: 1096677 - RNA, 22 nt, Human
auaagaauaauuaaguuagucc

SEQ ID NO: 1096678 - RNA, 22 nt, Human
uccugguggugccagcugcagg

SEQ ID NO: 1096679 - RNA, 22 nt, Human
uauucacauucucaggccuggu

SEQ ID NO: 1096680 - RNA, 20 nt, Human
ugggcagcacugcuggcugg

SEQ ID NO: 1096681 - RNA, 22 nt, Human
cugccuguggacacccuggagg

SEQ ID NO: 1096682 - RNA, 22 nt, Human
agggcagaccacgugcaaggau

SEQ ID NO: 1096683 - RNA, 22 nt, Human
agauguuuguaaacacacugcu

SEQ ID NO: 1096684 - RNA, 22 nt, Human
caggaugagaggcccagggaag

SEQ ID NO: 1096685 - RNA, 22 nt, Human
agagcugagaauguggcuuccu

SEQ ID NO: 1096686 - RNA, 22 nt, Human
aggcucaguucacgucaacuuu

SEQ ID NO: 1096687 - RNA, 22 nt, Human
uucaggauucugugucugacaa

SEQ ID NO: 1096688 - RNA, 22 nt, Human
ugucccagacacaguaugcgcu

SEQ ID NO: 1096689 - RNA, 22 nt, Human
gcaggucucaaucugagcaggc

SEQ ID NO: 1096690 - RNA, 22 nt, Human
gcugucacucaccaggccugca

SEQ ID NO: 1096691 - RNA, 22 nt, Human
uccaagcuugcuuuagccacag

SEQ ID NO: 1096692 - RNA, 22 nt, Human
uaauacuugucauaaaggcauu

SEQ ID NO: 1096693 - RNA, 22 nt, Human
gugccagcaguuauggugauuu

SEQ ID NO: 1096694 - RNA, 22 nt, Human
gugccugcugcagagucgcugu

SEQ ID NO: 1096695 - RNA, 22 nt, Human
uuaggaaguguguccagaagcg

SEQ ID NO: 1096696 - RNA, 22 nt, Human
agaggccaucugcucugugggg

SEQ ID NO: 1096697 - RNA, 22 nt, Human
cuucuuuucauggcuugggaag

SEQ ID NO: 1096698 - RNA, 22 nt, Human
gccagcaacuaggagcugaauu

SEQ ID NO: 1096699 - RNA, 22 nt, Human
cccuggagugugacgaggcauu

SEQ ID NO: 1096700 - RNA, 22 nt, Human
acagaggccccgugggagagcc

SEQ ID NO: 1096701 - RNA, 22 nt, Human
caucacauuuaaggggaaggac

SEQ ID NO: 1096702 - RNA, 22 nt, Human
uggagaauucuauguugagggg

SEQ ID NO: 1096703 - RNA, 22 nt, Human
uguguuugaggcauguugcaga

SEQ ID NO: 1096704 - RNA, 22 nt, Human
cuccagggaugagacagaguag

SEQ ID NO: 1096705 - RNA, 22 nt, Human
cuucucagucaccugugagucu

SEQ ID NO: 1096706 - RNA, 22 nt, Human
ugggcugcagagcccggccuuc

SEQ ID NO: 1096707 - RNA, 22 nt, Human
uggcccagaucucugaccuuga

SEQ ID NO: 1096708 - RNA, 17 nt, Human
agguggcugcugcgccu

SEQ ID NO: 1096709 - RNA, 20 nt, Human
aauuauauaacuccaacauu

SEQ ID NO: 1096710 - RNA, 23 nt, Human
agccucuuuucuccugcccugca

SEQ ID NO: 1096711 - RNA, 22 nt, Human
ucucugagaaguuccuuuguga

SEQ ID NO: 1096712 - RNA, 22 nt, Human
ugaauguugauaugaguacaga

SEQ ID NO: 1096713 - RNA, 22 nt, Human
aauuaaaggucauguuaaaggg

SEQ ID NO: 1096714 - RNA, 22 nt, Human
acaugacuuuucucuuccagag

SEQ ID NO: 1096715 - RNA, 22 nt, Human
uguaauggaagugggauugcau

SEQ ID NO: 1096716 - RNA, 22 nt, Human
agcccugcccugccauguggca

SEQ ID NO: 1096717 - RNA, 19 nt, Human
gucuuacaggcaacaugag

SEQ ID NO: 1096718 - RNA, 21 nt, Human
ggacaugaggcaggagaggcu

SEQ ID NO: 1096719 - RNA, 22 nt, Human
uugagaguagagauggcagggc

SEQ ID NO: 1096720 - RNA, 22 nt, Human
cucugguuucgcaggaaauaga

SEQ ID NO: 1096721 - RNA, 22 nt, Human
augggcucggcgcugcugggau

SEQ ID NO: 1096722 - RNA, 22 nt, Human
aauguuuuacagaucccauuag

SEQ ID NO: 1096723 - RNA, 22 nt, Human
uuaaaaucgcuguugcuucugu

SEQ ID NO: 1096724 - RNA, 22 nt, Human
uaggagaggugaauggcacacu

SEQ ID NO: 1096725 - RNA, 22 nt, Human
cuuuuaagggauaauaagaugu

SEQ ID NO: 1096726 - RNA, 22 nt, Human
ccuggagccccucuggccagcc

SEQ ID NO: 1096727 - RNA, 21 nt, Human
cuacacagcuuucuauaggaa

SEQ ID NO: 1096728 - RNA, 22 nt, Human
cccaguuucaacuuuccagugg

SEQ ID NO: 1096729 - RNA, 22 nt, Human
gaagcaagugcaaggaagaggc

SEQ ID NO: 1096730 - RNA, 22 nt, Human
acaaaguuugugguauuccaag

SEQ ID NO: 1096731 - RNA, 22 nt, Human
uggguaggaccagaaaugcacu

SEQ ID NO: 1096732 - RNA, 22 nt, Human
ucacagaagcccucgcaaacua

SEQ ID NO: 1096733 - RNA, 22 nt, Human
gcuccugcccucuugcaauucc

SEQ ID NO: 1096734 - RNA, 22 nt, Human
uuugaagucagacacugcuuug

SEQ ID NO: 1096735 - RNA, 22 nt, Human
ucacagcuuugagcagagacca

SEQ ID NO: 1096736 - RNA, 22 nt, Human
gaacaacuccaagggacaucau

SEQ ID NO: 1096737 - RNA, 22 nt, Human
ucuuauaccccuaaacugcagc

SEQ ID NO: 1096738 - RNA, 22 nt, Human
uuucaaugacacaaaagagaaa

SEQ ID NO: 1096739 - RNA, 22 nt, Human
ugcuuucuguuuuucauauaau

SEQ ID NO: 1096740 - RNA, 22 nt, Human
acaaaguaggucaucaaagcuc

SEQ ID NO: 1096741 - RNA, 22 nt, Human
uggcuggcaaggcuggagucag

SEQ ID NO: 1096742 - RNA, 22 nt, Human
gcaggcaguuugcuuuucccuc

SEQ ID NO: 1096743 - RNA, 22 nt, Human
uggcaggagacacauggcauag

SEQ ID NO: 1096744 - RNA, 22 nt, Human
ucuugauuaauaccuuagcccu

SEQ ID NO: 1096745 - RNA, 22 nt, Human
ugggccacgugacccuuacccu

SEQ ID NO: 1096746 - RNA, 22 nt, Human
uuucacaaagcauagcacuuua

SEQ ID NO: 1096747 - RNA, 22 nt, Human
cucuuuccucagccacagucua

SEQ ID NO: 1096748 - RNA, 22 nt, Human
uuucacagaaagacaacagaua

SEQ ID NO: 1096749 - RNA, 22 nt, Human
cacauacuuguguguacauaug

SEQ ID NO: 1096750 - RNA, 22 nt, Human
gauuucuuggcccacucucaga

SEQ ID NO: 1096751 - RNA, 22 nt, Human
cagcuguuugggcauggccaga

SEQ ID NO: 1096752 - RNA, 22 nt, Human
gugcaguggcagauccuagcuc

SEQ ID NO: 1096753 - RNA, 22 nt, Human
gaggaaccacucugagaagcca

SEQ ID NO: 1096754 - RNA, 22 nt, Human
agaagccauauuuagggaggag

SEQ ID NO: 1096755 - RNA, 17 nt, Human
aggcagcucagaacauc

SEQ ID NO: 1096756 - RNA, 23 nt, Human
uuuugugugacuuaauaucucuu

SEQ ID NO: 1096757 - RNA, 22 nt, Human
ugcagagguuuccaggcaaguu

SEQ ID NO: 1096758 - RNA, 22 nt, Human
auuccuaaaguaauacacuaga

SEQ ID NO: 1096759 - RNA, 22 nt, Human
aauucacaggaucacaggagag

SEQ ID NO: 1096760 - RNA, 22 nt, Human
cagaaacuuucuuuacugagca

SEQ ID NO: 1096761 - RNA, 22 nt, Human
acucaggaaaugagaggcucuc

SEQ ID NO: 1096762 - RNA, 22 nt, Human
aacaucuuugauaaacuuagug

SEQ ID NO: 1096763 - RNA, 22 nt, Human
ggcuccuggcaucuggugggua

SEQ ID NO: 1096764 - RNA, 22 nt, Human
acagaauugaaaguauaaucug

SEQ ID NO: 1096765 - RNA, 22 nt, Human
acauuugacucuguucauauua

SEQ ID NO: 1096766 - RNA, 22 nt, Human
acagugauuauuaguugguggu

SEQ ID NO: 1096767 - RNA, 19 nt, Human
ugggcucauucaggugguu

SEQ ID NO: 1096768 - RNA, 22 nt, Human
gucugcccggccuuccuccacc

SEQ ID NO: 1096769 - RNA, 22 nt, Human
ccuggcuuccuucaugaccugg

SEQ ID NO: 1096770 - RNA, 22 nt, Human
agagaaaagaguucaggcuuug

SEQ ID NO: 1096771 - RNA, 22 nt, Human
gccagagguaucaaagauagua

SEQ ID NO: 1096772 - RNA, 22 nt, Human
auccaguuccaaagaucauuua

SEQ ID NO: 1096773 - RNA, 22 nt, Human
aagaauuuaaacuaaccauaug

SEQ ID NO: 1096774 - RNA, 22 nt, Human
ugaauacacuaaaaaucacuuu

SEQ ID NO: 1096775 - RNA, 22 nt, Human
aguuuuucuccccuggcuucau

SEQ ID NO: 1096776 - RNA, 22 nt, Human
gccuggaguacuccuugaagug

SEQ ID NO: 1096777 - RNA, 17 nt, Human
cauuuguugaucaguug

SEQ ID NO: 1096778 - RNA, 22 nt, Human
acugucuuccaggucuggaggu

SEQ ID NO: 1096779 - RNA, 22 nt, Human
ggcuccuguccuccuggagcuc

SEQ ID NO: 1096780 - RNA, 22 nt, Human
uguacagauaaagacuguaaau

SEQ ID NO: 1096781 - RNA, 22 nt, Human
caaauacuuacugaaccugugc

SEQ ID NO: 1096782 - RNA, 22 nt, Human
guggcagucaucaaggacagau

SEQ ID NO: 1096783 - RNA, 22 nt, Human
cagauaaauagauagauaaacu

SEQ ID NO: 1096784 - RNA, 22 nt, Human
cagcaauaacucaaagccauuu

SEQ ID NO: 1096785 - RNA, 22 nt, Human
gaagagaaaggcaaggaguuuu

SEQ ID NO: 1096786 - RNA, 22 nt, Human
gcugccaugccacagcacucac

SEQ ID NO: 1096787 - RNA, 22 nt, Human
gaggcccaggucaagcagccac

SEQ ID NO: 1096788 - RNA, 23 nt, Human
auaauaacgucugucuugucucu

SEQ ID NO: 1096789 - RNA, 23 nt, Human
agugagcagcuguagggcaagga

SEQ ID NO: 1096790 - RNA, 22 nt, Human
uuucuucuaagauuucaaacua

SEQ ID NO: 1096791 - RNA, 22 nt, Human
cugcuguggaugcaggaccuca

SEQ ID NO: 1096792 - RNA, 22 nt, Human
agguggcagagcuggcccagcg

SEQ ID NO: 1096793 - RNA, 22 nt, Human
uucaacaugcuuuauuucuaaa

SEQ ID NO: 1096794 - RNA, 22 nt, Human
ccucuccuugcacccgucccgc

SEQ ID NO: 1096795 - RNA, 20 nt, Human
gaggaaccacugggaggaga

SEQ ID NO: 1096796 - RNA, 22 nt, Human
guagcagaaucagugcuacaga

SEQ ID NO: 1096797 - RNA, 22 nt, Human
uaacuguaguuauaaagcuauc

SEQ ID NO: 1096798 - RNA, 22 nt, Human
ucacuaagugccgaguuuaguu

SEQ ID NO: 1096799 - RNA, 22 nt, Human
uucaaauacauucuuugccacu

SEQ ID NO: 1096800 - RNA, 22 nt, Human
aauucugaugaauaaaucaucc

SEQ ID NO: 1096801 - RNA, 22 nt, Human
aguguuccacacaucuggggaa

SEQ ID NO: 1096802 - RNA, 22 nt, Human
aggcuucagaugaccuuagcau

SEQ ID NO: 1096803 - RNA, 22 nt, Human
ugugaagguaaggaggggcaag

SEQ ID NO: 1096804 - RNA, 22 nt, Human
agagccuguuuugugggagaug

SEQ ID NO: 1096805 - RNA, 22 nt, Human
aaggaagaaucaucacguuggg

SEQ ID NO: 1096806 - RNA, 22 nt, Human
acagucaaucagaacagcaugu

SEQ ID NO: 1096807 - RNA, 22 nt, Human
acccuggggguggccagugcca

SEQ ID NO: 1096808 - RNA, 22 nt, Human
gaaaucuacgauuagugaaaau

SEQ ID NO: 1096809 - RNA, 22 nt, Human
uuaucauaaguaauugaaauaa

SEQ ID NO: 1096810 - RNA, 22 nt, Human
agccccaguaagggagggccug

SEQ ID NO: 1096811 - RNA, 22 nt, Human
ccuggcugccgagugugcagcg

SEQ ID NO: 1096812 - RNA, 21 nt, Human
aauuacagauggaauuacaga

SEQ ID NO: 1096813 - RNA, 22 nt, Human
acauuuugagaaaugacaagcu

SEQ ID NO: 1096814 - RNA, 22 nt, Human
aggaguggaauuacuggguucu

SEQ ID NO: 1096815 - RNA, 22 nt, Human
gguggaguaauucgcagagguu

SEQ ID NO: 1096816 - RNA, 22 nt, Human
uucuaauagcugccuauguauu

SEQ ID NO: 1096817 - RNA, 22 nt, Human
ccccucuugugggcucagguca

SEQ ID NO: 1096818 - RNA, 22 nt, Human
gaagacauuuuaugcauacucu

SEQ ID NO: 1096819 - RNA, 22 nt, Human
uccagccacucagcagggauug

SEQ ID NO: 1096820 - RNA, 22 nt, Human
gugcccaggggccagcugccgg

SEQ ID NO: 1096821 - RNA, 22 nt, Human
ccugggcuuugagggcaggaug

SEQ ID NO: 1096822 - RNA, 22 nt, Human
ugaaauaucauuuucaucuccc

SEQ ID NO: 1096823 - RNA, 22 nt, Human
gcaggcucaaaagcugguagga

SEQ ID NO: 1096824 - RNA, 22 nt, Human
agaagccagaauauucauggau

SEQ ID NO: 1096825 - RNA, 22 nt, Human
gccuucugcgcucgugucuccg

SEQ ID NO: 1096826 - RNA, 22 nt, Human
cugaaggauguguggugggagu

SEQ ID NO: 1096827 - RNA, 22 nt, Human
gucaggaugacaagugcuuuca

SEQ ID NO: 1096828 - RNA, 22 nt, Human
acagcuaggucuucagcacuuu

SEQ ID NO: 1096829 - RNA, 22 nt, Human
caauguuuguuagagcucuaga

SEQ ID NO: 1096830 - RNA, 22 nt, Human
uacagaaaucacaucgcuuuga

SEQ ID NO: 1096831 - RNA, 22 nt, Human
accagggcaaauguuuguacuc

SEQ ID NO: 1096832 - RNA, 22 nt, Human
ucucccacagucucccauggcu

SEQ ID NO: 1096833 - RNA, 22 nt, Human
uuucaaaguggagaauuagaca

SEQ ID NO: 1096834 - RNA, 22 nt, Human
uccugagcaccuaugccauggc

SEQ ID NO: 1096835 - RNA, 22 nt, Human
acuuuucuuaucagaaaggcca

SEQ ID NO: 1096836 - RNA, 22 nt, Human
uuccaagacaccuuuagucacu

SEQ ID NO: 1096837 - RNA, 22 nt, Human
ggcaggcugcuugggucauguc

SEQ ID NO: 1096838 - RNA, 22 nt, Human
aaggugguaauagugcaggauu

SEQ ID NO: 1096839 - RNA, 22 nt, Human
cacagagacagaucuauuuugc

SEQ ID NO: 1096840 - RNA, 22 nt, Human
auccuugaacuuagacacuagg

SEQ ID NO: 1096841 - RNA, 22 nt, Human
auauauuuugaauagccucugu

SEQ ID NO: 1096842 - RNA, 22 nt, Human
gcucagaggaugcuccuuuaug

SEQ ID NO: 1096843 - RNA, 22 nt, Human
ugcugagcgcauccggcggccg

SEQ ID NO: 1096844 - RNA, 22 nt, Human
ucuucaguuguaaaaguguugg

SEQ ID NO: 1096845 - RNA, 22 nt, Human
caucugaugggaauauaagagc

SEQ ID NO: 1096846 - RNA, 22 nt, Human
gccugcuggauguggccaggcc

SEQ ID NO: 1096847 - RNA, 22 nt, Human
gcuguguuuuauguuagguuaa

SEQ ID NO: 1096848 - RNA, 22 nt, Human
ucagcuggauguggaagugcua

SEQ ID NO: 1096849 - RNA, 22 nt, Human
gacaaaacacauuaguuuaaaa

SEQ ID NO: 1096850 - RNA, 22 nt, Human
agucaguguucuccggagaggc

SEQ ID NO: 1096851 - RNA, 22 nt, Human
aaucagucauuagcucugaccu

SEQ ID NO: 1096852 - RNA, 22 nt, Human
auucuggccuuggcucugucac

SEQ ID NO: 1096853 - RNA, 22 nt, Human
uuacaguagauacaaugaguaa

SEQ ID NO: 1096854 - RNA, 22 nt, Human
gcagggcacacaagaaugauaa

SEQ ID NO: 1096855 - RNA, 22 nt, Human
ggaagagaaugauggcuauggg

SEQ ID NO: 1096856 - RNA, 22 nt, Human
cacaucauguuaauucauuaca

SEQ ID NO: 1096857 - RNA, 22 nt, Human
gugcccuucagcuuugcugaaa

SEQ ID NO: 1096858 - RNA, 22 nt, Human
guuuacauguacucauuauacu

SEQ ID NO: 1096859 - RNA, 22 nt, Human
gagcuuaaauggcuaaauauaa

SEQ ID NO: 1096860 - RNA, 19 nt, Human
ucuaaacucuauacuggua

SEQ ID NO: 1096861 - RNA, 22 nt, Human
ucccaggguccucuucuggaau

SEQ ID NO: 1096862 - RNA, 22 nt, Human
augaaguucuagugagaaaugc

SEQ ID NO: 1096863 - RNA, 22 nt, Human
gaaagguugggugaauggugga

SEQ ID NO: 1096864 - RNA, 22 nt, Human
gcugccaguguggcaugaugca

SEQ ID NO: 1096865 - RNA, 22 nt, Human
ucuuugauggagagauagauau

SEQ ID NO: 1096866 - RNA, 22 nt, Human
ccacagcugaccgcaggugagc

SEQ ID NO: 1096867 - RNA, 18 nt, Human
aagaaguuggccaaagag

SEQ ID NO: 1096868 - RNA, 22 nt, Human
uccuggauucugcccugaaggc

SEQ ID NO: 1096869 - RNA, 22 nt, Human
agucccagagaggucggggcca

SEQ ID NO: 1096870 - RNA, 22 nt, Human
agggcagaaaucgauuacaccu

SEQ ID NO: 1096871 - RNA, 22 nt, Human
ccagcuccugggucuuagucag

SEQ ID NO: 1096872 - RNA, 22 nt, Human
uucacacagcaacuguaugaau

SEQ ID NO: 1096873 - RNA, 22 nt, Human
cugggccuugagaaucauguuu

SEQ ID NO: 1096874 - RNA, 22 nt, Human
caggcccuggcagggcugaguc

SEQ ID NO: 1096875 - RNA, 22 nt, Human
cagcaguggaacuacccaggga

SEQ ID NO: 1096876 - RNA, 22 nt, Human
ccagguggcuucugcccgaugu

SEQ ID NO: 1096877 - RNA, 22 nt, Human
gaaacuuucaugaauauaagau

SEQ ID NO: 1096878 - RNA, 22 nt, Human
cacaggaggaggugcccgggcc

SEQ ID NO: 1096879 - RNA, 22 nt, Human
uagauuuuaggagauuuuacug

SEQ ID NO: 1096880 - RNA, 22 nt, Human
cugcccugagucaugccagaug

SEQ ID NO: 1096881 - RNA, 22 nt, Human
gauauuuugagaaauccuauga

SEQ ID NO: 1096882 - RNA, 22 nt, Human
cuggccuggggggacacauccc

SEQ ID NO: 1096883 - RNA, 22 nt, Human
ggagcauguggggugagcaggg

SEQ ID NO: 1096884 - RNA, 22 nt, Human
cuucugagaggggcuaggagca

SEQ ID NO: 1096885 - RNA, 22 nt, Human
agcugcucccuauccuuuccuu

SEQ ID NO: 1096886 - RNA, 19 nt, Human
agugaaauggaguauucaa

SEQ ID NO: 1096887 - RNA, 22 nt, Human
cugcccugacugaccuuuugaa

SEQ ID NO: 1096888 - RNA, 22 nt, Human
agccuggaccaggggccucaga

SEQ ID NO: 1096889 - RNA, 22 nt, Human
aagauguaucaguuaagucuuc

SEQ ID NO: 1096890 - RNA, 22 nt, Human
aagacacacacauaugcugagu

SEQ ID NO: 1096891 - RNA, 19 nt, Human
gcacacauacacccuuugg

SEQ ID NO: 1096892 - RNA, 20 nt, Human
ucccugccuuuuacugcugg

SEQ ID NO: 1096893 - RNA, 22 nt, Human
ugauggugaugguugcacaaug

SEQ ID NO: 1096894 - RNA, 22 nt, Human
uccaggcccacucagcugaaau

SEQ ID NO: 1096895 - RNA, 22 nt, Human
acaacacauguguauaugugug

SEQ ID NO: 1096896 - RNA, 18 nt, Human
cuggagucacagugggga

SEQ ID NO: 1096897 - RNA, 22 nt, Human
aacaucuuaucugcaugauccc

SEQ ID NO: 1096898 - RNA, 22 nt, Human
ugaguucuaguggcugcagauu

SEQ ID NO: 1096899 - RNA, 22 nt, Human
cuggggaccgagcaagcucugg

SEQ ID NO: 1096900 - RNA, 22 nt, Human
gcaagcugugccuucucaggau

SEQ ID NO: 1096901 - RNA, 22 nt, Human
gucuuauuuaaggacaagaaga

SEQ ID NO: 1096902 - RNA, 22 nt, Human
uaggaacaaguuuccuugcugu

SEQ ID NO: 1096903 - RNA, 22 nt, Human
cugugcccagcucccugacugc

SEQ ID NO: 1096904 - RNA, 22 nt, Human
gguggaaggccuggaaggaggc

SEQ ID NO: 1096905 - RNA, 23 nt, Human
aacaccaaggcucagagagauaa

SEQ ID NO: 1096906 - RNA, 22 nt, Human
caaaagucuguccuuuaacuuc

SEQ ID NO: 1096907 - RNA, 22 nt, Human
cucugugagggucuguacagaa

SEQ ID NO: 1096908 - RNA, 22 nt, Human
ucugaaauguucucuuguuuug

SEQ ID NO: 1096909 - RNA, 22 nt, Human
gagccuggagcuggaacgaagc

SEQ ID NO: 1096910 - RNA, 23 nt, Human
agcauggaauaggaaagaggcag

SEQ ID NO: 1096911 - RNA, 22 nt, Human
ucauuucaguggcacagaagau

SEQ ID NO: 1096912 - RNA, 19 nt, Human
ucaguuuuagucaucaguu

SEQ ID NO: 1096913 - RNA, 22 nt, Human
aauuaauggaaaguaaggaagg

SEQ ID NO: 1096914 - RNA, 22 nt, Human
uuguguguguaacuuuaugaga

SEQ ID NO: 1096915 - RNA, 22 nt, Human
auugaagaguugauuauuaucu

SEQ ID NO: 1096916 - RNA, 22 nt, Human
gggcuggaggccugccugguua

SEQ ID NO: 1096917 - RNA, 22 nt, Human
aaagcaaugggucuaagguaaa

SEQ ID NO: 1096918 - RNA, 22 nt, Human
ucaacauucauauauagccaca

SEQ ID NO: 1096919 - RNA, 22 nt, Human
gagaucgguaaagagcaugcac

SEQ ID NO: 1096920 - RNA, 22 nt, Human
auuuucuauguuguaauuguua

SEQ ID NO: 1096921 - RNA, 22 nt, Human
ggagccagaaaugcugugguug

SEQ ID NO: 1096922 - RNA, 22 nt, Human
caguaaaugaugauagugccuu

SEQ ID NO: 1096923 - RNA, 22 nt, Human
gacacaugaccauaaaugcuaa

SEQ ID NO: 1096924 - RNA, 22 nt, Human
ucugggcuggugcucaugaauu

SEQ ID NO: 1096925 - RNA, 22 nt, Human
guuuucuuugaaugcuucuaga

SEQ ID NO: 1096926 - RNA, 22 nt, Human
ugucccaggcugaaguacagug

SEQ ID NO: 1096927 - RNA, 22 nt, Human
cccagccucagcuuuacuucca

SEQ ID NO: 1096928 - RNA, 22 nt, Human
cuccagggggcauccacacagc

SEQ ID NO: 1096929 - RNA, 22 nt, Human
acauuuaaauaugccuuauauu

SEQ ID NO: 1096930 - RNA, 22 nt, Human
aguagauagauucuaagcacua

SEQ ID NO: 1096931 - RNA, 18 nt, Human
gagcucugccucccaguc

SEQ ID NO: 1096932 - RNA, 22 nt, Human
caggcagcauuuacucugauga

SEQ ID NO: 1096933 - RNA, 20 nt, Human
ugugggcccuuggcuggcaa

SEQ ID NO: 1096934 - RNA, 22 nt, Human
gucccauaaguagugcaacuug

SEQ ID NO: 1096935 - RNA, 22 nt, Human
ugccuugcgggcguuucuguug

SEQ ID NO: 1096936 - RNA, 22 nt, Human
uccaggagagguguggggacug

SEQ ID NO: 1096937 - RNA, 22 nt, Human
uuuauguaaguggaaugaugcc

SEQ ID NO: 1096938 - RNA, 22 nt, Human
uaccacaggccaaauuugaggu

SEQ ID NO: 1096939 - RNA, 22 nt, Human
agucucagcuacuugggaggcu

SEQ ID NO: 1096940 - RNA, 22 nt, Human
ggucccaggauugguugcgcag

SEQ ID NO: 1096941 - RNA, 23 nt, Human
uggcucuguggaucccucaggag

SEQ ID NO: 1096942 - RNA, 22 nt, Human
ccaaaguccauaguuuacauaa

SEQ ID NO: 1096943 - RNA, 20 nt, Human
agggucagagagcgugagug

SEQ ID NO: 1096944 - RNA, 22 nt, Human
gagucugaugucccccaggcca

SEQ ID NO: 1096945 - RNA, 22 nt, Human
uggcucagccauucguguugcc

SEQ ID NO: 1096946 - RNA, 22 nt, Human
cagcagagggagccauugaaau

SEQ ID NO: 1096947 - RNA, 22 nt, Human
gcagaggacacaggagggcaag

SEQ ID NO: 1096948 - RNA, 22 nt, Human
ccagccaggcauugcaaacuga

SEQ ID NO: 1096949 - RNA, 22 nt, Human
uggggccuuggccucauuagau

SEQ ID NO: 1096950 - RNA, 20 nt, Human
auuccucagccccagccuca

SEQ ID NO: 1096951 - RNA, 22 nt, Human
guuuggggucugcagagcggcg

SEQ ID NO: 1096952 - RNA, 22 nt, Human
agggagcugcucugcuuccgug

SEQ ID NO: 1096953 - RNA, 22 nt, Human
gagcucccaggccccagcaagg

SEQ ID NO: 1096954 - RNA, 22 nt, Human
uuugcuuuguuuaaaaguggua

SEQ ID NO: 1096955 - RNA, 22 nt, Human
cugcagggcagggccuccuggc

SEQ ID NO: 1096956 - RNA, 22 nt, Human
uuggcaggaggcuucaguuccu

SEQ ID NO: 1096957 - RNA, 21 nt, Human
uccugccuuaguccagagcag

SEQ ID NO: 1096958 - RNA, 22 nt, Human
gauaaaauauguggccuuuagu

SEQ ID NO: 1096959 - RNA, 22 nt, Human
gagagcuguaauagucaugucu

SEQ ID NO: 1096960 - RNA, 22 nt, Human
caauacaauuaccaguuaauca

SEQ ID NO: 1096961 - RNA, 22 nt, Human
ucagcugaguucuagagcacuc

SEQ ID NO: 1096962 - RNA, 22 nt, Human
caagauggaguccgggaaugug

SEQ ID NO: 1096963 - RNA, 22 nt, Human
ggaggggccggcugccugccac

SEQ ID NO: 1096964 - RNA, 22 nt, Human
ugugccuggucccugagucgag

SEQ ID NO: 1096965 - RNA, 22 nt, Human
ugccacuggcucaauggugcag

SEQ ID NO: 1096966 - RNA, 22 nt, Human
aaauucuaugucaauguuuauu

SEQ ID NO: 1096967 - RNA, 22 nt, Human
uaaauuguuuucuagaaguugu

SEQ ID NO: 1096968 - RNA, 18 nt, Human
ucucuuuuccccucauug

SEQ ID NO: 1096969 - RNA, 22 nt, Human
gcaggagcccuggcauguucuu

SEQ ID NO: 1096970 - RNA, 22 nt, Human
auagaccuucuacacaggacaa

SEQ ID NO: 1096971 - RNA, 22 nt, Human
uugcuuuacuuugccauucguu

SEQ ID NO: 1096972 - RNA, 22 nt, Human
uuccucagacccucauugugag

SEQ ID NO: 1096973 - RNA, 22 nt, Human
aaguuauugcagcaauccaagu

SEQ ID NO: 1096974 - RNA, 22 nt, Human
agagaugaaaaguggagacugg

SEQ ID NO: 1096975 - RNA, 22 nt, Human
gccucugggcucugccccuggc

SEQ ID NO: 1096976 - RNA, 19 nt, Human
aaucagaaauaucgaggcc

SEQ ID NO: 1096977 - RNA, 22 nt, Human
uggcccugaaucaaggccagca

SEQ ID NO: 1096978 - RNA, 22 nt, Human
uggguggcacuucuggggucca

SEQ ID NO: 1096979 - RNA, 17 nt, Human
cugaagauaauggcaac

SEQ ID NO: 1096980 - RNA, 22 nt, Human
cugaagcaaaugaaacagcucu

SEQ ID NO: 1096981 - RNA, 23 nt, Human
acugaaaggauccuagcagagac

SEQ ID NO: 1096982 - RNA, 22 nt, Human
ucagcagaggggaaggcaucug

SEQ ID NO: 1096983 - RNA, 22 nt, Human
ucaguauuccuggaaauacaag

SEQ ID NO: 1096984 - RNA, 22 nt, Human
ucuucacacacaguccucuuuc

SEQ ID NO: 1096985 - RNA, 22 nt, Human
aacaucagcacacaauagcaag

SEQ ID NO: 1096986 - RNA, 22 nt, Human
cagcuuggaggaggaucuaaga

SEQ ID NO: 1096987 - RNA, 22 nt, Human
ugcugcuguugacggcugucca

SEQ ID NO: 1096988 - RNA, 22 nt, Human
gauauacauagguuucuaugca

SEQ ID NO: 1096989 - RNA, 22 nt, Human
gcagacuguaucaaugucagua

SEQ ID NO: 1096990 - RNA, 22 nt, Human
uaacacugguauuucauuuagu

SEQ ID NO: 1096991 - RNA, 22 nt, Human
ggugcugguucaggguggcugu

SEQ ID NO: 1096992 - RNA, 22 nt, Human
cacagagacagaagcacuuaug

SEQ ID NO: 1096993 - RNA, 22 nt, Human
uggcccugugugcaggcugcac

SEQ ID NO: 1096994 - RNA, 19 nt, Human
uacagugaaccaggaggag

SEQ ID NO: 1096995 - RNA, 22 nt, Human
caaggccaugagcagcgagugu

SEQ ID NO: 1096996 - RNA, 22 nt, Human
ucuugggauugcccugcaguuc

SEQ ID NO: 1096997 - RNA, 22 nt, Human
ucuggcugcugcgugagugcuu

SEQ ID NO: 1096998 - RNA, 22 nt, Human
ugugggcucuaauggcagcaga

SEQ ID NO: 1096999 - RNA, 22 nt, Human
gggcuggcuaagacuuuucugu

SEQ ID NO: 1097000 - RNA, 22 nt, Human
ggcaggugcuugucgaaggccu

SEQ ID NO: 1097001 - RNA, 22 nt, Human
agccuguccagaggacagggcu

SEQ ID NO: 1097002 - RNA, 22 nt, Human
uccucuucaaaaggauuuccuu

SEQ ID NO: 1097003 - RNA, 22 nt, Human
uggccuggugcucaggcaguag

SEQ ID NO: 1097004 - RNA, 22 nt, Human
cuggagugaagucuggcagcuu

SEQ ID NO: 1097005 - RNA, 22 nt, Human
uggagcaggugccaggugugug

SEQ ID NO: 1097006 - RNA, 22 nt, Human
agaugcaugcuuaauuagcaca

SEQ ID NO: 1097007 - RNA, 22 nt, Human
agccauuagucauuuuagaaua

SEQ ID NO: 1097008 - RNA, 22 nt, Human
agaggcacaaacuggaaaggac

SEQ ID NO: 1097009 - RNA, 21 nt, Human
cacuauuuauauaugccagcu

SEQ ID NO: 1097010 - RNA, 22 nt, Human
cucugcagaggcccaaggcuga

SEQ ID NO: 1097011 - RNA, 22 nt, Human
acugaacaccauuuauaacauu

SEQ ID NO: 1097012 - RNA, 22 nt, Human
ugagccagucugucugggugaa

SEQ ID NO: 1097013 - RNA, 22 nt, Human
ugaggaaguugaucucaucagu

SEQ ID NO: 1097014 - RNA, 22 nt, Human
gcuggaguuggcaaggcaugua

SEQ ID NO: 1097015 - RNA, 22 nt, Human
uguguugugacauucuuggaug

SEQ ID NO: 1097016 - RNA, 22 nt, Human
aaagaaaccuaucagccacaug

SEQ ID NO: 1097017 - RNA, 22 nt, Human
ggcagagacaccgaaugacucu

SEQ ID NO: 1097018 - RNA, 22 nt, Human
ugaggcucagagaagugcuguu

SEQ ID NO: 1097019 - RNA, 22 nt, Human
uuuuaaugggcgacuauuaugg

SEQ ID NO: 1097020 - RNA, 22 nt, Human
uuggcuucucuuaacccuaaag

SEQ ID NO: 1097021 - RNA, 22 nt, Human
aaugugugaacacuaaugcaac

SEQ ID NO: 1097022 - RNA, 22 nt, Human
aaaugcagauugucauucagga

SEQ ID NO: 1097023 - RNA, 22 nt, Human
aaaguuacacgacuauuuaugu

SEQ ID NO: 1097024 - RNA, 22 nt, Human
gacccuggaguuaguccugugu

SEQ ID NO: 1097025 - RNA, 22 nt, Human
auaugugucgugcuacugccca

SEQ ID NO: 1097026 - RNA, 22 nt, Human
aggccucaggaagguaaagaag

SEQ ID NO: 1097027 - RNA, 22 nt, Human
aaggacagaaacagauugcugg

SEQ ID NO: 1097028 - RNA, 22 nt, Human
aaugaaauguagcuuauccaua

SEQ ID NO: 1097029 - RNA, 22 nt, Human
gggaaguuuguuuggacuggga

SEQ ID NO: 1097030 - RNA, 22 nt, Human
aagguggugcuucugcuccucu

SEQ ID NO: 1097031 - RNA, 22 nt, Human
ggguggcuccuaugggcauagc

SEQ ID NO: 1097032 - RNA, 22 nt, Human
uccugggcagcgggacgcucag

SEQ ID NO: 1097033 - RNA, 22 nt, Human
gggagaagaaugugucaauugu

SEQ ID NO: 1097034 - RNA, 22 nt, Human
uccucaguauuguggagcagau

SEQ ID NO: 1097035 - RNA, 22 nt, Human
cuguggaccugcucuuagagac

SEQ ID NO: 1097036 - RNA, 22 nt, Human
uuggccuucucauuugcuuauu

SEQ ID NO: 1097037 - RNA, 22 nt, Human
acuguugucaggcugcuuugga

SEQ ID NO: 1097038 - RNA, 20 nt, Human
gguuacauugucuacaugug

SEQ ID NO: 1097039 - RNA, 22 nt, Human
augugaaacugaagcauccaua

SEQ ID NO: 1097040 - RNA, 22 nt, Human
acauuucuggaguuucucaaca

SEQ ID NO: 1097041 - RNA, 22 nt, Human
ccacacugaaccucagugucuu

SEQ ID NO: 1097042 - RNA, 22 nt, Human
ucaguuuucucauuuaugagau

SEQ ID NO: 1097043 - RNA, 22 nt, Human
agaggggaguccuaaucugauu

SEQ ID NO: 1097044 - RNA, 22 nt, Human
ccuuucucuaucgacccaucgc

SEQ ID NO: 1097045 - RNA, 22 nt, Human
ggugcuggacacguggcacucc

SEQ ID NO: 1097046 - RNA, 22 nt, Human
gcugucuccauagcuguguguc

SEQ ID NO: 1097047 - RNA, 20 nt, Human
augccucuaauuuugcaaac

SEQ ID NO: 1097048 - RNA, 22 nt, Human
ugcuucugggcaaaugugugug

SEQ ID NO: 1097049 - RNA, 22 nt, Human
cucagacuagccuguaccgaca

SEQ ID NO: 1097050 - RNA, 22 nt, Human
aggcagcaaagaaaugaugcug

SEQ ID NO: 1097051 - RNA, 22 nt, Human
ccuggccagcuaauugcccauc

SEQ ID NO: 1097052 - RNA, 22 nt, Human
agucucagccacacagaccuau

SEQ ID NO: 1097053 - RNA, 22 nt, Human
cucaggccagguuucucccaca

SEQ ID NO: 1097054 - RNA, 22 nt, Human
uugacagcaaagauugugccua

SEQ ID NO: 1097055 - RNA, 22 nt, Human
ucuugauuuauucuacccagaa

SEQ ID NO: 1097056 - RNA, 20 nt, Human
acuccagguggcaugaggac

SEQ ID NO: 1097057 - RNA, 22 nt, Human
gagcaugguuccauagguuggu

SEQ ID NO: 1097058 - RNA, 22 nt, Human
gcuuccuucuaccacaucaugc

SEQ ID NO: 1097059 - RNA, 22 nt, Human
aggaccaguaugagagcaucug

SEQ ID NO: 1097060 - RNA, 22 nt, Human
agucccagugagaugaaccagg

SEQ ID NO: 1097061 - RNA, 20 nt, Human
accucugcaucaauccuuug

SEQ ID NO: 1097062 - RNA, 21 nt, Human
uuacuuuugcagcaaccuaau

SEQ ID NO: 1097063 - RNA, 22 nt, Human
agguccagcuguugcagccucc

SEQ ID NO: 1097064 - RNA, 22 nt, Human
aagcagagagcagaauuaaguu

SEQ ID NO: 1097065 - RNA, 22 nt, Human
ugcccugcuaaccuugguucca

SEQ ID NO: 1097066 - RNA, 22 nt, Human
aguuagcaaauaccacaaucug

SEQ ID NO: 1097067 - RNA, 16 nt, Human
gagcagagcgguucca

SEQ ID NO: 1097068 - RNA, 22 nt, Human
uccauguggccagacacuggca

SEQ ID NO: 1097069 - RNA, 22 nt, Human
ggagaggaaaugccagcacuuc

SEQ ID NO: 1097070 - RNA, 20 nt, Human
ugaagaggaagaggacggcc

SEQ ID NO: 1097071 - RNA, 22 nt, Human
cugagagucagcuucuccuccu

SEQ ID NO: 1097072 - RNA, 22 nt, Human
ugcccacaggaagacaccagcg

SEQ ID NO: 1097073 - RNA, 22 nt, Human
uuuccaaaaguuuguucugugc

SEQ ID NO: 1097074 - RNA, 22 nt, Human
caggcagcugacugucagauau

SEQ ID NO: 1097075 - RNA, 22 nt, Human
ccuggccugugaaucugagagc

SEQ ID NO: 1097076 - RNA, 19 nt, Human
agcagagcagggccguggg

SEQ ID NO: 1097077 - RNA, 22 nt, Human
ugccaggcugcccuccagucug

SEQ ID NO: 1097078 - RNA, 22 nt, Human
uugcacaguuugaagaugacuc

SEQ ID NO: 1097079 - RNA, 23 nt, Human
augcccuguagaggcugcugacc

SEQ ID NO: 1097080 - RNA, 23 nt, Human
ugcagccacucaggagcucagug

SEQ ID NO: 1097081 - RNA, 21 nt, Human
ucaggaagagccaguucaugc

SEQ ID NO: 1097082 - RNA, 20 nt, Human
aaaugccagugauucugcuu

SEQ ID NO: 1097083 - RNA, 22 nt, Human
uccccugcagaugagggcagug

SEQ ID NO: 1097084 - RNA, 22 nt, Human
aggccugaaggaagaugagcug

SEQ ID NO: 1097085 - RNA, 22 nt, Human
cagaaguaagauuacugugaga

SEQ ID NO: 1097086 - RNA, 22 nt, Human
uuuguaacucucccuuuguaua

SEQ ID NO: 1097087 - RNA, 22 nt, Human
uggcccuguguccugcugccag

SEQ ID NO: 1097088 - RNA, 22 nt, Human
cagggguauucaagguaguuua

SEQ ID NO: 1097089 - RNA, 22 nt, Human
acuuuguaggaaaaagucacaa

SEQ ID NO: 1097090 - RNA, 22 nt, Human
ccuuuacaaaguucuucauggg

SEQ ID NO: 1097091 - RNA, 22 nt, Human
aaggacuccaauucuuucaucu

SEQ ID NO: 1097092 - RNA, 22 nt, Human
auucugucuuuuuaaaauaaua

SEQ ID NO: 1097093 - RNA, 21 nt, Human
ugcccacagcaaaugcagagg

SEQ ID NO: 1097094 - RNA, 22 nt, Human
ugcuccagcuggagaugggggc

SEQ ID NO: 1097095 - RNA, 22 nt, Human
uucacauuguuuuaaugugaau

SEQ ID NO: 1097096 - RNA, 22 nt, Human
ggauggagguucucagaugcuc

SEQ ID NO: 1097097 - RNA, 22 nt, Human
acuuuuaaaugaguuucaguug

SEQ ID NO: 1097098 - RNA, 22 nt, Human
uucaagaucuggguuuucagcu

SEQ ID NO: 1097099 - RNA, 22 nt, Human
guccaaguacauguguguacau

SEQ ID NO: 1097100 - RNA, 22 nt, Human
gcuggcagagacaagaagacua

SEQ ID NO: 1097101 - RNA, 20 nt, Human
caggccagagguuugauggc

SEQ ID NO: 1097102 - RNA, 22 nt, Human
aaacuuuuccugcucuuguccu

SEQ ID NO: 1097103 - RNA, 22 nt, Human
uuauuaaugaguacaaguuauu

SEQ ID NO: 1097104 - RNA, 22 nt, Human
acagcaguuuagaggacagcca

SEQ ID NO: 1097105 - RNA, 22 nt, Human
uguacacugcaggaugcauugc

SEQ ID NO: 1097106 - RNA, 22 nt, Human
caaagccauagaguagauaaga

SEQ ID NO: 1097107 - RNA, 22 nt, Human
cuuuucacaggaggauaagccc

SEQ ID NO: 1097108 - RNA, 22 nt, Human
aagacaauaauuuuugggcagg

SEQ ID NO: 1097109 - RNA, 22 nt, Human
caucagaagauggcucuggaaa

SEQ ID NO: 1097110 - RNA, 22 nt, Human
gaagcccagggcguggccgggc

SEQ ID NO: 1097111 - RNA, 22 nt, Human
acagaauagguacagucaguca

SEQ ID NO: 1097112 - RNA, 22 nt, Human
cucugagggcugucaggaaagg

SEQ ID NO: 1097113 - RNA, 22 nt, Human
aggcucaggugccucauucaca

SEQ ID NO: 1097114 - RNA, 22 nt, Human
ugggcagacuaaggucaaagcu

SEQ ID NO: 1097115 - RNA, 19 nt, Human
gccaggaaagaaucaggcg

SEQ ID NO: 1097116 - RNA, 22 nt, Human
cuggcagccaagugggauacuc

SEQ ID NO: 1097117 - RNA, 22 nt, Human
auguaauuugcccucaaguuaa

SEQ ID NO: 1097118 - RNA, 22 nt, Human
augaauggugaagucugauaag

SEQ ID NO: 1097119 - RNA, 22 nt, Human
uuagggcuuuucugaauaggcc

SEQ ID NO: 1097120 - RNA, 23 nt, Human
cugcuguguuggucucgauggga

SEQ ID NO: 1097121 - RNA, 22 nt, Human
ucagaguccucacccugaggau

SEQ ID NO: 1097122 - RNA, 22 nt, Human
aguuuuaagaugcgcuucuguu

SEQ ID NO: 1097123 - RNA, 22 nt, Human
ggucccagcuggucacugucag

SEQ ID NO: 1097124 - RNA, 22 nt, Human
ucagauggauucauuacaugac

SEQ ID NO: 1097125 - RNA, 22 nt, Human
uagaugaauuagcaauuaucuu

SEQ ID NO: 1097126 - RNA, 22 nt, Human
gcagauggaaagugcuugaggg

SEQ ID NO: 1097127 - RNA, 22 nt, Human
guuucuaagcacaugugagugu

SEQ ID NO: 1097128 - RNA, 22 nt, Human
ucccuggcuguguucaggugcg

SEQ ID NO: 1097129 - RNA, 21 nt, Human
uguggcugccucuggcccugg

SEQ ID NO: 1097130 - RNA, 22 nt, Human
uuuucuaaaauauccaggacag

SEQ ID NO: 1097131 - RNA, 22 nt, Human
gggcagaggcucuggcccaucc

SEQ ID NO: 1097132 - RNA, 22 nt, Human
caggaggccaacugugggacuu

SEQ ID NO: 1097133 - RNA, 22 nt, Human
auuucuaaagagggugguuugg

SEQ ID NO: 1097134 - RNA, 22 nt, Human
uguuugugguuauaauaaguau

SEQ ID NO: 1097135 - RNA, 22 nt, Human
uuucuacuucuccugaaugucu

SEQ ID NO: 1097136 - RNA, 22 nt, Human
uguaaauaaugcauguaaauca

SEQ ID NO: 1097137 - RNA, 22 nt, Human
gcagggaggaagagaugcuucc

SEQ ID NO: 1097138 - RNA, 22 nt, Human
uuaauacaacuguugucacugg

SEQ ID NO: 1097139 - RNA, 23 nt, Human
uggccagguagaggagguaguga

SEQ ID NO: 1097140 - RNA, 22 nt, Human
agcuguggaguaggggguugga

SEQ ID NO: 1097141 - RNA, 22 nt, Human
ugcaagagcccagggccaggaa

SEQ ID NO: 1097142 - RNA, 22 nt, Human
cugggagguggagguugcauug

SEQ ID NO: 1097143 - RNA, 22 nt, Human
cugacacacugagcauuugaua

SEQ ID NO: 1097144 - RNA, 22 nt, Human
ugaaauuauucuuaccaaggug

SEQ ID NO: 1097145 - RNA, 22 nt, Human
uggccagugauuaaugacgcuu

SEQ ID NO: 1097146 - RNA, 22 nt, Human
caggggcuagcacuuaauguuu

SEQ ID NO: 1097147 - RNA, 22 nt, Human
cagcaucucacuucccagaagg

SEQ ID NO: 1097148 - RNA, 22 nt, Human
gcaggugguggggcuaugaucu

SEQ ID NO: 1097149 - RNA, 23 nt, Human
aagagcagggaauauuuauuugc

SEQ ID NO: 1097150 - RNA, 22 nt, Human
ccacagggcacaagggagguug

SEQ ID NO: 1097151 - RNA, 22 nt, Human
cugggcugcaucaaagaggcau

SEQ ID NO: 1097152 - RNA, 22 nt, Human
uccaagcuguauguuccuagag

SEQ ID NO: 1097153 - RNA, 22 nt, Human
aggcccugcccagugccacaag

SEQ ID NO: 1097154 - RNA, 21 nt, Human
acaugagacacacauauaugu

SEQ ID NO: 1097155 - RNA, 22 nt, Human
gcugugagaaacagggaguguc

SEQ ID NO: 1097156 - RNA, 22 nt, Human
uggaggcagucaaaugacugac

SEQ ID NO: 1097157 - RNA, 22 nt, Human
cugacccauauaagaguggagg

SEQ ID NO: 1097158 - RNA, 19 nt, Human
agcaaauauaauaguguuc

SEQ ID NO: 1097159 - RNA, 22 nt, Human
cccaguccuaaagcagacgcca

SEQ ID NO: 1097160 - RNA, 22 nt, Human
gccucagggggagaggccagcu

SEQ ID NO: 1097161 - RNA, 22 nt, Human
uaaaggcucacuggcuuggggu

SEQ ID NO: 1097162 - RNA, 20 nt, Human
ucacaucuggcagcugauga

SEQ ID NO: 1097163 - RNA, 22 nt, Human
cauauuaaggucuguaaggggu

SEQ ID NO: 1097164 - RNA, 19 nt, Human
ggcugccuuuccuuaccag

SEQ ID NO: 1097165 - RNA, 22 nt, Human
auaagaaacauuauucuuucca

SEQ ID NO: 1097166 - RNA, 22 nt, Human
gcucugcugcuuacuagauggu

SEQ ID NO: 1097167 - RNA, 22 nt, Human
aucuuugaagaggacuugaagu

SEQ ID NO: 1097168 - RNA, 22 nt, Human
aaaugcaggauuaacagcuuug

SEQ ID NO: 1097169 - RNA, 22 nt, Human
ugucagcagcugguuugcuguu

SEQ ID NO: 1097170 - RNA, 22 nt, Human
aggcugagccacggggcuggcu

SEQ ID NO: 1097171 - RNA, 22 nt, Human
uuucacagcauauagguguacu

SEQ ID NO: 1097172 - RNA, 22 nt, Human
ugucaccagcugcuccucagga

SEQ ID NO: 1097173 - RNA, 22 nt, Human
auugacaauuagcccuuaggug

SEQ ID NO: 1097174 - RNA, 22 nt, Human
cagaauuuuucgaauguacugu

SEQ ID NO: 1097175 - RNA, 22 nt, Human
aaauuauuuucagaauggagaa

SEQ ID NO: 1097176 - RNA, 22 nt, Human
auuguggugucaguuauaggca

SEQ ID NO: 1097177 - RNA, 22 nt, Human
aaacagcagcuguuuaauuugc

SEQ ID NO: 1097178 - RNA, 22 nt, Human
uguagcagucugggggaauuac

SEQ ID NO: 1097179 - RNA, 22 nt, Human
uguaauaccacuguuggacauu

SEQ ID NO: 1097180 - RNA, 22 nt, Human
gcauuccugagaaugcagagug

SEQ ID NO: 1097181 - RNA, 18 nt, Human
aggcagacacuagagguc

SEQ ID NO: 1097182 - RNA, 22 nt, Human
uuucuaaggccagagacugcug

SEQ ID NO: 1097183 - RNA, 22 nt, Human
agcagcaguacauauaagacua

SEQ ID NO: 1097184 - RNA, 22 nt, Human
agggcagcuagcuguagaaaga

SEQ ID NO: 1097185 - RNA, 21 nt, Human
aaaggccauaaucacggagca

SEQ ID NO: 1097186 - RNA, 22 nt, Human
acugggccgcgcugcagagggc

SEQ ID NO: 1097187 - RNA, 18 nt, Human
gggcccuggcguccgccc

SEQ ID NO: 1097188 - RNA, 22 nt, Human
acaggaaaugaaaugguaucua

SEQ ID NO: 1097189 - RNA, 22 nt, Human
uuccaauugugagauuuuuuaa

SEQ ID NO: 1097190 - RNA, 23 nt, Human
aaacuacaacgccaggcacugag

SEQ ID NO: 1097191 - RNA, 22 nt, Human
cauacagagaaggauaauaaag

SEQ ID NO: 1097192 - RNA, 22 nt, Human
aaacacuucuuaggucuuaagu

SEQ ID NO: 1097193 - RNA, 22 nt, Human
ggaugcugacuuuggagcaugg

SEQ ID NO: 1097194 - RNA, 22 nt, Human
ccucugccugcacaucauccug

SEQ ID NO: 1097195 - RNA, 22 nt, Human
cauuugaugacucaacucauaa

SEQ ID NO: 1097196 - RNA, 22 nt, Human
uccaguuugcacuguauaauag

SEQ ID NO: 1097197 - RNA, 22 nt, Human
uagaugcuugucaguuucuguc

SEQ ID NO: 1097198 - RNA, 22 nt, Human
ugcagggcacacgcacgggugu

SEQ ID NO: 1097199 - RNA, 19 nt, Human
cugcugggugcugagggag

SEQ ID NO: 1097200 - RNA, 22 nt, Human
uuucauucauguguuaaaggug

SEQ ID NO: 1097201 - RNA, 22 nt, Human
cucccuggcacagcgagagguu

SEQ ID NO: 1097202 - RNA, 22 nt, Human
cccaggaccgcgcggcugagcg

SEQ ID NO: 1097203 - RNA, 20 nt, Human
uggagccaaggugugucugg

SEQ ID NO: 1097204 - RNA, 19 nt, Human
gcauuucauuuaaccauca

SEQ ID NO: 1097205 - RNA, 19 nt, Human
augauacaggugaaaauug

SEQ ID NO: 1097206 - RNA, 19 nt, Human
cugagagaugcuucacaca

SEQ ID NO: 1097207 - RNA, 22 nt, Human
ggaggggaggauuaaugacaaa

SEQ ID NO: 1097208 - RNA, 22 nt, Human
cccugcagaucuaggguccuuc

SEQ ID NO: 1097209 - RNA, 22 nt, Human
auauuuguaaaauucugugucu

SEQ ID NO: 1097210 - RNA, 22 nt, Human
ucccucagagaccguggugcag

SEQ ID NO: 1097211 - RNA, 22 nt, Human
aaauauacuagaugaugaccca

SEQ ID NO: 1097212 - RNA, 22 nt, Human
ugacaucauuggccauugggga

SEQ ID NO: 1097213 - RNA, 22 nt, Human
accccagcccugcuucugggag

SEQ ID NO: 1097214 - RNA, 22 nt, Human
ucauuuuucacacagggucacc

SEQ ID NO: 1097215 - RNA, 22 nt, Human
uaauuuaauccaaguguuacau

SEQ ID NO: 1097216 - RNA, 22 nt, Human
aaugauguuuuuaaagaacaua

SEQ ID NO: 1097217 - RNA, 22 nt, Human
ucagucucuggggcuucuguuu

SEQ ID NO: 1097218 - RNA, 22 nt, Human
uggaggagaccauuccacucag

SEQ ID NO: 1097219 - RNA, 22 nt, Human
agcagcaggcuuaaggaaaagu

SEQ ID NO: 1097220 - RNA, 22 nt, Human
aaaguccuagcgauccacagaa

SEQ ID NO: 1097221 - RNA, 22 nt, Human
ugcaguggaaucuggagagcag

SEQ ID NO: 1097222 - RNA, 22 nt, Human
gaaaaaugcuccaaaucugugg

SEQ ID NO: 1097223 - RNA, 22 nt, Human
ucucagaguuuagagcugagcc

SEQ ID NO: 1097224 - RNA, 22 nt, Human
ccugggcuuccacgagcagagg

SEQ ID NO: 1097225 - RNA, 22 nt, Human
uggcagagccuugccaaacucc

SEQ ID NO: 1097226 - RNA, 22 nt, Human
aucugccuggcuccaggugagc

SEQ ID NO: 1097227 - RNA, 22 nt, Human
ugaagcagaggggucuugagcu

SEQ ID NO: 1097228 - RNA, 22 nt, Human
ugcuuuuaggagauuaaaauua

SEQ ID NO: 1097229 - RNA, 22 nt, Human
aagaagguguggaaagaugcuc

SEQ ID NO: 1097230 - RNA, 22 nt, Human
aauguauuccucaugcaagagu

SEQ ID NO: 1097231 - RNA, 22 nt, Human
guugaaugaaucauucuaugua

SEQ ID NO: 1097232 - RNA, 20 nt, Human
ugcuguaagauuagagagcu

SEQ ID NO: 1097233 - RNA, 22 nt, Human
agggcugcugcuccgggcccag

SEQ ID NO: 1097234 - RNA, 22 nt, Human
ugggccucuguuuccucaucug

SEQ ID NO: 1097235 - RNA, 22 nt, Human
uccuuccuggggucucugcugc

SEQ ID NO: 1097236 - RNA, 22 nt, Human
ccaaggagcugcaggcacuugu

SEQ ID NO: 1097237 - RNA, 22 nt, Human
caugaauauacauccugauggc

SEQ ID NO: 1097238 - RNA, 22 nt, Human
accuccugaugagaguaaagga

SEQ ID NO: 1097239 - RNA, 22 nt, Human
gaguccaguuguucacagaggc

SEQ ID NO: 1097240 - RNA, 22 nt, Human
ccugauuagggucuuucaaaug

SEQ ID NO: 1097241 - RNA, 22 nt, Human
gucuuuggaaagacaaaguuca

SEQ ID NO: 1097242 - RNA, 22 nt, Human
ugccugcauuuuguggcuggcu

SEQ ID NO: 1097243 - RNA, 22 nt, Human
auucacacauacucauguguga

SEQ ID NO: 1097244 - RNA, 20 nt, Human
uaucaaucagaaagaagacu

SEQ ID NO: 1097245 - RNA, 23 nt, Human
gcaggugguucgaacagaaguuu

SEQ ID NO: 1097246 - RNA, 22 nt, Human
agcacagagaagauuucaauua

SEQ ID NO: 1097247 - RNA, 20 nt, Human
uucuugaauacccaacccca

SEQ ID NO: 1097248 - RNA, 22 nt, Human
ucaaaguuuuugagaauuacau

SEQ ID NO: 1097249 - RNA, 22 nt, Human
uggcaggauuugcccggaagga

SEQ ID NO: 1097250 - RNA, 22 nt, Human
uucacagugguaaggguuguga

SEQ ID NO: 1097251 - RNA, 22 nt, Human
uccucaggucaaagcaggagaa

SEQ ID NO: 1097252 - RNA, 22 nt, Human
gauuuguagcuuuucagucugu

SEQ ID NO: 1097253 - RNA, 22 nt, Human
cggggcugcgcucuuccugccg

SEQ ID NO: 1097254 - RNA, 22 nt, Human
gaauucugguccuguccaaggu

SEQ ID NO: 1097255 - RNA, 22 nt, Human
gcaggugguuaaggucccaugu

SEQ ID NO: 1097256 - RNA, 22 nt, Human
gggcucagcugggcgugcuggu

SEQ ID NO: 1097257 - RNA, 22 nt, Human
guaugaaguuggacuguauaaa

SEQ ID NO: 1097258 - RNA, 22 nt, Human
auuuccucaugaucauaaugca

SEQ ID NO: 1097259 - RNA, 22 nt, Human
uugcacagaugcacaugguugc

SEQ ID NO: 1097260 - RNA, 22 nt, Human
auggcaggcccagguguucauu

SEQ ID NO: 1097261 - RNA, 22 nt, Human
cuggaaagaccugcuugcuuuu

SEQ ID NO: 1097262 - RNA, 22 nt, Human
cuggcucaauuuguacugcugu

SEQ ID NO: 1097263 - RNA, 21 nt, Human
caagccagaccaauagcagcc

SEQ ID NO: 1097264 - RNA, 22 nt, Human
ucaucacaauuuuaugacccuc

SEQ ID NO: 1097265 - RNA, 22 nt, Human
caggcagcucgaugccuuguug

SEQ ID NO: 1097266 - RNA, 22 nt, Human
aggcagcaugggccccagcucc

SEQ ID NO: 1097267 - RNA, 22 nt, Human
ucugggugaugaaaugcacugu

SEQ ID NO: 1097268 - RNA, 22 nt, Human
gcuggccugggcucaagaccag

SEQ ID NO: 1097269 - RNA, 22 nt, Human
gccuccccaaagugcugacagc

SEQ ID NO: 1097270 - RNA, 22 nt, Human
caagucauuguuuagucauguu

SEQ ID NO: 1097271 - RNA, 22 nt, Human
acagcagcagaccagcauaugu

SEQ ID NO: 1097272 - RNA, 22 nt, Human
auguuugucccugacauccucu

SEQ ID NO: 1097273 - RNA, 22 nt, Human
agaccaagaaaggaugaggauc

SEQ ID NO: 1097274 - RNA, 22 nt, Human
aaggaagaagacucuuuacucc

SEQ ID NO: 1097275 - RNA, 22 nt, Human
gagaggaguaggcugauggugc

SEQ ID NO: 1097276 - RNA, 22 nt, Human
cacuguguaagaagaugggcuu

SEQ ID NO: 1097277 - RNA, 22 nt, Human
ucucagagaaaugugucaccau

SEQ ID NO: 1097278 - RNA, 22 nt, Human
ugcagcaggagccaggccuggu

SEQ ID NO: 1097279 - RNA, 22 nt, Human
gucccauuucaagaaauucaug

SEQ ID NO: 1097280 - RNA, 20 nt, Human
agaaaaaguguggaaauuuc

SEQ ID NO: 1097281 - RNA, 22 nt, Human
ugacauuuaagccucugauuuc

SEQ ID NO: 1097282 - RNA, 22 nt, Human
cagcaucccucaggggccucug

SEQ ID NO: 1097283 - RNA, 22 nt, Human
cugccaaggcuggggaggacaa

SEQ ID NO: 1097284 - RNA, 22 nt, Human
cagcccucaucucagcuucuuu

SEQ ID NO: 1097285 - RNA, 22 nt, Human
ucagagugaggcgucaacauga

SEQ ID NO: 1097286 - RNA, 22 nt, Human
ugauauuuuaugagcuuucaua

SEQ ID NO: 1097287 - RNA, 22 nt, Human
gcaacagcccagguucugugug

SEQ ID NO: 1097288 - RNA, 22 nt, Human
ucuuccagcaaugugaaaucac

SEQ ID NO: 1097289 - RNA, 22 nt, Human
ggagagaauuccauggacaugu

SEQ ID NO: 1097290 - RNA, 20 nt, Human
agccaggccucaaguuaagu

SEQ ID NO: 1097291 - RNA, 22 nt, Human
uacauuacaggaaagauaaaga

SEQ ID NO: 1097292 - RNA, 22 nt, Human
agggccucuggaacacugaggg

SEQ ID NO: 1097293 - RNA, 18 nt, Human
cugcuugggagacgucag

SEQ ID NO: 1097294 - RNA, 22 nt, Human
gggacuggaguagaggccggug

SEQ ID NO: 1097295 - RNA, 22 nt, Human
uaagacuugauccaaagaacua

SEQ ID NO: 1097296 - RNA, 22 nt, Human
acugggccggugcagaguaguu

SEQ ID NO: 1097297 - RNA, 22 nt, Human
aagcacaggaucuugaggagcg

SEQ ID NO: 1097298 - RNA, 22 nt, Human
ugugcaaucauauuuuaaaaug

SEQ ID NO: 1097299 - RNA, 22 nt, Human
ugugaagagaguaauaaaguca

SEQ ID NO: 1097300 - RNA, 23 nt, Human
uccugagaugagacagugcugcc

SEQ ID NO: 1097301 - RNA, 18 nt, Human
cugcuuugccuucauucc

SEQ ID NO: 1097302 - RNA, 22 nt, Human
ggcucagguuuaaagugcuuua

SEQ ID NO: 1097303 - RNA, 22 nt, Human
agccaggcagacucucuuucuu

SEQ ID NO: 1097304 - RNA, 22 nt, Human
gcagggcaaauguggaaaggag

SEQ ID NO: 1097305 - RNA, 22 nt, Human
gcccugcccuguugaaacuaga

SEQ ID NO: 1097306 - RNA, 22 nt, Human
agauuaugcuggcugcuacaag

SEQ ID NO: 1097307 - RNA, 22 nt, Human
gagccugaugaaacaggcagac

SEQ ID NO: 1097308 - RNA, 22 nt, Human
aaguuauuuccucgugacugaa

SEQ ID NO: 1097309 - RNA, 22 nt, Human
agggcucagccuccuccucagc

SEQ ID NO: 1097310 - RNA, 22 nt, Human
cauaaacucucuguaccaauau

SEQ ID NO: 1097311 - RNA, 22 nt, Human
agcaaggucucccugcaccugg

SEQ ID NO: 1097312 - RNA, 22 nt, Human
ugggcagguuguuauuugacau

SEQ ID NO: 1097313 - RNA, 22 nt, Human
agcuggcagcucucagggguac

SEQ ID NO: 1097314 - RNA, 22 nt, Human
cuucuuuuacaggucuuggguu

SEQ ID NO: 1097315 - RNA, 22 nt, Human
acagaaaugauguuuggcaaua

SEQ ID NO: 1097316 - RNA, 22 nt, Human
gccgugcgugcgcaggugcugu

SEQ ID NO: 1097317 - RNA, 22 nt, Human
ugccuuuuccagcuuccagagg

SEQ ID NO: 1097318 - RNA, 22 nt, Human
gcagagccugggggucugcgga

SEQ ID NO: 1097319 - RNA, 22 nt, Human
ugcagggccuuguugaugugcu

SEQ ID NO: 1097320 - RNA, 22 nt, Human
ugcagagaaaacuccuggguac

SEQ ID NO: 1097321 - RNA, 22 nt, Human
uucacagauguauuggaacucc

SEQ ID NO: 1097322 - RNA, 22 nt, Human
gcucccuccaugaggcagaccg

SEQ ID NO: 1097323 - RNA, 17 nt, Human
accagccucuccugggg

SEQ ID NO: 1097324 - RNA, 22 nt, Human
gaaggagacccugaagaugcug

SEQ ID NO: 1097325 - RNA, 22 nt, Human
ugguggggcuuuccuucugcuu

SEQ ID NO: 1097326 - RNA, 22 nt, Human
auacagaucccacagcauguga

SEQ ID NO: 1097327 - RNA, 22 nt, Human
gccagcagccacagaagucacu

SEQ ID NO: 1097328 - RNA, 22 nt, Human
agaugugggagaugcuucugca

SEQ ID NO: 1097329 - RNA, 22 nt, Human
cccaguuguugccggcucugga

SEQ ID NO: 1097330 - RNA, 18 nt, Human
ccagguggugacagagau

SEQ ID NO: 1097331 - RNA, 22 nt, Human
ugaaggagcucaaugaugaugc

SEQ ID NO: 1097332 - RNA, 22 nt, Human
uucaaagagaaauuguauuuuc

SEQ ID NO: 1097333 - RNA, 22 nt, Human
caggaagcugagcugcacugca

SEQ ID NO: 1097334 - RNA, 22 nt, Human
uuaacauacaucaugaacaaug

SEQ ID NO: 1097335 - RNA, 22 nt, Human
ugcagccccugaaaauggcagc

SEQ ID NO: 1097336 - RNA, 22 nt, Human
ccagggaagucacauugucuag

SEQ ID NO: 1097337 - RNA, 17 nt, Human
gggaaguggagaaagcu

SEQ ID NO: 1097338 - RNA, 22 nt, Human
ugagagcacacagaaauauuuu

SEQ ID NO: 1097339 - RNA, 22 nt, Human
guggcagguuauaagcaucuca

SEQ ID NO: 1097340 - RNA, 22 nt, Human
ugggcucagggaagcuuggccu

SEQ ID NO: 1097341 - RNA, 22 nt, Human
agagacagaggcaauauagcuu

SEQ ID NO: 1097342 - RNA, 22 nt, Human
gugcccugaugcaauugucuca

SEQ ID NO: 1097343 - RNA, 22 nt, Human
agaaauuaugcaguaguuuuau

SEQ ID NO: 1097344 - RNA, 20 nt, Human
gaaauucucguauuaguuua

SEQ ID NO: 1097345 - RNA, 22 nt, Human
ugcugaugaguccuucuaucgc

SEQ ID NO: 1097346 - RNA, 22 nt, Human
agccaggaauuggacaacacau

SEQ ID NO: 1097347 - RNA, 22 nt, Human
ugacagggcuagaggcaaugca

SEQ ID NO: 1097348 - RNA, 22 nt, Human
ccugcugugaagccaggccugu

SEQ ID NO: 1097349 - RNA, 22 nt, Human
ggcagugacuguucagacgucc

SEQ ID NO: 1097350 - RNA, 22 nt, Human
uggcccugcccucuucaucuuu

SEQ ID NO: 1097351 - RNA, 22 nt, Human
acuguuuucuaaagaacagaug

SEQ ID NO: 1097352 - RNA, 22 nt, Human
cucaacauaugacuuugguggg

SEQ ID NO: 1097353 - RNA, 22 nt, Human
cagaaauguuuguuaauauugu

SEQ ID NO: 1097354 - RNA, 22 nt, Human
ucccaagagcucugggauaagg

SEQ ID NO: 1097355 - RNA, 22 nt, Human
ugcaggugcuccgggggugccc

SEQ ID NO: 1097356 - RNA, 22 nt, Human
gccaggaaagggaauucccuga

SEQ ID NO: 1097357 - RNA, 19 nt, Human
uacuuuuucaggacagagu

SEQ ID NO: 1097358 - RNA, 23 nt, Human
uguaacagagcacugauugacaa

SEQ ID NO: 1097359 - RNA, 22 nt, Human
uaguuacagcaggcaggauaua

SEQ ID NO: 1097360 - RNA, 22 nt, Human
aaaugcagugguucuacuucuc

SEQ ID NO: 1097361 - RNA, 22 nt, Human
uaggggaacuggcacagggcag

SEQ ID NO: 1097362 - RNA, 22 nt, Human
gcagugcugaucccauggcaga

SEQ ID NO: 1097363 - RNA, 22 nt, Human
gucugcugcagagcauggcuuu

SEQ ID NO: 1097364 - RNA, 22 nt, Human
aauauuucguugcguggcuaga

SEQ ID NO: 1097365 - RNA, 21 nt, Human
ucacuuauaauguauuugcug

SEQ ID NO: 1097366 - RNA, 22 nt, Human
acagaauuuaaagcucuagacu

SEQ ID NO: 1097367 - RNA, 22 nt, Human
aauuuauuauauccuaggggaa

SEQ ID NO: 1097368 - RNA, 22 nt, Human
uuauauaaagauaacuuuucuu

SEQ ID NO: 1097369 - RNA, 22 nt, Human
gcaggauggugcccuuucugcc

SEQ ID NO: 1097370 - RNA, 22 nt, Human
aaaugcaaguucauauuuuguu

SEQ ID NO: 1097371 - RNA, 22 nt, Human
gagaagggggcucgaguguccu

SEQ ID NO: 1097372 - RNA, 22 nt, Human
aggcagguguuaccucugguuu

SEQ ID NO: 1097373 - RNA, 21 nt, Human
ggugucaguuuuggucauuag

SEQ ID NO: 1097374 - RNA, 23 nt, Human
ccucucucccuguuuggcaaaua

SEQ ID NO: 1097375 - RNA, 22 nt, Human
ugcauguguuucccagcaagcu

SEQ ID NO: 1097376 - RNA, 22 nt, Human
cuggagcauuuucugcuucugc

SEQ ID NO: 1097377 - RNA, 23 nt, Human
uggcucugugucacauacaggau

SEQ ID NO: 1097378 - RNA, 22 nt, Human
ugaaaaggaguccuuguuuuca

SEQ ID NO: 1097379 - RNA, 22 nt, Human
aagcagaaagaacaacugagug

SEQ ID NO: 1097380 - RNA, 22 nt, Human
acauacaucaaguaucacaaga

SEQ ID NO: 1097381 - RNA, 22 nt, Human
gucccaggucccagcacaucug

SEQ ID NO: 1097382 - RNA, 22 nt, Human
uccauaagcagguucuuccuga

SEQ ID NO: 1097383 - RNA, 22 nt, Human
ccaggcugcucacaagcugccc

SEQ ID NO: 1097384 - RNA, 22 nt, Human
gaggggcucuuuaauaguaaca

SEQ ID NO: 1097385 - RNA, 22 nt, Human
gcugaucucccuuuucucacag

SEQ ID NO: 1097386 - RNA, 21 nt, Human
acagaguaguugaaacagaga

SEQ ID NO: 1097387 - RNA, 22 nt, Human
cucaucaccacauauaacaaag

SEQ ID NO: 1097388 - RNA, 22 nt, Human
guuucacagcaaaguucccugu

SEQ ID NO: 1097389 - RNA, 22 nt, Human
aaauuagaaauacuuucaaagc

SEQ ID NO: 1097390 - RNA, 22 nt, Human
agggcaguucaacuucauagug

SEQ ID NO: 1097391 - RNA, 19 nt, Human
ucaaaggcaaggaggaacu

SEQ ID NO: 1097392 - RNA, 22 nt, Human
uauuauuuuagcacugaggauu

SEQ ID NO: 1097393 - RNA, 22 nt, Human
ugcaauuuggcuuccauuuucu

SEQ ID NO: 1097394 - RNA, 23 nt, Human
ugauuacaagggccaaagaaagg

SEQ ID NO: 1097395 - RNA, 22 nt, Human
ugaaaaacacuaauuggaaagc

SEQ ID NO: 1097396 - RNA, 22 nt, Human
caggguuucaccauguuagcag

SEQ ID NO: 1097397 - RNA, 22 nt, Human
auacuaagcucauuacauuuug

SEQ ID NO: 1097398 - RNA, 22 nt, Human
cccagggauuauaaaggugaaa

SEQ ID NO: 1097399 - RNA, 22 nt, Human
acacagccaggguaguaaggcu

SEQ ID NO: 1097400 - RNA, 22 nt, Human
agagauauauauuuguuuacca

SEQ ID NO: 1097401 - RNA, 20 nt, Human
gggagcuggaauugucuuag

SEQ ID NO: 1097402 - RNA, 22 nt, Human
ugcaggaauuuuuugcagaaag

SEQ ID NO: 1097403 - RNA, 22 nt, Human
auucuuccucaucaaucuguag

SEQ ID NO: 1097404 - RNA, 22 nt, Human
ggagaaggaagaaagcuacuau

SEQ ID NO: 1097405 - RNA, 22 nt, Human
gagucacauuaauuuaauuuua

SEQ ID NO: 1097406 - RNA, 22 nt, Human
agcagcucuggcacuguagcau

SEQ ID NO: 1097407 - RNA, 22 nt, Human
ggagccuuccagacugcccaca

SEQ ID NO: 1097408 - RNA, 22 nt, Human
gaaaacacuuugaucugaaagu

SEQ ID NO: 1097409 - RNA, 22 nt, Human
ugcaggugucucugucuagcgu

SEQ ID NO: 1097410 - RNA, 21 nt, Human
agggaaauccagucacuuuuc

SEQ ID NO: 1097411 - RNA, 22 nt, Human
gccagacacuccccugggcagg

SEQ ID NO: 1097412 - RNA, 22 nt, Human
aaagcagcaaguauuuguuacu

SEQ ID NO: 1097413 - RNA, 22 nt, Human
uggcucugaucagauguccagu

SEQ ID NO: 1097414 - RNA, 22 nt, Human
gccuggcaccacagccuuucag

SEQ ID NO: 1097415 - RNA, 22 nt, Human
cagaacacaggcuaaacugaga

SEQ ID NO: 1097416 - RNA, 22 nt, Human
ggcucaggggccaggccugucc

SEQ ID NO: 1097417 - RNA, 22 nt, Human
cccaggaaaguggaggcggcug

SEQ ID NO: 1097418 - RNA, 23 nt, Human
uggagcugacagucagagggagg

SEQ ID NO: 1097419 - RNA, 22 nt, Human
aaguuaauuaaccucuccauca

SEQ ID NO: 1097420 - RNA, 21 nt, Human
ucccugcuuucuggcccaguc

SEQ ID NO: 1097421 - RNA, 22 nt, Human
ggucucuguugccuccaucaag

SEQ ID NO: 1097422 - RNA, 22 nt, Human
uucagcuauaacauugagacuu

SEQ ID NO: 1097423 - RNA, 22 nt, Human
uuggauccaucucaggcauagg

SEQ ID NO: 1097424 - RNA, 19 nt, Human
ucaggaaguugaugaggug

SEQ ID NO: 1097425 - RNA, 22 nt, Human
ucaaagcaucagucaauuuagg

SEQ ID NO: 1097426 - RNA, 16 nt, Human
gcuaggcaacaggcug

SEQ ID NO: 1097427 - RNA, 22 nt, Human
ucagaguggugguuuugccuuc

SEQ ID NO: 1097428 - RNA, 22 nt, Human
cuccagugggggugagccuaga

SEQ ID NO: 1097429 - RNA, 22 nt, Human
gucuuucugccaugugaagaga

SEQ ID NO: 1097430 - RNA, 22 nt, Human
uggugagaaguuuugagauucu

SEQ ID NO: 1097431 - RNA, 22 nt, Human
cuuccagagauagggccucaag

SEQ ID NO: 1097432 - RNA, 22 nt, Human
acaggcaaggccagugagaaau

SEQ ID NO: 1097433 - RNA, 22 nt, Human
gaggagcccagcaccaucacuu

SEQ ID NO: 1097434 - RNA, 22 nt, Human
gaggcugaggguuagagaguca

SEQ ID NO: 1097435 - RNA, 22 nt, Human
uauuuccacaccuuuugaaucu

SEQ ID NO: 1097436 - RNA, 22 nt, Human
gagagcugcagccgagaggggg

SEQ ID NO: 1097437 - RNA, 22 nt, Human
ugggccuggcccuguggaggag

SEQ ID NO: 1097438 - RNA, 22 nt, Human
aacauugccaugguuaauuuua

SEQ ID NO: 1097439 - RNA, 22 nt, Human
caucagcaggcaacacucuugg

SEQ ID NO: 1097440 - RNA, 19 nt, Human
ccuggaggugaagguucuc

SEQ ID NO: 1097441 - RNA, 22 nt, Human
gagccuggauugaagugggugg

SEQ ID NO: 1097442 - RNA, 22 nt, Human
ucaagagagugcugcuuggggu

SEQ ID NO: 1097443 - RNA, 22 nt, Human
gggagggauuaguucugccugg

SEQ ID NO: 1097444 - RNA, 22 nt, Human
uuucucuuucaaucugcaguac

SEQ ID NO: 1097445 - RNA, 19 nt, Human
cauaaauguacaagauaca

SEQ ID NO: 1097446 - RNA, 22 nt, Human
gaggcagcugaaggagugacag

SEQ ID NO: 1097447 - RNA, 22 nt, Human
uuaacauuucuuuuccacucau

SEQ ID NO: 1097448 - RNA, 22 nt, Human
cugauucuuucuucuugccagg

SEQ ID NO: 1097449 - RNA, 22 nt, Human
gccagaaagaggaggaccuggg

SEQ ID NO: 1097450 - RNA, 22 nt, Human
gucagcugucuccccagagugg

SEQ ID NO: 1097451 - RNA, 22 nt, Human
agcuccuguggcugaaagagga

SEQ ID NO: 1097452 - RNA, 22 nt, Human
uggaagcaucacuucuugccug

SEQ ID NO: 1097453 - RNA, 22 nt, Human
gcugcccauuccacuggauggu

SEQ ID NO: 1097454 - RNA, 22 nt, Human
ugggcucagucugcuugguccu

SEQ ID NO: 1097455 - RNA, 22 nt, Human
ugccuguguauuuccggccugc

SEQ ID NO: 1097456 - RNA, 22 nt, Human
gcagccacuuugcaaccaagag

SEQ ID NO: 1097457 - RNA, 22 nt, Human
aguuuuaucuguaagcuguuca

SEQ ID NO: 1097458 - RNA, 22 nt, Human
gaguggggcgaagucggcgagu

SEQ ID NO: 1097459 - RNA, 22 nt, Human
agugucuuugucaaauuacagg

SEQ ID NO: 1097460 - RNA, 22 nt, Human
uauuccaauugguuguaaagaa

SEQ ID NO: 1097461 - RNA, 22 nt, Human
gcaggugguggcgcgcgcccug

SEQ ID NO: 1097462 - RNA, 22 nt, Human
ggcugucucugugacugccacc

SEQ ID NO: 1097463 - RNA, 22 nt, Human
cagggcagggagcuuagaauga

SEQ ID NO: 1097464 - RNA, 19 nt, Human
ggugugaagugaggaguua

SEQ ID NO: 1097465 - RNA, 22 nt, Human
uuaaauuccagccucauaauag

SEQ ID NO: 1097466 - RNA, 22 nt, Human
gagaacacuuauggauuauucu

SEQ ID NO: 1097467 - RNA, 22 nt, Human
cagaggcucuuccucacugccc

SEQ ID NO: 1097468 - RNA, 21 nt, Human
cuuaacauuuuaaaugaaagg

SEQ ID NO: 1097469 - RNA, 22 nt, Human
ugaggcaggacugagcgggaug

SEQ ID NO: 1097470 - RNA, 22 nt, Human
augaagauuuauaauugccuuu

SEQ ID NO: 1097471 - RNA, 22 nt, Human
gaggaguggaguugcuggguug

SEQ ID NO: 1097472 - RNA, 23 nt, Human
cacugcagcguggucuggcagga

SEQ ID NO: 1097473 - RNA, 22 nt, Human
cuucaguuuaucccaucaucca

SEQ ID NO: 1097474 - RNA, 22 nt, Human
cuccagggagcuuggaaagacc

SEQ ID NO: 1097475 - RNA, 22 nt, Human
aguuucacacaacauuugcaug

SEQ ID NO: 1097476 - RNA, 22 nt, Human
ggcagccauacucagaccuggg

SEQ ID NO: 1097477 - RNA, 22 nt, Human
ccagccagucccgcaugaccgc

SEQ ID NO: 1097478 - RNA, 22 nt, Human
gccugaccucuucugcccuggg

SEQ ID NO: 1097479 - RNA, 22 nt, Human
ccuggccucagacagagggugg

SEQ ID NO: 1097480 - RNA, 22 nt, Human
cccaggaaggagcuguguauuu

SEQ ID NO: 1097481 - RNA, 22 nt, Human
uuugcuauuuuucugugcagcu

SEQ ID NO: 1097482 - RNA, 22 nt, Human
aacuuuaaggcuauaaauuaug

SEQ ID NO: 1097483 - RNA, 22 nt, Human
uucuguuuugcacagacuugaa

SEQ ID NO: 1097484 - RNA, 21 nt, Human
uggcccuggccacggcugcca

SEQ ID NO: 1097485 - RNA, 22 nt, Human
gcugagugaggcugucaaaaug

SEQ ID NO: 1097486 - RNA, 22 nt, Human
cugcugauguaagccaugcucu

SEQ ID NO: 1097487 - RNA, 22 nt, Human
ccaggcugggcggggaaccugg

SEQ ID NO: 1097488 - RNA, 22 nt, Human
uccuucaggguugaggccgacu

SEQ ID NO: 1097489 - RNA, 22 nt, Human
cucugggcacuguauggguucu

SEQ ID NO: 1097490 - RNA, 22 nt, Human
ggagcugcuccuucagccaagu

SEQ ID NO: 1097491 - RNA, 22 nt, Human
acaggcugagcguccaucuuca

SEQ ID NO: 1097492 - RNA, 20 nt, Human
cccugagacaaaggaggggc

SEQ ID NO: 1097493 - RNA, 22 nt, Human
uaucuucauagauuuuuacacc

SEQ ID NO: 1097494 - RNA, 22 nt, Human
cugguacaaaaugcugauauca

SEQ ID NO: 1097495 - RNA, 22 nt, Human
agggcugguauguccaugaaag

SEQ ID NO: 1097496 - RNA, 22 nt, Human
cacaccuguaauaccagcuacu

SEQ ID NO: 1097497 - RNA, 22 nt, Human
aaagacuaagaagaguauuauu

SEQ ID NO: 1097498 - RNA, 22 nt, Human
agaaauguaauugcaacugucu

SEQ ID NO: 1097499 - RNA, 22 nt, Human
ggaguuggugagcaccaggcuu

SEQ ID NO: 1097500 - RNA, 23 nt, Human
uggcucugagagguucagaugcu

SEQ ID NO: 1097501 - RNA, 22 nt, Human
ccagcuccagguagaugggcag

SEQ ID NO: 1097502 - RNA, 22 nt, Human
uagaaacccauguuuauucagu

SEQ ID NO: 1097503 - RNA, 22 nt, Human
uuauuuguggcauccauguugg

SEQ ID NO: 1097504 - RNA, 22 nt, Human
aaaauucuaacaugcagccaag

SEQ ID NO: 1097505 - RNA, 22 nt, Human
cacauuuaaagguugaagcuga

SEQ ID NO: 1097506 - RNA, 22 nt, Human
auuuauguaucuguguagauca

SEQ ID NO: 1097507 - RNA, 22 nt, Human
ggccuugggauguggcugcagc

SEQ ID NO: 1097508 - RNA, 22 nt, Human
uucaagauaauaggaaugaaaa

SEQ ID NO: 1097509 - RNA, 22 nt, Human
gcaaaauuuacacuccuucuuc

SEQ ID NO: 1097510 - RNA, 22 nt, Human
uaagagcauaggcuugaaaaua

SEQ ID NO: 1097511 - RNA, 22 nt, Human
uuugacaggacuaacauauggc

SEQ ID NO: 1097512 - RNA, 22 nt, Human
aaucuggcucagaagaagauga

SEQ ID NO: 1097513 - RNA, 22 nt, Human
caggaagaccagggcuguggcu

SEQ ID NO: 1097514 - RNA, 22 nt, Human
aaauacugugaauaaagguuuu

SEQ ID NO: 1097515 - RNA, 22 nt, Human
gaggucaaggucaagagacaga

SEQ ID NO: 1097516 - RNA, 22 nt, Human
gucaauauauucugucucuuug

SEQ ID NO: 1097517 - RNA, 22 nt, Human
agucugucuacuuaaagucugu

SEQ ID NO: 1097518 - RNA, 22 nt, Human
agugcagaguacauuuguggca

SEQ ID NO: 1097519 - RNA, 22 nt, Human
uaaaucaguuucucuuauuggu

SEQ ID NO: 1097520 - RNA, 22 nt, Human
ucagcuggagaugagaaccgaa

SEQ ID NO: 1097521 - RNA, 22 nt, Human
accaaggagccacauacaaccu

SEQ ID NO: 1097522 - RNA, 18 nt, Human
ucugagggugcgggagcu

SEQ ID NO: 1097523 - RNA, 22 nt, Human
gcccucaguggauucuuauugu

SEQ ID NO: 1097524 - RNA, 22 nt, Human
aggugucugggcuuuggaguca

SEQ ID NO: 1097525 - RNA, 22 nt, Human
gagcacagcuggagguagcauu

SEQ ID NO: 1097526 - RNA, 22 nt, Human
guuucuuuuaaaauauguagac

SEQ ID NO: 1097527 - RNA, 22 nt, Human
cucaggaaaauauugaagaagu

SEQ ID NO: 1097528 - RNA, 22 nt, Human
uuccagcucuugaaggugggau

SEQ ID NO: 1097529 - RNA, 22 nt, Human
ucacuuuugaucccuaugcagu

SEQ ID NO: 1097530 - RNA, 22 nt, Human
uuuguuuagagaauugaagcag

SEQ ID NO: 1097531 - RNA, 22 nt, Human
gaggggauuggaaggaacaccc

SEQ ID NO: 1097532 - RNA, 22 nt, Human
cacugaagccugggaguaagac

SEQ ID NO: 1097533 - RNA, 22 nt, Human
cuuaacagagagaaguguugcu

SEQ ID NO: 1097534 - RNA, 22 nt, Human
cggcuggguagaggugccgggu

SEQ ID NO: 1097535 - RNA, 22 nt, Human
ugcugagaggaaggugcacugg

SEQ ID NO: 1097536 - RNA, 22 nt, Human
ucugccugcggcugcagguggc

SEQ ID NO: 1097537 - RNA, 20 nt, Human
agucacaugcauacacaagu

SEQ ID NO: 1097538 - RNA, 22 nt, Human
uacaaaaaauugauacugacga

SEQ ID NO: 1097539 - RNA, 22 nt, Human
cccagcagaaucugaugagggc

SEQ ID NO: 1097540 - RNA, 22 nt, Human
gucagcugggcaucugcagaug

SEQ ID NO: 1097541 - RNA, 22 nt, Human
uuucaugcucauggaacacagc

SEQ ID NO: 1097542 - RNA, 22 nt, Human
uuacagauacuuuguaggcaag

SEQ ID NO: 1097543 - RNA, 22 nt, Human
ugugcagaguaaggcagcuguu

SEQ ID NO: 1097544 - RNA, 22 nt, Human
aacagcagcugccugaauuugc

SEQ ID NO: 1097545 - RNA, 18 nt, Human
uguacaguuaugagcauu

SEQ ID NO: 1097546 - RNA, 22 nt, Human
auagcuguuagauuggggucga

SEQ ID NO: 1097547 - RNA, 22 nt, Human
aaagucauuggaauauuaauga

SEQ ID NO: 1097548 - RNA, 22 nt, Human
aaaggccaccaacaugaagcau

SEQ ID NO: 1097549 - RNA, 22 nt, Human
uuaauuuauguccaaaccagau

SEQ ID NO: 1097550 - RNA, 22 nt, Human
ugaggccugcauugaacuagaa

SEQ ID NO: 1097551 - RNA, 19 nt, Human
cccucaggucugagcaguc

SEQ ID NO: 1097552 - RNA, 22 nt, Human
uugcuaaaucccuauaauauuc

SEQ ID NO: 1097553 - RNA, 22 nt, Human
aaguuugugguuauacuugauu

SEQ ID NO: 1097554 - RNA, 22 nt, Human
auggaaaugauggaacauuaaa

SEQ ID NO: 1097555 - RNA, 22 nt, Human
uguguucauguauguauacaua

SEQ ID NO: 1097556 - RNA, 22 nt, Human
gugcccugguccccagcauaua

SEQ ID NO: 1097557 - RNA, 20 nt, Human
ucucugagcuucucuugggg

SEQ ID NO: 1097558 - RNA, 23 nt, Human
guuuucaacacaauaaauguaac

SEQ ID NO: 1097559 - RNA, 22 nt, Human
uagcagcuuaaguaauuagaau

SEQ ID NO: 1097560 - RNA, 22 nt, Human
cugcagagaauuguggggcuuc

SEQ ID NO: 1097561 - RNA, 22 nt, Human
uagaaguuuaaauucaccaugc

SEQ ID NO: 1097562 - RNA, 22 nt, Human
uggagcugggaguccugggcug

SEQ ID NO: 1097563 - RNA, 22 nt, Human
cuuauucauauauucucgguag

SEQ ID NO: 1097564 - RNA, 22 nt, Human
cugucugucaaguucaucucca

SEQ ID NO: 1097565 - RNA, 22 nt, Human
uucaggauucucucccauuuac

SEQ ID NO: 1097566 - RNA, 22 nt, Human
ucugggcagagggucuuaguca

SEQ ID NO: 1097567 - RNA, 22 nt, Human
gccuuggcugaugugcgaauga

SEQ ID NO: 1097568 - RNA, 22 nt, Human
uagauuucucauucauagauug

SEQ ID NO: 1097569 - RNA, 23 nt, Human
agucacaucuuagcagccagguc

SEQ ID NO: 1097570 - RNA, 17 nt, Human
gcuuccugugcugggga

SEQ ID NO: 1097571 - RNA, 22 nt, Human
cuggcugcuuguagacucgacu

SEQ ID NO: 1097572 - RNA, 22 nt, Human
ccauuaaaauggaauguaguga

SEQ ID NO: 1097573 - RNA, 22 nt, Human
uggcugggugcuauccaguacu

SEQ ID NO: 1097574 - RNA, 22 nt, Human
gacacagaugaucaggugugga

SEQ ID NO: 1097575 - RNA, 22 nt, Human
acaauguuuuuguucaaagagu

SEQ ID NO: 1097576 - RNA, 22 nt, Human
acugagaguugugcauucaugc

SEQ ID NO: 1097577 - RNA, 22 nt, Human
acuuacaagcuagggaagcuug

SEQ ID NO: 1097578 - RNA, 22 nt, Human
gcaggguccauggaggcagccc

SEQ ID NO: 1097579 - RNA, 22 nt, Human
aagauuucuuacuuauugaugc

SEQ ID NO: 1097580 - RNA, 22 nt, Human
ggcacacauggugguuggugaa

SEQ ID NO: 1097581 - RNA, 22 nt, Human
cagaguggcgacccccucagcu

SEQ ID NO: 1097582 - RNA, 22 nt, Human
acacagggcagagagcuggcuc

SEQ ID NO: 1097583 - RNA, 22 nt, Human
aggaagcuccaugaaggcagag

SEQ ID NO: 1097584 - RNA, 22 nt, Human
cacagcaggugcuuaaugauua

SEQ ID NO: 1097585 - RNA, 22 nt, Human
uauuucaggggguacaagaaga

SEQ ID NO: 1097586 - RNA, 22 nt, Human
ccagcucuggcuucuugcuggg

SEQ ID NO: 1097587 - RNA, 22 nt, Human
gccugucuacacuuucucugca

SEQ ID NO: 1097588 - RNA, 20 nt, Human
gcucccagccugcagucccc

SEQ ID NO: 1097589 - RNA, 22 nt, Human
gcugcccuaauaucacauguua

SEQ ID NO: 1097590 - RNA, 22 nt, Human
acaggggcuccgaaggugaggg

SEQ ID NO: 1097591 - RNA, 22 nt, Human
agauacauugaguuuccuccug

SEQ ID NO: 1097592 - RNA, 22 nt, Human
caacacauugaagcuaugauga

SEQ ID NO: 1097593 - RNA, 22 nt, Human
ccagcccuugagauggaaggga

SEQ ID NO: 1097594 - RNA, 22 nt, Human
gcugaaugaauguauuuuaaaa

SEQ ID NO: 1097595 - RNA, 22 nt, Human
guacagaaaguacccauagaag

SEQ ID NO: 1097596 - RNA, 22 nt, Human
uguaaacaguaggacuaaagag

SEQ ID NO: 1097597 - RNA, 22 nt, Human
uucuugcaggucacucacugag

SEQ ID NO: 1097598 - RNA, 22 nt, Human
agcacccucagccuuauccaga

SEQ ID NO: 1097599 - RNA, 20 nt, Human
uuuuagcagaaagaaagcuc

SEQ ID NO: 1097600 - RNA, 22 nt, Human
uugaaacugucagcuuuuacgc

SEQ ID NO: 1097601 - RNA, 22 nt, Human
aacagauaauuucuaaguuacu

SEQ ID NO: 1097602 - RNA, 22 nt, Human
cagggagcaggcucuguccauc

SEQ ID NO: 1097603 - RNA, 22 nt, Human
cagcccuggccccagguggucu

SEQ ID NO: 1097604 - RNA, 23 nt, Human
cagagcuggcucagagcugccug

SEQ ID NO: 1097605 - RNA, 22 nt, Human
cacagccugcugcacucaagaa

SEQ ID NO: 1097606 - RNA, 22 nt, Human
auuacagauuauaaauuugagc

SEQ ID NO: 1097607 - RNA, 22 nt, Human
agcagcuguuagaaacaggaag

SEQ ID NO: 1097608 - RNA, 22 nt, Human
accuucagacaucaacuaucuc

SEQ ID NO: 1097609 - RNA, 22 nt, Human
uuguacuuacauuuuaaagcua

SEQ ID NO: 1097610 - RNA, 22 nt, Human
uggggaccagauuagaccaugg

SEQ ID NO: 1097611 - RNA, 22 nt, Human
ugccaggcauuugacagacacu

SEQ ID NO: 1097612 - RNA, 22 nt, Human
aggcagcuggaggcagagacua

SEQ ID NO: 1097613 - RNA, 22 nt, Human
ggcagugguuagaaacaugagc

SEQ ID NO: 1097614 - RNA, 22 nt, Human
ucucugaguauccugaacugcc

SEQ ID NO: 1097615 - RNA, 22 nt, Human
aucagaaaggugggcaagcaga

SEQ ID NO: 1097616 - RNA, 22 nt, Human
gccaggcauguccucugcagaa

SEQ ID NO: 1097617 - RNA, 18 nt, Human
ucagggaaucuuggccuu

SEQ ID NO: 1097618 - RNA, 22 nt, Human
agcaggcuccaggcuggccauc

SEQ ID NO: 1097619 - RNA, 22 nt, Human
ucaaacauccccaccagggacu

SEQ ID NO: 1097620 - RNA, 23 nt, Human
agaaguggaauggccgugggguc

SEQ ID NO: 1097621 - RNA, 22 nt, Human
ugaagaaccugaugagcugugu

SEQ ID NO: 1097622 - RNA, 22 nt, Human
agggcagcuggaagguggcuuc

SEQ ID NO: 1097623 - RNA, 22 nt, Human
gguuuuaacuacagaauugcaa

SEQ ID NO: 1097624 - RNA, 22 nt, Human
uaagaugaucaccaaaugcugg

SEQ ID NO: 1097625 - RNA, 22 nt, Human
ggucccaguugcccaggucagg

SEQ ID NO: 1097626 - RNA, 23 nt, Human
uggggagaguuacccuggaagcg

SEQ ID NO: 1097627 - RNA, 22 nt, Human
auacaaggucaugaagguuuac

SEQ ID NO: 1097628 - RNA, 22 nt, Human
cugccagcagaggccagcgcug

SEQ ID NO: 1097629 - RNA, 22 nt, Human
aaacaucuggaggccccguuug

SEQ ID NO: 1097630 - RNA, 22 nt, Human
aaaggcaagcauuuauauagga

SEQ ID NO: 1097631 - RNA, 20 nt, Human
ugcaggcuucgcucuaggag

SEQ ID NO: 1097632 - RNA, 21 nt, Human
aggcucagagagaaacucuug

SEQ ID NO: 1097633 - RNA, 23 nt, Human
auggagcugguacuagcuaccuc

SEQ ID NO: 1097634 - RNA, 22 nt, Human
uagggcagauucgguggaguuu

SEQ ID NO: 1097635 - RNA, 21 nt, Human
agcagaggcugccuggugacu

SEQ ID NO: 1097636 - RNA, 22 nt, Human
cuggagaggcugggaacagguu

SEQ ID NO: 1097637 - RNA, 22 nt, Human
ugccugggccuucccaccucug

SEQ ID NO: 1097638 - RNA, 22 nt, Human
ucuuuuauagugaauuuucuug

SEQ ID NO: 1097639 - RNA, 22 nt, Human
uauuuauucauucagcaagcau

SEQ ID NO: 1097640 - RNA, 22 nt, Human
cacaauuagcagcucuuuauuu

SEQ ID NO: 1097641 - RNA, 22 nt, Human
aaaauguaaagcuugaguguag

SEQ ID NO: 1097642 - RNA, 22 nt, Human
gccuggcagccuccaaccuuca

SEQ ID NO: 1097643 - RNA, 20 nt, Human
ugugaaagcaguagaaugac

SEQ ID NO: 1097644 - RNA, 22 nt, Human
uaguaacugguugaacaacugu

SEQ ID NO: 1097645 - RNA, 21 nt, Human
aaauacagaugcaaaucuguu

SEQ ID NO: 1097646 - RNA, 22 nt, Human
gcuucaugccaggagguuuaag

SEQ ID NO: 1097647 - RNA, 19 nt, Human
gccugcagaaaaggcaggg

SEQ ID NO: 1097648 - RNA, 22 nt, Human
gaagacuuuaagccgagauuag

SEQ ID NO: 1097649 - RNA, 22 nt, Human
cugugagaaaggugauggaggu

SEQ ID NO: 1097650 - RNA, 22 nt, Human
auguuugugggauaaacaaaug

SEQ ID NO: 1097651 - RNA, 22 nt, Human
caggucagaggcgcagccccca

SEQ ID NO: 1097652 - RNA, 22 nt, Human
acaggacagggaauucgaaauu

SEQ ID NO: 1097653 - RNA, 22 nt, Human
agaaaccucacagcaauucuga

SEQ ID NO: 1097654 - RNA, 22 nt, Human
ugugccaagaucaaacuuuucu

SEQ ID NO: 1097655 - RNA, 22 nt, Human
augggcuggggaagcucacucc

SEQ ID NO: 1097656 - RNA, 22 nt, Human
acaagguaagaaacauuggcuu

SEQ ID NO: 1097657 - RNA, 22 nt, Human
uggagggcaugcuguccauggg

SEQ ID NO: 1097658 - RNA, 22 nt, Human
cucugcagaauuugagcugcuc

SEQ ID NO: 1097659 - RNA, 22 nt, Human
aagcacagaaaaggagcaugga

SEQ ID NO: 1097660 - RNA, 22 nt, Human
uacuguuuuuuagacucauggu

SEQ ID NO: 1097661 - RNA, 22 nt, Human
aguccuucaagaaaucuggaaa

SEQ ID NO: 1097662 - RNA, 22 nt, Human
cagugcuguuguaagcucauug

SEQ ID NO: 1097663 - RNA, 22 nt, Human
aguagaaaguugcaggaggaau

SEQ ID NO: 1097664 - RNA, 22 nt, Human
caggauggagaguuguugguug

SEQ ID NO: 1097665 - RNA, 22 nt, Human
caggaggcagaggaugcccagu

SEQ ID NO: 1097666 - RNA, 22 nt, Human
agcaaagcuaucucuauggaga

SEQ ID NO: 1097667 - RNA, 22 nt, Human
acauuuuuuagagucccacauu

SEQ ID NO: 1097668 - RNA, 23 nt, Human
augaaacucaagccagauccaag

SEQ ID NO: 1097669 - RNA, 23 nt, Human
ugacacauuuccuuuccacugca

SEQ ID NO: 1097670 - RNA, 22 nt, Human
caccagcuuugcccacugccca

SEQ ID NO: 1097671 - RNA, 22 nt, Human
auucaagagcccauguuuccug

SEQ ID NO: 1097672 - RNA, 22 nt, Human
uauuuggacaccaaguagaagu

SEQ ID NO: 1097673 - RNA, 22 nt, Human
uucaacuagauuuauacaauuc

SEQ ID NO: 1097674 - RNA, 22 nt, Human
caccagggacaaugcuaggggu

SEQ ID NO: 1097675 - RNA, 22 nt, Human
ccuuggagcggucagcacuggu

SEQ ID NO: 1097676 - RNA, 22 nt, Human
cugcagcuuauuugcuguguga

SEQ ID NO: 1097677 - RNA, 22 nt, Human
ugagguggcuagggaggcacuc

SEQ ID NO: 1097678 - RNA, 22 nt, Human
cauuuuauccucugggaagcua

SEQ ID NO: 1097679 - RNA, 22 nt, Human
cucucagacacccauuuggaaa

SEQ ID NO: 1097680 - RNA, 21 nt, Human
gaaagcacagaaaggacucuu

SEQ ID NO: 1097681 - RNA, 23 nt, Human
aguguuccaguugguugagagug

SEQ ID NO: 1097682 - RNA, 22 nt, Human
aacauguaucgcuuuuuaauau

SEQ ID NO: 1097683 - RNA, 22 nt, Human
ucauccaguaccauggaaggca

SEQ ID NO: 1097684 - RNA, 22 nt, Human
gcauagcuguuaauuugguuuc

SEQ ID NO: 1097685 - RNA, 22 nt, Human
uuguaugaauguauccuaauuu

SEQ ID NO: 1097686 - RNA, 22 nt, Human
uguuuaauucaccaucauguuc

SEQ ID NO: 1097687 - RNA, 23 nt, Human
agcuggaggcugucuacucccaa

SEQ ID NO: 1097688 - RNA, 22 nt, Human
ugccuuguccuucgucagggcu

SEQ ID NO: 1097689 - RNA, 22 nt, Human
gcucagaggcacgaccucuugg

SEQ ID NO: 1097690 - RNA, 21 nt, Human
ucuggggaagacaucuaggau

SEQ ID NO: 1097691 - RNA, 22 nt, Human
gaaugcacuuccaacaucuauu

SEQ ID NO: 1097692 - RNA, 22 nt, Human
uuggugggagagaugaggguug

SEQ ID NO: 1097693 - RNA, 22 nt, Human
ccuccaggcugaauaucuagaa

SEQ ID NO: 1097694 - RNA, 22 nt, Human
gcauguguggaggagaugugcu

SEQ ID NO: 1097695 - RNA, 20 nt, Human
uccaggaaugguagaggacu

SEQ ID NO: 1097696 - RNA, 22 nt, Human
uuuaacagaugcuaugucuacc

SEQ ID NO: 1097697 - RNA, 22 nt, Human
ccagugcuuccaggaauacggu

SEQ ID NO: 1097698 - RNA, 22 nt, Human
cagauggcagggcagcucugca

SEQ ID NO: 1097699 - RNA, 21 nt, Human
gagccuucccucugcccuuuc

SEQ ID NO: 1097700 - RNA, 22 nt, Human
uuguaacacuuuucuauuaaua

SEQ ID NO: 1097701 - RNA, 20 nt, Human
gcuggcagaugucuugagau

SEQ ID NO: 1097702 - RNA, 22 nt, Human
uguuauauaacuuacaaccugu

SEQ ID NO: 1097703 - RNA, 22 nt, Human
augcugaauaguucacucuucu

SEQ ID NO: 1097704 - RNA, 22 nt, Human
aaagggcugucaaauaagcaac

SEQ ID NO: 1097705 - RNA, 22 nt, Human
gaggcaguguuuacugcccugu

SEQ ID NO: 1097706 - RNA, 22 nt, Human
acuacacagggaugugacuacc

SEQ ID NO: 1097707 - RNA, 22 nt, Human
gaagcagacuuuugcuuauuug

SEQ ID NO: 1097708 - RNA, 22 nt, Human
uaggaacaacugcagguacaag

SEQ ID NO: 1097709 - RNA, 22 nt, Human
aaagcagcggugucuuuacugc

SEQ ID NO: 1097710 - RNA, 22 nt, Human
ggcugggcucgcugauuggcug

SEQ ID NO: 1097711 - RNA, 22 nt, Human
ucagguguuagaagaaauuuca

SEQ ID NO: 1097712 - RNA, 22 nt, Human
auaaggcagaaauagggaaagu

SEQ ID NO: 1097713 - RNA, 22 nt, Human
ugucccaguuuaucugggacug

SEQ ID NO: 1097714 - RNA, 22 nt, Human
ucuucuuuaugucauaugccag

SEQ ID NO: 1097715 - RNA, 19 nt, Human
uccugcuuucuacucugcu

SEQ ID NO: 1097716 - RNA, 22 nt, Human
uaaaucacuccuaauaaucagu

SEQ ID NO: 1097717 - RNA, 22 nt, Human
agcaaggauuauccugggaagg

SEQ ID NO: 1097718 - RNA, 17 nt, Human
cucuggggacaguucua

SEQ ID NO: 1097719 - RNA, 21 nt, Human
gauuuuaaagagacugccaca

SEQ ID NO: 1097720 - RNA, 19 nt, Human
ggcugggucuggcagguuc

SEQ ID NO: 1097721 - RNA, 22 nt, Human
uucuaagaaugcuuugcaaaau

SEQ ID NO: 1097722 - RNA, 22 nt, Human
ccuggggaagucacuucucuuu

SEQ ID NO: 1097723 - RNA, 22 nt, Human
ugcaggagacauaauagggacu

SEQ ID NO: 1097724 - RNA, 22 nt, Human
gcugaagcccacguggcuugua

SEQ ID NO: 1097725 - RNA, 22 nt, Human
ccuuuaaauggauguucaacug

SEQ ID NO: 1097726 - RNA, 22 nt, Human
uaacagaaaggggacagaaaua

SEQ ID NO: 1097727 - RNA, 22 nt, Human
uggccugccugggagcagcagg

SEQ ID NO: 1097728 - RNA, 22 nt, Human
uuugaaagaauuuauguacuuu

SEQ ID NO: 1097729 - RNA, 22 nt, Human
ucuuuguauguauguuucaaag

SEQ ID NO: 1097730 - RNA, 22 nt, Human
cugccuguauugucugcuuggg

SEQ ID NO: 1097731 - RNA, 22 nt, Human
gcaguggcaugaugugggcuca

SEQ ID NO: 1097732 - RNA, 22 nt, Human
ucccaccaggugaccauuucau

SEQ ID NO: 1097733 - RNA, 22 nt, Human
ccagcuggcaggagagucaggg

SEQ ID NO: 1097734 - RNA, 22 nt, Human
ugugaagaauuaaugugaauca

SEQ ID NO: 1097735 - RNA, 22 nt, Human
ucuccuggucaccucagaaguc

SEQ ID NO: 1097736 - RNA, 22 nt, Human
cucagggagguccugugcugaa

SEQ ID NO: 1097737 - RNA, 22 nt, Human
acacuuaagcaugaaguauaaa

SEQ ID NO: 1097738 - RNA, 22 nt, Human
agcaggcuuucaagagucuucu

SEQ ID NO: 1097739 - RNA, 22 nt, Human
cucuggagcgcugcuucccgcg

SEQ ID NO: 1097740 - RNA, 22 nt, Human
uuugaacagggaauguuccaca

SEQ ID NO: 1097741 - RNA, 22 nt, Human
gccuccuggguucaugccauuc

SEQ ID NO: 1097742 - RNA, 22 nt, Human
aaggagagguuguccguguugu

SEQ ID NO: 1097743 - RNA, 22 nt, Human
caccugcugagcugcugggggu

SEQ ID NO: 1097744 - RNA, 22 nt, Human
agccucuggcccuagacugcuu

SEQ ID NO: 1097745 - RNA, 22 nt, Human
uagaaacauauguuugagacau

SEQ ID NO: 1097746 - RNA, 22 nt, Human
aucaguuuaacugucaagagcc

SEQ ID NO: 1097747 - RNA, 22 nt, Human
uaacaucugggcugcguccuga

SEQ ID NO: 1097748 - RNA, 22 nt, Human
gugcagcagggggaagacagug

SEQ ID NO: 1097749 - RNA, 22 nt, Human
gacaaagucaacaguacucuca

SEQ ID NO: 1097750 - RNA, 22 nt, Human
agcaggugaauuccuggaugug

SEQ ID NO: 1097751 - RNA, 22 nt, Human
uuuauaagaagcaaugucugag

SEQ ID NO: 1097752 - RNA, 22 nt, Human
ucuggcucucauacucgccagu

SEQ ID NO: 1097753 - RNA, 22 nt, Human
cucccugggcagauguggcucu

SEQ ID NO: 1097754 - RNA, 22 nt, Human
guuacaaauguaaauucugggg

SEQ ID NO: 1097755 - RNA, 22 nt, Human
uuccagaguugggggagugguu

SEQ ID NO: 1097756 - RNA, 20 nt, Human
uccagcugggaacagcugau

SEQ ID NO: 1097757 - RNA, 22 nt, Human
uuacaaacaacagacauuuauu

SEQ ID NO: 1097758 - RNA, 22 nt, Human
ggcuccaagucucagagugaag

SEQ ID NO: 1097759 - RNA, 22 nt, Human
ugagccaggcucaagugauccu

SEQ ID NO: 1097760 - RNA, 22 nt, Human
aaaagggacuacucucagcucc

SEQ ID NO: 1097761 - RNA, 22 nt, Human
uuugaaagagcugauacaugaa

SEQ ID NO: 1097762 - RNA, 22 nt, Human
aauuaaauugguuuagagagga

SEQ ID NO: 1097763 - RNA, 22 nt, Human
aaugcugaauuuaguauuuaug

SEQ ID NO: 1097764 - RNA, 20 nt, Human
acagaaagcugccuuguccc

SEQ ID NO: 1097765 - RNA, 22 nt, Human
ccugaagaugcuguggccuggu

SEQ ID NO: 1097766 - RNA, 22 nt, Human
cccucagcuccacccucagcag

SEQ ID NO: 1097767 - RNA, 22 nt, Human
uuuguagaacuauacuuacauu

SEQ ID NO: 1097768 - RNA, 23 nt, Human
aggcuggcuucaggagccucucc

SEQ ID NO: 1097769 - RNA, 22 nt, Human
cuccucuuuacccgcauggucu

SEQ ID NO: 1097770 - RNA, 22 nt, Human
cugagagaugauauagcuuaau

SEQ ID NO: 1097771 - RNA, 22 nt, Human
uaaaaugacuuccuccaacauc

SEQ ID NO: 1097772 - RNA, 22 nt, Human
agcccugcugcuucuuguauuu

SEQ ID NO: 1097773 - RNA, 22 nt, Human
augguucauauuaugcaucuga

SEQ ID NO: 1097774 - RNA, 22 nt, Human
gggagucugggcuagacuccuu

SEQ ID NO: 1097775 - RNA, 22 nt, Human
cuucaaguccagcucaugcucu

SEQ ID NO: 1097776 - RNA, 22 nt, Human
aggauuucugugccuggaaaau

SEQ ID NO: 1097777 - RNA, 22 nt, Human
cagcugaguguuggcauguuca

SEQ ID NO: 1097778 - RNA, 22 nt, Human
agaccagggguugaguccuagc

SEQ ID NO: 1097779 - RNA, 22 nt, Human
accuucauauucucugauaccu

SEQ ID NO: 1097780 - RNA, 22 nt, Human
uuuuaaugugcucugcaaugau

SEQ ID NO: 1097781 - RNA, 22 nt, Human
cccagcucucugcucuuagccu

SEQ ID NO: 1097782 - RNA, 22 nt, Human
aaaauauggggugagcccagag

SEQ ID NO: 1097783 - RNA, 22 nt, Human
ggcagucuuucccuugagcucu

SEQ ID NO: 1097784 - RNA, 22 nt, Human
cugccugcuucugagccagagg

SEQ ID NO: 1097785 - RNA, 22 nt, Human
ugcuggaggggccugaccagga

SEQ ID NO: 1097786 - RNA, 21 nt, Human
acugugaagaugcuauaaacu

SEQ ID NO: 1097787 - RNA, 22 nt, Human
gaggccuggcugucagucccca

SEQ ID NO: 1097788 - RNA, 22 nt, Human
uggcccugugacugaguucuag

SEQ ID NO: 1097789 - RNA, 22 nt, Human
ggaggucaaauggagggcuggg

SEQ ID NO: 1097790 - RNA, 22 nt, Human
cucuucaguuggucacuauucu

SEQ ID NO: 1097791 - RNA, 22 nt, Human
aggcacugugcuucuuauaugu

SEQ ID NO: 1097792 - RNA, 22 nt, Human
ggcagaagaaaggcuaagucuc

SEQ ID NO: 1097793 - RNA, 22 nt, Human
augcaagacccagaaaucauua

SEQ ID NO: 1097794 - RNA, 22 nt, Human
aggugcuggaguagaagaaaaa

SEQ ID NO: 1097795 - RNA, 22 nt, Human
ggguccagcuacaucagggugg

SEQ ID NO: 1097796 - RNA, 18 nt, Human
agagaugguguagaguuu

SEQ ID NO: 1097797 - RNA, 22 nt, Human
ggaagugguagagccaugagug

SEQ ID NO: 1097798 - RNA, 22 nt, Human
ccuccuggccugugcagagccc

SEQ ID NO: 1097799 - RNA, 21 nt, Human
aauacagugaagaauuucuuu

SEQ ID NO: 1097800 - RNA, 22 nt, Human
ucuucagugaauggcaagaucu

SEQ ID NO: 1097801 - RNA, 22 nt, Human
uuucccaucuuagcagauuaaa

SEQ ID NO: 1097802 - RNA, 22 nt, Human
ggcugggcugcggcuguaccug

SEQ ID NO: 1097803 - RNA, 22 nt, Human
cugcuguguuucugcuagaaaa

SEQ ID NO: 1097804 - RNA, 22 nt, Human
acuuggaaaauucaaaauggca

SEQ ID NO: 1097805 - RNA, 22 nt, Human
cccagcuaccucugcuaggaga

SEQ ID NO: 1097806 - RNA, 22 nt, Human
ucccuggacaacagacuucacu

SEQ ID NO: 1097807 - RNA, 22 nt, Human
uucuuucccaguagaugugaaa

SEQ ID NO: 1097808 - RNA, 22 nt, Human
agacuuucuugaccuaguuaau

SEQ ID NO: 1097809 - RNA, 22 nt, Human
auagaauaaggcacagauucuu

SEQ ID NO: 1097810 - RNA, 17 nt, Human
gaaagguccuagaaauc

SEQ ID NO: 1097811 - RNA, 22 nt, Human
gaauacaaauaauaccaaggug

SEQ ID NO: 1097812 - RNA, 22 nt, Human
agguggcaugccugagacauaa

SEQ ID NO: 1097813 - RNA, 22 nt, Human
gucagcauaguucacacacagu

SEQ ID NO: 1097814 - RNA, 22 nt, Human
ugggaaaguguugaggugucuu

SEQ ID NO: 1097815 - RNA, 22 nt, Human
ugaugauguuuaucuugguauu

SEQ ID NO: 1097816 - RNA, 22 nt, Human
auuagcuuugguggaaaggagu

SEQ ID NO: 1097817 - RNA, 22 nt, Human
ucuuugcaaauguuauuaucuu

SEQ ID NO: 1097818 - RNA, 22 nt, Human
guacucucuugaaggccuuucu

SEQ ID NO: 1097819 - RNA, 22 nt, Human
ccugagagcauuccacacugaa

SEQ ID NO: 1097820 - RNA, 22 nt, Human
gaguccuguugucccagauggg

SEQ ID NO: 1097821 - RNA, 22 nt, Human
gcuuucaaauccuaauuccaac

SEQ ID NO: 1097822 - RNA, 22 nt, Human
gcagccacuaguuuuccuguuu

SEQ ID NO: 1097823 - RNA, 22 nt, Human
ugcaguuugcccuuugcucacu

SEQ ID NO: 1097824 - RNA, 22 nt, Human
uaagccacuagucuguuaugaa

SEQ ID NO: 1097825 - RNA, 22 nt, Human
ugcucuccggcuuccguggccu

SEQ ID NO: 1097826 - RNA, 22 nt, Human
caugccaguuuugagaugcacc

SEQ ID NO: 1097827 - RNA, 21 nt, Human
gguggccuuggugagagaccu

SEQ ID NO: 1097828 - RNA, 22 nt, Human
gaaggccacaaaaaaugucaua

SEQ ID NO: 1097829 - RNA, 22 nt, Human
gagaggucaucucccaucagca

SEQ ID NO: 1097830 - RNA, 22 nt, Human
ucacagcagaauuuaggaggca

SEQ ID NO: 1097831 - RNA, 19 nt, Human
ggaaggugacaguggugaa

SEQ ID NO: 1097832 - RNA, 22 nt, Human
uaggaacacauccuccucuagc

SEQ ID NO: 1097833 - RNA, 22 nt, Human
uuugacaauucaugacauuuau

SEQ ID NO: 1097834 - RNA, 22 nt, Human
ugaaggccagggauuugcagcc

SEQ ID NO: 1097835 - RNA, 22 nt, Human
uuuauauauggcuggucuggau

SEQ ID NO: 1097836 - RNA, 22 nt, Human
ccacccagccagaugcaggaag

SEQ ID NO: 1097837 - RNA, 22 nt, Human
cccagagcugagucugauauau

SEQ ID NO: 1097838 - RNA, 22 nt, Human
cucuuaaagaauguuccagcug

SEQ ID NO: 1097839 - RNA, 20 nt, Human
gagccugggaagucuaaggu

SEQ ID NO: 1097840 - RNA, 22 nt, Human
uauuuucuguggaggaccagau

SEQ ID NO: 1097841 - RNA, 19 nt, Human
auaaauaaaaagugggaga

SEQ ID NO: 1097842 - RNA, 22 nt, Human
uuauaauucuggcauaggcugu

SEQ ID NO: 1097843 - RNA, 22 nt, Human
gugacucuuaaagcaaaucuug

SEQ ID NO: 1097844 - RNA, 22 nt, Human
cugagcccugccucuugucacu

SEQ ID NO: 1097845 - RNA, 22 nt, Human
uggagcaggacugcugcccuca

SEQ ID NO: 1097846 - RNA, 22 nt, Human
augaagaaaaauccagcugucc

SEQ ID NO: 1097847 - RNA, 22 nt, Human
gcucaggaaggcucaaccagga

SEQ ID NO: 1097848 - RNA, 22 nt, Human
gcugggagucgcgucuguggcc

SEQ ID NO: 1097849 - RNA, 20 nt, Human
uaggcagagcugugcagccu

SEQ ID NO: 1097850 - RNA, 22 nt, Human
ucagaggugcaagaaguucuga

SEQ ID NO: 1097851 - RNA, 22 nt, Human
aagaugcagcaaacuacuuuuu

SEQ ID NO: 1097852 - RNA, 22 nt, Human
cuccagggagcuguggagguuu

SEQ ID NO: 1097853 - RNA, 22 nt, Human
cugagcugggcucucuugaggg

SEQ ID NO: 1097854 - RNA, 22 nt, Human
uaacuucucugagccucauucc

SEQ ID NO: 1097855 - RNA, 22 nt, Human
ggaacauguagagggccuguag

SEQ ID NO: 1097856 - RNA, 22 nt, Human
uuucaaguuguuuauauccaga

SEQ ID NO: 1097857 - RNA, 22 nt, Human
uggaagaauaggauagaagaac

SEQ ID NO: 1097858 - RNA, 22 nt, Human
cuucucuucccagggacacagg

SEQ ID NO: 1097859 - RNA, 17 nt, Human
uggaugugggaucugga

SEQ ID NO: 1097860 - RNA, 22 nt, Human
gagcucagcaaaggucugugug

SEQ ID NO: 1097861 - RNA, 21 nt, Human
ggcaggauggcaguggacccc

SEQ ID NO: 1097862 - RNA, 22 nt, Human
aguaugaagcugaaugauuuua

SEQ ID NO: 1097863 - RNA, 22 nt, Human
gcucccugcacucugcagcccu

SEQ ID NO: 1097864 - RNA, 22 nt, Human
cuucuggaggacacuggcccca

SEQ ID NO: 1097865 - RNA, 22 nt, Human
gcagccagguuugaggaccacu

SEQ ID NO: 1097866 - RNA, 22 nt, Human
gaaugcucuuugguccuagacu

SEQ ID NO: 1097867 - RNA, 22 nt, Human
uuaguguauuuucaaauguaga

SEQ ID NO: 1097868 - RNA, 22 nt, Human
cacagcuggggaagcugaggcc

SEQ ID NO: 1097869 - RNA, 19 nt, Human
gagcacagcggcauuuggu

SEQ ID NO: 1097870 - RNA, 19 nt, Human
ugagaggcuuaaggcagcu

SEQ ID NO: 1097871 - RNA, 22 nt, Human
gcccagugguaaaagcaggccu

SEQ ID NO: 1097872 - RNA, 22 nt, Human
aaaauauguauaacucuucugc

SEQ ID NO: 1097873 - RNA, 22 nt, Human
cucugugggggagaggcagcug

SEQ ID NO: 1097874 - RNA, 22 nt, Human
aaaugcuaaaugcagcaaguag

SEQ ID NO: 1097875 - RNA, 22 nt, Human
gcccucagcuugauguuguucu

SEQ ID NO: 1097876 - RNA, 22 nt, Human
auuuuacauaaggaagguuuaa

SEQ ID NO: 1097877 - RNA, 22 nt, Human
aagagagucagucugagcacca

SEQ ID NO: 1097878 - RNA, 22 nt, Human
aggugacaggacaggagcuggu

SEQ ID NO: 1097879 - RNA, 22 nt, Human
ugaggggaacugaugcccauug

SEQ ID NO: 1097880 - RNA, 22 nt, Human
uauuucugagaaccaacuuacc

SEQ ID NO: 1097881 - RNA, 22 nt, Human
cccacacauuuuucacuuaccg

SEQ ID NO: 1097882 - RNA, 22 nt, Human
gcauacagagaggauguggcau

SEQ ID NO: 1097883 - RNA, 22 nt, Human
acagagcaauaacagggagagg

SEQ ID NO: 1097884 - RNA, 19 nt, Human
guauuucaggacaagacgu

SEQ ID NO: 1097885 - RNA, 22 nt, Human
ccugggaccucgcgggaagcgg

SEQ ID NO: 1097886 - RNA, 23 nt, Human
ccuucagaagaaguaacaggggc

SEQ ID NO: 1097887 - RNA, 22 nt, Human
ugggaggcuuccagaccuugcu

SEQ ID NO: 1097888 - RNA, 22 nt, Human
agcccagaggguagcagaagaa

SEQ ID NO: 1097889 - RNA, 22 nt, Human
gcagggguagugucuuccugag

SEQ ID NO: 1097890 - RNA, 22 nt, Human
ugaaagguguccaauauuucuc

SEQ ID NO: 1097891 - RNA, 22 nt, Human
ugcuugucuucaggaaugcuga

SEQ ID NO: 1097892 - RNA, 22 nt, Human
cugaggcaguuuaauuuuugaa

SEQ ID NO: 1097893 - RNA, 22 nt, Human
guuuacaguacucacuugcauu

SEQ ID NO: 1097894 - RNA, 21 nt, Human
ccuggccaaucugauaggguu

SEQ ID NO: 1097895 - RNA, 22 nt, Human
uggccugcucugacuuuggggg

SEQ ID NO: 1097896 - RNA, 22 nt, Human
aaccauuagucaaucagcaaga

SEQ ID NO: 1097897 - RNA, 22 nt, Human
aacaguuugccugaaauguauu

SEQ ID NO: 1097898 - RNA, 19 nt, Human
gucaccauuuccaaaugcc

SEQ ID NO: 1097899 - RNA, 22 nt, Human
cugcucuguauaugagcaggaa

SEQ ID NO: 1097900 - RNA, 22 nt, Human
cugggcagaguccggaagaugg

SEQ ID NO: 1097901 - RNA, 22 nt, Human
cauaacauguacauauaaaugc

SEQ ID NO: 1097902 - RNA, 22 nt, Human
auaugaagucagacaaacuggg

SEQ ID NO: 1097903 - RNA, 22 nt, Human
agcaguggccuggggcucugug

SEQ ID NO: 1097904 - RNA, 22 nt, Human
gaaggccugugguagugagacg

SEQ ID NO: 1097905 - RNA, 22 nt, Human
agaggcugggcaggacccacag

SEQ ID NO: 1097906 - RNA, 22 nt, Human
agaacuuaggaacaacagcuua

SEQ ID NO: 1097907 - RNA, 22 nt, Human
ucacaucuauacccaauaauuu

SEQ ID NO: 1097908 - RNA, 22 nt, Human
ggcacagcacaguggacccagg

SEQ ID NO: 1097909 - RNA, 22 nt, Human
aguucaaaaagguaaaguuuau

SEQ ID NO: 1097910 - RNA, 22 nt, Human
ugcaggugcagcgauacuguga

SEQ ID NO: 1097911 - RNA, 22 nt, Human
agggccugagcuggcugaccuc

SEQ ID NO: 1097912 - RNA, 22 nt, Human
aaacacaagaggcaggguacag

SEQ ID NO: 1097913 - RNA, 22 nt, Human
aggcagggcucauuucuuaggc

SEQ ID NO: 1097914 - RNA, 22 nt, Human
aucugccugcaguggagguggg

SEQ ID NO: 1097915 - RNA, 22 nt, Human
gaaggcuguuucugguagugau

SEQ ID NO: 1097916 - RNA, 22 nt, Human
uucuucuuuccaauuacauggu

SEQ ID NO: 1097917 - RNA, 22 nt, Human
ugggcacuauggcucugugcac

SEQ ID NO: 1097918 - RNA, 22 nt, Human
aagggcugcuguagaagcagag

SEQ ID NO: 1097919 - RNA, 22 nt, Human
agacaaaugguaauuaugucua

SEQ ID NO: 1097920 - RNA, 22 nt, Human
aaauacuguccaccauggagca

SEQ ID NO: 1097921 - RNA, 22 nt, Human
gcagccuguuguaccagccugu

SEQ ID NO: 1097922 - RNA, 22 nt, Human
ccagaugggaagaagcaugacu

SEQ ID NO: 1097923 - RNA, 22 nt, Human
gcagcugcuggaaguuccugcc

SEQ ID NO: 1097924 - RNA, 21 nt, Human
accuuuaauucaagcaucagg

SEQ ID NO: 1097925 - RNA, 22 nt, Human
aggcagguuucccggcugucaa

SEQ ID NO: 1097926 - RNA, 22 nt, Human
cagcagagaugagauuccuaua

SEQ ID NO: 1097927 - RNA, 22 nt, Human
acuuuguuuggcuauuagaguc

SEQ ID NO: 1097928 - RNA, 22 nt, Human
cccagcacucagcaggcucaua

SEQ ID NO: 1097929 - RNA, 22 nt, Human
gcuaggagccgcugcacuaggu

SEQ ID NO: 1097930 - RNA, 22 nt, Human
acacauaugccauuacagcaaa

SEQ ID NO: 1097931 - RNA, 22 nt, Human
uuuauuguguugaaacugaauu

SEQ ID NO: 1097932 - RNA, 22 nt, Human
cauuucugauuacagaauacua

SEQ ID NO: 1097933 - RNA, 22 nt, Human
cuacauuuggagaguauaggaa

SEQ ID NO: 1097934 - RNA, 22 nt, Human
gagccaccuucaacucaggaau

SEQ ID NO: 1097935 - RNA, 22 nt, Human
ucugccugccgagaacaccuac

SEQ ID NO: 1097936 - RNA, 22 nt, Human
cugggcuggauaauucuuugcu

SEQ ID NO: 1097937 - RNA, 22 nt, Human
uagugcauaacauuuaaagguc

SEQ ID NO: 1097938 - RNA, 19 nt, Human
ucaaaacacaaaugguuga

SEQ ID NO: 1097939 - RNA, 18 nt, Human
agaagccacgaggagucc

SEQ ID NO: 1097940 - RNA, 22 nt, Human
cagacuggccacaucugcacug

SEQ ID NO: 1097941 - RNA, 22 nt, Human
ugcaucuaaguggcuaacaacc

SEQ ID NO: 1097942 - RNA, 22 nt, Human
uggaagagcaggcagacaaugc

SEQ ID NO: 1097943 - RNA, 21 nt, Human
caggaacauucuuuacauuua

SEQ ID NO: 1097944 - RNA, 22 nt, Human
cacagggcaccaguuggccauc

SEQ ID NO: 1097945 - RNA, 22 nt, Human
ugggccucaucuucaaugaguc

SEQ ID NO: 1097946 - RNA, 22 nt, Human
gagugugggggugcugaggaca

SEQ ID NO: 1097947 - RNA, 22 nt, Human
ggaggugguggcagugacaauu

SEQ ID NO: 1097948 - RNA, 22 nt, Human
caggcacuagcagaaugaggcu

SEQ ID NO: 1097949 - RNA, 22 nt, Human
gauuucaauccagcuuucuucu

SEQ ID NO: 1097950 - RNA, 22 nt, Human
uauuuggaagguauaaacacaa

SEQ ID NO: 1097951 - RNA, 22 nt, Human
auagucuuagaucagauaaagu

SEQ ID NO: 1097952 - RNA, 22 nt, Human
auuuccuaacagaggcaacagu

SEQ ID NO: 1097953 - RNA, 22 nt, Human
acccaggagcaggcugggcagu

SEQ ID NO: 1097954 - RNA, 22 nt, Human
ccaggaacaaagccccauccac

SEQ ID NO: 1097955 - RNA, 22 nt, Human
cugggugaguugaugaaggaga

SEQ ID NO: 1097956 - RNA, 22 nt, Human
agcaacagcagguuugcacucc

SEQ ID NO: 1097957 - RNA, 22 nt, Human
auuaggcagacaacguagccgg

SEQ ID NO: 1097958 - RNA, 22 nt, Human
ucuagaacuucucuaaaaugaa

SEQ ID NO: 1097959 - RNA, 22 nt, Human
cagaccagcucuaugaacccaa

SEQ ID NO: 1097960 - RNA, 22 nt, Human
uuucacauuuguuuuaagaagu

SEQ ID NO: 1097961 - RNA, 22 nt, Human
aaaugccucauuuucucucacu

SEQ ID NO: 1097962 - RNA, 22 nt, Human
gcagaggcauuucugacgcugc

SEQ ID NO: 1097963 - RNA, 17 nt, Human
acacaucuuggcuuugc

SEQ ID NO: 1097964 - RNA, 22 nt, Human
uuccaacuuuaaaauucauucu

SEQ ID NO: 1097965 - RNA, 22 nt, Human
aagcacagggacucaggaccgg

SEQ ID NO: 1097966 - RNA, 21 nt, Human
ucccacucuaaauggacugaa

SEQ ID NO: 1097967 - RNA, 22 nt, Human
aggaagccugcaggugacugcu

SEQ ID NO: 1097968 - RNA, 22 nt, Human
ucauugcagaaauaaaggugaa

SEQ ID NO: 1097969 - RNA, 22 nt, Human
cagagccugccucuggcugugg

SEQ ID NO: 1097970 - RNA, 22 nt, Human
ugcccuguuccugccuccagcu

SEQ ID NO: 1097971 - RNA, 22 nt, Human
augggaggcaggcucagaaccg

SEQ ID NO: 1097972 - RNA, 22 nt, Human
uauaagucuggcauauguaugc

SEQ ID NO: 1097973 - RNA, 22 nt, Human
uugcuuuguggugguucuucca

SEQ ID NO: 1097974 - RNA, 23 nt, Human
uuucaacaaugcuuagagaaaac

SEQ ID NO: 1097975 - RNA, 22 nt, Human
auccaaaucaugucagaagaac

SEQ ID NO: 1097976 - RNA, 22 nt, Human
auucuaauuaguucuacauguu

SEQ ID NO: 1097977 - RNA, 22 nt, Human
uucucuuauucuggauaugcag

SEQ ID NO: 1097978 - RNA, 22 nt, Human
caagauauugauuuccagcuga

SEQ ID NO: 1097979 - RNA, 22 nt, Human
uugacaaaguuuaguaauaauc

SEQ ID NO: 1097980 - RNA, 22 nt, Human
agaggccaugcuagaggccugg

SEQ ID NO: 1097981 - RNA, 22 nt, Human
caaggccagggaauuuuucugg

SEQ ID NO: 1097982 - RNA, 20 nt, Human
guggccuguccuguuguggg

SEQ ID NO: 1097983 - RNA, 22 nt, Human
uggguggcggccugguucugag

SEQ ID NO: 1097984 - RNA, 22 nt, Human
agggcagccugagugcuggccc

SEQ ID NO: 1097985 - RNA, 22 nt, Human
uugacaauguccuuugaauuuc

SEQ ID NO: 1097986 - RNA, 22 nt, Human
uauuaauaugugugugcaugua

SEQ ID NO: 1097987 - RNA, 22 nt, Human
uuaagugagcuugaauaaucuu

SEQ ID NO: 1097988 - RNA, 22 nt, Human
aucugaaagcuaggaguucuca

SEQ ID NO: 1097989 - RNA, 22 nt, Human
aauagauucaugguuaagagca

SEQ ID NO: 1097990 - RNA, 22 nt, Human
uguaauuaaacugaagacagaa

SEQ ID NO: 1097991 - RNA, 22 nt, Human
uuuauucagcagcagcaguggu

SEQ ID NO: 1097992 - RNA, 22 nt, Human
aaguacuugauagauuaacugu

SEQ ID NO: 1097993 - RNA, 22 nt, Human
cucacacugugccaaauccuuu

SEQ ID NO: 1097994 - RNA, 22 nt, Human
cuggcaggcucucuggucgguu

SEQ ID NO: 1097995 - RNA, 22 nt, Human
gggccaggaguggagauauggg

SEQ ID NO: 1097996 - RNA, 18 nt, Human
ucucagaggccauccuag

SEQ ID NO: 1097997 - RNA, 22 nt, Human
uaaggcaaaggggaaguuauca

SEQ ID NO: 1097998 - RNA, 22 nt, Human
agaggcacuaagggaagagcag

SEQ ID NO: 1097999 - RNA, 22 nt, Human
uuacagaagaguaacuuggcaa

SEQ ID NO: 1098000 - RNA, 22 nt, Human
agaccgagaaguucuccaggcc

SEQ ID NO: 1098001 - RNA, 22 nt, Human
aagugagugguaaggagcaugg

SEQ ID NO: 1098002 - RNA, 23 nt, Human
gagagcugacugucaagacuguu

SEQ ID NO: 1098003 - RNA, 22 nt, Human
agcauacaguaggugcucaguu

SEQ ID NO: 1098004 - RNA, 22 nt, Human
aaucacauuacagcauaucugu

SEQ ID NO: 1098005 - RNA, 22 nt, Human
ggagacagugacuuagagacug

SEQ ID NO: 1098006 - RNA, 22 nt, Human
agccacagcccacaggacucuu

SEQ ID NO: 1098007 - RNA, 22 nt, Human
cagaaacaggcaacgugugcac

SEQ ID NO: 1098008 - RNA, 22 nt, Human
aagauuuccuucaguagagcua

SEQ ID NO: 1098009 - RNA, 22 nt, Human
agugcauacccuucuaaaaagu

SEQ ID NO: 1098010 - RNA, 22 nt, Human
acagggccaggugagaggugcu

SEQ ID NO: 1098011 - RNA, 22 nt, Human
ggccagaaaguuaagcuguggc

SEQ ID NO: 1098012 - RNA, 22 nt, Human
ucagggaaauuuccauguguuu

SEQ ID NO: 1098013 - RNA, 22 nt, Human
gguggggcccuggcacugguau

SEQ ID NO: 1098014 - RNA, 22 nt, Human
ccugccugauuccaggauggcu

SEQ ID NO: 1098015 - RNA, 22 nt, Human
ucuuccaaggugcagaucuucu

SEQ ID NO: 1098016 - RNA, 22 nt, Human
agcaaagcaucacuccaaucug

SEQ ID NO: 1098017 - RNA, 22 nt, Human
gggagcugagaaacaacauucu

SEQ ID NO: 1098018 - RNA, 22 nt, Human
agggucagugaugagggagccc

SEQ ID NO: 1098019 - RNA, 22 nt, Human
ucaucaaagucaaagaaugacu

SEQ ID NO: 1098020 - RNA, 22 nt, Human
ggaggccaaggaggagcuugcc

SEQ ID NO: 1098021 - RNA, 22 nt, Human
uuucuggaaacuguaaagagga

SEQ ID NO: 1098022 - RNA, 18 nt, Human
ugcuggcaacuacuauug

SEQ ID NO: 1098023 - RNA, 22 nt, Human
caugcuaaccagagacauaaag

SEQ ID NO: 1098024 - RNA, 22 nt, Human
aggaagaauguuuacauaucaa

SEQ ID NO: 1098025 - RNA, 22 nt, Human
gggugaggagcugccagucaug

SEQ ID NO: 1098026 - RNA, 20 nt, Human
uccaggagaacugggagccg

SEQ ID NO: 1098027 - RNA, 22 nt, Human
gagggccagcagccucagcaug

SEQ ID NO: 1098028 - RNA, 17 nt, Human
ccacugacucugacuuc

SEQ ID NO: 1098029 - RNA, 22 nt, Human
caaagccucugauuucacuugu

SEQ ID NO: 1098030 - RNA, 22 nt, Human
uuuaugcaucucuaggaagggc

SEQ ID NO: 1098031 - RNA, 22 nt, Human
gugcugucaauugcuuucagua

SEQ ID NO: 1098032 - RNA, 22 nt, Human
aaagaugucaguuugaaauaac

SEQ ID NO: 1098033 - RNA, 22 nt, Human
cuacccaggcuggagugcagua

SEQ ID NO: 1098034 - RNA, 22 nt, Human
augcaugauccugagcaaccca

SEQ ID NO: 1098035 - RNA, 22 nt, Human
cggucaggugcagcguuggcac

SEQ ID NO: 1098036 - RNA, 22 nt, Human
ugcccguggccuggggcagcuu

SEQ ID NO: 1098037 - RNA, 22 nt, Human
gggcccugcgacucgcggcgga

SEQ ID NO: 1098038 - RNA, 22 nt, Human
cagagccacugucugccaggca

SEQ ID NO: 1098039 - RNA, 22 nt, Human
caggcgggcaggugcggccccu

SEQ ID NO: 1098040 - RNA, 22 nt, Human
guggccuuuucaaguaggguau

SEQ ID NO: 1098041 - RNA, 22 nt, Human
gcggcccgagcaggacgggugg

SEQ ID NO: 1098042 - RNA, 22 nt, Human
cuauacagcagcuuacuaguua

SEQ ID NO: 1098043 - RNA, 22 nt, Human
cagagccaaaccucagggcccg

SEQ ID NO: 1098044 - RNA, 22 nt, Human
accaggcccuccagcugcgugg

SEQ ID NO: 1098045 - RNA, 22 nt, Human
gcaggccugucuugcucgcccu

SEQ ID NO: 1098046 - RNA, 22 nt, Human
agcaaggcagcuuucacugcuu

SEQ ID NO: 1098047 - RNA, 22 nt, Human
caggugggagccacagcguaca

SEQ ID NO: 1098048 - RNA, 22 nt, Human
gggagagcgcgcuagggccgag

SEQ ID NO: 1098049 - RNA, 22 nt, Human
agucaacauuugagaugcaaug

SEQ ID NO: 1098050 - RNA, 22 nt, Human
gccggggcuggggagagacaug

SEQ ID NO: 1098051 - RNA, 19 nt, Human
ggggcccggggucugcgag

SEQ ID NO: 1098052 - RNA, 20 nt, Human
uggcccagcacgacgaggac

SEQ ID NO: 1098053 - RNA, 22 nt, Human
ggugucagugaagguagaguuu

SEQ ID NO: 1098054 - RNA, 22 nt, Human
ccaggcuccccaggaggcccuu

SEQ ID NO: 1098055 - RNA, 22 nt, Human
agggcccuagggaaugagacau

SEQ ID NO: 1098056 - RNA, 22 nt, Human
agccccaguccgcugcgggcgg

SEQ ID NO: 1098057 - RNA, 22 nt, Human
augacagcucuagcacacagua

SEQ ID NO: 1098058 - RNA, 22 nt, Human
agcagcaggugaccucgaugcc

SEQ ID NO: 1098059 - RNA, 19 nt, Human
gggucccacugcccgucug

SEQ ID NO: 1098060 - RNA, 22 nt, Human
gcagcccaggaggcgggagccc

SEQ ID NO: 1098061 - RNA, 22 nt, Human
gccagcagcucuugggcgggca

SEQ ID NO: 1098062 - RNA, 22 nt, Human
gcggggggcaggcaguacguug

SEQ ID NO: 1098063 - RNA, 22 nt, Human
ugguccagacuuugaccucuca

SEQ ID NO: 1098064 - RNA, 22 nt, Human
ggcagaggaagcuggaaguggg

SEQ ID NO: 1098065 - RNA, 22 nt, Human
gguuccaggcauggcaggaugu

SEQ ID NO: 1098066 - RNA, 22 nt, Human
caggaacagcaccaggagcuag

SEQ ID NO: 1098067 - RNA, 22 nt, Human
guggcgcagaggguggcagaga

SEQ ID NO: 1098068 - RNA, 22 nt, Human
gcggcgccugggacccgccagc

SEQ ID NO: 1098069 - RNA, 22 nt, Human
cagcaguguacaaggugucaga

SEQ ID NO: 1098070 - RNA, 22 nt, Human
ugaaggccuccccgagcauuag

SEQ ID NO: 1098071 - RNA, 22 nt, Human
gggcagcaucaggaggggcuuu

SEQ ID NO: 1098072 - RNA, 22 nt, Human
uggccagucuuagcugugccug

SEQ ID NO: 1098073 - RNA, 22 nt, Human
gguggcagaggugcaucagccc

SEQ ID NO: 1098074 - RNA, 22 nt, Human
caggaacacaaugagucucaaa

SEQ ID NO: 1098075 - RNA, 22 nt, Human
ggcagcagaacuggcccuguau

SEQ ID NO: 1098076 - RNA, 22 nt, Human
ccagcagcgauagggugagugc

SEQ ID NO: 1098077 - RNA, 22 nt, Human
ugccagagaggagaaagcauuu

SEQ ID NO: 1098078 - RNA, 22 nt, Human
ggggucccugcaccagcauguc

SEQ ID NO: 1098079 - RNA, 22 nt, Human
caggccugugacaccgugucug

SEQ ID NO: 1098080 - RNA, 23 nt, Human
augcaacauugccaguaugggca

SEQ ID NO: 1098081 - RNA, 20 nt, Human
ugcuggaggcgccggcgcuc

SEQ ID NO: 1098082 - RNA, 22 nt, Human
ggagugggaacaaugacauggu

SEQ ID NO: 1098083 - RNA, 22 nt, Human
ccccacaccugccgggcagcag

SEQ ID NO: 1098084 - RNA, 22 nt, Human
agcggcgccggagggaggugcg

SEQ ID NO: 1098085 - RNA, 17 nt, Human
gcaggcacugcugccug

SEQ ID NO: 1098086 - RNA, 22 nt, Human
uggcggugacggcggcgccugg

SEQ ID NO: 1098087 - RNA, 22 nt, Human
ggguuguagagcuggaagggga

SEQ ID NO: 1098088 - RNA, 22 nt, Human
cccaggucgucagcaguguggu

SEQ ID NO: 1098089 - RNA, 22 nt, Human
cacaggaagcaagccuggggcc

SEQ ID NO: 1098090 - RNA, 22 nt, Human
guguccagagccgggcugaaug

SEQ ID NO: 1098091 - RNA, 22 nt, Human
ugucugccugcgggccggcaca

SEQ ID NO: 1098092 - RNA, 22 nt, Human
ucaggggcuugaggugcauguc

SEQ ID NO: 1098093 - RNA, 22 nt, Human
cgugcggccucggggcccggcu

SEQ ID NO: 1098094 - RNA, 22 nt, Human
agccagggacgcugcaggcuac

SEQ ID NO: 1098095 - RNA, 22 nt, Human
ggugggugagcccugggagcug

SEQ ID NO: 1098096 - RNA, 22 nt, Human
agguccugucuuaucucuguaa

SEQ ID NO: 1098097 - RNA, 23 nt, Human
uggggcugauggagacggaccag

SEQ ID NO: 1098098 - RNA, 22 nt, Human
guggcaggagggcaucacuugg

SEQ ID NO: 1098099 - RNA, 22 nt, Human
gcaccgagaaggaagcaugccu

SEQ ID NO: 1098100 - RNA, 22 nt, Human
gagcaacacauugaaugaggau

SEQ ID NO: 1098101 - RNA, 22 nt, Human
gcccagcugagaagcgcggggc

SEQ ID NO: 1098102 - RNA, 22 nt, Human
cagcgguggcaaggugacugug

SEQ ID NO: 1098103 - RNA, 22 nt, Human
gcagcugcgcugguguggggca

SEQ ID NO: 1098104 - RNA, 22 nt, Human
ggcagcugaagaggaacuuugg

SEQ ID NO: 1098105 - RNA, 23 nt, Human
agacagaggcugaggcuggccgc

SEQ ID NO: 1098106 - RNA, 23 nt, Human
gcacagagcaguuaggggaagau

SEQ ID NO: 1098107 - RNA, 22 nt, Human
aaaccggguccagaucuucagg

SEQ ID NO: 1098108 - RNA, 20 nt, Human
gucagaggacccuagagcga

SEQ ID NO: 1098109 - RNA, 22 nt, Human
ggcagcaggguagccauuucuc

SEQ ID NO: 1098110 - RNA, 15 nt, Human
uggugguguugagac

SEQ ID NO: 1098111 - RNA, 22 nt, Human
gcggggccauguccaacggccu

SEQ ID NO: 1098112 - RNA, 19 nt, Human
ugcagcuguaugagcuuaa

SEQ ID NO: 1098113 - RNA, 17 nt, Human
agcagcuggguugaucu

SEQ ID NO: 1098114 - RNA, 22 nt, Human
uuggccguuucacugggcaguu

SEQ ID NO: 1098115 - RNA, 22 nt, Human
acgcggugcggcaaguucaugg

SEQ ID NO: 1098116 - RNA, 22 nt, Human
uggcuccaggggacacgcagua

SEQ ID NO: 1098117 - RNA, 22 nt, Human
ggcggcacgcaggcugcugucg

SEQ ID NO: 1098118 - RNA, 22 nt, Human
ggcuguggucauuaggagguug

SEQ ID NO: 1098119 - RNA, 16 nt, Human
ggcagcagcuccgugc

SEQ ID NO: 1098120 - RNA, 22 nt, Human
ccagccagcugcccuuggggcc

SEQ ID NO: 1098121 - RNA, 22 nt, Human
gugcugccuccauauccgucag

SEQ ID NO: 1098122 - RNA, 22 nt, Human
gaagcgcggcgucggcgugggu

SEQ ID NO: 1098123 - RNA, 22 nt, Human
aagcgcagacacagagagugga

SEQ ID NO: 1098124 - RNA, 22 nt, Human
auacagguucucuagggaacag

SEQ ID NO: 1098125 - RNA, 22 nt, Human
gcagcccaggcucgcucacugc

SEQ ID NO: 1098126 - RNA, 22 nt, Human
agcaccagcucaaggugcaccu

SEQ ID NO: 1098127 - RNA, 22 nt, Human
ccagcaggaaagugacguuuga

SEQ ID NO: 1098128 - RNA, 20 nt, Human
gggugugggcccggccaggc

SEQ ID NO: 1098129 - RNA, 22 nt, Human
gggggcgccgccgcucaucuca

SEQ ID NO: 1098130 - RNA, 22 nt, Human
ggcggcgcguagccggagacuu

SEQ ID NO: 1098131 - RNA, 22 nt, Human
ggccgcggauuuucccgcuggc

SEQ ID NO: 1098132 - RNA, 22 nt, Human
ggcaguggugggaggcucgcuc

SEQ ID NO: 1098133 - RNA, 22 nt, Human
gcagaggggaagcugaggaauu

SEQ ID NO: 1098134 - RNA, 22 nt, Human
gggggcuggacuuucccacaca

SEQ ID NO: 1098135 - RNA, 22 nt, Human
ucuguggcaaacacagugacca

SEQ ID NO: 1098136 - RNA, 23 nt, Human
ugagagccuggcagccuggguuc

SEQ ID NO: 1098137 - RNA, 22 nt, Human
gggcagcaggcuccacguuccu

SEQ ID NO: 1098138 - RNA, 22 nt, Human
cucaguggggcgacagggugcu

SEQ ID NO: 1098139 - RNA, 22 nt, Human
gggagccccaccucggugcccg

SEQ ID NO: 1098140 - RNA, 22 nt, Human
gggcggggcuuccguccuccac

SEQ ID NO: 1098141 - RNA, 22 nt, Human
gguggcaccuuacccugcgcag

SEQ ID NO: 1098142 - RNA, 18 nt, Human
uggggggcuugucugaag

SEQ ID NO: 1098143 - RNA, 22 nt, Human
cagcugccuguauuguccucau

SEQ ID NO: 1098144 - RNA, 22 nt, Human
cggcagcgguuggagguuguag

SEQ ID NO: 1098145 - RNA, 22 nt, Human
cgcagcugcugcucugaaacag

SEQ ID NO: 1098146 - RNA, 22 nt, Human
gcccagggcugcaaguggacgc

SEQ ID NO: 1098147 - RNA, 22 nt, Human
gccagaggggcucgaaggcgcg

SEQ ID NO: 1098148 - RNA, 22 nt, Human
aggggcagccucacaauccucu

SEQ ID NO: 1098149 - RNA, 22 nt, Human
agacagcacuuuuguauggggg

SEQ ID NO: 1098150 - RNA, 22 nt, Human
gccgugcgugcgcaggugcugu

SEQ ID NO: 1098151 - RNA, 20 nt, Human
gugcccaguuggugacagac

SEQ ID NO: 1098152 - RNA, 22 nt, Human
ggcuggccuguguggccgccac

SEQ ID NO: 1098153 - RNA, 18 nt, Human
gagagcccagcagguggu

SEQ ID NO: 1098154 - RNA, 22 nt, Human
gcggggacagaaggcgguucuc

SEQ ID NO: 1098155 - RNA, 22 nt, Human
cgccccagccaguugagcggcg

SEQ ID NO: 1098156 - RNA, 22 nt, Human
caggacccaucagccaggcacu

SEQ ID NO: 1098157 - RNA, 21 nt, Human
uuggccgugcagaugaacagc

SEQ ID NO: 1098158 - RNA, 22 nt, Human
gcaguggccacauggaggagga

SEQ ID NO: 1098159 - RNA, 22 nt, Human
ugcuggccucggcgcugggccu

SEQ ID NO: 1098160 - RNA, 22 nt, Human
cuauucaguugugggcaacaau

SEQ ID NO: 1098161 - RNA, 22 nt, Human
gcccagcgagcagagguggacg

SEQ ID NO: 1098162 - RNA, 19 nt, Human
aggaaggcggcggcugccc

SEQ ID NO: 1098163 - RNA, 22 nt, Human
aagcccgguugggaacguggug

SEQ ID NO: 1098164 - RNA, 22 nt, Human
gggcucggcaucuguggacucu

SEQ ID NO: 1098165 - RNA, 22 nt, Human
cagggcuccccagagagccucu

SEQ ID NO: 1098166 - RNA, 22 nt, Human
cauggggcccaugugcuccaag

SEQ ID NO: 1098167 - RNA, 22 nt, Human
ugcagcugccuagggcuggcuu

SEQ ID NO: 1098168 - RNA, 22 nt, Human
ccagcaggagacuagcaacaua

SEQ ID NO: 1098169 - RNA, 22 nt, Human
gcccaguggcaucuucacugcu

SEQ ID NO: 1098170 - RNA, 23 nt, Human
agcaacagugggugaguguugcu

SEQ ID NO: 1098171 - RNA, 20 nt, Human
gcucagggccugggucugga

SEQ ID NO: 1098172 - RNA, 20 nt, Human
gagcagugagccagggaaag

SEQ ID NO: 1098173 - RNA, 22 nt, Human
caggcucgguccaguggcaccc

SEQ ID NO: 1098174 - RNA, 22 nt, Human
ccaggcccugcuccucacacca

SEQ ID NO: 1098175 - RNA, 22 nt, Human
cucagugcuuaguguguuuugg

SEQ ID NO: 1098176 - RNA, 22 nt, Human
gcaggggcugagcaccagcggg

SEQ ID NO: 1098177 - RNA, 22 nt, Human
uccaguggugguuugaagggca

SEQ ID NO: 1098178 - RNA, 21 nt, Human
gcugcucgagauccagugcuu

SEQ ID NO: 1098179 - RNA, 22 nt, Human
uccagcugugcuccaggaggug

SEQ ID NO: 1098180 - RNA, 22 nt, Human
aacagguagggacucuaacuug

SEQ ID NO: 1098181 - RNA, 22 nt, Human
ggugugggucagcuuuauuaau

SEQ ID NO: 1098182 - RNA, 19 nt, Human
acacaccagugccugugac

SEQ ID NO: 1098183 - RNA, 22 nt, Human
agcaggccugccaccucggggu

SEQ ID NO: 1098184 - RNA, 22 nt, Human
ggagcugcucagagccaguccc

SEQ ID NO: 1098185 - RNA, 22 nt, Human
acuagugcacauuguuucucaa

SEQ ID NO: 1098186 - RNA, 22 nt, Human
acaggcgcacaugagggccgug

SEQ ID NO: 1098187 - RNA, 22 nt, Human
gcccagccccuggguggacgug

SEQ ID NO: 1098188 - RNA, 22 nt, Human
gggccccaagaaccuccuccug

SEQ ID NO: 1098189 - RNA, 22 nt, Human
gggcagcaaaucugagucuggu

SEQ ID NO: 1098190 - RNA, 22 nt, Human
ucggugcgcgaggcgcgguccc

SEQ ID NO: 1098191 - RNA, 21 nt, Human
gcaaccagaccacagggcagu

SEQ ID NO: 1098192 - RNA, 22 nt, Human
gccacaggucggcuagaggguc

SEQ ID NO: 1098193 - RNA, 22 nt, Human
agagggcgcccaggcccacgcc

SEQ ID NO: 1098194 - RNA, 22 nt, Human
cggcgcaggcagaccgcgggcu

SEQ ID NO: 1098195 - RNA, 22 nt, Human
cagugcccuuccaggacugcag

SEQ ID NO: 1098196 - RNA, 22 nt, Human
cccccagcucugcugggucccg

SEQ ID NO: 1098197 - RNA, 22 nt, Human
guggcccaggcuuggcgcuggc

SEQ ID NO: 1098198 - RNA, 22 nt, Human
gccagugccugcugcucagggc

SEQ ID NO: 1098199 - RNA, 21 nt, Human
aggucccagguuugggcagca

SEQ ID NO: 1098200 - RNA, 22 nt, Human
acagcagguuauuguuauggca

SEQ ID NO: 1098201 - RNA, 22 nt, Human
ugcaggccuggacugauguggu

SEQ ID NO: 1098202 - RNA, 22 nt, Human
gcggcccggguccccagcagca

SEQ ID NO: 1098203 - RNA, 22 nt, Human
uggacccaccccagggccugcu

SEQ ID NO: 1098204 - RNA, 22 nt, Human
gaugcgggcccgcuccacugcc

SEQ ID NO: 1098205 - RNA, 22 nt, Human
aaggggggcaccugcaugcccg

SEQ ID NO: 1098206 - RNA, 22 nt, Human
aaggugccacuucccucagacu

SEQ ID NO: 1098207 - RNA, 22 nt, Human
ggcggugguugagaggacggcg

SEQ ID NO: 1098208 - RNA, 22 nt, Human
cagcugccuaugaccuagccuc

SEQ ID NO: 1098209 - RNA, 22 nt, Human
cagacaggguccuguccgucac

SEQ ID NO: 1098210 - RNA, 21 nt, Human
ccaccaggucuucugcucggg

SEQ ID NO: 1098211 - RNA, 22 nt, Human
ggcgagcaugagucacucuggg

SEQ ID NO: 1098212 - RNA, 22 nt, Human
guggcagcggcccaggccgucu

SEQ ID NO: 1098213 - RNA, 22 nt, Rubella virus
uggggcacccggcacucgugua

SEQ ID NO: 1098214 - RNA, 22 nt, Rubella virus
uggcgagccagagggccgaggc

SEQ ID NO: 1098215 - RNA, 22 nt, Rubella virus
gcgagccagcaguuaugcaccu

SEQ ID NO: 1098216 - RNA, 22 nt, Rubella virus
cgugaugcuguggcacagggcg

SEQ ID NO: 1098217 - RNA, 22 nt, Rubella virus
cauggccacggugguguugugc

SEQ ID NO: 1098218 - RNA, 22 nt, Rubella virus
agauggcaauugccucccccgg

SEQ ID NO: 1098219 - RNA, 22 nt, Rubella virus
ucagccugacccgggccuccga

SEQ ID NO: 1098220 - RNA, 22 nt, Rubella virus
gugccccaagugcgccuacggc

SEQ ID NO: 1098221 - RNA, 22 nt, Rubella virus
cgugaugcuguggcacagggcg

SEQ ID NO: 1098222 - RNA, 23 nt, Rubella virus
cgcgcgucccauggggcucacca

SEQ ID NO: 1098223 - RNA, 22 nt, Rubella virus
gugccgccaugauggccgucgu

SEQ ID NO: 1098224 - RNA, 22 nt, Rubella virus
agauggcaauugccucccccgg

SEQ ID NO: 1098225 - RNA, 22 nt, Rubella virus
acggcagcugauggugguggug

SEQ ID NO: 1098226 - RNA, 22 nt, Rubella virus
gcucgccgccuaccgccgcauc

SEQ ID NO: 1098227 - RNA, 22 nt, Rubella virus
uggcgagccagagggccgaggc

SEQ ID NO: 1098228 - RNA, 22 nt, Rubella virus
gcgcacgccuuuggggaccaug

SEQ ID NO: 1098229 - RNA, 22 nt, Rubella virus
ucgaggucgacuucacugaguu

SEQ ID NO: 1098230 - RNA, 22 nt, Human
acagagagaaacaaucagcagc

SEQ ID NO: 1098231 - RNA, 22 nt, Human
gucaggaucaaauugaaguuau

SEQ ID NO: 1098232 - RNA, 22 nt, Human
uucuucaacaaggacacuguua

SEQ ID NO: 1098233 - RNA, 22 nt, Human
uaacacaugguucugucaggaa

SEQ ID NO: 1098234 - RNA, 22 nt, Human
ggauggcauguugggcucuguu

SEQ ID NO: 1098235 - RNA, 22 nt, Human
uuucacauuuaggcgugaauug

SEQ ID NO: 1098236 - RNA, 22 nt, Human
aaaaacugcaauuacuuuuguc

SEQ ID NO: 1098237 - RNA, 22 nt, Human
uacaucauaauaauacuuagaa

SEQ ID NO: 1098238 - RNA, 20 nt, Human
uugagcuuuuaguacagaca

SEQ ID NO: 1098239 - RNA, 22 nt, Human
uggagucugugaugcucugggu

SEQ ID NO: 1098240 - RNA, 22 nt, Human
acugcuuacccggccugacuuc

SEQ ID NO: 1098241 - RNA, 22 nt, Human
uaaggccaccguuauagaacca

SEQ ID NO: 1098242 - RNA, 20 nt, Human
uaacuuucuaugcuuucagc

SEQ ID NO: 1098243 - RNA, 22 nt, Human
acacaaauuguaggauaauugc

SEQ ID NO: 1098244 - RNA, 22 nt, Human
ugucucugauaaguaguucagu

SEQ ID NO: 1098245 - RNA, 22 nt, Human
uagcuagaaugcuucgugauau

SEQ ID NO: 1098246 - RNA, 22 nt, Human
gaaauauuucucuugagccccu

SEQ ID NO: 1098247 - RNA, 22 nt, Human
cugcuguggccagccaggucaa

SEQ ID NO: 1098248 - RNA, 22 nt, Human
uguggaaaagaauaagggagau

SEQ ID NO: 1098249 - RNA, 22 nt, Human
ggaccuggcaauuugcaucucu

SEQ ID NO: 1098250 - RNA, 22 nt, Human
ugucuucagcaaaugccuuucu

SEQ ID NO: 1098251 - RNA, 22 nt, Human
uuauagaaggagcauucacuua

SEQ ID NO: 1098252 - RNA, 22 nt, Human
acaauacaggcuucuggacuua

SEQ ID NO: 1098253 - RNA, 17 nt, Human
gcuguaguuugauaaga

SEQ ID NO: 1098254 - RNA, 22 nt, Human
aucugcuugaguuugaagucag

SEQ ID NO: 1098255 - RNA, 22 nt, Human
gagggucccugcucagggccag

SEQ ID NO: 1098256 - RNA, 22 nt, Human
uagcuaucuguguccagaucca

SEQ ID NO: 1098257 - RNA, 22 nt, Human
aaauuaguacauugcaaagucc

SEQ ID NO: 1098258 - RNA, 22 nt, Human
uuucuucagccuucacaaccug

SEQ ID NO: 1098259 - RNA, 22 nt, Human
cagucuucuaaccuagcagccu

SEQ ID NO: 1098260 - RNA, 22 nt, Human
gaucauuuugaugcccuuuuag

SEQ ID NO: 1098261 - RNA, 22 nt, Human
ucuguggauuuuaguguucaug

SEQ ID NO: 1098262 - RNA, 20 nt, Human
cugcuguguuauuguagaac

SEQ ID NO: 1098263 - RNA, 22 nt, Human
gugcauuuaggucacaugaugu

SEQ ID NO: 1098264 - RNA, 22 nt, Human
uuccucagaaaauacuguccaa

SEQ ID NO: 1098265 - RNA, 22 nt, Human
gcugugcuugggaagaaucucu

SEQ ID NO: 1098266 - RNA, 22 nt, Human
aguucuucauaaccuuacugug

SEQ ID NO: 1098267 - RNA, 22 nt, Human
cacagacccagaagggaugaag

SEQ ID NO: 1098268 - RNA, 22 nt, Human
auaugagaguaaaugccgaucu

SEQ ID NO: 1098269 - RNA, 22 nt, Human
gaggccuggagccgccuaggcg

SEQ ID NO: 1098270 - RNA, 22 nt, Human
auaucacaguaguuguuuaguu

SEQ ID NO: 1098271 - RNA, 22 nt, Human
uucacagaauggcaaguuaugg

SEQ ID NO: 1098272 - RNA, 22 nt, Human
aucuugcauuugcuaaaaugca

SEQ ID NO: 1098273 - RNA, 21 nt, Human
ucucugugucuuuaagcugga

SEQ ID NO: 1098274 - RNA, 22 nt, Human
auacauauaugguacuuccugg

SEQ ID NO: 1098275 - RNA, 22 nt, Human
gcagagcuucuguccuucagga

SEQ ID NO: 1098276 - RNA, 22 nt, Human
aaaguuugucacuuggcuagaa

SEQ ID NO: 1098277 - RNA, 22 nt, Human
auguucuuccaaaucuguaaca

SEQ ID NO: 1098278 - RNA, 22 nt, Human
uagcacaucuggcgcuuauagg

SEQ ID NO: 1098279 - RNA, 22 nt, Human
ucuuuguaaaugccuagcauaa

SEQ ID NO: 1098280 - RNA, 22 nt, Human
cagugguuauacuuacuguuuc

SEQ ID NO: 1098281 - RNA, 22 nt, Human
auuauauaggacuugcccuucc

SEQ ID NO: 1098282 - RNA, 22 nt, Human
agguaugagauaaaucaaugaa

SEQ ID NO: 1098283 - RNA, 22 nt, Human
aguuauuacucuuuaacauauu

SEQ ID NO: 1098284 - RNA, 22 nt, Human
aucugcuuuugagaauuuacuu

SEQ ID NO: 1098285 - RNA, 22 nt, Human
aggccagaaauuuggaguaugu

SEQ ID NO: 1098286 - RNA, 22 nt, Human
cuuagcaugugguguccuugua

SEQ ID NO: 1098287 - RNA, 22 nt, Human
ucacauuuuauaucucugguuu

SEQ ID NO: 1098288 - RNA, 22 nt, Human
ugaaaggugacauuucuuggau

SEQ ID NO: 1098289 - RNA, 22 nt, Human
uugagaagaauguguugaguuu

SEQ ID NO: 1098290 - RNA, 22 nt, Human
aguaaaaauugaggugcaaaau

SEQ ID NO: 1098291 - RNA, 22 nt, Human
aagcaauauacugauaugauua

SEQ ID NO: 1098292 - RNA, 22 nt, Human
aguauaaagugguuuucagcac

SEQ ID NO: 1098293 - RNA, 23 nt, Human
ucucaggacacacaugucuauca

SEQ ID NO: 1098294 - RNA, 22 nt, Human
ugaaacauugcacuguaugaau

SEQ ID NO: 1098295 - RNA, 22 nt, Human
cucagagaggcaguggaaguca

SEQ ID NO: 1098296 - RNA, 19 nt, Human
auguaugaggucuucugcu

SEQ ID NO: 1098297 - RNA, 22 nt, Human
ucaugaacaucucaaauaacca

SEQ ID NO: 1098298 - RNA, 22 nt, Human
uauaucaccaaaaacaguucug

SEQ ID NO: 1098299 - RNA, 22 nt, Human
uuggaaauggcuguaguuauga

SEQ ID NO: 1098300 - RNA, 22 nt, Human
auucugucuaagcuggcuacgu

SEQ ID NO: 1098301 - RNA, 22 nt, Human
uguaaaaccaaaucaaucuagu

SEQ ID NO: 1098302 - RNA, 22 nt, Human
caggauagaaaggccauggagu

SEQ ID NO: 1098303 - RNA, 22 nt, Human
uugauuaaacaggcauauucaa

SEQ ID NO: 1098304 - RNA, 22 nt, Human
ugcccacauggugccauggcca

SEQ ID NO: 1098305 - RNA, 22 nt, Human
ccucaggauacaggagccacag

SEQ ID NO: 1098306 - RNA, 22 nt, Human
aagcaccucuaugauugcuuuu

SEQ ID NO: 1098307 - RNA, 22 nt, Human
aaucauucuuauuucacagcaa

SEQ ID NO: 1098308 - RNA, 23 nt, Human
uugaaagguagcuggcagcuaga

SEQ ID NO: 1098309 - RNA, 20 nt, Human
cuguggaauuuuaccaugcg

SEQ ID NO: 1098310 - RNA, 22 nt, Human
auguagaagcugacagugcugu

SEQ ID NO: 1098311 - RNA, 22 nt, Human
uuuaaauucugucugccgcuua

SEQ ID NO: 1098312 - RNA, 22 nt, Human
agagugucugguagcugcucug

SEQ ID NO: 1098313 - RNA, 22 nt, Human
acuucacagauauuuauuuggu

SEQ ID NO: 1098314 - RNA, 22 nt, Human
ugucuucaguaaaauacacuau

SEQ ID NO: 1098315 - RNA, 22 nt, Human
uuacacaacaucuguauuauua

SEQ ID NO: 1098316 - RNA, 22 nt, Human
uguauaaaccauggacagcuuu

SEQ ID NO: 1098317 - RNA, 22 nt, Human
auuaaauuagcaaacugugaaa

SEQ ID NO: 1098318 - RNA, 22 nt, Human
guucuucagcauuagaagucau

SEQ ID NO: 1098319 - RNA, 22 nt, Human
accgaaggaaacuggaaccguu

SEQ ID NO: 1098320 - RNA, 22 nt, Human
uuauuucauugauuucuaagac

SEQ ID NO: 1098321 - RNA, 22 nt, Human
gcuuugaagacuuuuccagggu

SEQ ID NO: 1098322 - RNA, 22 nt, Human
ccucacugcuauguguuugcuc

SEQ ID NO: 1098323 - RNA, 22 nt, Human
augcuguguauuuuacucuuuc

SEQ ID NO: 1098324 - RNA, 22 nt, Human
guugaaagagcauggacuugaa

SEQ ID NO: 1098325 - RNA, 22 nt, Human
uuuguaaauagcaguacucaug

SEQ ID NO: 1098326 - RNA, 22 nt, Human
agccuauuccaggaugagcuca

SEQ ID NO: 1098327 - RNA, 22 nt, Human
caagauaagaucauuuacacua

SEQ ID NO: 1098328 - RNA, 22 nt, Human
aaggccagccugagagcuaaca

SEQ ID NO: 1098329 - RNA, 22 nt, Human
cagaaggcuuuguggaguagac

SEQ ID NO: 1098330 - RNA, 22 nt, Human
guuguuuuuguucucuauagcu

SEQ ID NO: 1098331 - RNA, 22 nt, Human
uauaaaguuucgaaagauguau

SEQ ID NO: 1098332 - RNA, 22 nt, Human
aguucucagcuuaguaugcugu

SEQ ID NO: 1098333 - RNA, 22 nt, Human
caaaucuauauguugauauucu

SEQ ID NO: 1098334 - RNA, 22 nt, Human
acuggcagcagcagcccuuggg

SEQ ID NO: 1098335 - RNA, 22 nt, Human
ucagagagugcaaaauauagcu

SEQ ID NO: 1098336 - RNA, 22 nt, Human
auaaauaucacuguugucccuc

SEQ ID NO: 1098337 - RNA, 22 nt, Human
auugaaagauuuugggcucaug

SEQ ID NO: 1098338 - RNA, 20 nt, Human
uugauucaagggcugaugga

SEQ ID NO: 1098339 - RNA, 22 nt, Human
uaggaaauggcucaguuacugc

SEQ ID NO: 1098340 - RNA, 22 nt, Human
uucuuugaguuaguacagucca

SEQ ID NO: 1098341 - RNA, 19 nt, Human
ucugccucuggucaggcuc

SEQ ID NO: 1098342 - RNA, 22 nt, Human
uucuucuuuaucucaguauccu

SEQ ID NO: 1098343 - RNA, 22 nt, Human
ugguaauuaauuugauagguuc

SEQ ID NO: 1098344 - RNA, 22 nt, Human
ggccagcagucacagggucaga

SEQ ID NO: 1098345 - RNA, 22 nt, Human
uuuaaauuauaguuaaugucug

SEQ ID NO: 1098346 - RNA, 22 nt, Human
uuugacaugcaaagcacuuuag

SEQ ID NO: 1098347 - RNA, 22 nt, Human
caggguggggaaauagcgcccu

SEQ ID NO: 1098348 - RNA, 22 nt, Human
uggaguucauccaugacagcuu

SEQ ID NO: 1098349 - RNA, 22 nt, Human
gagaacucagacgcaggucaug

SEQ ID NO: 1098350 - RNA, 17 nt, Human
gucauucucagaaaaug

SEQ ID NO: 1098351 - RNA, 22 nt, Human
uguuuuaagagcgcacuuuaua

SEQ ID NO: 1098352 - RNA, 23 nt, Human
uuuuccuguggagacaugacugg

SEQ ID NO: 1098353 - RNA, 22 nt, Human
caaauguauucucacuucaggg

SEQ ID NO: 1098354 - RNA, 22 nt, Human
ucagggugaaccaggcaggaau

SEQ ID NO: 1098355 - RNA, 22 nt, Human
cucuuucugauucgcugggacc

SEQ ID NO: 1098356 - RNA, 22 nt, Human
uucuuauagaagcaaccauugu

SEQ ID NO: 1098357 - RNA, 22 nt, Human
acaugcauaggagaagucuuua

SEQ ID NO: 1098358 - RNA, 22 nt, Human
uucugagacaauugagagucua

SEQ ID NO: 1098359 - RNA, 22 nt, Human
ucagaaaagguagcugugacaa

SEQ ID NO: 1098360 - RNA, 22 nt, Human
uuuggaaugguaccuucaguug

SEQ ID NO: 1098361 - RNA, 22 nt, Human
cuuuggaauauuuuauugagaa

SEQ ID NO: 1098362 - RNA, 22 nt, Human
uucaugaaacuuaacuguuggg

SEQ ID NO: 1098363 - RNA, 22 nt, Human
ccacagagacaggguccuugcu

SEQ ID NO: 1098364 - RNA, 22 nt, Human
ucagaaagaacacaggcaguag

SEQ ID NO: 1098365 - RNA, 20 nt, Human
ucaggaugugcugagugaag

SEQ ID NO: 1098366 - RNA, 22 nt, Human
uucuuuuccuacacagcgauuu

SEQ ID NO: 1098367 - RNA, 22 nt, Human
aauaacuucauguaacauuuaa

SEQ ID NO: 1098368 - RNA, 22 nt, Human
aaugcauauguaggcaagcagu

SEQ ID NO: 1098369 - RNA, 22 nt, Human
uauggaaagcucuuuuugauug

SEQ ID NO: 1098370 - RNA, 22 nt, Human
uaugagaaucugcaguaugcuu

SEQ ID NO: 1098371 - RNA, 22 nt, Human
auuucauugaaguuaauucuuc

SEQ ID NO: 1098372 - RNA, 19 nt, Human
caggaugaucccaugacac

SEQ ID NO: 1098373 - RNA, 22 nt, Human
uugguuuaggaacuggcuugga

SEQ ID NO: 1098374 - RNA, 22 nt, Human
uuaaaugaggcugauguagauu

SEQ ID NO: 1098375 - RNA, 22 nt, Human
ucucaggaauagaguggcagca

SEQ ID NO: 1098376 - RNA, 22 nt, Human
uguugaagauaaaguucucauu

SEQ ID NO: 1098377 - RNA, 22 nt, Human
uuucuucacaggguauugggug

SEQ ID NO: 1098378 - RNA, 22 nt, Human
ccagaagaccccguccaccucc

SEQ ID NO: 1098379 - RNA, 22 nt, Human
aaaggccacuugaaggauuuuu

SEQ ID NO: 1098380 - RNA, 22 nt, Human
cacaaauggccguguucaaaga

SEQ ID NO: 1098381 - RNA, 20 nt, Human
gaguuccccauuucuccugg

SEQ ID NO: 1098382 - RNA, 22 nt, Human
uaaaugaagaaauggagauugu

SEQ ID NO: 1098383 - RNA, 22 nt, Human
acaacauucuuaaauacacuga

SEQ ID NO: 1098384 - RNA, 22 nt, Human
aauaucuucuaaggauagaacu

SEQ ID NO: 1098385 - RNA, 22 nt, Human
aaagauaauguuuccuuauucu

SEQ ID NO: 1098386 - RNA, 22 nt, Human
cauucucaauaguagaugagua

SEQ ID NO: 1098387 - RNA, 22 nt, Human
caaggccaugagcagcgagugu

SEQ ID NO: 1098388 - RNA, 22 nt, Human
ggcucagacucccaggcccucu

SEQ ID NO: 1098389 - RNA, 22 nt, Human
aagacugucuuuucugagugac

SEQ ID NO: 1098390 - RNA, 22 nt, Human
augcuguggggagugaggguag

SEQ ID NO: 1098391 - RNA, 22 nt, Human
ucugucuucaucagcaugugau

SEQ ID NO: 1098392 - RNA, 19 nt, Human
uaaggccaaaaguaagugu

SEQ ID NO: 1098393 - RNA, 22 nt, Human
ucucuucucuagugagcaacug

SEQ ID NO: 1098394 - RNA, 22 nt, Human
aacaugcucuguuucuuggaug

SEQ ID NO: 1098395 - RNA, 22 nt, Human
aauacuauguugugacacauga

SEQ ID NO: 1098396 - RNA, 22 nt, Human
uugauacaggcucuauuucauc

SEQ ID NO: 1098397 - RNA, 22 nt, Human
uucuuuucuuuaggcauugugu

SEQ ID NO: 1098398 - RNA, 22 nt, Human
uucuuuugggaauuacguaugc

SEQ ID NO: 1098399 - RNA, 21 nt, Human
ugaaugaggaggauggcauuu

SEQ ID NO: 1098400 - RNA, 22 nt, Human
ccaggcugccgaggaaagaaag

SEQ ID NO: 1098401 - RNA, 22 nt, Human
uuccuuaggcuguuugcagugc

SEQ ID NO: 1098402 - RNA, 22 nt, Human
uguuccaauaaggaguugaaau

SEQ ID NO: 1098403 - RNA, 22 nt, Human
auugcuguacacuucuagaucu

SEQ ID NO: 1098404 - RNA, 22 nt, Human
uuugaaaguucuucugacacua

SEQ ID NO: 1098405 - RNA, 23 nt, Human
uucuuucaagaaguucacagugc

SEQ ID NO: 1098406 - RNA, 22 nt, Human
cucaggaugucggugacuauug

SEQ ID NO: 1098407 - RNA, 22 nt, Human
auucuuaauugccaugcuguau

SEQ ID NO: 1098408 - RNA, 22 nt, Human
aaaauaacuucuacuauuugca

SEQ ID NO: 1098409 - RNA, 22 nt, Human
ugaaaugauguacaagaaggca

SEQ ID NO: 1098410 - RNA, 22 nt, Human
auccaugauuaguaggauaaag

SEQ ID NO: 1098411 - RNA, 19 nt, Human
agaaguuagacauugcaau

SEQ ID NO: 1098412 - RNA, 22 nt, Human
cuggcugggagcgagcugcuca

SEQ ID NO: 1098413 - RNA, 22 nt, Human
aaauugcauuuuaaagguagau

SEQ ID NO: 1098414 - RNA, 22 nt, Human
cugcuguguuggcauuggauag

SEQ ID NO: 1098415 - RNA, 22 nt, Human
aucauucugauggucaaugcua

SEQ ID NO: 1098416 - RNA, 22 nt, Human
aaggaaccauuugugugcaugg

SEQ ID NO: 1098417 - RNA, 22 nt, Human
uguagaaccuguuuauuauaga

SEQ ID NO: 1098418 - RNA, 22 nt, Human
ugaaacuuauaagaauaugaau

SEQ ID NO: 1098419 - RNA, 22 nt, Human
auuucauagauuguaaaucccu

SEQ ID NO: 1098420 - RNA, 22 nt, Human
uucucagagcucacuguaguaa

SEQ ID NO: 1098421 - RNA, 23 nt, Human
ugaguucucaucuuggcuucuau

SEQ ID NO: 1098422 - RNA, 22 nt, Human
uauuucagcccuacuacuuggc

SEQ ID NO: 1098423 - RNA, 19 nt, Human
ugcuagaaauucugugacu

SEQ ID NO: 1098424 - RNA, 20 nt, Human
uacagaaugcaauaaaaugg

SEQ ID NO: 1098425 - RNA, 22 nt, Human
aaauauagcaauuaugccuacu

SEQ ID NO: 1098426 - RNA, 22 nt, Human
gauugaaacauaggcagucgag

SEQ ID NO: 1098427 - RNA, 22 nt, Human
uagugcuuaauaaauuucagaa

SEQ ID NO: 1098428 - RNA, 22 nt, Human
uuuggaauguaguuuaaucauc

SEQ ID NO: 1098429 - RNA, 22 nt, Human
aaaggccacacagagcagggag

SEQ ID NO: 1098430 - RNA, 22 nt, Human
uuucucuguucucuaacuguaa

SEQ ID NO: 1098431 - RNA, 22 nt, Human
aaaauauuuuagggccaggaga

SEQ ID NO: 1098432 - RNA, 22 nt, Human
ucucugaguaagugacaguuca

SEQ ID NO: 1098433 - RNA, 19 nt, Human
uuucccagcccuugcugug

SEQ ID NO: 1098434 - RNA, 22 nt, Human
ucuucaauuagauuuaccaauu

SEQ ID NO: 1098435 - RNA, 22 nt, Human
gaaaggccauuucugaggguuu

SEQ ID NO: 1098436 - RNA, 22 nt, Human
uagcauuaucugucuuaucauu

SEQ ID NO: 1098437 - RNA, 22 nt, Human
uucaacuauuaugaauaaaauu

SEQ ID NO: 1098438 - RNA, 22 nt, Human
ugaaaugauaucugauaacaaa

SEQ ID NO: 1098439 - RNA, 22 nt, Human
guacauuucucuuguucuuauu

SEQ ID NO: 1098440 - RNA, 17 nt, Human
gccucugcuugugucau

SEQ ID NO: 1098441 - RNA, 22 nt, Human
uaaggccaaguucauauacaac

SEQ ID NO: 1098442 - RNA, 22 nt, Human
uuugaaguucccccauaucaga

SEQ ID NO: 1098443 - RNA, 22 nt, Human
cugcaucaguggauaugauggu

SEQ ID NO: 1098444 - RNA, 22 nt, Human
aucugucagccugggauuaggg

SEQ ID NO: 1098445 - RNA, 18 nt, Human
cauaauuuucuuucuuua

SEQ ID NO: 1098446 - RNA, 22 nt, Human
uagcauuucacugaucuucacu

SEQ ID NO: 1098447 - RNA, 22 nt, Human
ccuuaaauucuccauuugaaag

SEQ ID NO: 1098448 - RNA, 22 nt, Human
aauuuuaagcauaugacugguu

SEQ ID NO: 1098449 - RNA, 19 nt, Human
cccucuugcacaaagcaaa

SEQ ID NO: 1098450 - RNA, 19 nt, Human
aucugccuuagugcugcug

SEQ ID NO: 1098451 - RNA, 22 nt, Human
uuuacaaccucauauucugaug

SEQ ID NO: 1098452 - RNA, 22 nt, Human
ucucagucagccuugauguccc

SEQ ID NO: 1098453 - RNA, 22 nt, Human
ucaacugcaaguuugcuuaguu

SEQ ID NO: 1098454 - RNA, 22 nt, Human
ucuuugaacuuggcugaucucu

SEQ ID NO: 1098455 - RNA, 22 nt, Human
augcugugaaaaagaaggcuga

SEQ ID NO: 1098456 - RNA, 20 nt, Human
cucuccucacccgugucagg

SEQ ID NO: 1098457 - RNA, 22 nt, Human
aaucuuagguuuggcuucaucu

SEQ ID NO: 1098458 - RNA, 17 nt, Human
agguauaaaaugguagc

SEQ ID NO: 1098459 - RNA, 22 nt, Human
cacaauuuccuugcuucacuuu

SEQ ID NO: 1098460 - RNA, 22 nt, Human
ccaugagcuuccuauauagggu

SEQ ID NO: 1098461 - RNA, 22 nt, Human
ugaguucucacccauucuucuu

SEQ ID NO: 1098462 - RNA, 22 nt, Human
cagucucagaggugggaguggg

SEQ ID NO: 1098463 - RNA, 22 nt, Human
auuuguugcuagcagcacugau

SEQ ID NO: 1098464 - RNA, 22 nt, Human
uaauaguuaugguugguucuca

SEQ ID NO: 1098465 - RNA, 22 nt, Human
guccucugaaguugugcaaugc

SEQ ID NO: 1098466 - RNA, 20 nt, Human
ucuguacacucaucuucugc

SEQ ID NO: 1098467 - RNA, 22 nt, Human
ggaaaugacuuggugcuucguu

SEQ ID NO: 1098468 - RNA, 22 nt, Human
aguggaccagaagacugaagcu

SEQ ID NO: 1098469 - RNA, 17 nt, Human
gagagcugcugcuuccg

SEQ ID NO: 1098470 - RNA, 22 nt, Human
cagugcugggcagaggagagcg

SEQ ID NO: 1098471 - RNA, 22 nt, Human
cuguaugaggaucagacuggac

SEQ ID NO: 1098472 - RNA, 22 nt, Human
uaugacauuggccaaguucugu

SEQ ID NO: 1098473 - RNA, 22 nt, Human
ucugggaaccagugcggcuggg

SEQ ID NO: 1098474 - RNA, 22 nt, Human
ccugcuguucuguuuagugaac

SEQ ID NO: 1098475 - RNA, 22 nt, Human
aguaugaaccuggguucuggau

SEQ ID NO: 1098476 - RNA, 22 nt, Human
uguaugaagguuuaccugcugu

SEQ ID NO: 1098477 - RNA, 22 nt, Human
aagcaauagcaacaacuuuaca

SEQ ID NO: 1098478 - RNA, 21 nt, Human
ucuugaaaauuguagcaguuu

SEQ ID NO: 1098479 - RNA, 22 nt, Human
aaaggccaauaaagacaagcug

SEQ ID NO: 1098480 - RNA, 22 nt, Human
auauuucaugggguuccauacu

SEQ ID NO: 1098481 - RNA, 22 nt, Human
gguuauauaauucagugcuuuc

SEQ ID NO: 1098482 - RNA, 22 nt, Human
uauuuuaaagacugccagccua

SEQ ID NO: 1098483 - RNA, 22 nt, Human
ccugcuguaaugugucuuuauu

SEQ ID NO: 1098484 - RNA, 22 nt, Human
uugaauuauaagugugucuacu

SEQ ID NO: 1098485 - RNA, 22 nt, Human
ccuggacucaggcugugggcac

SEQ ID NO: 1098486 - RNA, 22 nt, Human
gguuugaacagcuuuggagaag

SEQ ID NO: 1098487 - RNA, 22 nt, Human
auuuccauagagcgucucacag

SEQ ID NO: 1098488 - RNA, 22 nt, Human
auucacagaauaguuuuaccag

SEQ ID NO: 1098489 - RNA, 22 nt, Human
uucugucucuguguuuacauua

SEQ ID NO: 1098490 - RNA, 22 nt, Human
uaaugcuuaacagcuggcuuuu

SEQ ID NO: 1098491 - RNA, 22 nt, Human
ccucaggaaccacauugcugcu

SEQ ID NO: 1098492 - RNA, 22 nt, Human
acacaaguucuaaagauugcgc

SEQ ID NO: 1098493 - RNA, 22 nt, Human
uucaggauuauacucucuuccc

SEQ ID NO: 1098494 - RNA, 22 nt, Human
ucaugcuuauugcauauuugga

SEQ ID NO: 1098495 - RNA, 22 nt, Human
ucuuuuggaaaugaugugcagg

SEQ ID NO: 1098496 - RNA, 22 nt, Human
agaccaugggcucugaagagca

SEQ ID NO: 1098497 - RNA, 22 nt, Human
ugcuggaauaauuucauguuaa

SEQ ID NO: 1098498 - RNA, 22 nt, Human
uuaugauuugccacagauuggu

SEQ ID NO: 1098499 - RNA, 22 nt, Human
uugcagcuuagugauguuaucu

SEQ ID NO: 1098500 - RNA, 20 nt, Human
aauuuacucacagaaugaau

SEQ ID NO: 1098501 - RNA, 22 nt, Human
uugaacaguccuaagagacccu

SEQ ID NO: 1098502 - RNA, 22 nt, Human
gucugucaucugagauggagug

SEQ ID NO: 1098503 - RNA, 23 nt, Human
auggaagucacuguuuucuuguc

SEQ ID NO: 1098504 - RNA, 22 nt, Human
ucuccucuauuucuguauguau

SEQ ID NO: 1098505 - RNA, 22 nt, Human
acuauaaaaggauaaaccagaa

SEQ ID NO: 1098506 - RNA, 22 nt, Human
aaucuguuuaguucugcguaug

SEQ ID NO: 1098507 - RNA, 20 nt, Human
ccagaagagaugaucaucca

SEQ ID NO: 1098508 - RNA, 22 nt, Human
auuaaaauuccaagguaugcca

SEQ ID NO: 1098509 - RNA, 23 nt, Human
ugugaaauuugaggucagugcuu

SEQ ID NO: 1098510 - RNA, 22 nt, Human
uaucuguugucuuuuacaugua

SEQ ID NO: 1098511 - RNA, 22 nt, Human
aauguaugggugagaaaguuga

SEQ ID NO: 1098512 - RNA, 22 nt, Human
auucuucacaaauauauagaag

SEQ ID NO: 1098513 - RNA, 22 nt, Human
gaucuucuauguaaugaagugu

SEQ ID NO: 1098514 - RNA, 22 nt, Human
gaggaaccaaaucagcuugcac

SEQ ID NO: 1098515 - RNA, 22 nt, Human
uuuuccuguccaggcaauuauu

SEQ ID NO: 1098516 - RNA, 22 nt, Human
ucugauuagcaguuuagggaaa

SEQ ID NO: 1098517 - RNA, 22 nt, Human
cagucucuugcuucauuaguug

SEQ ID NO: 1098518 - RNA, 22 nt, Human
aucaggauagugguuaccuggg

SEQ ID NO: 1098519 - RNA, 22 nt, Human
uauuuccagcaguaagaagaca

SEQ ID NO: 1098520 - RNA, 22 nt, Human
cuucucagucaccugugagucu

SEQ ID NO: 1098521 - RNA, 22 nt, Human
uugauagguuuuauguauaguu

SEQ ID NO: 1098522 - RNA, 22 nt, Human
caguucuuaauaccaugugguu

SEQ ID NO: 1098523 - RNA, 20 nt, Human
uauuuguauuugggaaaguu

SEQ ID NO: 1098524 - RNA, 22 nt, Human
augcuguggaugccuugcccca

SEQ ID NO: 1098525 - RNA, 22 nt, Human
uuauucuuuucuccagaauccc

SEQ ID NO: 1098526 - RNA, 22 nt, Human
uacaaguaaauuguagauacca

SEQ ID NO: 1098527 - RNA, 22 nt, Human
aucugccugagucuagguuuuc

SEQ ID NO: 1098528 - RNA, 22 nt, Human
uugcugugucugauggcugaga

SEQ ID NO: 1098529 - RNA, 22 nt, Human
ugugauauuugaguauugucaa

SEQ ID NO: 1098530 - RNA, 20 nt, Human
ucucuucuggggagauaaaa

SEQ ID NO: 1098531 - RNA, 22 nt, Human
cugcagagcaaguaacauccuc

SEQ ID NO: 1098532 - RNA, 23 nt, Human
ggagugcaauggcgccaucucgg

SEQ ID NO: 1098533 - RNA, 22 nt, Human
gcucagagcuugaaguuccacu

SEQ ID NO: 1098534 - RNA, 22 nt, Human
cucaacagcucugccauacucc

SEQ ID NO: 1098535 - RNA, 22 nt, Human
cauuuguaggaugcuucuuguu

SEQ ID NO: 1098536 - RNA, 22 nt, Human
acucaggaagaaagcagcuggu

SEQ ID NO: 1098537 - RNA, 22 nt, Human
aaacacagauuucuuuguccca

SEQ ID NO: 1098538 - RNA, 22 nt, Human
acaacauuauacauagaaagcu

SEQ ID NO: 1098539 - RNA, 22 nt, Human
cauucacaaagcugauugaugg

SEQ ID NO: 1098540 - RNA, 22 nt, Human
gcuguguuuuauguuagguuaa

SEQ ID NO: 1098541 - RNA, 22 nt, Human
ucucaggaagauuagggcuaag

SEQ ID NO: 1098542 - RNA, 22 nt, Human
cugcugugcacccaggaaggcu

SEQ ID NO: 1098543 - RNA, 23 nt, Human
aaacuacauuuauaguuuuucuc

SEQ ID NO: 1098544 - RNA, 22 nt, Human
uguaugaagacuucuucugugu

SEQ ID NO: 1098545 - RNA, 22 nt, Human
auuugcuucugugaaaucaagu

SEQ ID NO: 1098546 - RNA, 22 nt, Human
uaacacauuaguucuccuagau

SEQ ID NO: 1098547 - RNA, 22 nt, Human
acuguagcugccacuggaugca

SEQ ID NO: 1098548 - RNA, 22 nt, Human
guguauaaugcuguuuguacau

SEQ ID NO: 1098549 - RNA, 22 nt, Human
cucaggauuuacuaauuucaag

SEQ ID NO: 1098550 - RNA, 22 nt, Human
cauaauuucuguaucagcacca

SEQ ID NO: 1098551 - RNA, 22 nt, Human
ugccuguguugauuacuuuguc

SEQ ID NO: 1098552 - RNA, 22 nt, Human
gaggcugauucggggaacagca

SEQ ID NO: 1098553 - RNA, 22 nt, Human
acauauuuugaaagcuuucuaa

SEQ ID NO: 1098554 - RNA, 22 nt, Human
ucacauuucugauuauaccaaa

SEQ ID NO: 1098555 - RNA, 22 nt, Human
aucuacccacugaacacaauau

SEQ ID NO: 1098556 - RNA, 22 nt, Human
ucucaagaucucaagauggccc

SEQ ID NO: 1098557 - RNA, 22 nt, Human
auuauuauuguugauguuaggg

SEQ ID NO: 1098558 - RNA, 22 nt, Human
uaaggccagcaugaaugcagca

SEQ ID NO: 1098559 - RNA, 22 nt, Human
uuugaauagaggccccucagaa

SEQ ID NO: 1098560 - RNA, 22 nt, Human
ugcugcuguuuccuacaucuca

SEQ ID NO: 1098561 - RNA, 22 nt, Human
gaaggccauugcguccugggau

SEQ ID NO: 1098562 - RNA, 22 nt, Human
ucacagacauggugagguaaca

SEQ ID NO: 1098563 - RNA, 22 nt, Human
auucuucacauggauaggaucu

SEQ ID NO: 1098564 - RNA, 22 nt, Human
uuucaucuucccagagaccuug

SEQ ID NO: 1098565 - RNA, 22 nt, Human
ucuuugcagaauuuaacuuugc

SEQ ID NO: 1098566 - RNA, 22 nt, Human
uucuccucuguuggccuucccu

SEQ ID NO: 1098567 - RNA, 22 nt, Human
cacagcauaaugaaauauacuu

SEQ ID NO: 1098568 - RNA, 19 nt, Human
caagugaagccugggaugg

SEQ ID NO: 1098569 - RNA, 22 nt, Human
ugucaaauuuuuauugcaguau

SEQ ID NO: 1098570 - RNA, 22 nt, Human
ugugaaaagggcuuuguacaaa

SEQ ID NO: 1098571 - RNA, 18 nt, Human
ugcuggguaacuguaugg

SEQ ID NO: 1098572 - RNA, 20 nt, Human
uuucaguugguuaauggcau

SEQ ID NO: 1098573 - RNA, 22 nt, Human
guggaauguccuugaucauaag

SEQ ID NO: 1098574 - RNA, 21 nt, Human
cucaggaucuuauauauuagu

SEQ ID NO: 1098575 - RNA, 22 nt, Human
augcugugccuggaaagcggcu

SEQ ID NO: 1098576 - RNA, 22 nt, Human
aaauacauacacuguacguggc

SEQ ID NO: 1098577 - RNA, 22 nt, Human
uucucacuauguauguagauug

SEQ ID NO: 1098578 - RNA, 22 nt, Human
acuuaaaaagaaucuuuucacg

SEQ ID NO: 1098579 - RNA, 22 nt, Human
cuuacagagaagaaaauguagu

SEQ ID NO: 1098580 - RNA, 22 nt, Human
augcugugauuguagaaauauu

SEQ ID NO: 1098581 - RNA, 22 nt, Human
ugagaaaugggucugcugaaga

SEQ ID NO: 1098582 - RNA, 22 nt, Human
uaauuucuagggacuaaggugc

SEQ ID NO: 1098583 - RNA, 21 nt, Human
uuugaaagugggugauucuuu

SEQ ID NO: 1098584 - RNA, 22 nt, Human
cucacugugaccucagcagaca

SEQ ID NO: 1098585 - RNA, 22 nt, Human
uaugaacuguacuguacuaagc

SEQ ID NO: 1098586 - RNA, 21 nt, Human
ccugcugugaucuuagugagu

SEQ ID NO: 1098587 - RNA, 22 nt, Human
uucuucaauuuuccauauacug

SEQ ID NO: 1098588 - RNA, 22 nt, Human
gaaaggccagcucacagaugag

SEQ ID NO: 1098589 - RNA, 22 nt, Human
uuugaaaggaauuaggaugaca

SEQ ID NO: 1098590 - RNA, 22 nt, Human
aaauauguaagauuagcacuag

SEQ ID NO: 1098591 - RNA, 22 nt, Human
uucugugauugacauguggcuu

SEQ ID NO: 1098592 - RNA, 22 nt, Human
cauuuacuuaaaucuuuacaag

SEQ ID NO: 1098593 - RNA, 22 nt, Human
auguuauggcucaaacauuugg

SEQ ID NO: 1098594 - RNA, 22 nt, Human
cucauaaugugacuguauuuga

SEQ ID NO: 1098595 - RNA, 22 nt, Human
guuaucaugcuucaucaucacu

SEQ ID NO: 1098596 - RNA, 22 nt, Human
aagcaccugcaguugacaaaaa

SEQ ID NO: 1098597 - RNA, 22 nt, Human
uucuuaaaacuuauggacaggu

SEQ ID NO: 1098598 - RNA, 22 nt, Human
uuucacauuagauaugucauuu

SEQ ID NO: 1098599 - RNA, 22 nt, Human
cucaggauuaaggaaucuaaau

SEQ ID NO: 1098600 - RNA, 22 nt, Human
uacagcuaggcaaaaaugacau

SEQ ID NO: 1098601 - RNA, 23 nt, Human
ucuccuccuagauacagucaugg

SEQ ID NO: 1098602 - RNA, 20 nt, Human
ucacuaguaaccaucugcuu

SEQ ID NO: 1098603 - RNA, 22 nt, Human
aagcuggagaguuaggugaaua

SEQ ID NO: 1098604 - RNA, 17 nt, Human
acagagcacaucaagau

SEQ ID NO: 1098605 - RNA, 22 nt, Human
acagaauugaaaguauaaucug

SEQ ID NO: 1098606 - RNA, 21 nt, Human
ucacaucuauguuaagcaaac

SEQ ID NO: 1098607 - RNA, 22 nt, Human
cagcauuuaucuuguagcagga

SEQ ID NO: 1098608 - RNA, 22 nt, Human
caguuucuacgaaggucaaccc

SEQ ID NO: 1098609 - RNA, 22 nt, Human
uaauacagaaguguauuaaaau

SEQ ID NO: 1098610 - RNA, 22 nt, Human
uuucuuaguccuagagugauuu

SEQ ID NO: 1098611 - RNA, 22 nt, Human
auaaucuuucuuuuccagauag

SEQ ID NO: 1098612 - RNA, 22 nt, Human
aaauauagugacacuuauaguc

SEQ ID NO: 1098613 - RNA, 22 nt, Human
aaauuuucagagcacuagagaa

SEQ ID NO: 1098614 - RNA, 22 nt, Human
uauugacaauuugugaaacuau

SEQ ID NO: 1098615 - RNA, 21 nt, Human
uuucuucacuuugccccaugu

SEQ ID NO: 1098616 - RNA, 22 nt, Human
cauaauuuuccaugguuugcua

SEQ ID NO: 1098617 - RNA, 22 nt, Human
uugaaagaagaagcugcgaugu

SEQ ID NO: 1098618 - RNA, 22 nt, Human
ucuuugaauucaaacuguucaa

SEQ ID NO: 1098619 - RNA, 22 nt, Human
ucaggaugaccacgagccucua

SEQ ID NO: 1098620 - RNA, 22 nt, Human
ucacaguuauagucuguagaau

SEQ ID NO: 1098621 - RNA, 22 nt, Human
acaguacauaauccugagucug

SEQ ID NO: 1098622 - RNA, 22 nt, Human
gcagcugaaagggaucucuaca

SEQ ID NO: 1098623 - RNA, 22 nt, Human
gaaccucagugaaacuggaggu

SEQ ID NO: 1098624 - RNA, 22 nt, Human
auucuucaaagagugucaaagu

SEQ ID NO: 1098625 - RNA, 22 nt, Human
uuuccucacuucaugagaguuu

SEQ ID NO: 1098626 - RNA, 22 nt, Human
ccagaccacccuggccaugcac

SEQ ID NO: 1098627 - RNA, 22 nt, Human
cagucucuaaaucaaucugaau

SEQ ID NO: 1098628 - RNA, 22 nt, Human
ucuucacauggaacaugaagcu

SEQ ID NO: 1098629 - RNA, 22 nt, Human
ugagacaguuuuucuauuucca

SEQ ID NO: 1098630 - RNA, 22 nt, Human
uugcagcugcaguaaauguuca

SEQ ID NO: 1098631 - RNA, 22 nt, Human
agcacauucugccuugcuuugc

SEQ ID NO: 1098632 - RNA, 22 nt, Human
uuguaugagcuccaggaacuca

SEQ ID NO: 1098633 - RNA, 22 nt, Human
ucacuguugaccuggaaguggg

SEQ ID NO: 1098634 - RNA, 22 nt, Human
aaugauuuccccuacacagaag

SEQ ID NO: 1098635 - RNA, 22 nt, Human
acauacuuaugcuaaaaauaua

SEQ ID NO: 1098636 - RNA, 22 nt, Human
uuggcaguaaaagaaaaugcuu

SEQ ID NO: 1098637 - RNA, 22 nt, Human
uucuucuccuaaggagaguccu

SEQ ID NO: 1098638 - RNA, 22 nt, Human
uuggaaauacagcaguuacuuu

SEQ ID NO: 1098639 - RNA, 22 nt, Human
uuugaaauaugaggcauuauga

SEQ ID NO: 1098640 - RNA, 20 nt, Human
augauuuugcacuaacuuca

SEQ ID NO: 1098641 - RNA, 22 nt, Human
ucacaaauagcuauauuaagga

SEQ ID NO: 1098642 - RNA, 22 nt, Human
gcaguucuacuuauccauagac

SEQ ID NO: 1098643 - RNA, 21 nt, Human
uucuccccagcgaauccucgg

SEQ ID NO: 1098644 - RNA, 22 nt, Human
aaauuauuacaagcuaguuggc

SEQ ID NO: 1098645 - RNA, 22 nt, Human
auuuagaacuuuguuugccaau

SEQ ID NO: 1098646 - RNA, 22 nt, Human
aacaguaaagacagaauuuauc

SEQ ID NO: 1098647 - RNA, 22 nt, Human
uuacaguuuaguccaagccaga

SEQ ID NO: 1098648 - RNA, 19 nt, Human
gugcuuuuuaagagcucag

SEQ ID NO: 1098649 - RNA, 23 nt, Human
ucaggauauugugugccaaggug

SEQ ID NO: 1098650 - RNA, 22 nt, Human
cuguuaaucugcuugcaugaug

SEQ ID NO: 1098651 - RNA, 22 nt, Human
ccaugagccaggcugaggaagc

SEQ ID NO: 1098652 - RNA, 19 nt, Human
ucuuucauuucuagcucug

SEQ ID NO: 1098653 - RNA, 22 nt, Human
uugcauuuuuagaugcuucugu

SEQ ID NO: 1098654 - RNA, 22 nt, Human
gaggacaggagacucacuguuu

SEQ ID NO: 1098655 - RNA, 22 nt, Human
gucuauauauugcuugaauaau

SEQ ID NO: 1098656 - RNA, 22 nt, Human
cuuaaagaaauugaggagagga

SEQ ID NO: 1098657 - RNA, 22 nt, Human
uaacacauauuucaagaguagu

SEQ ID NO: 1098658 - RNA, 22 nt, Human
cauuuucagcacccaucugaaa

SEQ ID NO: 1098659 - RNA, 22 nt, Human
gaaaggugccccauaggcagga

SEQ ID NO: 1098660 - RNA, 22 nt, Human
auuaaauuaaguggcuaauuua

SEQ ID NO: 1098661 - RNA, 22 nt, Human
cuucuucagcacaauauugaug

SEQ ID NO: 1098662 - RNA, 22 nt, Human
cuugaaagcacuccuuugacug

SEQ ID NO: 1098663 - RNA, 22 nt, Human
ccagugcuaagguagccucugc

SEQ ID NO: 1098664 - RNA, 22 nt, Human
uuucaaacuuuacucuugaauc

SEQ ID NO: 1098665 - RNA, 22 nt, Human
cugcuguguggugaaacucagu

SEQ ID NO: 1098666 - RNA, 22 nt, Human
aagucuguuugagugucacacu

SEQ ID NO: 1098667 - RNA, 22 nt, Human
uuucuuguaagauguuuauuaa

SEQ ID NO: 1098668 - RNA, 22 nt, Human
aggcuggagggcaauggcaaga

SEQ ID NO: 1098669 - RNA, 22 nt, Human
uuaauuaaauucaugagcauug

SEQ ID NO: 1098670 - RNA, 22 nt, Human
gaaggccaagaggcuccaagau

SEQ ID NO: 1098671 - RNA, 22 nt, Human
uucugucauccuuucuagaugu

SEQ ID NO: 1098672 - RNA, 22 nt, Human
cucugcaugccuugcucagaca

SEQ ID NO: 1098673 - RNA, 22 nt, Human
gaaauauugggacucagagcuu

SEQ ID NO: 1098674 - RNA, 22 nt, Human
gccaucacauccaggcuaccuc

SEQ ID NO: 1098675 - RNA, 22 nt, Human
gauauguauugaaugaucauuu

SEQ ID NO: 1098676 - RNA, 22 nt, Human
uuugaaagagcugauacaugaa

SEQ ID NO: 1098677 - RNA, 22 nt, Human
ccacugaggcaggcaguaucua

SEQ ID NO: 1098678 - RNA, 21 nt, Human
uggagacucugguucuuugug

SEQ ID NO: 1098679 - RNA, 22 nt, Human
gagggagugccagagggccagc

SEQ ID NO: 1098680 - RNA, 21 nt, Human
acagucuccccagaucucucc

SEQ ID NO: 1098681 - RNA, 23 nt, Human
acaagauagggauaaaaagauaa

SEQ ID NO: 1098682 - RNA, 19 nt, Human
agggaguuuauauuugcac

SEQ ID NO: 1098683 - RNA, 22 nt, Human
aguaugaagauuauaauuuuuc

SEQ ID NO: 1098684 - RNA, 22 nt, Human
aaaauacuguggaguguugaaa

SEQ ID NO: 1098685 - RNA, 22 nt, Human
aaauuguugaucuacaguaagg

SEQ ID NO: 1098686 - RNA, 22 nt, Human
ucuuagaaugucaacugauguu

SEQ ID NO: 1098687 - RNA, 22 nt, Human
uuggaaagauuauuauuaugaa

SEQ ID NO: 1098688 - RNA, 22 nt, Human
ugaaagauugugauucaauaug

SEQ ID NO: 1098689 - RNA, 22 nt, Human
uauuucuucgggauucaagcua

SEQ ID NO: 1098690 - RNA, 22 nt, Human
ugcuuagacgucaaguacagcc

SEQ ID NO: 1098691 - RNA, 22 nt, Human
ugaguucuaguggcugcagauu

SEQ ID NO: 1098692 - RNA, 22 nt, Human
ucauuucaaguucugacagcua

SEQ ID NO: 1098693 - RNA, 18 nt, Human
ugaauagggguuugcaga

SEQ ID NO: 1098694 - RNA, 22 nt, Human
uaugaacugugagugugauggg

SEQ ID NO: 1098695 - RNA, 22 nt, Human
uaugacauugcuuuuuagaacu

SEQ ID NO: 1098696 - RNA, 22 nt, Human
uaacacaugguuaguacacaau

SEQ ID NO: 1098697 - RNA, 22 nt, Human
augacacuuggugauacuuugu

SEQ ID NO: 1098698 - RNA, 22 nt, Human
cuguaugaacccauauacuuau

SEQ ID NO: 1098699 - RNA, 22 nt, Human
augaaaauguacauguguauaa

SEQ ID NO: 1098700 - RNA, 22 nt, Human
ugucucaguacacuccgauguu

SEQ ID NO: 1098701 - RNA, 19 nt, Human
ucauuguugguuugucggg

SEQ ID NO: 1098702 - RNA, 22 nt, Human
aaaggccacugcaagggaaggu

SEQ ID NO: 1098703 - RNA, 22 nt, Human
ugaaguuauauauguugaaaau

SEQ ID NO: 1098704 - RNA, 22 nt, Human
ccuugcugaccaucaccuuuga

SEQ ID NO: 1098705 - RNA, 22 nt, Human
uuuuucuuaaauguggguuggc

SEQ ID NO: 1098706 - RNA, 22 nt, Human
agugcuguaacaacuuauuugg

SEQ ID NO: 1098707 - RNA, 22 nt, Human
guccaugauucugugacacccu

SEQ ID NO: 1098708 - RNA, 22 nt, Human
gcuguguuggugaagcuguagc

SEQ ID NO: 1098709 - RNA, 22 nt, Human
uucaggaucauuuguuuuaucu

SEQ ID NO: 1098710 - RNA, 22 nt, Human
uccauguguuuuccuguccaca

SEQ ID NO: 1098711 - RNA, 22 nt, Human
uucugucacuuuuuuggaaucu

SEQ ID NO: 1098712 - RNA, 22 nt, Human
gugcugugugauccaugcuggc

SEQ ID NO: 1098713 - RNA, 22 nt, Human
gucaggauuggggucaugaguc

SEQ ID NO: 1098714 - RNA, 22 nt, Human
aauggccagcaacaggagugaa

SEQ ID NO: 1098715 - RNA, 23 nt, Human
ugcaugugaauucauacuuguuu

SEQ ID NO: 1098716 - RNA, 22 nt, Human
ugcuucagaggaaaggcaaaag

SEQ ID NO: 1098717 - RNA, 22 nt, Human
aguccaugguucugacucaucu

SEQ ID NO: 1098718 - RNA, 22 nt, Human
uuucucuugcgauaugcuacac

SEQ ID NO: 1098719 - RNA, 22 nt, Human
ggcacagagcccagcuuccuag

SEQ ID NO: 1098720 - RNA, 22 nt, Human
aaguaugaaucaaagacuaucu

SEQ ID NO: 1098721 - RNA, 22 nt, Human
aaaggugacacucugccagcug

SEQ ID NO: 1098722 - RNA, 18 nt, Human
ucauuuguuuugcaugaa

SEQ ID NO: 1098723 - RNA, 22 nt, Human
cuggcugugcugcaggcuuugg

SEQ ID NO: 1098724 - RNA, 22 nt, Human
uauuucagcaagaagaaugugg

SEQ ID NO: 1098725 - RNA, 22 nt, Human
gcaggggcuaaggacacagaga

SEQ ID NO: 1098726 - RNA, 22 nt, Human
uucaaauacauucuuugccacu

SEQ ID NO: 1098727 - RNA, 22 nt, Human
aguuagaauauaauuauguuaa

SEQ ID NO: 1098728 - RNA, 22 nt, Human
guucuucaguaaaauuaaaugu

SEQ ID NO: 1098729 - RNA, 22 nt, Human
ucauggauggccgggaggugau

SEQ ID NO: 1098730 - RNA, 22 nt, Human
uaauuccaaguugagacaugca

SEQ ID NO: 1098731 - RNA, 22 nt, Human
uguuguuuucucauggagaaua

SEQ ID NO: 1098732 - RNA, 20 nt, Human
uuucacaaugaacaugucuc

SEQ ID NO: 1098733 - RNA, 22 nt, Human
uuucacacugcagcaucagaga

SEQ ID NO: 1098734 - RNA, 22 nt, Human
ucuaaagaagaggguucugcgg

SEQ ID NO: 1098735 - RNA, 22 nt, Human
caaggccaagguuuugugaacu

SEQ ID NO: 1098736 - RNA, 22 nt, Human
ugugaaauauuuauauacucaa

SEQ ID NO: 1098737 - RNA, 22 nt, Human
uaaggccagccagcaaaucugu

SEQ ID NO: 1098738 - RNA, 22 nt, Human
uuugcauaagucauguccagug

SEQ ID NO: 1098739 - RNA, 22 nt, Human
uagaaacaucagcuaaccaaaa

SEQ ID NO: 1098740 - RNA, 22 nt, Human
gcugauguuuaguugauguuac

SEQ ID NO: 1098741 - RNA, 22 nt, Human
uaacacauuuuaagccauuuua

SEQ ID NO: 1098742 - RNA, 22 nt, Human
cugggaaauggcuucgagcuca

SEQ ID NO: 1098743 - RNA, 22 nt, Human
uugcugaauugaauccuuuggu

SEQ ID NO: 1098744 - RNA, 22 nt, Human
uacugcauaacuggcauguggg

SEQ ID NO: 1098745 - RNA, 22 nt, Human
uggaaauggaucugaugagucu

SEQ ID NO: 1098746 - RNA, 22 nt, Human
auuacucugucugccucugacc

SEQ ID NO: 1098747 - RNA, 22 nt, Human
auucuucauuguugauucaugu

SEQ ID NO: 1098748 - RNA, 22 nt, Human
gucuucuuguuuugaaggaaau

SEQ ID NO: 1098749 - RNA, 22 nt, Human
uauaauuuggggaaaguggugu

SEQ ID NO: 1098750 - RNA, 22 nt, Human
auuauuauauagggaaaguccc

SEQ ID NO: 1098751 - RNA, 22 nt, Human
ccugcucagagcgucuugugug

SEQ ID NO: 1098752 - RNA, 22 nt, Human
caucaucaaaacaaauggaguc

SEQ ID NO: 1098753 - RNA, 22 nt, Human
uucauugugaacacauucugcc

SEQ ID NO: 1098754 - RNA, 22 nt, Human
ugucucugggugauucaguccu

SEQ ID NO: 1098755 - RNA, 22 nt, Human
gcucaggacuggaggagcgggg

SEQ ID NO: 1098756 - RNA, 22 nt, Human
acaaaugugucuaauugugccu

SEQ ID NO: 1098757 - RNA, 20 nt, Human
aagcacauuucuacaauaau

SEQ ID NO: 1098758 - RNA, 22 nt, Human
gauuucuugauaauucaaaucc

SEQ ID NO: 1098759 - RNA, 22 nt, Human
cauacaagcguucaauagaugu

SEQ ID NO: 1098760 - RNA, 22 nt, Human
acaaauaugguacucggagaaa

SEQ ID NO: 1098761 - RNA, 22 nt, Human
cauauguauuucucauaauuag

SEQ ID NO: 1098762 - RNA, 22 nt, Human
caggauggucucgaucuccuga

SEQ ID NO: 1098763 - RNA, 21 nt, Human
auaaaguuuuacaggaaugca

SEQ ID NO: 1098764 - RNA, 22 nt, Human
aucuuucagggccauuuguauu

SEQ ID NO: 1098765 - RNA, 22 nt, Human
acaaucauuccguucacaacag

SEQ ID NO: 1098766 - RNA, 22 nt, Human
gguggagcuggaccaggagagg

SEQ ID NO: 1098767 - RNA, 22 nt, Human
agguauaagaagauuauuuaua

SEQ ID NO: 1098768 - RNA, 22 nt, Human
cagagggcacaugguuuccuca

SEQ ID NO: 1098769 - RNA, 22 nt, Human
uuaacauacaucaugaacaaug

SEQ ID NO: 1098770 - RNA, 22 nt, Human
auguagaagugggcauuauaga

SEQ ID NO: 1098771 - RNA, 22 nt, Human
ccacagcugaccgcaggugagc

SEQ ID NO: 1098772 - RNA, 22 nt, Human
acacauauauacauauuugugc

SEQ ID NO: 1098773 - RNA, 22 nt, Human
auggaguucuuuaaauucacag

SEQ ID NO: 1098774 - RNA, 22 nt, Human
caggauggucuucauuuggcuc

SEQ ID NO: 1098775 - RNA, 22 nt, Human
uguaugaaaaggaauagauuga

SEQ ID NO: 1098776 - RNA, 22 nt, Human
gaugccuccaaaugagggcaga

SEQ ID NO: 1098777 - RNA, 22 nt, Human
ucugggaaugaauaagaccugu

SEQ ID NO: 1098778 - RNA, 22 nt, Human
gucuucuguaagaugagguccc

SEQ ID NO: 1098779 - RNA, 22 nt, Human
cuggaguuagaguagacacuga

SEQ ID NO: 1098780 - RNA, 22 nt, Human
cagcauuuggugaucaucuuaa

SEQ ID NO: 1098781 - RNA, 21 nt, Human
aaucauacaaaacaugucagg

SEQ ID NO: 1098782 - RNA, 22 nt, Human
guguugaugacauuuuagaaac

SEQ ID NO: 1098783 - RNA, 22 nt, Human
ugaacacauaaggcuuuccugu

SEQ ID NO: 1098784 - RNA, 19 nt, Human
guugaaaguaggugagggu

SEQ ID NO: 1098785 - RNA, 22 nt, Human
auacuuucugaccaauuaauug

SEQ ID NO: 1098786 - RNA, 22 nt, Human
auguagagcaguguuguccaau

SEQ ID NO: 1098787 - RNA, 22 nt, Human
ugcuuggcuuucugagcuucug

SEQ ID NO: 1098788 - RNA, 22 nt, Human
uucauucuugggaucagagagu

SEQ ID NO: 1098789 - RNA, 22 nt, Human
ucuucccuaaucaccaucuuca

SEQ ID NO: 1098790 - RNA, 22 nt, Human
agcuggcagcucucagggguac

SEQ ID NO: 1098791 - RNA, 22 nt, Human
auacacauauguguguauaugu

SEQ ID NO: 1098792 - RNA, 22 nt, Human
uuaacaugucuugacuucaucu

SEQ ID NO: 1098793 - RNA, 22 nt, Human
gcagaagucagaccaucugaau

SEQ ID NO: 1098794 - RNA, 22 nt, Human
uuuuuuaguuaggucagaaugu

SEQ ID NO: 1098795 - RNA, 22 nt, Human
uugacaauguccuuugaauuuc

SEQ ID NO: 1098796 - RNA, 22 nt, Human
agacaguguguguauauauggu

SEQ ID NO: 1098797 - RNA, 22 nt, Human
auuuaaaugcuuaagaggguuu

SEQ ID NO: 1098798 - RNA, 21 nt, Human
auuucagagcacacaaguaaa

SEQ ID NO: 1098799 - RNA, 22 nt, Human
cauuuguuuagaagucuuuaua

SEQ ID NO: 1098800 - RNA, 22 nt, Human
aaagauuauggcauugaaauac

SEQ ID NO: 1098801 - RNA, 22 nt, Human
uucauucugcaguucucagcuc

SEQ ID NO: 1098802 - RNA, 22 nt, Human
gccucugcccuccugggacugc

SEQ ID NO: 1098803 - RNA, 22 nt, Human
uugcuagcugguguaugcauug

SEQ ID NO: 1098804 - RNA, 23 nt, Human
aucuguucaucugacacagauuc

SEQ ID NO: 1098805 - RNA, 22 nt, Human
augcaucuauucccaagggcag

SEQ ID NO: 1098806 - RNA, 22 nt, Human
cugcugugaguuuggaggucua

SEQ ID NO: 1098807 - RNA, 22 nt, Human
uuuguuuagaaagagauuggug

SEQ ID NO: 1098808 - RNA, 22 nt, Human
uagcucuucaaucacugucucc

SEQ ID NO: 1098809 - RNA, 22 nt, Human
aaauuauuaugccccucuauaa

SEQ ID NO: 1098810 - RNA, 22 nt, Human
auuucucuuagcaagacauuac

SEQ ID NO: 1098811 - RNA, 22 nt, Human
uuuggaauauuaaaaugucuca

SEQ ID NO: 1098812 - RNA, 22 nt, Human
uuucaaacauaucuucauuacu

SEQ ID NO: 1098813 - RNA, 21 nt, Human
gacaaagugaagcaggcagga

SEQ ID NO: 1098814 - RNA, 22 nt, Human
aaaggaagaugccaggacucug

SEQ ID NO: 1098815 - RNA, 22 nt, Human
uauacaaugaguacauucuggg

SEQ ID NO: 1098816 - RNA, 22 nt, Human
augacucuuagcuaaagguaag

SEQ ID NO: 1098817 - RNA, 22 nt, Human
uaagaacuucggacauguuauc

SEQ ID NO: 1098818 - RNA, 22 nt, Human
uugcuuuguuacugcaguuucc

SEQ ID NO: 1098819 - RNA, 22 nt, Human
uuugaaaguccuaggagagucc

SEQ ID NO: 1098820 - RNA, 22 nt, Human
uucaggauggaguaccuuuuau

SEQ ID NO: 1098821 - RNA, 22 nt, Human
aauacuauguagccaaaauaau

SEQ ID NO: 1098822 - RNA, 22 nt, Human
ucaucugucauccacaaagcug

SEQ ID NO: 1098823 - RNA, 22 nt, Human
agaaaugaagcaggaguuauua

SEQ ID NO: 1098824 - RNA, 22 nt, Human
uucuucuuuccuauaauuaauu

SEQ ID NO: 1098825 - RNA, 22 nt, Human
aucaggaugaagcuguagcgaa

SEQ ID NO: 1098826 - RNA, 22 nt, Human
ucugauuagagcauucuugagu

SEQ ID NO: 1098827 - RNA, 22 nt, Human
ugaacuuagugggaauaucucu

SEQ ID NO: 1098828 - RNA, 22 nt, Human
aaaauuauagaucuagugccug

SEQ ID NO: 1098829 - RNA, 22 nt, Human
agggcaguucaacuucauagug

SEQ ID NO: 1098830 - RNA, 22 nt, Human
cugcucuaacugcauuaguuuu

SEQ ID NO: 1098831 - RNA, 22 nt, Human
ucuucauuuuauagcaucugug

SEQ ID NO: 1098832 - RNA, 22 nt, Human
ucuucaaguuccaaagugcagg

SEQ ID NO: 1098833 - RNA, 22 nt, Human
ccuugcauauauuauaucuuug

SEQ ID NO: 1098834 - RNA, 22 nt, Human
aauguaugaagguuccaguuuc

SEQ ID NO: 1098835 - RNA, 22 nt, Human
cacaugaagagagucuaguaau

SEQ ID NO: 1098836 - RNA, 22 nt, Human
auacagauguugaauguuauau

SEQ ID NO: 1098837 - RNA, 22 nt, Human
auucuucauuuacuguuacuug

SEQ ID NO: 1098838 - RNA, 22 nt, Human
cucagugugaaugcucaguaaa

SEQ ID NO: 1098839 - RNA, 22 nt, Human
gaaguacaguuuuaucuagcca

SEQ ID NO: 1098840 - RNA, 22 nt, Human
ucugggaagcugguccuguucu

SEQ ID NO: 1098841 - RNA, 22 nt, Human
ugcuagaauuugcagaagcaua

SEQ ID NO: 1098842 - RNA, 22 nt, Human
uuucugaacaaagccauuauca

SEQ ID NO: 1098843 - RNA, 22 nt, Human
uggcaucucaaacaggcagauu

SEQ ID NO: 1098844 - RNA, 22 nt, Human
ucuuccucuagaucugaggccc

SEQ ID NO: 1098845 - RNA, 22 nt, Human
auguaaacaagguuauugucca

SEQ ID NO: 1098846 - RNA, 22 nt, Human
ucauuuugggguuugucaucuu

SEQ ID NO: 1098847 - RNA, 22 nt, Human
uucaaacaguguagaauauaug

SEQ ID NO: 1098848 - RNA, 22 nt, Human
uucugucacuugcaaucaagag

SEQ ID NO: 1098849 - RNA, 22 nt, Human
aaaggagacuucagaucuccuu

SEQ ID NO: 1098850 - RNA, 22 nt, Human
uuuguuuacucauucauugaug

SEQ ID NO: 1098851 - RNA, 22 nt, Human
augcuguguggucaaguuaauu

SEQ ID NO: 1098852 - RNA, 22 nt, Human
caggaugggauguagugggccc

SEQ ID NO: 1098853 - RNA, 22 nt, Human
ucauuuguaccauuuuuuaaga

SEQ ID NO: 1098854 - RNA, 22 nt, Human
cucccagagagcaggugggccg

SEQ ID NO: 1098855 - RNA, 22 nt, Human
agcugaugccauguggaacagu

SEQ ID NO: 1098856 - RNA, 22 nt, Human
gugcuuuuaaaggcaauuagua

SEQ ID NO: 1098857 - RNA, 22 nt, Human
uaggaaaugcuccauugcauaa

SEQ ID NO: 1098858 - RNA, 22 nt, Human
gcugaaugaauguauuuuaaaa

SEQ ID NO: 1098859 - RNA, 22 nt, Human
auucugauaucuuauucuagcu

SEQ ID NO: 1098860 - RNA, 22 nt, Human
ggucagagggugggcugccugu

SEQ ID NO: 1098861 - RNA, 22 nt, Human
aguccuuugggaaaaaugacua

SEQ ID NO: 1098862 - RNA, 22 nt, Human
ugagccuguccugugcauguga

SEQ ID NO: 1098863 - RNA, 22 nt, Human
uuagacauguuugcuaaaauga

SEQ ID NO: 1098864 - RNA, 22 nt, Human
cugcugugggcaggguagcugg

SEQ ID NO: 1098865 - RNA, 22 nt, Human
gugauuuugagaccuauauagu

SEQ ID NO: 1098866 - RNA, 22 nt, Human
cugucccuucauuauucacuac

SEQ ID NO: 1098867 - RNA, 21 nt, Human
uucaaaaugguguguuugucu

SEQ ID NO: 1098868 - RNA, 22 nt, Human
cuucuucaagagaaugggagac

SEQ ID NO: 1098869 - RNA, 19 nt, Human
uuuuccuucuauauguuuc

SEQ ID NO: 1098870 - RNA, 22 nt, Human
uuuaaaauuuagaccucuccac

SEQ ID NO: 1098871 - RNA, 22 nt, Human
gucuucuuguguugccugucuu

SEQ ID NO: 1098872 - RNA, 22 nt, Human
cucuucuuauggccguggcuga

SEQ ID NO: 1098873 - RNA, 22 nt, Human
uagaauucaagauucaacaggc

SEQ ID NO: 1098874 - RNA, 22 nt, Human
agaguucugcucuucucaguga

SEQ ID NO: 1098875 - RNA, 22 nt, Human
acaugcauacacguacauaccu

SEQ ID NO: 1098876 - RNA, 22 nt, Human
ugcuagaagauagcuagaagau

SEQ ID NO: 1098877 - RNA, 22 nt, Human
uccuuagagauacugucuugaa

SEQ ID NO: 1098878 - RNA, 22 nt, Human
guuauauauaguauuucucuga

SEQ ID NO: 1098879 - RNA, 20 nt, Human
cucaggauugucuagccccu

SEQ ID NO: 1098880 - RNA, 22 nt, Human
guucuucaucuuaaccaucugu

SEQ ID NO: 1098881 - RNA, 22 nt, Human
gaaggccacaagagaaguuaag

SEQ ID NO: 1098882 - RNA, 22 nt, Human
cagcugcuguuacugcuuauua

SEQ ID NO: 1098883 - RNA, 22 nt, Human
gucuucuuuaaccuacuaaagc

SEQ ID NO: 1098884 - RNA, 19 nt, Human
agucuuucccacucgucuu

SEQ ID NO: 1098885 - RNA, 22 nt, Human
agucucugcaugccugcugugc

SEQ ID NO: 1098886 - RNA, 22 nt, Human
ugcauguguuugccacagugag

SEQ ID NO: 1098887 - RNA, 20 nt, Human
ucagugauuuugaagaggaa

SEQ ID NO: 1098888 - RNA, 22 nt, Human
auaguuugugaaacacagcagu

SEQ ID NO: 1098889 - RNA, 22 nt, Human
ugaaggccucugguacaugcca

SEQ ID NO: 1098890 - RNA, 22 nt, Human
aauaucagcacuuuugugguau

SEQ ID NO: 1098891 - RNA, 22 nt, Human
uucuucuuucccccugugguac

SEQ ID NO: 1098892 - RNA, 22 nt, Human
gcuugaaaauucauagguauuu

SEQ ID NO: 1098893 - RNA, 22 nt, Human
uugcaucuaccauaucaaagau

SEQ ID NO: 1098894 - RNA, 22 nt, Human
auucugucuuuuuaaaauaaua

SEQ ID NO: 1098895 - RNA, 22 nt, Human
uuuaaauuuguguuuagagggu

SEQ ID NO: 1098896 - RNA, 22 nt, Human
uuagcaucugcuguaagcuuau

SEQ ID NO: 1098897 - RNA, 22 nt, Human
acagcagcuugcgugucugguc

SEQ ID NO: 1098898 - RNA, 22 nt, Human
augcugugucuagcaggaacac

SEQ ID NO: 1098899 - RNA, 22 nt, Human
aaauauguauggaguucaugaa

SEQ ID NO: 1098900 - RNA, 22 nt, Human
aagauggaguaguguaaugguu

SEQ ID NO: 1098901 - RNA, 22 nt, Human
aggcacagagaaugcccuccau

SEQ ID NO: 1098902 - RNA, 22 nt, Human
uucacacacagcuuccuauugu

SEQ ID NO: 1098903 - RNA, 22 nt, Human
agcagagccugggcuaggggug

SEQ ID NO: 1098904 - RNA, 22 nt, Human
cauaugaaauaugaguugaaca

SEQ ID NO: 1098905 - RNA, 22 nt, Human
uuggaaagcaagcuggacauac

SEQ ID NO: 1098906 - RNA, 22 nt, Human
aauaguauuuauuuggaaaaag

SEQ ID NO: 1098907 - RNA, 22 nt, Human
uugaaagugccaaguccuagug

SEQ ID NO: 1098908 - RNA, 19 nt, Human
aauacaguguuauagaauu

SEQ ID NO: 1098909 - RNA, 22 nt, Human
uugcugaaaacaguggguauug

SEQ ID NO: 1098910 - RNA, 22 nt, Human
gucaggauuuacaaacuucagu

SEQ ID NO: 1098911 - RNA, 22 nt, Human
uaacaauaguguuugcuaguca

SEQ ID NO: 1098912 - RNA, 22 nt, Human
guuaaauucgaugauggauaaa

SEQ ID NO: 1098913 - RNA, 22 nt, Human
cucaaauauaagcuaaaugugg

SEQ ID NO: 1098914 - RNA, 22 nt, Human
ugaaaugaaacagaacauauca

SEQ ID NO: 1098915 - RNA, 22 nt, Human
uggagacucugcaucugugaca

SEQ ID NO: 1098916 - RNA, 22 nt, Human
auuuagacuucccagcacugug

SEQ ID NO: 1098917 - RNA, 22 nt, Human
uuagccauguugaagauuuaga

SEQ ID NO: 1098918 - RNA, 22 nt, Human
aggcacaguggcucacaccugu

SEQ ID NO: 1098919 - RNA, 22 nt, Human
cuauuacauuucuggacauuca

SEQ ID NO: 1098920 - RNA, 19 nt, Human
caggaaugagguaauggcu

SEQ ID NO: 1098921 - RNA, 22 nt, Human
uaaggccaaggggccauagucu

SEQ ID NO: 1098922 - RNA, 22 nt, Human
aaucuguucuacucuauucaga

SEQ ID NO: 1098923 - RNA, 22 nt, Human
ucacaguaaaagcauggaagag

SEQ ID NO: 1098924 - RNA, 22 nt, Human
aucuuucuccauauacaucuuu

SEQ ID NO: 1098925 - RNA, 22 nt, Human
aaguuugcauagauuaagcauu

SEQ ID NO: 1098926 - RNA, 22 nt, Human
cuagaauugcauucuaugaaua

SEQ ID NO: 1098927 - RNA, 22 nt, Human
aggcacagcacaccuggccccc

SEQ ID NO: 1098928 - RNA, 22 nt, Human
acuuggcaaguaucuauaaagu

SEQ ID NO: 1098929 - RNA, 22 nt, Human
uauuuuaaagugaagggucuug

SEQ ID NO: 1098930 - RNA, 22 nt, Human
uguucauaucauuuugaaagcu

SEQ ID NO: 1098931 - RNA, 22 nt, Human
ugugaaggagaugaagggagug

SEQ ID NO: 1098932 - RNA, 22 nt, Human
acucagaagauauaaugacuca

SEQ ID NO: 1098933 - RNA, 22 nt, Human
auucuucagaauaucuggcacu

SEQ ID NO: 1098934 - RNA, 22 nt, Human
guccaugacugugacucacaug

SEQ ID NO: 1098935 - RNA, 22 nt, Human
uguccauggauagagcugcucg

SEQ ID NO: 1098936 - RNA, 22 nt, Human
auguagaacagguuaaugacag

SEQ ID NO: 1098937 - RNA, 22 nt, Human
aaaacuaaauacgcuuugccuc

SEQ ID NO: 1098938 - RNA, 22 nt, Human
gaacccaggcuuuugaggcugu

SEQ ID NO: 1098939 - RNA, 22 nt, Human
uuucuugacugcuuaggaaugc

SEQ ID NO: 1098940 - RNA, 22 nt, Human
ugcuggguuaccuaagccuaaa

SEQ ID NO: 1098941 - RNA, 22 nt, Human
guggaaugaauagauuugcauu

SEQ ID NO: 1098942 - RNA, 23 nt, Human
aucauucuccaaucuggagcagg

SEQ ID NO: 1098943 - RNA, 22 nt, Human
aacuuucuuggaugucucaaca

SEQ ID NO: 1098944 - RNA, 22 nt, Human
uauuugcaacauaaaacucuga

SEQ ID NO: 1098945 - RNA, 22 nt, Human
cuguauuuguccucuauuuauu

SEQ ID NO: 1098946 - RNA, 22 nt, Human
uugcauuucccauugaguaaug

SEQ ID NO: 1098947 - RNA, 22 nt, Human
uucuucaaccaucuacauaaac

SEQ ID NO: 1098948 - RNA, 22 nt, Human
gagcauuugguuauaguaauuu

SEQ ID NO: 1098949 - RNA, 22 nt, Human
ucagagaguuagugucuuagcu

SEQ ID NO: 1098950 - RNA, 22 nt, Human
uggaaagucucuuuugacugua

SEQ ID NO: 1098951 - RNA, 22 nt, Human
caggauggccccggggcugugc

SEQ ID NO: 1098952 - RNA, 22 nt, Human
uacagcauguccuuagcaaggc

SEQ ID NO: 1098953 - RNA, 15 nt, Human
cuccaugauuuugca

SEQ ID NO: 1098954 - RNA, 22 nt, Human
agacucaagcagauaggaauua

SEQ ID NO: 1098955 - RNA, 22 nt, Human
uguuuucagucauauagcaggu

SEQ ID NO: 1098956 - RNA, 17 nt, Human
guccuacccauggucua

SEQ ID NO: 1098957 - RNA, 22 nt, Human
ucaggauaaaauguaauggcaa

SEQ ID NO: 1098958 - RNA, 22 nt, Human
uuuaacagguaaaguaaaugug

SEQ ID NO: 1098959 - RNA, 22 nt, Human
auugcuuaucuaucuuuaaguc

SEQ ID NO: 1098960 - RNA, 22 nt, Human
uuauacuaaaacgcauugaauu

SEQ ID NO: 1098961 - RNA, 20 nt, Human
gcccaagguccagaaggggg

SEQ ID NO: 1098962 - RNA, 22 nt, Human
uggcaguccccugugccuggaa

SEQ ID NO: 1098963 - RNA, 22 nt, Human
ggauggagguucucagaugcuc

SEQ ID NO: 1098964 - RNA, 22 nt, Human
ugacuagaccuauaucuuuuug

SEQ ID NO: 1098965 - RNA, 22 nt, Human
gugguaaucggauucuuaccgg

SEQ ID NO: 1098966 - RNA, 22 nt, Human
gucuuuaugguaugaaaacuga

SEQ ID NO: 1098967 - RNA, 22 nt, Human
aggccagacagcuagaaacagg

SEQ ID NO: 1098968 - RNA, 22 nt, Human
ucacaguaucacacaaggauua

SEQ ID NO: 1098969 - RNA, 22 nt, Human
cuggaaauuggagaugauguuu

SEQ ID NO: 1098970 - RNA, 22 nt, Human
aaggccaacuaggaugagcuag

SEQ ID NO: 1098971 - RNA, 22 nt, Human
uucuuaacucaaauauauaucc

SEQ ID NO: 1098972 - RNA, 22 nt, Human
aguaugaaaguuaaucaauuua

SEQ ID NO: 1098973 - RNA, 22 nt, Human
gcuguucucuguaacaugcauu

SEQ ID NO: 1098974 - RNA, 22 nt, Human
uuucaaauagaaucuuuccaaa

SEQ ID NO: 1098975 - RNA, 22 nt, Human
gucuucaauagagccucaauuu

SEQ ID NO: 1098976 - RNA, 22 nt, Human
aaauguauugcauaggauauuu

SEQ ID NO: 1098977 - RNA, 22 nt, Human
uuucaaagucaauaucauuacc

SEQ ID NO: 1098978 - RNA, 22 nt, Human
uucugucauuuagcauugucau

SEQ ID NO: 1098979 - RNA, 22 nt, Human
acucaggaaauugagauaaugg

SEQ ID NO: 1098980 - RNA, 23 nt, Human
ccacuagcaccuguucaacuucu

SEQ ID NO: 1098981 - RNA, 22 nt, Human
ucuuagcauuucauaacaacug

SEQ ID NO: 1098982 - RNA, 22 nt, Human
agucucuuauucccuauugcug

SEQ ID NO: 1098983 - RNA, 22 nt, Human
agucucuuuaaucacagugucu

SEQ ID NO: 1098984 - RNA, 22 nt, Human
uaacacauaucuacaacaugug

SEQ ID NO: 1098985 - RNA, 22 nt, Human
cagaaauguacugacaugcagu

SEQ ID NO: 1098986 - RNA, 20 nt, Human
aaacauucauguacaaguga

SEQ ID NO: 1098987 - RNA, 22 nt, Human
uucuucuucuggcugcaccugg

SEQ ID NO: 1098988 - RNA, 22 nt, Human
ucagagaguuggaaagaauuaa

SEQ ID NO: 1098989 - RNA, 22 nt, Human
uuugaagucagacacugcuuug

SEQ ID NO: 1098990 - RNA, 22 nt, Human
cuugggaaugcuaacagaugac

SEQ ID NO: 1098991 - RNA, 22 nt, Human
gaaggccacggaauggagcugg

SEQ ID NO: 1098992 - RNA, 22 nt, Human
acaucucaugaaugauaaauca

SEQ ID NO: 1098993 - RNA, 22 nt, Human
uauuauuaaauggcagaauuuu

SEQ ID NO: 1098994 - RNA, 22 nt, Human
cacaaugugguuugucaucuuu

SEQ ID NO: 1098995 - RNA, 22 nt, Human
uuguaaauaguaguaagaugcc

SEQ ID NO: 1098996 - RNA, 22 nt, Human
uagaaauguugguauuaacauu

SEQ ID NO: 1098997 - RNA, 22 nt, Human
agauaugugcgucuuagauuga

SEQ ID NO: 1098998 - RNA, 22 nt, Human
uguaugaaugggaaaaggaaac

SEQ ID NO: 1098999 - RNA, 22 nt, Human
gcaagcugaugugauagugaaa

SEQ ID NO: 1099000 - RNA, 22 nt, Human
gugauaaagacgugucauaauu

SEQ ID NO: 1099001 - RNA, 22 nt, Human
acaauucugaugguuucccagu

SEQ ID NO: 1099002 - RNA, 22 nt, Human
auucacaguuuccucauauucu

SEQ ID NO: 1099003 - RNA, 22 nt, Human
ggagcacuauaauagagauuuu

SEQ ID NO: 1099004 - RNA, 22 nt, Human
aucaggaucugcaucauaagaa

SEQ ID NO: 1099005 - RNA, 22 nt, Human
uucuucaaauagcagggaguca

SEQ ID NO: 1099006 - RNA, 22 nt, Human
auugaaagagaauguagcucuu

SEQ ID NO: 1099007 - RNA, 22 nt, Human
aucauucuaguccuuauggucu

SEQ ID NO: 1099008 - RNA, 22 nt, Human
uaugacuuauuucaucaguucu

SEQ ID NO: 1099009 - RNA, 22 nt, Human
aucaggauccaccuugagccug

SEQ ID NO: 1099010 - RNA, 22 nt, Human
uauuuguugaguuguuaugucu

SEQ ID NO: 1099011 - RNA, 19 nt, Human
ugugaaagcuaguguucuu

SEQ ID NO: 1099012 - RNA, 22 nt, Human
caaaugauacuguuuuuagucu

SEQ ID NO: 1099013 - RNA, 21 nt, Human
acucaggagacuaacuauguc

SEQ ID NO: 1099014 - RNA, 22 nt, Human
cagaugaggcaaccucauugcu

SEQ ID NO: 1099015 - RNA, 22 nt, Human
uuauuuugguaaauguuugccu

SEQ ID NO: 1099016 - RNA, 22 nt, Human
ucgcugugguuucuguacaugg

SEQ ID NO: 1099017 - RNA, 22 nt, Human
gugugaaagcuuguccucugua

SEQ ID NO: 1099018 - RNA, 22 nt, Human
gucugucauacggcuuauguaa

SEQ ID NO: 1099019 - RNA, 22 nt, Human
caagaugggcaccccagcaccu

SEQ ID NO: 1099020 - RNA, 22 nt, Human
uuuguaugugauaagacuauuc

SEQ ID NO: 1099021 - RNA, 22 nt, Human
ucagauggcacacagagccugc

SEQ ID NO: 1099022 - RNA, 22 nt, Human
auuguauaacagcauguauuuu

SEQ ID NO: 1099023 - RNA, 19 nt, Human
uucauucucuuauuguugu

SEQ ID NO: 1099024 - RNA, 22 nt, Human
uucuacaugguugcucagaggg

SEQ ID NO: 1099025 - RNA, 20 nt, Human
uugauaggcagcuugucagg

SEQ ID NO: 1099026 - RNA, 22 nt, Human
uuuguaaaggccugaauuucag

SEQ ID NO: 1099027 - RNA, 22 nt, Human
aggcaguuuaggcagcgauuua

SEQ ID NO: 1099028 - RNA, 22 nt, Human
guuuuauaggcuguugcuauau

SEQ ID NO: 1099029 - RNA, 22 nt, Human
uuauuacacugaaagaauugcg

SEQ ID NO: 1099030 - RNA, 22 nt, Human
caaggccaguccauuuuggaag

SEQ ID NO: 1099031 - RNA, 22 nt, Human
uucuuuuacauuaagauuucag

SEQ ID NO: 1099032 - RNA, 22 nt, Human
gcaucuaaacuugcaucauugu

SEQ ID NO: 1099033 - RNA, 21 nt, Human
acagcauguuuguguguuugc

SEQ ID NO: 1099034 - RNA, 22 nt, Human
cugcaucacagcaggaggcaca

SEQ ID NO: 1099035 - RNA, 22 nt, Human
caaggccaguuucuccuaguca

SEQ ID NO: 1099036 - RNA, 22 nt, Human
uugauacauuuuuaggauaaac

SEQ ID NO: 1099037 - RNA, 22 nt, Human
uguguuauugccacugaagacc

SEQ ID NO: 1099038 - RNA, 22 nt, Human
guaucacuuuugagagugagaa

SEQ ID NO: 1099039 - RNA, 22 nt, Human
cccuugcacauuugucuuuaau

SEQ ID NO: 1099040 - RNA, 22 nt, Human
uacaaaugaguuguaugaacca

SEQ ID NO: 1099041 - RNA, 22 nt, Human
uguaggaauguuuuuaaguugg

SEQ ID NO: 1099042 - RNA, 19 nt, Human
cuucuucuuggcagccaag

SEQ ID NO: 1099043 - RNA, 22 nt, Human
auuuguagugaagugaaaauaa

SEQ ID NO: 1099044 - RNA, 22 nt, Human
uucaggaucacuaaacccucca

SEQ ID NO: 1099045 - RNA, 23 nt, Human
uagaaugucauucaaugauaugg

SEQ ID NO: 1099046 - RNA, 22 nt, Human
uaacuacauuucacugcaauua

SEQ ID NO: 1099047 - RNA, 22 nt, Human
cuagcaucagaugagaagcugu

SEQ ID NO: 1099048 - RNA, 22 nt, Human
aauauaugugguauugaccagc

SEQ ID NO: 1099049 - RNA, 22 nt, Human
aucaggauuauuaaaucuggau

SEQ ID NO: 1099050 - RNA, 22 nt, Human
gugggagcuuuggcaucaggcu

SEQ ID NO: 1099051 - RNA, 22 nt, Human
aaggcaguaggaucuuccacag

SEQ ID NO: 1099052 - RNA, 22 nt, Human
uuugcaaagugacuauuauaug

SEQ ID NO: 1099053 - RNA, 22 nt, Human
ucugcugugggucuauauuuua

SEQ ID NO: 1099054 - RNA, 22 nt, Human
ucuucucucauguaggagggaa

SEQ ID NO: 1099055 - RNA, 22 nt, Human
uagauauguguuuauuaugcug

SEQ ID NO: 1099056 - RNA, 22 nt, Human
uaugaaaugguaguaggaaggg

SEQ ID NO: 1099057 - RNA, 22 nt, Human
uucauucuugucuuuguauagu

SEQ ID NO: 1099058 - RNA, 22 nt, Human
aaaagucugcucucauuucaga

SEQ ID NO: 1099059 - RNA, 22 nt, Human
cauuuguauagugcuuagacca

SEQ ID NO: 1099060 - RNA, 22 nt, Human
ugaaucaguauaaauucucaaa

SEQ ID NO: 1099061 - RNA, 22 nt, Human
ucacaaauauuuuaacaguagg

SEQ ID NO: 1099062 - RNA, 22 nt, Human
ucauauaacuggauauuuucaa

SEQ ID NO: 1099063 - RNA, 22 nt, Human
agggaguuagaaauccaggaua

SEQ ID NO: 1099064 - RNA, 22 nt, Human
uuucaugauuaacuuagugaau

SEQ ID NO: 1099065 - RNA, 22 nt, Human
aaagccagagcaagcugucaca

SEQ ID NO: 1099066 - RNA, 23 nt, Human
cuuugccacccagagccugacag

SEQ ID NO: 1099067 - RNA, 22 nt, Human
cauuuuaaaugauuuaagccaa

SEQ ID NO: 1099068 - RNA, 22 nt, Human
gugaaggacuagcauggagggc

SEQ ID NO: 1099069 - RNA, 20 nt, Human
cugagagucugugcuuaguc

SEQ ID NO: 1099070 - RNA, 22 nt, Human
uuuauucaucaucuguucauau

SEQ ID NO: 1099071 - RNA, 22 nt, Human
ugguauaaaacuuuuuauugaa

SEQ ID NO: 1099072 - RNA, 22 nt, Human
aaaguguggucguucauuuugu

SEQ ID NO: 1099073 - RNA, 22 nt, Human
ccauccugcauugcuauucaga

SEQ ID NO: 1099074 - RNA, 22 nt, Human
aauaucaacaguguccuucuaa

SEQ ID NO: 1099075 - RNA, 22 nt, Human
cauuuccagcuccugcaucaug

SEQ ID NO: 1099076 - RNA, 19 nt, Human
caaggccaccauuucuccg

SEQ ID NO: 1099077 - RNA, 22 nt, Human
gaggaacccagcugggguugcc

SEQ ID NO: 1099078 - RNA, 22 nt, Human
cucaggaugaaagucaugguga

SEQ ID NO: 1099079 - RNA, 22 nt, Human
uugauuucuauucagauguaga

SEQ ID NO: 1099080 - RNA, 22 nt, Human
ggccagaaguuggaaaagagcc

SEQ ID NO: 1099081 - RNA, 22 nt, Human
aaggccagacaggaccacaucu

SEQ ID NO: 1099082 - RNA, 22 nt, Human
guucuucagauuccauuucagu

SEQ ID NO: 1099083 - RNA, 22 nt, Human
augcagcugugggcaagaaaug

SEQ ID NO: 1099084 - RNA, 20 nt, Human
aucuucuuggccagcuugcu

SEQ ID NO: 1099085 - RNA, 22 nt, Human
uuaacacaucccugcucuaccc

SEQ ID NO: 1099086 - RNA, 20 nt, Human
caggaugauuggacacgaug

SEQ ID NO: 1099087 - RNA, 22 nt, Human
uuauccaagcagaagcugcaca

SEQ ID NO: 1099088 - RNA, 18 nt, Human
ucuuuggacaacuacugg

SEQ ID NO: 1099089 - RNA, 22 nt, Human
ucuucacaugaccuucaugucu

SEQ ID NO: 1099090 - RNA, 22 nt, Human
uuucagcugguaaaggaguagc

SEQ ID NO: 1099091 - RNA, 18 nt, Human
agucuucugauccauuuu

SEQ ID NO: 1099092 - RNA, 22 nt, Human
ugaaaugaagggcuuguucugg

SEQ ID NO: 1099093 - RNA, 22 nt, Human
cucaugauguagcgaaugagaa

SEQ ID NO: 1099094 - RNA, 22 nt, Human
ccucaggauccgcaggugcagu

SEQ ID NO: 1099095 - RNA, 21 nt, Human
uuccagagauuguuucaccug

SEQ ID NO: 1099096 - RNA, 22 nt, Human
uuuucaguuccaucucugcucu

SEQ ID NO: 1099097 - RNA, 22 nt, Human
uauguuauuuucauacaacaga

SEQ ID NO: 1099098 - RNA, 22 nt, Human
uuucaaaauuuugcagugguaa

SEQ ID NO: 1099099 - RNA, 20 nt, Human
uuuuccuucugaguauguug

SEQ ID NO: 1099100 - RNA, 23 nt, Human
gaauaguuuuagaaauuggagaa

SEQ ID NO: 1099101 - RNA, 22 nt, Human
aaucuuucccuauuaaaugugg

SEQ ID NO: 1099102 - RNA, 22 nt, Human
gcuccuucaggugguagcuguu

SEQ ID NO: 1099103 - RNA, 22 nt, Human
aaaggcaggcuuucacaucuca

SEQ ID NO: 1099104 - RNA, 22 nt, Human
uuguuuuaucuuucuacagacu

SEQ ID NO: 1099105 - RNA, 22 nt, Human
ugaaagcacaaguucuaacagg

SEQ ID NO: 1099106 - RNA, 22 nt, Human
uuuuacuuaauucuuggucaug

SEQ ID NO: 1099107 - RNA, 22 nt, Human
auguagaaauuaggaugauagu

SEQ ID NO: 1099108 - RNA, 19 nt, Human
uuugaaaggauuguuauuu

SEQ ID NO: 1099109 - RNA, 22 nt, Human
aucaggaucaugcuggguggga

SEQ ID NO: 1099110 - RNA, 23 nt, Human
ugaaggccuggaggacgcguugu

SEQ ID NO: 1099111 - RNA, 22 nt, Human
uugcacuaggaaaaggcagcca

SEQ ID NO: 1099112 - RNA, 22 nt, Human
caguucuuauuuggccaguguc

SEQ ID NO: 1099113 - RNA, 22 nt, Human
uaaagcacauaucuuacaauaa

SEQ ID NO: 1099114 - RNA, 22 nt, Human
cauuuguaucugggcugcugug

SEQ ID NO: 1099115 - RNA, 21 nt, Human
agccuguugguuuacugcuca

SEQ ID NO: 1099116 - RNA, 19 nt, Human
acauuuaaauucagaucuc

SEQ ID NO: 1099117 - RNA, 22 nt, Human
augcugugucaggaauuugaua

SEQ ID NO: 1099118 - RNA, 22 nt, Human
aauguaugagcgugaaagcacu

SEQ ID NO: 1099119 - RNA, 22 nt, Human
auucuucacauaagugcuguac

SEQ ID NO: 1099120 - RNA, 22 nt, Human
ccauggcaauggucagucuauu

SEQ ID NO: 1099121 - RNA, 22 nt, Human
aauaacuuuuaaaagacccugg

SEQ ID NO: 1099122 - RNA, 22 nt, Human
augugaaauagcuggauaugaa

SEQ ID NO: 1099123 - RNA, 22 nt, Human
uuaaaaugaauauugauuagca

SEQ ID NO: 1099124 - RNA, 22 nt, Human
agauuuauguggucacacucag

SEQ ID NO: 1099125 - RNA, 22 nt, Human
gaauagcuuccuuuuuuccaaa

SEQ ID NO: 1099126 - RNA, 17 nt, Human
uucaaagcuuaucaagg

SEQ ID NO: 1099127 - RNA, 22 nt, Human
aaacauuugcaacucgguuugg

SEQ ID NO: 1099128 - RNA, 22 nt, Human
ugauuuccccagucuugcugcu

SEQ ID NO: 1099129 - RNA, 22 nt, Human
cuuucauaaaggaaaugaugag

SEQ ID NO: 1099130 - RNA, 22 nt, Human
uuuucagugggcaaugauguga

SEQ ID NO: 1099131 - RNA, 22 nt, Human
aaacugcugguugcuggccagc

SEQ ID NO: 1099132 - RNA, 22 nt, Human
aaugucugagucucuguauccc

SEQ ID NO: 1099133 - RNA, 22 nt, Human
cccaugagaccugguuuaaggc

SEQ ID NO: 1099134 - RNA, 22 nt, Human
aggccagcaagaaagagagucu

SEQ ID NO: 1099135 - RNA, 22 nt, Human
caggaugagguagaggcagaua

SEQ ID NO: 1099136 - RNA, 22 nt, Human
augcuuuuaugucacaugguca

SEQ ID NO: 1099137 - RNA, 22 nt, Human
uggaaauguauuugggcaugcc

SEQ ID NO: 1099138 - RNA, 22 nt, Human
gaacacaugauuauaaaugcua

SEQ ID NO: 1099139 - RNA, 22 nt, Human
auucuucacuguuucagaauga

SEQ ID NO: 1099140 - RNA, 22 nt, Human
gaggaaccaaucugugauauuc

SEQ ID NO: 1099141 - RNA, 22 nt, Human
auguuucaccaguuuuauaaga

SEQ ID NO: 1099142 - RNA, 22 nt, Human
acuguguggaccacucugaggc

SEQ ID NO: 1099143 - RNA, 22 nt, Human
uucuucaugcuguugcugcuug

SEQ ID NO: 1099144 - RNA, 20 nt, Human
auuuggcaugaaguauugau

SEQ ID NO: 1099145 - RNA, 22 nt, Human
cuguucucuggcgguggcuguu

SEQ ID NO: 1099146 - RNA, 22 nt, Human
acauugcugcauucuccuuccc

SEQ ID NO: 1099147 - RNA, 22 nt, Human
agaccaagugcaggugccacua

SEQ ID NO: 1099148 - RNA, 22 nt, Human
caaggccauaagagauacaaaa

SEQ ID NO: 1099149 - RNA, 22 nt, Human
gcuuuggaugugugccugaggu

SEQ ID NO: 1099150 - RNA, 22 nt, Human
uaaaaugaucucucauguucuu

SEQ ID NO: 1099151 - RNA, 22 nt, Human
auauaauuguucugaaguguuu

SEQ ID NO: 1099152 - RNA, 22 nt, Human
ugaaaucaaugucuucugucuc

SEQ ID NO: 1099153 - RNA, 22 nt, Human
gugcugugucuaucaggaauaa

SEQ ID NO: 1099154 - RNA, 22 nt, Human
auguuauaguuauaaaaugagg

SEQ ID NO: 1099155 - RNA, 22 nt, Human
aggccagaaaugucagggagug

SEQ ID NO: 1099156 - RNA, 22 nt, Human
gugcauuugugcaugcacaugu

SEQ ID NO: 1099157 - RNA, 22 nt, Human
uuacaagauaaccugaugcugu

SEQ ID NO: 1099158 - RNA, 23 nt, Human
uacaugcuauaauuucacccuca

SEQ ID NO: 1099159 - RNA, 22 nt, Human
aaggagaaaugguagaugugca

SEQ ID NO: 1099160 - RNA, 22 nt, Human
ugaaggccagcucuuuaucagc

SEQ ID NO: 1099161 - RNA, 22 nt, Human
agacaaauggaguaugagcaac

SEQ ID NO: 1099162 - RNA, 22 nt, Human
uacaacauuguguugcuucaua

SEQ ID NO: 1099163 - RNA, 22 nt, Human
uccaugagcuagggauucauca

SEQ ID NO: 1099164 - RNA, 22 nt, Human
cucucuguuaugcuuucaugaa

SEQ ID NO: 1099165 - RNA, 22 nt, Human
gcucaggagcucuugguggcgc

SEQ ID NO: 1099166 - RNA, 22 nt, Human
uccugagagcagcugcuuugga

SEQ ID NO: 1099167 - RNA, 22 nt, Human
auucucuuuguauaacaucuug

SEQ ID NO: 1099168 - RNA, 22 nt, Human
uuuucguuuauuugacauguaa

SEQ ID NO: 1099169 - RNA, 22 nt, Human
gcugcugucacggugcuaaggg

SEQ ID NO: 1099170 - RNA, 22 nt, Human
uuuaacagaugugaaauuuuca

SEQ ID NO: 1099171 - RNA, 22 nt, Human
agaauccuguuuuacuucauca

SEQ ID NO: 1099172 - RNA, 22 nt, Human
auagcuguuagauuggggucga

SEQ ID NO: 1099173 - RNA, 19 nt, Human
auacagauguauccaugau

SEQ ID NO: 1099174 - RNA, 22 nt, Human
uuguuugaggucacugauauuu

SEQ ID NO: 1099175 - RNA, 22 nt, Human
acaccauacucauguugguucc

SEQ ID NO: 1099176 - RNA, 22 nt, Human
agcaccugucacaagcagaagg

SEQ ID NO: 1099177 - RNA, 22 nt, Human
aaccauuugcaguuacugagac

SEQ ID NO: 1099178 - RNA, 22 nt, Human
uuuacuuuugguaaggucauuu

SEQ ID NO: 1099179 - RNA, 22 nt, Human
gaaacauaguugagacacugcu

SEQ ID NO: 1099180 - RNA, 22 nt, Human
uagcacauuguugaccagaagg

SEQ ID NO: 1099181 - RNA, 22 nt, Human
cauaauuugauaugcuugaugg

SEQ ID NO: 1099182 - RNA, 22 nt, Human
uuucaguuuccagcuuugucau

SEQ ID NO: 1099183 - RNA, 22 nt, Human
cuuaacagagagaaguguugcu

SEQ ID NO: 1099184 - RNA, 22 nt, Human
aaauauaauuucugccucaaua

SEQ ID NO: 1099185 - RNA, 22 nt, Human
gucacuguuuccuauuauauuu

SEQ ID NO: 1099186 - RNA, 22 nt, Human
aaaggccaagcaugagguggac

SEQ ID NO: 1099187 - RNA, 22 nt, Human
cccucuacagggaagcgcuuuc

SEQ ID NO: 1099188 - RNA, 22 nt, Human
uuugauaagagcugcugaaacu

SEQ ID NO: 1099189 - RNA, 22 nt, Human
ggccagagaauaugccuuacgu

SEQ ID NO: 1099190 - RNA, 22 nt, Human
aagauggagcacgagcagaagc

SEQ ID NO: 1099191 - RNA, 22 nt, Human
ucuucaucucagauuaacagga

SEQ ID NO: 1099192 - RNA, 22 nt, Human
cuucagaauccagaaucagaau

SEQ ID NO: 1099193 - RNA, 22 nt, Human
auuuccagugcacugaauagaa

SEQ ID NO: 1099194 - RNA, 22 nt, Human
gcugcugugccuggcguccugu

SEQ ID NO: 1099195 - RNA, 22 nt, Human
agaccaagacuauaaugagagg

SEQ ID NO: 1099196 - RNA, 22 nt, Human
gaacacauuagucugaguuggc

SEQ ID NO: 1099197 - RNA, 22 nt, Human
uucuucucucauagauuaaggu

SEQ ID NO: 1099198 - RNA, 22 nt, Human
uuucuagggcucuugucuucug

SEQ ID NO: 1099199 - RNA, 22 nt, Human
ucuuuggaucccaacuggcugg

SEQ ID NO: 1099200 - RNA, 22 nt, Human
gauuucuugaccccugucucag

SEQ ID NO: 1099201 - RNA, 22 nt, Human
uaucaauugggccaaaugguac

SEQ ID NO: 1099202 - RNA, 23 nt, Human
cugcccugaucuugaucuauugu

SEQ ID NO: 1099203 - RNA, 22 nt, Human
uugaaaggugaacaugaugcac

SEQ ID NO: 1099204 - RNA, 22 nt, Human
acauuuuuuagagucccacauu

SEQ ID NO: 1099205 - RNA, 22 nt, Human
uuucucugcugccugugucgau

SEQ ID NO: 1099206 - RNA, 22 nt, Human
cugcuguguuucacaccucugg

SEQ ID NO: 1099207 - RNA, 22 nt, Human
ugaaaugacaaagguuuuucuu

SEQ ID NO: 1099208 - RNA, 22 nt, Human
uuugaaugcaggacauacagaa

SEQ ID NO: 1099209 - RNA, 22 nt, Human
uucuagaugauaaaccagcagc

SEQ ID NO: 1099210 - RNA, 22 nt, Human
auccagucaaaauuaguaaggu

SEQ ID NO: 1099211 - RNA, 22 nt, Human
gauuucuucauuuguggugaau

SEQ ID NO: 1099212 - RNA, 22 nt, Human
uugaauaguuuuggauagcaua

SEQ ID NO: 1099213 - RNA, 22 nt, Human
guuuuauaggugaaauauuacu

SEQ ID NO: 1099214 - RNA, 22 nt, Human
aaggcaguacuuuauguccaua

SEQ ID NO: 1099215 - RNA, 22 nt, Human
cugcuuugauuagaagaguaca

SEQ ID NO: 1099216 - RNA, 22 nt, Human
ugcauauuguccuugauauuau

SEQ ID NO: 1099217 - RNA, 22 nt, Human
aacauucuauuuugcuaaaaca

SEQ ID NO: 1099218 - RNA, 22 nt, Human
uucucugagauagacuaagugg

SEQ ID NO: 1099219 - RNA, 22 nt, Human
auucuuauuuaaauagagucug

SEQ ID NO: 1099220 - RNA, 22 nt, Human
ucaugcuuaaaagacacuugag

SEQ ID NO: 1099221 - RNA, 22 nt, Human
ugguaaauauguccauucucuu

SEQ ID NO: 1099222 - RNA, 22 nt, Human
ccaugagcuucaacugacacag

SEQ ID NO: 1099223 - RNA, 22 nt, Human
uuuuuggguccaggcuguaucu

SEQ ID NO: 1099224 - RNA, 22 nt, Human
cucugucacuucuccagcugag

SEQ ID NO: 1099225 - RNA, 22 nt, Human
uguuagaaguuaaucacuaauu

SEQ ID NO: 1099226 - RNA, 22 nt, Human
aaggccagaguacuagaggcug

SEQ ID NO: 1099227 - RNA, 22 nt, Human
cugagcugggaguagagacucu

SEQ ID NO: 1099228 - RNA, 22 nt, Human
cuucucaguugcaagugucaga

SEQ ID NO: 1099229 - RNA, 22 nt, Human
caaugugguggcagaugucagu

SEQ ID NO: 1099230 - RNA, 22 nt, Human
auugaaagcauggauuuggauu

SEQ ID NO: 1099231 - RNA, 21 nt, Human
gauuugcagaaacuagacagg

SEQ ID NO: 1099232 - RNA, 22 nt, Human
gaaauauuguacuggagauguu

SEQ ID NO: 1099233 - RNA, 22 nt, Human
uguucuucuagauugccuuuua

SEQ ID NO: 1099234 - RNA, 20 nt, Human
uuucaagucagcaauucuca

SEQ ID NO: 1099235 - RNA, 22 nt, Human
uacuuuuuagcacagugugugc

SEQ ID NO: 1099236 - RNA, 22 nt, Human
ccucagaugucuuaaggcacug

SEQ ID NO: 1099237 - RNA, 22 nt, Human
cauuuguuaaccaguguggauu

SEQ ID NO: 1099238 - RNA, 22 nt, Human
cuuaaauuggaugaguuaaguu

SEQ ID NO: 1099239 - RNA, 23 nt, Human
acagacaacacugaugagagaaa

SEQ ID NO: 1099240 - RNA, 22 nt, Human
aguuauaaucugcuacugauau

SEQ ID NO: 1099241 - RNA, 22 nt, Human
agugcuuucuugcuccaucagu

SEQ ID NO: 1099242 - RNA, 22 nt, Human
gaccuggaggauccucuucuug

SEQ ID NO: 1099243 - RNA, 22 nt, Human
auacuguuuugugacuuaucuu

SEQ ID NO: 1099244 - RNA, 22 nt, Human
auaaaugauucagcaggaaaua

SEQ ID NO: 1099245 - RNA, 22 nt, Human
agguauaagucucauuucuguu

SEQ ID NO: 1099246 - RNA, 22 nt, Human
aauugcaacagguagacuuuuc

SEQ ID NO: 1099247 - RNA, 22 nt, Human
caguuuuugccauuaagaguaa

SEQ ID NO: 1099248 - RNA, 22 nt, Human
caguugcuggaugugcagcucu

SEQ ID NO: 1099249 - RNA, 22 nt, Human
ucauuucccuccuacaaagagg

SEQ ID NO: 1099250 - RNA, 22 nt, Human
uugaaaguccuucuugaguuac

SEQ ID NO: 1099251 - RNA, 22 nt, Human
ugcauaaagugccauaguauua

SEQ ID NO: 1099252 - RNA, 22 nt, Human
caaggccacguucugcaugcgg

SEQ ID NO: 1099253 - RNA, 17 nt, Human
ugaauucaaucugcacu

SEQ ID NO: 1099254 - RNA, 22 nt, Human
gccacaggcacuuaagggcugg

SEQ ID NO: 1099255 - RNA, 22 nt, Human
cuugauguauaaguugauaugu

SEQ ID NO: 1099256 - RNA, 22 nt, Human
gaacaucagucauaauuuaacg

SEQ ID NO: 1099257 - RNA, 22 nt, Human
auccugucaucauaguacuuga

SEQ ID NO: 1099258 - RNA, 22 nt, Human
auucuucaccugagucagucua

SEQ ID NO: 1099259 - RNA, 22 nt, Human
ugcacagugaccccuggugacu

SEQ ID NO: 1099260 - RNA, 22 nt, Human
aaucuucagugucuaaaaagca

SEQ ID NO: 1099261 - RNA, 20 nt, Human
gcaaaauaggcucuguuggu

SEQ ID NO: 1099262 - RNA, 22 nt, Human
ucugugcauuguaacaacuaaa

SEQ ID NO: 1099263 - RNA, 18 nt, Human
cucugucauaagugucau

SEQ ID NO: 1099264 - RNA, 22 nt, Human
ucuucucuccugcuuggcagaa

SEQ ID NO: 1099265 - RNA, 22 nt, Human
cuucaggauuuaggaagaugaa

SEQ ID NO: 1099266 - RNA, 22 nt, Human
agaggccaggcugcagagggau

SEQ ID NO: 1099267 - RNA, 22 nt, Human
auuuuccucaagccucuggaag

SEQ ID NO: 1099268 - RNA, 22 nt, Human
uuucauugaugggugauagaaa

SEQ ID NO: 1099269 - RNA, 22 nt, Human
ucaucuugcugccauugcuuua

SEQ ID NO: 1099270 - RNA, 22 nt, Human
uuucacaucagagguagauuag

SEQ ID NO: 1099271 - RNA, 22 nt, Human
uucuucaaaacaacacuggccu

SEQ ID NO: 1099272 - RNA, 22 nt, Human
cugcuucuccaaaguaggacuu

SEQ ID NO: 1099273 - RNA, 22 nt, Human
augacaguucuacacuuaaucu

SEQ ID NO: 1099274 - RNA, 22 nt, Human
ugaaagguagcuggccucauag

SEQ ID NO: 1099275 - RNA, 22 nt, Human
auugaaagaguuuucugcugca

SEQ ID NO: 1099276 - RNA, 22 nt, Human
ugcuucuggaaacaguggcugu

SEQ ID NO: 1099277 - RNA, 22 nt, Human
uuuugcuugagugcacaaaaug

SEQ ID NO: 1099278 - RNA, 22 nt, Human
acaagcaugggcuuugacauca

SEQ ID NO: 1099279 - RNA, 22 nt, Human
aguucuuuugugaacauaugcu

SEQ ID NO: 1099280 - RNA, 22 nt, Human
uuuccaagacuccaguucuccc

SEQ ID NO: 1099281 - RNA, 20 nt, Human
uuucacagucccuguuuccu

SEQ ID NO: 1099282 - RNA, 22 nt, Human
uucaggaugaaagugugcaaca

SEQ ID NO: 1099283 - RNA, 23 nt, Human
acagaaaguucugcuggacagag

SEQ ID NO: 1099284 - RNA, 22 nt, Human
gaucuguuucauucacagucug

SEQ ID NO: 1099285 - RNA, 22 nt, Human
uauuuccaagcugaauccaaug

SEQ ID NO: 1099286 - RNA, 22 nt, Human
guccucuggaagaugaguucuu

SEQ ID NO: 1099287 - RNA, 22 nt, Human
cucuccucugaaguggugaccc

SEQ ID NO: 1099288 - RNA, 22 nt, Human
ugucaaagccugaaucacauag

SEQ ID NO: 1099289 - RNA, 22 nt, Human
ugcugaugcuguucuguuagga

SEQ ID NO: 1099290 - RNA, 22 nt, Human
gaacacauguccuccuuggauu

SEQ ID NO: 1099291 - RNA, 22 nt, Human
augcuguguggccaccuccaug

SEQ ID NO: 1099292 - RNA, 22 nt, Human
uagacauuucugguuauugaca

SEQ ID NO: 1099293 - RNA, 23 nt, Human
uuucaaauuacucugcagaugac

SEQ ID NO: 1099294 - RNA, 22 nt, Human
gcuuuggagccuguguucugcc

SEQ ID NO: 1099295 - RNA, 20 nt, Human
ggggcugcaugcagagaaga

SEQ ID NO: 1099296 - RNA, 22 nt, Human
uacucagagucauugcccuucu

SEQ ID NO: 1099297 - RNA, 22 nt, Human
aguguguccagaaaucuguauu

SEQ ID NO: 1099298 - RNA, 22 nt, Human
aaauacuagaauucagaguuga

SEQ ID NO: 1099299 - RNA, 22 nt, Human
guuguuuugcaggauccuuaca

SEQ ID NO: 1099300 - RNA, 22 nt, Human
cacucugaugguuucuguucaa

SEQ ID NO: 1099301 - RNA, 21 nt, Human
ggcagccucuguggaagggga

SEQ ID NO: 1099302 - RNA, 22 nt, Human
caugucuguguacacaugcaca

SEQ ID NO: 1099303 - RNA, 22 nt, Human
caugaaauugcuccuuuggugc

SEQ ID NO: 1099304 - RNA, 22 nt, Human
caaggccacugcucagguuucc

SEQ ID NO: 1099305 - RNA, 20 nt, Human
ucauuguguugccaauuccc

SEQ ID NO: 1099306 - RNA, 22 nt, Human
ugugugaaggagccacuguuca

SEQ ID NO: 1099307 - RNA, 22 nt, Human
acucaggaaaugagaggcucuc

SEQ ID NO: 1099308 - RNA, 22 nt, Human
cuucuucacacuggucugaagc

SEQ ID NO: 1099309 - RNA, 22 nt, Human
aucuguuccccuaugcucucua

SEQ ID NO: 1099310 - RNA, 22 nt, Human
cagucccuaguggagcucacag

SEQ ID NO: 1099311 - RNA, 22 nt, Human
aaaguuugaaugauauauuagu

SEQ ID NO: 1099312 - RNA, 22 nt, Human
caguucuuuguggggaguucuc

SEQ ID NO: 1099313 - RNA, 20 nt, Human
uucacagaggacucagguca

SEQ ID NO: 1099314 - RNA, 22 nt, Human
aaaggccaccaacaugaagcau

SEQ ID NO: 1099315 - RNA, 20 nt, Human
ugcguguguauuuauuuucu

SEQ ID NO: 1099316 - RNA, 22 nt, Human
gaacacaucacauuuuacagug

SEQ ID NO: 1099317 - RNA, 22 nt, Human
ucuucagaggaagucagucuuu

SEQ ID NO: 1099318 - RNA, 22 nt, Human
auucuucaguauguguggauug

SEQ ID NO: 1099319 - RNA, 22 nt, Human
uucuacagacuauaacugugau

SEQ ID NO: 1099320 - RNA, 22 nt, Human
augaaacaguguguauagcaaa

SEQ ID NO: 1099321 - RNA, 22 nt, Human
uugaauaguguuuucaguauac

SEQ ID NO: 1099322 - RNA, 22 nt, Human
ugaaaugagauagauaaucagg

SEQ ID NO: 1099323 - RNA, 23 nt, Human
ccacagagcugccaauuccugug

SEQ ID NO: 1099324 - RNA, 22 nt, Human
agaggagugggaagcagugcaa

SEQ ID NO: 1099325 - RNA, 22 nt, Human
cucagaauuuagggcucugagg

SEQ ID NO: 1099326 - RNA, 22 nt, Human
uuucaguuguccuguuaauagc

SEQ ID NO: 1099327 - RNA, 22 nt, Human
acugugugacuguuauuacugu

SEQ ID NO: 1099328 - RNA, 22 nt, Human
uuuaaauuuagaagaaacacug

SEQ ID NO: 1099329 - RNA, 22 nt, Human
ccaggcugcagucaaggggcau

SEQ ID NO: 1099330 - RNA, 19 nt, Human
acaaaugauguugcacuga

SEQ ID NO: 1099331 - RNA, 22 nt, Human
auacaaagacaaaucucaaucu

SEQ ID NO: 1099332 - RNA, 22 nt, Human
acaauauuguacccagaaguuu

SEQ ID NO: 1099333 - RNA, 22 nt, Human
uaaggccaggcuguggucggca

SEQ ID NO: 1099334 - RNA, 22 nt, Human
aucugcuugaaugagcaacagg

SEQ ID NO: 1099335 - RNA, 22 nt, Human
caacugugaauuuuaugauacc

SEQ ID NO: 1099336 - RNA, 20 nt, Human
cuucuucaguaguuuguucu

SEQ ID NO: 1099337 - RNA, 23 nt, Human
aaggccagaauuucaauggugcc

SEQ ID NO: 1099338 - RNA, 22 nt, Human
uuuugugagcccauaaaugcca

SEQ ID NO: 1099339 - RNA, 22 nt, Human
uccauuuuguagguaugcuaca

SEQ ID NO: 1099340 - RNA, 22 nt, Human
agugcuuuccuucuugugacau

SEQ ID NO: 1099341 - RNA, 22 nt, Human
auugugcaaauauuaucuguag

SEQ ID NO: 1099342 - RNA, 22 nt, Human
agucucugcugguugugccuau

SEQ ID NO: 1099343 - RNA, 22 nt, Human
aucuacauaaaacgaauacaua

SEQ ID NO: 1099344 - RNA, 22 nt, Human
gauuucuuuagguguaauagug

SEQ ID NO: 1099345 - RNA, 22 nt, Human
aauaacuucaguucuuacauua

SEQ ID NO: 1099346 - RNA, 22 nt, Human
acagucauuagauacaaugucu

SEQ ID NO: 1099347 - RNA, 22 nt, Human
ggguacuuaauauuuacggggu

SEQ ID NO: 1099348 - RNA, 22 nt, Human
uuaucauugucgcagucuaauu

SEQ ID NO: 1099349 - RNA, 22 nt, Human
uuauacauguguuuugagauga

SEQ ID NO: 1099350 - RNA, 22 nt, Human
ugaaaugagcauuuauucuuua

SEQ ID NO: 1099351 - RNA, 22 nt, Human
aucugucuugccuugcauauuu

SEQ ID NO: 1099352 - RNA, 22 nt, Human
uucagcaagaccaccauguacc

SEQ ID NO: 1099353 - RNA, 20 nt, Human
aguuauaguaucuagccaug

SEQ ID NO: 1099354 - RNA, 22 nt, Human
ucacugcucuccaauguggagu

SEQ ID NO: 1099355 - RNA, 22 nt, Human
agugcugucaguuuuauagaua

SEQ ID NO: 1099356 - RNA, 22 nt, Human
uguugauuaguguuuagacuua

SEQ ID NO: 1099357 - RNA, 22 nt, Human
caagauggguguugugaugguu

SEQ ID NO: 1099358 - RNA, 22 nt, Human
uuuuagcacuaagugauaugcu

SEQ ID NO: 1099359 - RNA, 22 nt, Human
agaaaugaaaccaaagccuaga

SEQ ID NO: 1099360 - RNA, 22 nt, Human
ccuccuuuccuguuuuccugag

SEQ ID NO: 1099361 - RNA, 22 nt, Human
aaauaguuguuuggaucaauaa

SEQ ID NO: 1099362 - RNA, 22 nt, Human
uugguuuacuaggauucaaauu

SEQ ID NO: 1099363 - RNA, 20 nt, Human
caguccaaucagaggccacc

SEQ ID NO: 1099364 - RNA, 22 nt, Human
ucucaggaagugauauugagac

SEQ ID NO: 1099365 - RNA, 22 nt, Human
acacagccgugaaucugcuucu

SEQ ID NO: 1099366 - RNA, 22 nt, Human
uucaggauccccuugaugggcu

SEQ ID NO: 1099367 - RNA, 22 nt, Human
uucucagaggagucgggagcug

SEQ ID NO: 1099368 - RNA, 22 nt, Human
ucugcucuguggcuucagcuaa

SEQ ID NO: 1099369 - RNA, 22 nt, Human
uugugaguagugccgcaauaaa

SEQ ID NO: 1099370 - RNA, 22 nt, Human
aaggcaguuaauuuggcuagaa

SEQ ID NO: 1099371 - RNA, 22 nt, Human
ugcugaugaguccuucuaucgc

SEQ ID NO: 1099372 - RNA, 19 nt, Human
acauauguggauauacaug

SEQ ID NO: 1099373 - RNA, 20 nt, Human
ucacaucuggcagcugauga

SEQ ID NO: 1099374 - RNA, 22 nt, Human
uuaaauauuuucagcaggguca

SEQ ID NO: 1099375 - RNA, 22 nt, Human
ucuccuccuuuuuucaacauag

SEQ ID NO: 1099376 - RNA, 22 nt, Human
aguggcagagugcacucaggca

SEQ ID NO: 1099377 - RNA, 22 nt, Human
agagacagaggcaauauagcuu

SEQ ID NO: 1099378 - RNA, 22 nt, Human
uugaaaguuuauggagucugca

SEQ ID NO: 1099379 - RNA, 19 nt, Human
acauuuagaauguacuugc

SEQ ID NO: 1099380 - RNA, 22 nt, Human
uugaaagaggcaaaguuugauc

SEQ ID NO: 1099381 - RNA, 22 nt, Human
guaugaaaauuguaaaguucuu

SEQ ID NO: 1099382 - RNA, 22 nt, Human
gauaaugaugacaaugacaacc

SEQ ID NO: 1099383 - RNA, 18 nt, Human
ugucauaauauaucaccu

SEQ ID NO: 1099384 - RNA, 22 nt, Human
gucauauacacugcauguaauc

SEQ ID NO: 1099385 - RNA, 20 nt, Human
acaggggcagcacaauaaug

SEQ ID NO: 1099386 - RNA, 22 nt, Human
augcuuuuccaggagaaauaua

SEQ ID NO: 1099387 - RNA, 22 nt, Human
auguggaggaaaugaguguaca

SEQ ID NO: 1099388 - RNA, 22 nt, Human
cagaguucaaagccugcuggga

SEQ ID NO: 1099389 - RNA, 22 nt, Human
uuugacauuggcuuauucuguu

SEQ ID NO: 1099390 - RNA, 22 nt, Human
uucucagauccaucagaagucc

SEQ ID NO: 1099391 - RNA, 22 nt, Human
cagaguggcgacccccucagcu

SEQ ID NO: 1099392 - RNA, 22 nt, Human
ucugcugugauuugcuaccugu

SEQ ID NO: 1099393 - RNA, 22 nt, Human
uggcuguguuaccacuucaugu

SEQ ID NO: 1099394 - RNA, 22 nt, Human
ccaggauggggagcagauagaa

SEQ ID NO: 1099395 - RNA, 22 nt, Human
acaugauuuuuaaagagauaau

SEQ ID NO: 1099396 - RNA, 22 nt, Human
cauuuguagcuauuuacuguau

SEQ ID NO: 1099397 - RNA, 22 nt, Human
ucugucaaaaguuuucaauaaa

SEQ ID NO: 1099398 - RNA, 22 nt, Human
cuguaaauaugaagaauauaug

SEQ ID NO: 1099399 - RNA, 22 nt, Human
uccaugucuucaugugucuaac

SEQ ID NO: 1099400 - RNA, 22 nt, Human
cugcugugccucuuuucacgug

SEQ ID NO: 1099401 - RNA, 21 nt, Human
gugcuuuuccuuaauguucuu

SEQ ID NO: 1099402 - RNA, 22 nt, Human
ugucaagucucugaaugaaaug

SEQ ID NO: 1099403 - RNA, 22 nt, Human
uaucuaaauggaauauuccaga

SEQ ID NO: 1099404 - RNA, 22 nt, Human
uucaggaugcagagguuguagu

SEQ ID NO: 1099405 - RNA, 22 nt, Human
cucaggauccaucuccugcccu

SEQ ID NO: 1099406 - RNA, 22 nt, Human
auugcuguggaaauauaagaug

SEQ ID NO: 1099407 - RNA, 22 nt, Human
gucaggauuauaauccccaugg

SEQ ID NO: 1099408 - RNA, 23 nt, Human
aaauaugucugagggcaaagaau

SEQ ID NO: 1099409 - RNA, 22 nt, Human
gaaacauauuaauccagugaaa

SEQ ID NO: 1099410 - RNA, 21 nt, Human
uuugaaagcuacaucuauagc

SEQ ID NO: 1099411 - RNA, 22 nt, Human
caacugcugacaccaucacucc

SEQ ID NO: 1099412 - RNA, 22 nt, Human
uguuuuaaucucccauugcucu

SEQ ID NO: 1099413 - RNA, 22 nt, Human
uaaauuaugucacaugacucug

SEQ ID NO: 1099414 - RNA, 22 nt, Human
cucagaagaacaaaggcucuac

SEQ ID NO: 1099415 - RNA, 22 nt, Human
ggagcuguucaggacugcuuca

SEQ ID NO: 1099416 - RNA, 17 nt, Human
ggcagcugugugcaugc

SEQ ID NO: 1099417 - RNA, 23 nt, Human
ucuguacaauugagaagagaaca

SEQ ID NO: 1099418 - RNA, 22 nt, Human
uucugucaugcucauguaauug

SEQ ID NO: 1099419 - RNA, 22 nt, Human
gcuggcuugauaguuucugcuu

SEQ ID NO: 1099420 - RNA, 22 nt, Human
cucacugacgaggaagcugaga

SEQ ID NO: 1099421 - RNA, 22 nt, Human
uacuaucucuucuaacuucaga

SEQ ID NO: 1099422 - RNA, 22 nt, Human
ucucuguaguugggcagcugcu

SEQ ID NO: 1099423 - RNA, 22 nt, Human
cucuucuugaaagaggaauuca

SEQ ID NO: 1099424 - RNA, 23 nt, Human
ucagagagcuguugagagcugcc

SEQ ID NO: 1099425 - RNA, 21 nt, Human
uaugaacaugaccaauagucc

SEQ ID NO: 1099426 - RNA, 21 nt, Human
uugaccaagggugcgugcucc

SEQ ID NO: 1099427 - RNA, 22 nt, Human
uuagaacuuaaacuucagaaag

SEQ ID NO: 1099428 - RNA, 22 nt, Human
cauugcuuccuaugucccuucu

SEQ ID NO: 1099429 - RNA, 22 nt, Human
uuugaaauuaagauauugucca

SEQ ID NO: 1099430 - RNA, 22 nt, Human
gucaggauguuuauucuccagu

SEQ ID NO: 1099431 - RNA, 22 nt, Human
ucuuagaaguucauguuccagc

SEQ ID NO: 1099432 - RNA, 22 nt, Human
aaugagacacgugaagcagaug

SEQ ID NO: 1099433 - RNA, 22 nt, Human
gucuucaacaauaacuaccacu

SEQ ID NO: 1099434 - RNA, 22 nt, Human
uuucauugcagagucugugugc

SEQ ID NO: 1099435 - RNA, 22 nt, Human
ucauuuguugcuguuaccugag

SEQ ID NO: 1099436 - RNA, 23 nt, Human
uugcauagacauccucauagauu

SEQ ID NO: 1099437 - RNA, 22 nt, Human
uugagaagaggcuuuguaggaa

SEQ ID NO: 1099438 - RNA, 22 nt, Human
auuaaauuggaucugcauaguu

SEQ ID NO: 1099439 - RNA, 22 nt, Human
cccaugagauucugaauuuggc

SEQ ID NO: 1099440 - RNA, 22 nt, Human
cuuuuccacugagccucacaaa

SEQ ID NO: 1099441 - RNA, 22 nt, Human
auguuuccgugagcauccuuga

SEQ ID NO: 1099442 - RNA, 22 nt, Human
cuggcuuucucugugguguuca

SEQ ID NO: 1099443 - RNA, 22 nt, Human
gauggcagguaguggucucauc

SEQ ID NO: 1099444 - RNA, 22 nt, Human
ggcucagagaccugcgaucuga

SEQ ID NO: 1099445 - RNA, 22 nt, Human
uccucagaaaccccugugaggu

SEQ ID NO: 1099446 - RNA, 22 nt, Human
aucaggaugacuauaaggcugc

SEQ ID NO: 1099447 - RNA, 22 nt, Human
auugcuguaaauuaucuuauua

SEQ ID NO: 1099448 - RNA, 21 nt, Human
ucauuugugaucugauuucca

SEQ ID NO: 1099449 - RNA, 19 nt, Human
uucuccaggcugcagaggg

SEQ ID NO: 1099450 - RNA, 22 nt, Human
uuauuuucuccucagaaagugg

SEQ ID NO: 1099451 - RNA, 22 nt, Human
cuacagacccaccuuggaagaa

SEQ ID NO: 1099452 - RNA, 22 nt, Human
aaaguguugauaugugacaucc

SEQ ID NO: 1099453 - RNA, 22 nt, Human
cugcuguggugucaagcaucuc

SEQ ID NO: 1099454 - RNA, 22 nt, Human
uuuguuaauucuuauguuagag

SEQ ID NO: 1099455 - RNA, 22 nt, Human
auuccaguuggguucuaauaca

SEQ ID NO: 1099456 - RNA, 22 nt, Human
caaauaguaugagcaaugauuc

SEQ ID NO: 1099457 - RNA, 22 nt, Human
uuggaauucaaguuguagcuua

SEQ ID NO: 1099458 - RNA, 20 nt, Human
ugugaaagcaguagaaugac

SEQ ID NO: 1099459 - RNA, 22 nt, Human
uugcucagcacuggagccagcu

SEQ ID NO: 1099460 - RNA, 22 nt, Human
aauauccacacugugucccugc

SEQ ID NO: 1099461 - RNA, 17 nt, Human
uuuagaauacaauguuu

SEQ ID NO: 1099462 - RNA, 22 nt, Human
augcuguggccagaguucaacu

SEQ ID NO: 1099463 - RNA, 22 nt, Human
uuucauaauauccagagauuuu

SEQ ID NO: 1099464 - RNA, 22 nt, Human
uauucacaggcacgaaauauug

SEQ ID NO: 1099465 - RNA, 22 nt, Human
uacauucagcaaaagaaugguu

SEQ ID NO: 1099466 - RNA, 22 nt, Human
ucacugcugcugccaugaugga

SEQ ID NO: 1099467 - RNA, 22 nt, Human
cugcuguguuccuccugcaucu

SEQ ID NO: 1099468 - RNA, 22 nt, Human
uauauguaagcuauguaagagu

SEQ ID NO: 1099469 - RNA, 22 nt, Human
aauacugucuuucacagauauu

SEQ ID NO: 1099470 - RNA, 22 nt, Human
aaaggaagauugagcuuuucca

SEQ ID NO: 1099471 - RNA, 22 nt, Human
cauuuuaagaugaccugguuuc

SEQ ID NO: 1099472 - RNA, 22 nt, Human
guaguuuucugaaaauuacuuu

SEQ ID NO: 1099473 - RNA, 22 nt, Human
auugaaagguuuugagcagaua

SEQ ID NO: 1099474 - RNA, 22 nt, Human
cugagacuuucaugugcuuuua

SEQ ID NO: 1099475 - RNA, 22 nt, Human
aucuuucuauuucuaaaaacua

SEQ ID NO: 1099476 - RNA, 22 nt, Human
uuuagaaguucacacauuuaaa

SEQ ID NO: 1099477 - RNA, 23 nt, Human
auucuucauuaucuucuagaaaa

SEQ ID NO: 1099478 - RNA, 22 nt, Human
uugaaaguuaucuagauucuga

SEQ ID NO: 1099479 - RNA, 22 nt, Human
gcaucuaauccaguccagcauc

SEQ ID NO: 1099480 - RNA, 22 nt, Human
auucaaguggcugcuauguuaa

SEQ ID NO: 1099481 - RNA, 22 nt, Human
cuuguaauuauaauguacuguu

SEQ ID NO: 1099482 - RNA, 22 nt, Human
gauuuuaauuauaggagguccu

SEQ ID NO: 1099483 - RNA, 22 nt, Human
cagucuuuguucccauuacuga

SEQ ID NO: 1099484 - RNA, 22 nt, Human
ucucccaggcugcccuguggac

SEQ ID NO: 1099485 - RNA, 22 nt, Human
aauucuguuacuaaugugaugu

SEQ ID NO: 1099486 - RNA, 22 nt, Human
uuagccauauagaaaaagagcu

SEQ ID NO: 1099487 - RNA, 22 nt, Human
aacuacauuguccuuucugaag

SEQ ID NO: 1099488 - RNA, 22 nt, Human
aagauuauuuaagacaggaacc

SEQ ID NO: 1099489 - RNA, 22 nt, Human
cucugaaagaguuuaguauuau

SEQ ID NO: 1099490 - RNA, 22 nt, Human
augaggcaaucaugguccaguu

SEQ ID NO: 1099491 - RNA, 22 nt, Human
gucauucuuaacaacucaguag

SEQ ID NO: 1099492 - RNA, 22 nt, Human
ugagauguaagguaugcuuacu

SEQ ID NO: 1099493 - RNA, 22 nt, Human
cuguggaaaauuuguauguaau

SEQ ID NO: 1099494 - RNA, 22 nt, Human
ugcacauuaguguuugagaugc

SEQ ID NO: 1099495 - RNA, 22 nt, Human
auauaauacaaccugcuaagug

SEQ ID NO: 1099496 - RNA, 22 nt, Human
guucuucaucauuaacacucug

SEQ ID NO: 1099497 - RNA, 22 nt, Human
agugauggugagugagaagcuc

SEQ ID NO: 1099498 - RNA, 22 nt, Human
uugcauuuaaguagauguuaca

SEQ ID NO: 1099499 - RNA, 22 nt, Human
guucuucacauuucauugagga

SEQ ID NO: 1099500 - RNA, 22 nt, Human
aucauuuuuaagagacucuucu

SEQ ID NO: 1099501 - RNA, 22 nt, Human
caaggccaaagggccacuguca

SEQ ID NO: 1099502 - RNA, 22 nt, Human
aggggcucaaagugugcaggga

SEQ ID NO: 1099503 - RNA, 23 nt, Human
uuugaaguugacugccuuccaga

SEQ ID NO: 1099504 - RNA, 22 nt, Human
uuagccauuaauguccugugca

SEQ ID NO: 1099505 - RNA, 22 nt, Human
uucuucagucccacuagccaca

SEQ ID NO: 1099506 - RNA, 22 nt, Human
uuagccauggacugaauugacu

SEQ ID NO: 1099507 - RNA, 22 nt, Human
ugaaagcagcaccaauaccauu

SEQ ID NO: 1099508 - RNA, 22 nt, Human
uugcuuugccaccagaagucua

SEQ ID NO: 1099509 - RNA, 22 nt, Human
uucaggauuguguuuuuccuga

SEQ ID NO: 1099510 - RNA, 22 nt, Human
augcuacagcaucucucaucag

SEQ ID NO: 1099511 - RNA, 22 nt, Human
cuguguuugaugagaagccacc

SEQ ID NO: 1099512 - RNA, 22 nt, Human
gaaaggcaguacagcugagccu

SEQ ID NO: 1099513 - RNA, 21 nt, Human
aaaggccauaaucacggagca

SEQ ID NO: 1099514 - RNA, 21 nt, Human
ccauaccuaccucaccugguu

SEQ ID NO: 1099515 - RNA, 22 nt, Human
gaccauuugcuaguaaauugca

SEQ ID NO: 1099516 - RNA, 22 nt, Human
ucagugugaguaccaugcucag

SEQ ID NO: 1099517 - RNA, 22 nt, Human
uuccagcaggcagacaggagau

SEQ ID NO: 1099518 - RNA, 22 nt, Human
ucuuuccauggccacacagucu

SEQ ID NO: 1099519 - RNA, 22 nt, Human
uuguaaaugaccuuuucuaauu

SEQ ID NO: 1099520 - RNA, 22 nt, Human
auaucaguaucuauguauuugu

SEQ ID NO: 1099521 - RNA, 22 nt, Human
caaaugauagagccgauuauca

SEQ ID NO: 1099522 - RNA, 22 nt, Human
uagaagcaguaauagaaauagg

SEQ ID NO: 1099523 - RNA, 22 nt, Human
uuagccauuaaauuacaaggug

SEQ ID NO: 1099524 - RNA, 22 nt, Human
gcaaguuauuuccauuuaaagc

SEQ ID NO: 1099525 - RNA, 22 nt, Human
ucauuucuccgaccugcugucc

SEQ ID NO: 1099526 - RNA, 22 nt, Human
uggaaauauacaaugugucucu

SEQ ID NO: 1099527 - RNA, 22 nt, Human
aaaguucuuucucuuauuuggu

SEQ ID NO: 1099528 - RNA, 22 nt, Human
uuucacaagacagcuacuguug

SEQ ID NO: 1099529 - RNA, 22 nt, Human
uucauacaaugggauauuauga

SEQ ID NO: 1099530 - RNA, 22 nt, Human
gggagcugaauggcaauggaga

SEQ ID NO: 1099531 - RNA, 21 nt, Human
cgcagagcgaacuugcggcgc

SEQ ID NO: 1099532 - RNA, 22 nt, Human
auaucaaacgaaguuauuuuaa

SEQ ID NO: 1099533 - RNA, 22 nt, Human
aggaugaauaacugaaauggug

SEQ ID NO: 1099534 - RNA, 22 nt, Human
uuuugaauaauucagaaacagc

SEQ ID NO: 1099535 - RNA, 22 nt, Human
uugcauuugagaaaguucuccu

SEQ ID NO: 1099536 - RNA, 21 nt, Human
ucuagaauccuguauaagacu

SEQ ID NO: 1099537 - RNA, 23 nt, Human
uguugaaguaacuguuacauaga

SEQ ID NO: 1099538 - RNA, 22 nt, Human
gaaacugugaggaucuuaacuu

SEQ ID NO: 1099539 - RNA, 22 nt, Human
aguuugaauugaaaugcagaug

SEQ ID NO: 1099540 - RNA, 22 nt, Human
cugcugugcaacauugcaccua

SEQ ID NO: 1099541 - RNA, 22 nt, Human
gaggccaaucaauagggcaaua

SEQ ID NO: 1099542 - RNA, 22 nt, Human
cacucaggcugugucaggagga

SEQ ID NO: 1099543 - RNA, 22 nt, Human
acauuuagaguucuuuacucca

SEQ ID NO: 1099544 - RNA, 22 nt, Human
ggagcugugcagugacuacaga

SEQ ID NO: 1099545 - RNA, 22 nt, Human
uagugcuuaacacaaagugauu

SEQ ID NO: 1099546 - RNA, 22 nt, Human
uuugagauggagucuugcucug

SEQ ID NO: 1099547 - RNA, 22 nt, Human
aguaccaugcuuccugacuggu

SEQ ID NO: 1099548 - RNA, 22 nt, Human
cuucucagaggccagaagcuau

SEQ ID NO: 1099549 - RNA, 22 nt, Human
ucauuuguucucauucucuacu

SEQ ID NO: 1099550 - RNA, 19 nt, Human
gacagugcaguuguaguac

SEQ ID NO: 1099551 - RNA, 22 nt, Human
aggcacaggccucagcacccag

SEQ ID NO: 1099552 - RNA, 22 nt, Human
uauguacuaacuuucauucuag

SEQ ID NO: 1099553 - RNA, 22 nt, Human
cuugcacacauguacaugugua

SEQ ID NO: 1099554 - RNA, 22 nt, Human
uugguuuagagagugugguuac

SEQ ID NO: 1099555 - RNA, 22 nt, Human
cucuucuuuaguccagaccauc

SEQ ID NO: 1099556 - RNA, 22 nt, Human
uuugacauggaauaacucauuu

SEQ ID NO: 1099557 - RNA, 22 nt, Human
uucuuucucaacaugaauguuu

SEQ ID NO: 1099558 - RNA, 22 nt, Human
uauguacaugauuucauuugcu

SEQ ID NO: 1099559 - RNA, 20 nt, Human
cugcugugauucccuccucc

SEQ ID NO: 1099560 - RNA, 22 nt, Human
ugcauaguucuccuuccuccuc

SEQ ID NO: 1099561 - RNA, 22 nt, Human
gugguaauuuaauccuacacug

SEQ ID NO: 1099562 - RNA, 22 nt, Human
uuuccaagagcuuauuucugaa

SEQ ID NO: 1099563 - RNA, 22 nt, Human
agauggaguuaguaccagaguc

SEQ ID NO: 1099564 - RNA, 22 nt, Human
uaauuauucuagucacauagca

SEQ ID NO: 1099565 - RNA, 18 nt, Human
ugugaacacauuuuucug

SEQ ID NO: 1099566 - RNA, 22 nt, Human
auguuagaaggaauguuaaaag

SEQ ID NO: 1099567 - RNA, 22 nt, Human
gaaggccauuagagccugugcc

SEQ ID NO: 1099568 - RNA, 22 nt, Human
acaauacuuaccaauguuuuug

SEQ ID NO: 1099569 - RNA, 22 nt, Human
caugauuuugucuuguguuaau

SEQ ID NO: 1099570 - RNA, 22 nt, Human
acauauauuacuaguaaagaca

SEQ ID NO: 1099571 - RNA, 21 nt, Human
uuagaaagcucacuacaguua

SEQ ID NO: 1099572 - RNA, 22 nt, Human
cuuuggcagccucugcuauuga

SEQ ID NO: 1099573 - RNA, 22 nt, Human
uauacacaaggugugcauuugu

SEQ ID NO: 1099574 - RNA, 19 nt, Human
ugccuggacaaaugugggg

SEQ ID NO: 1099575 - RNA, 22 nt, Human
aguggacucuucccagugcuug

SEQ ID NO: 1099576 - RNA, 22 nt, Human
uugugguuaaccgcacauuuuu

SEQ ID NO: 1099577 - RNA, 21 nt, Human
uucucagaucgaguagugaga

SEQ ID NO: 1099578 - RNA, 22 nt, Human
cuacaaugacagaauugaguag

SEQ ID NO: 1099579 - RNA, 22 nt, Human
uuuuagauaguuuaacugcacu

SEQ ID NO: 1099580 - RNA, 22 nt, Human
ugaaagguuauuuaggucugcu

SEQ ID NO: 1099581 - RNA, 16 nt, Human
uguaugaacgucucca

SEQ ID NO: 1099582 - RNA, 22 nt, Human
ugacaguuaagguauacauuca

SEQ ID NO: 1099583 - RNA, 22 nt, Human
gaacacauuucucugacuguag

SEQ ID NO: 1099584 - RNA, 22 nt, Human
uagaaaugaauguuuaaaaguc

SEQ ID NO: 1099585 - RNA, 22 nt, Human
cauugcuguuaauugucucuag

SEQ ID NO: 1099586 - RNA, 22 nt, Human
auuacaauaagguuuauuugua

SEQ ID NO: 1099587 - RNA, 22 nt, Human
aaaaugacauuccagugauauu

SEQ ID NO: 1099588 - RNA, 20 nt, Human
agcauuugaaauaugacuau

SEQ ID NO: 1099589 - RNA, 22 nt, Human
uggaaauacuugccauaaaacu

SEQ ID NO: 1099590 - RNA, 22 nt, Human
augcugugagugugccgcagag

SEQ ID NO: 1099591 - RNA, 22 nt, Human
gcagagcuccccaagacaccaa

SEQ ID NO: 1099592 - RNA, 22 nt, Human
cacaugcaucugucauguuugg

SEQ ID NO: 1099593 - RNA, 22 nt, Human
caauaguucgguccugaaggcc

SEQ ID NO: 1099594 - RNA, 22 nt, Human
guagccauuggcaaugaagccu

SEQ ID NO: 1099595 - RNA, 22 nt, Human
augaggcaucugcagucacuag

SEQ ID NO: 1099596 - RNA, 22 nt, Human
aaaaauaggucaaccguguaug

SEQ ID NO: 1099597 - RNA, 20 nt, Human
uccaugaguuagagacuaua

SEQ ID NO: 1099598 - RNA, 22 nt, Human
uuuguuaaauauuuauugagug

SEQ ID NO: 1099599 - RNA, 22 nt, Human
cuuugaagagauuacugugcuc

SEQ ID NO: 1099600 - RNA, 22 nt, Human
uugaauaggacucagcagugau

SEQ ID NO: 1099601 - RNA, 22 nt, Human
caggauggagaguuguugguug

SEQ ID NO: 1099602 - RNA, 22 nt, Human
gcaagcugcucuuauguggagg

SEQ ID NO: 1099603 - RNA, 22 nt, Human
agauauauuuaagguaauaagu

SEQ ID NO: 1099604 - RNA, 22 nt, Human
cugcucuagagagcauuaguca

SEQ ID NO: 1099605 - RNA, 22 nt, Human
uucaguaaaacacugcaauguc

SEQ ID NO: 1099606 - RNA, 22 nt, Human
uaguuaaaauaauggagauguu

SEQ ID NO: 1099607 - RNA, 22 nt, Human
gcauguguggaggagaugugcu

SEQ ID NO: 1099608 - RNA, 22 nt, Human
aaggcaguuugggccaccaucu

SEQ ID NO: 1099609 - RNA, 22 nt, Human
uauuucuaagagauaucuguac

SEQ ID NO: 1099610 - RNA, 22 nt, Human
cacucaggguacaauggagggc

SEQ ID NO: 1099611 - RNA, 22 nt, Human
gaaucucaaggcuugugaggau

SEQ ID NO: 1099612 - RNA, 22 nt, Human
auacauacauguaugcacauac

SEQ ID NO: 1099613 - RNA, 22 nt, Human
ucuucacaggagccugccugcc

SEQ ID NO: 1099614 - RNA, 22 nt, Human
uuugcagugauucuugcaguga

SEQ ID NO: 1099615 - RNA, 21 nt, Human
gcugcaucaaucuacccaggg

SEQ ID NO: 1099616 - RNA, 22 nt, Human
uugacacaguuuucucauuaag

SEQ ID NO: 1099617 - RNA, 23 nt, Human
uuucuucagaagccuugcgaggc

SEQ ID NO: 1099618 - RNA, 22 nt, Human
gacuucuauuaauaccucuacu

SEQ ID NO: 1099619 - RNA, 22 nt, Human
guuuucaaggggauuuaacuga

SEQ ID NO: 1099620 - RNA, 22 nt, Human
cuuugcaaacgauuaccacaug

SEQ ID NO: 1099621 - RNA, 21 nt, Human
auaagcaugcugauuacauuu

SEQ ID NO: 1099622 - RNA, 22 nt, Human
agaccuggauuccaauccuacc

SEQ ID NO: 1099623 - RNA, 22 nt, Human
cucacuguuuaauagcuggauc

SEQ ID NO: 1099624 - RNA, 18 nt, Human
acaaaugugucacaggaa

SEQ ID NO: 1099625 - RNA, 21 nt, Human
uucucagagucuauuacaguu

SEQ ID NO: 1099626 - RNA, 22 nt, Human
auguuuccagguucuuccuaug

SEQ ID NO: 1099627 - RNA, 22 nt, Human
acugauuacacgaguucugacu

SEQ ID NO: 1099628 - RNA, 22 nt, Human
guuuauaaggcccaauauuucu

SEQ ID NO: 1099629 - RNA, 23 nt, Human
uggagcugacagucagagggagg

SEQ ID NO: 1099630 - RNA, 19 nt, Human
uucacaauuaugaaauuag

SEQ ID NO: 1099631 - RNA, 19 nt, Human
gcuuuggagggagguucua

SEQ ID NO: 1099632 - RNA, 22 nt, Human
uaucuguuugcucacagguguu

SEQ ID NO: 1099633 - RNA, 22 nt, Human
cuuuccaagaaugcagauaccu

SEQ ID NO: 1099634 - RNA, 22 nt, Human
cauuuguaguaucuguuuauau

SEQ ID NO: 1099635 - RNA, 22 nt, Human
cccauucauccucgcuuccuuc

SEQ ID NO: 1099636 - RNA, 22 nt, Human
ucuacuauguuucuuaaauaga

SEQ ID NO: 1099637 - RNA, 22 nt, Human
ucuucagauaaagggagaguau

SEQ ID NO: 1099638 - RNA, 17 nt, Human
ucaggauguagcaguag

SEQ ID NO: 1099639 - RNA, 22 nt, Human
agagggagcccagucauagcug

SEQ ID NO: 1099640 - RNA, 18 nt, Human
gagucuuuguuacugcug

SEQ ID NO: 1099641 - RNA, 22 nt, Human
uggaguucucaggugagggcuu

SEQ ID NO: 1099642 - RNA, 22 nt, Human
uucuucaguuugguaaauguaa

SEQ ID NO: 1099643 - RNA, 22 nt, Human
uuuuccagauuggacuuagucc

SEQ ID NO: 1099644 - RNA, 22 nt, Human
ucuagaauuuugccauauagcu

SEQ ID NO: 1099645 - RNA, 21 nt, Human
ucacuagugccuucugucauu

SEQ ID NO: 1099646 - RNA, 22 nt, Human
ccuugcugcgugcuagcacaga

SEQ ID NO: 1099647 - RNA, 22 nt, Human
cuguggaauugaugcuuagugu

SEQ ID NO: 1099648 - RNA, 22 nt, Human
uacuuucuguccuucuguuaaa

SEQ ID NO: 1099649 - RNA, 22 nt, Human
uuaggaguccagaugucuuggg

SEQ ID NO: 1099650 - RNA, 22 nt, Human
auuuagcaaaaaaugaugaagc

SEQ ID NO: 1099651 - RNA, 22 nt, Human
ccuugcguuuuacagcuucuag

SEQ ID NO: 1099652 - RNA, 22 nt, Human
auacaacuuuacaugcaauucc

SEQ ID NO: 1099653 - RNA, 21 nt, Human
uaaggccaagucuauuucugu

SEQ ID NO: 1099654 - RNA, 22 nt, Human
aucauuacuccuguaaaauugu

SEQ ID NO: 1099655 - RNA, 22 nt, Human
gcugucccgcugacuuccagcu

SEQ ID NO: 1099656 - RNA, 22 nt, Human
gcauucuuuuuaggagguuccu

SEQ ID NO: 1099657 - RNA, 22 nt, Human
cauaauuuuuuuaagucagaac

SEQ ID NO: 1099658 - RNA, 22 nt, Human
cugcugugagcacuccagccug

SEQ ID NO: 1099659 - RNA, 22 nt, Human
cucuucuugccugaugaggcag

SEQ ID NO: 1099660 - RNA, 22 nt, Human
ugcauguguguguauuuauaaa

SEQ ID NO: 1099661 - RNA, 22 nt, Human
uucacagacauugcagacugaa

SEQ ID NO: 1099662 - RNA, 22 nt, Human
ucaucucaaaacccaaggggca

SEQ ID NO: 1099663 - RNA, 22 nt, Human
ucacaauuuggauacagcuaug

SEQ ID NO: 1099664 - RNA, 22 nt, Human
ugaaagguuaaaaguaguauug

SEQ ID NO: 1099665 - RNA, 22 nt, Human
aucaaauauaauaauuuucgcu

SEQ ID NO: 1099666 - RNA, 22 nt, Human
auuacaaucgagagaaacaaau

SEQ ID NO: 1099667 - RNA, 22 nt, Human
cccuuagcucaauuucuugccc

SEQ ID NO: 1099668 - RNA, 19 nt, Human
ucaucucacagggccuggc

SEQ ID NO: 1099669 - RNA, 22 nt, Human
uccaugagaacccuuggagaua

SEQ ID NO: 1099670 - RNA, 22 nt, Human
gaggggcagagguagagaacaa

SEQ ID NO: 1099671 - RNA, 22 nt, Human
agaaguuguagguuugcauauu

SEQ ID NO: 1099672 - RNA, 22 nt, Human
aucugccugcaguggagguggg

SEQ ID NO: 1099673 - RNA, 22 nt, Human
uuacaagcagcuacauaucaca

SEQ ID NO: 1099674 - RNA, 22 nt, Human
ucauauaaguuuaaaacuaucu

SEQ ID NO: 1099675 - RNA, 17 nt, Human
aggccagaugaggcaag

SEQ ID NO: 1099676 - RNA, 22 nt, Human
uagcauuucccaaaugcauuug

SEQ ID NO: 1099677 - RNA, 22 nt, Human
cauucauuuaugaaauaucuau

SEQ ID NO: 1099678 - RNA, 22 nt, Human
uggggcucaccuaggcuggaag

SEQ ID NO: 1099679 - RNA, 22 nt, Human
agaaaacuugucacagcucuca

SEQ ID NO: 1099680 - RNA, 22 nt, Human
cuucuucauaggcaguccuguu

SEQ ID NO: 1099681 - RNA, 22 nt, Human
aggcaguuguugcugagcagcu

SEQ ID NO: 1099682 - RNA, 22 nt, Human
caacagcugaucuuugaugaag

SEQ ID NO: 1099683 - RNA, 22 nt, Human
guccaugauucuguguaguaga

SEQ ID NO: 1099684 - RNA, 22 nt, Human
aacaugcugccuuucuacgagu

SEQ ID NO: 1099685 - RNA, 22 nt, Human
agucuuuccugcuugacuguuc

SEQ ID NO: 1099686 - RNA, 22 nt, Human
uugaaaggguuaaagugguaaa

SEQ ID NO: 1099687 - RNA, 22 nt, Human
auuucaaggcuauuaauauaaa

SEQ ID NO: 1099688 - RNA, 22 nt, Human
acucaggaauggggcugggacu

SEQ ID NO: 1099689 - RNA, 22 nt, Human
ucugggaacacacgucacuuca

SEQ ID NO: 1099690 - RNA, 22 nt, Human
gugguuuugccauuacaaguaa

SEQ ID NO: 1099691 - RNA, 22 nt, Human
cugucauugagccugucagggc

SEQ ID NO: 1099692 - RNA, 22 nt, Human
auugaaagcacaaagaacaagu

SEQ ID NO: 1099693 - RNA, 22 nt, Human
gcugguuuccuuaucuauaaag

SEQ ID NO: 1099694 - RNA, 22 nt, Human
cucaggauugugccuagggaga

SEQ ID NO: 1099695 - RNA, 22 nt, Human
ucuuugaauuucugacugucuu

SEQ ID NO: 1099696 - RNA, 22 nt, Human
ucaaauaaugccauucaucauc

SEQ ID NO: 1099697 - RNA, 22 nt, Human
cuuaagauuugcgauaccuaau

SEQ ID NO: 1099698 - RNA, 22 nt, Human
aaguccaugaucaagauguggc

SEQ ID NO: 1099699 - RNA, 21 nt, Human
uucuucaugaugauuaauggc

SEQ ID NO: 1099700 - RNA, 22 nt, Human
cauaauauacuacauugaugaa

SEQ ID NO: 1099701 - RNA, 22 nt, Human
caguuucuuggaugccaauuuc

SEQ ID NO: 1099702 - RNA, 22 nt, Human
uuuaagauucaguaaggcaaac

SEQ ID NO: 1099703 - RNA, 22 nt, Human
gucugucacucaggggcuggag

SEQ ID NO: 1099704 - RNA, 22 nt, Human
ugcugcugaucauuuauagucu

SEQ ID NO: 1099705 - RNA, 22 nt, Human
caggaaugaggucguaaguguc

SEQ ID NO: 1099706 - RNA, 22 nt, Human
agcaccaugaccuugccauuga

SEQ ID NO: 1099707 - RNA, 22 nt, Human
uugcugugucauuuguuuaauc

SEQ ID NO: 1099708 - RNA, 22 nt, Human
uuugcaaagaaauuauugcugu

SEQ ID NO: 1099709 - RNA, 22 nt, Human
uucauacacgaaaaugcaugca

SEQ ID NO: 1099710 - RNA, 22 nt, Human
acauuuuuauucaucaaagcag

SEQ ID NO: 1099711 - RNA, 22 nt, Human
augugaaaauccaauggcagca

SEQ ID NO: 1099712 - RNA, 22 nt, Human
agaaucucuacucaaguacuug

SEQ ID NO: 1099713 - RNA, 22 nt, Human
aaugaaauguagcuuauccaua

SEQ ID NO: 1099714 - RNA, 20 nt, Human
uucugucagauuauauggga

SEQ ID NO: 1099715 - RNA, 22 nt, Human
uuugacaaaggaaaaaugcaca

SEQ ID NO: 1099716 - RNA, 22 nt, Human
uucagugucaauuuuuaaauau

SEQ ID NO: 1099717 - RNA, 22 nt, Human
uaacaucuuuagcagcucgaac

SEQ ID NO: 1099718 - RNA, 22 nt, Human
uuuggaauuggaaagugcugug

SEQ ID NO: 1099719 - RNA, 21 nt, Human
uucuucaaagaagaaggcaca

SEQ ID NO: 1099720 - RNA, 22 nt, Human
uuugcaguuucauugcugaaau

SEQ ID NO: 1099721 - RNA, 22 nt, Human
ucagucuucccuccagugcaac

SEQ ID NO: 1099722 - RNA, 22 nt, Human
cugcuuccauaaauaaugugcu

SEQ ID NO: 1099723 - RNA, 22 nt, Human
cuuuggcacagucucauuugau

SEQ ID NO: 1099724 - RNA, 22 nt, Human
aaugucugccagaacugaucau

SEQ ID NO: 1099725 - RNA, 22 nt, Human
gcuguggucugugagcuccaaa

SEQ ID NO: 1099726 - RNA, 22 nt, Human
aaaauuauucauggcuuuugga

SEQ ID NO: 1099727 - RNA, 22 nt, Human
ugaaguuguuaagguugccauu

SEQ ID NO: 1099728 - RNA, 22 nt, Human
uuuacacaaaagauagcacacc

SEQ ID NO: 1099729 - RNA, 22 nt, Human
uucaggauaugugauaucugaa

SEQ ID NO: 1099730 - RNA, 22 nt, Human
uucaauucugcucugaucuuag

SEQ ID NO: 1099731 - RNA, 22 nt, Human
aucaggaugcugucaguuacca

SEQ ID NO: 1099732 - RNA, 22 nt, Human
aauaucaguauauuguaucagu

SEQ ID NO: 1099733 - RNA, 22 nt, Human
uaaaacuuaacuauccagauua

SEQ ID NO: 1099734 - RNA, 22 nt, Human
aaaguuuguugcuuacaaagaa

SEQ ID NO: 1099735 - RNA, 21 nt, Human
cuugaaagguagagucuacag

SEQ ID NO: 1099736 - RNA, 22 nt, Human
aucaggaucacagaaacuuuua

SEQ ID NO: 1099737 - RNA, 22 nt, Human
cuuagaaaucgaacucagguua

SEQ ID NO: 1099738 - RNA, 22 nt, Human
uuuuuauaugaaggauagugcg

SEQ ID NO: 1099739 - RNA, 22 nt, Human
agugcuuuauguuguugugcaa

SEQ ID NO: 1099740 - RNA, 22 nt, Human
aaaggccauuacuugcuuuuag

SEQ ID NO: 1099741 - RNA, 17 nt, Human
ccuguguuugcuccuuc

SEQ ID NO: 1099742 - RNA, 22 nt, Human
uuguaauuugcaaauguauugu

SEQ ID NO: 1099743 - RNA, 22 nt, Human
ccuggauucaagucuuucuuuc

SEQ ID NO: 1099744 - RNA, 22 nt, Human
uggugguuaugcgcuuuguggg

SEQ ID NO: 1099745 - RNA, 19 nt, Human
agcuuccauauucucuagu

SEQ ID NO: 1099746 - RNA, 22 nt, Human
uacugcaugguggaguggagcu

SEQ ID NO: 1099747 - RNA, 22 nt, Human
uccucagacuucccuuugugua

SEQ ID NO: 1099748 - RNA, 22 nt, Human
uuauuuaaugugaucugaagag

SEQ ID NO: 1099749 - RNA, 22 nt, Human
uaacacauagauauuuuaacuu

SEQ ID NO: 1099750 - RNA, 22 nt, Human
uggcuucuugggaugggucauu

SEQ ID NO: 1099751 - RNA, 22 nt, Human
aauacaguagguaauaguucau

SEQ ID NO: 1099752 - RNA, 22 nt, Human
uuugaaagaauuuauguacuuu

SEQ ID NO: 1099753 - RNA, 22 nt, Human
ggacuucuaagugccagacacu

SEQ ID NO: 1099754 - RNA, 22 nt, Human
ucugucuccucugaggugccag

SEQ ID NO: 1099755 - RNA, 22 nt, Human
gugacaguggucacuuguaguu

SEQ ID NO: 1099756 - RNA, 22 nt, Human
aaacaugaauagauauuaaaca

SEQ ID NO: 1099757 - RNA, 22 nt, Human
aaguugagaugucauaggagac

SEQ ID NO: 1099758 - RNA, 22 nt, Human
uguacuaaggcuguguagaugu

SEQ ID NO: 1099759 - RNA, 22 nt, Human
uauugaaauucuucauguccuc

SEQ ID NO: 1099760 - RNA, 22 nt, Human
auuguuaugaaaauaagauguu

SEQ ID NO: 1099761 - RNA, 18 nt, Human
uuugcaaaggaaguaugg

SEQ ID NO: 1099762 - RNA, 22 nt, Human
augcugucgaaaccaaacaucu

SEQ ID NO: 1099763 - RNA, 18 nt, Human
acacugcagcagucugcu

SEQ ID NO: 1099764 - RNA, 22 nt, Human
cauuaaaauaucucaugguguu

SEQ ID NO: 1099765 - RNA, 22 nt, Human
aguuugaaaguauugacagaag

SEQ ID NO: 1099766 - RNA, 22 nt, Human
aacagcauaaguauuuauuuca

SEQ ID NO: 1099767 - RNA, 22 nt, Human
guguaugauuucaaauggcuag

SEQ ID NO: 1099768 - RNA, 17 nt, Human
aaucuguuuacagucag

SEQ ID NO: 1099769 - RNA, 22 nt, Human
gaacuguaguuaauacuacaca

SEQ ID NO: 1099770 - RNA, 23 nt, Human
agcacacuuguacaaugcccuag

SEQ ID NO: 1099771 - RNA, 22 nt, Human
uugcugugaaaccaugggaagu

SEQ ID NO: 1099772 - RNA, 22 nt, Human
ccaggcugagcaugauuggagc

SEQ ID NO: 1099773 - RNA, 22 nt, Human
aauguauguguauaucaaauca

SEQ ID NO: 1099774 - RNA, 22 nt, Human
acaugauuuuaguaucauaaua

SEQ ID NO: 1099775 - RNA, 22 nt, Human
agauggagaccuuggaugaacu

SEQ ID NO: 1099776 - RNA, 22 nt, Human
acacauuucuaaauuuuuaccg

SEQ ID NO: 1099777 - RNA, 22 nt, Human
aucaggaugacaacugcugggu

SEQ ID NO: 1099778 - RNA, 22 nt, Human
uucuucuucaagugcugcauuc

SEQ ID NO: 1099779 - RNA, 22 nt, Human
uugaaagucacaauggcauuaa

SEQ ID NO: 1099780 - RNA, 22 nt, Human
uaucuguuggcuccuaguugua

SEQ ID NO: 1099781 - RNA, 22 nt, Human
uuagccauugucagcacauggc

SEQ ID NO: 1099782 - RNA, 22 nt, Human
guguaugaacgaaagaauggau

SEQ ID NO: 1099783 - RNA, 22 nt, Human
auuguucaaagugcuuugcaug

SEQ ID NO: 1099784 - RNA, 23 nt, Human
uuucacaaugagcauuacagaau

SEQ ID NO: 1099785 - RNA, 22 nt, Human
ugcauuuccagauuucuggagu

SEQ ID NO: 1099786 - RNA, 22 nt, Human
ggagugucagaaacaguguccu

SEQ ID NO: 1099787 - RNA, 22 nt, Human
augcugugccuucucugugcca

SEQ ID NO: 1099788 - RNA, 22 nt, Human
gcaaauauucaagacuuuucca

SEQ ID NO: 1099789 - RNA, 22 nt, Human
ucagagaggcaauacuguuuaa

SEQ ID NO: 1099790 - RNA, 22 nt, Human
cuuugaaaggaagccacacagc

SEQ ID NO: 1099791 - RNA, 22 nt, Human
gcuggcaggagccuuucccuuu

SEQ ID NO: 1099792 - RNA, 22 nt, Human
cugcugugcagacagacucucu

SEQ ID NO: 1099793 - RNA, 22 nt, Human
ucugguaaccuuuaucccuccu

SEQ ID NO: 1099794 - RNA, 22 nt, Human
auaugugaaugauaucacuuug

SEQ ID NO: 1099795 - RNA, 22 nt, Human
uucuccaacacaagcaugaugu

SEQ ID NO: 1099796 - RNA, 22 nt, Human
gaaguucuuagucucauuugca

SEQ ID NO: 1099797 - RNA, 22 nt, Human
uuucaugagauuccuccacauc

SEQ ID NO: 1099798 - RNA, 22 nt, Human
cauuguuauagcauuacacacc

SEQ ID NO: 1099799 - RNA, 22 nt, Human
ucagagagccucaggcacugcc

SEQ ID NO: 1099800 - RNA, 22 nt, Human
aaagaauagccuuuguccaaau

SEQ ID NO: 1099801 - RNA, 22 nt, Human
auguuauuaaaguacagauucu

SEQ ID NO: 1099802 - RNA, 22 nt, Human
uguauaaacuuaagcaggaacc

SEQ ID NO: 1099803 - RNA, 22 nt, Human
uccuucuuugacaaguggcaga

SEQ ID NO: 1099804 - RNA, 22 nt, Human
aucucauaacucauuugaagac

SEQ ID NO: 1099805 - RNA, 22 nt, Human
gccucugcaauuacauugugcc

SEQ ID NO: 1099806 - RNA, 22 nt, Human
cgccucagccguggucaucuuc

SEQ ID NO: 1099807 - RNA, 20 nt, Human
uuucaguuaucuugaccuuc

SEQ ID NO: 1099808 - RNA, 22 nt, Human
cuccaugaauuugagcuuugug

SEQ ID NO: 1099809 - RNA, 22 nt, Human
gccugcagaacugugaggcaau

SEQ ID NO: 1099810 - RNA, 22 nt, Human
caucaucaaaagugacagagaa

SEQ ID NO: 1099811 - RNA, 21 nt, Human
cucaggauggcggccuggugg

SEQ ID NO: 1099812 - RNA, 22 nt, Human
uuucaaagaguuguaaauuacu

SEQ ID NO: 1099813 - RNA, 23 nt, Human
aaacugcuuccaauuccugccau

SEQ ID NO: 1099814 - RNA, 22 nt, Human
cacauuuaauccuuuauaagua

SEQ ID NO: 1099815 - RNA, 22 nt, Human
uucauuaguucugaagaugucu

SEQ ID NO: 1099816 - RNA, 22 nt, Human
acauuuaaauaccuauguuucu

SEQ ID NO: 1099817 - RNA, 22 nt, Human
cagcuucugcuaucgaacaucu

SEQ ID NO: 1099818 - RNA, 22 nt, Human
guucuucaggcugugcucuaga

SEQ ID NO: 1099819 - RNA, 22 nt, Human
caucaaauaggaauauuuggca

SEQ ID NO: 1099820 - RNA, 22 nt, Human
gucaggaugacaagugcuuuca

SEQ ID NO: 1099821 - RNA, 22 nt, Human
uucaucaauguguuuaauaaug

SEQ ID NO: 1099822 - RNA, 22 nt, Human
uuacuuuggguccugcuuauaa

SEQ ID NO: 1099823 - RNA, 22 nt, Human
cuucugugcuucacaguugcca

SEQ ID NO: 1099824 - RNA, 20 nt, Human
auacacauauucuugcaacu

SEQ ID NO: 1099825 - RNA, 22 nt, Human
cuuucauucuuagauauuagug

SEQ ID NO: 1099826 - RNA, 22 nt, Human
uagucaaaccucagaauacccc

SEQ ID NO: 1099827 - RNA, 17 nt, Human
cucacggaggaugaauc

SEQ ID NO: 1099828 - RNA, 22 nt, Human
guuuuauaauugcuucauaaga

SEQ ID NO: 1099829 - RNA, 22 nt, Human
gugguaauagagcuccaaacua

SEQ ID NO: 1099830 - RNA, 22 nt, Human
uauugaugcuuggauugggcca

SEQ ID NO: 1099831 - RNA, 22 nt, Human
cugccagucuaugcugcucggc

SEQ ID NO: 1099832 - RNA, 22 nt, Human
uaugaaacauucauacaaauaa

SEQ ID NO: 1099833 - RNA, 22 nt, Human
uuccaagagcuuuaauuguuga

SEQ ID NO: 1099834 - RNA, 22 nt, Human
agaggccggccgagcccauggg

SEQ ID NO: 1099835 - RNA, 20 nt, Human
cugcugugugugccucagcc

SEQ ID NO: 1099836 - RNA, 19 nt, Human
ugaguucugugguucucaa

SEQ ID NO: 1099837 - RNA, 22 nt, Human
ugcuggguagaaguauuagucu

SEQ ID NO: 1099838 - RNA, 22 nt, Human
augcuguggaaguuccugaagc

SEQ ID NO: 1099839 - RNA, 22 nt, Human
gagagguccauuccccugucag

SEQ ID NO: 1099840 - RNA, 22 nt, Human
ggcuuugccuggaauuuccuug

SEQ ID NO: 1099841 - RNA, 22 nt, Human
gaaauauucuugucuuguuuuc

SEQ ID NO: 1099842 - RNA, 22 nt, Human
uucucuuuucaccaguugcuaa

SEQ ID NO: 1099843 - RNA, 22 nt, Human
uggggcuccuccuggcaggagg

SEQ ID NO: 1099844 - RNA, 22 nt, Human
acucaggagggaucagcuauca

SEQ ID NO: 1099845 - RNA, 22 nt, Human
cuucucaaaguugugaaucagg

SEQ ID NO: 1099846 - RNA, 22 nt, Human
ucaaauaccagcaauuucaugu

SEQ ID NO: 1099847 - RNA, 21 nt, Human
ggauggauagggaagagauuu

SEQ ID NO: 1099848 - RNA, 22 nt, Human
acucagaaccauuuacucugag

SEQ ID NO: 1099849 - RNA, 22 nt, Human
aagauaaacucuugauuucuga

SEQ ID NO: 1099850 - RNA, 22 nt, Human
uucacauugugcagauuauggu

SEQ ID NO: 1099851 - RNA, 22 nt, Human
agucucugucguagaucagcgu

SEQ ID NO: 1099852 - RNA, 22 nt, Human
ccuccucugggaagauucagag

SEQ ID NO: 1099853 - RNA, 22 nt, Human
ugaaaugaucaguuugguuacu

SEQ ID NO: 1099854 - RNA, 22 nt, Human
uagauauggccgucuguuuuaa

SEQ ID NO: 1099855 - RNA, 22 nt, Human
ucuacagacagagcagguggga

SEQ ID NO: 1099856 - RNA, 22 nt, Human
ccuucauugcaucuuuaagaga

SEQ ID NO: 1099857 - RNA, 22 nt, Human
aaauaguuacuucugcugucuu

SEQ ID NO: 1099858 - RNA, 22 nt, Human
cauuuguuggucagauuguagu

SEQ ID NO: 1099859 - RNA, 22 nt, Human
cuacuucuaaguacauggugau

SEQ ID NO: 1099860 - RNA, 22 nt, Human
uaucuguuguaguacagaugau

SEQ ID NO: 1099861 - RNA, 22 nt, Human
auuaaauuggacgcugggggaa

SEQ ID NO: 1099862 - RNA, 22 nt, Human
ucaaaguuacuugugguuuucu

SEQ ID NO: 1099863 - RNA, 22 nt, Human
ucucuuucuauaugugagucuu

SEQ ID NO: 1099864 - RNA, 20 nt, Human
cucaggauacugcaaaguug

SEQ ID NO: 1099865 - RNA, 22 nt, Human
aaauaguuuagcucucauuuca

SEQ ID NO: 1099866 - RNA, 22 nt, Human
uuugcagucuggccugcuuugg

SEQ ID NO: 1099867 - RNA, 22 nt, Human
aauacauauggaauuccauguu

SEQ ID NO: 1099868 - RNA, 22 nt, Human
uugauguacagaauuguucaca

SEQ ID NO: 1099869 - RNA, 22 nt, Human
acagugcuggcuacaacccugg

SEQ ID NO: 1099870 - RNA, 22 nt, Human
guuauacauauguguuaacaaa

SEQ ID NO: 1099871 - RNA, 22 nt, Human
cagaguggcacucugcuggaug

SEQ ID NO: 1099872 - RNA, 22 nt, Human
ucuuucaaugagcauucuuucc

SEQ ID NO: 1099873 - RNA, 22 nt, Human
auucuucauacagacaaguccu

SEQ ID NO: 1099874 - RNA, 22 nt, Human
aucuccaggcauuucaagagac

SEQ ID NO: 1099875 - RNA, 22 nt, Human
cugaaaauguuacacaggaaga

SEQ ID NO: 1099876 - RNA, 22 nt, Human
aauccugugugacucuggggag

SEQ ID NO: 1099877 - RNA, 22 nt, Human
uuagccauuuuauacaagugua

SEQ ID NO: 1099878 - RNA, 22 nt, Human
uaucuguuaugggcugaauugc

SEQ ID NO: 1099879 - RNA, 22 nt, Human
uugcaauagccuuauuuccaaa

SEQ ID NO: 1099880 - RNA, 22 nt, Human
cagaaccaggaacugauggaga

SEQ ID NO: 1099881 - RNA, 22 nt, Human
uuuucaguaaugucuacauaau

SEQ ID NO: 1099882 - RNA, 22 nt, Human
uuaacacagggggagacaaagu

SEQ ID NO: 1099883 - RNA, 22 nt, Human
ucuuagcacagcuauauaaguu

SEQ ID NO: 1099884 - RNA, 22 nt, Human
uuaaagggccgauuuccaggcc

SEQ ID NO: 1099885 - RNA, 22 nt, Human
ucucaggaaauaggauuugagu

SEQ ID NO: 1099886 - RNA, 22 nt, Human
uuugacaucuaagaauucuuac

SEQ ID NO: 1099887 - RNA, 22 nt, Human
aucauucuauuguugagcugcc

SEQ ID NO: 1099888 - RNA, 22 nt, Human
aagcuggcaugucaccugagaa

SEQ ID NO: 1099889 - RNA, 22 nt, Human
cagcugcuuuaguuuuccaucc

SEQ ID NO: 1099890 - RNA, 22 nt, Human
ugacauaauaauccaaacauac

SEQ ID NO: 1099891 - RNA, 22 nt, Human
ugaaggccacuuccugugagcu

SEQ ID NO: 1099892 - RNA, 23 nt, Human
uuccagaguccacaucugccacc

SEQ ID NO: 1099893 - RNA, 22 nt, Human
ugaaggccagcagagugaaggc

SEQ ID NO: 1099894 - RNA, 22 nt, Human
auugaaaguccuaucuaaggga

SEQ ID NO: 1099895 - RNA, 22 nt, Human
aauaauuagugggacagagaac

SEQ ID NO: 1099896 - RNA, 22 nt, Human
aagugagugguaaggagcaugg

SEQ ID NO: 1099897 - RNA, 22 nt, Human
uuuucagaggccuaagagguuu

SEQ ID NO: 1099898 - RNA, 22 nt, Human
uccaugaguuugaggaaaagag

SEQ ID NO: 1099899 - RNA, 22 nt, Human
gauuucuuugcaagcuguguuc

SEQ ID NO: 1099900 - RNA, 22 nt, Human
uugaagaggacuuugcagcugu

SEQ ID NO: 1099901 - RNA, 20 nt, Human
ccucaggaugagggugagca

SEQ ID NO: 1099902 - RNA, 22 nt, Human
uuucauaauacuguacaugaaa

SEQ ID NO: 1099903 - RNA, 22 nt, Human
cauaauuugugguaguggggga

SEQ ID NO: 1099904 - RNA, 22 nt, Human
auguaugagagauucuuuuauu

SEQ ID NO: 1099905 - RNA, 18 nt, Human
gugcugugggcaguggcc

SEQ ID NO: 1099906 - RNA, 22 nt, Human
cacagucacauaucuaugugug

SEQ ID NO: 1099907 - RNA, 22 nt, Human
auguuucaaugcacuuuagccu

SEQ ID NO: 1099908 - RNA, 23 nt, Human
aaaguuugaagcaacaguaguug

SEQ ID NO: 1099909 - RNA, 22 nt, Human
guguguuucagaagccaggugu

SEQ ID NO: 1099910 - RNA, 22 nt, Human
auuuccuuugcaaagacugugc

SEQ ID NO: 1099911 - RNA, 22 nt, Human
ugucuuuggaauauuuagcuga

SEQ ID NO: 1099912 - RNA, 22 nt, Human
uauuuccauguuagaacuaagu

SEQ ID NO: 1099913 - RNA, 22 nt, Human
ugaguuuuuucaacauaugaag

SEQ ID NO: 1099914 - RNA, 22 nt, Human
gaaacaauuuuuguugucuaag

SEQ ID NO: 1099915 - RNA, 22 nt, Human
augugaggaagaaagagguaag

SEQ ID NO: 1099916 - RNA, 22 nt, Human
aaguguauauaugacuuauaaa

SEQ ID NO: 1099917 - RNA, 22 nt, Human
uuucauaaccucaagcuacagu

SEQ ID NO: 1099918 - RNA, 22 nt, Human
auaugagaauuggaaaauauca

SEQ ID NO: 1099919 - RNA, 23 nt, Human
uugcacauuggagcuggucuucu

SEQ ID NO: 1099920 - RNA, 22 nt, Human
cagucucucagcuuucagcugu

SEQ ID NO: 1099921 - RNA, 22 nt, Human
uccacauccauugcuugacuuu

SEQ ID NO: 1099922 - RNA, 22 nt, Human
cacaaaugugcagaaaugugag

SEQ ID NO: 1099923 - RNA, 22 nt, Human
ucugggaacugagcuccccuag

SEQ ID NO: 1099924 - RNA, 22 nt, Human
gacagugcauuuccuggcaugg

SEQ ID NO: 1099925 - RNA, 22 nt, Human
uugcuuuguggugguucuucca

SEQ ID NO: 1099926 - RNA, 22 nt, Human
ucugcuguaaagaauuucugcc

SEQ ID NO: 1099927 - RNA, 22 nt, Human
auaacuuucuucacccuugcug

SEQ ID NO: 1099928 - RNA, 22 nt, Human
agaccgagaaguucuccaggcc

SEQ ID NO: 1099929 - RNA, 22 nt, Human
uuaacauuguccuuagcagauu

SEQ ID NO: 1099930 - RNA, 22 nt, Human
uguaugaaguuacugagccucu

SEQ ID NO: 1099931 - RNA, 19 nt, Human
uaucuguuuccugcuuguc

SEQ ID NO: 1099932 - RNA, 22 nt, Human
gaccauuuguugaaaagauuau

SEQ ID NO: 1099933 - RNA, 22 nt, Human
ucucucuugucaccccaucugc

SEQ ID NO: 1099934 - RNA, 22 nt, Human
guugaaagcuuuucauuuaguu

SEQ ID NO: 1099935 - RNA, 22 nt, Human
uucuucuuaauguccugggaac

SEQ ID NO: 1099936 - RNA, 22 nt, Human
uuauuuaaaagugguaagauuc

SEQ ID NO: 1099937 - RNA, 22 nt, Human
ucuacugcacuggugucucauc

SEQ ID NO: 1099938 - RNA, 22 nt, Human
uucacagucacccuucuccaug

SEQ ID NO: 1099939 - RNA, 22 nt, Human
ucucaggagccacagcgggagu

SEQ ID NO: 1099940 - RNA, 22 nt, Human
uaauuauuugaagacauuagag

SEQ ID NO: 1099941 - RNA, 22 nt, Human
caggguggcacaucacagcauu

SEQ ID NO: 1099942 - RNA, 22 nt, Human
cuugcuucauuagugucuuagu

SEQ ID NO: 1099943 - RNA, 21 nt, Human
agcaccuuacagcuauaaugg

SEQ ID NO: 1099944 - RNA, 22 nt, Human
agugcuuuagagaaauggugcu

SEQ ID NO: 1099945 - RNA, 22 nt, Human
uuguaugaggauagcaagaagc

SEQ ID NO: 1099946 - RNA, 22 nt, Human
uuggaugaagucuagcuuuagu

SEQ ID NO: 1099947 - RNA, 22 nt, Human
uucucuuuugugaugugagaug

SEQ ID NO: 1099948 - RNA, 22 nt, Human
acauaugugcuuauauccauga

SEQ ID NO: 1099949 - RNA, 22 nt, Human
agacccagaaagcagcugcauu

SEQ ID NO: 1099950 - RNA, 22 nt, Human
aucugcuuccugggcuccauga

SEQ ID NO: 1099951 - RNA, 23 nt, Human
acugucugauauguuuuccauca

SEQ ID NO: 1099952 - RNA, 22 nt, Human
agcaccuugcucuuggccuucc

SEQ ID NO: 1099953 - RNA, 22 nt, Human
ggcagcuggggcagugcccugu

SEQ ID NO: 1099954 - RNA, 22 nt, Human
guguaugaggggagaauguuuu

SEQ ID NO: 1099955 - RNA, 22 nt, Human
ucacugucugaaagaaauggcc

SEQ ID NO: 1099956 - RNA, 22 nt, Human
uaagcugugggagauuggcaua

SEQ ID NO: 1099957 - RNA, 22 nt, Human
cugcugugcaggugccuaugau

SEQ ID NO: 1099958 - RNA, 22 nt, Human
augcuguguuuuaaauggaaau

SEQ ID NO: 1099959 - RNA, 22 nt, Human
uacauucagaagaauggacacg

SEQ ID NO: 1099960 - RNA, 22 nt, Human
agugcuuugguauagaacuauu

SEQ ID NO: 1099961 - RNA, 22 nt, Human
auuuucaucauggguuuaacau

SEQ ID NO: 1099962 - RNA, 22 nt, Human
uccaugaggcagggaggcuggc

SEQ ID NO: 1099963 - RNA, 22 nt, Human
uucugucaaacucacaggccga

SEQ ID NO: 1099964 - RNA, 22 nt, Human
acaguuaucuuugaaauagaga

SEQ ID NO: 1099965 - RNA, 22 nt, Human
auucuuauuauaguaaaacagu

SEQ ID NO: 1099966 - RNA, 22 nt, Human
guguuuuaagaaagaagcucag

SEQ ID NO: 1099967 - RNA, 22 nt, Human
uacaaaguaauguauaauaucg

SEQ ID NO: 1099968 - RNA, 22 nt, Human
uuuuauagcugaauaguauucc

SEQ ID NO: 1099969 - RNA, 22 nt, Human
uaucuaaaggauuuaauuuagu

SEQ ID NO: 1099970 - RNA, 22 nt, Human
gucagagagggcacgugcacac

SEQ ID NO: 1099971 - RNA, 22 nt, Human
uuaaauuccagccucauaauag

SEQ ID NO: 1099972 - RNA, 22 nt, Human
uauucacaugaaaacaaauuuu

SEQ ID NO: 1099973 - RNA, 22 nt, Human
uugcugaagugaagguauguuu

SEQ ID NO: 1099974 - RNA, 22 nt, Human
gaaucucaguggaagcaggaag

SEQ ID NO: 1099975 - RNA, 22 nt, Human
auuuccaguccuaaugaucugg

SEQ ID NO: 1099976 - RNA, 22 nt, Human
agcaccauugcaaauauggcag

SEQ ID NO: 1099977 - RNA, 22 nt, Human
cuugaaguugcaaaacauuaau

SEQ ID NO: 1099978 - RNA, 22 nt, Human
uccaugagacagauacuguaag

SEQ ID NO: 1099979 - RNA, 23 nt, Human
cugcuguuuucuguaccugaagc

SEQ ID NO: 1099980 - RNA, 22 nt, Human
uucucagagugaccaagucuuu

SEQ ID NO: 1099981 - RNA, 22 nt, Human
uagcacauacauaauagauaga

SEQ ID NO: 1099982 - RNA, 22 nt, Human
uuucacaaaugucuuuaacuug

SEQ ID NO: 1099983 - RNA, 22 nt, Human
ggcagcugcaaaucugcucugu

SEQ ID NO: 1099984 - RNA, 22 nt, Human
aguuuucacacucaccaaaagg

SEQ ID NO: 1099985 - RNA, 20 nt, Human
ugaaggccauuuguuccaga

SEQ ID NO: 1099986 - RNA, 22 nt, Human
gaaggucaccuccccucucugg

SEQ ID NO: 1099987 - RNA, 22 nt, Human
caagauggacauaaggagagaa

SEQ ID NO: 1099988 - RNA, 22 nt, Human
cacaauguauauguauaucaaa

SEQ ID NO: 1099989 - RNA, 22 nt, Human
aaauauaguaaaugcauaguuc

SEQ ID NO: 1099990 - RNA, 22 nt, Human
ucuucauauauaaaguggaaua

SEQ ID NO: 1099991 - RNA, 22 nt, Human
ucuuugaaagcuguucuagagu

SEQ ID NO: 1099992 - RNA, 22 nt, Human
cuucugugauuugguuaggaua

SEQ ID NO: 1099993 - RNA, 22 nt, Human
agucucuuuguggacucugccu

SEQ ID NO: 1099994 - RNA, 22 nt, Human
aaaguuguaauggaagaaaugc

SEQ ID NO: 1099995 - RNA, 22 nt, Human
uguuuuuaaauaaugauagaaa

SEQ ID NO: 1099996 - RNA, 17 nt, Human
uccaugagacaugaaga

SEQ ID NO: 1099997 - RNA, 22 nt, Human
agcagcauuaugauauaucuua

SEQ ID NO: 1099998 - RNA, 19 nt, Human
ugaaauggcaguugcuaaa

SEQ ID NO: 1099999 - RNA, 22 nt, Human
augcuacauuuugguuuauaaa

SEQ ID NO: 1100000 - RNA, 22 nt, Human
caaggccacuccagagacuggu

SEQ ID NO: 1100001 - RNA, 22 nt, Human
ucuuuuggguucuuaugauuua

SEQ ID NO: 1100002 - RNA, 22 nt, Human
ucugcaucauuuuucagagccg

SEQ ID NO: 1100003 - RNA, 22 nt, Human
uuggcagugucugcaaaaugga

SEQ ID NO: 1100004 - RNA, 22 nt, Human
gcucucuuuuuccagugguggu

SEQ ID NO: 1100005 - RNA, 22 nt, Human
auguucuuucagccagugcauc

SEQ ID NO: 1100006 - RNA, 22 nt, Human
acuaagugauucuaagcaucuu

SEQ ID NO: 1100007 - RNA, 22 nt, Human
cuguguuggcuuuucucuugua

SEQ ID NO: 1100008 - RNA, 22 nt, Human
ucacaucucccuggaggacaca

SEQ ID NO: 1100009 - RNA, 22 nt, Human
gcauuuccugugcuuggcauau

SEQ ID NO: 1100010 - RNA, 22 nt, Human
agccuuguuggucugaguuugg

SEQ ID NO: 1100011 - RNA, 22 nt, Human
guguguuuagcauuagcagggg

SEQ ID NO: 1100012 - RNA, 22 nt, Human
auauucuuccaaaacaucauuu

SEQ ID NO: 1100013 - RNA, 22 nt, Human
acuuuacaagcuuauagccuag

SEQ ID NO: 1100014 - RNA, 20 nt, Human
gggagucuggaugaaagaug

SEQ ID NO: 1100015 - RNA, 22 nt, Human
gcucaggacccaggugugaccu

SEQ ID NO: 1100016 - RNA, 21 nt, Human
ucuuccuccacagcgugccac

SEQ ID NO: 1100017 - RNA, 20 nt, Human
agaggccaguuaggagucua

SEQ ID NO: 1100018 - RNA, 22 nt, Human
ucuuagaaguuuauggcacgga

SEQ ID NO: 1100019 - RNA, 20 nt, Human
uucuucucuaguuaucuuca

SEQ ID NO: 1100020 - RNA, 22 nt, Human
agucaauuaucucuaggucauc

SEQ ID NO: 1100021 - RNA, 22 nt, Human
ucugucaauauaugugcugcag

SEQ ID NO: 1100022 - RNA, 21 nt, Human
aaugcauuaacauaaagcuga

SEQ ID NO: 1100023 - RNA, 22 nt, Human
ggcucagaccucccagcuccag

SEQ ID NO: 1100024 - RNA, 23 nt, Human
ucguugaauagcaauagcacaac

SEQ ID NO: 1100025 - RNA, 22 nt, Human
gucuuucuaugaugaacuguug

SEQ ID NO: 1100026 - RNA, 19 nt, Human
auauauguauacaaugugg

SEQ ID NO: 1100027 - RNA, 22 nt, Human
aucacauuguuagcauagacug

SEQ ID NO: 1100028 - RNA, 22 nt, Human
aacaugauggggaagaacaaga

SEQ ID NO: 1100029 - RNA, 22 nt, Human
guaguucugcagugucaccuga

SEQ ID NO: 1100030 - RNA, 19 nt, Human
ugagaggcuuaaggcagcu

SEQ ID NO: 1100031 - RNA, 22 nt, Human
aaaguuguucaguaagaaacuc

SEQ ID NO: 1100032 - RNA, 22 nt, Human
cuguauuucccacauucucuau

SEQ ID NO: 1100033 - RNA, 22 nt, Human
acaauguaggauauguacuugu

SEQ ID NO: 1100034 - RNA, 22 nt, Human
gauggcagcagcagccagggau

SEQ ID NO: 1100035 - RNA, 22 nt, Human
auuuugaugcuaucuaaugaau

SEQ ID NO: 1100036 - RNA, 22 nt, Human
agugugagcccuggaguggugc

SEQ ID NO: 1100037 - RNA, 22 nt, Human
ucacauuuucuacuacuguacg

SEQ ID NO: 1100038 - RNA, 22 nt, Human
uuccuuaguugacugucuuagu

SEQ ID NO: 1100039 - RNA, 20 nt, Human
uguuaaaggacacuugcuuu

SEQ ID NO: 1100040 - RNA, 22 nt, Human
uauagccauuuccaguggcauc

SEQ ID NO: 1100041 - RNA, 22 nt, Human
aagcacauuguacauuugugcu

SEQ ID NO: 1100042 - RNA, 22 nt, Human
ucuuugaauccuuuacaucuga

SEQ ID NO: 1100043 - RNA, 22 nt, Human
guugaaaguagaugcuauuugg

SEQ ID NO: 1100044 - RNA, 22 nt, Human
uuuacauuucccucugucaguu

SEQ ID NO: 1100045 - RNA, 22 nt, Human
aacuagucagugauucucagaa

SEQ ID NO: 1100046 - RNA, 22 nt, Human
aucccaugagaccacguuggcu

SEQ ID NO: 1100047 - RNA, 22 nt, Human
ccucuucuagguuucagccugc

SEQ ID NO: 1100048 - RNA, 22 nt, Human
gauucacucauauuuuacguuu

SEQ ID NO: 1100049 - RNA, 22 nt, Human
uucagcaaacacgaugcuuguu

SEQ ID NO: 1100050 - RNA, 22 nt, Human
acagucuugcuguauggucagg

SEQ ID NO: 1100051 - RNA, 22 nt, Human
aacauacauauuucagugucca

SEQ ID NO: 1100052 - RNA, 22 nt, Human
ucaagugcuugugagguauuug

SEQ ID NO: 1100053 - RNA, 22 nt, Human
uucuugaaucacuuuagagaua

SEQ ID NO: 1100054 - RNA, 22 nt, Human
uuucccagagguaugaauaagu

SEQ ID NO: 1100055 - RNA, 22 nt, Human
acacauauucauauguacuuac

SEQ ID NO: 1100056 - RNA, 22 nt, Human
cuugaaagcuuugcgucuucua

SEQ ID NO: 1100057 - RNA, 22 nt, Human
guccucuguuagaaaugugcuu

SEQ ID NO: 1100058 - RNA, 22 nt, Human
auauacuuggagacuaucauug

SEQ ID NO: 1100059 - RNA, 22 nt, Human
uguaugaauauguuggggaggu

SEQ ID NO: 1100060 - RNA, 22 nt, Human
uggcagucuggguuggcaguua

SEQ ID NO: 1100061 - RNA, 22 nt, Human
ugcuuuggccacuagaauucag

SEQ ID NO: 1100062 - RNA, 22 nt, Human
aaaguuagacagcaucauuucu

SEQ ID NO: 1100063 - RNA, 22 nt, Human
uuugaaguggaaaaggauuuaa

SEQ ID NO: 1100064 - RNA, 23 nt, Human
agaugagccaacaccuccaugcc

SEQ ID NO: 1100065 - RNA, 22 nt, Human
uuugaaaucuaaucaaggaaca

SEQ ID NO: 1100066 - RNA, 21 nt, Human
uacagaaugcgcuucagucug

SEQ ID NO: 1100067 - RNA, 22 nt, Human
ucucugaguauccugaacugcc

SEQ ID NO: 1100068 - RNA, 22 nt, Human
gcucaggaucccaggggugugc

SEQ ID NO: 1100069 - RNA, 22 nt, Human
ucugucaucucuaaaauagaaa

SEQ ID NO: 1100070 - RNA, 22 nt, Human
uuccaugagcucugaguucaca

SEQ ID NO: 1100071 - RNA, 22 nt, Human
aguuauaugugaaaacacguau

SEQ ID NO: 1100072 - RNA, 22 nt, Human
agaaaugacaagacugaucagg

SEQ ID NO: 1100073 - RNA, 22 nt, Human
acucaggaaaugaagacugguu

SEQ ID NO: 1100074 - RNA, 22 nt, Human
agucugucuacuuaaagucugu

SEQ ID NO: 1100075 - RNA, 22 nt, Human
guuaacacaggacucucugccu

SEQ ID NO: 1100076 - RNA, 22 nt, Human
gaucuucucuuuaguagaaaca

SEQ ID NO: 1100077 - RNA, 22 nt, Human
uucuacaauaugaauaaugaag

SEQ ID NO: 1100078 - RNA, 22 nt, Human
uguaugaauauguauuuucaua

SEQ ID NO: 1100079 - RNA, 22 nt, Human
aacauuucagcaaauaagaaca

SEQ ID NO: 1100080 - RNA, 20 nt, Human
cuucuucauuaacccuacug

SEQ ID NO: 1100081 - RNA, 22 nt, Human
cucacugugccuuuucccaaac

SEQ ID NO: 1100082 - RNA, 22 nt, Human
aagaauacguaucaacaauggu

SEQ ID NO: 1100083 - RNA, 22 nt, Human
guaaaauagaauaacguggcua

SEQ ID NO: 1100084 - RNA, 22 nt, Human
acaguggagaaggcaugaggcu

SEQ ID NO: 1100085 - RNA, 22 nt, Human
ugaaugaguuuggcugcuguuc

SEQ ID NO: 1100086 - RNA, 22 nt, Human
uaauaucuacuucauagaguuu

SEQ ID NO: 1100087 - RNA, 22 nt, Human
uguaugaaccuuuaauauagug

SEQ ID NO: 1100088 - RNA, 22 nt, Human
uucucagguagugcugaugcug

SEQ ID NO: 1100089 - RNA, 19 nt, Human
ugaggggcucacagucuca

SEQ ID NO: 1100090 - RNA, 22 nt, Human
ucucucagaggaagaggcagug

SEQ ID NO: 1100091 - RNA, 22 nt, Human
cacucuccagcacaccccauuu

SEQ ID NO: 1100092 - RNA, 22 nt, Human
gagcauuuuugucugcauuuua

SEQ ID NO: 1100093 - RNA, 22 nt, Human
cgucuuccucuuacgaugcgcu

SEQ ID NO: 1100094 - RNA, 22 nt, Human
uacauugcuuucuaauacaucu

SEQ ID NO: 1100095 - RNA, 22 nt, Human
agaauaugaugguuggagaauu

SEQ ID NO: 1100096 - RNA, 21 nt, Human
aauguauguuuaucucacagu

SEQ ID NO: 1100097 - RNA, 22 nt, Human
uuucugaaaucucuuuugagga

SEQ ID NO: 1100098 - RNA, 22 nt, Human
gcuccucugucaaaugagagug

SEQ ID NO: 1100099 - RNA, 22 nt, Human
acugcuuuaucugagaaguccu

SEQ ID NO: 1100100 - RNA, 22 nt, Human
auauuguugacuauaagaguaa

SEQ ID NO: 1100101 - RNA, 22 nt, Human
ccucaggggucacugugaggag

SEQ ID NO: 1100102 - RNA, 22 nt, Human
caacauuucaaggucuuuagga

SEQ ID NO: 1100103 - RNA, 22 nt, Human
gagaggucaucucccaucagca

SEQ ID NO: 1100104 - RNA, 23 nt, Human
uaauucacauauacauugcuuca

SEQ ID NO: 1100105 - RNA, 22 nt, Human
uuugaaagcaggugugggaggg

SEQ ID NO: 1100106 - RNA, 22 nt, Human
uaucuguuaggaucagagcugg

SEQ ID NO: 1100107 - RNA, 22 nt, Human
cuggguaaguuccuaaggcuca

SEQ ID NO: 1100108 - RNA, 23 nt, Human
gugagucuugccuuugcugugga

SEQ ID NO: 1100109 - RNA, 22 nt, Human
aguaugaaucucuuuauucugc

SEQ ID NO: 1100110 - RNA, 22 nt, Human
uacaaagucacauugaaaugaa

SEQ ID NO: 1100111 - RNA, 22 nt, Human
ucuuugcaaauguuauuaucuu

SEQ ID NO: 1100112 - RNA, 22 nt, Human
aucaggauucaccccagagcug

SEQ ID NO: 1100113 - RNA, 18 nt, Human
ucuuccaacacugacacc

SEQ ID NO: 1100114 - RNA, 22 nt, Human
aguguuugagacacauuucacu

SEQ ID NO: 1100115 - RNA, 18 nt, Human
ccagguggugacagagau

SEQ ID NO: 1100116 - RNA, 22 nt, Human
uuucuucauucaccuucacccc

SEQ ID NO: 1100117 - RNA, 22 nt, Human
ccucagggaaugggaggcuggg

SEQ ID NO: 1100118 - RNA, 22 nt, Human
gggcacagaagucuaagacauc

SEQ ID NO: 1100119 - RNA, 22 nt, Human
uuaauuuuaaccuguuuguguc

SEQ ID NO: 1100120 - RNA, 22 nt, Human
uucauucuuauuugugaucugg

SEQ ID NO: 1100121 - RNA, 22 nt, Human
ucauaaaugcagugucauaaau

SEQ ID NO: 1100122 - RNA, 22 nt, Human
uaucaucuuguugucaugcagc

SEQ ID NO: 1100123 - RNA, 22 nt, Human
auccaugaucaauuuauuacua

SEQ ID NO: 1100124 - RNA, 22 nt, Human
uaugaacuagcugauuuaguuu

SEQ ID NO: 1100125 - RNA, 22 nt, Human
ucuggcaggucaaucauucuuu

SEQ ID NO: 1100126 - RNA, 22 nt, Human
guugaaaguggagaaccugguu

SEQ ID NO: 1100127 - RNA, 22 nt, Human
acugccauuggucaaaugagug

SEQ ID NO: 1100128 - RNA, 22 nt, Human
cucaggauucucgacacucaca

SEQ ID NO: 1100129 - RNA, 22 nt, Human
guuuagaacacggaaauacuga

SEQ ID NO: 1100130 - RNA, 22 nt, Human
agaauccucuucaguaaauucu

SEQ ID NO: 1100131 - RNA, 22 nt, Human
ugcuagugcaggguuuucaguu

SEQ ID NO: 1100132 - RNA, 22 nt, Human
caaauagugucacauugugagg

SEQ ID NO: 1100133 - RNA, 22 nt, Human
uucaggauaguggugaguggca

SEQ ID NO: 1100134 - RNA, 20 nt, Human
ucuggcaggugaacgagcug

SEQ ID NO: 1100135 - RNA, 22 nt, Human
uugaagagugccuuccagacau

SEQ ID NO: 1100136 - RNA, 22 nt, Human
ucagugugaggucuuccacccg

SEQ ID NO: 1100137 - RNA, 21 nt, Human
gauuuuaaagagacugccaca

SEQ ID NO: 1100138 - RNA, 22 nt, Human
acauaccauacauggugagaug

SEQ ID NO: 1100139 - RNA, 22 nt, Human
uaacauuagguagacauaagcc

SEQ ID NO: 1100140 - RNA, 22 nt, Human
uccauucauucauugaugaaca

SEQ ID NO: 1100141 - RNA, 22 nt, Human
cccuugcaucccauguguggcc

SEQ ID NO: 1100142 - RNA, 22 nt, Human
uugaaggacauccuauuucuag

SEQ ID NO: 1100143 - RNA, 22 nt, Human
agcuagaauauugaucugaaau

SEQ ID NO: 1100144 - RNA, 22 nt, Human
cccuguacagucucuguggcac

SEQ ID NO: 1100145 - RNA, 22 nt, Human
ugugugucagagucuccauggu

SEQ ID NO: 1100146 - RNA, 22 nt, Human
uguacaaagguacuuugauguu

SEQ ID NO: 1100147 - RNA, 23 nt, Human
gugcugugagccccuuggccucc

SEQ ID NO: 1100148 - RNA, 22 nt, Human
auucuucacaccuguuccuguu

SEQ ID NO: 1100149 - RNA, 22 nt, Human
ucugucaaaugagcaaguaacu

SEQ ID NO: 1100150 - RNA, 22 nt, Human
cacaaaugguuguagacauuaa

SEQ ID NO: 1100151 - RNA, 22 nt, Human
cauuucacaaauggccacauca

SEQ ID NO: 1100152 - RNA, 20 nt, Human
ucucagcauaagaacccuuc

SEQ ID NO: 1100153 - RNA, 18 nt, Human
ugcuuggagcauuuacca

SEQ ID NO: 1100154 - RNA, 23 nt, Human
ugaaacauuuaggguagaauuuc

SEQ ID NO: 1100155 - RNA, 22 nt, Human
uuuuuguagucauuagaagagg

SEQ ID NO: 1100156 - RNA, 22 nt, Human
aauauaaugcuguuuuaugcca

SEQ ID NO: 1100157 - RNA, 22 nt, Human
cacauauuugaugaagcuuugu

SEQ ID NO: 1100158 - RNA, 22 nt, Human
caggauggagggagggcuguua

SEQ ID NO: 1100159 - RNA, 22 nt, Human
uuugacauugccaauuugcuca

SEQ ID NO: 1100160 - RNA, 22 nt, Human
uuaaaauagccagugccccucu

SEQ ID NO: 1100161 - RNA, 22 nt, Human
gcuuggcauugaccauuaucau

SEQ ID NO: 1100162 - RNA, 17 nt, Human
uauauguaugccucucc

SEQ ID NO: 1100163 - RNA, 22 nt, Human
ugaacaguuucaagaaaacuuu

SEQ ID NO: 1100164 - RNA, 22 nt, Human
gugcuuucugcugcauuccucu

SEQ ID NO: 1100165 - RNA, 22 nt, Human
auuuucagagacaucuggacuu

SEQ ID NO: 1100166 - RNA, 22 nt, Human
ugaaagggguugaguuacagcu

SEQ ID NO: 1100167 - RNA, 22 nt, Human
auucugucuuuuuauacaucua

SEQ ID NO: 1100168 - RNA, 22 nt, Human
cagauccacccuuguagugaca

SEQ ID NO: 1100169 - RNA, 22 nt, Human
agucuugcucuugcaucugcuu

SEQ ID NO: 1100170 - RNA, 22 nt, Human
cugcuuuguaaaauagacauaa

SEQ ID NO: 1100171 - RNA, 22 nt, Human
ucugggaaaugcuguuccuugu

SEQ ID NO: 1100172 - RNA, 22 nt, Human
acuucaugcagaagagagcugu

SEQ ID NO: 1100173 - RNA, 22 nt, Human
acacaaugcauauuuuuccaga

SEQ ID NO: 1100174 - RNA, 22 nt, Human
caugaaaucugaguauguuucc

SEQ ID NO: 1100175 - RNA, 22 nt, Human
uaaugucaaggugauagauuug

SEQ ID NO: 1100176 - RNA, 22 nt, Human
gccagagguucaacaacugucu

SEQ ID NO: 1100177 - RNA, 22 nt, Human
agacucaagacugcagaagacg

SEQ ID NO: 1100178 - RNA, 22 nt, Human
uauggaaacuaauucauuuuuc

SEQ ID NO: 1100179 - RNA, 22 nt, Human
uuucuucagagagagcuuuccc

SEQ ID NO: 1100180 - RNA, 22 nt, Human
uacuuacagaaggaagcaauug

SEQ ID NO: 1100181 - RNA, 22 nt, Human
caaggccagagccagcgauaag

SEQ ID NO: 1100182 - RNA, 22 nt, Human
ugaaggcccuaucuccauauac

SEQ ID NO: 1100183 - RNA, 22 nt, Human
agguccagcuguugcagccucc

SEQ ID NO: 1100184 - RNA, 22 nt, Human
auaagcauguuagaauauuuga

SEQ ID NO: 1100185 - RNA, 22 nt, Human
gcagcugaauguccauugcugc

SEQ ID NO: 1100186 - RNA, 22 nt, Human
aacaaaugaccugauuucuucc

SEQ ID NO: 1100187 - RNA, 22 nt, Human
gagagaaaugugcaguuugggc

SEQ ID NO: 1100188 - RNA, 21 nt, Human
aaauacagaaacuuguuuuca

SEQ ID NO: 1100189 - RNA, 23 nt, Human
uuugaaaguaucaacucgccuga

SEQ ID NO: 1100190 - RNA, 22 nt, Human
uuuguuuagaugguaaaucagu

SEQ ID NO: 1100191 - RNA, 22 nt, Human
uuguauuucuccacuuucuguu

SEQ ID NO: 1100192 - RNA, 22 nt, Human
aaauaguucagccacggugacu

SEQ ID NO: 1100193 - RNA, 22 nt, Human
cugaggaagacagcagcugugu

SEQ ID NO: 1100194 - RNA, 18 nt, Human
gaugggagcaagagaaga

SEQ ID NO: 1100195 - RNA, 22 nt, Human
uuugaaaggagcuuuauccaga

SEQ ID NO: 1100196 - RNA, 22 nt, Human
uaaucuguguaccuucaucgga

SEQ ID NO: 1100197 - RNA, 22 nt, Human
aaacacauuagcccuguggaaa

SEQ ID NO: 1100198 - RNA, 22 nt, Human
uugaaagacuucuccugugaaa

SEQ ID NO: 1100199 - RNA, 20 nt, Human
caucaucacaugagccaauu

SEQ ID NO: 1100200 - RNA, 22 nt, Human
uuucuaggucuuccauacugcc

SEQ ID NO: 1100201 - RNA, 22 nt, Human
acaggccacaguggagucucug

SEQ ID NO: 1100202 - RNA, 21 nt, Human
uccuuccuugagguccuuucc

SEQ ID NO: 1100203 - RNA, 22 nt, Human
acuucacagaaauuuuaugagg

SEQ ID NO: 1100204 - RNA, 22 nt, Human
uuugaaguguuauuucuaucac

SEQ ID NO: 1100205 - RNA, 22 nt, Human
uuucugugguggguaguucaga

SEQ ID NO: 1100206 - RNA, 22 nt, Human
uaaacauuuguuauucuuguuu

SEQ ID NO: 1100207 - RNA, 22 nt, Human
uaaguggaagguuauaugcuaa

SEQ ID NO: 1100208 - RNA, 23 nt, Human
auguuauuauuagcagucuugcc

SEQ ID NO: 1100209 - RNA, 22 nt, Human
ucaggaugguguggaggaaaua

SEQ ID NO: 1100210 - RNA, 22 nt, Human
aagauauagauaaaacuaugca

SEQ ID NO: 1100211 - RNA, 22 nt, Human
ggauggcagucugcaugagaaa

SEQ ID NO: 1100212 - RNA, 22 nt, Human
agauauguuuguauauauuugu

SEQ ID NO: 1100213 - RNA, 22 nt, Human
auucuucaucacuaccuuguga

SEQ ID NO: 1100214 - RNA, 22 nt, Human
uuucugaagauacagcuuugcu

SEQ ID NO: 1100215 - RNA, 22 nt, Human
uucugaaagccaauucauugaa

SEQ ID NO: 1100216 - RNA, 22 nt, Human
gagccaaggguugccauggaga

SEQ ID NO: 1100217 - RNA, 22 nt, Human
aaaguuuguuauaugauaagga

SEQ ID NO: 1100218 - RNA, 22 nt, Human
acauuucuaguuguucaucucc

SEQ ID NO: 1100219 - RNA, 22 nt, Human
agugcuuugagcguuugaaaag

SEQ ID NO: 1100220 - RNA, 22 nt, Human
uagcuguguaagcuugguaaga

SEQ ID NO: 1100221 - RNA, 22 nt, Human
uccaugaggaccaaauucguag

SEQ ID NO: 1100222 - RNA, 22 nt, Human
caagauggagaagcagcaaggg

SEQ ID NO: 1100223 - RNA, 20 nt, Human
augugucuguaaacaacucu

SEQ ID NO: 1100224 - RNA, 22 nt, Human
ugucagaugcgauaaacuagug

SEQ ID NO: 1100225 - RNA, 22 nt, Human
cauuuguuaauuacuauuaucu

SEQ ID NO: 1100226 - RNA, 17 nt, Human
ugaaggccaugaccacg

SEQ ID NO: 1100227 - RNA, 22 nt, Human
ugauuuccuaggucuggagaag

SEQ ID NO: 1100228 - RNA, 22 nt, Human
cuuugaauugccguuucaucug

SEQ ID NO: 1100229 - RNA, 22 nt, Human
aaauauacuagaugaugaccca

SEQ ID NO: 1100230 - RNA, 20 nt, Human
uggcaucucucaauuguagg

SEQ ID NO: 1100231 - RNA, 22 nt, Human
uuugaaagucaaccuuccaguu

SEQ ID NO: 1100232 - RNA, 23 nt, Human
auuugagaaaguauuuuuaagac

SEQ ID NO: 1100233 - RNA, 22 nt, Human
ucucaggacuuugggaagcuca

SEQ ID NO: 1100234 - RNA, 22 nt, Human
auuugcuuucagguauaaaagg

SEQ ID NO: 1100235 - RNA, 22 nt, Human
ugaacaaacugcauucuucacu

SEQ ID NO: 1100236 - RNA, 22 nt, Human
uuaacacauauuuaucaauugc

SEQ ID NO: 1100237 - RNA, 22 nt, Human
uaugucaaaguuaagaaauagg

SEQ ID NO: 1100238 - RNA, 22 nt, Human
uuucacauaugguuguugauug

SEQ ID NO: 1100239 - RNA, 22 nt, Human
caaggccaguucaccaagggca

SEQ ID NO: 1100240 - RNA, 22 nt, Human
aaaugauugucaaaguucuguu

SEQ ID NO: 1100241 - RNA, 23 nt, Human
aaugauuucaugaugauagcagc

SEQ ID NO: 1100242 - RNA, 22 nt, Human
auuuuacuuugugaauauugac

SEQ ID NO: 1100243 - RNA, 22 nt, Human
caaggccaagucucugugaaga

SEQ ID NO: 1100244 - RNA, 19 nt, Human
cauuuuaagcauccccagu

SEQ ID NO: 1100245 - RNA, 22 nt, Human
aucaggauuacacggggaugcu

SEQ ID NO: 1100246 - RNA, 19 nt, Human
aaacacagauuucuuacca

SEQ ID NO: 1100247 - RNA, 22 nt, Human
gaggaaccacucugagaagcca

SEQ ID NO: 1100248 - RNA, 23 nt, Human
cugcugugaaacaugguuuuggu

SEQ ID NO: 1100249 - RNA, 22 nt, Human
uucugucaaauuugccauaugg

SEQ ID NO: 1100250 - RNA, 22 nt, Human
cacccugggcugggccuguuaa

SEQ ID NO: 1100251 - RNA, 22 nt, Human
cugacuguaauucuguucuuaa

SEQ ID NO: 1100252 - RNA, 22 nt, Human
aaaguugugaaaccgaacaugu

SEQ ID NO: 1100253 - RNA, 22 nt, Human
acaagguauccacauuaaaugu

SEQ ID NO: 1100254 - RNA, 22 nt, Human
aauguauuccucaugcaagagu

SEQ ID NO: 1100255 - RNA, 20 nt, Human
uuaucugucaaucugucuca

SEQ ID NO: 1100256 - RNA, 22 nt, Human
aacugcuguggccuaguacuua

SEQ ID NO: 1100257 - RNA, 22 nt, Human
gucuucuuuucagucugcuugu

SEQ ID NO: 1100258 - RNA, 22 nt, Human
cacaugaguccugccagguaug

SEQ ID NO: 1100259 - RNA, 22 nt, Human
cugguacaaaaugcugauauca

SEQ ID NO: 1100260 - RNA, 22 nt, Human
uguaggccuauguccagcaauu

SEQ ID NO: 1100261 - RNA, 22 nt, Human
gaauauuuucaguacagauggu

SEQ ID NO: 1100262 - RNA, 22 nt, Human
caaauguauaaauguacuuucu

SEQ ID NO: 1100263 - RNA, 23 nt, Human
guaaaauacgcagugcaguguga

SEQ ID NO: 1100264 - RNA, 22 nt, Human
cugcuucugggaugauggagua

SEQ ID NO: 1100265 - RNA, 22 nt, Human
agucauaugacccuucacaaac

SEQ ID NO: 1100266 - RNA, 21 nt, Human
cucaaagaccaaaaguguaga

SEQ ID NO: 1100267 - RNA, 22 nt, Human
uuagaacugaagaagauuaagg

SEQ ID NO: 1100268 - RNA, 22 nt, Human
acauacauauguuuaaaugcau

SEQ ID NO: 1100269 - RNA, 22 nt, Human
agcugcuacugcucugccagag

SEQ ID NO: 1100270 - RNA, 22 nt, Human
agugcuguuagguuaauauagu

SEQ ID NO: 1100271 - RNA, 22 nt, Human
auacaacuuuaucuguaaugag

SEQ ID NO: 1100272 - RNA, 22 nt, Human
agcuaccuggcuuaucacuguc

SEQ ID NO: 1100273 - RNA, 22 nt, Human
uauuuccaccuauuauuuucug

SEQ ID NO: 1100274 - RNA, 22 nt, Human
cuugcugucuugcauuuagagc

SEQ ID NO: 1100275 - RNA, 22 nt, Human
uagcuuuccuuguugccugugc

SEQ ID NO: 1100276 - RNA, 22 nt, Human
ugaaggccagggauuugcagcc

SEQ ID NO: 1100277 - RNA, 22 nt, Human
acagauauuuggggaaagacgu

SEQ ID NO: 1100278 - RNA, 22 nt, Human
cuuugcaaacugucacacuuuc

SEQ ID NO: 1100279 - RNA, 22 nt, Human
aauuuguuaaaagugagugaca

SEQ ID NO: 1100280 - RNA, 22 nt, Human
acaaauauuuacugaauccacu

SEQ ID NO: 1100281 - RNA, 20 nt, Human
uauuuacaacuuagagccuc

SEQ ID NO: 1100282 - RNA, 22 nt, Human
auugaaagauauacuguucuca

SEQ ID NO: 1100283 - RNA, 20 nt, Human
auaaaauaacugccacaaga

SEQ ID NO: 1100284 - RNA, 22 nt, Human
cucacugucuguacuagcugau

SEQ ID NO: 1100285 - RNA, 22 nt, Human
aucacaaaggcugcuucaugau

SEQ ID NO: 1100286 - RNA, 19 nt, Human
aucugccuguuaucacaua

SEQ ID NO: 1100287 - RNA, 22 nt, Human
aaguaugacauuuaagacaauu

SEQ ID NO: 1100288 - RNA, 22 nt, Human
aaaguuaguuucuuauaugucu

SEQ ID NO: 1100289 - RNA, 22 nt, Human
accauccugaaaccuucaugcu

SEQ ID NO: 1100290 - RNA, 22 nt, Human
cuguaguugaugauuucugaua

SEQ ID NO: 1100291 - RNA, 22 nt, Human
ugucccucugaggcuucccugg

SEQ ID NO: 1100292 - RNA, 22 nt, Human
gaucauuugcaggaaacauuaa

SEQ ID NO: 1100293 - RNA, 22 nt, Human
cuucuucauguauugauagucu

SEQ ID NO: 1100294 - RNA, 22 nt, Human
auuucccagcuuugaucaguuu

SEQ ID NO: 1100295 - RNA, 22 nt, Human
uugaaauggaagugaaaauucu

SEQ ID NO: 1100296 - RNA, 22 nt, Human
uugaaaggaauacagaggccua

SEQ ID NO: 1100297 - RNA, 22 nt, Human
aaaguaguuagucaugugaaaa

SEQ ID NO: 1100298 - RNA, 22 nt, Human
uuuccucauuuaucugcuggga

SEQ ID NO: 1100299 - RNA, 22 nt, Human
uucucugaucuugcuagacuga

SEQ ID NO: 1100300 - RNA, 22 nt, Human
uggucuuuaagguagcugucau

SEQ ID NO: 1100301 - RNA, 22 nt, Human
aauugcaauuuucuuaaggucu

SEQ ID NO: 1100302 - RNA, 22 nt, Human
aaaggccaugguuggaguguuu

SEQ ID NO: 1100303 - RNA, 22 nt, Human
ucucauugguauauacaugugu

SEQ ID NO: 1100304 - RNA, 22 nt, Human
guuuuccugaaacugauggugu

SEQ ID NO: 1100305 - RNA, 22 nt, Human
cugcugugcuuguggccacccg

SEQ ID NO: 1100306 - RNA, 22 nt, Human
auugucuuuccacugagaaguu

SEQ ID NO: 1100307 - RNA, 22 nt, Human
ugaaaugauuauaugguguuug

SEQ ID NO: 1100308 - RNA, 22 nt, Human
cucuucuugcuagacugagugc

SEQ ID NO: 1100309 - RNA, 22 nt, Human
cuugcugucccuugguaugaac

SEQ ID NO: 1100310 - RNA, 22 nt, Human
agcaccuguugcacuucauaau

SEQ ID NO: 1100311 - RNA, 22 nt, Human
acauuucacuguucacagcagg

SEQ ID NO: 1100312 - RNA, 22 nt, Human
cucaagacugaucgcaguggaa

SEQ ID NO: 1100313 - RNA, 22 nt, Human
aaucugucguaguaaaaagcag

SEQ ID NO: 1100314 - RNA, 22 nt, Human
ucacaauauuuaucuuccaauu

SEQ ID NO: 1100315 - RNA, 22 nt, Human
ucuuuauugcuacugguuuguc

SEQ ID NO: 1100316 - RNA, 22 nt, Human
cauggcugcgagaagagugggu

SEQ ID NO: 1100317 - RNA, 22 nt, Human
uucaggauccccaccgcguuua

SEQ ID NO: 1100318 - RNA, 22 nt, Human
aauaugcauuaacuguguacau

SEQ ID NO: 1100319 - RNA, 22 nt, Human
ucaguagcagaaagcaaugagu

SEQ ID NO: 1100320 - RNA, 22 nt, Human
uuauggcauauuccucauugua

SEQ ID NO: 1100321 - RNA, 22 nt, Human
uaauuucaauagcuugcauaau

SEQ ID NO: 1100322 - RNA, 22 nt, Human
uuucauggcuaggacuagagug

SEQ ID NO: 1100323 - RNA, 22 nt, Human
auucaaauuaaguuaauucagc

SEQ ID NO: 1100324 - RNA, 20 nt, Human
gagauggacagaugaagggg

SEQ ID NO: 1100325 - RNA, 22 nt, Human
aagauaauauucauuaacuaga

SEQ ID NO: 1100326 - RNA, 21 nt, Human
gauugaaaccauggcagugag

SEQ ID NO: 1100327 - RNA, 22 nt, Human
uuuccagguauuaauacuguau

SEQ ID NO: 1100328 - RNA, 22 nt, Human
auuaaauuuucacuaggcuccc

SEQ ID NO: 1100329 - RNA, 23 nt, Human
auguaucucauccaaggaagcuc

SEQ ID NO: 1100330 - RNA, 22 nt, Human
uuggaaauugcaagugauuugc

SEQ ID NO: 1100331 - RNA, 22 nt, Human
aaugucauugguaaagauuagg

SEQ ID NO: 1100332 - RNA, 22 nt, Human
gaggccaaguuggagaccaggu

SEQ ID NO: 1100333 - RNA, 22 nt, Human
uucucagauauuuacugagcau

SEQ ID NO: 1100334 - RNA, 22 nt, Human
ucucugguuauuaacuaacucc

SEQ ID NO: 1100335 - RNA, 22 nt, Human
ggaggccagggacccagucagc

SEQ ID NO: 1100336 - RNA, 22 nt, Human
cagcauuuggaggagaggcuuu

SEQ ID NO: 1100337 - RNA, 22 nt, Human
gcuaugcaggagccuaaugaca

SEQ ID NO: 1100338 - RNA, 22 nt, Human
ugccuguguccccuucuuggca

SEQ ID NO: 1100339 - RNA, 22 nt, Human
cugccaucugagccaaaagugc

SEQ ID NO: 1100340 - RNA, 23 nt, Human
acucacaaagcaggaucauguug

SEQ ID NO: 1100341 - RNA, 22 nt, Human
cugcuguggguuaagacacugu

SEQ ID NO: 1100342 - RNA, 22 nt, Human
ucacaugaguauuauuuuccaa

SEQ ID NO: 1100343 - RNA, 22 nt, Human
ugcuuggccuacuuguccuuug

SEQ ID NO: 1100344 - RNA, 22 nt, Human
cauauaaauacaacauguguua

SEQ ID NO: 1100345 - RNA, 22 nt, Human
cucaggauagauuguccucuca

SEQ ID NO: 1100346 - RNA, 22 nt, Human
gaauacaugauacaugaacugc

SEQ ID NO: 1100347 - RNA, 22 nt, Human
aaaauuauggaguaucccaaag

SEQ ID NO: 1100348 - RNA, 22 nt, Human
ggcuuggaaauugcaggacaca

SEQ ID NO: 1100349 - RNA, 22 nt, Human
cuucuucaucuguaaaacuugg

SEQ ID NO: 1100350 - RNA, 22 nt, Human
uguucucacuggaugcuucaca

SEQ ID NO: 1100351 - RNA, 22 nt, Human
uaauaucuggcauucaaacaug

SEQ ID NO: 1100352 - RNA, 22 nt, Human
aaauaguuagcccugcauauau

SEQ ID NO: 1100353 - RNA, 22 nt, Human
guuuuucuuugugugaagacaa

SEQ ID NO: 1100354 - RNA, 22 nt, Human
uuucagaaagcugaacauauga

SEQ ID NO: 1100355 - RNA, 22 nt, Human
auguuugacugaguuuggcaga

SEQ ID NO: 1100356 - RNA, 22 nt, Human
uacugccuggagcauuggugcu

SEQ ID NO: 1100357 - RNA, 22 nt, Human
ugaauaguccuuggaauaacug

SEQ ID NO: 1100358 - RNA, 17 nt, Human
caaggccagcaucuuca

SEQ ID NO: 1100359 - RNA, 22 nt, Human
ucucaggaucuaauacauggua

SEQ ID NO: 1100360 - RNA, 22 nt, Human
acugcccucccaucuauugcaa

SEQ ID NO: 1100361 - RNA, 19 nt, Human
agcauuuggaauucuacac

SEQ ID NO: 1100362 - RNA, 20 nt, Human
uuuacauuuugaaacaguga

SEQ ID NO: 1100363 - RNA, 22 nt, Human
uuucacuagaacguucuuguuu

SEQ ID NO: 1100364 - RNA, 22 nt, Human
uagaaauaaaucugcagcuggg

SEQ ID NO: 1100365 - RNA, 19 nt, Human
ugcauaaauuauauacuuu

SEQ ID NO: 1100366 - RNA, 22 nt, Human
aucacugucgucaucugagauu

SEQ ID NO: 1100367 - RNA, 22 nt, Human
auaaagauuucuuuuucucuac

SEQ ID NO: 1100368 - RNA, 22 nt, Human
aggcacaggaaugucauccagu

SEQ ID NO: 1100369 - RNA, 22 nt, Human
auuucccaugugaaucaauugg

SEQ ID NO: 1100370 - RNA, 22 nt, Human
auguucuuguucaaaugucagu

SEQ ID NO: 1100371 - RNA, 22 nt, Human
agugcuuugugcucucacugca

SEQ ID NO: 1100372 - RNA, 22 nt, Human
caggaugguggcaugaucagaa

SEQ ID NO: 1100373 - RNA, 22 nt, Human
guucuucagucacaucacagaa

SEQ ID NO: 1100374 - RNA, 22 nt, Human
ggauguugauugaauggccauu

SEQ ID NO: 1100375 - RNA, 22 nt, Human
aaguauuucuggccugugaaag

SEQ ID NO: 1100376 - RNA, 22 nt, Human
uguauaaauuuaaauuccugcu

SEQ ID NO: 1100377 - RNA, 22 nt, Human
ugacaaaacugcaauuacuuuu

SEQ ID NO: 1100378 - RNA, 22 nt, Human
uucaggauucucucccauuuac

SEQ ID NO: 1100379 - RNA, 22 nt, Human
ugccugugguuccaguuuuuuc

SEQ ID NO: 1100380 - RNA, 22 nt, Human
agaccaagaaaggaugaggauc

SEQ ID NO: 1100381 - RNA, 22 nt, Human
uguauuuuuagaccuuuagacc

SEQ ID NO: 1100382 - RNA, 22 nt, Human
agucuucucauuucacaugcuu

SEQ ID NO: 1100383 - RNA, 22 nt, Human
uucagaaugugaccuuauuugg

SEQ ID NO: 1100384 - RNA, 22 nt, Human
cuugcugggguaagucugugcu

SEQ ID NO: 1100385 - RNA, 22 nt, Human
gaucauuuacuuguucuggacu

SEQ ID NO: 1100386 - RNA, 22 nt, Human
uucaauucuaaacuaauauucu

SEQ ID NO: 1100387 - RNA, 22 nt, Human
uuucaguuuuugcucgauguau

SEQ ID NO: 1100388 - RNA, 22 nt, Human
guugaaugaaucauucuaugua

SEQ ID NO: 1100389 - RNA, 22 nt, Human
cucauuaaaggaaaucaccugc

SEQ ID NO: 1100390 - RNA, 22 nt, Human
ccucuucuaggacguccuugug

SEQ ID NO: 1100391 - RNA, 22 nt, Human
auuucacucauucauguuacuu

SEQ ID NO: 1100392 - RNA, 22 nt, Human
gugcuaaaggguuaugaacaag

SEQ ID NO: 1100393 - RNA, 22 nt, Human
uacuaaauaguuuaauuccuca

SEQ ID NO: 1100394 - RNA, 22 nt, Human
uugaaguuguaguucagugaag

SEQ ID NO: 1100395 - RNA, 22 nt, Human
augaacugcaguauaaacuugg

SEQ ID NO: 1100396 - RNA, 22 nt, Human
cucugauuuccuuauucuguca

SEQ ID NO: 1100397 - RNA, 22 nt, Human
uuugacaaauccuucagcaaug

SEQ ID NO: 1100398 - RNA, 22 nt, Human
auucauaacggcaaaugucacc

SEQ ID NO: 1100399 - RNA, 22 nt, Human
auuaguaaaacauuguauaugu

SEQ ID NO: 1100400 - RNA, 22 nt, Human
gugcugugcgcuuuuucuguau

SEQ ID NO: 1100401 - RNA, 22 nt, Human
uuuccagagcaugucugcucag

SEQ ID NO: 1100402 - RNA, 22 nt, Human
uauaauguuuuccauggacuga

SEQ ID NO: 1100403 - RNA, 22 nt, Human
acuggcaguagagggagcgcau

SEQ ID NO: 1100404 - RNA, 22 nt, Human
cauuugcagagggugacacucu

SEQ ID NO: 1100405 - RNA, 22 nt, Human
caaaugauaccuauuacuaggc

SEQ ID NO: 1100406 - RNA, 22 nt, Human
uguagaaacuacacaugcaaca

SEQ ID NO: 1100407 - RNA, 22 nt, Human
augugucuuugagacucugcua

SEQ ID NO: 1100408 - RNA, 22 nt, Human
ccuucuucuguguggcccaaga

SEQ ID NO: 1100409 - RNA, 22 nt, Human
uuaaauauuauguugucugcaa

SEQ ID NO: 1100410 - RNA, 22 nt, Human
ugcuuucaaaggcuuucuagau

SEQ ID NO: 1100411 - RNA, 18 nt, Human
cccucuugcacaaagcaa

SEQ ID NO: 1100412 - RNA, 22 nt, Human
ugcuagaauuagguuaaacaaa

SEQ ID NO: 1100413 - RNA, 22 nt, Human
uagcaauagaaacauauaaagu

SEQ ID NO: 1100414 - RNA, 18 nt, Human
ugagaggcagguagagga

SEQ ID NO: 1100415 - RNA, 22 nt, Human
auugaggcagcauaguucaggg

SEQ ID NO: 1100416 - RNA, 22 nt, Human
cugcuguguuagcagguuuagu

SEQ ID NO: 1100417 - RNA, 22 nt, Human
cuguuuaucucuaaccuguuua

SEQ ID NO: 1100418 - RNA, 22 nt, Human
uuucauugucuacauaugacau

SEQ ID NO: 1100419 - RNA, 22 nt, Human
cagugauggauauggagaaguc

SEQ ID NO: 1100420 - RNA, 22 nt, Human
ugugaaaagcaggcuacuuucu

SEQ ID NO: 1100421 - RNA, 22 nt, Human
ucuacugugguccuuguaacca

SEQ ID NO: 1100422 - RNA, 22 nt, Human
auguaugaugcuaggcucucag

SEQ ID NO: 1100423 - RNA, 22 nt, Human
uuugaaagcaccauuugaguag

SEQ ID NO: 1100424 - RNA, 22 nt, Human
uucugucaaaugccaguagaga

SEQ ID NO: 1100425 - RNA, 22 nt, Human
ugccuggaaggcccaugggaag

SEQ ID NO: 1100426 - RNA, 22 nt, Human
guuauaaaaugcacaguuguuu

SEQ ID NO: 1100427 - RNA, 22 nt, Human
uuccaugaaggagacugagaag

SEQ ID NO: 1100428 - RNA, 22 nt, Human
caugugguucaaguacuccaca

SEQ ID NO: 1100429 - RNA, 22 nt, Human
aagacuguacauuuuccagucu

SEQ ID NO: 1100430 - RNA, 19 nt, Human
ugcugcuguccuugcaggg

SEQ ID NO: 1100431 - RNA, 22 nt, Human
ugguuuugcuaaaauagaaaga

SEQ ID NO: 1100432 - RNA, 22 nt, Human
cagucucucugaaguauuaaga

SEQ ID NO: 1100433 - RNA, 22 nt, Human
uuagccaugcccuagaagagga

SEQ ID NO: 1100434 - RNA, 22 nt, Human
cauuuccugucuggaggucaaa

SEQ ID NO: 1100435 - RNA, 22 nt, Human
ggauggcaggacaaggacccag

SEQ ID NO: 1100436 - RNA, 22 nt, Human
ucugaaggugcuagagaaagcu

SEQ ID NO: 1100437 - RNA, 22 nt, Human
cauaauuucccaagagauugaa

SEQ ID NO: 1100438 - RNA, 22 nt, Human
uucuaugccauguucagcuacu

SEQ ID NO: 1100439 - RNA, 20 nt, Human
uggaaguucuguugcauugg

SEQ ID NO: 1100440 - RNA, 22 nt, Human
agcagccuuugaucaucuggga

SEQ ID NO: 1100441 - RNA, 22 nt, Human
uaucuuguaauagguccacuug

SEQ ID NO: 1100442 - RNA, 22 nt, Human
ugcuuuggaucuauuugcugag

SEQ ID NO: 1100443 - RNA, 22 nt, Human
uguguucuggaaagcucacuga

SEQ ID NO: 1100444 - RNA, 22 nt, Human
gcugccagccaacuugcugugc

SEQ ID NO: 1100445 - RNA, 21 nt, Human
uuucugaaggcaacaucuauc

SEQ ID NO: 1100446 - RNA, 22 nt, Human
aacauucugguucuaaaaaccu

SEQ ID NO: 1100447 - RNA, 22 nt, Human
ccagugcuucuuugcuagcugg

SEQ ID NO: 1100448 - RNA, 22 nt, Human
augcugugguagacagcauucc

SEQ ID NO: 1100449 - RNA, 22 nt, Human
gcucaggaccgaggggugggaa

SEQ ID NO: 1100450 - RNA, 22 nt, Human
cuuguccccagcagguugguuu

SEQ ID NO: 1100451 - RNA, 22 nt, Human
ucuuccaagguugcacacuauc

SEQ ID NO: 1100452 - RNA, 22 nt, Human
uuugaauguuuuagguacuuaa

SEQ ID NO: 1100453 - RNA, 22 nt, Human
aagauuauggcagauaacaauu

SEQ ID NO: 1100454 - RNA, 22 nt, Human
aucaggaucugggagccugaaa

SEQ ID NO: 1100455 - RNA, 22 nt, Human
gaauaguucuauggcugcaggg

SEQ ID NO: 1100456 - RNA, 22 nt, Human
acauuuaaccaaacuguuuaau

SEQ ID NO: 1100457 - RNA, 22 nt, Human
aaucuucauuuugacaagauuc

SEQ ID NO: 1100458 - RNA, 22 nt, Human
ucagagaguuacacaaauuguu

SEQ ID NO: 1100459 - RNA, 22 nt, Human
gagugucugaauuagagcacaa

SEQ ID NO: 1100460 - RNA, 22 nt, Human
aguuagaauagucagauuguag

SEQ ID NO: 1100461 - RNA, 22 nt, Human
cagagggcucuuggcugccugc

SEQ ID NO: 1100462 - RNA, 22 nt, Human
uuugcaaauaccaugaaacuug

SEQ ID NO: 1100463 - RNA, 22 nt, Human
auuuucaaaacaucugcugugu

SEQ ID NO: 1100464 - RNA, 22 nt, Human
cuuuguagcugcuucugauuua

SEQ ID NO: 1100465 - RNA, 22 nt, Human
ucugaaaugcaaauuugacuga

SEQ ID NO: 1100466 - RNA, 22 nt, Human
cuugaaagauuuggccucugug

SEQ ID NO: 1100467 - RNA, 22 nt, Human
gaaggccaguuuugagauaggu

SEQ ID NO: 1100468 - RNA, 18 nt, Human
ggucuuuaggucaguguc

SEQ ID NO: 1100469 - RNA, 22 nt, Human
cuggcuguauuaguuugauccu

SEQ ID NO: 1100470 - RNA, 22 nt, Human
agauggagaaugacaauuaagg

SEQ ID NO: 1100471 - RNA, 22 nt, Human
aagugggaauagaaaugaaggu

SEQ ID NO: 1100472 - RNA, 22 nt, Human
cuuaaaaucuggcaguuagcua

SEQ ID NO: 1100473 - RNA, 22 nt, Human
uguuagaauauuguaauauucg

SEQ ID NO: 1100474 - RNA, 22 nt, Human
ccucacugaagaggugacauuu

SEQ ID NO: 1100475 - RNA, 23 nt, Human
auugaugacuugauuacacuuuu

SEQ ID NO: 1100476 - RNA, 22 nt, Human
caaaguuuuaguaaacauauau

SEQ ID NO: 1100477 - RNA, 22 nt, Human
ucucuucuaauuaggguccaug

SEQ ID NO: 1100478 - RNA, 22 nt, Human
auguauuucuauguagugaaga

SEQ ID NO: 1100479 - RNA, 20 nt, Human
guugaaaguaauaugaugcu

SEQ ID NO: 1100480 - RNA, 22 nt, Human
cucaggauuuaaaggggcacuc

SEQ ID NO: 1100481 - RNA, 22 nt, Human
uuccaugaagggcagccucuca

SEQ ID NO: 1100482 - RNA, 22 nt, Human
ccagugcuuccaggaauacggu

SEQ ID NO: 1100483 - RNA, 22 nt, Human
gagucuuugguaaagucugcug

SEQ ID NO: 1100484 - RNA, 22 nt, Human
auuugcaaagucguaucuguga

SEQ ID NO: 1100485 - RNA, 22 nt, Human
gcauguguugguuuaugcaugu

SEQ ID NO: 1100486 - RNA, 22 nt, Human
uugagaagaaauaguuugcaau

SEQ ID NO: 1100487 - RNA, 22 nt, Human
auuuccaggagaaaggauuuua

SEQ ID NO: 1100488 - RNA, 22 nt, Human
gucccaggugggcuccaccucu

SEQ ID NO: 1100489 - RNA, 22 nt, Human
aauguaugacaguucuaguggu

SEQ ID NO: 1100490 - RNA, 22 nt, Human
aguauugugacucaaguauucu

SEQ ID NO: 1100491 - RNA, 22 nt, Human
aguuggagugaacaugagauug

SEQ ID NO: 1100492 - RNA, 18 nt, Human
aauuuccauaugaauugc

SEQ ID NO: 1100493 - RNA, 22 nt, Human
ucucuucuauuugagacuauuu

SEQ ID NO: 1100494 - RNA, 22 nt, Human
uacaguaagaugaaauagcaau

SEQ ID NO: 1100495 - RNA, 22 nt, Human
ucuuugaugugguuaauuauga

SEQ ID NO: 1100496 - RNA, 22 nt, Human
aucucuguaaaccauaaauuga

SEQ ID NO: 1100497 - RNA, 22 nt, Human
gagcaccucaauuugcuauuug

SEQ ID NO: 1100498 - RNA, 22 nt, Human
ugcauggacucaucagacaaga

SEQ ID NO: 1100499 - RNA, 22 nt, Human
ugugaaaagcguguguucuagg

SEQ ID NO: 1100500 - RNA, 20 nt, Human
agauuauuccuaagauuucu

SEQ ID NO: 1100501 - RNA, 22 nt, Human
cuagccugggauuugaacuuau

SEQ ID NO: 1100502 - RNA, 20 nt, Human
ucagaugggagugagccauc

SEQ ID NO: 1100503 - RNA, 22 nt, Human
uacauguauguguacgugcaug

SEQ ID NO: 1100504 - RNA, 22 nt, Human
cugcugugacagcugccguguu

SEQ ID NO: 1100505 - RNA, 22 nt, Human
agggacuuguguccuauguaug

SEQ ID NO: 1100506 - RNA, 22 nt, Human
auuacaguaacagcuacaaugc

SEQ ID NO: 1100507 - RNA, 22 nt, Human
ucauuuauaaggaugcaauuaa

SEQ ID NO: 1100508 - RNA, 18 nt, Human
cucaccauucugcccaau

SEQ ID NO: 1100509 - RNA, 22 nt, Human
uucugucagaagcuagcuccug

SEQ ID NO: 1100510 - RNA, 22 nt, Human
caugcugugcaucuugaugacc

SEQ ID NO: 1100511 - RNA, 17 nt, Human
uuugaaaggaugucagu

SEQ ID NO: 1100512 - RNA, 22 nt, Human
aucuuucaaucaggaaaaaucu

SEQ ID NO: 1100513 - RNA, 23 nt, Human
acacauuuuucccguucugaggu

SEQ ID NO: 1100514 - RNA, 22 nt, Human
agugcuuuaccuagauaauguu

SEQ ID NO: 1100515 - RNA, 22 nt, Human
uagaaacauguucuguucuguu

SEQ ID NO: 1100516 - RNA, 22 nt, Human
aauauaauuuuauuccuagagu

SEQ ID NO: 1100517 - RNA, 22 nt, Human
uguuugaauuuugcuaacgugu

SEQ ID NO: 1100518 - RNA, 22 nt, Human
aaauguuuugcucccauguggu

SEQ ID NO: 1100519 - RNA, 22 nt, Human
ucauuuaauaauuuuugaguag

SEQ ID NO: 1100520 - RNA, 22 nt, Human
uucuucuugucugcccucacau

SEQ ID NO: 1100521 - RNA, 22 nt, Human
ugaaacuucuaauaugaauagu

SEQ ID NO: 1100522 - RNA, 22 nt, Human
gcucacugccauucucuagaug

SEQ ID NO: 1100523 - RNA, 22 nt, Human
cugagccagcuggcaugugcua

SEQ ID NO: 1100524 - RNA, 22 nt, Human
gugucccaggccucuggaauua

SEQ ID NO: 1100525 - RNA, 22 nt, Human
aaacacauuuuaggaaaaucua

SEQ ID NO: 1100526 - RNA, 22 nt, Human
ucauuguuauguuuugcugucu

SEQ ID NO: 1100527 - RNA, 22 nt, Human
acacuaaugagaaaggaauuaa

SEQ ID NO: 1100528 - RNA, 22 nt, Human
uucacagacuuuccauagauug

SEQ ID NO: 1100529 - RNA, 22 nt, Human
agaggccagguccagaguuugu

SEQ ID NO: 1100530 - RNA, 22 nt, Human
agaccauggccauccuaggaaa

SEQ ID NO: 1100531 - RNA, 22 nt, Human
cucccagagaccaagcugagaa

SEQ ID NO: 1100532 - RNA, 22 nt, Human
aaacacaucauucaugucguca

SEQ ID NO: 1100533 - RNA, 22 nt, Human
acauuuagcuguacaaucuaug

SEQ ID NO: 1100534 - RNA, 22 nt, Human
uaacacauauuugcaguaagca

SEQ ID NO: 1100535 - RNA, 22 nt, Human
cauuuacacuucuaaccacaag

SEQ ID NO: 1100536 - RNA, 23 nt, Human
uucuucucaauuaguugauucag

SEQ ID NO: 1100537 - RNA, 22 nt, Human
ccugcugugaccggggagcagg

SEQ ID NO: 1100538 - RNA, 22 nt, Human
aaguauuucguucugaaaaagu

SEQ ID NO: 1100539 - RNA, 22 nt, Human
gcucaggaaauaguuuaguguu

SEQ ID NO: 1100540 - RNA, 22 nt, Human
gcucacugcaaccucugcuucc

SEQ ID NO: 1100541 - RNA, 22 nt, Human
aggguccugggugcaguugcuu

SEQ ID NO: 1100542 - RNA, 22 nt, Human
gggacuucauagcuaggcacuu

SEQ ID NO: 1100543 - RNA, 22 nt, Human
aaucacaugugcucaauuuuaa

SEQ ID NO: 1100544 - RNA, 22 nt, Human
uuuuaucuucauuccuaucuac

SEQ ID NO: 1100545 - RNA, 19 nt, Human
aaaaacuuaguccagaaag

SEQ ID NO: 1100546 - RNA, 23 nt, Human
uuuggacuugugacucuucuccu

SEQ ID NO: 1100547 - RNA, 22 nt, Human
uuugcaguagacaucuuauuuu

SEQ ID NO: 1100548 - RNA, 22 nt, Human
ugaaaugacagucuuaagcucu

SEQ ID NO: 1100549 - RNA, 22 nt, Human
cucagaagccuucagucuuggc

SEQ ID NO: 1100550 - RNA, 22 nt, Human
aagcaacucccuccucauuuuu

SEQ ID NO: 1100551 - RNA, 16 nt, Human
uucugucacguacggc

SEQ ID NO: 1100552 - RNA, 22 nt, Human
aacauauaaacucuuaaguuca

SEQ ID NO: 1100553 - RNA, 22 nt, Human
agcuucuuggcucagcacuugg

SEQ ID NO: 1100554 - RNA, 22 nt, Human
acauaugauauugaggaucuca

SEQ ID NO: 1100555 - RNA, 22 nt, Human
ucacaauacucacucaauggcu

SEQ ID NO: 1100556 - RNA, 22 nt, Human
gaauacauuggaaaucagaaua

SEQ ID NO: 1100557 - RNA, 22 nt, Human
cuguggaaauaaacaaugcuaa

SEQ ID NO: 1100558 - RNA, 22 nt, Human
uuucucaguuacuagcuguggu

SEQ ID NO: 1100559 - RNA, 22 nt, Human
ucauuuguucaucugcucuucu

SEQ ID NO: 1100560 - RNA, 22 nt, Human
gaccauuuuuacagagcauuca

SEQ ID NO: 1100561 - RNA, 22 nt, Human
cugugauuguuaguuccuauac

SEQ ID NO: 1100562 - RNA, 22 nt, Human
aucugccuccaaguccaugugu

SEQ ID NO: 1100563 - RNA, 22 nt, Human
cuuugcaauagaggcacacaug

SEQ ID NO: 1100564 - RNA, 22 nt, Human
guugacagcuggugagcugcua

SEQ ID NO: 1100565 - RNA, 19 nt, Human
augucuggguaacagcugc

SEQ ID NO: 1100566 - RNA, 22 nt, Human
gagagucuagugcaccuaguuu

SEQ ID NO: 1100567 - RNA, 22 nt, Human
uugggcucaggaguuugagacc

SEQ ID NO: 1100568 - RNA, 22 nt, Human
gaccauuucuaggaaucagacu

SEQ ID NO: 1100569 - RNA, 22 nt, Human
ucuucuuccucauuuauacaua

SEQ ID NO: 1100570 - RNA, 22 nt, Human
uaacuuucacaucacacugacu

SEQ ID NO: 1100571 - RNA, 22 nt, Human
caaggccagggaauuuuucugg

SEQ ID NO: 1100572 - RNA, 22 nt, Human
uauuuccaggccccacucuaga

SEQ ID NO: 1100573 - RNA, 22 nt, Human
agaaaugacacacaugagacau

SEQ ID NO: 1100574 - RNA, 22 nt, Human
cucacuguccaacaggcuuuac

SEQ ID NO: 1100575 - RNA, 22 nt, Human
ucagugaucuaaggguauggcc

SEQ ID NO: 1100576 - RNA, 22 nt, Human
ucucucuuuuuaaucauguaau

SEQ ID NO: 1100577 - RNA, 22 nt, Human
caggaugaagggcaaaggcaag

SEQ ID NO: 1100578 - RNA, 22 nt, Human
aauauuguuucaagaucacaga

SEQ ID NO: 1100579 - RNA, 22 nt, Human
uucugucacuuaggaggucaua

SEQ ID NO: 1100580 - RNA, 22 nt, Human
ucuuugcaggccaaauuguuaa

SEQ ID NO: 1100581 - RNA, 22 nt, Human
uucucagaugauucagauaaac

SEQ ID NO: 1100582 - RNA, 22 nt, Human
aaggaguuuggguagucauaca

SEQ ID NO: 1100583 - RNA, 22 nt, Human
cuuuggcaaggguuuuaauugu

SEQ ID NO: 1100584 - RNA, 22 nt, Human
cuagccaugggcauuaaaggua

SEQ ID NO: 1100585 - RNA, 22 nt, Human
gcauaugaucacgugugucggu

SEQ ID NO: 1100586 - RNA, 22 nt, Human
cucaggaaaggccaugcaaggg

SEQ ID NO: 1100587 - RNA, 22 nt, Human
ugcugugagguugagaaggaag

SEQ ID NO: 1100588 - RNA, 22 nt, Human
uguuugaacugaauaacauagu

SEQ ID NO: 1100589 - RNA, 22 nt, Human
ucaggauggcuucugcaucaaa

SEQ ID NO: 1100590 - RNA, 22 nt, Human
uccauuuucaucucauguauaa

SEQ ID NO: 1100591 - RNA, 23 nt, Human
uuagagaugauuaaaaaaucuug

SEQ ID NO: 1100592 - RNA, 22 nt, Human
agugcuuuagcauccaacuguc

SEQ ID NO: 1100593 - RNA, 20 nt, Human
cauuuguuagcuuucuacug

SEQ ID NO: 1100594 - RNA, 22 nt, Human
acagucuugagcaucagccaga

SEQ ID NO: 1100595 - RNA, 22 nt, Human
uugacacagaucaauauucaac

SEQ ID NO: 1100596 - RNA, 22 nt, Human
auucuucagcaggggacacuau

SEQ ID NO: 1100597 - RNA, 22 nt, Human
ucacaaaugaggaaaucgagca

SEQ ID NO: 1100598 - RNA, 22 nt, Human
ucaaucacguguuccauguucu

SEQ ID NO: 1100599 - RNA, 22 nt, Human
uuauucuucuucucuugccagg

SEQ ID NO: 1100600 - RNA, 22 nt, Human
acuuuugguucuguaacuguga

SEQ ID NO: 1100601 - RNA, 20 nt, Human
auccaugagagucuggauuc

SEQ ID NO: 1100602 - RNA, 22 nt, Human
uugugaaauguuucaaaauagu

SEQ ID NO: 1100603 - RNA, 22 nt, Human
uaacacaugucugggaugugaa

SEQ ID NO: 1100604 - RNA, 22 nt, Human
uauuugaaaguguacaaaaacu

SEQ ID NO: 1100605 - RNA, 22 nt, Human
uuagaaagaacuuuagauauca

SEQ ID NO: 1100606 - RNA, 22 nt, Human
uuauuauagauuaugcaagauu

SEQ ID NO: 1100607 - RNA, 22 nt, Human
cuucuucaaccugaaaguuuca

SEQ ID NO: 1100608 - RNA, 22 nt, Human
cucugcauuuuaacagaugauu

SEQ ID NO: 1100609 - RNA, 22 nt, Human
aauuuccaaauuucugucacac

SEQ ID NO: 1100610 - RNA, 22 nt, Human
ccccaggacacauggaccaagu

SEQ ID NO: 1100611 - RNA, 22 nt, Human
uuucacaacugcuuauuugaga

SEQ ID NO: 1100612 - RNA, 22 nt, Human
uuauuuacaacucuucucuucc

SEQ ID NO: 1100613 - RNA, 23 nt, Human
uuucaacuccugccauuauuucu

SEQ ID NO: 1100614 - RNA, 22 nt, Human
aaaguuugcaauuuauguuaau

SEQ ID NO: 1100615 - RNA, 22 nt, Human
uaaauuguuuucuagaaguugu

SEQ ID NO: 1100616 - RNA, 22 nt, Human
aaaguucuggcauuuucugucu

SEQ ID NO: 1100617 - RNA, 22 nt, Human
uguucuuuggcuucacagcucu

SEQ ID NO: 1100618 - RNA, 22 nt, Human
uucaggaugacaccauguccag

SEQ ID NO: 1100619 - RNA, 22 nt, Human
augcuguguccuagugaaagaa

SEQ ID NO: 1100620 - RNA, 22 nt, Human
uucuccagaccuugugacuaug

SEQ ID NO: 1100621 - RNA, 22 nt, Human
ucacagacacagggagaagcau

SEQ ID NO: 1100622 - RNA, 22 nt, Human
uacauauguaaacauguauaaa

SEQ ID NO: 1100623 - RNA, 22 nt, Human
auuuaaauuuucugauggagag

SEQ ID NO: 1100624 - RNA, 22 nt, Human
aaguguagauuauggagugucu

SEQ ID NO: 1100625 - RNA, 22 nt, Human
uucacaauggcaaaccauuaaa

SEQ ID NO: 1100626 - RNA, 22 nt, Human
cugcugugagugguucuugccu

SEQ ID NO: 1100627 - RNA, 22 nt, Human
cuuaagaugaggucaugcuaua

SEQ ID NO: 1100628 - RNA, 22 nt, Human
uagugcuuuaaguuuacagaga

SEQ ID NO: 1100629 - RNA, 22 nt, Human
auagucuuagaucagauaaagu

SEQ ID NO: 1100630 - RNA, 22 nt, Human
aagugaagaaauacaugagaau

SEQ ID NO: 1100631 - RNA, 22 nt, Human
ucuuugcaaaauacaacaaugg

SEQ ID NO: 1100632 - RNA, 22 nt, Human
gaauauuuguaauuacuguuga

SEQ ID NO: 1100633 - RNA, 22 nt, Human
uuugaaaggaaguuaauacuuu

SEQ ID NO: 1100634 - RNA, 22 nt, Human
cuagaaauauuuuacagucaag

SEQ ID NO: 1100635 - RNA, 22 nt, Human
augcagcuucaggauuaugaug

SEQ ID NO: 1100636 - RNA, 22 nt, Human
aguccaaggagagacagcauuu

SEQ ID NO: 1100637 - RNA, 22 nt, Human
uugaaaguagcagcugcauaug

SEQ ID NO: 1100638 - RNA, 22 nt, Human
acucagaaugacugaugcugug

SEQ ID NO: 1100639 - RNA, 22 nt, Human
caggaugagaggcccagggaag

SEQ ID NO: 1100640 - RNA, 22 nt, Human
gugauaaaauucaaauagcucu

SEQ ID NO: 1100641 - RNA, 21 nt, Human
ucacagacuggucagugaggc

SEQ ID NO: 1100642 - RNA, 22 nt, Human
uuuuuaguagagguggguuuca

SEQ ID NO: 1100643 - RNA, 15 nt, Human
uucaggauaugacuc

SEQ ID NO: 1100644 - RNA, 22 nt, Human
cugcuuugcauagcugccagag

SEQ ID NO: 1100645 - RNA, 22 nt, Human
aaaaugaugcuguaauuuggca

SEQ ID NO: 1100646 - RNA, 22 nt, Human
ugaaacaaugugaaguugcuga

SEQ ID NO: 1100647 - RNA, 22 nt, Human
uggagacugugcuaagggaguu

SEQ ID NO: 1100648 - RNA, 22 nt, Human
ucuucucuacaccagcagcccc

SEQ ID NO: 1100649 - RNA, 22 nt, Human
uucccucuccuacucaggaaag

SEQ ID NO: 1100650 - RNA, 22 nt, Human
uuucaaaccuacuuguauguuu

SEQ ID NO: 1100651 - RNA, 22 nt, Human
ggagcuguuggcagcuaucuug

SEQ ID NO: 1100652 - RNA, 22 nt, Human
ucuccucucuuaccugguacaa

SEQ ID NO: 1100653 - RNA, 22 nt, Human
agucacuguucugucaugucaa

SEQ ID NO: 1100654 - RNA, 22 nt, Human
augcugugcuggcuaaccaugg

SEQ ID NO: 1100655 - RNA, 22 nt, Human
cuaucauuuuacaugguuggug

SEQ ID NO: 1100656 - RNA, 22 nt, Human
aauuuuaaucaguggugcugag

SEQ ID NO: 1100657 - RNA, 22 nt, Human
uauuuucuggacagucuugcuu

SEQ ID NO: 1100658 - RNA, 22 nt, Human
gcucaggaaaacagucuaguaa

SEQ ID NO: 1100659 - RNA, 22 nt, Human
ccaggaugacccccacuuuccu

SEQ ID NO: 1100660 - RNA, 22 nt, Human
acuggcagagacccugauggcc

SEQ ID NO: 1100661 - RNA, 22 nt, Human
augaacuuauuucugaacuuuu

SEQ ID NO: 1100662 - RNA, 22 nt, Human
aauuaugagguagauaucacau

SEQ ID NO: 1100663 - RNA, 22 nt, Human
uggaguuccuuugaaaggcucu

SEQ ID NO: 1100664 - RNA, 22 nt, Human
agcuggcaguaugacuggugac

SEQ ID NO: 1100665 - RNA, 21 nt, Human
aaugaaguggcuauuuugagg

SEQ ID NO: 1100666 - RNA, 22 nt, Human
cagaccagcucuaugaacccaa

SEQ ID NO: 1100667 - RNA, 22 nt, Human
uugcugaaguuaaugcuugcaa

SEQ ID NO: 1100668 - RNA, 21 nt, Human
augugaaaccuuccacgcuga

SEQ ID NO: 1100669 - RNA, 18 nt, Human
cauuguacaaugcuuuau

SEQ ID NO: 1100670 - RNA, 22 nt, Human
ucauuucuauugcuacugucug

SEQ ID NO: 1100671 - RNA, 22 nt, Human
ugaugaaaauaugauucugagg

SEQ ID NO: 1100672 - RNA, 23 nt, Human
ucagucuucccugucaguaauag

SEQ ID NO: 1100673 - RNA, 19 nt, Human
uugaaagauuagcuuucua

SEQ ID NO: 1100674 - RNA, 20 nt, Human
aguguacagacacuagaaau

SEQ ID NO: 1100675 - RNA, 22 nt, Human
ucugucccugagagcucaggag

SEQ ID NO: 1100676 - RNA, 22 nt, Human
aaauuucaguuggaaugagcuc

SEQ ID NO: 1100677 - RNA, 22 nt, Human
gagaaaugcaugcaugucauca

SEQ ID NO: 1100678 - RNA, 22 nt, Human
uucaugugaucacagauuguaa

SEQ ID NO: 1100679 - RNA, 21 nt, Human
uaacacauuuugguacuuugg

SEQ ID NO: 1100680 - RNA, 22 nt, Human
ucagucuuugcuuaugacaaua

SEQ ID NO: 1100681 - RNA, 22 nt, Human
cucccaggggaacuaucaagua

SEQ ID NO: 1100682 - RNA, 22 nt, Human
agucaauucuuuucaacucaag

SEQ ID NO: 1100683 - RNA, 22 nt, Human
aucacauugccagugauuaccc

SEQ ID NO: 1100684 - RNA, 22 nt, Human
uuugcagucaaauuugcuaaau

SEQ ID NO: 1100685 - RNA, 18 nt, Human
aaacuggcuuggccugug

SEQ ID NO: 1100686 - RNA, 22 nt, Human
uaaaguuuggcagacaauaaca

SEQ ID NO: 1100687 - RNA, 22 nt, Human
auuuuacuacuccaauuaauga

SEQ ID NO: 1100688 - RNA, 22 nt, Human
uaaguucauaagcuuauucuua

SEQ ID NO: 1100689 - RNA, 22 nt, Human
aggccagaugucgggcuagaag

SEQ ID NO: 1100690 - RNA, 22 nt, Human
ugacccauggucugaucauagg

SEQ ID NO: 1100691 - RNA, 22 nt, Human
aauuauguagccauaugaaaca

SEQ ID NO: 1100692 - RNA, 22 nt, Human
auacaacagaaaaugauuauuc

SEQ ID NO: 1100693 - RNA, 22 nt, Human
aaggaaccuggaguagagggag

SEQ ID NO: 1100694 - RNA, 22 nt, Human
ucuuaaagagcgcaauuugagg

SEQ ID NO: 1100695 - RNA, 22 nt, Human
cucaggaugcaauuccaucaag

SEQ ID NO: 1100696 - RNA, 22 nt, Human
uaaggccaauuaacaaccaggg

SEQ ID NO: 1100697 - RNA, 22 nt, Human
uuucaaagaccauuaacuauca

SEQ ID NO: 1100698 - RNA, 22 nt, Human
acuugcugguggcauuuacagu

SEQ ID NO: 1100699 - RNA, 22 nt, Human
acagaaauugggcaaauggaag

SEQ ID NO: 1100700 - RNA, 22 nt, Human
uuuggaauuggcauucuauucu

SEQ ID NO: 1100701 - RNA, 22 nt, Human
uaguauuuaaucacuuuugucu

SEQ ID NO: 1100702 - RNA, 22 nt, Human
cuuccuucugaagcauagaagc

SEQ ID NO: 1100703 - RNA, 22 nt, Human
uuagagucaagcugcauguucu

SEQ ID NO: 1100704 - RNA, 22 nt, Human
auauucuucuuguucagacuau

SEQ ID NO: 1100705 - RNA, 22 nt, Human
auuugcuuaucuccacaguugu

SEQ ID NO: 1100706 - RNA, 22 nt, Human
uguccucuuccagugcuccuuc

SEQ ID NO: 1100707 - RNA, 20 nt, Human
aucaggauucuugcuuuguu

SEQ ID NO: 1100708 - RNA, 22 nt, Human
gaaaacuauuggccuagaacaa

SEQ ID NO: 1100709 - RNA, 22 nt, Human
caugcuguguguuuuagcucca

SEQ ID NO: 1100710 - RNA, 22 nt, Human
ucagucucaucaacucuauucc

SEQ ID NO: 1100711 - RNA, 22 nt, Human
aaacugcuuuccacaguggcua

SEQ ID NO: 1100712 - RNA, 22 nt, Human
uuucuucucgacaccuuauccc

SEQ ID NO: 1100713 - RNA, 21 nt, Human
gcaaauguucaggaaaaaaga

SEQ ID NO: 1100714 - RNA, 21 nt, Human
ugaaaugagaaugcugagcac

SEQ ID NO: 1100715 - RNA, 20 nt, Human
agaaauauugaguucagagg

SEQ ID NO: 1100716 - RNA, 22 nt, Human
agugcuuucccugaaaccuucc

SEQ ID NO: 1100717 - RNA, 22 nt, Human
ugccuugcgggcguuucuguug

SEQ ID NO: 1100718 - RNA, 22 nt, Human
aucugucaagauagacucugca

SEQ ID NO: 1100719 - RNA, 22 nt, Human
auucuucaccauggauaauuug

SEQ ID NO: 1100720 - RNA, 22 nt, Human
aaauacagaguugcuuaaaagc

SEQ ID NO: 1100721 - RNA, 22 nt, Human
ccacagagcauuagauuucaga

SEQ ID NO: 1100722 - RNA, 22 nt, Human
cucaggauguacuacagaaggc

SEQ ID NO: 1100723 - RNA, 22 nt, Human
gauggcagucaaccaggugagg

SEQ ID NO: 1100724 - RNA, 22 nt, Human
acuggaaaugagaugauaucag

SEQ ID NO: 1100725 - RNA, 22 nt, Human
guucuucaucauuuuagauagg

SEQ ID NO: 1100726 - RNA, 22 nt, Human
cagugguugguagauacuugag

SEQ ID NO: 1100727 - RNA, 22 nt, Human
ugccuggauucgguuguuguca

SEQ ID NO: 1100728 - RNA, 22 nt, Human
augucaaaucaguuuuaucaga

SEQ ID NO: 1100729 - RNA, 22 nt, Human
cagagccacuuggagaugagaa

SEQ ID NO: 1100730 - RNA, 22 nt, Human
caacacauugaagcuaugauga

SEQ ID NO: 1100731 - RNA, 22 nt, Human
ucauuuaauagcuuuugucuuu

SEQ ID NO: 1100732 - RNA, 19 nt, Human
uucauucuuucuacuuacc

SEQ ID NO: 1100733 - RNA, 22 nt, Human
cauuguuaccaucuuuuaccua

SEQ ID NO: 1100734 - RNA, 22 nt, Human
uuuuucuugugcuggaucuaau

SEQ ID NO: 1100735 - RNA, 22 nt, Human
uuggaaaaacacgauagugguu

SEQ ID NO: 1100736 - RNA, 22 nt, Human
ugaugaaauguugaggcaguga

SEQ ID NO: 1100737 - RNA, 22 nt, Human
auguuuuugagauacaaacaga

SEQ ID NO: 1100738 - RNA, 22 nt, Human
aucacuguguauguauaugcag

SEQ ID NO: 1100739 - RNA, 16 nt, Human
cuuccucuucacuggc

SEQ ID NO: 1100740 - RNA, 22 nt, Human
ugcuauaaguagacauucaaca

SEQ ID NO: 1100741 - RNA, 22 nt, Human
caagagagaugcagcucacuca

SEQ ID NO: 1100742 - RNA, 22 nt, Human
cuuuggcaaugucauuuucaau

SEQ ID NO: 1100743 - RNA, 22 nt, Human
cucuccucagaacaggcccucu

SEQ ID NO: 1100744 - RNA, 22 nt, Human
aaggcagucugguuucaaagca

SEQ ID NO: 1100745 - RNA, 22 nt, Human
uuguugguggaauugaugcuag

SEQ ID NO: 1100746 - RNA, 22 nt, Human
aucaggauguuuggcugucaua

SEQ ID NO: 1100747 - RNA, 22 nt, Human
aaaguucuaaaacucuuuguga

SEQ ID NO: 1100748 - RNA, 22 nt, Human
uagcugcugcagcacagggagg

SEQ ID NO: 1100749 - RNA, 22 nt, Human
cauuguuaauugguaucuuaca

SEQ ID NO: 1100750 - RNA, 22 nt, Human
aauugcuaaagauuauguuuuc

SEQ ID NO: 1100751 - RNA, 22 nt, Human
aaagauuugaguucugcuuaua

SEQ ID NO: 1100752 - RNA, 21 nt, Human
uuucuuaggcucuaaaaugac

SEQ ID NO: 1100753 - RNA, 22 nt, Human
augugaggcagcacggagauua

SEQ ID NO: 1100754 - RNA, 22 nt, Human
uaauuucacugauaugaaguca

SEQ ID NO: 1100755 - RNA, 22 nt, Human
uuugaaagacagaauauuuuug

SEQ ID NO: 1100756 - RNA, 22 nt, Human
augugaaagagguguucagugg

SEQ ID NO: 1100757 - RNA, 22 nt, Human
uuagaaagcuuuccauagucaa

SEQ ID NO: 1100758 - RNA, 22 nt, Human
auuugcuugugcuaugaaaguu

SEQ ID NO: 1100759 - RNA, 22 nt, Human
augauguugauaaauuacuuua

SEQ ID NO: 1100760 - RNA, 22 nt, Human
ucaguucuuuauuucacaguga

SEQ ID NO: 1100761 - RNA, 22 nt, Human
aauacuuuccuauauaaggugc

SEQ ID NO: 1100762 - RNA, 22 nt, Human
uuaguuuucccaucuuuauggu

SEQ ID NO: 1100763 - RNA, 22 nt, Human
gaugccucuuuuggcugaauua

SEQ ID NO: 1100764 - RNA, 22 nt, Human
agaauaugaucggaauacagau

SEQ ID NO: 1100765 - RNA, 22 nt, Human
aaauaguucagcuuguaaaccc

SEQ ID NO: 1100766 - RNA, 22 nt, Human
ucaggaugagcucauaacuaug

SEQ ID NO: 1100767 - RNA, 22 nt, Human
aagcaccuggguuauaucuuag

SEQ ID NO: 1100768 - RNA, 22 nt, Human
auucucaauggcuacuuucaua

SEQ ID NO: 1100769 - RNA, 22 nt, Human
cucuucuugucucugguuagaa

SEQ ID NO: 1100770 - RNA, 22 nt, Human
acagucuacuugagcuuguaua

SEQ ID NO: 1100771 - RNA, 22 nt, Human
auucacaaaaugauauagauac

SEQ ID NO: 1100772 - RNA, 22 nt, Human
ucaucugucccaggcuuuuuuc

SEQ ID NO: 1100773 - RNA, 22 nt, Human
uauuucagucacuucuucucug

SEQ ID NO: 1100774 - RNA, 22 nt, Human
auucuucauaccuacugagguu

SEQ ID NO: 1100775 - RNA, 22 nt, Human
cccaugagguggagguugcagu

SEQ ID NO: 1100776 - RNA, 22 nt, Human
uuguaugaucaaaagaaaugua

SEQ ID NO: 1100777 - RNA, 22 nt, Human
ucauacaauucaaucucugauu

SEQ ID NO: 1100778 - RNA, 22 nt, Human
ugcuugaaagggguuucccagu

SEQ ID NO: 1100779 - RNA, 22 nt, Human
gcaucuaaauaaacgugggagu

SEQ ID NO: 1100780 - RNA, 22 nt, Human
ucauuguuucugcuuuucauga

SEQ ID NO: 1100781 - RNA, 22 nt, Human
uucauugugauucuuggcuagc

SEQ ID NO: 1100782 - RNA, 22 nt, Human
cugcuguggaugcaggaccuca

SEQ ID NO: 1100783 - RNA, 22 nt, Human
guguaugagccuccagcugggc

SEQ ID NO: 1100784 - RNA, 22 nt, Human
ugaguaauaaacugucuugcuc

SEQ ID NO: 1100785 - RNA, 22 nt, Human
uaugaccuuaggaagcaagaag

SEQ ID NO: 1100786 - RNA, 22 nt, Human
cacaauuuguuuuaucaguauu

SEQ ID NO: 1100787 - RNA, 20 nt, Human
ccucaguguccuggacuggg

SEQ ID NO: 1100788 - RNA, 22 nt, Human
uuucacaaucaaauggugaaau

SEQ ID NO: 1100789 - RNA, 22 nt, Human
uuucaacaccagagaccaugcg

SEQ ID NO: 1100790 - RNA, 22 nt, Human
ucacugcucagucuguacuaca

SEQ ID NO: 1100791 - RNA, 22 nt, Human
gugugaaaaugugcacaauaug

SEQ ID NO: 1100792 - RNA, 22 nt, Human
uuagaacuuaagaauacugucu

SEQ ID NO: 1100793 - RNA, 22 nt, Human
uucugucagcugcuuugucuca

SEQ ID NO: 1100794 - RNA, 22 nt, Human
gccugcagauauauaggauggu

SEQ ID NO: 1100795 - RNA, 21 nt, Human
ucucugguuggaguugugcca

SEQ ID NO: 1100796 - RNA, 22 nt, Human
aauugucaaacacaaauaagag

SEQ ID NO: 1100797 - RNA, 22 nt, Human
gugacagucaaagacaugacuu

SEQ ID NO: 1100798 - RNA, 22 nt, Human
auguuucagauacagaucaaau

SEQ ID NO: 1100799 - RNA, 22 nt, Human
uaucuguuccaggcacucagcu

SEQ ID NO: 1100800 - RNA, 22 nt, Human
guucuugccagcauccucaggu

SEQ ID NO: 1100801 - RNA, 22 nt, Human
ucuucuccagugcuucugcaca

SEQ ID NO: 1100802 - RNA, 22 nt, Human
uauucacaguugauuuacaguu

SEQ ID NO: 1100803 - RNA, 22 nt, Human
uuugaagucaggcuuucuaccc

SEQ ID NO: 1100804 - RNA, 22 nt, Human
caaauauuccagguacaucccu

SEQ ID NO: 1100805 - RNA, 22 nt, Human
cuguaugaguugggaauagaau

SEQ ID NO: 1100806 - RNA, 21 nt, Human
uuugaaagcccuauguuuuca

SEQ ID NO: 1100807 - RNA, 22 nt, Human
cugaaugaggaaaagagugagg

SEQ ID NO: 1100808 - RNA, 22 nt, Human
uucaggaugcucagaguagucu

SEQ ID NO: 1100809 - RNA, 22 nt, Human
uaaucuguauuccuacuuugca

SEQ ID NO: 1100810 - RNA, 22 nt, Human
auuaucuauguagaaugauuuu

SEQ ID NO: 1100811 - RNA, 19 nt, Human
uuucuuaggccuuuggccu

SEQ ID NO: 1100812 - RNA, 22 nt, Human
gcacaauuauuuaugcaguaug

SEQ ID NO: 1100813 - RNA, 22 nt, Human
guuuucaauuauaagauggcuu

SEQ ID NO: 1100814 - RNA, 22 nt, Human
gcagaggggaagcugaggaauu

SEQ ID NO: 1100815 - RNA, 22 nt, Human
cagaccagaaggaagccgacaa

SEQ ID NO: 1100816 - RNA, 22 nt, Human
ggccagaggugguacauagcuu

SEQ ID NO: 1100817 - RNA, 18 nt, Human
acucaggaaaugaugaca

SEQ ID NO: 1100818 - RNA, 22 nt, Human
gauuucuuuaugaaguacagaa

SEQ ID NO: 1100819 - RNA, 22 nt, Human
aaucauaauuguauacauucau

SEQ ID NO: 1100820 - RNA, 23 nt, Human
uggacgccgacuuuggaggcgcu

SEQ ID NO: 1100821 - RNA, 20 nt, Human
uaguauuugcauaaggauag

SEQ ID NO: 1100822 - RNA, 22 nt, Human
uuuucuuauggugaagcacaaa

SEQ ID NO: 1100823 - RNA, 22 nt, Human
caaauacuggguaaguuaauuu

SEQ ID NO: 1100824 - RNA, 22 nt, Human
gucccauaaguagugcaacuug

SEQ ID NO: 1100825 - RNA, 22 nt, Human
auucugucauuucaagaaaaac

SEQ ID NO: 1100826 - RNA, 22 nt, Human
acuguugucaggcugcuuugga

SEQ ID NO: 1100827 - RNA, 22 nt, Human
aaguaugugauacauguuaauu

SEQ ID NO: 1100828 - RNA, 22 nt, Human
aucuucucauguguaaugaggu

SEQ ID NO: 1100829 - RNA, 22 nt, Human
gauauuuugagaaauccuauga

SEQ ID NO: 1100830 - RNA, 22 nt, Human
ucaauaaaauuguuuuccuauc

SEQ ID NO: 1100831 - RNA, 22 nt, Human
uuuuaucuaccuaugcucauuu

SEQ ID NO: 1100832 - RNA, 22 nt, Human
uguaggaaaaacaaugaucugc

SEQ ID NO: 1100833 - RNA, 22 nt, Human
uuuaaaaucagaugggaguugg

SEQ ID NO: 1100834 - RNA, 22 nt, Human
ucugucucaaguucuugcacuc

SEQ ID NO: 1100835 - RNA, 21 nt, Human
acagauauuucauugaacauu

SEQ ID NO: 1100836 - RNA, 22 nt, Human
uauguaaaaauucaucaggcug

SEQ ID NO: 1100837 - RNA, 22 nt, Human
uuugaaagccuggcuuuucucu

SEQ ID NO: 1100838 - RNA, 22 nt, Human
acaauguguuuuuauacauuug

SEQ ID NO: 1100839 - RNA, 22 nt, Human
aucacauucuuucaaagcaguc

SEQ ID NO: 1100840 - RNA, 22 nt, Human
uuugacauuauccuguuacugg

SEQ ID NO: 1100841 - RNA, 20 nt, Human
augugagggguugaaguggg

SEQ ID NO: 1100842 - RNA, 22 nt, Human
caucacccggaacugugucugc

SEQ ID NO: 1100843 - RNA, 22 nt, Human
caaauaguuuuucauguauuau

SEQ ID NO: 1100844 - RNA, 22 nt, Human
ucagcugcucaaauuuauguca

SEQ ID NO: 1100845 - RNA, 22 nt, Human
gucacuguauccagguuccagc

SEQ ID NO: 1100846 - RNA, 17 nt, Human
acucaggaucugggagu

SEQ ID NO: 1100847 - RNA, 22 nt, Human
uugugaaacauucauggauuug

SEQ ID NO: 1100848 - RNA, 22 nt, Human
accuugaugccuuuccaagaug

SEQ ID NO: 1100849 - RNA, 22 nt, Human
cuugcuggugguguuuucuaug

SEQ ID NO: 1100850 - RNA, 22 nt, Human
uucucugaaggccaugcucacu

SEQ ID NO: 1100851 - RNA, 22 nt, Human
cuucagaaugggacuguguuug

SEQ ID NO: 1100852 - RNA, 22 nt, Human
uugauacaggccuucuagauga

SEQ ID NO: 1100853 - RNA, 22 nt, Human
uuaucacuuaugagcuuuuugc

SEQ ID NO: 1100854 - RNA, 22 nt, Human
augaaacacacacgcgcauacu

SEQ ID NO: 1100855 - RNA, 22 nt, Human
uucucuuugacauuauucaggu

SEQ ID NO: 1100856 - RNA, 22 nt, Human
uccauuuuagagaugaagaaac

SEQ ID NO: 1100857 - RNA, 22 nt, Human
cauucuuauauuuacucauuca

SEQ ID NO: 1100858 - RNA, 23 nt, Human
cagaaaacccagagcucaguccc

SEQ ID NO: 1100859 - RNA, 22 nt, Human
cucaucugauaaaucacucuua

SEQ ID NO: 1100860 - RNA, 22 nt, Human
uuaacaauagaguuucuucagg

SEQ ID NO: 1100861 - RNA, 22 nt, Human
uguuugaaacuuugaucacuaa

SEQ ID NO: 1100862 - RNA, 22 nt, Human
acuaaauacacacauuuguuca

SEQ ID NO: 1100863 - RNA, 20 nt, Human
uuucugugagaaacacuguu

SEQ ID NO: 1100864 - RNA, 22 nt, Human
gcugcuguugauuuaguccaau

SEQ ID NO: 1100865 - RNA, 23 nt, Human
ucuugaaaagccuacagcaguuc

SEQ ID NO: 1100866 - RNA, 22 nt, Human
gaagcacauggcuauagcuauu

SEQ ID NO: 1100867 - RNA, 19 nt, Human
uucuccagccugaccugag

SEQ ID NO: 1100868 - RNA, 22 nt, Human
uuuccauguuggugaaaugagg

SEQ ID NO: 1100869 - RNA, 22 nt, Human
aucaggauucaguaucuccagc

SEQ ID NO: 1100870 - RNA, 22 nt, Human
aguaugaauugcuuugccugua

SEQ ID NO: 1100871 - RNA, 22 nt, Human
aguucucaagacaauuaccugu

SEQ ID NO: 1100872 - RNA, 22 nt, Human
uuugaaagggacaaagucacug

SEQ ID NO: 1100873 - RNA, 22 nt, Human
gucaggaugagggaugaggagu

SEQ ID NO: 1100874 - RNA, 22 nt, Human
acaagauagcuuagaagauuca

SEQ ID NO: 1100875 - RNA, 22 nt, Human
uucauugucucuguuugccuuc

SEQ ID NO: 1100876 - RNA, 22 nt, Human
caagaugugccuaaucagaccu

SEQ ID NO: 1100877 - RNA, 22 nt, Human
uucuucucggcugucagauagu

SEQ ID NO: 1100878 - RNA, 22 nt, Human
uacagcauauacagaaugaaca

SEQ ID NO: 1100879 - RNA, 20 nt, Human
acuugcugggcuuuguuacc

SEQ ID NO: 1100880 - RNA, 22 nt, Human
aucuucucaagcagcauccugu

SEQ ID NO: 1100881 - RNA, 22 nt, Human
cugcuuugggcagcuuuguggc

SEQ ID NO: 1100882 - RNA, 22 nt, Human
aaaaaucuaugacugcuucucc

SEQ ID NO: 1100883 - RNA, 22 nt, Human
cuggcaguguccagcucgugau

SEQ ID NO: 1100884 - RNA, 22 nt, Human
aaggcaguagguguuucaaacu

SEQ ID NO: 1100885 - RNA, 22 nt, Human
gaaauaagaguccaugccaggu

SEQ ID NO: 1100886 - RNA, 22 nt, Human
uugcagcuucgagucuaucugu

SEQ ID NO: 1100887 - RNA, 22 nt, Human
gauuuuauuagcccaaacuuug

SEQ ID NO: 1100888 - RNA, 22 nt, Human
ucaggauguccaaaauccagcc

SEQ ID NO: 1100889 - RNA, 22 nt, Human
uagugcuuuaggccugaguguc

SEQ ID NO: 1100890 - RNA, 22 nt, Human
ucagucucuggggcuucuguuu

SEQ ID NO: 1100891 - RNA, 22 nt, Human
ugauugaacugagcuucaagau

SEQ ID NO: 1100892 - RNA, 22 nt, Human
ugcuguguggaugugaagaauc

SEQ ID NO: 1100893 - RNA, 22 nt, Human
gcugggaagugcaagaucaagg

SEQ ID NO: 1100894 - RNA, 22 nt, Human
aaaggccagguuggcugguauu

SEQ ID NO: 1100895 - RNA, 22 nt, Human
agaaaugaauauguagugguua

SEQ ID NO: 1100896 - RNA, 22 nt, Human
acuggaaaacacuacuacaugc

SEQ ID NO: 1100897 - RNA, 20 nt, Human
uuugucuguuaaguguuucu

SEQ ID NO: 1100898 - RNA, 21 nt, Human
cucuugugucagagccagagg

SEQ ID NO: 1100899 - RNA, 20 nt, Human
augugaaagaucaguugucu

SEQ ID NO: 1100900 - RNA, 22 nt, Human
aaaaguauuuauggcuauguaa

SEQ ID NO: 1100901 - RNA, 22 nt, Human
uuggcagugaugcagcuuguuc

SEQ ID NO: 1100902 - RNA, 22 nt, Human
aaaggccacacugcucuuucuc

SEQ ID NO: 1100903 - RNA, 22 nt, Human
acagauauaaacuauaguagug

SEQ ID NO: 1100904 - RNA, 20 nt, Human
cgugcugugaccuugagcau

SEQ ID NO: 1100905 - RNA, 22 nt, Human
uuccaugacaccgagggaaguc

SEQ ID NO: 1100906 - RNA, 22 nt, Human
uucugucaaagacuuuuucagg

SEQ ID NO: 1100907 - RNA, 22 nt, Human
caucucaugggcaugccaagcu

SEQ ID NO: 1100908 - RNA, 22 nt, Human
gaaauauuacaguggaggggau

SEQ ID NO: 1100909 - RNA, 22 nt, Human
aucauucuagcuguuguguuga

SEQ ID NO: 1100910 - RNA, 22 nt, Human
cucaggauauugggcuggagca

SEQ ID NO: 1100911 - RNA, 22 nt, Human
uuugaaagcuacuuucggguca

SEQ ID NO: 1100912 - RNA, 21 nt, Human
auucugucaucccagcuacuu

SEQ ID NO: 1100913 - RNA, 22 nt, Human
uaugaacuuuugaugugacaug

SEQ ID NO: 1100914 - RNA, 22 nt, Human
cugcugugcauauuuaucuagg

SEQ ID NO: 1100915 - RNA, 22 nt, Human
aguaugaacggaaggccuggga

SEQ ID NO: 1100916 - RNA, 22 nt, Human
ucagccucucugaguccagacc

SEQ ID NO: 1100917 - RNA, 22 nt, Human
ucugaaagaagggcagucuuuu

SEQ ID NO: 1100918 - RNA, 22 nt, Human
gcuccucuucucccacugaaug

SEQ ID NO: 1100919 - RNA, 22 nt, Human
uucuucuugaaacuuuagguug

SEQ ID NO: 1100920 - RNA, 22 nt, Human
uccagccuaggggaacagcugc

SEQ ID NO: 1100921 - RNA, 22 nt, Human
gcuuugaagucugugucuuuug

SEQ ID NO: 1100922 - RNA, 22 nt, Human
aaaacaguuuaggcaucacagu

SEQ ID NO: 1100923 - RNA, 22 nt, Human
auuucauacuaaggcucaaaaa

SEQ ID NO: 1100924 - RNA, 22 nt, Human
uuuucauuguuccucgagcauu

SEQ ID NO: 1100925 - RNA, 22 nt, Human
gugaaacagaagcuccuggaau

SEQ ID NO: 1100926 - RNA, 21 nt, Human
ugcugaugucagagaagcaag

SEQ ID NO: 1100927 - RNA, 22 nt, Human
aaaaacuguaauuacuuuugca

SEQ ID NO: 1100928 - RNA, 22 nt, Human
uuuccuaggagauugaucacau

SEQ ID NO: 1100929 - RNA, 22 nt, Human
auucauuuagguauucacuuac

SEQ ID NO: 1100930 - RNA, 22 nt, Human
ucuucagagugaaagucuguga

SEQ ID NO: 1100931 - RNA, 22 nt, Human
uugaaauaucaaguuauuagug

SEQ ID NO: 1100932 - RNA, 22 nt, Human
cuggcagucugccucuucacug

SEQ ID NO: 1100933 - RNA, 22 nt, Human
aucaggauggguuuggcuuagg

SEQ ID NO: 1100934 - RNA, 22 nt, Human
aguaugaagcugaaugauuuua

SEQ ID NO: 1100935 - RNA, 22 nt, Human
aauaacuuaagaaauuucccca

SEQ ID NO: 1100936 - RNA, 22 nt, Human
auaugugaaguggguuauuuug

SEQ ID NO: 1100937 - RNA, 22 nt, Human
uucuuacagaguuuacagagcc

SEQ ID NO: 1100938 - RNA, 22 nt, Human
cauuuguacagaacagcuuuau

SEQ ID NO: 1100939 - RNA, 22 nt, Human
uuguaugaauguauccuaauuu

SEQ ID NO: 1100940 - RNA, 22 nt, Human
uaacaguguggacuugagaucu

SEQ ID NO: 1100941 - RNA, 22 nt, Human
uucaugugauaaaugugugacu

SEQ ID NO: 1100942 - RNA, 22 nt, Human
uugugcucuguguuauuuaagg

SEQ ID NO: 1100943 - RNA, 22 nt, Human
cugcugugugcuuacuuggguu

SEQ ID NO: 1100944 - RNA, 22 nt, Human
ucucagucuuugcaaggaugcu

SEQ ID NO: 1100945 - RNA, 22 nt, Human
ggugaguugggguucacagguc

SEQ ID NO: 1100946 - RNA, 22 nt, Human
ucaauucaacacaugcacauug

SEQ ID NO: 1100947 - RNA, 21 nt, Human
gaacauuuggguuguuucuac

SEQ ID NO: 1100948 - RNA, 22 nt, Human
ggacagaggguugacagaguau

SEQ ID NO: 1100949 - RNA, 22 nt, Human
ugcuagaaaucugaaacuagca

SEQ ID NO: 1100950 - RNA, 23 nt, Human
auuucuaggggauuuucuggugc

SEQ ID NO: 1100951 - RNA, 22 nt, Human
gguaugaaaugauuccauguua

SEQ ID NO: 1100952 - RNA, 22 nt, Human
uugcugaaaucuaugacauccu

SEQ ID NO: 1100953 - RNA, 22 nt, Human
agaaaauauucauugagaggcu

SEQ ID NO: 1100954 - RNA, 22 nt, Human
cugcugugauugggagaaaccg

SEQ ID NO: 1100955 - RNA, 22 nt, Human
cuauuucaaggcccagauauga

SEQ ID NO: 1100956 - RNA, 22 nt, Human
ggcuuggaaaugguaaugagcu

SEQ ID NO: 1100957 - RNA, 22 nt, Human
ugaugaauaaacuugagaguca

SEQ ID NO: 1100958 - RNA, 19 nt, Human
uggagacugagagugagca

SEQ ID NO: 1100959 - RNA, 22 nt, Human
uuugcaauuugugcugcaaaug

SEQ ID NO: 1100960 - RNA, 22 nt, Human
ucagauggguuuugaaggaugu

SEQ ID NO: 1100961 - RNA, 22 nt, Human
aaggccagcuuguagggcuggu

SEQ ID NO: 1100962 - RNA, 22 nt, Human
auguagaauggugauuggcagg

SEQ ID NO: 1100963 - RNA, 22 nt, Human
ucucuucuaacacuagaaauuc

SEQ ID NO: 1100964 - RNA, 22 nt, Human
ucugggaauuuauuggcacuuu

SEQ ID NO: 1100965 - RNA, 22 nt, Human
caaugaaaauuuaaguugcagc

SEQ ID NO: 1100966 - RNA, 22 nt, Human
gaugagcauuguuucauguguu

SEQ ID NO: 1100967 - RNA, 22 nt, Human
augaggcauuccacucaaacuc

SEQ ID NO: 1100968 - RNA, 22 nt, Human
uagcucuucauuucaucugauu

SEQ ID NO: 1100969 - RNA, 19 nt, Human
uggggcuguguuuugaccc

SEQ ID NO: 1100970 - RNA, 22 nt, Human
agaccauagggaccucagguug

SEQ ID NO: 1100971 - RNA, 22 nt, Human
ccugcugugaagccaggccugu

SEQ ID NO: 1100972 - RNA, 22 nt, Human
aaggcaguaaaaucuaccuugc

SEQ ID NO: 1100973 - RNA, 22 nt, Human
uacaauauguggccuuuuguga

SEQ ID NO: 1100974 - RNA, 22 nt, Human
aucugucaucagcaccacaggu

SEQ ID NO: 1100975 - RNA, 22 nt, Human
cagcauuuaaugcagugcuucc

SEQ ID NO: 1100976 - RNA, 22 nt, Human
ucauuugugugagugauuugac

SEQ ID NO: 1100977 - RNA, 22 nt, Human
uccuuagagacaagaccaguuu

SEQ ID NO: 1100978 - RNA, 22 nt, Human
cuuaacauccugcauuuuucuu

SEQ ID NO: 1100979 - RNA, 23 nt, Human
uccuuccuuugagaggcuccauc

SEQ ID NO: 1100980 - RNA, 22 nt, Human
guuugcauuuauuagucuucug

SEQ ID NO: 1100981 - RNA, 22 nt, Human
aguucacauaucuguuuuauuu

SEQ ID NO: 1100982 - RNA, 22 nt, Human
uguugagacugagggagucagc

SEQ ID NO: 1100983 - RNA, 22 nt, Human
uaaggccauuauggugggcccg

SEQ ID NO: 1100984 - RNA, 22 nt, Human
ucugcucugggccagcuauuaa

SEQ ID NO: 1100985 - RNA, 21 nt, Human
acauucacaggauauuaucau

SEQ ID NO: 1100986 - RNA, 22 nt, Human
aaagacuuggcuuaugauuugc

SEQ ID NO: 1100987 - RNA, 22 nt, Human
ugcuuugggucucucuaguuuc

SEQ ID NO: 1100988 - RNA, 22 nt, Human
uucuucuccgaggagggcuggu

SEQ ID NO: 1100989 - RNA, 22 nt, Human
ucauuauccuaguaucuugaau

SEQ ID NO: 1100990 - RNA, 22 nt, Human
cagcauuuagaauuugaagugu

SEQ ID NO: 1100991 - RNA, 22 nt, Human
guuugcauauuugcacaggaau

SEQ ID NO: 1100992 - RNA, 22 nt, Human
gauuuuauauggcauacugugg

SEQ ID NO: 1100993 - RNA, 22 nt, Human
aaauguuucuacuugugagcau

SEQ ID NO: 1100994 - RNA, 21 nt, Human
augucaaaugcuuuauuuuau

SEQ ID NO: 1100995 - RNA, 22 nt, Human
uucauucuuugaaucugaggua

SEQ ID NO: 1100996 - RNA, 22 nt, Human
uuguuauaaagacuaaauaugu

SEQ ID NO: 1100997 - RNA, 22 nt, Human
ugucuucaucuccaugcacaga

SEQ ID NO: 1100998 - RNA, 22 nt, Human
ucuuuucaucauuuaauaggua

SEQ ID NO: 1100999 - RNA, 18 nt, Human
uuccaugauuccuuucac

SEQ ID NO: 1101000 - RNA, 22 nt, Human
ugugaaauucuugaaaugcaca

SEQ ID NO: 1101001 - RNA, 22 nt, Human
caugcugugugguuagaacugu

SEQ ID NO: 1101002 - RNA, 22 nt, Human
ccagaggaggggggucuuucug

SEQ ID NO: 1101003 - RNA, 22 nt, Human
gucaggauuaaugggaguaugc

SEQ ID NO: 1101004 - RNA, 22 nt, Human
cuucucagaucucagcuuugag

SEQ ID NO: 1101005 - RNA, 22 nt, Human
auugaaagauaggcuacugugg

SEQ ID NO: 1101006 - RNA, 22 nt, Human
aauacaguaauuuugaugaguu

SEQ ID NO: 1101007 - RNA, 22 nt, Human
ugugaaagcaagucuaguucuc

SEQ ID NO: 1101008 - RNA, 22 nt, Human
uugcauuugaucuuggguucuc

SEQ ID NO: 1101009 - RNA, 22 nt, Human
uccugaggcucacuuugaaugu

SEQ ID NO: 1101010 - RNA, 22 nt, Human
aucaggaucagggcuagcagag

SEQ ID NO: 1101011 - RNA, 22 nt, Human
uucuuaacuggaaaaugucaga

SEQ ID NO: 1101012 - RNA, 22 nt, Human
auaacuuagaguaggcaaaagu

SEQ ID NO: 1101013 - RNA, 22 nt, Human
uauacaauggcugaaucaucca

SEQ ID NO: 1101014 - RNA, 21 nt, Human
uacugagaccucacagugugc

SEQ ID NO: 1101015 - RNA, 22 nt, Human
ucaauauauuccauguuuucuc

SEQ ID NO: 1101016 - RNA, 21 nt, Human
aucacauuggcuguuauuauu

SEQ ID NO: 1101017 - RNA, 22 nt, Human
aaauuauucucauguguuucuu

SEQ ID NO: 1101018 - RNA, 22 nt, Human
aaacacagggauauauauucca

SEQ ID NO: 1101019 - RNA, 22 nt, Human
ucucacuggguauaaaugagua

SEQ ID NO: 1101020 - RNA, 22 nt, Human
agcuagaaguacagccauauga

SEQ ID NO: 1101021 - RNA, 22 nt, Human
uuucaaaguugggaauuguaau

SEQ ID NO: 1101022 - RNA, 22 nt, Human
augaaacagugaauuagucaag

SEQ ID NO: 1101023 - RNA, 22 nt, Human
acaaauguggacauggauaaug

SEQ ID NO: 1101024 - RNA, 22 nt, Human
gcuccucuauuccccacauuuu

SEQ ID NO: 1101025 - RNA, 22 nt, Human
ucucgacagccuggcacagugg

SEQ ID NO: 1101026 - RNA, 22 nt, Human
uuccuuaguguuagauucugug

SEQ ID NO: 1101027 - RNA, 22 nt, Human
cugagagugcucuuugauguca

SEQ ID NO: 1101028 - RNA, 22 nt, Human
aagcuggaacaucuugaggaag

SEQ ID NO: 1101029 - RNA, 23 nt, Human
cagcccuuccugcauguuuuugu

SEQ ID NO: 1101030 - RNA, 22 nt, Human
aagacauugucauuuuauaauu

SEQ ID NO: 1101031 - RNA, 22 nt, Human
uuccucagcuggccugauuggg

SEQ ID NO: 1101032 - RNA, 22 nt, Human
guucuucagaggggaaagaacc

SEQ ID NO: 1101033 - RNA, 22 nt, Human
aaguuucauuguucauguaaca

SEQ ID NO: 1101034 - RNA, 22 nt, Human
aacauuuaugauugagguaaau

SEQ ID NO: 1101035 - RNA, 22 nt, Human
guuaugaaauaaauauagauca

SEQ ID NO: 1101036 - RNA, 18 nt, Human
guaggucaguaccaagca

SEQ ID NO: 1101037 - RNA, 23 nt, Human
caguggagacucaugcuuccuua

SEQ ID NO: 1101038 - RNA, 18 nt, Human
cugcuugggagacgucag

SEQ ID NO: 1101039 - RNA, 22 nt, Human
ucuggcaggcaaucggcucugg

SEQ ID NO: 1101040 - RNA, 22 nt, Human
cagcauuuucuuaauguaggug

SEQ ID NO: 1101041 - RNA, 22 nt, Human
uuaaauuagucaagcuucucug

SEQ ID NO: 1101042 - RNA, 22 nt, Human
gcaccugauugauuucacugcu

SEQ ID NO: 1101043 - RNA, 22 nt, Human
ugcuucugggcaaaugugugug

SEQ ID NO: 1101044 - RNA, 22 nt, Human
cauuuguaauacugacuugcag

SEQ ID NO: 1101045 - RNA, 22 nt, Human
ggagccuggucagguuggcucc

SEQ ID NO: 1101046 - RNA, 22 nt, Human
uauuuucuguggaggaccagau

SEQ ID NO: 1101047 - RNA, 22 nt, Human
uguuagaaauuauuaguaauau

SEQ ID NO: 1101048 - RNA, 22 nt, Human
uacacacagaggccaugggauu

SEQ ID NO: 1101049 - RNA, 22 nt, Human
gcaugucaugucauguaggaau

SEQ ID NO: 1101050 - RNA, 22 nt, Human
cucaggauggaagccuacagga

SEQ ID NO: 1101051 - RNA, 22 nt, Human
aacaucuacuaagugccaggca

SEQ ID NO: 1101052 - RNA, 22 nt, Human
uuugaaagggaaauaaacuccu

SEQ ID NO: 1101053 - RNA, 22 nt, Human
uaaauuauguuccauguccuuu

SEQ ID NO: 1101054 - RNA, 22 nt, Human
uuaugacaggaaaaucacagaa

SEQ ID NO: 1101055 - RNA, 22 nt, Human
auaucauuauguuaugagcaca

SEQ ID NO: 1101056 - RNA, 19 nt, Human
ucucugcuucucuuggcau

SEQ ID NO: 1101057 - RNA, 22 nt, Human
ggcagaagauaggacagggaau

SEQ ID NO: 1101058 - RNA, 22 nt, Human
augacaugaccugguagagaca

SEQ ID NO: 1101059 - RNA, 22 nt, Human
ccaaaugugccuguuucaacaa

SEQ ID NO: 1101060 - RNA, 22 nt, Human
ccauccuaucugaccuacuugu

SEQ ID NO: 1101061 - RNA, 22 nt, Human
cuucugcaauaaguuuuggucc

SEQ ID NO: 1101062 - RNA, 23 nt, Human
ucucaagaggaagcagggcucau

SEQ ID NO: 1101063 - RNA, 18 nt, Human
gucacuguguuucugagc

SEQ ID NO: 1101064 - RNA, 20 nt, Human
gucaggauuaguaaacucug

SEQ ID NO: 1101065 - RNA, 22 nt, Human
uucucagagcacugcugacaaa

SEQ ID NO: 1101066 - RNA, 23 nt, Human
ucucuuucaagagcuuaaugugc

SEQ ID NO: 1101067 - RNA, 22 nt, Human
uaauaguugugacuuuguaaag

SEQ ID NO: 1101068 - RNA, 22 nt, Human
gaaacuuacuuacucacauuuc

SEQ ID NO: 1101069 - RNA, 22 nt, Human
uguggaaaauuggaacguuccu

SEQ ID NO: 1101070 - RNA, 19 nt, Human
ggcagcuggacgcuguuca

SEQ ID NO: 1101071 - RNA, 22 nt, Human
uucaacuagauuuauacaauuc

SEQ ID NO: 1101072 - RNA, 22 nt, Human
gaggccaggagugcuguaaguu

SEQ ID NO: 1101073 - RNA, 22 nt, Human
aguaugaagaauacauagauga

SEQ ID NO: 1101074 - RNA, 19 nt, Human
cuuugucagaacaugcuuc

SEQ ID NO: 1101075 - RNA, 21 nt, Human
aucauucuggaaaauucaagc

SEQ ID NO: 1101076 - RNA, 22 nt, Human
uucaacuaauguuuauuuuaug

SEQ ID NO: 1101077 - RNA, 21 nt, Human
uucugggaaaugagcuggggc

SEQ ID NO: 1101078 - RNA, 22 nt, Human
ggcuuggaccagucacaguggu

SEQ ID NO: 1101079 - RNA, 22 nt, Human
auguagaauuccuucuacuuug

SEQ ID NO: 1101080 - RNA, 22 nt, Human
uuucauuuugguuaugccauaa

SEQ ID NO: 1101081 - RNA, 22 nt, Human
cucuuaguaaugccaugaagca

SEQ ID NO: 1101082 - RNA, 22 nt, Human
caggauggucagaugcauuguc

SEQ ID NO: 1101083 - RNA, 22 nt, Human
aauuacuuaagagaaacuuuga

SEQ ID NO: 1101084 - RNA, 22 nt, Human
caaauguaaauucuuuugaagc

SEQ ID NO: 1101085 - RNA, 23 nt, Human
acauacauggagauaaagugaug

SEQ ID NO: 1101086 - RNA, 22 nt, Human
ucugaaauagaagugucuuucu

SEQ ID NO: 1101087 - RNA, 22 nt, Human
augugaaaaauuucuuauuaca

SEQ ID NO: 1101088 - RNA, 22 nt, Human
ucacccuugauaauguucuucu

SEQ ID NO: 1101089 - RNA, 22 nt, Human
aauucuguaacuuuacugaauu

SEQ ID NO: 1101090 - RNA, 20 nt, Human
ugcugucguguuuucugcuu

SEQ ID NO: 1101091 - RNA, 22 nt, Human
uucuccagagggcucugcagga

SEQ ID NO: 1101092 - RNA, 22 nt, Human
uuucccaguucccugcucuaua

SEQ ID NO: 1101093 - RNA, 22 nt, Human
ucaggagggugacaggcccugg

SEQ ID NO: 1101094 - RNA, 22 nt, Human
uucauguguauggaacauuuuu

SEQ ID NO: 1101095 - RNA, 22 nt, Human
cuucagagugcagaagauuggg

SEQ ID NO: 1101096 - RNA, 21 nt, Human
uguaaguuucaucugaauugg

SEQ ID NO: 1101097 - RNA, 22 nt, Human
ucuacccagagcuaugaccuga

SEQ ID NO: 1101098 - RNA, 17 nt, Human
uuucuccuuccaucuca

SEQ ID NO: 1101099 - RNA, 20 nt, Human
auacacauucauagaaaaau

SEQ ID NO: 1101100 - RNA, 22 nt, Human
auuucagauucagaaauguagg

SEQ ID NO: 1101101 - RNA, 22 nt, Human
ucuggcuuucauuuguuuaaag

SEQ ID NO: 1101102 - RNA, 22 nt, Human
uggaaugacagagagucugaau

SEQ ID NO: 1101103 - RNA, 22 nt, Human
gauguguuuccaggauuuguuu

SEQ ID NO: 1101104 - RNA, 22 nt, Human
uaauuucaccguugcuagaaau

SEQ ID NO: 1101105 - RNA, 22 nt, Human
cuuuccaaugcauuuccaaugu

SEQ ID NO: 1101106 - RNA, 22 nt, Human
uguacauacauagauauacaca

SEQ ID NO: 1101107 - RNA, 22 nt, Human
ugugugaaggaauauauacuca

SEQ ID NO: 1101108 - RNA, 22 nt, Human
uucaggauggcggauguugggg

SEQ ID NO: 1101109 - RNA, 22 nt, Human
augaaggcuguguagauggaug

SEQ ID NO: 1101110 - RNA, 22 nt, Human
acucuucuugcugcucauuaau

SEQ ID NO: 1101111 - RNA, 22 nt, Human
cagagccauuauggagacuugc

SEQ ID NO: 1101112 - RNA, 23 nt, Human
uugauuucaaaugcagagaacac

SEQ ID NO: 1101113 - RNA, 21 nt, Human
gcucagaguauugcacuguuu

SEQ ID NO: 1101114 - RNA, 22 nt, Human
cagugucuccagaugcuccaau

SEQ ID NO: 1101115 - RNA, 22 nt, Human
ucauuauuuuggacuggagugu

SEQ ID NO: 1101116 - RNA, 22 nt, Human
cuuaaauuuucaucuacaagaa

SEQ ID NO: 1101117 - RNA, 22 nt, Human
uuccuugaaugagucauggaaa

SEQ ID NO: 1101118 - RNA, 22 nt, Human
aucuuucaguuucauaccaauu

SEQ ID NO: 1101119 - RNA, 20 nt, Human
uuucuugucggcuguugcug

SEQ ID NO: 1101120 - RNA, 22 nt, Human
cagaauggcuuuuauggcucag

SEQ ID NO: 1101121 - RNA, 22 nt, Human
auguagaaaguucauagaugcg

SEQ ID NO: 1101122 - RNA, 22 nt, Human
uuugaauaucacaaacuuucaa

SEQ ID NO: 1101123 - RNA, 22 nt, Human
ccaagaugaucuuuacaguguu

SEQ ID NO: 1101124 - RNA, 22 nt, Human
agaaaugaagagagucaagguu

SEQ ID NO: 1101125 - RNA, 22 nt, Human
aaacagcaggaacaucuugcca

SEQ ID NO: 1101126 - RNA, 22 nt, Human
uuuaacagaugcuaugucuacc

SEQ ID NO: 1101127 - RNA, 22 nt, Human
aaaggugacugcagcagcuauu

SEQ ID NO: 1101128 - RNA, 22 nt, Human
acuuugcagggcuugauaucca

SEQ ID NO: 1101129 - RNA, 22 nt, Human
uuccugagggacuuuugagauu

SEQ ID NO: 1101130 - RNA, 22 nt, Human
uugcuguguaacuccuggccug

SEQ ID NO: 1101131 - RNA, 22 nt, Human
uuucuuauacuauauugucauc

SEQ ID NO: 1101132 - RNA, 22 nt, Human
aggcucagaggugagcaucugc

SEQ ID NO: 1101133 - RNA, 22 nt, Human
uagaaacaaugacaugcuugua

SEQ ID NO: 1101134 - RNA, 22 nt, Human
uucagaauauuuguuuuacaug

SEQ ID NO: 1101135 - RNA, 22 nt, Human
gccauuuucugucuuguuuauu

SEQ ID NO: 1101136 - RNA, 22 nt, Human
cuucuucaguugcauguauugg

SEQ ID NO: 1101137 - RNA, 22 nt, Human
uuuuucagccaugaauuacacu

SEQ ID NO: 1101138 - RNA, 22 nt, Human
ucgagcucuggagccaaggaug

SEQ ID NO: 1101139 - RNA, 22 nt, Human
cagaaggcuggcagauugagau

SEQ ID NO: 1101140 - RNA, 22 nt, Human
cucugucaggcugcagaugcuc

SEQ ID NO: 1101141 - RNA, 22 nt, Human
uuugcagugucagcuucugugu

SEQ ID NO: 1101142 - RNA, 22 nt, Human
ucucuucuaauuuucccgagua

SEQ ID NO: 1101143 - RNA, 22 nt, Human
agcauucauugcuagaauguaa

SEQ ID NO: 1101144 - RNA, 22 nt, Human
gugcauuugacgaauacucacu

SEQ ID NO: 1101145 - RNA, 23 nt, Human
cuucucagaagucugugccagga

SEQ ID NO: 1101146 - RNA, 22 nt, Human
ugucauaacuuagugacaaauc

SEQ ID NO: 1101147 - RNA, 22 nt, Human
ccauuguaaauucuguggaagu

SEQ ID NO: 1101148 - RNA, 22 nt, Human
caagauggaguccgggaaugug

SEQ ID NO: 1101149 - RNA, 22 nt, Human
cugcucuaauaucagauagacu

SEQ ID NO: 1101150 - RNA, 22 nt, Human
uaugacauuauaaaggauuauu

SEQ ID NO: 1101151 - RNA, 22 nt, Human
uauaucauggagauuaacauuc

SEQ ID NO: 1101152 - RNA, 22 nt, Human
guucuucaggccauccucccag

SEQ ID NO: 1101153 - RNA, 18 nt, Human
cugcugugucgucugggc

SEQ ID NO: 1101154 - RNA, 22 nt, Human
auguuagaaucucugaaugugg

SEQ ID NO: 1101155 - RNA, 22 nt, Human
gaaacauacgauuuaggagaaa

SEQ ID NO: 1101156 - RNA, 22 nt, Human
gauguagagggaagauuuuaaa

SEQ ID NO: 1101157 - RNA, 22 nt, Human
ugguaauuuacgcauuucugua

SEQ ID NO: 1101158 - RNA, 22 nt, Human
aauaauuuuagcucagaguugu

SEQ ID NO: 1101159 - RNA, 19 nt, Human
uugaaauuguuugauaugg

SEQ ID NO: 1101160 - RNA, 22 nt, Human
augugaaacugaagcauccaua

SEQ ID NO: 1101161 - RNA, 22 nt, Human
uuucaugaggggcaaaaucuca

SEQ ID NO: 1101162 - RNA, 22 nt, Human
cugacagucucauugauuugcu

SEQ ID NO: 1101163 - RNA, 22 nt, Human
agugcuuugaacgaaaggcuga

SEQ ID NO: 1101164 - RNA, 22 nt, Human
cauaauaucuccgauuacuugc

SEQ ID NO: 1101165 - RNA, 21 nt, Human
gaauaguucuguggcagcagu

SEQ ID NO: 1101166 - RNA, 22 nt, Human
uucaauucaauucuaaauauau

SEQ ID NO: 1101167 - RNA, 17 nt, Human
uuucaucugggaccacc

SEQ ID NO: 1101168 - RNA, 22 nt, Human
cucaggauagcugcgcagccug

SEQ ID NO: 1101169 - RNA, 22 nt, Human
aggacuuagaacauuauguacu

SEQ ID NO: 1101170 - RNA, 22 nt, Human
acuggcaggcugcuggccggcg

SEQ ID NO: 1101171 - RNA, 22 nt, Human
agaggccaugcuagaggccugg

SEQ ID NO: 1101172 - RNA, 22 nt, Human
aauguaugugauuauuccucua

SEQ ID NO: 1101173 - RNA, 22 nt, Human
uccaugagagguaacuuuacaa

SEQ ID NO: 1101174 - RNA, 22 nt, Human
cauuuucaugaguuucuguuca

SEQ ID NO: 1101175 - RNA, 22 nt, Human
acuucuucuucagcugggggau

SEQ ID NO: 1101176 - RNA, 22 nt, Human
uaucauuguguuauuucuucca

SEQ ID NO: 1101177 - RNA, 22 nt, Human
aguuagaaaguaaaucauuuga

SEQ ID NO: 1101178 - RNA, 22 nt, Human
ucauuucucccggccaaaaacu

SEQ ID NO: 1101179 - RNA, 22 nt, Human
cuucuucaauagcaagcgcaua

SEQ ID NO: 1101180 - RNA, 22 nt, Human
uaguuuuacuugcgaugauaau

SEQ ID NO: 1101181 - RNA, 22 nt, Human
gugaaacacccuccaaugcaca

SEQ ID NO: 1101182 - RNA, 22 nt, Human
uuagccaugugggaaaaacagc

SEQ ID NO: 1101183 - RNA, 22 nt, Human
cuauugaauuaacuauuaaagu

SEQ ID NO: 1101184 - RNA, 22 nt, Human
uagaacauaagucauucauuug

SEQ ID NO: 1101185 - RNA, 22 nt, Human
aauguaugugcaucauuuacau

SEQ ID NO: 1101186 - RNA, 19 nt, Human
uggcaucuguaaaauggug

SEQ ID NO: 1101187 - RNA, 22 nt, Human
uucacauuggugauauguuucu

SEQ ID NO: 1101188 - RNA, 19 nt, Human
agcaacaccguuuauuucc

SEQ ID NO: 1101189 - RNA, 22 nt, Human
ugucucugaggugagggucagc

SEQ ID NO: 1101190 - RNA, 22 nt, Human
uaaauuauggcuggcagagcag

SEQ ID NO: 1101191 - RNA, 22 nt, Human
ccucugcucugguccaugugcu

SEQ ID NO: 1101192 - RNA, 22 nt, Human
aauaaucucccuuuuuguaugu

SEQ ID NO: 1101193 - RNA, 16 nt, Human
auuuccagauuaugca

SEQ ID NO: 1101194 - RNA, 22 nt, Human
agucucugccagcuuguccucu

SEQ ID NO: 1101195 - RNA, 21 nt, Human
auacacauacacauaaaugug

SEQ ID NO: 1101196 - RNA, 22 nt, Human
uuacuuugcuuucucauuacag

SEQ ID NO: 1101197 - RNA, 20 nt, Human
ucauuucuugggguuccaag

SEQ ID NO: 1101198 - RNA, 22 nt, Human
cucaggaugcaggucacaggac

SEQ ID NO: 1101199 - RNA, 22 nt, Human
auugaaaggcaaaguaggaagc

SEQ ID NO: 1101200 - RNA, 22 nt, Human
ugcuguggcaguuuauguauag

SEQ ID NO: 1101201 - RNA, 22 nt, Human
cugcugugccuuaaaaugcaag

SEQ ID NO: 1101202 - RNA, 23 nt, Human
uccaugagaugugggcuucuagu

SEQ ID NO: 1101203 - RNA, 22 nt, Human
ugauuuuuagcuauucugaaga

SEQ ID NO: 1101204 - RNA, 22 nt, Human
cugccuccugccgugcagcuuc

SEQ ID NO: 1101205 - RNA, 22 nt, Human
gcugcugugaauuuuuuaaaug

SEQ ID NO: 1101206 - RNA, 21 nt, Human
uucuucaguuuaauauaaaau

SEQ ID NO: 1101207 - RNA, 22 nt, Human
uucucugaguacguuucagugu

SEQ ID NO: 1101208 - RNA, 22 nt, Human
auauauuugagaauauucauga

SEQ ID NO: 1101209 - RNA, 22 nt, Human
auguuugaaauuguaaguauau

SEQ ID NO: 1101210 - RNA, 22 nt, Human
uucacagauguauuggaacucc

SEQ ID NO: 1101211 - RNA, 22 nt, Human
uuuucauuguuacuaugagcua

SEQ ID NO: 1101212 - RNA, 22 nt, Human
uucugucagcgucagaaauucu

SEQ ID NO: 1101213 - RNA, 20 nt, Human
aucugcuugccuguccucgg

SEQ ID NO: 1101214 - RNA, 22 nt, Human
cucuucuuggcccccaugaggg

SEQ ID NO: 1101215 - RNA, 21 nt, Human
auugaaagucaacaaucaguu

SEQ ID NO: 1101216 - RNA, 22 nt, Human
gaaagauauuuauuggcaacag

SEQ ID NO: 1101217 - RNA, 22 nt, Human
ugaccuuauuugaaaauagaga

SEQ ID NO: 1101218 - RNA, 22 nt, Human
cacacucauuagucauuucucu

SEQ ID NO: 1101219 - RNA, 22 nt, Human
uucagcaaauggacuguucagg

SEQ ID NO: 1101220 - RNA, 22 nt, Human
uacuuacacagcuguagaaggu

SEQ ID NO: 1101221 - RNA, 22 nt, Human
ucauacaucuguccuggagcuc

SEQ ID NO: 1101222 - RNA, 19 nt, Human
uuagccauccacagugaaa

SEQ ID NO: 1101223 - RNA, 23 nt, Human
uuuauccaacucuguaaucucuc

SEQ ID NO: 1101224 - RNA, 20 nt, Human
cuucuucagccuaugcuuca

SEQ ID NO: 1101225 - RNA, 22 nt, Human
cugcuguguuucugcuagaaaa

SEQ ID NO: 1101226 - RNA, 22 nt, Human
aguaugaauacagauuuucucu

SEQ ID NO: 1101227 - RNA, 22 nt, Human
uuucaucuuccuuggcauaggu

SEQ ID NO: 1101228 - RNA, 22 nt, Human
uucugggagagaaagggccuug

SEQ ID NO: 1101229 - RNA, 22 nt, Human
gucaggauuugaacucaggucu

SEQ ID NO: 1101230 - RNA, 22 nt, Human
uguucauuuggcccuuuuguau

SEQ ID NO: 1101231 - RNA, 22 nt, Human
uauucaaaguaccuucauugcc

SEQ ID NO: 1101232 - RNA, 22 nt, Human
gaccaaggaagaggggagccag

SEQ ID NO: 1101233 - RNA, 22 nt, Human
uagcauuuauuccagauuugga

SEQ ID NO: 1101234 - RNA, 20 nt, Human
ucugugcaccugcuacaagg

SEQ ID NO: 1101235 - RNA, 22 nt, Human
ccacuguuuuucaguuaacuuu

SEQ ID NO: 1101236 - RNA, 22 nt, Human
gucaaaaaguagucauuucugu

SEQ ID NO: 1101237 - RNA, 22 nt, Human
aauauuuguuaguguuuuaaug

SEQ ID NO: 1101238 - RNA, 22 nt, Human
aauggccagcugggagaguuga

SEQ ID NO: 1101239 - RNA, 22 nt, Human
ucauuuguugaacuuuagugcg

SEQ ID NO: 1101240 - RNA, 22 nt, Human
uaucuguuguccaugcagaaag

SEQ ID NO: 1101241 - RNA, 22 nt, Human
ugaugaaacugagguuccaaga

SEQ ID NO: 1101242 - RNA, 22 nt, Human
uucuucucagggucccacaugg

SEQ ID NO: 1101243 - RNA, 22 nt, Human
gaaacuguauguaguuuuuggg

SEQ ID NO: 1101244 - RNA, 21 nt, Human
cugcuguggcccccgacaugc

SEQ ID NO: 1101245 - RNA, 22 nt, Human
agucccuguacuuuccacugcc

SEQ ID NO: 1101246 - RNA, 22 nt, Human
cacugagcugauagaauuccag

SEQ ID NO: 1101247 - RNA, 22 nt, Human
agucuugcauuuucugaagaug

SEQ ID NO: 1101248 - RNA, 22 nt, Human
gcugccagcuuuccuuggcuga

SEQ ID NO: 1101249 - RNA, 22 nt, Human
augauauuugcaaugugcuugc

SEQ ID NO: 1101250 - RNA, 22 nt, Human
uaagauaaguggguugagaugg

SEQ ID NO: 1101251 - RNA, 22 nt, Human
gugauuuucuccuccuagaagu

SEQ ID NO: 1101252 - RNA, 22 nt, Human
cuaauguaucauggcucucagc

SEQ ID NO: 1101253 - RNA, 22 nt, Human
aaaguauuugugauuuuuacca

SEQ ID NO: 1101254 - RNA, 22 nt, Human
uauuuguauguguguacauaua

SEQ ID NO: 1101255 - RNA, 22 nt, Human
gaucuucuagcagaaguaauuu

SEQ ID NO: 1101256 - RNA, 22 nt, Human
cuuaagauuugagauaccuaau

SEQ ID NO: 1101257 - RNA, 17 nt, Human
aaggccauuuccaccca

SEQ ID NO: 1101258 - RNA, 22 nt, Human
uguguaaagcuuguuccagaaa

SEQ ID NO: 1101259 - RNA, 22 nt, Human
aauuuccagaucagaugacuca

SEQ ID NO: 1101260 - RNA, 22 nt, Human
uuugaaaguguuuacuugggaa

SEQ ID NO: 1101261 - RNA, 22 nt, Human
cucucagacugaagggccugug

SEQ ID NO: 1101262 - RNA, 22 nt, Human
cagugauguuucugcaucagag

SEQ ID NO: 1101263 - RNA, 22 nt, Human
uuucaguuacugcuauaucauu

SEQ ID NO: 1101264 - RNA, 22 nt, Human
augcuguguuugagaaccuagg

SEQ ID NO: 1101265 - RNA, 22 nt, Human
ucucacugcaaauauuauguau

SEQ ID NO: 1101266 - RNA, 22 nt, Human
uucugggacaucuggacaguuu

SEQ ID NO: 1101267 - RNA, 22 nt, Human
uaucuguucaauggaagaugac

SEQ ID NO: 1101268 - RNA, 20 nt, Human
uuucugugcccaggucuguu

SEQ ID NO: 1101269 - RNA, 19 nt, Human
cucucacucgccacauccu

SEQ ID NO: 1101270 - RNA, 22 nt, Human
ugaaacauuugaugaucuuugg

SEQ ID NO: 1101271 - RNA, 22 nt, Human
augcugugucaccuuaggauuu

SEQ ID NO: 1101272 - RNA, 22 nt, Human
uugcauuuccuguacuguuuga

SEQ ID NO: 1101273 - RNA, 22 nt, Human
uuuaaauggcauuuucccagau

SEQ ID NO: 1101274 - RNA, 22 nt, Human
caauacuuccuuguuagaggca

SEQ ID NO: 1101275 - RNA, 22 nt, Human
uaaugucagcauaguuuauuuu

SEQ ID NO: 1101276 - RNA, 22 nt, Human
uuuccuaguucuaagaaaugua

SEQ ID NO: 1101277 - RNA, 22 nt, Human
gguauaaaugaucagaucgcug

SEQ ID NO: 1101278 - RNA, 22 nt, Human
ucauuuguggaagugauugugg

SEQ ID NO: 1101279 - RNA, 22 nt, Human
cugucauuuaagacauucugga

SEQ ID NO: 1101280 - RNA, 22 nt, Human
uuauuucauguaaaauuuaugu

SEQ ID NO: 1101281 - RNA, 22 nt, Human
auaucauucugauguauaucuu

SEQ ID NO: 1101282 - RNA, 22 nt, Human
uuuuucaagacaaccugcaugu

SEQ ID NO: 1101283 - RNA, 22 nt, Human
aagaacuuccuaauauauuuuc

SEQ ID NO: 1101284 - RNA, 23 nt, Human
cuuuuaacuugaucugagaccag

SEQ ID NO: 1101285 - RNA, 22 nt, Human
ucuucuuaugugccauuaucuc

SEQ ID NO: 1101286 - RNA, 22 nt, Human
gcuguguuugacaguagcagac

SEQ ID NO: 1101287 - RNA, 22 nt, Human
auuuugcuggucugaauuacuu

SEQ ID NO: 1101288 - RNA, 20 nt, Human
ugaaggccagcagcauaggg

SEQ ID NO: 1101289 - RNA, 23 nt, Human
aggauguaggauguauggcagag

SEQ ID NO: 1101290 - RNA, 22 nt, Human
aucauuucccuuuagaucacaa

SEQ ID NO: 1101291 - RNA, 22 nt, Human
uuugaagugggcauuagaaccu

SEQ ID NO: 1101292 - RNA, 22 nt, Human
uacaaaguagaaauucaguaaa

SEQ ID NO: 1101293 - RNA, 23 nt, Human
aggcccaacucugugagggcugc

SEQ ID NO: 1101294 - RNA, 22 nt, Human
aaauuauaggugccaccuugga

SEQ ID NO: 1101295 - RNA, 22 nt, Human
ucagugcacagagauuuuuguu

SEQ ID NO: 1101296 - RNA, 21 nt, Human
uaauaauuccacuacagagua

SEQ ID NO: 1101297 - RNA, 22 nt, Human
cauuuguaguuaaaaaugucuc

SEQ ID NO: 1101298 - RNA, 22 nt, Human
ucaccgccuugcccggccgggc

SEQ ID NO: 1101299 - RNA, 22 nt, Human
aaccauuugccauuaucuuaag

SEQ ID NO: 1101300 - RNA, 22 nt, Human
ugaaucauggauaaauagcuua

SEQ ID NO: 1101301 - RNA, 23 nt, Human
uuuuccagaaucgacucuguaga

SEQ ID NO: 1101302 - RNA, 22 nt, Human
aagacugugucuauggcuacuc

SEQ ID NO: 1101303 - RNA, 22 nt, Human
aacauucaaaacccaguucagu

SEQ ID NO: 1101304 - RNA, 22 nt, Human
uuagcauuucaguacacauguu

SEQ ID NO: 1101305 - RNA, 22 nt, Human
cuugcugugugguguucucaga

SEQ ID NO: 1101306 - RNA, 22 nt, Human
ugaaggcccagccacagaaugg

SEQ ID NO: 1101307 - RNA, 22 nt, Human
ucuuagaaauuccccaguggcu

SEQ ID NO: 1101308 - RNA, 22 nt, Human
augcuacagaguuugaauaugu

SEQ ID NO: 1101309 - RNA, 22 nt, Human
augucaaacacaacaccagugg

SEQ ID NO: 1101310 - RNA, 22 nt, Human
ucucagaguuuagagcugagcc

SEQ ID NO: 1101311 - RNA, 22 nt, Human
acacauuucucuuuuuguaagu

SEQ ID NO: 1101312 - RNA, 22 nt, Human
uccauuuuagaagaaaauccac

SEQ ID NO: 1101313 - RNA, 22 nt, Human
uucccucucacuuaaagcuugg

SEQ ID NO: 1101314 - RNA, 22 nt, Human
ccagaggaaaaauaucucccua

SEQ ID NO: 1101315 - RNA, 22 nt, Human
gaaggccauuuuuagguagaau

SEQ ID NO: 1101316 - RNA, 22 nt, Human
cggagccugcuuguugcagcug

SEQ ID NO: 1101317 - RNA, 22 nt, Human
uuugaaaggugucgagaugugu

SEQ ID NO: 1101318 - RNA, 22 nt, Human
ucaauucugguccucaggaacu

SEQ ID NO: 1101319 - RNA, 22 nt, Human
uuucaguuuaugucuugaauua

SEQ ID NO: 1101320 - RNA, 22 nt, Human
acuuucugcaguguuggaaaug

SEQ ID NO: 1101321 - RNA, 22 nt, Human
cauuuguaucauauguaucuua

SEQ ID NO: 1101322 - RNA, 22 nt, Human
uaugaacauguucauugacuua

SEQ ID NO: 1101323 - RNA, 22 nt, Human
uuccaagaguaaauucaaauug

SEQ ID NO: 1101324 - RNA, 22 nt, Human
gaggcugaggguuagagaguca

SEQ ID NO: 1101325 - RNA, 22 nt, Human
uacauaugaacuuuauaacuug

SEQ ID NO: 1101326 - RNA, 22 nt, Human
uuaaauuuuagaaacagacucu

SEQ ID NO: 1101327 - RNA, 22 nt, Human
acagugacguuuauuugagacg

SEQ ID NO: 1101328 - RNA, 22 nt, Human
auacuucuuugauguucacagg

SEQ ID NO: 1101329 - RNA, 22 nt, Human
ucauaaaucauacuccauuugc

SEQ ID NO: 1101330 - RNA, 22 nt, Human
uucugucuguaaacuucucaau

SEQ ID NO: 1101331 - RNA, 22 nt, Human
ucacacagauugguagagcuga

SEQ ID NO: 1101332 - RNA, 22 nt, Human
auuugcuuuuacuauguuaaaa

SEQ ID NO: 1101333 - RNA, 21 nt, Human
auacauucuauuaagcauuua

SEQ ID NO: 1101334 - RNA, 22 nt, Human
auuuggcaacauuaauugaauc

SEQ ID NO: 1101335 - RNA, 22 nt, Human
uccauuuucuugcucuagguaa

SEQ ID NO: 1101336 - RNA, 22 nt, Human
cuucucagcauuuugucagucu

SEQ ID NO: 1101337 - RNA, 23 nt, Human
cugcuguguuggucucgauggga

SEQ ID NO: 1101338 - RNA, 20 nt, Human
cugcugugguccuuuauuuu

SEQ ID NO: 1101339 - RNA, 22 nt, Human
cauaauuucacugucguauggc

SEQ ID NO: 1101340 - RNA, 22 nt, Human
accauguguuuuacacauggua

SEQ ID NO: 1101341 - RNA, 22 nt, Human
uucuucuucauuucugacgaug

SEQ ID NO: 1101342 - RNA, 22 nt, Human
ucaguucugcuagaaaaacagu

SEQ ID NO: 1101343 - RNA, 22 nt, Human
auucuucaucagagaugcacua

SEQ ID NO: 1101344 - RNA, 22 nt, Human
gagagucuaggaaccucauaua

SEQ ID NO: 1101345 - RNA, 22 nt, Human
uucuugcaggucacucacugag

SEQ ID NO: 1101346 - RNA, 22 nt, Human
ucauucuugaucacuaguuagu

SEQ ID NO: 1101347 - RNA, 22 nt, Human
cuguuucaagugaagucagaca

SEQ ID NO: 1101348 - RNA, 22 nt, Human
gucaggaugggcagccaaacua

SEQ ID NO: 1101349 - RNA, 22 nt, Human
uaugaacuguaacccucaccgc

SEQ ID NO: 1101350 - RNA, 22 nt, Human
uuuuccuucuagagcagauuuc

SEQ ID NO: 1101351 - RNA, 18 nt, Human
ccucagggagagagacgc

SEQ ID NO: 1101352 - RNA, 22 nt, Human
acauuguuugagaauacagaug

SEQ ID NO: 1101353 - RNA, 20 nt, Human
accaauguuagcuuaguacu

SEQ ID NO: 1101354 - RNA, 22 nt, Human
ccaggcugggcuacaaguugag

SEQ ID NO: 1101355 - RNA, 22 nt, Human
uugcagcuucuaccacuguuuc

SEQ ID NO: 1101356 - RNA, 22 nt, Human
uuuucucuuguuaauguacuga

SEQ ID NO: 1101357 - RNA, 22 nt, Human
ucaugaacauggaauaucuuuu

SEQ ID NO: 1101358 - RNA, 22 nt, Human
ucucucuucaacccuuaacuag

SEQ ID NO: 1101359 - RNA, 22 nt, Human
uuugaauagcauaggauuacau

SEQ ID NO: 1101360 - RNA, 22 nt, Human
auuucagaugaccaaauggaaa

SEQ ID NO: 1101361 - RNA, 19 nt, Human
cauuuagaaguacauauua

SEQ ID NO: 1101362 - RNA, 23 nt, Human
cuuuuaacuagaguaucagcugc

SEQ ID NO: 1101363 - RNA, 22 nt, Human
acagugcuaaacacuucuugaa

SEQ ID NO: 1101364 - RNA, 22 nt, Human
acagucucuccacacugcaggg

SEQ ID NO: 1101365 - RNA, 22 nt, Human
aauagcucacugauuucucuuu

SEQ ID NO: 1101366 - RNA, 23 nt, Human
uguaugaauaugccacaguuuaa

SEQ ID NO: 1101367 - RNA, 22 nt, Human
gcauguguuauuuuauguauga

SEQ ID NO: 1101368 - RNA, 20 nt, Human
augcuuucuugugugcugcu

SEQ ID NO: 1101369 - RNA, 22 nt, Human
uguaugaaucucauuuguuuaa

SEQ ID NO: 1101370 - RNA, 22 nt, Human
uucagaaguagcuaagcaguca

SEQ ID NO: 1101371 - RNA, 22 nt, Human
ucuucagacuccaaauguuuua

SEQ ID NO: 1101372 - RNA, 22 nt, Human
ugucugugaccucuuaggcaag

SEQ ID NO: 1101373 - RNA, 22 nt, Human
cucuucucugcagccuuugaag

SEQ ID NO: 1101374 - RNA, 23 nt, Human
acuauaaaguuguucugauuuac

SEQ ID NO: 1101375 - RNA, 22 nt, Human
gaaacugugaucguguucuggg

SEQ ID NO: 1101376 - RNA, 22 nt, Human
augaguucaauuguuucaguca

SEQ ID NO: 1101377 - RNA, 22 nt, Human
ugaaaugaaugugauucgauag

SEQ ID NO: 1101378 - RNA, 22 nt, Human
ccacaucucgguccccucuuug

SEQ ID NO: 1101379 - RNA, 22 nt, Human
cauucacaucuuguuccaucac

SEQ ID NO: 1101380 - RNA, 22 nt, Human
uuuggacuuagccugcagaauu

SEQ ID NO: 1101381 - RNA, 22 nt, Human
agucagugaaaacuagaauguu

SEQ ID NO: 1101382 - RNA, 22 nt, Human
uuucuagucucgaucucuuaau

SEQ ID NO: 1101383 - RNA, 22 nt, Human
uagugcuugagucucuccguac

SEQ ID NO: 1101384 - RNA, 22 nt, Human
cugcugugugaccauggacagg

SEQ ID NO: 1101385 - RNA, 22 nt, Human
cucuggcuucuaccuugcaguu

SEQ ID NO: 1101386 - RNA, 22 nt, Human
cuggcugugcagucuuccagaa

SEQ ID NO: 1101387 - RNA, 22 nt, Human
uuugacaucaauacccuagaau

SEQ ID NO: 1101388 - RNA, 22 nt, Human
cuugaaagucagcagaguggau

SEQ ID NO: 1101389 - RNA, 22 nt, Human
ucuaaccuuugaaacugcuuuc

SEQ ID NO: 1101390 - RNA, 22 nt, Human
uuucugcugugcuuucuugcgu

SEQ ID NO: 1101391 - RNA, 22 nt, Human
ucaguuaacaacuauuuauuga

SEQ ID NO: 1101392 - RNA, 17 nt, Human
uagcuguguuucagcua

SEQ ID NO: 1101393 - RNA, 22 nt, Human
ucugggaacucugucauuuccc

SEQ ID NO: 1101394 - RNA, 22 nt, Human
uaacuuucuucauaugugaacc

SEQ ID NO: 1101395 - RNA, 17 nt, Human
uucucugagcuguauug

SEQ ID NO: 1101396 - RNA, 22 nt, Human
cagcuucugucugauuagcaag

SEQ ID NO: 1101397 - RNA, 22 nt, Human
uucugugaaucuuuuuucccac

SEQ ID NO: 1101398 - RNA, 22 nt, Human
augaagcugaaaaaggcauaua

SEQ ID NO: 1101399 - RNA, 22 nt, Human
agucuacaaucuuaaaugaacu

SEQ ID NO: 1101400 - RNA, 22 nt, Human
cuagguauucauguuucguggc

SEQ ID NO: 1101401 - RNA, 22 nt, Human
acacauuuacauguuuacguau

SEQ ID NO: 1101402 - RNA, 22 nt, Human
uccaugagggacacuggaugcu

SEQ ID NO: 1101403 - RNA, 22 nt, Human
ugagaauuuucaguuucacuuu

SEQ ID NO: 1101404 - RNA, 22 nt, Human
uuucaguguaucuuccaaaagc

SEQ ID NO: 1101405 - RNA, 22 nt, Human
ucauucuuuaccaaguugucac

SEQ ID NO: 1101406 - RNA, 22 nt, Human
uaaggccaauuacauauguuca

SEQ ID NO: 1101407 - RNA, 22 nt, Human
uugcaucuagggcaacccagag

SEQ ID NO: 1101408 - RNA, 22 nt, Human
uucucagaauugacugggagca

SEQ ID NO: 1101409 - RNA, 22 nt, Human
uuuuuauaacucuuuugugaca

SEQ ID NO: 1101410 - RNA, 22 nt, Human
gaauauuuuuaaagggacuaau

SEQ ID NO: 1101411 - RNA, 22 nt, Human
acaaaguuugugguauuccaag

SEQ ID NO: 1101412 - RNA, 22 nt, Human
uuucuucaauugcuaacaagga

SEQ ID NO: 1101413 - RNA, 22 nt, Human
cagagccaggucuaggagucuc

SEQ ID NO: 1101414 - RNA, 22 nt, Human
guuuuucuaggaccaugugauu

SEQ ID NO: 1101415 - RNA, 22 nt, Human
cugcugugucagaguccagggg

SEQ ID NO: 1101416 - RNA, 22 nt, Human
uagaauucauguuacuguuagc

SEQ ID NO: 1101417 - RNA, 22 nt, Human
ucuuuguaacugucuauugaga

SEQ ID NO: 1101418 - RNA, 19 nt, Human
uuacuuggcaaagucaguc

SEQ ID NO: 1101419 - RNA, 22 nt, Human
ucaggaugguccuuuaugagaa

SEQ ID NO: 1101420 - RNA, 22 nt, Human
agucugucugucacuucugcag

SEQ ID NO: 1101421 - RNA, 19 nt, Human
uuugcagugguuccuuugu

SEQ ID NO: 1101422 - RNA, 22 nt, Human
uguaugaaagaacaagggcuua

SEQ ID NO: 1101423 - RNA, 22 nt, Human
cagagaaaaaauccugcucuca

SEQ ID NO: 1101424 - RNA, 22 nt, Human
aaguauaagcuauucuucauga

SEQ ID NO: 1101425 - RNA, 22 nt, Human
uuugaaaggguuaugagacuga

SEQ ID NO: 1101426 - RNA, 22 nt, Human
aucaggaucacugggagucuug

SEQ ID NO: 1101427 - RNA, 22 nt, Human
cauucauuagaauagauaugua

SEQ ID NO: 1101428 - RNA, 22 nt, Human
uuuuccagagcugucucuugca

SEQ ID NO: 1101429 - RNA, 22 nt, Human
aauucugugcaggcagagcuau

SEQ ID NO: 1101430 - RNA, 22 nt, Human
gggagucugggcuagacuccuu

SEQ ID NO: 1101431 - RNA, 22 nt, Human
ucugcuguauuagguugaacug

SEQ ID NO: 1101432 - RNA, 22 nt, Human
auguuuccauuuucuuguauca

SEQ ID NO: 1101433 - RNA, 22 nt, Human
auguucuguuuuguaauucaua

SEQ ID NO: 1101434 - RNA, 22 nt, Human
uccagaaacuuuuccagucuca

SEQ ID NO: 1101435 - RNA, 22 nt, Human
ccucaugguacuuacuguagcu

SEQ ID NO: 1101436 - RNA, 22 nt, Human
auacacauguguaugugcaugc

SEQ ID NO: 1101437 - RNA, 23 nt, Human
auguauuuaaauuucagugauga

SEQ ID NO: 1101438 - RNA, 18 nt, Human
acugugugaauuagcucc

SEQ ID NO: 1101439 - RNA, 22 nt, Human
ugcuguguucuccugacucacc

SEQ ID NO: 1101440 - RNA, 22 nt, Human
aaauacauaaagguuguaccag

SEQ ID NO: 1101441 - RNA, 22 nt, Human
cuucagaagccugcagccuuug

SEQ ID NO: 1101442 - RNA, 22 nt, Human
uuccaugaaauguguuaugcuu

SEQ ID NO: 1101443 - RNA, 22 nt, Human
ugcuacaauucacaucuggaua

SEQ ID NO: 1101444 - RNA, 22 nt, Human
uguaugaagccagaaucuguuu

SEQ ID NO: 1101445 - RNA, 22 nt, Human
ugagaacugaggauuugaauuc

SEQ ID NO: 1101446 - RNA, 21 nt, Human
uuucacaaaaguaugugacaa

SEQ ID NO: 1101447 - RNA, 22 nt, Human
uuccaugaaagugaaauggagc

SEQ ID NO: 1101448 - RNA, 22 nt, Human
uacauaguauucacauuguuuu

SEQ ID NO: 1101449 - RNA, 22 nt, Human
ucuggucaguaauaagaagugg

SEQ ID NO: 1101450 - RNA, 22 nt, Human
uguuuuaaagccauugccuuuc

SEQ ID NO: 1101451 - RNA, 22 nt, Human
ccugucacgaugacugcacucu

SEQ ID NO: 1101452 - RNA, 22 nt, Human
agcuggcagucauccuagugag

SEQ ID NO: 1101453 - RNA, 22 nt, Human
ugugccagccucuggcuguguc

SEQ ID NO: 1101454 - RNA, 22 nt, Human
agaagucauuuauguuagauga

SEQ ID NO: 1101455 - RNA, 22 nt, Human
uuugaaagaaaccagugaguga

SEQ ID NO: 1101456 - RNA, 21 nt, Human
augugaaauaucaucagagca

SEQ ID NO: 1101457 - RNA, 17 nt, Human
ugauaguucauuuuaag

SEQ ID NO: 1101458 - RNA, 22 nt, Human
aaucuucuacuugacaguucuc

SEQ ID NO: 1101459 - RNA, 22 nt, Human
cacauauuguaguucaccagga

SEQ ID NO: 1101460 - RNA, 22 nt, Human
uuagacauagaauauugucuag

SEQ ID NO: 1101461 - RNA, 22 nt, Human
guuuucugauuagcaaaucuga

SEQ ID NO: 1101462 - RNA, 22 nt, Human
ugucugugaccucuuuggagcc

SEQ ID NO: 1101463 - RNA, 22 nt, Human
gucaggauuauuuuauuaaaag

SEQ ID NO: 1101464 - RNA, 22 nt, Human
auguuucaccagcaaauuaccu

SEQ ID NO: 1101465 - RNA, 22 nt, Human
ucaggauguuaauauagcauua

SEQ ID NO: 1101466 - RNA, 22 nt, Human
uuauuugcccauguuuagcaga

SEQ ID NO: 1101467 - RNA, 22 nt, Human
cugcuuuggacaacuauucuug

SEQ ID NO: 1101468 - RNA, 22 nt, Human
uucccaugccuggccccuaucc

SEQ ID NO: 1101469 - RNA, 22 nt, Human
aauguauggauucaugucugug

SEQ ID NO: 1101470 - RNA, 22 nt, Human
uaaggccaaacuauuauaguuc

SEQ ID NO: 1101471 - RNA, 22 nt, Human
ugaaaugagagcacagaauaaa

SEQ ID NO: 1101472 - RNA, 22 nt, Human
uuucuaggcacagugucuuccc

SEQ ID NO: 1101473 - RNA, 22 nt, Human
uuuaucuuuaggacuuugcaga

SEQ ID NO: 1101474 - RNA, 22 nt, Human
aaguuucaaauguugauuaugc

SEQ ID NO: 1101475 - RNA, 22 nt, Human
uuugcauaaaggagcauuucuc

SEQ ID NO: 1101476 - RNA, 22 nt, Human
ucauuuuucacacagggucacc

SEQ ID NO: 1101477 - RNA, 22 nt, Human
cucugucagaguguugucccca

SEQ ID NO: 1101478 - RNA, 22 nt, Human
uugcaaaggggaauaaagcaau

SEQ ID NO: 1101479 - RNA, 22 nt, Human
uccauuuuucaugacuccucaa

SEQ ID NO: 1101480 - RNA, 22 nt, Human
ucaggaggccaccaggaccugu

SEQ ID NO: 1101481 - RNA, 22 nt, Human
agucucuuccuucaaggcuggu

SEQ ID NO: 1101482 - RNA, 22 nt, Human
ugcuugugagaguuuuuucaga

SEQ ID NO: 1101483 - RNA, 22 nt, Human
ucaggaauccagacagggcaca

SEQ ID NO: 1101484 - RNA, 22 nt, Human
uauauguaaauaagucuaaugu

SEQ ID NO: 1101485 - RNA, 22 nt, Human
ucagguggcuuggagggggacg

SEQ ID NO: 1101486 - RNA, 22 nt, Human
aucugccuggcuccaggugagc

SEQ ID NO: 1101487 - RNA, 18 nt, Human
uugcuuuguaagcuugca

SEQ ID NO: 1101488 - RNA, 22 nt, Human
aaugcuuuuugcgaaaugugca

SEQ ID NO: 1101489 - RNA, 22 nt, Human
uauuuccaaaagccuauuauga

SEQ ID NO: 1101490 - RNA, 22 nt, Human
uccauuuucuaaguaucacuua

SEQ ID NO: 1101491 - RNA, 22 nt, Human
guugaaagaucauguggcugcc

SEQ ID NO: 1101492 - RNA, 22 nt, Human
cugcauuagucaugcuuugcag

SEQ ID NO: 1101493 - RNA, 22 nt, Human
aaauuagucgguuuaggaauuu

SEQ ID NO: 1101494 - RNA, 22 nt, Human
uuaauacaagcauaugcacaca

SEQ ID NO: 1101495 - RNA, 22 nt, Human
uacuuuuagccuauuugauucu

SEQ ID NO: 1101496 - RNA, 22 nt, Human
uuaagauagaacccaguagucu

SEQ ID NO: 1101497 - RNA, 22 nt, Human
ugcauggaggaagaugaaugca

SEQ ID NO: 1101498 - RNA, 22 nt, Human
ugagccugguugcagugucugg

SEQ ID NO: 1101499 - RNA, 22 nt, Human
uauguacuacacuagaacauuu

SEQ ID NO: 1101500 - RNA, 22 nt, Human
aucuagcaguguuauaauugga

SEQ ID NO: 1101501 - RNA, 22 nt, Human
aagcgccaugguuccugcgcag

SEQ ID NO: 1101502 - RNA, 22 nt, Human
gucaggaugcuauuguuauuaa

SEQ ID NO: 1101503 - RNA, 22 nt, Human
ucuucagauggccaguuguccc

SEQ ID NO: 1101504 - RNA, 22 nt, Human
uuucuucagccacuccaaacug

SEQ ID NO: 1101505 - RNA, 20 nt, Human
guaaaauauggucuuugggu

SEQ ID NO: 1101506 - RNA, 22 nt, Human
gucaggauuuuaaaaucccagu

SEQ ID NO: 1101507 - RNA, 22 nt, Human
ugagaauuuuuugucaugcauu

SEQ ID NO: 1101508 - RNA, 22 nt, Human
cuaauacacccuauugcuuguu

SEQ ID NO: 1101509 - RNA, 22 nt, Human
uacacacaugcauuugccuuau

SEQ ID NO: 1101510 - RNA, 18 nt, Human
caugucugcgccacaagg

SEQ ID NO: 1101511 - RNA, 22 nt, Human
uuucuucauagaccuugucuug

SEQ ID NO: 1101512 - RNA, 22 nt, Human
ucuucagacccuuagcugugau

SEQ ID NO: 1101513 - RNA, 22 nt, Human
ucacauucucagcaucuauaca

SEQ ID NO: 1101514 - RNA, 19 nt, Human
uucaggauugacccuacug

SEQ ID NO: 1101515 - RNA, 22 nt, Human
gcugauguaagacuuuugguuu

SEQ ID NO: 1101516 - RNA, 22 nt, Human
uucauucugggcucuaaggaac

SEQ ID NO: 1101517 - RNA, 22 nt, Human
auuugcuuuaagguauaaaagg

SEQ ID NO: 1101518 - RNA, 22 nt, Human
auaguuugaaggcuguucuacu

SEQ ID NO: 1101519 - RNA, 22 nt, Human
uauuucagggagaauaaauuug

SEQ ID NO: 1101520 - RNA, 22 nt, Human
auccaugaagguacuucucagg

SEQ ID NO: 1101521 - RNA, 22 nt, Human
uaauacuguauacugcaaauuu

SEQ ID NO: 1101522 - RNA, 22 nt, Human
ugcugcugauggcaccuaggca

SEQ ID NO: 1101523 - RNA, 22 nt, Human
cuucagaggggacucaaaguca

SEQ ID NO: 1101524 - RNA, 22 nt, Human
cuugaaagaagggucuuuuaau

SEQ ID NO: 1101525 - RNA, 22 nt, Human
auucauuugcuauuguguaugg

SEQ ID NO: 1101526 - RNA, 22 nt, Human
ugagagggcccagagcacacca

SEQ ID NO: 1101527 - RNA, 22 nt, Human
guuuuaguggguggccacugau

SEQ ID NO: 1101528 - RNA, 22 nt, Human
uucaugugaauauauuugucuu

SEQ ID NO: 1101529 - RNA, 22 nt, Human
uuuuaucugcuucauuaguuga

SEQ ID NO: 1101530 - RNA, 21 nt, Human
caauaaacugcacauugagac

SEQ ID NO: 1101531 - RNA, 22 nt, Human
acucaggaaaaauguagugaua

SEQ ID NO: 1101532 - RNA, 19 nt, Human
ugcaagcuuuuucuuguua

SEQ ID NO: 1101533 - RNA, 22 nt, Human
ugaguuuugucuugcuagaagu

SEQ ID NO: 1101534 - RNA, 22 nt, Human
aaaguauucuugacuguuuuuc

SEQ ID NO: 1101535 - RNA, 22 nt, Human
ggaggcugagaaguccaagauc

SEQ ID NO: 1101536 - RNA, 22 nt, Human
uugaacauuggcaauuucauau

SEQ ID NO: 1101537 - RNA, 22 nt, Human
ucugcugucacucauuugcuuc

SEQ ID NO: 1101538 - RNA, 22 nt, Human
ccucuucugcuucaggagcacu

SEQ ID NO: 1101539 - RNA, 22 nt, Human
aaucuucuuucuuaacaguaca

SEQ ID NO: 1101540 - RNA, 22 nt, Human
aaaauugaagugaucaggaacu

SEQ ID NO: 1101541 - RNA, 22 nt, Human
acuugcauuauauuuaucacaa

SEQ ID NO: 1101542 - RNA, 22 nt, Human
ucccuucacagaugcgauguuu

SEQ ID NO: 1101543 - RNA, 22 nt, Human
ucauuucaaugauacuacuaag

SEQ ID NO: 1101544 - RNA, 22 nt, Human
uguacauagaucuugaaaauua

SEQ ID NO: 1101545 - RNA, 22 nt, Human
uguuuauuacaguucuuggaau

SEQ ID NO: 1101546 - RNA, 21 nt, Human
uucuucuuggacuguuuuggc

SEQ ID NO: 1101547 - RNA, 22 nt, Human
cuugaaagucacaugcagcccu

SEQ ID NO: 1101548 - RNA, 22 nt, Human
ugaaaugagauaauuuaagugc

SEQ ID NO: 1101549 - RNA, 22 nt, Human
uucuucaguguagcaacuguau

SEQ ID NO: 1101550 - RNA, 22 nt, Human
accauuuuggguauuuucagag

SEQ ID NO: 1101551 - RNA, 22 nt, Human
ucuacuguagugaugcugcagu

SEQ ID NO: 1101552 - RNA, 22 nt, Human
uucuucaaugugcccuguuuuc

SEQ ID NO: 1101553 - RNA, 22 nt, Human
caguggagagacuuuuacucuu

SEQ ID NO: 1101554 - RNA, 22 nt, Human
cagauggaacacagaaaggaga

SEQ ID NO: 1101555 - RNA, 22 nt, Human
ggcugaaggaugaaagcugcag

SEQ ID NO: 1101556 - RNA, 22 nt, Human
aagauauucaaagauuuauuag

SEQ ID NO: 1101557 - RNA, 22 nt, Human
uggaagggagugacagucagag

SEQ ID NO: 1101558 - RNA, 22 nt, Human
ccucaggaaaugaauaaauggc

SEQ ID NO: 1101559 - RNA, 22 nt, Human
agucucugggcaugguugugac

SEQ ID NO: 1101560 - RNA, 22 nt, Human
ugccuugcacauaauauacauu

SEQ ID NO: 1101561 - RNA, 22 nt, Human
acauucuuaacaguuaaaaacu

SEQ ID NO: 1101562 - RNA, 22 nt, Human
cuuaaauucuuaaugcccucau

SEQ ID NO: 1101563 - RNA, 22 nt, Human
cugcuguguugccagugucacc

SEQ ID NO: 1101564 - RNA, 22 nt, Human
aucaggauagucuguaaauugu

SEQ ID NO: 1101565 - RNA, 22 nt, Human
uaugaacucuggagucugagug

SEQ ID NO: 1101566 - RNA, 22 nt, Human
uaacacaugaaagcaccuucuu

SEQ ID NO: 1101567 - RNA, 22 nt, Human
uuuagacauggcuugcucacuu

SEQ ID NO: 1101568 - RNA, 22 nt, Human
auggagacgcaagggaccuagg

SEQ ID NO: 1101569 - RNA, 22 nt, Human
aagacaauuugauacuaguugc

SEQ ID NO: 1101570 - RNA, 19 nt, Human
uguguguuuauauauguau

SEQ ID NO: 1101571 - RNA, 20 nt, Human
agcuucuucugucuaauuuu

SEQ ID NO: 1101572 - RNA, 22 nt, Human
uuugcauaggauggacauuuua

SEQ ID NO: 1101573 - RNA, 17 nt, Human
agaacuguaguagcucc

SEQ ID NO: 1101574 - RNA, 22 nt, Human
caaggccauauugccuguaugu

SEQ ID NO: 1101575 - RNA, 22 nt, Human
ugauugaagaggugaggaaguu

SEQ ID NO: 1101576 - RNA, 22 nt, Human
cagaccucaguccucaguagga

SEQ ID NO: 1101577 - RNA, 22 nt, Human
auucaaguucuucugucuuugc

SEQ ID NO: 1101578 - RNA, 22 nt, Human
uagugcuuggcccuaccagaua

SEQ ID NO: 1101579 - RNA, 19 nt, Human
acuggcaguuucugcaugg

SEQ ID NO: 1101580 - RNA, 22 nt, Human
acagauguacacucauauauaa

SEQ ID NO: 1101581 - RNA, 22 nt, Human
cuaaucaucuuucucuuaaagc

SEQ ID NO: 1101582 - RNA, 22 nt, Human
uacuuccuguuuccaugucugu

SEQ ID NO: 1101583 - RNA, 22 nt, Human
ucucaaaucaaacuuugagcuu

SEQ ID NO: 1101584 - RNA, 22 nt, Human
uuauccuggauuauauauguga

SEQ ID NO: 1101585 - RNA, 23 nt, Human
aauguauguuaguaucuuagaga

SEQ ID NO: 1101586 - RNA, 20 nt, Human
cagagccaagagcagcaucu

SEQ ID NO: 1101587 - RNA, 22 nt, Human
aguuugaaauguuggcaauauu

SEQ ID NO: 1101588 - RNA, 22 nt, Human
uuugcacuagcauuuguccaug

SEQ ID NO: 1101589 - RNA, 22 nt, Human
cuucucagcaugguuacuguga

SEQ ID NO: 1101590 - RNA, 22 nt, Human
acuagauaauuauaaaagguag

SEQ ID NO: 1101591 - RNA, 22 nt, Human
ucucuucuagcuucuugugguu

SEQ ID NO: 1101592 - RNA, 22 nt, Human
uaucaauacauguuaucagugu

SEQ ID NO: 1101593 - RNA, 22 nt, Human
gugguuuucuccaacccagaac

SEQ ID NO: 1101594 - RNA, 22 nt, Human
agucuccuuggccucaaugccu

SEQ ID NO: 1101595 - RNA, 22 nt, Human
auguaugauauuuccaguauca

SEQ ID NO: 1101596 - RNA, 22 nt, Human
ucuucuucccaucccucaaaug

SEQ ID NO: 1101597 - RNA, 22 nt, Human
uaauuauuaugacaacaauugc

SEQ ID NO: 1101598 - RNA, 22 nt, Human
uaaaauagcaugugcagugaaa

SEQ ID NO: 1101599 - RNA, 22 nt, Human
caggauggugugagugugagga

SEQ ID NO: 1101600 - RNA, 22 nt, Human
ucucacuuuccagacuuuucaa

SEQ ID NO: 1101601 - RNA, 22 nt, Human
auguaugaagcuuuguuuggga

SEQ ID NO: 1101602 - RNA, 22 nt, Human
uugcucaggcuggugugcagug

SEQ ID NO: 1101603 - RNA, 22 nt, Human
agcaccugccugcauuggcuau

SEQ ID NO: 1101604 - RNA, 22 nt, Human
uuuuaacuuaaaauacauagau

SEQ ID NO: 1101605 - RNA, 20 nt, Human
uucaggauucuagaccacac

SEQ ID NO: 1101606 - RNA, 22 nt, Human
acauguaaaaggaacaugcaug

SEQ ID NO: 1101607 - RNA, 22 nt, Human
aucuuguuauaagagauaaugg

SEQ ID NO: 1101608 - RNA, 22 nt, Human
uauguguuugacacccugcaag

SEQ ID NO: 1101609 - RNA, 22 nt, Human
uaacacauuuuccucauacgga

SEQ ID NO: 1101610 - RNA, 21 nt, Human
cuguggaagggaacuagaggg

SEQ ID NO: 1101611 - RNA, 22 nt, Human
uugcauuugacaaauuauuuaa

SEQ ID NO: 1101612 - RNA, 22 nt, Human
ugcugcuguauccuuaguguca

SEQ ID NO: 1101613 - RNA, 22 nt, Human
cuggaggcacccuuagagaggc

SEQ ID NO: 1101614 - RNA, 22 nt, Human
uagauuuuacuucugucauuac

SEQ ID NO: 1101615 - RNA, 22 nt, Human
agcauccaacaggagggaaggg

SEQ ID NO: 1101616 - RNA, 22 nt, Human
ucugggaacagccuggcugugu

SEQ ID NO: 1101617 - RNA, 20 nt, Human
cuguuaaaagguaugaauuc

SEQ ID NO: 1101618 - RNA, 22 nt, Human
ucacuucacacccacuaucaug

SEQ ID NO: 1101619 - RNA, 22 nt, Human
ugaaggccuaacuuccagugcu

SEQ ID NO: 1101620 - RNA, 22 nt, Human
auucaaguccagcuucucuaca

SEQ ID NO: 1101621 - RNA, 22 nt, Human
uaaaugagggcugacaugauug

SEQ ID NO: 1101622 - RNA, 22 nt, Human
uguccucagauaugucuacucu

SEQ ID NO: 1101623 - RNA, 22 nt, Human
cucaggaucgcuugcccuaggg

SEQ ID NO: 1101624 - RNA, 22 nt, Human
acaaaugucuccucuuuuguua

SEQ ID NO: 1101625 - RNA, 22 nt, Human
aucugucaggagcaaggacuac

SEQ ID NO: 1101626 - RNA, 22 nt, Human
cauuuguauguuccuccuuagg

SEQ ID NO: 1101627 - RNA, 22 nt, Human
uauuaaauuauggauuuaggag

SEQ ID NO: 1101628 - RNA, 23 nt, Human
uugcuuucaucaugagaugcucc

SEQ ID NO: 1101629 - RNA, 22 nt, Human
ucuuugcacugugcaagcagaa

SEQ ID NO: 1101630 - RNA, 22 nt, Human
uaugauuuguagacauuugauu

SEQ ID NO: 1101631 - RNA, 22 nt, Human
cugcuguguggauucaauggcu

SEQ ID NO: 1101632 - RNA, 22 nt, Human
gaucuguuauaaucucuuuuau

SEQ ID NO: 1101633 - RNA, 19 nt, Human
agccuggcuuugcucugcu

SEQ ID NO: 1101634 - RNA, 22 nt, Human
ccuacucugagcgccuccgcau

SEQ ID NO: 1101635 - RNA, 22 nt, Human
cccaucacagacacuggguuau

SEQ ID NO: 1101636 - RNA, 22 nt, Human
uucaggauucuuucagacuggg

SEQ ID NO: 1101637 - RNA, 23 nt, Human
acagaaaucauuuguaagguacc

SEQ ID NO: 1101638 - RNA, 22 nt, Human
auaaaguuuaaaagucaauagu

SEQ ID NO: 1101639 - RNA, 22 nt, Human
aaaguucuggggguguuucugg

SEQ ID NO: 1101640 - RNA, 22 nt, Human
uaugccugauaacugugucucu

SEQ ID NO: 1101641 - RNA, 17 nt, Human
cccaugagcccacuccc

SEQ ID NO: 1101642 - RNA, 22 nt, Human
uucaggaucaaguugccaguag

SEQ ID NO: 1101643 - RNA, 23 nt, Human
aaauuauugcucuucaauugccu

SEQ ID NO: 1101644 - RNA, 20 nt, Human
aggcucagcugagcucuugg

SEQ ID NO: 1101645 - RNA, 22 nt, Human
agucucagaaaagaagcaugga

SEQ ID NO: 1101646 - RNA, 22 nt, Human
auuauucuuaugucaucauggc

SEQ ID NO: 1101647 - RNA, 22 nt, Human
ugaaauuaugcauuguuguacc

SEQ ID NO: 1101648 - RNA, 22 nt, Human
cuugaaagcacuuaguaaauua

SEQ ID NO: 1101649 - RNA, 22 nt, Human
ucuucauuccguagauauuuau

SEQ ID NO: 1101650 - RNA, 21 nt, Human
agucuguuaggaugacucuga

SEQ ID NO: 1101651 - RNA, 22 nt, Human
ugcacauucacuuagguauugu

SEQ ID NO: 1101652 - RNA, 22 nt, Human
uagcacaucuucuuggccugca

SEQ ID NO: 1101653 - RNA, 22 nt, Human
ucucaguguguuuucucucaga

SEQ ID NO: 1101654 - RNA, 22 nt, Human
uuucuugaccacuauguugaua

SEQ ID NO: 1101655 - RNA, 22 nt, Human
uucacagaugccugaugugugg

SEQ ID NO: 1101656 - RNA, 22 nt, Human
guugaaagaugucuugguuccc

SEQ ID NO: 1101657 - RNA, 22 nt, Human
aaguggacuaauacaaggacua

SEQ ID NO: 1101658 - RNA, 22 nt, Human
uuagagucaaaauggcauguua

SEQ ID NO: 1101659 - RNA, 23 nt, Human
uucauuugucuacuucacuuguu

SEQ ID NO: 1101660 - RNA, 17 nt, Human
cauuuguugaucaguug

SEQ ID NO: 1101661 - RNA, 22 nt, Human
cuggcuugcagcucaucauaaa

SEQ ID NO: 1101662 - RNA, 22 nt, Human
uaacacauaagcugagaccaug

SEQ ID NO: 1101663 - RNA, 22 nt, Human
gccaugcuugguaugcugugag

SEQ ID NO: 1101664 - RNA, 22 nt, Human
uaccauuucauucuuuccucau

SEQ ID NO: 1101665 - RNA, 22 nt, Human
gucuccugagccuugacugcaa

SEQ ID NO: 1101666 - RNA, 22 nt, Human
uaauaguuucauaaugugcuuc

SEQ ID NO: 1101667 - RNA, 22 nt, Human
aauguaugcugugguaucuucu

SEQ ID NO: 1101668 - RNA, 22 nt, Human
cuguggaaggccuguccugaaa

SEQ ID NO: 1101669 - RNA, 22 nt, Human
uuuuguuguaauauaccuaucc

SEQ ID NO: 1101670 - RNA, 22 nt, Human
uuucaaacauagaucugaauau

SEQ ID NO: 1101671 - RNA, 21 nt, Human
cacucaggguaugugccaggc

SEQ ID NO: 1101672 - RNA, 22 nt, Human
aggcacaguuucauccccgggc

SEQ ID NO: 1101673 - RNA, 22 nt, Human
ucacacagguuugcaaugauuu

SEQ ID NO: 1101674 - RNA, 22 nt, Human
cagagcucuauguucauggagg

SEQ ID NO: 1101675 - RNA, 22 nt, Human
gucuccugagacugcagucacc

SEQ ID NO: 1101676 - RNA, 22 nt, Human
ccugccugcaccuucucugggg

SEQ ID NO: 1101677 - RNA, 21 nt, Human
uugaaaguaaauucagcagcu

SEQ ID NO: 1101678 - RNA, 22 nt, Human
auacuaaaguauagaacuuagu

SEQ ID NO: 1101679 - RNA, 22 nt, Human
aguacauauaguaauuuagcca

SEQ ID NO: 1101680 - RNA, 22 nt, Human
uuauucuuuaaacauauauguu

SEQ ID NO: 1101681 - RNA, 22 nt, Human
gucaggaucucccaguacauau

SEQ ID NO: 1101682 - RNA, 22 nt, Human
ucugcuguucauucuuuuagcu

SEQ ID NO: 1101683 - RNA, 22 nt, Human
aucaguuauuuuuaagcuauaa

SEQ ID NO: 1101684 - RNA, 22 nt, Human
aguggcagagccaaguagagcc

SEQ ID NO: 1101685 - RNA, 22 nt, Human
ccaggcugugguuuagauagag

SEQ ID NO: 1101686 - RNA, 19 nt, Human
uuugaaagaguuuuauugg

SEQ ID NO: 1101687 - RNA, 22 nt, Human
ucucuguacaguacaugccgug

SEQ ID NO: 1101688 - RNA, 22 nt, Human
aggaaacuccccuacaucucaa

SEQ ID NO: 1101689 - RNA, 22 nt, Human
acaauacuauuuucaguauccu

SEQ ID NO: 1101690 - RNA, 22 nt, Human
gaaggccacaaaaaaugucaua

SEQ ID NO: 1101691 - RNA, 22 nt, Human
cauagagugauguaagguaugu

SEQ ID NO: 1101692 - RNA, 22 nt, Human
ucauuuguacuugugugcuugu

SEQ ID NO: 1101693 - RNA, 22 nt, Human
uuucacagguacaaacacuccu

SEQ ID NO: 1101694 - RNA, 22 nt, Human
ucugggaaguccucugucaugc

SEQ ID NO: 1101695 - RNA, 22 nt, Human
cauucuuacacaauauuuuaau

SEQ ID NO: 1101696 - RNA, 22 nt, Human
uuucaguucaguuuauuauauc

SEQ ID NO: 1101697 - RNA, 22 nt, Human
aaaguuugagugauuugacaca

SEQ ID NO: 1101698 - RNA, 22 nt, Human
aauuuccagaccccauccacag

SEQ ID NO: 1101699 - RNA, 22 nt, Human
ugggagcccaagggagcugccg

SEQ ID NO: 1101700 - RNA, 22 nt, Human
auacuguuucucuucuacauga

SEQ ID NO: 1101701 - RNA, 23 nt, Human
cccauuuucauguuaacuccugg

SEQ ID NO: 1101702 - RNA, 22 nt, Human
agucuacaaagaaaaguuauug

SEQ ID NO: 1101703 - RNA, 22 nt, Human
uauauauucuuaaguaguguag

SEQ ID NO: 1101704 - RNA, 22 nt, Human
ugaaggaaugaguauacuguuu

SEQ ID NO: 1101705 - RNA, 22 nt, Human
gaaggccacuuuguguugagaa

SEQ ID NO: 1101706 - RNA, 22 nt, Human
uauaauuuaucaugucacaguu

SEQ ID NO: 1101707 - RNA, 22 nt, Human
cugcuuugacuguuaagaacca

SEQ ID NO: 1101708 - RNA, 22 nt, Human
cugcuguguaucauuuuagaug

SEQ ID NO: 1101709 - RNA, 22 nt, Human
gcuggcagggacagcugcgugu

SEQ ID NO: 1101710 - RNA, 22 nt, Human
uuucacagcuggguggcagagu

SEQ ID NO: 1101711 - RNA, 22 nt, Human
uugcuucaguagcucuuuaaag

SEQ ID NO: 1101712 - RNA, 21 nt, Human
acagcaagccuucacaugagu

SEQ ID NO: 1101713 - RNA, 22 nt, Human
agugugucugaucacuugugag

SEQ ID NO: 1101714 - RNA, 22 nt, Human
aucugccucuucuucauugcga

SEQ ID NO: 1101715 - RNA, 22 nt, Human
gcugcugucagugguggcaguu

SEQ ID NO: 1101716 - RNA, 22 nt, Human
gcucaggaucagccaccucuuu

SEQ ID NO: 1101717 - RNA, 22 nt, Human
agacaaaugguaauuaugucua

SEQ ID NO: 1101718 - RNA, 22 nt, Human
gauuucuugauaaguaguguga

SEQ ID NO: 1101719 - RNA, 19 nt, Human
cuugcugggugguuucugc

SEQ ID NO: 1101720 - RNA, 22 nt, Human
uggagcugggguuugaaucugg

SEQ ID NO: 1101721 - RNA, 22 nt, Human
uucugucacagugcugguauca

SEQ ID NO: 1101722 - RNA, 22 nt, Human
augaaggcaguuaaacgucauc

SEQ ID NO: 1101723 - RNA, 22 nt, Human
aguggcaggcggagauguagga

SEQ ID NO: 1101724 - RNA, 22 nt, Human
ucuuuccaaggacucuguagca

SEQ ID NO: 1101725 - RNA, 22 nt, Human
uuucaucuaacacuacauaggg

SEQ ID NO: 1101726 - RNA, 22 nt, Human
auauucuugugauuauaaagua

SEQ ID NO: 1101727 - RNA, 22 nt, Human
cccuuagcuccaagggguuugg

SEQ ID NO: 1101728 - RNA, 22 nt, Human
aaugucugcucuacucaggagg

SEQ ID NO: 1101729 - RNA, 17 nt, Human
ucauuuguugugacuag

SEQ ID NO: 1101730 - RNA, 22 nt, Human
ucugggaagcugcgugccuguu

SEQ ID NO: 1101731 - RNA, 20 nt, Human
uuuuccagaaaguaucauug

SEQ ID NO: 1101732 - RNA, 22 nt, Human
uucuucaaacaaaaguggcaug

SEQ ID NO: 1101733 - RNA, 22 nt, Human
uccaugagcuagcuuuccaaag

SEQ ID NO: 1101734 - RNA, 22 nt, Human
aauacugccugugagguaacuc

SEQ ID NO: 1101735 - RNA, 22 nt, Human
gcucucuugguggcuguccugg

SEQ ID NO: 1101736 - RNA, 22 nt, Human
uugaaauacugcauuguucagu

SEQ ID NO: 1101737 - RNA, 22 nt, Human
uccuucuuucccccuagucauu

SEQ ID NO: 1101738 - RNA, 22 nt, Human
guucuucaaagugacaacuaaa

SEQ ID NO: 1101739 - RNA, 22 nt, Human
guucucucugcuuccaagaugg

SEQ ID NO: 1101740 - RNA, 22 nt, Human
aaucacuuuucucuaauguagc

SEQ ID NO: 1101741 - RNA, 22 nt, Human
uuuguagaggguaauugacaga

SEQ ID NO: 1101742 - RNA, 22 nt, Human
uugaauuagacuuugcuacagg

SEQ ID NO: 1101743 - RNA, 22 nt, Human
aaguuucaugauguaauuauug

SEQ ID NO: 1101744 - RNA, 22 nt, Human
caguuucuauggcugggcucug

SEQ ID NO: 1101745 - RNA, 22 nt, Human
uucaggauucugugucugacaa

SEQ ID NO: 1101746 - RNA, 22 nt, Human
cuucagaagaaaagcagugugu

SEQ ID NO: 1101747 - RNA, 22 nt, Human
gagagcuggguucaaguagcug

SEQ ID NO: 1101748 - RNA, 22 nt, Human
cagcuuucaucagugacacuca

SEQ ID NO: 1101749 - RNA, 22 nt, Human
augaaggcuguguggagccccc

SEQ ID NO: 1101750 - RNA, 22 nt, Human
cauuuccacuucugaaaacugg

SEQ ID NO: 1101751 - RNA, 22 nt, Human
gaaauuauugcuagagacugca

SEQ ID NO: 1101752 - RNA, 22 nt, Human
augaggcaguacacacaaagcc

SEQ ID NO: 1101753 - RNA, 22 nt, Human
ucagccagaggcuucuugguuu

SEQ ID NO: 1101754 - RNA, 22 nt, Human
cagcaguguacaaggugucaga

SEQ ID NO: 1101755 - RNA, 22 nt, Human
uaagaaacauuuuuaugacagu

SEQ ID NO: 1101756 - RNA, 22 nt, Human
aguggcaguagaugagcugguu

SEQ ID NO: 1101757 - RNA, 22 nt, Human
guuuugaauacuacuagaacuu

SEQ ID NO: 1101758 - RNA, 22 nt, Human
agauggcagggguaccuggaag

SEQ ID NO: 1101759 - RNA, 22 nt, Human
agcccugaccuguccuguucug

SEQ ID NO: 1101760 - RNA, 22 nt, Human
aaauugcuugagauuagucucc

SEQ ID NO: 1101761 - RNA, 23 nt, Human
agccucuuguggauggucagcga

SEQ ID NO: 1101762 - RNA, 22 nt, Human
caauaauugcuuuccagaguua

SEQ ID NO: 1101763 - RNA, 22 nt, Human
uuccaggccgggcaggaaacac

SEQ ID NO: 1101764 - RNA, 22 nt, Human
uuccauacgacugaggucucgg

SEQ ID NO: 1101765 - RNA, 22 nt, Human
agaaagcacccugcacuuucug

SEQ ID NO: 1101766 - RNA, 22 nt, Human
uucguuuaguccacaaaugcau

SEQ ID NO: 1101767 - RNA, 22 nt, Human
acgugcuggagaagagcucgcc

SEQ ID NO: 1101768 - RNA, 22 nt, Human
auacacauguuauuguggaagc

SEQ ID NO: 1101769 - RNA, 22 nt, Human
aaaagagccacuuaugaccuca

SEQ ID NO: 1101770 - RNA, 22 nt, Human
uccuuggcaugccgucuucucc

SEQ ID NO: 1101771 - RNA, 22 nt, Human
auagucuuagaaucuugagugu

SEQ ID NO: 1101772 - RNA, 22 nt, Human
aucauugaguaaaaugaauaca

SEQ ID NO: 1101773 - RNA, 22 nt, Human
ggaaacauuccaagaguugaaa

SEQ ID NO: 1101774 - RNA, 22 nt, Human
ugccagcaguagcaguaggcca

SEQ ID NO: 1101775 - RNA, 22 nt, Human
uaaguauuggccuauagcuaga

SEQ ID NO: 1101776 - RNA, 22 nt, Human
gagccacaguggauugauucca

SEQ ID NO: 1101777 - RNA, 22 nt, Human
aaagcagaacugagagagcugg

SEQ ID NO: 1101778 - RNA, 22 nt, Human
ugaaauguggagaugguaagua

SEQ ID NO: 1101779 - RNA, 22 nt, Human
aaugugcugguaacugcuuugc

SEQ ID NO: 1101780 - RNA, 22 nt, Human
auuuggucuacauuuuccaaau

SEQ ID NO: 1101781 - RNA, 22 nt, Human
cugaagcugggcacuuccuuuu

SEQ ID NO: 1101782 - RNA, 22 nt, Human
auugagaaaauucgagcaaguu

SEQ ID NO: 1101783 - RNA, 22 nt, Human
ccagcuugcuccucugcaaugg

SEQ ID NO: 1101784 - RNA, 22 nt, Human
agaaaagaggcuuucuaagcau

SEQ ID NO: 1101785 - RNA, 22 nt, Human
aaggaucauguauauguuuaag

SEQ ID NO: 1101786 - RNA, 22 nt, Human
ugcacauggccugagugccuga

SEQ ID NO: 1101787 - RNA, 22 nt, Human
ucacccuucccagcuguccgcc

SEQ ID NO: 1101788 - RNA, 20 nt, Human
cagagcagugcccaggcggc

SEQ ID NO: 1101789 - RNA, 22 nt, Human
auuaguagcacacagagaucag

SEQ ID NO: 1101790 - RNA, 16 nt, Human
ggcagcagcuccgugc

SEQ ID NO: 1101791 - RNA, 22 nt, Human
aacaucuagguucucaucgaua

SEQ ID NO: 1101792 - RNA, 22 nt, Human
uggcaacucaauuucuacaaga

SEQ ID NO: 1101793 - RNA, 22 nt, Human
gcagagcugguacuugagccug

SEQ ID NO: 1101794 - RNA, 22 nt, Human
aagacagugacagucacaauug

SEQ ID NO: 1101795 - RNA, 21 nt, Human
ucuuggggaggagggcugcac

SEQ ID NO: 1101796 - RNA, 22 nt, Human
ugaaaugccuaugaagucagga

SEQ ID NO: 1101797 - RNA, 20 nt, Human
cuuguuaaauaugcagguag

SEQ ID NO: 1101798 - RNA, 21 nt, Human
uaaggaagagcauuuuagguc

SEQ ID NO: 1101799 - RNA, 22 nt, Human
guaauucugugugaaucuauua

SEQ ID NO: 1101800 - RNA, 22 nt, Human
cauggaaggcaaaagacacaga

SEQ ID NO: 1101801 - RNA, 22 nt, Human
gcggggggcaggcaguacguug

SEQ ID NO: 1101802 - RNA, 22 nt, Human
caguauuuaggauuaggagaga

SEQ ID NO: 1101803 - RNA, 22 nt, Human
guguguggaaugcucauuuauu

SEQ ID NO: 1101804 - RNA, 22 nt, Human
uucuuucugggguccuucggcu

SEQ ID NO: 1101805 - RNA, 22 nt, Human
gaaaccuuugccgauggggucc

SEQ ID NO: 1101806 - RNA, 20 nt, Human
ggcagcaaccauaugcuaca

SEQ ID NO: 1101807 - RNA, 22 nt, Human
ucucuuugacccuuuagcucca

SEQ ID NO: 1101808 - RNA, 22 nt, Human
acauuuaaugauccuacuguga

SEQ ID NO: 1101809 - RNA, 19 nt, Human
ggaggcuucuuggggucgg

SEQ ID NO: 1101810 - RNA, 22 nt, Human
gcauuuaaauuugaacuucaga

SEQ ID NO: 1101811 - RNA, 22 nt, Human
acaaguuucauuguuuagaacc

SEQ ID NO: 1101812 - RNA, 22 nt, Human
uuuguucaccuagcaaacuuuu

SEQ ID NO: 1101813 - RNA, 22 nt, Human
augcuugaaaguuauuucauuu

SEQ ID NO: 1101814 - RNA, 22 nt, Human
ccaaaauauuagugcuuaagua

SEQ ID NO: 1101815 - RNA, 22 nt, Human
ugcccucagcagcagcuccugc

SEQ ID NO: 1101816 - RNA, 22 nt, Human
cuuauuagaaagaaaagacaug

SEQ ID NO: 1101817 - RNA, 22 nt, Human
cuucauuaaugucuauaaguuu

SEQ ID NO: 1101818 - RNA, 22 nt, Human
ugguuaaaugcuccgaucuugg

SEQ ID NO: 1101819 - RNA, 22 nt, Human
ucagccaggccaggcauucaca

SEQ ID NO: 1101820 - RNA, 22 nt, Human
ggcugagcuuuucaugaugguu

SEQ ID NO: 1101821 - RNA, 22 nt, Human
caguguuuagcacagugcuugg

SEQ ID NO: 1101822 - RNA, 22 nt, Human
agccacauggaccugaugcuag

SEQ ID NO: 1101823 - RNA, 22 nt, Human
cugagcaugcuacaugcagcac

SEQ ID NO: 1101824 - RNA, 22 nt, Human
uguaauguuagaaacaauugcu

SEQ ID NO: 1101825 - RNA, 19 nt, Human
auagaguagaguaucuguu

SEQ ID NO: 1101826 - RNA, 22 nt, Human
gaaaauaguucaucacaaugau

SEQ ID NO: 1101827 - RNA, 22 nt, Human
ucuaaugcuugacugggggcuu

SEQ ID NO: 1101828 - RNA, 22 nt, Human
ugacauuugagagagauauaca

SEQ ID NO: 1101829 - RNA, 23 nt, Human
ugucuugguuucuucacccuagu

SEQ ID NO: 1101830 - RNA, 22 nt, Human
uuguuuguaaggcucuuagaau

SEQ ID NO: 1101831 - RNA, 22 nt, Human
gguguuguacauucuguggauu

SEQ ID NO: 1101832 - RNA, 22 nt, Human
aagcagcauaugacagcaucca

SEQ ID NO: 1101833 - RNA, 22 nt, Human
caugugguauugugagauccac

SEQ ID NO: 1101834 - RNA, 22 nt, Human
ggcaagaaccucaauuaccuuu

SEQ ID NO: 1101835 - RNA, 22 nt, Human
ggcaauuacguauuagucaugu

SEQ ID NO: 1101836 - RNA, 22 nt, Human
ugaggagcaggguggcuuacuc

SEQ ID NO: 1101837 - RNA, 22 nt, Human
agcaauguuggccuauauaccu

SEQ ID NO: 1101838 - RNA, 22 nt, Human
gcuuucuuuucaagaauguauu

SEQ ID NO: 1101839 - RNA, 22 nt, Human
uuuuuggguccaggcuguaucu

SEQ ID NO: 1101840 - RNA, 18 nt, Human
ccucuggguuuuguuccc

SEQ ID NO: 1101841 - RNA, 22 nt, Human
guguuuugugaggccuucuuuc

SEQ ID NO: 1101842 - RNA, 22 nt, Human
ugaggauggaaugcugugcaag

SEQ ID NO: 1101843 - RNA, 22 nt, Human
augcggagccccaagcuugaag

SEQ ID NO: 1101844 - RNA, 22 nt, Human
ggugaccucaccuggucccacc

SEQ ID NO: 1101845 - RNA, 22 nt, Human
ggcagcagaacuggcccuguau

SEQ ID NO: 1101846 - RNA, 23 nt, Human
cuuuccuuucuuugacacccagc

SEQ ID NO: 1101847 - RNA, 22 nt, Human
aggcuuuugcucuggcuccucu

SEQ ID NO: 1101848 - RNA, 22 nt, Human
aaggcucccucuucucgagugu

SEQ ID NO: 1101849 - RNA, 22 nt, Human
ugugucuuuggcgaugucugga

SEQ ID NO: 1101850 - RNA, 22 nt, Human
gagcagcaggccagguugcagg

SEQ ID NO: 1101851 - RNA, 22 nt, Human
aagcucuuuccacuaaaccacu

SEQ ID NO: 1101852 - RNA, 22 nt, Human
agcaguuuauccucauaaugga

SEQ ID NO: 1101853 - RNA, 18 nt, Human
gcugaaauucuaaacaaa

SEQ ID NO: 1101854 - RNA, 19 nt, Human
cagcaaacacuguaaaugg

SEQ ID NO: 1101855 - RNA, 22 nt, Human
cuugucugcuauaaaaauccag

SEQ ID NO: 1101856 - RNA, 22 nt, Human
agcagcaggagccgugggguga

SEQ ID NO: 1101857 - RNA, 21 nt, Human
ucaggaagagccaguucaugc

SEQ ID NO: 1101858 - RNA, 22 nt, Human
aggcauuuaaagauguaagacu

SEQ ID NO: 1101859 - RNA, 22 nt, Human
uagcagcacuauuuguuguagu

SEQ ID NO: 1101860 - RNA, 22 nt, Human
caauuuuuaaacuaugaaguug

SEQ ID NO: 1101861 - RNA, 22 nt, Human
agcaaauaauugucuuugaggg

SEQ ID NO: 1101862 - RNA, 22 nt, Human
ugugcuauuuuugcauaugugu

SEQ ID NO: 1101863 - RNA, 22 nt, Human
uucacagcuaagagcuaaguaa

SEQ ID NO: 1101864 - RNA, 22 nt, Human
gaaaugucaagauauguuugga

SEQ ID NO: 1101865 - RNA, 22 nt, Human
guuuccuuuuggaauuagagcu

SEQ ID NO: 1101866 - RNA, 22 nt, Human
uagaaguuaaaggaauacagaa

SEQ ID NO: 1101867 - RNA, 22 nt, Human
gaggcugaacagguucucauga

SEQ ID NO: 1101868 - RNA, 22 nt, Human
cuuuggucuccgucaucaauca

SEQ ID NO: 1101869 - RNA, 22 nt, Human
uggccuuggucacaaugcaaac

SEQ ID NO: 1101870 - RNA, 22 nt, Human
cucaggaaaauauugaagaagu

SEQ ID NO: 1101871 - RNA, 22 nt, Human
ucuucaugucucugcuugaguc

SEQ ID NO: 1101872 - RNA, 22 nt, Human
uuauuuaaaagugguaagauuc

SEQ ID NO: 1101873 - RNA, 22 nt, Human
aucauccuagaaggaagcuagg

SEQ ID NO: 1101874 - RNA, 22 nt, Human
gagagaagggggauaugagccu

SEQ ID NO: 1101875 - RNA, 22 nt, Human
aaggcaguuaauuuggcuagaa

SEQ ID NO: 1101876 - RNA, 21 nt, Human
ugucagcaacaauacuuucuc

SEQ ID NO: 1101877 - RNA, 22 nt, Human
cccuugagguagacugaacacc

SEQ ID NO: 1101878 - RNA, 22 nt, Human
gagcaaggaugggucuauagua

SEQ ID NO: 1101879 - RNA, 21 nt, Human
cccuugccugcacuccucggc

SEQ ID NO: 1101880 - RNA, 19 nt, Human
ucuuucauuucuagcucug

SEQ ID NO: 1101881 - RNA, 22 nt, Human
uuguaacaguagcugucagcuc

SEQ ID NO: 1101882 - RNA, 22 nt, Human
caagucugaccucugggugaag

SEQ ID NO: 1101883 - RNA, 22 nt, Human
uguucuggugaggccauggggu

SEQ ID NO: 1101884 - RNA, 20 nt, Human
ccacaguggagacuggagac

SEQ ID NO: 1101885 - RNA, 22 nt, Human
auagcaaaggacaauagucagu

SEQ ID NO: 1101886 - RNA, 22 nt, Human
uaaugccuuaugucaaauguaa

SEQ ID NO: 1101887 - RNA, 22 nt, Human
ugccauagcaaugguaagcuga

SEQ ID NO: 1101888 - RNA, 22 nt, Human
gcagcaaucuucacagugucau

SEQ ID NO: 1101889 - RNA, 22 nt, Human
ugcuuguauucauaucacagcu

SEQ ID NO: 1101890 - RNA, 22 nt, Human
uggccuugcccagcgccuaggu

SEQ ID NO: 1101891 - RNA, 22 nt, Human
acaaucagcacugaguuuaucu

SEQ ID NO: 1101892 - RNA, 22 nt, Human
uaaagcaaugaaaguuuugcag

SEQ ID NO: 1101893 - RNA, 22 nt, Human
agagucaguuaugucaagugcu

SEQ ID NO: 1101894 - RNA, 22 nt, Human
uccucauucuuggugcaucaaa

SEQ ID NO: 1101895 - RNA, 22 nt, Human
uuuugaauaauucagaaacagc

SEQ ID NO: 1101896 - RNA, 22 nt, Human
ugagacaaagcagcugacagaa

SEQ ID NO: 1101897 - RNA, 22 nt, Human
aagcagcacagcaaugacucua

SEQ ID NO: 1101898 - RNA, 22 nt, Human
guggccuccuccguccgccucu

SEQ ID NO: 1101899 - RNA, 22 nt, Human
agcagcaggugaccucgaugcc

SEQ ID NO: 1101900 - RNA, 22 nt, Human
agugaauuagccuauuuguaaa

SEQ ID NO: 1101901 - RNA, 17 nt, Human
agcagcuggguugaucu

SEQ ID NO: 1101902 - RNA, 22 nt, Human
ucuuuuaucuguuguguaacaa

SEQ ID NO: 1101903 - RNA, 22 nt, Human
auuuccuauacaguuguccaua

SEQ ID NO: 1101904 - RNA, 22 nt, Human
uggcugaggcuuuucuuaaaga

SEQ ID NO: 1101905 - RNA, 22 nt, Human
uggcaauguggaaugguccagg

SEQ ID NO: 1101906 - RNA, 22 nt, Human
agccagcauauauauaguugaa

SEQ ID NO: 1101907 - RNA, 22 nt, Human
caaugcagauaccuuccagaga

SEQ ID NO: 1101908 - RNA, 22 nt, Human
acauuguugagccucuuguuca

SEQ ID NO: 1101909 - RNA, 22 nt, Human
agauguuuauaacucaugagug

SEQ ID NO: 1101910 - RNA, 22 nt, Human
uuuguaguuguggaugcugaag

SEQ ID NO: 1101911 - RNA, 22 nt, Human
auugcacaucugcacuacagcc

SEQ ID NO: 1101912 - RNA, 19 nt, Human
ccauucugucucugccaca

SEQ ID NO: 1101913 - RNA, 22 nt, Human
uccuccuuuccccgcuggagcc

SEQ ID NO: 1101914 - RNA, 22 nt, Human
gaauacaaauaauaccaaggug

SEQ ID NO: 1101915 - RNA, 21 nt, Human
cuagaaagaauguugucgucu

SEQ ID NO: 1101916 - RNA, 22 nt, Human
uggcugaggagagggcggaagu

SEQ ID NO: 1101917 - RNA, 22 nt, Human
cugggguccuugccauguguca

SEQ ID NO: 1101918 - RNA, 22 nt, Human
uaacaaaguauuguuuguguau

SEQ ID NO: 1101919 - RNA, 22 nt, Human
ggcuagcuuagagucaugcuag

SEQ ID NO: 1101920 - RNA, 22 nt, Human
cagcagcaggcgcacggccguc

SEQ ID NO: 1101921 - RNA, 22 nt, Human
uuugaaauguaucaguauaggu

SEQ ID NO: 1101922 - RNA, 22 nt, Human
agucaacauuugagaugcaaug

SEQ ID NO: 1101923 - RNA, 22 nt, Human
cagcaguacuucucagagguau

SEQ ID NO: 1101924 - RNA, 22 nt, Human
gaagaaguguaagucuguuuca

SEQ ID NO: 1101925 - RNA, 20 nt, Human
caucaacaccuugucagccu

SEQ ID NO: 1101926 - RNA, 22 nt, Human
uccuuucugucuuuacucugga

SEQ ID NO: 1101927 - RNA, 22 nt, Human
aagaagguugaaugacuacuuu

SEQ ID NO: 1101928 - RNA, 22 nt, Human
auuuacagacguggauuagugc

SEQ ID NO: 1101929 - RNA, 22 nt, Human
uccuggccucugagucaagaac

SEQ ID NO: 1101930 - RNA, 22 nt, Human
agcucuuuuaucaugaggagag

SEQ ID NO: 1101931 - RNA, 22 nt, Human
uaaggacagcagcuacuuuucc

SEQ ID NO: 1101932 - RNA, 22 nt, Human
ccacugcuaacuugcugcagcu

SEQ ID NO: 1101933 - RNA, 22 nt, Human
ccaaacauuucaaauuuagaga

SEQ ID NO: 1101934 - RNA, 22 nt, Human
gucagcaggguccccuugagug

SEQ ID NO: 1101935 - RNA, 23 nt, Human
aacauuuguaaggugauuuuguu

SEQ ID NO: 1101936 - RNA, 23 nt, Human
agcaacagugggugaguguugcu

SEQ ID NO: 1101937 - RNA, 18 nt, Human
uauaaacacacuuagguu

SEQ ID NO: 1101938 - RNA, 22 nt, Human
auugagaaggagauuggcaucu

SEQ ID NO: 1101939 - RNA, 22 nt, Human
guuaacaacacugugagugcug

SEQ ID NO: 1101940 - RNA, 22 nt, Human
ucauugaggaaagguaguggcu

SEQ ID NO: 1101941 - RNA, 22 nt, Human
auggcucugcugggcaaagcaa

SEQ ID NO: 1101942 - RNA, 22 nt, Human
ggaguugacggccgacacccag

SEQ ID NO: 1101943 - RNA, 22 nt, Human
uacaagcuuuuguguauaaaug

SEQ ID NO: 1101944 - RNA, 20 nt, Human
uugaggagauauugaauacu

SEQ ID NO: 1101945 - RNA, 22 nt, Human
gugcugagugcagagugcagag

SEQ ID NO: 1101946 - RNA, 22 nt, Human
uagcauuucacugaucuucacu

SEQ ID NO: 1101947 - RNA, 22 nt, Human
gcaaugagcacccagagggcag

SEQ ID NO: 1101948 - RNA, 22 nt, Human
uuagccaugcccuagaagagga

SEQ ID NO: 1101949 - RNA, 22 nt, Human
uuguccuuaccucaaucuggaa

SEQ ID NO: 1101950 - RNA, 22 nt, Human
aagaauaagaggauuuagaaca

SEQ ID NO: 1101951 - RNA, 22 nt, Human
ggcucucuuaacuggccauccu

SEQ ID NO: 1101952 - RNA, 22 nt, Human
gcagggaaguuguaauguaaug

SEQ ID NO: 1101953 - RNA, 22 nt, Human
cagagcagaaaccugggugauu

SEQ ID NO: 1101954 - RNA, 22 nt, Human
uuugaacuucuaccugucauau

SEQ ID NO: 1101955 - RNA, 22 nt, Human
cucacagcugcuucaggaucca

SEQ ID NO: 1101956 - RNA, 22 nt, Human
aauuagaagcuguuagcaaaau

SEQ ID NO: 1101957 - RNA, 19 nt, Human
ggguccauggugucaagga

SEQ ID NO: 1101958 - RNA, 22 nt, Human
uaaaaguuagcuaggacaaagu

SEQ ID NO: 1101959 - RNA, 22 nt, Human
gguagacugagcuccuugagga

SEQ ID NO: 1101960 - RNA, 22 nt, Human
ugcauguuucuguauguuaaug

SEQ ID NO: 1101961 - RNA, 22 nt, Human
ccugugggagggagcggcugga

SEQ ID NO: 1101962 - RNA, 22 nt, Human
gagaauguuaauguugaaguau

SEQ ID NO: 1101963 - RNA, 22 nt, Human
cuagcagaagcuccuugagggu

SEQ ID NO: 1101964 - RNA, 22 nt, Human
ugagcuucuuuauuuggccaga

SEQ ID NO: 1101965 - RNA, 22 nt, Human
auugugcaccuacugugugcag

SEQ ID NO: 1101966 - RNA, 22 nt, Human
aggcugagccugggcguggugg

SEQ ID NO: 1101967 - RNA, 22 nt, Human
uuccaggacuggguguuugaag

SEQ ID NO: 1101968 - RNA, 22 nt, Human
agugagaguauuaaugugaacu

SEQ ID NO: 1101969 - RNA, 22 nt, Human
uagcugcacaggaaguaagauu

SEQ ID NO: 1101970 - RNA, 22 nt, Human
aaaugcaugugcuauagaugug

SEQ ID NO: 1101971 - RNA, 22 nt, Human
uccuggcccuguggccugcagu

SEQ ID NO: 1101972 - RNA, 22 nt, Human
augcauugaggaugacaugagu

SEQ ID NO: 1101973 - RNA, 22 nt, Human
aagccuucaguccguugcagag

SEQ ID NO: 1101974 - RNA, 22 nt, Human
uggcugaggcacagcugccgcc

SEQ ID NO: 1101975 - RNA, 22 nt, Human
uauuuggugaaucuauggucag

SEQ ID NO: 1101976 - RNA, 22 nt, Human
ucugaaauuuuaguuauagaaa

SEQ ID NO: 1101977 - RNA, 22 nt, Human
auguuguugaacucuuugcaug

SEQ ID NO: 1101978 - RNA, 22 nt, Human
auucuggacaaggcaagcuccu

SEQ ID NO: 1101979 - RNA, 22 nt, Human
gagcagcaucuccggcuuaaag

SEQ ID NO: 1101980 - RNA, 22 nt, Human
caauguuuuuccuuccuuaaua

SEQ ID NO: 1101981 - RNA, 22 nt, Human
aggcuguagaucuagacaugua

SEQ ID NO: 1101982 - RNA, 19 nt, Human
acaguuugggaaaugagca

SEQ ID NO: 1101983 - RNA, 22 nt, Human
aaguuacacauuuucauuguaa

SEQ ID NO: 1101984 - RNA, 22 nt, Human
gauguucgagcagaagaccagg

SEQ ID NO: 1101985 - RNA, 22 nt, Human
uaccaggagcccccuucugguc

SEQ ID NO: 1101986 - RNA, 22 nt, Human
cuguccauggcaaugaugcaga

SEQ ID NO: 1101987 - RNA, 22 nt, Human
ugaaguuguuaagguugccauu

SEQ ID NO: 1101988 - RNA, 22 nt, Human
augaaacaacagacuuggucaa

SEQ ID NO: 1101989 - RNA, 21 nt, Human
gacauugagcgugucgcagug

SEQ ID NO: 1101990 - RNA, 22 nt, Human
cagacucuugagcugauuguau

SEQ ID NO: 1101991 - RNA, 22 nt, Human
cagcagcaacaacggaagccuu

SEQ ID NO: 1101992 - RNA, 22 nt, Human
guggucaucuaacuaaauuuuc

SEQ ID NO: 1101993 - RNA, 21 nt, Human
caaaagagacugauucuugga

SEQ ID NO: 1101994 - RNA, 22 nt, Human
ucuauuaaugauucaauagugu

SEQ ID NO: 1101995 - RNA, 22 nt, Human
ccaccgaaacgucugcggaucc

SEQ ID NO: 1101996 - RNA, 22 nt, Human
cagcacauggauggaguuagga

SEQ ID NO: 1101997 - RNA, 22 nt, Human
gaauguuuaaaaggugcaguuu

SEQ ID NO: 1101998 - RNA, 22 nt, Human
aggauaauaauaaucucguuua

SEQ ID NO: 1101999 - RNA, 22 nt, Human
ccagcuggcccagcugugcucc

SEQ ID NO: 1102000 - RNA, 22 nt, Human
ggcagcaggguagccauuucuc

SEQ ID NO: 1102001 - RNA, 22 nt, Human
aaggcuuguugucacgcucuug

SEQ ID NO: 1102002 - RNA, 22 nt, Human
auuccaaagccugaauaaugga

SEQ ID NO: 1102003 - RNA, 22 nt, Human
cugcugccuuccaaaggccagg

SEQ ID NO: 1102004 - RNA, 19 nt, Human
uggcagcauugguaccuug

SEQ ID NO: 1102005 - RNA, 21 nt, Human
agaaggcaaaagcagacaucu

SEQ ID NO: 1102006 - RNA, 22 nt, Human
uggccuuggcagugagaagagu

SEQ ID NO: 1102007 - RNA, 22 nt, Human
gcagcagugugggcugaaccua

SEQ ID NO: 1102008 - RNA, 22 nt, Human
cagugcaacguugugcauucaa

SEQ ID NO: 1102009 - RNA, 22 nt, Human
guaauagucucaaacuccugga

SEQ ID NO: 1102010 - RNA, 22 nt, Human
aaugagaauguaagugaagaga

SEQ ID NO: 1102011 - RNA, 22 nt, Human
uuuccaaagguggcaggaacaa

SEQ ID NO: 1102012 - RNA, 20 nt, Human
caauaauuuacuucccuauu

SEQ ID NO: 1102013 - RNA, 22 nt, Human
gcuucuggugaggccucaggaa

SEQ ID NO: 1102014 - RNA, 21 nt, Human
acaaauuguuuauauaggaag

SEQ ID NO: 1102015 - RNA, 22 nt, Human
uugcaaauaauagccugaaacu

SEQ ID NO: 1102016 - RNA, 22 nt, Human
cacuguuuuacauguuauuuaa

SEQ ID NO: 1102017 - RNA, 20 nt, Human
gagcagugagccagggaaag

SEQ ID NO: 1102018 - RNA, 22 nt, Human
uaucuguauucugacagucacu

SEQ ID NO: 1102019 - RNA, 22 nt, Human
uaggcuccaguguguggcgagu

SEQ ID NO: 1102020 - RNA, 22 nt, Human
caagaaguugacagccagguga

SEQ ID NO: 1102021 - RNA, 22 nt, Human
gcagagcugucuaagucacuuc

SEQ ID NO: 1102022 - RNA, 22 nt, Human
ucuucaugucaugguauauuga

SEQ ID NO: 1102023 - RNA, 22 nt, Human
gcagugacagacaacuguuuga

SEQ ID NO: 1102024 - RNA, 22 nt, Human
ugucuucuaccuugacagcauu

SEQ ID NO: 1102025 - RNA, 22 nt, Human
augaaaacggaccagagcuauu

SEQ ID NO: 1102026 - RNA, 22 nt, Human
cagcaugaauguguucguaggg

SEQ ID NO: 1102027 - RNA, 22 nt, Human
auguuuguguuucccauucagg

SEQ ID NO: 1102028 - RNA, 22 nt, Human
ccagcagcucccucaggguccg

SEQ ID NO: 1102029 - RNA, 22 nt, Human
ccaggaagaaacagucuuuaua

SEQ ID NO: 1102030 - RNA, 22 nt, Human
aauguuugaacuuugcauauuu

SEQ ID NO: 1102031 - RNA, 22 nt, Human
guuaaaugcagauucugacuca

SEQ ID NO: 1102032 - RNA, 22 nt, Human
agugaaauaugcccauugcugu

SEQ ID NO: 1102033 - RNA, 22 nt, Human
uugcugccagcgcccugcaggg

SEQ ID NO: 1102034 - RNA, 22 nt, Human
cccuugagccuggaggagcucu

SEQ ID NO: 1102035 - RNA, 22 nt, Human
augaugaagcaugguuacacug

SEQ ID NO: 1102036 - RNA, 22 nt, Human
uagaugaacagaaagccacugu

SEQ ID NO: 1102037 - RNA, 22 nt, Human
cauagacauugauagguuauau

SEQ ID NO: 1102038 - RNA, 18 nt, Human
ucagacaaguuagacagg

SEQ ID NO: 1102039 - RNA, 22 nt, Human
uugauguaauacuuugcaacca

SEQ ID NO: 1102040 - RNA, 22 nt, Human
ccauuuguaccauuucuuugua

SEQ ID NO: 1102041 - RNA, 22 nt, Human
aaugucaacacaagagaaaugc

SEQ ID NO: 1102042 - RNA, 22 nt, Human
gagcagcagcugggccagguuc

SEQ ID NO: 1102043 - RNA, 22 nt, Human
cuagcagcauucuucuaguuag

SEQ ID NO: 1102044 - RNA, 22 nt, Human
uucacagcucauacuguucuca

SEQ ID NO: 1102045 - RNA, 22 nt, Human
uggcagcagggccccuggagga

SEQ ID NO: 1102046 - RNA, 22 nt, Human
cucugcguggcugggcccaggg

SEQ ID NO: 1102047 - RNA, 22 nt, Human
aaagcacauuacaagcucaguc

SEQ ID NO: 1102048 - RNA, 22 nt, Human
ugguaaaugucuaacaaucacu

SEQ ID NO: 1102049 - RNA, 20 nt, Human
aaagauacuuuuuguaaugg

SEQ ID NO: 1102050 - RNA, 22 nt, Human
uggaucuugaugcuccaagagu

SEQ ID NO: 1102051 - RNA, 22 nt, Human
cccaggaguaagugacauuguu

SEQ ID NO: 1102052 - RNA, 22 nt, Human
agauaaaguccaaacuguguag

SEQ ID NO: 1102053 - RNA, 22 nt, Human
auguaguauuuggaaauguaaa

SEQ ID NO: 1102054 - RNA, 22 nt, Human
uugggcugcagcaauuauuagu

SEQ ID NO: 1102055 - RNA, 22 nt, Human
uuucauguuggauacuguuuca

SEQ ID NO: 1102056 - RNA, 22 nt, Human
ugcaaauucuuuacucugugau

SEQ ID NO: 1102057 - RNA, 22 nt, Human
ucauuguuucugcuuuucauga

SEQ ID NO: 1102058 - RNA, 22 nt, Human
auccuucaaaaggaauagcagg

SEQ ID NO: 1102059 - RNA, 20 nt, Human
uaugauaauuacaaaauagu

SEQ ID NO: 1102060 - RNA, 22 nt, Human
ccugaaaugaguucugcucacu

SEQ ID NO: 1102061 - RNA, 22 nt, Human
cagagcagcagagcuuccaugg

SEQ ID NO: 1102062 - RNA, 22 nt, Human
ugggcaaaugcuuuuuagucaa

SEQ ID NO: 1102063 - RNA, 22 nt, Human
auggucacuucacccaugagcu

SEQ ID NO: 1102064 - RNA, 17 nt, Human
ugagcaguagaagaugc

SEQ ID NO: 1102065 - RNA, 22 nt, Human
aggcaguuguugcugagcagcu

SEQ ID NO: 1102066 - RNA, 22 nt, Human
augaauaaaacauuuuaaucag

SEQ ID NO: 1102067 - RNA, 22 nt, Human
aaauugaauuugggaaacauug

SEQ ID NO: 1102068 - RNA, 21 nt, Human
auucaaagaagaggaaggccc

SEQ ID NO: 1102069 - RNA, 22 nt, Human
uagcaggacaugugcagagaag

SEQ ID NO: 1102070 - RNA, 18 nt, Human
agcucacagaucuguuuu

SEQ ID NO: 1102071 - RNA, 22 nt, Human
cuucauuuggcaggcuggccuc

SEQ ID NO: 1102072 - RNA, 22 nt, Human
uugagcagaucgggcugugggg

SEQ ID NO: 1102073 - RNA, 22 nt, Human
uggcugaguuacgaacagagca

SEQ ID NO: 1102074 - RNA, 22 nt, Human
cuccccuagcccguugggaggu

SEQ ID NO: 1102075 - RNA, 22 nt, Human
augaaacucuagcuuucagcac

SEQ ID NO: 1102076 - RNA, 22 nt, Human
agugaaaaccuaaucaugcagu

SEQ ID NO: 1102077 - RNA, 22 nt, Human
uagcagaacaauagucaaugau

SEQ ID NO: 1102078 - RNA, 22 nt, Human
gggcugagggguaucucauggg

SEQ ID NO: 1102079 - RNA, 22 nt, Human
uccuggccaaguagauguggcg

SEQ ID NO: 1102080 - RNA, 22 nt, Human
uaagucauagauuaauggccac

SEQ ID NO: 1102081 - RNA, 22 nt, Human
uagcauuuagaacaccuugaga

SEQ ID NO: 1102082 - RNA, 22 nt, Human
gcagcagaaggccaaggggagc

SEQ ID NO: 1102083 - RNA, 22 nt, Human
ugugugaacucucugauguaca

SEQ ID NO: 1102084 - RNA, 22 nt, Human
gaauaauugugaugcuugaagu

SEQ ID NO: 1102085 - RNA, 22 nt, Human
uggcuuccagaacugagcaaca

SEQ ID NO: 1102086 - RNA, 22 nt, Human
auucauucugaccucaagagaa

SEQ ID NO: 1102087 - RNA, 22 nt, Human
ugaauaugugacuuugauuuca

SEQ ID NO: 1102088 - RNA, 22 nt, Human
uaucacauacuucucauccagg

SEQ ID NO: 1102089 - RNA, 22 nt, Human
cagaaagcaguugucaaugggc

SEQ ID NO: 1102090 - RNA, 22 nt, Human
agagaagagucuugucaaauua

SEQ ID NO: 1102091 - RNA, 23 nt, Human
aguacauuugacccaaauaagcu

SEQ ID NO: 1102092 - RNA, 22 nt, Human
auucuugauauagauaguuaau

SEQ ID NO: 1102093 - RNA, 22 nt, Human
ugguuuguauauguuugugaga

SEQ ID NO: 1102094 - RNA, 22 nt, Human
aucaugcagcaacaagcaaggc

SEQ ID NO: 1102095 - RNA, 22 nt, Human
caugcuggucagccaguggaug

SEQ ID NO: 1102096 - RNA, 22 nt, Human
aauacagugaaagugagcaagg

SEQ ID NO: 1102097 - RNA, 22 nt, Human
acagugcugaucuagacugacc

SEQ ID NO: 1102098 - RNA, 18 nt, Human
accugauuggcgcagccc

SEQ ID NO: 1102099 - RNA, 22 nt, Human
ugugaggaccucagcagagucu

SEQ ID NO: 1102100 - RNA, 23 nt, Human
gggcagcuuaagcuuguuuuucu

SEQ ID NO: 1102101 - RNA, 22 nt, Human
uugaggagucaggggcacggaa

SEQ ID NO: 1102102 - RNA, 22 nt, Human
guaugucuuaggguucaguaac

SEQ ID NO: 1102103 - RNA, 22 nt, Human
agugacauuauuuuguguacua

SEQ ID NO: 1102104 - RNA, 22 nt, Human
acagugcuaucaauagcuagaa

SEQ ID NO: 1102105 - RNA, 22 nt, Human
guggccuuuucaaguaggguau

SEQ ID NO: 1102106 - RNA, 22 nt, Human
ucagcacaggucuugcaaaaca

SEQ ID NO: 1102107 - RNA, 22 nt, Human
ugggugaagaggcuaugcuacu

SEQ ID NO: 1102108 - RNA, 22 nt, Human
auugaacauuguucuaggaggc

SEQ ID NO: 1102109 - RNA, 22 nt, Human
acuuuggugcgaagucacuuua

SEQ ID NO: 1102110 - RNA, 22 nt, Human
uuagacaucaagaagccaaugu

SEQ ID NO: 1102111 - RNA, 22 nt, Human
uccugaaggccugaguuccacc

SEQ ID NO: 1102112 - RNA, 22 nt, Human
uagcaucuguacugacauaauc

SEQ ID NO: 1102113 - RNA, 22 nt, Human
guagagcagggagcaggaagcu

SEQ ID NO: 1102114 - RNA, 22 nt, Human
ccacccuuccauucuuccucuu

SEQ ID NO: 1102115 - RNA, 22 nt, Human
gacuggcucuaucaggauaaau

SEQ ID NO: 1102116 - RNA, 22 nt, Human
ugucacagugcacagcuaagaa

SEQ ID NO: 1102117 - RNA, 22 nt, Human
uuagaaaucaccucugaagauc

SEQ ID NO: 1102118 - RNA, 22 nt, Human
uugcugccuuuguacucugaug

SEQ ID NO: 1102119 - RNA, 22 nt, Human
acaguaaucugggaacuuguua

SEQ ID NO: 1102120 - RNA, 22 nt, Human
guugguccuuugagcaagaucc

SEQ ID NO: 1102121 - RNA, 22 nt, Human
uuuugucagugagaacagaguu

SEQ ID NO: 1102122 - RNA, 22 nt, Human
guguggucgaaguucucccgga

SEQ ID NO: 1102123 - RNA, 22 nt, Human
uagcccauggacuggucagcug

SEQ ID NO: 1102124 - RNA, 22 nt, Human
gucaaaacaaaguuaagaauuc

SEQ ID NO: 1102125 - RNA, 22 nt, Human
uguuccucugaacuucuuccaa

SEQ ID NO: 1102126 - RNA, 22 nt, Human
ugugugcacaaagaguacaugg

SEQ ID NO: 1102127 - RNA, 22 nt, Human
uguggguccuccugugugcccg

SEQ ID NO: 1102128 - RNA, 22 nt, Human
ggaagcaaauuccagaaccaca

SEQ ID NO: 1102129 - RNA, 22 nt, Human
aauagcaaaugcucauuugaaa

SEQ ID NO: 1102130 - RNA, 22 nt, Human
uguuaguauuggcaaauuuguu

SEQ ID NO: 1102131 - RNA, 22 nt, Human
gggaaucuuccuuuuuuguaag

SEQ ID NO: 1102132 - RNA, 22 nt, Human
aucagaagaaauggaugugacu

SEQ ID NO: 1102133 - RNA, 22 nt, Human
aaguuugucucauuugaucuuc

SEQ ID NO: 1102134 - RNA, 22 nt, Human
ugaauaaucuuggguauuaaua

SEQ ID NO: 1102135 - RNA, 22 nt, Human
uucuguuuauaauuugcaguug

SEQ ID NO: 1102136 - RNA, 22 nt, Human
aguggcagggacuucauauaaa

SEQ ID NO: 1102137 - RNA, 22 nt, Human
ucauugagcgguucuuaaccca

SEQ ID NO: 1102138 - RNA, 21 nt, Human
uuuguucaggggcaaaguuaa

SEQ ID NO: 1102139 - RNA, 20 nt, Human
uuugauugccccucugacuu

SEQ ID NO: 1102140 - RNA, 23 nt, Human
aaauugucguaagguggagaugu

SEQ ID NO: 1102141 - RNA, 22 nt, Human
cagaaacacuguauuuagggaa

SEQ ID NO: 1102142 - RNA, 18 nt, Human
uagcucuuguugguccau

SEQ ID NO: 1102143 - RNA, 22 nt, Human
aggcugcugccuuggagagugu

SEQ ID NO: 1102144 - RNA, 22 nt, Human
uugcaguuuugacagaccaaau

SEQ ID NO: 1102145 - RNA, 22 nt, Human
uucuuuuaauagagauccugug

SEQ ID NO: 1102146 - RNA, 22 nt, Human
cuuccucuguggccagagugua

SEQ ID NO: 1102147 - RNA, 22 nt, Human
gagauuuccauauuuuguaaca

SEQ ID NO: 1102148 - RNA, 22 nt, Human
cagcuauuguucuguauaauga

SEQ ID NO: 1102149 - RNA, 22 nt, Human
uuuaauuuucugggcccagcag

SEQ ID NO: 1102150 - RNA, 22 nt, Human
gaaggcaagcagcauaaauguc

SEQ ID NO: 1102151 - RNA, 22 nt, Human
uaacauuucggugacaguggga

SEQ ID NO: 1102152 - RNA, 22 nt, Human
uauaagaaacaaggcaaauuuu

SEQ ID NO: 1102153 - RNA, 22 nt, Human
gugcuaugauuggacagaauag

SEQ ID NO: 1102154 - RNA, 22 nt, Human
auaguguguaaagugcagugau

SEQ ID NO: 1102155 - RNA, 22 nt, Human
ccuugcagcauauagagucccu

SEQ ID NO: 1102156 - RNA, 22 nt, Human
caagcagauauuuuagucaaga

SEQ ID NO: 1102157 - RNA, 22 nt, Human
aaagccauaucuauucuauucu

SEQ ID NO: 1102158 - RNA, 22 nt, Human
aucauccauggcugaucauaaa

SEQ ID NO: 1102159 - RNA, 22 nt, Human
agagaagcagggagucaucugu

SEQ ID NO: 1102160 - RNA, 22 nt, Human
ugggugguugcugaggcuccuu

SEQ ID NO: 1102161 - RNA, 22 nt, Human
uggcugagugaacauguccauu

SEQ ID NO: 1102162 - RNA, 22 nt, SARS coronavirus
auugugcagacaccuauuguag

SEQ ID NO: 1102163 - RNA, 20 nt, SARS coronavirus
aauaaauugccagaagcugc

SEQ ID NO: 1102164 - RNA, 22 nt, SARS coronavirus
cacaaggcagaugggcuaugua

SEQ ID NO: 1102165 - RNA, 22 nt, SARS coronavirus
uacuagagcagcaacaaugaga

SEQ ID NO: 1102166 - RNA, 22 nt, SARS coronavirus
uuaacaauuuucuugaacuuac

SEQ ID NO: 1102167 - RNA, 21 nt, SARS coronavirus
uuguccuccacuugcuaggua

SEQ ID NO: 1102168 - RNA, 20 nt, SARS coronavirus
aauaaauugccagaagcugc

SEQ ID NO: 1102169 - RNA, 22 nt, SARS coronavirus
uccaucauuaauaaugcuguuu

SEQ ID NO: 1102170 - RNA, 23 nt, SARS coronavirus
cucacgaauuuugcucacagcau

SEQ ID NO: 1102171 - RNA, 22 nt, SARS coronavirus
cucuuaauggugaagcaaagua

SEQ ID NO: 1102172 - RNA, 22 nt, SARS coronavirus
auugugcagacaccuauuguag

SEQ ID NO: 1102173 - RNA, 20 nt, Human
aaagagcccuuggagcaggc

SEQ ID NO: 1102174 - RNA, 22 nt, Human
gcuugggaagggcccuguguac

SEQ ID NO: 1102175 - RNA, 22 nt, Human
guggcagucgcugacagauaca

SEQ ID NO: 1102176 - RNA, 22 nt, Human
cucugagcagaggccguggcua

SEQ ID NO: 1102177 - RNA, 22 nt, Human
agcacaggaccaaggaagcugu

SEQ ID NO: 1102178 - RNA, 22 nt, Human
ccuggcagcauugguagagauu

SEQ ID NO: 1102179 - RNA, 22 nt, Human
uacacagauaugugaucaauca

SEQ ID NO: 1102180 - RNA, 23 nt, Human
uuggagagggugaguagugucag

SEQ ID NO: 1102181 - RNA, 22 nt, Human
cugagggucaacuugauuguau

SEQ ID NO: 1102182 - RNA, 22 nt, Human
ucuggcagcuauccucuggcca

SEQ ID NO: 1102183 - RNA, 22 nt, Human
cacauaagaaaugaauaugaga

SEQ ID NO: 1102184 - RNA, 22 nt, Human
ucccagccacaguuuccaccug

SEQ ID NO: 1102185 - RNA, 22 nt, Human
uucaguuccauuucaggugggu

SEQ ID NO: 1102186 - RNA, 19 nt, Human
gcuggcagaauuuugaacc

SEQ ID NO: 1102187 - RNA, 21 nt, Human
acauacauaccuuaccaccuu

SEQ ID NO: 1102188 - RNA, 22 nt, Human
ccagcccuugcugaaggguggc

SEQ ID NO: 1102189 - RNA, 22 nt, Human
uggcagggugccaguugcgagu

SEQ ID NO: 1102190 - RNA, 22 nt, Human
uccuggcauccgugggucugug

SEQ ID NO: 1102191 - RNA, 22 nt, Human
auggccugcagugcugccacag

SEQ ID NO: 1102192 - RNA, 22 nt, Human
cacugucccuguuuccuggaaa

SEQ ID NO: 1102193 - RNA, 22 nt, Human
cacccacauuccaucacucugc

SEQ ID NO: 1102194 - RNA, 22 nt, Human
ucuggcaggaccaugaagcgua

SEQ ID NO: 1102195 - RNA, 22 nt, Human
ucuggcagugagcaacuugaca

SEQ ID NO: 1102196 - RNA, 22 nt, Human
gguggcauaagaacacuaaaga

SEQ ID NO: 1102197 - RNA, 22 nt, Human
uggcaguggauaggggagcggu

SEQ ID NO: 1102198 - RNA, 22 nt, Human
ggcacagggggcugaggacuag

SEQ ID NO: 1102199 - RNA, 22 nt, Human
acuccugggugcugaccagcgu

SEQ ID NO: 1102200 - RNA, 22 nt, Human
cccacccugggaagcuaggcag

SEQ ID NO: 1102201 - RNA, 22 nt, Human
uccaggcuccccugcgugcucc

SEQ ID NO: 1102202 - RNA, 22 nt, Human
cucaucaccacauauaacaaag

SEQ ID NO: 1102203 - RNA, 22 nt, Human
acacagaguuugacacauggga

SEQ ID NO: 1102204 - RNA, 22 nt, Human
cacauacauacguauguauaca

SEQ ID NO: 1102205 - RNA, 22 nt, Human
ucuuuuucugcacacguguccc

SEQ ID NO: 1102206 - RNA, 22 nt, Human
uggcgucucucauaaguaugug

SEQ ID NO: 1102207 - RNA, 22 nt, Human
ugguaagaacccaucagagaag

SEQ ID NO: 1102208 - RNA, 22 nt, Human
gcuggcaggauaacuucuaagc

SEQ ID NO: 1102209 - RNA, 22 nt, Human
uguggggaagaguaugacuugg

SEQ ID NO: 1102210 - RNA, 22 nt, Human
ggagccugaaaagucugcauuu

SEQ ID NO: 1102211 - RNA, 22 nt, Human
auaauggccgggggcugaaugc

SEQ ID NO: 1102212 - RNA, 22 nt, Human
cccagcaugcacgcugacacuc

SEQ ID NO: 1102213 - RNA, 23 nt, Human
uccuuccuuugagaggcuccauc

SEQ ID NO: 1102214 - RNA, 22 nt, Human
aggcaguguguagcuggaagag

SEQ ID NO: 1102215 - RNA, 23 nt, Human
uaaauuaccuuuccagugcaggg

SEQ ID NO: 1102216 - RNA, 22 nt, Human
uccugagcacagagacaaggaa

SEQ ID NO: 1102217 - RNA, 22 nt, Human
cuuggcaggguggaggaugcag

SEQ ID NO: 1102218 - RNA, 23 nt, Human
uguaaacaucacccccuggaguu

SEQ ID NO: 1102219 - RNA, 22 nt, Human
gcuggcagagcucugggcuggg

SEQ ID NO: 1102220 - RNA, 20 nt, Human
gauacacagcacagagggcc

SEQ ID NO: 1102221 - RNA, 22 nt, Human
ucuggcagcaagauaacaaugg

SEQ ID NO: 1102222 - RNA, 22 nt, Human
ggagagaauuccauggacaugu

SEQ ID NO: 1102223 - RNA, 22 nt, Human
acccacccuacuagcagugucc

SEQ ID NO: 1102224 - RNA, 22 nt, Human
guccucuguuagaaaugugcuu

SEQ ID NO: 1102225 - RNA, 22 nt, Human
cugcaggacgaccgccucaucu

SEQ ID NO: 1102226 - RNA, 22 nt, Human
gccuggcauauaguaguugugc

SEQ ID NO: 1102227 - RNA, 22 nt, Human
ccccacccucgcuccauuucgg

SEQ ID NO: 1102228 - RNA, 22 nt, Human
gacaaaaguguuuugaacaagg

SEQ ID NO: 1102229 - RNA, 19 nt, Human
uccuggcauuuguaggaaa

SEQ ID NO: 1102230 - RNA, 22 nt, Human
cccacacaaaucauggggagaa

SEQ ID NO: 1102231 - RNA, 22 nt, Human
cccuuccucccaggcuucugug

SEQ ID NO: 1102232 - RNA, 22 nt, Human
cuccucuggguccugguggcca

SEQ ID NO: 1102233 - RNA, 22 nt, Human
cuggccucagagggucauggug

SEQ ID NO: 1102234 - RNA, 22 nt, Human
aauggcagaggcaaagauggua

SEQ ID NO: 1102235 - RNA, 22 nt, Human
ggccucucagggcagagacccu

SEQ ID NO: 1102236 - RNA, 22 nt, Human
uccccaccccagaacuacuagg

SEQ ID NO: 1102237 - RNA, 22 nt, Human
uuggaacaugccgggguccagg

SEQ ID NO: 1102238 - RNA, 22 nt, Human
aacacauauuuauauaugcaca

SEQ ID NO: 1102239 - RNA, 22 nt, Human
cugcaggagcaaagccucugcu

SEQ ID NO: 1102240 - RNA, 22 nt, Human
auguuggagucguaaggcaugg

SEQ ID NO: 1102241 - RNA, 18 nt, Human
uguagagccagguuugcc

SEQ ID NO: 1102242 - RNA, 22 nt, Human
cuccugaggaaaagcuugguca

SEQ ID NO: 1102243 - RNA, 22 nt, Human
cuccuggcacugucuugaccca

SEQ ID NO: 1102244 - RNA, 22 nt, Human
acagguccucaagucagcuggg

SEQ ID NO: 1102245 - RNA, 22 nt, Human
ucccacccccuccaaggaggaa

SEQ ID NO: 1102246 - RNA, 22 nt, Human
gacccauauaggacccuccaaa

SEQ ID NO: 1102247 - RNA, 22 nt, Human
guuaggaacacuggagccuaaa

SEQ ID NO: 1102248 - RNA, 22 nt, Human
gccuggcaggccuguuggggcu

SEQ ID NO: 1102249 - RNA, 22 nt, Human
agggagacacaugaggaaguca

SEQ ID NO: 1102250 - RNA, 22 nt, Human
gacacagagggcaccagauaug

SEQ ID NO: 1102251 - RNA, 22 nt, Human
ucuggcagguucccauguuaug

SEQ ID NO: 1102252 - RNA, 22 nt, Human
ccuccccaugacccggugcugg

SEQ ID NO: 1102253 - RNA, 18 nt, Human
gccugcucugcucucccc

SEQ ID NO: 1102254 - RNA, 22 nt, Human
cacacugucagguaaauaacac

SEQ ID NO: 1102255 - RNA, 22 nt, Human
ccagcccugucaccaacuggag

SEQ ID NO: 1102256 - RNA, 22 nt, Human
acacacacaagcagguugugga

SEQ ID NO: 1102257 - RNA, 22 nt, Human
ccuggcagcgugccgagcugcg

SEQ ID NO: 1102258 - RNA, 22 nt, Human
aaagaucacgucccaggacucg

SEQ ID NO: 1102259 - RNA, 22 nt, Human
gcugcuaagcguuucuguucca

SEQ ID NO: 1102260 - RNA, 22 nt, Human
cggcuggugucgggcacagcaa

SEQ ID NO: 1102261 - RNA, 22 nt, Human
uagacacaucuucauccacaau

SEQ ID NO: 1102262 - RNA, 22 nt, Human
gaggcugcggggaggagccugc

SEQ ID NO: 1102263 - RNA, 22 nt, Human
uggcaguagauccagucucucu

SEQ ID NO: 1102264 - RNA, 22 nt, Human
cuugccucccucagcucacagc

SEQ ID NO: 1102265 - RNA, 22 nt, Human
caucacagaaauaaacauaccu

SEQ ID NO: 1102266 - RNA, 22 nt, Human
auccaggcgaaugcagaaggcc

SEQ ID NO: 1102267 - RNA, 22 nt, Human
ccagugcccagcugcccaggca

SEQ ID NO: 1102268 - RNA, 22 nt, Human
cccacacacauuuaugauagga

SEQ ID NO: 1102269 - RNA, 20 nt, Human
agaggcuuccuugggaggag

SEQ ID NO: 1102270 - RNA, 22 nt, Human
caaauacuacgauucuugcagu

SEQ ID NO: 1102271 - RNA, 22 nt, Human
cacacagaaccgcucgccacuu

SEQ ID NO: 1102272 - RNA, 22 nt, Human
caggaguggugugagggacucc

SEQ ID NO: 1102273 - RNA, 22 nt, Human
cucucuccuuagcugcagacca

SEQ ID NO: 1102274 - RNA, 22 nt, Human
gcuggcagccaagugaagaggg

SEQ ID NO: 1102275 - RNA, 22 nt, Human
ccaggcugggcggggaaccugg

SEQ ID NO: 1102276 - RNA, 22 nt, Human
cuccucuguauugauugggacu

SEQ ID NO: 1102277 - RNA, 22 nt, Human
gcuggcaggagccuuucccuuu

SEQ ID NO: 1102278 - RNA, 22 nt, Human
ugcucuguauucuauggcaguu

SEQ ID NO: 1102279 - RNA, 22 nt, Human
gcuggcagugugaaugacaagc

SEQ ID NO: 1102280 - RNA, 21 nt, Human
ucuggcaguggucuuucaaau

SEQ ID NO: 1102281 - RNA, 22 nt, Human
ucacacaugcuaagccagagau

SEQ ID NO: 1102282 - RNA, 22 nt, Human
ucuccugggaggacaaggaagg

SEQ ID NO: 1102283 - RNA, 22 nt, Human
acacacaugccuuuccuaagua

SEQ ID NO: 1102284 - RNA, 22 nt, Human
uugggaagaauggaggugguua

SEQ ID NO: 1102285 - RNA, 22 nt, Human
ugaguagagaauucagcuaagg

SEQ ID NO: 1102286 - RNA, 22 nt, Human
aaaagagucuuaggcagucaua

SEQ ID NO: 1102287 - RNA, 22 nt, Human
gccuggcaggggccugggagug

SEQ ID NO: 1102288 - RNA, 22 nt, Human
gcugcgccggaucccacguucc

SEQ ID NO: 1102289 - RNA, 22 nt, Human
augacugcucugggcucccaug

SEQ ID NO: 1102290 - RNA, 22 nt, Human
ugccugccucuggcagcccugc

SEQ ID NO: 1102291 - RNA, 22 nt, Human
uccugagcccuguaggacccug

SEQ ID NO: 1102292 - RNA, 22 nt, Human
uuccuggcauagagagggcaca

SEQ ID NO: 1102293 - RNA, 22 nt, Human
guccucuggagguuuuuaggug

SEQ ID NO: 1102294 - RNA, 15 nt, Human
cacacagacagcuug

SEQ ID NO: 1102295 - RNA, 22 nt, Human
acaucccacagaaacauacaua

SEQ ID NO: 1102296 - RNA, 22 nt, Human
acacacuuuaaauuaaaccucu

SEQ ID NO: 1102297 - RNA, 22 nt, Human
cacaacuuuaggaaccacauuc

SEQ ID NO: 1102298 - RNA, 22 nt, Human
ucuggcagcucuccucggcgga

SEQ ID NO: 1102299 - RNA, 22 nt, Human
aucacaauguacguuaaaaugu

SEQ ID NO: 1102300 - RNA, 16 nt, Human
ucacauacuuccuugc

SEQ ID NO: 1102301 - RNA, 19 nt, Human
ccacacagugugcaauuua

SEQ ID NO: 1102302 - RNA, 22 nt, Human
acaggugguaaaauggacuguc

SEQ ID NO: 1102303 - RNA, 22 nt, Human
gaggacucugggcguguauggg

SEQ ID NO: 1102304 - RNA, 22 nt, Human
cccagccuuccacccuggacua

SEQ ID NO: 1102305 - RNA, 22 nt, Human
ugcacaggaggcuguggagaag

SEQ ID NO: 1102306 - RNA, 22 nt, Human
uugggaaguuuaaugacagacu

SEQ ID NO: 1102307 - RNA, 22 nt, Human
ucccagccuuccagucugguuu

SEQ ID NO: 1102308 - RNA, 22 nt, Human
ggccucucugagagcagacguu

SEQ ID NO: 1102309 - RNA, 23 nt, Human
guccucuggagagaaaggcagua

SEQ ID NO: 1102310 - RNA, 22 nt, Human
cacauacuuguguguacauaug

SEQ ID NO: 1102311 - RNA, 22 nt, Human
gccuccuguuaugccaugugcc

SEQ ID NO: 1102312 - RNA, 22 nt, Human
acagguggggcacuuggagccu

SEQ ID NO: 1102313 - RNA, 22 nt, Human
gcuggcagacugggggcagaac

SEQ ID NO: 1102314 - RNA, 22 nt, Human
guccucugggagccuugagccu

SEQ ID NO: 1102315 - RNA, 22 nt, Human
cacaaaaguaggaggcaggcgg

SEQ ID NO: 1102316 - RNA, 22 nt, Human
auggccuggggauuccugagca

SEQ ID NO: 1102317 - RNA, 22 nt, Human
cccagccuacucugccauagca

SEQ ID NO: 1102318 - RNA, 22 nt, Human
gauggccuuguuuucucccuuc

SEQ ID NO: 1102319 - RNA, 22 nt, Human
gaggagcugggacccugucauc

SEQ ID NO: 1102320 - RNA, 22 nt, Human
ucuggcagagugauaggauaag

SEQ ID NO: 1102321 - RNA, 22 nt, Human
cccuuccuugauuuuaacugga

SEQ ID NO: 1102322 - RNA, 22 nt, Human
uuccagcccgcgacuuguucag

SEQ ID NO: 1102323 - RNA, 22 nt, Human
guacacacuauguauuguacac

SEQ ID NO: 1102324 - RNA, 22 nt, Human
cacuguccaugcuugcuaaccc

SEQ ID NO: 1102325 - RNA, 22 nt, Human
gcuggcagguccaagauagagc

SEQ ID NO: 1102326 - RNA, 23 nt, Human
ugagggacaugguggcuucugag

SEQ ID NO: 1102327 - RNA, 22 nt, Human
acagguggccccgagggagugg

SEQ ID NO: 1102328 - RNA, 22 nt, Human
gcacacacaugugaguacaugc

SEQ ID NO: 1102329 - RNA, 22 nt, Human
ggcacagagcuuugucccaguu

SEQ ID NO: 1102330 - RNA, 22 nt, Human
ccuggcaggcuggggacagugc

SEQ ID NO: 1102331 - RNA, 22 nt, Human
ggagcugaaggggugggcucag

SEQ ID NO: 1102332 - RNA, 22 nt, Human
ucuggcaggacaugcugaccau

SEQ ID NO: 1102333 - RNA, 22 nt, Human
ucuggcagagauauccauccca

SEQ ID NO: 1102334 - RNA, 19 nt, Human
gcuggcagauguggccgug

SEQ ID NO: 1102335 - RNA, 22 nt, Human
ucacauacugaaaguccaguga

SEQ ID NO: 1102336 - RNA, 22 nt, Human
uccccacacuuucacuccuggc

SEQ ID NO: 1102337 - RNA, 22 nt, Human
uucccacaguguugaauccucu

SEQ ID NO: 1102338 - RNA, 22 nt, Human
accugccucagugcagcuggau

SEQ ID NO: 1102339 - RNA, 22 nt, Human
ucaggcccuuugcugcugcccc

SEQ ID NO: 1102340 - RNA, 22 nt, Human
aucucccagccacagcauucuu

SEQ ID NO: 1102341 - RNA, 22 nt, Human
ccacauacaaauggggugcugu

SEQ ID NO: 1102342 - RNA, 22 nt, Human
guccucugucccuggggcacgg

SEQ ID NO: 1102343 - RNA, 22 nt, Human
guccuggcugguucuguggggc

SEQ ID NO: 1102344 - RNA, 22 nt, Human
cagugggggggccaugcugcag

SEQ ID NO: 1102345 - RNA, 22 nt, Human
cccgagugucuacucacuccca

SEQ ID NO: 1102346 - RNA, 22 nt, Human
uacacaucccagacucccagga

SEQ ID NO: 1102347 - RNA, 22 nt, Human
cccccaaaguuugcacggauaa

SEQ ID NO: 1102348 - RNA, 22 nt, Human
cuuacacagucuggcacuucuu

SEQ ID NO: 1102349 - RNA, 22 nt, Human
ccugccuucagcccugaagucu

SEQ ID NO: 1102350 - RNA, 22 nt, Human
ucacacacauuugcugucugau

SEQ ID NO: 1102351 - RNA, 22 nt, Human
cccagccugugacagccguccu

SEQ ID NO: 1102352 - RNA, 22 nt, Human
ccuggcagcuaagugcuuugag

SEQ ID NO: 1102353 - RNA, 22 nt, Human
caggacaaagcccuuugagaaa

SEQ ID NO: 1102354 - RNA, 22 nt, Human
gacacagacaguuagagguaau

SEQ ID NO: 1102355 - RNA, 22 nt, Human
ccacagaccuuggcuuccaccu

SEQ ID NO: 1102356 - RNA, 22 nt, Human
uacacagacucuucaauucaga

SEQ ID NO: 1102357 - RNA, 22 nt, Human
ucacacauuucucaaguguagg

SEQ ID NO: 1102358 - RNA, 22 nt, Human
uggcaucuccgacagucuugau

SEQ ID NO: 1102359 - RNA, 22 nt, Human
ccagcccuuagauaaaccuggc

SEQ ID NO: 1102360 - RNA, 22 nt, Human
acuggcaggcugcuggccggcg

SEQ ID NO: 1102361 - RNA, 22 nt, Human
agaggccuccgaaaggugggcu

SEQ ID NO: 1102362 - RNA, 22 nt, Human
acauaaugagcucuuuauaaau

SEQ ID NO: 1102363 - RNA, 22 nt, Human
guccucugaaagaugaaccaug

SEQ ID NO: 1102364 - RNA, 22 nt, Human
ucuggcagaagugcugucagua

SEQ ID NO: 1102365 - RNA, 22 nt, Human
ggcccagccucagacaugcccu

SEQ ID NO: 1102366 - RNA, 22 nt, Human
uacacacagaggccaugggauu

SEQ ID NO: 1102367 - RNA, 22 nt, Human
ugcagagaaaacuccuggguac

SEQ ID NO: 1102368 - RNA, 22 nt, Human
gugugggaaggcuaggaugcug

SEQ ID NO: 1102369 - RNA, 22 nt, Human
gccucaggccgcccugcugcuc

SEQ ID NO: 1102370 - RNA, 22 nt, Human
aagugccaucauagcauggcug

SEQ ID NO: 1102371 - RNA, 22 nt, Human
cugccugcaggacaccucgcua

SEQ ID NO: 1102372 - RNA, 23 nt, Human
ccuggcagcaaacgaggagguua

SEQ ID NO: 1102373 - RNA, 22 nt, Human
ccaccccaaaugaagaccucuc

SEQ ID NO: 1102374 - RNA, 20 nt, Human
ccuggcaggcggguuacuua

SEQ ID NO: 1102375 - RNA, 17 nt, Human
cccaggccgccgggagc

SEQ ID NO: 1102376 - RNA, 22 nt, Human
gcuggcaguguauuguuagcug

SEQ ID NO: 1102377 - RNA, 22 nt, Human
acagaguccuagcugcaaagaa

SEQ ID NO: 1102378 - RNA, 22 nt, Human
ggagcugaggcugaggccucac

SEQ ID NO: 1102379 - RNA, 20 nt, Human
cacaacuguccacaugcucc

SEQ ID NO: 1102380 - RNA, 22 nt, Human
aggcugcuucagcugcagggag

SEQ ID NO: 1102381 - RNA, 22 nt, Human
agaggcuuggaggugcaagguu

SEQ ID NO: 1102382 - RNA, 22 nt, Human
ucccacaccugucuauuccuag

SEQ ID NO: 1102383 - RNA, 21 nt, Human
uucucuccauaugcccagccc

SEQ ID NO: 1102384 - RNA, 22 nt, Human
cugccugcucaccagggcucug

SEQ ID NO: 1102385 - RNA, 22 nt, Human
uacaaaaguaauuacgguuuuu

SEQ ID NO: 1102386 - RNA, 22 nt, Human
cucuccagccuuuagcccacgc

SEQ ID NO: 1102387 - RNA, 22 nt, Human
uggcaguggcucagagugcaga

SEQ ID NO: 1102388 - RNA, 22 nt, Human
gaaaagaguccugugugaggag

SEQ ID NO: 1102389 - RNA, 23 nt, Human
acuccccagucucuucuugccaa

SEQ ID NO: 1102390 - RNA, 20 nt, Human
gagucacagaagaagcugaa

SEQ ID NO: 1102391 - RNA, 22 nt, Human
gccacauagaggaggauauuaa

SEQ ID NO: 1102392 - RNA, 22 nt, Human
aucccacaccccuacaacauau

SEQ ID NO: 1102393 - RNA, 22 nt, Human
acaauucugaugguuucccagu

SEQ ID NO: 1102394 - RNA, 18 nt, Human
acucugcggaggccccag

SEQ ID NO: 1102395 - RNA, 23 nt, Human
uccaggagcaugcuggcuggcga

SEQ ID NO: 1102396 - RNA, 22 nt, Human
aggaggcuguggagcacuccau

SEQ ID NO: 1102397 - RNA, 22 nt, Human
cuggcagucugguggaaggccu

SEQ ID NO: 1102398 - RNA, 22 nt, Human
aaauuacagaucaccaaugcau

SEQ ID NO: 1102399 - RNA, 22 nt, Human
guccucuguagggcugggccac

SEQ ID NO: 1102400 - RNA, 20 nt, Human
cccagccccuaccuguugcc

SEQ ID NO: 1102401 - RNA, 22 nt, Human
uggcagagagacucuccuugau

SEQ ID NO: 1102402 - RNA, 22 nt, Human
gacugccucaguuucccugcag

SEQ ID NO: 1102403 - RNA, 22 nt, Human
ucuggcaggccuugucaaucug

SEQ ID NO: 1102404 - RNA, 22 nt, Human
cucaccccacuaccccuuggug

SEQ ID NO: 1102405 - RNA, 22 nt, Human
auccuggcccagguguggaggg

SEQ ID NO: 1102406 - RNA, 22 nt, Human
ugaccaggauacugcagggaug

SEQ ID NO: 1102407 - RNA, 22 nt, Human
agugccccaugggugccugggg

SEQ ID NO: 1102408 - RNA, 22 nt, Human
ccccacacucuuuacauucaua

SEQ ID NO: 1102409 - RNA, 22 nt, Human
aggccccaaagcagugcaagua

SEQ ID NO: 1102410 - RNA, 22 nt, Human
ccuggcagacugugagggcagg

SEQ ID NO: 1102411 - RNA, 22 nt, Human
acuggcaguagagggagcgcau

SEQ ID NO: 1102412 - RNA, 22 nt, Human
ccuucuucuguguggcccaaga

SEQ ID NO: 1102413 - RNA, 22 nt, Human
uacaaaaggaagagggaucuua

SEQ ID NO: 1102414 - RNA, 22 nt, Human
agccagggucucucgcucuguu

SEQ ID NO: 1102415 - RNA, 22 nt, Human
ucccacacuugaaacaaggcug

SEQ ID NO: 1102416 - RNA, 22 nt, Human
agagucccagggacacuccaga

SEQ ID NO: 1102417 - RNA, 22 nt, Human
cacaauguauauguauaucaaa

SEQ ID NO: 1102418 - RNA, 22 nt, Human
aggcacaggaggugguaagaag

SEQ ID NO: 1102419 - RNA, 22 nt, Human
cacacacuggagcaaggagaug

SEQ ID NO: 1102420 - RNA, 23 nt, Human
acacugucucauggauagacugc

SEQ ID NO: 1102421 - RNA, 22 nt, Human
uugggaagaaacauguccauca

SEQ ID NO: 1102422 - RNA, 22 nt, Human
gcuccaggagagggaagcagau

SEQ ID NO: 1102423 - RNA, 22 nt, Human
guacacacuauuuaaaguguuu

SEQ ID NO: 1102424 - RNA, 22 nt, Human
agacaagaaacugggagucucu

SEQ ID NO: 1102425 - RNA, 18 nt, Human
gacacauccccaggccuc

SEQ ID NO: 1102426 - RNA, 22 nt, Human
uuccaggcuucucuggggcguc

SEQ ID NO: 1102427 - RNA, 22 nt, Human
aggguagggcccggagacagac

SEQ ID NO: 1102428 - RNA, 22 nt, Human
ccuggcagcaggugggcccgug

SEQ ID NO: 1102429 - RNA, 22 nt, Human
acuggcaguuugagaaugcauu

SEQ ID NO: 1102430 - RNA, 22 nt, Human
ucuggcagagucagugcacaca

SEQ ID NO: 1102431 - RNA, 22 nt, Human
gacacauaugcguauaguuuag

SEQ ID NO: 1102432 - RNA, 22 nt, Human
agucuagggugggguccacagg

SEQ ID NO: 1102433 - RNA, 22 nt, Human
agaggccugugugcuccagugg

SEQ ID NO: 1102434 - RNA, 22 nt, Human
aggccacaguacuuugcagacc

SEQ ID NO: 1102435 - RNA, 22 nt, Human
cuguccuccagacgacaguccc

SEQ ID NO: 1102436 - RNA, 21 nt, Human
uccacccucucugcucccagu

SEQ ID NO: 1102437 - RNA, 20 nt, Human
uuccacaucuuugcacaugc

SEQ ID NO: 1102438 - RNA, 22 nt, Human
ccacccuaacaauccuuacugu

SEQ ID NO: 1102439 - RNA, 22 nt, Human
aaagagucaaaggcaugucucu

SEQ ID NO: 1102440 - RNA, 22 nt, Human
auggccugaugcaccuguccca

SEQ ID NO: 1102441 - RNA, 22 nt, Human
gcuggcagggacagcugcgugu

SEQ ID NO: 1102442 - RNA, 22 nt, Human
ugcagagaagaggacaguucua

SEQ ID NO: 1102443 - RNA, 23 nt, Human
aguguugguugggaagccaagca

SEQ ID NO: 1102444 - RNA, 22 nt, Human
uccccaccuaagauacccaucu

SEQ ID NO: 1102445 - RNA, 22 nt, Human
ucccuccccacuucugagcuuu

SEQ ID NO: 1102446 - RNA, 22 nt, Human
uggcaggaaaguaacagagcac

SEQ ID NO: 1102447 - RNA, 22 nt, Human
gguggcagaggugcaucagccc

SEQ ID NO: 1102448 - RNA, 22 nt, Human
uuccuggccccaccccuggaga

SEQ ID NO: 1102449 - RNA, 22 nt, Human
gcuggcagcauuagacccuggg

SEQ ID NO: 1102450 - RNA, 22 nt, Human
ucuggcagcgaagcguguacuu

SEQ ID NO: 1102451 - RNA, 22 nt, Human
ccuggcagacagcacugaagcu

SEQ ID NO: 1102452 - RNA, 22 nt, Human
acacacuguaaggacuaucacu

SEQ ID NO: 1102453 - RNA, 22 nt, Human
gcacacacuguuuuccucacau

SEQ ID NO: 1102454 - RNA, 22 nt, Human
ucccacaugugaauccucaggu

SEQ ID NO: 1102455 - RNA, 22 nt, Human
acuggcagguccaucgcccuuu

SEQ ID NO: 1102456 - RNA, 22 nt, Human
ccacaaaacugugugucaaaga

SEQ ID NO: 1102457 - RNA, 22 nt, Human
ggugccaggcuguagucagggu

SEQ ID NO: 1102458 - RNA, 22 nt, Human
agggcugacaaauggcagugac

SEQ ID NO: 1102459 - RNA, 22 nt, Human
ugagagucuguuccucuugcag

SEQ ID NO: 1102460 - RNA, 22 nt, Human
uguaaacauaccagagccaagu

SEQ ID NO: 1102461 - RNA, 22 nt, Human
acaagagcauugcagguguguu

SEQ ID NO: 1102462 - RNA, 18 nt, Human
acacacacaccuguguau

SEQ ID NO: 1102463 - RNA, 22 nt, Human
ggggcugagucagugggaagag

SEQ ID NO: 1102464 - RNA, 22 nt, Human
cagucccaugagcccagaacau

SEQ ID NO: 1102465 - RNA, 19 nt, Human
gugggacagacauuacaua

SEQ ID NO: 1102466 - RNA, 22 nt, Human
gaggcacauauauacagagccc

SEQ ID NO: 1102467 - RNA, 22 nt, Human
gauggcagguaguggucucauc

SEQ ID NO: 1102468 - RNA, 22 nt, Human
auacaugacucacacauucugc

SEQ ID NO: 1102469 - RNA, 18 nt, Human
aggaaagaaaggcaggug

SEQ ID NO: 1102470 - RNA, 22 nt, Human
cacacaguaggcacucauuaau

SEQ ID NO: 1102471 - RNA, 22 nt, Human
acacacaugguauuguucagaa

SEQ ID NO: 1102472 - RNA, 18 nt, Human
ggccucuggacuggcagc

SEQ ID NO: 1102473 - RNA, 22 nt, Human
uggcagagaacacacaugauuc

SEQ ID NO: 1102474 - RNA, 22 nt, Human
ucccugcccucagugcacccgg

SEQ ID NO: 1102475 - RNA, 22 nt, Human
ccugaccuauuuuucucagcug

SEQ ID NO: 1102476 - RNA, 22 nt, Human
gaugccuggcacccagcaagga

SEQ ID NO: 1102477 - RNA, 22 nt, Human
uccuggcagugcuuguuuugga

SEQ ID NO: 1102478 - RNA, 22 nt, Human
agcagguugugauacacucaga

SEQ ID NO: 1102479 - RNA, 22 nt, Human
cuuggcagagggcugggcucag

SEQ ID NO: 1102480 - RNA, 22 nt, Human
cccagcccccgagugucuggaa

SEQ ID NO: 1102481 - RNA, 22 nt, Human
ggagacucggguucuagccuug

SEQ ID NO: 1102482 - RNA, 22 nt, Human
agacacagucugucuggaggag

SEQ ID NO: 1102483 - RNA, 22 nt, Human
cugagagaucaagccacaggau

SEQ ID NO: 1102484 - RNA, 22 nt, Human
aggacacacagaauacaaaucc

SEQ ID NO: 1102485 - RNA, 20 nt, Human
accccacagaguccauugca

SEQ ID NO: 1102486 - RNA, 22 nt, Human
ccucuccuugcacccgucccgc

SEQ ID NO: 1102487 - RNA, 22 nt, Human
ccuggcagguagcauugaggag

SEQ ID NO: 1102488 - RNA, 22 nt, Human
cccaggccagaacuugguugcu

SEQ ID NO: 1102489 - RNA, 22 nt, Human
agggccccauagucacugcccg

SEQ ID NO: 1102490 - RNA, 22 nt, Human
uauuacagaaucaggcauaacu

SEQ ID NO: 1102491 - RNA, 22 nt, Human
uucuuucaauagcuggcauaug

SEQ ID NO: 1102492 - RNA, 22 nt, Human
ccuggcagguggagguugcagu

SEQ ID NO: 1102493 - RNA, 22 nt, Human
uccugccuguuuaccuguacuu

SEQ ID NO: 1102494 - RNA, 22 nt, Human
gcuccaggcagcauaguggaug

SEQ ID NO: 1102495 - RNA, 22 nt, Human
gcacacaguauaugcucauuaa

SEQ ID NO: 1102496 - RNA, 22 nt, Human
uggcagugggaauggacaaaca

SEQ ID NO: 1102497 - RNA, 22 nt, Human
agagggugcuggagagacauug

SEQ ID NO: 1102498 - RNA, 22 nt, Human
ugccagccagggaagcucaccc

SEQ ID NO: 1102499 - RNA, 22 nt, Human
gaggcacagucccgaggcaagg

SEQ ID NO: 1102500 - RNA, 22 nt, Human
cacacacugacaccuuaucuug

SEQ ID NO: 1102501 - RNA, 22 nt, Human
caggagggcccgagacucuucc

SEQ ID NO: 1102502 - RNA, 22 nt, Human
cugccugccuuggccuccagga

SEQ ID NO: 1102503 - RNA, 22 nt, Human
ucaucacauguguagucauccc

SEQ ID NO: 1102504 - RNA, 22 nt, Human
gccuccuggaagucacauguuu

SEQ ID NO: 1102505 - RNA, 22 nt, Human
gaggcuguuaggagggacucug

SEQ ID NO: 1102506 - RNA, 22 nt, Human
cauucccacguguucuuugcuu

SEQ ID NO: 1102507 - RNA, 22 nt, Human
uccuggcaaagauguugguguu

SEQ ID NO: 1102508 - RNA, 22 nt, Human
cuggcaguuggcauuggcaucu

SEQ ID NO: 1102509 - RNA, 21 nt, Human
ugacugaggcuucuucacaca

SEQ ID NO: 1102510 - RNA, 22 nt, Human
ccaggcuguaagagugauguug

SEQ ID NO: 1102511 - RNA, 22 nt, Human
gcagccucaaacuccccagcuc

SEQ ID NO: 1102512 - RNA, 22 nt, Human
ggccucagagaaggcugugcgg

SEQ ID NO: 1102513 - RNA, 22 nt, Human
gagaaagacguaggcugggagg

SEQ ID NO: 1102514 - RNA, 22 nt, Human
ccucucccgggugccgcugggc

SEQ ID NO: 1102515 - RNA, 22 nt, Human
ucccacacuacacgguuguugg

SEQ ID NO: 1102516 - RNA, 22 nt, Human
uguaaagaaagacgcagaguua

SEQ ID NO: 1102517 - RNA, 22 nt, Human
ucuggcagugauuucugugauc

SEQ ID NO: 1102518 - RNA, 22 nt, Human
aggaagaaccuaagaaagucuc

SEQ ID NO: 1102519 - RNA, 22 nt, Human
auggcagaccuccuggccacaa

SEQ ID NO: 1102520 - RNA, 22 nt, Human
guccacagagggcugggcaggc

SEQ ID NO: 1102521 - RNA, 22 nt, Human
gccuggcacaguagggacccaa

SEQ ID NO: 1102522 - RNA, 22 nt, Human
gcuggcaguuuccucaccgagg

SEQ ID NO: 1102523 - RNA, 22 nt, Human
ccucucagcgauuccucuugga

SEQ ID NO: 1102524 - RNA, 22 nt, Human
cuucccacuaguaucacagagc

SEQ ID NO: 1102525 - RNA, 22 nt, Human
gccuccggagucacagugucuu

SEQ ID NO: 1102526 - RNA, 22 nt, Human
ccuggcagucaggggaguccuu

SEQ ID NO: 1102527 - RNA, 22 nt, Human
ccuugcucaagcuagugacggg

SEQ ID NO: 1102528 - RNA, 22 nt, Human
cagguugguauucaucuccaca

SEQ ID NO: 1102529 - RNA, 22 nt, Human
caugagauaauuuuucuccagu

SEQ ID NO: 1102530 - RNA, 22 nt, Human
auccccacgauauagccaaagc

SEQ ID NO: 1102531 - RNA, 21 nt, Human
aaagagcccgcugagagguuc

SEQ ID NO: 1102532 - RNA, 22 nt, Human
aggcuggauuuauggggacuuc

SEQ ID NO: 1102533 - RNA, 22 nt, Human
cuggccucauagccaagcugug

SEQ ID NO: 1102534 - RNA, 22 nt, Human
ucccaccccggucaagggcuga

SEQ ID NO: 1102535 - RNA, 22 nt, Human
ucaggcccagagucacggaucc

SEQ ID NO: 1102536 - RNA, 22 nt, Human
gcccucucuucugcagccucca

SEQ ID NO: 1102537 - RNA, 22 nt, Human
ugggagaaacugucucucccac

SEQ ID NO: 1102538 - RNA, 22 nt, Human
aagagagagugcgcucacagaa

SEQ ID NO: 1102539 - RNA, 22 nt, Human
cuggcacgcccacguaggcacu

SEQ ID NO: 1102540 - RNA, 22 nt, Human
cccagcccacgguccugggugg

SEQ ID NO: 1102541 - RNA, 22 nt, Human
ucccugccuccuggcagugcca

SEQ ID NO: 1102542 - RNA, 17 nt, Human
agccugccccaugcugc

SEQ ID NO: 1102543 - RNA, 22 nt, Human
cugccugcuuaccaugcaucag

SEQ ID NO: 1102544 - RNA, 22 nt, Human
guccucugcuucaugcccugau

SEQ ID NO: 1102545 - RNA, 22 nt, Human
gcuggcagucccaucagcuggg

SEQ ID NO: 1102546 - RNA, 22 nt, Human
gcuggcagagagcuggugagga

SEQ ID NO: 1102547 - RNA, 22 nt, Human
guccucugggcagcugccccac

SEQ ID NO: 1102548 - RNA, 22 nt, Human
uccccacacagauacagaguag

SEQ ID NO: 1102549 - RNA, 22 nt, Human
cacacacaguuuuguauucugu

SEQ ID NO: 1102550 - RNA, 22 nt, Human
caggauggucucgaucuccuga

SEQ ID NO: 1102551 - RNA, 22 nt, Human
uccaggccauugacugcauccu

SEQ ID NO: 1102552 - RNA, 22 nt, Human
uuccaggccgggcaggaaacac

SEQ ID NO: 1102553 - RNA, 22 nt, Human
gagaaagauuguccuucagggg

SEQ ID NO: 1102554 - RNA, 21 nt, Human
ccuggcagaagccugauaugc

SEQ ID NO: 1102555 - RNA, 22 nt, Human
uggaaagaggaagugcccagca

SEQ ID NO: 1102556 - RNA, 22 nt, Human
uccaggaggaggaaggcugcca

SEQ ID NO: 1102557 - RNA, 22 nt, Human
ggagcugaguucuucagccggg

SEQ ID NO: 1102558 - RNA, 22 nt, Human
uccccacagcagaagaucugag

SEQ ID NO: 1102559 - RNA, 22 nt, Human
agagcacagaagaauaggugcu

SEQ ID NO: 1102560 - RNA, 22 nt, Human
gcuccaggugucccagguaaaa

SEQ ID NO: 1102561 - RNA, 22 nt, Human
guccuggcaccucacuggcuac

SEQ ID NO: 1102562 - RNA, 22 nt, Human
guugggaagcagauggaugagc

SEQ ID NO: 1102563 - RNA, 16 nt, Human
gcacacacaucaauga

SEQ ID NO: 1102564 - RNA, 20 nt, Human
auacacaugcagacagaugc

SEQ ID NO: 1102565 - RNA, 22 nt, Human
acacauuugcauaauaccucau

SEQ ID NO: 1102566 - RNA, 22 nt, Human
aguugggaguuauagacucuau

SEQ ID NO: 1102567 - RNA, 22 nt, Human
uccugagccugacaaucaccau

SEQ ID NO: 1102568 - RNA, 22 nt, Human
cgcugauaaacgucacguuccc

SEQ ID NO: 1102569 - RNA, 22 nt, Human
aaagaaucagaagucucaaaca

SEQ ID NO: 1102570 - RNA, 22 nt, Human
acacucacccucccacugccug

SEQ ID NO: 1102571 - RNA, 22 nt, Human
gcuggcaggagaaacggggugc

SEQ ID NO: 1102572 - RNA, 22 nt, Human
cccagcccaucucaaaggucua

SEQ ID NO: 1102573 - RNA, 22 nt, Human
ucuggcaguaauaggggagaga

SEQ ID NO: 1102574 - RNA, 22 nt, Human
guccucugacucagccuuggga

SEQ ID NO: 1102575 - RNA, 22 nt, Human
cccacacacuggcugcugccaa

SEQ ID NO: 1102576 - RNA, 22 nt, Human
ccuggcagcgccgaagcuggcc

SEQ ID NO: 1102577 - RNA, 22 nt, Human
auggcagauggcuggagcaggu

SEQ ID NO: 1102578 - RNA, 22 nt, Human
agacacauaggaccacacugug

SEQ ID NO: 1102579 - RNA, 22 nt, Human
aggcaggggagcuggaagggua

SEQ ID NO: 1102580 - RNA, 22 nt, Human
cuggccuggggggacacauccc

SEQ ID NO: 1102581 - RNA, 22 nt, Human
cagcacagugaccagacccacu

SEQ ID NO: 1102582 - RNA, 22 nt, Human
ccacaucauggauacaguuaug

SEQ ID NO: 1102583 - RNA, 18 nt, Human
cuccuggcugauggugag

SEQ ID NO: 1102584 - RNA, 22 nt, Human
ccacacuaaacugcucaaacca

SEQ ID NO: 1102585 - RNA, 22 nt, Human
ucacacacauggauaguauuuu

SEQ ID NO: 1102586 - RNA, 22 nt, Human
ccccacccaccuaagagaaacu

SEQ ID NO: 1102587 - RNA, 22 nt, Human
cugccugccacguucagcugua

SEQ ID NO: 1102588 - RNA, 22 nt, Human
acauacacaugaauauauuuuu

SEQ ID NO: 1102589 - RNA, 22 nt, Human
gagccugaugaaacaggcagac

SEQ ID NO: 1102590 - RNA, 22 nt, Human
uauucccagccucuuucuaucu

SEQ ID NO: 1102591 - RNA, 22 nt, Human
uacacagaaccugguguacagu

SEQ ID NO: 1102592 - RNA, 22 nt, Human
uagauacaggcucucugagccu

SEQ ID NO: 1102593 - RNA, 22 nt, Human
ccagcccugccagagagagcug

SEQ ID NO: 1102594 - RNA, 22 nt, Human
ugccugacugcugccaccacua

SEQ ID NO: 1102595 - RNA, 22 nt, Human
acacaucuuagacugaaauaug

SEQ ID NO: 1102596 - RNA, 22 nt, Human
aggaggcuuuugcaggugccac

SEQ ID NO: 1102597 - RNA, 22 nt, Human
aagagcacuaacagagcugaua

SEQ ID NO: 1102598 - RNA, 22 nt, Human
uggcacaguccugggugccugc

SEQ ID NO: 1102599 - RNA, 17 nt, Human
ugcuggcaacauacaaa

SEQ ID NO: 1102600 - RNA, 22 nt, Human
uccuggcacccuuggguuggag

SEQ ID NO: 1102601 - RNA, 22 nt, Human
ucccagccaggcucuaccacuu

SEQ ID NO: 1102602 - RNA, 22 nt, Human
uccucuccaugucucacgccac

SEQ ID NO: 1102603 - RNA, 22 nt, Human
uggaaagagguagaggaucugg

SEQ ID NO: 1102604 - RNA, 22 nt, Human
acacauaagccuaaucaucucc

SEQ ID NO: 1102605 - RNA, 22 nt, Human
gcuggcagagacaagaagacua

SEQ ID NO: 1102606 - RNA, 22 nt, Human
cccuuccugggugucccggagu

SEQ ID NO: 1102607 - RNA, 22 nt, Human
acaucacaguaguuaagccaga

SEQ ID NO: 1102608 - RNA, 22 nt, Human
gguucccggaucuccgaguccc

SEQ ID NO: 1102609 - RNA, 22 nt, Human
guccucugagggggcugcacgc

SEQ ID NO: 1102610 - RNA, 22 nt, Human
acaaauccagugaacuccagug

SEQ ID NO: 1102611 - RNA, 22 nt, Human
ccuggcagcuguuuggcuuggc

SEQ ID NO: 1102612 - RNA, 22 nt, Human
ccuggcagcuccuccccggcgg

SEQ ID NO: 1102613 - RNA, 22 nt, Human
gacucugggcugagccagggcc

SEQ ID NO: 1102614 - RNA, 22 nt, Human
ccucccuucaguagagcccaau

SEQ ID NO: 1102615 - RNA, 22 nt, Human
ucuggcagcaagucuguuucuc

SEQ ID NO: 1102616 - RNA, 22 nt, Human
aggcaguggagcuggaauaggc

SEQ ID NO: 1102617 - RNA, 21 nt, Human
agugccaguagguauggagga

SEQ ID NO: 1102618 - RNA, 22 nt, Human
aagagagaacucccuucgccag

SEQ ID NO: 1102619 - RNA, 22 nt, Human
acuggcagaauugaauaguugu

SEQ ID NO: 1102620 - RNA, 22 nt, Human
acacacagaaggaagccccacu

SEQ ID NO: 1102621 - RNA, 22 nt, Human
gcacacaggcaguuuccagcca

SEQ ID NO: 1102622 - RNA, 22 nt, Human
cuggcaggagcauucacagagg

SEQ ID NO: 1102623 - RNA, 22 nt, Human
ccaucacaguccccaucgugau

SEQ ID NO: 1102624 - RNA, 22 nt, Human
cccacccugggcuacacaucca

SEQ ID NO: 1102625 - RNA, 22 nt, Human
acacauacauggggaagaugag

SEQ ID NO: 1102626 - RNA, 22 nt, Human
cagucacauagguauacacaua

SEQ ID NO: 1102627 - RNA, 22 nt, Human
acaguucccgucuugcacagcu

SEQ ID NO: 1102628 - RNA, 22 nt, Human
cagcccagccuugucucuuuau

SEQ ID NO: 1102629 - RNA, 22 nt, Human
gcccagccuccaagcuccaagg

SEQ ID NO: 1102630 - RNA, 22 nt, Human
gagaggcuggcagugccagguu

SEQ ID NO: 1102631 - RNA, 22 nt, Human
gacuguggggggcggacacaag

SEQ ID NO: 1102632 - RNA, 22 nt, Human
cccugccuugggguccacaccg

SEQ ID NO: 1102633 - RNA, 18 nt, Human
cccacacagcaguagcuc

SEQ ID NO: 1102634 - RNA, 20 nt, Human
aagagucuuuacugagcuaa

SEQ ID NO: 1102635 - RNA, 17 nt, Human
uugggagagaaagguau

SEQ ID NO: 1102636 - RNA, 22 nt, Human
gacacuucaccuuucccagccu

SEQ ID NO: 1102637 - RNA, 17 nt, Human
gccuucucugcccucac

SEQ ID NO: 1102638 - RNA, 22 nt, Human
aaaaagucugcaaaggagguug

SEQ ID NO: 1102639 - RNA, 22 nt, Human
acacagaugcauuacacaucua

SEQ ID NO: 1102640 - RNA, 22 nt, Human
uccuggcagagggcggccucga

SEQ ID NO: 1102641 - RNA, 21 nt, Human
cagcccagcccauugacagug

SEQ ID NO: 1102642 - RNA, 19 nt, Human
acuggcagcuguagucugu

SEQ ID NO: 1102643 - RNA, 22 nt, Human
gacacauagaucuaucucacuc

SEQ ID NO: 1102644 - RNA, 22 nt, Human
uacacaucucugucaguaguga

SEQ ID NO: 1102645 - RNA, 22 nt, Human
aaagaucaauagauaaagcuac

SEQ ID NO: 1102646 - RNA, 22 nt, Human
ucccuccuggccgucaccgcug

SEQ ID NO: 1102647 - RNA, 22 nt, Human
uggccucugugggagcugagca

SEQ ID NO: 1102648 - RNA, 22 nt, Human
ggagcugaaccccaucgugcug

SEQ ID NO: 1102649 - RNA, 22 nt, Human
ucaggcccuucucccaggacuc

SEQ ID NO: 1102650 - RNA, 23 nt, Human
gcccacccucagcguccucacgg

SEQ ID NO: 1102651 - RNA, 22 nt, Human
cccuuccuugugacuggugggg

SEQ ID NO: 1102652 - RNA, 22 nt, Human
cccugccucugaagcugcucag

SEQ ID NO: 1102653 - RNA, 22 nt, Human
acacacuguugcucauccaggc

SEQ ID NO: 1102654 - RNA, 22 nt, Human
cucuccagaauaugccgccgug

SEQ ID NO: 1102655 - RNA, 22 nt, Human
acugccaaugguaguuugaugg

SEQ ID NO: 1102656 - RNA, 22 nt, Human
gaggagcugcagggggagucua

SEQ ID NO: 1102657 - RNA, 22 nt, Human
uaagaacaguagaacaguaggu

SEQ ID NO: 1102658 - RNA, 22 nt, Human
ucuggcaguuugagaaaggcua

SEQ ID NO: 1102659 - RNA, 22 nt, Human
uuccuggccuaagguaggugac

SEQ ID NO: 1102660 - RNA, 22 nt, Human
ugcagagagauccucaggguuu

SEQ ID NO: 1102661 - RNA, 22 nt, Human
auggcagacgaggcagcagggg

SEQ ID NO: 1102662 - RNA, 19 nt, Human
gggagcugaggucuuuggu

SEQ ID NO: 1102663 - RNA, 22 nt, Human
guccucugggcuuugagcaguc

SEQ ID NO: 1102664 - RNA, 22 nt, Human
acacaucucaggggacacucuc

SEQ ID NO: 1102665 - RNA, 22 nt, Human
uccacccugcuuucuuaucucc

SEQ ID NO: 1102666 - RNA, 22 nt, Human
acuggcagagacccugauggcc

SEQ ID NO: 1102667 - RNA, 22 nt, Human
gccuggcaauggccucaggaag

SEQ ID NO: 1102668 - RNA, 22 nt, Human
aaagagucguguuccagguuug

SEQ ID NO: 1102669 - RNA, 22 nt, Human
ccuggcagcccagagcgccgcu

SEQ ID NO: 1102670 - RNA, 22 nt, Human
ugcacaggugagacucaggaag

SEQ ID NO: 1102671 - RNA, 17 nt, Human
uccaggcagcaacugag

SEQ ID NO: 1102672 - RNA, 22 nt, Human
gaaagacuuccuuugagaguac

SEQ ID NO: 1102673 - RNA, 22 nt, Human
gccuggcacucaaucaucugcu

SEQ ID NO: 1102674 - RNA, 22 nt, Human
gcacaggaugauggguugaggg

SEQ ID NO: 1102675 - RNA, 22 nt, Human
uucccacagagauuacauugaa

SEQ ID NO: 1102676 - RNA, 22 nt, Human
cccaggccuggucugggccagu

SEQ ID NO: 1102677 - RNA, 21 nt, Human
cacacagugaucuauccacau

SEQ ID NO: 1102678 - RNA, 22 nt, Human
ggcccagcgaggccaccuacag

SEQ ID NO: 1102679 - RNA, 22 nt, Human
agggacucccugggccgacacg

SEQ ID NO: 1102680 - RNA, 22 nt, Human
aggaggcugcaacccugaggcc

SEQ ID NO: 1102681 - RNA, 20 nt, Human
uucaugggagcaaagaggcc

SEQ ID NO: 1102682 - RNA, 22 nt, Human
uacacaucacuguaucuuucag

SEQ ID NO: 1102683 - RNA, 22 nt, Human
ucccagccuuucuuuucugcug

SEQ ID NO: 1102684 - RNA, 22 nt, Human
uggcagugucuuaucaggagug

SEQ ID NO: 1102685 - RNA, 22 nt, Human
gcuggcagcuggaaguugggcu

SEQ ID NO: 1102686 - RNA, 22 nt, Human
agucacaguuucccugagagag

SEQ ID NO: 1102687 - RNA, 22 nt, Human
gguguugggcucacugguccuu

SEQ ID NO: 1102688 - RNA, 22 nt, Human
gcaguguuuguguucucacaug

SEQ ID NO: 1102689 - RNA, 22 nt, Human
guccucuggaagaugaguucuu

SEQ ID NO: 1102690 - RNA, 22 nt, Human
cacacagacagcucucugaaga

SEQ ID NO: 1102691 - RNA, 21 nt, Human
acacacugaguuuuccacugu

SEQ ID NO: 1102692 - RNA, 22 nt, Human
uggucucugcaggccaggcuca

SEQ ID NO: 1102693 - RNA, 22 nt, Human
agggcugaagggaggugcucau

SEQ ID NO: 1102694 - RNA, 22 nt, Human
gucaggacucugacccgucccg

SEQ ID NO: 1102695 - RNA, 22 nt, Human
uacacauccauguuuugacuuu

SEQ ID NO: 1102696 - RNA, 22 nt, Human
aggggugugcauccuggaggau

SEQ ID NO: 1102697 - RNA, 18 nt, Human
cuccuccacagccccugc

SEQ ID NO: 1102698 - RNA, 22 nt, Human
ucuggcagggucagggcccagg

SEQ ID NO: 1102699 - RNA, 22 nt, Human
uuccuggcgccacggagccggu

SEQ ID NO: 1102700 - RNA, 22 nt, Human
ccacacagucaguuuccaagaa

SEQ ID NO: 1102701 - RNA, 22 nt, Human
uuccuggccaagcagaguggaa

SEQ ID NO: 1102702 - RNA, 22 nt, Human
cccuggcagagggggcaggugc

SEQ ID NO: 1102703 - RNA, 22 nt, Human
cugagcagugguucuugagcgc

SEQ ID NO: 1102704 - RNA, 22 nt, Human
acccacaccuccguauaucacu

SEQ ID NO: 1102705 - RNA, 22 nt, Human
gagggugucugcguaacuggca

SEQ ID NO: 1102706 - RNA, 22 nt, Human
guggcagugaaggucauagcau

SEQ ID NO: 1102707 - RNA, 22 nt, Human
cacccacauggaaauucacagu

SEQ ID NO: 1102708 - RNA, 22 nt, Human
ucacacagcuccuuuccuuagu

SEQ ID NO: 1102709 - RNA, 22 nt, Human
guggcagugggaugcuaucagg

SEQ ID NO: 1102710 - RNA, 22 nt, Human
cgcauacauagaaacacacaga

SEQ ID NO: 1102711 - RNA, 22 nt, Human
uccacccugcuuuugucuuuga

SEQ ID NO: 1102712 - RNA, 22 nt, Human
ucuggcagugaagucaugaggu

SEQ ID NO: 1102713 - RNA, 22 nt, Human
gaagagaaaggcaaggaguuuu

SEQ ID NO: 1102714 - RNA, 23 nt, Human
uugggaaauaguuaagacaugag

SEQ ID NO: 1102715 - RNA, 22 nt, Human
ucuggcagaggaaggaggccug

SEQ ID NO: 1102716 - RNA, 22 nt, Human
gucacaggcaguaacuaggacc

SEQ ID NO: 1102717 - RNA, 22 nt, Human
ucacacacauaaucuaagauua

SEQ ID NO: 1102718 - RNA, 22 nt, Human
gcacacaguagggauucaauga

SEQ ID NO: 1102719 - RNA, 22 nt, Human
gcacauaaagggcaugggaggu

SEQ ID NO: 1102720 - RNA, 22 nt, Human
uuccugccccugagagcuccca

SEQ ID NO: 1102721 - RNA, 22 nt, Human
gaggagcucugcuccauccuuc

SEQ ID NO: 1102722 - RNA, 22 nt, Human
aucacagagcucccuuccacug

SEQ ID NO: 1102723 - RNA, 22 nt, Human
ccaggccucuggcugcuuaguc

SEQ ID NO: 1102724 - RNA, 22 nt, Human
acagguggcuuauuggcugauu

SEQ ID NO: 1102725 - RNA, 22 nt, Human
acaggugguagaguggaaagag

SEQ ID NO: 1102726 - RNA, 22 nt, Human
acuggcagggggagccccgaga

SEQ ID NO: 1102727 - RNA, 22 nt, Human
uuccuggcucacagcagugggg

SEQ ID NO: 1102728 - RNA, 22 nt, Human
acccacacaucucuaauucagu

SEQ ID NO: 1102729 - RNA, 22 nt, Human
uccaggcucuaggcugcucucc

SEQ ID NO: 1102730 - RNA, 22 nt, Human
acacucuguaaugucacacucc

SEQ ID NO: 1102731 - RNA, 22 nt, Human
gccuggcaaggcccuguugacu

SEQ ID NO: 1102732 - RNA, 21 nt, Human
ucacguggucacaugagcuuu

SEQ ID NO: 1102733 - RNA, 22 nt, Human
acaucacagagcccagauaaag

SEQ ID NO: 1102734 - RNA, 22 nt, Human
gacacagagcucacagucuccu

SEQ ID NO: 1102735 - RNA, 22 nt, Human
acuggcagcagcagcccuuggg

SEQ ID NO: 1102736 - RNA, 22 nt, Human
cuccaggccccuggccuucugc

SEQ ID NO: 1102737 - RNA, 22 nt, Human
uuccacauuccuuacauucaua

SEQ ID NO: 1102738 - RNA, 22 nt, Human
gccagguugcugacgacgaucu

SEQ ID NO: 1102739 - RNA, 22 nt, Human
acagacuggccugucucgcacc

SEQ ID NO: 1102740 - RNA, 19 nt, Human
ccuuccuccccagggccau

SEQ ID NO: 1102741 - RNA, 22 nt, Human
agacacagcugcaggagguggg

SEQ ID NO: 1102742 - RNA, 22 nt, Human
auggcagagggauugaacagcu

SEQ ID NO: 1102743 - RNA, 22 nt, Human
cacaucccuggaguuacccagu

SEQ ID NO: 1102744 - RNA, 22 nt, Human
uuggagagauuuaggucucagu

SEQ ID NO: 1102745 - RNA, 20 nt, Human
uggccucugagaugccacgg

SEQ ID NO: 1102746 - RNA, 22 nt, Human
uccugagcugccgcaucagcag

SEQ ID NO: 1102747 - RNA, 22 nt, Human
gaaagaagcuuuagauggcuau

SEQ ID NO: 1102748 - RNA, 22 nt, Human
ccuggcagguggcgcccucggc

SEQ ID NO: 1102749 - RNA, 22 nt, Human
uccaggcuaauuuugcauuguu

SEQ ID NO: 1102750 - RNA, 22 nt, Human
uccuggcauugugcagggugug

SEQ ID NO: 1102751 - RNA, 22 nt, Human
uaaaggguagguuuuacuguaa

SEQ ID NO: 1102752 - RNA, 20 nt, Human
ucuggcaggugaacgagcug

SEQ ID NO: 1102753 - RNA, 22 nt, Human
gacccggcuccaggcccagcag

SEQ ID NO: 1102754 - RNA, 19 nt, Human
uccuggcacaguggaacca

SEQ ID NO: 1102755 - RNA, 22 nt, Human
cuggcaguauuaagagaaguga

SEQ ID NO: 1102756 - RNA, 22 nt, Human
uauguaaaguagauggcaggua

SEQ ID NO: 1102757 - RNA, 22 nt, Human
ucuggcaggguguguauuuaca

SEQ ID NO: 1102758 - RNA, 22 nt, Human
gagagaaaagggggaauugauu

SEQ ID NO: 1102759 - RNA, 22 nt, Human
ugcuccagugccugccccacag

SEQ ID NO: 1102760 - RNA, 22 nt, Human
ucaucacaauuuuaugacccuc

SEQ ID NO: 1102761 - RNA, 22 nt, Human
gcuggcagaauuucuucuugcu

SEQ ID NO: 1102762 - RNA, 22 nt, Human
cuccuggcaguuccccuuguca

SEQ ID NO: 1102763 - RNA, 22 nt, Human
uccuggcagggucuaggucuag

SEQ ID NO: 1102764 - RNA, 22 nt, Human
ccuggcagcuccguggccuucc

SEQ ID NO: 1102765 - RNA, 22 nt, Human
guccuggcccaggaguacacau

SEQ ID NO: 1102766 - RNA, 22 nt, Human
gcacauaacugaccacaucuaa

SEQ ID NO: 1102767 - RNA, 20 nt, Human
acaaagacuggaaaagcaag

SEQ ID NO: 1102768 - RNA, 22 nt, Human
cauuacaaccccaaauuacaaa

SEQ ID NO: 1102769 - RNA, 22 nt, Human
ugcuggcacguggaccaggaga

SEQ ID NO: 1102770 - RNA, 22 nt, Human
ccacacagauaaguguuuucua

SEQ ID NO: 1102771 - RNA, 22 nt, Human
agaggccggccgagcccauggg

SEQ ID NO: 1102772 - RNA, 22 nt, Human
acacauaagaaacuacaaagag

SEQ ID NO: 1102773 - RNA, 22 nt, Human
agaggcuucucggauggggcag

SEQ ID NO: 1102774 - RNA, 22 nt, Human
acuggcagcuguaggaugcaug

SEQ ID NO: 1102775 - RNA, 22 nt, Human
uggccugccacugccacgccac

SEQ ID NO: 1102776 - RNA, 22 nt, Human
agguagggaagaaggcaugaaa

SEQ ID NO: 1102777 - RNA, 22 nt, Human
ggcaaggggucaggcugagaca

SEQ ID NO: 1102778 - RNA, 22 nt, Human
ucuggcaggauaucgaagugaa

SEQ ID NO: 1102779 - RNA, 22 nt, Human
gcccacacaccagcucaggagg

SEQ ID NO: 1102780 - RNA, 22 nt, Human
uggcagagagagugcagucgac

SEQ ID NO: 1102781 - RNA, 22 nt, Human
ugccucucuaacccaugcccaa

SEQ ID NO: 1102782 - RNA, 22 nt, Human
cacagagacagaagcacuuaug

SEQ ID NO: 1102783 - RNA, 22 nt, Human
ugguccugccccgugcacagag

SEQ ID NO: 1102784 - RNA, 22 nt, Human
gccacagguacuaugggagaga

SEQ ID NO: 1102785 - RNA, 20 nt, Human
gcuggcagaugucuugagau

SEQ ID NO: 1102786 - RNA, 21 nt, Human
acacagaggcaucaucacuuu

SEQ ID NO: 1102787 - RNA, 22 nt, Human
cagggacaauggcagagccuga

SEQ ID NO: 1102788 - RNA, 22 nt, Human
gcuggcaggagaccauacccua

SEQ ID NO: 1102789 - RNA, 22 nt, Human
guccucuguguaggcugcagac

SEQ ID NO: 1102790 - RNA, 22 nt, Human
cugagccagggccacacaugga

SEQ ID NO: 1102791 - RNA, 22 nt, Human
ccacacagggggaugaguuauu

SEQ ID NO: 1102792 - RNA, 22 nt, Human
gucacacagggccuccaaauca

SEQ ID NO: 1102793 - RNA, 21 nt, Human
aggcugcuggcucaggguccu

SEQ ID NO: 1102794 - RNA, 19 nt, Human
agaggccucagcagcuggc

SEQ ID NO: 1102795 - RNA, 22 nt, Human
guccucuggugaaagcauuccc

SEQ ID NO: 1102796 - RNA, 22 nt, Human
uguaaacauauguauguaugua

SEQ ID NO: 1102797 - RNA, 22 nt, Human
gacacagaaggucacauguuca

SEQ ID NO: 1102798 - RNA, 22 nt, Human
cugccucuauaggaguccacca

SEQ ID NO: 1102799 - RNA, 22 nt, Human
ucuggcaguggaugagggcagc

SEQ ID NO: 1102800 - RNA, 19 nt, Human
guccucucaacaacccggg

SEQ ID NO: 1102801 - RNA, 22 nt, Human
gcacauacugcaaagauuacua

SEQ ID NO: 1102802 - RNA, 22 nt, Human
guccuggcccacuggcaggcug

SEQ ID NO: 1102803 - RNA, 22 nt, Human
uuccuggcagaggccccgacag

SEQ ID NO: 1102804 - RNA, 20 nt, Human
aaaagagugcuucaacugcu

SEQ ID NO: 1102805 - RNA, 22 nt, Human
ggaggacacuggcucugccuuc

SEQ ID NO: 1102806 - RNA, 22 nt, Human
ccuggcaguggugaagaagagg

SEQ ID NO: 1102807 - RNA, 22 nt, Human
accugccuucucaaggacauga

SEQ ID NO: 1102808 - RNA, 22 nt, Human
uccacacacauuucuaugugca

SEQ ID NO: 1102809 - RNA, 22 nt, Human
agcccagcuuugaaccauauca

SEQ ID NO: 1102810 - RNA, 22 nt, Human
uccaggcuuuuucaugcugucu

SEQ ID NO: 1102811 - RNA, 22 nt, Human
ucuggcagggguucugcacuug

SEQ ID NO: 1102812 - RNA, 22 nt, Human
cagccaagaaccacagacccag

SEQ ID NO: 1102813 - RNA, 19 nt, Human
uggcagguagugagcaguc

SEQ ID NO: 1102814 - RNA, 22 nt, Human
ccuggcagcagcacaugccuuc

SEQ ID NO: 1102815 - RNA, 22 nt, Human
gagacaucauaaugaaguuucc

SEQ ID NO: 1102816 - RNA, 22 nt, Human
agggcugacagugaggagucaa

SEQ ID NO: 1102817 - RNA, 22 nt, Human
ucccaccccuugacucuuuaag

SEQ ID NO: 1102818 - RNA, 22 nt, Human
ucacacagcugacagagccuuu

SEQ ID NO: 1102819 - RNA, 22 nt, Human
cugccugcugcccuccagagcc

SEQ ID NO: 1102820 - RNA, 22 nt, Human
accugccuauggagccacaugg

SEQ ID NO: 1102821 - RNA, 22 nt, Human
guugggaaggugaacaugaugc

SEQ ID NO: 1102822 - RNA, 22 nt, Human
uacauuccuguuagcaucuaag

SEQ ID NO: 1102823 - RNA, 22 nt, Human
ucuccacacuuucucucccagg

SEQ ID NO: 1102824 - RNA, 21 nt, Human
ucuggcaggcacgggcccagc

SEQ ID NO: 1102825 - RNA, 22 nt, Human
cucucugggcccaguuggcacc

SEQ ID NO: 1102826 - RNA, 22 nt, Human
cccacccucaagggugucuaua

SEQ ID NO: 1102827 - RNA, 22 nt, Human
ggcaagagggcagauggagugc

SEQ ID NO: 1102828 - RNA, 22 nt, Human
gacacagaauuuacucccgaua

SEQ ID NO: 1102829 - RNA, 22 nt, Human
gaccugccugagcugccucugc

SEQ ID NO: 1102830 - RNA, 22 nt, Human
guccucuggccuuucccaggac

SEQ ID NO: 1102831 - RNA, 20 nt, Human
cccacacccuucccacuugg

SEQ ID NO: 1102832 - RNA, 22 nt, Human
aguguugggucuuuagaauuua

SEQ ID NO: 1102833 - RNA, 21 nt, Human
agagucugagugugcaagggc

SEQ ID NO: 1102834 - RNA, 22 nt, Human
cuccaggcucguccaagaucga

SEQ ID NO: 1102835 - RNA, 22 nt, Human
ccauucauacaauuuuguucua

SEQ ID NO: 1102836 - RNA, 22 nt, Human
ccuggcugguggcagcgacaag

SEQ ID NO: 1102837 - RNA, 22 nt, Human
gauggccuggguccccuuccgg

SEQ ID NO: 1102838 - RNA, 22 nt, Human
gcacacagcuagauuaccauuc

SEQ ID NO: 1102839 - RNA, 22 nt, Human
auacauucaaaggaaggauaga

SEQ ID NO: 1102840 - RNA, 22 nt, Human
gucuggaaggaggagauggagc

SEQ ID NO: 1102841 - RNA, 19 nt, Human
cugagagaugcuucacaca

SEQ ID NO: 1102842 - RNA, 22 nt, Human
acacacagaguuuauacaggca

SEQ ID NO: 1102843 - RNA, 22 nt, Human
uucccacauucuuuacauucau

SEQ ID NO: 1102844 - RNA, 22 nt, Human
cacacacucuuccuggcaccua

SEQ ID NO: 1102845 - RNA, 22 nt, Human
guacacacuguuugaucauuuc

SEQ ID NO: 1102846 - RNA, 22 nt, Human
aaaagagugacugauaaguaua

SEQ ID NO: 1102847 - RNA, 22 nt, Human
aggccuccagccacaugccagu

SEQ ID NO: 1102848 - RNA, 22 nt, Human
guccucugauuucuagguauau

SEQ ID NO: 1102849 - RNA, 22 nt, Human
gaggcugcuuugaugacaggag

SEQ ID NO: 1102850 - RNA, 22 nt, Human
agaaagaggaugcagaucucau

SEQ ID NO: 1102851 - RNA, 23 nt, Human
uuccaggcagagcagggauuaga

SEQ ID NO: 1102852 - RNA, 22 nt, Human
caauacugaguuuacauucauc

SEQ ID NO: 1102853 - RNA, 22 nt, Human
ccagccucacuggcaucaccua

SEQ ID NO: 1102854 - RNA, 22 nt, Human
guccucugaaguugugcaaugc

SEQ ID NO: 1102855 - RNA, 21 nt, Human
uccuguaagcuuggguggcuc

SEQ ID NO: 1102856 - RNA, 22 nt, Human
gcacacauucggauucuuaacc

SEQ ID NO: 1102857 - RNA, 22 nt, Human
uggcacagggcuuggucgcuca

SEQ ID NO: 1102858 - RNA, 22 nt, Human
ccuccagcgcgauccacuccgg

SEQ ID NO: 1102859 - RNA, 22 nt, Human
aaagaucaaguaggcauggccu

SEQ ID NO: 1102860 - RNA, 22 nt, Human
ucaggagcucuucccuggugug

SEQ ID NO: 1102861 - RNA, 19 nt, Human
guccuggcgccgccacacc

SEQ ID NO: 1102862 - RNA, 22 nt, Human
gagaaagaugaagaguggcguu

SEQ ID NO: 1102863 - RNA, 22 nt, Human
caccagggccccaggcugugcc

SEQ ID NO: 1102864 - RNA, 22 nt, Human
uuccaggcuauccggugaaggg

SEQ ID NO: 1102865 - RNA, 22 nt, Human
cccacacucugagaaaugcuga

SEQ ID NO: 1102866 - RNA, 22 nt, Human
cuggcaguuugccaggagcucg

SEQ ID NO: 1102867 - RNA, 19 nt, Human
ccuugccugucccugcagc

SEQ ID NO: 1102868 - RNA, 22 nt, Human
ggcugaguugagaggauuacuu

SEQ ID NO: 1102869 - RNA, 22 nt, Human
uggccucugggaaagcagauuc

SEQ ID NO: 1102870 - RNA, 22 nt, Human
acuggcagugucguuuacauga

SEQ ID NO: 1102871 - RNA, 21 nt, Human
ccacucaugacuccacucacc

SEQ ID NO: 1102872 - RNA, 22 nt, Human
ccuggcaggccccuccuggauu

SEQ ID NO: 1102873 - RNA, 17 nt, Human
ccauacugacauauuga

SEQ ID NO: 1102874 - RNA, 22 nt, Human
gcuggcaguaaaggguuuggca

SEQ ID NO: 1102875 - RNA, 22 nt, Human
cacacacuguuaauguaggagu

SEQ ID NO: 1102876 - RNA, 21 nt, Human
agaugcugaugcugcaggucc

SEQ ID NO: 1102877 - RNA, 18 nt, Human
uccugccugugccccagg

SEQ ID NO: 1102878 - RNA, 22 nt, Human
ucaucacauaugucaugauuug

SEQ ID NO: 1102879 - RNA, 22 nt, Human
uggcagagcccagacuccaguc

SEQ ID NO: 1102880 - RNA, 22 nt, Human
ggccucucaugcccagagccaa

SEQ ID NO: 1102881 - RNA, 22 nt, Human
ggugccagaguggcccaggggc

SEQ ID NO: 1102882 - RNA, 22 nt, Human
ggagaagaggagcuggaagccu

SEQ ID NO: 1102883 - RNA, 22 nt, Human
auccaggccccaagaccccgac

SEQ ID NO: 1102884 - RNA, 22 nt, Human
aacacauaggcagagcaugaca

SEQ ID NO: 1102885 - RNA, 22 nt, Human
uccaggcaaaaaccaacuacag

SEQ ID NO: 1102886 - RNA, 22 nt, Human
acaucugaggagaccagccucu

SEQ ID NO: 1102887 - RNA, 22 nt, Human
auagggccuaaaaaguauugcu

SEQ ID NO: 1102888 - RNA, 17 nt, Human
uuaagguggaucagcac

SEQ ID NO: 1102889 - RNA, 20 nt, Human
acuggcagccugccugcugu

SEQ ID NO: 1102890 - RNA, 22 nt, Human
uccccacaucucugcaucaggc

SEQ ID NO: 1102891 - RNA, 22 nt, Human
acacacagcgccuaccaugugc

SEQ ID NO: 1102892 - RNA, 22 nt, Human
ccuggcaggacuguuguaagaa

SEQ ID NO: 1102893 - RNA, 22 nt, Human
guccucugcccaggucaagguu

SEQ ID NO: 1102894 - RNA, 22 nt, Human
gcacauacccacugucaagcac

SEQ ID NO: 1102895 - RNA, 22 nt, Human
cuuccucuagccuaguaaugcc

SEQ ID NO: 1102896 - RNA, 22 nt, Human
aaauacugcugcuauuccuuuu

SEQ ID NO: 1102897 - RNA, 22 nt, Human
ccuggcagaaagaguuacaccu

SEQ ID NO: 1102898 - RNA, 22 nt, Human
uccuucccaggugucgccgccu

SEQ ID NO: 1102899 - RNA, 22 nt, Human
caggcuggagugcaauggcaca

SEQ ID NO: 1102900 - RNA, 22 nt, Human
ccuggcagggcugcaguaaugg

SEQ ID NO: 1102901 - RNA, 17 nt, Human
gcccacccuuaggagcu

SEQ ID NO: 1102902 - RNA, 22 nt, Human
gcacacaugcaugcacaggagu

SEQ ID NO: 1102903 - RNA, 22 nt, Human
ugguccuggaagguccugaggg

SEQ ID NO: 1102904 - RNA, 22 nt, Human
gagacacacauucuggagagaa

SEQ ID NO: 1102905 - RNA, 22 nt, Human
gacacagauaucucugagauua

SEQ ID NO: 1102906 - RNA, 22 nt, Human
cccagccuuugcuuccugguuc

SEQ ID NO: 1102907 - RNA, 22 nt, Human
auccucuguggauuacaccuag

SEQ ID NO: 1102908 - RNA, 18 nt, Human
acaggcugugggaauggu

SEQ ID NO: 1102909 - RNA, 22 nt, Human
agcacugugauuuauaacauuu

SEQ ID NO: 1102910 - RNA, 22 nt, Human
ucuggcaguuccuuguugauau

SEQ ID NO: 1102911 - RNA, 22 nt, Human
uuccagccaugguuucccuaug

SEQ ID NO: 1102912 - RNA, 22 nt, Human
ucuggcagcucaguucaggucu

SEQ ID NO: 1102913 - RNA, 22 nt, Human
auuccacacaguaauacucaau

SEQ ID NO: 1102914 - RNA, 19 nt, Human
acuggcagggcugcggugg

SEQ ID NO: 1102915 - RNA, 22 nt, Human
cuccuggcuuucccagaccagg

SEQ ID NO: 1102916 - RNA, 22 nt, Human
gugggagaaauuagcucuaguu

SEQ ID NO: 1102917 - RNA, 22 nt, Human
gaggagcugagccacguccugg

SEQ ID NO: 1102918 - RNA, 22 nt, Human
gccccaccuugagagcagaaac

SEQ ID NO: 1102919 - RNA, 22 nt, Human
acuggcagccacaacuggcagg

SEQ ID NO: 1102920 - RNA, 22 nt, Human
gucacaggccuggaugaggggc

SEQ ID NO: 1102921 - RNA, 21 nt, Human
cccuugccugcacuccucggc

SEQ ID NO: 1102922 - RNA, 22 nt, Human
acaugacuuuucucuuccagag

SEQ ID NO: 1102923 - RNA, 22 nt, Human
acuggcaguggcagcagaaaga

SEQ ID NO: 1102924 - RNA, 22 nt, Human
ucuggcagaaggcagaaauuca

SEQ ID NO: 1102925 - RNA, 22 nt, Human
acacacucaauugcauaagcac

SEQ ID NO: 1102926 - RNA, 22 nt, Human
agcacagggacaaugccaggug

SEQ ID NO: 1102927 - RNA, 22 nt, Human
cuaugagaagaaaacaagauua

SEQ ID NO: 1102928 - RNA, 22 nt, Human
cagcccaaagccccaggcuaga

SEQ ID NO: 1102929 - RNA, 22 nt, Human
aggacaagcuaaaggacuuccu

SEQ ID NO: 1102930 - RNA, 19 nt, Human
acacauuugcacaauccac

SEQ ID NO: 1102931 - RNA, 22 nt, Human
uacugacacaaagccaaucccu

SEQ ID NO: 1102932 - RNA, 21 nt, Human
gggcagaggggccuccugggu

SEQ ID NO: 1102933 - RNA, 22 nt, Human
ccuggcaguuuugcccaggauu

SEQ ID NO: 1102934 - RNA, 19 nt, Human
ccagcccacagugacuuuc

SEQ ID NO: 1102935 - RNA, 22 nt, Human
cagguuggucggcaaguacaca

SEQ ID NO: 1102936 - RNA, 22 nt, Human
uuccaggcucccuuggaggugu

SEQ ID NO: 1102937 - RNA, 22 nt, Human
gaggagcuggcagcgucuccgc

SEQ ID NO: 1102938 - RNA, 22 nt, Human
caggucccugcgccccggccuc

SEQ ID NO: 1102939 - RNA, 22 nt, Human
acuggcagaggauagcacuaau

SEQ ID NO: 1102940 - RNA, 22 nt, Human
cuccaggccauggcugcggagg

SEQ ID NO: 1102941 - RNA, 22 nt, Human
cacaauuuuaauacacagucaa

SEQ ID NO: 1102942 - RNA, 19 nt, Human
cagcccucuuaccacugug

SEQ ID NO: 1102943 - RNA, 22 nt, Human
aacaaaagccgaaguagguguc

SEQ ID NO: 1102944 - RNA, 22 nt, Human
uguuggaauuaggauacagagg

SEQ ID NO: 1102945 - RNA, 22 nt, Human
acuggcagaacuggugauuguc

SEQ ID NO: 1102946 - RNA, 21 nt, Human
ucuggcagcaguuuguugagu

SEQ ID NO: 1102947 - RNA, 22 nt, Human
aggagcugcagauucugccuug

SEQ ID NO: 1102948 - RNA, 22 nt, Human
uggcacucacucucagagucug

SEQ ID NO: 1102949 - RNA, 22 nt, Human
agcacaggcuuuggugugaggg

SEQ ID NO: 1102950 - RNA, 22 nt, Human
uuggaaaguuuuuacugaagac

SEQ ID NO: 1102951 - RNA, 18 nt, Human
ccuggcagccaugcgcgc

SEQ ID NO: 1102952 - RNA, 22 nt, Human
cacacagaugguaagggaggga

SEQ ID NO: 1102953 - RNA, 22 nt, Human
ucccacauuacccugacugaca

SEQ ID NO: 1102954 - RNA, 23 nt, Human
cauccaggagcugagucugacug

SEQ ID NO: 1102955 - RNA, 22 nt, Human
gcacacaggggaguucucagaa

SEQ ID NO: 1102956 - RNA, 22 nt, Human
ccugccucccagagguccucua

SEQ ID NO: 1102957 - RNA, 22 nt, Human
gaggagcucaugaaagcggugu

SEQ ID NO: 1102958 - RNA, 20 nt, Human
ugccuggccuuucucugccc

SEQ ID NO: 1102959 - RNA, 22 nt, Human
caucacagguccugaugacauu

SEQ ID NO: 1102960 - RNA, 22 nt, Human
ucuggcaggcaaucggcucugg

SEQ ID NO: 1102961 - RNA, 22 nt, Human
uccugugccaucucuagagacu

SEQ ID NO: 1102962 - RNA, 19 nt, Human
ucuggcagguaauuaggga

SEQ ID NO: 1102963 - RNA, 22 nt, Human
cacauuccuggugcucagcagc

SEQ ID NO: 1102964 - RNA, 22 nt, Human
guggcaguuuugacaucacaaa

SEQ ID NO: 1102965 - RNA, 22 nt, Human
agggaagaagcugguaguaggu

SEQ ID NO: 1102966 - RNA, 22 nt, Human
cagcccaggccgacaguuccuc

SEQ ID NO: 1102967 - RNA, 22 nt, Human
acacacaugcaugcuugccauu

SEQ ID NO: 1102968 - RNA, 22 nt, Human
uacacaacugacaaccauucug

SEQ ID NO: 1102969 - RNA, 22 nt, Human
gccgggaccaaggccacggagc

SEQ ID NO: 1102970 - RNA, 22 nt, Human
gcuggcagaagagcugguucaa

SEQ ID NO: 1102971 - RNA, 17 nt, Human
ugccagccugucccagg

SEQ ID NO: 1102972 - RNA, 22 nt, Human
uuuaaauuuagaagaaacacug

SEQ ID NO: 1102973 - RNA, 22 nt, Human
aacacagaucaaaauauuuccu

SEQ ID NO: 1102974 - RNA, 22 nt, Human
cccagccucuguuugcuccucu

SEQ ID NO: 1102975 - RNA, 22 nt, Human
ggaggacaggggcugcagcaca

SEQ ID NO: 1102976 - RNA, 22 nt, Human
ccugccuguacuagagacccag

SEQ ID NO: 1102977 - RNA, 22 nt, Human
ggcagugagaggucuccugguc

SEQ ID NO: 1102978 - RNA, 22 nt, Human
ucacacaugaguaaauacaggg

SEQ ID NO: 1102979 - RNA, 22 nt, Human
ggugccagugggucucaggaua

SEQ ID NO: 1102980 - RNA, 22 nt, Human
cacuguccaauagauacauaau

SEQ ID NO: 1102981 - RNA, 22 nt, Human
cuccuggcucgcccccagcuga

SEQ ID NO: 1102982 - RNA, 22 nt, Human
ccccacaccugccgggcagcag

SEQ ID NO: 1102983 - RNA, 22 nt, Human
cuuggcaguuucggaaggauga

SEQ ID NO: 1102984 - RNA, 19 nt, Human
ugccuggcaccagcuccac

SEQ ID NO: 1102985 - RNA, 21 nt, Human
uccugccuuaguccagagcag

SEQ ID NO: 1102986 - RNA, 22 nt, Human
cucagccccaauucuccccauu

SEQ ID NO: 1102987 - RNA, 22 nt, Human
acacacuggcccccaguacuga

SEQ ID NO: 1102988 - RNA, 22 nt, Human
gcccacacagcagauccuuugg

SEQ ID NO: 1102989 - RNA, 20 nt, Human
cugcuccacccggcucucag

SEQ ID NO: 1102990 - RNA, 22 nt, Human
acuggcagaacgugaugcgggu

SEQ ID NO: 1102991 - RNA, 22 nt, Human
ucacauacacuaggauauuuuu

SEQ ID NO: 1102992 - RNA, 22 nt, Human
uggcagugguaccggcucucag

SEQ ID NO: 1102993 - RNA, 22 nt, Human
aguguggcaggaaugacuagaa

SEQ ID NO: 1102994 - RNA, 22 nt, Human
uuccaggcugaugggccacagg

SEQ ID NO: 1102995 - RNA, 22 nt, Human
ccauacacacaccaaauuugua

SEQ ID NO: 1102996 - RNA, 22 nt, Human
ugcagagagaccccugggccag

SEQ ID NO: 1102997 - RNA, 22 nt, Human
gcacucuccuggcugccacagu

SEQ ID NO: 1102998 - RNA, 22 nt, Human
gagaaagauguaggcugggagg

SEQ ID NO: 1102999 - RNA, 22 nt, Human
ugagggacucccggcccugcca

SEQ ID NO: 1103000 - RNA, 22 nt, Human
ucccagccuggacccugccagu

SEQ ID NO: 1103001 - RNA, 20 nt, Human
ucacacaugguaagcuauga

SEQ ID NO: 1103002 - RNA, 22 nt, Human
uccugagcaacacagcuaagug

SEQ ID NO: 1103003 - RNA, 22 nt, Human
ugagagucucagaccuccuggu

SEQ ID NO: 1103004 - RNA, 22 nt, Human
acaucacacgccuuccaggagg

SEQ ID NO: 1103005 - RNA, 22 nt, Human
acuggcagagguuggacaccau

SEQ ID NO: 1103006 - RNA, 22 nt, Human
ccuggcuccugccucugcaggg

SEQ ID NO: 1103007 - RNA, 23 nt, Human
ggacacauuuauuucagaauuca

SEQ ID NO: 1103008 - RNA, 22 nt, Human
gcagggacagggcagggccuuu

SEQ ID NO: 1103009 - RNA, 22 nt, Human
aagagccagcuagugaagaggc

SEQ ID NO: 1103010 - RNA, 22 nt, Human
gcuggcagggugguugagagag

SEQ ID NO: 1103011 - RNA, 22 nt, Human
cacauacaaggcacacuggagg

SEQ ID NO: 1103012 - RNA, 21 nt, Human
ccuagccucuuacccagcuuu

SEQ ID NO: 1103013 - RNA, 22 nt, Human
cacauacauucauguuacucua

SEQ ID NO: 1103014 - RNA, 22 nt, Human
auacacacugcuauccuuuuuu

SEQ ID NO: 1103015 - RNA, 22 nt, Human
uccaggcuagguuuacaggaca

SEQ ID NO: 1103016 - RNA, 22 nt, Human
agcccaggucuggcccagccug

SEQ ID NO: 1103017 - RNA, 22 nt, Human
gccuccggaguugcagugucuu

SEQ ID NO: 1103018 - RNA, 22 nt, Human
cuugggaaugcuaacagaugac

SEQ ID NO: 1103019 - RNA, 22 nt, Human
ccuggcagccucagccaauucu

SEQ ID NO: 1103020 - RNA, 22 nt, Human
uacacacaugcauuugccuuau

SEQ ID NO: 1103021 - RNA, 22 nt, Human
gcuggcagguaaagccccgggg

SEQ ID NO: 1103022 - RNA, 22 nt, Human
gggccccuugcugcucugcugg

SEQ ID NO: 1103023 - RNA, 22 nt, Human
cugccugcucuauccaggccug

SEQ ID NO: 1103024 - RNA, 22 nt, Human
uccuggcagcccgcaggugcug

SEQ ID NO: 1103025 - RNA, 20 nt, Human
gcuccaggucagagaggacg

SEQ ID NO: 1103026 - RNA, 22 nt, Human
cuuacaaauacacuuaggagag

SEQ ID NO: 1103027 - RNA, 22 nt, Human
ucuggcaggucaaucauucuuu

SEQ ID NO: 1103028 - RNA, 22 nt, Human
gcuggcaggguucucacugaaa

SEQ ID NO: 1103029 - RNA, 22 nt, Human
gguuccuucugaggucccugua

SEQ ID NO: 1103030 - RNA, 22 nt, Human
gcuggcaggauagaagucuaau

SEQ ID NO: 1103031 - RNA, 21 nt, Human
aacacauccagaguauuugac

SEQ ID NO: 1103032 - RNA, 22 nt, Human
cccugagcgugaggaggaagua

SEQ ID NO: 1103033 - RNA, 21 nt, Human
gggagggauggaaaugauguu

SEQ ID NO: 1103034 - RNA, 22 nt, Human
cagcccaggucucucuuccagu

SEQ ID NO: 1103035 - RNA, 22 nt, Human
uauucccauuccacuuaucaag

SEQ ID NO: 1103036 - RNA, 19 nt, Human
acuggcaguuucugcaugg

SEQ ID NO: 1103037 - RNA, 22 nt, Human
agcacaggaacauggagauggg

SEQ ID NO: 1103038 - RNA, 22 nt, Human
cagguuggggacuuaggaugac

SEQ ID NO: 1103039 - RNA, 19 nt, Human
ccagucccauacaggagau

SEQ ID NO: 1103040 - RNA, 22 nt, Human
cuccugaggacuucuauugggu

SEQ ID NO: 1103041 - RNA, 22 nt, Human
uccaggcuugagaccaggcucu

SEQ ID NO: 1103042 - RNA, 22 nt, Human
uccaaggcuccggcccuggcgu

SEQ ID NO: 1103043 - RNA, 22 nt, Human
aggaggcugggcacaguggccu

SEQ ID NO: 1103044 - RNA, 22 nt, Human
uacacagauuucaguaucauca

SEQ ID NO: 1103045 - RNA, 22 nt, Human
cacacauuucagaugcuacaau

SEQ ID NO: 1103046 - RNA, 22 nt, Human
ucccugccugacagcacccacc

SEQ ID NO: 1103047 - RNA, 21 nt, Human
guacacacagguggaugggcu

SEQ ID NO: 1103048 - RNA, 22 nt, Human
gcuccaggaggaugaccuuccu

SEQ ID NO: 1103049 - RNA, 22 nt, Human
aucacagagauugcuuuuaaaa

SEQ ID NO: 1103050 - RNA, 23 nt, Human
ucacauaauccuucauccacagg

SEQ ID NO: 1103051 - RNA, 22 nt, Human
cagaaagaccugggcucaagag

SEQ ID NO: 1103052 - RNA, 22 nt, Human
cuccuggcacucaguguggaag

SEQ ID NO: 1103053 - RNA, 22 nt, Human
uggcagagaacacggcugaucu

SEQ ID NO: 1103054 - RNA, 21 nt, Human
ccagcccagcugugucccagc

SEQ ID NO: 1103055 - RNA, 22 nt, Human
ucaggauggagggaagcacaga

SEQ ID NO: 1103056 - RNA, 22 nt, Human
uggccuccccuaacagccucuu

SEQ ID NO: 1103057 - RNA, 22 nt, Human
ucccacacagcccgcucaccgg

SEQ ID NO: 1103058 - RNA, 22 nt, Human
aggaggcugaacuagggucugg

SEQ ID NO: 1103059 - RNA, 22 nt, Human
cagguggguguaugaaugcaaa

SEQ ID NO: 1103060 - RNA, 21 nt, Human
acacacucugagucuucuauu

SEQ ID NO: 1103061 - RNA, 22 nt, Human
gagauggccagugccaggacaa

SEQ ID NO: 1103062 - RNA, 20 nt, Human
ccccacacuauugagcacuu

SEQ ID NO: 1103063 - RNA, 22 nt, Human
cagccaggauggagaacuguug

SEQ ID NO: 1103064 - RNA, 22 nt, Human
ccucugccaccucccacgaggc

SEQ ID NO: 1103065 - RNA, 22 nt, Human
aagaggucauaccagauaaggg

SEQ ID NO: 1103066 - RNA, 20 nt, Human
agggcugagaagggacuagc

SEQ ID NO: 1103067 - RNA, 21 nt, Human
ucacacacguuuccaagggca

SEQ ID NO: 1103068 - RNA, 22 nt, Human
ggcagagguagcuggaaccagg

SEQ ID NO: 1103069 - RNA, 22 nt, Human
cauacauuuauacacaucuaug

SEQ ID NO: 1103070 - RNA, 22 nt, Human
cagacagagucuucccaucagu

SEQ ID NO: 1103071 - RNA, 22 nt, Human
ucacauaaauuuaccagaugau

SEQ ID NO: 1103072 - RNA, 22 nt, Human
uccaggcaagggaggagcaugg

SEQ ID NO: 1103073 - RNA, 22 nt, Human
ccuggcagaauauuaaagugca

SEQ ID NO: 1103074 - RNA, 22 nt, Human
gaggggcuggguagggcaaccc

SEQ ID NO: 1103075 - RNA, 22 nt, Human
ucuggcaguugccgcuucaguc

SEQ ID NO: 1103076 - RNA, 19 nt, Human
acauucccaucagcaaugu

SEQ ID NO: 1103077 - RNA, 22 nt, Human
uacacacuuacuggagaugaag

SEQ ID NO: 1103078 - RNA, 22 nt, Human
acauacacaagcguacaugaac

SEQ ID NO: 1103079 - RNA, 22 nt, Human
ggagucugcucccagacaugau

SEQ ID NO: 1103080 - RNA, 22 nt, Human
uccuggcacuuugggggcucgc

SEQ ID NO: 1103081 - RNA, 22 nt, Human
uccaggcucccucaggaugcac

SEQ ID NO: 1103082 - RNA, 22 nt, Human
gggacaauggaggccucucucc

SEQ ID NO: 1103083 - RNA, 22 nt, Human
cuggcagguuuggugucuggug

SEQ ID NO: 1103084 - RNA, 22 nt, Human
ucuggcagaucuucccacguuu

SEQ ID NO: 1103085 - RNA, 22 nt, Human
gagaccucuugguaucgcuagg

SEQ ID NO: 1103086 - RNA, 22 nt, Human
auuccacagcuacaucaaucua

SEQ ID NO: 1103087 - RNA, 22 nt, Human
ugggacucacucuuuuggccag

SEQ ID NO: 1103088 - RNA, 22 nt, Human
gaggagcuguucccucaccucu

SEQ ID NO: 1103089 - RNA, 22 nt, Human
uugggaucucaaauccagcuau

SEQ ID NO: 1103090 - RNA, 22 nt, Human
ccuucucucugaagaccccaaa

SEQ ID NO: 1103091 - RNA, 22 nt, Human
ucuugggauagugucucauggc

SEQ ID NO: 1103092 - RNA, 22 nt, Human
gggccccuuguaucucuggcuc

SEQ ID NO: 1103093 - RNA, 22 nt, Human
ucccacauaugcaauccugaau

SEQ ID NO: 1103094 - RNA, 22 nt, Human
uccugagcuacaguaguaugau

SEQ ID NO: 1103095 - RNA, 22 nt, Human
ccuggcaguucaucaaauggca

SEQ ID NO: 1103096 - RNA, 22 nt, Human
ccaggcccugcuccucacacca

SEQ ID NO: 1103097 - RNA, 22 nt, Human
cuggccucuguguucaccauag

SEQ ID NO: 1103098 - RNA, 22 nt, Human
aagucguggcaggcuugcacga

SEQ ID NO: 1103099 - RNA, 22 nt, Human
ccuggcagguuacaaccaguua

SEQ ID NO: 1103100 - RNA, 20 nt, Human
ucccucccuccagcucuggg

SEQ ID NO: 1103101 - RNA, 22 nt, Human
acuggcagagggaaaaccauuc

SEQ ID NO: 1103102 - RNA, 22 nt, Human
acagguggaggcuuuaggaggu

SEQ ID NO: 1103103 - RNA, 22 nt, Human
ucccacaggaaaguagacauug

SEQ ID NO: 1103104 - RNA, 22 nt, Human
ugacaggaggcuugaggccagg

SEQ ID NO: 1103105 - RNA, 22 nt, Human
guacacacaaucucuggucagu

SEQ ID NO: 1103106 - RNA, 22 nt, Human
guccucuguuuccaucugacuu

SEQ ID NO: 1103107 - RNA, 23 nt, Human
acauacauggagauaaagugaug

SEQ ID NO: 1103108 - RNA, 22 nt, Human
gccccacagccugcggucucag

SEQ ID NO: 1103109 - RNA, 18 nt, Human
uccuggcagucagagagg

SEQ ID NO: 1103110 - RNA, 22 nt, Human
cuggcaugaaauggcaucucau

SEQ ID NO: 1103111 - RNA, 22 nt, Human
uguaaacagccccauggagagc

SEQ ID NO: 1103112 - RNA, 21 nt, Human
ucuggcaggaagacggauggg

SEQ ID NO: 1103113 - RNA, 22 nt, Human
ucuggcagcagcaucaguggcu

SEQ ID NO: 1103114 - RNA, 22 nt, Human
cacacaucaaccuagacauugu

SEQ ID NO: 1103115 - RNA, 22 nt, Human
uuguaaacugcugcaggagugc

SEQ ID NO: 1103116 - RNA, 22 nt, Human
cuccuggcaggcugagugaaau

SEQ ID NO: 1103117 - RNA, 22 nt, Human
accugccuaucagcugccugcu

SEQ ID NO: 1103118 - RNA, 22 nt, Human
ccaggcccaggguacugaccaa

SEQ ID NO: 1103119 - RNA, 18 nt, Human
ggcagggaaaagauaggg

SEQ ID NO: 1103120 - RNA, 22 nt, Human
cuguccagcuuggcuccugggg

SEQ ID NO: 1103121 - RNA, 22 nt, Human
cacacaucuuaucccaguuauu

SEQ ID NO: 1103122 - RNA, 22 nt, Human
uuccaggcaugucagacauagg

SEQ ID NO: 1103123 - RNA, 22 nt, Human
ccucagcugcuucccuggagcc

SEQ ID NO: 1103124 - RNA, 22 nt, Human
aaagagucuggcacuguaccag

SEQ ID NO: 1103125 - RNA, 22 nt, Human
cccugagcucaggcccuugggg

SEQ ID NO: 1103126 - RNA, 22 nt, Human
uccuggcaguaauuugauguug

SEQ ID NO: 1103127 - RNA, 22 nt, Human
acacaucagaaauaugaaugag

SEQ ID NO: 1103128 - RNA, 18 nt, Human
gacaaaaguacagacaga

SEQ ID NO: 1103129 - RNA, 22 nt, Human
uggcagagucaucacaucugga

SEQ ID NO: 1103130 - RNA, 22 nt, Human
acugagagucaagauagcaugg

SEQ ID NO: 1103131 - RNA, 22 nt, Human
ccuggcaggcaagaggaaggga

SEQ ID NO: 1103132 - RNA, 21 nt, Human
uccccacauuucuaaacagac

SEQ ID NO: 1103133 - RNA, 22 nt, Human
uccugcagccacugcaggcaga

SEQ ID NO: 1103134 - RNA, 22 nt, Human
acacaucaugccaaguuucacc

SEQ ID NO: 1103135 - RNA, 22 nt, Human
ucauggcacuuagcacaguccu

SEQ ID NO: 1103136 - RNA, 22 nt, Human
gccuggcacaggaauuaggagg

SEQ ID NO: 1103137 - RNA, 22 nt, Human
acacacagguaaaggagccugg

SEQ ID NO: 1103138 - RNA, 18 nt, Human
ccuagccuccaagcucau

SEQ ID NO: 1103139 - RNA, 22 nt, Human
uccuggcagaaauggggcugug

SEQ ID NO: 1103140 - RNA, 22 nt, Human
aggaagaacagauaauggacgc

SEQ ID NO: 1103141 - RNA, 22 nt, Human
ccuccuggcuuuucccauugaa

SEQ ID NO: 1103142 - RNA, 22 nt, Human
aggaaagauggaaggaggauaa

SEQ ID NO: 1103143 - RNA, 22 nt, Human
cccacacauuuuucacuuaccg

SEQ ID NO: 1103144 - RNA, 22 nt, Human
ugccugccaugcagaaagcuga

SEQ ID NO: 1103145 - RNA, 17 nt, Human
gcaucacagauaacacg

SEQ ID NO: 1103146 - RNA, 22 nt, Human
uucauugcaguucuucagguua

SEQ ID NO: 1103147 - RNA, 22 nt, Human
guugggaaggcaagaaguagaa

SEQ ID NO: 1103148 - RNA, 22 nt, Human
ucccacccauccugcaucucuu

SEQ ID NO: 1103149 - RNA, 22 nt, Human
ccagguccuguuuucaccacag

SEQ ID NO: 1103150 - RNA, 22 nt, Human
gcccacaccauuuauucuuugu

SEQ ID NO: 1103151 - RNA, 22 nt, Human
cacauacugagaaucacaccca

SEQ ID NO: 1103152 - RNA, 20 nt, Seoul virus
ucauguggaguuugcuauua

SEQ ID NO: 1103153 - RNA, 22 nt, Seoul virus
aaagaugaaauuaugugcaauc

SEQ ID NO: 1103154 - RNA, 22 nt, Human
acacacaugguauuguucagaa

SEQ ID NO: 1103155 - RNA, 22 nt, Human
cacuguccaugcuugcuaaccc

SEQ ID NO: 1103156 - RNA, 22 nt, Human
cuuacacagucuggcacuucuu

SEQ ID NO: 1103157 - RNA, 22 nt, Human
uuccuggcucacagcagugggg

SEQ ID NO: 1103158 - RNA, 22 nt, Human
gcagggacagggcagggccuuu

SEQ ID NO: 1103159 - RNA, 22 nt, Human
cccugccucugaagcugcucag

SEQ ID NO: 1103160 - RNA, 22 nt, Human
ccacacagggggaugaguuauu

SEQ ID NO: 1103161 - RNA, 22 nt, Human
augacugcucugggcucccaug

SEQ ID NO: 1103162 - RNA, 22 nt, Human
gagggugucugcguaacuggca

SEQ ID NO: 1103163 - RNA, 17 nt, Human
uccaggcagcaacugag

SEQ ID NO: 1103164 - RNA, 22 nt, Human
cugccugccacguucagcugua

SEQ ID NO: 1103165 - RNA, 22 nt, Human
ugacaggaggcuugaggccagg

SEQ ID NO: 1103166 - RNA, 20 nt, Human
ucccucccuccagcucuggg

SEQ ID NO: 1103167 - RNA, 22 nt, Human
cccuuccucccaggcuucugug

SEQ ID NO: 1103168 - RNA, 22 nt, Human
ucuggcagagauauccauccca

SEQ ID NO: 1103169 - RNA, 22 nt, Human
gucacaggccuggaugaggggc

SEQ ID NO: 1103170 - RNA, 22 nt, Human
gccuccggaguugcagugucuu

SEQ ID NO: 1103171 - RNA, 22 nt, Human
ugccugccaugcagaaagcuga

SEQ ID NO: 1103172 - RNA, 22 nt, Human
ucacacagcugacagagccuuu

SEQ ID NO: 1103173 - RNA, 21 nt, Human
ucuggcaguggucuuucaaau

SEQ ID NO: 1103174 - RNA, 18 nt, Human
cuccuggcugauggugag

SEQ ID NO: 1103175 - RNA, 22 nt, Human
uucaguuccauuucaggugggu

SEQ ID NO: 1103176 - RNA, 22 nt, Human
gacacagaaggucacauguuca

SEQ ID NO: 1103177 - RNA, 22 nt, Human
agcacaggcuuuggugugaggg

SEQ ID NO: 1103178 - RNA, 22 nt, Human
uccaggcuuuuucaugcugucu

SEQ ID NO: 1103179 - RNA, 22 nt, Human
gaggagcucaugaaagcggugu

SEQ ID NO: 1103180 - RNA, 22 nt, Human
ccuggcagaauauuaaagugca

SEQ ID NO: 1103181 - RNA, 22 nt, Human
uuccaggcaugucagacauagg

SEQ ID NO: 1103182 - RNA, 22 nt, Human
cuggcagguuuggugucuggug

SEQ ID NO: 1103183 - RNA, 22 nt, Human
cacauuccuggugcucagcagc

SEQ ID NO: 1103184 - RNA, 20 nt, Human
accccacagaguccauugca

SEQ ID NO: 1103185 - RNA, 22 nt, Human
aagagcacuaacagagcugaua

SEQ ID NO: 1103186 - RNA, 22 nt, Human
gcuggcagagacaagaagacua

SEQ ID NO: 1103187 - RNA, 22 nt, Human
ccagcccugccagagagagcug

SEQ ID NO: 1103188 - RNA, 22 nt, Human
uacacacagaggccaugggauu

SEQ ID NO: 1103189 - RNA, 22 nt, Human
uuggaaaguuuuuacugaagac

SEQ ID NO: 1103190 - RNA, 22 nt, Human
ccaccccaaaugaagaccucuc

SEQ ID NO: 1103191 - RNA, 22 nt, Human
ccucugccaccucccacgaggc

SEQ ID NO: 1103192 - RNA, 22 nt, Human
acuggcaguggcagcagaaaga

SEQ ID NO: 1103193 - RNA, 22 nt, Human
gcacacauucggauucuuaacc

SEQ ID NO: 1103194 - RNA, 22 nt, Human
cccagcccaucucaaaggucua

SEQ ID NO: 1103195 - RNA, 22 nt, Human
cugccugcuuaccaugcaucag

SEQ ID NO: 1103196 - RNA, 22 nt, Human
gccacagguacuaugggagaga

SEQ ID NO: 1103197 - RNA, 22 nt, Human
cagcccagccuugucucuuuau

SEQ ID NO: 1103198 - RNA, 22 nt, Human
acacagaguuugacacauggga

SEQ ID NO: 1103199 - RNA, 22 nt, Human
agguagggaagaaggcaugaaa

SEQ ID NO: 1103200 - RNA, 22 nt, Human
cgcauacauagaaacacacaga

SEQ ID NO: 1103201 - RNA, 22 nt, Human
agucacaguuucccugagagag

SEQ ID NO: 1103202 - RNA, 22 nt, Human
guugggaaggugaacaugaugc

SEQ ID NO: 1103203 - RNA, 22 nt, Human
auggccugaugcaccuguccca

SEQ ID NO: 1103204 - RNA, 22 nt, Human
ucacacacauuugcugucugau

SEQ ID NO: 1103205 - RNA, 22 nt, Human
gcuggcaggguucucacugaaa

SEQ ID NO: 1103206 - RNA, 20 nt, Human
aaaagagugcuucaacugcu

SEQ ID NO: 1103207 - RNA, 22 nt, Human
guacacacuauuuaaaguguuu

SEQ ID NO: 1103208 - RNA, 18 nt, Human
gacaaaaguacagacaga

SEQ ID NO: 1103209 - RNA, 22 nt, Human
cauucccacguguucuuugcuu

SEQ ID NO: 1103210 - RNA, 22 nt, Human
cuggccucagagggucauggug

SEQ ID NO: 1103211 - RNA, 22 nt, Human
cuccuggcaggcugagugaaau

SEQ ID NO: 1103212 - RNA, 22 nt, Human
ccacccuaacaauccuuacugu

SEQ ID NO: 1103213 - RNA, 22 nt, Human
agcagguugugauacacucaga

SEQ ID NO: 1103214 - RNA, 22 nt, Human
cuggcacgcccacguaggcacu

SEQ ID NO: 1103215 - RNA, 22 nt, Human
ggagcugaggcugaggccucac

SEQ ID NO: 1103216 - RNA, 22 nt, Human
cacccacauggaaauucacagu

SEQ ID NO: 1103217 - RNA, 18 nt, Human
ggcagggaaaagauaggg

SEQ ID NO: 1103218 - RNA, 22 nt, Human
gcacacaguauaugcucauuaa

SEQ ID NO: 1103219 - RNA, 19 nt, Human
agaggccucagcagcuggc

SEQ ID NO: 1103220 - RNA, 22 nt, Human
aggccacaguacuuugcagacc

SEQ ID NO: 1103221 - RNA, 20 nt, Human
cccagccccuaccuguugcc

SEQ ID NO: 1103222 - RNA, 22 nt, Human
uacacagaaccugguguacagu

SEQ ID NO: 1103223 - RNA, 22 nt, Human
uguuggaauuaggauacagagg

SEQ ID NO: 1103224 - RNA, 22 nt, Human
acacauaagaaacuacaaagag

SEQ ID NO: 1103225 - RNA, 22 nt, Human
gcacacacuguuuuccucacau

SEQ ID NO: 1103226 - RNA, 22 nt, Human
acacaucaugccaaguuucacc

SEQ ID NO: 1103227 - RNA, 22 nt, Human
cagaaagaccugggcucaagag

SEQ ID NO: 1103228 - RNA, 22 nt, Human
cugagcagugguucuugagcgc

SEQ ID NO: 1103229 - RNA, 22 nt, Human
guccucuguguaggcugcagac

SEQ ID NO: 1103230 - RNA, 20 nt, Human
gcuccaggucagagaggacg

SEQ ID NO: 1103231 - RNA, 22 nt, Human
ccuggcagacugugagggcagg

SEQ ID NO: 1103232 - RNA, 19 nt, Human
ccacacagugugcaauuua

SEQ ID NO: 1103233 - RNA, 22 nt, Human
uccaggcucuaggcugcucucc

SEQ ID NO: 1103234 - RNA, 22 nt, Human
aagucguggcaggcuugcacga

SEQ ID NO: 1103235 - RNA, 22 nt, Human
uuccaggcucccuuggaggugu

SEQ ID NO: 1103236 - RNA, 18 nt, Human
uccuggcagucagagagg

SEQ ID NO: 1103237 - RNA, 22 nt, Human
auggccuggggauuccugagca

SEQ ID NO: 1103238 - RNA, 22 nt, Human
guggcagugggaugcuaucagg

SEQ ID NO: 1103239 - RNA, 22 nt, Human
uacacagauaugugaucaauca

SEQ ID NO: 1103240 - RNA, 22 nt, Human
agggagacacaugaggaaguca

SEQ ID NO: 1103241 - RNA, 22 nt, Human
cccagccuacucugccauagca

SEQ ID NO: 1103242 - RNA, 22 nt, Human
cacacaucaaccuagacauugu

SEQ ID NO: 1103243 - RNA, 22 nt, Human
ucccacauaugcaauccugaau

SEQ ID NO: 1103244 - RNA, 22 nt, Human
uuuaaauuuagaagaaacacug

SEQ ID NO: 1103245 - RNA, 22 nt, Human
cuccuggcacugucuugaccca

SEQ ID NO: 1103246 - RNA, 22 nt, Human
gccuggcacaguagggacccaa

SEQ ID NO: 1103247 - RNA, 22 nt, Human
agcacagggacaaugccaggug

SEQ ID NO: 1103248 - RNA, 22 nt, Human
acacaucagaaauaugaaugag

SEQ ID NO: 1103249 - RNA, 22 nt, Human
gcuccaggaggaugaccuuccu

SEQ ID NO: 1103250 - RNA, 22 nt, Human
uggccuccccuaacagccucuu

SEQ ID NO: 1103251 - RNA, 22 nt, Human
gguucccggaucuccgaguccc

SEQ ID NO: 1103252 - RNA, 22 nt, Human
gaggcugcuuugaugacaggag

SEQ ID NO: 1103253 - RNA, 22 nt, Human
gagccugaugaaacaggcagac

SEQ ID NO: 1103254 - RNA, 22 nt, Human
aggggugugcauccuggaggau

SEQ ID NO: 1103255 - RNA, 22 nt, Human
ucccagccuuccagucugguuu

SEQ ID NO: 1103256 - RNA, 22 nt, Human
auguuggagucguaaggcaugg

SEQ ID NO: 1103257 - RNA, 22 nt, Human
cagguggguguaugaaugcaaa

SEQ ID NO: 1103258 - RNA, 22 nt, Human
uuccacauuccuuacauucaua

SEQ ID NO: 1103259 - RNA, 22 nt, Human
acauacacaugaauauauuuuu

SEQ ID NO: 1103260 - RNA, 22 nt, Human
guccuggcugguucuguggggc

SEQ ID NO: 1103261 - RNA, 22 nt, Human
ggaggacaggggcugcagcaca

SEQ ID NO: 1103262 - RNA, 22 nt, Human
ggcacagggggcugaggacuag

SEQ ID NO: 1103263 - RNA, 22 nt, Human
cuccucuggguccugguggcca

SEQ ID NO: 1103264 - RNA, 22 nt, Human
cuggcaguuggcauuggcaucu

SEQ ID NO: 1103265 - RNA, 22 nt, Human
uggcagugggaauggacaaaca

SEQ ID NO: 1103266 - RNA, 22 nt, Human
ggagcugaaggggugggcucag

SEQ ID NO: 1103267 - RNA, 22 nt, Human
gcuggcaguuuccucaccgagg

SEQ ID NO: 1103268 - RNA, 20 nt, Human
auacacaugcagacagaugc

SEQ ID NO: 1103269 - RNA, 22 nt, Human
acagaguccuagcugcaaagaa

SEQ ID NO: 1103270 - RNA, 22 nt, Human
uugggaaguuuaaugacagacu

SEQ ID NO: 1103271 - RNA, 22 nt, Human
gaugccuggcacccagcaagga

SEQ ID NO: 1103272 - RNA, 22 nt, Human
uuccuggccuaagguaggugac

SEQ ID NO: 1103273 - RNA, 22 nt, Human
uccuggcauccgugggucugug

SEQ ID NO: 1103274 - RNA, 22 nt, Human
acacacaugcaugcuugccauu

SEQ ID NO: 1103275 - RNA, 22 nt, Human
ccaggcccaggguacugaccaa

SEQ ID NO: 1103276 - RNA, 22 nt, Human
uggccucugugggagcugagca

SEQ ID NO: 1103277 - RNA, 22 nt, Human
ucuggcagagucagugcacaca

SEQ ID NO: 1103278 - RNA, 22 nt, Human
uauguaaaguagauggcaggua

SEQ ID NO: 1103279 - RNA, 22 nt, Human
ucaucacauaugucaugauuug

SEQ ID NO: 1103280 - RNA, 22 nt, Human
uccuggcagagggcggccucga

SEQ ID NO: 1103281 - RNA, 22 nt, Human
gcacacaugcaugcacaggagu

SEQ ID NO: 1103282 - RNA, 22 nt, Human
gcuggcaggauagaagucuaau

SEQ ID NO: 1103283 - RNA, 22 nt, Human
cccacccugggaagcuaggcag

SEQ ID NO: 1103284 - RNA, 17 nt, Human
uugggagagaaagguau

SEQ ID NO: 1103285 - RNA, 22 nt, Human
uccccaccuaagauacccaucu

SEQ ID NO: 1103286 - RNA, 23 nt, Human
uguaaacaucacccccuggaguu

SEQ ID NO: 1103287 - RNA, 22 nt, Human
agggccccauagucacugcccg

SEQ ID NO: 1103288 - RNA, 22 nt, Human
cccuuccuugauuuuaacugga

SEQ ID NO: 1103289 - RNA, 21 nt, Human
guacacacagguggaugggcu

SEQ ID NO: 1103290 - RNA, 22 nt, Human
ggcagugagaggucuccugguc

SEQ ID NO: 1103291 - RNA, 22 nt, Human
uuccuggcagaggccccgacag

SEQ ID NO: 1103292 - RNA, 22 nt, Human
cacuguccaauagauacauaau

SEQ ID NO: 1103293 - RNA, 22 nt, Human
guacacacuguuugaucauuuc

SEQ ID NO: 1103294 - RNA, 22 nt, Human
ccuggcagguuacaaccaguua

SEQ ID NO: 1103295 - RNA, 22 nt, Human
cuccaggccauggcugcggagg

SEQ ID NO: 1103296 - RNA, 18 nt, Human
uguagagccagguuugcc

SEQ ID NO: 1103297 - RNA, 22 nt, Human
cagccaggauggagaacuguug

SEQ ID NO: 1103298 - RNA, 22 nt, Human
acuggcagggggagccccgaga

SEQ ID NO: 1103299 - RNA, 22 nt, Human
uggcgucucucauaaguaugug

SEQ ID NO: 1103300 - RNA, 22 nt, Human
aaagaucaauagauaaagcuac

SEQ ID NO: 1103301 - RNA, 22 nt, Human
cuggcaggagcauucacagagg

SEQ ID NO: 1103302 - RNA, 22 nt, Human
gagaaagaugaagaguggcguu

SEQ ID NO: 1103303 - RNA, 19 nt, Human
ccagcccacagugacuuuc

SEQ ID NO: 1103304 - RNA, 22 nt, Human
cccagccuuugcuuccugguuc

SEQ ID NO: 1103305 - RNA, 19 nt, Human
acauucccaucagcaaugu

SEQ ID NO: 1103306 - RNA, 20 nt, Human
ucuggcaggugaacgagcug

SEQ ID NO: 1103307 - RNA, 22 nt, Human
agcacaggaacauggagauggg

SEQ ID NO: 1103308 - RNA, 22 nt, Human
ucccacccauccugcaucucuu

SEQ ID NO: 1103309 - RNA, 22 nt, Human
uucccacauucuuuacauucau

SEQ ID NO: 1103310 - RNA, 22 nt, Human
gcuggcagggacagcugcgugu

SEQ ID NO: 1103311 - RNA, 22 nt, Human
ccagcccuuagauaaaccuggc

SEQ ID NO: 1103312 - RNA, 18 nt, Human
acucugcggaggccccag

SEQ ID NO: 1103313 - RNA, 22 nt, Human
cugccugcucaccagggcucug

SEQ ID NO: 1103314 - RNA, 22 nt, Human
ucuggcagagugauaggauaag

SEQ ID NO: 1103315 - RNA, 22 nt, Human
uuccaggccgggcaggaaacac

SEQ ID NO: 1103316 - RNA, 22 nt, Human
ccuggcagacagcacugaagcu

SEQ ID NO: 1103317 - RNA, 22 nt, Human
gaagagaaaggcaaggaguuuu

SEQ ID NO: 1103318 - RNA, 22 nt, Human
gguggcauaagaacacuaaaga

SEQ ID NO: 1103319 - RNA, 22 nt, Human
acacacuuuaaauuaaaccucu

SEQ ID NO: 1103320 - RNA, 22 nt, Human
gaggcacagucccgaggcaagg

SEQ ID NO: 1103321 - RNA, 18 nt, Human
cuccuccacagccccugc

SEQ ID NO: 1103322 - RNA, 22 nt, Human
ucacacagcuccuuuccuuagu

SEQ ID NO: 1103323 - RNA, 22 nt, Human
gguuccuucugaggucccugua

SEQ ID NO: 1103324 - RNA, 22 nt, Human
acuggcagagacccugauggcc

SEQ ID NO: 1103325 - RNA, 22 nt, Human
cuccaggcucguccaagaucga

SEQ ID NO: 1103326 - RNA, 22 nt, Human
uccuggcagugcuuguuuugga

SEQ ID NO: 1103327 - RNA, 22 nt, Human
ucuggcagcgaagcguguacuu

SEQ ID NO: 1103328 - RNA, 22 nt, Human
agggcugacaaauggcagugac

SEQ ID NO: 1103329 - RNA, 22 nt, Human
cacacacugacaccuuaucuug

SEQ ID NO: 1103330 - RNA, 22 nt, Human
uucccacagagauuacauugaa

SEQ ID NO: 1103331 - RNA, 22 nt, Human
cuggcagucugguggaaggccu

SEQ ID NO: 1103332 - RNA, 22 nt, Human
gagauggccagugccaggacaa

SEQ ID NO: 1103333 - RNA, 18 nt, Human
cccacacagcaguagcuc

SEQ ID NO: 1103334 - RNA, 22 nt, Human
ucccacacuacacgguuguugg

SEQ ID NO: 1103335 - RNA, 19 nt, Human
ucuggcagguaauuaggga

SEQ ID NO: 1103336 - RNA, 22 nt, Human
ccuggcaggcuggggacagugc

SEQ ID NO: 1103337 - RNA, 22 nt, Human
ucuggcagugaagucaugaggu

SEQ ID NO: 1103338 - RNA, 22 nt, Human
cugccucuauaggaguccacca

SEQ ID NO: 1103339 - RNA, 22 nt, Human
aggcaguguguagcuggaagag

SEQ ID NO: 1103340 - RNA, 22 nt, Human
cuuacaaauacacuuaggagag

SEQ ID NO: 1103341 - RNA, 22 nt, Human
gagagaaaagggggaauugauu

SEQ ID NO: 1103342 - RNA, 17 nt, Human
gccuucucugcccucac

SEQ ID NO: 1103343 - RNA, 22 nt, Human
gggccccuugcugcucugcugg

SEQ ID NO: 1103344 - RNA, 22 nt, Human
uccaggaggaggaaggcugcca

SEQ ID NO: 1103345 - RNA, 22 nt, Human
uccaggcuccccugcgugcucc

SEQ ID NO: 1103346 - RNA, 22 nt, Human
cccugagcucaggcccuugggg

SEQ ID NO: 1103347 - RNA, 22 nt, Human
gccgggaccaaggccacggagc

SEQ ID NO: 1103348 - RNA, 22 nt, Human
ggggcugagucagugggaagag

SEQ ID NO: 1103349 - RNA, 22 nt, Human
aggcacaggaggugguaagaag

SEQ ID NO: 1103350 - RNA, 22 nt, Human
guccucugggagccuugagccu

SEQ ID NO: 1103351 - RNA, 22 nt, Human
aggacacacagaauacaaaucc

SEQ ID NO: 1103352 - RNA, 19 nt, Human
uggcagguagugagcaguc

SEQ ID NO: 1103353 - RNA, 22 nt, Human
guccucugucccuggggcacgg

SEQ ID NO: 1103354 - RNA, 22 nt, Human
aagagccagcuagugaagaggc

SEQ ID NO: 1103355 - RNA, 21 nt, Human
uccccacauuucuaaacagac

SEQ ID NO: 1103356 - RNA, 22 nt, Human
cuggccucuguguucaccauag

SEQ ID NO: 1103357 - RNA, 22 nt, Human
ucuggcagugagcaacuugaca

SEQ ID NO: 1103358 - RNA, 22 nt, Human
ccuggcagcaggugggcccgug

SEQ ID NO: 1103359 - RNA, 22 nt, Human
gaggcacauauauacagagccc

SEQ ID NO: 1103360 - RNA, 22 nt, Human
ggccucucagggcagagacccu

SEQ ID NO: 1103361 - RNA, 22 nt, Human
acauacacaagcguacaugaac

SEQ ID NO: 1103362 - RNA, 22 nt, Human
cacacacucuuccuggcaccua

SEQ ID NO: 1103363 - RNA, 22 nt, Human
ucuggcaggaccaugaagcgua

SEQ ID NO: 1103364 - RNA, 22 nt, Human
ggaggacacuggcucugccuuc

SEQ ID NO: 1103365 - RNA, 22 nt, Human
cccacccucaagggugucuaua

SEQ ID NO: 1103366 - RNA, 22 nt, Human
gccccaccuugagagcagaaac

SEQ ID NO: 1103367 - RNA, 22 nt, Human
gcuggcagugugaaugacaagc

SEQ ID NO: 1103368 - RNA, 22 nt, Human
cacacagaaccgcucgccacuu

SEQ ID NO: 1103369 - RNA, 18 nt, Human
acacacacaccuguguau

SEQ ID NO: 1103370 - RNA, 22 nt, Human
gaggcugcggggaggagccugc

SEQ ID NO: 1103371 - RNA, 22 nt, Human
ugggacucacucuuuuggccag

SEQ ID NO: 1103372 - RNA, 22 nt, Human
ucuggcagcucaguucaggucu

SEQ ID NO: 1103373 - RNA, 21 nt, Human
cccuugccugcacuccucggc

SEQ ID NO: 1103374 - RNA, 22 nt, Human
ccuggcagcgugccgagcugcg

SEQ ID NO: 1103375 - RNA, 22 nt, Human
cucuccagccuuuagcccacgc

SEQ ID NO: 1103376 - RNA, 18 nt, Human
acaggcugugggaauggu

SEQ ID NO: 1103377 - RNA, 22 nt, Human
gcacauaacugaccacaucuaa

SEQ ID NO: 1103378 - RNA, 22 nt, Human
gagaaagauguaggcugggagg

SEQ ID NO: 1103379 - RNA, 22 nt, Human
guccucuguuuccaucugacuu

SEQ ID NO: 1103380 - RNA, 22 nt, Human
ccuggcuccugccucugcaggg

SEQ ID NO: 1103381 - RNA, 18 nt, Human
aggaaagaaaggcaggug

SEQ ID NO: 1103382 - RNA, 22 nt, Human
uacacaucacuguaucuuucag

SEQ ID NO: 1103383 - RNA, 22 nt, Human
acagguggggcacuuggagccu

SEQ ID NO: 1103384 - RNA, 19 nt, Human
guccuggcgccgccacacc

SEQ ID NO: 1103385 - RNA, 22 nt, Human
gagaaagauuguccuucagggg

SEQ ID NO: 1103386 - RNA, 22 nt, Human
uccugcagccacugcaggcaga

SEQ ID NO: 1103387 - RNA, 22 nt, Human
gacucugggcugagccagggcc

SEQ ID NO: 1103388 - RNA, 22 nt, Human
aggacaagcuaaaggacuuccu

SEQ ID NO: 1103389 - RNA, 22 nt, Human
gucacaggcaguaacuaggacc

SEQ ID NO: 1103390 - RNA, 23 nt, Human
uccaggagcaugcuggcuggcga

SEQ ID NO: 1103391 - RNA, 23 nt, Human
uuccaggcagagcagggauuaga

SEQ ID NO: 1103392 - RNA, 22 nt, Human
acuggcagccacaacuggcagg

SEQ ID NO: 1103393 - RNA, 22 nt, Human
ccuggcagguggagguugcagu

SEQ ID NO: 1103394 - RNA, 22 nt, Human
gagacaucauaaugaaguuucc

SEQ ID NO: 1103395 - RNA, 22 nt, Human
uauuacagaaucaggcauaacu

SEQ ID NO: 1103396 - RNA, 22 nt, Human
accugccuauggagccacaugg

SEQ ID NO: 1103397 - RNA, 22 nt, Human
uccugagcugccgcaucagcag

SEQ ID NO: 1103398 - RNA, 22 nt, Human
agggcugaagggaggugcucau

SEQ ID NO: 1103399 - RNA, 22 nt, Human
ucccacaccugucuauuccuag

SEQ ID NO: 1103400 - RNA, 16 nt, Human
ucacauacuuccuugc

SEQ ID NO: 1103401 - RNA, 21 nt, Human
ugacugaggcuucuucacaca

SEQ ID NO: 1103402 - RNA, 22 nt, Human
cagucccaugagcccagaacau

SEQ ID NO: 1103403 - RNA, 22 nt, Human
acuggcagaacgugaugcgggu

SEQ ID NO: 1103404 - RNA, 22 nt, Human
guugggaaggcaagaaguagaa

SEQ ID NO: 1103405 - RNA, 22 nt, Human
uggcagagcccagacuccaguc

SEQ ID NO: 1103406 - RNA, 22 nt, Human
aucucccagccacagcauucuu

SEQ ID NO: 1103407 - RNA, 22 nt, Human
ugaguagagaauucagcuaagg

SEQ ID NO: 1103408 - RNA, 22 nt, Human
aacacagaucaaaauauuuccu

SEQ ID NO: 1103409 - RNA, 22 nt, Human
auggcagaccuccuggccacaa

SEQ ID NO: 1103410 - RNA, 22 nt, Human
cacaacuuuaggaaccacauuc

SEQ ID NO: 1103411 - RNA, 22 nt, Human
agacacagcugcaggagguggg

SEQ ID NO: 1103412 - RNA, 19 nt, Human
cugagagaugcuucacaca

SEQ ID NO: 1103413 - RNA, 22 nt, Human
ccuggcaggccccuccuggauu

SEQ ID NO: 1103414 - RNA, 22 nt, Human
uggccugccacugccacgccac

SEQ ID NO: 1103415 - RNA, 22 nt, Human
caggcuggagugcaauggcaca

SEQ ID NO: 1103416 - RNA, 22 nt, Human
acacacuguaaggacuaucacu

SEQ ID NO: 1103417 - RNA, 22 nt, Human
uacaaaaggaagagggaucuua

SEQ ID NO: 1103418 - RNA, 22 nt, Human
ccccacaccugccgggcagcag

SEQ ID NO: 1103419 - RNA, 22 nt, Human
acagacuggccugucucgcacc

SEQ ID NO: 1103420 - RNA, 22 nt, Human
gcuggcaggagccuuucccuuu

SEQ ID NO: 1103421 - RNA, 22 nt, Human
cuggccucauagccaagcugug

SEQ ID NO: 1103422 - RNA, 22 nt, Human
caggacaaagcccuuugagaaa

SEQ ID NO: 1103423 - RNA, 22 nt, Human
ucacauaaauuuaccagaugau

SEQ ID NO: 1103424 - RNA, 22 nt, Human
agaaagaggaugcagaucucau

SEQ ID NO: 1103425 - RNA, 22 nt, Human
uccaaggcuccggcccuggcgu

SEQ ID NO: 1103426 - RNA, 17 nt, Human
ugcuggcaacauacaaa

SEQ ID NO: 1103427 - RNA, 22 nt, Human
gguguugggcucacugguccuu

SEQ ID NO: 1103428 - RNA, 22 nt, Human
acacaucuuagacugaaauaug

SEQ ID NO: 1103429 - RNA, 22 nt, Human
auuccacagcuacaucaaucua

SEQ ID NO: 1103430 - RNA, 21 nt, Human
ccuagccucuuacccagcuuu

SEQ ID NO: 1103431 - RNA, 22 nt, Human
ugcuccagugccugccccacag

SEQ ID NO: 1103432 - RNA, 22 nt, Human
gccuggcaauggccucaggaag

SEQ ID NO: 1103433 - RNA, 22 nt, Human
cuggccuggggggacacauccc

SEQ ID NO: 1103434 - RNA, 22 nt, Human
acuggcagagggaaaaccauuc

SEQ ID NO: 1103435 - RNA, 22 nt, Human
ccuggcagcuccuccccggcgg

SEQ ID NO: 1103436 - RNA, 22 nt, Human
ucccaccccggucaagggcuga

SEQ ID NO: 1103437 - RNA, 22 nt, Human
gacacagaauuuacucccgaua

SEQ ID NO: 1103438 - RNA, 22 nt, Human
gacugccucaguuucccugcag

SEQ ID NO: 1103439 - RNA, 22 nt, Human
uccccaccccagaacuacuagg

SEQ ID NO: 1103440 - RNA, 22 nt, Human
gggccccuuguaucucuggcuc

SEQ ID NO: 1103441 - RNA, 22 nt, Human
gaggggcuggguagggcaaccc

SEQ ID NO: 1103442 - RNA, 22 nt, Human
ccuggcagcagcacaugccuuc

SEQ ID NO: 1103443 - RNA, 22 nt, Human
gcacacaggcaguuuccagcca

SEQ ID NO: 1103444 - RNA, 22 nt, Human
uuccagcccgcgacuuguucag

SEQ ID NO: 1103445 - RNA, 22 nt, Human
gguggcagaggugcaucagccc

SEQ ID NO: 1103446 - RNA, 22 nt, Human
cuguccuccagacgacaguccc

SEQ ID NO: 1103447 - RNA, 22 nt, Human
uccaggcuaauuuugcauuguu

SEQ ID NO: 1103448 - RNA, 22 nt, Human
cccagccucuguuugcuccucu

SEQ ID NO: 1103449 - RNA, 22 nt, Human
uccuggcagaaauggggcugug

SEQ ID NO: 1103450 - RNA, 22 nt, Human
aaaaagucugcaaaggagguug

SEQ ID NO: 1103451 - RNA, 22 nt, Human
acaucacagagcccagauaaag

SEQ ID NO: 1103452 - RNA, 22 nt, Human
guccucuguuagaaaugugcuu

SEQ ID NO: 1103453 - RNA, 22 nt, Human
ucccacaugugaauccucaggu

SEQ ID NO: 1103454 - RNA, 22 nt, Human
uccaggccauugacugcauccu

SEQ ID NO: 1103455 - RNA, 22 nt, Human
uacacaucccagacucccagga

SEQ ID NO: 1103456 - RNA, 19 nt, Human
acuggcagggcugcggugg

SEQ ID NO: 1103457 - RNA, 22 nt, Human
acuggcagaauugaauaguugu

SEQ ID NO: 1103458 - RNA, 20 nt, Human
aagagucuuuacugagcuaa

SEQ ID NO: 1103459 - RNA, 22 nt, Human
acacacaugccuuuccuaagua

SEQ ID NO: 1103460 - RNA, 19 nt, Human
uccuggcacaguggaacca

SEQ ID NO: 1103461 - RNA, 20 nt, Human
ccccacacuauugagcacuu

SEQ ID NO: 1103462 - RNA, 22 nt, Human
cacauaagaaaugaauaugaga

SEQ ID NO: 1103463 - RNA, 22 nt, Human
acacaucucaggggacacucuc

SEQ ID NO: 1103464 - RNA, 22 nt, Human
acacucacccucccacugccug

SEQ ID NO: 1103465 - RNA, 21 nt, Human
acauacauaccuuaccaccuu

SEQ ID NO: 1103466 - RNA, 22 nt, Human
uuccaggcugaugggccacagg

SEQ ID NO: 1103467 - RNA, 22 nt, Human
cucugagcagaggccguggcua

SEQ ID NO: 1103468 - RNA, 22 nt, Human
acuggcagagguuggacaccau

SEQ ID NO: 1103469 - RNA, 22 nt, Human
cacccacauuccaucacucugc

SEQ ID NO: 1103470 - RNA, 22 nt, Human
cacaauguauauguauaucaaa

SEQ ID NO: 1103471 - RNA, 22 nt, Human
cacacaucuuaucccaguuauu

SEQ ID NO: 1103472 - RNA, 22 nt, Human
agacacagucugucuggaggag

SEQ ID NO: 1103473 - RNA, 22 nt, Human
cucagccccaauucuccccauu

SEQ ID NO: 1103474 - RNA, 22 nt, Human
ggcaaggggucaggcugagaca

SEQ ID NO: 1103475 - RNA, 22 nt, Human
guggcagugaaggucauagcau

SEQ ID NO: 1103476 - RNA, 22 nt, Human
ccagguccuguuuucaccacag

SEQ ID NO: 1103477 - RNA, 22 nt, Human
ugcucuguauucuauggcaguu

SEQ ID NO: 1103478 - RNA, 19 nt, Human
gcuggcagaauuuugaacc

SEQ ID NO: 1103479 - RNA, 23 nt, Human
uugggaaauaguuaagacaugag

SEQ ID NO: 1103480 - RNA, 22 nt, Human
gauggcagguaguggucucauc

SEQ ID NO: 1103481 - RNA, 22 nt, Human
ggugccagaguggcccaggggc

SEQ ID NO: 1103482 - RNA, 22 nt, Human
gugggagaaauuagcucuaguu

SEQ ID NO: 1103483 - RNA, 22 nt, Human
ccagcccugucaccaacuggag

SEQ ID NO: 1103484 - RNA, 20 nt, Human
cccacacccuucccacuugg

SEQ ID NO: 1103485 - RNA, 22 nt, Human
gacacauaugcguauaguuuag

SEQ ID NO: 1103486 - RNA, 22 nt, Human
guccucugcuucaugcccugau

SEQ ID NO: 1103487 - RNA, 22 nt, Human
ccugccuguacuagagacccag

SEQ ID NO: 1103488 - RNA, 22 nt, Human
uggcaguggauaggggagcggu

SEQ ID NO: 1103489 - RNA, 19 nt, Human
cagcccucuuaccacugug

SEQ ID NO: 1103490 - RNA, 22 nt, Human
ucccuccccacuucugagcuuu

SEQ ID NO: 1103491 - RNA, 22 nt, Human
aggcaguggagcuggaauaggc

SEQ ID NO: 1103492 - RNA, 22 nt, Human
ugcagagagauccucaggguuu

SEQ ID NO: 1103493 - RNA, 23 nt, Human
acuccccagucucuucuugccaa

SEQ ID NO: 1103494 - RNA, 22 nt, Human
cacaauuuuaauacacagucaa

SEQ ID NO: 1103495 - RNA, 22 nt, Human
ccagcccuugcugaaggguggc

SEQ ID NO: 1103496 - RNA, 22 nt, Human
ccuggcagcuaagugcuuugag

SEQ ID NO: 1103497 - RNA, 20 nt, Human
ucacacaugguaagcuauga

SEQ ID NO: 1103498 - RNA, 21 nt, Human
ucacacacguuuccaagggca

SEQ ID NO: 1103499 - RNA, 22 nt, Human
aucccacaccccuacaacauau

SEQ ID NO: 1103500 - RNA, 22 nt, Human
cccugccuugggguccacaccg

SEQ ID NO: 1103501 - RNA, 22 nt, Human
uggcagagagagugcagucgac

SEQ ID NO: 1103502 - RNA, 22 nt, Human
uccuggcacccuuggguuggag

SEQ ID NO: 1103503 - RNA, 21 nt, Human
uccugccuuaguccagagcag

SEQ ID NO: 1103504 - RNA, 22 nt, Human
gccuggcaggccuguuggggcu

SEQ ID NO: 1103505 - RNA, 22 nt, Human
agaggccuccgaaaggugggcu

SEQ ID NO: 1103506 - RNA, 22 nt, Human
gcacacaggggaguucucagaa

SEQ ID NO: 1103507 - RNA, 21 nt, Human
ucacguggucacaugagcuuu

SEQ ID NO: 1103508 - RNA, 22 nt, Human
ugaccaggauacugcagggaug

SEQ ID NO: 1103509 - RNA, 21 nt, Human
aacacauccagaguauuugac

SEQ ID NO: 1103510 - RNA, 22 nt, Human
ucccagccaggcucuaccacuu

SEQ ID NO: 1103511 - RNA, 22 nt, Human
aaagaucacgucccaggacucg

SEQ ID NO: 1103512 - RNA, 22 nt, Human
uauucccauuccacuuaucaag

SEQ ID NO: 1103513 - RNA, 22 nt, Human
caaauacuacgauucuugcagu

SEQ ID NO: 1103514 - RNA, 22 nt, Human
aacacauauuuauauaugcaca

SEQ ID NO: 1103515 - RNA, 22 nt, Human
cacauacauacguauguauaca

SEQ ID NO: 1103516 - RNA, 22 nt, Human
gagaaagacguaggcugggagg

SEQ ID NO: 1103517 - RNA, 22 nt, Human
uggcacucacucucagagucug

SEQ ID NO: 1103518 - RNA, 18 nt, Human
ccuggcagccaugcgcgc

SEQ ID NO: 1103519 - RNA, 20 nt, Human
uucaugggagcaaagaggcc

SEQ ID NO: 1103520 - RNA, 22 nt, Human
gacacauagaucuaucucacuc

SEQ ID NO: 1103521 - RNA, 22 nt, Human
caggagggcccgagacucuucc

SEQ ID NO: 1103522 - RNA, 22 nt, Human
ucacacaugcuaagccagagau

SEQ ID NO: 1103523 - RNA, 22 nt, Human
uggcaggaaaguaacagagcac

SEQ ID NO: 1103524 - RNA, 22 nt, Human
cacaucccuggaguuacccagu

SEQ ID NO: 1103525 - RNA, 22 nt, Human
guccucugagggggcugcacgc

SEQ ID NO: 1103526 - RNA, 22 nt, Human
acaggugguaaaauggacuguc

SEQ ID NO: 1103527 - RNA, 21 nt, Human
aaagagcccgcugagagguuc

SEQ ID NO: 1103528 - RNA, 22 nt, Human
auacacacugcuauccuuuuuu

SEQ ID NO: 1103529 - RNA, 22 nt, Human
acaggugguagaguggaaagag

SEQ ID NO: 1103530 - RNA, 21 nt, Human
ucuggcaggaagacggauggg

SEQ ID NO: 1103531 - RNA, 22 nt, Human
guccucugcccaggucaagguu

SEQ ID NO: 1103532 - RNA, 22 nt, Human
cuccuggcuuucccagaccagg

SEQ ID NO: 1103533 - RNA, 22 nt, Human
uaaaggguagguuuuacuguaa

SEQ ID NO: 1103534 - RNA, 22 nt, Human
ucaggcccuuugcugcugcccc

SEQ ID NO: 1103535 - RNA, 22 nt, Human
gcacucuccuggcugccacagu

SEQ ID NO: 1103536 - RNA, 22 nt, Human
cacauacugagaaucacaccca

SEQ ID NO: 1103537 - RNA, 22 nt, Human
gcuccaggugucccagguaaaa

SEQ ID NO: 1103538 - RNA, 22 nt, Human
uacacagauuucaguaucauca

SEQ ID NO: 1103539 - RNA, 22 nt, Human
ggagcugaaccccaucgugcug

SEQ ID NO: 1103540 - RNA, 22 nt, Human
agaggccugugugcuccagugg

SEQ ID NO: 1103541 - RNA, 22 nt, Human
cagguuggggacuuaggaugac

SEQ ID NO: 1103542 - RNA, 22 nt, Human
uccaggcuugagaccaggcucu

SEQ ID NO: 1103543 - RNA, 22 nt, Human
cucuccagaauaugccgccgug

SEQ ID NO: 1103544 - RNA, 22 nt, Human
cacacacaguuuuguauucugu

SEQ ID NO: 1103545 - RNA, 22 nt, Human
guacacacuauguauuguacac

SEQ ID NO: 1103546 - RNA, 22 nt, Human
cagcacagugaccagacccacu

SEQ ID NO: 1103547 - RNA, 20 nt, Human
agaggcuuccuugggaggag

SEQ ID NO: 1103548 - RNA, 22 nt, Human
cacacugucagguaaauaacac

SEQ ID NO: 1103549 - RNA, 20 nt, Human
gauacacagcacagagggcc

SEQ ID NO: 1103550 - RNA, 22 nt, Human
cacacacuguuaauguaggagu

SEQ ID NO: 1103551 - RNA, 23 nt, Human
uuggagagggugaguagugucag

SEQ ID NO: 1103552 - RNA, 22 nt, Human
ugcagagagaccccugggccag

SEQ ID NO: 1103553 - RNA, 22 nt, Human
ugguaagaacccaucagagaag

SEQ ID NO: 1103554 - RNA, 22 nt, Human
gccacauagaggaggauauuaa

SEQ ID NO: 1103555 - RNA, 22 nt, Human
ucauggcacuuagcacaguccu

SEQ ID NO: 1103556 - RNA, 22 nt, Human
ucacacacauaaucuaagauua

SEQ ID NO: 1103557 - RNA, 22 nt, Human
aaagagucguguuccagguuug

SEQ ID NO: 1103558 - RNA, 22 nt, Human
ucacauacacuaggauauuuuu

SEQ ID NO: 1103559 - RNA, 22 nt, Human
ggcccagccucagacaugcccu

SEQ ID NO: 1103560 - RNA, 22 nt, Human
guggcagucgcugacagauaca

SEQ ID NO: 1103561 - RNA, 21 nt, Human
acacacugaguuuuccacugu

SEQ ID NO: 1103562 - RNA, 22 nt, Human
ucuccacacuuucucucccagg

SEQ ID NO: 1103563 - RNA, 22 nt, Human
ucuggcagcaagucuguuucuc

SEQ ID NO: 1103564 - RNA, 19 nt, Human
gugggacagacauuacaua

SEQ ID NO: 1103565 - RNA, 22 nt, Human
ucuggcaggguguguauuuaca

SEQ ID NO: 1103566 - RNA, 22 nt, Human
ccaggccucuggcugcuuaguc

SEQ ID NO: 1103567 - RNA, 21 nt, Human
agagucugagugugcaagggc

SEQ ID NO: 1103568 - RNA, 22 nt, Human
cuguccagcuuggcuccugggg

SEQ ID NO: 1103569 - RNA, 22 nt, Human
ccacacagucaguuuccaagaa

SEQ ID NO: 1103570 - RNA, 22 nt, Human
acaucugaggagaccagccucu

SEQ ID NO: 1103571 - RNA, 22 nt, Human
ucccagccuggacccugccagu

SEQ ID NO: 1103572 - RNA, 22 nt, Human
uacauuccuguuagcaucuaag

SEQ ID NO: 1103573 - RNA, 22 nt, Human
uugggaucucaaauccagcuau

SEQ ID NO: 1103574 - RNA, 22 nt, Human
caccagggccccaggcugugcc

SEQ ID NO: 1103575 - RNA, 22 nt, Human
gccuggcaaggcccuguugacu

SEQ ID NO: 1103576 - RNA, 22 nt, Human
ccuggcagguagcauugaggag

SEQ ID NO: 1103577 - RNA, 22 nt, Human
uccacccugcuuuugucuuuga

SEQ ID NO: 1103578 - RNA, 22 nt, Human
aacaaaagccgaaguagguguc

SEQ ID NO: 1103579 - RNA, 22 nt, Human
gcuggcaggagaaacggggugc

SEQ ID NO: 1103580 - RNA, 22 nt, Human
gcccagccuccaagcuccaagg

SEQ ID NO: 1103581 - RNA, 20 nt, Human
gagucacagaagaagcugaa

SEQ ID NO: 1103582 - RNA, 22 nt, Human
guccucugaaguugugcaaugc

SEQ ID NO: 1103583 - RNA, 22 nt, Human
gagaccucuugguaucgcuagg

SEQ ID NO: 1103584 - RNA, 22 nt, Human
gcccucucuucugcagccucca

SEQ ID NO: 1103585 - RNA, 22 nt, Human
cacugucccuguuuccuggaaa

SEQ ID NO: 1103586 - RNA, 22 nt, Human
auagggccuaaaaaguauugcu

SEQ ID NO: 1103587 - RNA, 22 nt, Human
acuggcaggcugcuggccggcg

SEQ ID NO: 1103588 - RNA, 22 nt, Human
cuggcaguuugccaggagcucg

SEQ ID NO: 1103589 - RNA, 22 nt, Human
uagacacaucuucauccacaau

SEQ ID NO: 1103590 - RNA, 22 nt, Human
acacauuugcauaauaccucau

SEQ ID NO: 1103591 - RNA, 22 nt, Human
uccucuccaugucucacgccac

SEQ ID NO: 1103592 - RNA, 22 nt, Human
aagugccaucauagcauggcug

SEQ ID NO: 1103593 - RNA, 22 nt, Human
ggcacagagcuuugucccaguu

SEQ ID NO: 1103594 - RNA, 19 nt, Human
ccuugccugucccugcagc

SEQ ID NO: 1103595 - RNA, 22 nt, Human
aauggcagaggcaaagauggua

SEQ ID NO: 1103596 - RNA, 22 nt, Human
uuccuggcgccacggagccggu

SEQ ID NO: 1103597 - RNA, 22 nt, Human
gcccacacagcagauccuuugg

SEQ ID NO: 1103598 - RNA, 19 nt, Human
gggagcugaggucuuuggu

SEQ ID NO: 1103599 - RNA, 21 nt, Human
aggcugcuggcucaggguccu

SEQ ID NO: 1103600 - RNA, 22 nt, Human
aaaagagucuuaggcagucaua

SEQ ID NO: 1103601 - RNA, 22 nt, Human
gcagccucaaacuccccagcuc

SEQ ID NO: 1103602 - RNA, 22 nt, Human
uccugugccaucucuagagacu

SEQ ID NO: 1103603 - RNA, 22 nt, Human
ccucucagcgauuccucuugga

SEQ ID NO: 1103604 - RNA, 22 nt, Human
uccuggcagcccgcaggugcug

SEQ ID NO: 1103605 - RNA, 22 nt, Human
aggaggcugcaacccugaggcc

SEQ ID NO: 1103606 - RNA, 22 nt, Human
gccuggcauauaguaguugugc

SEQ ID NO: 1103607 - RNA, 22 nt, Human
ggcagagguagcuggaaccagg

SEQ ID NO: 1103608 - RNA, 22 nt, Human
ccuccccaugacccggugcugg

SEQ ID NO: 1103609 - RNA, 20 nt, Human
ugccuggccuuucucugccc

SEQ ID NO: 1103610 - RNA, 22 nt, Human
gaaagaagcuuuagauggcuau

SEQ ID NO: 1103611 - RNA, 22 nt, Human
gcuggcagggugguugagagag

SEQ ID NO: 1103612 - RNA, 22 nt, Human
uacacagacucuucaauucaga

SEQ ID NO: 1103613 - RNA, 22 nt, Human
cccacccugggcuacacaucca

SEQ ID NO: 1103614 - RNA, 22 nt, Human
cagggacaauggcagagccuga

SEQ ID NO: 1103615 - RNA, 22 nt, Human
uacacacuuacuggagaugaag

SEQ ID NO: 1103616 - RNA, 22 nt, Human
uccaggcuagguuuacaggaca

SEQ ID NO: 1103617 - RNA, 18 nt, Human
gccugcucugcucucccc

SEQ ID NO: 1103618 - RNA, 22 nt, Human
uccaggcucccucaggaugcac

SEQ ID NO: 1103619 - RNA, 22 nt, Human
ucuccugggaggacaaggaagg

SEQ ID NO: 1103620 - RNA, 22 nt, Human
auggccugcagugcugccacag

SEQ ID NO: 1103621 - RNA, 22 nt, Human
cuccuggcaguuccccuuguca

SEQ ID NO: 1103622 - RNA, 19 nt, Human
ccagucccauacaggagau

SEQ ID NO: 1103623 - RNA, 22 nt, Human
agcccagcuuugaaccauauca

SEQ ID NO: 1103624 - RNA, 22 nt, Human
ucaggagcucuucccuggugug

SEQ ID NO: 1103625 - RNA, 22 nt, Human
ucuggcaguggaugagggcagc

SEQ ID NO: 1103626 - RNA, 22 nt, Human
guccucugggcuuugagcaguc

SEQ ID NO: 1103627 - RNA, 22 nt, Human
aacacauaggcagagcaugaca

SEQ ID NO: 1103628 - RNA, 22 nt, Human
ugguccugccccgugcacagag

SEQ ID NO: 1103629 - RNA, 22 nt, Human
ucuggcaguuccuuguugauau

SEQ ID NO: 1103630 - RNA, 22 nt, Human
guacacacaaucucuggucagu

SEQ ID NO: 1103631 - RNA, 22 nt, Human
gcuggcaguguauuguuagcug

SEQ ID NO: 1103632 - RNA, 22 nt, Human
ucccagccuuucuuuucugcug

SEQ ID NO: 1103633 - RNA, 22 nt, Human
auccuggcccagguguggaggg

SEQ ID NO: 1103634 - RNA, 21 nt, Human
gggagggauggaaaugauguu

SEQ ID NO: 1103635 - RNA, 19 nt, Human
uccuggcauuuguaggaaa

SEQ ID NO: 1103636 - RNA, 22 nt, Human
cauacauuuauacacaucuaug

SEQ ID NO: 1103637 - RNA, 22 nt, Human
cagugggggggccaugcugcag

SEQ ID NO: 1103638 - RNA, 22 nt, Human
gaggacucugggcguguauggg

SEQ ID NO: 1103639 - RNA, 22 nt, Human
ucccugccugacagcacccacc

SEQ ID NO: 1103640 - RNA, 21 nt, Human
uccuguaagcuuggguggcuc

SEQ ID NO: 1103641 - RNA, 21 nt, Human
cacacagugaucuauccacau

SEQ ID NO: 1103642 - RNA, 22 nt, Human
cccacacacauuuaugauagga

SEQ ID NO: 1103643 - RNA, 22 nt, Human
gaaagacuuccuuugagaguac

SEQ ID NO: 1103644 - RNA, 22 nt, Human
uugggaagaauggaggugguua

SEQ ID NO: 1103645 - RNA, 23 nt, Human
ucacauaauccuucauccacagg

SEQ ID NO: 1103646 - RNA, 22 nt, Human
cugccugcucuauccaggccug

SEQ ID NO: 1103647 - RNA, 22 nt, Human
ccacacagauaaguguuuucua

SEQ ID NO: 1103648 - RNA, 22 nt, Human
ugcagagaaaacuccuggguac

SEQ ID NO: 1103649 - RNA, 22 nt, Human
gcuggcagguaaagccccgggg

SEQ ID NO: 1103650 - RNA, 22 nt, Human
ugccugacugcugccaccacua

SEQ ID NO: 1103651 - RNA, 22 nt, Human
ccccacccucgcuccauuucgg

SEQ ID NO: 1103652 - RNA, 22 nt, Human
ucuggcaggacaugcugaccau

SEQ ID NO: 1103653 - RNA, 22 nt, Human
aggguagggcccggagacagac

SEQ ID NO: 1103654 - RNA, 22 nt, Human
gaggcuguuaggagggacucug

SEQ ID NO: 1103655 - RNA, 17 nt, Human
ugccagccugucccagg

SEQ ID NO: 1103656 - RNA, 22 nt, Human
ucuggcagcaagauaacaaugg

SEQ ID NO: 1103657 - RNA, 22 nt, Human
uauucccagccucuuucuaucu

SEQ ID NO: 1103658 - RNA, 22 nt, Human
gcacacaguagggauucaauga

SEQ ID NO: 1103659 - RNA, 22 nt, Human
ccuucuucuguguggcccaaga

SEQ ID NO: 1103660 - RNA, 22 nt, Human
acccacacaucucuaauucagu

SEQ ID NO: 1103661 - RNA, 22 nt, Human
uggcagagagacucuccuugau

SEQ ID NO: 1103662 - RNA, 22 nt, Human
ugggagaaacugucucucccac

SEQ ID NO: 1103663 - RNA, 22 nt, Human
auccaggcgaaugcagaaggcc

SEQ ID NO: 1103664 - RNA, 19 nt, Human
ccuuccuccccagggccau

SEQ ID NO: 1103665 - RNA, 16 nt, Human
gcacacacaucaauga

SEQ ID NO: 1103666 - RNA, 22 nt, Human
ccuugcucaagcuagugacggg

SEQ ID NO: 1103667 - RNA, 22 nt, Human
gaccugccugagcugccucugc

SEQ ID NO: 1103668 - RNA, 22 nt, Human
ccuccagcgcgauccacuccgg

SEQ ID NO: 1103669 - RNA, 22 nt, Human
ccucucccgggugccgcugggc

SEQ ID NO: 1103670 - RNA, 22 nt, Human
agcacugugauuuauaacauuu

SEQ ID NO: 1103671 - RNA, 22 nt, Human
agcccaggucuggcccagccug

SEQ ID NO: 1103672 - RNA, 22 nt, Human
cuccuggcucgcccccagcuga

SEQ ID NO: 1103673 - RNA, 22 nt, Human
cagcccaggccgacaguuccuc

SEQ ID NO: 1103674 - RNA, 22 nt, Human
acagguggaggcuuuaggaggu

SEQ ID NO: 1103675 - RNA, 22 nt, Human
ucuggcagaggaaggaggccug

SEQ ID NO: 1103676 - RNA, 22 nt, Human
ggagccugaaaagucugcauuu

SEQ ID NO: 1103677 - RNA, 22 nt, Human
acuggcagguccaucgcccuuu

SEQ ID NO: 1103678 - RNA, 22 nt, Human
gaggagcuguucccucaccucu

SEQ ID NO: 1103679 - RNA, 22 nt, Human
aggccuccagccacaugccagu

SEQ ID NO: 1103680 - RNA, 22 nt, Human
cccuuccugggugucccggagu

SEQ ID NO: 1103681 - RNA, 22 nt, Human
gcacauaaagggcaugggaggu

SEQ ID NO: 1103682 - RNA, 23 nt, Human
guccucuggagagaaaggcagua

SEQ ID NO: 1103683 - RNA, 21 nt, Human
acacagaggcaucaucacuuu

SEQ ID NO: 1103684 - RNA, 22 nt, Human
agggcugacagugaggagucaa

SEQ ID NO: 1103685 - RNA, 21 nt, Human
uucucuccauaugcccagccc

SEQ ID NO: 1103686 - RNA, 22 nt, Human
ccauacacacaccaaauuugua

SEQ ID NO: 1103687 - RNA, 22 nt, Human
caugagauaauuuuucuccagu

SEQ ID NO: 1103688 - RNA, 22 nt, Human
aggaggcuuuugcaggugccac

SEQ ID NO: 1103689 - RNA, 22 nt, Human
aagaggucauaccagauaaggg

SEQ ID NO: 1103690 - RNA, 17 nt, Human
gcccacccuuaggagcu

SEQ ID NO: 1103691 - RNA, 22 nt, Human
ccuggcagguggcgcccucggc

SEQ ID NO: 1103692 - RNA, 22 nt, Human
uguaaacauaccagagccaagu

SEQ ID NO: 1103693 - RNA, 22 nt, Human
gacacagacaguuagagguaau

SEQ ID NO: 1103694 - RNA, 22 nt, Human
aggcuggauuuauggggacuuc

SEQ ID NO: 1103695 - RNA, 20 nt, Human
uuccacaucuuugcacaugc

SEQ ID NO: 1103696 - RNA, 22 nt, Human
gcccacaccauuuauucuuugu

SEQ ID NO: 1103697 - RNA, 22 nt, Human
gcacacacaugugaguacaugc

SEQ ID NO: 1103698 - RNA, 22 nt, Human
cagcccaggucucucuuccagu

SEQ ID NO: 1103699 - RNA, 22 nt, Human
acuggcaguagagggagcgcau

SEQ ID NO: 1103700 - RNA, 22 nt, Human
uccccacaucucugcaucaggc

SEQ ID NO: 1103701 - RNA, 17 nt, Human
cccaggccgccgggagc

SEQ ID NO: 1103702 - RNA, 22 nt, Human
acaucacacgccuuccaggagg

SEQ ID NO: 1103703 - RNA, 22 nt, Human
cagcccaaagccccaggcuaga

SEQ ID NO: 1103704 - RNA, 22 nt, Human
acaaauccagugaacuccagug

SEQ ID NO: 1103705 - RNA, 22 nt, Human
guccucugggcagcugccccac

SEQ ID NO: 1103706 - RNA, 22 nt, Human
gacuguggggggcggacacaag

SEQ ID NO: 1103707 - RNA, 22 nt, Human
cacagagacagaagcacuuaug

SEQ ID NO: 1103708 - RNA, 22 nt, Human
cuugccucccucagcucacagc

SEQ ID NO: 1103709 - RNA, 22 nt, Human
ccaucacaguccccaucgugau

SEQ ID NO: 1103710 - RNA, 22 nt, Human
guccucuguagggcugggccac

SEQ ID NO: 1103711 - RNA, 22 nt, Human
uggcaucuccgacagucuugau

SEQ ID NO: 1103712 - RNA, 22 nt, Human
cuaugagaagaaaacaagauua

SEQ ID NO: 1103713 - RNA, 22 nt, Human
uggaaagaggaagugcccagca

SEQ ID NO: 1103714 - RNA, 20 nt, Human
cacaacuguccacaugcucc

SEQ ID NO: 1103715 - RNA, 22 nt, Human
ucccacacagcccgcucaccgg

SEQ ID NO: 1103716 - RNA, 17 nt, Human
uuaagguggaucagcac

SEQ ID NO: 1103717 - RNA, 22 nt, Human
acccacaccuccguauaucacu

SEQ ID NO: 1103718 - RNA, 22 nt, Human
ccuggcaggcaagaggaaggga

SEQ ID NO: 1103719 - RNA, 22 nt, Human
gacccauauaggacccuccaaa

SEQ ID NO: 1103720 - RNA, 22 nt, Human
acaguucccgucuugcacagcu

SEQ ID NO: 1103721 - RNA, 22 nt, Human
gcuccaggagagggaagcagau

SEQ ID NO: 1103722 - RNA, 22 nt, Human
guccuggcccaggaguacacau

SEQ ID NO: 1103723 - RNA, 22 nt, Human
ucuggcaggucaaucauucuuu

SEQ ID NO: 1103724 - RNA, 22 nt, Human
gcuggcagucccaucagcuggg

SEQ ID NO: 1103725 - RNA, 22 nt, Human
cucucugggcccaguuggcacc

SEQ ID NO: 1103726 - RNA, 22 nt, Human
cugagccagggccacacaugga

SEQ ID NO: 1103727 - RNA, 21 nt, Human
cagcccagcccauugacagug

SEQ ID NO: 1103728 - RNA, 22 nt, Human
auccucuguggauuacaccuag

SEQ ID NO: 1103729 - RNA, 22 nt, Human
cgcugauaaacgucacguuccc

SEQ ID NO: 1103730 - RNA, 22 nt, Human
ucacacauuucucaaguguagg

SEQ ID NO: 1103731 - RNA, 22 nt, Human
acaugacuuuucucuuccagag

SEQ ID NO: 1103732 - RNA, 22 nt, Human
uccccacacagauacagaguag

SEQ ID NO: 1103733 - RNA, 22 nt, Human
uggcagugucuuaucaggagug

SEQ ID NO: 1103734 - RNA, 18 nt, Human
uccugccugugccccagg

SEQ ID NO: 1103735 - RNA, 22 nt, Human
ccaggcugggcggggaaccugg

SEQ ID NO: 1103736 - RNA, 21 nt, Human
ucuggcaggcacgggcccagc

SEQ ID NO: 1103737 - RNA, 22 nt, Human
ucccugcccucagugcacccgg

SEQ ID NO: 1103738 - RNA, 22 nt, Human
ucccaccccuugacucuuuaag

SEQ ID NO: 1103739 - RNA, 22 nt, Human
aaauacugcugcuauuccuuuu

SEQ ID NO: 1103740 - RNA, 22 nt, Human
cugcaggagcaaagccucugcu

SEQ ID NO: 1103741 - RNA, 22 nt, Human
uggcagagucaucacaucugga

SEQ ID NO: 1103742 - RNA, 22 nt, Human
uuccagccaugguuucccuaug

SEQ ID NO: 1103743 - RNA, 22 nt, Human
ggcccagcgaggccaccuacag

SEQ ID NO: 1103744 - RNA, 22 nt, Human
cucucuccuuagcugcagacca

SEQ ID NO: 1103745 - RNA, 21 nt, Human
agaugcugaugcugcaggucc

SEQ ID NO: 1103746 - RNA, 22 nt, Human
ggagucugcucccagacaugau

SEQ ID NO: 1103747 - RNA, 22 nt, Human
gauggccuggguccccuuccgg

SEQ ID NO: 1103748 - RNA, 22 nt, Human
acacacucaauugcauaagcac

SEQ ID NO: 1103749 - RNA, 21 nt, Human
gggcagaggggccuccugggu

SEQ ID NO: 1103750 - RNA, 22 nt, Human
caggauggucucgaucuccuga

SEQ ID NO: 1103751 - RNA, 22 nt, Human
gccuggcacucaaucaucugcu

SEQ ID NO: 1103752 - RNA, 22 nt, Human
uccccacacuuucacuccuggc

SEQ ID NO: 1103753 - RNA, 22 nt, Human
aggaagaaccuaagaaagucuc

SEQ ID NO: 1103754 - RNA, 22 nt, Human
uggcagagaacacacaugauuc

SEQ ID NO: 1103755 - RNA, 22 nt, Human
gcacaggaugauggguugaggg

SEQ ID NO: 1103756 - RNA, 22 nt, Human
uagauacaggcucucugagccu

SEQ ID NO: 1103757 - RNA, 22 nt, Human
acuccugggugcugaccagcgu

SEQ ID NO: 1103758 - RNA, 22 nt, Human
aggcaggggagcuggaagggua

SEQ ID NO: 1103759 - RNA, 22 nt, Human
cuggcaugaaauggcaucucau

SEQ ID NO: 1103760 - RNA, 22 nt, Human
guggcaguuuugacaucacaaa

SEQ ID NO: 1103761 - RNA, 23 nt, Human
uccuuccuuugagaggcuccauc

SEQ ID NO: 1103762 - RNA, 22 nt, Human
cacacauuucagaugcuacaau

SEQ ID NO: 1103763 - RNA, 22 nt, Human
agucuagggugggguccacagg

SEQ ID NO: 1103764 - RNA, 22 nt, Human
ucuuuuucugcacacguguccc

SEQ ID NO: 1103765 - RNA, 22 nt, Human
uucauugcaguucuucagguua

SEQ ID NO: 1103766 - RNA, 22 nt, Human
uggcagggugccaguugcgagu

SEQ ID NO: 1103767 - RNA, 22 nt, Human
auuccacacaguaauacucaau

SEQ ID NO: 1103768 - RNA, 22 nt, Human
uggaaagagguagaggaucugg

SEQ ID NO: 1103769 - RNA, 22 nt, Human
ucuggcaggcaaucggcucugg

SEQ ID NO: 1103770 - RNA, 22 nt, Human
cccagccuuccacccuggacua

SEQ ID NO: 1103771 - RNA, 20 nt, Human
aaagagcccuuggagcaggc

SEQ ID NO: 1103772 - RNA, 22 nt, Human
uccuggcaaagauguugguguu

SEQ ID NO: 1103773 - RNA, 22 nt, Human
gcacauacugcaaagauuacua

SEQ ID NO: 1103774 - RNA, 22 nt, Human
aggaagaacagauaauggacgc

SEQ ID NO: 1103775 - RNA, 22 nt, Human
auccaggccccaagaccccgac

SEQ ID NO: 1103776 - RNA, 22 nt, Human
gacacagagcucacagucuccu

SEQ ID NO: 1103777 - RNA, 22 nt, Human
gaggagcugggacccugucauc

SEQ ID NO: 1103778 - RNA, 22 nt, Human
cccacacaaaucauggggagaa

SEQ ID NO: 1103779 - RNA, 22 nt, Human
uuccugccccugagagcuccca

SEQ ID NO: 1103780 - RNA, 22 nt, Human
ucuggcagaaggcagaaauuca

SEQ ID NO: 1103781 - RNA, 22 nt, Human
accugccuaucagcugccugcu

SEQ ID NO: 1103782 - RNA, 22 nt, Human
ucuggcaguuugagaaaggcua

SEQ ID NO: 1103783 - RNA, 22 nt, Human
acagguccucaagucagcuggg

SEQ ID NO: 1103784 - RNA, 22 nt, Human
caggucccugcgccccggccuc

SEQ ID NO: 1103785 - RNA, 22 nt, Human
ccacacuaaacugcucaaacca

SEQ ID NO: 1103786 - RNA, 22 nt, Human
ucccacacuugaaacaaggcug

SEQ ID NO: 1103787 - RNA, 22 nt, Human
ccagccucacuggcaucaccua

SEQ ID NO: 1103788 - RNA, 22 nt, Human
ccacagaccuuggcuuccaccu

SEQ ID NO: 1103789 - RNA, 19 nt, Human
gcuggcagauguggccgug

SEQ ID NO: 1103790 - RNA, 22 nt, Human
cuccugaggacuucuauugggu

SEQ ID NO: 1103791 - RNA, 19 nt, Human
ugccuggcaccagcuccac

SEQ ID NO: 1103792 - RNA, 22 nt, Human
acaucacaguaguuaagccaga

SEQ ID NO: 1103793 - RNA, 22 nt, Human
ccucagcugcuucccuggagcc

SEQ ID NO: 1103794 - RNA, 20 nt, Human
acaaagacuggaaaagcaag

SEQ ID NO: 1103795 - RNA, 22 nt, Human
cucaccccacuaccccuuggug

SEQ ID NO: 1103796 - RNA, 22 nt, Human
ggagaagaggagcuggaagccu

SEQ ID NO: 1103797 - RNA, 22 nt, Human
ccuggcaguuuugcccaggauu

SEQ ID NO: 1103798 - RNA, 22 nt, Human
uugggaagaaacauguccauca

SEQ ID NO: 1103799 - RNA, 22 nt, Human
ucacacacauggauaguauuuu

SEQ ID NO: 1103800 - RNA, 22 nt, Human
acacauaagccuaaucaucucc

SEQ ID NO: 1103801 - RNA, 22 nt, Human
uccuucccaggugucgccgccu

SEQ ID NO: 1103802 - RNA, 19 nt, Human
acacauuugcacaauccac

SEQ ID NO: 1103803 - RNA, 22 nt, Human
ucaggcccuucucccaggacuc

SEQ ID NO: 1103804 - RNA, 22 nt, Human
cagguuggucggcaaguacaca

SEQ ID NO: 1103805 - RNA, 22 nt, Human
gauggccuuguuuucucccuuc

SEQ ID NO: 1103806 - RNA, 20 nt, Human
ccuggcaggcggguuacuua

SEQ ID NO: 1103807 - RNA, 22 nt, Human
agaggcuucucggauggggcag

SEQ ID NO: 1103808 - RNA, 22 nt, Human
ccaggcccugcuccucacacca

SEQ ID NO: 1103809 - RNA, 22 nt, Human
uacugacacaaagccaaucccu

SEQ ID NO: 1103810 - RNA, 22 nt, Human
aucacagagauugcuuuuaaaa

SEQ ID NO: 1103811 - RNA, 22 nt, Human
cagacagagucuucccaucagu

SEQ ID NO: 1103812 - RNA, 22 nt, Human
gcuggcagacugggggcagaac

SEQ ID NO: 1103813 - RNA, 22 nt, Human
gugugggaaggcuaggaugcug

SEQ ID NO: 1103814 - RNA, 22 nt, Human
ugagagucucagaccuccuggu

SEQ ID NO: 1103815 - RNA, 22 nt, Human
aggcugcuucagcugcagggag

SEQ ID NO: 1103816 - RNA, 22 nt, Human
acauaaugagcucuuuauaaau

SEQ ID NO: 1103817 - RNA, 22 nt, Human
uucccacaguguugaauccucu

SEQ ID NO: 1103818 - RNA, 22 nt, Human
cccgagugucuacucacuccca

SEQ ID NO: 1103819 - RNA, 22 nt, Human
ccacaucauggauacaguuaug

SEQ ID NO: 1103820 - RNA, 22 nt, Human
caauacugaguuuacauucauc

SEQ ID NO: 1103821 - RNA, 22 nt, Human
uguaaagaaagacgcagaguua

SEQ ID NO: 1103822 - RNA, 22 nt, Human
ugcacaggugagacucaggaag

SEQ ID NO: 1103823 - RNA, 22 nt, Human
acacagaugcauuacacaucua

SEQ ID NO: 1103824 - RNA, 22 nt, Human
ggagacucggguucuagccuug

SEQ ID NO: 1103825 - RNA, 22 nt, Human
uacaaaaguaauuacgguuuuu

SEQ ID NO: 1103826 - RNA, 22 nt, Human
gccuggcacaggaauuaggagg

SEQ ID NO: 1103827 - RNA, 22 nt, Human
uccugagcuacaguaguaugau

SEQ ID NO: 1103828 - RNA, 22 nt, Human
cacacagacagcucucugaaga

SEQ ID NO: 1103829 - RNA, 22 nt, Human
ucuggcagguucccauguuaug

SEQ ID NO: 1103830 - RNA, 21 nt, Human
acacacucugagucuucuauu

SEQ ID NO: 1103831 - RNA, 22 nt, Human
auccccacgauauagccaaagc

SEQ ID NO: 1103832 - RNA, 22 nt, Human
gcuggcagguccaagauagagc

SEQ ID NO: 1103833 - RNA, 22 nt, Human
acacacagaguuuauacaggca

SEQ ID NO: 1103834 - RNA, 22 nt, Human
ucccacauuacccugacugaca

SEQ ID NO: 1103835 - RNA, 22 nt, Human
cuuggcaggguggaggaugcag

SEQ ID NO: 1103836 - RNA, 22 nt, Human
ccccacccaccuaagagaaacu

SEQ ID NO: 1103837 - RNA, 22 nt, Human
acacacagaaggaagccccacu

SEQ ID NO: 1103838 - RNA, 22 nt, Human
acuggcagcuguaggaugcaug

SEQ ID NO: 1103839 - RNA, 22 nt, Human
aguugggaguuauagacucuau

SEQ ID NO: 1103840 - RNA, 22 nt, Human
gcccacacaccagcucaggagg

SEQ ID NO: 1103841 - RNA, 22 nt, Human
ccacauacaaauggggugcugu

SEQ ID NO: 1103842 - RNA, 22 nt, Human
guugggaagcagauggaugagc

SEQ ID NO: 1103843 - RNA, 22 nt, Human
caggaguggugugagggacucc

SEQ ID NO: 1103844 - RNA, 20 nt, Human
gcuggcagaugucuugagau

SEQ ID NO: 1103845 - RNA, 22 nt, Human
acugagagucaagauagcaugg

SEQ ID NO: 1103846 - RNA, 22 nt, Human
uacacauccauguuuugacuuu

SEQ ID NO: 1103847 - RNA, 22 nt, Human
acuggcaguuugagaaugcauu

SEQ ID NO: 1103848 - RNA, 22 nt, Human
uuggagagauuuaggucucagu

SEQ ID NO: 1103849 - RNA, 22 nt, Human
agcacaggaccaaggaagcugu

SEQ ID NO: 1103850 - RNA, 20 nt, Human
cugcuccacccggcucucag

SEQ ID NO: 1103851 - RNA, 22 nt, Human
ucuggcagugauuucugugauc

SEQ ID NO: 1103852 - RNA, 22 nt, Human
caucacagaaauaaacauaccu

SEQ ID NO: 1103853 - RNA, 22 nt, Human
ccuggcagcauugguagagauu

SEQ ID NO: 1103854 - RNA, 20 nt, Human
uggccucugagaugccacgg

SEQ ID NO: 1103855 - RNA, 22 nt, Human
ugcagagaagaggacaguucua

SEQ ID NO: 1103856 - RNA, 22 nt, Human
gcuccaggcagcauaguggaug

SEQ ID NO: 1103857 - RNA, 19 nt, Human
guccucucaacaacccggg

SEQ ID NO: 1103858 - RNA, 22 nt, Human
ugccucucuaacccaugcccaa

SEQ ID NO: 1103859 - RNA, 18 nt, Human
ccuagccuccaagcucau

SEQ ID NO: 1103860 - RNA, 22 nt, Human
cuugggaaugcuaacagaugac

SEQ ID NO: 1103861 - RNA, 22 nt, Human
ucuugggauagugucucauggc

SEQ ID NO: 1103862 - RNA, 22 nt, Human
cuucccacuaguaucacagagc

SEQ ID NO: 1103863 - RNA, 21 nt, Human
uccacccucucugcucccagu

SEQ ID NO: 1103864 - RNA, 22 nt, Human
gccccacagccugcggucucag

SEQ ID NO: 1103865 - RNA, 22 nt, Human
ccucccuucaguagagcccaau

SEQ ID NO: 1103866 - RNA, 22 nt, Human
uggccucugggaaagcagauuc

SEQ ID NO: 1103867 - RNA, 22 nt, Human
cuggcaguauuaagagaaguga

SEQ ID NO: 1103868 - RNA, 22 nt, Human
cugagagaucaagccacaggau

SEQ ID NO: 1103869 - RNA, 22 nt, Human
gaaaagaguccugugugaggag

SEQ ID NO: 1103870 - RNA, 22 nt, Human
gcuggcagaauuucuucuugcu

SEQ ID NO: 1103871 - RNA, 22 nt, Human
aggaggcuguggagcacuccau

SEQ ID NO: 1103872 - RNA, 22 nt, Human
aagagagaacucccuucgccag

SEQ ID NO: 1103873 - RNA, 22 nt, Human
cuuccucuagccuaguaaugcc

SEQ ID NO: 1103874 - RNA, 22 nt, Human
cccuggcagagggggcaggugc

SEQ ID NO: 1103875 - RNA, 22 nt, Human
ccuggcagcgccgaagcuggcc

SEQ ID NO: 1103876 - RNA, 22 nt, Human
auacauucaaaggaaggauaga

SEQ ID NO: 1103877 - RNA, 22 nt, Human
cugccugccuuggccuccagga

SEQ ID NO: 1103878 - RNA, 22 nt, Human
cagccaagaaccacagacccag

SEQ ID NO: 1103879 - RNA, 22 nt, Human
uccuggcaguaauuugauguug

SEQ ID NO: 1103880 - RNA, 22 nt, Human
cccagcccccgagugucuggaa

SEQ ID NO: 1103881 - RNA, 15 nt, Human
cacacagacagcuug

SEQ ID NO: 1103882 - RNA, 22 nt, Human
aggccccaaagcagugcaagua

SEQ ID NO: 1103883 - RNA, 22 nt, Human
guccuggcccacuggcaggcug

SEQ ID NO: 1103884 - RNA, 22 nt, Human
ccuggcagggcugcaguaaugg

SEQ ID NO: 1103885 - RNA, 22 nt, Human
ccuggcaguucaucaaauggca

SEQ ID NO: 1103886 - RNA, 22 nt, Human
gagaggcuggcagugccagguu

SEQ ID NO: 1103887 - RNA, 22 nt, Human
cacacaguaggcacucauuaau

SEQ ID NO: 1103888 - RNA, 22 nt, Human
aaagaaucagaagucucaaaca

SEQ ID NO: 1103889 - RNA, 22 nt, Human
gcugcgccggaucccacguucc

SEQ ID NO: 1103890 - RNA, 22 nt, Human
cccccaaaguuugcacggauaa

SEQ ID NO: 1103891 - RNA, 22 nt, Human
ggcaagagggcagauggagugc

SEQ ID NO: 1103892 - RNA, 22 nt, Human
aguguggcaggaaugacuagaa

SEQ ID NO: 1103893 - RNA, 22 nt, Human
ucuggcaggccuugucaaucug

SEQ ID NO: 1103894 - RNA, 22 nt, Human
cccacacucugagaaaugcuga

SEQ ID NO: 1103895 - RNA, 22 nt, Human
gcugcuaagcguuucuguucca

SEQ ID NO: 1103896 - RNA, 22 nt, Human
cuccucuguauugauugggacu

SEQ ID NO: 1103897 - RNA, 22 nt, Human
cacauacauucauguuacucua

SEQ ID NO: 1103898 - RNA, 22 nt, Human
guccucuggccuuucccaggac

SEQ ID NO: 1103899 - RNA, 22 nt, Human
uggcacaguccugggugccugc

SEQ ID NO: 1103900 - RNA, 22 nt, Human
cacaaaaguaggaggcaggcgg

SEQ ID NO: 1103901 - RNA, 22 nt, Human
aaaagagugacugauaaguaua

SEQ ID NO: 1103902 - RNA, 22 nt, Human
uggcagugguaccggcucucag

SEQ ID NO: 1103903 - RNA, 22 nt, Human
guccucuggaagaugaguucuu

SEQ ID NO: 1103904 - RNA, 22 nt, Human
ccugaccuauuuuucucagcug

SEQ ID NO: 1103905 - RNA, 22 nt, Human
cacauacaaggcacacuggagg

SEQ ID NO: 1103906 - RNA, 22 nt, Human
acacacagguaaaggagccugg

SEQ ID NO: 1103907 - RNA, 22 nt, Human
ccuggcagaaagaguuacaccu

SEQ ID NO: 1103908 - RNA, 22 nt, Human
accugccucagugcagcuggau

SEQ ID NO: 1103909 - RNA, 22 nt, Human
ucccugccuccuggcagugcca

SEQ ID NO: 1103910 - RNA, 22 nt, Human
ucaggauggagggaagcacaga

SEQ ID NO: 1103911 - RNA, 22 nt, Human
ccuggcagucaggggaguccuu

SEQ ID NO: 1103912 - RNA, 22 nt, Human
gccuccggagucacagugucuu

SEQ ID NO: 1103913 - RNA, 22 nt, Human
auggcagagggauugaacagcu

SEQ ID NO: 1103914 - RNA, 23 nt, Human
acacugucucauggauagacugc

SEQ ID NO: 1103915 - RNA, 21 nt, Human
agugccaguagguauggagga

SEQ ID NO: 1103916 - RNA, 22 nt, Human
ugcuggcacguggaccaggaga

SEQ ID NO: 1103917 - RNA, 22 nt, Human
ccaggcuguaagagugauguug

SEQ ID NO: 1103918 - RNA, 22 nt, Human
aaagagucaaaggcaugucucu

SEQ ID NO: 1103919 - RNA, 22 nt, Human
acagguggccccgagggagugg

SEQ ID NO: 1103920 - RNA, 22 nt, Human
guccucugacucagccuuggga

SEQ ID NO: 1103921 - RNA, 23 nt, Human
ugagggacaugguggcuucugag

SEQ ID NO: 1103922 - RNA, 22 nt, Human
agaggccggccgagcccauggg

SEQ ID NO: 1103923 - RNA, 22 nt, Human
ggccucucaugcccagagccaa

SEQ ID NO: 1103924 - RNA, 22 nt, Human
uccacacacauuucuaugugca

SEQ ID NO: 1103925 - RNA, 20 nt, Human
agggcugagaagggacuagc

SEQ ID NO: 1103926 - RNA, 22 nt, Human
gaggagcugcagggggagucua

SEQ ID NO: 1103927 - RNA, 22 nt, Human
agacaagaaacugggagucucu

SEQ ID NO: 1103928 - RNA, 22 nt, Human
aggaaagauggaaggaggauaa

SEQ ID NO: 1103929 - RNA, 22 nt, Human
uacacaucucugucaguaguga

SEQ ID NO: 1103930 - RNA, 22 nt, Human
gcuggcagccaagugaagaggg

SEQ ID NO: 1103931 - RNA, 22 nt, Human
ucacacaugaguaaauacaggg

SEQ ID NO: 1103932 - RNA, 22 nt, Human
aagagagagugcgcucacagaa

SEQ ID NO: 1103933 - RNA, 22 nt, Human
acugccaaugguaguuugaugg

SEQ ID NO: 1103934 - RNA, 22 nt, Human
uguaaacauauguauguaugua

SEQ ID NO: 1103935 - RNA, 22 nt, Human
ccuggcaggacuguuguaagaa

SEQ ID NO: 1103936 - RNA, 22 nt, Human
uuguaaacugcugcaggagugc

SEQ ID NO: 1103937 - RNA, 22 nt, Human
gacacuucaccuuucccagccu

SEQ ID NO: 1103938 - RNA, 22 nt, Human
gcuggcagagagcuggugagga

SEQ ID NO: 1103939 - RNA, 22 nt, Human
ccucuccuugcacccgucccgc

SEQ ID NO: 1103940 - RNA, 22 nt, Human
ucccagccacaguuuccaccug

SEQ ID NO: 1103941 - RNA, 22 nt, Human
caucacagguccugaugacauu

SEQ ID NO: 1103942 - RNA, 23 nt, Human
acauacauggagauaaagugaug

SEQ ID NO: 1103943 - RNA, 22 nt, Human
gcuggcagcauuagacccuggg

SEQ ID NO: 1103944 - RNA, 22 nt, Human
gcuggcaguaaaggguuuggca

SEQ ID NO: 1103945 - RNA, 22 nt, Human
uuccaggcuucucuggggcguc

SEQ ID NO: 1103946 - RNA, 22 nt, Human
acuggcagaggauagcacuaau

SEQ ID NO: 1103947 - RNA, 22 nt, Human
auacaugacucacacauucugc

SEQ ID NO: 1103948 - RNA, 22 nt, Human
auggcagauggcuggagcaggu

SEQ ID NO: 1103949 - RNA, 22 nt, Human
uuggaacaugccgggguccagg

SEQ ID NO: 1103950 - RNA, 22 nt, Human
cggcuggugucgggcacagcaa

SEQ ID NO: 1103951 - RNA, 22 nt, Human
gaggagcucugcuccauccuuc

SEQ ID NO: 1103952 - RNA, 22 nt, Human
uaagaacaguagaacaguaggu

SEQ ID NO: 1103953 - RNA, 22 nt, Human
aggaggcugaacuagggucugg

SEQ ID NO: 1103954 - RNA, 22 nt, Human
ucuggcagcagcaucaguggcu

SEQ ID NO: 1103955 - RNA, 21 nt, Human
ucuggcagcaguuuguugagu

SEQ ID NO: 1103956 - RNA, 22 nt, Human
ccuggcagcuccguggccuucc

SEQ ID NO: 1103957 - RNA, 22 nt, Human
ccccacacucuuuacauucaua

SEQ ID NO: 1103958 - RNA, 22 nt, Human
acacucuguaaugucacacucc

SEQ ID NO: 1103959 - RNA, 22 nt, Human
ugccugccucuggcagcccugc

SEQ ID NO: 1103960 - RNA, 22 nt, Human
ccauucauacaauuuuguucua

SEQ ID NO: 1103961 - RNA, 22 nt, Human
acuggcagaacuggugauuguc

SEQ ID NO: 1103962 - RNA, 22 nt, Human
gacacagauaucucugagauua

SEQ ID NO: 1103963 - RNA, 22 nt, Human
cccacacauuuuucacuuaccg

SEQ ID NO: 1103964 - RNA, 22 nt, Human
cugccugcugcccuccagagcc

SEQ ID NO: 1103965 - RNA, 23 nt, Human
uaaauuaccuuuccagugcaggg

SEQ ID NO: 1103966 - RNA, 22 nt, Human
uggucucugcaggccaggcuca

SEQ ID NO: 1103967 - RNA, 21 nt, Human
ccacucaugacuccacucacc

SEQ ID NO: 1103968 - RNA, 22 nt, Human
uuccuggccaagcagaguggaa

SEQ ID NO: 1103969 - RNA, 22 nt, Human
gcuggcagaagagcugguucaa

SEQ ID NO: 1103970 - RNA, 22 nt, Human
cugccugcaggacaccucgcua

SEQ ID NO: 1103971 - RNA, 22 nt, Human
acacauacauggggaagaugag

SEQ ID NO: 1103972 - RNA, 22 nt, Human
gccuccuguuaugccaugugcc

SEQ ID NO: 1103973 - RNA, 22 nt, Human
gacaaaaguguuuugaacaagg

SEQ ID NO: 1103974 - RNA, 22 nt, Human
uccaggcaaaaaccaacuacag

SEQ ID NO: 1103975 - RNA, 22 nt, Human
agagggugcuggagagacauug

SEQ ID NO: 1103976 - RNA, 22 nt, Human
ccuggcagccucagccaauucu

SEQ ID NO: 1103977 - RNA, 22 nt, Human
auggcagacgaggcagcagggg

SEQ ID NO: 1103978 - RNA, 22 nt, Human
ucaggcccagagucacggaucc

SEQ ID NO: 1103979 - RNA, 22 nt, Human
agggacucccugggccgacacg

SEQ ID NO: 1103980 - RNA, 22 nt, Human
ccugccucccagagguccucua

SEQ ID NO: 1103981 - RNA, 22 nt, Human
acacacuggcccccaguacuga

SEQ ID NO: 1103982 - RNA, 21 nt, Human
ccuggcagaagccugauaugc

SEQ ID NO: 1103983 - RNA, 22 nt, Human
ugccagccagggaagcucaccc

SEQ ID NO: 1103984 - RNA, 22 nt, Human
aggaggcugggcacaguggccu

SEQ ID NO: 1103985 - RNA, 22 nt, Human
acuggcagugucguuuacauga

SEQ ID NO: 1103986 - RNA, 22 nt, Human
acaauucugaugguuucccagu

SEQ ID NO: 1103987 - RNA, 22 nt, Human
uggcaguggcucagagugcaga

SEQ ID NO: 1103988 - RNA, 22 nt, Human
acccacccuacuagcagugucc

SEQ ID NO: 1103989 - RNA, 23 nt, Human
ccuggcagcaaacgaggagguua

SEQ ID NO: 1103990 - RNA, 22 nt, Human
ccuggcugguggcagcgacaag

SEQ ID NO: 1103991 - RNA, 22 nt, Human
cuuggcagagggcugggcucag

SEQ ID NO: 1103992 - RNA, 22 nt, Human
ucccacccccuccaaggaggaa

SEQ ID NO: 1103993 - RNA, 22 nt, Human
cacauacuuguguguacauaug

SEQ ID NO: 1103994 - RNA, 22 nt, Human
acuggcagcagcagcccuuggg

SEQ ID NO: 1103995 - RNA, 22 nt, Human
ucaucacaauuuuaugacccuc

SEQ ID NO: 1103996 - RNA, 22 nt, Human
gggacaauggaggccucucucc

SEQ ID NO: 1103997 - RNA, 22 nt, Human
ucacauacugaaaguccaguga

SEQ ID NO: 1103998 - RNA, 22 nt, Human
aaagaucaaguaggcauggccu

SEQ ID NO: 1103999 - RNA, 22 nt, Human
ggccucagagaaggcugugcgg

SEQ ID NO: 1104000 - RNA, 22 nt, Human
ggugccaggcuguagucagggu

SEQ ID NO: 1104001 - RNA, 22 nt, Human
ucuggcagggguucugcacuug

SEQ ID NO: 1104002 - RNA, 22 nt, Human
cuccugaggaaaagcuugguca

SEQ ID NO: 1104003 - RNA, 22 nt, Human
ggccucucugagagcagacguu

SEQ ID NO: 1104004 - RNA, 22 nt, Human
aguguugggucuuuagaauuua

SEQ ID NO: 1104005 - RNA, 22 nt, Human
guccacagagggcugggcaggc

SEQ ID NO: 1104006 - RNA, 22 nt, Human
guccuggcaccucacuggcuac

SEQ ID NO: 1104007 - RNA, 23 nt, Human
ggacacauuuauuucagaauuca

SEQ ID NO: 1104008 - RNA, 22 nt, Human
gccuccuggaagucacauguuu

SEQ ID NO: 1104009 - RNA, 22 nt, Human
cccagccugugacagccguccu

SEQ ID NO: 1104010 - RNA, 22 nt, Human
gcacauacccacugucaagcac

SEQ ID NO: 1104011 - RNA, 22 nt, Human
uuccuggcauagagagggcaca

SEQ ID NO: 1104012 - RNA, 22 nt, Human
gaggagcugagccacguccugg

SEQ ID NO: 1104013 - RNA, 22 nt, Human
uacacacaugcauuugccuuau

SEQ ID NO: 1104014 - RNA, 20 nt, Human
acuggcagccugccugcugu

SEQ ID NO: 1104015 - RNA, 22 nt, Human
ggagcugaguucuucagccggg

SEQ ID NO: 1104016 - RNA, 22 nt, Human
gacccggcuccaggcccagcag

SEQ ID NO: 1104017 - RNA, 22 nt, Human
ccagugcccagcugcccaggca

SEQ ID NO: 1104018 - RNA, 22 nt, Human
uccuggcauugugcagggugug

SEQ ID NO: 1104019 - RNA, 23 nt, Human
cauccaggagcugagucugacug

SEQ ID NO: 1104020 - RNA, 22 nt, Human
cuccuggcacucaguguggaag

SEQ ID NO: 1104021 - RNA, 22 nt, Human
ucaucacauguguagucauccc

SEQ ID NO: 1104022 - RNA, 23 nt, Human
gcccacccucagcguccucacgg

SEQ ID NO: 1104023 - RNA, 22 nt, Human
gcacacagcuagauuaccauuc

SEQ ID NO: 1104024 - RNA, 22 nt, Human
guccucugaaagaugaaccaug

SEQ ID NO: 1104025 - RNA, 19 nt, Human
acuggcagcuguagucugu

SEQ ID NO: 1104026 - RNA, 22 nt, Human
gaggagcuggcagcgucuccgc

SEQ ID NO: 1104027 - RNA, 22 nt, Human
guccucugauuucuagguauau

SEQ ID NO: 1104028 - RNA, 22 nt, Human
uguaaacagccccauggagagc

SEQ ID NO: 1104029 - RNA, 22 nt, Human
cccugagcgugaggaggaagua

SEQ ID NO: 1104030 - RNA, 22 nt, Human
agggaagaagcugguaguaggu

SEQ ID NO: 1104031 - RNA, 17 nt, Human
gcaucacagauaacacg

SEQ ID NO: 1104032 - RNA, 22 nt, Human
cugcaggacgaccgccucaucu

SEQ ID NO: 1104033 - RNA, 22 nt, Human
gccagguugcugacgacgaucu

SEQ ID NO: 1104034 - RNA, 22 nt, Human
acacacagcgccuaccaugugc

SEQ ID NO: 1104035 - RNA, 22 nt, Human
auaauggccgggggcugaaugc

SEQ ID NO: 1104036 - RNA, 22 nt, Human
uuccaggcuauccggugaaggg

SEQ ID NO: 1104037 - RNA, 22 nt, Human
gcuggcagcuggaaguugggcu

SEQ ID NO: 1104038 - RNA, 22 nt, Human
ucuggcaguaauaggggagaga

SEQ ID NO: 1104039 - RNA, 22 nt, Human
ccuggcagcuguuuggcuuggc

SEQ ID NO: 1104040 - RNA, 22 nt, Human
agacacauaggaccacacugug

SEQ ID NO: 1104041 - RNA, 22 nt, Human
ggugccagugggucucaggaua

SEQ ID NO: 1104042 - RNA, 22 nt, Human
guccucuggugaaagcauuccc

SEQ ID NO: 1104043 - RNA, 22 nt, Human
uucuuucaauagcuggcauaug

SEQ ID NO: 1104044 - RNA, 22 nt, Human
acacacacaagcagguugugga

SEQ ID NO: 1104045 - RNA, 22 nt, Human
agagucccagggacacuccaga

SEQ ID NO: 1104046 - RNA, 17 nt, Human
agccugccccaugcugc

SEQ ID NO: 1104047 - RNA, 22 nt, Human
ucuggcagaagugcugucagua

SEQ ID NO: 1104048 - RNA, 22 nt, Human
cccuuccuugugacuggugggg

SEQ ID NO: 1104049 - RNA, 22 nt, Human
guuaggaacacuggagccuaaa

SEQ ID NO: 1104050 - RNA, 22 nt, Human
ugagggacucccggcccugcca

SEQ ID NO: 1104051 - RNA, 18 nt, Human
gacacauccccaggccuc

SEQ ID NO: 1104052 - RNA, 22 nt, Human
aaauuacagaucaccaaugcau

SEQ ID NO: 1104053 - RNA, 22 nt, Human
ccuggcagcccagagcgccgcu

SEQ ID NO: 1104054 - RNA, 22 nt, Human
ucuggcagggucagggcccagg

SEQ ID NO: 1104055 - RNA, 22 nt, Human
uccugagccugacaaucaccau

SEQ ID NO: 1104056 - RNA, 22 nt, Human
ugguccuggaagguccugaggg

SEQ ID NO: 1104057 - RNA, 19 nt, Human
acuggcaguuucugcaugg

SEQ ID NO: 1104058 - RNA, 22 nt, Human
gucaggacucugacccgucccg

SEQ ID NO: 1104059 - RNA, 22 nt, Human
acacacuguugcucauccaggc

SEQ ID NO: 1104060 - RNA, 22 nt, Human
cagucacauagguauacacaua

SEQ ID NO: 1104061 - RNA, 21 nt, Human
ccagcccagcugugucccagc

SEQ ID NO: 1104062 - RNA, 22 nt, Human
cccagcccacgguccugggugg

SEQ ID NO: 1104063 - RNA, 22 nt, Human
gcuugggaagggcccuguguac

SEQ ID NO: 1104064 - RNA, 22 nt, Human
gacacagagggcaccagauaug

SEQ ID NO: 1104065 - RNA, 22 nt, Human
cacacagaugguaagggaggga

SEQ ID NO: 1104066 - RNA, 22 nt, Human
uggcaguagauccagucucucu

SEQ ID NO: 1104067 - RNA, 22 nt, Human
ccugccuucagcccugaagucu

SEQ ID NO: 1104068 - RNA, 22 nt, Human
uccuggcacuuugggggcucgc

SEQ ID NO: 1104069 - RNA, 22 nt, Human
cuccaggccccuggccuucugc

SEQ ID NO: 1104070 - RNA, 22 nt, Human
cccagcaugcacgcugacacuc

SEQ ID NO: 1104071 - RNA, 22 nt, Human
ucccuccuggccgucaccgcug

SEQ ID NO: 1104072 - RNA, 22 nt, Human
gcuggcaggauaacuucuaagc

SEQ ID NO: 1104073 - RNA, 22 nt, Human
cccacacacuggcugcugccaa

SEQ ID NO: 1104074 - RNA, 22 nt, Human
agagcacagaagaauaggugcu

SEQ ID NO: 1104075 - RNA, 22 nt, Human
ccacaaaacugugugucaaaga

SEQ ID NO: 1104076 - RNA, 22 nt, Human
ggcugaguugagaggauuacuu

SEQ ID NO: 1104077 - RNA, 22 nt, Human
uggcagagaacacggcugaucu

SEQ ID NO: 1104078 - RNA, 22 nt, Human
uuccuggccccaccccuggaga

SEQ ID NO: 1104079 - RNA, 22 nt, Human
cuuggcaguuucggaaggauga

SEQ ID NO: 1104080 - RNA, 22 nt, Human
uccugccuguuuaccuguacuu

SEQ ID NO: 1104081 - RNA, 22 nt, Human
gcaguguuuguguucucacaug

SEQ ID NO: 1104082 - RNA, 22 nt, Human
uccaggcaagggaggagcaugg

SEQ ID NO: 1104083 - RNA, 22 nt, Human
agugccccaugggugccugggg

SEQ ID NO: 1104084 - RNA, 22 nt, Human
cccaggccagaacuugguugcu

SEQ ID NO: 1104085 - RNA, 22 nt, Human
cauuacaaccccaaauuacaaa

SEQ ID NO: 1104086 - RNA, 22 nt, Human
aucacaauguacguuaaaaugu

SEQ ID NO: 1104087 - RNA, 22 nt, Human
ucuggcaguugccgcuucaguc

SEQ ID NO: 1104088 - RNA, 22 nt, Human
uccugagcaacacagcuaagug

SEQ ID NO: 1104089 - RNA, 22 nt, Human
ccuggcaguggugaagaagagg

SEQ ID NO: 1104090 - RNA, 17 nt, Human
ccauacugacauauuga

SEQ ID NO: 1104091 - RNA, 22 nt, Human
ucuggcagcucuccucggcgga

SEQ ID NO: 1104092 - RNA, 22 nt, Human
cccaggccuggucugggccagu

SEQ ID NO: 1104093 - RNA, 22 nt, Human
gcuggcagagcucugggcuggg

SEQ ID NO: 1104094 - RNA, 22 nt, Human
uccugagcccuguaggacccug

SEQ ID NO: 1104095 - RNA, 22 nt, Human
uacacaacugacaaccauucug

SEQ ID NO: 1104096 - RNA, 22 nt, Human
gccucaggccgcccugcugcuc

SEQ ID NO: 1104097 - RNA, 22 nt, Human
ugcacaggaggcuguggagaag

SEQ ID NO: 1104098 - RNA, 22 nt, Human
aaagagucuggcacuguaccag

SEQ ID NO: 1104099 - RNA, 22 nt, Human
ugagagucuguuccucuugcag

SEQ ID NO: 1104100 - RNA, 22 nt, Human
uggcacagggcuuggucgcuca

SEQ ID NO: 1104101 - RNA, 22 nt, Human
acaagagcauugcagguguguu

SEQ ID NO: 1104102 - RNA, 22 nt, Human
aucacagagcucccuuccacug

SEQ ID NO: 1104103 - RNA, 22 nt, Human
uccuggcagggucuaggucuag

SEQ ID NO: 1104104 - RNA, 22 nt, Human
gagacacacauucuggagagaa

SEQ ID NO: 1104105 - RNA, 22 nt, Human
ggagagaauuccauggacaugu

SEQ ID NO: 1104106 - RNA, 22 nt, Human
cugagggucaacuugauuguau

SEQ ID NO: 1104107 - RNA, 22 nt, Human
ccuucucucugaagaccccaaa

SEQ ID NO: 1104108 - RNA, 22 nt, Human
gucuggaaggaggagauggagc

SEQ ID NO: 1104109 - RNA, 22 nt, Human
cucaucaccacauauaacaaag

SEQ ID NO: 1104110 - RNA, 22 nt, Human
gucacacagggccuccaaauca

SEQ ID NO: 1104111 - RNA, 22 nt, Human
accugccuucucaaggacauga

SEQ ID NO: 1104112 - RNA, 22 nt, Human
gcuggcaggagaccauacccua

SEQ ID NO: 1104113 - RNA, 22 nt, Human
aggagcugcagauucugccuug

SEQ ID NO: 1104114 - RNA, 22 nt, Human
ucuggcaggauaucgaagugaa

SEQ ID NO: 1104115 - RNA, 23 nt, Human
aguguugguugggaagccaagca

SEQ ID NO: 1104116 - RNA, 22 nt, Human
agccagggucucucgcucuguu

SEQ ID NO: 1104117 - RNA, 22 nt, Human
ucuggcagcuauccucuggcca

SEQ ID NO: 1104118 - RNA, 22 nt, Human
acaucccacagaaacauacaua

SEQ ID NO: 1104119 - RNA, 22 nt, Human
ucccacaggaaaguagacauug

SEQ ID NO: 1104120 - RNA, 22 nt, Human
cagguugguauucaucuccaca

SEQ ID NO: 1104121 - RNA, 22 nt, Human
uguggggaagaguaugacuugg

SEQ ID NO: 1104122 - RNA, 22 nt, Human
ccuccuggcuuuucccauugaa

SEQ ID NO: 1104123 - RNA, 22 nt, Human
uccacccugcuuucuuaucucc

SEQ ID NO: 1104124 - RNA, 22 nt, Human
agaggcuuggaggugcaagguu

SEQ ID NO: 1104125 - RNA, 22 nt, Human
uccugagcacagagacaaggaa

SEQ ID NO: 1104126 - RNA, 22 nt, Human
ucuggcagaucuucccacguuu

SEQ ID NO: 1104127 - RNA, 22 nt, Human
gccuggcaggggccugggagug

SEQ ID NO: 1104128 - RNA, 22 nt, Human
uccccacagcagaagaucugag

SEQ ID NO: 1104129 - RNA, 22 nt, Human
guccucuggagguuuuuaggug

SEQ ID NO: 1104130 - RNA, 18 nt, Human
ggccucuggacuggcagc

SEQ ID NO: 1104131 - RNA, 22 nt, Human
cacacacuggagcaaggagaug

SEQ ID NO: 1104132 - RNA, 22 nt, Human
acagguggcuuauuggcugauu

SEQ ID NO: 1104133 - RNA, 21 nt, Human
caggaacauucuuuacauuua

SEQ ID NO: 1104134 - RNA, 22 nt, Human
cagacuuaccuaaggucacaca

SEQ ID NO: 1104135 - RNA, 22 nt, Human
auuguauacaagcuuaauuguu

SEQ ID NO: 1104136 - RNA, 22 nt, Human
uauaagaaacaaggcaaauuuu

SEQ ID NO: 1104137 - RNA, 22 nt, Human
aaggauuuuuggaaugagaugg

SEQ ID NO: 1104138 - RNA, 22 nt, Human
agucaagguggaccagaaaaau

SEQ ID NO: 1104139 - RNA, 22 nt, Human
auagcaaaggacaauagucagu

SEQ ID NO: 1104140 - RNA, 22 nt, Human
auuuacagacguggauuagugc

SEQ ID NO: 1104141 - RNA, 22 nt, Human
uggaaauacaagaaguauguca

SEQ ID NO: 1104142 - RNA, 22 nt, Human
augaacaguacaaagcacagac

SEQ ID NO: 1104143 - RNA, 22 nt, Human
auaggacuuuguaucaggauga

SEQ ID NO: 1104144 - RNA, 22 nt, Human
gaauacaaauaauaccaaggug

SEQ ID NO: 1104145 - RNA, 22 nt, Human
cagcaguacuucucagagguau

SEQ ID NO: 1104146 - RNA, 22 nt, Human
acagagacacggaagcuaaaga

SEQ ID NO: 1104147 - RNA, 22 nt, Human
cuuccagugcauagguagauca

SEQ ID NO: 1104148 - RNA, 22 nt, Human
gcagagcacccugcagugguau

SEQ ID NO: 1104149 - RNA, 22 nt, Human
uagcuguucucuguaaauugga

SEQ ID NO: 1104150 - RNA, 20 nt, Human
gagcagugagccagggaaag

SEQ ID NO: 1104151 - RNA, 22 nt, Human
auuagguaguauaaucuuuguu

SEQ ID NO: 1104152 - RNA, 22 nt, Human
uacugcaaaccauuuacaguag

SEQ ID NO: 1104153 - RNA, 22 nt, Human
aagagagaacucccuucgccag

SEQ ID NO: 1104154 - RNA, 19 nt, Human
gcuguuaaggacccucgga

SEQ ID NO: 1104155 - RNA, 22 nt, Human
ugcucccaaaccugacaggcuc

SEQ ID NO: 1104156 - RNA, 22 nt, Human
acagaguaucuaucaggaguau

SEQ ID NO: 1104157 - RNA, 21 nt, Human
uaagaacauuaucuucuuccu

SEQ ID NO: 1104158 - RNA, 22 nt, Human
cuucacaaaauauuucauuaua

SEQ ID NO: 1104159 - RNA, 21 nt, Human
ugcuccaggagggggcagucc

SEQ ID NO: 1104160 - RNA, 22 nt, Human
gaagaaguguaagucuguuuca

SEQ ID NO: 1104161 - RNA, 22 nt, Human
agaguuuacagaaauaagcugu

SEQ ID NO: 1104162 - RNA, 22 nt, Human
guuaacaacacugugagugcug

SEQ ID NO: 1104163 - RNA, 22 nt, Human
ucauacauguuguguucaaaug

SEQ ID NO: 1104164 - RNA, 22 nt, Human
agagugaaguaauuguuaggau

SEQ ID NO: 1104165 - RNA, 22 nt, Human
uauaaacuccucuugcauuccu

SEQ ID NO: 1104166 - RNA, 22 nt, Human
uguaauguuagaaacaauugcu

SEQ ID NO: 1104167 - RNA, 18 nt, Human
accugauuggcgcagccc

SEQ ID NO: 1104168 - RNA, 22 nt, Human
caggaacagcaccaggagcuag

SEQ ID NO: 1104169 - RNA, 22 nt, Human
cugagcaggacagugggagacc

SEQ ID NO: 1104170 - RNA, 22 nt, Human
uuuacagagaauguacauaaag

SEQ ID NO: 1104171 - RNA, 22 nt, Human
cagagcagcagagcuuccaugg

SEQ ID NO: 1104172 - RNA, 22 nt, Human
uucaacaacuugguucaaaugg

SEQ ID NO: 1104173 - RNA, 15 nt, Human
gccuugaaugugaau

SEQ ID NO: 1104174 - RNA, 22 nt, Human
uccuagaauauuuguggagguu

SEQ ID NO: 1104175 - RNA, 20 nt, Human
cagagcagugcccaggcggc

SEQ ID NO: 1104176 - RNA, 22 nt, Human
ggcuuuggggguguccaagaaa

SEQ ID NO: 1104177 - RNA, 22 nt, Human
guagcagagggcccagguaacu

SEQ ID NO: 1104178 - RNA, 22 nt, Human
cugagguagggacgugccguag

SEQ ID NO: 1104179 - RNA, 22 nt, Human
gguuuguggagcuggaaacacu

SEQ ID NO: 1104180 - RNA, 22 nt, Human
aaggcauggcaggguuuacaca

SEQ ID NO: 1104181 - RNA, 22 nt, Human
aguacaagugaugugguaaaaa

SEQ ID NO: 1104182 - RNA, 22 nt, Human
cauuaacacuuuggauuuagac

SEQ ID NO: 1104183 - RNA, 22 nt, Human
cagagcugagucuucaagguug

SEQ ID NO: 1104184 - RNA, 22 nt, Human
caggaacacaaugagucucaaa

SEQ ID NO: 1104185 - RNA, 22 nt, Human
acaagucaguggaauuaauauu

SEQ ID NO: 1104186 - RNA, 22 nt, Human
aaaucaugguggaagaaacaga

SEQ ID NO: 1104187 - RNA, 22 nt, Human
augugauacuccuucuagugga

SEQ ID NO: 1104188 - RNA, 21 nt, Human
ugcauauauaagugcauacac

SEQ ID NO: 1104189 - RNA, 22 nt, Human
aaaacuuucagggauacagaaa

SEQ ID NO: 1104190 - RNA, 22 nt, Human
uccugagauaggaguugaaggc

SEQ ID NO: 1104191 - RNA, 22 nt, Human
cuauacagcagcuuacuaguua

SEQ ID NO: 1104192 - RNA, 22 nt, Human
cauccauagauugagagauggu

SEQ ID NO: 1104193 - RNA, 22 nt, Human
aguaauggguugaaauuuaguu

SEQ ID NO: 1104194 - RNA, 22 nt, Human
ugucauggacuggauuucugcu

SEQ ID NO: 1104195 - RNA, 22 nt, Human
augacuuaaucauacuugcauu

SEQ ID NO: 1104196 - RNA, 22 nt, Human
uaagucauagauuaauggccac

SEQ ID NO: 1104197 - RNA, 22 nt, Human
auacaugacucacacauucugc

SEQ ID NO: 1104198 - RNA, 22 nt, Human
cugagguagaggaaauguagcu

SEQ ID NO: 1104199 - RNA, 22 nt, Human
auauaugaagaagucuugauua

SEQ ID NO: 1104200 - RNA, 22 nt, Human
ucauggcucuaaagacauagau

SEQ ID NO: 1104201 - RNA, 22 nt, Human
agguuuggguucauugcuggcu

SEQ ID NO: 1104202 - RNA, 22 nt, Human
aguaacagguguacagacuauc

SEQ ID NO: 1104203 - RNA, 22 nt, Human
gcaguaaauugagagucauguu

SEQ ID NO: 1104204 - RNA, 22 nt, Human
aucagagcugcauuuuagagcc

SEQ ID NO: 1104205 - RNA, 22 nt, Human
aaacccugagacuuggggccag

SEQ ID NO: 1104206 - RNA, 22 nt, Human
aguguuaaggcugguugcuaua

SEQ ID NO: 1104207 - RNA, 22 nt, Human
agcagcaggugaccucgaugcc

SEQ ID NO: 1104208 - RNA, 22 nt, Human
ugcuccugaacacagcccuaug

SEQ ID NO: 1104209 - RNA, 22 nt, Human
ugagaacaaaguugaaaguuug

SEQ ID NO: 1104210 - RNA, 22 nt, Human
agagaagcagggagucaucugu

SEQ ID NO: 1104211 - RNA, 22 nt, Human
caaauguuugguggcauuuugu

SEQ ID NO: 1104212 - RNA, 22 nt, Human
aacacuaaaggucaguuagaag

SEQ ID NO: 1104213 - RNA, 22 nt, Human
acagggcaccugagguaggaag

SEQ ID NO: 1104214 - RNA, 22 nt, Human
uaaagcaaugaaaguuuugcag

SEQ ID NO: 1104215 - RNA, 22 nt, Human
agagaagagucuugucaaauua

SEQ ID NO: 1104216 - RNA, 22 nt, Human
cagagcagaaaccugggugauu

SEQ ID NO: 1104217 - RNA, 22 nt, Human
uuccaaguuaggcgagcuggug

SEQ ID NO: 1104218 - RNA, 20 nt, Human
acaacuuaguugagagacua

SEQ ID NO: 1104219 - RNA, 22 nt, Human
uggcuccguuguacaggcugga

SEQ ID NO: 1104220 - RNA, 22 nt, Human
agagucaguuaugucaagugcu

SEQ ID NO: 1104221 - RNA, 22 nt, Human
aagauuuaccacuuuauucaag

SEQ ID NO: 1104222 - RNA, 22 nt, Human
aucauccauggcugaucauaaa

SEQ ID NO: 1104223 - RNA, 22 nt, Human
aacacaguuucugcauugguag

SEQ ID NO: 1104224 - RNA, 17 nt, Human
ugagcaguagaagaugc

SEQ ID NO: 1104225 - RNA, 17 nt, Human
acuuguauugugcuuua

SEQ ID NO: 1104226 - RNA, 22 nt, Human
caaacuuacuguguuuaaagag

SEQ ID NO: 1104227 - RNA, 22 nt, Human
gcaccgagaaggaagcaugccu

SEQ ID NO: 1104228 - RNA, 22 nt, Human
agaacagaggccuuauguuuca

SEQ ID NO: 1104229 - RNA, 22 nt, Human
aaugaguuuguucuauuauuug

SEQ ID NO: 1104230 - RNA, 22 nt, Human
gcauuuaaauuugaacuucaga

SEQ ID NO: 1104231 - RNA, 22 nt, Human
cuuaagacaggcucaaagauua

SEQ ID NO: 1104232 - RNA, 22 nt, Sin Nombre virus
uauaagaucacauuugauguug

SEQ ID NO: 1104233 - RNA, 23 nt, Sin Nombre virus
auaacaaauuacugucuuccuug

SEQ ID NO: 1104234 - RNA, 22 nt, Sin Nombre virus
auaagcaaugcuuuuauuauau

SEQ ID NO: 1104235 - RNA, 22 nt, Human
aaggcaguagguguuucaaacu

SEQ ID NO: 1104236 - RNA, 22 nt, Human
caggauggucuucauuuggcuc

SEQ ID NO: 1104237 - RNA, 22 nt, Human
ggguacuuaauauuuacggggu

SEQ ID NO: 1104238 - RNA, 22 nt, Human
uaagcugugggagauuggcaua

SEQ ID NO: 1104239 - RNA, 22 nt, Human
cucaggauagauuguccucuca

SEQ ID NO: 1104240 - RNA, 20 nt, Human
ggggcugcaugcagagaaga

SEQ ID NO: 1104241 - RNA, 22 nt, Human
aaguggacuaauacaaggacua

SEQ ID NO: 1104242 - RNA, 22 nt, Human
aucaggaugaagcuguagcgaa

SEQ ID NO: 1104243 - RNA, 22 nt, Human
uggagacugugcuaagggaguu

SEQ ID NO: 1104244 - RNA, 22 nt, Human
uaaggccaaggggccauagucu

SEQ ID NO: 1104245 - RNA, 22 nt, Human
acauacacaagcguacaugaac

SEQ ID NO: 1104246 - RNA, 22 nt, Human
uucccacagagauuacauugaa

SEQ ID NO: 1104247 - RNA, 22 nt, Human
gcacauaaagggcaugggaggu

SEQ ID NO: 1104248 - RNA, 22 nt, Human
cuuacagagaagaaaauguagu

SEQ ID NO: 1104249 - RNA, 20 nt, Human
ucacaucuggcagcugauga

SEQ ID NO: 1104250 - RNA, 22 nt, Human
aucacagagauugcuuuuaaaa

SEQ ID NO: 1104251 - RNA, 22 nt, Human
augaggcaguacacacaaagcc

SEQ ID NO: 1104252 - RNA, 22 nt, Human
agggacuuguguccuauguaug

SEQ ID NO: 1104253 - RNA, 21 nt, Human
ugacugaggcuucuucacaca

SEQ ID NO: 1104254 - RNA, 22 nt, Human
uucaggaugcagagguuguagu

SEQ ID NO: 1104255 - RNA, 21 nt, Human
uuugaaagcuacaucuauagc

SEQ ID NO: 1104256 - RNA, 22 nt, Human
uguggaaaauuggaacguuccu

SEQ ID NO: 1104257 - RNA, 22 nt, Human
cugguacaaaaugcugauauca

SEQ ID NO: 1104258 - RNA, 22 nt, Human
ccucaggauacaggagccacag

SEQ ID NO: 1104259 - RNA, 22 nt, Human
acucaggaaaugaagacugguu

SEQ ID NO: 1104260 - RNA, 22 nt, Human
auggcagaccuccuggccacaa

SEQ ID NO: 1104261 - RNA, 22 nt, Human
aacacagaucaaaauauuuccu

SEQ ID NO: 1104262 - RNA, 22 nt, Human
uauuuucuggacagucuugcuu

SEQ ID NO: 1104263 - RNA, 22 nt, Human
ugucucugaggugagggucagc

SEQ ID NO: 1104264 - RNA, 22 nt, Human
uugaagagugccuuccagacau

SEQ ID NO: 1104265 - RNA, 22 nt, Human
ugagagucucagaccuccuggu

SEQ ID NO: 1104266 - RNA, 22 nt, Human
ugaaggccuaacuuccagugcu

SEQ ID NO: 1104267 - RNA, 22 nt, Human
aucacauugccagugauuaccc

SEQ ID NO: 1104268 - RNA, 22 nt, Human
cugccaucugagccaaaagugc

SEQ ID NO: 1104269 - RNA, 22 nt, Human
gcaucuaaauaaacgugggagu

SEQ ID NO: 1104270 - RNA, 19 nt, Human
ugaguucugugguucucaa

SEQ ID NO: 1104271 - RNA, 20 nt, Human
auacacaugcagacagaugc

SEQ ID NO: 1104272 - RNA, 22 nt, Human
gaaggccacggaauggagcugg

SEQ ID NO: 1104273 - RNA, 23 nt, Human
ugaguucucaucuuggcuucuau

SEQ ID NO: 1104274 - RNA, 22 nt, Human
gaggccaaguuggagaccaggu

SEQ ID NO: 1104275 - RNA, 22 nt, Human
gacacauaugcguauaguuuag

SEQ ID NO: 1104276 - RNA, 22 nt, Human
caaggccacugcucagguuucc

SEQ ID NO: 1104277 - RNA, 22 nt, Human
ccagaccacccuggccaugcac

SEQ ID NO: 1104278 - RNA, 22 nt, Human
cuucaggauuuaggaagaugaa

SEQ ID NO: 1104279 - RNA, 22 nt, Human
cauggcugcgagaagagugggu

SEQ ID NO: 1104280 - RNA, 22 nt, Human
uucccacauucuuuacauucau

SEQ ID NO: 1104281 - RNA, 22 nt, Human
ucucccaggcugcccuguggac

SEQ ID NO: 1104282 - RNA, 22 nt, Human
uguuugaauuuugcuaacgugu

SEQ ID NO: 1104283 - RNA, 20 nt, Human
ccccacacuauugagcacuu

SEQ ID NO: 1104284 - RNA, 22 nt, Human
caggguggggaaauagcgcccu

SEQ ID NO: 1104285 - RNA, 22 nt, Human
gacacagacaguuagagguaau

SEQ ID NO: 1104286 - RNA, 21 nt, Human
cucaggauggcggccuggugg

SEQ ID NO: 1104287 - RNA, 22 nt, Human
aguggaccagaagacugaagcu

SEQ ID NO: 1104288 - RNA, 22 nt, Human
gaaaggugccccauaggcagga

SEQ ID NO: 1104289 - RNA, 22 nt, Human
acaucacaguaguuaagccaga

SEQ ID NO: 1104290 - RNA, 22 nt, Human
aaaggagacuucagaucuccuu

SEQ ID NO: 1104291 - RNA, 22 nt, Human
gccacauagaggaggauauuaa

SEQ ID NO: 1104292 - RNA, 22 nt, Human
cuugaaagucacaugcagcccu

SEQ ID NO: 1104293 - RNA, 22 nt, Human
uucuccucuguuggccuucccu

SEQ ID NO: 1104294 - RNA, 22 nt, Human
ccucaggaaaugaauaaauggc

SEQ ID NO: 1104295 - RNA, 22 nt, Human
cucaggaugcaauuccaucaag

SEQ ID NO: 1104296 - RNA, 22 nt, Human
aaggccagcuuguagggcuggu

SEQ ID NO: 1104297 - RNA, 22 nt, Human
auugaaagauaggcuacugugg

SEQ ID NO: 1104298 - RNA, 22 nt, Human
ucacacagcuccuuuccuuagu

SEQ ID NO: 1104299 - RNA, 22 nt, Human
cacaucccuggaguuacccagu

SEQ ID NO: 1104300 - RNA, 22 nt, Human
cucacugucuguacuagcugau

SEQ ID NO: 1104301 - RNA, 22 nt, Human
uaaggccagcaugaaugcagca

SEQ ID NO: 1104302 - RNA, 22 nt, Human
auccucuguggauuacaccuag

SEQ ID NO: 1104303 - RNA, 22 nt, Human
cucaacagcucugccauacucc

SEQ ID NO: 1104304 - RNA, 19 nt, Human
uggagacugagagugagca

SEQ ID NO: 1104305 - RNA, 22 nt, Human
ucccacauuacccugacugaca

SEQ ID NO: 1104306 - RNA, 22 nt, Human
uuagccauggacugaauugacu

SEQ ID NO: 1104307 - RNA, 22 nt, Human
cacauuccuggugcucagcagc

SEQ ID NO: 1104308 - RNA, 22 nt, Human
cagaaggcuggcagauugagau

SEQ ID NO: 1104309 - RNA, 22 nt, Human
gucaggauuauuuuauuaaaag

SEQ ID NO: 1104310 - RNA, 20 nt, Human
ugaaggccagcagcauaggg

SEQ ID NO: 1104311 - RNA, 22 nt, Human
gcugucccgcugacuuccagcu

SEQ ID NO: 1104312 - RNA, 22 nt, Human
cacaauguauauguauaucaaa

SEQ ID NO: 1104313 - RNA, 22 nt, Human
auugaaaggcaaaguaggaagc

SEQ ID NO: 1104314 - RNA, 19 nt, Human
uuugaaaggauuguuauuu

SEQ ID NO: 1104315 - RNA, 22 nt, Human
aagugagugguaaggagcaugg

SEQ ID NO: 1104316 - RNA, 22 nt, Human
agugugagcccuggaguggugc

SEQ ID NO: 1104317 - RNA, 22 nt, Human
acacacagaguuuauacaggca

SEQ ID NO: 1104318 - RNA, 22 nt, Human
aaaggccacacugcucuuucuc

SEQ ID NO: 1104319 - RNA, 22 nt, Human
agcagagccugggcuaggggug

SEQ ID NO: 1104320 - RNA, 22 nt, Human
uuagaaagaacuuuagauauca

SEQ ID NO: 1104321 - RNA, 22 nt, Human
uccauucauucauugaugaaca

SEQ ID NO: 1104322 - RNA, 17 nt, Human
uuugaaaggaugucagu

SEQ ID NO: 1104323 - RNA, 22 nt, Human
aggggcucaaagugugcaggga

SEQ ID NO: 1104324 - RNA, 21 nt, Human
cagcccagcccauugacagug

SEQ ID NO: 1104325 - RNA, 22 nt, Human
uauuuguugaguuguuaugucu

SEQ ID NO: 1104326 - RNA, 20 nt, Human
gggagucuggaugaaagaug

SEQ ID NO: 1104327 - RNA, 22 nt, Human
acacacuggcccccaguacuga

SEQ ID NO: 1104328 - RNA, 22 nt, Human
agaggccaugcuagaggccugg

SEQ ID NO: 1104329 - RNA, 22 nt, Human
cacucaggguacaauggagggc

SEQ ID NO: 1104330 - RNA, 22 nt, Human
cacacaucuuaucccaguuauu

SEQ ID NO: 1104331 - RNA, 22 nt, Human
agaccauggccauccuaggaaa

SEQ ID NO: 1104332 - RNA, 22 nt, Human
cacauacuuguguguacauaug

SEQ ID NO: 1104333 - RNA, 22 nt, Human
caggauggccccggggcugugc

SEQ ID NO: 1104334 - RNA, 22 nt, Human
uugaaaggugaacaugaugcac

SEQ ID NO: 1104335 - RNA, 22 nt, Human
ucacacaugcuaagccagagau

SEQ ID NO: 1104336 - RNA, 22 nt, Human
acccacacaucucuaauucagu

SEQ ID NO: 1104337 - RNA, 22 nt, Human
cagauccacccuuguagugaca

SEQ ID NO: 1104338 - RNA, 22 nt, Human
cacacauuucagaugcuacaau

SEQ ID NO: 1104339 - RNA, 22 nt, Human
aggcucagaggugagcaucugc

SEQ ID NO: 1104340 - RNA, 22 nt, Human
uuucauugcagagucugugugc

SEQ ID NO: 1104341 - RNA, 20 nt, Human
ucauuguguugccaauuccc

SEQ ID NO: 1104342 - RNA, 22 nt, Human
cagagccacuuggagaugagaa

SEQ ID NO: 1104343 - RNA, 22 nt, Human
uuagccaugugggaaaaacagc

SEQ ID NO: 1104344 - RNA, 22 nt, Human
ucacauaaauuuaccagaugau

SEQ ID NO: 1104345 - RNA, 22 nt, Human
gaaggccacaagagaaguuaag

SEQ ID NO: 1104346 - RNA, 22 nt, Human
cuugaaagauuuggccucugug

SEQ ID NO: 1104347 - RNA, 21 nt, Human
ugaaugaggaggauggcauuu

SEQ ID NO: 1104348 - RNA, 22 nt, Human
ugucucugggugauucaguccu

SEQ ID NO: 1104349 - RNA, 22 nt, Human
ucucgacagccuggcacagugg

SEQ ID NO: 1104350 - RNA, 22 nt, Human
cuggcuuucucugugguguuca

SEQ ID NO: 1104351 - RNA, 22 nt, Human
ccaggcugggcuacaaguugag

SEQ ID NO: 1104352 - RNA, 22 nt, Human
ugagagucuguuccucuugcag

SEQ ID NO: 1104353 - RNA, 22 nt, Human
uccccacagcagaagaucugag

SEQ ID NO: 1104354 - RNA, 22 nt, Human
gagagucuaggaaccucauaua

SEQ ID NO: 1104355 - RNA, 22 nt, Human
cuugaaagcacuuaguaaauua

SEQ ID NO: 1104356 - RNA, 22 nt, Human
ucucuguaguugggcagcugcu

SEQ ID NO: 1104357 - RNA, 22 nt, Human
cuuacacagucuggcacuucuu

SEQ ID NO: 1104358 - RNA, 20 nt, Human
gagauggacagaugaagggg

SEQ ID NO: 1104359 - RNA, 22 nt, Human
cagucucucagcuuucagcugu

SEQ ID NO: 1104360 - RNA, 22 nt, Human
guccucugucccuggggcacgg

SEQ ID NO: 1104361 - RNA, 22 nt, Human
ucauuuguucucauucucuacu

SEQ ID NO: 1104362 - RNA, 22 nt, Human
gguggagcuggaccaggagagg

SEQ ID NO: 1104363 - RNA, 22 nt, Human
cacauaagaaaugaauaugaga

SEQ ID NO: 1104364 - RNA, 21 nt, Human
acauacauaccuuaccaccuu

SEQ ID NO: 1104365 - RNA, 22 nt, Human
uugaaggacauccuauuucuag

SEQ ID NO: 1104366 - RNA, 17 nt, Human
gccucugcuugugucau

SEQ ID NO: 1104367 - RNA, 20 nt, Human
ccucaggaugagggugagca

SEQ ID NO: 1104368 - RNA, 20 nt, Human
aucaggauucuugcuuuguu

SEQ ID NO: 1104369 - RNA, 22 nt, Human
guguugaugacauuuuagaaac

SEQ ID NO: 1104370 - RNA, 22 nt, Human
cucaggaugaaagucaugguga

SEQ ID NO: 1104371 - RNA, 22 nt, Human
uacugacacaaagccaaucccu

SEQ ID NO: 1104372 - RNA, 22 nt, Human
gcugcuaagcguuucuguucca

SEQ ID NO: 1104373 - RNA, 22 nt, Human
acacauacauggggaagaugag

SEQ ID NO: 1104374 - RNA, 22 nt, Human
cucaucaccacauauaacaaag

SEQ ID NO: 1104375 - RNA, 22 nt, Human
gucuccugagacugcagucacc

SEQ ID NO: 1104376 - RNA, 22 nt, Human
ucacacauuucucaaguguagg

SEQ ID NO: 1104377 - RNA, 22 nt, Human
uagauuuuacuucugucauuac

SEQ ID NO: 1104378 - RNA, 22 nt, Human
cucccagagaccaagcugagaa

SEQ ID NO: 1104379 - RNA, 22 nt, Human
caaggccaagguuuugugaacu

SEQ ID NO: 1104380 - RNA, 22 nt, Human
gagccaaggguugccauggaga

SEQ ID NO: 1104381 - RNA, 22 nt, Human
guccucuguagggcugggccac

SEQ ID NO: 1104382 - RNA, 22 nt, Human
uaaggccaccguuauagaacca

SEQ ID NO: 1104383 - RNA, 20 nt, Human
cucaggauugucuagccccu

SEQ ID NO: 1104384 - RNA, 22 nt, Human
cagugucuccagaugcuccaau

SEQ ID NO: 1104385 - RNA, 22 nt, Human
gaggcugaggguuagagaguca

SEQ ID NO: 1104386 - RNA, 22 nt, Human
agucucagaaaagaagcaugga

SEQ ID NO: 1104387 - RNA, 22 nt, Human
uggcacaguccugggugccugc

SEQ ID NO: 1104388 - RNA, 22 nt, Human
acacauuugcauaauaccucau

SEQ ID NO: 1104389 - RNA, 22 nt, Human
aaggcaguacuuuauguccaua

SEQ ID NO: 1104390 - RNA, 22 nt, Human
uuuuuguagucauuagaagagg

SEQ ID NO: 1104391 - RNA, 22 nt, Human
gcagagcuucuguccuucagga

SEQ ID NO: 1104392 - RNA, 22 nt, Human
uugaaagugccaaguccuagug

SEQ ID NO: 1104393 - RNA, 22 nt, Human
ucacacaugaguaaauacaggg

SEQ ID NO: 1104394 - RNA, 22 nt, Human
ggagcuguucaggacugcuuca

SEQ ID NO: 1104395 - RNA, 22 nt, Human
ccacaucauggauacaguuaug

SEQ ID NO: 1104396 - RNA, 22 nt, Human
ccaagaugaucuuuacaguguu

SEQ ID NO: 1104397 - RNA, 22 nt, Human
uuugaaagucaaccuuccaguu

SEQ ID NO: 1104398 - RNA, 23 nt, Human
ucucaagaggaagcagggcucau

SEQ ID NO: 1104399 - RNA, 22 nt, Human
uucaugugaauauauuugucuu

SEQ ID NO: 1104400 - RNA, 22 nt, Human
acugccaaugguaguuugaugg

SEQ ID NO: 1104401 - RNA, 22 nt, Human
cucccaggggaacuaucaagua

SEQ ID NO: 1104402 - RNA, 22 nt, Human
aucaggaucugcaucauaagaa

SEQ ID NO: 1104403 - RNA, 22 nt, Human
caagaugggcaccccagcaccu

SEQ ID NO: 1104404 - RNA, 22 nt, Human
ucagauggcacacagagccugc

SEQ ID NO: 1104405 - RNA, 22 nt, Human
aggcacaggaaugucauccagu

SEQ ID NO: 1104406 - RNA, 22 nt, Human
cccauucauccucgcuuccuuc

SEQ ID NO: 1104407 - RNA, 22 nt, Human
aaaggaagaugccaggacucug

SEQ ID NO: 1104408 - RNA, 22 nt, Human
uuucuucucgacaccuuauccc

SEQ ID NO: 1104409 - RNA, 22 nt, Human
uacuuccuguuuccaugucugu

SEQ ID NO: 1104410 - RNA, 22 nt, Human
uagcuaucuguguccagaucca

SEQ ID NO: 1104411 - RNA, 21 nt, Human
ggcagccucuguggaagggga

SEQ ID NO: 1104412 - RNA, 22 nt, Human
caggauggugugagugugagga

SEQ ID NO: 1104413 - RNA, 22 nt, Human
agaccaagaaaggaugaggauc

SEQ ID NO: 1104414 - RNA, 22 nt, Human
cucaggauggaagccuacagga

SEQ ID NO: 1104415 - RNA, 22 nt, Human
gucacacagggccuccaaauca

SEQ ID NO: 1104416 - RNA, 22 nt, Human
cacucaggcugugucaggagga

SEQ ID NO: 1104417 - RNA, 22 nt, Human
gaggcugauucggggaacagca

SEQ ID NO: 1104418 - RNA, 21 nt, Human
cucaggaucuuauauauuagu

SEQ ID NO: 1104419 - RNA, 22 nt, Human
ugaaagguuauuuaggucugcu

SEQ ID NO: 1104420 - RNA, 22 nt, Human
cucaggaugucggugacuauug

SEQ ID NO: 1104421 - RNA, 22 nt, Human
auggagacgcaagggaccuagg

SEQ ID NO: 1104422 - RNA, 22 nt, Human
ucaggaauccagacagggcaca

SEQ ID NO: 1104423 - RNA, 22 nt, Human
uguugagacugagggagucagc

SEQ ID NO: 1104424 - RNA, 22 nt, Human
acucaggaaauugagauaaugg

SEQ ID NO: 1104425 - RNA, 22 nt, Human
uggaaugacagagagucugaau

SEQ ID NO: 1104426 - RNA, 22 nt, Human
ggccagagaauaugccuuacgu

SEQ ID NO: 1104427 - RNA, 23 nt, Human
ucagagagcuguugagagcugcc

SEQ ID NO: 1104428 - RNA, 22 nt, Human
caggaugagaggcccagggaag

SEQ ID NO: 1104429 - RNA, 22 nt, Human
aaaggcaggcuuucacaucuca

SEQ ID NO: 1104430 - RNA, 22 nt, Human
gaaggccaguuuugagauaggu

SEQ ID NO: 1104431 - RNA, 22 nt, Human
gcuguucucuguaacaugcauu

SEQ ID NO: 1104432 - RNA, 19 nt, Human
uuugaaagaguuuuauugg

SEQ ID NO: 1104433 - RNA, 22 nt, Human
gccacaggcacuuaagggcugg

SEQ ID NO: 1104434 - RNA, 22 nt, Human
gagagguccauuccccugucag

SEQ ID NO: 1104435 - RNA, 22 nt, Human
cagaccagcucuaugaacccaa

SEQ ID NO: 1104436 - RNA, 22 nt, Human
agacucaagacugcagaagacg

SEQ ID NO: 1104437 - RNA, 22 nt, Human
ugguccugccccgugcacagag

SEQ ID NO: 1104438 - RNA, 22 nt, Human
cuggaggcacccuuagagaggc

SEQ ID NO: 1104439 - RNA, 22 nt, Human
ugauugaacugagcuucaagau

SEQ ID NO: 1104440 - RNA, 22 nt, Human
guugaaagagcauggacuugaa

SEQ ID NO: 1104441 - RNA, 22 nt, Human
ucucauugguauauacaugugu

SEQ ID NO: 1104442 - RNA, 22 nt, Human
uuccagccaugguuucccuaug

SEQ ID NO: 1104443 - RNA, 22 nt, Human
accauuuuggguauuuucagag

SEQ ID NO: 1104444 - RNA, 22 nt, Human
acaugacuuuucucuuccagag

SEQ ID NO: 1104445 - RNA, 22 nt, Human
acauuuuuuagagucccacauu

SEQ ID NO: 1104446 - RNA, 22 nt, Human
cuugaaagcuuugcgucuucua

SEQ ID NO: 1104447 - RNA, 22 nt, Human
cuccucuguauugauugggacu

SEQ ID NO: 1104448 - RNA, 22 nt, Human
ccaggaugacccccacuuuccu

SEQ ID NO: 1104449 - RNA, 23 nt, Human
uaaauuaccuuuccagugcaggg

SEQ ID NO: 1104450 - RNA, 22 nt, Human
auucauuugcuauuguguaugg

SEQ ID NO: 1104451 - RNA, 22 nt, Human
agaccaugggcucugaagagca

SEQ ID NO: 1104452 - RNA, 22 nt, Human
uagacacaucuucauccacaau

SEQ ID NO: 1104453 - RNA, 22 nt, Human
guacauuucucuuguucuuauu

SEQ ID NO: 1104454 - RNA, 19 nt, Human
caggaaugagguaauggcu

SEQ ID NO: 1104455 - RNA, 22 nt, Human
guccucuggccuuucccaggac

SEQ ID NO: 1104456 - RNA, 22 nt, Human
uccccacaucucugcaucaggc

SEQ ID NO: 1104457 - RNA, 22 nt, Human
cucuggcuucuaccuugcaguu

SEQ ID NO: 1104458 - RNA, 22 nt, Human
ggauggagguucucagaugcuc

SEQ ID NO: 1104459 - RNA, 19 nt, Human
agggaguuuauauuugcac

SEQ ID NO: 1104460 - RNA, 22 nt, Human
acacaucucaggggacacucuc

SEQ ID NO: 1104461 - RNA, 21 nt, Human
auugaaagucaacaaucaguu

SEQ ID NO: 1104462 - RNA, 22 nt, Human
aaaggccaccaacaugaagcau

SEQ ID NO: 1104463 - RNA, 22 nt, Human
ucccacacuacacgguuguugg

SEQ ID NO: 1104464 - RNA, 22 nt, Human
uguauuuuuagaccuuuagacc

SEQ ID NO: 1104465 - RNA, 22 nt, Human
uucaugugaucacagauuguaa

SEQ ID NO: 1104466 - RNA, 22 nt, Human
aaggccagacaggaccacaucu

SEQ ID NO: 1104467 - RNA, 22 nt, Human
uugaaagaagaagcugcgaugu

SEQ ID NO: 1104468 - RNA, 22 nt, Human
uuagccauauagaaaaagagcu

SEQ ID NO: 1104469 - RNA, 22 nt, Human
acagucuugagcaucagccaga

SEQ ID NO: 1104470 - RNA, 19 nt, Human
cucucacucgccacauccu

SEQ ID NO: 1104471 - RNA, 22 nt, Human
ucuccacacuuucucucccagg

SEQ ID NO: 1104472 - RNA, 22 nt, Human
ggagugucagaaacaguguccu

SEQ ID NO: 1104473 - RNA, 21 nt, Human
cacacagugaucuauccacau

SEQ ID NO: 1104474 - RNA, 22 nt, Human
gagggucccugcucagggccag

SEQ ID NO: 1104475 - RNA, 22 nt, Human
ucaauucaacacaugcacauug

SEQ ID NO: 1104476 - RNA, 20 nt, Human
cucaggauacugcaaaguug

SEQ ID NO: 1104477 - RNA, 22 nt, Human
ucaggauggcuucugcaucaaa

SEQ ID NO: 1104478 - RNA, 22 nt, Human
gcucagagcuugaaguuccacu

SEQ ID NO: 1104479 - RNA, 22 nt, Human
uuuguuuagaugguaaaucagu

SEQ ID NO: 1104480 - RNA, 20 nt, Human
augugagggguugaaguggg

SEQ ID NO: 1104481 - RNA, 22 nt, Human
gcucaggaaauaguuuaguguu

SEQ ID NO: 1104482 - RNA, 22 nt, Human
acauaccauacauggugagaug

SEQ ID NO: 1104483 - RNA, 22 nt, Human
ucauggauggccgggaggugau

SEQ ID NO: 1104484 - RNA, 22 nt, Human
aauggcagaggcaaagauggua

SEQ ID NO: 1104485 - RNA, 22 nt, Human
aagagagaacucccuucgccag

SEQ ID NO: 1104486 - RNA, 20 nt, Human
ccucaguguccuggacuggg

SEQ ID NO: 1104487 - RNA, 22 nt, Human
ucacagacacagggagaagcau

SEQ ID NO: 1104488 - RNA, 22 nt, Human
gaaccucagugaaacuggaggu

SEQ ID NO: 1104489 - RNA, 22 nt, Human
aggguccugggugcaguugcuu

SEQ ID NO: 1104490 - RNA, 22 nt, Human
agucucugucguagaucagcgu

SEQ ID NO: 1104491 - RNA, 22 nt, Human
ccugccugcaccuucucugggg

SEQ ID NO: 1104492 - RNA, 22 nt, Human
caggauggagaguuguugguug

SEQ ID NO: 1104493 - RNA, 22 nt, Human
uggcaucucaaacaggcagauu

SEQ ID NO: 1104494 - RNA, 22 nt, Human
auggcagacgaggcagcagggg

SEQ ID NO: 1104495 - RNA, 22 nt, Human
aaaggccacuugaaggauuuuu

SEQ ID NO: 1104496 - RNA, 21 nt, Human
gacaaagugaagcaggcagga

SEQ ID NO: 1104497 - RNA, 22 nt, Human
ucagccucucugaguccagacc

SEQ ID NO: 1104498 - RNA, 17 nt, Human
gcaucacagauaacacg

SEQ ID NO: 1104499 - RNA, 22 nt, Human
aucugccucuucuucauugcga

SEQ ID NO: 1104500 - RNA, 22 nt, Human
ugcucuguauucuauggcaguu

SEQ ID NO: 1104501 - RNA, 22 nt, Human
uuccacauuccuuacauucaua

SEQ ID NO: 1104502 - RNA, 22 nt, Human
gucaggaucaaauugaaguuau

SEQ ID NO: 1104503 - RNA, 22 nt, Human
agcccagcuuugaaccauauca

SEQ ID NO: 1104504 - RNA, 17 nt, Human
ugaaggccaugaccacg

SEQ ID NO: 1104505 - RNA, 22 nt, Human
aucucccagccacagcauucuu

SEQ ID NO: 1104506 - RNA, 22 nt, Human
ccucugcucugguccaugugcu

SEQ ID NO: 1104507 - RNA, 22 nt, Human
guucuugccagcauccucaggu

SEQ ID NO: 1104508 - RNA, 22 nt, Human
ugguaaauauguccauucucuu

SEQ ID NO: 1104509 - RNA, 22 nt, Human
acauuuuuauucaucaaagcag

SEQ ID NO: 1104510 - RNA, 22 nt, Human
uauaucaccaaaaacaguucug

SEQ ID NO: 1104511 - RNA, 22 nt, Human
gccccacagccugcggucucag

SEQ ID NO: 1104512 - RNA, 22 nt, Human
ggcacagagcccagcuuccuag

SEQ ID NO: 1104513 - RNA, 22 nt, Human
ggcagugagaggucuccugguc

SEQ ID NO: 1104514 - RNA, 22 nt, Human
guugaaagaucauguggcugcc

SEQ ID NO: 1104515 - RNA, 22 nt, Human
gucaggaugcuauuguuauuaa

SEQ ID NO: 1104516 - RNA, 18 nt, Human
ggccucuggacuggcagc

SEQ ID NO: 1104517 - RNA, 22 nt, Human
uagcuuuccuuguugccugugc

SEQ ID NO: 1104518 - RNA, 22 nt, Human
gagaggucaucucccaucagca

SEQ ID NO: 1104519 - RNA, 22 nt, Human
ccacuguuuuucaguuaacuuu

SEQ ID NO: 1104520 - RNA, 22 nt, Human
uugauguacagaauuguucaca

SEQ ID NO: 1104521 - RNA, 22 nt, Human
caaggccagagccagcgauaag

SEQ ID NO: 1104522 - RNA, 20 nt, Human
ucagaugggagugagccauc

SEQ ID NO: 1104523 - RNA, 22 nt, Human
cauuuguuuagaagucuuuaua

SEQ ID NO: 1104524 - RNA, 22 nt, Human
ucucaggaagauuagggcuaag

SEQ ID NO: 1104525 - RNA, 22 nt, Human
cagauggaacacagaaaggaga

SEQ ID NO: 1104526 - RNA, 22 nt, Human
auucauuuagguauucacuuac

SEQ ID NO: 1104527 - RNA, 22 nt, Human
ggcucagaccucccagcuccag

SEQ ID NO: 1104528 - RNA, 19 nt, Human
ucauuguugguuugucggg

SEQ ID NO: 1104529 - RNA, 22 nt, Human
uuuacaaccucauauucugaug

SEQ ID NO: 1104530 - RNA, 22 nt, Human
aagauggaguaguguaaugguu

SEQ ID NO: 1104531 - RNA, 22 nt, Human
cucaggauccaucuccugcccu

SEQ ID NO: 1104532 - RNA, 22 nt, Human
gaaucucaaggcuugugaggau

SEQ ID NO: 1104533 - RNA, 22 nt, Human
gaaggccauuuuuagguagaau

SEQ ID NO: 1104534 - RNA, 23 nt, Human
auugaugacuugauuacacuuuu

SEQ ID NO: 1104535 - RNA, 20 nt, Human
caucaucacaugagccaauu

SEQ ID NO: 1104536 - RNA, 22 nt, Human
gucccauaaguagugcaacuug

SEQ ID NO: 1104537 - RNA, 22 nt, Human
aaccauuugccauuaucuuaag

SEQ ID NO: 1104538 - RNA, 22 nt, Human
ucucagucagccuugauguccc

SEQ ID NO: 1104539 - RNA, 22 nt, Human
uuugaaagccuggcuuuucucu

SEQ ID NO: 1104540 - RNA, 22 nt, Human
ugcuuucaaaggcuuucuagau

SEQ ID NO: 1104541 - RNA, 22 nt, Human
uuuuuauaugaaggauagugcg

SEQ ID NO: 1104542 - RNA, 22 nt, Human
gugaaggacuagcauggagggc

SEQ ID NO: 1104543 - RNA, 22 nt, Human
acacucacccucccacugccug

SEQ ID NO: 1104544 - RNA, 22 nt, Human
uucccucuccuacucaggaaag

SEQ ID NO: 1104545 - RNA, 22 nt, Human
guccucugauuucuagguauau

SEQ ID NO: 1104546 - RNA, 22 nt, Human
ccauccuaucugaccuacuugu

SEQ ID NO: 1104547 - RNA, 22 nt, Human
uuugaaagcaccauuugaguag

SEQ ID NO: 1104548 - RNA, 22 nt, Human
uuucacagguacaaacacuccu

SEQ ID NO: 1104549 - RNA, 22 nt, Human
gcacauaacugaccacaucuaa

SEQ ID NO: 1104550 - RNA, 22 nt, Human
cuggccuggggggacacauccc

SEQ ID NO: 1104551 - RNA, 22 nt, Human
ggcucagagaccugcgaucuga

SEQ ID NO: 1104552 - RNA, 22 nt, Human
uucaggauucucucccauuuac

SEQ ID NO: 1104553 - RNA, 22 nt, Human
ucacacacauggauaguauuuu

SEQ ID NO: 1104554 - RNA, 22 nt, Human
aaggaguuuggguagucauaca

SEQ ID NO: 1104555 - RNA, 22 nt, Human
aaggcaguuugggccaccaucu

SEQ ID NO: 1104556 - RNA, 20 nt, Human
ucacacaugguaagcuauga

SEQ ID NO: 1104557 - RNA, 22 nt, Human
acuuuugguucuguaacuguga

SEQ ID NO: 1104558 - RNA, 22 nt, Human
gcacacagcuagauuaccauuc

SEQ ID NO: 1104559 - RNA, 22 nt, Human
ugauuuuuagcuauucugaaga

SEQ ID NO: 1104560 - RNA, 22 nt, Human
cucugcaugccuugcucagaca

SEQ ID NO: 1104561 - RNA, 22 nt, Human
uggcgucucucauaaguaugug

SEQ ID NO: 1104562 - RNA, 22 nt, Human
cuuccucuagccuaguaaugcc

SEQ ID NO: 1104563 - RNA, 22 nt, Human
gaggacaggagacucacuguuu

SEQ ID NO: 1104564 - RNA, 22 nt, Human
cacaauuuuaauacacagucaa

SEQ ID NO: 1104565 - RNA, 22 nt, Human
gacacuucaccuuucccagccu

SEQ ID NO: 1104566 - RNA, 22 nt, Human
augaaggcaguuaaacgucauc

SEQ ID NO: 1104567 - RNA, 17 nt, Human
cauuuguugaucaguug

SEQ ID NO: 1104568 - RNA, 22 nt, Human
ccacacuaaacugcucaaacca

SEQ ID NO: 1104569 - RNA, 22 nt, Human
cagaguucaaagccugcuggga

SEQ ID NO: 1104570 - RNA, 22 nt, Human
cucagagaggcaguggaaguca

SEQ ID NO: 1104571 - RNA, 22 nt, Human
uccauuuuguagguaugcuaca

SEQ ID NO: 1104572 - RNA, 22 nt, Human
aggcacaggccucagcacccag

SEQ ID NO: 1104573 - RNA, 22 nt, Human
aucacagagcucccuuccacug

SEQ ID NO: 1104574 - RNA, 22 nt, Human
agagacagaggcaauauagcuu

SEQ ID NO: 1104575 - RNA, 22 nt, Human
agggcaguucaacuucauagug

SEQ ID NO: 1104576 - RNA, 20 nt, Human
cccacacccuucccacuugg

SEQ ID NO: 1104577 - RNA, 22 nt, Human
uucuuugaguuaguacagucca

SEQ ID NO: 1104578 - RNA, 22 nt, Human
gugggagcuuuggcaucaggcu

SEQ ID NO: 1104579 - RNA, 22 nt, Human
cccacacacuggcugcugccaa

SEQ ID NO: 1104580 - RNA, 22 nt, Human
uggcagagagacucuccuugau

SEQ ID NO: 1104581 - RNA, 20 nt, Human
accaauguuagcuuaguacu

SEQ ID NO: 1104582 - RNA, 22 nt, Human
ucaucacaauuuuaugacccuc

SEQ ID NO: 1104583 - RNA, 22 nt, Human
aaucuguuuaguucugcguaug

SEQ ID NO: 1104584 - RNA, 22 nt, Human
gccucugcaauuacauugugcc

SEQ ID NO: 1104585 - RNA, 22 nt, Human
cacucuccagcacaccccauuu

SEQ ID NO: 1104586 - RNA, 22 nt, Human
auacauucaaaggaaggauaga

SEQ ID NO: 1104587 - RNA, 22 nt, Human
aauggccagcaacaggagugaa

SEQ ID NO: 1104588 - RNA, 22 nt, Human
gcacacaugcaugcacaggagu

SEQ ID NO: 1104589 - RNA, 21 nt, Human
uuugaaagcccuauguuuuca

SEQ ID NO: 1104590 - RNA, 22 nt, Human
aucaggaucagggcuagcagag

SEQ ID NO: 1104591 - RNA, 22 nt, Human
gugguaauuuaauccuacacug

SEQ ID NO: 1104592 - RNA, 22 nt, Human
ccaggcugccgaggaaagaaag

SEQ ID NO: 1104593 - RNA, 22 nt, Human
acacauuuacauguuuacguau

SEQ ID NO: 1104594 - RNA, 22 nt, Human
aguggcaggcggagauguagga

SEQ ID NO: 1104595 - RNA, 22 nt, Human
uuuguuuagaaagagauuggug

SEQ ID NO: 1104596 - RNA, 22 nt, Human
uuugaaaggagcuuuauccaga

SEQ ID NO: 1104597 - RNA, 22 nt, Human
caggaugaagggcaaaggcaag

SEQ ID NO: 1104598 - RNA, 22 nt, Human
gagaccucuugguaucgcuagg

SEQ ID NO: 1104599 - RNA, 22 nt, Human
aaugucugcucuacucaggagg

SEQ ID NO: 1104600 - RNA, 22 nt, Human
uucacagacuuuccauagauug

SEQ ID NO: 1104601 - RNA, 22 nt, Human
ccuucauugcaucuuuaagaga

SEQ ID NO: 1104602 - RNA, 22 nt, Human
uuugaaagagcugauacaugaa

SEQ ID NO: 1104603 - RNA, 22 nt, Human
uggcagagcccagacuccaguc

SEQ ID NO: 1104604 - RNA, 22 nt, Human
uucacagacauugcagacugaa

SEQ ID NO: 1104605 - RNA, 22 nt, Human
agucucugccagcuuguccucu

SEQ ID NO: 1104606 - RNA, 22 nt, Human
aggcacagcacaccuggccccc

SEQ ID NO: 1104607 - RNA, 22 nt, Human
uucauugugauucuuggcuagc

SEQ ID NO: 1104608 - RNA, 22 nt, Human
uguuuuaaucucccauugcucu

SEQ ID NO: 1104609 - RNA, 22 nt, Human
uugagaagaggcuuuguaggaa

SEQ ID NO: 1104610 - RNA, 21 nt, Human
aacacauccagaguauuugac

SEQ ID NO: 1104611 - RNA, 22 nt, Human
ucaggaugguguggaggaaaua

SEQ ID NO: 1104612 - RNA, 22 nt, Human
ugaaagguuaaaaguaguauug

SEQ ID NO: 1104613 - RNA, 22 nt, Human
aucaggaugacuauaaggcugc

SEQ ID NO: 1104614 - RNA, 22 nt, Human
ccuugcucaagcuagugacggg

SEQ ID NO: 1104615 - RNA, 22 nt, Human
ucugcaucauuuuucagagccg

SEQ ID NO: 1104616 - RNA, 22 nt, Human
uucuagaugauaaaccagcagc

SEQ ID NO: 1104617 - RNA, 18 nt, Human
cccacacagcaguagcuc

SEQ ID NO: 1104618 - RNA, 22 nt, Human
guccucugggcagcugccccac

SEQ ID NO: 1104619 - RNA, 22 nt, Human
cagaaccaggaacugauggaga

SEQ ID NO: 1104620 - RNA, 22 nt, Human
gagacaucauaaugaaguuucc

SEQ ID NO: 1104621 - RNA, 22 nt, Human
cucacugugccuuuucccaaac

SEQ ID NO: 1104622 - RNA, 22 nt, Human
aucaggaucaugcuggguggga

SEQ ID NO: 1104623 - RNA, 22 nt, Human
aucaggauagugguuaccuggg

SEQ ID NO: 1104624 - RNA, 22 nt, Human
gcacacacuguuuuccucacau

SEQ ID NO: 1104625 - RNA, 22 nt, Human
caggauagaaaggccauggagu

SEQ ID NO: 1104626 - RNA, 22 nt, Human
caaggccaagucucugugaaga

SEQ ID NO: 1104627 - RNA, 22 nt, Human
ugggagcccaagggagcugccg

SEQ ID NO: 1104628 - RNA, 22 nt, Human
cgccucagccguggucaucuuc

SEQ ID NO: 1104629 - RNA, 21 nt, Human
gaacauuuggguuguuucuac

SEQ ID NO: 1104630 - RNA, 22 nt, Human
uuccagcccgcgacuuguucag

SEQ ID NO: 1104631 - RNA, 20 nt, Human
ugugaaagcaguagaaugac

SEQ ID NO: 1104632 - RNA, 22 nt, Human
uacacacaugcauuugccuuau

SEQ ID NO: 1104633 - RNA, 22 nt, Human
uugcugaaaacaguggguauug

SEQ ID NO: 1104634 - RNA, 22 nt, Human
auggcagagggauugaacagcu

SEQ ID NO: 1104635 - RNA, 22 nt, Human
ucuucauuccguagauauuuau

SEQ ID NO: 1104636 - RNA, 22 nt, Human
uuaaagggccgauuuccaggcc

SEQ ID NO: 1104637 - RNA, 22 nt, Human
agacacauaggaccacacugug

SEQ ID NO: 1104638 - RNA, 20 nt, Human
ucacuaguaaccaucugcuu

SEQ ID NO: 1104639 - RNA, 22 nt, Human
aaucuguucuacucuauucaga

SEQ ID NO: 1104640 - RNA, 22 nt, Human
gaucauuugcaggaaacauuaa

SEQ ID NO: 1104641 - RNA, 22 nt, Human
aaugagacacgugaagcagaug

SEQ ID NO: 1104642 - RNA, 22 nt, Human
cuuucauucuuagauauuagug

SEQ ID NO: 1104643 - RNA, 22 nt, Human
ucaucacauguguagucauccc

SEQ ID NO: 1104644 - RNA, 20 nt, Human
gaguuccccauuucuccugg

SEQ ID NO: 1104645 - RNA, 22 nt, Human
uacauaguauucacauuguuuu

SEQ ID NO: 1104646 - RNA, 23 nt, Human
aggauguaggauguauggcagag

SEQ ID NO: 1104647 - RNA, 22 nt, Human
ggucagagggugggcugccugu

SEQ ID NO: 1104648 - RNA, 22 nt, Human
uuugaaaggaaguuaauacuuu

SEQ ID NO: 1104649 - RNA, 22 nt, Human
uugaauaguguuuucaguauac

SEQ ID NO: 1104650 - RNA, 22 nt, Human
cugccuccugccgugcagcuuc

SEQ ID NO: 1104651 - RNA, 23 nt, Human
aaggccagaauuucaauggugcc

SEQ ID NO: 1104652 - RNA, 18 nt, Human
agucuucugauccauuuu

SEQ ID NO: 1104653 - RNA, 22 nt, Human
ggcccagccucagacaugcccu

SEQ ID NO: 1104654 - RNA, 22 nt, Human
agaggccagguccagaguuugu

SEQ ID NO: 1104655 - RNA, 22 nt, Human
cugucauugagccugucagggc

SEQ ID NO: 1104656 - RNA, 22 nt, Human
cccacccugggcuacacaucca

SEQ ID NO: 1104657 - RNA, 22 nt, Human
cucccagagagcaggugggccg

SEQ ID NO: 1104658 - RNA, 19 nt, Human
ucugccucuggucaggcuc

SEQ ID NO: 1104659 - RNA, 22 nt, Human
ccauacacacaccaaauuugua

SEQ ID NO: 1104660 - RNA, 22 nt, Human
ucucaggaaauaggauuugagu

SEQ ID NO: 1104661 - RNA, 19 nt, Human
ugcauaaauuauauacuuu

SEQ ID NO: 1104662 - RNA, 22 nt, Human
auugaaagcacaaagaacaagu

SEQ ID NO: 1104663 - RNA, 22 nt, Human
acacacaugguauuguucagaa

SEQ ID NO: 1104664 - RNA, 21 nt, Human
acacacucugagucuucuauu

SEQ ID NO: 1104665 - RNA, 22 nt, Human
aaggagaaaugguagaugugca

SEQ ID NO: 1104666 - RNA, 20 nt, Human
caguccaaucagaggccacc

SEQ ID NO: 1104667 - RNA, 22 nt, Human
aggcacaguuucauccccgggc

SEQ ID NO: 1104668 - RNA, 22 nt, Human
uguggaaaagaauaagggagau

SEQ ID NO: 1104669 - RNA, 22 nt, Human
cagucucuaaaucaaucugaau

SEQ ID NO: 1104670 - RNA, 20 nt, Human
ccagaagagaugaucaucca

SEQ ID NO: 1104671 - RNA, 22 nt, Human
uacugccuggagcauuggugcu

SEQ ID NO: 1104672 - RNA, 19 nt, Human
ugaaauggcaguugcuaaa

SEQ ID NO: 1104673 - RNA, 22 nt, Human
cacacacuggagcaaggagaug

SEQ ID NO: 1104674 - RNA, 22 nt, Human
ggaggccagggacccagucagc

SEQ ID NO: 1104675 - RNA, 22 nt, Human
ggcagaagauaggacagggaau

SEQ ID NO: 1104676 - RNA, 22 nt, Human
cucaggaugcaggucacaggac

SEQ ID NO: 1104677 - RNA, 21 nt, Human
acucaggagacuaacuauguc

SEQ ID NO: 1104678 - RNA, 18 nt, Human
guaggucaguaccaagca

SEQ ID NO: 1104679 - RNA, 22 nt, Human
caaggccagggaauuuuucugg

SEQ ID NO: 1104680 - RNA, 22 nt, Human
uuugaaagcuacuuucggguca

SEQ ID NO: 1104681 - RNA, 21 nt, Human
uuagaaagcucacuacaguua

SEQ ID NO: 1104682 - RNA, 22 nt, Human
gucaggauuuuaaaaucccagu

SEQ ID NO: 1104683 - RNA, 21 nt, Human
uucuccccagcgaauccucgg

SEQ ID NO: 1104684 - RNA, 22 nt, Human
uuagccauuaauguccugugca

SEQ ID NO: 1104685 - RNA, 18 nt, Human
caugucugcgccacaagg

SEQ ID NO: 1104686 - RNA, 22 nt, Human
uuucuuguaagauguuuauuaa

SEQ ID NO: 1104687 - RNA, 22 nt, Human
cucaggauuaaggaaucuaaau

SEQ ID NO: 1104688 - RNA, 22 nt, Human
aggacacacagaauacaaaucc

SEQ ID NO: 1104689 - RNA, 22 nt, Human
agucuccuuggccucaaugccu

SEQ ID NO: 1104690 - RNA, 22 nt, Human
aucacugucgucaucugagauu

SEQ ID NO: 1104691 - RNA, 22 nt, Human
gggagcugaauggcaauggaga

SEQ ID NO: 1104692 - RNA, 22 nt, Human
gacccauauaggacccuccaaa

SEQ ID NO: 1104693 - RNA, 22 nt, Human
uggcagagaacacggcugaucu

SEQ ID NO: 1104694 - RNA, 22 nt, Human
ucacaguaaaagcauggaagag

SEQ ID NO: 1104695 - RNA, 22 nt, Human
ucacuguugaccuggaaguggg

SEQ ID NO: 1104696 - RNA, 22 nt, Human
ucccacaggaaaguagacauug

SEQ ID NO: 1104697 - RNA, 22 nt, Human
acaauucugaugguuucccagu

SEQ ID NO: 1104698 - RNA, 22 nt, Human
uugagaagaauguguugaguuu

SEQ ID NO: 1104699 - RNA, 22 nt, Human
cuugaaagcacuccuuugacug

SEQ ID NO: 1104700 - RNA, 22 nt, Human
uacacauccauguuuugacuuu

SEQ ID NO: 1104701 - RNA, 22 nt, Human
aaggcaguaggaucuuccacag

SEQ ID NO: 1104702 - RNA, 22 nt, Human
cacugucccuguuuccuggaaa

SEQ ID NO: 1104703 - RNA, 22 nt, Human
cacauacauucauguuacucua

SEQ ID NO: 1104704 - RNA, 20 nt, Human
cagagccaagagcagcaucu

SEQ ID NO: 1104705 - RNA, 22 nt, Human
uucaggauuauacucucuuccc

SEQ ID NO: 1104706 - RNA, 22 nt, Human
uuuuuggguccaggcuguaucu

SEQ ID NO: 1104707 - RNA, 22 nt, Human
gaucauuuugaugcccuuuuag

SEQ ID NO: 1104708 - RNA, 22 nt, Human
cagcccaggccgacaguuccuc

SEQ ID NO: 1104709 - RNA, 22 nt, Human
caucacagguccugaugacauu

SEQ ID NO: 1104710 - RNA, 20 nt, Human
acaggggcagcacaauaaug

SEQ ID NO: 1104711 - RNA, 22 nt, Human
acccacaccuccguauaucacu

SEQ ID NO: 1104712 - RNA, 22 nt, Human
cacagagacagaagcacuuaug

SEQ ID NO: 1104713 - RNA, 22 nt, Human
ucuuagaaauuccccaguggcu

SEQ ID NO: 1104714 - RNA, 22 nt, Human
uccaugucuucaugugucuaac

SEQ ID NO: 1104715 - RNA, 22 nt, Human
aucacauucuuucaaagcaguc

SEQ ID NO: 1104716 - RNA, 22 nt, Human
aucacauuguuagcauagacug

SEQ ID NO: 1104717 - RNA, 22 nt, Human
guccucugaaguugugcaaugc

SEQ ID NO: 1104718 - RNA, 22 nt, Human
aguggcagagccaaguagagcc

SEQ ID NO: 1104719 - RNA, 22 nt, Human
aucaggaugcugucaguuacca

SEQ ID NO: 1104720 - RNA, 22 nt, Human
aagugaagaaauacaugagaau

SEQ ID NO: 1104721 - RNA, 22 nt, Human
ggagcuguuggcagcuaucuug

SEQ ID NO: 1104722 - RNA, 22 nt, Human
ggccagaaguuggaaaagagcc

SEQ ID NO: 1104723 - RNA, 17 nt, Human
ucauuuguugugacuag

SEQ ID NO: 1104724 - RNA, 22 nt, Human
uuggaaagcaagcuggacauac

SEQ ID NO: 1104725 - RNA, 22 nt, Human
ccucaugguacuuacuguagcu

SEQ ID NO: 1104726 - RNA, 22 nt, Human
cuguaugaggaucagacuggac

SEQ ID NO: 1104727 - RNA, 22 nt, Human
cucaggauagcugcgcagccug

SEQ ID NO: 1104728 - RNA, 22 nt, Human
acucaggaagaaagcagcuggu

SEQ ID NO: 1104729 - RNA, 23 nt, Human
uuugaaaguaucaacucgccuga

SEQ ID NO: 1104730 - RNA, 22 nt, Human
agaguucugcucuucucaguga

SEQ ID NO: 1104731 - RNA, 22 nt, Human
ucuccuccuuuuuucaacauag

SEQ ID NO: 1104732 - RNA, 22 nt, Human
ggccagcagucacagggucaga

SEQ ID NO: 1104733 - RNA, 22 nt, Human
uucaggauccccuugaugggcu

SEQ ID NO: 1104734 - RNA, 22 nt, Human
ucaggaugagcucauaacuaug

SEQ ID NO: 1104735 - RNA, 22 nt, Human
agucccuguacuuuccacugcc

SEQ ID NO: 1104736 - RNA, 22 nt, Human
cacauacauacguauguauaca

SEQ ID NO: 1104737 - RNA, 21 nt, Human
ucauuugugaucugauuucca

SEQ ID NO: 1104738 - RNA, 17 nt, Human
guccuacccauggucua

SEQ ID NO: 1104739 - RNA, 21 nt, Human
ucucugugucuuuaagcugga

SEQ ID NO: 1104740 - RNA, 22 nt, Human
gggagucugggcuagacuccuu

SEQ ID NO: 1104741 - RNA, 21 nt, Human
guacacacagguggaugggcu

SEQ ID NO: 1104742 - RNA, 22 nt, Human
augaaggcuguguagauggaug

SEQ ID NO: 1104743 - RNA, 19 nt, Human
uaaggccaaaaguaagugu

SEQ ID NO: 1104744 - RNA, 22 nt, Human
caguuucuuggaugccaauuuc

SEQ ID NO: 1104745 - RNA, 22 nt, Human
ugaaggcccuaucuccauauac

SEQ ID NO: 1104746 - RNA, 16 nt, Human
ucacauacuuccuugc

SEQ ID NO: 1104747 - RNA, 22 nt, Human
caagauggagaagcagcaaggg

SEQ ID NO: 1104748 - RNA, 17 nt, Human
uuucuccuuccaucuca

SEQ ID NO: 1104749 - RNA, 22 nt, Human
agaccauagggaccucagguug

SEQ ID NO: 1104750 - RNA, 22 nt, Human
uccauuuuucaugacuccucaa

SEQ ID NO: 1104751 - RNA, 19 nt, Human
ugagaggcuuaaggcagcu

SEQ ID NO: 1104752 - RNA, 22 nt, Human
uguaggccuauguccagcaauu

SEQ ID NO: 1104753 - RNA, 22 nt, Human
acauuucuaguuguucaucucc

SEQ ID NO: 1104754 - RNA, 22 nt, Human
acacacucaauugcauaagcac

SEQ ID NO: 1104755 - RNA, 22 nt, Human
ucuggcuuucauuuguuuaaag

SEQ ID NO: 1104756 - RNA, 22 nt, Human
aaaggccaauaaagacaagcug

SEQ ID NO: 1104757 - RNA, 22 nt, Human
cagagggcucuuggcugccugc

SEQ ID NO: 1104758 - RNA, 22 nt, Human
ucaggauguuaauauagcauua

SEQ ID NO: 1104759 - RNA, 22 nt, Human
uugcugaauugaauccuuuggu

SEQ ID NO: 1104760 - RNA, 22 nt, Human
uuuuuaguagagguggguuuca

SEQ ID NO: 1104761 - RNA, 22 nt, Human
uucuaugccauguucagcuacu

SEQ ID NO: 1104762 - RNA, 22 nt, Human
uccccaccccagaacuacuagg

SEQ ID NO: 1104763 - RNA, 22 nt, Human
ucucuguacaguacaugccgug

SEQ ID NO: 1104764 - RNA, 22 nt, Human
gcacacacaugugaguacaugc

SEQ ID NO: 1104765 - RNA, 22 nt, Human
uuagccauuuuauacaagugua

SEQ ID NO: 1104766 - RNA, 22 nt, Human
ucuacagacagagcagguggga

SEQ ID NO: 1104767 - RNA, 22 nt, Human
ucuuagcauuucauaacaacug

SEQ ID NO: 1104768 - RNA, 22 nt, Human
aauaugcauuaacuguguacau

SEQ ID NO: 1104769 - RNA, 22 nt, Human
caaggccacuccagagacuggu

SEQ ID NO: 1104770 - RNA, 22 nt, Human
ucuacugcacuggugucucauc

SEQ ID NO: 1104771 - RNA, 22 nt, Human
cccacacaaaucauggggagaa

SEQ ID NO: 1104772 - RNA, 22 nt, Human
uggaguuccuuugaaaggcucu

SEQ ID NO: 1104773 - RNA, 22 nt, Human
cacacacaguuuuguauucugu

SEQ ID NO: 1104774 - RNA, 22 nt, Human
cugcagagcaaguaacauccuc

SEQ ID NO: 1104775 - RNA, 22 nt, Human
cucucagacugaagggccugug

SEQ ID NO: 1104776 - RNA, 22 nt, Human
cccagcaugcacgcugacacuc

SEQ ID NO: 1104777 - RNA, 22 nt, Human
uucaggauucugugucugacaa

SEQ ID NO: 1104778 - RNA, 16 nt, Human
gcacacacaucaauga

SEQ ID NO: 1104779 - RNA, 22 nt, Human
uugaaaguagcagcugcauaug

SEQ ID NO: 1104780 - RNA, 22 nt, Human
aaggcagucugguuucaaagca

SEQ ID NO: 1104781 - RNA, 22 nt, Human
cucaucugauaaaucacucuua

SEQ ID NO: 1104782 - RNA, 22 nt, Human
uugcugaaguuaaugcuugcaa

SEQ ID NO: 1104783 - RNA, 23 nt, Human
uccuuccuuugagaggcuccauc

SEQ ID NO: 1104784 - RNA, 22 nt, Human
ugcugugagguugagaaggaag

SEQ ID NO: 1104785 - RNA, 22 nt, Human
aggcuggagggcaauggcaaga

SEQ ID NO: 1104786 - RNA, 22 nt, Human
cucaggauguacuacagaaggc

SEQ ID NO: 1104787 - RNA, 21 nt, Human
ggauggauagggaagagauuu

SEQ ID NO: 1104788 - RNA, 22 nt, Human
cacauacugagaaucacaccca

SEQ ID NO: 1104789 - RNA, 19 nt, Human
caagugaagccugggaugg

SEQ ID NO: 1104790 - RNA, 22 nt, Human
ucucagucuuugcaaggaugcu

SEQ ID NO: 1104791 - RNA, 22 nt, Human
ccccaggacacauggaccaagu

SEQ ID NO: 1104792 - RNA, 22 nt, Human
cugcuucuccaaaguaggacuu

SEQ ID NO: 1104793 - RNA, 22 nt, Human
ucucaggagccacagcgggagu

SEQ ID NO: 1104794 - RNA, 22 nt, Human
ggcacagagcuuugucccaguu

SEQ ID NO: 1104795 - RNA, 22 nt, Human
ggagcacuauaauagagauuuu

SEQ ID NO: 1104796 - RNA, 22 nt, Human
uccccacacagauacagaguag

SEQ ID NO: 1104797 - RNA, 17 nt, Human
aaucuguuuacagucag

SEQ ID NO: 1104798 - RNA, 17 nt, Human
cucacggaggaugaauc

SEQ ID NO: 1104799 - RNA, 22 nt, Human
agucucugggcaugguugugac

SEQ ID NO: 1104800 - RNA, 22 nt, Human
gaaggccaagaggcuccaagau

SEQ ID NO: 1104801 - RNA, 22 nt, Human
ucccagccuggacccugccagu

SEQ ID NO: 1104802 - RNA, 20 nt, Human
uuugucuguuaaguguuucu

SEQ ID NO: 1104803 - RNA, 21 nt, Human
ucacuagugccuucugucauu

SEQ ID NO: 1104804 - RNA, 22 nt, Human
auacuguuuugugacuuaucuu

SEQ ID NO: 1104805 - RNA, 22 nt, Human
aaguugagaugucauaggagac

SEQ ID NO: 1104806 - RNA, 22 nt, Human
gaccauuugcuaguaaauugca

SEQ ID NO: 1104807 - RNA, 22 nt, Human
acacagaguuugacacauggga

SEQ ID NO: 1104808 - RNA, 19 nt, Human
ugugaaagcuaguguucuu

SEQ ID NO: 1104809 - RNA, 22 nt, Human
gaccaaggaagaggggagccag

SEQ ID NO: 1104810 - RNA, 19 nt, Human
aucugccuguuaucacaua

SEQ ID NO: 1104811 - RNA, 22 nt, Human
uuagcaucugcuguaagcuuau

SEQ ID NO: 1104812 - RNA, 22 nt, Human
gccugcagaacugugaggcaau

SEQ ID NO: 1104813 - RNA, 22 nt, Human
cccuguacagucucuguggcac

SEQ ID NO: 1104814 - RNA, 22 nt, Human
acaucccacagaaacauacaua

SEQ ID NO: 1104815 - RNA, 22 nt, Human
ugaugaaacugagguuccaaga

SEQ ID NO: 1104816 - RNA, 23 nt, Human
aggcccaacucugugagggcugc

SEQ ID NO: 1104817 - RNA, 22 nt, Human
gcagaggggaagcugaggaauu

SEQ ID NO: 1104818 - RNA, 22 nt, Human
uaacaucuuuagcagcucgaac

SEQ ID NO: 1104819 - RNA, 20 nt, Human
gcccaagguccagaaggggg

SEQ ID NO: 1104820 - RNA, 22 nt, Human
ccaggauggggagcagauagaa

SEQ ID NO: 1104821 - RNA, 22 nt, Human
cuagcaucagaugagaagcugu

SEQ ID NO: 1104822 - RNA, 22 nt, Human
uacacaacugacaaccauucug

SEQ ID NO: 1104823 - RNA, 20 nt, Human
gucaggauuaguaaacucug

SEQ ID NO: 1104824 - RNA, 23 nt, Human
uggagcugacagucagagggagg

SEQ ID NO: 1104825 - RNA, 22 nt, Human
gcaggggcuaaggacacagaga

SEQ ID NO: 1104826 - RNA, 22 nt, Human
cagucacauagguauacacaua

SEQ ID NO: 1104827 - RNA, 22 nt, Human
ucccacaccugucuauuccuag

SEQ ID NO: 1104828 - RNA, 22 nt, Human
uucauguguauggaacauuuuu

SEQ ID NO: 1104829 - RNA, 22 nt, Human
auguggaggaaaugaguguaca

SEQ ID NO: 1104830 - RNA, 22 nt, Human
caucacagaaauaaacauaccu

SEQ ID NO: 1104831 - RNA, 22 nt, Human
ccacagaccuuggcuuccaccu

SEQ ID NO: 1104832 - RNA, 18 nt, Human
gucacuguguuucugagc

SEQ ID NO: 1104833 - RNA, 22 nt, Human
uuuuaucuaccuaugcucauuu

SEQ ID NO: 1104834 - RNA, 22 nt, Human
uaaggccaaacuauuauaguuc

SEQ ID NO: 1104835 - RNA, 22 nt, Human
ucacacagcugacagagccuuu

SEQ ID NO: 1104836 - RNA, 22 nt, Human
aagugggaauagaaaugaaggu

SEQ ID NO: 1104837 - RNA, 22 nt, Human
gcccacacagcagauccuuugg

SEQ ID NO: 1104838 - RNA, 22 nt, Human
cacauacaaggcacacuggagg

SEQ ID NO: 1104839 - RNA, 20 nt, Human
ucaggaugugcugagugaag

SEQ ID NO: 1104840 - RNA, 22 nt, Human
aucacuguguauguauaugcag

SEQ ID NO: 1104841 - RNA, 22 nt, Human
cauucccacguguucuuugcuu

SEQ ID NO: 1104842 - RNA, 22 nt, Human
ucagugaucuaaggguauggcc

SEQ ID NO: 1104843 - RNA, 22 nt, Human
uuaauuuuaaccuguuuguguc

SEQ ID NO: 1104844 - RNA, 22 nt, Human
ucagucucuggggcuucuguuu

SEQ ID NO: 1104845 - RNA, 23 nt, Human
guccucuggagagaaaggcagua

SEQ ID NO: 1104846 - RNA, 22 nt, Human
acaggccacaguggagucucug

SEQ ID NO: 1104847 - RNA, 23 nt, Human
uucauuugucuacuucacuuguu

SEQ ID NO: 1104848 - RNA, 22 nt, Human
ucacacacauuugcugucugau

SEQ ID NO: 1104849 - RNA, 22 nt, Human
guccucugagggggcugcacgc

SEQ ID NO: 1104850 - RNA, 22 nt, Human
gaacccaggcuuuugaggcugu

SEQ ID NO: 1104851 - RNA, 23 nt, Human
uugaaagguagcuggcagcuaga

SEQ ID NO: 1104852 - RNA, 22 nt, Human
ggcccagcgaggccaccuacag

SEQ ID NO: 1104853 - RNA, 22 nt, Human
aaggcaguaaaaucuaccuugc

SEQ ID NO: 1104854 - RNA, 17 nt, Human
aggccagaugaggcaag

SEQ ID NO: 1104855 - RNA, 22 nt, Human
uaaaggguagguuuuacuguaa

SEQ ID NO: 1104856 - RNA, 22 nt, Human
uauguaaaguagauggcaggua

SEQ ID NO: 1104857 - RNA, 22 nt, Human
guaguucugcagugucaccuga

SEQ ID NO: 1104858 - RNA, 22 nt, Human
uugauagguuuuauguauaguu

SEQ ID NO: 1104859 - RNA, 22 nt, Human
cucuccucugaaguggugaccc

SEQ ID NO: 1104860 - RNA, 22 nt, Human
caagauggguguugugaugguu

SEQ ID NO: 1104861 - RNA, 22 nt, Human
aaauacugcugcuauuccuuuu

SEQ ID NO: 1104862 - RNA, 22 nt, Human
ucacauucucagcaucuauaca

SEQ ID NO: 1104863 - RNA, 22 nt, Human
cucaggauugugccuagggaga

SEQ ID NO: 1104864 - RNA, 22 nt, Human
gauugaaacauaggcagucgag

SEQ ID NO: 1104865 - RNA, 22 nt, Human
uggagcugggguuugaaucugg

SEQ ID NO: 1104866 - RNA, 22 nt, Human
ugaaagggguugaguuacagcu

SEQ ID NO: 1104867 - RNA, 21 nt, Human
uuugaaagugggugauucuuu

SEQ ID NO: 1104868 - RNA, 22 nt, Human
cuucccacuaguaucacagagc

SEQ ID NO: 1104869 - RNA, 19 nt, Human
uucaggauugacccuacug

SEQ ID NO: 1104870 - RNA, 22 nt, Human
acacacagguaaaggagccugg

SEQ ID NO: 1104871 - RNA, 22 nt, Human
agguccagcuguugcagccucc

SEQ ID NO: 1104872 - RNA, 22 nt, Human
uugggcucaggaguuugagacc

SEQ ID NO: 1104873 - RNA, 22 nt, Human
gcucaggacuggaggagcgggg

SEQ ID NO: 1104874 - RNA, 22 nt, Human
gcucacugccauucucuagaug

SEQ ID NO: 1104875 - RNA, 19 nt, Human
guugaaaguaggugagggu

SEQ ID NO: 1104876 - RNA, 22 nt, Human
uucaauucaauucuaaauauau

SEQ ID NO: 1104877 - RNA, 22 nt, Human
ucuccucuauuucuguauguau

SEQ ID NO: 1104878 - RNA, 22 nt, Human
agauggagaccuuggaugaacu

SEQ ID NO: 1104879 - RNA, 22 nt, Human
uucauugucucuguuugccuuc

SEQ ID NO: 1104880 - RNA, 22 nt, Human
ucacacagauugguagagcuga

SEQ ID NO: 1104881 - RNA, 22 nt, Human
ggauggcaggacaaggacccag

SEQ ID NO: 1104882 - RNA, 22 nt, Human
aaaggugacacucugccagcug

SEQ ID NO: 1104883 - RNA, 21 nt, Human
acagucuccccagaucucucc

SEQ ID NO: 1104884 - RNA, 22 nt, Human
gacccggcuccaggcccagcag

SEQ ID NO: 1104885 - RNA, 22 nt, Human
uugaauaguuuuggauagcaua

SEQ ID NO: 1104886 - RNA, 22 nt, Human
uuugaaaggugucgagaugugu

SEQ ID NO: 1104887 - RNA, 22 nt, Human
ggcucagacucccaggcccucu

SEQ ID NO: 1104888 - RNA, 22 nt, Human
gucagagagggcacgugcacac

SEQ ID NO: 1104889 - RNA, 22 nt, Human
aaaggccacugcaagggaaggu

SEQ ID NO: 1104890 - RNA, 22 nt, Human
ccauccugcauugcuauucaga

SEQ ID NO: 1104891 - RNA, 22 nt, Human
ccuggauucaagucuuucuuuc

SEQ ID NO: 1104892 - RNA, 22 nt, Human
uugaaaggguuaaagugguaaa

SEQ ID NO: 1104893 - RNA, 22 nt, Human
gaaggucaccuccccucucugg

SEQ ID NO: 1104894 - RNA, 21 nt, Human
uccuguaagcuuggguggcuc

SEQ ID NO: 1104895 - RNA, 22 nt, Human
guccucuguuuccaucugacuu

SEQ ID NO: 1104896 - RNA, 19 nt, Human
caggaugaucccaugacac

SEQ ID NO: 1104897 - RNA, 22 nt, Human
gcccagccuccaagcuccaagg

SEQ ID NO: 1104898 - RNA, 22 nt, Human
uucccaugccuggccccuaucc

SEQ ID NO: 1104899 - RNA, 22 nt, Human
gccauuuucugucuuguuuauu

SEQ ID NO: 1104900 - RNA, 23 nt, Human
uggacgccgacuuuggaggcgcu

SEQ ID NO: 1104901 - RNA, 22 nt, Human
ccagaggaaaaauaucucccua

SEQ ID NO: 1104902 - RNA, 22 nt, Human
caaggccaugagcagcgagugu

SEQ ID NO: 1104903 - RNA, 22 nt, Human
agucucugcaugccugcugugc

SEQ ID NO: 1104904 - RNA, 22 nt, Human
uucauuaguucugaagaugucu

SEQ ID NO: 1104905 - RNA, 22 nt, Human
acacacuuuaaauuaaaccucu

SEQ ID NO: 1104906 - RNA, 22 nt, Human
caggaaugaggucguaaguguc

SEQ ID NO: 1104907 - RNA, 22 nt, Human
guccucugaaagaugaaccaug

SEQ ID NO: 1104908 - RNA, 22 nt, Human
ucaggauaaaauguaauggcaa

SEQ ID NO: 1104909 - RNA, 22 nt, Human
acaucucaugaaugauaaauca

SEQ ID NO: 1104910 - RNA, 22 nt, Human
caguuucuauggcugggcucug

SEQ ID NO: 1104911 - RNA, 22 nt, Human
uacuuucuguccuucuguuaaa

SEQ ID NO: 1104912 - RNA, 22 nt, Human
gaccauuuguugaaaagauuau

SEQ ID NO: 1104913 - RNA, 22 nt, Human
aggccagacagcuagaaacagg

SEQ ID NO: 1104914 - RNA, 22 nt, Human
uugugguuaaccgcacauuuuu

SEQ ID NO: 1104915 - RNA, 22 nt, Human
aguggacucuucccagugcuug

SEQ ID NO: 1104916 - RNA, 20 nt, Human
uucaggauucuagaccacac

SEQ ID NO: 1104917 - RNA, 22 nt, Human
gaggggcagagguagagaacaa

SEQ ID NO: 1104918 - RNA, 22 nt, Human
caaggccauaagagauacaaaa

SEQ ID NO: 1104919 - RNA, 22 nt, Human
cccacacauuuuucacuuaccg

SEQ ID NO: 1104920 - RNA, 22 nt, Human
uuugaaaguucuucugacacua

SEQ ID NO: 1104921 - RNA, 21 nt, Human
uucucuccauaugcccagccc

SEQ ID NO: 1104922 - RNA, 22 nt, Human
aauugcuaaagauuauguuuuc

SEQ ID NO: 1104923 - RNA, 22 nt, Human
acacagaugcauuacacaucua

SEQ ID NO: 1104924 - RNA, 22 nt, Human
uauugaugcuuggauugggcca

SEQ ID NO: 1104925 - RNA, 22 nt, Human
cagucucuugcuucauuaguug

SEQ ID NO: 1104926 - RNA, 22 nt, Human
ccuccucugggaagauucagag

SEQ ID NO: 1104927 - RNA, 22 nt, Human
cacacagacagcucucugaaga

SEQ ID NO: 1104928 - RNA, 22 nt, Human
cagcccaggucucucuuccagu

SEQ ID NO: 1104929 - RNA, 22 nt, Human
cucacuguuuaauagcuggauc

SEQ ID NO: 1104930 - RNA, 22 nt, Human
aaggcaguuaauuuggcuagaa

SEQ ID NO: 1104931 - RNA, 19 nt, Human
ucaucucacagggccuggc

SEQ ID NO: 1104932 - RNA, 22 nt, Human
aucugccugagucuagguuuuc

SEQ ID NO: 1104933 - RNA, 22 nt, Human
agggaguuagaaauccaggaua

SEQ ID NO: 1104934 - RNA, 23 nt, Human
ugaaggccuggaggacgcguugu

SEQ ID NO: 1104935 - RNA, 22 nt, Human
cuacuucuaaguacauggugau

SEQ ID NO: 1104936 - RNA, 22 nt, Human
cugucauuuaagacauucugga

SEQ ID NO: 1104937 - RNA, 22 nt, Human
ucacagacauggugagguaaca

SEQ ID NO: 1104938 - RNA, 22 nt, Human
acaucacagagcccagauaaag

SEQ ID NO: 1104939 - RNA, 22 nt, Human
cagagcucuauguucauggagg

SEQ ID NO: 1104940 - RNA, 22 nt, Human
ggacagaggguugacagaguau

SEQ ID NO: 1104941 - RNA, 19 nt, Human
ucuuucauuucuagcucug

SEQ ID NO: 1104942 - RNA, 22 nt, Human
uuuuucaagacaaccugcaugu

SEQ ID NO: 1104943 - RNA, 22 nt, Human
uacacacagaggccaugggauu

SEQ ID NO: 1104944 - RNA, 22 nt, Human
cagugcugggcagaggagagcg

SEQ ID NO: 1104945 - RNA, 22 nt, Human
gaccauuuuuacagagcauuca

SEQ ID NO: 1104946 - RNA, 22 nt, Human
cagagccauuauggagacuugc

SEQ ID NO: 1104947 - RNA, 22 nt, Human
caaugugguggcagaugucagu

SEQ ID NO: 1104948 - RNA, 18 nt, Human
ugaauagggguuugcaga

SEQ ID NO: 1104949 - RNA, 22 nt, Human
ucaggaggccaccaggaccugu

SEQ ID NO: 1104950 - RNA, 22 nt, Human
ccucagggaaugggaggcuggg

SEQ ID NO: 1104951 - RNA, 23 nt, Human
ggacacauuuauuucagaauuca

SEQ ID NO: 1104952 - RNA, 22 nt, Human
uggcuucuugggaugggucauu

SEQ ID NO: 1104953 - RNA, 18 nt, Human
acacacacaccuguguau

SEQ ID NO: 1104954 - RNA, 22 nt, Human
aucuccaggcauuucaagagac

SEQ ID NO: 1104955 - RNA, 22 nt, Human
uagauacaggcucucugagccu

SEQ ID NO: 1104956 - RNA, 22 nt, Human
cuguauuuguccucuauuuauu

SEQ ID NO: 1104957 - RNA, 22 nt, Human
uugcaucuagggcaacccagag

SEQ ID NO: 1104958 - RNA, 22 nt, Human
ucaggagggugacaggcccugg

SEQ ID NO: 1104959 - RNA, 22 nt, Human
gcucaggaucagccaccucuuu

SEQ ID NO: 1104960 - RNA, 23 nt, Human
ucacauaauccuucauccacagg

SEQ ID NO: 1104961 - RNA, 22 nt, Human
ugcagagaaaacuccuggguac

SEQ ID NO: 1104962 - RNA, 22 nt, Human
acacacacaagcagguugugga

SEQ ID NO: 1104963 - RNA, 18 nt, Human
ugagaggcagguagagga

SEQ ID NO: 1104964 - RNA, 22 nt, Human
cagaauggcuuuuauggcucag

SEQ ID NO: 1104965 - RNA, 22 nt, Human
auacacacugcuauccuuuuuu

SEQ ID NO: 1104966 - RNA, 22 nt, Human
ucuucauuuuauagcaucugug

SEQ ID NO: 1104967 - RNA, 22 nt, Human
auuucacucauucauguuacuu

SEQ ID NO: 1104968 - RNA, 20 nt, Human
cucuccucacccgugucagg

SEQ ID NO: 1104969 - RNA, 22 nt, Human
cagacagagucuucccaucagu

SEQ ID NO: 1104970 - RNA, 22 nt, Human
cacauuuaauccuuuauaagua

SEQ ID NO: 1104971 - RNA, 23 nt, Human
uguugaaguaacuguuacauaga

SEQ ID NO: 1104972 - RNA, 22 nt, Human
cucacugacgaggaagcugaga

SEQ ID NO: 1104973 - RNA, 17 nt, Human
acucaggaucugggagu

SEQ ID NO: 1104974 - RNA, 22 nt, Human
caugucuguguacacaugcaca

SEQ ID NO: 1104975 - RNA, 22 nt, Human
aggcaguuuaggcagcgauuua

SEQ ID NO: 1104976 - RNA, 20 nt, Human
accccacagaguccauugca

SEQ ID NO: 1104977 - RNA, 19 nt, Human
ugaggggcucacagucuca

SEQ ID NO: 1104978 - RNA, 22 nt, Human
caguggagagacuuuuacucuu

SEQ ID NO: 1104979 - RNA, 22 nt, Human
cagaccucaguccucaguagga

SEQ ID NO: 1104980 - RNA, 22 nt, Human
cagaguggcgacccccucagcu

SEQ ID NO: 1104981 - RNA, 22 nt, Human
agugauggugagugagaagcuc

SEQ ID NO: 1104982 - RNA, 22 nt, Human
ccuccuuuccuguuuuccugag

SEQ ID NO: 1104983 - RNA, 22 nt, Human
cugcuucugggaugauggagua

SEQ ID NO: 1104984 - RNA, 22 nt, Human
uacacaucacuguaucuuucag

SEQ ID NO: 1104985 - RNA, 22 nt, Human
cagucccuaguggagcucacag

SEQ ID NO: 1104986 - RNA, 22 nt, Human
aaagccagagcaagcugucaca

SEQ ID NO: 1104987 - RNA, 23 nt, Human
acacauuuuucccguucugaggu

SEQ ID NO: 1104988 - RNA, 22 nt, Human
ucccacacagcccgcucaccgg

SEQ ID NO: 1104989 - RNA, 22 nt, Human
uauucccagccucuuucuaucu

SEQ ID NO: 1104990 - RNA, 22 nt, Human
aggccagcaagaaagagagucu

SEQ ID NO: 1104991 - RNA, 22 nt, Human
auagcuguuagauuggggucga

SEQ ID NO: 1104992 - RNA, 22 nt, Human
uuauggcauauuccucauugua

SEQ ID NO: 1104993 - RNA, 19 nt, Human
acacauuugcacaauccac

SEQ ID NO: 1104994 - RNA, 22 nt, Human
guccucugcuucaugcccugau

SEQ ID NO: 1104995 - RNA, 22 nt, Human
uuggaugaagucuagcuuuagu

SEQ ID NO: 1104996 - RNA, 22 nt, Human
gaaggccauuagagccugugcc

SEQ ID NO: 1104997 - RNA, 22 nt, Human
gucuccugagccuugacugcaa

SEQ ID NO: 1104998 - RNA, 20 nt, Human
ucucagcauaagaacccuuc

SEQ ID NO: 1104999 - RNA, 22 nt, Human
uucaggaugcucagaguagucu

SEQ ID NO: 1105000 - RNA, 22 nt, Human
ggauggcagucugcaugagaaa

SEQ ID NO: 1105001 - RNA, 22 nt, Human
cuguuaaucugcuugcaugaug

SEQ ID NO: 1105002 - RNA, 22 nt, Human
cugagccagcuggcaugugcua

SEQ ID NO: 1105003 - RNA, 22 nt, Human
caagauggaguccgggaaugug

SEQ ID NO: 1105004 - RNA, 19 nt, Human
uuagccauccacagugaaa

SEQ ID NO: 1105005 - RNA, 22 nt, Human
uucuuucucaacaugaauguuu

SEQ ID NO: 1105006 - RNA, 22 nt, Human
uacacagaaccugguguacagu

SEQ ID NO: 1105007 - RNA, 22 nt, Human
ucacaguaucacacaaggauua

SEQ ID NO: 1105008 - RNA, 22 nt, Human
uugcugaaaucuaugacauccu

SEQ ID NO: 1105009 - RNA, 22 nt, Human
acauaaugagcucuuuauaaau

SEQ ID NO: 1105010 - RNA, 22 nt, Human
ucucaggacuuugggaagcuca

SEQ ID NO: 1105011 - RNA, 22 nt, Human
ccucacugaagaggugacauuu

SEQ ID NO: 1105012 - RNA, 22 nt, Human
auugaaagcauggauuuggauu

SEQ ID NO: 1105013 - RNA, 22 nt, Human
cacacacucuuccuggcaccua

SEQ ID NO: 1105014 - RNA, 22 nt, Human
ugcauaaagugccauaguauua

SEQ ID NO: 1105015 - RNA, 22 nt, Human
ucagagaguuagugucuuagcu

SEQ ID NO: 1105016 - RNA, 22 nt, Human
guccucuguuagaaaugugcuu

SEQ ID NO: 1105017 - RNA, 22 nt, Human
auugaaagauuuugggcucaug

SEQ ID NO: 1105018 - RNA, 22 nt, Human
uccauuuucaucucauguauaa

SEQ ID NO: 1105019 - RNA, 22 nt, Human
agucaauucuuuucaacucaag

SEQ ID NO: 1105020 - RNA, 22 nt, Human
aagcuggagaguuaggugaaua

SEQ ID NO: 1105021 - RNA, 22 nt, Human
uggaguucauccaugacagcuu

SEQ ID NO: 1105022 - RNA, 22 nt, Human
uucaggauccccaccgcguuua

SEQ ID NO: 1105023 - RNA, 22 nt, Human
uggcagagagagugcagucgac

SEQ ID NO: 1105024 - RNA, 22 nt, Human
gccaugcuugguaugcugugag

SEQ ID NO: 1105025 - RNA, 22 nt, Human
agucucugcugguugugccuau

SEQ ID NO: 1105026 - RNA, 22 nt, Human
ucaggaugaccacgagccucua

SEQ ID NO: 1105027 - RNA, 22 nt, Human
ugaaagguagcuggccucauag

SEQ ID NO: 1105028 - RNA, 22 nt, Human
agcauccaacaggagggaaggg

SEQ ID NO: 1105029 - RNA, 22 nt, Human
aucaggauuauuaaaucuggau

SEQ ID NO: 1105030 - RNA, 22 nt, Human
aagcgccaugguuccugcgcag

SEQ ID NO: 1105031 - RNA, 22 nt, Human
uucucacuauguauguagauug

SEQ ID NO: 1105032 - RNA, 22 nt, Human
uggcagagucaucacaucugga

SEQ ID NO: 1105033 - RNA, 22 nt, Human
ucauuuaauagcuuuugucuuu

SEQ ID NO: 1105034 - RNA, 22 nt, Human
uucaggaucacuaaacccucca

SEQ ID NO: 1105035 - RNA, 22 nt, Human
uucuuuugggaauuacguaugc

SEQ ID NO: 1105036 - RNA, 22 nt, Human
uggcagagaacacacaugauuc

SEQ ID NO: 1105037 - RNA, 22 nt, Human
uguucauuuggcccuuuuguau

SEQ ID NO: 1105038 - RNA, 22 nt, Human
aaaggugacugcagcagcuauu

SEQ ID NO: 1105039 - RNA, 22 nt, Human
cagucccaugagcccagaacau

SEQ ID NO: 1105040 - RNA, 22 nt, Human
cgcugauaaacgucacguuccc

SEQ ID NO: 1105041 - RNA, 22 nt, Human
cucagccccaauucuccccauu

SEQ ID NO: 1105042 - RNA, 22 nt, Human
cucugcauuuuaacagaugauu

SEQ ID NO: 1105043 - RNA, 22 nt, Human
gcacacaguagggauucaauga

SEQ ID NO: 1105044 - RNA, 19 nt, Human
gugggacagacauuacaua

SEQ ID NO: 1105045 - RNA, 22 nt, Human
uucaggauuguguuuuuccuga

SEQ ID NO: 1105046 - RNA, 22 nt, Human
cccucuacagggaagcgcuuuc

SEQ ID NO: 1105047 - RNA, 22 nt, Human
acagguccucaagucagcuggg

SEQ ID NO: 1105048 - RNA, 22 nt, Human
aaaggccaagcaugagguggac

SEQ ID NO: 1105049 - RNA, 22 nt, Human
ucacacagguuugcaaugauuu

SEQ ID NO: 1105050 - RNA, 22 nt, Human
aucaggauucaccccagagcug

SEQ ID NO: 1105051 - RNA, 22 nt, Human
cucacugugaccucagcagaca

SEQ ID NO: 1105052 - RNA, 22 nt, Human
aggccagaugucgggcuagaag

SEQ ID NO: 1105053 - RNA, 22 nt, Human
gucaggauuauaauccccaugg

SEQ ID NO: 1105054 - RNA, 20 nt, Human
uguuaaaggacacuugcuuu

SEQ ID NO: 1105055 - RNA, 22 nt, Human
ggaggcugagaaguccaagauc

SEQ ID NO: 1105056 - RNA, 22 nt, Human
uuugaaaguguuuacuugggaa

SEQ ID NO: 1105057 - RNA, 21 nt, Human
cucuugugucagagccagagg

SEQ ID NO: 1105058 - RNA, 22 nt, Human
uucacagauguauuggaacucc

SEQ ID NO: 1105059 - RNA, 22 nt, Human
uggaagggagugacagucagag

SEQ ID NO: 1105060 - RNA, 22 nt, Human
cacacugucagguaaauaacac

SEQ ID NO: 1105061 - RNA, 22 nt, Human
ggcugaaggaugaaagcugcag

SEQ ID NO: 1105062 - RNA, 22 nt, Human
aaguguagauuauggagugucu

SEQ ID NO: 1105063 - RNA, 22 nt, Human
cagucuucuaaccuagcagccu

SEQ ID NO: 1105064 - RNA, 22 nt, Human
gacacauagaucuaucucacuc

SEQ ID NO: 1105065 - RNA, 22 nt, Human
ucacauacacuaggauauuuuu

SEQ ID NO: 1105066 - RNA, 21 nt, Human
ucacaucuauguuaagcaaac

SEQ ID NO: 1105067 - RNA, 21 nt, Human
uccccacauuucuaaacagac

SEQ ID NO: 1105068 - RNA, 22 nt, Human
aaugucugagucucuguauccc

SEQ ID NO: 1105069 - RNA, 22 nt, Human
aaaggccacacagagcagggag

SEQ ID NO: 1105070 - RNA, 22 nt, Human
ccaggcugcagucaaggggcau

SEQ ID NO: 1105071 - RNA, 22 nt, Human
ugugaaggagaugaagggagug

SEQ ID NO: 1105072 - RNA, 22 nt, Human
uauuuucuguggaggaccagau

SEQ ID NO: 1105073 - RNA, 22 nt, Human
gugguaauagagcuccaaacua

SEQ ID NO: 1105074 - RNA, 22 nt, Human
ucacacacauaaucuaagauua

SEQ ID NO: 1105075 - RNA, 22 nt, Human
cugagggucaacuugauuguau

SEQ ID NO: 1105076 - RNA, 22 nt, Human
uaccauuucauucuuuccucau

SEQ ID NO: 1105077 - RNA, 20 nt, Human
gauacacagcacagagggcc

SEQ ID NO: 1105078 - RNA, 22 nt, Human
acagucucuccacacugcaggg

SEQ ID NO: 1105079 - RNA, 22 nt, Human
caucaucaaaagugacagagaa

SEQ ID NO: 1105080 - RNA, 21 nt, Human
aaaggccauaaucacggagca

SEQ ID NO: 1105081 - RNA, 22 nt, Human
gccucugcccuccugggacugc

SEQ ID NO: 1105082 - RNA, 19 nt, Human
caaggccaccauuucuccg

SEQ ID NO: 1105083 - RNA, 22 nt, Human
uaaguggaagguuauaugcuaa

SEQ ID NO: 1105084 - RNA, 22 nt, Human
caaggccaguucaccaagggca

SEQ ID NO: 1105085 - RNA, 22 nt, Human
uacacaucccagacucccagga

SEQ ID NO: 1105086 - RNA, 22 nt, Human
gggcacagaagucuaagacauc

SEQ ID NO: 1105087 - RNA, 22 nt, Human
gacacagaaggucacauguuca

SEQ ID NO: 1105088 - RNA, 22 nt, Human
cuaugagaagaaaacaagauua

SEQ ID NO: 1105089 - RNA, 22 nt, Human
cucaggaucgcuugcccuaggg

SEQ ID NO: 1105090 - RNA, 20 nt, Human
ucagugauuuugaagaggaa

SEQ ID NO: 1105091 - RNA, 22 nt, Human
uuugaaagcaggugugggaggg

SEQ ID NO: 1105092 - RNA, 22 nt, Human
uuuaaauuuagaagaaacacug

SEQ ID NO: 1105093 - RNA, 22 nt, Human
guugaaugaaucauucuaugua

SEQ ID NO: 1105094 - RNA, 22 nt, Human
ucucaggaagugauauugagac

SEQ ID NO: 1105095 - RNA, 22 nt, Human
guccucuggugaaagcauuccc

SEQ ID NO: 1105096 - RNA, 22 nt, Human
caaauacuacgauucuugcagu

SEQ ID NO: 1105097 - RNA, 22 nt, Human
acacacaugcaugcuugccauu

SEQ ID NO: 1105098 - RNA, 22 nt, Human
gaucauuuacuuguucuggacu

SEQ ID NO: 1105099 - RNA, 22 nt, Human
aggccagaaauuuggaguaugu

SEQ ID NO: 1105100 - RNA, 22 nt, Human
ugucucugauaaguaguucagu

SEQ ID NO: 1105101 - RNA, 22 nt, Human
cucaggauucucgacacucaca

SEQ ID NO: 1105102 - RNA, 23 nt, Human
agaugagccaacaccuccaugcc

SEQ ID NO: 1105103 - RNA, 22 nt, Human
uaaggccaggcuguggucggca

SEQ ID NO: 1105104 - RNA, 22 nt, Human
guccucugacucagccuuggga

SEQ ID NO: 1105105 - RNA, 22 nt, Human
auucaaguggcugcuauguuaa

SEQ ID NO: 1105106 - RNA, 22 nt, Human
uggggcucaccuaggcuggaag

SEQ ID NO: 1105107 - RNA, 22 nt, Human
cccccaaaguuugcacggauaa

SEQ ID NO: 1105108 - RNA, 22 nt, Human
uuuguuaaauauuuauugagug

SEQ ID NO: 1105109 - RNA, 22 nt, Human
uccccacacuuucacuccuggc

SEQ ID NO: 1105110 - RNA, 22 nt, Human
uacuuuuuagcacagugugugc

SEQ ID NO: 1105111 - RNA, 22 nt, Human
ucucacuggguauaaaugagua

SEQ ID NO: 1105112 - RNA, 22 nt, Human
uugaauaggacucagcagugau

SEQ ID NO: 1105113 - RNA, 22 nt, Human
ucacugcucuccaauguggagu

SEQ ID NO: 1105114 - RNA, 22 nt, Human
ucagguggcuuggagggggacg

SEQ ID NO: 1105115 - RNA, 22 nt, Human
ucccacauaugcaauccugaau

SEQ ID NO: 1105116 - RNA, 22 nt, Human
caagauggacauaaggagagaa

SEQ ID NO: 1105117 - RNA, 22 nt, Human
gugguaaucggauucuuaccgg

SEQ ID NO: 1105118 - RNA, 22 nt, Human
gagugucugaauuagagcacaa

SEQ ID NO: 1105119 - RNA, 22 nt, Human
auacaugacucacacauucugc

SEQ ID NO: 1105120 - RNA, 22 nt, Human
uucaggaugaaagugugcaaca

SEQ ID NO: 1105121 - RNA, 22 nt, Human
uucaggaucauuuguuuuaucu

SEQ ID NO: 1105122 - RNA, 22 nt, Human
ccucacugcuauguguuugcuc

SEQ ID NO: 1105123 - RNA, 22 nt, Human
acacauaagaaacuacaaagag

SEQ ID NO: 1105124 - RNA, 22 nt, Human
gugcuuucugcugcauuccucu

SEQ ID NO: 1105125 - RNA, 22 nt, Human
cagucucucugaaguauuaaga

SEQ ID NO: 1105126 - RNA, 22 nt, Human
agcacugugauuuauaacauuu

SEQ ID NO: 1105127 - RNA, 22 nt, Human
gcucaggaucccaggggugugc

SEQ ID NO: 1105128 - RNA, 23 nt, Human
ggagugcaauggcgccaucucgg

SEQ ID NO: 1105129 - RNA, 22 nt, Human
uggugguuaugcgcuuuguggg

SEQ ID NO: 1105130 - RNA, 19 nt, Human
uugaaagauuagcuuucua

SEQ ID NO: 1105131 - RNA, 22 nt, Human
uauucccauuccacuuaucaag

SEQ ID NO: 1105132 - RNA, 22 nt, Human
gucaggaugagggaugaggagu

SEQ ID NO: 1105133 - RNA, 18 nt, Human
ccucagggagagagacgc

SEQ ID NO: 1105134 - RNA, 22 nt, Human
gcacacaggggaguucucagaa

SEQ ID NO: 1105135 - RNA, 22 nt, Human
agacucaagcagauaggaauua

SEQ ID NO: 1105136 - RNA, 22 nt, Human
cagaaggcuuuguggaguagac

SEQ ID NO: 1105137 - RNA, 22 nt, Human
uacacacuuacuggagaugaag

SEQ ID NO: 1105138 - RNA, 22 nt, Human
uucaauucugcucugaucuuag

SEQ ID NO: 1105139 - RNA, 22 nt, Human
ugaguagagaauucagcuaagg

SEQ ID NO: 1105140 - RNA, 22 nt, Human
cacacagaugguaagggaggga

SEQ ID NO: 1105141 - RNA, 22 nt, Human
gucaggauuaaugggaguaugc

SEQ ID NO: 1105142 - RNA, 22 nt, Human
gucaggauuugaacucaggucu

SEQ ID NO: 1105143 - RNA, 22 nt, Human
cauuuguuggucagauuguagu

SEQ ID NO: 1105144 - RNA, 22 nt, Human
cuguccuccagacgacaguccc

SEQ ID NO: 1105145 - RNA, 22 nt, Human
ccacacagucaguuuccaagaa

SEQ ID NO: 1105146 - RNA, 22 nt, Human
aaccauuugcaguuacugagac

SEQ ID NO: 1105147 - RNA, 22 nt, Human
ucccacaugugaauccucaggu

SEQ ID NO: 1105148 - RNA, 22 nt, Human
ugcuucuggaaacaguggcugu

SEQ ID NO: 1105149 - RNA, 22 nt, Human
auguagagcaguguuguccaau

SEQ ID NO: 1105150 - RNA, 22 nt, Human
gagggagugccagagggccagc

SEQ ID NO: 1105151 - RNA, 22 nt, Human
uugaaagucacaauggcauuaa

SEQ ID NO: 1105152 - RNA, 22 nt, Human
uucuacaugguugcucagaggg

SEQ ID NO: 1105153 - RNA, 20 nt, Human
uucacagaggacucagguca

SEQ ID NO: 1105154 - RNA, 22 nt, Human
acagagagaaacaaucagcagc

SEQ ID NO: 1105155 - RNA, 22 nt, Human
cacacacugacaccuuaucuug

SEQ ID NO: 1105156 - RNA, 22 nt, Human
gaggccuggagccgccuaggcg

SEQ ID NO: 1105157 - RNA, 22 nt, Human
ugaaaggugacauuucuuggau

SEQ ID NO: 1105158 - RNA, 22 nt, Human
cuguauuucccacauucucuau

SEQ ID NO: 1105159 - RNA, 20 nt, Human
agaggccaguuaggagucua

SEQ ID NO: 1105160 - RNA, 22 nt, Human
aauggccagcugggagaguuga

SEQ ID NO: 1105161 - RNA, 22 nt, Human
uugaaaguuaucuagauucuga

SEQ ID NO: 1105162 - RNA, 22 nt, Human
uugauuaaacaggcauauucaa

SEQ ID NO: 1105163 - RNA, 21 nt, Human
gggcagaggggccuccugggu

SEQ ID NO: 1105164 - RNA, 22 nt, Human
acagacuggccugucucgcacc

SEQ ID NO: 1105165 - RNA, 22 nt, Human
uaaggccaauuaacaaccaggg

SEQ ID NO: 1105166 - RNA, 22 nt, Human
gaccauuucuaggaaucagacu

SEQ ID NO: 1105167 - RNA, 22 nt, Human
uucaggaugacaccauguccag

SEQ ID NO: 1105168 - RNA, 22 nt, Human
auccccacgauauagccaaagc

SEQ ID NO: 1105169 - RNA, 22 nt, Human
cuugaaagucagcagaguggau

SEQ ID NO: 1105170 - RNA, 22 nt, Human
uacacagacucuucaauucaga

SEQ ID NO: 1105171 - RNA, 22 nt, Human
guccucugcccaggucaagguu

SEQ ID NO: 1105172 - RNA, 22 nt, Human
uccauuuucuugcucuagguaa

SEQ ID NO: 1105173 - RNA, 22 nt, Human
guugaaaguagaugcuauuugg

SEQ ID NO: 1105174 - RNA, 22 nt, Human
uagcugcugcagcacagggagg

SEQ ID NO: 1105175 - RNA, 22 nt, Human
caauacugaguuuacauucauc

SEQ ID NO: 1105176 - RNA, 22 nt, Human
gcacauacccacugucaagcac

SEQ ID NO: 1105177 - RNA, 22 nt, Human
caaggccaaagggccacuguca

SEQ ID NO: 1105178 - RNA, 21 nt, Human
gauugaaaccauggcagugag

SEQ ID NO: 1105179 - RNA, 22 nt, Human
cucaagacugaucgcaguggaa

SEQ ID NO: 1105180 - RNA, 22 nt, Human
gauggcagucaaccaggugagg

SEQ ID NO: 1105181 - RNA, 22 nt, Human
acucaggagggaucagcuauca

SEQ ID NO: 1105182 - RNA, 22 nt, Human
auagggccuaaaaaguauugcu

SEQ ID NO: 1105183 - RNA, 22 nt, Human
aucaggaucacagaaacuuuua

SEQ ID NO: 1105184 - RNA, 22 nt, Human
cagugauguuucugcaucagag

SEQ ID NO: 1105185 - RNA, 22 nt, Human
gucaggaugggcagccaaacua

SEQ ID NO: 1105186 - RNA, 22 nt, Human
ucccacacuugaaacaaggcug

SEQ ID NO: 1105187 - RNA, 22 nt, Human
ccccacacucuuuacauucaua

SEQ ID NO: 1105188 - RNA, 22 nt, Human
ugaguucuaguggcugcagauu

SEQ ID NO: 1105189 - RNA, 22 nt, Human
ucauuucaaguucugacagcua

SEQ ID NO: 1105190 - RNA, 22 nt, Human
cucaggauuuaaaggggcacuc

SEQ ID NO: 1105191 - RNA, 22 nt, Human
ucagagagugcaaaauauagcu

SEQ ID NO: 1105192 - RNA, 22 nt, Human
auugaggcagcauaguucaggg

SEQ ID NO: 1105193 - RNA, 22 nt, Human
caggaugagguagaggcagaua

SEQ ID NO: 1105194 - RNA, 22 nt, Human
augaggcaaucaugguccaguu

SEQ ID NO: 1105195 - RNA, 22 nt, Human
acacacaugccuuuccuaagua

SEQ ID NO: 1105196 - RNA, 18 nt, Human
gaugggagcaagagaaga

SEQ ID NO: 1105197 - RNA, 22 nt, Human
cccacacucugagaaaugcuga

SEQ ID NO: 1105198 - RNA, 21 nt, Human
cucaaagaccaaaaguguaga

SEQ ID NO: 1105199 - RNA, 22 nt, Human
gaaaggccauuucugaggguuu

SEQ ID NO: 1105200 - RNA, 22 nt, Human
ugaaggcccagccacagaaugg

SEQ ID NO: 1105201 - RNA, 21 nt, Human
ucacagacuggucagugaggc

SEQ ID NO: 1105202 - RNA, 22 nt, Human
gucaggauuggggucaugaguc

SEQ ID NO: 1105203 - RNA, 22 nt, Human
aucaggaucugggagccugaaa

SEQ ID NO: 1105204 - RNA, 22 nt, Human
ucagagaguuacacaaauuguu

SEQ ID NO: 1105205 - RNA, 22 nt, Human
guacacacuguuugaucauuuc

SEQ ID NO: 1105206 - RNA, 22 nt, Human
guagccauuggcaaugaagccu

SEQ ID NO: 1105207 - RNA, 22 nt, Human
cugaaugaggaaaagagugagg

SEQ ID NO: 1105208 - RNA, 20 nt, Human
uggcaucucucaauuguagg

SEQ ID NO: 1105209 - RNA, 22 nt, Human
uaaggccagccagcaaaucugu

SEQ ID NO: 1105210 - RNA, 22 nt, Human
acuaagugauucuaagcaucuu

SEQ ID NO: 1105211 - RNA, 22 nt, Human
cggagccugcuuguugcagcug

SEQ ID NO: 1105212 - RNA, 22 nt, Human
ucaggaugguccuuuaugagaa

SEQ ID NO: 1105213 - RNA, 22 nt, Human
acacauaagccuaaucaucucc

SEQ ID NO: 1105214 - RNA, 22 nt, Human
caguuuuugccauuaagaguaa

SEQ ID NO: 1105215 - RNA, 22 nt, Human
uucaggauggcggauguugggg

SEQ ID NO: 1105216 - RNA, 22 nt, Human
uuucugcugugcuuucuugcgu

SEQ ID NO: 1105217 - RNA, 22 nt, Human
uuugaaagacagaauauuuuug

SEQ ID NO: 1105218 - RNA, 22 nt, Human
gaaucucaguggaagcaggaag

SEQ ID NO: 1105219 - RNA, 20 nt, Human
cacaacuguccacaugcucc

SEQ ID NO: 1105220 - RNA, 22 nt, Human
uucacagucacccuucuccaug

SEQ ID NO: 1105221 - RNA, 22 nt, Human
cacacaucaaccuagacauugu

SEQ ID NO: 1105222 - RNA, 22 nt, Human
gaugccuccaaaugagggcaga

SEQ ID NO: 1105223 - RNA, 20 nt, Human
ugaaggccauuuguuccaga

SEQ ID NO: 1105224 - RNA, 22 nt, Human
ucacugcugcugccaugaugga

SEQ ID NO: 1105225 - RNA, 22 nt, Human
acaguucccgucuugcacagcu

SEQ ID NO: 1105226 - RNA, 22 nt, Human
cagcacagugaccagacccacu

SEQ ID NO: 1105227 - RNA, 22 nt, Human
ucaucugucccaggcuuuuuuc

SEQ ID NO: 1105228 - RNA, 22 nt, Human
acaaauccagugaacuccagug

SEQ ID NO: 1105229 - RNA, 23 nt, Human
ucucaggacacacaugucuauca

SEQ ID NO: 1105230 - RNA, 21 nt, Human
uccuuccuugagguccuuucc

SEQ ID NO: 1105231 - RNA, 22 nt, Human
acacacagaaggaagccccacu

SEQ ID NO: 1105232 - RNA, 22 nt, Human
uauguguuugacacccugcaag

SEQ ID NO: 1105233 - RNA, 22 nt, Human
acuugcauuauauuuaucacaa

SEQ ID NO: 1105234 - RNA, 21 nt, Human
ccacucaugacuccacucacc

SEQ ID NO: 1105235 - RNA, 22 nt, Human
cugcuuccauaaauaaugugcu

SEQ ID NO: 1105236 - RNA, 22 nt, Human
gccugcagauauauaggauggu

SEQ ID NO: 1105237 - RNA, 22 nt, Human
uggaguucucaggugagggcuu

SEQ ID NO: 1105238 - RNA, 21 nt, Human
acacacugaguuuuccacugu

SEQ ID NO: 1105239 - RNA, 22 nt, Human
ucacugucugaaagaaauggcc

SEQ ID NO: 1105240 - RNA, 22 nt, Human
gggacuucauagcuaggcacuu

SEQ ID NO: 1105241 - RNA, 22 nt, Human
ugguaauuaauuugauagguuc

SEQ ID NO: 1105242 - RNA, 22 nt, Human
cacagacccagaagggaugaag

SEQ ID NO: 1105243 - RNA, 22 nt, Human
acacacagcgccuaccaugugc

SEQ ID NO: 1105244 - RNA, 22 nt, Human
acauuuaaccaaacuguuuaau

SEQ ID NO: 1105245 - RNA, 22 nt, Human
gcacacauucggauucuuaacc

SEQ ID NO: 1105246 - RNA, 22 nt, Human
guugacagcuggugagcugcua

SEQ ID NO: 1105247 - RNA, 22 nt, Human
uugaaaggaauacagaggccua

SEQ ID NO: 1105248 - RNA, 22 nt, Human
aaggccagaguacuagaggcug

SEQ ID NO: 1105249 - RNA, 22 nt, Human
cuacagacccaccuuggaagaa

SEQ ID NO: 1105250 - RNA, 18 nt, Human
uguagagccagguuugcc

SEQ ID NO: 1105251 - RNA, 22 nt, Human
uugaaagaggcaaaguuugauc

SEQ ID NO: 1105252 - RNA, 22 nt, Human
uugcaucuaccauaucaaagau

SEQ ID NO: 1105253 - RNA, 22 nt, Human
uccacacacauuucuaugugca

SEQ ID NO: 1105254 - RNA, 22 nt, Human
cagugauggauauggagaaguc

SEQ ID NO: 1105255 - RNA, 22 nt, Human
ucuacugugguccuuguaacca

SEQ ID NO: 1105256 - RNA, 22 nt, Human
ccacauacaaauggggugcugu

SEQ ID NO: 1105257 - RNA, 22 nt, Human
uggcacagggcuuggucgcuca

SEQ ID NO: 1105258 - RNA, 23 nt, Human
acauacauggagauaaagugaug

SEQ ID NO: 1105259 - RNA, 22 nt, Human
aguccaaggagagacagcauuu

SEQ ID NO: 1105260 - RNA, 22 nt, Human
cccacacacauuuaugauagga

SEQ ID NO: 1105261 - RNA, 22 nt, Human
auucaaguccagcuucucuaca

SEQ ID NO: 1105262 - RNA, 22 nt, Human
ccuucuucuguguggcccaaga

SEQ ID NO: 1105263 - RNA, 22 nt, Human
uucaggauaguggugaguggca

SEQ ID NO: 1105264 - RNA, 22 nt, Human
caggauggucagaugcauuguc

SEQ ID NO: 1105265 - RNA, 22 nt, Human
uucuugcaggucacucacugag

SEQ ID NO: 1105266 - RNA, 22 nt, Human
auguuggagucguaaggcaugg

SEQ ID NO: 1105267 - RNA, 21 nt, Human
cgcagagcgaacuugcggcgc

SEQ ID NO: 1105268 - RNA, 22 nt, Human
uugguuuaggaacuggcuugga

SEQ ID NO: 1105269 - RNA, 22 nt, Human
aucugccuccaaguccaugugu

SEQ ID NO: 1105270 - RNA, 22 nt, Human
ucaucucaaaacccaaggggca

SEQ ID NO: 1105271 - RNA, 22 nt, Human
uuugaaagggacaaagucacug

SEQ ID NO: 1105272 - RNA, 22 nt, Human
ucauggcacuuagcacaguccu

SEQ ID NO: 1105273 - RNA, 22 nt, Human
cucaugauguagcgaaugagaa

SEQ ID NO: 1105274 - RNA, 22 nt, Human
auaauggccgggggcugaaugc

SEQ ID NO: 1105275 - RNA, 22 nt, Human
ucucaggaucuaauacauggua

SEQ ID NO: 1105276 - RNA, 22 nt, Human
ucacaucucccuggaggacaca

SEQ ID NO: 1105277 - RNA, 22 nt, Human
acacauuucucuuuuuguaagu

SEQ ID NO: 1105278 - RNA, 22 nt, Human
cagucucagaggugggaguggg

SEQ ID NO: 1105279 - RNA, 22 nt, Human
uugaagaggacuuugcagcugu

SEQ ID NO: 1105280 - RNA, 18 nt, Human
acucaggaaaugaugaca

SEQ ID NO: 1105281 - RNA, 23 nt, Human
uguaaacaucacccccuggaguu

SEQ ID NO: 1105282 - RNA, 19 nt, Human
ccagcccacagugacuuuc

SEQ ID NO: 1105283 - RNA, 22 nt, Human
uccagccuaggggaacagcugc

SEQ ID NO: 1105284 - RNA, 22 nt, Human
caggauggagggagggcuguua

SEQ ID NO: 1105285 - RNA, 22 nt, Human
ggugaguugggguucacagguc

SEQ ID NO: 1105286 - RNA, 17 nt, Human
acagagcacaucaagau

SEQ ID NO: 1105287 - RNA, 22 nt, Human
cagaugaggcaaccucauugcu

SEQ ID NO: 1105288 - RNA, 18 nt, Human
gacacauccccaggccuc

SEQ ID NO: 1105289 - RNA, 22 nt, Human
uggggcuccuccuggcaggagg

SEQ ID NO: 1105290 - RNA, 17 nt, Human
caaggccagcaucuuca

SEQ ID NO: 1105291 - RNA, 22 nt, Human
ugaaggccagcucuuuaucagc

SEQ ID NO: 1105292 - RNA, 22 nt, Human
uuuuaucuucauuccuaucuac

SEQ ID NO: 1105293 - RNA, 22 nt, Human
gcccacacaccagcucaggagg

SEQ ID NO: 1105294 - RNA, 22 nt, Human
augaguucaauuguuucaguca

SEQ ID NO: 1105295 - RNA, 22 nt, Human
ccagaggaggggggucuuucug

SEQ ID NO: 1105296 - RNA, 22 nt, Human
gucaggaugacaagugcuuuca

SEQ ID NO: 1105297 - RNA, 22 nt, Human
augaaggcuguguggagccccc

SEQ ID NO: 1105298 - RNA, 22 nt, Human
ugcagagagauccucaggguuu

SEQ ID NO: 1105299 - RNA, 22 nt, Human
caagagagaugcagcucacuca

SEQ ID NO: 1105300 - RNA, 22 nt, Human
aucugccugcaguggagguggg

SEQ ID NO: 1105301 - RNA, 22 nt, Human
cagaccagaaggaagccgacaa

SEQ ID NO: 1105302 - RNA, 22 nt, Human
ucucaagaucucaagauggccc

SEQ ID NO: 1105303 - RNA, 22 nt, Human
auacuguuucucuucuacauga

SEQ ID NO: 1105304 - RNA, 22 nt, Human
gucaggauguuuauucuccagu

SEQ ID NO: 1105305 - RNA, 22 nt, Human
gaaggccacaaaaaaugucaua

SEQ ID NO: 1105306 - RNA, 23 nt, Human
cccauuuucauguuaacuccugg

SEQ ID NO: 1105307 - RNA, 22 nt, Human
uccauuuucuaaguaucacuua

SEQ ID NO: 1105308 - RNA, 19 nt, Human
uggcaucuguaaaauggug

SEQ ID NO: 1105309 - RNA, 22 nt, Human
ucucacuuuccagacuuuucaa

SEQ ID NO: 1105310 - RNA, 22 nt, Human
ugaaggaaugaguauacuguuu

SEQ ID NO: 1105311 - RNA, 22 nt, Human
uaaggccaauuacauauguuca

SEQ ID NO: 1105312 - RNA, 22 nt, Human
agagggagcccagucauagcug

SEQ ID NO: 1105313 - RNA, 22 nt, Human
ugaguaauaaacugucuugcuc

SEQ ID NO: 1105314 - RNA, 22 nt, Human
uuguaaacugcugcaggagugc

SEQ ID NO: 1105315 - RNA, 22 nt, Human
augcaucuauucccaagggcag

SEQ ID NO: 1105316 - RNA, 22 nt, Human
uucacagaugccugaugugugg

SEQ ID NO: 1105317 - RNA, 22 nt, Human
auugaaaguccuaucuaaggga

SEQ ID NO: 1105318 - RNA, 22 nt, Human
ugaaugaguuuggcugcuguuc

SEQ ID NO: 1105319 - RNA, 22 nt, Human
guugaaagcuuuucauuuaguu

SEQ ID NO: 1105320 - RNA, 18 nt, Human
cucaccauucugcccaau

SEQ ID NO: 1105321 - RNA, 22 nt, Human
cuuguaauuauaauguacuguu

SEQ ID NO: 1105322 - RNA, 22 nt, Human
gacacagagcucacagucuccu

SEQ ID NO: 1105323 - RNA, 22 nt, Human
aagcuggaacaucuugaggaag

SEQ ID NO: 1105324 - RNA, 22 nt, Human
agacccagaaagcagcugcauu

SEQ ID NO: 1105325 - RNA, 22 nt, Human
acauuuaaauaccuauguuucu

SEQ ID NO: 1105326 - RNA, 22 nt, Human
caaggccaguccauuuuggaag

SEQ ID NO: 1105327 - RNA, 22 nt, Human
gcucaggaaaacagucuaguaa

SEQ ID NO: 1105328 - RNA, 22 nt, Human
aagagagagugcgcucacagaa

SEQ ID NO: 1105329 - RNA, 22 nt, Human
ugucaaauuuuuauugcaguau

SEQ ID NO: 1105330 - RNA, 22 nt, Human
ucagagagccucaggcacugcc

SEQ ID NO: 1105331 - RNA, 22 nt, Human
ccagaagaccccguccaccucc

SEQ ID NO: 1105332 - RNA, 22 nt, Human
caguuucuacgaaggucaaccc

SEQ ID NO: 1105333 - RNA, 22 nt, Human
aggcacaguggcucacaccugu

SEQ ID NO: 1105334 - RNA, 22 nt, Human
gacacagauaucucugagauua

SEQ ID NO: 1105335 - RNA, 22 nt, Human
uaaggccauuauggugggcccg

SEQ ID NO: 1105336 - RNA, 22 nt, Human
ucauuuaauaauuuuugaguag

SEQ ID NO: 1105337 - RNA, 21 nt, Human
acacagaggcaucaucacuuu

SEQ ID NO: 1105338 - RNA, 22 nt, Human
cacacacuguuaauguaggagu

SEQ ID NO: 1105339 - RNA, 22 nt, Human
cacccacauggaaauucacagu

SEQ ID NO: 1105340 - RNA, 22 nt, Human
aggaaacuccccuacaucucaa

SEQ ID NO: 1105341 - RNA, 22 nt, Human
aucugccuggcuccaggugagc

SEQ ID NO: 1105342 - RNA, 22 nt, Human
guacacacuauguauuguacac

SEQ ID NO: 1105343 - RNA, 22 nt, Human
uucccacaguguugaauccucu

SEQ ID NO: 1105344 - RNA, 22 nt, Human
gacuucuauuaauaccucuacu

SEQ ID NO: 1105345 - RNA, 22 nt, Human
ugaugaaauguugaggcaguga

SEQ ID NO: 1105346 - RNA, 22 nt, Human
ucucucagaggaagaggcagug

SEQ ID NO: 1105347 - RNA, 22 nt, Human
ucucacugcaaauauuauguau

SEQ ID NO: 1105348 - RNA, 22 nt, Human
augaggcauuccacucaaacuc

SEQ ID NO: 1105349 - RNA, 22 nt, Human
ugcagagagaccccugggccag

SEQ ID NO: 1105350 - RNA, 22 nt, Human
uuccagcaggcagacaggagau

SEQ ID NO: 1105351 - RNA, 22 nt, Human
cucaggauuuacuaauuucaag

SEQ ID NO: 1105352 - RNA, 22 nt, Human
gaaaggccagcucacagaugag

SEQ ID NO: 1105353 - RNA, 22 nt, Human
gcucaggacccaggugugaccu

SEQ ID NO: 1105354 - RNA, 22 nt, Human
uuugaaagaauuuauguacuuu

SEQ ID NO: 1105355 - RNA, 20 nt, Human
cauuuguuagcuuucuacug

SEQ ID NO: 1105356 - RNA, 22 nt, Human
cucacuguccaacaggcuuuac

SEQ ID NO: 1105357 - RNA, 18 nt, Human
ccagguggugacagagau

SEQ ID NO: 1105358 - RNA, 22 nt, Human
uuugaaaggaauuaggaugaca

SEQ ID NO: 1105359 - RNA, 23 nt, Human
acacugucucauggauagacugc

SEQ ID NO: 1105360 - RNA, 22 nt, Human
agaggagugggaagcagugcaa

SEQ ID NO: 1105361 - RNA, 20 nt, Human
uucaugggagcaaagaggcc

SEQ ID NO: 1105362 - RNA, 22 nt, Human
cauuuguuaauuacuauuaucu

SEQ ID NO: 1105363 - RNA, 22 nt, Human
uacacaucucugucaguaguga

SEQ ID NO: 1105364 - RNA, 22 nt, Human
uaagaacaguagaacaguaggu

SEQ ID NO: 1105365 - RNA, 22 nt, Human
ggacuucuaagugccagacacu

SEQ ID NO: 1105366 - RNA, 22 nt, Human
aaggccaacuaggaugagcuag

SEQ ID NO: 1105367 - RNA, 22 nt, Human
acaguggagaaggcaugaggcu

SEQ ID NO: 1105368 - RNA, 22 nt, Human
gggacaauggaggccucucucc

SEQ ID NO: 1105369 - RNA, 22 nt, Human
gcccacaccauuuauucuuugu

SEQ ID NO: 1105370 - RNA, 22 nt, Human
gucaggaucucccaguacauau

SEQ ID NO: 1105371 - RNA, 22 nt, Human
gaggaaccaaaucagcuugcac

SEQ ID NO: 1105372 - RNA, 22 nt, Human
agauggaguuaguaccagaguc

SEQ ID NO: 1105373 - RNA, 22 nt, Human
ccucaggaaccacauugcugcu

SEQ ID NO: 1105374 - RNA, 22 nt, Human
ucagauggguuuugaaggaugu

SEQ ID NO: 1105375 - RNA, 22 nt, Human
uugguuuagagagugugguuac

SEQ ID NO: 1105376 - RNA, 23 nt, Human
acagacaacacugaugagagaaa

SEQ ID NO: 1105377 - RNA, 17 nt, Human
ccauacugacauauuga

SEQ ID NO: 1105378 - RNA, 22 nt, Human
acaucacacgccuuccaggagg

SEQ ID NO: 1105379 - RNA, 22 nt, Human
cuugaaagaagggucuuuuaau

SEQ ID NO: 1105380 - RNA, 22 nt, Human
gcuccucugucaaaugagagug

SEQ ID NO: 1105381 - RNA, 22 nt, Human
ucacaguuauagucuguagaau

SEQ ID NO: 1105382 - RNA, 22 nt, Human
ucagucucaucaacucuauucc

SEQ ID NO: 1105383 - RNA, 22 nt, Human
guugaaaguggagaaccugguu

SEQ ID NO: 1105384 - RNA, 22 nt, Human
aggcacagagaaugcccuccau

SEQ ID NO: 1105385 - RNA, 22 nt, Human
gcucacugcaaccucugcuucc

SEQ ID NO: 1105386 - RNA, 22 nt, Human
guccucuggaagaugaguucuu

SEQ ID NO: 1105387 - RNA, 22 nt, Human
aguucucagcuuaguaugcugu

SEQ ID NO: 1105388 - RNA, 22 nt, Human
caggauggucucgaucuccuga

SEQ ID NO: 1105389 - RNA, 22 nt, Human
gaggaaccaaucugugauauuc

SEQ ID NO: 1105390 - RNA, 22 nt, Human
ccucaggauccgcaggugcagu

SEQ ID NO: 1105391 - RNA, 22 nt, Human
cacacaguaggcacucauuaau

SEQ ID NO: 1105392 - RNA, 22 nt, Human
acucaggaaaugagaggcucuc

SEQ ID NO: 1105393 - RNA, 22 nt, Human
aaugucugccagaacugaucau

SEQ ID NO: 1105394 - RNA, 22 nt, Human
aaggccagccugagagcuaaca

SEQ ID NO: 1105395 - RNA, 22 nt, Human
cccagcccccgagugucuggaa

SEQ ID NO: 1105396 - RNA, 22 nt, Human
aucaggauagucuguaaauugu

SEQ ID NO: 1105397 - RNA, 22 nt, Human
acacauuucuaaauuuuuaccg

SEQ ID NO: 1105398 - RNA, 22 nt, Human
ccaggcugagcaugauuggagc

SEQ ID NO: 1105399 - RNA, 22 nt, Human
accgaaggaaacuggaaccguu

SEQ ID NO: 1105400 - RNA, 22 nt, Human
gaaggccauugcguccugggau

SEQ ID NO: 1105401 - RNA, 22 nt, Human
uugcugaagugaagguauguuu

SEQ ID NO: 1105402 - RNA, 22 nt, Human
cuucugcaauaaguuuuggucc

SEQ ID NO: 1105403 - RNA, 22 nt, Human
caaggccauauugccuguaugu

SEQ ID NO: 1105404 - RNA, 19 nt, Human
ucucugcuucucuuggcau

SEQ ID NO: 1105405 - RNA, 22 nt, Human
auucaaguucuucugucuuugc

SEQ ID NO: 1105406 - RNA, 22 nt, Human
aucaggauccaccuugagccug

SEQ ID NO: 1105407 - RNA, 22 nt, Human
aucaggaucacugggagucuug

SEQ ID NO: 1105408 - RNA, 22 nt, Human
uucaggauaugugauaucugaa

SEQ ID NO: 1105409 - RNA, 22 nt, Human
aggaugaauaacugaaauggug

SEQ ID NO: 1105410 - RNA, 23 nt, Human
ucuccuccuagauacagucaugg

SEQ ID NO: 1105411 - RNA, 22 nt, Human
cgcauacauagaaacacacaga

SEQ ID NO: 1105412 - RNA, 22 nt, Human
agaggccaggcugcagagggau

SEQ ID NO: 1105413 - RNA, 22 nt, Human
uugaaaguccuucuugaguuac

SEQ ID NO: 1105414 - RNA, 22 nt, Human
uuagccauuaaauuacaaggug

SEQ ID NO: 1105415 - RNA, 22 nt, Human
ggauggcauguugggcucuguu

SEQ ID NO: 1105416 - RNA, 22 nt, Human
guccucugggagccuugagccu

SEQ ID NO: 1105417 - RNA, 22 nt, Human
uacacagauaugugaucaauca

SEQ ID NO: 1105418 - RNA, 22 nt, Human
aaacauuugcaacucgguuugg

SEQ ID NO: 1105419 - RNA, 22 nt, Human
ugguccuggaagguccugaggg

SEQ ID NO: 1105420 - RNA, 22 nt, Human
uuugaaaggguuaugagacuga

SEQ ID NO: 1105421 - RNA, 22 nt, Human
cagagggcacaugguuuccuca

SEQ ID NO: 1105422 - RNA, 22 nt, Human
acacacuguaaggacuaucacu

SEQ ID NO: 1105423 - RNA, 22 nt, Human
uuuuaucugcuucauuaguuga

SEQ ID NO: 1105424 - RNA, 22 nt, Human
uucauugugaacacauucugcc

SEQ ID NO: 1105425 - RNA, 22 nt, Human
acacaucagaaauaugaaugag

SEQ ID NO: 1105426 - RNA, 22 nt, Human
aucccaugagaccacguuggcu

SEQ ID NO: 1105427 - RNA, 22 nt, Human
acacaucuuagacugaaauaug

SEQ ID NO: 1105428 - RNA, 22 nt, Human
acugccauuggucaaaugagug

SEQ ID NO: 1105429 - RNA, 19 nt, Human
aucugccuuagugcugcug

SEQ ID NO: 1105430 - RNA, 22 nt, Human
ugaguucucacccauucuucuu

SEQ ID NO: 1105431 - RNA, 22 nt, Human
agucacuguucugucaugucaa

SEQ ID NO: 1105432 - RNA, 22 nt, Human
uguaaacauauguauguaugua

SEQ ID NO: 1105433 - RNA, 22 nt, Human
gcacauacugcaaagauuacua

SEQ ID NO: 1105434 - RNA, 22 nt, Human
uugugaguagugccgcaauaaa

SEQ ID NO: 1105435 - RNA, 23 nt, Human
ucaggauauugugugccaaggug

SEQ ID NO: 1105436 - RNA, 22 nt, Human
uaaggccaaguucauauacaac

SEQ ID NO: 1105437 - RNA, 22 nt, Human
uuaucacuuaugagcuuuuugc

SEQ ID NO: 1105438 - RNA, 22 nt, Human
caucucaugggcaugccaagcu

SEQ ID NO: 1105439 - RNA, 22 nt, Human
aucaggaugacaacugcugggu

SEQ ID NO: 1105440 - RNA, 22 nt, Human
ccuggcuccugccucugcaggg

SEQ ID NO: 1105441 - RNA, 21 nt, Human
uugaaaguaaauucagcagcu

SEQ ID NO: 1105442 - RNA, 22 nt, Human
gauggcagcagcagccagggau

SEQ ID NO: 1105443 - RNA, 22 nt, Human
uugcaaaggggaauaaagcaau

SEQ ID NO: 1105444 - RNA, 22 nt, Human
ugcuucugggcaaaugugugug

SEQ ID NO: 1105445 - RNA, 22 nt, Human
cagcccagccuugucucuuuau

SEQ ID NO: 1105446 - RNA, 21 nt, Human
ccagcccagcugugucccagc

SEQ ID NO: 1105447 - RNA, 22 nt, Human
uucaggauucuuucagacuggg

SEQ ID NO: 1105448 - RNA, 21 nt, Human
ucuugaaaauuguagcaguuu

SEQ ID NO: 1105449 - RNA, 22 nt, Human
caggguggcacaucacagcauu

SEQ ID NO: 1105450 - RNA, 22 nt, Human
auuccacacaguaauacucaau

SEQ ID NO: 1105451 - RNA, 22 nt, Human
gcuccucuucucccacugaaug

SEQ ID NO: 1105452 - RNA, 22 nt, Human
gcagagcuccccaagacaccaa

SEQ ID NO: 1105453 - RNA, 22 nt, Human
caacauuucaaggucuuuagga

SEQ ID NO: 1105454 - RNA, 22 nt, Human
uguaaagaaagacgcagaguua

SEQ ID NO: 1105455 - RNA, 22 nt, Human
uccauuuuagaagaaaauccac

SEQ ID NO: 1105456 - RNA, 20 nt, Human
guugaaaguaauaugaugcu

SEQ ID NO: 1105457 - RNA, 21 nt, Human
uucuucaugaugauuaauggc

SEQ ID NO: 1105458 - RNA, 22 nt, Human
auguucuguuuuguaauucaua

SEQ ID NO: 1105459 - RNA, 19 nt, Human
ccacacagugugcaauuua

SEQ ID NO: 1105460 - RNA, 22 nt, Human
gagagucuagugcaccuaguuu

SEQ ID NO: 1105461 - RNA, 22 nt, Human
guacacacaaucucuggucagu

SEQ ID NO: 1105462 - RNA, 22 nt, Human
augugaggaagaaagagguaag

SEQ ID NO: 1105463 - RNA, 22 nt, Human
agaccaagugcaggugccacua

SEQ ID NO: 1105464 - RNA, 22 nt, Human
ucucaggaauagaguggcagca

SEQ ID NO: 1105465 - RNA, 21 nt, Human
gcucagaguauugcacuguuu

SEQ ID NO: 1105466 - RNA, 20 nt, Human
uugauaggcagcuugucagg

SEQ ID NO: 1105467 - RNA, 22 nt, Human
gucacuguauccagguuccagc

SEQ ID NO: 1105468 - RNA, 22 nt, Human
agcccaggucuggcccagccug

SEQ ID NO: 1105469 - RNA, 22 nt, Human
cucaggauauugggcuggagca

SEQ ID NO: 1105470 - RNA, 22 nt, Human
uugguuuacuaggauucaaauu

SEQ ID NO: 1105471 - RNA, 22 nt, Human
uuucauuuugguuaugccauaa

SEQ ID NO: 1105472 - RNA, 22 nt, Human
ugauugaagaggugaggaaguu

SEQ ID NO: 1105473 - RNA, 22 nt, Human
gaggccaaucaauagggcaaua

SEQ ID NO: 1105474 - RNA, 22 nt, Human
ucaccgccuugcccggccgggc

SEQ ID NO: 1105475 - RNA, 22 nt, Human
aaggaaccuggaguagagggag

SEQ ID NO: 1105476 - RNA, 22 nt, Human
aggccagaaaugucagggagug

SEQ ID NO: 1105477 - RNA, 22 nt, Human
aacacauaggcagagcaugaca

SEQ ID NO: 1105478 - RNA, 16 nt, Human
cuuccucuucacuggc

SEQ ID NO: 1105479 - RNA, 22 nt, Human
cacuguccaugcuugcuaaccc

SEQ ID NO: 1105480 - RNA, 22 nt, Human
guaucacuuuugagagugagaa

SEQ ID NO: 1105481 - RNA, 22 nt, Human
cauuacaaccccaaauuacaaa

SEQ ID NO: 1105482 - RNA, 22 nt, Human
ugaaggccacuuccugugagcu

SEQ ID NO: 1105483 - RNA, 22 nt, Human
gaugccucuuuuggcugaauua

SEQ ID NO: 1105484 - RNA, 23 nt, Human
ucuugaaaagccuacagcaguuc

SEQ ID NO: 1105485 - RNA, 22 nt, Human
cagcuuucaucagugacacuca

SEQ ID NO: 1105486 - RNA, 22 nt, Human
agaccgagaaguucuccaggcc

SEQ ID NO: 1105487 - RNA, 22 nt, Human
ugaugaaaauaugauucugagg

SEQ ID NO: 1105488 - RNA, 22 nt, Human
uucaggauggaguaccuuuuau

SEQ ID NO: 1105489 - RNA, 22 nt, Human
agaggccggccgagcccauggg

SEQ ID NO: 1105490 - RNA, 22 nt, Human
aucaggauggguuuggcuuagg

SEQ ID NO: 1105491 - RNA, 22 nt, Human
aucccacaccccuacaacauau

SEQ ID NO: 1105492 - RNA, 22 nt, Human
aguggcagagugcacucaggca

SEQ ID NO: 1105493 - RNA, 22 nt, Human
ucacuucacacccacuaucaug

SEQ ID NO: 1105494 - RNA, 22 nt, Human
cacaacuuuaggaaccacauuc

SEQ ID NO: 1105495 - RNA, 22 nt, Human
auugaaagauauacuguucuca

SEQ ID NO: 1105496 - RNA, 22 nt, Human
ucuccucucuuaccugguacaa

SEQ ID NO: 1105497 - RNA, 22 nt, Human
ucuacuguagugaugcugcagu

SEQ ID NO: 1105498 - RNA, 22 nt, Human
auugaaagguuuugagcagaua

SEQ ID NO: 1105499 - RNA, 22 nt, Human
uuagccauugucagcacauggc

SEQ ID NO: 1105500 - RNA, 22 nt, Human
uuugaaagggaaauaaacuccu

SEQ ID NO: 1105501 - RNA, 22 nt, Human
gauggcagguaguggucucauc

SEQ ID NO: 1105502 - RNA, 22 nt, Human
auugaaagagaauguagcucuu

SEQ ID NO: 1105503 - RNA, 22 nt, Human
ugagagggcccagagcacacca

SEQ ID NO: 1105504 - RNA, 22 nt, Human
gacacagagggcaccagauaug

SEQ ID NO: 1105505 - RNA, 21 nt, Human
cuugaaagguagagucuacag

SEQ ID NO: 1105506 - RNA, 22 nt, Human
cuccucuggguccugguggcca

SEQ ID NO: 1105507 - RNA, 22 nt, Human
gcacacaguauaugcucauuaa

SEQ ID NO: 1105508 - RNA, 22 nt, Human
aaaggaagauugagcuuuucca

SEQ ID NO: 1105509 - RNA, 22 nt, Human
uucacagaauggcaaguuaugg

SEQ ID NO: 1105510 - RNA, 22 nt, Human
ucaggauguccaaaauccagcc

SEQ ID NO: 1105511 - RNA, 22 nt, Human
gacacagaauuuacucccgaua

SEQ ID NO: 1105512 - RNA, 22 nt, Human
cagaguggcacucugcuggaug

SEQ ID NO: 1105513 - RNA, 22 nt, Human
acucaggaaaaauguagugaua

SEQ ID NO: 1105514 - RNA, 22 nt, Human
cacuguccaauagauacauaau

SEQ ID NO: 1105515 - RNA, 22 nt, Human
aucacaauguacguuaaaaugu

SEQ ID NO: 1105516 - RNA, 22 nt, Human
acugagagucaagauagcaugg

SEQ ID NO: 1105517 - RNA, 22 nt, Human
ucagagaguuggaaagaauuaa

SEQ ID NO: 1105518 - RNA, 22 nt, Human
uucacauuggugauauguuucu

SEQ ID NO: 1105519 - RNA, 22 nt, Human
caucaucaaaacaaauggaguc

SEQ ID NO: 1105520 - RNA, 22 nt, Human
guccucuggagguuuuuaggug

SEQ ID NO: 1105521 - RNA, 22 nt, Human
ugaugaauaaacuugagaguca

SEQ ID NO: 1105522 - RNA, 22 nt, Human
gucacuguuuccuauuauauuu

SEQ ID NO: 1105523 - RNA, 22 nt, Human
caggaugguggcaugaucagaa

SEQ ID NO: 1105524 - RNA, 22 nt, Human
agucuucucauuucacaugcuu

SEQ ID NO: 1105525 - RNA, 22 nt, Human
acagucuugcuguauggucagg

SEQ ID NO: 1105526 - RNA, 22 nt, Human
cgucuuccucuuacgaugcgcu

SEQ ID NO: 1105527 - RNA, 22 nt, Human
aaauuacagaucaccaaugcau

SEQ ID NO: 1105528 - RNA, 22 nt, Human
ccaucacaguccccaucgugau

SEQ ID NO: 1105529 - RNA, 22 nt, Human
uuugaaaguccuaggagagucc

SEQ ID NO: 1105530 - RNA, 22 nt, Human
ugaaggccucugguacaugcca

SEQ ID NO: 1105531 - RNA, 22 nt, Human
acauacacaugaauauauuuuu

SEQ ID NO: 1105532 - RNA, 22 nt, Human
aaaggccauuacuugcuuuuag

SEQ ID NO: 1105533 - RNA, 22 nt, Human
uacacagauuucaguaucauca

SEQ ID NO: 1105534 - RNA, 22 nt, Human
agaccaagacuauaaugagagg

SEQ ID NO: 1105535 - RNA, 22 nt, Human
ucagagaggcaauacuguuuaa

SEQ ID NO: 1105536 - RNA, 22 nt, Human
uuugaaagaaaccagugaguga

SEQ ID NO: 1105537 - RNA, 22 nt, Human
uucaggaucaaguugccaguag

SEQ ID NO: 1105538 - RNA, 22 nt, Human
cagcccaaagccccaggcuaga

SEQ ID NO: 1105539 - RNA, 22 nt, Human
gaaaggcaguacagcugagccu

SEQ ID NO: 1105540 - RNA, 22 nt, Human
uugaaaguuuauggagucugca

SEQ ID NO: 1105541 - RNA, 22 nt, Human
aucaggauuacacggggaugcu

SEQ ID NO: 1105542 - RNA, 19 nt, Human
cugagagaugcuucacaca

SEQ ID NO: 1105543 - RNA, 21 nt, Human
gcugcaucaaucuacccaggg

SEQ ID NO: 1105544 - RNA, 22 nt, Human
gaggccaggagugcuguaaguu

SEQ ID NO: 1105545 - RNA, 22 nt, Human
aggcaguuguugcugagcagcu

SEQ ID NO: 1105546 - RNA, 22 nt, Human
ggccagaggugguacauagcuu

SEQ ID NO: 1105547 - RNA, 22 nt, Human
ccaggcugugguuuagauagag

SEQ ID NO: 1105548 - RNA, 22 nt, Human
acacacuguugcucauccaggc

SEQ ID NO: 1105549 - RNA, 22 nt, Human
aguuggagugaacaugagauug

SEQ ID NO: 1105550 - RNA, 23 nt, Human
ucguugaauagcaauagcacaac

SEQ ID NO: 1105551 - RNA, 22 nt, Human
aucaggauguuuggcugucaua

SEQ ID NO: 1105552 - RNA, 20 nt, Human
uuccacaucuuugcacaugc

SEQ ID NO: 1105553 - RNA, 22 nt, Human
guccucuguguaggcugcagac

SEQ ID NO: 1105554 - RNA, 22 nt, Human
ugguaauuuacgcauuucugua

SEQ ID NO: 1105555 - RNA, 22 nt, Human
gcuccucuauuccccacauuuu

SEQ ID NO: 1105556 - RNA, 15 nt, Human
uucaggauaugacuc

SEQ ID NO: 1105557 - RNA, 22 nt, Human
auuccacagcuacaucaaucua

SEQ ID NO: 1105558 - RNA, 21 nt, Human
cacucaggguaugugccaggc

SEQ ID NO: 1105559 - RNA, 22 nt, Human
accauguguuuuacacauggua

SEQ ID NO: 1105560 - RNA, 21 nt, Human
uaaggccaagucuauuucugu

SEQ ID NO: 1105561 - RNA, 22 nt, Human
guacacacuauuuaaaguguuu

SEQ ID NO: 1105562 - RNA, 22 nt, Human
aaaggccaugguuggaguguuu

SEQ ID NO: 1105563 - RNA, 22 nt, Human
cauacauuuauacacaucuaug

SEQ ID NO: 1105564 - RNA, 22 nt, Human
agagugucugguagcugcucug

SEQ ID NO: 1105565 - RNA, 22 nt, Human
ucucugguuauuaacuaacucc

SEQ ID NO: 1105566 - RNA, 23 nt, Human
caguggagacucaugcuuccuua

SEQ ID NO: 1105567 - RNA, 22 nt, Human
guugaaagaugucuugguuccc

SEQ ID NO: 1105568 - RNA, 22 nt, Human
ccucagaugucuuaaggcacug

SEQ ID NO: 1105569 - RNA, 22 nt, Human
ccacacagauaaguguuuucua

SEQ ID NO: 1105570 - RNA, 22 nt, Human
agcugcuacugcucugccagag

SEQ ID NO: 1105571 - RNA, 22 nt, Human
cucagaauuuagggcucugagg

SEQ ID NO: 1105572 - RNA, 22 nt, Human
cagccaagaaccacagacccag

SEQ ID NO: 1105573 - RNA, 22 nt, Human
ucauuuuucacacagggucacc

SEQ ID NO: 1105574 - RNA, 22 nt, Human
cuggccucagagggucauggug

SEQ ID NO: 1105575 - RNA, 22 nt, Human
aucaggauucaguaucuccagc

SEQ ID NO: 1105576 - RNA, 22 nt, Human
ugugaaagcaagucuaguucuc

SEQ ID NO: 1105577 - RNA, 22 nt, Human
ugcagagaagaggacaguucua

SEQ ID NO: 1105578 - RNA, 22 nt, Human
ucugaaggugcuagagaaagcu

SEQ ID NO: 1105579 - RNA, 22 nt, Human
gccagagguucaacaacugucu

SEQ ID NO: 1105580 - RNA, 22 nt, Human
cacacagaaccgcucgccacuu

SEQ ID NO: 1105581 - RNA, 22 nt, Human
uucaauucuaaacuaauauucu

SEQ ID NO: 1105582 - RNA, 21 nt, Human
ucacacacguuuccaagggca

SEQ ID NO: 1105583 - RNA, 22 nt, Human
caaggccacguucugcaugcgg

SEQ ID NO: 1105584 - RNA, 22 nt, Human
cucuccucagaacaggcccucu

SEQ ID NO: 1105585 - RNA, 22 nt, Human
ucuuuuggguucuuaugauuua

SEQ ID NO: 1105586 - RNA, 22 nt, Human
augaggcaucugcagucacuag

SEQ ID NO: 1105587 - RNA, 22 nt, Human
acacucuguaaugucacacucc

SEQ ID NO: 1105588 - RNA, 22 nt, Human
gaggaaccacucugagaagcca

SEQ ID NO: 1105589 - RNA, 17 nt, Human
ucaggauguagcaguag

SEQ ID NO: 1105590 - RNA, 22 nt, Human
cugagagaucaagccacaggau

SEQ ID NO: 1105591 - RNA, 22 nt, Human
uugagaagaaauaguuugcaau

SEQ ID NO: 1105592 - RNA, 22 nt, Human
cauucucaauaguagaugagua

SEQ ID NO: 1105593 - RNA, 22 nt, Human
agauggagaaugacaauuaagg

SEQ ID NO: 1105594 - RNA, 22 nt, Human
ucaauucugguccucaggaacu

SEQ ID NO: 1105595 - RNA, 22 nt, Human
gcuugaaaauucauagguauuu

SEQ ID NO: 1105596 - RNA, 15 nt, Human
cacacagacagcuug

SEQ ID NO: 1105597 - RNA, 20 nt, Human
aguuauaguaucuagccaug

SEQ ID NO: 1105598 - RNA, 22 nt, Human
ucacauacugaaaguccaguga

SEQ ID NO: 1105599 - RNA, 22 nt, Human
ucuuuuggaaaugaugugcagg

SEQ ID NO: 1105600 - RNA, 22 nt, Human
aaggaaccauuugugugcaugg

SEQ ID NO: 1105601 - RNA, 22 nt, Human
gcacacaggcaguuuccagcca

SEQ ID NO: 1105602 - RNA, 19 nt, Human
agcuuccauauucucuagu

SEQ ID NO: 1105603 - RNA, 22 nt, Human
aacacauauuuauauaugcaca

SEQ ID NO: 1105604 - RNA, 22 nt, Human
auaucacaguaguuguuuaguu

SEQ ID NO: 1105605 - RNA, 22 nt, Human
uuuuuuaguuaggucagaaugu

SEQ ID NO: 1105606 - RNA, 22 nt, Human
gucaggauuuacaaacuucagu

SEQ ID NO: 1105607 - RNA, 22 nt, Human
caaggccaguuucuccuaguca

SEQ ID NO: 1105608 - RNA, 22 nt, Human
ccccacaccugccgggcagcag

SEQ ID NO: 1105609 - RNA, 21 nt, Human
ucucugguuggaguugugcca

SEQ ID NO: 1105610 - RNA, 22 nt, Human
uuuguuuacucauucauugaug

SEQ ID NO: 1105611 - RNA, 19 nt, Human
acauuuaaauucagaucuc

SEQ ID NO: 1105612 - RNA, 22 nt, Human
ccaccccaaaugaagaccucuc

SEQ ID NO: 1105613 - RNA, 22 nt, Human
gcaugucaugucauguaggaau

SEQ ID NO: 1105614 - RNA, 22 nt, Human
ugaaggccagggauuugcagcc

SEQ ID NO: 1105615 - RNA, 22 nt, Human
cauagagugauguaagguaugu

SEQ ID NO: 1105616 - RNA, 22 nt, Human
aagauggagcacgagcagaagc

SEQ ID NO: 1105617 - RNA, 22 nt, Human
guccucugggcuuugagcaguc

SEQ ID NO: 1105618 - RNA, 22 nt, Human
ucugguaaccuuuaucccuccu

SEQ ID NO: 1105619 - RNA, 22 nt, Human
aaaggccagguuggcugguauu

SEQ ID NO: 1105620 - RNA, 22 nt, Human
cagagccaggucuaggagucuc

SEQ ID NO: 1105621 - RNA, 22 nt, Human
agucaauuaucucuaggucauc

SEQ ID NO: 1105622 - RNA, 22 nt, Human
augugaggcagcacggagauua

SEQ ID NO: 1105623 - RNA, 22 nt, Human
ccacacagggggaugaguuauu

SEQ ID NO: 1105624 - RNA, 22 nt, Human
uuaacaugucuugacuucaucu

SEQ ID NO: 1105625 - RNA, 22 nt, Human
cauuuguuaaccaguguggauu

SEQ ID NO: 1105626 - RNA, 22 nt, Human
uacauuccuguuagcaucuaag

SEQ ID NO: 1105627 - RNA, 22 nt, Human
cacccacauuccaucacucugc

SEQ ID NO: 1105628 - RNA, 22 nt, Human
acaucugaggagaccagccucu

SEQ ID NO: 1105629 - RNA, 19 nt, Human
acauucccaucagcaaugu

SEQ ID NO: 1105630 - RNA, 22 nt, Human
uccauuuuagagaugaagaaac

SEQ ID NO: 1105631 - RNA, 22 nt, Human
auggcagauggcuggagcaggu

SEQ ID NO: 1105632 - RNA, 22 nt, Human
cucucuguuaugcuuucaugaa

SEQ ID NO: 1105633 - RNA, 22 nt, Human
ugaaggccagcagagugaaggc

SEQ ID NO: 1105634 - RNA, 17 nt, Human
aaggccauuuccaccca

SEQ ID NO: 1105635 - RNA, 22 nt, Human
acucaggaauggggcugggacu

SEQ ID NO: 1105636 - RNA, 22 nt, Human
caggaugggauguagugggccc

SEQ ID NO: 1105637 - RNA, 22 nt, Human
ucauuguuauguuuugcugucu

SEQ ID NO: 1105638 - RNA, 22 nt, Human
uuagaaagcuuuccauagucaa

SEQ ID NO: 1105639 - RNA, 21 nt, Human
aucacauuggcuguuauuauu

SEQ ID NO: 1105640 - RNA, 22 nt, Human
uguaaacauaccagagccaagu

SEQ ID NO: 1105641 - RNA, 22 nt, Human
ucauuuguacuugugugcuugu

SEQ ID NO: 1105642 - RNA, 22 nt, Human
gucuucuguaagaugagguccc

SEQ ID NO: 1105643 - RNA, 22 nt, Human
gcucaggagcucuugguggcgc

SEQ ID NO: 1105644 - RNA, 22 nt, Human
gaaggccacuuuguguugagaa

SEQ ID NO: 1105645 - RNA, 22 nt, Human
ccucaggggucacugugaggag

SEQ ID NO: 1105646 - RNA, 22 nt, Human
ucaucacauaugucaugauuug

SEQ ID NO: 1105647 - RNA, 22 nt, Human
ucagggugaaccaggcaggaau

SEQ ID NO: 1105648 - RNA, 22 nt, Human
agagucccagggacacuccaga

SEQ ID NO: 1105649 - RNA, 22 nt, Human
auugaaagaguuuucugcugca

SEQ ID NO: 1105650 - RNA, 22 nt, Human
ggagcugugcagugacuacaga

SEQ ID NO: 1105651 - RNA, 20 nt, Human
aggcucagcugagcucuugg

SEQ ID NO: 1105652 - RNA, 22 nt, Human
acacaucaugccaaguuucacc

SEQ ID NO: 1105653 - RNA, 22 nt, Human
uguaaacagccccauggagagc

SEQ ID NO: 1105654 - RNA, 22 nt, Human
uguugaagauaaaguucucauu

SEQ ID NO: 1105655 - RNA, 22 nt, Human
gaggaacccagcugggguugcc

SEQ ID NO: 1105656 - RNA, 20 nt, Human
caggaugauuggacacgaug

SEQ ID NO: 1105657 - RNA, 22 nt, Human
uuagccaugcccuagaagagga

SEQ ID NO: 1105658 - RNA, 22 nt, Human
gcucaggaccgaggggugggaa

SEQ ID NO: 1105659 - RNA, 22 nt, Human
uuuguuaauucuuauguuagag

SEQ ID NO: 1105660 - RNA, 19 nt, Human
uggggcuguguuuugaccc

SEQ ID NO: 1105661 - RNA, 22 nt, Human
gagguauaguucuauuagauga

SEQ ID NO: 1105662 - RNA, 22 nt, Human
cuacauuauguuuauugggacu

SEQ ID NO: 1105663 - RNA, 22 nt, Human
ugaaauguggagaugguaagua

SEQ ID NO: 1105664 - RNA, 22 nt, Human
aagaaaagguaaccgcuuaucu

SEQ ID NO: 1105665 - RNA, 22 nt, Human
aaauacaguggcagcagauaau

SEQ ID NO: 1105666 - RNA, 22 nt, Human
ccccaacccugguuccguggcg

SEQ ID NO: 1105667 - RNA, 22 nt, Human
uacaccagauuauuuauaacau

SEQ ID NO: 1105668 - RNA, 22 nt, Human
auguuugaaauuguaaguauau

SEQ ID NO: 1105669 - RNA, 22 nt, Human
caggaacacaaugagucucaaa

SEQ ID NO: 1105670 - RNA, 22 nt, Human
uagaugaacagaaagccacugu

SEQ ID NO: 1105671 - RNA, 22 nt, Human
ugugugaacucucugauguaca

SEQ ID NO: 1105672 - RNA, 22 nt, Human
uauagcagcaugauuuauaguc

SEQ ID NO: 1105673 - RNA, 22 nt, Human
guucaguuauuucugaagauau

SEQ ID NO: 1105674 - RNA, 22 nt, Human
ugucauuggugaucugaugccu

SEQ ID NO: 1105675 - RNA, 22 nt, Human
ugagaugaagugauguaaaaca

SEQ ID NO: 1105676 - RNA, 22 nt, Human
uucaguuuugcuuuuaaucaug

SEQ ID NO: 1105677 - RNA, 22 nt, Human
uagaaaagccccagcuggaggg

SEQ ID NO: 1105678 - RNA, 22 nt, Human
gaaaauaguucaucacaaugau

SEQ ID NO: 1105679 - RNA, 22 nt, Human
caggaaugguuaaucuaaagug

SEQ ID NO: 1105680 - RNA, 22 nt, Human
gcgagaaacuaagugcccuuug

SEQ ID NO: 1105681 - RNA, 22 nt, Human
uugaauaguuuuggauagcaua

SEQ ID NO: 1105682 - RNA, 22 nt, Human
aaacacaucauucaugucguca

SEQ ID NO: 1105683 - RNA, 22 nt, Human
cuauacagcagcuuacuaguua

SEQ ID NO: 1105684 - RNA, 22 nt, Human
caggaacagcaccaggagcuag

SEQ ID NO: 1105685 - RNA, 22 nt, Human
agagcaauuagcuuagguaaaa

SEQ ID NO: 1105686 - RNA, 22 nt, Human
ucagagaaguaggcuaauggug

SEQ ID NO: 1105687 - RNA, 22 nt, Human
caauguuuuuccuuccuuaaua

SEQ ID NO: 1105688 - RNA, 22 nt, Human
aaguccagguccucauuccauc

SEQ ID NO: 1105689 - RNA, 22 nt, Human
uuaaggaacuugucuuucucuu

SEQ ID NO: 1105690 - RNA, 22 nt, Human
guacauauccuuuacguuuugu

SEQ ID NO: 1105691 - RNA, 22 nt, Human
caggaaugccaaccagugcaug

SEQ ID NO: 1105692 - RNA, 22 nt, Human
ugcauuaagaauuucugaggau

SEQ ID NO: 1105693 - RNA, 22 nt, Human
uguucaguuugcuaucauaauc

SEQ ID NO: 1105694 - RNA, 22 nt, Human
uuggaaguucuuagccuuuuca

SEQ ID NO: 1105695 - RNA, 22 nt, Human
agagucaguuaugucaagugcu

SEQ ID NO: 1105696 - RNA, 19 nt, Human
uaugaaguugauaaaaguu

SEQ ID NO: 1105697 - RNA, 22 nt, Human
uccaagaagcuuacaaucuaau

SEQ ID NO: 1105698 - RNA, 22 nt, Human
agucaguaugacuuauaguucu

SEQ ID NO: 1105699 - RNA, 22 nt, Human
uacauguuauuucacuauuggu

SEQ ID NO: 1105700 - RNA, 22 nt, Human
gugcauauguguguauacaaac

SEQ ID NO: 1105701 - RNA, 22 nt, Human
uguggaauguccucagcauccu

SEQ ID NO: 1105702 - RNA, 21 nt, Human
aaagugguaaggauuauuuug

SEQ ID NO: 1105703 - RNA, 22 nt, Human
aauacagauggcaugugaagau

SEQ ID NO: 1105704 - RNA, 22 nt, Human
aucaucaucuaaauugugucgc

SEQ ID NO: 1105705 - RNA, 22 nt, Human
uugcauauccuccaacacaugg

SEQ ID NO: 1105706 - RNA, 22 nt, Human
caugcauuucuaccaaggaaua

SEQ ID NO: 1105707 - RNA, 22 nt, Human
aaugaaacuauauuuagagagg

SEQ ID NO: 1105708 - RNA, 22 nt, Human
gcaccgagaaggaagcaugccu

SEQ ID NO: 1105709 - RNA, 22 nt, Human
caguggaugucucauaguguga

SEQ ID NO: 1105710 - RNA, 21 nt, Human
caggaacauucuuuacauuua

SEQ ID NO: 1105711 - RNA, 22 nt, Human
uuuaaaccuaucuaagaaauag

SEQ ID NO: 1105712 - RNA, 22 nt, Human
agaaaagaggcuuucuaagcau

SEQ ID NO: 1105713 - RNA, 22 nt, Human
acagagacacggaagcuaaaga

SEQ ID NO: 1105714 - RNA, 22 nt, Human
agagaagagucuugucaaauua

SEQ ID NO: 1105715 - RNA, 22 nt, Human
cugugaauguuauaucucaaug

SEQ ID NO: 1105716 - RNA, 21 nt, Human
ugcauauauaagugcauacac

SEQ ID NO: 1105717 - RNA, 22 nt, Human
auguaguauuuggaaauguaaa

SEQ ID NO: 1105718 - RNA, 21 nt, Human
caaaagagacugauucuugga

SEQ ID NO: 1105719 - RNA, 18 nt, Human
uauaaacacacuuagguu

SEQ ID NO: 1105720 - RNA, 22 nt, Human
guaugugucuuagaacuuggga

SEQ ID NO: 1105721 - RNA, 22 nt, Human
caaacuuacuguguuuaaagag

SEQ ID NO: 1105722 - RNA, 22 nt, Human
aaaagagccacuuaugaccuca

SEQ ID NO: 1105723 - RNA, 22 nt, Human
gagcaacacauugaaugaggau

SEQ ID NO: 1105724 - RNA, 22 nt, Human
cuucacaaaauauuucauuaua

SEQ ID NO: 1105725 - RNA, 22 nt, Human
cagagcugucauuugccaguga

SEQ ID NO: 1105726 - RNA, 22 nt, Human
cugagguagaggaaauguagcu

SEQ ID NO: 1105727 - RNA, 22 nt, Tula virus
ccauuuaagagugcacuugaug

SEQ ID NO: 1105728 - RNA, 22 nt, Tula virus
agcaugugcaauuagacauucu

SEQ ID NO: 1105729 - RNA, 22 nt, Tula virus
accgagaagacucaaacacaga

SEQ ID NO: 1105730 - RNA, 22 nt, Human
uagaaaagccccagcuggaggg

SEQ ID NO: 1105731 - RNA, 22 nt, Human
aagaaaagguaaccgcuuaucu

SEQ ID NO: 1105732 - RNA, 22 nt, Human
uucacugugauguuuaagagaa

SEQ ID NO: 1105733 - RNA, 22 nt, Human
cagcacauggauggaguuagga

SEQ ID NO: 1105734 - RNA, 20 nt, Human
ucacuguaacauuugggggg

SEQ ID NO: 1105735 - RNA, 22 nt, Human
aagcaccuggguuauaucuuag

SEQ ID NO: 1105736 - RNA, 22 nt, Human
agaauccuggagaagcuguacc

SEQ ID NO: 1105737 - RNA, 21 nt, Human
uuggccgugcagaugaacagc

SEQ ID NO: 1105738 - RNA, 21 nt, Human
ccuuugaguguguuugaagua

SEQ ID NO: 1105739 - RNA, 22 nt, Human
agagaagagucuugucaaauua

SEQ ID NO: 1105740 - RNA, 22 nt, Human
agcacuggaaaguuaagaguuu

SEQ ID NO: 1105741 - RNA, 22 nt, Human
augaagcugguuuuggcuuggg

SEQ ID NO: 1105742 - RNA, 22 nt, Human
gucaccuugaacaggcuacuca

SEQ ID NO: 1105743 - RNA, 22 nt, Human
gagcacugagcuggaauuggag

SEQ ID NO: 1105744 - RNA, 22 nt, Human
ucuucaugucucugcuugaguc

SEQ ID NO: 1105745 - RNA, 22 nt, Human
ccuuugagccugggcgcggacc

SEQ ID NO: 1105746 - RNA, 22 nt, Human
gagcagcaggccagguugcagg

SEQ ID NO: 1105747 - RNA, 22 nt, Human
gcacugggggcagcagugaggg

SEQ ID NO: 1105748 - RNA, 22 nt, Human
cccuugagccuggaggagcucu

SEQ ID NO: 1105749 - RNA, 22 nt, Human
ggcacuggcaaagcaaagucug

SEQ ID NO: 1105750 - RNA, 22 nt, Human
ugggaagauaugagugaccaac

SEQ ID NO: 1105751 - RNA, 22 nt, Human
augcaacuacccccaggauuuu

SEQ ID NO: 1105752 - RNA, 22 nt, Human
agaaagcacccugcacuuucug

SEQ ID NO: 1105753 - RNA, 22 nt, Human
cuggccagggugcgaucguggu

SEQ ID NO: 1105754 - RNA, 22 nt, Human
agggcacucugcagggaccacc

SEQ ID NO: 1105755 - RNA, 22 nt, Human
agucacuguuuaaucuagcuaa

SEQ ID NO: 1105756 - RNA, 22 nt, Human
gggagccagcagggcauggagc

SEQ ID NO: 1105757 - RNA, 22 nt, Human
aguguauuugccuauaaaaaug

SEQ ID NO: 1105758 - RNA, 22 nt, Human
auucauucugaccucaagagaa

SEQ ID NO: 1105759 - RNA, 22 nt, Human
aauacagugaaagugagcaagg

SEQ ID NO: 1105760 - RNA, 21 nt, Human
aaagugguaaggauuauuuug

SEQ ID NO: 1105761 - RNA, 22 nt, Human
ugcuuucaaugaauuguauacu

SEQ ID NO: 1105762 - RNA, 22 nt, Human
uuuguguuguacuucugugcau

SEQ ID NO: 1105763 - RNA, 21 nt, Human
uucugagacucauuugaacuc

SEQ ID NO: 1105764 - RNA, 22 nt, Human
uuuguguuggaagaaaugcuac

SEQ ID NO: 1105765 - RNA, 22 nt, Human
uucagauaagucaaguuaguau

SEQ ID NO: 1105766 - RNA, 22 nt, Human
aggaaauuuugaaucagugucu

SEQ ID NO: 1105767 - RNA, 22 nt, Human
gauccacaggaaccaaaacgca

SEQ ID NO: 1105768 - RNA, 22 nt, Human
uacagcuugauguuuguguguu

SEQ ID NO: 1105769 - RNA, 22 nt, Human
uguacacauuaagcucuuuaga

SEQ ID NO: 1105770 - RNA, 22 nt, Human
aaugaaacuauauuuagagagg

SEQ ID NO: 1105771 - RNA, 18 nt, Human
ucugaaggaaugauucca

SEQ ID NO: 1105772 - RNA, 22 nt, Human
uuucauuauaaaaaguuggcuu

SEQ ID NO: 1105773 - RNA, 21 nt, Human
cgaaguuugggcagagggguc

SEQ ID NO: 1105774 - RNA, 22 nt, Human
uuccaauaaaauguuauuugca

SEQ ID NO: 1105775 - RNA, 22 nt, Human
uuguagucuaggauagauuuuu

SEQ ID NO: 1105776 - RNA, 22 nt, Human
uugcuggaguagaaaacuuaac

SEQ ID NO: 1105777 - RNA, 22 nt, Human
gucauggaggauugugaguggu

SEQ ID NO: 1105778 - RNA, 22 nt, Human
uuuugucagugagaacagaguu

SEQ ID NO: 1105779 - RNA, 22 nt, Human
uuauuccauagaagucaaggaa

SEQ ID NO: 1105780 - RNA, 22 nt, Human
ucauuuacacuucacaaaugga

SEQ ID NO: 1105781 - RNA, 22 nt, Human
uaagggaacagcuucaaacuca

SEQ ID NO: 1105782 - RNA, 17 nt, Human
uuucugcaugauuggac

SEQ ID NO: 1105783 - RNA, 22 nt, Human
auaggcauaacacugauguccu

SEQ ID NO: 1105784 - RNA, 22 nt, Human
uuguguacucaccagcacauac

SEQ ID NO: 1105785 - RNA, 23 nt, Human
gacagagugagaccuugucuuac

SEQ ID NO: 1105786 - RNA, 22 nt, Human
cugguuuuccaauguuuugacu

SEQ ID NO: 1105787 - RNA, 22 nt, Human
auuaauaucccccgccguucug

SEQ ID NO: 1105788 - RNA, 22 nt, Human
acugagcaggguuccgcaugga

SEQ ID NO: 1105789 - RNA, 22 nt, Human
gugggugucaguaucuuuaacg

SEQ ID NO: 1105790 - RNA, 22 nt, Human
gcauucuugguggagugcuaaa

SEQ ID NO: 1105791 - RNA, 22 nt, Human
uuccuucuucauuguguuacag

SEQ ID NO: 1105792 - RNA, 21 nt, Human
acaguacuugagaucuuuuga

SEQ ID NO: 1105793 - RNA, 18 nt, Human
gacaaaaguacagacaga

SEQ ID NO: 1105794 - RNA, 22 nt, Human
uuuacagagaauguacauaaag

SEQ ID NO: 1105795 - RNA, 22 nt, Human
cuuguuuucuucugcagucuau

SEQ ID NO: 1105796 - RNA, 22 nt, Human
uguuuuaagggucaacugucac

SEQ ID NO: 1105797 - RNA, 22 nt, Human
uaaaugaaaggguuuaauuuau

SEQ ID NO: 1105798 - RNA, 22 nt, Human
gucucuaucauagcugaacccu

SEQ ID NO: 1105799 - RNA, 23 nt, Human
caaaaugcuaugugcccaaugca

SEQ ID NO: 1105800 - RNA, 22 nt, Human
auuuccuauacaguuguccaua

SEQ ID NO: 1105801 - RNA, 22 nt, Human
uuaccacagugccugucuaaug

SEQ ID NO: 1105802 - RNA, 22 nt, Human
gcaaggaagcagaguugcuauc

SEQ ID NO: 1105803 - RNA, 22 nt, Human
cauaacauccuugcuacuuuga

SEQ ID NO: 1105804 - RNA, 18 nt, Human
ucaguccuccauagagcu

SEQ ID NO: 1105805 - RNA, 22 nt, Human
aaaaugcucaucagcgauggcu

SEQ ID NO: 1105806 - RNA, 22 nt, Human
cauuguguauuucuguaguacu

SEQ ID NO: 1105807 - RNA, 22 nt, Human
cugcaucaguggauaugauggu

SEQ ID NO: 1105808 - RNA, 22 nt, Human
uccuuagagugguugugcuaug

SEQ ID NO: 1105809 - RNA, 22 nt, Human
aaauugcuugagauuagucucc

SEQ ID NO: 1105810 - RNA, 22 nt, Human
ccucuaaauuguuugaaguugg

SEQ ID NO: 1105811 - RNA, 22 nt, Human
aguucaugugguuuaacuuaau

SEQ ID NO: 1105812 - RNA, 22 nt, Human
gcuuucuuuucaagaauguauu

SEQ ID NO: 1105813 - RNA, 22 nt, Human
agauguuuauaacucaugagug

SEQ ID NO: 1105814 - RNA, 22 nt, Human
acaauuucuaauauagaucuua

SEQ ID NO: 1105815 - RNA, 22 nt, Human
guuaaaugcagauucugacuca

SEQ ID NO: 1105816 - RNA, 22 nt, Human
uaacacauagauauuuuaacuu

SEQ ID NO: 1105817 - RNA, 22 nt, Human
agugaaauaugcccauugcugu

SEQ ID NO: 1105818 - RNA, 22 nt, Human
gaugaaggggcuggugcccucu

SEQ ID NO: 1105819 - RNA, 22 nt, Human
auucuugauauagauaguuaau

SEQ ID NO: 1105820 - RNA, 22 nt, Human
uuuaaaccuaucuaagaaauag

SEQ ID NO: 1105821 - RNA, 22 nt, Human
uacuacauacagaauuuagaga

SEQ ID NO: 1105822 - RNA, 22 nt, Human
auacagaagaccccuccgucau

SEQ ID NO: 1105823 - RNA, 22 nt, Human
uaaaguuuauuggcaccaccau

SEQ ID NO: 1105824 - RNA, 22 nt, Human
cucuggaucugcccugacgcca

SEQ ID NO: 1105825 - RNA, 22 nt, Human
uuuacaaggcaguuauuuuccu

SEQ ID NO: 1105826 - RNA, 22 nt, Human
uggaaauaguugugagucaggc

SEQ ID NO: 1105827 - RNA, 22 nt, Human
gcugaaguugccuauuuuaaua

SEQ ID NO: 1105828 - RNA, 22 nt, Human
ugacucauauuucauggauacg

SEQ ID NO: 1105829 - RNA, 22 nt, Human
ugcuugacuuaguuucucauuu

SEQ ID NO: 1105830 - RNA, 22 nt, Human
uaguggauguucagagauuuga

SEQ ID NO: 1105831 - RNA, 19 nt, Human
uuacaugacauaugaagga

SEQ ID NO: 1105832 - RNA, 18 nt, Human
uauaaacacacuuagguu

SEQ ID NO: 1105833 - RNA, 22 nt, Human
cugguuaauccauaaacagaga

SEQ ID NO: 1105834 - RNA, 22 nt, Human
cuaguucugccauucaguguca

SEQ ID NO: 1105835 - RNA, 22 nt, Human
uccuuggcaugccgucuucucc

SEQ ID NO: 1105836 - RNA, 22 nt, Human
gaugucuucagauggcaagaga

SEQ ID NO: 1105837 - RNA, 22 nt, Human
aaaucaugguggaagaaacaga

SEQ ID NO: 1105838 - RNA, 22 nt, Human
cgauuuccgcuugaucugaucu

SEQ ID NO: 1105839 - RNA, 22 nt, Human
auguaugagagauucuuuuauu

SEQ ID NO: 1105840 - RNA, 22 nt, Human
uucguuuaguccacaaaugcau

SEQ ID NO: 1105841 - RNA, 22 nt, Human
auacuucuuuagcauauugaac

SEQ ID NO: 1105842 - RNA, 22 nt, Human
ugugagacguaggccaucgagg

SEQ ID NO: 1105843 - RNA, 22 nt, Human
caugucacaauucuuaauggga

SEQ ID NO: 1105844 - RNA, 19 nt, Human
uaugaaguugauaaaaguu

SEQ ID NO: 1105845 - RNA, 22 nt, Human
auugaagacuugguauccgugg

SEQ ID NO: 1105846 - RNA, 22 nt, Human
uuuaaacuaacaguacacguug

SEQ ID NO: 1105847 - RNA, 22 nt, Human
acaugcauaaacuacuucuuau

SEQ ID NO: 1105848 - RNA, 22 nt, Human
acaaacuucccagacaagcucc

SEQ ID NO: 1105849 - RNA, 22 nt, Human
auggcauuugaaucugucuuuu

SEQ ID NO: 1105850 - RNA, 22 nt, Human
agcaauguuggccuauauaccu

SEQ ID NO: 1105851 - RNA, 20 nt, Human
acagagauccucucuuuauc

SEQ ID NO: 1105852 - RNA, 22 nt, Human
uacuuucuagcucuccccaguu

SEQ ID NO: 1105853 - RNA, 22 nt, Human
gaaaauaguucaucacaaugau

SEQ ID NO: 1105854 - RNA, 22 nt, Human
agcuauggguguggguuccauu

SEQ ID NO: 1105855 - RNA, 22 nt, Human
aaagucuuaauguaaguuuagu

SEQ ID NO: 1105856 - RNA, 22 nt, Human
guuuugaauacuacuagaacuu

SEQ ID NO: 1105857 - RNA, 22 nt, Human
uauagugucucuagaucaaaga

SEQ ID NO: 1105858 - RNA, 22 nt, Human
uuguacacacaggaacaaacgu

SEQ ID NO: 1105859 - RNA, 22 nt, Human
cugugaauguuauaucucaaug

SEQ ID NO: 1105860 - RNA, 22 nt, Human
uucugauuguuggaggaugcuu

SEQ ID NO: 1105861 - RNA, 22 nt, Human
ucgucugugaaauugggauaag

SEQ ID NO: 1105862 - RNA, 22 nt, Human
ucguuauagaacauucuugggu

SEQ ID NO: 1105863 - RNA, 22 nt, Human
uuuccagucucugccuccaagg

SEQ ID NO: 1105864 - RNA, 22 nt, Human
aagaaaagguaaccgcuuaucu

SEQ ID NO: 1105865 - RNA, 22 nt, Human
acuggaaaguauucuuucacug

SEQ ID NO: 1105866 - RNA, 22 nt, Human
gucauuuuugacuuugaaguga

SEQ ID NO: 1105867 - RNA, 22 nt, Human
ucccagaacccugccagguccu

SEQ ID NO: 1105868 - RNA, 22 nt, Human
cuucuccgacaaccgacgccgg

SEQ ID NO: 1105869 - RNA, 22 nt, Human
uagcauuuagaacaccuugaga

SEQ ID NO: 1105870 - RNA, 22 nt, Human
uuaaguauauccauuugacugg

SEQ ID NO: 1105871 - RNA, 22 nt, Human
cuaaauguuuuaucuuccuggc

SEQ ID NO: 1105872 - RNA, 23 nt, Human
gggcagcuuaagcuuguuuuucu

SEQ ID NO: 1105873 - RNA, 22 nt, Human
ucacacuuuauuuauuucaugc

SEQ ID NO: 1105874 - RNA, 22 nt, Human
guuucuccucugugucuuguuu

SEQ ID NO: 1105875 - RNA, 22 nt, Human
cuguauaugugcauacacacac

SEQ ID NO: 1105876 - RNA, 22 nt, Human
gcauuuaaauuugaacuucaga

SEQ ID NO: 1105877 - RNA, 22 nt, Human
acaggaaaugaaaugguaucua

SEQ ID NO: 1105878 - RNA, 17 nt, Human
gcaggcacugcugccug

SEQ ID NO: 1105879 - RNA, 22 nt, Human
augaauaaaacauuuuaaucag

SEQ ID NO: 1105880 - RNA, 22 nt, Human
gacauuuauuggauuuuacgag

SEQ ID NO: 1105881 - RNA, 22 nt, Human
acagaagugacaauuucuuggg

SEQ ID NO: 1105882 - RNA, 19 nt, Human
aaauccaagcucaggccuc

SEQ ID NO: 1105883 - RNA, 22 nt, Human
ucacuaugcccagaauacaguu

SEQ ID NO: 1105884 - RNA, 22 nt, Human
caguauuucauucagaauuguu

SEQ ID NO: 1105885 - RNA, 22 nt, Human
uagcuguucucuguaaauugga

SEQ ID NO: 1105886 - RNA, 22 nt, Human
gagaauacaaccagaagcugag

SEQ ID NO: 1105887 - RNA, 22 nt, Human
auuuuagagaaacaaacguagg

SEQ ID NO: 1105888 - RNA, 19 nt, Human
cugaaacacagagagggcu

SEQ ID NO: 1105889 - RNA, 22 nt, Human
cauugcuuugugcauauuuaaa

SEQ ID NO: 1105890 - RNA, 22 nt, Human
auacuaagcucauuacauuuug

SEQ ID NO: 1105891 - RNA, 22 nt, Human
acagcuucgaggaucucauccc

SEQ ID NO: 1105892 - RNA, 22 nt, Human
accaguuaaagaauaugaggcc

SEQ ID NO: 1105893 - RNA, 22 nt, Human
uuuuuugucuugaagaaauggu

SEQ ID NO: 1105894 - RNA, 22 nt, Human
caaacuuacuguguuuaaagag

SEQ ID NO: 1105895 - RNA, 22 nt, Human
cauggaaggcaaaagacacaga

SEQ ID NO: 1105896 - RNA, 22 nt, Human
cagaugaggcaaccucauugcu

SEQ ID NO: 1105897 - RNA, 22 nt, Human
uccaaggacauuguucuaguug

SEQ ID NO: 1105898 - RNA, 22 nt, Human
auuucagaguagaucguuauuu

SEQ ID NO: 1105899 - RNA, 22 nt, Human
acuggauucucuuacacagaug

SEQ ID NO: 1105900 - RNA, 22 nt, Human
acaucucacuucuuugaaggcu

SEQ ID NO: 1105901 - RNA, 22 nt, Human
uuugacaggaauucucucuagg

SEQ ID NO: 1105902 - RNA, 22 nt, Human
uggaaacacccacgcaugcaua

SEQ ID NO: 1105903 - RNA, 22 nt, Human
uaaccaagcaaacuuucauugu

SEQ ID NO: 1105904 - RNA, 22 nt, Human
gauauucauaggcagguauuua

SEQ ID NO: 1105905 - RNA, 22 nt, Human
uugagauagguggaaucucuuu

SEQ ID NO: 1105906 - RNA, 22 nt, Human
ucuaugaaccucugcaaugaca

SEQ ID NO: 1105907 - RNA, 22 nt, Human
ccuuugugaauaugcagaaaau

SEQ ID NO: 1105908 - RNA, 22 nt, Human
gcuguauuuauaugaaggcaug

SEQ ID NO: 1105909 - RNA, 22 nt, Human
cuacauuauguuuauugggacu

SEQ ID NO: 1105910 - RNA, 22 nt, Human
auuucauccauuaagaguacuc

SEQ ID NO: 1105911 - RNA, 22 nt, Human
uuggaauuugagaccaagaaaa

SEQ ID NO: 1105912 - RNA, 22 nt, Human
uuauuuaaaagugguaagauuc

SEQ ID NO: 1105913 - RNA, 19 nt, Human
ucuuucauuucuagcucug

SEQ ID NO: 1105914 - RNA, 21 nt, Human
gucuuuuuaauugcgauuucc

SEQ ID NO: 1105915 - RNA, 20 nt, Human
uccuaacgaggcccauugca

SEQ ID NO: 1105916 - RNA, 22 nt, Human
aucagaagaaauggaugugacu

SEQ ID NO: 1105917 - RNA, 22 nt, Human
uucagucuuguugaaaacuugg

SEQ ID NO: 1105918 - RNA, 22 nt, Human
uaucauuuuacugugacauuuu

SEQ ID NO: 1105919 - RNA, 22 nt, Human
uucacauaaucugcagcaagcg

SEQ ID NO: 1105920 - RNA, 22 nt, Human
agauguuuuuccaggucuaauu

SEQ ID NO: 1105921 - RNA, 22 nt, Human
uuguacuuaaauaugcaaauag

SEQ ID NO: 1105922 - RNA, 17 nt, Human
ucugagaaugcuggagg

SEQ ID NO: 1105923 - RNA, 22 nt, Human
augguuuuguccucuuugguuc

SEQ ID NO: 1105924 - RNA, 19 nt, Human
uuuaaugugugcugcaauc

SEQ ID NO: 1105925 - RNA, 22 nt, Human
caacauuucaaggucuuuagga

SEQ ID NO: 1105926 - RNA, 22 nt, Human
uaaaucccuacaucuguguuuu

SEQ ID NO: 1105927 - RNA, 22 nt, Human
cuuuaguucuagaaagugaaac

SEQ ID NO: 1105928 - RNA, 22 nt, Human
uaacauuucggugacaguggga

SEQ ID NO: 1105929 - RNA, 22 nt, Human
augcacaagguagauuauuauu

SEQ ID NO: 1105930 - RNA, 22 nt, Human
uuugcaaaguccauugaaguua

SEQ ID NO: 1105931 - RNA, 22 nt, Human
cuuucuuucgaagacgugauua

SEQ ID NO: 1105932 - RNA, 22 nt, Human
auucuagaguuucaauccaagg

SEQ ID NO: 1105933 - RNA, 22 nt, Human
aguguucuagcgcugugcuugu

SEQ ID NO: 1105934 - RNA, 22 nt, Human
ucuccauggauuuggaaaugau

SEQ ID NO: 1105935 - RNA, 22 nt, Human
ucuuuuaucuguuguguaacaa

SEQ ID NO: 1105936 - RNA, 22 nt, Human
cugucuacagaugaaauaagca

SEQ ID NO: 1105937 - RNA, 22 nt, Human
ggauguggaccuugccugguga

SEQ ID NO: 1105938 - RNA, 22 nt, Human
uguuaguauuggcaaauuuguu

SEQ ID NO: 1105939 - RNA, 22 nt, Human
gugcauauguguguauacaaac

SEQ ID NO: 1105940 - RNA, 20 nt, Human
caauaauuuacuucccuauu

SEQ ID NO: 1105941 - RNA, 22 nt, Human
uaugcuagauggaaaaauauug

SEQ ID NO: 1105942 - RNA, 22 nt, Human
cuuugcuaauguugcauuuuca

SEQ ID NO: 1105943 - RNA, 22 nt, Human
cuacuguaguuaaaguuuugua

SEQ ID NO: 1105944 - RNA, 22 nt, Human
uuggcaauauuuacugaaguug

SEQ ID NO: 1105945 - RNA, 22 nt, Human
auuguacagacaugggaaacaa

SEQ ID NO: 1105946 - RNA, 17 nt, Human
acuuguauugugcuuua

SEQ ID NO: 1105947 - RNA, 22 nt, Human
ccuuugagccugggcgcggacc

SEQ ID NO: 1105948 - RNA, 22 nt, Human
caugaaaugauauuuggguggg

SEQ ID NO: 1105949 - RNA, 22 nt, Human
cacauuuaugggcugggaggca

SEQ ID NO: 1105950 - RNA, 22 nt, Human
agauuauuuaagacaggaacca

SEQ ID NO: 1105951 - RNA, 22 nt, Human
guugaaauccuaacccccuagu

SEQ ID NO: 1105952 - RNA, 22 nt, Human
auaguagcgagaucucagcuca

SEQ ID NO: 1105953 - RNA, 22 nt, Human
acucucagggcuccagggaaag

SEQ ID NO: 1105954 - RNA, 18 nt, Human
acccauuauauuuguagc

SEQ ID NO: 1105955 - RNA, 22 nt, Human
aaaugcaugugcuauagaugug

SEQ ID NO: 1105956 - RNA, 22 nt, Human
cacaguuuugucuugguuucca

SEQ ID NO: 1105957 - RNA, 22 nt, Human
aaugaguuuguucuauuauuug

SEQ ID NO: 1105958 - RNA, 22 nt, Human
uaugaaggauacaccucugauu

SEQ ID NO: 1105959 - RNA, 22 nt, Human
ugaauaaucuuggguauuaaua

SEQ ID NO: 1105960 - RNA, 22 nt, Human
aaugaacacuuagccuuucuau

SEQ ID NO: 1105961 - RNA, 22 nt, Human
cuagagaaaaagcuuagguacg

SEQ ID NO: 1105962 - RNA, 22 nt, Human
ugcaucuaaguggcuaacaacc

SEQ ID NO: 1105963 - RNA, 22 nt, Human
caauuuuuaaacuaugaaguug

SEQ ID NO: 1105964 - RNA, 18 nt, Human
cgcauguacacgucaugc

SEQ ID NO: 1105965 - RNA, 22 nt, Human
uuugacaugugcuuauaacuuu

SEQ ID NO: 1105966 - RNA, 21 nt, Human
ccacaauucuaguuacauaug

SEQ ID NO: 1105967 - RNA, 22 nt, Human
uugggauacaucuugcugagcc

SEQ ID NO: 1105968 - RNA, 22 nt, Human
caguaaauguccucgcagggaa

SEQ ID NO: 1105969 - RNA, 22 nt, Human
gccagagaggccuuagaaucca

SEQ ID NO: 1105970 - RNA, 22 nt, Human
uaucuguagucucaugguuccu

SEQ ID NO: 1105971 - RNA, 22 nt, Human
acagcugugggcucugcauaua

SEQ ID NO: 1105972 - RNA, 22 nt, Human
agugaauuagccuauuuguaaa

SEQ ID NO: 1105973 - RNA, 22 nt, Human
auuuagacaacaagccuucucc

SEQ ID NO: 1105974 - RNA, 22 nt, Human
ucauuacuuauuaaaagccuug

SEQ ID NO: 1105975 - RNA, 22 nt, Human
gugauuucagguuuuucauacu

SEQ ID NO: 1105976 - RNA, 22 nt, Human
uguuaccauaggucagaacguu

SEQ ID NO: 1105977 - RNA, 23 nt, Human
uaucauuucagcucucugccugg

SEQ ID NO: 1105978 - RNA, 22 nt, Human
guauuaugaaugccgaggcggc

SEQ ID NO: 1105979 - RNA, 22 nt, Human
gacauacagcccucucccuggu

SEQ ID NO: 1105980 - RNA, 22 nt, Human
agaauaaccaguguuucacagu

SEQ ID NO: 1105981 - RNA, 22 nt, Human
agucuauuuuugguucuucggg

SEQ ID NO: 1105982 - RNA, 22 nt, Human
uuuggauugcuuggaugcuucg

SEQ ID NO: 1105983 - RNA, 22 nt, Human
acuaauugaaaugagacuggug

SEQ ID NO: 1105984 - RNA, 22 nt, Human
gaugucuggcuaccacucgcac

SEQ ID NO: 1105985 - RNA, 22 nt, Human
acaagauagcuuagaagauuca

SEQ ID NO: 1105986 - RNA, 22 nt, Human
agagauuccuuuggggaaagca

SEQ ID NO: 1105987 - RNA, 22 nt, Human
guuucuuauuucaacuggaaca

SEQ ID NO: 1105988 - RNA, 22 nt, Human
guggcauugccuucugcaggaa

SEQ ID NO: 1105989 - RNA, 22 nt, Human
uaaagcauguuucaguaagguu

SEQ ID NO: 1105990 - RNA, 22 nt, Human
uucauuacauucaaaaggcauu

SEQ ID NO: 1105991 - RNA, 22 nt, Human
cucaucuggcuucaguaacagu

SEQ ID NO: 1105992 - RNA, 22 nt, Human
ugucauauagaauguucuauga

SEQ ID NO: 1105993 - RNA, 22 nt, Human
auugacuuucccuucuccucau

SEQ ID NO: 1105994 - RNA, 22 nt, Human
uuuccaaagguggcaggaacaa

SEQ ID NO: 1105995 - RNA, 22 nt, Human
aaagcuauuuuauugcagcucu

SEQ ID NO: 1105996 - RNA, 22 nt, Human
cugugcuggcagaccuggaguu

SEQ ID NO: 1105997 - RNA, 22 nt, Human
aggcagagaaaaaccagauaug

SEQ ID NO: 1105998 - RNA, 22 nt, Human
guuuccagccuccuggguaaag

SEQ ID NO: 1105999 - RNA, 22 nt, Human
cuauucaguugugggcaacaau

SEQ ID NO: 1106000 - RNA, 22 nt, Human
aauucauacucuauauugcuuu

SEQ ID NO: 1106001 - RNA, 22 nt, Human
acagugauuggcacugauucag

SEQ ID NO: 1106002 - RNA, 22 nt, Human
gaaccuggcagcccuauaucug

SEQ ID NO: 1106003 - RNA, 22 nt, Human
uugaagcauuugcuauagcauu

SEQ ID NO: 1106004 - RNA, 22 nt, Human
agacugugagaagauggcugcg

SEQ ID NO: 1106005 - RNA, 22 nt, Human
auuaguguuguggcuucauggc

SEQ ID NO: 1106006 - RNA, 22 nt, Human
cacuuuuaacaggagaauuccc

SEQ ID NO: 1106007 - RNA, 22 nt, Human
uagaggaugauccuuccuugcc

SEQ ID NO: 1106008 - RNA, 22 nt, Human
aauacagauggcaugugaagau

SEQ ID NO: 1106009 - RNA, 22 nt, Human
uacugucuuuuccuaaaugggu

SEQ ID NO: 1106010 - RNA, 22 nt, Human
aucaucaucuaaauugugucgc

SEQ ID NO: 1106011 - RNA, 22 nt, Human
caucccugauuccuaguacagu

SEQ ID NO: 1106012 - RNA, 22 nt, Human
uucagaaaggcugugccagcca

SEQ ID NO: 1106013 - RNA, 22 nt, Human
cgcuuuggagucccugcuuuac

SEQ ID NO: 1106014 - RNA, 22 nt, Human
aacacuaaaggucaguuagaag

SEQ ID NO: 1106015 - RNA, 20 nt, Human
gacuucaauuucuaucuuuu

SEQ ID NO: 1106016 - RNA, 22 nt, Human
aacagaaugcaggggaugcugc

SEQ ID NO: 1106017 - RNA, 22 nt, Human
ggacuggucugagagggauuca

SEQ ID NO: 1106018 - RNA, 22 nt, Human
guuguuuuugaacggugguggc

SEQ ID NO: 1106019 - RNA, 20 nt, Human
ugugguuuuugccaguugaa

SEQ ID NO: 1106020 - RNA, 22 nt, Human
ugaaagaagccucccuuuggag

SEQ ID NO: 1106021 - RNA, 22 nt, Human
gucuguggaguugcuugcugga

SEQ ID NO: 1106022 - RNA, 22 nt, Human
ccagcagccaccuucucgaaau

SEQ ID NO: 1106023 - RNA, 22 nt, Human
cauugcugugggcauuugcugc

SEQ ID NO: 1106024 - RNA, 22 nt, Human
gcuuccuucuaccacaucaugc

SEQ ID NO: 1106025 - RNA, 22 nt, Human
acucacagggccucaguuuucc

SEQ ID NO: 1106026 - RNA, 22 nt, Human
uuccaaggcugcuauuuguuuc

SEQ ID NO: 1106027 - RNA, 22 nt, Human
augaauuguccgauguugugca

SEQ ID NO: 1106028 - RNA, 22 nt, Human
auguauacgugcaggucacagg

SEQ ID NO: 1106029 - RNA, 22 nt, Human
ccauuuguaccauuucuuugua

SEQ ID NO: 1106030 - RNA, 22 nt, Human
augauacaccuaggagugggag

SEQ ID NO: 1106031 - RNA, 22 nt, Human
uuuucuaacaucuaguaauuug

SEQ ID NO: 1106032 - RNA, 22 nt, Human
auuccaaagccugaauaaugga

SEQ ID NO: 1106033 - RNA, 22 nt, Human
uaaaguauaagcauuggaguau

SEQ ID NO: 1106034 - RNA, 22 nt, Human
ucuccucuauuucuguauguau

SEQ ID NO: 1106035 - RNA, 23 nt, Human
auuuccuaaaagauaaucauuac

SEQ ID NO: 1106036 - RNA, 22 nt, Human
uuauuuuguagcucugaucuuu

SEQ ID NO: 1106037 - RNA, 17 nt, Human
ucugagaacuugaagca

SEQ ID NO: 1106038 - RNA, 19 nt, Human
uuugauagggcauaauaua

SEQ ID NO: 1106039 - RNA, 22 nt, Human
acuguagucuaaauauagucuu

SEQ ID NO: 1106040 - RNA, 22 nt, Human
auauaaguguguggcuguuagu

SEQ ID NO: 1106041 - RNA, 22 nt, Human
augugauacuccuucuagugga

SEQ ID NO: 1106042 - RNA, 22 nt, Human
cuucucaaaguugugaaucagg

SEQ ID NO: 1106043 - RNA, 23 nt, Human
ugcaaaauuugcagaguucgaug

SEQ ID NO: 1106044 - RNA, 20 nt, Human
uguauuuaaugaaggcuuuu

SEQ ID NO: 1106045 - RNA, 22 nt, Human
uaucaguagaacaauggacauu

SEQ ID NO: 1106046 - RNA, 22 nt, Human
gacaagaugacaucauggcuuc

SEQ ID NO: 1106047 - RNA, 22 nt, Human
caaauguuugguggcauuuugu

SEQ ID NO: 1106048 - RNA, 22 nt, Human
uuuucaguuccaucucugcucu

SEQ ID NO: 1106049 - RNA, 22 nt, Human
uccugagauaggaguugaaggc

SEQ ID NO: 1106050 - RNA, 22 nt, Human
gaaagagaaccugggccuagau

SEQ ID NO: 1106051 - RNA, 22 nt, Human
guaaaucagugucauuuuagaa

SEQ ID NO: 1106052 - RNA, 22 nt, Human
gaaguucugguguaugugauaa

SEQ ID NO: 1106053 - RNA, 17 nt, Human
auucaugaacauguccu

SEQ ID NO: 1106054 - RNA, 22 nt, Human
auuacugaggcaaaguaguuuu

SEQ ID NO: 1106055 - RNA, 22 nt, Human
auacaugacucacacauucugc

SEQ ID NO: 1106056 - RNA, 22 nt, Human
gucaucaucaggcagaugcugc

SEQ ID NO: 1106057 - RNA, 22 nt, Human
uuuaauuauaucugggcaguua

SEQ ID NO: 1106058 - RNA, 22 nt, Human
cuuuacagauggauaauuguuu

SEQ ID NO: 1106059 - RNA, 22 nt, Human
auccauuugccgugcuaugugc

SEQ ID NO: 1106060 - RNA, 22 nt, Human
auuguacucuagccucugggca

SEQ ID NO: 1106061 - RNA, 19 nt, Human
uaugacaaguacuaguucu

SEQ ID NO: 1106062 - RNA, 22 nt, Human
acaaucagcacugaguuuaucu

SEQ ID NO: 1106063 - RNA, 22 nt, Human
augcauaucuccuaucuccuca

SEQ ID NO: 1106064 - RNA, 22 nt, Human
aaguuacacauuuucauuguaa

SEQ ID NO: 1106065 - RNA, 22 nt, Human
cugaggaucuaauuauuggguc

SEQ ID NO: 1106066 - RNA, 22 nt, Human
uuugagaaacagacgaaagaca

SEQ ID NO: 1106067 - RNA, 22 nt, Human
caguggaugucucauaguguga

SEQ ID NO: 1106068 - RNA, 21 nt, Human
uuggaacaagcagcaguuugc

SEQ ID NO: 1106069 - RNA, 22 nt, Human
ugugucuuuggcgaugucugga

SEQ ID NO: 1106070 - RNA, 22 nt, Human
uauaagaaacaaggcaaauuuu

SEQ ID NO: 1106071 - RNA, 22 nt, Human
agauaucuuacacuuugaaguu

SEQ ID NO: 1106072 - RNA, 22 nt, Human
cuucagagugacucagcaucuu

SEQ ID NO: 1106073 - RNA, 22 nt, Human
auaaugacauucuuagacugga

SEQ ID NO: 1106074 - RNA, 22 nt, Human
uuccuuuucuucuaccacaugu

SEQ ID NO: 1106075 - RNA, 22 nt, Human
uggaaauacaagaaguauguca

SEQ ID NO: 1106076 - RNA, 22 nt, Human
guuugagauggguuauugcucu

SEQ ID NO: 1106077 - RNA, 22 nt, Human
ugugugcacaaagaguacaugg

SEQ ID NO: 1106078 - RNA, 22 nt, Human
ucuauuaaugauucaauagugu

SEQ ID NO: 1106079 - RNA, 22 nt, Human
uaaauacuuuuacuccacugau

SEQ ID NO: 1106080 - RNA, 22 nt, Human
gaaggcaagcagcauaaauguc

SEQ ID NO: 1106081 - RNA, 18 nt, Human
cgauguguaugugauuug

SEQ ID NO: 1106082 - RNA, 22 nt, Human
ugucuucauuccccaugaaguc

SEQ ID NO: 1106083 - RNA, 22 nt, Human
uucuacauugugaaguucuuua

SEQ ID NO: 1106084 - RNA, 21 nt, Human
agcauucaaaagaugccauaa

SEQ ID NO: 1106085 - RNA, 22 nt, Human
ugaaauguggagaugguaagua

SEQ ID NO: 1106086 - RNA, 19 nt, Human
aucaggcuucuauuuucuc

SEQ ID NO: 1106087 - RNA, 22 nt, Human
augaucaagaauuuuguauucc

SEQ ID NO: 1106088 - RNA, 22 nt, Human
aacugcuaacugguuugauacu

SEQ ID NO: 1106089 - RNA, 22 nt, Human
ucccaaguagaugggaauacag

SEQ ID NO: 1106090 - RNA, 22 nt, Human
uguauuucugcuuucucuagua

SEQ ID NO: 1106091 - RNA, 22 nt, Human
caguuuuucaaaauuacaugau

SEQ ID NO: 1106092 - RNA, 22 nt, Human
agggcagagauuaauuaagaca

SEQ ID NO: 1106093 - RNA, 22 nt, Human
uuugccaguauuuuauugauga

SEQ ID NO: 1106094 - RNA, 22 nt, Human
uuacacaacaucuguauuauua

SEQ ID NO: 1106095 - RNA, 22 nt, Human
acucaucuuugaauuuucagua

SEQ ID NO: 1106096 - RNA, 18 nt, Human
gcugaaauucuaaacaaa

SEQ ID NO: 1106097 - RNA, 20 nt, Human
ucuuuuauuggcagauccug

SEQ ID NO: 1106098 - RNA, 22 nt, Human
uuguuuguaaggcucuuagaau

SEQ ID NO: 1106099 - RNA, 22 nt, Human
ugugaagaauuaaugugaauca

SEQ ID NO: 1106100 - RNA, 22 nt, Human
uagauuaucccugauuugucca

SEQ ID NO: 1106101 - RNA, 22 nt, Human
aauuauguuugcuuuagaugga

SEQ ID NO: 1106102 - RNA, 21 nt, Human
aucuuaaaaggucuuaacuuu

SEQ ID NO: 1106103 - RNA, 22 nt, Human
uuauguauggauggcugaaagu

SEQ ID NO: 1106104 - RNA, 22 nt, Human
caguauuuaggauuaggagaga

SEQ ID NO: 1106105 - RNA, 22 nt, Human
uuaguuuccuguggugugaagu

SEQ ID NO: 1106106 - RNA, 22 nt, Human
cuaguauuaagugugaguaaaa

SEQ ID NO: 1106107 - RNA, 18 nt, Human
ucagaggagauaccuaaa

SEQ ID NO: 1106108 - RNA, 22 nt, Human
uaguauuuccuguaagcuauag

SEQ ID NO: 1106109 - RNA, 22 nt, Human
uaucuagagccuggaagucuug

SEQ ID NO: 1106110 - RNA, 22 nt, Human
ugcaucauuaagguacaguugg

SEQ ID NO: 1106111 - RNA, 22 nt, Human
aaaggagacuucagaucuccuu

SEQ ID NO: 1106112 - RNA, 22 nt, Human
aagggaaacuuucacaaugucc

SEQ ID NO: 1106113 - RNA, 22 nt, Human
aagcauuucagguagagauauu

SEQ ID NO: 1106114 - RNA, 22 nt, Human
cuugucuaguuccuggugaugu

SEQ ID NO: 1106115 - RNA, 22 nt, Human
caaacugaacacgaaagucuuu

SEQ ID NO: 1106116 - RNA, 22 nt, Human
uguucuuagguauuugacaguc

SEQ ID NO: 1106117 - RNA, 22 nt, Human
ccaccagaccaccaagagcaac

SEQ ID NO: 1106118 - RNA, 22 nt, Human
aggauugugccuccagucagaa

SEQ ID NO: 1106119 - RNA, 18 nt, Human
agcucacagaucuguuuu

SEQ ID NO: 1106120 - RNA, 22 nt, Human
aaguuauugguggagagcacug

SEQ ID NO: 1106121 - RNA, 22 nt, Human
ugauucaguacuuucucuaacu

SEQ ID NO: 1106122 - RNA, 20 nt, Human
acucuguagguaaugagacu

SEQ ID NO: 1106123 - RNA, 22 nt, Human
aaugguaauauuucauaguugu

SEQ ID NO: 1106124 - RNA, 22 nt, Human
agaauaagccugacgaaaccua

SEQ ID NO: 1106125 - RNA, 17 nt, Human
cauucuguaaucuuucu

SEQ ID NO: 1106126 - RNA, 22 nt, Human
caaaugaugcauggcuagugag

SEQ ID NO: 1106127 - RNA, 22 nt, Human
uaaugccuuucuguacuauaug

SEQ ID NO: 1106128 - RNA, 22 nt, Human
aacaugaugacauuguaagcuu

SEQ ID NO: 1106129 - RNA, 22 nt, Human
aaucugagggaacuugaacucc

SEQ ID NO: 1106130 - RNA, 22 nt, Human
augacuuaaucauacuugcauu

SEQ ID NO: 1106131 - RNA, 22 nt, Human
ugcauguuucuguauguuaaug

SEQ ID NO: 1106132 - RNA, 22 nt, Human
uagaaguuaaaggaauacagaa

SEQ ID NO: 1106133 - RNA, 22 nt, Human
uaagccugcaugaaccaugaga

SEQ ID NO: 1106134 - RNA, 22 nt, Human
aucauuugaacagaauuuguuu

SEQ ID NO: 1106135 - RNA, 22 nt, Human
cuacuucuguggcucuaagaga

SEQ ID NO: 1106136 - RNA, 21 nt, Human
acuguauuguuuucaaggauc

SEQ ID NO: 1106137 - RNA, 22 nt, Human
auuguauacaagcuuaauuguu

SEQ ID NO: 1106138 - RNA, 20 nt, Human
aaagauacuuuuuguaaugg

SEQ ID NO: 1106139 - RNA, 22 nt, Human
aucuaaagugucauaaguagcu

SEQ ID NO: 1106140 - RNA, 22 nt, Human
aucuuuggguacaaacuugccu

SEQ ID NO: 1106141 - RNA, 22 nt, Human
guuuauuggguauuguggagcc

SEQ ID NO: 1106142 - RNA, 22 nt, Human
aacuuucuuugcaucuaaguuu

SEQ ID NO: 1106143 - RNA, 21 nt, Human
uaaacauaaccuuguauggcu

SEQ ID NO: 1106144 - RNA, 22 nt, Human
accacaucgggcggacacuggg

SEQ ID NO: 1106145 - RNA, 22 nt, Human
uaagcuauuccugaagaagguu

SEQ ID NO: 1106146 - RNA, 22 nt, Human
guuuccaggcuuugguaugguu

SEQ ID NO: 1106147 - RNA, 22 nt, Human
aaugauguuuuuaaagaacaua

SEQ ID NO: 1106148 - RNA, 22 nt, Human
aauaaguacuuggggauaacuu

SEQ ID NO: 1106149 - RNA, 22 nt, Human
uucaguaagcacuucuagagcu

SEQ ID NO: 1106150 - RNA, 22 nt, Human
gcaguggccacauggaggagga

SEQ ID NO: 1106151 - RNA, 22 nt, Human
uacauguacaugcauagguaga

SEQ ID NO: 1106152 - RNA, 23 nt, Human
cguuuuuuccucagauguucugg

SEQ ID NO: 1106153 - RNA, 22 nt, Human
uuguaacaguagcugucagcuc

SEQ ID NO: 1106154 - RNA, 22 nt, Human
cauccauagauugagagauggu

SEQ ID NO: 1106155 - RNA, 22 nt, Human
ucuucaugucaugguauauuga

SEQ ID NO: 1106156 - RNA, 22 nt, Human
ucaauuuauguggcuauucauu

SEQ ID NO: 1106157 - RNA, 22 nt, Human
aaaguaauugugguucuugcca

SEQ ID NO: 1106158 - RNA, 22 nt, Human
auauauacuuugacacauucug

SEQ ID NO: 1106159 - RNA, 22 nt, Human
uagauacauacauuuuaaaaug

SEQ ID NO: 1106160 - RNA, 22 nt, Human
uggcuacauuuauacucucauu

SEQ ID NO: 1106161 - RNA, 22 nt, Human
caguuaaacagauugaguguua

SEQ ID NO: 1106162 - RNA, 22 nt, Human
gguuuguugggguccaggccca

SEQ ID NO: 1106163 - RNA, 22 nt, Human
cauuuuccucugcugguguuca

SEQ ID NO: 1106164 - RNA, 22 nt, Human
gaauacaaauaauaccaaggug

SEQ ID NO: 1106165 - RNA, 22 nt, Human
auuuacagacguggauuagugc

SEQ ID NO: 1106166 - RNA, 22 nt, Human
ucagagaaguaggcuaauggug

SEQ ID NO: 1106167 - RNA, 22 nt, Human
ucauugaggaaagguaguggcu

SEQ ID NO: 1106168 - RNA, 22 nt, Human
uauaaacuccucuugcauuccu

SEQ ID NO: 1106169 - RNA, 22 nt, Human
ugaagacaguuuuacucaugag

SEQ ID NO: 1106170 - RNA, 22 nt, Human
cugaucuuaaguaacauuauuu

SEQ ID NO: 1106171 - RNA, 22 nt, Human
uuauugcuaugaugauguguag

SEQ ID NO: 1106172 - RNA, 22 nt, Human
uugagacacaaggcacaguaag

SEQ ID NO: 1106173 - RNA, 22 nt, Human
ucugaaauuuuaguuauagaaa

SEQ ID NO: 1106174 - RNA, 22 nt, Human
auuuacugagguaaauaaacug

SEQ ID NO: 1106175 - RNA, 22 nt, Human
uauggcaagaugacauguucuc

SEQ ID NO: 1106176 - RNA, 22 nt, Human
gacuacaggugugugccaccau

SEQ ID NO: 1106177 - RNA, 22 nt, Human
uucauugauuuccuuggaauaa

SEQ ID NO: 1106178 - RNA, 22 nt, Human
auauggcuguugcacaucuaag

SEQ ID NO: 1106179 - RNA, 22 nt, Human
aaaugcacaauaaaguaaaggc

SEQ ID NO: 1106180 - RNA, 22 nt, Human
uuugaaauguaucaguauaggu

SEQ ID NO: 1106181 - RNA, 22 nt, Human
ucaaaaugccgagugcccaggu

SEQ ID NO: 1106182 - RNA, 22 nt, Human
uaguggguuuauacaauuuaaa

SEQ ID NO: 1106183 - RNA, 22 nt, Human
cauuuuacgacauagggcaggc

SEQ ID NO: 1106184 - RNA, 22 nt, Human
guaaagcaaaauguagagauug

SEQ ID NO: 1106185 - RNA, 22 nt, Human
aguaaaaucaccaucucuuugu

SEQ ID NO: 1106186 - RNA, 22 nt, Human
agaaacaucgcuuaguccucau

SEQ ID NO: 1106187 - RNA, 22 nt, Human
cuauuuucccauaugguugaca

SEQ ID NO: 1106188 - RNA, 22 nt, Human
uaauuuugucacagugacaugc

SEQ ID NO: 1106189 - RNA, 22 nt, Human
uuggaaaugcauuuguuauuau

SEQ ID NO: 1106190 - RNA, 22 nt, Human
aaagugacaaccauuuauuaag

SEQ ID NO: 1106191 - RNA, 22 nt, Human
gcuucccacagcuggacugggg

SEQ ID NO: 1106192 - RNA, 22 nt, Human
auuuuguaucuuacggggacua

SEQ ID NO: 1106193 - RNA, 22 nt, Human
uacauguuauuucacuauuggu

SEQ ID NO: 1106194 - RNA, 22 nt, Human
aguaucagaugugauuaaaggg

SEQ ID NO: 1106195 - RNA, 22 nt, Human
auuuacagccuugccaucuaua

SEQ ID NO: 1106196 - RNA, 21 nt, Human
agagacugucacugcaguacc

SEQ ID NO: 1106197 - RNA, 22 nt, Human
uucuuuuaauuucugucugcag

SEQ ID NO: 1106198 - RNA, 22 nt, Human
ucaaagaucagaugguuguagg

SEQ ID NO: 1106199 - RNA, 22 nt, Human
cuucuucagaggccagccucug

SEQ ID NO: 1106200 - RNA, 22 nt, Human
guaugugucuuagaacuuggga

SEQ ID NO: 1106201 - RNA, 22 nt, Human
cucagagagacaaugugggaca

SEQ ID NO: 1106202 - RNA, 22 nt, Human
ugagaacaaaguugaaaguuug

SEQ ID NO: 1106203 - RNA, 22 nt, Human
uugacguccucgauggggaacu

SEQ ID NO: 1106204 - RNA, 21 nt, Human
ugucagcaacaauacuuucuc

SEQ ID NO: 1106205 - RNA, 22 nt, Human
uagugucuuccaggacauggua

SEQ ID NO: 1106206 - RNA, 22 nt, Human
auguuuguguuucccauucagg

SEQ ID NO: 1106207 - RNA, 22 nt, Human
auacaggaugcugaacaucucu

SEQ ID NO: 1106208 - RNA, 22 nt, Human
gaguuugugggaauggaguauu

SEQ ID NO: 1106209 - RNA, 22 nt, Human
cgggcagugcccagcggggcag

SEQ ID NO: 1106210 - RNA, 22 nt, Human
uuugggcuguacaauuucugua

SEQ ID NO: 1106211 - RNA, 22 nt, Human
aacacaguuucugcauugguag

SEQ ID NO: 1106212 - RNA, 22 nt, Human
gaugaguucuuucuauucuauu

SEQ ID NO: 1106213 - RNA, 22 nt, Human
acauuuaaugauccuacuguga

SEQ ID NO: 1106214 - RNA, 22 nt, Human
aaguuugucucauuugaucuuc

SEQ ID NO: 1106215 - RNA, 22 nt, Human
acaguacucuaaugaaaagugc

SEQ ID NO: 1106216 - RNA, 22 nt, Human
ugaaucaaugaauugcacuuca

SEQ ID NO: 1106217 - RNA, 22 nt, Human
aaugugcugguaacugcuuugc

SEQ ID NO: 1106218 - RNA, 22 nt, Human
uucacguuguugaagaaaauac

SEQ ID NO: 1106219 - RNA, 22 nt, Human
caaagccaggcuuucuaaugua

SEQ ID NO: 1106220 - RNA, 22 nt, Human
uucuaagaaauggaaaacgauu

SEQ ID NO: 1106221 - RNA, 22 nt, Human
acauuguugagccucuuguuca

SEQ ID NO: 1106222 - RNA, 19 nt, Human
uccuugacuguauucagag

SEQ ID NO: 1106223 - RNA, 22 nt, Human
ugcaaauauuccaugcuguuca

SEQ ID NO: 1106224 - RNA, 22 nt, Human
aucauuuaguggggcauuggaa

SEQ ID NO: 1106225 - RNA, 22 nt, Human
agauuucaauggauauugcaag

SEQ ID NO: 1106226 - RNA, 22 nt, Human
acaaguuucauuguuuagaacc

SEQ ID NO: 1106227 - RNA, 22 nt, Human
guaauagucucaaacuccugga

SEQ ID NO: 1106228 - RNA, 22 nt, Human
ucugagagcuguagaagccuau

SEQ ID NO: 1106229 - RNA, 22 nt, Human
aaguuacaggagaaagagauca

SEQ ID NO: 1106230 - RNA, 22 nt, Human
ggagucugugucuugaagcagu

SEQ ID NO: 1106231 - RNA, 22 nt, Human
uaucuuaaaaaucgaagcagau

SEQ ID NO: 1106232 - RNA, 22 nt, Human
uucaaacacugcuuugagaggg

SEQ ID NO: 1106233 - RNA, 22 nt, Human
cagucucuugcuucauuaguug

SEQ ID NO: 1106234 - RNA, 22 nt, Human
ucucuuugacccuuuagcucca

SEQ ID NO: 1106235 - RNA, 22 nt, Human
ccaaaauauuagugcuuaagua

SEQ ID NO: 1106236 - RNA, 22 nt, Human
gauuuucauuauagcuaguuuc

SEQ ID NO: 1106237 - RNA, 22 nt, Human
gcauuacuucuuucauagguca

SEQ ID NO: 1106238 - RNA, 22 nt, Human
cauuuacauuuaagguuaauau

SEQ ID NO: 1106239 - RNA, 22 nt, Human
aaaugcacugaauauuccaaau

SEQ ID NO: 1106240 - RNA, 22 nt, Human
cccgaccucgcaaagcgcacuc

SEQ ID NO: 1106241 - RNA, 22 nt, Human
gcugauggcuugcuggcugaca

SEQ ID NO: 1106242 - RNA, 22 nt, Human
uuccaggacuggguguuugaag

SEQ ID NO: 1106243 - RNA, 22 nt, Human
cagaaacacuguauuuagggaa

SEQ ID NO: 1106244 - RNA, 22 nt, Human
ggaaguuuguauacuggccucu

SEQ ID NO: 1106245 - RNA, 23 nt, Human
acucguggaauucucugcgaucg

SEQ ID NO: 1106246 - RNA, 22 nt, Human
cuaagaaggaggaaaagugcca

SEQ ID NO: 1106247 - RNA, 22 nt, Human
uguauauacacacucccauguu

SEQ ID NO: 1106248 - RNA, 22 nt, Human
ccaaacauuucaaauuuagaga

SEQ ID NO: 1106249 - RNA, 22 nt, Human
uuuuccuuaacagagggagaaa

SEQ ID NO: 1106250 - RNA, 22 nt, Human
gaguaaaagaugaggcaguaga

SEQ ID NO: 1106251 - RNA, 22 nt, Human
acuucagugugguauaaaacgu

SEQ ID NO: 1106252 - RNA, 22 nt, Human
aaagacuaaccaguugucaaaa

SEQ ID NO: 1106253 - RNA, 22 nt, Human
cauuuugugcuagacacuaugg

SEQ ID NO: 1106254 - RNA, 22 nt, Human
ugguaugcuuauuaucuucaac

SEQ ID NO: 1106255 - RNA, 22 nt, Human
agagaauuaacauuccauggcu

SEQ ID NO: 1106256 - RNA, 22 nt, Human
uucaguaugcugaaugauuuuu

SEQ ID NO: 1106257 - RNA, 22 nt, Human
aagcauuuuagauaaagcauca

SEQ ID NO: 1106258 - RNA, 22 nt, Human
guuauguaaucuaacacucagu

SEQ ID NO: 1106259 - RNA, 22 nt, Human
acaguucuguccuagacuucgu

SEQ ID NO: 1106260 - RNA, 22 nt, Human
guuuccuuuuggaauuagagcu

SEQ ID NO: 1106261 - RNA, 22 nt, Human
uggaauuaucugaagugauuug

SEQ ID NO: 1106262 - RNA, 22 nt, Human
acucauuugcaugaugugcuau

SEQ ID NO: 1106263 - RNA, 22 nt, Human
ugucauuggugaucugaugccu

SEQ ID NO: 1106264 - RNA, 23 nt, Human
auaauaacgucugucuugucucu

SEQ ID NO: 1106265 - RNA, 22 nt, Human
aguucaauuguuuuguaaaagu

SEQ ID NO: 1106266 - RNA, 20 nt, Human
uuacagaaaugauguuauuu

SEQ ID NO: 1106267 - RNA, 22 nt, Human
gauguaucugagcugcuuaggu

SEQ ID NO: 1106268 - RNA, 22 nt, Human
cuuauguaaacuacagauaaua

SEQ ID NO: 1106269 - RNA, 19 nt, Human
cauaauacaguggaucuga

SEQ ID NO: 1106270 - RNA, 23 nt, Human
cauuugauccucacaauaaaugg

SEQ ID NO: 1106271 - RNA, 22 nt, Human
ucacuagugguuucuggugguu

SEQ ID NO: 1106272 - RNA, 22 nt, Human
cuuucugaggagacgggcuuug

SEQ ID NO: 1106273 - RNA, 22 nt, Human
ggaguucaaaucuuuuggaucu

SEQ ID NO: 1106274 - RNA, 19 nt, Human
cuucuggauccgcagggcc

SEQ ID NO: 1106275 - RNA, 22 nt, Human
uaaaaucaugacagauugacau

SEQ ID NO: 1106276 - RNA, 22 nt, Human
ucauuccuccagcgggagucca

SEQ ID NO: 1106277 - RNA, 22 nt, Human
aauagcaaaugcucauuugaaa

SEQ ID NO: 1106278 - RNA, 22 nt, Human
cuucauuucaggcugaagaaua

SEQ ID NO: 1106279 - RNA, 22 nt, Human
auuuacucgugcuucauugaau

SEQ ID NO: 1106280 - RNA, 22 nt, Human
auauaguuggguuucauucuac

SEQ ID NO: 1106281 - RNA, 22 nt, Human
uuucauguuggauacuguuuca

SEQ ID NO: 1106282 - RNA, 22 nt, Human
cacuguuuuacauguuauuuaa

SEQ ID NO: 1106283 - RNA, 22 nt, Human
uaucaguccaggguuuugugac

SEQ ID NO: 1106284 - RNA, 23 nt, Human
uagauccuuccaacuacucuuac

SEQ ID NO: 1106285 - RNA, 22 nt, Human
uagauucugacccucuuuuuac

SEQ ID NO: 1106286 - RNA, 22 nt, Human
gucacaguggggucacagugug

SEQ ID NO: 1106287 - RNA, 22 nt, Human
cuugugaaaugccagauaaucu

SEQ ID NO: 1106288 - RNA, 20 nt, Human
uacaauauucccacuuugcu

SEQ ID NO: 1106289 - RNA, 22 nt, Human
aggacaaaggaccagaucugga

SEQ ID NO: 1106290 - RNA, 23 nt, Human
auaugucaugcaccagcacuuua

SEQ ID NO: 1106291 - RNA, 22 nt, Human
uuggauggagguucaagcacua

SEQ ID NO: 1106292 - RNA, 22 nt, Human
uaaguauuggccuauagcuaga

SEQ ID NO: 1106293 - RNA, 22 nt, Human
ucuccucuccuuucauguuguu

SEQ ID NO: 1106294 - RNA, 23 nt, Human
aaugaguugggcagcauacaggc

SEQ ID NO: 1106295 - RNA, 22 nt, Human
uaggauaugcauuuuuauacau

SEQ ID NO: 1106296 - RNA, 22 nt, Human
uaacuucucugagccucauucc

SEQ ID NO: 1106297 - RNA, 22 nt, Human
auuaguagcacacagagaucag

SEQ ID NO: 1106298 - RNA, 22 nt, Human
uucuguaauucuguuaguuuca

SEQ ID NO: 1106299 - RNA, 22 nt, Human
ccauccaugguguugguuguau

SEQ ID NO: 1106300 - RNA, 22 nt, Human
auacaacagaaaaugauuauuc

SEQ ID NO: 1106301 - RNA, 21 nt, Human
ucaauuauggaugugugcaaa

SEQ ID NO: 1106302 - RNA, 19 nt, Human
aguguuuauguagugccua

SEQ ID NO: 1106303 - RNA, 22 nt, Human
auagcaaaggacaauagucagu

SEQ ID NO: 1106304 - RNA, 22 nt, Human
uguaauguuagaaacaauugcu

SEQ ID NO: 1106305 - RNA, 22 nt, Human
augaaaacggaccagagcuauu

SEQ ID NO: 1106306 - RNA, 22 nt, Human
uacaccagauuauuuauaacau

SEQ ID NO: 1106307 - RNA, 22 nt, Human
acugguuuuggaaaucaguaca

SEQ ID NO: 1106308 - RNA, 22 nt, Human
ccugaaaugaguucugcucacu

SEQ ID NO: 1106309 - RNA, 22 nt, Human
gaucuguccuggcaguuaacac

SEQ ID NO: 1106310 - RNA, 22 nt, Human
aucagugacuucuuccaaaguu

SEQ ID NO: 1106311 - RNA, 22 nt, Human
ugugagauuuuauuugauaugc

SEQ ID NO: 1106312 - RNA, 19 nt, Human
auucuucucuuccugcugu

SEQ ID NO: 1106313 - RNA, 22 nt, Human
ucagaacauccugguuuaaaau

SEQ ID NO: 1106314 - RNA, 23 nt, Human
auagaccauugucucacacuuca

SEQ ID NO: 1106315 - RNA, 22 nt, Human
aggcuauuuccacucuucucau

SEQ ID NO: 1106316 - RNA, 22 nt, Human
aaaacuuucagggauacagaaa

SEQ ID NO: 1106317 - RNA, 22 nt, Human
auaacugagugagcagcgacuc

SEQ ID NO: 1106318 - RNA, 22 nt, Human
uuugggaaacuuaggggucaga

SEQ ID NO: 1106319 - RNA, 22 nt, Human
uaaacagagaugccugggucug

SEQ ID NO: 1106320 - RNA, 22 nt, Human
acaggauuaauaaaaaauugua

SEQ ID NO: 1106321 - RNA, 22 nt, Human
acauuuguuucucuagaguagg

SEQ ID NO: 1106322 - RNA, 22 nt, Human
ugucuuaugcugcauagacuau

SEQ ID NO: 1106323 - RNA, 22 nt, Human
agaaaagaggcuuucuaagcau

SEQ ID NO: 1106324 - RNA, 22 nt, Human
guaguucuuucucaauguucaa

SEQ ID NO: 1106325 - RNA, 22 nt, Human
gcaaaacagucgaugccuccca

SEQ ID NO: 1106326 - RNA, 22 nt, Human
uugcucuauguuuguaaacaga

SEQ ID NO: 1106327 - RNA, 22 nt, Human
aaaauuaagugucugggaagcc

SEQ ID NO: 1106328 - RNA, 22 nt, Human
auauuuguuuggcagaguucag

SEQ ID NO: 1106329 - RNA, 22 nt, Human
aacaucuagguucucaucgaua

SEQ ID NO: 1106330 - RNA, 22 nt, Human
uguaucauauggggaagcuuca

SEQ ID NO: 1106331 - RNA, 22 nt, Human
gcacaaaagguacuucauguag

SEQ ID NO: 1106332 - RNA, 22 nt, Human
aagacagugacagucacaauug

SEQ ID NO: 1106333 - RNA, 22 nt, Human
caugucaagacugaagauccag

SEQ ID NO: 1106334 - RNA, 22 nt, Human
cuuugugauaguguuaagacca

SEQ ID NO: 1106335 - RNA, 22 nt, Human
guacauauccuuuacguuuugu

SEQ ID NO: 1106336 - RNA, 22 nt, Human
gucuugcacuuaccuaagaacu

SEQ ID NO: 1106337 - RNA, 20 nt, Human
ucauaugugguuguauacaa

SEQ ID NO: 1106338 - RNA, 23 nt, Human
aaacuacauuuauaguuuuucuc

SEQ ID NO: 1106339 - RNA, 22 nt, Human
agccagugucgugugacaugag

SEQ ID NO: 1106340 - RNA, 22 nt, Human
guuaaugcaaagcagagggcaa

SEQ ID NO: 1106341 - RNA, 22 nt, Human
caaaauuguugaugcugcuuug

SEQ ID NO: 1106342 - RNA, 20 nt, Human
caacacugcccauuguuugc

SEQ ID NO: 1106343 - RNA, 18 nt, Human
agguauaugaaucucuuu

SEQ ID NO: 1106344 - RNA, 22 nt, Human
ugcauaaacuucucugguguga

SEQ ID NO: 1106345 - RNA, 22 nt, Human
gaaaugucaagauauguuugga

SEQ ID NO: 1106346 - RNA, 22 nt, Human
gagaugugucagguccuggggg

SEQ ID NO: 1106347 - RNA, 22 nt, Human
cagcugacaagaguccuuggag

SEQ ID NO: 1106348 - RNA, 22 nt, Human
gcacugagcuuuggaggagcag

SEQ ID NO: 1106349 - RNA, 22 nt, Human
gggcagagguucaacuucaaca

SEQ ID NO: 1106350 - RNA, 22 nt, Human
cugguuuuuagugcuuaggagu

SEQ ID NO: 1106351 - RNA, 22 nt, Human
uguaaagaaagacgcagaguua

SEQ ID NO: 1106352 - RNA, 22 nt, Human
ucauacauguuguguucaaaug

SEQ ID NO: 1106353 - RNA, 22 nt, Human
aauuccagcugauugacuuucc

SEQ ID NO: 1106354 - RNA, 22 nt, Human
augauugaaaaugacauugcca

SEQ ID NO: 1106355 - RNA, 22 nt, Human
gaaacuguauguaguuuuuggg

SEQ ID NO: 1106356 - RNA, 22 nt, Human
acauucaugcaccuuccuaucc

SEQ ID NO: 1106357 - RNA, 18 nt, Human
ucuuccaacacugacacc

SEQ ID NO: 1106358 - RNA, 22 nt, Human
cagcuggacugggauguagcga

SEQ ID NO: 1106359 - RNA, 22 nt, Human
agacauauuggcuugcuuuaau

SEQ ID NO: 1106360 - RNA, 22 nt, Human
agcuuucuauauaugaguugcu

SEQ ID NO: 1106361 - RNA, 22 nt, Human
uauuuguuucuaguggcagcaa

SEQ ID NO: 1106362 - RNA, 18 nt, Human
gaacagcaauuucauguu

SEQ ID NO: 1106363 - RNA, 22 nt, Human
ccucucauagucuguauccuuu

SEQ ID NO: 1106364 - RNA, 22 nt, Human
aacagguagggacucuaacuug

SEQ ID NO: 1106365 - RNA, 22 nt, Human
ucaugauaauacaggccuucua

SEQ ID NO: 1106366 - RNA, 22 nt, Human
gagaugggcgagaagguggacu

SEQ ID NO: 1106367 - RNA, 22 nt, Human
uucaaacaguguagaauauaug

SEQ ID NO: 1106368 - RNA, 18 nt, Human
aguaaauguuaaauauug

SEQ ID NO: 1106369 - RNA, 22 nt, Human
cagacugaaaaucccugguagu

SEQ ID NO: 1106370 - RNA, 22 nt, Human
aaauacaguggcagcagauaau

SEQ ID NO: 1106371 - RNA, 22 nt, Human
auguuguugaacucuuugcaug

SEQ ID NO: 1106372 - RNA, 22 nt, Human
uagaucuuucacuacuguguag

SEQ ID NO: 1106373 - RNA, 23 nt, Human
ggacaugucucuggguauuuuga

SEQ ID NO: 1106374 - RNA, 22 nt, Human
uacaguaaccagucuacuuaga

SEQ ID NO: 1106375 - RNA, 22 nt, Human
uagcaucuguacugacauaauc

SEQ ID NO: 1106376 - RNA, 21 nt, Human
cuuuucuagucccagccccgc

SEQ ID NO: 1106377 - RNA, 21 nt, Human
agauuguauggaggugagagg

SEQ ID NO: 1106378 - RNA, 22 nt, Human
uuuaauuuucugggcccagcag

SEQ ID NO: 1106379 - RNA, 22 nt, Human
uuuccagaaauaccauuuggug

SEQ ID NO: 1106380 - RNA, 22 nt, Human
cacugguugccucuuucuguuc

SEQ ID NO: 1106381 - RNA, 22 nt, Human
auugucgucaauggacacauag

SEQ ID NO: 1106382 - RNA, 22 nt, Human
caggcuguguuccuggaacccc

SEQ ID NO: 1106383 - RNA, 22 nt, Human
ucuuauaccccuaaacugcagc

SEQ ID NO: 1106384 - RNA, 22 nt, Human
aauaguguauuuuucaaaauua

SEQ ID NO: 1106385 - RNA, 22 nt, Human
uugauggacagggaccacuguc

SEQ ID NO: 1106386 - RNA, 22 nt, Human
uauucacagcugccgcacucag

SEQ ID NO: 1106387 - RNA, 23 nt, Human
ucugaccucguuugcuguguucu

SEQ ID NO: 1106388 - RNA, 19 nt, Human
agcaguggagccaugccug

SEQ ID NO: 1106389 - RNA, 22 nt, Human
uagcauuucacugaucuucacu

SEQ ID NO: 1106390 - RNA, 22 nt, Human
cuggagaacagagcuguuuaga

SEQ ID NO: 1106391 - RNA, 22 nt, Human
agagcaauuagcuuagguaaaa

SEQ ID NO: 1106392 - RNA, 17 nt, Human
ccuuucuucccagaggg

SEQ ID NO: 1106393 - RNA, 22 nt, Human
auuuccaggaguugaggucuga

SEQ ID NO: 1106394 - RNA, 22 nt, Human
guuucgucaggcuuauucuauc

SEQ ID NO: 1106395 - RNA, 22 nt, Human
cuuaagacaggcucaaagauua

SEQ ID NO: 1106396 - RNA, 22 nt, Human
accagagucaauuauuuugcca

SEQ ID NO: 1106397 - RNA, 22 nt, Human
uauucauguguuggaaaggaac

SEQ ID NO: 1106398 - RNA, 22 nt, Human
augaacugcaguauaaacuugg

SEQ ID NO: 1106399 - RNA, 22 nt, Human
ucuuuuccuugaugguuaaaua

SEQ ID NO: 1106400 - RNA, 22 nt, Human
guaugucuuaggguucaguaac

SEQ ID NO: 1106401 - RNA, 22 nt, Human
auggauggaacucugcuguggu

SEQ ID NO: 1106402 - RNA, 22 nt, Human
aaacacaucauucaugucguca

SEQ ID NO: 1106403 - RNA, 21 nt, Human
gcucuguguuacaaguugggg

SEQ ID NO: 1106404 - RNA, 22 nt, Human
ucuaugucucuggaaggagugu

SEQ ID NO: 1106405 - RNA, 22 nt, Human
ucucagucuuugcaaggaugcu

SEQ ID NO: 1106406 - RNA, 22 nt, Human
caggaaauucccagaaggacug

SEQ ID NO: 1106407 - RNA, 22 nt, Human
uucagaaagugaaucuuguuau

SEQ ID NO: 1106408 - RNA, 20 nt, Human
agcauuuagccuuuauccac

SEQ ID NO: 1106409 - RNA, 22 nt, Human
cggcagagcccugagucagccu

SEQ ID NO: 1106410 - RNA, 22 nt, Human
uaaaccuuauuugaauaccaac

SEQ ID NO: 1106411 - RNA, 22 nt, Human
uguggaauguccucagcauccu

SEQ ID NO: 1106412 - RNA, 22 nt, Human
ucauggaugauagcuucauugc

SEQ ID NO: 1106413 - RNA, 22 nt, Human
guggcagcggcccaggccgucu

SEQ ID NO: 1106414 - RNA, 22 nt, Human
agugauaggacauauggauuuu

SEQ ID NO: 1106415 - RNA, 22 nt, Human
ucugaauucuuagaauuaaagg

SEQ ID NO: 1106416 - RNA, 22 nt, Human
uggaucuugaugcuccaagagu

SEQ ID NO: 1106417 - RNA, 22 nt, Human
aaugagaauguaagugaagaga

SEQ ID NO: 1106418 - RNA, 22 nt, Human
aaacaguguguuucagagaggc

SEQ ID NO: 1106419 - RNA, 22 nt, Human
uaaaaguuagcuaggacaaagu

SEQ ID NO: 1106420 - RNA, 22 nt, Human
gaaggaagcugucuggaugugu

SEQ ID NO: 1106421 - RNA, 22 nt, Human
gagucacauacuauguaauaga

SEQ ID NO: 1106422 - RNA, 22 nt, Human
ucuguaaacacccguaagcuuu

SEQ ID NO: 1106423 - RNA, 22 nt, Human
caauaguaaauuacggaggaga

SEQ ID NO: 1106424 - RNA, 22 nt, Human
uguucauucugugaccugguuc

SEQ ID NO: 1106425 - RNA, 22 nt, Human
aucuucaaggaaaaaauacagu

SEQ ID NO: 1106426 - RNA, 22 nt, Human
aguaacuuaagcaauuguguau

SEQ ID NO: 1106427 - RNA, 22 nt, Human
uugauuugauuguaauggcucu

SEQ ID NO: 1106428 - RNA, 23 nt, Human
aaauugucguaagguggagaugu

SEQ ID NO: 1106429 - RNA, 22 nt, Human
uuuguagauuuucucuccagua

SEQ ID NO: 1106430 - RNA, 22 nt, Human
ggaagcaaauuccagaaccaca

SEQ ID NO: 1106431 - RNA, 22 nt, Human
cuuauuggucccaggaggagaa

SEQ ID NO: 1106432 - RNA, 22 nt, Human
uuuagcaaggagaaauaauccu

SEQ ID NO: 1106433 - RNA, 22 nt, Human
gaaggagaggauugugaggcug

SEQ ID NO: 1106434 - RNA, 22 nt, Human
aaugcuuuuugcgaaaugugca

SEQ ID NO: 1106435 - RNA, 22 nt, Human
augcaauaguaauucuagucug

SEQ ID NO: 1106436 - RNA, 22 nt, Human
uuucacaugguacugccuguuu

SEQ ID NO: 1106437 - RNA, 22 nt, Human
ucagucucuggggcuucuguuu

SEQ ID NO: 1106438 - RNA, 22 nt, Human
ccaggacacgauuuuuagucug

SEQ ID NO: 1106439 - RNA, 22 nt, Human
agaauguaagaaugcaaagauu

SEQ ID NO: 1106440 - RNA, 22 nt, Human
ucaucaucauucucccccacuu

SEQ ID NO: 1106441 - RNA, 22 nt, Human
gcagaagucagaccaucugaau

SEQ ID NO: 1106442 - RNA, 22 nt, Human
aauuagaagcuguuagcaaaau

SEQ ID NO: 1106443 - RNA, 22 nt, Human
uaccaaaaccaagccauuaucu

SEQ ID NO: 1106444 - RNA, 22 nt, Human
gagaauguuaauguugaaguau

SEQ ID NO: 1106445 - RNA, 22 nt, Human
aaugagauggaggacucuuaau

SEQ ID NO: 1106446 - RNA, 22 nt, Human
cuaguuuuaagcuccuugaggu

SEQ ID NO: 1106447 - RNA, 22 nt, Human
acugaaauuuauauuuugggca

SEQ ID NO: 1106448 - RNA, 22 nt, Human
ucuaguuagugguugauacugu

SEQ ID NO: 1106449 - RNA, 16 nt, Human
ccagaugaaugggagu

SEQ ID NO: 1106450 - RNA, 22 nt, Human
uagaaaagccccagcuggaggg

SEQ ID NO: 1106451 - RNA, 22 nt, Human
augauuuguuaacagacuuaau

SEQ ID NO: 1106452 - RNA, 22 nt, Human
guauuucuuuacauaugcucau

SEQ ID NO: 1106453 - RNA, 22 nt, Human
aagcuguuagggagugguaggu

SEQ ID NO: 1106454 - RNA, 22 nt, Human
ucaauucugccucuaaauauuu

SEQ ID NO: 1106455 - RNA, 22 nt, Human
uuugagaagauaggggaauacu

SEQ ID NO: 1106456 - RNA, 22 nt, Human
guuaacaacacugugagugcug

SEQ ID NO: 1106457 - RNA, 22 nt, Human
uccucauucuuggugcaucaaa

SEQ ID NO: 1106458 - RNA, 22 nt, Human
auuucagagugagagugcucaa

SEQ ID NO: 1106459 - RNA, 22 nt, Human
guggaaauuuuaggaucaucuu

SEQ ID NO: 1106460 - RNA, 22 nt, Human
uuguccuuaccucaaucuggaa

SEQ ID NO: 1106461 - RNA, 22 nt, Human
agaugguucagaauuauaaaga

SEQ ID NO: 1106462 - RNA, 22 nt, Human
aauggagugguucuugcccucu

SEQ ID NO: 1106463 - RNA, 22 nt, Human
uucuucauucccuuacuuccga

SEQ ID NO: 1106464 - RNA, 22 nt, Human
caauguuuuuccuuccuuaaua

SEQ ID NO: 1106465 - RNA, 22 nt, Human
uaauccaaaacugaaucugugg

SEQ ID NO: 1106466 - RNA, 22 nt, Human
uuggggaagcuuugaaauacuu

SEQ ID NO: 1106467 - RNA, 22 nt, Human
ccagaaugugugaaauuugaug

SEQ ID NO: 1106468 - RNA, 22 nt, Human
gugguuguuuccagguuugaaa

SEQ ID NO: 1106469 - RNA, 22 nt, Human
aaaacauuuuacugccaucuca

SEQ ID NO: 1106470 - RNA, 22 nt, Human
gaagccaaguccucgaguuuca

SEQ ID NO: 1106471 - RNA, 22 nt, Human
uuggaaauguagaaaagcagau

SEQ ID NO: 1106472 - RNA, 22 nt, Human
uacuuugagaugaugcugaucg

SEQ ID NO: 1106473 - RNA, 22 nt, Human
guucuucaaagugacaacuaaa

SEQ ID NO: 1106474 - RNA, 22 nt, Human
cacaguuuuaucuuauacugau

SEQ ID NO: 1106475 - RNA, 22 nt, Human
ugugugaacucucugauguaca

SEQ ID NO: 1106476 - RNA, 22 nt, Human
uggaaaauauuuaggugaauga

SEQ ID NO: 1106477 - RNA, 22 nt, Human
ugauuccugugcuuauuccagu

SEQ ID NO: 1106478 - RNA, 22 nt, Human
aggcauuacaucuaaauauuua

SEQ ID NO: 1106479 - RNA, 22 nt, Human
ucucacacuaaugcucuaucag

SEQ ID NO: 1106480 - RNA, 22 nt, Human
cuacauuuacacaguuaggcuu

SEQ ID NO: 1106481 - RNA, 22 nt, Human
ugcuuuauucgacaucugguag

SEQ ID NO: 1106482 - RNA, 22 nt, Human
agaaguaucaggaagauucuca

SEQ ID NO: 1106483 - RNA, 23 nt, Human
aacucuggcuagcauagaauaga

SEQ ID NO: 1106484 - RNA, 22 nt, Human
ugugguuuugguucagaaacaa

SEQ ID NO: 1106485 - RNA, 22 nt, Human
ucuuauugugaugaugaagaac

SEQ ID NO: 1106486 - RNA, 22 nt, Human
gaaguauuucugaguugcccag

SEQ ID NO: 1106487 - RNA, 22 nt, Human
cucuaaauguggucugcagaua

SEQ ID NO: 1106488 - RNA, 22 nt, Human
ggcaauuacguauuagucaugu

SEQ ID NO: 1106489 - RNA, 22 nt, Human
uuuugaauaauucagaaacagc

SEQ ID NO: 1106490 - RNA, 22 nt, Human
uugaugcugucuuucagaauca

SEQ ID NO: 1106491 - RNA, 22 nt, Human
acagaguaucuaucaggaguau

SEQ ID NO: 1106492 - RNA, 22 nt, Human
aauaucaucucucuuuucugca

SEQ ID NO: 1106493 - RNA, 22 nt, Human
uuuguugguugcacuggugggu

SEQ ID NO: 1106494 - RNA, 22 nt, Human
uacaucucaucugugcucuccg

SEQ ID NO: 1106495 - RNA, 22 nt, Human
ugauuuacaguagugucuaaac

SEQ ID NO: 1106496 - RNA, 22 nt, Human
gaauaauugugaugcuugaagu

SEQ ID NO: 1106497 - RNA, 22 nt, Human
ucuuagaaacuguaucgauuag

SEQ ID NO: 1106498 - RNA, 22 nt, Human
uuuucaguugugcucucuaguu

SEQ ID NO: 1106499 - RNA, 22 nt, Human
cuuccagugcauagguagauca

SEQ ID NO: 1106500 - RNA, 22 nt, Human
gaacaguuucccuguagaaaau

SEQ ID NO: 1106501 - RNA, 20 nt, Human
uauuucugggcaaccauuua

SEQ ID NO: 1106502 - RNA, 22 nt, Human
guucuucagauuccauuucagu

SEQ ID NO: 1106503 - RNA, 22 nt, Human
cagagaauaaaagggcauuccu

SEQ ID NO: 1106504 - RNA, 22 nt, Human
aauaucuagccuuuagcagcuu

SEQ ID NO: 1106505 - RNA, 22 nt, Human
aagucaauuaguaaacuuggaa

SEQ ID NO: 1106506 - RNA, 22 nt, Human
cagcaguacuucucagagguau

SEQ ID NO: 1106507 - RNA, 22 nt, Human
uguucaguuugcuaucauaauc

SEQ ID NO: 1106508 - RNA, 22 nt, Human
auguacaaucuaucacaagaag

SEQ ID NO: 1106509 - RNA, 22 nt, Human
gcaucugauccaauagauauau

SEQ ID NO: 1106510 - RNA, 22 nt, Human
uagaagaugccuuaaaguugaa

SEQ ID NO: 1106511 - RNA, 22 nt, Human
caaagaugccaaaaggaagaca

SEQ ID NO: 1106512 - RNA, 22 nt, Human
aggcauuuaaagauguaagacu

SEQ ID NO: 1106513 - RNA, 22 nt, Human
ucuucaugaaauugauugcuua

SEQ ID NO: 1106514 - RNA, 22 nt, Human
agagaagagucuugucaaauua

SEQ ID NO: 1106515 - RNA, 22 nt, Human
uccaugacagcgugagaguuug

SEQ ID NO: 1106516 - RNA, 22 nt, Human
gcuuuuauuucuucacaaaagu

SEQ ID NO: 1106517 - RNA, 22 nt, Human
gugacagaaacagggcuagaau

SEQ ID NO: 1106518 - RNA, 21 nt, Human
uggacauuuacccuucaggga

SEQ ID NO: 1106519 - RNA, 22 nt, Human
gugaagaugccucaggugaccc

SEQ ID NO: 1106520 - RNA, 22 nt, Human
uucaguuuugcuuuuaaucaug

SEQ ID NO: 1106521 - RNA, 22 nt, Human
aaagaugucauacacauuaaga

SEQ ID NO: 1106522 - RNA, 22 nt, Human
gcaguuaccuauuuuguagaaa

SEQ ID NO: 1106523 - RNA, 18 nt, Human
cuggucucccuucgcuuu

SEQ ID NO: 1106524 - RNA, 22 nt, Human
guuggacaguuugggaagggag

SEQ ID NO: 1106525 - RNA, 22 nt, Human
agcuuuauuugucauucacggc

SEQ ID NO: 1106526 - RNA, 22 nt, Human
aggaauuugggguuacaugaug

SEQ ID NO: 1106527 - RNA, 22 nt, Human
cuguuuauucucaucuaaaaug

SEQ ID NO: 1106528 - RNA, 22 nt, Human
uacuggacacguauauauagau

SEQ ID NO: 1106529 - RNA, 22 nt, Human
agggagcugcucugcuuccgug

SEQ ID NO: 1106530 - RNA, 22 nt, Human
caaagaagagauuuacagagcu

SEQ ID NO: 1106531 - RNA, 22 nt, Human
acaccacaaguaacucuuuucc

SEQ ID NO: 1106532 - RNA, 22 nt, Human
uuucuaguggguauucccuguu

SEQ ID NO: 1106533 - RNA, 22 nt, Human
ucuaauuuuggcauuuuaaccu

SEQ ID NO: 1106534 - RNA, 22 nt, Human
gugcuaugauuggacagaauag

SEQ ID NO: 1106535 - RNA, 22 nt, Human
aucaugcagcaacaagcaaggc

SEQ ID NO: 1106536 - RNA, 22 nt, Human
uacauuuauaaggcuucucugu

SEQ ID NO: 1106537 - RNA, 22 nt, Human
uaauuucagugcaagcucacgg

SEQ ID NO: 1106538 - RNA, 17 nt, Human
ucuggaugucauggaag

SEQ ID NO: 1106539 - RNA, 23 nt, Human
uggaaacauucugaauguccauc

SEQ ID NO: 1106540 - RNA, 22 nt, Human
aaucaggagugugcacuuugau

SEQ ID NO: 1106541 - RNA, 22 nt, Human
acuuuggugcgaagucacuuua

SEQ ID NO: 1106542 - RNA, 22 nt, Human
uauggauauaaucagacuggaa

SEQ ID NO: 1106543 - RNA, 22 nt, Human
agaacagaggccuuauguuuca

SEQ ID NO: 1106544 - RNA, 22 nt, Human
auccuucaaaaggaauagcagg

SEQ ID NO: 1106545 - RNA, 22 nt, Human
aucucuguaaaccauaaauuga

SEQ ID NO: 1106546 - RNA, 22 nt, Human
augaaacaacagacuuggucaa

SEQ ID NO: 1106547 - RNA, 22 nt, Human
aagaugauuauguagauuggga

SEQ ID NO: 1106548 - RNA, 18 nt, Human
gguguguaacguguuuuc

SEQ ID NO: 1106549 - RNA, 22 nt, Human
aaaugccucauuuucucucacu

SEQ ID NO: 1106550 - RNA, 22 nt, Human
aagaauaagaggauuuagaaca

SEQ ID NO: 1106551 - RNA, 22 nt, Human
caaucaaugcugcuaguuccuu

SEQ ID NO: 1106552 - RNA, 22 nt, Human
aaaucccacucacgaguuuugc

SEQ ID NO: 1106553 - RNA, 22 nt, Human
ggaagcuguuaucaucuguauc

SEQ ID NO: 1106554 - RNA, 22 nt, Human
uugguuaccuucagaaaugagu

SEQ ID NO: 1106555 - RNA, 22 nt, Human
ugugucuaaugacuauuucuuc

SEQ ID NO: 1106556 - RNA, 22 nt, Human
auguaguauuuggaaauguaaa

SEQ ID NO: 1106557 - RNA, 22 nt, Human
guuuacaacaucuuguccuuca

SEQ ID NO: 1106558 - RNA, 22 nt, Human
uuuacgaauggggugacaacuu

SEQ ID NO: 1106559 - RNA, 22 nt, Human
ucuuauugguaaugauggcauu

SEQ ID NO: 1106560 - RNA, 22 nt, Human
uuauuugcccauguuuagcaga

SEQ ID NO: 1106561 - RNA, 22 nt, Human
guguuuggucagacguccgggg

SEQ ID NO: 1106562 - RNA, 22 nt, Human
uggaauguuaaaccucaaugau

SEQ ID NO: 1106563 - RNA, 22 nt, Human
gaaacacucaauuuaguaauuc

SEQ ID NO: 1106564 - RNA, 22 nt, Human
uaggaaauaauucacucuggcu

SEQ ID NO: 1106565 - RNA, 22 nt, Human
uuuuccuucugauacuccauuu

SEQ ID NO: 1106566 - RNA, 22 nt, Human
aggaaaugccgcggcucucuuu

SEQ ID NO: 1106567 - RNA, 20 nt, Human
uuuuccacuccucaaaacag

SEQ ID NO: 1106568 - RNA, 22 nt, Human
ccaucuucucuugaaccuccuu

SEQ ID NO: 1106569 - RNA, 22 nt, Human
uugcaaucagcaguguuuucac

SEQ ID NO: 1106570 - RNA, 22 nt, Human
ucagugauuucuggggugaggg

SEQ ID NO: 1106571 - RNA, 22 nt, Human
accauccaaacugcuuucugug

SEQ ID NO: 1106572 - RNA, 22 nt, Human
auuguuacuggguuaauuugga

SEQ ID NO: 1106573 - RNA, 22 nt, Human
aacagauuguaaccugauagcc

SEQ ID NO: 1106574 - RNA, 22 nt, Human
ccuggaaaaugccacuuucaca

SEQ ID NO: 1106575 - RNA, 22 nt, Human
aauuauugagcaucuacugugu

SEQ ID NO: 1106576 - RNA, 22 nt, Human
uaaugccuuaugucaaauguaa

SEQ ID NO: 1106577 - RNA, 22 nt, Human
auguccagaguaaagcacauuc

SEQ ID NO: 1106578 - RNA, 22 nt, Human
cuucucagagcuuccagaaaac

SEQ ID NO: 1106579 - RNA, 22 nt, Human
augcauugaggaugacaugagu

SEQ ID NO: 1106580 - RNA, 22 nt, Human
aacuagaaagaacauauuucca

SEQ ID NO: 1106581 - RNA, 22 nt, Human
uuguuuaaagaacuucugacuu

SEQ ID NO: 1106582 - RNA, 22 nt, Human
cuuuauguuggggugucuuagu

SEQ ID NO: 1106583 - RNA, 22 nt, Human
ucggggauggugucugagggag

SEQ ID NO: 1106584 - RNA, 22 nt, Human
uauuaugguuguagguuaacaa

SEQ ID NO: 1106585 - RNA, 22 nt, Human
uuacaauuacuugaucucagcu

SEQ ID NO: 1106586 - RNA, 22 nt, Human
uagaagaacaugucaaacuaua

SEQ ID NO: 1106587 - RNA, 20 nt, Human
uaugauaauuacaaaauagu

SEQ ID NO: 1106588 - RNA, 22 nt, Human
guguuuaaugcagaugugggug

SEQ ID NO: 1106589 - RNA, 22 nt, Human
cuugaugaaugaccuggguggu

SEQ ID NO: 1106590 - RNA, 22 nt, Human
uuaagagaagaguaucuagaac

SEQ ID NO: 1106591 - RNA, 22 nt, Human
auugcacaucugcacuacagcc

SEQ ID NO: 1106592 - RNA, 22 nt, Human
uuuauacuccacucugcaagcg

SEQ ID NO: 1106593 - RNA, 18 nt, Human
cagaaaguuauuuacucu

SEQ ID NO: 1106594 - RNA, 22 nt, Human
acuuuagauauuccucuguaca

SEQ ID NO: 1106595 - RNA, 22 nt, Human
guaauucugugugaaucuauua

SEQ ID NO: 1106596 - RNA, 22 nt, Human
cuuuggaaaaauaccuggcaua

SEQ ID NO: 1106597 - RNA, 22 nt, Human
uuuacuuuugguaaggucauuu

SEQ ID NO: 1106598 - RNA, 22 nt, Human
aaggaucauguauauguuuaag

SEQ ID NO: 1106599 - RNA, 22 nt, Human
aauguuacgaucaacaacacau

SEQ ID NO: 1106600 - RNA, 22 nt, Human
uuuuuaagagucuggaaauagu

SEQ ID NO: 1106601 - RNA, 22 nt, Human
agccacauggaccugaugcuag

SEQ ID NO: 1106602 - RNA, 22 nt, Human
gugauuuucuccuccuagaagu

SEQ ID NO: 1106603 - RNA, 22 nt, Human
augaacaguacaaagcacagac

SEQ ID NO: 1106604 - RNA, 22 nt, Human
gaagauuaccugagaccacuug

SEQ ID NO: 1106605 - RNA, 22 nt, Human
auuguugacuugauuacucaac

SEQ ID NO: 1106606 - RNA, 22 nt, Human
ugcuugcugaaaggcauuuaga

SEQ ID NO: 1106607 - RNA, 22 nt, Human
aucuucaaagcacaucguuugu

SEQ ID NO: 1106608 - RNA, 22 nt, Human
gugauuucaaauauagagugag

SEQ ID NO: 1106609 - RNA, 22 nt, Human
cauuguuggcagagggacagag

SEQ ID NO: 1106610 - RNA, 22 nt, Human
ucaucuguuaugggaguuuuug

SEQ ID NO: 1106611 - RNA, 22 nt, Human
aguuauugagugcagagcaggg

SEQ ID NO: 1106612 - RNA, 22 nt, Human
uuguugcugcucaaccucuaua

SEQ ID NO: 1106613 - RNA, 20 nt, Human
uuugauugccccucugacuu

SEQ ID NO: 1106614 - RNA, 19 nt, Human
cagcaaacacuguaaaugg

SEQ ID NO: 1106615 - RNA, 22 nt, Human
cuuguauuaggaagaaugcuuu

SEQ ID NO: 1106616 - RNA, 22 nt, Human
uuugaauauacuucaaacaaag

SEQ ID NO: 1106617 - RNA, 22 nt, Human
uugcauauccuccaacacaugg

SEQ ID NO: 1106618 - RNA, 22 nt, Human
cacaauuuccauugagcagcag

SEQ ID NO: 1106619 - RNA, 22 nt, Human
uaugcuguauucuguauguuag

SEQ ID NO: 1106620 - RNA, 23 nt, Human
acauuacacgcaguaauugcccc

SEQ ID NO: 1106621 - RNA, 22 nt, Human
ugcacccacuuagcugaaguuc

SEQ ID NO: 1106622 - RNA, 22 nt, Human
uauagcagcaugauuuauaguc

SEQ ID NO: 1106623 - RNA, 22 nt, Human
caugcaugccgggcugacagag

SEQ ID NO: 1106624 - RNA, 22 nt, Human
uuuacuguuuacagcuaaugca

SEQ ID NO: 1106625 - RNA, 22 nt, Human
cacgaauggaagggucuuggcu

SEQ ID NO: 1106626 - RNA, 22 nt, Human
augcuugaaaguuauuucauuu

SEQ ID NO: 1106627 - RNA, 23 nt, Human
ugaaagcaaugggucuauaguau

SEQ ID NO: 1106628 - RNA, 22 nt, Human
uuagaaaaaggcuguggucuua

SEQ ID NO: 1106629 - RNA, 23 nt, Human
aacauuuguaaggugauuuuguu

SEQ ID NO: 1106630 - RNA, 22 nt, Human
cagccuuugggucagaagauuc

SEQ ID NO: 1106631 - RNA, 22 nt, Human
uuucaugauuaacuuagugaau

SEQ ID NO: 1106632 - RNA, 22 nt, Human
ugugcuauuuuugcauaugugu

SEQ ID NO: 1106633 - RNA, 22 nt, Human
uguacauauucaagcacuucua

SEQ ID NO: 1106634 - RNA, 21 nt, Human
acaaauuguuuauauaggaag

SEQ ID NO: 1106635 - RNA, 22 nt, Human
acaaaggugagcagaagacaca

SEQ ID NO: 1106636 - RNA, 22 nt, Human
acauuucuccuacuuguuauuu

SEQ ID NO: 1106637 - RNA, 22 nt, Human
augcaguuagguaauagucuca

SEQ ID NO: 1106638 - RNA, 22 nt, Human
guuguacauaugaggauaaguu

SEQ ID NO: 1106639 - RNA, 22 nt, Human
agugaaaaccuaaucaugcagu

SEQ ID NO: 1106640 - RNA, 22 nt, Human
acuuuuaaggggccuugauuua

SEQ ID NO: 1106641 - RNA, 22 nt, Human
ccuuuuauauggcucaucacag

SEQ ID NO: 1106642 - RNA, 22 nt, Human
cagcuauuguucuguauaauga

SEQ ID NO: 1106643 - RNA, 22 nt, Human
auuaaugaaacuuugguuaagc

SEQ ID NO: 1106644 - RNA, 22 nt, Human
ccagguggacggcgaguacagg

SEQ ID NO: 1106645 - RNA, 22 nt, Human
gccucugcaccaguacugugcc

SEQ ID NO: 1106646 - RNA, 22 nt, Human
gagaaagggaacuuacagagug

SEQ ID NO: 1106647 - RNA, 22 nt, Human
uuguugcaagccuggaaucugg

SEQ ID NO: 1106648 - RNA, 22 nt, Human
acaaacagaguugaaaaauagg

SEQ ID NO: 1106649 - RNA, 22 nt, Human
ugucuagaaaugcugagucuca

SEQ ID NO: 1106650 - RNA, 22 nt, Human
caguuuuacccaagcuuauuuu

SEQ ID NO: 1106651 - RNA, 22 nt, Human
ucuguuauaaaucacacugcau

SEQ ID NO: 1106652 - RNA, 22 nt, Human
ugaaaacacuuuaguuuagguc

SEQ ID NO: 1106653 - RNA, 22 nt, Human
uucuuuuaauagagauccugug

SEQ ID NO: 1106654 - RNA, 22 nt, Human
uccagaugcugcacauuccuga

SEQ ID NO: 1106655 - RNA, 22 nt, Human
uaucacauacuucucauccagg

SEQ ID NO: 1106656 - RNA, 22 nt, Human
aggcuuaacuacaauuuuugcc

SEQ ID NO: 1106657 - RNA, 22 nt, Human
agagcuauuucuuaaaagcugu

SEQ ID NO: 1106658 - RNA, 22 nt, Human
uuuauccaccuuacccuguucc

SEQ ID NO: 1106659 - RNA, 22 nt, Human
uccagcagguccgagacaaguu

SEQ ID NO: 1106660 - RNA, 22 nt, Human
ggaaacauuccaagaguugaaa

SEQ ID NO: 1106661 - RNA, 22 nt, Human
cacuguugagcaauguacagug

SEQ ID NO: 1106662 - RNA, 22 nt, Human
uacaaagugauuuuggaauuga

SEQ ID NO: 1106663 - RNA, 22 nt, Human
agaugacuaacauaguauugcu

SEQ ID NO: 1106664 - RNA, 21 nt, Human
caaaagagacugauucuugga

SEQ ID NO: 1106665 - RNA, 22 nt, Human
cuucuuaaaguugucacagcug

SEQ ID NO: 1106666 - RNA, 22 nt, Human
auagucuuagaaucuugagugu

SEQ ID NO: 1106667 - RNA, 22 nt, Human
gaauguuuaaaaggugcaguuu

SEQ ID NO: 1106668 - RNA, 20 nt, Human
aaaaacaguaaugcugaaga

SEQ ID NO: 1106669 - RNA, 22 nt, Human
uggagcagccuuuucuaagcaa

SEQ ID NO: 1106670 - RNA, 22 nt, Human
uucucaaagugugcucccugga

SEQ ID NO: 1106671 - RNA, 22 nt, Human
ucaguaaaugagcaaaaauuuc

SEQ ID NO: 1106672 - RNA, 22 nt, Human
uuugcagagugcagaagcaucu

SEQ ID NO: 1106673 - RNA, 22 nt, Human
auugagaaaauucgagcaaguu

SEQ ID NO: 1106674 - RNA, 22 nt, Human
uacuuugucauucuaaccuucc

SEQ ID NO: 1106675 - RNA, 22 nt, Human
ucucaucugccauuugcaggag

SEQ ID NO: 1106676 - RNA, 22 nt, Human
uaauucuagauugacauuuuga

SEQ ID NO: 1106677 - RNA, 22 nt, Human
caucaguuccugccccugcccc

SEQ ID NO: 1106678 - RNA, 22 nt, Human
ugauaguaucugauuauuucac

SEQ ID NO: 1106679 - RNA, 22 nt, Human
cauguguauuauucuuguggaa

SEQ ID NO: 1106680 - RNA, 22 nt, Human
cagaaccaggaacugauggaga

SEQ ID NO: 1106681 - RNA, 22 nt, Human
caugugguauugugagauccac

SEQ ID NO: 1106682 - RNA, 22 nt, Human
auccuggguaaguuccuuuuaa

SEQ ID NO: 1106683 - RNA, 22 nt, Human
uguguacauguaucaacuaucg

SEQ ID NO: 1106684 - RNA, 22 nt, Human
guuuuguucaugaacauugggu

SEQ ID NO: 1106685 - RNA, 21 nt, Human
uucacaguggauaacuuucug

SEQ ID NO: 1106686 - RNA, 22 nt, Human
caauuaccaguaauugagguuu

SEQ ID NO: 1106687 - RNA, 22 nt, Human
uuaaaagaauccuguuauccuc

SEQ ID NO: 1106688 - RNA, 20 nt, Human
agugauuuguuaguacauug

SEQ ID NO: 1106689 - RNA, 22 nt, Human
gaauuguacugcaaucagggga

SEQ ID NO: 1106690 - RNA, 22 nt, Human
acauuuuuggguugaugucuga

SEQ ID NO: 1106691 - RNA, 22 nt, Human
agauauguuaggcuuguucccu

SEQ ID NO: 1106692 - RNA, 21 nt, Human
gcaggguuugugcugugaguu

SEQ ID NO: 1106693 - RNA, 22 nt, Human
gaaaggagaggguuaaggagcu

SEQ ID NO: 1106694 - RNA, 22 nt, Human
uauuuggauagacagggagaug

SEQ ID NO: 1106695 - RNA, 22 nt, Human
uugauguaauacuuugcaacca

SEQ ID NO: 1106696 - RNA, 22 nt, Human
aaauccaucaaaucuucuagaa

SEQ ID NO: 1106697 - RNA, 22 nt, Human
auugugcaccuacugugugcag

SEQ ID NO: 1106698 - RNA, 22 nt, Human
acauucucuuuuagaaagcugu

SEQ ID NO: 1106699 - RNA, 22 nt, Human
cuuuacagugaacuugcuuguc

SEQ ID NO: 1106700 - RNA, 22 nt, Human
ggaaaaugggaaccugaagcca

SEQ ID NO: 1106701 - RNA, 22 nt, Human
acaagucaguggaauuaauauu

SEQ ID NO: 1106702 - RNA, 22 nt, Human
guucuuaaagauucaucaagca

SEQ ID NO: 1106703 - RNA, 22 nt, Human
uuagaaaucaccucugaagauc

SEQ ID NO: 1106704 - RNA, 22 nt, Human
caguauguuuauuagaacugca

SEQ ID NO: 1106705 - RNA, 22 nt, Human
uucaacaacuugguucaaaugg

SEQ ID NO: 1106706 - RNA, 22 nt, Human
cacaucauguuaauucauuaca

SEQ ID NO: 1106707 - RNA, 22 nt, Human
gucaaaacaaaguuaagaauuc

SEQ ID NO: 1106708 - RNA, 22 nt, Human
uugcuugaacccaggaagugga

SEQ ID NO: 1106709 - RNA, 22 nt, Human
aucaagggcgcgugguucggcg

SEQ ID NO: 1106710 - RNA, 22 nt, Human
uuuauucucuaguuggucagau

SEQ ID NO: 1106711 - RNA, 17 nt, Human
uaaguccuaguuauuuu

SEQ ID NO: 1106712 - RNA, 22 nt, Human
cugauggagagugugauuuggg

SEQ ID NO: 1106713 - RNA, 22 nt, Human
cauaaauuguacccauuccaac

SEQ ID NO: 1106714 - RNA, 22 nt, Human
uaaaacuagugguugggacuaa

SEQ ID NO: 1106715 - RNA, 22 nt, Human
uuuugguaauuaaguagauauu

SEQ ID NO: 1106716 - RNA, 22 nt, Human
aauguuugaacuuugcauauuu

SEQ ID NO: 1106717 - RNA, 22 nt, Human
uacuguauacuacugcuguucu

SEQ ID NO: 1106718 - RNA, 22 nt, Human
uaucuguuuuuacagugucuuu

SEQ ID NO: 1106719 - RNA, 22 nt, Human
cacauuuaaagguugaagcuga

SEQ ID NO: 1106720 - RNA, 22 nt, Human
acugcauuugguaaagucaaga

SEQ ID NO: 1106721 - RNA, 22 nt, Human
ggaaacugcuuacacuagaggg

SEQ ID NO: 1106722 - RNA, 22 nt, Human
uaacaaaguauuguuuguguau

SEQ ID NO: 1106723 - RNA, 22 nt, Human
uguuccugacggccaaagaggu

SEQ ID NO: 1106724 - RNA, 22 nt, Human
acagaauugggguucuugggga

SEQ ID NO: 1106725 - RNA, 22 nt, Human
uggauguuugaaguugcaugug

SEQ ID NO: 1106726 - RNA, 22 nt, Human
gaaauguuggacacuugaaauu

SEQ ID NO: 1106727 - RNA, 22 nt, Human
guguaucaaagcacagacuuca

SEQ ID NO: 1106728 - RNA, 23 nt, Human
uuguucuuggaucuuccugaagc

SEQ ID NO: 1106729 - RNA, 22 nt, Human
uagaugaacagaaagccacugu

SEQ ID NO: 1106730 - RNA, 22 nt, Human
uaccauuucaguaaaaacuuag

SEQ ID NO: 1106731 - RNA, 22 nt, Human
uuuggaaaugagaagccaccuu

SEQ ID NO: 1106732 - RNA, 22 nt, Human
uucuaguuacagaagccuugcu

SEQ ID NO: 1106733 - RNA, 22 nt, Human
ucucuuaauuguaaugguuccu

SEQ ID NO: 1106734 - RNA, 22 nt, Human
uaucuguauucugacagucacu

SEQ ID NO: 1106735 - RNA, 22 nt, Human
ugguuuguauauguuugugaga

SEQ ID NO: 1106736 - RNA, 22 nt, Human
uccaagaagcuuacaaucuaau

SEQ ID NO: 1106737 - RNA, 22 nt, Human
uaaaugcaguacaaauuguucu

SEQ ID NO: 1106738 - RNA, 22 nt, Human
gaugauuacacuuuuaaaacag

SEQ ID NO: 1106739 - RNA, 23 nt, Human
uggagaauucagucuuuguuuug

SEQ ID NO: 1106740 - RNA, 22 nt, Human
caugcuggucagccaguggaug

SEQ ID NO: 1106741 - RNA, 22 nt, Human
uauuuggugaaucuauggucag

SEQ ID NO: 1106742 - RNA, 22 nt, Human
ucuccccaguauggauucucug

SEQ ID NO: 1106743 - RNA, 22 nt, Human
aucuguucuucaaaauauuaca

SEQ ID NO: 1106744 - RNA, 22 nt, Human
uucuuugcccauguuuccuaag

SEQ ID NO: 1106745 - RNA, 22 nt, Human
cuaccugguacauagaaauguu

SEQ ID NO: 1106746 - RNA, 22 nt, Human
aguacuuuuuguucaauugugc

SEQ ID NO: 1106747 - RNA, 22 nt, Human
auuucagcagcccauguuugga

SEQ ID NO: 1106748 - RNA, 22 nt, Human
uccguuuucacacugcuauaaa

SEQ ID NO: 1106749 - RNA, 22 nt, Human
gaauguuauugaacuacgagcu

SEQ ID NO: 1106750 - RNA, 22 nt, Human
cauuaacacuuuggauuuagac

SEQ ID NO: 1106751 - RNA, 22 nt, Human
ugcucuguucaguguaucuugu

SEQ ID NO: 1106752 - RNA, 22 nt, Human
gucuuaagaaugaaugcugaga

SEQ ID NO: 1106753 - RNA, 22 nt, Human
uuugagaagcauggcuguauuc

SEQ ID NO: 1106754 - RNA, 22 nt, Human
guagagcagggagcaggaagcu

SEQ ID NO: 1106755 - RNA, 23 nt, Human
aguacauuugacccaaauaagcu

SEQ ID NO: 1106756 - RNA, 22 nt, Human
guggcuaggcccaacggcagga

SEQ ID NO: 1106757 - RNA, 22 nt, Human
cagucauuaugggaguuaaucc

SEQ ID NO: 1106758 - RNA, 22 nt, Human
cuucuaauucuuauguaagcuu

SEQ ID NO: 1106759 - RNA, 18 nt, Human
ucagacaaguuagacagg

SEQ ID NO: 1106760 - RNA, 22 nt, Human
uugaauaguuuuggauagcaua

SEQ ID NO: 1106761 - RNA, 22 nt, Human
ugagaugaagugauguaaaaca

SEQ ID NO: 1106762 - RNA, 22 nt, Human
gagcuuuucccgucuuucucgu

SEQ ID NO: 1106763 - RNA, 22 nt, Human
uucucugaguacguuucagugu

SEQ ID NO: 1106764 - RNA, 22 nt, Human
cucagagaagauggaugaggua

SEQ ID NO: 1106765 - RNA, 22 nt, Human
ugaauaugugacuuugauuuca

SEQ ID NO: 1106766 - RNA, 23 nt, Human
agugaugucacccacagacaagg

SEQ ID NO: 1106767 - RNA, 22 nt, Human
guguuucccuggcacaagaacc

SEQ ID NO: 1106768 - RNA, 22 nt, Human
uaccaggagcccccuucugguc

SEQ ID NO: 1106769 - RNA, 22 nt, Human
auuugugggacuauaaugcagg

SEQ ID NO: 1106770 - RNA, 22 nt, Human
cuuuacuucagcaagcuuuccu

SEQ ID NO: 1106771 - RNA, 22 nt, Human
uagugucucuuccuguuugaaa

SEQ ID NO: 1106772 - RNA, 22 nt, Human
acuagaaacuaauggauuauua

SEQ ID NO: 1106773 - RNA, 22 nt, Human
uaaguauguuagaaaaucaagu

SEQ ID NO: 1106774 - RNA, 22 nt, Human
uuuacagcuacuguccuauuuc

SEQ ID NO: 1106775 - RNA, 22 nt, Human
acagauccugguuacagccauu

SEQ ID NO: 1106776 - RNA, 22 nt, Human
aagucauugguagcuugauagg

SEQ ID NO: 1106777 - RNA, 22 nt, Human
gcuuccaaugcuucuaucacau

SEQ ID NO: 1106778 - RNA, 22 nt, Human
acaguccuguacaggccauauc

SEQ ID NO: 1106779 - RNA, 22 nt, Human
aacaguaugugagauuuacaca

SEQ ID NO: 1106780 - RNA, 22 nt, Human
cauucauaggaggagaugauua

SEQ ID NO: 1106781 - RNA, 22 nt, Human
agcaaauaauugucuuugaggg

SEQ ID NO: 1106782 - RNA, 18 nt, Human
guagauccuugagcuacc

SEQ ID NO: 1106783 - RNA, 22 nt, Human
gccugagauucccggagccgug

SEQ ID NO: 1106784 - RNA, 22 nt, Human
cagaguccugcaccagcuccag

SEQ ID NO: 1106785 - RNA, 22 nt, Human
uguacauacauagauauacaca

SEQ ID NO: 1106786 - RNA, 22 nt, Human
uucagcacuggacagcgagucu

SEQ ID NO: 1106787 - RNA, 22 nt, Human
uuacuguagcuugacauauguc

SEQ ID NO: 1106788 - RNA, 22 nt, Human
uucuuucugggguccuucggcu

SEQ ID NO: 1106789 - RNA, 22 nt, Human
uuuccuacugcccuauacacac

SEQ ID NO: 1106790 - RNA, 22 nt, Human
auguaagagcuuugcagggaaa

SEQ ID NO: 1106791 - RNA, 21 nt, Human
uaaaagaugacaagacagcuc

SEQ ID NO: 1106792 - RNA, 22 nt, Human
uugcuauuuugagagucauagu

SEQ ID NO: 1106793 - RNA, 22 nt, Human
guccaucuaaguauccagccug

SEQ ID NO: 1106794 - RNA, 22 nt, Human
aaauugaauuugggaaacauug

SEQ ID NO: 1106795 - RNA, 22 nt, Human
ucguuaaucagcaccagaauuc

SEQ ID NO: 1106796 - RNA, 22 nt, Human
auuagguaguauaaucuuuguu

SEQ ID NO: 1106797 - RNA, 18 nt, Human
acagggagggcgcugggg

SEQ ID NO: 1106798 - RNA, 22 nt, Human
ucuuugcagaauuuaacuuugc

SEQ ID NO: 1106799 - RNA, 22 nt, Human
uucuguuuauaauuugcaguug

SEQ ID NO: 1106800 - RNA, 22 nt, Human
agaguuuacagaaauaagcugu

SEQ ID NO: 1106801 - RNA, 20 nt, Human
caucaacaccuugucagccu

SEQ ID NO: 1106802 - RNA, 22 nt, Human
gaguaauuuucuuaaaacauca

SEQ ID NO: 1106803 - RNA, 22 nt, Human
ugauuugaauuuuaaaacacug

SEQ ID NO: 1106804 - RNA, 22 nt, Human
aaauugcauuuuaaagguagau

SEQ ID NO: 1106805 - RNA, 23 nt, Human
uuaagacuggcugaacuuaguag

SEQ ID NO: 1106806 - RNA, 19 nt, Human
auagaguagaguaucuguu

SEQ ID NO: 1106807 - RNA, 22 nt, Human
auauacacuguuucaguugaag

SEQ ID NO: 1106808 - RNA, 22 nt, Human
uuauuuaaaauguagguuggga

SEQ ID NO: 1106809 - RNA, 22 nt, Human
aagagagaacucccuucgccag

SEQ ID NO: 1106810 - RNA, 22 nt, Human
acuucccacugcagugacugag

SEQ ID NO: 1106811 - RNA, 22 nt, Human
uuagcacugucugguuaucuug

SEQ ID NO: 1106812 - RNA, 22 nt, Human
ugaauagagcugcaguggacau

SEQ ID NO: 1106813 - RNA, 22 nt, Human
augaugaagcaugguuacacug

SEQ ID NO: 1106814 - RNA, 22 nt, Human
uuucuacacuucgugguguuuu

SEQ ID NO: 1106815 - RNA, 22 nt, Human
guuauucuauuaaugugauugu

SEQ ID NO: 1106816 - RNA, 22 nt, Human
uaucuuugguagcuuuccuaag

SEQ ID NO: 1106817 - RNA, 22 nt, Human
gagaugaagaggcccuuggagu

SEQ ID NO: 1106818 - RNA, 22 nt, Human
gauuugucuauauucaaauaug

SEQ ID NO: 1106819 - RNA, 22 nt, Human
gauucugaaauuaacagacugg

SEQ ID NO: 1106820 - RNA, 22 nt, Human
uuuuaauccucuugguaucuua

SEQ ID NO: 1106821 - RNA, 22 nt, Human
uauacuacgcaccaaacaaagg

SEQ ID NO: 1106822 - RNA, 22 nt, Human
acauauuuugaaagcuuucuaa

SEQ ID NO: 1106823 - RNA, 22 nt, Human
auagacacagcuaugauuugag

SEQ ID NO: 1106824 - RNA, 22 nt, Human
cauuuagaagucuuagaacuau

SEQ ID NO: 1106825 - RNA, 22 nt, Human
uuggaggaagcucaugggggau

SEQ ID NO: 1106826 - RNA, 22 nt, Human
ggauguuuauccuaucuuaguu

SEQ ID NO: 1106827 - RNA, 22 nt, Human
cuccagauuccguuuauucagg

SEQ ID NO: 1106828 - RNA, 22 nt, Human
uuaguguccagaguuuuuauua

SEQ ID NO: 1106829 - RNA, 22 nt, Human
uuucucggcagagaugaugggc

SEQ ID NO: 1106830 - RNA, 22 nt, Human
uuucucuuucaaucugcaguac

SEQ ID NO: 1106831 - RNA, 22 nt, Human
augaaacucuagcuuucagcac

SEQ ID NO: 1106832 - RNA, 22 nt, Human
cucaaaauccauaaaaucaggu

SEQ ID NO: 1106833 - RNA, 22 nt, Human
acacaucagaaauaugaaugag

SEQ ID NO: 1106834 - RNA, 22 nt, Human
aaggauuuuuggaaugagaugg

SEQ ID NO: 1106835 - RNA, 22 nt, Human
guggcauuugggagaugcgugg

SEQ ID NO: 1106836 - RNA, 22 nt, Human
aucuaugugggaaucauaauag

SEQ ID NO: 1106837 - RNA, 22 nt, Human
acauucuacaguuaaccauuag

SEQ ID NO: 1106838 - RNA, 18 nt, Human
ggaaaaggagugucuagc

SEQ ID NO: 1106839 - RNA, 20 nt, Human
acagaugaggaugcggaggc

SEQ ID NO: 1106840 - RNA, 22 nt, Human
guuauacuuaugugcaaaaaua

SEQ ID NO: 1106841 - RNA, 22 nt, Human
cucacucaguuuuuaguucauc

SEQ ID NO: 1106842 - RNA, 22 nt, Human
agacuucucuaacuugaggacc

SEQ ID NO: 1106843 - RNA, 20 nt, Human
ucucuaacaugaaugcuauc

SEQ ID NO: 1106844 - RNA, 22 nt, Human
ccagaucccuguuugccucugg

SEQ ID NO: 1106845 - RNA, 22 nt, Human
uuccagaacaauguggacguau

SEQ ID NO: 1106846 - RNA, 23 nt, Human
cuuuccuuucuuugacacccagc

SEQ ID NO: 1106847 - RNA, 22 nt, Human
uggcacagcuugucauaaacuc

SEQ ID NO: 1106848 - RNA, 22 nt, Human
uaguuacuuuugcucuucauua

SEQ ID NO: 1106849 - RNA, 22 nt, Human
caauaauugcuuuccagaguua

SEQ ID NO: 1106850 - RNA, 22 nt, Human
gcucccugguauugcugccacu

SEQ ID NO: 1106851 - RNA, 22 nt, Human
uuuguucaccuagcaaacuuuu

SEQ ID NO: 1106852 - RNA, 22 nt, Human
cauaacuugguguuggaaacug

SEQ ID NO: 1106853 - RNA, 22 nt, Human
caguuuuaugaaugcuuauuag

SEQ ID NO: 1106854 - RNA, 22 nt, Human
uuauugagcacauaguaugugg

SEQ ID NO: 1106855 - RNA, 19 nt, Human
ucaaagucugagucacuuu

SEQ ID NO: 1106856 - RNA, 22 nt, Human
accuuuaugaaacagcugucgu

SEQ ID NO: 1106857 - RNA, 22 nt, Human
guucuccaggggcuguucaucu

SEQ ID NO: 1106858 - RNA, 22 nt, Human
uaaagacaauuucgagcuguag

SEQ ID NO: 1106859 - RNA, 22 nt, Human
auaucuaggcugaauguaaaau

SEQ ID NO: 1106860 - RNA, 22 nt, Human
agaguuauccuguccuagggga

SEQ ID NO: 1106861 - RNA, 22 nt, Human
agagccuguucggaggcgcccc

SEQ ID NO: 1106862 - RNA, 22 nt, Human
uauucacaaaaugagguccuca

SEQ ID NO: 1106863 - RNA, 22 nt, Human
agaacauaucuguuuucuaacu

SEQ ID NO: 1106864 - RNA, 20 nt, Human
uuucacaaugaacaugucuc

SEQ ID NO: 1106865 - RNA, 22 nt, Human
auccuaaagcagacagcagguu

SEQ ID NO: 1106866 - RNA, 22 nt, Human
aucaacuuguccuugauguuaa

SEQ ID NO: 1106867 - RNA, 22 nt, Human
caacuuuagaccccaaguagcu

SEQ ID NO: 1106868 - RNA, 22 nt, Human
aacagaaaucauuuagggcucu

SEQ ID NO: 1106869 - RNA, 22 nt, Human
guucacauccuugugaggauuu

SEQ ID NO: 1106870 - RNA, 21 nt, Human
uuccuggaggcagaaacguga

SEQ ID NO: 1106871 - RNA, 22 nt, Human
caugggaauaaaguuauuucaa

SEQ ID NO: 1106872 - RNA, 22 nt, Human
ugucauggacuggauuucugcu

SEQ ID NO: 1106873 - RNA, 22 nt, Human
cuucucuuggguguggugucuu

SEQ ID NO: 1106874 - RNA, 22 nt, Human
gguuauuaguuucaccuggacu

SEQ ID NO: 1106875 - RNA, 22 nt, Human
auagcuuugagggcuccuuagg

SEQ ID NO: 1106876 - RNA, 22 nt, Human
agauugucauugacgaugagca

SEQ ID NO: 1106877 - RNA, 22 nt, Human
auacaugugugugcauacaugu

SEQ ID NO: 1106878 - RNA, 22 nt, Human
uuucuucucacccaggacagag

SEQ ID NO: 1106879 - RNA, 22 nt, Human
gaagcgugcagguccguauacu

SEQ ID NO: 1106880 - RNA, 22 nt, Human
auguuugaaauuguaaguauau

SEQ ID NO: 1106881 - RNA, 22 nt, Human
ucucauuuacuuccacaggcug

SEQ ID NO: 1106882 - RNA, 21 nt, Human
acugaacuuguguucuagagg

SEQ ID NO: 1106883 - RNA, 22 nt, Human
cuagaaguuuggguccauuaag

SEQ ID NO: 1106884 - RNA, 22 nt, Human
cuucauuaaugucuauaaguuu

SEQ ID NO: 1106885 - RNA, 22 nt, Human
ggagcgugcacuccaggcccuu

SEQ ID NO: 1106886 - RNA, 22 nt, Human
uagauaccugcuggaccucauu

SEQ ID NO: 1106887 - RNA, 22 nt, Human
cgucauuuguaaaugaucaaga

SEQ ID NO: 1106888 - RNA, 21 nt, Human
ugcauauauaagugcauacac

SEQ ID NO: 1106889 - RNA, 21 nt, Human
uaccaagaaguuugggaaagc

SEQ ID NO: 1106890 - RNA, 22 nt, Human
cuucaguucuaaaguagaaugu

SEQ ID NO: 1106891 - RNA, 22 nt, Human
cagaugaaguaggugacgagca

SEQ ID NO: 1106892 - RNA, 22 nt, Human
acuuuucuuaucagaaaggcca

SEQ ID NO: 1106893 - RNA, 22 nt, Human
agagacauagcacaguuuuucg

SEQ ID NO: 1106894 - RNA, 22 nt, Human
ccagacuggggcuccuugaggg

SEQ ID NO: 1106895 - RNA, 22 nt, Human
agcauucuguggucuucuaugg

SEQ ID NO: 1106896 - RNA, 19 nt, Human
auacacguguauacauaca

SEQ ID NO: 1106897 - RNA, 22 nt, Human
gcagagcugucuaagucacuuc

SEQ ID NO: 1106898 - RNA, 22 nt, Human
acagugcugaucuagacugacc

SEQ ID NO: 1106899 - RNA, 22 nt, Human
uuugaaaggagcuuuauccaga

SEQ ID NO: 1106900 - RNA, 22 nt, Human
aucauuaacccuugaugcuggg

SEQ ID NO: 1106901 - RNA, 22 nt, Human
ucauaggaguagcagugagagg

SEQ ID NO: 1106902 - RNA, 22 nt, Human
aagugucuucugauggggugug

SEQ ID NO: 1106903 - RNA, 22 nt, Human
ucauuguuucugcuuuucauga

SEQ ID NO: 1106904 - RNA, 22 nt, Human
uaugccuaccuccaaaauauau

SEQ ID NO: 1106905 - RNA, 22 nt, Human
uacugaaagagugguggacucu

SEQ ID NO: 1106906 - RNA, 22 nt, Human
auguaacauaugugaucgcauu

SEQ ID NO: 1106907 - RNA, 22 nt, Human
agaaaucugacugcugugcaca

SEQ ID NO: 1106908 - RNA, 22 nt, Human
ucauuacaagauuuccaauuug

SEQ ID NO: 1106909 - RNA, 22 nt, Human
aggauaauaauaaucucguuua

SEQ ID NO: 1106910 - RNA, 22 nt, Human
uacauuguguuaaaacagaaga

SEQ ID NO: 1106911 - RNA, 22 nt, Human
cuucauuuggcaggcuggccuc

SEQ ID NO: 1106912 - RNA, 22 nt, Human
gaucgauucagugugccuaccc

SEQ ID NO: 1106913 - RNA, 22 nt, Human
caaacauuuguuggaaccccug

SEQ ID NO: 1106914 - RNA, 22 nt, Human
aaacaucuucucuugauucuuu

SEQ ID NO: 1106915 - RNA, 22 nt, Human
uuuuguguugccauguuaagca

SEQ ID NO: 1106916 - RNA, 22 nt, Human
gagcuguucugugauugaucua

SEQ ID NO: 1106917 - RNA, 22 nt, Human
ugacauuugagagagauauaca

SEQ ID NO: 1106918 - RNA, 22 nt, Human
guggauggagcuggaagccauu

SEQ ID NO: 1106919 - RNA, 22 nt, Human
gagucgagcagaaagccgucgg

SEQ ID NO: 1106920 - RNA, 22 nt, Human
gauguauagcuuuaacugaccc

SEQ ID NO: 1106921 - RNA, 22 nt, Human
aguuuacccacuguugaaauua

SEQ ID NO: 1106922 - RNA, 21 nt, Human
ucacuagugccuucugucauu

SEQ ID NO: 1106923 - RNA, 22 nt, Human
acugauuucagggaugagaaga

SEQ ID NO: 1106924 - RNA, 22 nt, Human
auauaugaagaagucuugauua

SEQ ID NO: 1106925 - RNA, 22 nt, Human
uuuggcaagcgaguacuuucug

SEQ ID NO: 1106926 - RNA, 22 nt, Human
acauagcuuaaaugagaagaua

SEQ ID NO: 1106927 - RNA, 22 nt, Human
cucagugaauuggaggauggcc

SEQ ID NO: 1106928 - RNA, 22 nt, Human
augcuacauuuugguuuauaaa

SEQ ID NO: 1106929 - RNA, 22 nt, Human
agauaaaguccaaacuguguag

SEQ ID NO: 1106930 - RNA, 22 nt, Human
agucaguaugacuuauaguucu

SEQ ID NO: 1106931 - RNA, 22 nt, Human
gucuuuuuuacaccuuacauca

SEQ ID NO: 1106932 - RNA, 22 nt, Human
uaaagugaaguucagaauggcu

SEQ ID NO: 1106933 - RNA, 22 nt, Human
uuaaggaacuugucuuucucuu

SEQ ID NO: 1106934 - RNA, 22 nt, Human
auccauuuuuucagaaugcucu

SEQ ID NO: 1106935 - RNA, 22 nt, Human
uuuuucaagacaaccugcaugu

SEQ ID NO: 1106936 - RNA, 22 nt, Human
aauggcaaaguguuuucauacc

SEQ ID NO: 1106937 - RNA, 22 nt, Human
auauaccucauucuuugagugc

SEQ ID NO: 1106938 - RNA, 22 nt, Human
uuguauuaaaauguguuucugu

SEQ ID NO: 1106939 - RNA, 22 nt, Human
cucugccagccaaagucaucac

SEQ ID NO: 1106940 - RNA, 22 nt, Human
uuuccucacacagaagaucuug

SEQ ID NO: 1106941 - RNA, 22 nt, Human
aagcaauucacaguucacuuaa

SEQ ID NO: 1106942 - RNA, 22 nt, Human
ucagauggaaugaugccacugc

SEQ ID NO: 1106943 - RNA, 22 nt, Human
aucauccauggcugaucauaaa

SEQ ID NO: 1106944 - RNA, 22 nt, Human
aauugguuugaauaaauaaaga

SEQ ID NO: 1106945 - RNA, 22 nt, Human
auuccucagcaggccuuuuguu

SEQ ID NO: 1106946 - RNA, 22 nt, Human
uauuucagcucuuuggauuauc

SEQ ID NO: 1106947 - RNA, 22 nt, Human
uguuugcucugacuaucuugcg

SEQ ID NO: 1106948 - RNA, 22 nt, Human
uuucacauacaguguauaguag

SEQ ID NO: 1106949 - RNA, 22 nt, Human
uauaugcagauuuucaucaucg

SEQ ID NO: 1106950 - RNA, 22 nt, Human
uuacuaguggagaaacugaggc

SEQ ID NO: 1106951 - RNA, 19 nt, Human
acaguuugggaaaugagca

SEQ ID NO: 1106952 - RNA, 22 nt, Human
gauggaggagauggcagggugc

SEQ ID NO: 1106953 - RNA, 22 nt, Human
uuacaguuuacauaagaauugu

SEQ ID NO: 1106954 - RNA, 22 nt, Human
gagguauaguucuauuagauga

SEQ ID NO: 1106955 - RNA, 22 nt, Human
uaucugucgggagucuuccgga

SEQ ID NO: 1106956 - RNA, 22 nt, Human
auuauguagcuaaaaauugugu

SEQ ID NO: 1106957 - RNA, 22 nt, Human
aaacucuacauggucgcaaaaa

SEQ ID NO: 1106958 - RNA, 22 nt, Human
agagacuguaaugagagguaca

SEQ ID NO: 1106959 - RNA, 22 nt, Human
gccaggaugacuauacaacagc

SEQ ID NO: 1106960 - RNA, 22 nt, Human
uuucucagccuccuugcuggag

SEQ ID NO: 1106961 - RNA, 22 nt, Human
guucucucagcgauagugaugg

SEQ ID NO: 1106962 - RNA, 22 nt, Human
guuuccaagucucucaacaccc

SEQ ID NO: 1106963 - RNA, 23 nt, Human
cuguuauauggguguuaugugcu

SEQ ID NO: 1106964 - RNA, 22 nt, Human
auuuccagcagcauauuugucu

SEQ ID NO: 1106965 - RNA, 22 nt, Human
aguuauguccucagcaaaucaa

SEQ ID NO: 1106966 - RNA, 22 nt, Human
gcagcucacagucuccgccauc

SEQ ID NO: 1106967 - RNA, 22 nt, Human
ucuuugcauggacauguguuuu

SEQ ID NO: 1106968 - RNA, 22 nt, Human
auguucaaguaccuuugugucu

SEQ ID NO: 1106969 - RNA, 22 nt, Human
auguacauuauucgagugaugg

SEQ ID NO: 1106970 - RNA, 22 nt, Human
caaauacaaauacgggcagcuu

SEQ ID NO: 1106971 - RNA, 22 nt, Human
gaauguuaaugcacuucuagcu

SEQ ID NO: 1106972 - RNA, 22 nt, Human
auuauugcaagcagugaaggga

SEQ ID NO: 1106973 - RNA, 22 nt, Human
gggcuuuaggggccagugacca

SEQ ID NO: 1106974 - RNA, 22 nt, Human
auggaguugagcucuguugucc

SEQ ID NO: 1106975 - RNA, 20 nt, Human
cucuuuucacucucaguggu

SEQ ID NO: 1106976 - RNA, 22 nt, Human
cuauacagcagcuuacuaguua

SEQ ID NO: 1106977 - RNA, 22 nt, Human
aucauugaguaaaaugaauaca

SEQ ID NO: 1106978 - RNA, 22 nt, Human
uuguacaaauaggaaccucuga

SEQ ID NO: 1106979 - RNA, 22 nt, Human
ucacuguuaauaaauagcaaag

SEQ ID NO: 1106980 - RNA, 22 nt, Human
agcuaguauuucauugaggauu

SEQ ID NO: 1106981 - RNA, 22 nt, Human
guggcauuuuagaacagcugac

SEQ ID NO: 1106982 - RNA, 22 nt, Human
uccagagaacgaugaaagcugg

SEQ ID NO: 1106983 - RNA, 22 nt, Human
uuucuacauuuguaaccagauu

SEQ ID NO: 1106984 - RNA, 22 nt, Human
acaugacagugacuuuauaaga

SEQ ID NO: 1106985 - RNA, 22 nt, Human
aggucuacaugcuuaauauauc

SEQ ID NO: 1106986 - RNA, 22 nt, Human
uugcaucagcaggcauaauugg

SEQ ID NO: 1106987 - RNA, 22 nt, Human
ugguaaaugucuaacaaucacu

SEQ ID NO: 1106988 - RNA, 22 nt, Human
auucagaaauagaaaauuugau

SEQ ID NO: 1106989 - RNA, 22 nt, Human
ugcccguucauucauacuuaac

SEQ ID NO: 1106990 - RNA, 22 nt, Human
ugcugcuuguuuuguaaauaaa

SEQ ID NO: 1106991 - RNA, 22 nt, Human
ugcaagagcccaaacuauauac

SEQ ID NO: 1106992 - RNA, 22 nt, Human
cucaggucuuaguucugucauc

SEQ ID NO: 1106993 - RNA, 22 nt, Human
ugagaauacugcauuguuagga

SEQ ID NO: 1106994 - RNA, 22 nt, Human
uaaucuuagacauguauuuuuc

SEQ ID NO: 1106995 - RNA, 22 nt, Human
ugcaauuagcguauuaguuuau

SEQ ID NO: 1106996 - RNA, 22 nt, Human
aaucuguugucaggaauccaca

SEQ ID NO: 1106997 - RNA, 22 nt, Human
uucgcuuugcccguugucauuu

SEQ ID NO: 1106998 - RNA, 22 nt, Human
uuguaagacuguagaaugcaaa

SEQ ID NO: 1106999 - RNA, 22 nt, Human
augaaaacagccuccugugaua

SEQ ID NO: 1107000 - RNA, 22 nt, Human
ugaaaugccuaugaagucagga

SEQ ID NO: 1107001 - RNA, 22 nt, Human
caucuuuguuuuggauauaauc

SEQ ID NO: 1107002 - RNA, 20 nt, Human
cuuguuaaauaugcagguag

SEQ ID NO: 1107003 - RNA, 22 nt, Human
gcuuuggaaauauagacucaag

SEQ ID NO: 1107004 - RNA, 22 nt, Human
aaugaaacuaguagaaucuuug

SEQ ID NO: 1107005 - RNA, 22 nt, Human
cacucucacaugcccugucagu

SEQ ID NO: 1107006 - RNA, 22 nt, Human
ucuuuugagggccagaggaaga

SEQ ID NO: 1107007 - RNA, 22 nt, Human
acucuguuugcagguagcucag

SEQ ID NO: 1107008 - RNA, 21 nt, Human
uugauuuagcagaucuagcug

SEQ ID NO: 1107009 - RNA, 22 nt, Human
uuagacaucaagaagccaaugu

SEQ ID NO: 1107010 - RNA, 22 nt, Human
gucguucucugccagggcguug

SEQ ID NO: 1107011 - RNA, 22 nt, Human
cagaaagugauuugcuauucca

SEQ ID NO: 1107012 - RNA, 22 nt, Human
uguucauaucauuuugaaagcu

SEQ ID NO: 1107013 - RNA, 21 nt, Human
guucaauagcucuuugaaugc

SEQ ID NO: 1107014 - RNA, 22 nt, Human
acaguaaucugggaacuuguua

SEQ ID NO: 1107015 - RNA, 22 nt, Human
aauguuaaguuuagauuauaac

SEQ ID NO: 1107016 - RNA, 22 nt, Human
gaaacauuuguugaguacuugc

SEQ ID NO: 1107017 - RNA, 22 nt, Human
aagauuuaccacuuuauucaag

SEQ ID NO: 1107018 - RNA, 22 nt, Human
cagaggauauaugguuuguaug

SEQ ID NO: 1107019 - RNA, 22 nt, Human
uauuacaguucgaguuucuagg

SEQ ID NO: 1107020 - RNA, 22 nt, Human
caagacuucaccgcucugugcu

SEQ ID NO: 1107021 - RNA, 22 nt, Human
aauggcuguucucugugauugg

SEQ ID NO: 1107022 - RNA, 22 nt, Human
uaaaguuggaccugauuuuauu

SEQ ID NO: 1107023 - RNA, 22 nt, Human
cugcuuuaaaacugauacauga

SEQ ID NO: 1107024 - RNA, 22 nt, Human
ucuaaacuuguaaacaagcaua

SEQ ID NO: 1107025 - RNA, 18 nt, Human
cuacauucauaggaaagg

SEQ ID NO: 1107026 - RNA, 22 nt, Human
uuugacaacugugcaguuugua

SEQ ID NO: 1107027 - RNA, 22 nt, Human
gauacuuuguggaauccuggau

SEQ ID NO: 1107028 - RNA, 22 nt, Human
uuuguaguuguggaugcugaag

SEQ ID NO: 1107029 - RNA, 22 nt, Human
aaauuaacuaucacuuuuguga

SEQ ID NO: 1107030 - RNA, 22 nt, Human
uuacaguuaaugugacuaacca

SEQ ID NO: 1107031 - RNA, 22 nt, Human
uggauaaaaugacauuaccuga

SEQ ID NO: 1107032 - RNA, 22 nt, Human
aacuuucugaaaagcuugauca

SEQ ID NO: 1107033 - RNA, 22 nt, Human
ugcaaaaagagcgaggagcccu

SEQ ID NO: 1107034 - RNA, 22 nt, Human
acaacuuuaauggguuucagcu

SEQ ID NO: 1107035 - RNA, 22 nt, Human
uauccaaaggaacaaucacagc

SEQ ID NO: 1107036 - RNA, 22 nt, Human
caagauauguccuguuacuaag

SEQ ID NO: 1107037 - RNA, 22 nt, Human
gagagaagggggauaugagccu

SEQ ID NO: 1107038 - RNA, 21 nt, Human
cuuuggcaagggagaagucac

SEQ ID NO: 1107039 - RNA, 22 nt, Human
ucuuucagaaacuuugucugcg

SEQ ID NO: 1107040 - RNA, 22 nt, Human
cauagacauugauagguuauau

SEQ ID NO: 1107041 - RNA, 21 nt, Human
acucugaaaauuaauaguuau

SEQ ID NO: 1107042 - RNA, 22 nt, Human
aucauccuagaaggaagcuagg

SEQ ID NO: 1107043 - RNA, 22 nt, Human
gaaugcuggcuuacaggcaguu

SEQ ID NO: 1107044 - RNA, 22 nt, Human
gguuauuguggagaaguuccgg

SEQ ID NO: 1107045 - RNA, 22 nt, Human
uucucuucacagggaucauccu

SEQ ID NO: 1107046 - RNA, 22 nt, Human
auucugcugccuaguuuaugaa

SEQ ID NO: 1107047 - RNA, 22 nt, Human
augugaaagagguguucagugg

SEQ ID NO: 1107048 - RNA, 22 nt, Human
uaagaaacauuuuuaugacagu

SEQ ID NO: 1107049 - RNA, 22 nt, Human
auauguggcauuauuucugagg

SEQ ID NO: 1107050 - RNA, 17 nt, Human
uagauuaaacacggcca

SEQ ID NO: 1107051 - RNA, 22 nt, Human
ugggaagauaugagugaccaac

SEQ ID NO: 1107052 - RNA, 22 nt, Vaccinia virus
acaucgauucccauaugauguu

SEQ ID NO: 1107053 - RNA, 22 nt, Vaccinia virus
gaaaguguaaagacaacgaaua

SEQ ID NO: 1107054 - RNA, 22 nt, Vaccinia virus
uguccgggaacauacgcuucca

SEQ ID NO: 1107055 - RNA, 22 nt, Vaccinia virus
gcuuugaguuuuguugaaucga

SEQ ID NO: 1107056 - RNA, 20 nt, Vaccinia virus
ucgguugcaccuucagaugc

SEQ ID NO: 1107057 - RNA, 22 nt, Human
acacaucagaaauaugaaugag

SEQ ID NO: 1107058 - RNA, 22 nt, Human
uauucacaaaaugagguccuca

SEQ ID NO: 1107059 - RNA, 22 nt, Human
uggaucuugaugcuccaagagu

SEQ ID NO: 1107060 - RNA, 22 nt, Human
uucaguaagcacuucuagagcu

SEQ ID NO: 1107061 - RNA, 22 nt, Human
cagaaccaggaacugauggaga

SEQ ID NO: 1107062 - RNA, 20 nt, Human
uuucacaaugaacaugucuc

SEQ ID NO: 1107063 - RNA, 22 nt, Human
caguuuuaugaaugcuuauuag

SEQ ID NO: 1107064 - RNA, 22 nt, Human
aucuucaaagcacaucguuugu

SEQ ID NO: 1107065 - RNA, 22 nt, Human
augcauaucuccuaucuccuca

SEQ ID NO: 1107066 - RNA, 22 nt, Human
ugcaaaaagagcgaggagcccu

SEQ ID NO: 1107067 - RNA, 22 nt, Human
ggucagugccuaucaugugggc

SEQ ID NO: 1107068 - RNA, 17 nt, Human
ucugagaaugcuggagg

SEQ ID NO: 1107069 - RNA, 22 nt, Human
augaaaacagccuccugugaua

SEQ ID NO: 1107070 - RNA, 22 nt, Human
uucuuuuaauuucugucugcag

SEQ ID NO: 1107071 - RNA, 22 nt, Human
auucugcugccuaguuuaugaa

SEQ ID NO: 1107072 - RNA, 22 nt, Human
cauuguuggcagagggacagag

SEQ ID NO: 1107073 - RNA, 22 nt, Human
uguguacauguaucaacuaucg

SEQ ID NO: 1107074 - RNA, 22 nt, Human
guuuuguucaugaacauugggu

SEQ ID NO: 1107075 - RNA, 22 nt, Human
uucacauaaucugcagcaagcg

SEQ ID NO: 1107076 - RNA, 22 nt, Human
auuguauacaagcuuaauuguu

SEQ ID NO: 1107077 - RNA, 18 nt, Human
ucugaaggaaugauucca

SEQ ID NO: 1107078 - RNA, 19 nt, Human
auagaguagaguaucuguu

SEQ ID NO: 1107079 - RNA, 22 nt, Human
ccagagagggcgccaccuggag

SEQ ID NO: 1107080 - RNA, 22 nt, Human
aacacaguuucugcauugguag

SEQ ID NO: 1107081 - RNA, 22 nt, Human
aacuagaaagaacauauuucca

SEQ ID NO: 1107082 - RNA, 22 nt, Human
cauagacauugauagguuauau

SEQ ID NO: 1107083 - RNA, 22 nt, Human
cugguggaauggcagagggaac

SEQ ID NO: 1107084 - RNA, 22 nt, Human
cuuuggaaaaauaccuggcaua

SEQ ID NO: 1107085 - RNA, 22 nt, Human
gugauuucagguuuuucauacu

SEQ ID NO: 1107086 - RNA, 22 nt, Human
ggauguggaccuugccugguga

SEQ ID NO: 1107087 - RNA, 22 nt, Human
aucauugaguaaaaugaauaca

SEQ ID NO: 1107088 - RNA, 21 nt, Human
ucacuagugccuucugucauu

SEQ ID NO: 1107089 - RNA, 23 nt, Human
agguggagcugugcagccggggc

SEQ ID NO: 1107090 - RNA, 22 nt, Human
ugcccguucauucauacuuaac

SEQ ID NO: 1107091 - RNA, 22 nt, Human
uucagucuuguugaaaacuugg

SEQ ID NO: 1107092 - RNA, 19 nt, Human
auucuucucuuccugcugu

SEQ ID NO: 1107093 - RNA, 22 nt, Human
acauuguugagccucuuguuca

SEQ ID NO: 1107094 - RNA, 22 nt, Human
uagauaccugcuggaccucauu

SEQ ID NO: 1107095 - RNA, 20 nt, Human
acagaugaggaugcggaggc

SEQ ID NO: 1107096 - RNA, 22 nt, Human
gauacuuuguggaauccuggau

SEQ ID NO: 1107097 - RNA, 22 nt, Human
aucauuaacccuugaugcuggg

SEQ ID NO: 1107098 - RNA, 22 nt, Human
aaugauguuuuuaaagaacaua

SEQ ID NO: 1107099 - RNA, 22 nt, Human
gauuuucauuauagcuaguuuc

SEQ ID NO: 1107100 - RNA, 21 nt, Human
ugcauauauaagugcauacac

SEQ ID NO: 1107101 - RNA, 22 nt, Human
uaucuguuuuuacagugucuuu

SEQ ID NO: 1107102 - RNA, 21 nt, Human
cuuuucuagucccagccccgc

SEQ ID NO: 1107103 - RNA, 22 nt, Human
cuucuuaaaguugucacagcug

SEQ ID NO: 1107104 - RNA, 22 nt, Human
cacaauuuccauugagcagcag

SEQ ID NO: 1107105 - RNA, 22 nt, Human
uuucucggcagagaugaugggc

SEQ ID NO: 1107106 - RNA, 22 nt, Human
uuauuuuguagcucugaucuuu

SEQ ID NO: 1107107 - RNA, 22 nt, Human
acucauguccuaggaguaaagc

SEQ ID NO: 1107108 - RNA, 22 nt, Human
cuuuauguuggggugucuuagu

SEQ ID NO: 1107109 - RNA, 22 nt, Human
acuggauucucuuacacagaug

SEQ ID NO: 1107110 - RNA, 22 nt, Human
agagcuauuucuuaaaagcugu

SEQ ID NO: 1107111 - RNA, 22 nt, Human
acauauuuugaaagcuuucuaa

SEQ ID NO: 1107112 - RNA, 22 nt, Human
guaauagucucaaacuccugga

SEQ ID NO: 1107113 - RNA, 22 nt, Human
auuacugaggcaaaguaguuuu

SEQ ID NO: 1107114 - RNA, 22 nt, Human
uagaagaugccuuaaaguugaa

SEQ ID NO: 1107115 - RNA, 20 nt, Human
uauuucugggcaaccauuua

SEQ ID NO: 1107116 - RNA, 22 nt, Human
uagcaggagagaaguuuuaagu

SEQ ID NO: 1107117 - RNA, 22 nt, Human
uuaugcaaaggggccucuuccu

SEQ ID NO: 1107118 - RNA, 22 nt, Human
gugacagaaacagggcuagaau

SEQ ID NO: 1107119 - RNA, 22 nt, Human
uauacuacgcaccaaacaaagg

SEQ ID NO: 1107120 - RNA, 22 nt, Human
uuugccaguauuuuauugauga

SEQ ID NO: 1107121 - RNA, 22 nt, Human
ugagaauacugcauuguuagga

SEQ ID NO: 1107122 - RNA, 23 nt, Human
uuaagacuggcugaacuuaguag

SEQ ID NO: 1107123 - RNA, 22 nt, Human
uaaguauguuagaaaaucaagu

SEQ ID NO: 1107124 - RNA, 22 nt, Human
uugcaucagcaggcauaauugg

SEQ ID NO: 1107125 - RNA, 18 nt, Human
cuacauucauaggaaagg

SEQ ID NO: 1107126 - RNA, 22 nt, Human
uaugccuaccuccaaaauauau

SEQ ID NO: 1107127 - RNA, 22 nt, Human
uacauguacaugcauagguaga

SEQ ID NO: 1107128 - RNA, 23 nt, Human
uagauccuuccaacuacucuuac

SEQ ID NO: 1107129 - RNA, 22 nt, Human
guguuucccuggcacaagaacc

SEQ ID NO: 1107130 - RNA, 22 nt, Human
uucuuuuaauagagauccugug

SEQ ID NO: 1107131 - RNA, 22 nt, Human
auuuccagcagcauauuugucu

SEQ ID NO: 1107132 - RNA, 22 nt, Human
cuugaugaaugaccuggguggu

SEQ ID NO: 1107133 - RNA, 22 nt, Human
acauuuguuucucuagaguagg

SEQ ID NO: 1107134 - RNA, 22 nt, Human
uauuuggugaaucuauggucag

SEQ ID NO: 1107135 - RNA, 22 nt, Human
uucaacaacuugguucaaaugg

SEQ ID NO: 1107136 - RNA, 22 nt, Human
guggaaauuuuaggaucaucuu

SEQ ID NO: 1107137 - RNA, 22 nt, Human
agcuuucuauauaugaguugcu

SEQ ID NO: 1107138 - RNA, 21 nt, Human
acaaauuguuuauauaggaag

SEQ ID NO: 1107139 - RNA, 22 nt, Human
auucauucugaccucaagagaa

SEQ ID NO: 1107140 - RNA, 22 nt, Human
uagugucucuuccuguuugaaa

SEQ ID NO: 1107141 - RNA, 22 nt, Human
cauuuugugcuagacacuaugg

SEQ ID NO: 1107142 - RNA, 22 nt, Human
uuuuccuucugauacuccauuu

SEQ ID NO: 1107143 - RNA, 21 nt, Human
gcucuguguuacaaguugggg

SEQ ID NO: 1107144 - RNA, 22 nt, Human
acugguuuuggaaaucaguaca

SEQ ID NO: 1107145 - RNA, 22 nt, Human
acauucuacaguuaaccauuag

SEQ ID NO: 1107146 - RNA, 22 nt, Human
agaacauaucuguuuucuaacu

SEQ ID NO: 1107147 - RNA, 22 nt, Human
uuuaauuuucugggcccagcag

SEQ ID NO: 1107148 - RNA, 22 nt, Human
aagagagaacucccuucgccag

SEQ ID NO: 1107149 - RNA, 22 nt, Human
ccaggacacgauuuuuagucug

SEQ ID NO: 1107150 - RNA, 22 nt, Human
uguucuuagguauuugacaguc

SEQ ID NO: 1107151 - RNA, 22 nt, Human
aagucauugguagcuugauagg

SEQ ID NO: 1107152 - RNA, 22 nt, Human
ugacauuugagagagauauaca

SEQ ID NO: 1107153 - RNA, 22 nt, Human
uuccaaggcugcuauuuguuuc

SEQ ID NO: 1107154 - RNA, 22 nt, Human
uguuugcucugacuaucuugcg

SEQ ID NO: 1107155 - RNA, 22 nt, Human
ugcacccacuuagcugaaguuc

SEQ ID NO: 1107156 - RNA, 22 nt, Human
aguucaauuguuuuguaaaagu

SEQ ID NO: 1107157 - RNA, 22 nt, Human
uaaaguauaagcauuggaguau

SEQ ID NO: 1107158 - RNA, 22 nt, Human
ucuccucuauuucuguauguau

SEQ ID NO: 1107159 - RNA, 22 nt, Human
gcuuuggaaauauagacucaag

SEQ ID NO: 1107160 - RNA, 22 nt, Human
auauacacuguuucaguugaag

SEQ ID NO: 1107161 - RNA, 22 nt, Human
ccagagaggccuuggcaagaca

SEQ ID NO: 1107162 - RNA, 22 nt, Human
uaaaacuagugguugggacuaa

SEQ ID NO: 1107163 - RNA, 22 nt, Human
uuccagaacaauguggacguau

SEQ ID NO: 1107164 - RNA, 22 nt, Human
auuagguaguauaaucuuuguu

SEQ ID NO: 1107165 - RNA, 22 nt, Human
guuucgucaggcuuauucuauc

SEQ ID NO: 1107166 - RNA, 23 nt, Human
aaauugucguaagguggagaugu

SEQ ID NO: 1107167 - RNA, 22 nt, Human
ucguuauagaacauucuugggu

SEQ ID NO: 1107168 - RNA, 22 nt, Human
ucacaacugggugucuucauca

SEQ ID NO: 1107169 - RNA, 22 nt, Human
acagaauugggguucuugggga

SEQ ID NO: 1107170 - RNA, 22 nt, Human
gagagaagggggauaugagccu

SEQ ID NO: 1107171 - RNA, 23 nt, Human
aaacuacauuuauaguuuuucuc

SEQ ID NO: 1107172 - RNA, 22 nt, Human
aagaauaagaggauuuagaaca

SEQ ID NO: 1107173 - RNA, 22 nt, Human
uuuauacuccacucugcaagcg

SEQ ID NO: 1107174 - RNA, 22 nt, Human
cagaaacacuguauuuagggaa

SEQ ID NO: 1107175 - RNA, 22 nt, Human
ucugagaaugguggauguggug

SEQ ID NO: 1107176 - RNA, 22 nt, Human
augaacaguacaaagcacagac

SEQ ID NO: 1107177 - RNA, 22 nt, Human
augaaaacggaccagagcuauu

SEQ ID NO: 1107178 - RNA, 22 nt, Human
uccaugacagcgugagaguuug

SEQ ID NO: 1107179 - RNA, 22 nt, Human
uacuacauacagaauuuagaga

SEQ ID NO: 1107180 - RNA, 22 nt, Human
uuucauuauaaaaaguuggcuu

SEQ ID NO: 1107181 - RNA, 22 nt, Human
uuuaauuauaucugggcaguua

SEQ ID NO: 1107182 - RNA, 22 nt, Human
uaauucuagauugacauuuuga

SEQ ID NO: 1107183 - RNA, 22 nt, Human
uuuaggaagaguugaguaaauu

SEQ ID NO: 1107184 - RNA, 22 nt, Human
ugugucuuuggcgaugucugga

SEQ ID NO: 1107185 - RNA, 22 nt, Human
uuccaauaaaauguuauuugca

SEQ ID NO: 1107186 - RNA, 21 nt, Human
uaccaagaaguuugggaaagc

SEQ ID NO: 1107187 - RNA, 22 nt, Human
cgaguaauuggaaauuugcuau

SEQ ID NO: 1107188 - RNA, 22 nt, Human
aguuggaagacacccugaaauc

SEQ ID NO: 1107189 - RNA, 22 nt, Human
uuugagaagcauggcuguauuc

SEQ ID NO: 1107190 - RNA, 22 nt, Human
aaauucuguccugaaugccauu

SEQ ID NO: 1107191 - RNA, 22 nt, Human
aaaguaauugugguucuugcca

SEQ ID NO: 1107192 - RNA, 22 nt, Human
uucagcacuggacagcgagucu

SEQ ID NO: 1107193 - RNA, 22 nt, Human
agauaucuuacacuuugaaguu

SEQ ID NO: 1107194 - RNA, 22 nt, Human
aauaguguauuuuucaaaauua

SEQ ID NO: 1107195 - RNA, 19 nt, Human
guuggcacugaaaauggcu

SEQ ID NO: 1107196 - RNA, 18 nt, Human
uuugggauccucuuuucu

SEQ ID NO: 1107197 - RNA, 22 nt, Human
ucuacugagugcugagauuuug

SEQ ID NO: 1107198 - RNA, 22 nt, Human
aaugcugugauuuauuaaguau

SEQ ID NO: 1107199 - RNA, 22 nt, Human
agggagcugcucugcuuccgug

SEQ ID NO: 1107200 - RNA, 22 nt, Human
gcuuucuuuucaagaauguauu

SEQ ID NO: 1107201 - RNA, 22 nt, Human
ccuuugugaauaugcagaaaau

SEQ ID NO: 1107202 - RNA, 22 nt, Human
ggggaagaaauagaacauuuug

SEQ ID NO: 1107203 - RNA, 22 nt, Human
acuuuucuuaucagaaaggcca

SEQ ID NO: 1107204 - RNA, 22 nt, Human
ugauaguaucugauuauuucac

SEQ ID NO: 1107205 - RNA, 22 nt, Human
uagaucuuucacuacuguguag

SEQ ID NO: 1107206 - RNA, 22 nt, Human
gauguaucugagcugcuuaggu

SEQ ID NO: 1107207 - RNA, 22 nt, Human
uuguauuaaaauguguuucugu

SEQ ID NO: 1107208 - RNA, 22 nt, Human
augcaauaguaauucuagucug

SEQ ID NO: 1107209 - RNA, 22 nt, Human
ugugguuuugguucagaaacaa

SEQ ID NO: 1107210 - RNA, 19 nt, Human
ggauaagguuggagugauc

SEQ ID NO: 1107211 - RNA, 22 nt, Human
gauguauagcuuuaacugaccc

SEQ ID NO: 1107212 - RNA, 22 nt, Human
auauaguuggguuucauucuac

SEQ ID NO: 1107213 - RNA, 18 nt, Human
gacaaaaguacagacaga

SEQ ID NO: 1107214 - RNA, 22 nt, Human
caaagaugccaaaaggaagaca

SEQ ID NO: 1107215 - RNA, 22 nt, Human
uucaaacacugcuuugagaggg

SEQ ID NO: 1107216 - RNA, 22 nt, Human
cugaaggacacgugaggagcca

SEQ ID NO: 1107217 - RNA, 22 nt, Human
cagcaguacuucucagagguau

SEQ ID NO: 1107218 - RNA, 22 nt, Human
aaaauuaagugucugggaagcc

SEQ ID NO: 1107219 - RNA, 17 nt, Human
uaaguccuaguuauuuu

SEQ ID NO: 1107220 - RNA, 22 nt, Human
ucuaguuagugguugauacugu

SEQ ID NO: 1107221 - RNA, 22 nt, Human
guggcauuugggagaugcgugg

SEQ ID NO: 1107222 - RNA, 20 nt, Human
uuacagaaaugauguuauuu

SEQ ID NO: 1107223 - RNA, 18 nt, Human
ucuuccaacacugacacc

SEQ ID NO: 1107224 - RNA, 22 nt, Human
ucaguaaaugagcaaaaauuuc

SEQ ID NO: 1107225 - RNA, 22 nt, Human
uuauuuaaaauguagguuggga

SEQ ID NO: 1107226 - RNA, 22 nt, Human
cagacguuggaggaaauauacc

SEQ ID NO: 1107227 - RNA, 22 nt, Human
aucucuguaaaccauaaauuga

SEQ ID NO: 1107228 - RNA, 22 nt, Human
gagagagacauguaaacgcggu

SEQ ID NO: 1107229 - RNA, 22 nt, Human
ugucauauagaauguucuauga

SEQ ID NO: 1107230 - RNA, 22 nt, Human
aguaaaaucaccaucucuuugu

SEQ ID NO: 1107231 - RNA, 22 nt, Human
acauucaugcaccuuccuaucc

SEQ ID NO: 1107232 - RNA, 22 nt, Human
ucagaacauccugguuuaaaau

SEQ ID NO: 1107233 - RNA, 22 nt, Human
gguuauuguggagaaguuccgg

SEQ ID NO: 1107234 - RNA, 22 nt, Human
aagcauuuuagauaaagcauca

SEQ ID NO: 1107235 - RNA, 22 nt, Human
cauucauaggaggagaugauua

SEQ ID NO: 1107236 - RNA, 22 nt, Human
gucuugcacuuaccuaagaacu

SEQ ID NO: 1107237 - RNA, 22 nt, Human
uuaguuuccuguggugugaagu

SEQ ID NO: 1107238 - RNA, 22 nt, Human
aaccauggauuucaguucaccu

SEQ ID NO: 1107239 - RNA, 22 nt, Human
aagcaccuggguuauaucuuag

SEQ ID NO: 1107240 - RNA, 23 nt, Human
cuguuauauggguguuaugugcu

SEQ ID NO: 1107241 - RNA, 22 nt, Human
ucaaagaucagaugguuguagg

SEQ ID NO: 1107242 - RNA, 22 nt, Human
gauuugucuauauucaaauaug

SEQ ID NO: 1107243 - RNA, 22 nt, Human
acaauuucuaauauagaucuua

SEQ ID NO: 1107244 - RNA, 22 nt, Human
uucuacauugugaaguucuuua

SEQ ID NO: 1107245 - RNA, 22 nt, Human
uagauucugacccucuuuuuac

SEQ ID NO: 1107246 - RNA, 18 nt, Human
aaacauggcuuaaaggcu

SEQ ID NO: 1107247 - RNA, 22 nt, Human
ugauuuacaguagugucuaaac

SEQ ID NO: 1107248 - RNA, 18 nt, Human
agguauaugaaucucuuu

SEQ ID NO: 1107249 - RNA, 22 nt, Human
uauggcaagaugacauguucuc

SEQ ID NO: 1107250 - RNA, 22 nt, Human
ucuuugcagaauuuaacuuugc

SEQ ID NO: 1107251 - RNA, 22 nt, Human
uuguuuaaagaacuucugacuu

SEQ ID NO: 1107252 - RNA, 22 nt, Human
auggcuguguuguuccucugaa

SEQ ID NO: 1107253 - RNA, 22 nt, Human
agugucugcgggcagaggagcg

SEQ ID NO: 1107254 - RNA, 22 nt, Human
ugguggcacugacaucagacac

SEQ ID NO: 1107255 - RNA, 22 nt, Human
aauaucuagccuuuagcagcuu

SEQ ID NO: 1107256 - RNA, 22 nt, Human
aagucaauuaguaaacuuggaa

SEQ ID NO: 1107257 - RNA, 22 nt, Human
uuggaaagggauaucuguacuu

SEQ ID NO: 1107258 - RNA, 22 nt, Human
gugauugugaaaacauuaagaa

SEQ ID NO: 1107259 - RNA, 22 nt, Human
caaagaagagauuuacagagcu

SEQ ID NO: 1107260 - RNA, 22 nt, Human
uucagaaagugaaucuuguuau

SEQ ID NO: 1107261 - RNA, 22 nt, Human
agaauguaagaaugcaaagauu

SEQ ID NO: 1107262 - RNA, 22 nt, Human
aaacaucuucucuugauucuuu

SEQ ID NO: 1107263 - RNA, 22 nt, Human
uaaugccuuucuguacuauaug

SEQ ID NO: 1107264 - RNA, 22 nt, Human
uuucuaguggguauucccuguu

SEQ ID NO: 1107265 - RNA, 22 nt, Human
auauaccucauucuuugagugc

SEQ ID NO: 1107266 - RNA, 22 nt, Human
cagcuauuguucuguauaauga

SEQ ID NO: 1107267 - RNA, 22 nt, Human
cauuuagaagucuuagaacuau

SEQ ID NO: 1107268 - RNA, 22 nt, Human
ucucauuuacuuccacaggcug

SEQ ID NO: 1107269 - RNA, 22 nt, Human
uauucauguguuggaaaggaac

SEQ ID NO: 1107270 - RNA, 22 nt, Human
aucauuuaguggggcauuggaa

SEQ ID NO: 1107271 - RNA, 22 nt, Human
ucuaauuuuggcauuuuaaccu

SEQ ID NO: 1107272 - RNA, 21 nt, Human
aucuuaaaaggucuuaacuuu

SEQ ID NO: 1107273 - RNA, 22 nt, Human
aaagaugucauacacauuaaga

SEQ ID NO: 1107274 - RNA, 22 nt, Human
cgggcagugcccagcggggcag

SEQ ID NO: 1107275 - RNA, 22 nt, Human
uuguacaaauaggaaccucuga

SEQ ID NO: 1107276 - RNA, 22 nt, Human
gaauguuauugaacuacgagcu

SEQ ID NO: 1107277 - RNA, 23 nt, Human
cguuuuuuccucagauguucugg

SEQ ID NO: 1107278 - RNA, 22 nt, Human
cuucucaaaguugugaaucagg

SEQ ID NO: 1107279 - RNA, 22 nt, Human
aaggaucauguauauguuuaag

SEQ ID NO: 1107280 - RNA, 20 nt, Human
ucauaugugguuguauacaa

SEQ ID NO: 1107281 - RNA, 22 nt, Human
aagcaacuaaggcaaggaaaug

SEQ ID NO: 1107282 - RNA, 20 nt, Human
ugugguuuuugccaguugaa

SEQ ID NO: 1107283 - RNA, 22 nt, Human
uaagaaacauuuuuaugacagu

SEQ ID NO: 1107284 - RNA, 22 nt, Human
gaaguauuucugaguugcccag

SEQ ID NO: 1107285 - RNA, 22 nt, Human
auucuugauauagauaguuaau

SEQ ID NO: 1107286 - RNA, 22 nt, Human
auuuacucgugcuucauugaau

SEQ ID NO: 1107287 - RNA, 22 nt, Human
uacaucucaucugugcucuccg

SEQ ID NO: 1107288 - RNA, 22 nt, Human
uagcauuuagaacaccuugaga

SEQ ID NO: 1107289 - RNA, 22 nt, Human
uuguaagacuguagaaugcaaa

SEQ ID NO: 1107290 - RNA, 22 nt, Human
uuuccagucucugccuccaagg

SEQ ID NO: 1107291 - RNA, 22 nt, Human
caaucaaugcugcuaguuccuu

SEQ ID NO: 1107292 - RNA, 19 nt, Human
acaguuugggaaaugagca

SEQ ID NO: 1107293 - RNA, 22 nt, Human
uccaagaagcuuacaaucuaau

SEQ ID NO: 1107294 - RNA, 22 nt, Human
auguaugagagauucuuuuauu

SEQ ID NO: 1107295 - RNA, 22 nt, Human
agaguuuacagaaauaagcugu

SEQ ID NO: 1107296 - RNA, 22 nt, Human
uaacuucucugagccucauucc

SEQ ID NO: 1107297 - RNA, 22 nt, Human
uucugauuguuggaggaugcuu

SEQ ID NO: 1107298 - RNA, 22 nt, Human
uuucugugauaggcugcgacgc

SEQ ID NO: 1107299 - RNA, 22 nt, Human
aauacagauggcaugugaagau

SEQ ID NO: 1107300 - RNA, 22 nt, Human
cauaacuugguguuggaaacug

SEQ ID NO: 1107301 - RNA, 22 nt, Human
uugagacacaaggcacaguaag

SEQ ID NO: 1107302 - RNA, 22 nt, Human
uaaaguuggaccugauuuuauu

SEQ ID NO: 1107303 - RNA, 22 nt, Human
aaugagauggaggacucuuaau

SEQ ID NO: 1107304 - RNA, 22 nt, Human
aaggauuuuuggaaugagaugg

SEQ ID NO: 1107305 - RNA, 22 nt, Human
uggcuacauuuauacucucauu

SEQ ID NO: 1107306 - RNA, 22 nt, Human
gaagcgugcagguccguauacu

SEQ ID NO: 1107307 - RNA, 22 nt, Human
caaaugaugcauggcuagugag

SEQ ID NO: 1107308 - RNA, 22 nt, Human
guauuucuuuacauaugcucau

SEQ ID NO: 1107309 - RNA, 22 nt, Human
auguuugaaauuguaaguauau

SEQ ID NO: 1107310 - RNA, 22 nt, Human
uuugaauauacuucaaacaaag

SEQ ID NO: 1107311 - RNA, 22 nt, Human
ugagaugaagugauguaaaaca

SEQ ID NO: 1107312 - RNA, 22 nt, Human
aggaaauuuugaaucagugucu

SEQ ID NO: 1107313 - RNA, 22 nt, Human
aucucccaaauuagccucuuga

SEQ ID NO: 1107314 - RNA, 22 nt, Human
auugaacauuguucuaggaggc

SEQ ID NO: 1107315 - RNA, 22 nt, Human
ucaauuuauguggcuauucauu

SEQ ID NO: 1107316 - RNA, 22 nt, Human
auuuuagagaaacaaacguagg

SEQ ID NO: 1107317 - RNA, 22 nt, Human
uuauuugcccauguuuagcaga

SEQ ID NO: 1107318 - RNA, 22 nt, Human
acauagcuuaaaugagaagaua

SEQ ID NO: 1107319 - RNA, 22 nt, Human
uuuugaauaauucagaaacagc

SEQ ID NO: 1107320 - RNA, 22 nt, Human
ucaugauaauacaggccuucua

SEQ ID NO: 1107321 - RNA, 22 nt, Human
cacuuuuaacaggagaauuccc

SEQ ID NO: 1107322 - RNA, 22 nt, Human
aaaacuuucagggauacagaaa

SEQ ID NO: 1107323 - RNA, 23 nt, Human
acucguggaauucucugcgaucg

SEQ ID NO: 1107324 - RNA, 21 nt, Human
uuccuggaggcagaaacguga

SEQ ID NO: 1107325 - RNA, 18 nt, Human
ucagaggagauaccuaaa

SEQ ID NO: 1107326 - RNA, 22 nt, Human
gacuacaggugugugccaccau

SEQ ID NO: 1107327 - RNA, 22 nt, Human
gcagaagucagaccaucugaau

SEQ ID NO: 1107328 - RNA, 22 nt, Human
cugagauggaguuucgcucuuc

SEQ ID NO: 1107329 - RNA, 22 nt, Human
agaauccuggagaagcuguacc

SEQ ID NO: 1107330 - RNA, 22 nt, Human
cuacauuuacacaguuaggcuu

SEQ ID NO: 1107331 - RNA, 22 nt, Human
aaguuacaggagaaagagauca

SEQ ID NO: 1107332 - RNA, 22 nt, Human
accagagucaauuauuuugcca

SEQ ID NO: 1107333 - RNA, 22 nt, Human
uuuguguuguacuucugugcau

SEQ ID NO: 1107334 - RNA, 22 nt, Human
cauuuacauuuaagguuaauau

SEQ ID NO: 1107335 - RNA, 22 nt, Human
uaaaugaaaggguuuaauuuau

SEQ ID NO: 1107336 - RNA, 22 nt, Human
uuuccacacucacugcacucau

SEQ ID NO: 1107337 - RNA, 22 nt, Human
uacuuucuagcucuccccaguu

SEQ ID NO: 1107338 - RNA, 22 nt, Human
uuauugcuaugaugauguguag

SEQ ID NO: 1107339 - RNA, 22 nt, Human
auuguuacuggguuaauuugga

SEQ ID NO: 1107340 - RNA, 22 nt, Human
ucuaugaaccucugcaaugaca

SEQ ID NO: 1107341 - RNA, 22 nt, Human
ucuuuugagggccagaggaaga

SEQ ID NO: 1107342 - RNA, 22 nt, Human
ccuuuguucacuggagagugga

SEQ ID NO: 1107343 - RNA, 22 nt, Human
cuacuguaguuaaaguuuugua

SEQ ID NO: 1107344 - RNA, 22 nt, Human
uaucuuugguagcuuuccuaag

SEQ ID NO: 1107345 - RNA, 19 nt, Human
cuccacagggauugugauu

SEQ ID NO: 1107346 - RNA, 22 nt, Human
gucacaguggggucacagugug

SEQ ID NO: 1107347 - RNA, 22 nt, Human
agugaaaaccuaaucaugcagu

SEQ ID NO: 1107348 - RNA, 20 nt, Human
uacaauauucccacuuugcu

SEQ ID NO: 1107349 - RNA, 17 nt, Human
ucuggaugucauggaag

SEQ ID NO: 1107350 - RNA, 22 nt, Human
auacuaagcucauuacauuuug

SEQ ID NO: 1107351 - RNA, 22 nt, Human
uuuauccaccuuacccuguucc

SEQ ID NO: 1107352 - RNA, 22 nt, Human
uauaugcagauuuucaucaucg

SEQ ID NO: 1107353 - RNA, 22 nt, Human
augugaaagagguguucagugg

SEQ ID NO: 1107354 - RNA, 22 nt, Human
auuaaauuggacgcugggggaa

SEQ ID NO: 1107355 - RNA, 22 nt, Human
caugugguauugugagauccac

SEQ ID NO: 1107356 - RNA, 22 nt, Human
ucuuugcauggacauguguuuu

SEQ ID NO: 1107357 - RNA, 22 nt, Human
gcucuaugaaccugaaucucac

SEQ ID NO: 1107358 - RNA, 22 nt, Human
cagucucuugcuucauuaguug

SEQ ID NO: 1107359 - RNA, 22 nt, Human
gaaagagaaccugggccuagau

SEQ ID NO: 1107360 - RNA, 22 nt, Human
uaucacauacuucucauccagg

SEQ ID NO: 1107361 - RNA, 22 nt, Human
cuucaguucuaaaguagaaugu

SEQ ID NO: 1107362 - RNA, 20 nt, Human
aaaaacaguaaugcugaaga

SEQ ID NO: 1107363 - RNA, 22 nt, Human
aaugagaauguaagugaagaga

SEQ ID NO: 1107364 - RNA, 22 nt, Human
cauguguauuauucuuguggaa

SEQ ID NO: 1107365 - RNA, 22 nt, Human
gugagcugggugaaugguaggg

SEQ ID NO: 1107366 - RNA, 19 nt, Human
uaugacaaguacuaguucu

SEQ ID NO: 1107367 - RNA, 22 nt, Human
uguuaguauuggcaaauuuguu

SEQ ID NO: 1107368 - RNA, 22 nt, Human
gcuuuugagguccugcucagcc

SEQ ID NO: 1107369 - RNA, 18 nt, Human
aguaaauguuaaauauug

SEQ ID NO: 1107370 - RNA, 22 nt, Human
uuagaaaucaccucugaagauc

SEQ ID NO: 1107371 - RNA, 22 nt, Human
cuaguucugccauucaguguca

SEQ ID NO: 1107372 - RNA, 22 nt, Human
caguauuuaggauuaggagaga

SEQ ID NO: 1107373 - RNA, 22 nt, Human
ccaaaauauuagugcuuaagua

SEQ ID NO: 1107374 - RNA, 19 nt, Human
aaauccaagcucaggccuc

SEQ ID NO: 1107375 - RNA, 22 nt, Human
uucucugaguacguuucagugu

SEQ ID NO: 1107376 - RNA, 22 nt, Human
uuuacaaggcaguuauuuuccu

SEQ ID NO: 1107377 - RNA, 22 nt, Human
agccagugucgugugacaugag

SEQ ID NO: 1107378 - RNA, 22 nt, Human
uaggaaugcagaugcauaauaa

SEQ ID NO: 1107379 - RNA, 22 nt, Human
auguuuguguuucccauucagg

SEQ ID NO: 1107380 - RNA, 20 nt, Human
cuuguuaaauaugcagguag

SEQ ID NO: 1107381 - RNA, 22 nt, Human
gcauuuaaauuugaacuucaga

SEQ ID NO: 1107382 - RNA, 17 nt, Human
cauucuguaaucuuucu

SEQ ID NO: 1107383 - RNA, 22 nt, Human
ucugaauucuuagaauuaaagg

SEQ ID NO: 1107384 - RNA, 22 nt, Human
gagaacuugaacuuuuccucug

SEQ ID NO: 1107385 - RNA, 22 nt, Human
acaugacagugacuuuauaaga

SEQ ID NO: 1107386 - RNA, 22 nt, Human
caagauauguccuguuacuaag

SEQ ID NO: 1107387 - RNA, 22 nt, Human
uguacacauuaagcucuuuaga

SEQ ID NO: 1107388 - RNA, 22 nt, Human
cuaccugguacauagaaauguu

SEQ ID NO: 1107389 - RNA, 22 nt, Human
ucuuuuccuugaugguuaaaua

SEQ ID NO: 1107390 - RNA, 22 nt, Human
uauuuguuucuaguggcagcaa

SEQ ID NO: 1107391 - RNA, 22 nt, Human
cagaugaaguaggugacgagca

SEQ ID NO: 1107392 - RNA, 22 nt, Human
aguucugacucugaaucuggga

SEQ ID NO: 1107393 - RNA, 22 nt, Human
caaauguuugguggcauuuugu

SEQ ID NO: 1107394 - RNA, 22 nt, Human
accuuguuguagguacaaaaga

SEQ ID NO: 1107395 - RNA, 22 nt, Human
uaaaaguuagcuaggacaaagu

SEQ ID NO: 1107396 - RNA, 22 nt, Human
ugcauguuucuguauguuaaug

SEQ ID NO: 1107397 - RNA, 22 nt, Human
auuuacugagguaaauaaacug

SEQ ID NO: 1107398 - RNA, 22 nt, Human
cugaucuuaaguaacauuauuu

SEQ ID NO: 1107399 - RNA, 22 nt, Human
agaaucugcauuuuaacaagau

SEQ ID NO: 1107400 - RNA, 22 nt, Human
augguuuuguccucuuugguuc

SEQ ID NO: 1107401 - RNA, 22 nt, Human
auacaugacucacacauucugc

SEQ ID NO: 1107402 - RNA, 22 nt, Human
guucuucagauuccauuucagu

SEQ ID NO: 1107403 - RNA, 22 nt, Human
aagacacuuucuaaauagaagu

SEQ ID NO: 1107404 - RNA, 22 nt, Human
agaugacuaacauaguauugcu

SEQ ID NO: 1107405 - RNA, 22 nt, Human
uauuuggauagacagggagaug

SEQ ID NO: 1107406 - RNA, 22 nt, Human
uuucacauacaguguauaguag

SEQ ID NO: 1107407 - RNA, 22 nt, Human
cugcaucaguggauaugauggu

SEQ ID NO: 1107408 - RNA, 22 nt, Human
cugcaucacagcaggaggcaca

SEQ ID NO: 1107409 - RNA, 22 nt, Human
acguagcacugagagaugcagg

SEQ ID NO: 1107410 - RNA, 22 nt, Human
gaaaauaguucaucacaaugau

SEQ ID NO: 1107411 - RNA, 22 nt, Human
cuaguauuaagugugaguaaaa

SEQ ID NO: 1107412 - RNA, 22 nt, Human
auuaaugaaacuuugguuaagc

SEQ ID NO: 1107413 - RNA, 22 nt, Human
agugaauuagccuauuuguaaa

SEQ ID NO: 1107414 - RNA, 22 nt, Human
ucuuucagaaacuuugucugcg

SEQ ID NO: 1107415 - RNA, 22 nt, Human
gaauguuaaugcacuucuagcu

SEQ ID NO: 1107416 - RNA, 22 nt, Human
auccuucaaaaggaauagcagg

SEQ ID NO: 1107417 - RNA, 22 nt, Human
uauagcagcaugauuuauaguc

SEQ ID NO: 1107418 - RNA, 22 nt, Human
uacugaaagagugguggacucu

SEQ ID NO: 1107419 - RNA, 22 nt, Human
aaugaaacuauauuuagagagg

SEQ ID NO: 1107420 - RNA, 21 nt, Human
cuagaaagaauguugucgucu

SEQ ID NO: 1107421 - RNA, 22 nt, Human
augugauacuccuucuagugga

SEQ ID NO: 1107422 - RNA, 22 nt, Human
uuacuaguggagaaacugaggc

SEQ ID NO: 1107423 - RNA, 22 nt, Human
augauugaaaaugacauugcca

SEQ ID NO: 1107424 - RNA, 22 nt, Human
uucacguuguugaagaaaauac

SEQ ID NO: 1107425 - RNA, 22 nt, Human
uaaguauuggccuauagcuaga

SEQ ID NO: 1107426 - RNA, 22 nt, Human
cugcauaucaaauuacuccugg

SEQ ID NO: 1107427 - RNA, 22 nt, Human
acucauuugcaugaugugcuau

SEQ ID NO: 1107428 - RNA, 22 nt, Human
ucuguuauaaaucacacugcau

SEQ ID NO: 1107429 - RNA, 22 nt, Human
gccaggaugacuauacaacagc

SEQ ID NO: 1107430 - RNA, 22 nt, Human
cugucuacagaugaaauaagca

SEQ ID NO: 1107431 - RNA, 22 nt, Human
uuucuacacuucgugguguuuu

SEQ ID NO: 1107432 - RNA, 22 nt, Human
ugaauagagcugcaguggacau

SEQ ID NO: 1107433 - RNA, 22 nt, Human
auggauggaacucugcuguggu

SEQ ID NO: 1107434 - RNA, 22 nt, Human
uuaccugagcggauuuguugca

SEQ ID NO: 1107435 - RNA, 22 nt, Human
guuaacaacacugugagugcug

SEQ ID NO: 1107436 - RNA, 22 nt, Human
guuauucuauuaaugugauugu

SEQ ID NO: 1107437 - RNA, 22 nt, Human
auuucagagugagagugcucaa

SEQ ID NO: 1107438 - RNA, 22 nt, Human
caaugcagauaccuuccagaga

SEQ ID NO: 1107439 - RNA, 17 nt, Human
aacaguuaaugggggaa

SEQ ID NO: 1107440 - RNA, 22 nt, Human
ccuuuuauauggcucaucacag

SEQ ID NO: 1107441 - RNA, 22 nt, Human
ugguuuguauauguuugugaga

SEQ ID NO: 1107442 - RNA, 22 nt, Human
caauguuuuuccuuccuuaaua

SEQ ID NO: 1107443 - RNA, 22 nt, Human
ucuuagaaacuguaucgauuag

SEQ ID NO: 1107444 - RNA, 22 nt, Human
gcaaggaagcagaguugcuauc

SEQ ID NO: 1107445 - RNA, 22 nt, Human
auauaugaagaagucuugauua

SEQ ID NO: 1107446 - RNA, 22 nt, Human
aaagcuauuuuauugcagcucu

SEQ ID NO: 1107447 - RNA, 22 nt, Human
gugcuuccuguauugauuccau

SEQ ID NO: 1107448 - RNA, 22 nt, Human
aucauccuagaaggaagcuagg

SEQ ID NO: 1107449 - RNA, 22 nt, Human
uuaaaagaauccuguuauccuc

SEQ ID NO: 1107450 - RNA, 22 nt, Human
aguuauugagugcagagcaggg

SEQ ID NO: 1107451 - RNA, 21 nt, Human
auacaagaagauggcagucug

SEQ ID NO: 1107452 - RNA, 22 nt, Human
cuucucuuggguguggugucuu

SEQ ID NO: 1107453 - RNA, 22 nt, Human
guuaaaugcagauucugacuca

SEQ ID NO: 1107454 - RNA, 22 nt, Human
ggagaugccuuguuucaggaac

SEQ ID NO: 1107455 - RNA, 15 nt, Human
gagaugcucucaggg

SEQ ID NO: 1107456 - RNA, 22 nt, Human
uuuacuucugcauuuccccuag

SEQ ID NO: 1107457 - RNA, 22 nt, Human
uuguagucuaggauagauuuuu

SEQ ID NO: 1107458 - RNA, 22 nt, Human
augcuuccagauugguaggggu

SEQ ID NO: 1107459 - RNA, 22 nt, Human
cuucauuucaggcugaagaaua

SEQ ID NO: 1107460 - RNA, 22 nt, Human
cauaaauuguacccauuccaac

SEQ ID NO: 1107461 - RNA, 22 nt, Human
uaguauuuccuguaagcuauag

SEQ ID NO: 1107462 - RNA, 22 nt, Human
uuuccagaaauaccauuuggug

SEQ ID NO: 1107463 - RNA, 22 nt, Human
uuuugguaauuaaguagauauu

SEQ ID NO: 1107464 - RNA, 20 nt, Human
uugcaaagugaauagcaauu

SEQ ID NO: 1107465 - RNA, 22 nt, Human
caaacuuacuguguuuaaagag

SEQ ID NO: 1107466 - RNA, 22 nt, Human
aauuauugagcaucuacugugu

SEQ ID NO: 1107467 - RNA, 22 nt, Human
gcugcucucucccuaaguuggg

SEQ ID NO: 1107468 - RNA, 22 nt, Human
agaugguucagaauuauaaaga

SEQ ID NO: 1107469 - RNA, 22 nt, Human
ucauuguuucugcuuuucauga

SEQ ID NO: 1107470 - RNA, 22 nt, Human
auucagaaauagaaaauuugau

SEQ ID NO: 1107471 - RNA, 22 nt, Human
ucucuuaauuguaaugguuccu

SEQ ID NO: 1107472 - RNA, 22 nt, Human
ccaaagcuggcuuucaugguuu

SEQ ID NO: 1107473 - RNA, 22 nt, Human
uaucuguauucugacagucacu

SEQ ID NO: 1107474 - RNA, 22 nt, Human
gcauucuugguggagugcuaaa

SEQ ID NO: 1107475 - RNA, 22 nt, Human
auaaugacauucuuagacugga

SEQ ID NO: 1107476 - RNA, 22 nt, Human
ccaaacauuucaaauuuagaga

SEQ ID NO: 1107477 - RNA, 22 nt, Human
guggauggagcuggaagccauu

SEQ ID NO: 1107478 - RNA, 22 nt, Human
gguuauuaguuucaccuggacu

SEQ ID NO: 1107479 - RNA, 21 nt, Human
cgaaguuugggcagagggguc

SEQ ID NO: 1107480 - RNA, 22 nt, Human
aaacacaucauucaugucguca

SEQ ID NO: 1107481 - RNA, 22 nt, Human
agcuaguauuucauugaggauu

SEQ ID NO: 1107482 - RNA, 22 nt, Human
acaaguuucauuguuuagaacc

SEQ ID NO: 1107483 - RNA, 22 nt, Human
auagacgcggccgcugaugcag

SEQ ID NO: 1107484 - RNA, 22 nt, Human
ugugacuaggccugagcucuug

SEQ ID NO: 1107485 - RNA, 19 nt, Human
cagcaaacacuguaaaugg

SEQ ID NO: 1107486 - RNA, 22 nt, Human
uaaguugauuauaaccacugga

SEQ ID NO: 1107487 - RNA, 23 nt, Human
ugcaaaauuugcagaguucgaug

SEQ ID NO: 1107488 - RNA, 22 nt, Human
cauuaacacuuuggauuuagac

SEQ ID NO: 1107489 - RNA, 22 nt, Human
agauugucauugacgaugagca

SEQ ID NO: 1107490 - RNA, 22 nt, Human
aaauuaacuaucacuuuuguga

SEQ ID NO: 1107491 - RNA, 22 nt, Human
uugguuaccuucagaaaugagu

SEQ ID NO: 1107492 - RNA, 22 nt, Human
cuucucagagcuuccagaaaac

SEQ ID NO: 1107493 - RNA, 22 nt, Human
aaguuugucucauuugaucuuc

SEQ ID NO: 1107494 - RNA, 22 nt, Human
cauugcuuugugcauauuuaaa

SEQ ID NO: 1107495 - RNA, 22 nt, Human
caauuuuuaaacuaugaaguug

SEQ ID NO: 1107496 - RNA, 22 nt, Human
guucuucaggcugugcucuaga

SEQ ID NO: 1107497 - RNA, 22 nt, Human
aauggcaaaguguuuucauacc

SEQ ID NO: 1107498 - RNA, 22 nt, Human
guacauauccuuuacguuuugu

SEQ ID NO: 1107499 - RNA, 22 nt, Human
ucagaagucuggacugcuucuc

SEQ ID NO: 1107500 - RNA, 22 nt, Human
auauggcuguugcacaucuaag

SEQ ID NO: 1107501 - RNA, 22 nt, Human
uucagauaagucaaguuaguau

SEQ ID NO: 1107502 - RNA, 22 nt, Human
gaauuguacugcaaucagggga

SEQ ID NO: 1107503 - RNA, 18 nt, Human
guagauccuugagcuacc

SEQ ID NO: 1107504 - RNA, 23 nt, Human
uggaaacauucugaauguccauc

SEQ ID NO: 1107505 - RNA, 22 nt, Human
guaugugucuuagaacuuggga

SEQ ID NO: 1107506 - RNA, 22 nt, Human
cuuucuuucgaagacgugauua

SEQ ID NO: 1107507 - RNA, 22 nt, Human
uguauuucugcuuucucuagua

SEQ ID NO: 1107508 - RNA, 22 nt, Human
uguaucauauggggaagcuuca

SEQ ID NO: 1107509 - RNA, 22 nt, Human
cuuguuuucuucugcagucuau

SEQ ID NO: 1107510 - RNA, 22 nt, Human
acagaguaucuaucaggaguau

SEQ ID NO: 1107511 - RNA, 22 nt, Human
uguacauacauagauauacaca

SEQ ID NO: 1107512 - RNA, 22 nt, Human
uaauuucagugcaagcucacgg

SEQ ID NO: 1107513 - RNA, 22 nt, Human
agaaaucugacugcugugcaca

SEQ ID NO: 1107514 - RNA, 22 nt, Human
ggaaacauuccaagaguugaaa

SEQ ID NO: 1107515 - RNA, 22 nt, Human
agauuauuuaagacaggaacca

SEQ ID NO: 1107516 - RNA, 22 nt, Human
acaguccuguacaggccauauc

SEQ ID NO: 1107517 - RNA, 22 nt, Human
augaugaagcaugguuacacug

SEQ ID NO: 1107518 - RNA, 22 nt, Human
cuuugcuaauguugcauuuuca

SEQ ID NO: 1107519 - RNA, 22 nt, Human
acucccuugguggagaaugcaa

SEQ ID NO: 1107520 - RNA, 22 nt, Human
caguuaaacagauugaguguua

SEQ ID NO: 1107521 - RNA, 22 nt, Human
guuuauuggguauuguggagcc

SEQ ID NO: 1107522 - RNA, 22 nt, Human
gcuuccaaugcuucuaucacau

SEQ ID NO: 1107523 - RNA, 22 nt, Human
uucuaagaaauggaaaacgauu

SEQ ID NO: 1107524 - RNA, 22 nt, Human
cagaggauauaugguuuguaug

SEQ ID NO: 1107525 - RNA, 23 nt, Human
gacagguaaggguugggagaauc

SEQ ID NO: 1107526 - RNA, 22 nt, Human
caauaguaaauuacggaggaga

SEQ ID NO: 1107527 - RNA, 22 nt, Human
uaucaguagaacaauggacauu

SEQ ID NO: 1107528 - RNA, 22 nt, Human
uugacacagucaacuugauuuu

SEQ ID NO: 1107529 - RNA, 22 nt, Human
gucuguggaguugcuugcugga

SEQ ID NO: 1107530 - RNA, 22 nt, Human
auugucgucaauggacacauag

SEQ ID NO: 1107531 - RNA, 22 nt, Human
cuccaggacugaggacagagcu

SEQ ID NO: 1107532 - RNA, 22 nt, Human
aauaucaucucucuuuucugca

SEQ ID NO: 1107533 - RNA, 22 nt, Human
gauauucauaggcagguauuua

SEQ ID NO: 1107534 - RNA, 22 nt, Human
gauccacagcugcgguaggaga

SEQ ID NO: 1107535 - RNA, 22 nt, Human
guacuuucaggcuuucccuuaa

SEQ ID NO: 1107536 - RNA, 22 nt, Human
uaaccaagcaaacuuucauugu

SEQ ID NO: 1107537 - RNA, 22 nt, Human
auuguugacuugauuacucaac

SEQ ID NO: 1107538 - RNA, 22 nt, Human
ugugucuaaugacuauuucuuc

SEQ ID NO: 1107539 - RNA, 21 nt, Human
guucaauagcucuuugaaugc

SEQ ID NO: 1107540 - RNA, 22 nt, Human
uuuuguguugccauguuaagca

SEQ ID NO: 1107541 - RNA, 22 nt, Human
uccaaauagcuggaugauggug

SEQ ID NO: 1107542 - RNA, 22 nt, Human
agauauguuaggcuuguucccu

SEQ ID NO: 1107543 - RNA, 22 nt, Human
gaaguucugguguaugugauaa

SEQ ID NO: 1107544 - RNA, 22 nt, Human
aguacuuuuuguucaauugugc

SEQ ID NO: 1107545 - RNA, 22 nt, Human
uggcacagcuugucauaaacuc

SEQ ID NO: 1107546 - RNA, 22 nt, Human
cauggaaggcaaaagacacaga

SEQ ID NO: 1107547 - RNA, 22 nt, Human
cuuucugaggagacgggcuuug

SEQ ID NO: 1107548 - RNA, 22 nt, Human
agguggaguuaagugugaacug

SEQ ID NO: 1107549 - RNA, 19 nt, Human
ugguggaggugcaccugac

SEQ ID NO: 1107550 - RNA, 22 nt, Human
ggaagcuguuaucaucuguauc

SEQ ID NO: 1107551 - RNA, 22 nt, Human
auguaacauaugugaucgcauu

SEQ ID NO: 1107552 - RNA, 22 nt, Human
aaucaggagugugcacuuugau

SEQ ID NO: 1107553 - RNA, 22 nt, Human
ucuauuaaugauucaauagugu

SEQ ID NO: 1107554 - RNA, 17 nt, Human
ucugagaacuugaagca

SEQ ID NO: 1107555 - RNA, 22 nt, Human
caguuuuacccaagcuuauuuu

SEQ ID NO: 1107556 - RNA, 22 nt, Human
acauuugauauggaguugugua

SEQ ID NO: 1107557 - RNA, 22 nt, Human
ugaauaaucuuggguauuaaua

SEQ ID NO: 1107558 - RNA, 22 nt, Human
cacaguuuugucuugguuucca

SEQ ID NO: 1107559 - RNA, 22 nt, Human
cuucauuaaugucuauaaguuu

SEQ ID NO: 1107560 - RNA, 22 nt, Human
cacauuuaugggcugggaggca

SEQ ID NO: 1107561 - RNA, 22 nt, Human
ucacuagugguuucuggugguu

SEQ ID NO: 1107562 - RNA, 22 nt, Human
gcuguauuuauaugaaggcaug

SEQ ID NO: 1107563 - RNA, 22 nt, Human
uagcaucuguacugacauaauc

SEQ ID NO: 1107564 - RNA, 22 nt, Human
auucuagaguuucaauccaagg

SEQ ID NO: 1107565 - RNA, 22 nt, Human
uugauucugcugaucucggacg

SEQ ID NO: 1107566 - RNA, 22 nt, Human
gaaaacacuuugaucugaaagu

SEQ ID NO: 1107567 - RNA, 22 nt, Human
gucguucucugccagggcguug

SEQ ID NO: 1107568 - RNA, 22 nt, Human
gcaaaacagucgaugccuccca

SEQ ID NO: 1107569 - RNA, 22 nt, Human
aucuguucuucaaaauauuaca

SEQ ID NO: 1107570 - RNA, 22 nt, Human
gcagcucacagucuccgccauc

SEQ ID NO: 1107571 - RNA, 22 nt, Human
ggaguucaaaucuuuuggaucu

SEQ ID NO: 1107572 - RNA, 21 nt, Human
caagacauaugaguacucugg

SEQ ID NO: 1107573 - RNA, 22 nt, Human
ucauuuacacuucacaaaugga

SEQ ID NO: 1107574 - RNA, 22 nt, Human
ucuacuuccgcaaaaggcacau

SEQ ID NO: 1107575 - RNA, 22 nt, Human
augaaacaacagacuuggucaa

SEQ ID NO: 1107576 - RNA, 22 nt, Human
agagaauuaacauuccauggcu

SEQ ID NO: 1107577 - RNA, 22 nt, Human
uaucauuuuacugugacauuuu

SEQ ID NO: 1107578 - RNA, 22 nt, Human
uucuuugcccauguuuccuaag

SEQ ID NO: 1107579 - RNA, 22 nt, Human
aaguuauugguggagagcacug

SEQ ID NO: 1107580 - RNA, 22 nt, Human
ccagaucccuguuugccucugg

SEQ ID NO: 1107581 - RNA, 22 nt, Human
uuguuuguaaggcucuuagaau

SEQ ID NO: 1107582 - RNA, 22 nt, Human
ugcuuuauucgacaucugguag

SEQ ID NO: 1107583 - RNA, 22 nt, Human
uauaaacuccucuugcauuccu

SEQ ID NO: 1107584 - RNA, 22 nt, Human
auguaagagcuuugcagggaaa

SEQ ID NO: 1107585 - RNA, 22 nt, Human
ccagaaugugugaaauuugaug

SEQ ID NO: 1107586 - RNA, 19 nt, Human
augagcuggcauuucaggu

SEQ ID NO: 1107587 - RNA, 22 nt, Human
uuucaaguagagggaucgcuag

SEQ ID NO: 1107588 - RNA, 19 nt, Human
auacacguguauacauaca

SEQ ID NO: 1107589 - RNA, 22 nt, Human
uucaaacaguguagaauauaug

SEQ ID NO: 1107590 - RNA, 22 nt, Human
cucagugaauuggaggauggcc

SEQ ID NO: 1107591 - RNA, 22 nt, Human
augaauuguccgauguugugca

SEQ ID NO: 1107592 - RNA, 22 nt, Human
aauguuugaacuuugcauauuu

SEQ ID NO: 1107593 - RNA, 23 nt, Human
agugaugucacccacagacaagg

SEQ ID NO: 1107594 - RNA, 22 nt, Human
uuugacuccuguguuucuggaa

SEQ ID NO: 1107595 - RNA, 22 nt, Human
aacuuucuuugcaucuaaguuu

SEQ ID NO: 1107596 - RNA, 22 nt, Human
auguccaggaagucuuaacuca

SEQ ID NO: 1107597 - RNA, 22 nt, Human
uuuggauugcuuggaugcuucg

SEQ ID NO: 1107598 - RNA, 22 nt, Human
guuuccaagucucucaacaccc

SEQ ID NO: 1107599 - RNA, 22 nt, Human
augcacaagguagauuauuauu

SEQ ID NO: 1107600 - RNA, 22 nt, Human
cagugccauauugaaagacauu

SEQ ID NO: 1107601 - RNA, 22 nt, Human
auguaguauuuggaaauguaaa

SEQ ID NO: 1107602 - RNA, 22 nt, Human
auuccaaagccugaauaaugga

SEQ ID NO: 1107603 - RNA, 22 nt, Human
accuuuaugaaacagcugucgu

SEQ ID NO: 1107604 - RNA, 20 nt, Human
cucuuuucacucucaguggu

SEQ ID NO: 1107605 - RNA, 22 nt, Human
auuuccaggaguugaggucuga

SEQ ID NO: 1107606 - RNA, 22 nt, Human
aaugacaguggcacagucacuu

SEQ ID NO: 1107607 - RNA, 20 nt, Human
caauaauuuacuucccuauu

SEQ ID NO: 1107608 - RNA, 22 nt, Human
acuuuggugcgaagucacuuua

SEQ ID NO: 1107609 - RNA, 22 nt, Human
aauggcuguucucugugauugg

SEQ ID NO: 1107610 - RNA, 22 nt, Human
aggccagaacagcucugcacca

SEQ ID NO: 1107611 - RNA, 22 nt, Human
gcaucugauccaauagauauau

SEQ ID NO: 1107612 - RNA, 22 nt, Human
gaaccuggcagcccuauaucug

SEQ ID NO: 1107613 - RNA, 22 nt, Human
auuucagcagcccauguuugga

SEQ ID NO: 1107614 - RNA, 22 nt, Human
aaaugccucauuuucucucacu

SEQ ID NO: 1107615 - RNA, 22 nt, Human
cuuuacagauggauaauuguuu

SEQ ID NO: 1107616 - RNA, 22 nt, Human
uaugcuguauucuguauguuag

SEQ ID NO: 1107617 - RNA, 22 nt, Human
cacauuggcaaacgggguugca

SEQ ID NO: 1107618 - RNA, 22 nt, Human
aucuuacaauuacaagacacuc

SEQ ID NO: 1107619 - RNA, 22 nt, Human
uauuaugguuguagguuaacaa

SEQ ID NO: 1107620 - RNA, 22 nt, Human
auauguggcauuauuucugagg

SEQ ID NO: 1107621 - RNA, 22 nt, Human
guuucuuauuucaacuggaaca

SEQ ID NO: 1107622 - RNA, 22 nt, Human
gaguaauuuucuuaaaacauca

SEQ ID NO: 1107623 - RNA, 17 nt, Human
uagauuaaacacggcca

SEQ ID NO: 1107624 - RNA, 22 nt, Human
auacaggaugcugaacaucucu

SEQ ID NO: 1107625 - RNA, 22 nt, Human
uuugcagagugcagaagcaucu

SEQ ID NO: 1107626 - RNA, 22 nt, Human
caucuuuguuuuggauauaauc

SEQ ID NO: 1107627 - RNA, 18 nt, Human
acccauuauauuuguagc

SEQ ID NO: 1107628 - RNA, 22 nt, Human
uugcauauccuccaacacaugg

SEQ ID NO: 1107629 - RNA, 22 nt, Human
cuuguauuaggaagaaugcuuu

SEQ ID NO: 1107630 - RNA, 22 nt, Human
uacauuuauaaggcuucucugu

SEQ ID NO: 1107631 - RNA, 22 nt, Human
uaguuacuuuugcucuucauua

SEQ ID NO: 1107632 - RNA, 22 nt, Human
ucauuacaagauuuccaauuug

SEQ ID NO: 1107633 - RNA, 22 nt, Human
acuaauugaaaugagacuggug

SEQ ID NO: 1107634 - RNA, 22 nt, Human
gaaucucaggggaguuacugga

SEQ ID NO: 1107635 - RNA, 22 nt, Human
aaauccaucaaaucuucuagaa

SEQ ID NO: 1107636 - RNA, 22 nt, Human
agauguuuauaacucaugagug

SEQ ID NO: 1107637 - RNA, 22 nt, Human
agaauaagccugacgaaaccua

SEQ ID NO: 1107638 - RNA, 22 nt, Human
agauguuuuuccaggucuaauu

SEQ ID NO: 1107639 - RNA, 22 nt, Human
uaaggacagcagcuacuuuucc

SEQ ID NO: 1107640 - RNA, 22 nt, Human
aggcauuacaucuaaauauuua

SEQ ID NO: 1107641 - RNA, 22 nt, Human
agaacagaggccuuauguuuca

SEQ ID NO: 1107642 - RNA, 22 nt, Human
augcaucaccgaguugcccacc

SEQ ID NO: 1107643 - RNA, 22 nt, Human
guaguucuuucucaauguucaa

SEQ ID NO: 1107644 - RNA, 22 nt, Human
cacugguugccucuuucuguuc

SEQ ID NO: 1107645 - RNA, 22 nt, Human
uggaaauaguugugagucaggc

SEQ ID NO: 1107646 - RNA, 22 nt, Human
acaucucacuucuuugaaggcu

SEQ ID NO: 1107647 - RNA, 22 nt, Human
aaauugcuugagauuagucucc

SEQ ID NO: 1107648 - RNA, 22 nt, Human
guuuccaggcuuugguaugguu

SEQ ID NO: 1107649 - RNA, 22 nt, Human
cucuaaauguggucugcagaua

SEQ ID NO: 1107650 - RNA, 22 nt, Human
cucaaaauccauaaaaucaggu

SEQ ID NO: 1107651 - RNA, 20 nt, Human
ucuuuuauuggcagauccug

SEQ ID NO: 1107652 - RNA, 22 nt, Human
acagaagugacaauuucuuggg

SEQ ID NO: 1107653 - RNA, 22 nt, Human
ggcaauuacguauuagucaugu

SEQ ID NO: 1107654 - RNA, 23 nt, Human
uggagaauucagucuuuguuuug

SEQ ID NO: 1107655 - RNA, 22 nt, Human
uggaauuaucugaagugauuug

SEQ ID NO: 1107656 - RNA, 22 nt, Human
caaaauuguugaugcugcuuug

SEQ ID NO: 1107657 - RNA, 22 nt, Human
caauaauugcuuuccagaguua

SEQ ID NO: 1107658 - RNA, 22 nt, Human
caugugaccgcugggugagcga

SEQ ID NO: 1107659 - RNA, 22 nt, Human
agugauaggacauauggauuuu

SEQ ID NO: 1107660 - RNA, 22 nt, Human
ugauuccugugcuuauuccagu

SEQ ID NO: 1107661 - RNA, 22 nt, Human
cuuaagacaggcucaaagauua

SEQ ID NO: 1107662 - RNA, 22 nt, Human
gaaugcuggcuuacaggcaguu

SEQ ID NO: 1107663 - RNA, 22 nt, Human
aagcauuucagguagagauauu

SEQ ID NO: 1107664 - RNA, 17 nt, Human
gcuccagaauucuaguc

SEQ ID NO: 1107665 - RNA, 22 nt, Human
ucaauucugccucuaaauauuu

SEQ ID NO: 1107666 - RNA, 19 nt, Human
ucuuucauuucuagcucug

SEQ ID NO: 1107667 - RNA, 22 nt, Human
ugaggaaugugacaaaaccaag

SEQ ID NO: 1107668 - RNA, 22 nt, Human
ucccagaacccugccagguccu

SEQ ID NO: 1107669 - RNA, 22 nt, Human
acauuuaaugauccuacuguga

SEQ ID NO: 1107670 - RNA, 22 nt, Human
cugccaucugagccaaaagugc

SEQ ID NO: 1107671 - RNA, 22 nt, Human
uuggauggagguucaagcacua

SEQ ID NO: 1107672 - RNA, 22 nt, Human
caaauacaaauacgggcagcuu

SEQ ID NO: 1107673 - RNA, 22 nt, Human
uaaaucccuacaucuguguuuu

SEQ ID NO: 1107674 - RNA, 22 nt, Human
auuguacagacaugggaaacaa

SEQ ID NO: 1107675 - RNA, 22 nt, Human
gaaacauuuguugaguacuugc

SEQ ID NO: 1107676 - RNA, 22 nt, Human
uauagugucucuagaucaaaga

SEQ ID NO: 1107677 - RNA, 22 nt, Human
uuguacuuaaauaugcaaauag

SEQ ID NO: 1107678 - RNA, 22 nt, Human
aaagucuuaauguaaguuuagu

SEQ ID NO: 1107679 - RNA, 22 nt, Human
aacaucuagguucucaucgaua

SEQ ID NO: 1107680 - RNA, 22 nt, Human
gaccaaggaagaggggagccag

SEQ ID NO: 1107681 - RNA, 22 nt, Human
aaagacuaaccaguugucaaaa

SEQ ID NO: 1107682 - RNA, 22 nt, Human
caaguaugagaaagcuauuacc

SEQ ID NO: 1107683 - RNA, 22 nt, Human
gucucuaucauagcugaacccu

SEQ ID NO: 1107684 - RNA, 22 nt, Human
augaauaaaacauuuuaaucag

SEQ ID NO: 1107685 - RNA, 22 nt, Human
auuuuguaucuuacggggacua

SEQ ID NO: 1107686 - RNA, 22 nt, Human
uaguggauguucagagauuuga

SEQ ID NO: 1107687 - RNA, 22 nt, Human
cagagaauaaaagggcauuccu

SEQ ID NO: 1107688 - RNA, 22 nt, Human
gacauuuauuggauuuuacgag

SEQ ID NO: 1107689 - RNA, 22 nt, Human
acagugauuggcacugauucag

SEQ ID NO: 1107690 - RNA, 22 nt, Human
gaauaauugugaugcuugaagu

SEQ ID NO: 1107691 - RNA, 22 nt, Human
gaugauuacacuuuuaaaacag

SEQ ID NO: 1107692 - RNA, 22 nt, Human
ugcaaauauuccaugcuguuca

SEQ ID NO: 1107693 - RNA, 22 nt, Human
uugagauagguggaaucucuuu

SEQ ID NO: 1107694 - RNA, 22 nt, Human
guguuuaaugcagaugugggug

SEQ ID NO: 1107695 - RNA, 22 nt, Human
acugagcaggguuccgcaugga

SEQ ID NO: 1107696 - RNA, 22 nt, Human
gcuuccuucuaccacaucaugc

SEQ ID NO: 1107697 - RNA, 22 nt, Human
ucaucuguuaugggaguuuuug

SEQ ID NO: 1107698 - RNA, 22 nt, Human
caguaaauguccucgcagggaa

SEQ ID NO: 1107699 - RNA, 22 nt, Human
uggaaaauauuuaggugaauga

SEQ ID NO: 1107700 - RNA, 22 nt, Human
uugcacauguugguucuugaaa

SEQ ID NO: 1107701 - RNA, 22 nt, Human
uacuguauacuacugcuguucu

SEQ ID NO: 1107702 - RNA, 22 nt, Human
uaaagacaauuucgagcuguag

SEQ ID NO: 1107703 - RNA, 22 nt, Human
auacaugugugugcauacaugu

SEQ ID NO: 1107704 - RNA, 22 nt, Human
uaauuuugucacagugacaugc

SEQ ID NO: 1107705 - RNA, 22 nt, Human
guuauguaaucuaacacucagu

SEQ ID NO: 1107706 - RNA, 22 nt, Human
cucuauucuaauggauucuggg

SEQ ID NO: 1107707 - RNA, 22 nt, Human
acuuccagaaaugauuuaauuu

SEQ ID NO: 1107708 - RNA, 22 nt, Human
aauugguuugaauaaauaaaga

SEQ ID NO: 1107709 - RNA, 22 nt, Human
uuagcacugucugguuaucuug

SEQ ID NO: 1107710 - RNA, 22 nt, Human
agguggagaagagaugggcagu

SEQ ID NO: 1107711 - RNA, 22 nt, Human
ucuuuuaucuguuguguaacaa

SEQ ID NO: 1107712 - RNA, 22 nt, Human
uuuccaaagguggcaggaacaa

SEQ ID NO: 1107713 - RNA, 22 nt, Human
uaaugccuuaugucaaauguaa

SEQ ID NO: 1107714 - RNA, 22 nt, Human
cuccacagccccuccaguggca

SEQ ID NO: 1107715 - RNA, 22 nt, Human
cucacucaguuuuuaguucauc

SEQ ID NO: 1107716 - RNA, 22 nt, Human
uuucuacauuuguaaccagauu

SEQ ID NO: 1107717 - RNA, 22 nt, Human
uguauauacacacucccauguu

SEQ ID NO: 1107718 - RNA, 17 nt, Human
ccuuucuucccagaggg

SEQ ID NO: 1107719 - RNA, 23 nt, Human
gggcagcuuaagcuuguuuuucu

SEQ ID NO: 1107720 - RNA, 22 nt, Human
ugucuagaaaugcugagucuca

SEQ ID NO: 1107721 - RNA, 22 nt, Human
cuugaaagucagcagaguggau

SEQ ID NO: 1107722 - RNA, 22 nt, Human
aauguuaaguuuagauuauaac

SEQ ID NO: 1107723 - RNA, 22 nt, Human
auccuggguaaguuccuuuuaa

SEQ ID NO: 1107724 - RNA, 22 nt, Human
guucaguuauuucugaagauau

SEQ ID NO: 1107725 - RNA, 22 nt, Human
aucagaagaaauggaugugacu

SEQ ID NO: 1107726 - RNA, 18 nt, Human
cuuuagcugucaucuuug

SEQ ID NO: 1107727 - RNA, 22 nt, Human
augaucaagaauuuuguauucc

SEQ ID NO: 1107728 - RNA, 22 nt, Human
aggaaaauggaccagaguuguu

SEQ ID NO: 1107729 - RNA, 20 nt, Human
cauuccugaggaauucaugu

SEQ ID NO: 1107730 - RNA, 22 nt, Human
ugucuucauuccccaugaaguc

SEQ ID NO: 1107731 - RNA, 22 nt, Human
cuuauuggucccaggaggagaa

SEQ ID NO: 1107732 - RNA, 22 nt, Human
guuguuuuugaacggugguggc

SEQ ID NO: 1107733 - RNA, 22 nt, Human
agacugugagaagauggcugcg

SEQ ID NO: 1107734 - RNA, 22 nt, Human
ugugagauuuuauuugauaugc

SEQ ID NO: 1107735 - RNA, 22 nt, Human
ucuucaugaaauugauugcuua

SEQ ID NO: 1107736 - RNA, 22 nt, Human
gugauuuucuccuccuagaagu

SEQ ID NO: 1107737 - RNA, 20 nt, Human
uaugauaauuacaaaauagu

SEQ ID NO: 1107738 - RNA, 21 nt, Human
ccacaauucuaguuacauaug

SEQ ID NO: 1107739 - RNA, 22 nt, Human
uucuguuuauaauuugcaguug

SEQ ID NO: 1107740 - RNA, 22 nt, Human
aauagcaaaugcucauuugaaa

SEQ ID NO: 1107741 - RNA, 22 nt, Human
ggaagcaaauuccagaaccaca

SEQ ID NO: 1107742 - RNA, 22 nt, Human
uaaagugaaguucagaauggcu

SEQ ID NO: 1107743 - RNA, 22 nt, Human
gauucugaaauuaacagacugg

SEQ ID NO: 1107744 - RNA, 22 nt, Human
uaacacauagauauuuuaacuu

SEQ ID NO: 1107745 - RNA, 22 nt, Human
cucaucuggcuucaguaacagu

SEQ ID NO: 1107746 - RNA, 22 nt, Human
gaacaguuucccuguagaaaau

SEQ ID NO: 1107747 - RNA, 22 nt, Human
ugaagacaguuuuacucaugag

SEQ ID NO: 1107748 - RNA, 22 nt, Human
uacagugcuugguaucuaguaa

SEQ ID NO: 1107749 - RNA, 18 nt, Human
gaacagcaauuucauguu

SEQ ID NO: 1107750 - RNA, 22 nt, Human
agucaguaugacuuauaguucu

SEQ ID NO: 1107751 - RNA, 22 nt, Human
guuauacuuaugugcaaaaaua

SEQ ID NO: 1107752 - RNA, 22 nt, Human
acagcuucgaggaucucauccc

SEQ ID NO: 1107753 - RNA, 22 nt, Human
uaaaccuuauuugaauaccaac

SEQ ID NO: 1107754 - RNA, 22 nt, Human
aggauaauaauaaucucguuua

SEQ ID NO: 1107755 - RNA, 22 nt, Human
cuagagaaaaagcuuagguacg

SEQ ID NO: 1107756 - RNA, 22 nt, Human
ucacacaucucagguguuuaau

SEQ ID NO: 1107757 - RNA, 22 nt, Human
cacauuuaaagguugaagcuga

SEQ ID NO: 1107758 - RNA, 22 nt, Human
guaauucugugugaaucuauua

SEQ ID NO: 1107759 - RNA, 21 nt, Human
uaaacauaaccuuguauggcu

SEQ ID NO: 1107760 - RNA, 22 nt, Human
ggaaacugcuuacacuagaggg

SEQ ID NO: 1107761 - RNA, 22 nt, Human
gucauuuuugacuuugaaguga

SEQ ID NO: 1107762 - RNA, 22 nt, Human
guucucucagcgauagugaugg

SEQ ID NO: 1107763 - RNA, 22 nt, Human
uuagacaucaagaagccaaugu

SEQ ID NO: 1107764 - RNA, 22 nt, Human
guggcuaggcccaacggcagga

SEQ ID NO: 1107765 - RNA, 22 nt, Human
uuacaguuuacauaagaauugu

SEQ ID NO: 1107766 - RNA, 22 nt, Human
uccaaggacauuguucuaguug

SEQ ID NO: 1107767 - RNA, 22 nt, Human
agagcaauuagcuuagguaaaa

SEQ ID NO: 1107768 - RNA, 21 nt, Human
acuguauuguuuucaaggauc

SEQ ID NO: 1107769 - RNA, 22 nt, Human
cuaguuuuaagcuccuugaggu

SEQ ID NO: 1107770 - RNA, 22 nt, Human
uuuauucucuaguuggucagau

SEQ ID NO: 1107771 - RNA, 22 nt, Human
uugcuauuuugagagucauagu

SEQ ID NO: 1107772 - RNA, 22 nt, Human
agcaaauaauugucuuugaggg

SEQ ID NO: 1107773 - RNA, 22 nt, Human
gaauacaaauaauaccaaggug

SEQ ID NO: 1107774 - RNA, 22 nt, Human
caugcuggucagccaguggaug

SEQ ID NO: 1107775 - RNA, 20 nt, Human
caacacugcccauuguuugc

SEQ ID NO: 1107776 - RNA, 22 nt, Human
auuuacagccuugccaucuaua

SEQ ID NO: 1107777 - RNA, 22 nt, Human
uauuucagcucuuuggauuauc

SEQ ID NO: 1107778 - RNA, 22 nt, Human
cuguauaugugcauacacacac

SEQ ID NO: 1107779 - RNA, 22 nt, Human
ucacuguuaauaaauagcaaag

SEQ ID NO: 1107780 - RNA, 22 nt, Human
aaugucaacacaagagaaaugc

SEQ ID NO: 1107781 - RNA, 22 nt, Human
ugauauccuuuaaccuggaccg

SEQ ID NO: 1107782 - RNA, 22 nt, Human
aauacagugaaagugagcaagg

SEQ ID NO: 1107783 - RNA, 22 nt, Human
uguuuuaagggucaacugucac

SEQ ID NO: 1107784 - RNA, 22 nt, Human
uugauggacagggaccacuguc

SEQ ID NO: 1107785 - RNA, 22 nt, Human
aagaaaagguaaccgcuuaucu

SEQ ID NO: 1107786 - RNA, 22 nt, Human
agucuauuuuugguucuucggg

SEQ ID NO: 1107787 - RNA, 22 nt, Human
uuuguguuggaagaaaugcuac

SEQ ID NO: 1107788 - RNA, 22 nt, Human
aauucauacucuauauugcuuu

SEQ ID NO: 1107789 - RNA, 22 nt, Human
uuguaacaguagcugucagcuc

SEQ ID NO: 1107790 - RNA, 22 nt, Human
uuuagcaaggagaaauaauccu

SEQ ID NO: 1107791 - RNA, 22 nt, Human
cuccagauuccguuuauucagg

SEQ ID NO: 1107792 - RNA, 23 nt, Human
aucuguguguggguagggaugau

SEQ ID NO: 1107793 - RNA, 22 nt, Human
acuuuuaaggggccuugauuua

SEQ ID NO: 1107794 - RNA, 22 nt, Human
gaacuuuaauuagcuuuugucu

SEQ ID NO: 1107795 - RNA, 22 nt, Human
ugaaucaaugaauugcacuuca

SEQ ID NO: 1107796 - RNA, 22 nt, Human
uugcuggaguagaaaacuuaac

SEQ ID NO: 1107797 - RNA, 23 nt, Human
uaucauuucagcucucugccugg

SEQ ID NO: 1107798 - RNA, 22 nt, Human
uaucaguccaggguuuugugac

SEQ ID NO: 1107799 - RNA, 22 nt, Human
ugaaaacacuuuaguuuagguc

SEQ ID NO: 1107800 - RNA, 22 nt, Human
ccaagagcuucccauagcuucu

SEQ ID NO: 1107801 - RNA, 22 nt, Human
uaucuguagucucaugguuccu

SEQ ID NO: 1107802 - RNA, 22 nt, Human
uagcuguucucuguaaauugga

SEQ ID NO: 1107803 - RNA, 22 nt, Human
uaucuagagccuggaagucuug

SEQ ID NO: 1107804 - RNA, 18 nt, Human
acagggagggcgcugggg

SEQ ID NO: 1107805 - RNA, 22 nt, Human
augauuuguuaacagacuuaau

SEQ ID NO: 1107806 - RNA, 22 nt, Human
guuugagauggguuauugcucu

SEQ ID NO: 1107807 - RNA, 22 nt, Human
accaaauaggcuuccuggguug

SEQ ID NO: 1107808 - RNA, 22 nt, Human
guuuacaacaucuuguccuuca

SEQ ID NO: 1107809 - RNA, 20 nt, Human
acucuguagguaaugagacu

SEQ ID NO: 1107810 - RNA, 22 nt, Human
ugggaagauaugagugaccaac

SEQ ID NO: 1107811 - RNA, 22 nt, Human
caguauguuuauuagaacugca

SEQ ID NO: 1107812 - RNA, 22 nt, Human
uggcuccguuguacaggcugga

SEQ ID NO: 1107813 - RNA, 21 nt, Human
uuuaaggccagcaggagguga

SEQ ID NO: 1107814 - RNA, 22 nt, Human
gugauuucaaauauagagugag

SEQ ID NO: 1107815 - RNA, 22 nt, Human
uucuguaauucuguuaguuuca

SEQ ID NO: 1107816 - RNA, 22 nt, Human
caacuuuagaccccaaguagcu

SEQ ID NO: 1107817 - RNA, 22 nt, Human
uaggauaugcauuuuuauacau

SEQ ID NO: 1107818 - RNA, 22 nt, Human
cgucauuuguaaaugaucaaga

SEQ ID NO: 1107819 - RNA, 22 nt, Human
ucuguaaacacccguaagcuuu

SEQ ID NO: 1107820 - RNA, 19 nt, Human
aggucuaaucauaagacaa

SEQ ID NO: 1107821 - RNA, 21 nt, Human
acaguacuugagaucuuuuga

SEQ ID NO: 1107822 - RNA, 22 nt, Human
uguaauguuagaaacaauugcu

SEQ ID NO: 1107823 - RNA, 22 nt, Human
acaagauagcuuagaagauuca

SEQ ID NO: 1107824 - RNA, 22 nt, Human
acucaucuuugaauuuucagua

SEQ ID NO: 1107825 - RNA, 22 nt, Human
auuugcuuguucaccaguacuu

SEQ ID NO: 1107826 - RNA, 22 nt, Human
uggaaagaggaagugcccagca

SEQ ID NO: 1107827 - RNA, 22 nt, Human
acauucucuuuuagaaagcugu

SEQ ID NO: 1107828 - RNA, 22 nt, Human
aguucaugugguuuaacuuaau

SEQ ID NO: 1107829 - RNA, 18 nt, Human
ucagacaaguuagacagg

SEQ ID NO: 1107830 - RNA, 20 nt, Human
uguauuuaaugaaggcuuuu

SEQ ID NO: 1107831 - RNA, 20 nt, Human
ucucuaacaugaaugcuauc

SEQ ID NO: 1107832 - RNA, 22 nt, Human
cuuccuaaaagcuucaagagaa

SEQ ID NO: 1107833 - RNA, 22 nt, Human
aacagauuguaaccugauagcc

SEQ ID NO: 1107834 - RNA, 22 nt, Human
gugcuaugauuggacagaauag

SEQ ID NO: 1107835 - RNA, 22 nt, Human
cugauggagagugugauuuggg

SEQ ID NO: 1107836 - RNA, 22 nt, Human
uguucaguuugcuaucauaauc

SEQ ID NO: 1107837 - RNA, 22 nt, Human
uugcuugaacccaggaagugga

SEQ ID NO: 1107838 - RNA, 23 nt, Human
auaugucaugcaccagcacuuua

SEQ ID NO: 1107839 - RNA, 22 nt, Human
auauauacuuugacacauucug

SEQ ID NO: 1107840 - RNA, 22 nt, Human
gagaauguuaauguugaaguau

SEQ ID NO: 1107841 - RNA, 22 nt, Human
uuuuucaagacaaccugcaugu

SEQ ID NO: 1107842 - RNA, 22 nt, Human
uuugacaugugcuuauaacuuu

SEQ ID NO: 1107843 - RNA, 22 nt, Human
uuuaaaccuaucuaagaaauag

SEQ ID NO: 1107844 - RNA, 22 nt, Human
uuggaauuugagaccaagaaaa

SEQ ID NO: 1107845 - RNA, 22 nt, Human
uggaaauacaagaaguauguca

SEQ ID NO: 1107846 - RNA, 22 nt, Human
ucaucaucauucucccccacuu

SEQ ID NO: 1107847 - RNA, 22 nt, Human
uagaggaugauccuuccuugcc

SEQ ID NO: 1107848 - RNA, 22 nt, Human
cuuugugauaguguuaagacca

SEQ ID NO: 1107849 - RNA, 22 nt, Human
auuugugggacuauaaugcagg

SEQ ID NO: 1107850 - RNA, 22 nt, Human
auugagaaaauucgagcaaguu

SEQ ID NO: 1107851 - RNA, 22 nt, Human
aucaacuuguccuugauguuaa

SEQ ID NO: 1107852 - RNA, 22 nt, Human
ucccaaguagaugggaauacag

SEQ ID NO: 1107853 - RNA, 22 nt, Human
cauuguguauuucuguaguacu

SEQ ID NO: 1107854 - RNA, 22 nt, Human
uucuucauucccuuacuuccga

SEQ ID NO: 1107855 - RNA, 19 nt, Human
cauaauacaguggaucuga

SEQ ID NO: 1107856 - RNA, 22 nt, Human
uucaguuuugcuuuuaaucaug

SEQ ID NO: 1107857 - RNA, 22 nt, Human
cacaguuuuaucuuauacugau

SEQ ID NO: 1107858 - RNA, 22 nt, Human
ugaguguuguaaccauaugauu

SEQ ID NO: 1107859 - RNA, 22 nt, Human
guccaucuaaguauccagccug

SEQ ID NO: 1107860 - RNA, 22 nt, Human
uuugaagauaaauauggagaaa

SEQ ID NO: 1107861 - RNA, 22 nt, Human
agucuuagaacuacagugccua

SEQ ID NO: 1107862 - RNA, 22 nt, Human
ucaagaaagggcuucaccagga

SEQ ID NO: 1107863 - RNA, 22 nt, Human
ugugugcacaaagaguacaugg

SEQ ID NO: 1107864 - RNA, 22 nt, Human
uuauuccauagaagucaaggaa

SEQ ID NO: 1107865 - RNA, 22 nt, Human
cagucauuaugggaguuaaucc

SEQ ID NO: 1107866 - RNA, 22 nt, Human
aaaacauuuuacugccaucuca

SEQ ID NO: 1107867 - RNA, 22 nt, Human
ugcaucauuaagguacaguugg

SEQ ID NO: 1107868 - RNA, 22 nt, Human
uuaagagaagaguaucuagaac

SEQ ID NO: 1107869 - RNA, 22 nt, Human
uguggaauguccucagcauccu

SEQ ID NO: 1107870 - RNA, 22 nt, Human
cuucuaauucuuauguaagcuu

SEQ ID NO: 1107871 - RNA, 22 nt, Human
uagaaagagcuuugcuuccuuu

SEQ ID NO: 1107872 - RNA, 22 nt, Human
uagaagaacaugucaaacuaua

SEQ ID NO: 1107873 - RNA, 22 nt, Human
gucccauaaguagugcaacuug

SEQ ID NO: 1107874 - RNA, 22 nt, Human
uuuguugguugcacuggugggu

SEQ ID NO: 1107875 - RNA, 22 nt, Human
aaauugaauuugggaaacauug

SEQ ID NO: 1107876 - RNA, 22 nt, Human
aaugaaacuaguagaaucuuug

SEQ ID NO: 1107877 - RNA, 23 nt, Human
ugaaagcaaugggucuauaguau

SEQ ID NO: 1107878 - RNA, 22 nt, Human
uuuuaauccucuugguaucuua

SEQ ID NO: 1107879 - RNA, 22 nt, Human
uugcacagaugcacaugguugc

SEQ ID NO: 1107880 - RNA, 22 nt, Human
uaccauuucaguaaaaacuuag

SEQ ID NO: 1107881 - RNA, 22 nt, Human
gugguuguuuccagguuugaaa

SEQ ID NO: 1107882 - RNA, 22 nt, Human
uguaaagaaagacgcagaguua

SEQ ID NO: 1107883 - RNA, 22 nt, Human
augcggagccccaagcuugaag

SEQ ID NO: 1107884 - RNA, 22 nt, Human
cucugcaaggcccuccaguagc

SEQ ID NO: 1107885 - RNA, 22 nt, Human
gguagacaacuuuguaauagcc

SEQ ID NO: 1107886 - RNA, 22 nt, Human
ugcuugacuuaguuucucauuu

SEQ ID NO: 1107887 - RNA, 22 nt, Human
uguacauauucaagcacuucua

SEQ ID NO: 1107888 - RNA, 22 nt, Human
uaaaugcaguacaaauuguucu

SEQ ID NO: 1107889 - RNA, 22 nt, Human
ucauacauguuguguucaaaug

SEQ ID NO: 1107890 - RNA, 22 nt, Human
gacauacagcccucucccuggu

SEQ ID NO: 1107891 - RNA, 22 nt, Human
uuuggaaaugagaagccaccuu

SEQ ID NO: 1107892 - RNA, 22 nt, Human
aagauuuaccacuuuauucaag

SEQ ID NO: 1107893 - RNA, 22 nt, Human
uaaaguuuauuggcaccaccau

SEQ ID NO: 1107894 - RNA, 22 nt, Human
gugcacagaaacauacaaugug

SEQ ID NO: 1107895 - RNA, 22 nt, Human
gugcauauguguguauacaaac

SEQ ID NO: 1107896 - RNA, 22 nt, Human
auuuccuauacaguuguccaua

SEQ ID NO: 1107897 - RNA, 22 nt, Human
uagugucuuccaggacauggua

SEQ ID NO: 1107898 - RNA, 22 nt, Human
guaugucuuaggguucaguaac

SEQ ID NO: 1107899 - RNA, 23 nt, Human
uuguucuuggaucuuccugaagc

SEQ ID NO: 1107900 - RNA, 22 nt, Human
gccauguucuugaaucuggguc

SEQ ID NO: 1107901 - RNA, 22 nt, Human
uccugagauaggaguugaaggc

SEQ ID NO: 1107902 - RNA, 20 nt, Human
ccacaguggagacuggagac

SEQ ID NO: 1107903 - RNA, 22 nt, Human
uguaccgccuugugggguuggg

SEQ ID NO: 1107904 - RNA, 22 nt, Human
agaauaaccaguguuucacagu

SEQ ID NO: 1107905 - RNA, 22 nt, Human
auagcuuugagggcuccuuagg

SEQ ID NO: 1107906 - RNA, 22 nt, Human
uuaguguccagaguuuuuauua

SEQ ID NO: 1107907 - RNA, 22 nt, Human
guuccuaagcuguggcccugga

SEQ ID NO: 1107908 - RNA, 22 nt, Human
uggauguuugaaguugcaugug

SEQ ID NO: 1107909 - RNA, 22 nt, Human
cagaaagugauuugcuauucca

SEQ ID NO: 1107910 - RNA, 22 nt, Human
auacaccaccuuggaucuuuca

SEQ ID NO: 1107911 - RNA, 22 nt, Human
ugaauaugugacuuugauuuca

SEQ ID NO: 1107912 - RNA, 22 nt, Human
acaaacuucccagacaagcucc

SEQ ID NO: 1107913 - RNA, 22 nt, Human
cuuuacuucagcaagcuuuccu

SEQ ID NO: 1107914 - RNA, 22 nt, Human
agcucuuuuaucaugaggagag

SEQ ID NO: 1107915 - RNA, 22 nt, Human
uuauugagcacauaguaugugg

SEQ ID NO: 1107916 - RNA, 22 nt, Human
aaauacaguggcagcagauaau

SEQ ID NO: 1107917 - RNA, 22 nt, Human
aaaucaugguggaagaaacaga

SEQ ID NO: 1107918 - RNA, 22 nt, Human
uuugggaaacuuaggggucaga

SEQ ID NO: 1107919 - RNA, 22 nt, Human
acugauuucagggaugagaaga

SEQ ID NO: 1107920 - RNA, 20 nt, Human
uccuaacgaggcccauugca

SEQ ID NO: 1107921 - RNA, 22 nt, Human
ggaugacagaugcaggcuuuga

SEQ ID NO: 1107922 - RNA, 22 nt, Human
cauuuuacgacauagggcaggc

SEQ ID NO: 1107923 - RNA, 22 nt, Human
guuuugaauacuacuagaacuu

SEQ ID NO: 1107924 - RNA, 22 nt, Human
uuuggagagaugaaguucugug

SEQ ID NO: 1107925 - RNA, 22 nt, Human
auagcaaaggacaauagucagu

SEQ ID NO: 1107926 - RNA, 22 nt, Human
uaaccuguuaagggcugaccca

SEQ ID NO: 1107927 - RNA, 22 nt, Human
uuacacaacaucuguauuauua

SEQ ID NO: 1107928 - RNA, 21 nt, Human
uaaaagaugacaagacagcuc

SEQ ID NO: 1107929 - RNA, 22 nt, Human
aguguauuugccuauaaaaaug

SEQ ID NO: 1107930 - RNA, 22 nt, Human
ugcaauuagcguauuaguuuau

SEQ ID NO: 1107931 - RNA, 22 nt, Human
ugauucaguacuuucucuaacu

SEQ ID NO: 1107932 - RNA, 22 nt, Human
uguguuuuggaaggaacaugca

SEQ ID NO: 1107933 - RNA, 22 nt, Human
aauuccagcugauugacuuucc

SEQ ID NO: 1107934 - RNA, 22 nt, Human
augcaggaagagcccuggagcu

SEQ ID NO: 1107935 - RNA, 22 nt, Human
acuguagucuaaauauagucuu

SEQ ID NO: 1107936 - RNA, 22 nt, Human
aggaauuugggguuacaugaug

SEQ ID NO: 1107937 - RNA, 22 nt, Human
uugcucuauguuuguaaacaga

SEQ ID NO: 1107938 - RNA, 22 nt, Human
auauaaguguguggcuguuagu

SEQ ID NO: 1107939 - RNA, 22 nt, Human
acaccacaaguaacucuuuucc

SEQ ID NO: 1107940 - RNA, 22 nt, Human
ucacaauacucacucaauggcu

SEQ ID NO: 1107941 - RNA, 21 nt, Human
acugaacuuguguucuagagg

SEQ ID NO: 1107942 - RNA, 22 nt, Human
gauggaggagauggcagggugc

SEQ ID NO: 1107943 - RNA, 22 nt, Human
uucuaguuacagaagccuugcu

SEQ ID NO: 1107944 - RNA, 22 nt, Human
aauggagugguucuugcccucu

SEQ ID NO: 1107945 - RNA, 22 nt, Human
acuucagugugguauaaaacgu

SEQ ID NO: 1107946 - RNA, 22 nt, Human
uagaaaagccccagcuggaggg

SEQ ID NO: 1107947 - RNA, 22 nt, Human
auuauguagcuaaaaauugugu

SEQ ID NO: 1107948 - RNA, 22 nt, Human
ucuucagacuguuguucuuuug

SEQ ID NO: 1107949 - RNA, 22 nt, Human
ucguuaaucagcaccagaauuc

SEQ ID NO: 1107950 - RNA, 22 nt, Human
acuucacagauauuuauuuggu

SEQ ID NO: 1107951 - RNA, 21 nt, Human
agggaaaaggcugagugaggg

SEQ ID NO: 1107952 - RNA, 17 nt, Human
acuuguauugugcuuua

SEQ ID NO: 1107953 - RNA, 19 nt, Human
cugaaacacagagagggcu

SEQ ID NO: 1107954 - RNA, 22 nt, Human
gaggcauaaguagaagagauug

SEQ ID NO: 1107955 - RNA, 22 nt, Human
cuuccagugcauagguagauca

SEQ ID NO: 1107956 - RNA, 22 nt, Human
auugacuuucccuucuccucau

SEQ ID NO: 1107957 - RNA, 22 nt, Human
uuuucuaacaucuaguaauuug

SEQ ID NO: 1107958 - RNA, 22 nt, Human
auuucauccauuaagaguacuc

SEQ ID NO: 1107959 - RNA, 22 nt, Human
guuuuaguggguggccacugau

SEQ ID NO: 1107960 - RNA, 22 nt, Human
uaaaaucaugacagauugacau

SEQ ID NO: 1107961 - RNA, 22 nt, Human
uccguuuucacacugcuauaaa

SEQ ID NO: 1107962 - RNA, 22 nt, Human
aguaacuuaagcaauuguguau

SEQ ID NO: 1107963 - RNA, 22 nt, Human
guaaaucagugucauuuuagaa

SEQ ID NO: 1107964 - RNA, 22 nt, Human
aagugucuucugauggggugug

SEQ ID NO: 1107965 - RNA, 22 nt, Human
aaugaacacuuagccuuucuau

SEQ ID NO: 1107966 - RNA, 22 nt, Human
cugcacagccugucugggggcc

SEQ ID NO: 1107967 - RNA, 22 nt, Human
gucuccuuguggaucucaagga

SEQ ID NO: 1107968 - RNA, 22 nt, Human
uuucucuuucaaucugcaguac

SEQ ID NO: 1107969 - RNA, 22 nt, Human
ucuucaugucaugguauauuga

SEQ ID NO: 1107970 - RNA, 22 nt, Human
aaugaguuuguucuauuauuug

SEQ ID NO: 1107971 - RNA, 22 nt, Human
ugguaugcuuauuaucuucaac

SEQ ID NO: 1107972 - RNA, 22 nt, Human
gaaaugucaagauauguuugga

SEQ ID NO: 1107973 - RNA, 22 nt, Human
aguuauguccucagcaaaucaa

SEQ ID NO: 1107974 - RNA, 19 nt, Human
aguguuuauguagugccua

SEQ ID NO: 1107975 - RNA, 22 nt, Human
cagcugacaagaguccuuggag

SEQ ID NO: 1107976 - RNA, 22 nt, Human
cuagaaguuuggguccauuaag

SEQ ID NO: 1107977 - RNA, 22 nt, Human
aagaugauuauguagauuggga

SEQ ID NO: 1107978 - RNA, 22 nt, Human
uuuacuguuuacagcuaaugca

SEQ ID NO: 1107979 - RNA, 19 nt, Human
agacaaguuuccagaagcc

SEQ ID NO: 1107980 - RNA, 22 nt, Human
aaagugacaaccauuuauuaag

SEQ ID NO: 1107981 - RNA, 22 nt, Human
gagguauaguucuauuagauga

SEQ ID NO: 1107982 - RNA, 19 nt, Human
uuugauagggcauaauaua

SEQ ID NO: 1107983 - RNA, 22 nt, Human
aggucuacaugcuuaauauauc

SEQ ID NO: 1107984 - RNA, 22 nt, Human
caugucacaauucuuaauggga

SEQ ID NO: 1107985 - RNA, 22 nt, Human
auaucuaggcugaauguaaaau

SEQ ID NO: 1107986 - RNA, 22 nt, Human
guucuccaggggcuguucaucu

SEQ ID NO: 1107987 - RNA, 23 nt, Human
aguacauuugacccaaauaagcu

SEQ ID NO: 1107988 - RNA, 22 nt, Human
acauuucuccuacuuguuauuu

SEQ ID NO: 1107989 - RNA, 22 nt, Human
aucuaaagugucauaaguagcu

SEQ ID NO: 1107990 - RNA, 22 nt, Human
caauguacaaaauaauuacaca

SEQ ID NO: 1107991 - RNA, 22 nt, Human
cauaacauccuugcuacuuuga

SEQ ID NO: 1107992 - RNA, 22 nt, Human
uaacauuucggugacaguggga

SEQ ID NO: 1107993 - RNA, 22 nt, Human
accacaucgggcggacacuggg

SEQ ID NO: 1107994 - RNA, 22 nt, Human
ggaaggaucuggcugaaaucca

SEQ ID NO: 1107995 - RNA, 22 nt, Human
auguacauuauucgagugaugg

SEQ ID NO: 1107996 - RNA, 23 nt, Human
acucugacuuaguuauagcuauu

SEQ ID NO: 1107997 - RNA, 22 nt, Human
cuuuacagugaacuugcuuguc

SEQ ID NO: 1107998 - RNA, 22 nt, Human
aauaaguacuuggggauaacuu

SEQ ID NO: 1107999 - RNA, 22 nt, Human
aucauuugaacagaauuuguuu

SEQ ID NO: 1108000 - RNA, 22 nt, Human
ugucuuaugcugcauagacuau

SEQ ID NO: 1108001 - RNA, 22 nt, Human
uuuguagauuuucucuccagua

SEQ ID NO: 1108002 - RNA, 20 nt, Human
auacuuguuuucaggcuuuu

SEQ ID NO: 1108003 - RNA, 22 nt, Human
uuaaguauauccauuugacugg

SEQ ID NO: 1108004 - RNA, 21 nt, Human
gucuuuuuaauugcgauuucc

SEQ ID NO: 1108005 - RNA, 22 nt, Human
uuacaguuaaugugacuaacca

SEQ ID NO: 1108006 - RNA, 22 nt, Human
uuacaauuacuugaucucagcu

SEQ ID NO: 1108007 - RNA, 23 nt, Human
auuuccuaaaagauaaucauuac

SEQ ID NO: 1108008 - RNA, 22 nt, Human
gaagaaguguaagucuguuuca

SEQ ID NO: 1108009 - RNA, 22 nt, Human
ugauuugaauuuuaaaacacug

SEQ ID NO: 1108010 - RNA, 22 nt, Human
uuuguucaccuagcaaacuuuu

SEQ ID NO: 1108011 - RNA, 22 nt, Human
caguuuuucaaaauuacaugau

SEQ ID NO: 1108012 - RNA, 22 nt, Human
uggauaaaaugacauuaccuga

SEQ ID NO: 1108013 - RNA, 22 nt, Human
acaggauuaauaaaaaauugua

SEQ ID NO: 1108014 - RNA, 22 nt, Human
uaauccaaaacugaaucugugg

SEQ ID NO: 1108015 - RNA, 23 nt, Human
auaauaacgucugucuugucucu

SEQ ID NO: 1108016 - RNA, 22 nt, Human
uuggggaagcuuugaaauacuu

SEQ ID NO: 1108017 - RNA, 22 nt, Human
caucccugauuccuaguacagu

SEQ ID NO: 1108018 - RNA, 22 nt, Human
uucaguaugcugaaugauuuuu

SEQ ID NO: 1108019 - RNA, 22 nt, Human
uaggaaauaauucacucuggcu

SEQ ID NO: 1108020 - RNA, 22 nt, Human
ugcaugacaauugccgucaagu

SEQ ID NO: 1108021 - RNA, 22 nt, Human
cuauuuucccauaugguugaca

SEQ ID NO: 1108022 - RNA, 22 nt, Human
gagcaacacauugaaugaggau

SEQ ID NO: 1108023 - RNA, 22 nt, Human
uuuacgaauggggugacaacuu

SEQ ID NO: 1108024 - RNA, 22 nt, Human
guaaagcaaaauguagagauug

SEQ ID NO: 1108025 - RNA, 22 nt, Human
aaacucuacauggucgcaaaaa

SEQ ID NO: 1108026 - RNA, 22 nt, Human
uauaagaaacaaggcaaauuuu

SEQ ID NO: 1108027 - RNA, 22 nt, Human
acaaacagaguugaaaaauagg

SEQ ID NO: 1108028 - RNA, 22 nt, Human
uaccaaaaccaagccauuaucu

SEQ ID NO: 1108029 - RNA, 22 nt, Human
uuugacaacugugcaguuugua

SEQ ID NO: 1108030 - RNA, 22 nt, Human
uggcuguagaaucagagacuug

SEQ ID NO: 1108031 - RNA, 22 nt, Human
cugcacagucauuuccucucaa

SEQ ID NO: 1108032 - RNA, 22 nt, Human
ucugagagcuguagaagccuau

SEQ ID NO: 1108033 - RNA, 22 nt, Human
cucuggaucugcccugacgcca

SEQ ID NO: 1108034 - RNA, 22 nt, Human
cagucucuggugaguugacagu

SEQ ID NO: 1108035 - RNA, 23 nt, Human
gacagagugagaccuugucuuac

SEQ ID NO: 1108036 - RNA, 22 nt, Human
aaguguguauuuuucuucagug

SEQ ID NO: 1108037 - RNA, 22 nt, Human
uacaagcuuuuguguauaaaug

SEQ ID NO: 1108038 - RNA, 22 nt, Human
agagaagagucuugucaaauua

SEQ ID NO: 1108039 - RNA, 22 nt, Human
cuccuuaaagggagcagcagcu

SEQ ID NO: 1108040 - RNA, 22 nt, Human
cuguuuauucucaucuaaaaug

SEQ ID NO: 1108041 - RNA, 23 nt, Human
agaagcagcuucuggaguaucgg

SEQ ID NO: 1108042 - RNA, 22 nt, Human
ucauuccuccagcgggagucca

SEQ ID NO: 1108043 - RNA, 22 nt, Human
aaucuguuuuaaaguuugugcc

SEQ ID NO: 1108044 - RNA, 22 nt, Human
uuugaaaggagcuuuauccaga

SEQ ID NO: 1108045 - RNA, 22 nt, Human
cgauuuccgcuugaucugaucu

SEQ ID NO: 1108046 - RNA, 20 nt, Human
uuugauugccccucugacuu

SEQ ID NO: 1108047 - RNA, 22 nt, Human
cugaggaucuaauuauuggguc

SEQ ID NO: 1108048 - RNA, 22 nt, Human
uugggauacaucuugcugagcc

SEQ ID NO: 1108049 - RNA, 22 nt, Human
uucauugauuuccuuggaauaa

SEQ ID NO: 1108050 - RNA, 22 nt, Human
uccuuggagaaucuuguuuuac

SEQ ID NO: 1108051 - RNA, 22 nt, Human
aaagcagaacugagagagcugg

SEQ ID NO: 1108052 - RNA, 22 nt, Human
acaguaaucugggaacuuguua

SEQ ID NO: 1108053 - RNA, 22 nt, Human
augcuugaaaguuauuucauuu

SEQ ID NO: 1108054 - RNA, 22 nt, Human
uggagcagccuuuucuaagcaa

SEQ ID NO: 1108055 - RNA, 22 nt, Human
cucugaauggacacuccagugu

SEQ ID NO: 1108056 - RNA, 22 nt, Human
uugaagcauuugcuauagcauu

SEQ ID NO: 1108057 - RNA, 22 nt, Human
gauacuugaggagaucaccaca

SEQ ID NO: 1108058 - RNA, 22 nt, Human
aggaaaugccgcggcucucuuu

SEQ ID NO: 1108059 - RNA, 22 nt, Human
agaaacaucgcuuaguccucau

SEQ ID NO: 1108060 - RNA, 22 nt, Human
agagacauagcacaguuuuucg

SEQ ID NO: 1108061 - RNA, 22 nt, Human
uuuuuugucuugaagaaauggu

SEQ ID NO: 1108062 - RNA, 22 nt, Human
caggaaauucccagaaggacug

SEQ ID NO: 1108063 - RNA, 22 nt, Human
ucuaugucucuggaaggagugu

SEQ ID NO: 1108064 - RNA, 22 nt, Human
ugggguagguaugaaaacuagg

SEQ ID NO: 1108065 - RNA, 22 nt, Human
ucugaaauuuuaguuauagaaa

SEQ ID NO: 1108066 - RNA, 22 nt, Human
aucuuuggguacaaacuugccu

SEQ ID NO: 1108067 - RNA, 22 nt, Human
uagauacauacauuuuaaaaug

SEQ ID NO: 1108068 - RNA, 22 nt, Human
ugcauccuguucuagguuuggg

SEQ ID NO: 1108069 - RNA, 19 nt, Human
aacuacagcgcacuguccu

SEQ ID NO: 1108070 - RNA, 22 nt, Human
acuuuagauauuccucuguaca

SEQ ID NO: 1108071 - RNA, 22 nt, Human
uugacuauacucuggcggaaaa

SEQ ID NO: 1108072 - RNA, 22 nt, Human
uuacuguagcuugacauauguc

SEQ ID NO: 1108073 - RNA, 22 nt, Human
agggcagagauuaauuaagaca

SEQ ID NO: 1108074 - RNA, 22 nt, Human
aaaugcaugugcuauagaugug

SEQ ID NO: 1108075 - RNA, 22 nt, Human
gaaacacucaauuuaguaauuc

SEQ ID NO: 1108076 - RNA, 22 nt, Human
auuuacagacguggauuagugc

SEQ ID NO: 1108077 - RNA, 22 nt, Human
caguauuucauucagaauuguu

SEQ ID NO: 1108078 - RNA, 22 nt, Human
auguauacgugcaggucacagg

SEQ ID NO: 1108079 - RNA, 22 nt, Human
ggaaaaugggaaccugaagcca

SEQ ID NO: 1108080 - RNA, 22 nt, Human
aacuuucugaaaagcuugauca

SEQ ID NO: 1108081 - RNA, 22 nt, Human
cuacuucuguggcucuaagaga

SEQ ID NO: 1108082 - RNA, 22 nt, Human
uuauguauggauggcugaaagu

SEQ ID NO: 1108083 - RNA, 22 nt, Human
auuauugcaagcagugaaggga

SEQ ID NO: 1108084 - RNA, 22 nt, Human
ggaaguuuguauacuggccucu

SEQ ID NO: 1108085 - RNA, 22 nt, Human
uuuccuacugcccuauacacac

SEQ ID NO: 1108086 - RNA, 22 nt, Human
aacaguaugugagauuuacaca

SEQ ID NO: 1108087 - RNA, 22 nt, Human
ugagauucuguucagaaaaaug

SEQ ID NO: 1108088 - RNA, 22 nt, Human
uuugaaauguaucaguauaggu

SEQ ID NO: 1108089 - RNA, 22 nt, Human
auuaguagcacacagagaucag

SEQ ID NO: 1108090 - RNA, 20 nt, Human
aaagauacuuuuuguaaugg

SEQ ID NO: 1108091 - RNA, 22 nt, Human
cgaggagugugaaggcuugucg

SEQ ID NO: 1108092 - RNA, 21 nt, Human
agcauucaaaagaugccauaa

SEQ ID NO: 1108093 - RNA, 22 nt, Human
agacauauuggcuugcuuuaau

SEQ ID NO: 1108094 - RNA, 22 nt, Human
cuugaguaaagaaguauuuuag

SEQ ID NO: 1108095 - RNA, 22 nt, Human
uaucuuaaaaaucgaagcagau

SEQ ID NO: 1108096 - RNA, 22 nt, Human
ugucuacaagccuuguucggca

SEQ ID NO: 1108097 - RNA, 22 nt, Human
agcacguucuucauuacuucac

SEQ ID NO: 1108098 - RNA, 22 nt, Human
ucuuauugugaugaugaagaac

SEQ ID NO: 1108099 - RNA, 22 nt, Human
gggcauuucuugucaauguagg

SEQ ID NO: 1108100 - RNA, 22 nt, Human
guucuucaaagugacaacuaaa

SEQ ID NO: 1108101 - RNA, 22 nt, Human
cuggagaacagagcuguuuaga

SEQ ID NO: 1108102 - RNA, 22 nt, Human
uacagcuugauguuuguguguu

SEQ ID NO: 1108103 - RNA, 22 nt, Human
ggauguuuauccuaucuuaguu

SEQ ID NO: 1108104 - RNA, 22 nt, Human
aacugcuaacugguuugauacu

SEQ ID NO: 1108105 - RNA, 22 nt, Human
acaaaggugagcagaagacaca

SEQ ID NO: 1108106 - RNA, 22 nt, Human
aauuauguuugcuuuagaugga

SEQ ID NO: 1108107 - RNA, 21 nt, Human
gacauugagcgugucgcagug

SEQ ID NO: 1108108 - RNA, 22 nt, Human
cacuguuuuacauguuauuuaa

SEQ ID NO: 1108109 - RNA, 22 nt, Human
aauuagaagcuguuagcaaaau

SEQ ID NO: 1108110 - RNA, 22 nt, Human
aggcauuuaaagauguaagacu

SEQ ID NO: 1108111 - RNA, 22 nt, Human
aucuaugugggaaucauaauag

SEQ ID NO: 1108112 - RNA, 22 nt, Human
uuaaggaacuugucuuucucuu

SEQ ID NO: 1108113 - RNA, 22 nt, Human
cuacauuauguuuauugggacu

SEQ ID NO: 1108114 - RNA, 22 nt, Human
ccaucuucucuugaaccuccuu

SEQ ID NO: 1108115 - RNA, 22 nt, Human
cuugugaaaugccagauaaucu

SEQ ID NO: 1108116 - RNA, 23 nt, Human
cauuugauccucacaauaaaugg

SEQ ID NO: 1108117 - RNA, 22 nt, Human
augcuacauuuugguuuauaaa

SEQ ID NO: 1108118 - RNA, 22 nt, Human
auacuucuuuagcauauugaac

SEQ ID NO: 1108119 - RNA, 22 nt, Human
aauucaaggaucuguuaaaucu

SEQ ID NO: 1108120 - RNA, 22 nt, Human
uuucugcagcagacucagugug

SEQ ID NO: 1108121 - RNA, 22 nt, Human
uagcugcuugaccaggcagugg

SEQ ID NO: 1108122 - RNA, 22 nt, Human
uuccuucuucauuguguuacag

SEQ ID NO: 1108123 - RNA, 22 nt, Human
uuaaggcuguggggauuacugc

SEQ ID NO: 1108124 - RNA, 22 nt, Human
uacauguuauuucacuauuggu

SEQ ID NO: 1108125 - RNA, 22 nt, Human
aguaauggguugaaauuuaguu

SEQ ID NO: 1108126 - RNA, 22 nt, Human
aucauccauggcugaucauaaa

SEQ ID NO: 1108127 - RNA, 22 nt, Human
auagucuuagaaucuugagugu

SEQ ID NO: 1108128 - RNA, 22 nt, Human
ggagcgugcacuccaggcccuu

SEQ ID NO: 1108129 - RNA, 22 nt, Human
guauuaugaaugccgaggcggc

SEQ ID NO: 1108130 - RNA, 20 nt, Human
agugauuuguuaguacauug

SEQ ID NO: 1108131 - RNA, 22 nt, Human
uagaaguuaaaggaauacagaa

SEQ ID NO: 1108132 - RNA, 22 nt, Human
ugcaucuaaguggcuaacaacc

SEQ ID NO: 1108133 - RNA, 22 nt, Human
ucuaaacuuguaaacaagcaua

SEQ ID NO: 1108134 - RNA, 22 nt, Human
uaaucuuagacauguauuuuuc

SEQ ID NO: 1108135 - RNA, 22 nt, Human
gaagauuaccugagaccacuug

SEQ ID NO: 1108136 - RNA, 22 nt, Human
caaacauuuguuggaaccccug

SEQ ID NO: 1108137 - RNA, 22 nt, Human
auguuguugaacucuuugcaug

SEQ ID NO: 1108138 - RNA, 22 nt, Human
uuaauggauuggagguuucaau

SEQ ID NO: 1108139 - RNA, 22 nt, Human
cugauccagagccaaccaaggc

SEQ ID NO: 1108140 - RNA, 22 nt, Human
cacaucauguuaauucauuaca

SEQ ID NO: 1108141 - RNA, 22 nt, Human
uuugagaagauaggggaauacu

SEQ ID NO: 1108142 - RNA, 22 nt, Human
ugugagacguaggccaucgagg

SEQ ID NO: 1108143 - RNA, 22 nt, Human
uugaugcugucuuucagaauca

SEQ ID NO: 1108144 - RNA, 23 nt, Human
cuuuccuuucuuugacacccagc

SEQ ID NO: 1108145 - RNA, 22 nt, Human
aguguucuagcgcugugcuugu

SEQ ID NO: 1108146 - RNA, 22 nt, Human
uggaauguuaaaccucaaugau

SEQ ID NO: 1108147 - RNA, 22 nt, Human
gugaagaugccucaggugaccc

SEQ ID NO: 1108148 - RNA, 22 nt, Human
uacaguaaccagucuacuuaga

SEQ ID NO: 1108149 - RNA, 22 nt, Human
ugacucauauuucauggauacg

SEQ ID NO: 1108150 - RNA, 20 nt, Human
uuuuccacuccucaaaacag

SEQ ID NO: 1108151 - RNA, 22 nt, Human
uaucugucgggagucuuccgga

SEQ ID NO: 1108152 - RNA, 22 nt, Human
aguuuacccacuguugaaauua

SEQ ID NO: 1108153 - RNA, 22 nt, Human
ucagucucuggggcuucuguuu

SEQ ID NO: 1108154 - RNA, 22 nt, Human
uuucaugauuaacuuagugaau

SEQ ID NO: 1108155 - RNA, 22 nt, Human
gcagagcugucuaagucacuuc

SEQ ID NO: 1108156 - RNA, 22 nt, Human
uagcauuucacugaucuucacu

SEQ ID NO: 1108157 - RNA, 22 nt, Human
ugaaauguggagaugguaagua

SEQ ID NO: 1108158 - RNA, 22 nt, Human
caacauuucaaggucuuuagga

SEQ ID NO: 1108159 - RNA, 22 nt, Human
uauuacaguucgaguuucuagg

SEQ ID NO: 1108160 - RNA, 22 nt, Human
auccuaaagcagacagcagguu

SEQ ID NO: 1108161 - RNA, 22 nt, Human
uuggaaauguagaaaagcagau

SEQ ID NO: 1108162 - RNA, 22 nt, Human
auauuuguuuggcagaguucag

SEQ ID NO: 1108163 - RNA, 22 nt, Human
agauuucaauggauauugcaag

SEQ ID NO: 1108164 - RNA, 22 nt, Human
uugauguaauacuuugcaacca

SEQ ID NO: 1108165 - RNA, 22 nt, Human
augacuuaaucauacuugcauu

SEQ ID NO: 1108166 - RNA, 22 nt, Human
caguuuccugaagagaaagaau

SEQ ID NO: 1108167 - RNA, 22 nt, Human
uuucacaugguacugccuguuu

SEQ ID NO: 1108168 - RNA, 22 nt, Human
uaccaggagcccccuucugguc

SEQ ID NO: 1108169 - RNA, 22 nt, Human
aggcagagaaaaaccagauaug

SEQ ID NO: 1108170 - RNA, 22 nt, Human
cauccauagauugagagauggu

SEQ ID NO: 1108171 - RNA, 22 nt, Human
ugaaagaagccucccuuuggag

SEQ ID NO: 1108172 - RNA, 22 nt, Human
gagcuuuucccgucuuucucgu

SEQ ID NO: 1108173 - RNA, 22 nt, Human
caugaaaugauauuuggguggg

SEQ ID NO: 1108174 - RNA, 22 nt, Human
uuuacagagaauguacauaaag

SEQ ID NO: 1108175 - RNA, 22 nt, Human
uauggauauaaucagacuggaa

SEQ ID NO: 1108176 - RNA, 22 nt, Human
auaggcauaacacugauguccu

SEQ ID NO: 1108177 - RNA, 22 nt, Human
auugaagacuugguauccgugg

SEQ ID NO: 1108178 - RNA, 22 nt, Human
uucguuuaguccacaaaugcau

SEQ ID NO: 1108179 - RNA, 22 nt, Human
uauccaaaggaacaaucacagc

SEQ ID NO: 1108180 - RNA, 22 nt, Human
gucaucaucaggcagaugcugc

SEQ ID NO: 1108181 - RNA, 22 nt, Human
agaguuauccuguccuagggga

SEQ ID NO: 1108182 - RNA, 22 nt, Human
agaaguaucaggaagauucuca

SEQ ID NO: 1108183 - RNA, 22 nt, Human
cuccagaggcgacuugcaucac

SEQ ID NO: 1108184 - RNA, 22 nt, Human
aaguuacacauuuucauuguaa

SEQ ID NO: 1108185 - RNA, 22 nt, Human
cugguuaauccauaaacagaga

SEQ ID NO: 1108186 - RNA, 21 nt, Human
uugauuuagcagaucuagcug

SEQ ID NO: 1108187 - RNA, 22 nt, Human
caugcauuucuaccaaggaaua

SEQ ID NO: 1108188 - RNA, 22 nt, Human
acuguucacccagcacuagcag

SEQ ID NO: 1108189 - RNA, 22 nt, Human
augcccugggagugcuguacca

SEQ ID NO: 1108190 - RNA, 22 nt, Human
uuccuuuucuucuaccacaugu

SEQ ID NO: 1108191 - RNA, 22 nt, Human
accauccaaacugcuuucugug

SEQ ID NO: 1108192 - RNA, 22 nt, Human
uuggaaaugcauuuguuauuau

SEQ ID NO: 1108193 - RNA, 22 nt, Human
aucagugacuucuuccaaaguu

SEQ ID NO: 1108194 - RNA, 22 nt, Human
uucuuucugggguccuucggcu

SEQ ID NO: 1108195 - RNA, 23 nt, Human
ugucuccaucucauuacuugggg

SEQ ID NO: 1108196 - RNA, 22 nt, Human
ugguaaaugucuaacaaucacu

SEQ ID NO: 1108197 - RNA, 22 nt, Human
aaaucccacucacgaguuuugc

SEQ ID NO: 1108198 - RNA, 22 nt, Human
guuuccagccuccuggguaaag

SEQ ID NO: 1108199 - RNA, 22 nt, Human
auguccagaguaaagcacauuc

SEQ ID NO: 1108200 - RNA, 22 nt, Human
auccauuuuuucagaaugcucu

SEQ ID NO: 1108201 - RNA, 22 nt, Human
cuuuaguucuagaaagugaaac

SEQ ID NO: 1108202 - RNA, 22 nt, Human
ucaaaaugccgagugcccaggu

SEQ ID NO: 1108203 - RNA, 22 nt, Human
cuugucuaguuccuggugaugu

SEQ ID NO: 1108204 - RNA, 22 nt, Human
gaugugucccuuucaacucaga

SEQ ID NO: 1108205 - RNA, 22 nt, Human
gagucacauacuauguaauaga

SEQ ID NO: 1108206 - RNA, 22 nt, Human
aguaucagaugugauuaaaggg

SEQ ID NO: 1108207 - RNA, 22 nt, Human
augauacaccuaggagugggag

SEQ ID NO: 1108208 - RNA, 22 nt, Human
cuuauguaaacuacagauaaua

SEQ ID NO: 1108209 - RNA, 22 nt, Human
uuucauguuggauacuguuuca

SEQ ID NO: 1108210 - RNA, 22 nt, Human
uacaccagauuauuuauaacau

SEQ ID NO: 1108211 - RNA, 22 nt, Human
aaucuguugucaggaauccaca

SEQ ID NO: 1108212 - RNA, 22 nt, Human
uuugagaaacagacgaaagaca

SEQ ID NO: 1108213 - RNA, 19 nt, Human
gcuguuaaggacccucgga

SEQ ID NO: 1108214 - RNA, 22 nt, Human
aacacuaaaggucaguuagaag

SEQ ID NO: 1108215 - RNA, 22 nt, Human
uacuuugucauucuaaccuucc

SEQ ID NO: 1108216 - RNA, 22 nt, Human
uaaauacuuuuacuccacugau

SEQ ID NO: 1108217 - RNA, 22 nt, Human
auguucaaguaccuuugugucu

SEQ ID NO: 1108218 - RNA, 18 nt, Human
uauaaacacacuuagguu

SEQ ID NO: 1108219 - RNA, 22 nt, Human
gauccacaggaaccaaaacgca

SEQ ID NO: 1108220 - RNA, 22 nt, Human
acaacuuuaauggguuucagcu

SEQ ID NO: 1108221 - RNA, 22 nt, Human
uucucuucacagggaucauccu

SEQ ID NO: 1108222 - RNA, 22 nt, Human
uacauuguguuaaaacagaaga

SEQ ID NO: 1108223 - RNA, 22 nt, Human
agauaaaguccaaacuguguag

SEQ ID NO: 1108224 - RNA, 22 nt, Human
gucaaaacaaaguuaagaauuc

SEQ ID NO: 1108225 - RNA, 22 nt, Human
uuuguaguuguggaugcugaag

SEQ ID NO: 1108226 - RNA, 22 nt, Human
uugaauaguuuuggauagcaua

SEQ ID NO: 1108227 - RNA, 19 nt, Human
ucaaagucugagucacuuu

SEQ ID NO: 1108228 - RNA, 22 nt, Human
ugcugcuuguuuuguaaauaaa

SEQ ID NO: 1108229 - RNA, 22 nt, Human
ccucuaaauuguuugaaguugg

SEQ ID NO: 1108230 - RNA, 19 nt, Human
uuacaugacauaugaagga

SEQ ID NO: 1108231 - RNA, 22 nt, Human
aaugcuuuuugcgaaaugugca

SEQ ID NO: 1108232 - RNA, 22 nt, Human
uuugggcuguacaauuucugua

SEQ ID NO: 1108233 - RNA, 22 nt, Human
cuauacagcagcuuacuaguua

SEQ ID NO: 1108234 - RNA, 22 nt, Human
acuagaaacuaauggauuauua

SEQ ID NO: 1108235 - RNA, 22 nt, Human
auacaacagaaaaugauuauuc

SEQ ID NO: 1108236 - RNA, 22 nt, Human
aucaucaucuaaauugugucgc

SEQ ID NO: 1108237 - RNA, 22 nt, Human
uaugcuagauggaaaaauauug

SEQ ID NO: 1108238 - RNA, 22 nt, Human
acaaucagcacugaguuuaucu

SEQ ID NO: 1108239 - RNA, 22 nt, Human
uuagaaaaaggcuguggucuua

SEQ ID NO: 1108240 - RNA, 22 nt, Human
aacaugaugacauuguaagcuu

SEQ ID NO: 1108241 - RNA, 19 nt, Human
uaugaaguugauaaaaguu

SEQ ID NO: 1108242 - RNA, 22 nt, Human
agcuuuauuugucauucacggc

SEQ ID NO: 1108243 - RNA, 22 nt, Human
uuuuuaagagucuggaaauagu

SEQ ID NO: 1108244 - RNA, 22 nt, Human
ucauggaugauagcuucauugc

SEQ ID NO: 1108245 - RNA, 22 nt, Human
uuaccacagugccugucuaaug

SEQ ID NO: 1108246 - RNA, 22 nt, Human
aaugguaauauuucauaguugu

SEQ ID NO: 1108247 - RNA, 22 nt, Human
auccauuugccgugcuaugugc

SEQ ID NO: 1108248 - RNA, 22 nt, Human
agaaaagaggcuuucuaagcau

SEQ ID NO: 1108249 - RNA, 22 nt, Human
cugguuuuuagugcuuaggagu

SEQ ID NO: 1108250 - RNA, 22 nt, Human
aaggcuauaucucaauacuauu

SEQ ID NO: 1108251 - RNA, 22 nt, Human
gaauguuuaaaaggugcaguuu

SEQ ID NO: 1108252 - RNA, 22 nt, Human
aguuagugaagcucaucacagc

SEQ ID NO: 1108253 - RNA, 22 nt, Human
guucuuaaagauucaucaagca

SEQ ID NO: 1108254 - RNA, 21 nt, Human
aaagugguaaggauuauuuug

SEQ ID NO: 1108255 - RNA, 22 nt, Human
ccauccaugguguugguuguau

SEQ ID NO: 1108256 - RNA, 22 nt, Human
uaacaaaguauuguuuguguau

SEQ ID NO: 1108257 - RNA, 21 nt, Human
caaaagagacugauucuugga

SEQ ID NO: 1108258 - RNA, 22 nt, Human
gaugaguucuuucuauucuauu

SEQ ID NO: 1108259 - RNA, 22 nt, Human
ugacauccuacaccccuggguc

SEQ ID NO: 1108260 - RNA, 22 nt, Human
uuauuuaaaagugguaagauuc

SEQ ID NO: 1108261 - RNA, 21 nt, Human
cuuuggcaagggagaagucac

SEQ ID NO: 1108262 - RNA, 22 nt, Human
aucuguaaauaaaaagggaggu

SEQ ID NO: 1108263 - RNA, 22 nt, Human
aucuucaaggaaaaaauacagu

SEQ ID NO: 1108264 - RNA, 22 nt, Human
accaguuaaagaauaugaggcc

SEQ ID NO: 1108265 - RNA, 22 nt, Human
auugcacaucugcacuacagcc

SEQ ID NO: 1108266 - RNA, 21 nt, Human
uucacaguggauaacuuucug

SEQ ID NO: 1108267 - RNA, 22 nt, Human
acauuuuuggguugaugucuga

SEQ ID NO: 1108268 - RNA, 21 nt, Human
ucaauuauggaugugugcaaa

SEQ ID NO: 1108269 - RNA, 23 nt, Human
uacagccaugucgcugauuuaac

SEQ ID NO: 1108270 - RNA, 22 nt, Human
gcacaaaagguacuucauguag

SEQ ID NO: 1108271 - RNA, 22 nt, Human
uagaugaacagaaagccacugu

SEQ ID NO: 1108272 - RNA, 22 nt, Human
cagcugcuguucaguuuuguuu

SEQ ID NO: 1108273 - RNA, 22 nt, Human
uacuuugagaugaugcugaucg

SEQ ID NO: 1108274 - RNA, 17 nt, Human
auucaugaacauguccu

SEQ ID NO: 1108275 - RNA, 22 nt, Human
uuuaaacuaacaguacacguug

SEQ ID NO: 1108276 - RNA, 22 nt, Human
guuggacaguuugggaagggag

SEQ ID NO: 1108277 - RNA, 22 nt, Human
gucuuuuuuacaccuuacauca

SEQ ID NO: 1108278 - RNA, 22 nt, Human
guugaaauccuaacccccuagu

SEQ ID NO: 1108279 - RNA, 22 nt, Human
aucaagggcgcgugguucggcg

SEQ ID NO: 1108280 - RNA, 23 nt, Human
aacauuuguaaggugauuuuguu

SEQ ID NO: 1108281 - RNA, 22 nt, Human
ugugaagaauuaaugugaauca

SEQ ID NO: 1108282 - RNA, 22 nt, Human
gagaauacaaccagaagcugag

SEQ ID NO: 1108283 - RNA, 22 nt, Human
auuucagaguagaucguuauuu

SEQ ID NO: 1108284 - RNA, 21 nt, Human
uggacauuuacccuucaggga

SEQ ID NO: 1108285 - RNA, 22 nt, Human
auguacaaucuaucacaagaag

SEQ ID NO: 1108286 - RNA, 22 nt, Human
guggucaucuaacuaaauuuuc

SEQ ID NO: 1108287 - RNA, 22 nt, Human
gacaagaugacaucauggcuuc

SEQ ID NO: 1108288 - RNA, 22 nt, Human
uugauuugauuguaauggcucu

SEQ ID NO: 1108289 - RNA, 18 nt, Human
ggaaaaggagugucuagc

SEQ ID NO: 1108290 - RNA, 22 nt, Human
uccaagacaagcacauuccugc

SEQ ID NO: 1108291 - RNA, 22 nt, Human
uagauuaucccugauuugucca

SEQ ID NO: 1108292 - RNA, 22 nt, Human
ucuguauaaaguaccgguggca

SEQ ID NO: 1108293 - RNA, 22 nt, Human
uuaaguccuugguaauuuucuu

SEQ ID NO: 1108294 - RNA, 22 nt, Human
auuaguguuguggcuucauggc

SEQ ID NO: 1108295 - RNA, 22 nt, Human
auuaauaucccccgccguucug

SEQ ID NO: 1108296 - RNA, 22 nt, Human
uuuacuuuugguaaggucauuu

SEQ ID NO: 1108297 - RNA, 22 nt, Variola virus
gucguaaagcguuaaaucaaua

SEQ ID NO: 1108298 - RNA, 22 nt, Human
gccugaggaaugcuccugacuu

SEQ ID NO: 1108299 - RNA, 22 nt, Human
gaaugcacuuccaacaucuauu

SEQ ID NO: 1108300 - RNA, 22 nt, Human
ccagagcugauuccugggacuu

SEQ ID NO: 1108301 - RNA, 22 nt, Human
cacugaaggcugcagcucagcc

SEQ ID NO: 1108302 - RNA, 22 nt, Human
cagcagcccacgcgugcugucc

SEQ ID NO: 1108303 - RNA, 22 nt, Human
gucccacaccuugaggggucuu

SEQ ID NO: 1108304 - RNA, 19 nt, Human
agacacacuugauaugugu

SEQ ID NO: 1108305 - RNA, 22 nt, Human
caggggcucccugggugccagu

SEQ ID NO: 1108306 - RNA, 22 nt, Human
cugaagcacagcauauaaauaa

SEQ ID NO: 1108307 - RNA, 22 nt, Human
agcaggagagcagugcgugguc

SEQ ID NO: 1108308 - RNA, 22 nt, Human
ccugaggggcugcaggccagcu

SEQ ID NO: 1108309 - RNA, 22 nt, Human
uuggcuucucuuaacccuaaag

SEQ ID NO: 1108310 - RNA, 22 nt, Human
cagggcuccccgcaccgcagcc

SEQ ID NO: 1108311 - RNA, 22 nt, Human
aggucacacuuggaucauagaa

SEQ ID NO: 1108312 - RNA, 22 nt, Human
accccagcucugagccacacca

SEQ ID NO: 1108313 - RNA, 22 nt, Human
ggaagggccucgggcgugggac

SEQ ID NO: 1108314 - RNA, 22 nt, Human
acagagcuuaggaugacuccca

SEQ ID NO: 1108315 - RNA, 22 nt, Human
cagagccagcccacuguucccg

SEQ ID NO: 1108316 - RNA, 22 nt, Human
aggaccuguaccucagcaucua

SEQ ID NO: 1108317 - RNA, 22 nt, Human
cuggcagggugggcuuugcuuu

SEQ ID NO: 1108318 - RNA, 22 nt, Human
gccuggccugaacuaggaggug

SEQ ID NO: 1108319 - RNA, 22 nt, Human
caggagugaguuggggucuaca

SEQ ID NO: 1108320 - RNA, 22 nt, Human
gagccuggauugaagugggugg

SEQ ID NO: 1108321 - RNA, 22 nt, Human
cuguuuaucccuuuggucagca

SEQ ID NO: 1108322 - RNA, 22 nt, Human
gagcagcugcagugcagacccu

SEQ ID NO: 1108323 - RNA, 22 nt, Human
gccuggagagcacugugcgcuu

SEQ ID NO: 1108324 - RNA, 22 nt, Human
ggacacaguggaagacagcuug

SEQ ID NO: 1108325 - RNA, 22 nt, Human
gccugcagauauauaggauggu

SEQ ID NO: 1108326 - RNA, 22 nt, Human
gcagcagaggcccuacucuuug

SEQ ID NO: 1108327 - RNA, 22 nt, Human
cauguuuucuaggcuuucacaa

SEQ ID NO: 1108328 - RNA, 22 nt, Human
ccuggcugcuauagcagcaugu

SEQ ID NO: 1108329 - RNA, 22 nt, Human
aagaagaugguuaacuuucagu

SEQ ID NO: 1108330 - RNA, 22 nt, Human
cugacucuccucaagcauaaau

SEQ ID NO: 1108331 - RNA, 19 nt, Human
ucccuggcgccucucgggc

SEQ ID NO: 1108332 - RNA, 23 nt, Human
aggugcagcccuggaccugcccc

SEQ ID NO: 1108333 - RNA, 22 nt, Human
caaaauguucuggcaccuuuaa

SEQ ID NO: 1108334 - RNA, 21 nt, Human
uauuucuuugacucucucccu

SEQ ID NO: 1108335 - RNA, 22 nt, Human
gccaggcugcuggcugcugucc

SEQ ID NO: 1108336 - RNA, 22 nt, Human
gcagcaaucuucacagugucau

SEQ ID NO: 1108337 - RNA, 22 nt, Human
ggcuuccuuucacuacccucag

SEQ ID NO: 1108338 - RNA, 22 nt, Human
gugccugguuuggggaguguuc

SEQ ID NO: 1108339 - RNA, 22 nt, Human
ugagaggcagaauggugccugc

SEQ ID NO: 1108340 - RNA, 22 nt, Human
augcuguagaucuuagccucua

SEQ ID NO: 1108341 - RNA, 22 nt, Human
gagggcugaugcuuacuuauuu

SEQ ID NO: 1108342 - RNA, 19 nt, Human
caucuggaugauucuccug

SEQ ID NO: 1108343 - RNA, 22 nt, Human
cucugugauuuugugagccaga

SEQ ID NO: 1108344 - RNA, 22 nt, Human
ugggggagauugugcaucucua

SEQ ID NO: 1108345 - RNA, 22 nt, Human
agcucagcuuccucuccaugcu

SEQ ID NO: 1108346 - RNA, 22 nt, Human
aagugguagacaaagauaauug

SEQ ID NO: 1108347 - RNA, 22 nt, Human
gccuggagaccugcuccucuac

SEQ ID NO: 1108348 - RNA, 22 nt, Human
cagucccagcugcucagaaggc

SEQ ID NO: 1108349 - RNA, 22 nt, Human
gcuggagccuucugcucuguug

SEQ ID NO: 1108350 - RNA, 22 nt, Human
ccaggaagccucagaugcugag

SEQ ID NO: 1108351 - RNA, 22 nt, Human
agaauucugacaauagaauugg

SEQ ID NO: 1108352 - RNA, 22 nt, Human
aaagagcuaacauugccgagau

SEQ ID NO: 1108353 - RNA, 22 nt, Human
uuucauguuuauggaaaaugag

SEQ ID NO: 1108354 - RNA, 22 nt, Human
acaggcucuggggcaggauggc

SEQ ID NO: 1108355 - RNA, 22 nt, Human
caggaacacaaugagucucaaa

SEQ ID NO: 1108356 - RNA, 18 nt, Human
uggcagccagcugcuccu

SEQ ID NO: 1108357 - RNA, 22 nt, Human
ggcuggcucagggcuugagaga

SEQ ID NO: 1108358 - RNA, 22 nt, Human
aaaauggucucagcuggcacca

SEQ ID NO: 1108359 - RNA, 20 nt, Human
ucagggcaugggacagcccc

SEQ ID NO: 1108360 - RNA, 22 nt, Human
uuccaggggcagcagugauggu

SEQ ID NO: 1108361 - RNA, 22 nt, Human
cugucuguuucugauucaaccu

SEQ ID NO: 1108362 - RNA, 22 nt, Human
ccugccugcaccuucucugggg

SEQ ID NO: 1108363 - RNA, 18 nt, Human
gcaggagauggguggggu

SEQ ID NO: 1108364 - RNA, 22 nt, Human
ucaaauaugugauagaagcuaa

SEQ ID NO: 1108365 - RNA, 22 nt, Human
ugccugcugcuaagcucuuugu

SEQ ID NO: 1108366 - RNA, 22 nt, Human
aucuauuaugcugagaaacugu

SEQ ID NO: 1108367 - RNA, 22 nt, Human
gcuggcagggacagcugcgugu

SEQ ID NO: 1108368 - RNA, 22 nt, Human
ccugugucagccccugccucca

SEQ ID NO: 1108369 - RNA, 22 nt, Human
cagggccauuggcguggcuguc

SEQ ID NO: 1108370 - RNA, 22 nt, Human
cugggcacagcguugggcucuu

SEQ ID NO: 1108371 - RNA, 22 nt, Human
acucugagcaucccaagucuua

SEQ ID NO: 1108372 - RNA, 22 nt, Human
auagauacauuagguaacuugu

SEQ ID NO: 1108373 - RNA, 22 nt, Human
ggcucaggggccaggccugucc

SEQ ID NO: 1108374 - RNA, 22 nt, Human
gcugucagaaggugaaggguaa

SEQ ID NO: 1108375 - RNA, 22 nt, Human
ucuguuuaggcaaaauagcuac

SEQ ID NO: 1108376 - RNA, 22 nt, Human
ugggguggauagaaagugaugu

SEQ ID NO: 1108377 - RNA, 20 nt, Human
agauggugaaggccagggag

SEQ ID NO: 1108378 - RNA, 22 nt, Human
gcaggcuggaggcuguucuggg

SEQ ID NO: 1108379 - RNA, 21 nt, Human
agcugccacccuagcuucuga

SEQ ID NO: 1108380 - RNA, 22 nt, Human
uguccucuaauuggccucuugc

SEQ ID NO: 1108381 - RNA, 22 nt, Human
ccucagcugcuucccuggagcc

SEQ ID NO: 1108382 - RNA, 22 nt, Human
uccuggccugucuggaguagcu

SEQ ID NO: 1108383 - RNA, 22 nt, Human
ccagccaggcuggcuguggagg

SEQ ID NO: 1108384 - RNA, 22 nt, Human
gcuuccugucccucagccauga

SEQ ID NO: 1108385 - RNA, 22 nt, Human
gcaggcugugaggcucagaugg

SEQ ID NO: 1108386 - RNA, 22 nt, Human
ucucagaguaauucuuuaaggu

SEQ ID NO: 1108387 - RNA, 21 nt, Human
aggugggagaccauguagguc

SEQ ID NO: 1108388 - RNA, 22 nt, Human
gcacagaacuucucuuaguagg

SEQ ID NO: 1108389 - RNA, 22 nt, Human
caggugccucaggaugagacaa

SEQ ID NO: 1108390 - RNA, 23 nt, Human
uccuuccuuugagaggcuccauc

SEQ ID NO: 1108391 - RNA, 20 nt, Human
ucuggcucuuugcuccuccc

SEQ ID NO: 1108392 - RNA, 22 nt, Human
uuuccuuccagguuccuaaggc

SEQ ID NO: 1108393 - RNA, 22 nt, Human
caggagcucucaucgucagggc

SEQ ID NO: 1108394 - RNA, 22 nt, Human
cuggcaggcagacuucugcaag

SEQ ID NO: 1108395 - RNA, 22 nt, Human
caucagcacuaugauuaaagua

SEQ ID NO: 1108396 - RNA, 22 nt, Human
gaaggcugaugacagauucugc

SEQ ID NO: 1108397 - RNA, 22 nt, Human
gaggagguuccggguggagaag

SEQ ID NO: 1108398 - RNA, 22 nt, Human
acccagcuggaugcauggaggc

SEQ ID NO: 1108399 - RNA, 22 nt, Human
gccuggaguucagccaaguccc

SEQ ID NO: 1108400 - RNA, 18 nt, Human
ccugccagucuggagcag

SEQ ID NO: 1108401 - RNA, 22 nt, Human
aggcuggguaccugucauaugc

SEQ ID NO: 1108402 - RNA, 22 nt, Human
cagaaauggagcccaggaaucu

SEQ ID NO: 1108403 - RNA, 22 nt, Human
aaaaugugaucuacaaaugcaa

SEQ ID NO: 1108404 - RNA, 22 nt, Human
agacaaaggauuaaugaugaug

SEQ ID NO: 1108405 - RNA, 22 nt, Human
acuauacauugaauguuaaggu

SEQ ID NO: 1108406 - RNA, 22 nt, Human
agagccaggaugucuucugggg

SEQ ID NO: 1108407 - RNA, 22 nt, Human
cugugugugucugcagcauacu

SEQ ID NO: 1108408 - RNA, 23 nt, Human
aaguucaagucacagccugucuu

SEQ ID NO: 1108409 - RNA, 22 nt, Human
gcugcaggagcuggagcugugg

SEQ ID NO: 1108410 - RNA, 22 nt, Human
gcagggacaaggcagguguucu

SEQ ID NO: 1108411 - RNA, 22 nt, Human
ucugagaguacgggcugcgcgc

SEQ ID NO: 1108412 - RNA, 22 nt, Human
gaagcagcagcuggggacaguu

SEQ ID NO: 1108413 - RNA, 22 nt, Human
cggcagagcuuccugcucagcg

SEQ ID NO: 1108414 - RNA, 22 nt, Human
uuugcauucuagaaaaauuucu

SEQ ID NO: 1108415 - RNA, 22 nt, Human
aaagguuaguucuuagaagugc

SEQ ID NO: 1108416 - RNA, 19 nt, Human
cccuggcaggcaagccugg

SEQ ID NO: 1108417 - RNA, 22 nt, Human
gcagagccugggggucugcgga

SEQ ID NO: 1108418 - RNA, 17 nt, Human
cugcuuugugcaacgcu

SEQ ID NO: 1108419 - RNA, 22 nt, Human
uuguuuuggaagaacuuacucu

SEQ ID NO: 1108420 - RNA, 22 nt, Human
aguggccagugcugcucugggg

SEQ ID NO: 1108421 - RNA, 22 nt, Human
aaaaagguugauccagauuagg

SEQ ID NO: 1108422 - RNA, 22 nt, Human
ccuguggcacaugcagggauuc

SEQ ID NO: 1108423 - RNA, 22 nt, Human
uggagcucaaaggccuguggga

SEQ ID NO: 1108424 - RNA, 22 nt, Human
gggugcaggcagcccaggcagg

SEQ ID NO: 1108425 - RNA, 22 nt, Human
acagccagaggagccaggcugg

SEQ ID NO: 1108426 - RNA, 23 nt, Human
ccagcucccaggucugaggacug

SEQ ID NO: 1108427 - RNA, 22 nt, Human
auccuugaaugacucugcccuc

SEQ ID NO: 1108428 - RNA, 22 nt, Human
ugaagguggcauaggagagaug

SEQ ID NO: 1108429 - RNA, 22 nt, Human
gauacauuuuaucuccuaacag

SEQ ID NO: 1108430 - RNA, 22 nt, Human
agggcugggcugcuuguuguca

SEQ ID NO: 1108431 - RNA, 22 nt, Human
accagagauggggcuucucugu

SEQ ID NO: 1108432 - RNA, 22 nt, Human
agguccagcuguugcagccucc

SEQ ID NO: 1108433 - RNA, 22 nt, Human
ggcagagaugugggucagaauc

SEQ ID NO: 1108434 - RNA, 22 nt, Human
agcugagcacauucaaacaggu

SEQ ID NO: 1108435 - RNA, 22 nt, Human
cugcccugagucaugccagaug

SEQ ID NO: 1108436 - RNA, 22 nt, Human
cuuuauguccaccagacugcaa

SEQ ID NO: 1108437 - RNA, 22 nt, Human
gcuguccucugaucucuggagg

SEQ ID NO: 1108438 - RNA, 22 nt, Human
cauugcacuccacccuaggcaa

SEQ ID NO: 1108439 - RNA, 22 nt, Human
uggcucaguuccaucaucugga

SEQ ID NO: 1108440 - RNA, 22 nt, Human
uuucagaucauuuuuuaaguac

SEQ ID NO: 1108441 - RNA, 22 nt, Human
cccaggcagucuggcucuaaag

SEQ ID NO: 1108442 - RNA, 19 nt, Human
ugcagcucagggcaggggc

SEQ ID NO: 1108443 - RNA, 22 nt, Human
uacaguucacaguaucauaaau

SEQ ID NO: 1108444 - RNA, 22 nt, Human
ggggcccagcaccccuccucgc

SEQ ID NO: 1108445 - RNA, 22 nt, Human
acuuugugcccaacagaaagaa

SEQ ID NO: 1108446 - RNA, 22 nt, Human
ugggcuggcugaggcauucacu

SEQ ID NO: 1108447 - RNA, 22 nt, Human
ggcaggagaauggcgugaacuc

SEQ ID NO: 1108448 - RNA, 22 nt, Human
gaaaauguuuguccggagcuga

SEQ ID NO: 1108449 - RNA, 22 nt, Human
uggcaggguggcaacuuuuggu

SEQ ID NO: 1108450 - RNA, 22 nt, Human
cagucccaaggaggaagcaguc

SEQ ID NO: 1108451 - RNA, 22 nt, Human
ugauuuccucuacuagcaauua

SEQ ID NO: 1108452 - RNA, 22 nt, Human
ccucuggggguccucagagucu

SEQ ID NO: 1108453 - RNA, 18 nt, Human
acaaauguagugucuuaa

SEQ ID NO: 1108454 - RNA, 22 nt, Human
aaaucacuaaguuauagugugg

SEQ ID NO: 1108455 - RNA, 22 nt, Human
auuguaauuuuagagaaagugg

SEQ ID NO: 1108456 - RNA, 19 nt, Human
ccagcagcuuugauucucu

SEQ ID NO: 1108457 - RNA, 22 nt, Human
uaugcacagaaguuugcugaau

SEQ ID NO: 1108458 - RNA, 22 nt, Human
cacagggccuugugugacugca

SEQ ID NO: 1108459 - RNA, 22 nt, Human
gccuggagcucuccacuugggg

SEQ ID NO: 1108460 - RNA, 22 nt, Human
aauuucaaugcacucaugguug

SEQ ID NO: 1108461 - RNA, 22 nt, Human
agcagccaaaugaagauuuuac

SEQ ID NO: 1108462 - RNA, 22 nt, Human
gcaagcugcuuaagcucauugu

SEQ ID NO: 1108463 - RNA, 22 nt, Human
aggcacugcagauuacaggcgc

SEQ ID NO: 1108464 - RNA, 22 nt, Human
auuuucugguugagguuuaaca

SEQ ID NO: 1108465 - RNA, 22 nt, Human
agaggccagggacacugcucaa

SEQ ID NO: 1108466 - RNA, 22 nt, Human
agagccagcauuugacacuggc

SEQ ID NO: 1108467 - RNA, 22 nt, Human
guguguccaggcgggagucaag

SEQ ID NO: 1108468 - RNA, 21 nt, Human
aggcucagagaucaaacagua

SEQ ID NO: 1108469 - RNA, 23 nt, Human
cugcagccgcguggggacgugga

SEQ ID NO: 1108470 - RNA, 22 nt, Human
auaugaagaauuccaauuugga

SEQ ID NO: 1108471 - RNA, 22 nt, Human
gugcauuggugcgccacuucac

SEQ ID NO: 1108472 - RNA, 22 nt, Human
acuuaguauuuuucagcuuuga

SEQ ID NO: 1108473 - RNA, 22 nt, Human
ggugcagugguguggcaaaggg

SEQ ID NO: 1108474 - RNA, 22 nt, Human
gcuggugccuuguuguuguuac

SEQ ID NO: 1108475 - RNA, 22 nt, Human
acuggcugaaguuuacuuuuug

SEQ ID NO: 1108476 - RNA, 17 nt, Human
uagagcugguucaggag

SEQ ID NO: 1108477 - RNA, 22 nt, Human
ugccagcuccgaggagcugcag

SEQ ID NO: 1108478 - RNA, 21 nt, Human
ggagggcagcccagacuggcu

SEQ ID NO: 1108479 - RNA, 22 nt, Human
ccacugggggcugcaggcacuc

SEQ ID NO: 1108480 - RNA, 22 nt, Human
uaacagaaauaguaggugaggg

SEQ ID NO: 1108481 - RNA, 22 nt, Human
cugcagcuccccugagaucaag

SEQ ID NO: 1108482 - RNA, 22 nt, Human
ucacuuauugcucaucucaugc

SEQ ID NO: 1108483 - RNA, 22 nt, Human
aaggaagacacagaugaaguga

SEQ ID NO: 1108484 - RNA, 22 nt, Human
ugggcugcuuccucagcugaga

SEQ ID NO: 1108485 - RNA, 23 nt, Human
ugucauugugacuacagaaccag

SEQ ID NO: 1108486 - RNA, 22 nt, Human
uggcccugaggggcugugcccc

SEQ ID NO: 1108487 - RNA, 22 nt, Human
gagugagggcagcaggggcugc

SEQ ID NO: 1108488 - RNA, 22 nt, Human
uuccaugugaguacacugugau

SEQ ID NO: 1108489 - RNA, 20 nt, Human
cagcaguggaugagaguuuu

SEQ ID NO: 1108490 - RNA, 22 nt, Human
cagccugcagggcugccuguug

SEQ ID NO: 1108491 - RNA, 22 nt, Human
uggcugggcccccaccugccuc

SEQ ID NO: 1108492 - RNA, 22 nt, Human
ggagcugcuuugaucugaagaa

SEQ ID NO: 1108493 - RNA, 22 nt, Human
agacagcauggagcugauaaca

SEQ ID NO: 1108494 - RNA, 22 nt, Human
gugggccuugcagggugcaggg

SEQ ID NO: 1108495 - RNA, 22 nt, Human
uguuuuguuuaugagagcacag

SEQ ID NO: 1108496 - RNA, 22 nt, Human
ucuuuacaaucuaagcauaguu

SEQ ID NO: 1108497 - RNA, 20 nt, Human
cuguagggugcagcaggcuc

SEQ ID NO: 1108498 - RNA, 22 nt, Human
acugccuugucucuugccuguu

SEQ ID NO: 1108499 - RNA, 22 nt, Human
acugggccuggauuggcguguc

SEQ ID NO: 1108500 - RNA, 22 nt, Human
gcucucuguuauuaagaucuuu

SEQ ID NO: 1108501 - RNA, 22 nt, Human
gacacagcacuguacaaggaau

SEQ ID NO: 1108502 - RNA, 22 nt, Human
auuuuuccaauuaggauaaaga

SEQ ID NO: 1108503 - RNA, 22 nt, Human
gcuggcuguuggagguaccugc

SEQ ID NO: 1108504 - RNA, 19 nt, Human
uaaaaugucuguggucagu

SEQ ID NO: 1108505 - RNA, 22 nt, Human
ggaggccaucuggcuggaggcu

SEQ ID NO: 1108506 - RNA, 22 nt, Human
cagagcaggcccacugcccucc

SEQ ID NO: 1108507 - RNA, 22 nt, Human
uggcugcuuguuuuagugaggc

SEQ ID NO: 1108508 - RNA, 22 nt, Human
ucaccaggcuggaaugcagugg

SEQ ID NO: 1108509 - RNA, 22 nt, Human
accagccugucugagucguggg

SEQ ID NO: 1108510 - RNA, 22 nt, Human
uggcagcagggccccuggagga

SEQ ID NO: 1108511 - RNA, 22 nt, Human
uguguuuugaacucaucuacug

SEQ ID NO: 1108512 - RNA, 22 nt, Human
ucaacacucuuuggcacaguua

SEQ ID NO: 1108513 - RNA, 22 nt, Human
uccucaggaugugggguagaau

SEQ ID NO: 1108514 - RNA, 22 nt, Human
gagcugggacauggguccucuc

SEQ ID NO: 1108515 - RNA, 22 nt, Human
acagggcaugugcaagagacau

SEQ ID NO: 1108516 - RNA, 22 nt, Human
cucaggauguacuacagaaggc

SEQ ID NO: 1108517 - RNA, 22 nt, Human
agaggccaucugcucugugggg

SEQ ID NO: 1108518 - RNA, 22 nt, Human
augguacaaaauguauaaaguc

SEQ ID NO: 1108519 - RNA, 22 nt, Human
aggugcuuggcucgugcacaca

SEQ ID NO: 1108520 - RNA, 22 nt, Human
gggcaagcucuucagaagcucu

SEQ ID NO: 1108521 - RNA, 22 nt, Human
gcuggccuuugaggaagcugcg

SEQ ID NO: 1108522 - RNA, 22 nt, Human
cugagggccuuggcuccugccc

SEQ ID NO: 1108523 - RNA, 22 nt, Human
ucccuggacagccuugccuggg

SEQ ID NO: 1108524 - RNA, 19 nt, Human
uccccagcaccucugaguc

SEQ ID NO: 1108525 - RNA, 22 nt, Human
ugucagugguagacccagaggu

SEQ ID NO: 1108526 - RNA, 22 nt, Human
agggccugcucuaucacucuca

SEQ ID NO: 1108527 - RNA, 22 nt, Human
aguauguauuuuauacuuacag

SEQ ID NO: 1108528 - RNA, 17 nt, Human
acacagccagguucucc

SEQ ID NO: 1108529 - RNA, 22 nt, Human
gguggggcccuggcacugguau

SEQ ID NO: 1108530 - RNA, 18 nt, Human
gguggccuugacuucucu

SEQ ID NO: 1108531 - RNA, 22 nt, Human
agagaagacuuacagccacagu

SEQ ID NO: 1108532 - RNA, 22 nt, Human
agccacagucugaugccugaga

SEQ ID NO: 1108533 - RNA, 22 nt, Human
ugacacagaaauuaagcuguca

SEQ ID NO: 1108534 - RNA, 22 nt, Human
uuuucucuacaaaauaaccagc

SEQ ID NO: 1108535 - RNA, 22 nt, Human
uccguauuugacuauugcaccg

SEQ ID NO: 1108536 - RNA, 22 nt, Human
gcauacagagaggauguggcau

SEQ ID NO: 1108537 - RNA, 22 nt, Human
uaugcacauauaaccugcacug

SEQ ID NO: 1108538 - RNA, 22 nt, Human
caggccugugacaccgugucug

SEQ ID NO: 1108539 - RNA, 23 nt, Human
caugccaguuugugcaggcagau

SEQ ID NO: 1108540 - RNA, 22 nt, Human
uuuauuaugauggacaccuucg

SEQ ID NO: 1108541 - RNA, 22 nt, Human
gaaaguuucuucauuaagaugu

SEQ ID NO: 1108542 - RNA, 18 nt, Human
guucaaggucaagagaga

SEQ ID NO: 1108543 - RNA, 22 nt, Human
agauuuccaucuuuuucaugug

SEQ ID NO: 1108544 - RNA, 22 nt, Human
aggagcugucagagugccagag

SEQ ID NO: 1108545 - RNA, 22 nt, Human
ugguccuggggaucugcaguga

SEQ ID NO: 1108546 - RNA, 22 nt, Human
ggccugcugacccaaguccugu

SEQ ID NO: 1108547 - RNA, 22 nt, Human
cuuuauguuggggugucuuagu

SEQ ID NO: 1108548 - RNA, 22 nt, Human
cagcccugcacgcugccuccgc

SEQ ID NO: 1108549 - RNA, 22 nt, Human
gggaguggauuauguggaccca

SEQ ID NO: 1108550 - RNA, 20 nt, Human
cccucugcuacacugggagc

SEQ ID NO: 1108551 - RNA, 22 nt, Human
ucugcugcugagcacacuccua

SEQ ID NO: 1108552 - RNA, 22 nt, Human
cagcugccugcaacacaagcuu

SEQ ID NO: 1108553 - RNA, 21 nt, Human
gcaaggcuuuuguguuuccca

SEQ ID NO: 1108554 - RNA, 22 nt, Human
uggcagcuggagggcaauggcc

SEQ ID NO: 1108555 - RNA, 22 nt, Human
gagggcagaaaauuaugcggug

SEQ ID NO: 1108556 - RNA, 22 nt, Human
caggacagguguucuagaucag

SEQ ID NO: 1108557 - RNA, 22 nt, Human
ggguccaggucuucaggcagag

SEQ ID NO: 1108558 - RNA, 22 nt, Human
aggagucagauaugggaaaguu

SEQ ID NO: 1108559 - RNA, 22 nt, Human
ccagcugacgaugccuggucuc

SEQ ID NO: 1108560 - RNA, 22 nt, Human
cugccuggaaggagcaagggga

SEQ ID NO: 1108561 - RNA, 22 nt, Human
agaaaaggauugauggaucaga

SEQ ID NO: 1108562 - RNA, 22 nt, Human
ucagggcacauucugcaguggc

SEQ ID NO: 1108563 - RNA, 22 nt, Human
agcugagcauuugauccaccuc

SEQ ID NO: 1108564 - RNA, 22 nt, Human
cucuggaaaaccacuagcagga

SEQ ID NO: 1108565 - RNA, 22 nt, Human
acaaggaggucuggggggcccu

SEQ ID NO: 1108566 - RNA, 22 nt, Human
accaggaggccuggagcacaaa

SEQ ID NO: 1108567 - RNA, 22 nt, Human
ggcagaaggccucccagcuccu

SEQ ID NO: 1108568 - RNA, 22 nt, Human
uggcacugagcagccgcggcag

SEQ ID NO: 1108569 - RNA, 22 nt, Human
ggguggcuccuaugggcauagc

SEQ ID NO: 1108570 - RNA, 22 nt, Human
aaggucauugguucugaauucu

SEQ ID NO: 1108571 - RNA, 22 nt, Human
ucuggcugcugcgugagugcuu

SEQ ID NO: 1108572 - RNA, 19 nt, Human
aguagcagaaagugcagug

SEQ ID NO: 1108573 - RNA, 22 nt, Human
ccugccugguguaagucuaagg

SEQ ID NO: 1108574 - RNA, 21 nt, Human
aucuuuauuacgcagagaaga

SEQ ID NO: 1108575 - RNA, 21 nt, Human
ucucuggaauuagaccauguu

SEQ ID NO: 1108576 - RNA, 22 nt, Human
ccuuggagcggucagcacuggu

SEQ ID NO: 1108577 - RNA, 22 nt, Human
ccagggcacguugggacaguac

SEQ ID NO: 1108578 - RNA, 22 nt, Human
gguugccggggcaggacuggaa

SEQ ID NO: 1108579 - RNA, 19 nt, Human
agaaaucucgagauuuguu

SEQ ID NO: 1108580 - RNA, 22 nt, Human
uguuccaugucuuuguaggacu

SEQ ID NO: 1108581 - RNA, 22 nt, Human
ggcugaguugagaggauuacuu

SEQ ID NO: 1108582 - RNA, 22 nt, Human
aaaugcaccuugcugugagacu

SEQ ID NO: 1108583 - RNA, 22 nt, Human
aggucauuaaaguuaaaugagg

SEQ ID NO: 1108584 - RNA, 18 nt, Human
cagggcuguggggucacu

SEQ ID NO: 1108585 - RNA, 22 nt, Human
agagaaggucacuaaggaccca

SEQ ID NO: 1108586 - RNA, 18 nt, Human
aguggucuguuauaucau

SEQ ID NO: 1108587 - RNA, 22 nt, Human
cauuucuguacauguuuuggug

SEQ ID NO: 1108588 - RNA, 22 nt, Human
agcagggcuucugugccugugc

SEQ ID NO: 1108589 - RNA, 22 nt, Human
gaaaccucuuagccucucuuug

SEQ ID NO: 1108590 - RNA, 22 nt, Human
gaagagcugugauucaggcuua

SEQ ID NO: 1108591 - RNA, 22 nt, Human
cccuuucccuucuggcucaggg

SEQ ID NO: 1108592 - RNA, 22 nt, Human
aaaugcagguaguauuuauuuu

SEQ ID NO: 1108593 - RNA, 19 nt, Human
aggguccagggagcggcuc

SEQ ID NO: 1108594 - RNA, 22 nt, Human
gucaaguuuauccgcucauuca

SEQ ID NO: 1108595 - RNA, 22 nt, Human
uauuggugggggcagagagaga

SEQ ID NO: 1108596 - RNA, 22 nt, Human
gaaaggucuuccggucuuccag

SEQ ID NO: 1108597 - RNA, 22 nt, Human
cuggagagaaaugacaaagcua

SEQ ID NO: 1108598 - RNA, 20 nt, Human
uauaacaguguugggugugu

SEQ ID NO: 1108599 - RNA, 22 nt, Human
gggccaugagagguucaucaac

SEQ ID NO: 1108600 - RNA, 22 nt, Human
ucagaaauguaagcugaugacu

SEQ ID NO: 1108601 - RNA, 22 nt, Human
ugagccuggggccugggcagcg

SEQ ID NO: 1108602 - RNA, 20 nt, Human
gaagcagcuucauguagaca

SEQ ID NO: 1108603 - RNA, 22 nt, Human
agcugccauccgaggugucaga

SEQ ID NO: 1108604 - RNA, 22 nt, Human
gaaaagggcaagagagagggca

SEQ ID NO: 1108605 - RNA, 22 nt, Human
ggucccaggaaucuguguucua

SEQ ID NO: 1108606 - RNA, 22 nt, Human
gcugugcacuaccuauacaucc

SEQ ID NO: 1108607 - RNA, 22 nt, Human
guguaaggugaaaucaacaaau

SEQ ID NO: 1108608 - RNA, 22 nt, Human
ugggccuccaauuccagcggga

SEQ ID NO: 1108609 - RNA, 22 nt, Human
agggcagcuaaggugcugacug

SEQ ID NO: 1108610 - RNA, 22 nt, Human
gcagguggauuaucagaagugc

SEQ ID NO: 1108611 - RNA, 22 nt, Human
gcccagcaggacagagugguuu

SEQ ID NO: 1108612 - RNA, 18 nt, Human
ccagagcuggcuccucgc

SEQ ID NO: 1108613 - RNA, 22 nt, Human
ggagccagcagggugacacuga

SEQ ID NO: 1108614 - RNA, 22 nt, Human
cagcagcuuugccaagucagcc

SEQ ID NO: 1108615 - RNA, 22 nt, Human
cugggcuucucccccuggcaga

SEQ ID NO: 1108616 - RNA, 22 nt, Human
uccuucagggggccgccugcac

SEQ ID NO: 1108617 - RNA, 22 nt, Human
acagaguaggugcugucgacug

SEQ ID NO: 1108618 - RNA, 22 nt, Human
ugcagaagaaugagcuuggagu

SEQ ID NO: 1108619 - RNA, 22 nt, Human
ugcucauuggcgaucugaggga

SEQ ID NO: 1108620 - RNA, 22 nt, Human
ccugggagguggagguugcagc

SEQ ID NO: 1108621 - RNA, 19 nt, Human
ccagagcccgccagauggg

SEQ ID NO: 1108622 - RNA, 22 nt, Human
uagacacaagagaaggguauaa

SEQ ID NO: 1108623 - RNA, 22 nt, Human
cugcacagagcagggcagacac

SEQ ID NO: 1108624 - RNA, 22 nt, Human
ggaaagaccugagauaggaaua

SEQ ID NO: 1108625 - RNA, 22 nt, Human
agagaacacgugcaucugcaau

SEQ ID NO: 1108626 - RNA, 22 nt, Human
aggccuccuggcuccaggccuu

SEQ ID NO: 1108627 - RNA, 21 nt, Human
uagagaaaagaagcuguuccu

SEQ ID NO: 1108628 - RNA, 22 nt, Human
augcagagacagauguggcaug

SEQ ID NO: 1108629 - RNA, 22 nt, Human
guccuggggauuauagaguguu

SEQ ID NO: 1108630 - RNA, 22 nt, Human
auaugugugaugcauggacuaa

SEQ ID NO: 1108631 - RNA, 22 nt, Human
ugaaggcuguuggauggggaag

SEQ ID NO: 1108632 - RNA, 22 nt, Human
agagccaggaucuguuuugggg

SEQ ID NO: 1108633 - RNA, 20 nt, Human
auauguguacguguauacau

SEQ ID NO: 1108634 - RNA, 22 nt, Human
cucagcagagaccagggaggaa

SEQ ID NO: 1108635 - RNA, 22 nt, Human
aggccugagguuccugugcuca

SEQ ID NO: 1108636 - RNA, 22 nt, Human
gggauggacuuggggacuccag

SEQ ID NO: 1108637 - RNA, 22 nt, Human
augcucugggcaggagcccugg

SEQ ID NO: 1108638 - RNA, 22 nt, Human
uuucacauguggaaugccaggu

SEQ ID NO: 1108639 - RNA, 22 nt, Human
agggccugggguagcuuacugc

SEQ ID NO: 1108640 - RNA, 22 nt, Human
uaaauguauaggcacuaaaccu

SEQ ID NO: 1108641 - RNA, 22 nt, Human
cuggcugcaggaugaggcugcc

SEQ ID NO: 1108642 - RNA, 22 nt, Human
ucaggagagaaagaauacaauu

SEQ ID NO: 1108643 - RNA, 22 nt, Human
gcugcucugcuguguaagcagg

SEQ ID NO: 1108644 - RNA, 22 nt, Human
caagggaccugagauggucucu

SEQ ID NO: 1108645 - RNA, 22 nt, Human
uacauguaauuuucauaguaag

SEQ ID NO: 1108646 - RNA, 21 nt, Human
agugaaauugcaucagaggga

SEQ ID NO: 1108647 - RNA, 22 nt, Human
caggccugcaggaaaggcuccc

SEQ ID NO: 1108648 - RNA, 22 nt, Human
agcugcugagccaggcugaugu

SEQ ID NO: 1108649 - RNA, 22 nt, Human
uaauacuuaccuugcagagucu

SEQ ID NO: 1108650 - RNA, 18 nt, Human
ggagagugacagagucgu

SEQ ID NO: 1108651 - RNA, 22 nt, Human
caccuggcuggaagugcuccgg

SEQ ID NO: 1108652 - RNA, 22 nt, Human
auggcagccuguggacagucaa

SEQ ID NO: 1108653 - RNA, 22 nt, Human
aggccugggucucgugccuacc

SEQ ID NO: 1108654 - RNA, 22 nt, Human
gcucuguacgcaggaugagggg

SEQ ID NO: 1108655 - RNA, 22 nt, Human
ugcagaagacacaagguaacgu

SEQ ID NO: 1108656 - RNA, 22 nt, Human
aaggagcucccggcagaccagg

SEQ ID NO: 1108657 - RNA, 22 nt, Human
aucuagaaaguguugaagauca

SEQ ID NO: 1108658 - RNA, 22 nt, Human
cuggggcugcggacgggagccc

SEQ ID NO: 1108659 - RNA, 22 nt, Human
gggugggccacugagcagcgug

SEQ ID NO: 1108660 - RNA, 22 nt, Human
gcccugcugucuucagaguaua

SEQ ID NO: 1108661 - RNA, 22 nt, Human
aauauguucaaaauagaucacu

SEQ ID NO: 1108662 - RNA, 18 nt, Human
aaauguacuguccauggc

SEQ ID NO: 1108663 - RNA, 22 nt, Human
cuuauaguaugauguugagaau

SEQ ID NO: 1108664 - RNA, 22 nt, Human
gccuguccuggaugcucugcaa

SEQ ID NO: 1108665 - RNA, 22 nt, Human
cuccuucccuucaaguguuccu

SEQ ID NO: 1108666 - RNA, 22 nt, Human
gaagcagcaaguauaggacagg

SEQ ID NO: 1108667 - RNA, 22 nt, Human
ggccuucacgugaccuggcgug

SEQ ID NO: 1108668 - RNA, 22 nt, Human
gggguggauuccuacaggucca

SEQ ID NO: 1108669 - RNA, 22 nt, Human
gagacugcauuguccaaggguu

SEQ ID NO: 1108670 - RNA, 22 nt, Human
gccuggaguacuccuugaagug

SEQ ID NO: 1108671 - RNA, 22 nt, Human
ugcagaaguauuccaggcccca

SEQ ID NO: 1108672 - RNA, 22 nt, Human
uggcagccacaucucguggauu

SEQ ID NO: 1108673 - RNA, 22 nt, Human
ugggcccaagagagucuccaac

SEQ ID NO: 1108674 - RNA, 22 nt, Human
agacagagauacuauguuguca

SEQ ID NO: 1108675 - RNA, 22 nt, Human
gcaggcagucaucuuucauauu

SEQ ID NO: 1108676 - RNA, 22 nt, Human
agcucccagaguccucugccca

SEQ ID NO: 1108677 - RNA, 22 nt, Human
cugggaggugaacagaaaaacu

SEQ ID NO: 1108678 - RNA, 22 nt, Human
guaucuuucccaccaaucacaa

SEQ ID NO: 1108679 - RNA, 22 nt, Human
aaaguuugagugauuugacaca

SEQ ID NO: 1108680 - RNA, 22 nt, Human
cuggagccggaccagggacggu

SEQ ID NO: 1108681 - RNA, 22 nt, Human
uggagccugagucagcggaggc

SEQ ID NO: 1108682 - RNA, 22 nt, Human
cuccagggagcuuggaaagacc

SEQ ID NO: 1108683 - RNA, 22 nt, Human
gggagggauuaguucugccugg

SEQ ID NO: 1108684 - RNA, 22 nt, Human
aggcugggaaaccugaaguugu

SEQ ID NO: 1108685 - RNA, 22 nt, Human
uguguauucagcaagcgaaaca

SEQ ID NO: 1108686 - RNA, 22 nt, Human
agggagaaugaccaagguauau

SEQ ID NO: 1108687 - RNA, 22 nt, Human
ugggugaggaugaugaggcagc

SEQ ID NO: 1108688 - RNA, 22 nt, Human
cuuaacagauacaucugugguu

SEQ ID NO: 1108689 - RNA, 22 nt, Human
aguguuguaugggaugacugcu

SEQ ID NO: 1108690 - RNA, 22 nt, Human
gaauuguacgcuuuacauaggu

SEQ ID NO: 1108691 - RNA, 22 nt, Human
ucagccagguaauguggagaug

SEQ ID NO: 1108692 - RNA, 22 nt, Human
agggccagcugaugagaaugag

SEQ ID NO: 1108693 - RNA, 22 nt, Human
gcagggacugugaucucacaga

SEQ ID NO: 1108694 - RNA, 22 nt, Human
aguaauaauuuauauuagggag

SEQ ID NO: 1108695 - RNA, 22 nt, Human
ggcuccucucuggccgcucccg

SEQ ID NO: 1108696 - RNA, 22 nt, Human
cugccuggaaugccagcuucuc

SEQ ID NO: 1108697 - RNA, 22 nt, Human
caguggguccuaaguacaguuc

SEQ ID NO: 1108698 - RNA, 22 nt, Human
uggccugccugggagcagcagg

SEQ ID NO: 1108699 - RNA, 22 nt, Human
ucuggagcuggagggcaaggca

SEQ ID NO: 1108700 - RNA, 22 nt, Human
ucaggcagcuccaggaauggua

SEQ ID NO: 1108701 - RNA, 22 nt, Human
caguagcaggcacucagcacgu

SEQ ID NO: 1108702 - RNA, 22 nt, Human
uggccucugugggagcugagca

SEQ ID NO: 1108703 - RNA, 22 nt, Human
ggagccagggaagcugcuuccu

SEQ ID NO: 1108704 - RNA, 22 nt, Human
gcccugugcgacucuagagguu

SEQ ID NO: 1108705 - RNA, 22 nt, Human
gcugcaggcauuuuccugggca

SEQ ID NO: 1108706 - RNA, 22 nt, Human
uggcccugcuguaucaucugcu

SEQ ID NO: 1108707 - RNA, 22 nt, Human
ggacagcccauacacaugucug

SEQ ID NO: 1108708 - RNA, 22 nt, Human
aaauguagaccuauagggaccu

SEQ ID NO: 1108709 - RNA, 22 nt, Human
cugccugcugccuguggagggu

SEQ ID NO: 1108710 - RNA, 22 nt, Human
aagaugauguuguguuuucacu

SEQ ID NO: 1108711 - RNA, 22 nt, Human
gggcuguggagccgcgagggcu

SEQ ID NO: 1108712 - RNA, 22 nt, Human
ucaaaugcuguauuguaguaau

SEQ ID NO: 1108713 - RNA, 22 nt, Human
cagucccaggguugguucagcu

SEQ ID NO: 1108714 - RNA, 22 nt, Human
gccauccucugagcacuaggca

SEQ ID NO: 1108715 - RNA, 22 nt, Human
gcagacagcauguugggcuauu

SEQ ID NO: 1108716 - RNA, 22 nt, Human
aucauguuccagaaacagugau

SEQ ID NO: 1108717 - RNA, 22 nt, Human
aagcagcacaguaauauuggug

SEQ ID NO: 1108718 - RNA, 22 nt, Human
aaaagacaucuauuucaggcag

SEQ ID NO: 1108719 - RNA, 22 nt, Human
uugaaucauuacaauagauaag

SEQ ID NO: 1108720 - RNA, 21 nt, Human
aaagagguuaauauuguaagu

SEQ ID NO: 1108721 - RNA, 22 nt, Human
aagacagagggaagcaaugaug

SEQ ID NO: 1108722 - RNA, 18 nt, Human
ugcuggcaacuacuauug

SEQ ID NO: 1108723 - RNA, 22 nt, Human
caggaaagguagucacaaugua

SEQ ID NO: 1108724 - RNA, 22 nt, Human
uuccucucaacaugccugccgg

SEQ ID NO: 1108725 - RNA, 22 nt, Human
uucaagaugccagggacgcggc

SEQ ID NO: 1108726 - RNA, 22 nt, Human
caccagcuuugcccacugccca

SEQ ID NO: 1108727 - RNA, 22 nt, Human
aggagaaguaaggcuagaugau

SEQ ID NO: 1108728 - RNA, 22 nt, Human
cgggcuggcugcagcugcugga

SEQ ID NO: 1108729 - RNA, 22 nt, Human
ccaagggcugcugaggugucca

SEQ ID NO: 1108730 - RNA, 22 nt, Human
aggagcuguuuuguucagcaaa

SEQ ID NO: 1108731 - RNA, 22 nt, Human
uagcagcucacagccucccauu

SEQ ID NO: 1108732 - RNA, 22 nt, Human
ggcuccuguccccucagcugcu

SEQ ID NO: 1108733 - RNA, 23 nt, Human
cccagcagauuguaaagugucca

SEQ ID NO: 1108734 - RNA, 22 nt, Human
cucauggauauaagaacuguuu

SEQ ID NO: 1108735 - RNA, 23 nt, Human
ucaugcccaggcuccagauguca

SEQ ID NO: 1108736 - RNA, 22 nt, Human
ugucccauggacacaacuucuu

SEQ ID NO: 1108737 - RNA, 22 nt, Human
ugucugguggguugacaggcag

SEQ ID NO: 1108738 - RNA, 22 nt, Human
gccugccuuuuggaggcacauu

SEQ ID NO: 1108739 - RNA, 20 nt, Human
ggaagcagagaacuguuuuc

SEQ ID NO: 1108740 - RNA, 21 nt, Human
ggugucaguuuuggucauuag

SEQ ID NO: 1108741 - RNA, 17 nt, Human
ggcugcugugcuggugc

SEQ ID NO: 1108742 - RNA, 22 nt, Human
aggagagagaacacuugggucc

SEQ ID NO: 1108743 - RNA, 22 nt, Human
gaaucacgguauucugcacggg

SEQ ID NO: 1108744 - RNA, 22 nt, Human
gagccagcugagcugcacuguc

SEQ ID NO: 1108745 - RNA, 22 nt, Human
ggccucuggcaggcaggcccuc

SEQ ID NO: 1108746 - RNA, 22 nt, Human
ggucaggguauaaucaagugag

SEQ ID NO: 1108747 - RNA, 22 nt, Human
cucagagaagucuuugcuaaac

SEQ ID NO: 1108748 - RNA, 22 nt, Human
caggugggagcgaggagcuacu

SEQ ID NO: 1108749 - RNA, 22 nt, Human
gggcuggugaggcugcccugca

SEQ ID NO: 1108750 - RNA, 22 nt, Human
auuauauugaguauaaccagag

SEQ ID NO: 1108751 - RNA, 22 nt, Human
agaguguuauuugcucuguauu

SEQ ID NO: 1108752 - RNA, 22 nt, Human
gcagggacgccagggacagcaa

SEQ ID NO: 1108753 - RNA, 22 nt, Human
gcuuccucgcugggcagaggca

SEQ ID NO: 1108754 - RNA, 22 nt, Human
ccuggcugucguuuugugaaau

SEQ ID NO: 1108755 - RNA, 22 nt, Human
caggaggaaaugugacccugcu

SEQ ID NO: 1108756 - RNA, 21 nt, Human
gccugccugcgugacccucuu

SEQ ID NO: 1108757 - RNA, 22 nt, Human
agaugcugugucuguucccuug

SEQ ID NO: 1108758 - RNA, 22 nt, Human
ccaaggagcugcaggcacuugu

SEQ ID NO: 1108759 - RNA, 22 nt, Human
ggcaguggcuccucucuacucc

SEQ ID NO: 1108760 - RNA, 22 nt, Human
gcugucacucaccaggccugca

SEQ ID NO: 1108761 - RNA, 22 nt, Human
ccucagagguguggcaucucug

SEQ ID NO: 1108762 - RNA, 19 nt, Human
augauacaggugaaaauug

SEQ ID NO: 1108763 - RNA, 22 nt, Human
gugcauugcgaugcagacgacc

SEQ ID NO: 1108764 - RNA, 22 nt, Human
gcagggacaacugugcaccuga

SEQ ID NO: 1108765 - RNA, 22 nt, Human
ucagggcacaggccuguggguu

SEQ ID NO: 1108766 - RNA, 23 nt, Human
gggggcugguugacucucugcag

SEQ ID NO: 1108767 - RNA, 22 nt, Human
ucucccacugcaagcccaggcu

SEQ ID NO: 1108768 - RNA, 22 nt, Human
uugucugucccagcuugugcau

SEQ ID NO: 1108769 - RNA, 22 nt, Human
cuggcagcuggaggcuagaggc

SEQ ID NO: 1108770 - RNA, 19 nt, Human
cagcucaguuugauucucu

SEQ ID NO: 1108771 - RNA, 22 nt, Human
cuauuucugccuaaugaccugu

SEQ ID NO: 1108772 - RNA, 22 nt, Human
agcugcuguggggcucggccug

SEQ ID NO: 1108773 - RNA, 21 nt, Human
agcuggcagauauggugucug

SEQ ID NO: 1108774 - RNA, 22 nt, Human
gcagggaccugccacugcuguc

SEQ ID NO: 1108775 - RNA, 22 nt, Human
gcucccugcagcugagaguucc

SEQ ID NO: 1108776 - RNA, 23 nt, Human
uggggcugauggagacggaccag

SEQ ID NO: 1108777 - RNA, 22 nt, Human
aaaaaugugaccacaggguguu

SEQ ID NO: 1108778 - RNA, 22 nt, Human
ggaggaccugcuggcccugcaa

SEQ ID NO: 1108779 - RNA, 22 nt, Human
ucuggccuacuggaguccauga

SEQ ID NO: 1108780 - RNA, 19 nt, Human
ugcaggaggacugagcaga

SEQ ID NO: 1108781 - RNA, 22 nt, Human
ugguggccuugauggcaucugc

SEQ ID NO: 1108782 - RNA, 22 nt, Human
auguagcagauauuugugcaca

SEQ ID NO: 1108783 - RNA, 22 nt, Human
uguucuugagccuuuagaccua

SEQ ID NO: 1108784 - RNA, 22 nt, Human
cauacuuugggauaagagugga

SEQ ID NO: 1108785 - RNA, 22 nt, Human
agcaggguuuggggauuggcac

SEQ ID NO: 1108786 - RNA, 19 nt, Human
cugaggcccauguaccaug

SEQ ID NO: 1108787 - RNA, 22 nt, Human
auggcaggcccagguguucauu

SEQ ID NO: 1108788 - RNA, 22 nt, Human
cauucauuuaugaaauaucuau

SEQ ID NO: 1108789 - RNA, 22 nt, Human
ccucacuuuccuuucuccuggg

SEQ ID NO: 1108790 - RNA, 22 nt, Human
ggugaggcagguggcugcugag

SEQ ID NO: 1108791 - RNA, 22 nt, Human
gcugcucugaaaaugacuguug

SEQ ID NO: 1108792 - RNA, 22 nt, Human
agaggccagguccagaguuugu

SEQ ID NO: 1108793 - RNA, 22 nt, Human
ugugccagccucuggcuguguc

SEQ ID NO: 1108794 - RNA, 22 nt, Human
ggcgcuggccacgguggcucug

SEQ ID NO: 1108795 - RNA, 22 nt, Human
ugcaguggaaagacucagacuu

SEQ ID NO: 1108796 - RNA, 22 nt, Human
gcucagaggcacgaccucuugg

SEQ ID NO: 1108797 - RNA, 22 nt, Human
uggcagcuugaaugcagucuuu

SEQ ID NO: 1108798 - RNA, 22 nt, Human
acagagauggcacagagaaggu

SEQ ID NO: 1108799 - RNA, 22 nt, Human
agggcugcaggcaagauauggc

SEQ ID NO: 1108800 - RNA, 22 nt, Human
ggcagccaugcacgcugccugg

SEQ ID NO: 1108801 - RNA, 22 nt, Human
guccucagggaauguggcgggu

SEQ ID NO: 1108802 - RNA, 22 nt, Human
ugcagccuugccuccucccagc

SEQ ID NO: 1108803 - RNA, 22 nt, Human
ucucuucugaaaccugucuuua

SEQ ID NO: 1108804 - RNA, 22 nt, Human
cuggugggaggcaagguggaag

SEQ ID NO: 1108805 - RNA, 22 nt, Human
ugugcccauuacacagaggcau

SEQ ID NO: 1108806 - RNA, 22 nt, Human
gaugcacagugacccugccagu

SEQ ID NO: 1108807 - RNA, 22 nt, Human
cugaagaggacgcagcagcaag

SEQ ID NO: 1108808 - RNA, 22 nt, Human
gggaugucacugugccuggcac

SEQ ID NO: 1108809 - RNA, 22 nt, Human
agcugagcucaggcugauguaa

SEQ ID NO: 1108810 - RNA, 22 nt, Human
cauacauuuugcauauuuacca

SEQ ID NO: 1108811 - RNA, 22 nt, Human
gcagggucgcucuaggagauca

SEQ ID NO: 1108812 - RNA, 22 nt, Human
ccagggagccuggugugucagc

SEQ ID NO: 1108813 - RNA, 22 nt, Human
ugccugggagugaccaagacuc

SEQ ID NO: 1108814 - RNA, 22 nt, Human
ucagcagugcagggugaggcag

SEQ ID NO: 1108815 - RNA, 22 nt, Human
gaaggagcuaaagggagcccug

SEQ ID NO: 1108816 - RNA, 22 nt, Human
cucugucccagacccaccucuc

SEQ ID NO: 1108817 - RNA, 22 nt, Human
augagacuaccuguaauguggc

SEQ ID NO: 1108818 - RNA, 22 nt, Human
gaggccugggagccuguccucc

SEQ ID NO: 1108819 - RNA, 20 nt, Human
aucuggcucagauccugcag

SEQ ID NO: 1108820 - RNA, 22 nt, Human
acagccagguaaaggcauggca

SEQ ID NO: 1108821 - RNA, 22 nt, Human
acaaagugaauugcaucgaguu

SEQ ID NO: 1108822 - RNA, 21 nt, Human
aagagcugucaggaaggcugc

SEQ ID NO: 1108823 - RNA, 22 nt, Human
ggaugcaggaguugaagaagga

SEQ ID NO: 1108824 - RNA, 22 nt, Human
uggcagcauuuuuuccagaaca

SEQ ID NO: 1108825 - RNA, 21 nt, Human
cugagggccgcagcugggcuc

SEQ ID NO: 1108826 - RNA, 22 nt, Human
cuggccuggggccucagcugcu

SEQ ID NO: 1108827 - RNA, 22 nt, Human
uguacaaugccgagacuaacuc

SEQ ID NO: 1108828 - RNA, 22 nt, Human
ugugacagaucuuuaaauaaug

SEQ ID NO: 1108829 - RNA, 22 nt, Human
uggcugccuuucaccucaucuc

SEQ ID NO: 1108830 - RNA, 22 nt, Human
ccagccaguccagcauuggugu

SEQ ID NO: 1108831 - RNA, 22 nt, Human
caggcacugugcugagcucugc

SEQ ID NO: 1108832 - RNA, 22 nt, Human
ucuggcucaucucuccagguaa

SEQ ID NO: 1108833 - RNA, 22 nt, Human
agcugaaggcuagaacagcugg

SEQ ID NO: 1108834 - RNA, 22 nt, Human
aggcucauucuugccucugagc

SEQ ID NO: 1108835 - RNA, 22 nt, Human
gcuuuuucaaaugaaagcuggu

SEQ ID NO: 1108836 - RNA, 22 nt, Human
aaaggucauugaaaaggaggaa

SEQ ID NO: 1108837 - RNA, 21 nt, Human
acagaguaguugaaacagaga

SEQ ID NO: 1108838 - RNA, 22 nt, Human
agcauuuaggagaauuugagaa

SEQ ID NO: 1108839 - RNA, 22 nt, Human
gcagauggcagcccaggcuggg

SEQ ID NO: 1108840 - RNA, 22 nt, Human
acaacaggguaaggcaggccau

SEQ ID NO: 1108841 - RNA, 22 nt, Human
agaauucucuuccauugaaaca

SEQ ID NO: 1108842 - RNA, 22 nt, Human
agcagcugcagagggcuccccc

SEQ ID NO: 1108843 - RNA, 23 nt, Human
uggauaaagcugugcugcauagg

SEQ ID NO: 1108844 - RNA, 23 nt, Human
uggagaugccccacucccugucu

SEQ ID NO: 1108845 - RNA, 22 nt, Human
gcagcagcccagggcucucaga

SEQ ID NO: 1108846 - RNA, 22 nt, Human
caagggcuucaaguggccaaga

SEQ ID NO: 1108847 - RNA, 22 nt, Human
cugccucaugcugccugcagcc

SEQ ID NO: 1108848 - RNA, 22 nt, Human
aaggcugagggcuguaccuggc

SEQ ID NO: 1108849 - RNA, 22 nt, Human
cuuaagaauauugaaguugugg

SEQ ID NO: 1108850 - RNA, 22 nt, Human
ccuuuuucaauauagaauugca

SEQ ID NO: 1108851 - RNA, 22 nt, Human
caggcacuggggaugcugggau

SEQ ID NO: 1108852 - RNA, 22 nt, Human
gcacagggcugccaggcggcuu

SEQ ID NO: 1108853 - RNA, 22 nt, Human
ggcagaggagcuggaaacaugg

SEQ ID NO: 1108854 - RNA, 22 nt, Human
aggagcugagucagcccgacag

SEQ ID NO: 1108855 - RNA, 22 nt, Human
uucuuucccuuccagcagcucc

SEQ ID NO: 1108856 - RNA, 22 nt, Human
cugggccuagcaacagaggagu

SEQ ID NO: 1108857 - RNA, 22 nt, Human
cuuccucccggcccaugcucug

SEQ ID NO: 1108858 - RNA, 22 nt, Human
agguggcuccucccauggcugg

SEQ ID NO: 1108859 - RNA, 22 nt, Human
agcagccagaaauccagaggug

SEQ ID NO: 1108860 - RNA, 22 nt, Human
gcagagacuccacugucuugug

SEQ ID NO: 1108861 - RNA, 21 nt, Human
ucagaguggaagacaguuuga

SEQ ID NO: 1108862 - RNA, 22 nt, Human
ggcuggcuugccaagcucaggg

SEQ ID NO: 1108863 - RNA, 22 nt, Human
agguacagggugaaaguuuaug

SEQ ID NO: 1108864 - RNA, 22 nt, Human
uggcuuccuggacagaugcggu

SEQ ID NO: 1108865 - RNA, 22 nt, Human
ucaugucaguuucuucuauaaa

SEQ ID NO: 1108866 - RNA, 22 nt, Human
gguucacacuaagcuuaagugg

SEQ ID NO: 1108867 - RNA, 20 nt, Human
agggcagagggauuacaggc

SEQ ID NO: 1108868 - RNA, 22 nt, Human
agagaauuuuaaaagccuugaa

SEQ ID NO: 1108869 - RNA, 22 nt, Human
gagaggccauggcugugcagug

SEQ ID NO: 1108870 - RNA, 22 nt, Human
ugcauauuauguguaucugucu

SEQ ID NO: 1108871 - RNA, 22 nt, Human
gaggaggaaacccuguuccucu

SEQ ID NO: 1108872 - RNA, 22 nt, Human
ucucagagcucacaccuccugg

SEQ ID NO: 1108873 - RNA, 22 nt, Human
ugggcugcugucugcacaugcu

SEQ ID NO: 1108874 - RNA, 22 nt, Human
cccaggccagaacuugguugcu

SEQ ID NO: 1108875 - RNA, 22 nt, Human
ucuuagaaugucaacugauguu

SEQ ID NO: 1108876 - RNA, 22 nt, Human
uagggcaguuucauguuaucuu

SEQ ID NO: 1108877 - RNA, 22 nt, Human
acagcagcuggguucccaccau

SEQ ID NO: 1108878 - RNA, 22 nt, Human
ucugagaggcagaccuuccuaa

SEQ ID NO: 1108879 - RNA, 18 nt, Human
aaagaaggauuggagagc

SEQ ID NO: 1108880 - RNA, 22 nt, Human
ccuccagcgcgauccacuccgg

SEQ ID NO: 1108881 - RNA, 22 nt, Human
gcagccacccucaaggcugaau

SEQ ID NO: 1108882 - RNA, 18 nt, Human
gggcaagcggcugucacc

SEQ ID NO: 1108883 - RNA, 22 nt, Human
acagaauucucucugcagaggc

SEQ ID NO: 1108884 - RNA, 22 nt, Human
cagggugccucccgcucgccgg

SEQ ID NO: 1108885 - RNA, 22 nt, Human
gcagggccagggcucaggcugu

SEQ ID NO: 1108886 - RNA, 19 nt, Human
ugcagaagacacaguggug

SEQ ID NO: 1108887 - RNA, 22 nt, Human
uuuuugcaccaaccuaauagaa

SEQ ID NO: 1108888 - RNA, 20 nt, Human
aagagcugacucacaguggu

SEQ ID NO: 1108889 - RNA, 22 nt, Human
cagguaggauggaagggcucaa

SEQ ID NO: 1108890 - RNA, 22 nt, Human
uggccuggaaaaaugcagaugg

SEQ ID NO: 1108891 - RNA, 22 nt, Human
ccugucucuuucaaucugagag

SEQ ID NO: 1108892 - RNA, 22 nt, Human
uugcagcagggugaauucacuc

SEQ ID NO: 1108893 - RNA, 22 nt, Human
gacuuucucuccucccaggugu

SEQ ID NO: 1108894 - RNA, 22 nt, Human
ggggauggugggaaggcaaucu

SEQ ID NO: 1108895 - RNA, 22 nt, Human
gggcaguggguggcugcagccu

SEQ ID NO: 1108896 - RNA, 22 nt, Human
aaaguguaaggaauuuaaguaa

SEQ ID NO: 1108897 - RNA, 22 nt, Human
ugcagcugguuuagaacuagau

SEQ ID NO: 1108898 - RNA, 22 nt, Human
agccaagcugaucuccugcuga

SEQ ID NO: 1108899 - RNA, 22 nt, Human
ccaggacucaguggggaaaggg

SEQ ID NO: 1108900 - RNA, 22 nt, Human
agcugggaugauaaccucaguc

SEQ ID NO: 1108901 - RNA, 22 nt, Human
ggaggcucccacgcagcucaca

SEQ ID NO: 1108902 - RNA, 22 nt, Human
acugaaggcuuucccaagguca

SEQ ID NO: 1108903 - RNA, 22 nt, Human
aacaguaaugugguguuggguu

SEQ ID NO: 1108904 - RNA, 22 nt, Human
cugacucagcagcugaugaucc

SEQ ID NO: 1108905 - RNA, 22 nt, Human
uaaaucccuacaucuguguuuu

SEQ ID NO: 1108906 - RNA, 18 nt, Human
uggagcagguaggcauga

SEQ ID NO: 1108907 - RNA, 22 nt, Human
gcugcucuacccaugcaucugu

SEQ ID NO: 1108908 - RNA, 22 nt, Human
ugcacuggggucccagcgcacg

SEQ ID NO: 1108909 - RNA, 22 nt, Human
uggcugggagcuggaacugggc

SEQ ID NO: 1108910 - RNA, 22 nt, Human
cacaugcauaaggauaauuacu

SEQ ID NO: 1108911 - RNA, 22 nt, Human
cuaauacucauuucuguaacuc

SEQ ID NO: 1108912 - RNA, 22 nt, Human
caggggacauuaaagcuccaua

SEQ ID NO: 1108913 - RNA, 22 nt, Human
ggcacugauuccauucaugaag

SEQ ID NO: 1108914 - RNA, 22 nt, Human
ugguuuauuucucugaaagguu

SEQ ID NO: 1108915 - RNA, 22 nt, Human
aggccugggcaagaaggggcgu

SEQ ID NO: 1108916 - RNA, 22 nt, Human
ggcugugcgggcagccguggga

SEQ ID NO: 1108917 - RNA, 22 nt, Human
aggccugucuggggcucagcca

SEQ ID NO: 1108918 - RNA, 23 nt, Human
agaagcagcuucuggaguaucgg

SEQ ID NO: 1108919 - RNA, 22 nt, Human
gaggaccacagaugagccugca

SEQ ID NO: 1108920 - RNA, 23 nt, Human
gccucugcucugcguuggggacu

SEQ ID NO: 1108921 - RNA, 22 nt, Human
uagccgcuuaauuauuugguga

SEQ ID NO: 1108922 - RNA, 22 nt, Human
uuuaguaaguucacugcaaagc

SEQ ID NO: 1108923 - RNA, 22 nt, Human
aggcuggcccuacuggcugccu

SEQ ID NO: 1108924 - RNA, 22 nt, Human
aggaggccccuccuggguugcu

SEQ ID NO: 1108925 - RNA, 23 nt, Human
cccuggccuuggggcacaggcug

SEQ ID NO: 1108926 - RNA, 21 nt, Human
cagcaaaucauugggcagacu

SEQ ID NO: 1108927 - RNA, 22 nt, Human
acccagaggcggagguugcagu

SEQ ID NO: 1108928 - RNA, 22 nt, Human
caggcagcguccugcuuccugu

SEQ ID NO: 1108929 - RNA, 22 nt, Human
agagcugugcuuugcaccacgu

SEQ ID NO: 1108930 - RNA, 22 nt, Human
caggggcucugggugaugugag

SEQ ID NO: 1108931 - RNA, 22 nt, Human
aaguguauauaugacuuauaaa

SEQ ID NO: 1108932 - RNA, 22 nt, Human
ggucagggcucuuccaguggcu

SEQ ID NO: 1108933 - RNA, 22 nt, Human
aagauuuaccacuuuauucaag

SEQ ID NO: 1108934 - RNA, 22 nt, Human
ggguacaaagauuucauaagau

SEQ ID NO: 1108935 - RNA, 22 nt, Human
gagaggcugaaaucacaggagc

SEQ ID NO: 1108936 - RNA, 20 nt, Human
uuugagaccagucugcccaa

SEQ ID NO: 1108937 - RNA, 22 nt, Human
gacucagugauuugacaugccu

SEQ ID NO: 1108938 - RNA, 22 nt, Human
gaagccaacauuccaaguagaa

SEQ ID NO: 1108939 - RNA, 21 nt, Human
cucuggagucaagagcuucca

SEQ ID NO: 1108940 - RNA, 22 nt, Human
agcaggaaagaaaaaucugugu

SEQ ID NO: 1108941 - RNA, 22 nt, Human
ucaaagucauggcuaguaauga

SEQ ID NO: 1108942 - RNA, 22 nt, Human
acacuuuacagcuuccuuugca

SEQ ID NO: 1108943 - RNA, 22 nt, Human
ucugggcuugguuagggcuguu

SEQ ID NO: 1108944 - RNA, 22 nt, Human
uacaugaacaaaauagcagaaa

SEQ ID NO: 1108945 - RNA, 22 nt, Human
ucuggcucauaggaaggccauu

SEQ ID NO: 1108946 - RNA, 22 nt, Human
ucugugcucuucucaguaucac

SEQ ID NO: 1108947 - RNA, 22 nt, Human
gagcugccuacauugccaagag

SEQ ID NO: 1108948 - RNA, 22 nt, Human
agcaauauuuaaagguuugcaa

SEQ ID NO: 1108949 - RNA, 22 nt, Human
agccacagagcaggagaccuuu

SEQ ID NO: 1108950 - RNA, 22 nt, Human
ggagggcucaauugacuccuga

SEQ ID NO: 1108951 - RNA, 22 nt, Human
uuuucuuauggugaagcacaaa

SEQ ID NO: 1108952 - RNA, 22 nt, Human
gcaggagcccuggcauguucuu

SEQ ID NO: 1108953 - RNA, 22 nt, Human
acuggcaguggcagcagaaaga

SEQ ID NO: 1108954 - RNA, 19 nt, Human
gcugcuggcucuggcugga

SEQ ID NO: 1108955 - RNA, 22 nt, Human
ugugucagaaggcaauggggau

SEQ ID NO: 1108956 - RNA, 22 nt, Human
cuugcaggcagggccuccugga

SEQ ID NO: 1108957 - RNA, 22 nt, Human
cucuccagaucugcugagccag

SEQ ID NO: 1108958 - RNA, 19 nt, Human
uccaaaggacccaccucca

SEQ ID NO: 1108959 - RNA, 22 nt, Human
ccagggcagcagaauuggggca

SEQ ID NO: 1108960 - RNA, 22 nt, Human
cggagcugccugccaagccugc

SEQ ID NO: 1108961 - RNA, 22 nt, Human
uguguuccugccuggcucuggu

SEQ ID NO: 1108962 - RNA, 17 nt, Human
gcagcagagagacccuc

SEQ ID NO: 1108963 - RNA, 22 nt, Human
gcgaaaaauguguaaauauguu

SEQ ID NO: 1108964 - RNA, 22 nt, Human
agcagggggccacagucacagc

SEQ ID NO: 1108965 - RNA, 22 nt, Human
uggcuucuuagaccaguggccu

SEQ ID NO: 1108966 - RNA, 21 nt, Human
agaaaaguagaguuuucagag

SEQ ID NO: 1108967 - RNA, 22 nt, Human
uaaagguaugucuuaaucaaac

SEQ ID NO: 1108968 - RNA, 22 nt, Human
gaggugagaagggggucagaug

SEQ ID NO: 1108969 - RNA, 19 nt, Human
aagaagcaauaagcuguga

SEQ ID NO: 1108970 - RNA, 22 nt, Human
cagcaaaagccagcauaagcuc

SEQ ID NO: 1108971 - RNA, 22 nt, Human
auguaucaugcaggguccauga

SEQ ID NO: 1108972 - RNA, 22 nt, Human
auuguacaugcagugagucauc

SEQ ID NO: 1108973 - RNA, 22 nt, Human
caagagcucccagaccugggca

SEQ ID NO: 1108974 - RNA, 22 nt, Human
ugacacauuaaaugcucacaaa

SEQ ID NO: 1108975 - RNA, 20 nt, Human
cacugaagacuucuugcuca

SEQ ID NO: 1108976 - RNA, 22 nt, Human
gcugcuccgucugagcucuggu

SEQ ID NO: 1108977 - RNA, 22 nt, Human
aaggcacuuaacgugggaggau

SEQ ID NO: 1108978 - RNA, 22 nt, Human
cacugggcguguccugggugag

SEQ ID NO: 1108979 - RNA, 22 nt, Human
uaaaugugagugaugcggugaa

SEQ ID NO: 1108980 - RNA, 22 nt, Human
uucacaggaggguggaugcaug

SEQ ID NO: 1108981 - RNA, 22 nt, Human
aaagccuuggucaucugguucc

SEQ ID NO: 1108982 - RNA, 22 nt, Human
ucaguuuuguauguuguaaguc

SEQ ID NO: 1108983 - RNA, 22 nt, Human
aguuuaugaaacacagauuuga

SEQ ID NO: 1108984 - RNA, 22 nt, Human
ucucacugcaaauauuauguau

SEQ ID NO: 1108985 - RNA, 22 nt, Human
cccagcucuuuuagcggcaucu

SEQ ID NO: 1108986 - RNA, 23 nt, Human
cacaccaggagccgucugggcca

SEQ ID NO: 1108987 - RNA, 22 nt, Human
uguacaaugccagggaacacca

SEQ ID NO: 1108988 - RNA, 22 nt, Human
ucccagagguugagucacuuau

SEQ ID NO: 1108989 - RNA, 22 nt, Human
cuuagaaauaaugguuucaguu

SEQ ID NO: 1108990 - RNA, 22 nt, Human
cacauuucugugagucaauauu

SEQ ID NO: 1108991 - RNA, 22 nt, Human
uggcccugcuuaugucucucuu

SEQ ID NO: 1108992 - RNA, 21 nt, Human
aagaagcaauuuauuggaagg

SEQ ID NO: 1108993 - RNA, 22 nt, Human
ugaggcuggcaaggcugguauu

SEQ ID NO: 1108994 - RNA, 22 nt, Human
aagccaggggcugcuuaggaga

SEQ ID NO: 1108995 - RNA, 22 nt, Human
aaugauggauuuagacaagcug

SEQ ID NO: 1108996 - RNA, 22 nt, Human
cugaagcaaaugaaacagcucu

SEQ ID NO: 1108997 - RNA, 22 nt, Human
cacaaaaguaggaggcaggcgg

SEQ ID NO: 1108998 - RNA, 22 nt, Human
aggagccaagauggggcaagua

SEQ ID NO: 1108999 - RNA, 22 nt, Human
ucagagguaagggcugagagga

SEQ ID NO: 1109000 - RNA, 22 nt, Human
gcagguguggaguggggugagc

SEQ ID NO: 1109001 - RNA, 22 nt, Human
ccagcgcuucccaucagggagg

SEQ ID NO: 1109002 - RNA, 22 nt, Human
gcaggagccacuucagggaugc

SEQ ID NO: 1109003 - RNA, 22 nt, Human
aucagcaagacuaggggaauac

SEQ ID NO: 1109004 - RNA, 22 nt, Human
ucuaaaaaagucuguucacuug

SEQ ID NO: 1109005 - RNA, 22 nt, Human
cugcucugaguauuaacggagg

SEQ ID NO: 1109006 - RNA, 22 nt, Human
aggcacugguccauuuucugca

SEQ ID NO: 1109007 - RNA, 22 nt, Human
gcuucucucucagacugcaagc

SEQ ID NO: 1109008 - RNA, 22 nt, Human
cucaggagacaguguccacaug

SEQ ID NO: 1109009 - RNA, 22 nt, Human
acauuuaaauaugccuuauauu

SEQ ID NO: 1109010 - RNA, 22 nt, Human
uuugcauuguaauauuuaguuc

SEQ ID NO: 1109011 - RNA, 22 nt, Human
cacacauugaauucauucuugu

SEQ ID NO: 1109012 - RNA, 22 nt, Human
auacaucuaugccuuucugaca

SEQ ID NO: 1109013 - RNA, 22 nt, Human
gaaaucugaaucuucuguuggu

SEQ ID NO: 1109014 - RNA, 22 nt, Human
uagggcaggggaggaaucugaa

SEQ ID NO: 1109015 - RNA, 22 nt, Human
acagggccagccugggaccugg

SEQ ID NO: 1109016 - RNA, 22 nt, Human
cacugucuuuugugaagacaau

SEQ ID NO: 1109017 - RNA, 23 nt, Human
agcaauaagaagggauacaugug

SEQ ID NO: 1109018 - RNA, 22 nt, Human
caguccaggccuggaggagcca

SEQ ID NO: 1109019 - RNA, 22 nt, Human
uuacauuuuaguuaaccuguga

SEQ ID NO: 1109020 - RNA, 22 nt, Human
guuuuuccuugcugaggacccg

SEQ ID NO: 1109021 - RNA, 22 nt, Human
ggggcagauggaacagagcaca

SEQ ID NO: 1109022 - RNA, 22 nt, Human
uauguguacaucugguugagca

SEQ ID NO: 1109023 - RNA, 22 nt, Human
gcuggccauagaagccaaagag

SEQ ID NO: 1109024 - RNA, 22 nt, Human
ugcagcaggcacaggacggaag

SEQ ID NO: 1109025 - RNA, 22 nt, Human
agcuuuaugggagcuuagauaa

SEQ ID NO: 1109026 - RNA, 22 nt, Human
caguggcugugaccagggaccu

SEQ ID NO: 1109027 - RNA, 22 nt, Human
agcagggcagcugaugcgcacg

SEQ ID NO: 1109028 - RNA, 22 nt, Human
aggcagcccacaggacacagga

SEQ ID NO: 1109029 - RNA, 22 nt, Human
aaaaauagcuucucuugucccu

SEQ ID NO: 1109030 - RNA, 22 nt, Human
gagaagccgagucagcugagcc

SEQ ID NO: 1109031 - RNA, 22 nt, Human
acugcagggcauccuggccaag

SEQ ID NO: 1109032 - RNA, 22 nt, Human
acaggcugcccgcuccccaccu

SEQ ID NO: 1109033 - RNA, 23 nt, Human
gccagccuugcucuccugcagcc

SEQ ID NO: 1109034 - RNA, 22 nt, Human
uggcucaggauaauuuucccaa

SEQ ID NO: 1109035 - RNA, 22 nt, Human
aaggaggaauuucagggugaau

SEQ ID NO: 1109036 - RNA, 22 nt, Human
uagggcagcugcaucaggcacu

SEQ ID NO: 1109037 - RNA, 22 nt, Human
ucaagcaucuuggucuacgauc

SEQ ID NO: 1109038 - RNA, 22 nt, Human
uugaccauaccuccaggcaguu

SEQ ID NO: 1109039 - RNA, 22 nt, Human
aaaaaucacuuuuauaggcagc

SEQ ID NO: 1109040 - RNA, 22 nt, Human
gugcagagaaaugagaagucga

SEQ ID NO: 1109041 - RNA, 22 nt, Human
cagcagugucuccagcaucaca

SEQ ID NO: 1109042 - RNA, 22 nt, Human
cuacacaguucugccuaauggc

SEQ ID NO: 1109043 - RNA, 22 nt, Human
agguacagaugaaagucuaguu

SEQ ID NO: 1109044 - RNA, 22 nt, Human
agccccucuguggcucugccuc

SEQ ID NO: 1109045 - RNA, 22 nt, Human
ucagaccauccugcuguuagug

SEQ ID NO: 1109046 - RNA, 22 nt, Human
uuccuguauuuugcgaauuuuc

SEQ ID NO: 1109047 - RNA, 22 nt, Human
uuguggcucgugagauguuagg

SEQ ID NO: 1109048 - RNA, 22 nt, Human
agugaguggguuacagauggga

SEQ ID NO: 1109049 - RNA, 22 nt, Human
ggcucagaaacuaaaggcgcug

SEQ ID NO: 1109050 - RNA, 22 nt, Human
uacaaaugaccauagccacuua

SEQ ID NO: 1109051 - RNA, 22 nt, Human
gugccugggcaugagcuuguug

SEQ ID NO: 1109052 - RNA, 22 nt, Human
cagccugacaccagcuuugggc

SEQ ID NO: 1109053 - RNA, 22 nt, Human
gcugucccgaaccccugguaau

SEQ ID NO: 1109054 - RNA, 22 nt, Human
gcccuggccuucaucucagaca

SEQ ID NO: 1109055 - RNA, 22 nt, Human
cugcaagauuggaagaugcaau

SEQ ID NO: 1109056 - RNA, 22 nt, Human
ucugucugcgcuugcccuggug

SEQ ID NO: 1109057 - RNA, 22 nt, Human
ccugccugauuccaggauggcu

SEQ ID NO: 1109058 - RNA, 19 nt, Human
ucuaacagaagugucgucc

SEQ ID NO: 1109059 - RNA, 23 nt, Human
uagagcagggaaaucugucagag

SEQ ID NO: 1109060 - RNA, 22 nt, Human
caggcugagcucuggccugggc

SEQ ID NO: 1109061 - RNA, 22 nt, Human
uuucacauaaauauuaugccua

SEQ ID NO: 1109062 - RNA, 22 nt, Human
gcacugaacuuuaaucauuucu

SEQ ID NO: 1109063 - RNA, 22 nt, Human
uagauuuccucuuccucauucc

SEQ ID NO: 1109064 - RNA, 21 nt, Human
ugguuugcggccaaaguuaaa

SEQ ID NO: 1109065 - RNA, 22 nt, Human
uggcccucagucuugcuccugc

SEQ ID NO: 1109066 - RNA, 22 nt, Human
ucucauguauugcccuggugug

SEQ ID NO: 1109067 - RNA, 22 nt, Human
gccucccuguucuuccacaaua

SEQ ID NO: 1109068 - RNA, 22 nt, Human
agagggaucacccuguuucugg

SEQ ID NO: 1109069 - RNA, 22 nt, Human
agcaaagucaguggaaccaucc

SEQ ID NO: 1109070 - RNA, 22 nt, Human
acaaaugcaaguuuuaugucaa

SEQ ID NO: 1109071 - RNA, 22 nt, Human
gcugucacaucaaggcacuaaa

SEQ ID NO: 1109072 - RNA, 22 nt, Human
uguauauucugccuaaaagcuu

SEQ ID NO: 1109073 - RNA, 22 nt, Human
guccuggcuuaguucgcuguaa

SEQ ID NO: 1109074 - RNA, 22 nt, Human
agccaggcugcaguuggcuggc

SEQ ID NO: 1109075 - RNA, 21 nt, Human
gcagggacaaagcuucaggag

SEQ ID NO: 1109076 - RNA, 22 nt, Human
cugggcacaggggagcagaguc

SEQ ID NO: 1109077 - RNA, 22 nt, Human
ucaaaugcaggucuggucuugg

SEQ ID NO: 1109078 - RNA, 22 nt, Human
gcacugcagguggguggagagg

SEQ ID NO: 1109079 - RNA, 21 nt, Human
ugccagcauguaggcuaguug

SEQ ID NO: 1109080 - RNA, 22 nt, Human
caaugauguuuagauaaaaucc

SEQ ID NO: 1109081 - RNA, 22 nt, Human
uauacuuuccugcaacuuugau

SEQ ID NO: 1109082 - RNA, 23 nt, Human
cuggcucuguagguggcauccuu

SEQ ID NO: 1109083 - RNA, 22 nt, Human
ggcagcucugcuccacaugagu

SEQ ID NO: 1109084 - RNA, 22 nt, Human
caggagugaaaugaggcccagg

SEQ ID NO: 1109085 - RNA, 22 nt, Human
aacaacugaaaagcuuuuucug

SEQ ID NO: 1109086 - RNA, 22 nt, Human
acagggcagagugaaaugcuau

SEQ ID NO: 1109087 - RNA, 22 nt, Human
ucccagccauuccuuuaggugu

SEQ ID NO: 1109088 - RNA, 20 nt, Human
cagagcuguuauggaugaug

SEQ ID NO: 1109089 - RNA, 22 nt, Human
aggagcuggaguccaggcaagu

SEQ ID NO: 1109090 - RNA, 21 nt, Human
ccugugugucugacugggcua

SEQ ID NO: 1109091 - RNA, 22 nt, Human
ggcagcuggggcagugcccugu

SEQ ID NO: 1109092 - RNA, 22 nt, Human
gccuggugugcgccgcgcagcu

SEQ ID NO: 1109093 - RNA, 22 nt, Human
ggcugucucugugacugccacc

SEQ ID NO: 1109094 - RNA, 22 nt, Human
acagacagggcaccugccuccu

SEQ ID NO: 1109095 - RNA, 22 nt, Human
aagugaguggccuggagaggug

SEQ ID NO: 1109096 - RNA, 22 nt, Human
uaauuuaauuccauggauucua

SEQ ID NO: 1109097 - RNA, 22 nt, Human
gagugugggcacgggggccuug

SEQ ID NO: 1109098 - RNA, 22 nt, Human
gaggagcacaugaggcugaggg

SEQ ID NO: 1109099 - RNA, 22 nt, Human
acagaccaaaaaaggauauugg

SEQ ID NO: 1109100 - RNA, 22 nt, Human
cagcagggaagcugugcuguuu

SEQ ID NO: 1109101 - RNA, 22 nt, Human
uaaauguaccuucugccuuacu

SEQ ID NO: 1109102 - RNA, 22 nt, Human
caggucagagucccccuguccu

SEQ ID NO: 1109103 - RNA, 22 nt, Human
ugggcugcugagaaugagagag

SEQ ID NO: 1109104 - RNA, 22 nt, Human
uggcucuggauuaaucuaggaa

SEQ ID NO: 1109105 - RNA, 22 nt, Human
gaggccugguuuccagcauccu

SEQ ID NO: 1109106 - RNA, 22 nt, Human
cagcagagacgguaagcagaac

SEQ ID NO: 1109107 - RNA, 22 nt, Human
uggcagaggaaaaagucacugg

SEQ ID NO: 1109108 - RNA, 19 nt, Human
guaagggcuaauggacuau

SEQ ID NO: 1109109 - RNA, 22 nt, Human
auuagcugaccucuaaggagcc

SEQ ID NO: 1109110 - RNA, 22 nt, Human
cagagcagguaucuuuggugaa

SEQ ID NO: 1109111 - RNA, 22 nt, Human
ccuuucucuaucgacccaucgc

SEQ ID NO: 1109112 - RNA, 22 nt, Human
gaaggccucacucugcagcaua

SEQ ID NO: 1109113 - RNA, 22 nt, Human
ucugggagguaaccaugcugau

SEQ ID NO: 1109114 - RNA, 22 nt, Human
gcagaacauuucacaguaucuu

SEQ ID NO: 1109115 - RNA, 22 nt, Human
uccuucagcuuauuucuuagga

SEQ ID NO: 1109116 - RNA, 22 nt, Human
gcucccugccuacacggaccuu

SEQ ID NO: 1109117 - RNA, 22 nt, Human
cagagacaguuucacagggucu

SEQ ID NO: 1109118 - RNA, 22 nt, Human
auguucaaacuuuuuacacacc

SEQ ID NO: 1109119 - RNA, 22 nt, Human
gccagcuggagugagagugggc

SEQ ID NO: 1109120 - RNA, 22 nt, Human
aggccugagcagaggaguggac

SEQ ID NO: 1109121 - RNA, 22 nt, Human
cagagccauuauggagacuugc

SEQ ID NO: 1109122 - RNA, 21 nt, Human
gcagcuggucucagagcuugc

SEQ ID NO: 1109123 - RNA, 22 nt, Human
ggagugaaucacuagaugcaga

SEQ ID NO: 1109124 - RNA, 22 nt, Human
acauacuuuuuaaaagauugcu

SEQ ID NO: 1109125 - RNA, 22 nt, Human
uucuggaggccccuuccuucuc

SEQ ID NO: 1109126 - RNA, 22 nt, Human
gguggggccugcuccagcggcc

SEQ ID NO: 1109127 - RNA, 22 nt, Human
cugcucugacccuuucaccuuc

SEQ ID NO: 1109128 - RNA, 22 nt, Human
caaagccucugauuucacuugu

SEQ ID NO: 1109129 - RNA, 22 nt, Human
aaaucuggccccuugccuauuu

SEQ ID NO: 1109130 - RNA, 22 nt, Human
ucccagagcaguacuccaggag

SEQ ID NO: 1109131 - RNA, 18 nt, Human
ugggauggagaguaacug

SEQ ID NO: 1109132 - RNA, 22 nt, Human
guccugggaaggaagccaggga

SEQ ID NO: 1109133 - RNA, 22 nt, Human
ucuggcucuguguccucaccca

SEQ ID NO: 1109134 - RNA, 22 nt, Human
gcaggagcagucaggggcagcu

SEQ ID NO: 1109135 - RNA, 22 nt, Human
gcagcuguguaaugagcccaca

SEQ ID NO: 1109136 - RNA, 22 nt, Human
ucaggggcuugaggugcauguc

SEQ ID NO: 1109137 - RNA, 22 nt, Human
cacugcucgcugcagcauggcc

SEQ ID NO: 1109138 - RNA, 22 nt, Human
ccagugcacagccaggcaggug

SEQ ID NO: 1109139 - RNA, 22 nt, Human
cauugacaguucuuuaaguugc

SEQ ID NO: 1109140 - RNA, 21 nt, Human
caugaagccgguucccuguuu

SEQ ID NO: 1109141 - RNA, 22 nt, Human
aaagcaguauauugguaguugu

SEQ ID NO: 1109142 - RNA, 22 nt, Human
cagaggccccagaacuagcucu

SEQ ID NO: 1109143 - RNA, 22 nt, Human
cagggccugcuuccuucuuguu

SEQ ID NO: 1109144 - RNA, 22 nt, Human
gggccccuuguaucucuggcuc

SEQ ID NO: 1109145 - RNA, 22 nt, Human
ugggcuggcugaacuucaaccu

SEQ ID NO: 1109146 - RNA, 21 nt, Human
gccacugcacuccagccuggg

SEQ ID NO: 1109147 - RNA, 22 nt, Human
aggcagccagauggcagccugc

SEQ ID NO: 1109148 - RNA, 22 nt, Human
cagagguaccagcagccucugg

SEQ ID NO: 1109149 - RNA, 22 nt, Human
ucucagagaccugaacucccug

SEQ ID NO: 1109150 - RNA, 23 nt, Human
ggggccugcaccggucugcgcgg

SEQ ID NO: 1109151 - RNA, 22 nt, Human
cugcaggcaucuaacugugggc

SEQ ID NO: 1109152 - RNA, 22 nt, Human
uggccucuggcugaggacuaac

SEQ ID NO: 1109153 - RNA, 22 nt, Human
ccagaagucaggaaugagucuu

SEQ ID NO: 1109154 - RNA, 20 nt, Human
caaugcacacagcugcuucu

SEQ ID NO: 1109155 - RNA, 22 nt, Human
ccaaggagaaaugcugugcuuu

SEQ ID NO: 1109156 - RNA, 22 nt, Human
uggccuggaaccuggcagggac

SEQ ID NO: 1109157 - RNA, 22 nt, Human
aaggagugcaugacucagagua

SEQ ID NO: 1109158 - RNA, 18 nt, Human
auuuugaacaaugcugua

SEQ ID NO: 1109159 - RNA, 22 nt, Human
gcugggagcaaguacucaucuu

SEQ ID NO: 1109160 - RNA, 22 nt, Human
cugagccagcuggcaugugcua

SEQ ID NO: 1109161 - RNA, 22 nt, Human
cacagaaguuucauagucucga

SEQ ID NO: 1109162 - RNA, 20 nt, Human
gcuuccuucccagcccccac

SEQ ID NO: 1109163 - RNA, 22 nt, Human
ccugucuguaucgguucagagu

SEQ ID NO: 1109164 - RNA, 18 nt, Human
auggucucauacugggag

SEQ ID NO: 1109165 - RNA, 22 nt, Human
ggcucagguuuccuucccagcu

SEQ ID NO: 1109166 - RNA, 22 nt, Human
gcagcuggaagugacacucugu

SEQ ID NO: 1109167 - RNA, 22 nt, Human
cugaggugcuagggucccugcu

SEQ ID NO: 1109168 - RNA, 22 nt, Human
guuugaaaaaagcaguauguaa

SEQ ID NO: 1109169 - RNA, 22 nt, Human
ugccugcucuuaccacucuccc

SEQ ID NO: 1109170 - RNA, 22 nt, Human
ccuagagcucugcuuuaucuaa

SEQ ID NO: 1109171 - RNA, 22 nt, Human
ccagacuguggaguuccuggug

SEQ ID NO: 1109172 - RNA, 22 nt, Human
uuagaaaucaccucugaagauc

SEQ ID NO: 1109173 - RNA, 22 nt, Human
ggcuucucgugccgaagcaaga

SEQ ID NO: 1109174 - RNA, 22 nt, Human
uacauggugguggcacuugacu

SEQ ID NO: 1109175 - RNA, 22 nt, Human
gggcacugcuuugcucugucac

SEQ ID NO: 1109176 - RNA, 22 nt, Human
ucagcugccccaguggccccag

SEQ ID NO: 1109177 - RNA, 18 nt, Human
uuucacaaccuccagagg

SEQ ID NO: 1109178 - RNA, 22 nt, Human
ggagacaguauggcuuguagcu

SEQ ID NO: 1109179 - RNA, 22 nt, Human
auaaggcauauagucacuuuuu

SEQ ID NO: 1109180 - RNA, 22 nt, Human
cugucaguucuuccagauagag

SEQ ID NO: 1109181 - RNA, 22 nt, Human
agagugaaguuuuugaaaguga

SEQ ID NO: 1109182 - RNA, 22 nt, Human
ucuggccaggauggcaagacca

SEQ ID NO: 1109183 - RNA, 22 nt, Human
gccaccagguuagauccagccu

SEQ ID NO: 1109184 - RNA, 20 nt, Human
cacaggcuauaugagagcca

SEQ ID NO: 1109185 - RNA, 22 nt, Human
ucagagcuaaggggagagcaaa

SEQ ID NO: 1109186 - RNA, 19 nt, Human
ucauaaggagagaggaaau

SEQ ID NO: 1109187 - RNA, 22 nt, Human
agccuccaguagcugaagagac

SEQ ID NO: 1109188 - RNA, 22 nt, Human
uuguuacagcagugauuucaga

SEQ ID NO: 1109189 - RNA, 22 nt, Human
agugaaauccuggucaacaggu

SEQ ID NO: 1109190 - RNA, 22 nt, Human
ugcauuaugcuacccagaagcu

SEQ ID NO: 1109191 - RNA, 22 nt, Human
agcagcauagaagcugggagga

SEQ ID NO: 1109192 - RNA, 22 nt, Human
uuaacagauguuuauggagcau

SEQ ID NO: 1109193 - RNA, 22 nt, Human
uaguccaguaaaacagcuaacg

SEQ ID NO: 1109194 - RNA, 21 nt, Human
agguggggcugcaccucugcu

SEQ ID NO: 1109195 - RNA, 22 nt, Human
aaaugcacagguuuuaaauccu

SEQ ID NO: 1109196 - RNA, 22 nt, Human
cacauggggcgcugcauuggcc

SEQ ID NO: 1109197 - RNA, 22 nt, Human
gagggggagaugugcacacacu

SEQ ID NO: 1109198 - RNA, 20 nt, Human
agaagcugauacugauggaa

SEQ ID NO: 1109199 - RNA, 22 nt, Human
aucaguuuauacuuauaaaucu

SEQ ID NO: 1109200 - RNA, 22 nt, Human
uggcucagaggggaagugguuu

SEQ ID NO: 1109201 - RNA, 22 nt, Human
cauguacaaaaggcaaaugccu

SEQ ID NO: 1109202 - RNA, 22 nt, Human
uguaucaaaccaaauuaauucu

SEQ ID NO: 1109203 - RNA, 22 nt, Human
ucugucugacaggguaugaacu

SEQ ID NO: 1109204 - RNA, 22 nt, Human
cuguccuguggaccugaggacg

SEQ ID NO: 1109205 - RNA, 22 nt, Human
gcugucccaugguugcaagaug

SEQ ID NO: 1109206 - RNA, 22 nt, Human
cugagcauggccgguccauggu

SEQ ID NO: 1109207 - RNA, 22 nt, Human
gcagccacacuguuacagaaug

SEQ ID NO: 1109208 - RNA, 22 nt, Human
acaaauguggacauggauaaug

SEQ ID NO: 1109209 - RNA, 22 nt, Human
caguggguggcuaaguggcuga

SEQ ID NO: 1109210 - RNA, 22 nt, Human
uccuauugguagacauuucugu

SEQ ID NO: 1109211 - RNA, 22 nt, Human
uggggugggcaugcgcuguccu

SEQ ID NO: 1109212 - RNA, 22 nt, Human
gcagcagagaacacaaugaugg

SEQ ID NO: 1109213 - RNA, 22 nt, Human
gagccagcgccuugccucuggg

SEQ ID NO: 1109214 - RNA, 22 nt, Human
cucucuggaagggggagcugau

SEQ ID NO: 1109215 - RNA, 22 nt, Human
augcacagcagugaguucagug

SEQ ID NO: 1109216 - RNA, 22 nt, Human
auugcagcuggucaggguaauu

SEQ ID NO: 1109217 - RNA, 22 nt, Human
aguggcagagcaggugcuggaa

SEQ ID NO: 1109218 - RNA, 22 nt, Human
uccuuccugcaggccaaguccu

SEQ ID NO: 1109219 - RNA, 22 nt, Human
augggguggaguccgggcagcg

SEQ ID NO: 1109220 - RNA, 22 nt, Human
cugugcuuaccugcccagguga

SEQ ID NO: 1109221 - RNA, 22 nt, Human
aacaaaugaccugauuucuucc

SEQ ID NO: 1109222 - RNA, 20 nt, Human
cugugcuuuggaaccuggaa

SEQ ID NO: 1109223 - RNA, 22 nt, Human
gcagcacauauaaacaaagaga

SEQ ID NO: 1109224 - RNA, 22 nt, Human
uacaaaguuugagaaugcuuuc

SEQ ID NO: 1109225 - RNA, 23 nt, Human
gugcaugugucuuuacaguagca

SEQ ID NO: 1109226 - RNA, 22 nt, Human
agaggucagaacaggaaagugu

SEQ ID NO: 1109227 - RNA, 22 nt, Human
uggcccugacuuggaggccuga

SEQ ID NO: 1109228 - RNA, 23 nt, Human
uuacuuuugcaccaaccuaauau

SEQ ID NO: 1109229 - RNA, 22 nt, Human
auguacauuuuccuaauguuuu

SEQ ID NO: 1109230 - RNA, 22 nt, Human
uguaauggaagugggauugcau

SEQ ID NO: 1109231 - RNA, 22 nt, Human
caucacugacgcugagauucca

SEQ ID NO: 1109232 - RNA, 22 nt, Human
gcugucacacauggccccagcu

SEQ ID NO: 1109233 - RNA, 22 nt, Human
ugggcacuauggcucugugcac

SEQ ID NO: 1109234 - RNA, 22 nt, Human
uagcagggucucaggagucagg

SEQ ID NO: 1109235 - RNA, 22 nt, Human
ugcaggccggcccuaggccuca

SEQ ID NO: 1109236 - RNA, 22 nt, Human
caggguggaagcuguagagugg

SEQ ID NO: 1109237 - RNA, 22 nt, Human
ugacagaacagguugggagcaa

SEQ ID NO: 1109238 - RNA, 22 nt, Human
ugucucugccagcuagcagaau

SEQ ID NO: 1109239 - RNA, 22 nt, Human
gcucugagauugagccuuuggu

SEQ ID NO: 1109240 - RNA, 22 nt, Human
gcaggcugaugacuggaguugg

SEQ ID NO: 1109241 - RNA, 22 nt, Human
accauuuaauaaguauuuccau

SEQ ID NO: 1109242 - RNA, 22 nt, Human
guuugcauuccaauuuagggga

SEQ ID NO: 1109243 - RNA, 22 nt, Human
uuuccauauucugcgucugcca

SEQ ID NO: 1109244 - RNA, 22 nt, Human
uggagcagcaucacuuugagcu

SEQ ID NO: 1109245 - RNA, 22 nt, Human
ucucaggggccuggaguccugg

SEQ ID NO: 1109246 - RNA, 22 nt, Human
uaacagaaaggcucaggugcuc

SEQ ID NO: 1109247 - RNA, 22 nt, Human
ugcugcacaauuggaaaguauc

SEQ ID NO: 1109248 - RNA, 22 nt, Human
auucuggauuaucaguccacca

SEQ ID NO: 1109249 - RNA, 22 nt, Human
auagaacagaaacagaugcaca

SEQ ID NO: 1109250 - RNA, 22 nt, Human
cagcagcugauggggaagugau

SEQ ID NO: 1109251 - RNA, 22 nt, Human
ugcagcauucuuggccacuacu

SEQ ID NO: 1109252 - RNA, 22 nt, Human
gggucuggcaugcugagaugga

SEQ ID NO: 1109253 - RNA, 22 nt, Human
ccuuagagaguacugggcugcc

SEQ ID NO: 1109254 - RNA, 22 nt, Human
gaacaguaucaguagugccagu

SEQ ID NO: 1109255 - RNA, 22 nt, Human
cgaugguucuggcugcuuguau

SEQ ID NO: 1109256 - RNA, 22 nt, Human
cccugcagaccaaugccauaga

SEQ ID NO: 1109257 - RNA, 22 nt, Human
aagcagggugucuugacccaug

SEQ ID NO: 1109258 - RNA, 22 nt, Human
cuucucucccuggcacucagac

SEQ ID NO: 1109259 - RNA, 22 nt, Human
acaaaugccauauauaaauucu

SEQ ID NO: 1109260 - RNA, 22 nt, Human
gcaggcaguuauuuaguagaau

SEQ ID NO: 1109261 - RNA, 22 nt, Human
uggcucagcgguggcagcagac

SEQ ID NO: 1109262 - RNA, 22 nt, Human
ggacacaagcuccggggcugca

SEQ ID NO: 1109263 - RNA, 22 nt, Human
ccagcugaggcagccacacagg

SEQ ID NO: 1109264 - RNA, 22 nt, Human
uaacagaaauuuuaguuagggg

SEQ ID NO: 1109265 - RNA, 17 nt, Human
cagggcugucugccuag

SEQ ID NO: 1109266 - RNA, 22 nt, Human
cagcaugguggagcugcucuuu

SEQ ID NO: 1109267 - RNA, 22 nt, Human
ccugucaguugcugucagggau

SEQ ID NO: 1109268 - RNA, 23 nt, Human
gccuggccaccccagggcugcuu

SEQ ID NO: 1109269 - RNA, 22 nt, Human
gcaguggcaugaugugggcuca

SEQ ID NO: 1109270 - RNA, 22 nt, Human
ggcucugguugaccaugauggc

SEQ ID NO: 1109271 - RNA, 22 nt, Human
aagcugccuuccaugugaggaa

SEQ ID NO: 1109272 - RNA, 17 nt, Human
cagugcagagcccuuuc

SEQ ID NO: 1109273 - RNA, 22 nt, Human
gguggcuggaggagcugaugga

SEQ ID NO: 1109274 - RNA, 22 nt, Human
agcauggggcuccgcaaugaac

SEQ ID NO: 1109275 - RNA, 19 nt, Human
ccucugcgcuguccugcuc

SEQ ID NO: 1109276 - RNA, 22 nt, Human
aaggcacuagcaagcugccugg

SEQ ID NO: 1109277 - RNA, 22 nt, Human
gacagacauuuccugauccaau

SEQ ID NO: 1109278 - RNA, 22 nt, Human
ugcuguuauacuuagcugguua

SEQ ID NO: 1109279 - RNA, 22 nt, Human
cugcuggggucagagcacuggg

SEQ ID NO: 1109280 - RNA, 22 nt, Human
ccucuccaguuuuaacgugacc

SEQ ID NO: 1109281 - RNA, 22 nt, Human
ucacauuuucauauucucugag

SEQ ID NO: 1109282 - RNA, 22 nt, Human
uggccugguuauauugcuauca

SEQ ID NO: 1109283 - RNA, 22 nt, Human
ugcaggagcugugcggugaggg

SEQ ID NO: 1109284 - RNA, 22 nt, Human
ccuguggcugccacuuggguga

SEQ ID NO: 1109285 - RNA, 22 nt, Human
gcucaggaccgaggggugggaa

SEQ ID NO: 1109286 - RNA, 22 nt, Human
gcaggagccaggccgagcuggu

SEQ ID NO: 1109287 - RNA, 21 nt, Human
ccugggagaucagcugccuuc

SEQ ID NO: 1109288 - RNA, 22 nt, Human
ccugagguggcugcagcacugc

SEQ ID NO: 1109289 - RNA, 22 nt, Human
ggcuggcuggcugguagacaag

SEQ ID NO: 1109290 - RNA, 22 nt, Human
gccucugcccuccugggacugc

SEQ ID NO: 1109291 - RNA, 23 nt, Human
cagggcugggcuugguguuaggc

SEQ ID NO: 1109292 - RNA, 22 nt, Human
aaaugcacaggagaaccaauuc

SEQ ID NO: 1109293 - RNA, 22 nt, Human
ccaggccuggaccaugccaggg

SEQ ID NO: 1109294 - RNA, 22 nt, Human
gccucugcgccucagccgaccu

SEQ ID NO: 1109295 - RNA, 22 nt, Human
gugaggugggcuggccagagac

SEQ ID NO: 1109296 - RNA, 22 nt, Human
ucagaggacaagcucccuggug

SEQ ID NO: 1109297 - RNA, 19 nt, Human
ggucucagugcagcugcag

SEQ ID NO: 1109298 - RNA, 22 nt, Human
gugcagugagcagugcagcacc

SEQ ID NO: 1109299 - RNA, 22 nt, Human
cagggcuguuagcugcugcucu

SEQ ID NO: 1109300 - RNA, 22 nt, Human
uaaugcacaugacugaacuauu

SEQ ID NO: 1109301 - RNA, 19 nt, Human
ggcucucccuugagagagc

SEQ ID NO: 1109302 - RNA, 22 nt, Human
gugcaggggaucagguugcagc

SEQ ID NO: 1109303 - RNA, 22 nt, Human
gccaaagcagucuugccucugc

SEQ ID NO: 1109304 - RNA, 22 nt, Human
aggcucagcccaagguggagag

SEQ ID NO: 1109305 - RNA, 22 nt, Human
cagagugagggccugcaccugc

SEQ ID NO: 1109306 - RNA, 22 nt, Human
gaggggcugggcagucccugga

SEQ ID NO: 1109307 - RNA, 22 nt, Human
acugugugggccgcucacuggg

SEQ ID NO: 1109308 - RNA, 22 nt, Human
gguggcagucuuaagagaucuu

SEQ ID NO: 1109309 - RNA, 20 nt, Human
guggccucucacauucugag

SEQ ID NO: 1109310 - RNA, 22 nt, Human
gcugccuguugaagggucugug

SEQ ID NO: 1109311 - RNA, 22 nt, Human
ugguggcuucugaggauggcga

SEQ ID NO: 1109312 - RNA, 22 nt, Human
agaggccuccgaaaggugggcu

SEQ ID NO: 1109313 - RNA, 22 nt, Human
uuccuguccgcaauggccuggg

SEQ ID NO: 1109314 - RNA, 22 nt, Human
uagccuucucaagacaaaguug

SEQ ID NO: 1109315 - RNA, 22 nt, Human
gcuggcagucccaucagcuggg

SEQ ID NO: 1109316 - RNA, 18 nt, Human
uccagcgugcuccagggc

SEQ ID NO: 1109317 - RNA, 22 nt, Human
gccuucaggaaaucaguccuug

SEQ ID NO: 1109318 - RNA, 22 nt, Human
ugcuggaggggccugaccagga

SEQ ID NO: 1109319 - RNA, 20 nt, Human
caggccucugggggcccugg

SEQ ID NO: 1109320 - RNA, 22 nt, Human
auuuacagaugaugcuauuuga

SEQ ID NO: 1109321 - RNA, 22 nt, Human
aaagaacaucggagugggcggg

SEQ ID NO: 1109322 - RNA, 20 nt, Human
ccuggcugcauucaggacgg

SEQ ID NO: 1109323 - RNA, 22 nt, Human
gagccuguguuuccuguagcca

SEQ ID NO: 1109324 - RNA, 22 nt, Human
cagggcugaaaucaagguguag

SEQ ID NO: 1109325 - RNA, 22 nt, Human
ucacacguccuugcuacuccuc

SEQ ID NO: 1109326 - RNA, 22 nt, Human
guaauugacucagcucuguuca

SEQ ID NO: 1109327 - RNA, 19 nt, Human
agccuggagggcuggucac

SEQ ID NO: 1109328 - RNA, 22 nt, Human
agggcugcuauguugauucaga

SEQ ID NO: 1109329 - RNA, 22 nt, Human
aggugcagaaaaaaguccuuua

SEQ ID NO: 1109330 - RNA, 22 nt, Human
ucugccuguucaagucuucuag

SEQ ID NO: 1109331 - RNA, 22 nt, Human
cucucugguacauagaguuugg

SEQ ID NO: 1109332 - RNA, 20 nt, Human
ucauccaggacaggaguggc

SEQ ID NO: 1109333 - RNA, 22 nt, Human
ucucagagcaucauuuucuuag

SEQ ID NO: 1109334 - RNA, 22 nt, Human
ggagcuguaacgagccauugcu

SEQ ID NO: 1109335 - RNA, 20 nt, Human
ugcuguaagauuagagagcu

SEQ ID NO: 1109336 - RNA, 17 nt, Human
uccuggcucugccacug

SEQ ID NO: 1109337 - RNA, 23 nt, Human
aaaugcagggucgcagguuacag

SEQ ID NO: 1109338 - RNA, 22 nt, Human
cugggccuggcguuccaggcug

SEQ ID NO: 1109339 - RNA, 22 nt, Human
accaucagucauugucaguggg

SEQ ID NO: 1109340 - RNA, 22 nt, Human
ugccugucagggggagugggaa

SEQ ID NO: 1109341 - RNA, 22 nt, Human
acagagaugcaaguguguauuu

SEQ ID NO: 1109342 - RNA, 22 nt, Human
uuauuaaugaguacaaguuauu

SEQ ID NO: 1109343 - RNA, 22 nt, Human
ucugagcuggagcccaucaccu

SEQ ID NO: 1109344 - RNA, 22 nt, Human
agcugggaggugggcagugaga

SEQ ID NO: 1109345 - RNA, 22 nt, Human
cagcaggguagguuguaucagu

SEQ ID NO: 1109346 - RNA, 22 nt, Human
cccagcuugcccaggacugagg

SEQ ID NO: 1109347 - RNA, 18 nt, Human
agucucagcggaggagua

SEQ ID NO: 1109348 - RNA, 22 nt, Human
gggcuggcaggaccugggcuga

SEQ ID NO: 1109349 - RNA, 22 nt, Human
cugagagcagggacuugagcca

SEQ ID NO: 1109350 - RNA, 22 nt, Human
ucagacaguuugcagugugccu

SEQ ID NO: 1109351 - RNA, 22 nt, Human
aguguuccuugcuuucccagag

SEQ ID NO: 1109352 - RNA, 22 nt, Human
acugucuguccugcucuccgug

SEQ ID NO: 1109353 - RNA, 22 nt, Human
gcagauggcucagacacugggg

SEQ ID NO: 1109354 - RNA, 22 nt, Human
acacugcucacuucuucccuug

SEQ ID NO: 1109355 - RNA, 22 nt, Human
cccucugcaggcuggaccugcc

SEQ ID NO: 1109356 - RNA, 22 nt, Human
uagcagcuuaaguaauuagaau

SEQ ID NO: 1109357 - RNA, 22 nt, Human
uccagggcugacuugggagagg

SEQ ID NO: 1109358 - RNA, 22 nt, Human
uuuuagauugggaaauguaaag

SEQ ID NO: 1109359 - RNA, 22 nt, Human
uucuuucacucaagaaggaucu

SEQ ID NO: 1109360 - RNA, 22 nt, Human
acaaagucucuaauaaucuucu

SEQ ID NO: 1109361 - RNA, 22 nt, Human
cacaggugcuccucggggagcu

SEQ ID NO: 1109362 - RNA, 22 nt, Human
auaacagagagcuacugaacug

SEQ ID NO: 1109363 - RNA, 22 nt, Human
guccugucccccaaggcugugg

SEQ ID NO: 1109364 - RNA, 22 nt, Human
aaagccuugcccgucacuggga

SEQ ID NO: 1109365 - RNA, 21 nt, Human
agacagaacaacugcucucca

SEQ ID NO: 1109366 - RNA, 22 nt, Human
cagaggccauauuucuucacuc

SEQ ID NO: 1109367 - RNA, 22 nt, Human
cuggugguucaggagaauggcu

SEQ ID NO: 1109368 - RNA, 21 nt, Human
aggcccagcuuuccucuugcu

SEQ ID NO: 1109369 - RNA, 22 nt, Human
ccuggcucuguccucgcgcaaa

SEQ ID NO: 1109370 - RNA, 22 nt, Human
agcaccuucacaggcucucagg

SEQ ID NO: 1109371 - RNA, 22 nt, Human
aaugaacacagcccucuacuuu

SEQ ID NO: 1109372 - RNA, 22 nt, Human
gugcccugaguggguaggagag

SEQ ID NO: 1109373 - RNA, 22 nt, Human
cugugcuggcagaccuggaguu

SEQ ID NO: 1109374 - RNA, 22 nt, Human
agagggagcccagucauagcug

SEQ ID NO: 1109375 - RNA, 22 nt, Human
cagggccacuguagaugaggag

SEQ ID NO: 1109376 - RNA, 22 nt, Human
caggcagcaucagucugcugua

SEQ ID NO: 1109377 - RNA, 22 nt, Human
agcaggugacagggcuguggug

SEQ ID NO: 1109378 - RNA, 22 nt, Human
ugggggagccuucacaguagcu

SEQ ID NO: 1109379 - RNA, 22 nt, Human
caaggcaggcaguucacuugag

SEQ ID NO: 1109380 - RNA, 22 nt, Human
uacuuacagagcuuauaaguua

SEQ ID NO: 1109381 - RNA, 22 nt, Human
gcuccuggucuggagcuucaag

SEQ ID NO: 1109382 - RNA, 22 nt, Human
ucucuggaauuggcugaggcaa

SEQ ID NO: 1109383 - RNA, 22 nt, Human
uccuuccucggggacccagauc

SEQ ID NO: 1109384 - RNA, 22 nt, Human
gagcagcucugggugacccagu

SEQ ID NO: 1109385 - RNA, 22 nt, Human
uggcucagcagguuagaaacua

SEQ ID NO: 1109386 - RNA, 22 nt, Human
caggcagccugcggucugcaca

SEQ ID NO: 1109387 - RNA, 22 nt, Human
aaacaaguguaaacuagucugu

SEQ ID NO: 1109388 - RNA, 22 nt, Human
acauucuagaagucuuugcaau

SEQ ID NO: 1109389 - RNA, 23 nt, Human
ggccuguguuuugucugaaguac

SEQ ID NO: 1109390 - RNA, 20 nt, Human
gagccuuccccucaccacug

SEQ ID NO: 1109391 - RNA, 23 nt, Human
ccaggccucucagagggugugcc

SEQ ID NO: 1109392 - RNA, 22 nt, Human
cccagcucucgcacuuacuagc

SEQ ID NO: 1109393 - RNA, 22 nt, Human
gcucccagaaccaaggcugggg

SEQ ID NO: 1109394 - RNA, 22 nt, Human
ugaagaugucagcagggguggu

SEQ ID NO: 1109395 - RNA, 22 nt, Human
uggccugcccagagcagcucug

SEQ ID NO: 1109396 - RNA, 22 nt, Human
ccagggugggguccaggaacca

SEQ ID NO: 1109397 - RNA, 22 nt, Human
gagcuggcuaauacugacuuau

SEQ ID NO: 1109398 - RNA, 22 nt, Human
ccagccuccauguagauagcug

SEQ ID NO: 1109399 - RNA, 22 nt, Human
agugaaaacacuaguucuugcc

SEQ ID NO: 1109400 - RNA, 22 nt, Human
agauacaugucaagagacuuau

SEQ ID NO: 1109401 - RNA, 22 nt, Human
ccaggcugugguuuagauagag

SEQ ID NO: 1109402 - RNA, 22 nt, Human
agggcugcuccuccuucaggcc

SEQ ID NO: 1109403 - RNA, 22 nt, Human
gggcacagcugcuacccagugc

SEQ ID NO: 1109404 - RNA, 22 nt, Human
gcuggcucccauugguccuucc

SEQ ID NO: 1109405 - RNA, 21 nt, Human
acaguucaugauaacuccauc

SEQ ID NO: 1109406 - RNA, 22 nt, Human
ucaguggagcuaagcaugagau

SEQ ID NO: 1109407 - RNA, 22 nt, Human
caagaugaaacuacagggagga

SEQ ID NO: 1109408 - RNA, 23 nt, Human
uggcagcagaucuuaaagugacc

SEQ ID NO: 1109409 - RNA, 22 nt, Human
ucacuuauaaaaugcaagaucu

SEQ ID NO: 1109410 - RNA, 22 nt, Human
caggacaguauaggcuuuagga

SEQ ID NO: 1109411 - RNA, 22 nt, Human
ugacaccacaacuagccauuga

SEQ ID NO: 1109412 - RNA, 22 nt, Human
ucaggcugguggucagauggcu

SEQ ID NO: 1109413 - RNA, 22 nt, Human
uguuaaucaaucaacaguauua

SEQ ID NO: 1109414 - RNA, 22 nt, Human
gggucagcugcugggggcugac

SEQ ID NO: 1109415 - RNA, 22 nt, Human
agggugccugcugcagguucag

SEQ ID NO: 1109416 - RNA, 22 nt, Human
cagcuugggaguuugguuuuau

SEQ ID NO: 1109417 - RNA, 22 nt, Human
ccuggcagguggagguugcagu

SEQ ID NO: 1109418 - RNA, 22 nt, Human
uauuuauaaucugccaaagaga

SEQ ID NO: 1109419 - RNA, 22 nt, Human
acaugcuuucuagguccuucug

SEQ ID NO: 1109420 - RNA, 22 nt, Human
agaagcugacagaugcagcagg

SEQ ID NO: 1109421 - RNA, 22 nt, Human
ccugcagacacuuguccagcaa

SEQ ID NO: 1109422 - RNA, 22 nt, Human
cacguuuuaugacagaagaagc

SEQ ID NO: 1109423 - RNA, 22 nt, Human
gcuggggagcuagaccucagca

SEQ ID NO: 1109424 - RNA, 22 nt, Human
agggugcauguuugcaagagug

SEQ ID NO: 1109425 - RNA, 22 nt, Human
agagccaggcaggcaauguuga

SEQ ID NO: 1109426 - RNA, 22 nt, Human
agagccuggggauuggcaaggg

SEQ ID NO: 1109427 - RNA, 19 nt, Human
acucaagucuaaugaaauc

SEQ ID NO: 1109428 - RNA, 22 nt, Human
ccugugucuuccccacuggugu

SEQ ID NO: 1109429 - RNA, 22 nt, Human
aagagcugcaucuaagccauga

SEQ ID NO: 1109430 - RNA, 22 nt, Human
gccugggagugcacagugaggu

SEQ ID NO: 1109431 - RNA, 22 nt, Human
aagggcagcuuaaauugguagc

SEQ ID NO: 1109432 - RNA, 22 nt, Human
gcugcccaguucugcugcugcc

SEQ ID NO: 1109433 - RNA, 22 nt, Human
ucucagggccucccucuguuuc

SEQ ID NO: 1109434 - RNA, 22 nt, Human
auucuaggcuugaaacaugaag

SEQ ID NO: 1109435 - RNA, 22 nt, Human
ucaggcagaggauggggagcgu

SEQ ID NO: 1109436 - RNA, 22 nt, Human
caaugguggugucagaagagau

SEQ ID NO: 1109437 - RNA, 22 nt, Human
agauacaucauuuauaccuuca

SEQ ID NO: 1109438 - RNA, 22 nt, Human
ugcuagaauaccuaccuggagg

SEQ ID NO: 1109439 - RNA, 22 nt, Human
caggccagugugcuucccaggc

SEQ ID NO: 1109440 - RNA, 22 nt, Human
uggccuggugcucaggcaguag

SEQ ID NO: 1109441 - RNA, 22 nt, Human
ugcauuucagaagaaaauucgg

SEQ ID NO: 1109442 - RNA, 22 nt, Human
ccuggaugauccaugucaugga

SEQ ID NO: 1109443 - RNA, 22 nt, Human
agaacagcaguuaugguucauu

SEQ ID NO: 1109444 - RNA, 22 nt, Human
acucacauuucaucaggccaag

SEQ ID NO: 1109445 - RNA, 22 nt, Human
cagggccaagcugcagcaucug

SEQ ID NO: 1109446 - RNA, 22 nt, Human
augucacagcucccauuccucc

SEQ ID NO: 1109447 - RNA, 22 nt, Human
agucucagaaaagaagcaugga

SEQ ID NO: 1109448 - RNA, 22 nt, Human
ugggccugggagggcagacgcu

SEQ ID NO: 1109449 - RNA, 22 nt, Human
gagcugccugugugccaugaug

SEQ ID NO: 1109450 - RNA, 22 nt, Human
acuuccuggcguagcugacauu

SEQ ID NO: 1109451 - RNA, 22 nt, Human
cuggaagggucuacuuagcaga

SEQ ID NO: 1109452 - RNA, 22 nt, Human
ccuggcagacugugagggcagg

SEQ ID NO: 1109453 - RNA, 21 nt, Human
aaguaaaucagagaaauaacc

SEQ ID NO: 1109454 - RNA, 22 nt, Human
ccagcccucacugaggccucuc

SEQ ID NO: 1109455 - RNA, 22 nt, Human
cauuacauuucaaaauguuucc

SEQ ID NO: 1109456 - RNA, 20 nt, Human
gggcaguggcgcuaucucag

SEQ ID NO: 1109457 - RNA, 22 nt, Human
cccagggauuauaaaggugaaa

SEQ ID NO: 1109458 - RNA, 21 nt, Human
accaggcuugugggagggagc

SEQ ID NO: 1109459 - RNA, 18 nt, Human
gagaggcccggcugugcc

SEQ ID NO: 1109460 - RNA, 18 nt, Human
cccucuccugcuaguggg

SEQ ID NO: 1109461 - RNA, 21 nt, Human
agcuggugucagagcucuggg

SEQ ID NO: 1109462 - RNA, 22 nt, Human
gcaaugauauugaagugaugaa

SEQ ID NO: 1109463 - RNA, 23 nt, Human
ugccagaggcagucacaguggug

SEQ ID NO: 1109464 - RNA, 23 nt, Human
aggauguaggauguauggcagag

SEQ ID NO: 1109465 - RNA, 22 nt, Human
caguggcgugaucucugcucac

SEQ ID NO: 1109466 - RNA, 22 nt, Human
ucacagcaaaagugugcagagc

SEQ ID NO: 1109467 - RNA, 22 nt, Human
gcugagggcauguguggcgacu

SEQ ID NO: 1109468 - RNA, 22 nt, Human
caaaagauacuugcaucuaacu

SEQ ID NO: 1109469 - RNA, 22 nt, Human
cagaggcucaccagccuuucac

SEQ ID NO: 1109470 - RNA, 22 nt, Human
ccagaggugcugggagaggucu

SEQ ID NO: 1109471 - RNA, 22 nt, Human
gggcagaggcucuggcccaucc

SEQ ID NO: 1109472 - RNA, 21 nt, Human
uucaagauauuuaaaaggugg

SEQ ID NO: 1109473 - RNA, 22 nt, Human
uucauuccuucuguaccuugcc

SEQ ID NO: 1109474 - RNA, 22 nt, Human
aauguguagggugccuguuuuu

SEQ ID NO: 1109475 - RNA, 22 nt, Human
auuuagaaauuccaaaaguauu

SEQ ID NO: 1109476 - RNA, 22 nt, Human
ggaaaaggccacagggacacau

SEQ ID NO: 1109477 - RNA, 22 nt, Human
gccugucugcagggcugucauu

SEQ ID NO: 1109478 - RNA, 21 nt, Human
gcucccuggcugugugaccug

SEQ ID NO: 1109479 - RNA, 22 nt, Human
agggaggauaguagucaguuua

SEQ ID NO: 1109480 - RNA, 22 nt, Human
aggcucagauucacauuugguu

SEQ ID NO: 1109481 - RNA, 22 nt, Human
ucccagccggugccuggguccc

SEQ ID NO: 1109482 - RNA, 22 nt, Human
aaugugguuaacccauuuaaga

SEQ ID NO: 1109483 - RNA, 22 nt, Human
uggagccagcccaggccccucu

SEQ ID NO: 1109484 - RNA, 22 nt, Human
uugggcucaggaguuugagacc

SEQ ID NO: 1109485 - RNA, 21 nt, Human
gaugaagcaaucuuucuguug

SEQ ID NO: 1109486 - RNA, 22 nt, Human
caguacuuggucaaggaagcag

SEQ ID NO: 1109487 - RNA, 22 nt, Human
gcagagccagaauggccaggac

SEQ ID NO: 1109488 - RNA, 22 nt, Human
caggugggagccacagcguaca

SEQ ID NO: 1109489 - RNA, 21 nt, Human
uggcagggguaguaguacagc

SEQ ID NO: 1109490 - RNA, 22 nt, Human
cagugggugaugaguccugggg

SEQ ID NO: 1109491 - RNA, 22 nt, Human
gcucccagcauugcuucccagg

SEQ ID NO: 1109492 - RNA, 22 nt, Human
agaggcagcagucauacuacag

SEQ ID NO: 1109493 - RNA, 22 nt, Human
agcagcugaccagugaguccug

SEQ ID NO: 1109494 - RNA, 22 nt, Human
cagagcugggcauggugaaagg

SEQ ID NO: 1109495 - RNA, 20 nt, Human
aagggcagagggaacagacu

SEQ ID NO: 1109496 - RNA, 22 nt, Human
ugcugaggucaccuugcugcua

SEQ ID NO: 1109497 - RNA, 22 nt, Human
uagcauuuauggucaugugucc

SEQ ID NO: 1109498 - RNA, 22 nt, Human
uaugcauagguaucuauacuca

SEQ ID NO: 1109499 - RNA, 22 nt, Human
uugcauguuauuuaaucuguau

SEQ ID NO: 1109500 - RNA, 22 nt, Human
gcucccugcacucugcagcccu

SEQ ID NO: 1109501 - RNA, 22 nt, Human
ccuucugcucccuggccagggc

SEQ ID NO: 1109502 - RNA, 22 nt, Human
caggcagaagaaguggaaggac

SEQ ID NO: 1109503 - RNA, 22 nt, Human
agaaaucaauaucuauauguug

SEQ ID NO: 1109504 - RNA, 22 nt, Human
ccagagcccagcacacggugcu

SEQ ID NO: 1109505 - RNA, 22 nt, Human
augcacgccccacacuggugug

SEQ ID NO: 1109506 - RNA, 22 nt, Human
gucaccaggucugaugcagcca

SEQ ID NO: 1109507 - RNA, 22 nt, Human
gaaggaaaucugugauuuaugc

SEQ ID NO: 1109508 - RNA, 22 nt, Human
uccuuucccuuuccauccuggc

SEQ ID NO: 1109509 - RNA, 19 nt, Human
uccuucagucagaucuggg

SEQ ID NO: 1109510 - RNA, 22 nt, Human
aaaugucugagacuucugaacu

SEQ ID NO: 1109511 - RNA, 22 nt, Human
ugccuggaugugcuggccucac

SEQ ID NO: 1109512 - RNA, 22 nt, Human
gaguuauuucagaaggaaagau

SEQ ID NO: 1109513 - RNA, 22 nt, Human
cuccucugucuaccacgagggu

SEQ ID NO: 1109514 - RNA, 22 nt, Human
ucauacauaacuuguacaguga

SEQ ID NO: 1109515 - RNA, 22 nt, Human
uacaaaugaguuguaugaacca

SEQ ID NO: 1109516 - RNA, 20 nt, Human
accccagccccucuaucuga

SEQ ID NO: 1109517 - RNA, 22 nt, Human
uccuugaaaagaaugucuccau

SEQ ID NO: 1109518 - RNA, 23 nt, Human
aagcugccagucugaagccuggg

SEQ ID NO: 1109519 - RNA, 22 nt, Human
ggggcagcucccgagggcagga

SEQ ID NO: 1109520 - RNA, 22 nt, Human
agcagagcugcaguggccugcu

SEQ ID NO: 1109521 - RNA, 20 nt, Human
uauuugaaauggccaagugu

SEQ ID NO: 1109522 - RNA, 22 nt, Human
uaagcauaacuaaaaaugauuu

SEQ ID NO: 1109523 - RNA, 21 nt, Human
cucacaggaugcaguguuacu

SEQ ID NO: 1109524 - RNA, 22 nt, Human
auggccuggccagagcucugcu

SEQ ID NO: 1109525 - RNA, 22 nt, Human
uggacaggaucugagacugaga

SEQ ID NO: 1109526 - RNA, 22 nt, Human
ucagcagggcugugguguggcu

SEQ ID NO: 1109527 - RNA, 22 nt, Human
agagccagcauuugggcccugc

SEQ ID NO: 1109528 - RNA, 23 nt, Human
ccagcuccgugagccucgggcuc

SEQ ID NO: 1109529 - RNA, 22 nt, Human
gcagaggcauuucugacgcugc

SEQ ID NO: 1109530 - RNA, 22 nt, Human
gaaggcuugcagcucuguggca

SEQ ID NO: 1109531 - RNA, 22 nt, Human
aaggcagcaccgccuccugaaa

SEQ ID NO: 1109532 - RNA, 22 nt, Human
gcagcugagagaagaacagggc

SEQ ID NO: 1109533 - RNA, 22 nt, Human
agaggcugcacuugcucaugau

SEQ ID NO: 1109534 - RNA, 22 nt, Human
agucucugcugguugugccuau

SEQ ID NO: 1109535 - RNA, 22 nt, Human
agagaggcugggcguagggcuu

SEQ ID NO: 1109536 - RNA, 22 nt, Human
gggcuucucccuaaggacucug

SEQ ID NO: 1109537 - RNA, 22 nt, Human
gcugauuauuacaugucugugg

SEQ ID NO: 1109538 - RNA, 22 nt, Human
aucaaaaugcuccagugauggu

SEQ ID NO: 1109539 - RNA, 22 nt, Human
gcuggcagagacaagaagacua

SEQ ID NO: 1109540 - RNA, 22 nt, Human
ccagccagccuugaucugagua

SEQ ID NO: 1109541 - RNA, 22 nt, Human
gaggcccaggucaagcagccac

SEQ ID NO: 1109542 - RNA, 22 nt, Human
gagccagguuugaaucucaguc

SEQ ID NO: 1109543 - RNA, 22 nt, Human
ugucucuggcccaugagcagag

SEQ ID NO: 1109544 - RNA, 22 nt, Human
ucuggcucaaaauacguacucu

SEQ ID NO: 1109545 - RNA, 22 nt, Human
gcucuggaagcaucugagagga

SEQ ID NO: 1109546 - RNA, 22 nt, Human
agaagcagacucugaggcaagg

SEQ ID NO: 1109547 - RNA, 21 nt, Human
aggcuguccuuugccagcccu

SEQ ID NO: 1109548 - RNA, 22 nt, Human
ggaggccaaggugggcggauca

SEQ ID NO: 1109549 - RNA, 22 nt, Human
uggcucagauaauucaaggggc

SEQ ID NO: 1109550 - RNA, 21 nt, Human
gagccuucccucugcccuuuc

SEQ ID NO: 1109551 - RNA, 22 nt, Human
gccacaggcacuuaagggcugg

SEQ ID NO: 1109552 - RNA, 23 nt, Human
cagugcagggcaacucagacucc

SEQ ID NO: 1109553 - RNA, 22 nt, Human
ucugagagccucuagccuaagu

SEQ ID NO: 1109554 - RNA, 22 nt, Human
aaaaauguuaucuacuguccga

SEQ ID NO: 1109555 - RNA, 22 nt, Human
gcucacagccggcuggcagggg

SEQ ID NO: 1109556 - RNA, 22 nt, Human
agcagccaauuggaggaugaag

SEQ ID NO: 1109557 - RNA, 22 nt, Human
ccagcccuguaaggaugaggca

SEQ ID NO: 1109558 - RNA, 22 nt, Human
uggcucaguuaggucagaaaca

SEQ ID NO: 1109559 - RNA, 22 nt, Human
ugcagaccucccauggcugccu

SEQ ID NO: 1109560 - RNA, 22 nt, Human
aaguuucauguggagguagacu

SEQ ID NO: 1109561 - RNA, 22 nt, Human
gcaggaugaaggcagaggcuga

SEQ ID NO: 1109562 - RNA, 22 nt, Human
guccugggccugcugaggcuga

SEQ ID NO: 1109563 - RNA, 21 nt, Human
gcagcaguguucuagaauacu

SEQ ID NO: 1109564 - RNA, 22 nt, Human
uacaagagguauauagaaacag

SEQ ID NO: 1109565 - RNA, 22 nt, Human
gugggcaaggucccugccagcu

SEQ ID NO: 1109566 - RNA, 22 nt, Human
uagucccauuuugagguauuug

SEQ ID NO: 1109567 - RNA, 22 nt, Human
uucagucagugacuaagcaguu

SEQ ID NO: 1109568 - RNA, 22 nt, Human
augauacaucuucaugucagug

SEQ ID NO: 1109569 - RNA, 22 nt, Human
uucaagguaugguagcugguca

SEQ ID NO: 1109570 - RNA, 22 nt, Human
ccagcuucucucugaugcagcu

SEQ ID NO: 1109571 - RNA, 22 nt, Human
acagcuggaggccccauugucc

SEQ ID NO: 1109572 - RNA, 22 nt, Human
gccugccugaaggcuguaccag

SEQ ID NO: 1109573 - RNA, 20 nt, Human
guccugggagccacagcaca

SEQ ID NO: 1109574 - RNA, 22 nt, Human
ccuggcugccgagugugcagcg

SEQ ID NO: 1109575 - RNA, 22 nt, Human
uccagccuuucuacucacugag

SEQ ID NO: 1109576 - RNA, 22 nt, Human
aggguggccaugagggagagau

SEQ ID NO: 1109577 - RNA, 22 nt, Human
cuggcucccguuguccuugaag

SEQ ID NO: 1109578 - RNA, 22 nt, Human
cauuuagacauuugauuugggg

SEQ ID NO: 1109579 - RNA, 23 nt, Human
gagugcagaauagacaugcagug

SEQ ID NO: 1109580 - RNA, 22 nt, Human
caggagacuauggcccaaggcc

SEQ ID NO: 1109581 - RNA, 22 nt, Human
gccugaagaacagcugugagga

SEQ ID NO: 1109582 - RNA, 22 nt, Human
aguccuucaagaaaucuggaaa

SEQ ID NO: 1109583 - RNA, 22 nt, Human
acagccagggucucaggaggcg

SEQ ID NO: 1109584 - RNA, 22 nt, Human
augaguaaaaccacuauuuaca

SEQ ID NO: 1109585 - RNA, 22 nt, Human
ccucuggucccagcucugcugc

SEQ ID NO: 1109586 - RNA, 22 nt, Human
ucccuggacaacagacuucacu

SEQ ID NO: 1109587 - RNA, 22 nt, Human
ggcccuguccuggcugucuccg

SEQ ID NO: 1109588 - RNA, 22 nt, Human
aauguguagauguugcauuccu

SEQ ID NO: 1109589 - RNA, 22 nt, Human
agcagggcaaagucaggcuaac

SEQ ID NO: 1109590 - RNA, 22 nt, Human
ggcugcagguugguuggcagcu

SEQ ID NO: 1109591 - RNA, 23 nt, Human
ccagcccuccaccagcucuaggc

SEQ ID NO: 1109592 - RNA, 22 nt, Human
caguagccacuagacacaugua

SEQ ID NO: 1109593 - RNA, 22 nt, Human
aguuuguaucaauuugcuuuau

SEQ ID NO: 1109594 - RNA, 22 nt, Human
gugauuucaaauauagagugag

SEQ ID NO: 1109595 - RNA, 22 nt, Human
cagccuccugggacacucaccg

SEQ ID NO: 1109596 - RNA, 22 nt, Human
ucagagcuuuggagaccaggaa

SEQ ID NO: 1109597 - RNA, 22 nt, Human
guggauggacaugggcaagagg

SEQ ID NO: 1109598 - RNA, 22 nt, Human
aaagcugcugccaaucaggcuu

SEQ ID NO: 1109599 - RNA, 22 nt, Human
aagcuccccgaaacccaccucu

SEQ ID NO: 1109600 - RNA, 22 nt, Human
uagucaaaccucagaauacccc

SEQ ID NO: 1109601 - RNA, 22 nt, Human
caggcacucauucagagaggug

SEQ ID NO: 1109602 - RNA, 22 nt, Human
caaaugcuggcccugcuacuua

SEQ ID NO: 1109603 - RNA, 22 nt, Human
aggcagggucuugcuauguugc

SEQ ID NO: 1109604 - RNA, 22 nt, Human
gcaggagugacauggaugugga

SEQ ID NO: 1109605 - RNA, 22 nt, Human
cugggccagggaggugucugua

SEQ ID NO: 1109606 - RNA, 22 nt, Human
gcucccaccuccagccugaguu

SEQ ID NO: 1109607 - RNA, 22 nt, Human
auaguauuuaauaguuagcuca

SEQ ID NO: 1109608 - RNA, 22 nt, Human
gcucagggaacuuuuugcaggc

SEQ ID NO: 1109609 - RNA, 22 nt, Human
cagaguguaucuguguaagcau

SEQ ID NO: 1109610 - RNA, 19 nt, Human
uagucuuuauucuuaauuu

SEQ ID NO: 1109611 - RNA, 22 nt, Human
cagccucuaagcacagccucuc

SEQ ID NO: 1109612 - RNA, 22 nt, Human
cagcugcaggaacaaaaaugug

SEQ ID NO: 1109613 - RNA, 22 nt, Human
gagaggcuaugagguucugugu

SEQ ID NO: 1109614 - RNA, 22 nt, Human
uacaguaaagcugcuaugaauu

SEQ ID NO: 1109615 - RNA, 22 nt, Human
gagaagcaaucaguggccaccc

SEQ ID NO: 1109616 - RNA, 23 nt, Human
cauuucugggagauuuauaaaau

SEQ ID NO: 1109617 - RNA, 22 nt, Human
uagcugucaccagaaauggcca

SEQ ID NO: 1109618 - RNA, 22 nt, Human
uucuuuccaaccagauauuggu

SEQ ID NO: 1109619 - RNA, 22 nt, Human
ucaguuuuuguuugccagauag

SEQ ID NO: 1109620 - RNA, 22 nt, Human
gcaggccuccccugcuggagcu

SEQ ID NO: 1109621 - RNA, 22 nt, Human
acugucugcccugagaugccag

SEQ ID NO: 1109622 - RNA, 22 nt, Human
ccaucagcuccaguaucuucug

SEQ ID NO: 1109623 - RNA, 22 nt, Human
uggcaccugaacuuagaggugu

SEQ ID NO: 1109624 - RNA, 22 nt, Human
ggccugcugcuaugacuuccug

SEQ ID NO: 1109625 - RNA, 22 nt, Human
ccugggagagccaucuguggcc

SEQ ID NO: 1109626 - RNA, 22 nt, Human
aaguucaaggcucuagaguucc

SEQ ID NO: 1109627 - RNA, 22 nt, Human
uauuucuuguuauucucguuga

SEQ ID NO: 1109628 - RNA, 22 nt, Human
uggccuggcccugaggcccugu

SEQ ID NO: 1109629 - RNA, 22 nt, Human
caggcagcugacugucagauau

SEQ ID NO: 1109630 - RNA, 22 nt, Human
ggagccuguggccgucacgacu

SEQ ID NO: 1109631 - RNA, 19 nt, Human
ucccuuccugucgggcucc

SEQ ID NO: 1109632 - RNA, 22 nt, Human
uggagcccagggugagaaggag

SEQ ID NO: 1109633 - RNA, 22 nt, Human
cagccaggacagggaaacuagu

SEQ ID NO: 1109634 - RNA, 22 nt, Human
gcugagcuagaaaaggaccaca

SEQ ID NO: 1109635 - RNA, 22 nt, Human
gagcuuaggccagggacaggga

SEQ ID NO: 1109636 - RNA, 22 nt, Human
uacaaagugugcccaugcugag

SEQ ID NO: 1109637 - RNA, 16 nt, Human
agcagggcgggaagga

SEQ ID NO: 1109638 - RNA, 22 nt, Human
gcagcuguggguuccaagucua

SEQ ID NO: 1109639 - RNA, 22 nt, Human
ugagcuuacuucuguacacaga

SEQ ID NO: 1109640 - RNA, 22 nt, Human
ggcacagggaggcccuggugug

SEQ ID NO: 1109641 - RNA, 22 nt, Human
ccacucugauuuuggcuccacu

SEQ ID NO: 1109642 - RNA, 21 nt, Human
cucaggauggcggccuggugg

SEQ ID NO: 1109643 - RNA, 22 nt, Human
uacaguagaauuuuuaguaacu

SEQ ID NO: 1109644 - RNA, 22 nt, Human
aagauguaucaguuaagucuuc

SEQ ID NO: 1109645 - RNA, 22 nt, Human
aggcugggaaauguauuccagc

SEQ ID NO: 1109646 - RNA, 22 nt, Human
uagaaaucagcaggcauaugua

SEQ ID NO: 1109647 - RNA, 22 nt, Human
uguagaaagaauauguuucaua

SEQ ID NO: 1109648 - RNA, 22 nt, Human
ucauugcaagcucauuuaucug

SEQ ID NO: 1109649 - RNA, 22 nt, Human
guaacaaaguuucuaggugcug

SEQ ID NO: 1109650 - RNA, 22 nt, Human
cccaccccuggacaggugagug

SEQ ID NO: 1109651 - RNA, 23 nt, Human
ucccagggaaggugagcgaggcu

SEQ ID NO: 1109652 - RNA, 22 nt, Human
gcuggccucaucacugacuucu

SEQ ID NO: 1109653 - RNA, 22 nt, Human
ccccagccuuccaugggaauug

SEQ ID NO: 1109654 - RNA, 21 nt, Human
uccuucaguucugcacuuucu

SEQ ID NO: 1109655 - RNA, 22 nt, Human
gccuggaguggacuuggccccu

SEQ ID NO: 1109656 - RNA, 22 nt, Human
cacagggcagaggguccguggc

SEQ ID NO: 1109657 - RNA, 21 nt, Human
gcugucucuggcuccugggaa

SEQ ID NO: 1109658 - RNA, 22 nt, Human
ucacuuagauggggaucaucac

SEQ ID NO: 1109659 - RNA, 22 nt, Human
gggccacauugaagggugggua

SEQ ID NO: 1109660 - RNA, 22 nt, Human
agagcaggcauaaagcuuugaa

SEQ ID NO: 1109661 - RNA, 22 nt, Human
ugagccugcaauaagcacagcc

SEQ ID NO: 1109662 - RNA, 22 nt, Human
ugucacauguguggcauuuuuc

SEQ ID NO: 1109663 - RNA, 22 nt, Human
uggaggaugccuggggaggccu

SEQ ID NO: 1109664 - RNA, 22 nt, Human
uccuugaauauaauaacaguag

SEQ ID NO: 1109665 - RNA, 22 nt, Human
agaggcuccuucacucuggcac

SEQ ID NO: 1109666 - RNA, 22 nt, Human
cacacaugagucuccccauugg

SEQ ID NO: 1109667 - RNA, 22 nt, Human
acccaggagcaggcugggcagu

SEQ ID NO: 1109668 - RNA, 22 nt, Human
gcauuuaaauuugaacuucaga

SEQ ID NO: 1109669 - RNA, 22 nt, Human
gaggccuggcucugcccuccug

SEQ ID NO: 1109670 - RNA, 22 nt, Human
acugccaggauggcacuagagg

SEQ ID NO: 1109671 - RNA, 22 nt, Human
gugacagaguuuuagaucucau

SEQ ID NO: 1109672 - RNA, 22 nt, Human
ccugcuggccaguggagggcug

SEQ ID NO: 1109673 - RNA, 22 nt, Human
aaaagguaguugccaaauaagg

SEQ ID NO: 1109674 - RNA, 22 nt, Human
gccaggcuggccagcaccuucu

SEQ ID NO: 1109675 - RNA, 22 nt, Human
acugaaggucucagcaaggaug

SEQ ID NO: 1109676 - RNA, 21 nt, Human
aggagcuguguuagcuggucg

SEQ ID NO: 1109677 - RNA, 22 nt, Human
auguauguuaguguauuaucua

SEQ ID NO: 1109678 - RNA, 22 nt, Human
ugccuggcaaugccagaagcca

SEQ ID NO: 1109679 - RNA, 22 nt, Human
agacaucagcuugugugcaggg

SEQ ID NO: 1109680 - RNA, 22 nt, Human
ggcaaaaaguucccaucagugu

SEQ ID NO: 1109681 - RNA, 22 nt, Human
agccagacauggcuccugcucc

SEQ ID NO: 1109682 - RNA, 22 nt, Human
gagcagagacaguacaacuggc

SEQ ID NO: 1109683 - RNA, 22 nt, Human
ugcuggcucaguuugcagacuc

SEQ ID NO: 1109684 - RNA, 19 nt, Human
gggcagaauggcaucucag

SEQ ID NO: 1109685 - RNA, 22 nt, Human
gugucccaaagauuagaaauca

SEQ ID NO: 1109686 - RNA, 22 nt, Human
cagagcuggagggaacccuggc

SEQ ID NO: 1109687 - RNA, 22 nt, Human
cugcuuuguaaaauagacauaa

SEQ ID NO: 1109688 - RNA, 22 nt, Human
aaaugguauuuacucuguauua

SEQ ID NO: 1109689 - RNA, 22 nt, Human
gcucaggagcugacagccucaa

SEQ ID NO: 1109690 - RNA, 22 nt, Human
aagcaaaagguuacacuucugg

SEQ ID NO: 1109691 - RNA, 22 nt, Human
ugccucugggugaccaaggagc

SEQ ID NO: 1109692 - RNA, 22 nt, Human
ggaggccuugaggccaggagcu

SEQ ID NO: 1109693 - RNA, 22 nt, Human
gcuccugucuuggggcacuggc

SEQ ID NO: 1109694 - RNA, 22 nt, Human
cuggcaggaaguuagaugguaa

SEQ ID NO: 1109695 - RNA, 22 nt, Human
agccaugcaccuuacucuugcu

SEQ ID NO: 1109696 - RNA, 22 nt, Human
ucacaggcuccagggccuggau

SEQ ID NO: 1109697 - RNA, 22 nt, Human
cacucugcgcugggcgccagcg

SEQ ID NO: 1109698 - RNA, 22 nt, Human
cuggcucaccuccgcuccagca

SEQ ID NO: 1109699 - RNA, 22 nt, Human
uggggagugaugccucggauaa

SEQ ID NO: 1109700 - RNA, 22 nt, Human
caggaggccaacugugggacuu

SEQ ID NO: 1109701 - RNA, 22 nt, Human
agcugcuaugacaacaccagcc

SEQ ID NO: 1109702 - RNA, 20 nt, Human
gugaccagaagacagugggu

SEQ ID NO: 1109703 - RNA, 22 nt, Human
cugaggcuggggaagggaagug

SEQ ID NO: 1109704 - RNA, 22 nt, Human
uggaaagaaaguaaaggcguau

SEQ ID NO: 1109705 - RNA, 22 nt, Human
ggcuucugccacgagagggaag

SEQ ID NO: 1109706 - RNA, 22 nt, Human
aagcagaugggacuccaaggca

SEQ ID NO: 1109707 - RNA, 22 nt, Human
cagguggguguaugaaugcaaa

SEQ ID NO: 1109708 - RNA, 22 nt, Human
ccugagggaaggaugcuaccca

SEQ ID NO: 1109709 - RNA, 22 nt, Human
uaaagguacgaagugagggauu

SEQ ID NO: 1109710 - RNA, 21 nt, Human
gugguuauuuucauuagcauc

SEQ ID NO: 1109711 - RNA, 20 nt, Human
guaaaauauggucuuugggu

SEQ ID NO: 1109712 - RNA, 22 nt, Human
caaaagcaguucuaucugaguu

SEQ ID NO: 1109713 - RNA, 22 nt, Human
uggaggccagagguacugggac

SEQ ID NO: 1109714 - RNA, 22 nt, Human
cugcucuggucucuucauguuu

SEQ ID NO: 1109715 - RNA, 22 nt, Human
gcugguccacucccuggaggcu

SEQ ID NO: 1109716 - RNA, 21 nt, Human
gcaugccugcaucuuaguguu

SEQ ID NO: 1109717 - RNA, 19 nt, Human
gcuucccaccagccagccc

SEQ ID NO: 1109718 - RNA, 22 nt, Human
ccucauggccuugagcugaggg

SEQ ID NO: 1109719 - RNA, 22 nt, Human
uggggacacagagccaaacuau

SEQ ID NO: 1109720 - RNA, 22 nt, Human
aaaguguacuaugucaugaaca

SEQ ID NO: 1109721 - RNA, 23 nt, Human
agaggccaacuucuugccccucc

SEQ ID NO: 1109722 - RNA, 22 nt, Human
agagcugugaaaaugagguuug

SEQ ID NO: 1109723 - RNA, 22 nt, Human
uugucuguaaagacggccacca

SEQ ID NO: 1109724 - RNA, 22 nt, Human
gggaggucagggugccugcugg

SEQ ID NO: 1109725 - RNA, 22 nt, Human
ccagcugagaaguguaaaguga

SEQ ID NO: 1109726 - RNA, 22 nt, Human
ggaggccaggaaggcucggaga

SEQ ID NO: 1109727 - RNA, 22 nt, Human
cugugcauugucuugucuguag

SEQ ID NO: 1109728 - RNA, 22 nt, Human
aggcuccuugcucacaggcuca

SEQ ID NO: 1109729 - RNA, 22 nt, Human
cagagcuggguuugggaaaccu

SEQ ID NO: 1109730 - RNA, 22 nt, Human
gcuuuauguaaguccaaaggca

SEQ ID NO: 1109731 - RNA, 22 nt, Human
acugggaguucuccaugucccu

SEQ ID NO: 1109732 - RNA, 22 nt, Human
gauccuugcacuugacuuggca

SEQ ID NO: 1109733 - RNA, 22 nt, Human
gauuucaccugaucuugucauc

SEQ ID NO: 1109734 - RNA, 20 nt, Human
cuuggccuacuuagcuuugu

SEQ ID NO: 1109735 - RNA, 22 nt, Human
caggcagcugggucaccguccc

SEQ ID NO: 1109736 - RNA, 18 nt, Human
cucucuggucuggauccc

SEQ ID NO: 1109737 - RNA, 22 nt, Human
agaaaugggccuugggacacaa

SEQ ID NO: 1109738 - RNA, 22 nt, Human
uccagagggcgauggcuggggg

SEQ ID NO: 1109739 - RNA, 23 nt, Human
gcucagagguuuuucucuggaug

SEQ ID NO: 1109740 - RNA, 22 nt, Human
aaaaccaggcguuuccuauuau

SEQ ID NO: 1109741 - RNA, 22 nt, Human
auucuguauuucuaauaagauc

SEQ ID NO: 1109742 - RNA, 22 nt, Human
ugcagggcuuccucuuggaguu

SEQ ID NO: 1109743 - RNA, 22 nt, Human
cuggggaggcagggcugccccu

SEQ ID NO: 1109744 - RNA, 22 nt, Human
agcagagcccuuccauggccuu

SEQ ID NO: 1109745 - RNA, 22 nt, Human
cuuucucugugugguaaagggc

SEQ ID NO: 1109746 - RNA, 22 nt, Human
cagaagccugccucagaugcac

SEQ ID NO: 1109747 - RNA, 22 nt, Human
ccuggcugggccugauuucuca

SEQ ID NO: 1109748 - RNA, 22 nt, Human
gagagugaaggcuucccagcaa

SEQ ID NO: 1109749 - RNA, 21 nt, Human
cagaggccucaugcucugugc

SEQ ID NO: 1109750 - RNA, 22 nt, Human
aggagccuccuucucaugugca

SEQ ID NO: 1109751 - RNA, 21 nt, Human
ugcuggccucaagggugacuu

SEQ ID NO: 1109752 - RNA, 22 nt, Human
cagcuccccucuguggggcagu

SEQ ID NO: 1109753 - RNA, 22 nt, Human
gagauuggccuggcuugccaac

SEQ ID NO: 1109754 - RNA, 22 nt, Human
uucacaggcuuggagguggggg

SEQ ID NO: 1109755 - RNA, 22 nt, Human
ccugccaggccagugagcuucc

SEQ ID NO: 1109756 - RNA, 21 nt, Human
cagugcucaaucugacagugg

SEQ ID NO: 1109757 - RNA, 17 nt, Human
acaagcaguggccaugg

SEQ ID NO: 1109758 - RNA, 22 nt, Human
acccugagggguauagcagaag

SEQ ID NO: 1109759 - RNA, 22 nt, Human
gcagggccuuagcagcggcugc

SEQ ID NO: 1109760 - RNA, 22 nt, Human
ucagaagccggaagugcuccuc

SEQ ID NO: 1109761 - RNA, 22 nt, Human
ugccugagugauguggcagcca

SEQ ID NO: 1109762 - RNA, 22 nt, Human
uggcgugcccuccagacuuggc

SEQ ID NO: 1109763 - RNA, 22 nt, Human
cccucagcuucucccugcagcu

SEQ ID NO: 1109764 - RNA, 22 nt, Human
ugugugccagccuacgaggagc

SEQ ID NO: 1109765 - RNA, 22 nt, Human
gucccucugugucccugcaguc

SEQ ID NO: 1109766 - RNA, 22 nt, Human
ggcuggucacaccacugcaggg

SEQ ID NO: 1109767 - RNA, 22 nt, Human
cauaccuuucucaagcacaugu

SEQ ID NO: 1109768 - RNA, 19 nt, Human
ccuggcccugcugcgcggg

SEQ ID NO: 1109769 - RNA, 21 nt, Human
ggagauggguaucgccugggc

SEQ ID NO: 1109770 - RNA, 22 nt, Human
cuguccuaugaguacucacuag

SEQ ID NO: 1109771 - RNA, 23 nt, Human
agggcugaugccauugcagcucu

SEQ ID NO: 1109772 - RNA, 22 nt, Human
cagagccaacgccaccugccca

SEQ ID NO: 1109773 - RNA, 21 nt, Human
acagagccgggcacaaagcug

SEQ ID NO: 1109774 - RNA, 22 nt, Human
ucagaaauagucuuuaaaauga

SEQ ID NO: 1109775 - RNA, 21 nt, Human
ccagacuggccuaugugguag

SEQ ID NO: 1109776 - RNA, 22 nt, Human
ccaaaguccuuucuccaccugc

SEQ ID NO: 1109777 - RNA, 22 nt, Human
cugggagcccgcguccuggugg

SEQ ID NO: 1109778 - RNA, 22 nt, Human
cgagaguggacagggcgcagcu

SEQ ID NO: 1109779 - RNA, 22 nt, Human
agggcuggccacaugauuuggu

SEQ ID NO: 1109780 - RNA, 17 nt, Human
gcucccugaggacagcu

SEQ ID NO: 1109781 - RNA, 22 nt, Human
ugaccaaaggugguuuauuugg

SEQ ID NO: 1109782 - RNA, 22 nt, Human
gaggccugaaaggggaccuaug

SEQ ID NO: 1109783 - RNA, 22 nt, Human
ugguccagaugccuuggcuuua

SEQ ID NO: 1109784 - RNA, 23 nt, Human
auggagcugguacuagcuaccuc

SEQ ID NO: 1109785 - RNA, 22 nt, Human
ucuggccaacaaaaacuaaguc

SEQ ID NO: 1109786 - RNA, 22 nt, Human
uggagccaugccuggccuuucc

SEQ ID NO: 1109787 - RNA, 22 nt, Human
agccaaggacacggagccuccu

SEQ ID NO: 1109788 - RNA, 22 nt, Human
agcuugccucuuaaucaccuca

SEQ ID NO: 1109789 - RNA, 22 nt, Human
acagaggucauggagaguucuc

SEQ ID NO: 1109790 - RNA, 22 nt, Human
ugcugccaagcccgugcuccug

SEQ ID NO: 1109791 - RNA, 22 nt, Human
ggugacugguuuaucuggcagu

SEQ ID NO: 1109792 - RNA, 22 nt, Human
cuccauugaacauccucucaga

SEQ ID NO: 1109793 - RNA, 22 nt, Human
ucccagacaaucauuggccacc

SEQ ID NO: 1109794 - RNA, 22 nt, Human
gagcugucuggggacucugggu

SEQ ID NO: 1109795 - RNA, 22 nt, Human
gggagcuggagcuggaagacuc

SEQ ID NO: 1109796 - RNA, 22 nt, Human
ucagccugcuccaagugcugcc

SEQ ID NO: 1109797 - RNA, 22 nt, Human
cagggccaagccccuuuggcug

SEQ ID NO: 1109798 - RNA, 22 nt, Human
gcaccuggcugcccagguggag

SEQ ID NO: 1109799 - RNA, 19 nt, Human
acuuugcaugugugucuaa

SEQ ID NO: 1109800 - RNA, 22 nt, Human
agcagggcagguaaggaucaga

SEQ ID NO: 1109801 - RNA, 22 nt, Human
ugggcucauggcccagcacugg

SEQ ID NO: 1109802 - RNA, 22 nt, Human
agugcagugguuaggagccagg

SEQ ID NO: 1109803 - RNA, 21 nt, Human
ucucugggaggacuugugaga

SEQ ID NO: 1109804 - RNA, 22 nt, Human
uuauguauggauggcugaaagu

SEQ ID NO: 1109805 - RNA, 22 nt, Human
cuuacauugugugcaugagggg

SEQ ID NO: 1109806 - RNA, 22 nt, Human
cugcugcauuacucuucucaag

SEQ ID NO: 1109807 - RNA, 22 nt, Human
uauaauccauucauugauuucu

SEQ ID NO: 1109808 - RNA, 22 nt, Human
agugcauauaugaagaguauga

SEQ ID NO: 1109809 - RNA, 22 nt, Human
aagggagguaaagcuauuuaaa

SEQ ID NO: 1109810 - RNA, 18 nt, Human
gugagcagagagcaucac

SEQ ID NO: 1109811 - RNA, 22 nt, Human
cacugaguucccugacauuuca

SEQ ID NO: 1109812 - RNA, 22 nt, Human
ugcaaacuauugguagagaugg

SEQ ID NO: 1109813 - RNA, 22 nt, Human
agaggcugucccuugcuauucc

SEQ ID NO: 1109814 - RNA, 22 nt, Human
ggggcagagucuggacuguugu

SEQ ID NO: 1109815 - RNA, 22 nt, Human
uggcagagaacacacaugauuc

SEQ ID NO: 1109816 - RNA, 22 nt, Human
uccugagauguggagcuccaug

SEQ ID NO: 1109817 - RNA, 22 nt, Human
gcaggauggugcccuuucugcc

SEQ ID NO: 1109818 - RNA, 22 nt, Human
aucuggcuccuacacuugaaga

SEQ ID NO: 1109819 - RNA, 22 nt, Human
gaggccuggugugucucccgcu

SEQ ID NO: 1109820 - RNA, 22 nt, Human
uaaacauggauucugaucacag

SEQ ID NO: 1109821 - RNA, 22 nt, Human
cugggcaggagggcucuaugga

SEQ ID NO: 1109822 - RNA, 22 nt, Human
acagaauucuaguauguggcuu

SEQ ID NO: 1109823 - RNA, 22 nt, Human
augggaggaugcucgggugcuc

SEQ ID NO: 1109824 - RNA, 22 nt, Human
ugucauuuucuaaucuguuguc

SEQ ID NO: 1109825 - RNA, 18 nt, Human
acaggccucaguccugca

SEQ ID NO: 1109826 - RNA, 23 nt, Human
uagggcagcugggagggacaugc

SEQ ID NO: 1109827 - RNA, 22 nt, Human
uagaggugacacugagaccaua

SEQ ID NO: 1109828 - RNA, 22 nt, Human
auaaggcaucucucaguuagca

SEQ ID NO: 1109829 - RNA, 23 nt, Human
guggccuccccggaaugccucgc

SEQ ID NO: 1109830 - RNA, 20 nt, Human
caggcacacucauuccugcu

SEQ ID NO: 1109831 - RNA, 21 nt, Human
uccucugcagugagguggccu

SEQ ID NO: 1109832 - RNA, 22 nt, Human
ugcugucuguuuacuggcuaua

SEQ ID NO: 1109833 - RNA, 22 nt, Human
guggcuugaccaucccugcuac

SEQ ID NO: 1109834 - RNA, 22 nt, Human
gcagugggcaacaagagcugga

SEQ ID NO: 1109835 - RNA, 22 nt, Human
acugaguguaggacuuugaguu

SEQ ID NO: 1109836 - RNA, 20 nt, Human
acaggagaucugaggaaagg

SEQ ID NO: 1109837 - RNA, 22 nt, Human
ggcugggcuccgggagcaugcg

SEQ ID NO: 1109838 - RNA, 22 nt, Human
uuuccuuccaaaugcccgggag

SEQ ID NO: 1109839 - RNA, 22 nt, Human
auaucuuuguaugguucagcag

SEQ ID NO: 1109840 - RNA, 22 nt, Human
uggggcugaggagccucacucu

SEQ ID NO: 1109841 - RNA, 22 nt, Human
aggcucuguuauucuagagggc

SEQ ID NO: 1109842 - RNA, 22 nt, Human
gagcucauccccaugguccguc

SEQ ID NO: 1109843 - RNA, 19 nt, Human
gggaaauucacuugcuucc

SEQ ID NO: 1109844 - RNA, 17 nt, Human
ugcauguccuuuguucc

SEQ ID NO: 1109845 - RNA, 22 nt, Human
cuggcugcaggaaggagugggc

SEQ ID NO: 1109846 - RNA, 22 nt, Human
cagccacguagcccuuggccgu

SEQ ID NO: 1109847 - RNA, 22 nt, Human
gcucaggaaggcucaaccagga

SEQ ID NO: 1109848 - RNA, 22 nt, Human
gucugagaaucuugcauaucau

SEQ ID NO: 1109849 - RNA, 22 nt, Human
uggccagguguggguucucaga

SEQ ID NO: 1109850 - RNA, 22 nt, Human
gcuggccugggcucaagaccag

SEQ ID NO: 1109851 - RNA, 22 nt, Human
gggcagagaaauggacaguugg

SEQ ID NO: 1109852 - RNA, 22 nt, Human
guguuuccucuagaagccaugg

SEQ ID NO: 1109853 - RNA, 22 nt, Human
acaguaauuaaaauggaucugc

SEQ ID NO: 1109854 - RNA, 22 nt, Human
agagucuuccaggcagccugag

SEQ ID NO: 1109855 - RNA, 21 nt, Human
ugcaggcaggcagagaugcug

SEQ ID NO: 1109856 - RNA, 22 nt, Human
cuggagcuaauaauccaucuga

SEQ ID NO: 1109857 - RNA, 17 nt, Human
uuccaguuuaguauugu

SEQ ID NO: 1109858 - RNA, 22 nt, Human
uaaaucacuccuaauaaucagu

SEQ ID NO: 1109859 - RNA, 23 nt, Human
uggaccugaaccagugccucugu

SEQ ID NO: 1109860 - RNA, 21 nt, Human
ucuuuccugcccaguugcccu

SEQ ID NO: 1109861 - RNA, 22 nt, Human
ucucuucuuguguuuuccugcc

SEQ ID NO: 1109862 - RNA, 22 nt, Human
ccugugccauccugagcauccc

SEQ ID NO: 1109863 - RNA, 22 nt, Human
ugcaggugguuuggacacugcu

SEQ ID NO: 1109864 - RNA, 22 nt, Human
uggcagaguuggagguggaaga

SEQ ID NO: 1109865 - RNA, 22 nt, Human
ggcagggcuugucucugugaug

SEQ ID NO: 1109866 - RNA, 22 nt, Human
aaggcagcccuggcucagccug

SEQ ID NO: 1109867 - RNA, 22 nt, Human
agcugccacauggugucacugu

SEQ ID NO: 1109868 - RNA, 22 nt, Human
uggcucagauuuuuguaggcuu

SEQ ID NO: 1109869 - RNA, 22 nt, Human
ugcccaaguccuccaccgaggu

SEQ ID NO: 1109870 - RNA, 22 nt, Human
uccugcagaccucagucagguc

SEQ ID NO: 1109871 - RNA, 22 nt, Human
uugagggucuggaucugcugcu

SEQ ID NO: 1109872 - RNA, 22 nt, Human
gagagcugcauucucagacaca

SEQ ID NO: 1109873 - RNA, 22 nt, Human
aagaacaguguccugggacucg

SEQ ID NO: 1109874 - RNA, 22 nt, Human
uauugaaauccauuacguucuu

SEQ ID NO: 1109875 - RNA, 22 nt, Human
ccagggcaaaugagaucauagc

SEQ ID NO: 1109876 - RNA, 22 nt, Human
gcuggcuuugcacugggugcau

SEQ ID NO: 1109877 - RNA, 22 nt, Human
aaggcugaggagggccugcagg

SEQ ID NO: 1109878 - RNA, 22 nt, Human
ugugaaaggagccauagacagu

SEQ ID NO: 1109879 - RNA, 22 nt, Human
ucagaaauacuaucagcuuuug

SEQ ID NO: 1109880 - RNA, 19 nt, Human
cugagagaugcuucacaca

SEQ ID NO: 1109881 - RNA, 22 nt, Human
gcuguggcuguacagagaccau

SEQ ID NO: 1109882 - RNA, 22 nt, Human
uguaggaguccaaucaggagac

SEQ ID NO: 1109883 - RNA, 20 nt, Human
aauuuacucacagaaugaau

SEQ ID NO: 1109884 - RNA, 22 nt, Human
cugucccucaucaccucugggu

SEQ ID NO: 1109885 - RNA, 22 nt, Human
ugucagaacucuauugaugucc

SEQ ID NO: 1109886 - RNA, 22 nt, Human
uaguccauuuucacacugcuga

SEQ ID NO: 1109887 - RNA, 22 nt, Human
ggcugcugggaauaugccagcu

SEQ ID NO: 1109888 - RNA, 22 nt, Human
aggagagaauguuccaggcuug

SEQ ID NO: 1109889 - RNA, 22 nt, Human
acauauuuccaugcagcauguc

SEQ ID NO: 1109890 - RNA, 22 nt, Human
gauuuccuagacauggggcaga

SEQ ID NO: 1109891 - RNA, 22 nt, Human
ggcaucuguccaucucuccagc

SEQ ID NO: 1109892 - RNA, 22 nt, Human
caguacuuugcaucauuccacu

SEQ ID NO: 1109893 - RNA, 20 nt, Human
auuccauaguuggcacuuuu

SEQ ID NO: 1109894 - RNA, 22 nt, Human
caggccugucugcacaugaggc

SEQ ID NO: 1109895 - RNA, 20 nt, Human
aguaccuuuuguauguuacc

SEQ ID NO: 1109896 - RNA, 22 nt, Human
uugacagcuauuuugcuuugau

SEQ ID NO: 1109897 - RNA, 22 nt, Human
ccaggugggaggaaagcagaga

SEQ ID NO: 1109898 - RNA, 22 nt, Human
caaggcaggaagccugucuuau

SEQ ID NO: 1109899 - RNA, 21 nt, Human
agggagcuauuuauaguaagc

SEQ ID NO: 1109900 - RNA, 21 nt, Human
agagucugcauuucugacaag

SEQ ID NO: 1109901 - RNA, 22 nt, Human
cuguuuuugugcugugucuccc

SEQ ID NO: 1109902 - RNA, 22 nt, Human
gccuuccugcagcucugagcgu

SEQ ID NO: 1109903 - RNA, 22 nt, Human
ugaaaguuacaggaaaacagau

SEQ ID NO: 1109904 - RNA, 22 nt, Human
ucucaggggauucacuggcacc

SEQ ID NO: 1109905 - RNA, 22 nt, Human
cauuccuuaacguggggagucu

SEQ ID NO: 1109906 - RNA, 22 nt, Human
aagagcuggcccaaucugagca

SEQ ID NO: 1109907 - RNA, 22 nt, Human
cugggugguucuaacuguugau

SEQ ID NO: 1109908 - RNA, 22 nt, Human
gagcuuccauggacgccaucug

SEQ ID NO: 1109909 - RNA, 22 nt, Human
ugcugugagguugagaaggaag

SEQ ID NO: 1109910 - RNA, 19 nt, Human
gaucuuugccaauuuaagc

SEQ ID NO: 1109911 - RNA, 22 nt, Human
augcccaaugucacaauuuuug

SEQ ID NO: 1109912 - RNA, 22 nt, Human
agaaggaguguacaggucaugc

SEQ ID NO: 1109913 - RNA, 22 nt, Human
cagggcagggccacacccccug

SEQ ID NO: 1109914 - RNA, 22 nt, Human
augaccccuaaaauuuacuguc

SEQ ID NO: 1109915 - RNA, 22 nt, Human
uugaagcagcucaggaggcuua

SEQ ID NO: 1109916 - RNA, 22 nt, Human
uaggagaggugaauggcacacu

SEQ ID NO: 1109917 - RNA, 22 nt, Human
ucucagaguuuagagcugagcc

SEQ ID NO: 1109918 - RNA, 22 nt, Human
accagguggccccagcgugguu

SEQ ID NO: 1109919 - RNA, 22 nt, Human
acagauugaucuugagaauuau

SEQ ID NO: 1109920 - RNA, 22 nt, Human
uggcagagucaucacaucugga

SEQ ID NO: 1109921 - RNA, 22 nt, Human
agcagcagaggucagaaaggua

SEQ ID NO: 1109922 - RNA, 22 nt, Human
ucaggcugagaaaaucuggacc

SEQ ID NO: 1109923 - RNA, 18 nt, Human
ggcugagguugacuagaa

SEQ ID NO: 1109924 - RNA, 22 nt, Human
ucuggcucagggcucugaggga

SEQ ID NO: 1109925 - RNA, 22 nt, Human
cauuaucugccauugacaccau

SEQ ID NO: 1109926 - RNA, 22 nt, Human
uagauaaauuagaaaguuuacu

SEQ ID NO: 1109927 - RNA, 22 nt, Human
ggagccugcgggagcucccauu

SEQ ID NO: 1109928 - RNA, 22 nt, Human
ucugggcacugcugagccugua

SEQ ID NO: 1109929 - RNA, 22 nt, Human
uuguuacaucuuauguaagugg

SEQ ID NO: 1109930 - RNA, 22 nt, Human
ccucugaguccucccugguugc

SEQ ID NO: 1109931 - RNA, 21 nt, Human
uggaaagauucaaagaccagg

SEQ ID NO: 1109932 - RNA, 22 nt, Human
ugagcuuacgugggaacagacu

SEQ ID NO: 1109933 - RNA, 22 nt, Human
ugagagugauugguucgaaugu

SEQ ID NO: 1109934 - RNA, 22 nt, Human
cucuggcuucuaccuugcaguu

SEQ ID NO: 1109935 - RNA, 20 nt, Human
ggcugcugugggcagagagg

SEQ ID NO: 1109936 - RNA, 22 nt, Human
augcccgauaccuaguuaacuc

SEQ ID NO: 1109937 - RNA, 22 nt, Human
uauuauguagaguaaggguuaa

SEQ ID NO: 1109938 - RNA, 22 nt, Human
ccagcccuccuccaucagagga

SEQ ID NO: 1109939 - RNA, 22 nt, Human
gccugugacucgucuugggcca

SEQ ID NO: 1109940 - RNA, 22 nt, Human
gucugucucucuccagagugca

SEQ ID NO: 1109941 - RNA, 22 nt, Human
guccucugcccaggucaagguu

SEQ ID NO: 1109942 - RNA, 22 nt, Human
gugauuccuauuaguacaugca

SEQ ID NO: 1109943 - RNA, 22 nt, Human
gagacugauggggcucccagaa

SEQ ID NO: 1109944 - RNA, 22 nt, Human
aaaugucuaucuggcauauucc

SEQ ID NO: 1109945 - RNA, 22 nt, Human
gcugccugccuugccuggagga

SEQ ID NO: 1109946 - RNA, 22 nt, Human
cugucccagauguucucagcac

SEQ ID NO: 1109947 - RNA, 22 nt, Human
gaugcagggcuggcaggagcuu

SEQ ID NO: 1109948 - RNA, 22 nt, Human
aggcucugcagugcuggaggac

SEQ ID NO: 1109949 - RNA, 22 nt, Human
ugcugcuccugccuggcuccca

SEQ ID NO: 1109950 - RNA, 22 nt, Human
uaagaacaguagaacaguaggu

SEQ ID NO: 1109951 - RNA, 19 nt, Human
ggaaacaggggccagagga

SEQ ID NO: 1109952 - RNA, 20 nt, Human
cucugcuuuaggagagucag

SEQ ID NO: 1109953 - RNA, 20 nt, Human
agggcagcuugaggagccgg

SEQ ID NO: 1109954 - RNA, 21 nt, Human
ucccugcuuucuggcccaguc

SEQ ID NO: 1109955 - RNA, 22 nt, Human
cugcaggcugagcgccugccgg

SEQ ID NO: 1109956 - RNA, 22 nt, Human
gccuggagaagauggaacuagc

SEQ ID NO: 1109957 - RNA, 22 nt, Human
cccucugccucugaguaggaca

SEQ ID NO: 1109958 - RNA, 22 nt, Human
aauguauaaaguguuaauaacu

SEQ ID NO: 1109959 - RNA, 19 nt, Human
cugucaggggcuggauguu

SEQ ID NO: 1109960 - RNA, 22 nt, Human
ccugucucccuggcauggcuca

SEQ ID NO: 1109961 - RNA, 22 nt, Human
auaauuuacaacugcuuuuaau

SEQ ID NO: 1109962 - RNA, 22 nt, Human
gccugggagagggauagugcag

SEQ ID NO: 1109963 - RNA, 22 nt, Human
acccagcucuuugauggucuug

SEQ ID NO: 1109964 - RNA, 22 nt, Human
gcuggcucuucaguggagauag

SEQ ID NO: 1109965 - RNA, 22 nt, Human
aaaugcacucugcuucugugac

SEQ ID NO: 1109966 - RNA, 22 nt, Human
cagcuucugagcaagccagggg

SEQ ID NO: 1109967 - RNA, 22 nt, Human
gcacugaaauuauaugcauuug

SEQ ID NO: 1109968 - RNA, 18 nt, Human
cagaagcaggcagugcag

SEQ ID NO: 1109969 - RNA, 22 nt, Human
uaauccacaauagagauuaucu

SEQ ID NO: 1109970 - RNA, 22 nt, Human
cugccucuauaggaguccacca

SEQ ID NO: 1109971 - RNA, 22 nt, Human
auggacaggaacucccuuggca

SEQ ID NO: 1109972 - RNA, 22 nt, Human
guuugcauauuugcacaggaau

SEQ ID NO: 1109973 - RNA, 22 nt, Human
gcugccacgaucucugcuguag

SEQ ID NO: 1109974 - RNA, 22 nt, Human
uggcagagaauaaaucuugacu

SEQ ID NO: 1109975 - RNA, 22 nt, Human
gcucccagcuggagccucaaca

SEQ ID NO: 1109976 - RNA, 21 nt, Human
uggcacugcuuagcagguucc

SEQ ID NO: 1109977 - RNA, 22 nt, Human
aaaugcacagagccuuagagau

SEQ ID NO: 1109978 - RNA, 22 nt, Human
auguacacaugcaugcaugugc

SEQ ID NO: 1109979 - RNA, 22 nt, Human
uacaguaacauguuguacaagc

SEQ ID NO: 1109980 - RNA, 22 nt, Human
ggccuugggcagacacgucaca

SEQ ID NO: 1109981 - RNA, 22 nt, Human
cuggggugagcagaaacagggg

SEQ ID NO: 1109982 - RNA, 22 nt, Human
agcaagcuaccuagauagucua

SEQ ID NO: 1109983 - RNA, 22 nt, Human
cauuacaugguccaggauauau

SEQ ID NO: 1109984 - RNA, 22 nt, Human
cuguagccaguuuggccucacc

SEQ ID NO: 1109985 - RNA, 22 nt, Human
gggccugugcacaguucuguua

SEQ ID NO: 1109986 - RNA, 22 nt, Human
cuggcucauuuuagcaucaggu

SEQ ID NO: 1109987 - RNA, 22 nt, Human
cagaggccaccuguggccacug

SEQ ID NO: 1109988 - RNA, 22 nt, Human
agcauuuaugacuaauguaaaa

SEQ ID NO: 1109989 - RNA, 22 nt, Human
gcaggaguguggugggacaucc

SEQ ID NO: 1109990 - RNA, 22 nt, Human
gcuaccugagcaagagcuucaa

SEQ ID NO: 1109991 - RNA, 22 nt, Human
aagcugccuugcugaggagaaa

SEQ ID NO: 1109992 - RNA, 22 nt, Human
cuggacagaaaaggccacugga

SEQ ID NO: 1109993 - RNA, 22 nt, Human
acucugggccccagguggagcu

SEQ ID NO: 1109994 - RNA, 22 nt, Human
acagaauauugguuacuguugc

SEQ ID NO: 1109995 - RNA, 22 nt, Human
auaaaaguuuccaaucaugccu

SEQ ID NO: 1109996 - RNA, 22 nt, Human
gugcagggagcccagaaggucc

SEQ ID NO: 1109997 - RNA, 23 nt, Human
ugcucugggaggcccuggagagc

SEQ ID NO: 1109998 - RNA, 22 nt, Human
ccaaggaguagagcaggaagcu

SEQ ID NO: 1109999 - RNA, 20 nt, Human
gucucaaguaucucacaguc

SEQ ID NO: 1110000 - RNA, 22 nt, Human
ucucccacuggccuuguaugau

SEQ ID NO: 1110001 - RNA, 22 nt, Human
gggcagcugcagggauggugac

SEQ ID NO: 1110002 - RNA, 17 nt, Human
uguggccuucugagcuu

SEQ ID NO: 1110003 - RNA, 22 nt, Human
agcuguguggugucugacagcu

SEQ ID NO: 1110004 - RNA, 22 nt, Human
uugauacagcagccugugaucc

SEQ ID NO: 1110005 - RNA, 22 nt, Human
gccuggagugcaguggcgugau

SEQ ID NO: 1110006 - RNA, 22 nt, Human
uaugcacauucacacaaaaaug

SEQ ID NO: 1110007 - RNA, 23 nt, Human
ugggaguguugggaucucugcuc

SEQ ID NO: 1110008 - RNA, 22 nt, Human
gagggcugauaacaggaauaca

SEQ ID NO: 1110009 - RNA, 17 nt, Human
ccaggugggaggugggg

SEQ ID NO: 1110010 - RNA, 22 nt, Human
uuuauuguuguuagucauaagu

SEQ ID NO: 1110011 - RNA, 22 nt, Human
cugggguggaggagcuccccug

SEQ ID NO: 1110012 - RNA, 18 nt, Human
gcccagaggucugggccc

SEQ ID NO: 1110013 - RNA, 22 nt, Human
ccugccugacagagaagguuca

SEQ ID NO: 1110014 - RNA, 22 nt, Human
cagggcaggacagauacauuac

SEQ ID NO: 1110015 - RNA, 23 nt, Human
auuugagaaaguauuuuuaagac

SEQ ID NO: 1110016 - RNA, 22 nt, Human
auagucuuagucuauaguuuug

SEQ ID NO: 1110017 - RNA, 22 nt, Human
ggcagagcuuguuccuucuguu

SEQ ID NO: 1110018 - RNA, 22 nt, Human
cagcaugcaaguccagaugugg

SEQ ID NO: 1110019 - RNA, 22 nt, Human
aagcugccagauucagucugcu

SEQ ID NO: 1110020 - RNA, 22 nt, Human
auguuuauguugggcuauauuu

SEQ ID NO: 1110021 - RNA, 22 nt, Human
cacugaagaugcgacuagugcu

SEQ ID NO: 1110022 - RNA, 22 nt, Human
agagcugaggauccagcugagc

SEQ ID NO: 1110023 - RNA, 21 nt, Human
gccacguuucagucuucucag

SEQ ID NO: 1110024 - RNA, 22 nt, Human
cccugcagcuuuugcauaguca

SEQ ID NO: 1110025 - RNA, 22 nt, Human
guggccucugugcuccugccua

SEQ ID NO: 1110026 - RNA, 22 nt, Human
ccacagcugaccgcaggugagc

SEQ ID NO: 1110027 - RNA, 20 nt, Human
aggcugccaggucucacauc

SEQ ID NO: 1110028 - RNA, 22 nt, Human
aggcacugaccugcuuccuuga

SEQ ID NO: 1110029 - RNA, 19 nt, Human
agcagccauagacaauaug

SEQ ID NO: 1110030 - RNA, 22 nt, Human
acagaauacuacagacugguua

SEQ ID NO: 1110031 - RNA, 22 nt, Human
ucaugcaaggcugaaacauggu

SEQ ID NO: 1110032 - RNA, 22 nt, Human
acagauauaaacuauaguagug

SEQ ID NO: 1110033 - RNA, 22 nt, Human
ugcuggcuguauaugugagagu

SEQ ID NO: 1110034 - RNA, 22 nt, Human
ccaggagcagggcuggcugcac

SEQ ID NO: 1110035 - RNA, 22 nt, Human
aauuaguauugcgauucauuag

SEQ ID NO: 1110036 - RNA, 22 nt, Human
ugcuggcccuggcucagggaac

SEQ ID NO: 1110037 - RNA, 22 nt, Human
ucucaggaagauuagggcuaag

SEQ ID NO: 1110038 - RNA, 22 nt, Human
cuggaaggcucugcugccuguc

SEQ ID NO: 1110039 - RNA, 22 nt, Human
gagcaggcuugcagagaagggg

SEQ ID NO: 1110040 - RNA, 22 nt, Human
cagaagcagugagagaugugca

SEQ ID NO: 1110041 - RNA, 22 nt, Human
uuccuggugguggugacagcac

SEQ ID NO: 1110042 - RNA, 22 nt, Human
gcaggaaagguugagacuuugc

SEQ ID NO: 1110043 - RNA, 22 nt, Human
caggauccuggcugcauggacg

SEQ ID NO: 1110044 - RNA, 19 nt, Human
cuggggcuuugguacugcc

SEQ ID NO: 1110045 - RNA, 22 nt, Human
cccucccaagcacucugacaua

SEQ ID NO: 1110046 - RNA, 22 nt, Human
gccacguugccacccgggugac

SEQ ID NO: 1110047 - RNA, 22 nt, Human
ccagggccaguaagauuggcau

SEQ ID NO: 1110048 - RNA, 22 nt, Human
gcccagcuuuuugaggcaggca

SEQ ID NO: 1110049 - RNA, 22 nt, Human
gaguguucccacaccccaguug

SEQ ID NO: 1110050 - RNA, 22 nt, Human
cugcuccacaccuccauuuccu

SEQ ID NO: 1110051 - RNA, 22 nt, Human
gcucaggaaauaguuuaguguu

SEQ ID NO: 1110052 - RNA, 22 nt, Human
cuucccagacgggguggcagcc

SEQ ID NO: 1110053 - RNA, 22 nt, Human
cucuugaagcaggggccaguuc

SEQ ID NO: 1110054 - RNA, 19 nt, Human
uugguggugguuuugguuc

SEQ ID NO: 1110055 - RNA, 22 nt, Human
uggcagucggacuucuaucuca

SEQ ID NO: 1110056 - RNA, 22 nt, Human
uggagcaggcaucuuucucucu

SEQ ID NO: 1110057 - RNA, 20 nt, Human
agcccuguuuccuggagaga

SEQ ID NO: 1110058 - RNA, 22 nt, Human
cagagcugcacauucuaugaug

SEQ ID NO: 1110059 - RNA, 22 nt, Human
agcagggcagugaucagaaagg

SEQ ID NO: 1110060 - RNA, 22 nt, Human
acaguaaugauucugagucucu

SEQ ID NO: 1110061 - RNA, 22 nt, Human
uagggcagagcuuguacacgau

SEQ ID NO: 1110062 - RNA, 22 nt, Human
aaggcacuuuuccugagaugau

SEQ ID NO: 1110063 - RNA, 18 nt, Human
cuuuaugugcagagcuuu

SEQ ID NO: 1110064 - RNA, 22 nt, Human
uaaaucucacuggguauauugg

SEQ ID NO: 1110065 - RNA, 22 nt, Human
guggugcaggccagcaggggcg

SEQ ID NO: 1110066 - RNA, 22 nt, Human
auuguguaauuuucagcucaua

SEQ ID NO: 1110067 - RNA, 22 nt, Human
agaggccuuucuguugagugaa

SEQ ID NO: 1110068 - RNA, 22 nt, Human
gccuccugagaagccacaggcu

SEQ ID NO: 1110069 - RNA, 22 nt, Human
ugggcagcagcaaagccagacu

SEQ ID NO: 1110070 - RNA, 22 nt, Human
agucucagcaagcauggcuagu

SEQ ID NO: 1110071 - RNA, 22 nt, Human
gcucugggauuaccagccuuag

SEQ ID NO: 1110072 - RNA, 22 nt, Human
cugggcugcgggcgccccucca

SEQ ID NO: 1110073 - RNA, 22 nt, Human
ggaugcugggagacagcaggca

SEQ ID NO: 1110074 - RNA, 22 nt, Human
ccucugcucugguccaugugcu

SEQ ID NO: 1110075 - RNA, 22 nt, Human
cagucccaccaggaucgcucuu

SEQ ID NO: 1110076 - RNA, 22 nt, Human
ucaggcagaccaccgugggcag

SEQ ID NO: 1110077 - RNA, 22 nt, Human
ccagcaugagacgaugaugaag

SEQ ID NO: 1110078 - RNA, 22 nt, Human
aagucauugguagcuugauagg

SEQ ID NO: 1110079 - RNA, 22 nt, Human
ucaaugaugcugaagguagcgu

SEQ ID NO: 1110080 - RNA, 22 nt, Human
uacauucuacuuuuucacuccc

SEQ ID NO: 1110081 - RNA, 22 nt, Human
ugaggugaccgcagaugggaag

SEQ ID NO: 1110082 - RNA, 22 nt, Human
ccugagagagaagcgaccuggu

SEQ ID NO: 1110083 - RNA, 22 nt, Human
caugccaguuuugagaugcacc

SEQ ID NO: 1110084 - RNA, 21 nt, Human
ccuccaggugauuccgugcuc

SEQ ID NO: 1110085 - RNA, 22 nt, Human
aaggugucacugggacaggaaa

SEQ ID NO: 1110086 - RNA, 22 nt, Human
uuguuucaugaguguaaaggga

SEQ ID NO: 1110087 - RNA, 22 nt, Human
acuucuugggacccuggcaccg

SEQ ID NO: 1110088 - RNA, 22 nt, Human
auaauuuaaauuaguaugugau

SEQ ID NO: 1110089 - RNA, 22 nt, Human
gccuggcaaggcccuguugacu

SEQ ID NO: 1110090 - RNA, 22 nt, Human
cagcugaguuacucugaggucu

SEQ ID NO: 1110091 - RNA, 22 nt, Human
uaguuauuauuguuacuaucag

SEQ ID NO: 1110092 - RNA, 22 nt, Human
gccaggcuggucuugaacuccu

SEQ ID NO: 1110093 - RNA, 22 nt, Human
agaaugcuccagagcugaaaga

SEQ ID NO: 1110094 - RNA, 22 nt, Human
gcugggagccccgagccagcgc

SEQ ID NO: 1110095 - RNA, 22 nt, Human
aggcugccaaagcuucugucuc

SEQ ID NO: 1110096 - RNA, 22 nt, Human
ggccuugggaggagggucagaa

SEQ ID NO: 1110097 - RNA, 22 nt, Human
acauuuaggauguuuugagaga

SEQ ID NO: 1110098 - RNA, 22 nt, Human
caggccacaaguuggguucaag

SEQ ID NO: 1110099 - RNA, 22 nt, Human
ugcaccauuuugucaggcuacu

SEQ ID NO: 1110100 - RNA, 22 nt, Human
cagugggaagggcagaggcuuu

SEQ ID NO: 1110101 - RNA, 22 nt, Human
cugcuuccaugcaauggcaguc

SEQ ID NO: 1110102 - RNA, 22 nt, Human
gcagcuggcccugacacgcaga

SEQ ID NO: 1110103 - RNA, 22 nt, Human
ucaggugguccuaagugccauc

SEQ ID NO: 1110104 - RNA, 22 nt, Human
cucuggccugcuuccucaggua

SEQ ID NO: 1110105 - RNA, 22 nt, Human
uggaaggcaacggagugagcug

SEQ ID NO: 1110106 - RNA, 22 nt, Human
gccugcagugagugcagaaggu

SEQ ID NO: 1110107 - RNA, 20 nt, Human
ucccuggaggugguggcauc

SEQ ID NO: 1110108 - RNA, 22 nt, Human
ugcaccauuaauuuaugugaga

SEQ ID NO: 1110109 - RNA, 22 nt, Human
ucucagggcagcaaggaagcau

SEQ ID NO: 1110110 - RNA, 22 nt, Human
cacccacccacugcucauuggc

SEQ ID NO: 1110111 - RNA, 22 nt, Human
cagacaugauguaagcagaggc

SEQ ID NO: 1110112 - RNA, 22 nt, Human
guguacaugagaaaucaacuuu

SEQ ID NO: 1110113 - RNA, 22 nt, Human
gcucaggaucccaggggugugc

SEQ ID NO: 1110114 - RNA, 22 nt, Human
gccagcugguaggcaccuagcc

SEQ ID NO: 1110115 - RNA, 22 nt, Human
acccuuucuuacucacacgcuc

SEQ ID NO: 1110116 - RNA, 22 nt, Human
augggaggcagacacuaaguuc

SEQ ID NO: 1110117 - RNA, 22 nt, Human
uacauguaagacaugagacucu

SEQ ID NO: 1110118 - RNA, 22 nt, Human
ggagggcaucaaucaggccugg

SEQ ID NO: 1110119 - RNA, 22 nt, Human
ucuucuuccucauuuauacaua

SEQ ID NO: 1110120 - RNA, 22 nt, Human
ccagcugguguuccuuaggacc

SEQ ID NO: 1110121 - RNA, 19 nt, Human
ccaggccaucccaguuccc

SEQ ID NO: 1110122 - RNA, 22 nt, Human
ucuuggagaauggcagagaagc

SEQ ID NO: 1110123 - RNA, 22 nt, Human
ggaggugaggccguagggugug

SEQ ID NO: 1110124 - RNA, 19 nt, Human
auagaaaggguuaaagaca

SEQ ID NO: 1110125 - RNA, 22 nt, Human
caguacuuuucuggcuuucuac

SEQ ID NO: 1110126 - RNA, 22 nt, Human
ugagccagaguggagugugccu

SEQ ID NO: 1110127 - RNA, 22 nt, Human
cucaggauuaaggaaucuaaau

SEQ ID NO: 1110128 - RNA, 22 nt, Human
agcagggccaacaguaaacacc

SEQ ID NO: 1110129 - RNA, 22 nt, Human
ccugcugugaaacuggcauaug

SEQ ID NO: 1110130 - RNA, 22 nt, Human
uaaaugcaguacaaauuguucu

SEQ ID NO: 1110131 - RNA, 22 nt, Human
gcugucuggguugagggcccug

SEQ ID NO: 1110132 - RNA, 22 nt, Human
ugggcucugcugcguaccaguu

SEQ ID NO: 1110133 - RNA, 22 nt, Human
guguggcuaccucagaggagca

SEQ ID NO: 1110134 - RNA, 22 nt, Human
acccacgaagaugagcggcaug

SEQ ID NO: 1110135 - RNA, 22 nt, Human
ccagagaccagaacauggggau

SEQ ID NO: 1110136 - RNA, 22 nt, Human
ccugagagcauuccacacugaa

SEQ ID NO: 1110137 - RNA, 23 nt, Human
uugauacagaagaaucaguuugu

SEQ ID NO: 1110138 - RNA, 22 nt, Human
acaugcauucucuaaaagcaaa

SEQ ID NO: 1110139 - RNA, 22 nt, Human
uccuggaggcaaaugagcacau

SEQ ID NO: 1110140 - RNA, 22 nt, Human
agccucugcuggcccuggcacu

SEQ ID NO: 1110141 - RNA, 22 nt, Human
caaagguaaagaucugcugugg

SEQ ID NO: 1110142 - RNA, 22 nt, Human
aguuuuucuccccuggcuucau

SEQ ID NO: 1110143 - RNA, 22 nt, Human
gggugggguguaucggauccua

SEQ ID NO: 1110144 - RNA, 22 nt, Human
cagguggcaugacugccuacaa

SEQ ID NO: 1110145 - RNA, 22 nt, Human
augagcuucccagacaggaugg

SEQ ID NO: 1110146 - RNA, 22 nt, Human
ucauugcaguagggagagaccc

SEQ ID NO: 1110147 - RNA, 22 nt, Human
cugcuggccuagcccauccucu

SEQ ID NO: 1110148 - RNA, 22 nt, Human
cccugcugucaggugcugggag

SEQ ID NO: 1110149 - RNA, 22 nt, Human
gccuccugaaaggaagagcucc

SEQ ID NO: 1110150 - RNA, 22 nt, Human
ggcuggcacucuguccaguguc

SEQ ID NO: 1110151 - RNA, 22 nt, Human
uuacaaagagaaguuguagaau

SEQ ID NO: 1110152 - RNA, 22 nt, Human
acaaugcaccagcaucuucacc

SEQ ID NO: 1110153 - RNA, 22 nt, Human
ucagcuggcaguucagaggcug

SEQ ID NO: 1110154 - RNA, 22 nt, Human
agguaaagacugcaaggagaau

SEQ ID NO: 1110155 - RNA, 21 nt, Human
cuggacugaggagacagucgc

SEQ ID NO: 1110156 - RNA, 22 nt, Human
uacaguaaccuuauuugucauu

SEQ ID NO: 1110157 - RNA, 22 nt, Human
gcuggccugggcagaggcuaug

SEQ ID NO: 1110158 - RNA, 20 nt, Human
uccagcugggaacagcugau

SEQ ID NO: 1110159 - RNA, 20 nt, Human
agggucaguagcacagagcu

SEQ ID NO: 1110160 - RNA, 20 nt, Human
caagcccucuuuagccugcc

SEQ ID NO: 1110161 - RNA, 22 nt, Human
agggccugcaucaggagcuugg

SEQ ID NO: 1110162 - RNA, 22 nt, Human
uccagggauguccuguagcacu

SEQ ID NO: 1110163 - RNA, 22 nt, Human
cugggcuggagugcaauggcgc

SEQ ID NO: 1110164 - RNA, 22 nt, Human
ugcagcagacugaguaugagaa

SEQ ID NO: 1110165 - RNA, 22 nt, Human
cugcucuguucccccaucaucu

SEQ ID NO: 1110166 - RNA, 22 nt, Human
gcugucacauuuggagcacugg

SEQ ID NO: 1110167 - RNA, 22 nt, Human
gccagccuucuguggccugcaa

SEQ ID NO: 1110168 - RNA, 22 nt, Human
gagcuucccucugcagucccug

SEQ ID NO: 1110169 - RNA, 20 nt, Human
agaggcuuccuugggaggag

SEQ ID NO: 1110170 - RNA, 22 nt, Human
cuuugcaauagaggcacacaug

SEQ ID NO: 1110171 - RNA, 22 nt, Human
agggcagaggcggacacggaag

SEQ ID NO: 1110172 - RNA, 22 nt, Human
gcugagguggcugccuuaguaa

SEQ ID NO: 1110173 - RNA, 22 nt, Human
cagucacauggaugauggauag

SEQ ID NO: 1110174 - RNA, 23 nt, Human
ccacagagcugccaauuccugug

SEQ ID NO: 1110175 - RNA, 22 nt, Human
cagauggccagaggcagcugca

SEQ ID NO: 1110176 - RNA, 22 nt, Human
aacuagaaccacuuguauuucc

SEQ ID NO: 1110177 - RNA, 22 nt, Human
acuggagcccguggaggcgcag

SEQ ID NO: 1110178 - RNA, 22 nt, Human
ggccucugccccagccacaccu

SEQ ID NO: 1110179 - RNA, 22 nt, Human
gcugccugguuucucagcugca

SEQ ID NO: 1110180 - RNA, 22 nt, Human
cugaaggaagcagaagcgaggu

SEQ ID NO: 1110181 - RNA, 22 nt, Human
caccugagugucaguauucuca

SEQ ID NO: 1110182 - RNA, 22 nt, Human
aaagguuaagguguucaagaaa

SEQ ID NO: 1110183 - RNA, 22 nt, Human
uaaaauguagcuucuaggcugg

SEQ ID NO: 1110184 - RNA, 22 nt, Human
guggagcccugccuugcucaug

SEQ ID NO: 1110185 - RNA, 22 nt, Human
gaggguccccaugcagagcuca

SEQ ID NO: 1110186 - RNA, 22 nt, Human
ucaugacaucuguuuaucucaa

SEQ ID NO: 1110187 - RNA, 22 nt, Human
ucagagugugagacauauugga

SEQ ID NO: 1110188 - RNA, 22 nt, Human
uuccauaaaggugauaguauac

SEQ ID NO: 1110189 - RNA, 22 nt, Human
gagggcagagacagugauucac

SEQ ID NO: 1110190 - RNA, 22 nt, Human
aagggcugcuguagaagcagag

SEQ ID NO: 1110191 - RNA, 22 nt, Human
ccagccuucugagcugccugga

SEQ ID NO: 1110192 - RNA, 22 nt, Human
uugcuuuguggugguucuucca

SEQ ID NO: 1110193 - RNA, 22 nt, Human
aagaggucauaccagauaaggg

SEQ ID NO: 1110194 - RNA, 22 nt, Human
ggcaugggccgaggugccuccu

SEQ ID NO: 1110195 - RNA, 22 nt, Human
gaguggggucugggcaucaguc

SEQ ID NO: 1110196 - RNA, 22 nt, Human
cagggccagccgcagcauccac

SEQ ID NO: 1110197 - RNA, 21 nt, Human
cugugcuucuuccuaagccag

SEQ ID NO: 1110198 - RNA, 22 nt, Human
agaaaucagaacccugaaguuc

SEQ ID NO: 1110199 - RNA, 22 nt, Human
ugcagggcuaagucagagccug

SEQ ID NO: 1110200 - RNA, 19 nt, Human
acaaagcugugagcagcuu

SEQ ID NO: 1110201 - RNA, 22 nt, Human
ucugggcugggagcguguggac

SEQ ID NO: 1110202 - RNA, 22 nt, Human
cccuggggcugagggauggccg

SEQ ID NO: 1110203 - RNA, 22 nt, Human
uccaggagguuuggaggaagca

SEQ ID NO: 1110204 - RNA, 22 nt, Human
cugaggccucuguucaccagaa

SEQ ID NO: 1110205 - RNA, 22 nt, Human
ggggcacacuuuugguagauau

SEQ ID NO: 1110206 - RNA, 19 nt, Human
cagcaauaaugccagaugg

SEQ ID NO: 1110207 - RNA, 19 nt, Human
ccuuggaguuccaggugga

SEQ ID NO: 1110208 - RNA, 21 nt, Human
aacauuucaggauccaaauug

SEQ ID NO: 1110209 - RNA, 22 nt, Human
cagcaucuuucucuucuggagu

SEQ ID NO: 1110210 - RNA, 22 nt, Human
agccagggauggcagugcccag

SEQ ID NO: 1110211 - RNA, 22 nt, Human
ggagaugguggaagcuggugca

SEQ ID NO: 1110212 - RNA, 22 nt, Human
ccuggcaggccccuccuggauu

SEQ ID NO: 1110213 - RNA, 22 nt, Human
aaaaaugaauucuucaguggca

SEQ ID NO: 1110214 - RNA, 22 nt, Human
cucagaguggggcucccugagg

SEQ ID NO: 1110215 - RNA, 22 nt, Human
ucuggcucuccagugcucuuag

SEQ ID NO: 1110216 - RNA, 22 nt, Human
ugcucugguccucccucggcgc

SEQ ID NO: 1110217 - RNA, 22 nt, Human
guccuggggauacagaagugaa

SEQ ID NO: 1110218 - RNA, 22 nt, Human
ugggccugccccaggcuucagc

SEQ ID NO: 1110219 - RNA, 22 nt, Human
cucuguccuugcacaguuccua

SEQ ID NO: 1110220 - RNA, 22 nt, Human
gcugccugcucggcuccuggga

SEQ ID NO: 1110221 - RNA, 20 nt, Human
gcucccugguagaaauguuu

SEQ ID NO: 1110222 - RNA, 22 nt, Human
agugcacaccuuaguacaaagu

SEQ ID NO: 1110223 - RNA, 22 nt, Human
auggggcuguucucugcccugc

SEQ ID NO: 1110224 - RNA, 22 nt, Human
gacaggguacgggcuaggcaca

SEQ ID NO: 1110225 - RNA, 22 nt, Human
ccagaggugccacagaaagagc

SEQ ID NO: 1110226 - RNA, 22 nt, Human
uggagcugaacuuugaggccag

SEQ ID NO: 1110227 - RNA, 22 nt, Human
ugggaauggaugcuaagugcua

SEQ ID NO: 1110228 - RNA, 22 nt, Human
acauuucuucccuuuagcagaa

SEQ ID NO: 1110229 - RNA, 22 nt, Human
gcucugugggugaguagaaucu

SEQ ID NO: 1110230 - RNA, 22 nt, Human
agcucccagaaggcccugcgcc

SEQ ID NO: 1110231 - RNA, 22 nt, Human
ugcagaagaauguaggcauaag

SEQ ID NO: 1110232 - RNA, 22 nt, Human
augcacagacccaaaggccauc

SEQ ID NO: 1110233 - RNA, 22 nt, Human
cugagccaugagccugcgccca

SEQ ID NO: 1110234 - RNA, 21 nt, Human
aagagcuggaucaaggauaag

SEQ ID NO: 1110235 - RNA, 22 nt, Human
uggcuggggagccccgacuccc

SEQ ID NO: 1110236 - RNA, 22 nt, Human
gacacauagaucuaucucacuc

SEQ ID NO: 1110237 - RNA, 22 nt, Human
accccagcccugcuucugggag

SEQ ID NO: 1110238 - RNA, 22 nt, Human
cugggccugguagggcuugaaa

SEQ ID NO: 1110239 - RNA, 22 nt, Human
ugggcugcccugaugguccuca

SEQ ID NO: 1110240 - RNA, 22 nt, Human
ucccagagcagaugugcuaaag

SEQ ID NO: 1110241 - RNA, 22 nt, Human
caaagugcuggaauuacaggug

SEQ ID NO: 1110242 - RNA, 22 nt, Human
gccagccugugcuuggccaggc

SEQ ID NO: 1110243 - RNA, 22 nt, Human
uaaugcacauagaaguacuuag

SEQ ID NO: 1110244 - RNA, 22 nt, Human
cugccucugcgucccacagagu

SEQ ID NO: 1110245 - RNA, 22 nt, Human
cccucuggcucuucucaggccg

SEQ ID NO: 1110246 - RNA, 22 nt, Human
uuguuuugcuaaagggucauca

SEQ ID NO: 1110247 - RNA, 22 nt, Human
uggcagagcuggcugcggauga

SEQ ID NO: 1110248 - RNA, 22 nt, Human
aauaauuuuagcucagaguugu

SEQ ID NO: 1110249 - RNA, 22 nt, Human
ucugagggcuugaggggaagua

SEQ ID NO: 1110250 - RNA, 17 nt, Human
cugucugcgcaugaggu

SEQ ID NO: 1110251 - RNA, 22 nt, Human
aacaugaagguaggaugguuuu

SEQ ID NO: 1110252 - RNA, 22 nt, Human
cgcagcagccccgugguaggug

SEQ ID NO: 1110253 - RNA, 22 nt, Human
guacauuucauuuaaaugaugu

SEQ ID NO: 1110254 - RNA, 22 nt, Human
ggcucuggugaggguaggagau

SEQ ID NO: 1110255 - RNA, 22 nt, Human
augggcugugagguccggcagg

SEQ ID NO: 1110256 - RNA, 22 nt, Human
uccuuugacuucuugcagucca

SEQ ID NO: 1110257 - RNA, 22 nt, Human
agcauuuaauuacaguuuaauu

SEQ ID NO: 1110258 - RNA, 22 nt, Human
ccugggaggcugugggucugcu

SEQ ID NO: 1110259 - RNA, 22 nt, Human
ucagcaauccucccacaggugg

SEQ ID NO: 1110260 - RNA, 22 nt, Human
ggccucuguuuggagccaggau

SEQ ID NO: 1110261 - RNA, 22 nt, Human
gaguguuccagaaacuggcccu

SEQ ID NO: 1110262 - RNA, 22 nt, Human
aaagaucagucugaagcaacau

SEQ ID NO: 1110263 - RNA, 22 nt, Human
aggccuuccucggagacaggga

SEQ ID NO: 1110264 - RNA, 22 nt, Human
cagggcugugcccaucuucccc

SEQ ID NO: 1110265 - RNA, 22 nt, Human
aaggcacugaacuuaaauucug

SEQ ID NO: 1110266 - RNA, 22 nt, Human
ccuggcagucaggggaguccuu

SEQ ID NO: 1110267 - RNA, 22 nt, Human
gcagcagagcuuuguccuggcu

SEQ ID NO: 1110268 - RNA, 22 nt, Human
gugccugggguugagcuaugaa

SEQ ID NO: 1110269 - RNA, 22 nt, Human
agcagcaugaugacagagucuc

SEQ ID NO: 1110270 - RNA, 22 nt, Human
aguuuuuccguggcuacgauaa

SEQ ID NO: 1110271 - RNA, 23 nt, Human
ccuucagaagaaguaacaggggc

SEQ ID NO: 1110272 - RNA, 22 nt, Human
agggcacaagacucugagcccc

SEQ ID NO: 1110273 - RNA, 22 nt, Human
ccuuggaggacugcugcuucuu

SEQ ID NO: 1110274 - RNA, 22 nt, Human
uggcaguggcucagagugcaga

SEQ ID NO: 1110275 - RNA, 21 nt, Human
augacagaugcugcagaucgu

SEQ ID NO: 1110276 - RNA, 22 nt, Human
uuugcuauaaaagggucacacg

SEQ ID NO: 1110277 - RNA, 22 nt, Human
cacccaggcuggagugcagggg

SEQ ID NO: 1110278 - RNA, 22 nt, Human
cugagucucccggcaguggagg

SEQ ID NO: 1110279 - RNA, 22 nt, Human
ucacauuuguuccucugcacuu

SEQ ID NO: 1110280 - RNA, 22 nt, Human
uccuucaggccucauucucaua

SEQ ID NO: 1110281 - RNA, 22 nt, Human
ucuccuuuaagauuuccucagg

SEQ ID NO: 1110282 - RNA, 22 nt, Human
ugacccugcuucuuggugcagg

SEQ ID NO: 1110283 - RNA, 22 nt, Human
cagcucccaguggcagcuccuu

SEQ ID NO: 1110284 - RNA, 22 nt, Human
gucacacuagggccaaguggag

SEQ ID NO: 1110285 - RNA, 22 nt, Human
agagccugcagcugugaagaaa

SEQ ID NO: 1110286 - RNA, 22 nt, Human
accuuucaaaguggcuaucacu

SEQ ID NO: 1110287 - RNA, 22 nt, Human
uccugagauaaaucucauguga

SEQ ID NO: 1110288 - RNA, 22 nt, Human
cagcucucacacccuccuccca

SEQ ID NO: 1110289 - RNA, 17 nt, Human
gcagugaaaagagauca

SEQ ID NO: 1110290 - RNA, 22 nt, Human
gagccuggauugucaccgacuu

SEQ ID NO: 1110291 - RNA, 22 nt, Human
gagcucccaggccccagcaagg

SEQ ID NO: 1110292 - RNA, 22 nt, Human
cagcagugugcaggugugcugg

SEQ ID NO: 1110293 - RNA, 22 nt, Human
ccaaggagcucauauucuuguu

SEQ ID NO: 1110294 - RNA, 21 nt, Human
uugcaccaugauaaauucaga

SEQ ID NO: 1110295 - RNA, 22 nt, Human
guguauaacuaucuaucuagua

SEQ ID NO: 1110296 - RNA, 22 nt, Human
uugcauugauguuccuucuugc

SEQ ID NO: 1110297 - RNA, 22 nt, Human
uccaguggguugcugagggagg

SEQ ID NO: 1110298 - RNA, 22 nt, Human
uguacaguguagucaugagguu

SEQ ID NO: 1110299 - RNA, 21 nt, Human
cccagggaagccgcagucacc

SEQ ID NO: 1110300 - RNA, 22 nt, Human
ggcugccuggaccuccucuuuc

SEQ ID NO: 1110301 - RNA, 22 nt, Human
auuuaguguguauugcuauuau

SEQ ID NO: 1110302 - RNA, 21 nt, Human
uuuuuucuugcgugaggccug

SEQ ID NO: 1110303 - RNA, 22 nt, Human
cugccacuagcuuucacaucuu

SEQ ID NO: 1110304 - RNA, 22 nt, Human
agcaauaugacauugcuacauc

SEQ ID NO: 1110305 - RNA, 22 nt, Human
ucuuccucuagaucugaggccc

SEQ ID NO: 1110306 - RNA, 22 nt, Human
aggccuggccugggcggcauug

SEQ ID NO: 1110307 - RNA, 22 nt, Human
ccugggugacccgugagcgucc

SEQ ID NO: 1110308 - RNA, 21 nt, Human
uggcagaguugaguaguuaug

SEQ ID NO: 1110309 - RNA, 22 nt, Human
agcaucuggucaugagugagaa

SEQ ID NO: 1110310 - RNA, 22 nt, Human
ggccagagagccgcuguuagga

SEQ ID NO: 1110311 - RNA, 22 nt, Human
caggccugagacaucugagaua

SEQ ID NO: 1110312 - RNA, 22 nt, Human
gacagggcgcccagccuguuuc

SEQ ID NO: 1110313 - RNA, 22 nt, Human
aacaaauggggccuuguaugaa

SEQ ID NO: 1110314 - RNA, 22 nt, Human
aguuuuuccugauuuuacagaa

SEQ ID NO: 1110315 - RNA, 22 nt, Human
agagccugugggagaugcagcu

SEQ ID NO: 1110316 - RNA, 22 nt, Human
ccagggugugggcgucggcacg

SEQ ID NO: 1110317 - RNA, 18 nt, Human
ucaagacaucaugaaaua

SEQ ID NO: 1110318 - RNA, 22 nt, Human
uggaaggagcuaaggaccuggg

SEQ ID NO: 1110319 - RNA, 22 nt, Human
cccagccucuguuugcuccucu

SEQ ID NO: 1110320 - RNA, 22 nt, Human
ugagaguauuuuggcauuauca

SEQ ID NO: 1110321 - RNA, 22 nt, Human
caaugauggcuaggcagcugcu

SEQ ID NO: 1110322 - RNA, 19 nt, Human
uccuuugaauaucaguuga

SEQ ID NO: 1110323 - RNA, 22 nt, Human
agagcuggauggucaagauggc

SEQ ID NO: 1110324 - RNA, 22 nt, Human
cugaggugcuauggaggauacg

SEQ ID NO: 1110325 - RNA, 22 nt, Human
uuggccuuaaccucucugugcc

SEQ ID NO: 1110326 - RNA, 22 nt, Human
gagcucugggaaacaaagugua

SEQ ID NO: 1110327 - RNA, 22 nt, Human
augcacaagaggcuagaaaaga

SEQ ID NO: 1110328 - RNA, 18 nt, Human
aucuuuccauagcauguu

SEQ ID NO: 1110329 - RNA, 17 nt, Human
gccucugcuugugucau

SEQ ID NO: 1110330 - RNA, 22 nt, Human
auuucuuccucugucaguaacu

SEQ ID NO: 1110331 - RNA, 22 nt, Human
uguguccuucugggagucccag

SEQ ID NO: 1110332 - RNA, 22 nt, Human
uccuuuuuaagucguuguggua

SEQ ID NO: 1110333 - RNA, 22 nt, Human
gaagcagcuaggaucuucauuu

SEQ ID NO: 1110334 - RNA, 22 nt, Human
auccuucaaggggcugacagcu

SEQ ID NO: 1110335 - RNA, 18 nt, Human
uggcagagugucuguucu

SEQ ID NO: 1110336 - RNA, 22 nt, Human
gaguuauuggguggaaagguag

SEQ ID NO: 1110337 - RNA, 22 nt, Human
augcagguugggcaaguguggg

SEQ ID NO: 1110338 - RNA, 22 nt, Human
gcccagcagaucucagugucuc

SEQ ID NO: 1110339 - RNA, 22 nt, Human
ccagcacugcucucagacugag

SEQ ID NO: 1110340 - RNA, 22 nt, Human
caguacuuguccucagguguua

SEQ ID NO: 1110341 - RNA, 22 nt, Human
agcaccugcuuaaugugcagug

SEQ ID NO: 1110342 - RNA, 22 nt, Human
agagcugggugaagugccauca

SEQ ID NO: 1110343 - RNA, 22 nt, Human
aggaaagggguagguguggacg

SEQ ID NO: 1110344 - RNA, 22 nt, Human
gggaggcuggcucuggccacag

SEQ ID NO: 1110345 - RNA, 22 nt, Human
uagccggguguugugucaugca

SEQ ID NO: 1110346 - RNA, 22 nt, Human
cugaggucuagacaccccaggg

SEQ ID NO: 1110347 - RNA, 22 nt, Human
gagguggguguaucacagguca

SEQ ID NO: 1110348 - RNA, 22 nt, Human
aggggugaaggcccgauaggag

SEQ ID NO: 1110349 - RNA, 22 nt, Human
gagccuggauagccuuguucca

SEQ ID NO: 1110350 - RNA, 22 nt, Human
cugggcugucccaaccccaucc

SEQ ID NO: 1110351 - RNA, 22 nt, Human
uggcccugucccuggagccugg

SEQ ID NO: 1110352 - RNA, 22 nt, Human
ugugccuggcauucugggcuuc

SEQ ID NO: 1110353 - RNA, 22 nt, Human
ccuggcuuccuggagcucacaa

SEQ ID NO: 1110354 - RNA, 22 nt, Human
cugccuuccaaccccagacucc

SEQ ID NO: 1110355 - RNA, 18 nt, Human
ugugguggagcugccuuc

SEQ ID NO: 1110356 - RNA, 22 nt, Human
uguguacaggccuugcuagacu

SEQ ID NO: 1110357 - RNA, 22 nt, Human
agggcagccaugagccuucagg

SEQ ID NO: 1110358 - RNA, 22 nt, Human
gccuucaguaguauccucauga

SEQ ID NO: 1110359 - RNA, 22 nt, Human
aauaauuuccagccaacuggaa

SEQ ID NO: 1110360 - RNA, 22 nt, Human
gaaauguguuguucauuucuaa

SEQ ID NO: 1110361 - RNA, 22 nt, Human
cagagcugcuucccaguuugug

SEQ ID NO: 1110362 - RNA, 22 nt, Human
gcagcugaaagggaucucuaca

SEQ ID NO: 1110363 - RNA, 22 nt, Human
aaugaacaggugaaugucagau

SEQ ID NO: 1110364 - RNA, 22 nt, Human
gcugcccagcaggccccagggg

SEQ ID NO: 1110365 - RNA, 20 nt, Human
agcagcuguguuuucauccu

SEQ ID NO: 1110366 - RNA, 22 nt, Human
gcaggguaggugacagguaguc

SEQ ID NO: 1110367 - RNA, 22 nt, Human
cccucugccugcgcccuggugu

SEQ ID NO: 1110368 - RNA, 22 nt, Human
aggaggcuguggagcacuccau

SEQ ID NO: 1110369 - RNA, 22 nt, Human
gcagagcccuggggguauggug

SEQ ID NO: 1110370 - RNA, 22 nt, Human
aaaugcagauugucauucagga

SEQ ID NO: 1110371 - RNA, 22 nt, Human
caggcagggagcuggaaaggau

SEQ ID NO: 1110372 - RNA, 22 nt, Human
uccuugaagaaugauucuugga

SEQ ID NO: 1110373 - RNA, 22 nt, Human
cugcccugugaggguccuuggg

SEQ ID NO: 1110374 - RNA, 20 nt, Human
agguggcuccugcugggggu

SEQ ID NO: 1110375 - RNA, 22 nt, Human
caaggcugcugcgggucgcacc

SEQ ID NO: 1110376 - RNA, 22 nt, Human
ucaucacauaugucaugauuug

SEQ ID NO: 1110377 - RNA, 22 nt, Human
uacauugugauguuucaauaca

SEQ ID NO: 1110378 - RNA, 17 nt, Human
ccucccacaccgcccug

SEQ ID NO: 1110379 - RNA, 22 nt, Human
cauugcacuuuggguccaggac

SEQ ID NO: 1110380 - RNA, 22 nt, Human
ucaggcugccuaucagacugug

SEQ ID NO: 1110381 - RNA, 22 nt, Human
aagaagagaaaugugcugcugg

SEQ ID NO: 1110382 - RNA, 19 nt, Human
gcuuuuuguugucaaaggu

SEQ ID NO: 1110383 - RNA, 22 nt, Human
ggggaggcugaugugggcaaag

SEQ ID NO: 1110384 - RNA, 22 nt, Human
ggccugaggcaauagucagaca

SEQ ID NO: 1110385 - RNA, 22 nt, Human
ggagcugggaauuggaucaucu

SEQ ID NO: 1110386 - RNA, 22 nt, Human
cacuggggugggccugguagag

SEQ ID NO: 1110387 - RNA, 22 nt, Human
acagagaaagugggcugaagau

SEQ ID NO: 1110388 - RNA, 22 nt, Human
agggcagagauuaauuaagaca

SEQ ID NO: 1110389 - RNA, 22 nt, Human
aaagccuugagauccuauaguu

SEQ ID NO: 1110390 - RNA, 22 nt, Human
uagagcuggccgggacagcugg

SEQ ID NO: 1110391 - RNA, 22 nt, Human
ugggccuguugccugaguccau

SEQ ID NO: 1110392 - RNA, 22 nt, Human
uaacagaauuugcuaaacuccg

SEQ ID NO: 1110393 - RNA, 22 nt, Human
accugaggccuccccagcagac

SEQ ID NO: 1110394 - RNA, 22 nt, Human
ccucucaucauuaucgcuuugu

SEQ ID NO: 1110395 - RNA, 18 nt, Human
gagguccugcucuagccc

SEQ ID NO: 1110396 - RNA, 22 nt, Human
cagcugggagcuccauuagaua

SEQ ID NO: 1110397 - RNA, 22 nt, Human
cccuggaggagcuuagagcuug

SEQ ID NO: 1110398 - RNA, 22 nt, Human
caggaaagagcugccaggcagg

SEQ ID NO: 1110399 - RNA, 22 nt, Human
cuggcugcuggccugaggaugc

SEQ ID NO: 1110400 - RNA, 22 nt, Human
cagagaccccgcugcccuucug

SEQ ID NO: 1110401 - RNA, 22 nt, Human
aagagcuguaugccauaugauu

SEQ ID NO: 1110402 - RNA, 22 nt, Human
ucugggagagcugcugucagag

SEQ ID NO: 1110403 - RNA, 21 nt, Human
agagcugggacuugccugaga

SEQ ID NO: 1110404 - RNA, 22 nt, Human
uguauagaguuggaagaugacu

SEQ ID NO: 1110405 - RNA, 22 nt, Human
ggcaggaggaagaguuagcacc

SEQ ID NO: 1110406 - RNA, 22 nt, Human
gacagggccgcagauggagacu

SEQ ID NO: 1110407 - RNA, 23 nt, Human
gcaggugguucgaacagaaguuu

SEQ ID NO: 1110408 - RNA, 22 nt, Human
ucucugggauaaacugggccag

SEQ ID NO: 1110409 - RNA, 22 nt, Human
caguuuuucaaaauuacaugau

SEQ ID NO: 1110410 - RNA, 22 nt, Human
ggcugggcaggucugcacaggg

SEQ ID NO: 1110411 - RNA, 22 nt, Human
gcuggccugucuagagccuuac

SEQ ID NO: 1110412 - RNA, 22 nt, Human
ccuuccaggagucucugcaggu

SEQ ID NO: 1110413 - RNA, 22 nt, Human
ccagagugacgugaagugugaa

SEQ ID NO: 1110414 - RNA, 22 nt, Human
cuggugucugcucccucacagc

SEQ ID NO: 1110415 - RNA, 22 nt, Human
guaucuuuccacaucuucagua

SEQ ID NO: 1110416 - RNA, 22 nt, Human
agcaccugcuaugugucaggga

SEQ ID NO: 1110417 - RNA, 22 nt, Human
uaagaacaguguuucaucucua

SEQ ID NO: 1110418 - RNA, 22 nt, Human
ccaggcagccaagugugugugu

SEQ ID NO: 1110419 - RNA, 22 nt, Human
acagccugcugccugcuucuug

SEQ ID NO: 1110420 - RNA, 22 nt, Human
aggcccugggcaguucuguagc

SEQ ID NO: 1110421 - RNA, 22 nt, Human
cagaauaugacaagauuuuccu

SEQ ID NO: 1110422 - RNA, 22 nt, Human
ugcagaggaccauuguccugga

SEQ ID NO: 1110423 - RNA, 22 nt, Human
ucagcagaggggaaggcaucug

SEQ ID NO: 1110424 - RNA, 22 nt, Human
cuggcucccucgcugaggugcu

SEQ ID NO: 1110425 - RNA, 22 nt, Human
augacagaggagugcaggugau

SEQ ID NO: 1110426 - RNA, 20 nt, Human
cagucccaauccagggccag

SEQ ID NO: 1110427 - RNA, 22 nt, Human
ggcuagaacuuuacacuuugca

SEQ ID NO: 1110428 - RNA, 22 nt, Human
gcuggagccaagcugcucuugg

SEQ ID NO: 1110429 - RNA, 19 nt, Human
ccaggccuccugggagguc

SEQ ID NO: 1110430 - RNA, 18 nt, Human
acugugguuuauguguag

SEQ ID NO: 1110431 - RNA, 22 nt, Human
ugagugccugaacauagaguag

SEQ ID NO: 1110432 - RNA, 22 nt, Human
aggaaucccgcaccagcugcug

SEQ ID NO: 1110433 - RNA, 22 nt, Human
aucuggcuugacuuugcgacuu

SEQ ID NO: 1110434 - RNA, 22 nt, Human
ugcucuguaaggucagaaaagg

SEQ ID NO: 1110435 - RNA, 22 nt, Human
agucccagcucugccacuuacu

SEQ ID NO: 1110436 - RNA, 22 nt, Human
ugcaguggcgccaucucagcuc

SEQ ID NO: 1110437 - RNA, 22 nt, Human
cugccuugaggagguuguggga

SEQ ID NO: 1110438 - RNA, 20 nt, Human
gagccugggaagucuaaggu

SEQ ID NO: 1110439 - RNA, 22 nt, Human
acauuucuauagugcaucuguu

SEQ ID NO: 1110440 - RNA, 22 nt, Human
cugggaguguucuaggucacau

SEQ ID NO: 1110441 - RNA, 22 nt, Human
uucaagaugacccagucacacg

SEQ ID NO: 1110442 - RNA, 22 nt, Human
gccaccucggcuuucucugcuc

SEQ ID NO: 1110443 - RNA, 22 nt, Human
ggaggccaaagugugggcggcu

SEQ ID NO: 1110444 - RNA, 22 nt, Human
cugccagcucucuggaggcucu

SEQ ID NO: 1110445 - RNA, 22 nt, Human
gcaggaugggagcuucacuuug

SEQ ID NO: 1110446 - RNA, 22 nt, Human
caagggaguuacugagggcggg

SEQ ID NO: 1110447 - RNA, 21 nt, Human
ucccagagugcuugggacugc

SEQ ID NO: 1110448 - RNA, 23 nt, Human
ucugagagaacaaugccuccuau

SEQ ID NO: 1110449 - RNA, 22 nt, Human
aggagcugaagucucugcacuc

SEQ ID NO: 1110450 - RNA, 22 nt, Human
ucagugucuugaccugggugug

SEQ ID NO: 1110451 - RNA, 22 nt, Human
cagacagcugcuuucuugcugu

SEQ ID NO: 1110452 - RNA, 22 nt, Human
guucucucugcuuccaagaugg

SEQ ID NO: 1110453 - RNA, 22 nt, Human
cagccaggcccccgagucguug

SEQ ID NO: 1110454 - RNA, 22 nt, Human
ccaggccauucccagaguugcu

SEQ ID NO: 1110455 - RNA, 22 nt, Human
ucagaggucccuagcaggagug

SEQ ID NO: 1110456 - RNA, 22 nt, Human
aagaaauuaaugugccauuacu

SEQ ID NO: 1110457 - RNA, 22 nt, Human
cuuucacagcugugcuuaugau

SEQ ID NO: 1110458 - RNA, 22 nt, Human
aggaaagcucccaguagggcuc

SEQ ID NO: 1110459 - RNA, 22 nt, Human
cuccucacacccacugcaacca

SEQ ID NO: 1110460 - RNA, 22 nt, Human
gcugucugagaacaugguggaa

SEQ ID NO: 1110461 - RNA, 22 nt, Human
ccugcagguaaggcuaacugcc

SEQ ID NO: 1110462 - RNA, 22 nt, Human
aaugaugguuaaacacuggagg

SEQ ID NO: 1110463 - RNA, 21 nt, Human
gagacagcccagugccagggc

SEQ ID NO: 1110464 - RNA, 22 nt, Human
aaaucugggucaagguggagug

SEQ ID NO: 1110465 - RNA, 15 nt, Human
aaucuggcggcaagu

SEQ ID NO: 1110466 - RNA, 22 nt, Human
aaauugcaaaaguacuuuuagg

SEQ ID NO: 1110467 - RNA, 22 nt, Human
ugccacccagccaggaguggga

SEQ ID NO: 1110468 - RNA, 22 nt, Human
cagaagcauugacuccuugcuc

SEQ ID NO: 1110469 - RNA, 22 nt, Human
uuguuaaaaugcauauucuggu

SEQ ID NO: 1110470 - RNA, 22 nt, Human
ucauugaauuucacagcuuuau

SEQ ID NO: 1110471 - RNA, 22 nt, Human
agagaugaaaaguggagacugg

SEQ ID NO: 1110472 - RNA, 22 nt, Human
uuuuuccuagcgauuugucagc

SEQ ID NO: 1110473 - RNA, 22 nt, Human
uaauacuuuugccuuguauuca

SEQ ID NO: 1110474 - RNA, 22 nt, Human
guuauaaaggugauaaugguca

SEQ ID NO: 1110475 - RNA, 21 nt, Human
gagcauggcuuacaucagcag

SEQ ID NO: 1110476 - RNA, 22 nt, Human
ggggacaguuaaagaccaagac

SEQ ID NO: 1110477 - RNA, 22 nt, Human
uaaagcaggccacauaugugau

SEQ ID NO: 1110478 - RNA, 22 nt, Human
gccagguggcugagugacugag

SEQ ID NO: 1110479 - RNA, 22 nt, Human
uaugcauaauuggauaaguaga

SEQ ID NO: 1110480 - RNA, 22 nt, Human
gcucagccgaacuucagagcag

SEQ ID NO: 1110481 - RNA, 22 nt, Human
agauguaguagugggucuuuua

SEQ ID NO: 1110482 - RNA, 19 nt, Human
ugccuggcaccagcuccac

SEQ ID NO: 1110483 - RNA, 22 nt, Human
cugggccuuggauugacacugu

SEQ ID NO: 1110484 - RNA, 22 nt, Human
uggcccugccacucacugcuga

SEQ ID NO: 1110485 - RNA, 21 nt, Human
uaucuacuggugucuuucaga

SEQ ID NO: 1110486 - RNA, 22 nt, Human
uccaguggcacuggagacuaga

SEQ ID NO: 1110487 - RNA, 22 nt, Human
ugcaccccauuuuacauuuaca

SEQ ID NO: 1110488 - RNA, 22 nt, Human
gugcucacugugagacguccug

SEQ ID NO: 1110489 - RNA, 19 nt, Human
ugaaggagggggauggcca

SEQ ID NO: 1110490 - RNA, 22 nt, Human
ugggcacuggaagccugcugug

SEQ ID NO: 1110491 - RNA, 22 nt, Human
gaagcccauuuguacagcacau

SEQ ID NO: 1110492 - RNA, 22 nt, Human
ggcuuccuggagaaggucugag

SEQ ID NO: 1110493 - RNA, 22 nt, Human
gcacacagauuaggaaacagaa

SEQ ID NO: 1110494 - RNA, 22 nt, Human
ugagguguguccccagggaggu

SEQ ID NO: 1110495 - RNA, 22 nt, Human
ccaggguguagggauuccagau

SEQ ID NO: 1110496 - RNA, 22 nt, Human
ugcauuguugaugaguugaaua

SEQ ID NO: 1110497 - RNA, 22 nt, Human
cugaggccagcugcagagcucu

SEQ ID NO: 1110498 - RNA, 22 nt, Human
acauuucucagggaguuuugcu

SEQ ID NO: 1110499 - RNA, 22 nt, Human
ugacuucaaaggcucuacuccu

SEQ ID NO: 1110500 - RNA, 22 nt, Human
guuauguaucuugauugggugg

SEQ ID NO: 1110501 - RNA, 22 nt, Human
accacugggcgggcagccugcu

SEQ ID NO: 1110502 - RNA, 22 nt, Human
aaauguauccuacuuccugagu

SEQ ID NO: 1110503 - RNA, 22 nt, Human
ucccagaguuuccuguguccca

SEQ ID NO: 1110504 - RNA, 22 nt, Human
ucagaagcaaacaucacucuag

SEQ ID NO: 1110505 - RNA, 22 nt, Human
cacuguaucuuuuccaaagucu

SEQ ID NO: 1110506 - RNA, 22 nt, Human
aguuaaagucugaaauagagaa

SEQ ID NO: 1110507 - RNA, 23 nt, Human
ggaguuggauuguacuugcugcu

SEQ ID NO: 1110508 - RNA, 22 nt, Human
cauuaagauuuuuuucuacugg

SEQ ID NO: 1110509 - RNA, 22 nt, Human
caaaugaagaaccuucucaccu

SEQ ID NO: 1110510 - RNA, 22 nt, Human
uguuacuuaucucacgugaugc

SEQ ID NO: 1110511 - RNA, 22 nt, Human
uauguacagggauagaacuuga

SEQ ID NO: 1110512 - RNA, 22 nt, Human
uaagaacauuuucggaaagaua

SEQ ID NO: 1110513 - RNA, 22 nt, Human
gggaguggagagcaauggauga

SEQ ID NO: 1110514 - RNA, 22 nt, Human
ugccucugugggccuuccuggc

SEQ ID NO: 1110515 - RNA, 22 nt, Human
ugucaugcuuauguuacauacu

SEQ ID NO: 1110516 - RNA, 22 nt, Human
agcaggguauguuagagcugua

SEQ ID NO: 1110517 - RNA, 22 nt, Human
cagccagagaaagggcacugcc

SEQ ID NO: 1110518 - RNA, 17 nt, Human
aauagcugcucagagag

SEQ ID NO: 1110519 - RNA, 22 nt, Human
guacauuggcaacucucuuaga

SEQ ID NO: 1110520 - RNA, 19 nt, Human
gugauuucuuuccacaagc

SEQ ID NO: 1110521 - RNA, 22 nt, Human
uaaagguagcaugaaacugcaa

SEQ ID NO: 1110522 - RNA, 19 nt, Human
auaaggcagugacuuuuuu

SEQ ID NO: 1110523 - RNA, 22 nt, Human
acucuugucucaacuuuuguau

SEQ ID NO: 1110524 - RNA, 22 nt, Human
augcacccagugucuggacuau

SEQ ID NO: 1110525 - RNA, 22 nt, Human
guucauuuuacuguaaauagca

SEQ ID NO: 1110526 - RNA, 22 nt, Human
augucuuucucacagccaguuc

SEQ ID NO: 1110527 - RNA, 22 nt, Human
uuuccucuucgauuaaguuugg

SEQ ID NO: 1110528 - RNA, 22 nt, Human
aaaugucuuucaauagagaaau

SEQ ID NO: 1110529 - RNA, 22 nt, Human
gagcacagccaaaguaagaagg

SEQ ID NO: 1110530 - RNA, 22 nt, Human
ucccugggccacagcugugagc

SEQ ID NO: 1110531 - RNA, 22 nt, Human
ccaggcaucacgggcauguggc

SEQ ID NO: 1110532 - RNA, 22 nt, Human
acacacagguaaaggagccugg

SEQ ID NO: 1110533 - RNA, 22 nt, Human
aaguuugagaagcuuauagaua

SEQ ID NO: 1110534 - RNA, 22 nt, Human
gacucugcuacaggccgagguu

SEQ ID NO: 1110535 - RNA, 22 nt, Human
ggucagccuuggauuugguagc

SEQ ID NO: 1110536 - RNA, 22 nt, Human
gcccucugcacagcucugagca

SEQ ID NO: 1110537 - RNA, 22 nt, Human
gggcccuggacguggcggcaga

SEQ ID NO: 1110538 - RNA, 22 nt, Human
ucugccuuuucacugccacuaa

SEQ ID NO: 1110539 - RNA, 22 nt, Human
cugagguguugaugaccuaugc

SEQ ID NO: 1110540 - RNA, 22 nt, Human
ccaggcugagcaugauuggagc

SEQ ID NO: 1110541 - RNA, 22 nt, Human
acucugaggagugacuagaggu

SEQ ID NO: 1110542 - RNA, 22 nt, Human
acaggugauucaggcucuggga

SEQ ID NO: 1110543 - RNA, 22 nt, Human
cauggccucaaaggacugcaga

SEQ ID NO: 1110544 - RNA, 22 nt, Human
gaggggcuggguagggcaaccc

SEQ ID NO: 1110545 - RNA, 22 nt, Human
gucaggggccaugggccaagga

SEQ ID NO: 1110546 - RNA, 22 nt, Human
auuuugaaaagcauuugaguaa

SEQ ID NO: 1110547 - RNA, 22 nt, Human
agggaauguagcaagaugccaa

SEQ ID NO: 1110548 - RNA, 22 nt, Human
cuccugaguaguagcauuguca

SEQ ID NO: 1110549 - RNA, 22 nt, Human
aggagccccucuucaguccugg

SEQ ID NO: 1110550 - RNA, 22 nt, Human
acuucauuguaauauuauagca

SEQ ID NO: 1110551 - RNA, 22 nt, Human
acagagcaauucuuggguguuu

SEQ ID NO: 1110552 - RNA, 22 nt, Human
cugugccuaagaugcaugucuc

SEQ ID NO: 1110553 - RNA, 22 nt, Human
ugagccagccuugcagcugugc

SEQ ID NO: 1110554 - RNA, 22 nt, Human
acaaagugcacaagaugagaac

SEQ ID NO: 1110555 - RNA, 22 nt, Human
ucagggcaagucucagaagguu

SEQ ID NO: 1110556 - RNA, 22 nt, Human
cuggagaggcugggaacagguu

SEQ ID NO: 1110557 - RNA, 16 nt, Human
gagccaggugccuuga

SEQ ID NO: 1110558 - RNA, 19 nt, Human
gaagaagcuugagaaguag

SEQ ID NO: 1110559 - RNA, 21 nt, Human
ucacuuauaauguauuugcug

SEQ ID NO: 1110560 - RNA, 22 nt, Human
cugcccugggaguaccuguccu

SEQ ID NO: 1110561 - RNA, 22 nt, Human
uucacauugugcagauuauggu

SEQ ID NO: 1110562 - RNA, 19 nt, Human
uucacauuggaagaaguag

SEQ ID NO: 1110563 - RNA, 22 nt, Human
aggcuucuacguggucccaggg

SEQ ID NO: 1110564 - RNA, 22 nt, Human
agagaaaacucauugagguguc

SEQ ID NO: 1110565 - RNA, 22 nt, Human
ccugggcauaaaucacuccaag

SEQ ID NO: 1110566 - RNA, 22 nt, Human
acagaacugcaggaggaaaagc

SEQ ID NO: 1110567 - RNA, 22 nt, Human
gagagcuggauucuggauaggu

SEQ ID NO: 1110568 - RNA, 22 nt, Human
aaguauauuuuuugaagcauau

SEQ ID NO: 1110569 - RNA, 22 nt, Human
uuuucuuacugucugugauccu

SEQ ID NO: 1110570 - RNA, 22 nt, Human
cgggcagaucacacagggcuug

SEQ ID NO: 1110571 - RNA, 22 nt, Human
cagcuggcaaguggagcagggu

SEQ ID NO: 1110572 - RNA, 22 nt, Human
ucagaagagcuggugcugccug

SEQ ID NO: 1110573 - RNA, 22 nt, Human
ggugggcaggucacucugccuc

SEQ ID NO: 1110574 - RNA, 22 nt, Human
guaggcagucucucaggugauc

SEQ ID NO: 1110575 - RNA, 22 nt, Human
cccagggacagcuagguggggc

SEQ ID NO: 1110576 - RNA, 22 nt, Human
uagaaaugcccagauucugcua

SEQ ID NO: 1110577 - RNA, 22 nt, Human
auaaggcagaaaugauucuagu

SEQ ID NO: 1110578 - RNA, 22 nt, Human
ugauuuccuagcugacaugaaa

SEQ ID NO: 1110579 - RNA, 18 nt, Human
cagagcagagguggagcg

SEQ ID NO: 1110580 - RNA, 22 nt, Human
uggggugccgacagggagggca

SEQ ID NO: 1110581 - RNA, 22 nt, Human
agaggugacauaggagaggcuc

SEQ ID NO: 1110582 - RNA, 22 nt, Human
ucccagccuuccagucugguuu

SEQ ID NO: 1110583 - RNA, 22 nt, Human
uagaaagugaagguuaauuaau

SEQ ID NO: 1110584 - RNA, 22 nt, Human
aggcuuccucgugccuuagaua

SEQ ID NO: 1110585 - RNA, 20 nt, Human
cagagccaagagcagcaucu

SEQ ID NO: 1110586 - RNA, 22 nt, Human
gccaggggacgcggagcgacga

SEQ ID NO: 1110587 - RNA, 22 nt, Human
ugcucuguauucuauggcaguu

SEQ ID NO: 1110588 - RNA, 22 nt, Human
auggggugagacuaggauuaaa

SEQ ID NO: 1110589 - RNA, 20 nt, Human
gggugagauguaggagaggg

SEQ ID NO: 1110590 - RNA, 22 nt, Human
cagccaucaguaaagacagcuu

SEQ ID NO: 1110591 - RNA, 22 nt, Human
gagugcagaugaacagaagauu

SEQ ID NO: 1110592 - RNA, 22 nt, Human
uccagcagcccgaaggcccauc

SEQ ID NO: 1110593 - RNA, 22 nt, Human
gcuggcagaagagcugguucaa

SEQ ID NO: 1110594 - RNA, 22 nt, Human
gcugucugcaagccaggaaaug

SEQ ID NO: 1110595 - RNA, 22 nt, Human
cacagcuuccauuagaaugaga

SEQ ID NO: 1110596 - RNA, 22 nt, Human
ccuuucucuuggauaccgauug

SEQ ID NO: 1110597 - RNA, 23 nt, Human
ugcuguccaacagacuggccaug

SEQ ID NO: 1110598 - RNA, 21 nt, Human
agaugaggauacugaggccua

SEQ ID NO: 1110599 - RNA, 22 nt, Human
uugccaggagcucaucugaggg

SEQ ID NO: 1110600 - RNA, 22 nt, Human
guggcagcggcccaggccgucu

SEQ ID NO: 1110601 - RNA, 22 nt, Human
gcucugcugucuucuugcaggc

SEQ ID NO: 1110602 - RNA, 22 nt, Human
acacaguauuacaauaggugcu

SEQ ID NO: 1110603 - RNA, 22 nt, Human
ucaggcugcccguucagggcuc

SEQ ID NO: 1110604 - RNA, 22 nt, Human
uauuugaaaguguacaaaaacu

SEQ ID NO: 1110605 - RNA, 22 nt, Human
ucuucuuccuccacagggccca

SEQ ID NO: 1110606 - RNA, 22 nt, Human
aggcaucugaguuugcaagcuu

SEQ ID NO: 1110607 - RNA, 20 nt, Human
accucugcaucaauccuuug

SEQ ID NO: 1110608 - RNA, 22 nt, Human
uaaaugcagcaguuucuguucu

SEQ ID NO: 1110609 - RNA, 22 nt, Human
gcuuccuaaaugcacagggcag

SEQ ID NO: 1110610 - RNA, 23 nt, Human
augcucugggcugugggaccugc

SEQ ID NO: 1110611 - RNA, 22 nt, Human
uaaugcaguacugauauaaaca

SEQ ID NO: 1110612 - RNA, 22 nt, Human
ccucuugccaaucagcuacaga

SEQ ID NO: 1110613 - RNA, 22 nt, Human
ugguggccaauucacagggcuc

SEQ ID NO: 1110614 - RNA, 22 nt, Human
aguuucauauuaccaugucacc

SEQ ID NO: 1110615 - RNA, 22 nt, Human
ccugcagguugcagaggcggaa

SEQ ID NO: 1110616 - RNA, 22 nt, Human
gagucaguaauggauaugucau

SEQ ID NO: 1110617 - RNA, 22 nt, Human
cuggcuuccucaggagcagugg

SEQ ID NO: 1110618 - RNA, 22 nt, Human
ugucaccaguuccaggaaauaa

SEQ ID NO: 1110619 - RNA, 22 nt, Human
agguacaguagacagacaguua

SEQ ID NO: 1110620 - RNA, 22 nt, Human
gaggccuggaauuccagccugg

SEQ ID NO: 1110621 - RNA, 19 nt, Human
cuggcucuuggguggagga

SEQ ID NO: 1110622 - RNA, 22 nt, Human
cugggcucagcccaugcugucc

SEQ ID NO: 1110623 - RNA, 22 nt, Human
ugggggugacuaucucgggaau

SEQ ID NO: 1110624 - RNA, 22 nt, Human
gccaagagaaugugagagaaau

SEQ ID NO: 1110625 - RNA, 22 nt, Human
gagaaggggugauguggguaau

SEQ ID NO: 1110626 - RNA, 22 nt, Human
ucaacagaagugauagcuauua

SEQ ID NO: 1110627 - RNA, 22 nt, Human
agaagaaacugucggggauauu

SEQ ID NO: 1110628 - RNA, 19 nt, Human
gccaggagggcucuggcug

SEQ ID NO: 1110629 - RNA, 22 nt, Human
ugggccugggucuuugcugcca

SEQ ID NO: 1110630 - RNA, 21 nt, Human
uggcugccuacaugcugcagg

SEQ ID NO: 1110631 - RNA, 22 nt, Human
agcacagguacggagaugcuac

SEQ ID NO: 1110632 - RNA, 22 nt, Human
gcucccagacugaccagaggug

SEQ ID NO: 1110633 - RNA, 22 nt, Human
cuggcucacaggugagaugcau

SEQ ID NO: 1110634 - RNA, 22 nt, Human
gcuguccaugucuggccucagu

SEQ ID NO: 1110635 - RNA, 22 nt, Human
ccaggcuggauuuugcaguuca

SEQ ID NO: 1110636 - RNA, 22 nt, Human
ccuggcugugcauugccggccc

SEQ ID NO: 1110637 - RNA, 22 nt, Human
cccaccaguacagaugguagau

SEQ ID NO: 1110638 - RNA, 22 nt, Human
ugaguagcggcuauguguaacu

SEQ ID NO: 1110639 - RNA, 22 nt, Human
agccucugcuuaugcaaaggua

SEQ ID NO: 1110640 - RNA, 22 nt, Human
agccuucaguaaauccacugug

SEQ ID NO: 1110641 - RNA, 20 nt, Human
gcccuggagccuuguccugg

SEQ ID NO: 1110642 - RNA, 22 nt, Human
aaaaacugcaauuacuuuuguc

SEQ ID NO: 1110643 - RNA, 22 nt, Human
uuguuuuuaugaacauccagga

SEQ ID NO: 1110644 - RNA, 20 nt, Human
ugcugcaguuucaugggacu

SEQ ID NO: 1110645 - RNA, 22 nt, Human
aucagcaagauugugucuugua

SEQ ID NO: 1110646 - RNA, 22 nt, Human
caagacaagaucuaagcaugcu

SEQ ID NO: 1110647 - RNA, 22 nt, Human
gagagaagggggauaugagccu

SEQ ID NO: 1110648 - RNA, 23 nt, Human
aagcugccuucgcaguuggucug

SEQ ID NO: 1110649 - RNA, 22 nt, Human
ugcugucuuccaggauggugaa

SEQ ID NO: 1110650 - RNA, 22 nt, Human
acaggcucucagccaguuggca

SEQ ID NO: 1110651 - RNA, 21 nt, Human
uaaagaagaugaaugugauca

SEQ ID NO: 1110652 - RNA, 21 nt, Human
agcugcuccagggagcucagg

SEQ ID NO: 1110653 - RNA, 22 nt, Human
uugcauugggagugaggagacc

SEQ ID NO: 1110654 - RNA, 22 nt, Human
ggcagcugugaagugccucaca

SEQ ID NO: 1110655 - RNA, 23 nt, Human
aggagccaggugcagcccuugug

SEQ ID NO: 1110656 - RNA, 19 nt, Human
agucccaggcccgaaagag

SEQ ID NO: 1110657 - RNA, 22 nt, Human
cauggcagaaaccugagcugcu

SEQ ID NO: 1110658 - RNA, 22 nt, Human
cucagggcuugaguguccagga

SEQ ID NO: 1110659 - RNA, 22 nt, Human
cagcuggcagcccuggcccugc

SEQ ID NO: 1110660 - RNA, 22 nt, Human
cuucuugcaauuuucaucuuau

SEQ ID NO: 1110661 - RNA, 22 nt, Human
ugagagugaaaugucacauguc

SEQ ID NO: 1110662 - RNA, 22 nt, Human
cuggcagcauggagccugugcu

SEQ ID NO: 1110663 - RNA, 22 nt, Human
aggcuuccgaguagcugggacu

SEQ ID NO: 1110664 - RNA, 22 nt, Human
gcugggcuucucaaugcugccu

SEQ ID NO: 1110665 - RNA, 22 nt, Human
uugcauugaaaauauauuuuaa

SEQ ID NO: 1110666 - RNA, 22 nt, Human
uuuccucugggcccugccaccc

SEQ ID NO: 1110667 - RNA, 22 nt, Human
agcagagucugugugcacuuua

SEQ ID NO: 1110668 - RNA, 22 nt, Human
cccagccugucuuucccaauga

SEQ ID NO: 1110669 - RNA, 22 nt, Human
cacagcagaaaguguaggagga

SEQ ID NO: 1110670 - RNA, 22 nt, Human
agcuggccuguuagagcugagu

SEQ ID NO: 1110671 - RNA, 22 nt, Human
aggagcagcccacuccuguccu

SEQ ID NO: 1110672 - RNA, 22 nt, Human
ggcugcaggcagaggcugucug

SEQ ID NO: 1110673 - RNA, 22 nt, Human
ucggagcuguagaugaaacccu

SEQ ID NO: 1110674 - RNA, 22 nt, Human
ugaaagguuauuuaggucugcu

SEQ ID NO: 1110675 - RNA, 22 nt, Human
uuccugaugcacacagucauuu

SEQ ID NO: 1110676 - RNA, 22 nt, Human
uuggccuucccuaccugggcca

SEQ ID NO: 1110677 - RNA, 22 nt, Human
aagagcuggauugugcugcaga

SEQ ID NO: 1110678 - RNA, 22 nt, Human
cugagggcccugaagcuuggca

SEQ ID NO: 1110679 - RNA, 22 nt, Human
cucucugggcccaguuggcacc

SEQ ID NO: 1110680 - RNA, 22 nt, Human
uucaaugagcccggggccauag

SEQ ID NO: 1110681 - RNA, 22 nt, Human
ucagcaggcgguuccuuguggg

SEQ ID NO: 1110682 - RNA, 18 nt, Human
uggcagggaggaaauaua

SEQ ID NO: 1110683 - RNA, 21 nt, Human
gggugcuguggucaugcagga

SEQ ID NO: 1110684 - RNA, 22 nt, Human
acuggcucagaguuccuagaga

SEQ ID NO: 1110685 - RNA, 22 nt, Human
ccggggacuuaaagugaaggaa

SEQ ID NO: 1110686 - RNA, 22 nt, Human
cugccucuauucacugaggcag

SEQ ID NO: 1110687 - RNA, 22 nt, Human
cucuuuccaggguaccccaggu

SEQ ID NO: 1110688 - RNA, 22 nt, Human
agcuucuugaccaagccuguaa

SEQ ID NO: 1110689 - RNA, 22 nt, Human
aaaaacuguaauuacuuuugca

SEQ ID NO: 1110690 - RNA, 22 nt, Human
aggcugaggcagguggaucacu

SEQ ID NO: 1110691 - RNA, 22 nt, Human
gcuggagcugcagccugggccu

SEQ ID NO: 1110692 - RNA, 22 nt, Human
ugagaggccccagcucuuggcc

SEQ ID NO: 1110693 - RNA, 22 nt, Human
ugcagggccuucuagaccaugg

SEQ ID NO: 1110694 - RNA, 22 nt, Human
gcauuucugugcauacacauga

SEQ ID NO: 1110695 - RNA, 22 nt, Human
aucugacaaccuauugacuuga

SEQ ID NO: 1110696 - RNA, 22 nt, Human
cuguauuuucaugccuacguac

SEQ ID NO: 1110697 - RNA, 22 nt, Human
gcugagucuugagcacugagca

SEQ ID NO: 1110698 - RNA, 22 nt, Human
acagggucauuuuaugaucugu

SEQ ID NO: 1110699 - RNA, 22 nt, Human
uguagcucuccagccagcaagg

SEQ ID NO: 1110700 - RNA, 22 nt, Human
ccucuggguaucuguggaagua

SEQ ID NO: 1110701 - RNA, 22 nt, Human
ugggaggagcccucugggaagg

SEQ ID NO: 1110702 - RNA, 22 nt, Human
ugggagcucagaaagggagguc

SEQ ID NO: 1110703 - RNA, 22 nt, Human
aaauuuaagaagugugugcgug

SEQ ID NO: 1110704 - RNA, 22 nt, Human
agcucucaagauaagaaagaac

SEQ ID NO: 1110705 - RNA, 22 nt, Human
uuuaucuuuaggacuuugcaga

SEQ ID NO: 1110706 - RNA, 22 nt, Human
ucucagagaaaugugucaccau

SEQ ID NO: 1110707 - RNA, 22 nt, Human
agccucuggcccuagacugcuu

SEQ ID NO: 1110708 - RNA, 22 nt, Human
aggugaaguugaggaggcagaa

SEQ ID NO: 1110709 - RNA, 22 nt, Human
aggacaggauugagcugaacug

SEQ ID NO: 1110710 - RNA, 20 nt, Human
cugagcgucuaagaggugag

SEQ ID NO: 1110711 - RNA, 22 nt, Human
cagagcagcagagcuuccaugg

SEQ ID NO: 1110712 - RNA, 22 nt, Human
uucaagauggcugcaaauacuu

SEQ ID NO: 1110713 - RNA, 22 nt, Human
cuggagccugcaguuuucacuu

SEQ ID NO: 1110714 - RNA, 22 nt, Human
gucccagaggcuuuggccacag

SEQ ID NO: 1110715 - RNA, 22 nt, Human
uccagugguacauggagacacu

SEQ ID NO: 1110716 - RNA, 22 nt, Human
caggcagcauuuacucugauga

SEQ ID NO: 1110717 - RNA, 22 nt, Human
uagauuucaggcuggcuugcgg

SEQ ID NO: 1110718 - RNA, 22 nt, Human
agugauggugagugagaagcuc

SEQ ID NO: 1110719 - RNA, 22 nt, Human
cuccugggcucaagugauccuc

SEQ ID NO: 1110720 - RNA, 22 nt, Human
agagugggugaucucuguuguc

SEQ ID NO: 1110721 - RNA, 22 nt, Human
gggcccagcgugguuccaucug

SEQ ID NO: 1110722 - RNA, 22 nt, Human
ggagccaguuuagaccucaguu

SEQ ID NO: 1110723 - RNA, 18 nt, Human
ugagagugugugcucuug

SEQ ID NO: 1110724 - RNA, 22 nt, Human
agcuccugcacccagccuugag

SEQ ID NO: 1110725 - RNA, 22 nt, Human
ugggccuggguuccuccugggc

SEQ ID NO: 1110726 - RNA, 22 nt, Human
ggagcuggucagccuugagcau

SEQ ID NO: 1110727 - RNA, 22 nt, Human
uuugcauuguuucaaaagugaa

SEQ ID NO: 1110728 - RNA, 22 nt, Human
augugucaauuuucaaaugcuu

SEQ ID NO: 1110729 - RNA, 23 nt, Human
ucuuuacauacugaugaguucuc

SEQ ID NO: 1110730 - RNA, 22 nt, Human
ucucagagauuuuguuucccuu

SEQ ID NO: 1110731 - RNA, 22 nt, Human
gccucugcaggugcgguuaucc

SEQ ID NO: 1110732 - RNA, 22 nt, Human
agagauucauguuuacuguagg

SEQ ID NO: 1110733 - RNA, 22 nt, Human
cagacagaccugcaagggcaca

SEQ ID NO: 1110734 - RNA, 22 nt, Human
gagucccaugaugauagccaca

SEQ ID NO: 1110735 - RNA, 22 nt, Human
uagaaacauauaggauggcagg

SEQ ID NO: 1110736 - RNA, 18 nt, Human
gggaagaggaucuggccc

SEQ ID NO: 1110737 - RNA, 22 nt, Human
ccagagcuccagggcuacagaa

SEQ ID NO: 1110738 - RNA, 22 nt, Human
gccagcagguugucaaggagcu

SEQ ID NO: 1110739 - RNA, 22 nt, Human
ccuccagguguuacauaugacu

SEQ ID NO: 1110740 - RNA, 21 nt, Human
agcagagugcuuugacuuugu

SEQ ID NO: 1110741 - RNA, 22 nt, Human
uggccugaggcucggcaugggu

SEQ ID NO: 1110742 - RNA, 22 nt, Human
ucuuagaaaugaaguucuuucu

SEQ ID NO: 1110743 - RNA, 22 nt, Human
ccuggcugcuuucacuauggag

SEQ ID NO: 1110744 - RNA, 19 nt, Human
cucuggagcagacacugga

SEQ ID NO: 1110745 - RNA, 21 nt, Human
ugagagccuccaaccggcuac

SEQ ID NO: 1110746 - RNA, 23 nt, Human
aguuuguaaagaaauauuugcac

SEQ ID NO: 1110747 - RNA, 22 nt, Human
aaaaaugcuuggacuuaauaaa

SEQ ID NO: 1110748 - RNA, 21 nt, Human
auccuugaucagaagagugcu

SEQ ID NO: 1110749 - RNA, 22 nt, Human
aggagucacucagggcuucauc

SEQ ID NO: 1110750 - RNA, 22 nt, Human
cucagagcccaggguacacccg

SEQ ID NO: 1110751 - RNA, 22 nt, Human
cacugcuuuuuuggcuauguac

SEQ ID NO: 1110752 - RNA, 22 nt, Human
cgcagaagagguugucuagucc

SEQ ID NO: 1110753 - RNA, 18 nt, Human
uccauuguucuacuguga

SEQ ID NO: 1110754 - RNA, 22 nt, Human
gcacagggcccugugcguaggu

SEQ ID NO: 1110755 - RNA, 22 nt, Human
gugucauuaaccaccaugcaaa

SEQ ID NO: 1110756 - RNA, 22 nt, Human
gaggccagcgcgcagcacuuuu

SEQ ID NO: 1110757 - RNA, 22 nt, Human
agucucugagguucagaugccu

SEQ ID NO: 1110758 - RNA, 22 nt, Human
gaggucagucagaccaggguuu

SEQ ID NO: 1110759 - RNA, 22 nt, Human
uggaggcaccacuggcugcccg

SEQ ID NO: 1110760 - RNA, 22 nt, Human
ucaagagacaggacguguuuca

SEQ ID NO: 1110761 - RNA, 22 nt, Human
agaaacuucagcuauucuuuug

SEQ ID NO: 1110762 - RNA, 22 nt, Human
caggagacaaguuagcagcuga

SEQ ID NO: 1110763 - RNA, 22 nt, Human
cugccacuuucacccagugcuc

SEQ ID NO: 1110764 - RNA, 22 nt, Human
uggccacagccucugccaguuc

SEQ ID NO: 1110765 - RNA, 22 nt, Human
ccugugugcugaugacgacaga

SEQ ID NO: 1110766 - RNA, 22 nt, Human
uccucagggcggccuccgucuu

SEQ ID NO: 1110767 - RNA, 22 nt, Human
aagguacaccaaaguucaaguu

SEQ ID NO: 1110768 - RNA, 22 nt, Human
ucuggcaggcaaucggcucugg

SEQ ID NO: 1110769 - RNA, 18 nt, Human
gggcauggaugcagcauc

SEQ ID NO: 1110770 - RNA, 17 nt, Human
gccaaaggguuccaauc

SEQ ID NO: 1110771 - RNA, 22 nt, Human
aaguucuacuguggguaaaaug

SEQ ID NO: 1110772 - RNA, 22 nt, Human
uggcugggggugcuauagcugc

SEQ ID NO: 1110773 - RNA, 22 nt, Human
cuggcagcgugagcagcaucca

SEQ ID NO: 1110774 - RNA, 22 nt, Human
ccuggccucagacagagggugg

SEQ ID NO: 1110775 - RNA, 20 nt, Human
uggagcugugguaaggagca

SEQ ID NO: 1110776 - RNA, 22 nt, Human
uguauuuucuucuggaagcuua

SEQ ID NO: 1110777 - RNA, 22 nt, Human
gcacugaaugccaaaguguagg

SEQ ID NO: 1110778 - RNA, 22 nt, Human
uuuucauuguaaaucaggaaac

SEQ ID NO: 1110779 - RNA, 19 nt, Human
gcagcugugggaagagcca

SEQ ID NO: 1110780 - RNA, 22 nt, Human
aggugcagcugacaccaugugg

SEQ ID NO: 1110781 - RNA, 22 nt, Human
uuggcuuccaggaucucagcag

SEQ ID NO: 1110782 - RNA, 22 nt, Human
ccccuuccgucucuugaguguc

SEQ ID NO: 1110783 - RNA, 22 nt, Human
aggagcugagggagcgcccuug

SEQ ID NO: 1110784 - RNA, 22 nt, Human
gcuguccagagcaugggagcaa

SEQ ID NO: 1110785 - RNA, 22 nt, Human
aaaaaugcugugguagcugugu

SEQ ID NO: 1110786 - RNA, 22 nt, Human
uggcaggguuggccaccuuacc

SEQ ID NO: 1110787 - RNA, 22 nt, Human
ccuggccucuccgaguaaccug

SEQ ID NO: 1110788 - RNA, 22 nt, Human
guggcccucugauagggucagg

SEQ ID NO: 1110789 - RNA, 22 nt, Human
cccccuggcaggcuggccucuc

SEQ ID NO: 1110790 - RNA, 22 nt, Human
auaaggcagaaauagggaaagu

SEQ ID NO: 1110791 - RNA, 22 nt, Human
ccucccuggccagagcagcagc

SEQ ID NO: 1110792 - RNA, 22 nt, Human
aagcagaaguugaucuaccaua

SEQ ID NO: 1110793 - RNA, 22 nt, Human
acccugccgugggcugcuugug

SEQ ID NO: 1110794 - RNA, 22 nt, Human
gggacagacccaugggccaggu

SEQ ID NO: 1110795 - RNA, 22 nt, Human
ugcagcugauuaaagggcagac

SEQ ID NO: 1110796 - RNA, 17 nt, Human
ccucacagggaccagac

SEQ ID NO: 1110797 - RNA, 22 nt, Human
ugaaaaggaguccuuguuuuca

SEQ ID NO: 1110798 - RNA, 22 nt, Human
cagcugccacaccucuuucucu

SEQ ID NO: 1110799 - RNA, 22 nt, Human
agccuggagaagauguguauug

SEQ ID NO: 1110800 - RNA, 22 nt, Human
gcagccccaggagacgcccagg

SEQ ID NO: 1110801 - RNA, 18 nt, Human
ccagcaugccagaggcug

SEQ ID NO: 1110802 - RNA, 22 nt, Human
gccuggagacaaggacaaaggg

SEQ ID NO: 1110803 - RNA, 22 nt, Human
augaagucugcacaugcaugug

SEQ ID NO: 1110804 - RNA, 22 nt, Human
ugcagccaauucauucauucuu

SEQ ID NO: 1110805 - RNA, 22 nt, Human
caggucagaggcgcagccccca

SEQ ID NO: 1110806 - RNA, 21 nt, Human
gcagacugcccugcugucccc

SEQ ID NO: 1110807 - RNA, 22 nt, Human
ggcagcuccaaaaggaaacacu

SEQ ID NO: 1110808 - RNA, 22 nt, Human
ggccuggaaugcuuuccuacca

SEQ ID NO: 1110809 - RNA, 22 nt, Human
uucagagccacuucaagucuaa

SEQ ID NO: 1110810 - RNA, 22 nt, Human
cagagccaggucuaggagucuc

SEQ ID NO: 1110811 - RNA, 22 nt, Human
uggcucagcaagacauugaccu

SEQ ID NO: 1110812 - RNA, 22 nt, Human
uuugcagcaaggagagagcauu

SEQ ID NO: 1110813 - RNA, 22 nt, Human
gccagcagggcccaaaugcugg

SEQ ID NO: 1110814 - RNA, 22 nt, Human
cacaggcucuucucacuugauu

SEQ ID NO: 1110815 - RNA, 22 nt, Human
gcugccugauguccagcaggac

SEQ ID NO: 1110816 - RNA, 22 nt, Human
ccagggccaagagaccucgagg

SEQ ID NO: 1110817 - RNA, 22 nt, Human
acugccuuauaugcugugugug

SEQ ID NO: 1110818 - RNA, 22 nt, Human
cuccucacuuuccagacugggc

SEQ ID NO: 1110819 - RNA, 22 nt, Human
aaugcacauguuguaauaaaua

SEQ ID NO: 1110820 - RNA, 22 nt, Human
aagucacagcuaaauagcuaag

SEQ ID NO: 1110821 - RNA, 22 nt, Human
cuccugggaauuuaguugugag

SEQ ID NO: 1110822 - RNA, 23 nt, Human
ggguccagagacaggcaugggug

SEQ ID NO: 1110823 - RNA, 22 nt, Human
cccagcagaaucugaugagggc

SEQ ID NO: 1110824 - RNA, 23 nt, Human
cugaggccugcugcguucagguu

SEQ ID NO: 1110825 - RNA, 22 nt, Human
cagggagcuggcuggcgugagu

SEQ ID NO: 1110826 - RNA, 21 nt, Human
agcagccauuucacagagacu

SEQ ID NO: 1110827 - RNA, 19 nt, Human
uggcucugucgaaggcaca

SEQ ID NO: 1110828 - RNA, 22 nt, Human
ugggcuggagcuuguugcuucc

SEQ ID NO: 1110829 - RNA, 22 nt, Human
cacuggcaugugaggcgguggc

SEQ ID NO: 1110830 - RNA, 22 nt, Human
gcucaggacccaggugugaccu

SEQ ID NO: 1110831 - RNA, 22 nt, Human
gggcuggcaucgguugcugaga

SEQ ID NO: 1110832 - RNA, 22 nt, Human
ccaaaguccauaguuuacauua

SEQ ID NO: 1110833 - RNA, 22 nt, Human
ugaagccaucaggaagccagca

SEQ ID NO: 1110834 - RNA, 22 nt, Human
ggccucaguuucuccauggguu

SEQ ID NO: 1110835 - RNA, 22 nt, Human
gggcucugcgcucagcuccagc

SEQ ID NO: 1110836 - RNA, 22 nt, Human
uggcagagucucuccuuuccag

SEQ ID NO: 1110837 - RNA, 22 nt, Human
ccagguggugaaagugggcccu

SEQ ID NO: 1110838 - RNA, 22 nt, Human
ggcagcuccucucagcaaaaga

SEQ ID NO: 1110839 - RNA, 22 nt, Human
uggcugggugcuauccaguacu

SEQ ID NO: 1110840 - RNA, 22 nt, Human
agaggcugagaaacccucuucu

SEQ ID NO: 1110841 - RNA, 22 nt, Human
uggcucagagagggagugugga

SEQ ID NO: 1110842 - RNA, 22 nt, Human
aggggccucgcaggaccgcucc

SEQ ID NO: 1110843 - RNA, 18 nt, Human
ugcucuguuuaaugauuu

SEQ ID NO: 1110844 - RNA, 22 nt, Human
caggaaugacugcagauggggc

SEQ ID NO: 1110845 - RNA, 22 nt, Human
aagauuuacuagcauaauagcu

SEQ ID NO: 1110846 - RNA, 22 nt, Human
gaacaauagugguaacaaagcc

SEQ ID NO: 1110847 - RNA, 22 nt, Human
cagcaagauuuuuaaagcaagg

SEQ ID NO: 1110848 - RNA, 22 nt, Human
aggccucuucagggagcaugga

SEQ ID NO: 1110849 - RNA, 22 nt, Human
ugaaaucuuagccauucugccu

SEQ ID NO: 1110850 - RNA, 22 nt, Human
cugcccugucugcagccuggcu

SEQ ID NO: 1110851 - RNA, 22 nt, Human
ggcuucuguccucuggaucugu

SEQ ID NO: 1110852 - RNA, 22 nt, Human
agccuggccacucagggccuga

SEQ ID NO: 1110853 - RNA, 22 nt, Human
caggugcugcguggcggagcug

SEQ ID NO: 1110854 - RNA, 22 nt, Human
ccagggucucugcugccugaga

SEQ ID NO: 1110855 - RNA, 22 nt, Human
agcucccugagaugccacagca

SEQ ID NO: 1110856 - RNA, 22 nt, Human
gcauaauauacaugcuugaucc

SEQ ID NO: 1110857 - RNA, 22 nt, Human
uccugccucaggcucuggagua

SEQ ID NO: 1110858 - RNA, 22 nt, Human
auucuucauguugaagcuguca

SEQ ID NO: 1110859 - RNA, 22 nt, Human
cauucacucagcgaugccagua

SEQ ID NO: 1110860 - RNA, 22 nt, Human
ucccagaggucucugcugguuc

SEQ ID NO: 1110861 - RNA, 19 nt, Human
ugaagcaauaccauuuuug

SEQ ID NO: 1110862 - RNA, 18 nt, Human
ccugcagcccaggaggcc

SEQ ID NO: 1110863 - RNA, 22 nt, Human
uauaaaguuucgaaagauguau

SEQ ID NO: 1110864 - RNA, 22 nt, Human
ccacacugaaccucagugucuu

SEQ ID NO: 1110865 - RNA, 22 nt, Human
agaaaagggcaggagggauaca

SEQ ID NO: 1110866 - RNA, 20 nt, Human
uugcauuggaugugcaggug

SEQ ID NO: 1110867 - RNA, 22 nt, Human
uggcuaggcuccaagagcugga

SEQ ID NO: 1110868 - RNA, 21 nt, Human
uggcucaguugcugggcacag

SEQ ID NO: 1110869 - RNA, 22 nt, Human
uuugcauuacuugacuuuaguu

SEQ ID NO: 1110870 - RNA, 21 nt, Human
ccagccucagaucagggagcu

SEQ ID NO: 1110871 - RNA, 22 nt, Human
uccugggcugugugccacucug

SEQ ID NO: 1110872 - RNA, 22 nt, Human
agcugucugucuccugaggaga

SEQ ID NO: 1110873 - RNA, 22 nt, Human
uguguacuugaaagggcagguc

SEQ ID NO: 1110874 - RNA, 18 nt, Human
uggagccauugccaccau

SEQ ID NO: 1110875 - RNA, 22 nt, Human
ccagccuggagggcaguggugg

SEQ ID NO: 1110876 - RNA, 22 nt, Human
gcagugcuaaguagcuggccca

SEQ ID NO: 1110877 - RNA, 22 nt, Human
caggaggcccaaagggcgcaga

SEQ ID NO: 1110878 - RNA, 22 nt, Human
acuuugcaauacuuaauacaaa

SEQ ID NO: 1110879 - RNA, 22 nt, Human
gugcugcucacaucuggaggua

SEQ ID NO: 1110880 - RNA, 22 nt, Human
ggguggaguagaaagaugaauu

SEQ ID NO: 1110881 - RNA, 22 nt, Human
gccugccugcugucaucugccu

SEQ ID NO: 1110882 - RNA, 22 nt, Human
gcucccugacucaguuccugag

SEQ ID NO: 1110883 - RNA, 22 nt, Human
uuaggaaauuaugguuucagau

SEQ ID NO: 1110884 - RNA, 22 nt, Human
ucuucagagacucugagccccu

SEQ ID NO: 1110885 - RNA, 22 nt, Human
acagcagcgucaacuuaaaauu

SEQ ID NO: 1110886 - RNA, 20 nt, Human
aucagcaacugccacucagu

SEQ ID NO: 1110887 - RNA, 20 nt, Human
aggaacuggaagggaggaaa

SEQ ID NO: 1110888 - RNA, 22 nt, Human
uggcuggggccacaguuuuccu

SEQ ID NO: 1110889 - RNA, 22 nt, Human
ggccucuguucugcauuccucc

SEQ ID NO: 1110890 - RNA, 22 nt, Human
ccagcuccccucagcagguaau

SEQ ID NO: 1110891 - RNA, 22 nt, Human
ugauuuccaaaaggcuucuaag

SEQ ID NO: 1110892 - RNA, 20 nt, Human
aaggcacuaugucugcuagc

SEQ ID NO: 1110893 - RNA, 22 nt, Human
ucccagagacagagccuccucc

SEQ ID NO: 1110894 - RNA, 22 nt, Human
ucagcagucacauguuguccca

SEQ ID NO: 1110895 - RNA, 22 nt, Human
agugugaccuuauuuggaaaca

SEQ ID NO: 1110896 - RNA, 22 nt, Human
uggcagggaauacagauguuua

SEQ ID NO: 1110897 - RNA, 22 nt, Human
ggugauuuucgaguuucauguu

SEQ ID NO: 1110898 - RNA, 22 nt, Human
gggacuggaguagaggccggug

SEQ ID NO: 1110899 - RNA, 20 nt, Human
acugccuugguucaguaggu

SEQ ID NO: 1110900 - RNA, 22 nt, Human
ucucagaguuuuuuuccaggac

SEQ ID NO: 1110901 - RNA, 22 nt, Human
gugcccaggcccaaggcaccac

SEQ ID NO: 1110902 - RNA, 22 nt, Human
ugugugacccccagugaagccu

SEQ ID NO: 1110903 - RNA, 22 nt, Human
augagcugugggauuccagagg

SEQ ID NO: 1110904 - RNA, 23 nt, Human
gggaccagcuagggcugugaccu

SEQ ID NO: 1110905 - RNA, 22 nt, Human
aggagcugcagauucugccuug

SEQ ID NO: 1110906 - RNA, 22 nt, Human
accuggagucauuugaggagua

SEQ ID NO: 1110907 - RNA, 22 nt, Human
gcagagccaggagagacccuug

SEQ ID NO: 1110908 - RNA, 22 nt, Human
ggccucucucccuggcuugcag

SEQ ID NO: 1110909 - RNA, 22 nt, Human
agccaucauuucugucacuggc

SEQ ID NO: 1110910 - RNA, 22 nt, Human
acauuugagaugccuuuuaggu

SEQ ID NO: 1110911 - RNA, 22 nt, Human
caaggagaguaauugaaugaga

SEQ ID NO: 1110912 - RNA, 22 nt, Human
agccacagcauguguguaugua

SEQ ID NO: 1110913 - RNA, 22 nt, Human
accucuggccuucaggcaucau

SEQ ID NO: 1110914 - RNA, 23 nt, Human
agcacagacuagaaaggucuuuc

SEQ ID NO: 1110915 - RNA, 22 nt, Human
ucaggggacuuaggagagaagu

SEQ ID NO: 1110916 - RNA, 17 nt, Human
aagacagaagccaugag

SEQ ID NO: 1110917 - RNA, 22 nt, Human
ggucauugaaaucagaaggguu

SEQ ID NO: 1110918 - RNA, 22 nt, Human
cagcagcuggugagacacagcc

SEQ ID NO: 1110919 - RNA, 22 nt, Human
cuuccugcaggacagccaucug

SEQ ID NO: 1110920 - RNA, 22 nt, Human
uccaggcugggcugaagggugc

SEQ ID NO: 1110921 - RNA, 22 nt, Human
ccagcugcugugaggaccacag

SEQ ID NO: 1110922 - RNA, 22 nt, Human
ccagggcaauuauuuggagggu

SEQ ID NO: 1110923 - RNA, 22 nt, Human
cagaggcagaggucaucucugg

SEQ ID NO: 1110924 - RNA, 22 nt, Human
ggcugcaguuugucuuuugcuu

SEQ ID NO: 1110925 - RNA, 22 nt, Human
gcagccacagaggagggaugca

SEQ ID NO: 1110926 - RNA, 22 nt, Human
agacagaacagaauaauuguug

SEQ ID NO: 1110927 - RNA, 22 nt, Human
agaaaugcucuuccugaccaga

SEQ ID NO: 1110928 - RNA, 22 nt, Human
uggagcccagacacuggcauug

SEQ ID NO: 1110929 - RNA, 22 nt, Human
gcugcccucccagggcaagcuu

SEQ ID NO: 1110930 - RNA, 19 nt, Human
aucagcaagguaggaugug

SEQ ID NO: 1110931 - RNA, 22 nt, Human
ccugggaggcggagguugcagu

SEQ ID NO: 1110932 - RNA, 22 nt, Human
gaggcccuccagcugucagcug

SEQ ID NO: 1110933 - RNA, 21 nt, Human
uuuauguacuucauagaguag

SEQ ID NO: 1110934 - RNA, 22 nt, Human
agccacagagguugaugugguu

SEQ ID NO: 1110935 - RNA, 22 nt, Human
cuggucugagggcucuugaggc

SEQ ID NO: 1110936 - RNA, 22 nt, Human
agccuggaggaggaguugagca

SEQ ID NO: 1110937 - RNA, 20 nt, Human
ucucccaggcucagggaaga

SEQ ID NO: 1110938 - RNA, 22 nt, Human
cagccagaaccuaggaugagcu

SEQ ID NO: 1110939 - RNA, 22 nt, Human
ugccaaggguaugggcaagaua

SEQ ID NO: 1110940 - RNA, 22 nt, Human
aaauacagaguugcuuaaaagc

SEQ ID NO: 1110941 - RNA, 22 nt, Human
caggagccccaggcugacaaua

SEQ ID NO: 1110942 - RNA, 22 nt, Human
aucaguuuggugcuuucaguga

SEQ ID NO: 1110943 - RNA, 22 nt, Human
gagcagugaagacagaaguaca

SEQ ID NO: 1110944 - RNA, 22 nt, Human
acaaaugcagcauaaagugaac

SEQ ID NO: 1110945 - RNA, 17 nt, Human
gugcagggaugaaggau

SEQ ID NO: 1110946 - RNA, 22 nt, Human
gcugugcuggaaggggaccugc

SEQ ID NO: 1110947 - RNA, 23 nt, Human
cccuggagcuagucugagcagag

SEQ ID NO: 1110948 - RNA, 20 nt, Human
uacuugaauguugcagcagu

SEQ ID NO: 1110949 - RNA, 22 nt, Human
ccugccugucaucgccugcgcc

SEQ ID NO: 1110950 - RNA, 22 nt, Human
aacagcaugcuggguaacauug

SEQ ID NO: 1110951 - RNA, 22 nt, Human
cagggagggacaauugucaccu

SEQ ID NO: 1110952 - RNA, 22 nt, Human
ccagcuggucugugcucauguu

SEQ ID NO: 1110953 - RNA, 22 nt, Human
ccagagucuuuauauuccugaa

SEQ ID NO: 1110954 - RNA, 22 nt, Human
ucucuggaguauaaccagggau

SEQ ID NO: 1110955 - RNA, 22 nt, Human
cucaggguaaugaaagacgaau

SEQ ID NO: 1110956 - RNA, 22 nt, Human
cucugaagggagggccaagccc

SEQ ID NO: 1110957 - RNA, 22 nt, Human
gcaaggcugugcacuuugcauu

SEQ ID NO: 1110958 - RNA, 22 nt, Human
gcauuucuuccuggugugagcc

SEQ ID NO: 1110959 - RNA, 22 nt, Human
aaggucauuuuuuccucuguug

SEQ ID NO: 1110960 - RNA, 22 nt, Human
cuggcucaggaaaguugcugcu

SEQ ID NO: 1110961 - RNA, 22 nt, Human
gagagggccgggggccagcucc

SEQ ID NO: 1110962 - RNA, 22 nt, Human
aggaccagaggccagagucagc

SEQ ID NO: 1110963 - RNA, 22 nt, Human
cugccucugguuuuggucccug

SEQ ID NO: 1110964 - RNA, 22 nt, Human
uccucaggagagcuccuaugcc

SEQ ID NO: 1110965 - RNA, 23 nt, Human
ucccagccucuucucuugcauac

SEQ ID NO: 1110966 - RNA, 22 nt, Human
uauguacacauacacuuguaau

SEQ ID NO: 1110967 - RNA, 22 nt, Human
accugaggcuguuagucuaggu

SEQ ID NO: 1110968 - RNA, 22 nt, Human
gcugaagagagaugcguccagc

SEQ ID NO: 1110969 - RNA, 22 nt, Human
gcagggacaccuuugugaagcu

SEQ ID NO: 1110970 - RNA, 22 nt, Human
ucuugccucuuccccuuuccau

SEQ ID NO: 1110971 - RNA, 22 nt, Human
aggcagugcagaguccucuucu

SEQ ID NO: 1110972 - RNA, 22 nt, Human
ucagaacauugacauucuuauu

SEQ ID NO: 1110973 - RNA, 22 nt, Human
uacauagcaaggaaaugacaga

SEQ ID NO: 1110974 - RNA, 22 nt, Human
gaagccaguacugugcucugca

SEQ ID NO: 1110975 - RNA, 22 nt, Human
aaaauaucagcaaagggugaca

SEQ ID NO: 1110976 - RNA, 22 nt, Human
acuguacuguguauuguagaau

SEQ ID NO: 1110977 - RNA, 22 nt, Human
cucuuaguuuaucuuugacaaa

SEQ ID NO: 1110978 - RNA, 22 nt, Human
cuccagaagacccauccucaug

SEQ ID NO: 1110979 - RNA, 22 nt, Human
gucuugaucuccugaccuugug

SEQ ID NO: 1110980 - RNA, 22 nt, Human
ggaugcugacuuuggagcaugg

SEQ ID NO: 1110981 - RNA, 22 nt, Human
ggccugcacagagguggcucua

SEQ ID NO: 1110982 - RNA, 22 nt, Human
agaagccaacagggcaggagag

SEQ ID NO: 1110983 - RNA, 22 nt, Human
agcugagagguggcaagcugua

SEQ ID NO: 1110984 - RNA, 22 nt, Human
gaggggcuggcacgauggcugc

SEQ ID NO: 1110985 - RNA, 22 nt, Human
cugugcuucgcaacuccaaggu

SEQ ID NO: 1110986 - RNA, 22 nt, Human
accucugccaagaugugcuccc

SEQ ID NO: 1110987 - RNA, 22 nt, Human
agagcuuagaauuucagaugau

SEQ ID NO: 1110988 - RNA, 22 nt, Human
cagccuguagaauacaguaaau

SEQ ID NO: 1110989 - RNA, 22 nt, Human
ugggcagacuaaggucaaagcu

SEQ ID NO: 1110990 - RNA, 22 nt, Human
ugaaggaaaugacggcagaaga

SEQ ID NO: 1110991 - RNA, 22 nt, Human
aggccuggugaaugaaguaucu

SEQ ID NO: 1110992 - RNA, 22 nt, Human
aacuagaaaacaagaugcugau

SEQ ID NO: 1110993 - RNA, 22 nt, Human
ccugagaggcccucucacuguc

SEQ ID NO: 1110994 - RNA, 22 nt, Human
uuugucagucaugucugcuuuu

SEQ ID NO: 1110995 - RNA, 22 nt, Human
cauuaucucuucuauaugcuag

SEQ ID NO: 1110996 - RNA, 19 nt, Human
aggucauugauagugcagg

SEQ ID NO: 1110997 - RNA, 22 nt, Human
uuugugaaaugaagucacaacu

SEQ ID NO: 1110998 - RNA, 22 nt, Human
aacagcuuugcuucuggagaca

SEQ ID NO: 1110999 - RNA, 21 nt, Human
ucuccaguauccuucucugag

SEQ ID NO: 1111000 - RNA, 22 nt, Human
cacagggcuaaaugaaggguug

SEQ ID NO: 1111001 - RNA, 22 nt, Human
ugccagcacuucuggcugucug

SEQ ID NO: 1111002 - RNA, 22 nt, Human
cugcugggucuaugcaagugga

SEQ ID NO: 1111003 - RNA, 22 nt, Human
cccagcccagcguucgaggggu

SEQ ID NO: 1111004 - RNA, 22 nt, Human
uuucaagcauaacugggaagag

SEQ ID NO: 1111005 - RNA, 22 nt, Human
agcuuccuuggcgcugaggccu

SEQ ID NO: 1111006 - RNA, 17 nt, Human
gucugggcuuuagagac

SEQ ID NO: 1111007 - RNA, 22 nt, Human
cacaggagagcugggaggugcc

SEQ ID NO: 1111008 - RNA, 22 nt, Human
agggucccgaaggagacagcaa

SEQ ID NO: 1111009 - RNA, 22 nt, Human
cuggggugucucgucugccauu

SEQ ID NO: 1111010 - RNA, 20 nt, Human
aguagcagugugacauugac

SEQ ID NO: 1111011 - RNA, 20 nt, Human
aggcacuggauuucuuauau

SEQ ID NO: 1111012 - RNA, 22 nt, Human
caaauaucuuuggcaaagagaa

SEQ ID NO: 1111013 - RNA, 22 nt, Human
gggcagagagcuggaacuccuu

SEQ ID NO: 1111014 - RNA, 21 nt, Human
ccuggcuucagggugcacugg

SEQ ID NO: 1111015 - RNA, 22 nt, Human
aaugaacaaaauaugcuuugca

SEQ ID NO: 1111016 - RNA, 22 nt, Human
gacauucacagguaaacauucc

SEQ ID NO: 1111017 - RNA, 22 nt, Human
uucagcagucguccaggaaaag

SEQ ID NO: 1111018 - RNA, 22 nt, Human
acucugccccgaguucugggaa

SEQ ID NO: 1111019 - RNA, 22 nt, Human
agagccaggugcugcuguuuga

SEQ ID NO: 1111020 - RNA, 23 nt, Human
gagcugggauacaggcuuacugc

SEQ ID NO: 1111021 - RNA, 22 nt, Human
gggucccaggaaggagcagugu

SEQ ID NO: 1111022 - RNA, 22 nt, Human
aggcacugugcugaugucuuau

SEQ ID NO: 1111023 - RNA, 19 nt, Human
gcuggggccugaccagaca

SEQ ID NO: 1111024 - RNA, 21 nt, Human
aaaguucaugcuuuaauauuc

SEQ ID NO: 1111025 - RNA, 22 nt, Human
acaggcugacuuccugccaugu

SEQ ID NO: 1111026 - RNA, 22 nt, Human
uuauuuauuguguaccuacugu

SEQ ID NO: 1111027 - RNA, 22 nt, Human
ugucaugccaccguuucccaga

SEQ ID NO: 1111028 - RNA, 22 nt, Human
uuaagaauggaaugaggaauuu

SEQ ID NO: 1111029 - RNA, 22 nt, Human
cucagcagcagggaagagguca

SEQ ID NO: 1111030 - RNA, 22 nt, Human
uucuggaguauuccuggcaccu

SEQ ID NO: 1111031 - RNA, 22 nt, Human
gaggcucugugaugugccaggc

SEQ ID NO: 1111032 - RNA, 20 nt, Human
acugcuucuuucucugaccu

SEQ ID NO: 1111033 - RNA, 17 nt, Human
uccuucagggccucaca

SEQ ID NO: 1111034 - RNA, 22 nt, Human
caagcagagacuagauagcugu

SEQ ID NO: 1111035 - RNA, 22 nt, Human
acagugucuccugguacccagu

SEQ ID NO: 1111036 - RNA, 22 nt, Human
ugcagccaccaccucugcugaa

SEQ ID NO: 1111037 - RNA, 22 nt, Human
ugaggaugacgauggcaauggc

SEQ ID NO: 1111038 - RNA, 23 nt, Human
aacaccaaggcucagagagauaa

SEQ ID NO: 1111039 - RNA, 22 nt, Human
cuggcuucugggccagggcaga

SEQ ID NO: 1111040 - RNA, 22 nt, Human
agcaccaucagaugcaauaucu

SEQ ID NO: 1111041 - RNA, 22 nt, Human
cucugggcaccaaagagcagcu

SEQ ID NO: 1111042 - RNA, 22 nt, Human
uuguuacacauaauaacauuuu

SEQ ID NO: 1111043 - RNA, 22 nt, Human
ggcagcucugugucugggaagc

SEQ ID NO: 1111044 - RNA, 22 nt, Human
acauuucugcauguaggguaau

SEQ ID NO: 1111045 - RNA, 22 nt, Human
gaggaggcuggcgccgccugcc

SEQ ID NO: 1111046 - RNA, 20 nt, Human
gaggcugcggacugcuggac

SEQ ID NO: 1111047 - RNA, 22 nt, Human
ccuggcuguggcggugcucuca

SEQ ID NO: 1111048 - RNA, 22 nt, Human
uggcacuggcgcaggauggcgg

SEQ ID NO: 1111049 - RNA, 22 nt, Human
cauuucugauuacagaauacua

SEQ ID NO: 1111050 - RNA, 22 nt, Human
guguccagggccguguugucuu

SEQ ID NO: 1111051 - RNA, 22 nt, Human
ugccugucuuuccucccucgua

SEQ ID NO: 1111052 - RNA, 22 nt, Human
ccugagagcagcuuccugcuua

SEQ ID NO: 1111053 - RNA, 22 nt, Human
ucugucacaauuugcuuacucu

SEQ ID NO: 1111054 - RNA, 20 nt, Human
gacauucauaguuauuacca

SEQ ID NO: 1111055 - RNA, 22 nt, Human
cucacagaugcugugggucagg

SEQ ID NO: 1111056 - RNA, 23 nt, Human
uccagggauuaaugaagucaguc

SEQ ID NO: 1111057 - RNA, 22 nt, Human
ggcagugguuagaaacaugagc

SEQ ID NO: 1111058 - RNA, 22 nt, Human
ugggcucucuggcaggaaggcu

SEQ ID NO: 1111059 - RNA, 22 nt, Human
gaagccaagugcaaaugccuua

SEQ ID NO: 1111060 - RNA, 22 nt, Human
aggcagaggaaggguggauuug

SEQ ID NO: 1111061 - RNA, 22 nt, Human
gucagcagugucagcucugggg

SEQ ID NO: 1111062 - RNA, 22 nt, Human
gcuggugcauuagcugcaguuc

SEQ ID NO: 1111063 - RNA, 22 nt, Human
uuuuagaaauacugauuuagug

SEQ ID NO: 1111064 - RNA, 22 nt, Human
cucuggaguuagugaucugggc

SEQ ID NO: 1111065 - RNA, 22 nt, Human
ccaggacuucgaggcuacagug

SEQ ID NO: 1111066 - RNA, 22 nt, Human
gucucagagagcuacucucuua

SEQ ID NO: 1111067 - RNA, 23 nt, Human
ucacacagcuggucagguacaga

SEQ ID NO: 1111068 - RNA, 22 nt, Human
ugaaaaggagccuuagguaggu

SEQ ID NO: 1111069 - RNA, 22 nt, Human
gggcucucaugaguguguggua

SEQ ID NO: 1111070 - RNA, 18 nt, Human
ucuggcucaggacugaac

SEQ ID NO: 1111071 - RNA, 20 nt, Human
ucacauccucucccaacaug

SEQ ID NO: 1111072 - RNA, 22 nt, Human
cagacacaccaggcccauucug

SEQ ID NO: 1111073 - RNA, 22 nt, Human
ccugccaggacauugcuugaag

SEQ ID NO: 1111074 - RNA, 19 nt, Human
cagaguccuugaccagucc

SEQ ID NO: 1111075 - RNA, 22 nt, Human
aaggguggauuucugagcucua

SEQ ID NO: 1111076 - RNA, 22 nt, Human
acagguggcauaggcaguuuga

SEQ ID NO: 1111077 - RNA, 17 nt, Human
uugggagagaaagguau

SEQ ID NO: 1111078 - RNA, 22 nt, Human
aggcaugugacccuggacucag

SEQ ID NO: 1111079 - RNA, 22 nt, Human
gggacagcuguagugcuuggcu

SEQ ID NO: 1111080 - RNA, 22 nt, Human
uugauaaaaugauaucuucuuu

SEQ ID NO: 1111081 - RNA, 22 nt, Human
uauugaaaugaaugacagugau

SEQ ID NO: 1111082 - RNA, 22 nt, Human
ccucacuggccagccaggggug

SEQ ID NO: 1111083 - RNA, 22 nt, Human
cagcucugugcaggccugggga

SEQ ID NO: 1111084 - RNA, 22 nt, Human
ccagggcauguccaagacuuag

SEQ ID NO: 1111085 - RNA, 22 nt, Human
aggagucaggaccaaauggaaa

SEQ ID NO: 1111086 - RNA, 22 nt, Human
guauuugauacaugaaauggug

SEQ ID NO: 1111087 - RNA, 22 nt, Human
cuggcagcucuacucagagccu

SEQ ID NO: 1111088 - RNA, 22 nt, Human
acauagcuuaaaugagaagaua

SEQ ID NO: 1111089 - RNA, 20 nt, Human
caccaggcgcucugagaaca

SEQ ID NO: 1111090 - RNA, 22 nt, Human
agcugccaucagccuuuggaug

SEQ ID NO: 1111091 - RNA, 22 nt, Human
ccagggugcucuguggcgucgc

SEQ ID NO: 1111092 - RNA, 22 nt, Human
acagaauuaaugaaaauuacaa

SEQ ID NO: 1111093 - RNA, 22 nt, Human
auaaauuuauaauuguuuccug

SEQ ID NO: 1111094 - RNA, 22 nt, Human
aagcacuuagaagagugccugc

SEQ ID NO: 1111095 - RNA, 22 nt, Human
cuguucucuggcgguggcuguu

SEQ ID NO: 1111096 - RNA, 22 nt, Human
uccuuccuggggucucugcugc

SEQ ID NO: 1111097 - RNA, 22 nt, Human
agccucugauggcucccaagga

SEQ ID NO: 1111098 - RNA, 20 nt, Human
ucagugauuaucucugagug

SEQ ID NO: 1111099 - RNA, 22 nt, Human
ggaggccaggguggguggaucg

SEQ ID NO: 1111100 - RNA, 22 nt, Human
agaugcugcuccacaggccagg

SEQ ID NO: 1111101 - RNA, 22 nt, Human
auguaaggcugccuaugacacu

SEQ ID NO: 1111102 - RNA, 22 nt, Human
ugaaauauuuagagaguaaguu

SEQ ID NO: 1111103 - RNA, 22 nt, Human
ucaggggaaaucucucagcgaa

SEQ ID NO: 1111104 - RNA, 19 nt, Human
uggcagggagugauauuag

SEQ ID NO: 1111105 - RNA, 22 nt, Human
uggugugggcguggcaggcaag

SEQ ID NO: 1111106 - RNA, 18 nt, Human
gcuggcugcacuucugcu

SEQ ID NO: 1111107 - RNA, 22 nt, Human
caaggagauaaaauguugagcu

SEQ ID NO: 1111108 - RNA, 22 nt, Human
ugaugcuucacgcugaauaugc

SEQ ID NO: 1111109 - RNA, 22 nt, Human
agcaggaguguccccuggcugu

SEQ ID NO: 1111110 - RNA, 21 nt, Human
gcugagagguugggaaguuca

SEQ ID NO: 1111111 - RNA, 22 nt, Human
uuucagaugcaauuaauuuuca

SEQ ID NO: 1111112 - RNA, 22 nt, Human
aagugacacauggcacuucuau

SEQ ID NO: 1111113 - RNA, 22 nt, Human
ugucucaguauacgaaacacuu

SEQ ID NO: 1111114 - RNA, 22 nt, Human
uguacaguauauuucaaagcca

SEQ ID NO: 1111115 - RNA, 22 nt, Human
ccuuugggugaauuccucucuu

SEQ ID NO: 1111116 - RNA, 22 nt, Human
gggugaggagcugccagucaug

SEQ ID NO: 1111117 - RNA, 19 nt, Human
ucaaggcucccugagggau

SEQ ID NO: 1111118 - RNA, 19 nt, Human
agacagagcucaguggguu

SEQ ID NO: 1111119 - RNA, 22 nt, Human
uggcacuggaaucguagccuug

SEQ ID NO: 1111120 - RNA, 22 nt, Human
caccagggacaaugcuaggggu

SEQ ID NO: 1111121 - RNA, 22 nt, Human
uggcccuguggaggucagugag

SEQ ID NO: 1111122 - RNA, 22 nt, Human
gccugagauucccggagccgug

SEQ ID NO: 1111123 - RNA, 21 nt, Human
uggcccuggccacggcugcca

SEQ ID NO: 1111124 - RNA, 22 nt, Human
aaggcucucugauggcagcagu

SEQ ID NO: 1111125 - RNA, 22 nt, Human
cugagcugggaguagagacucu

SEQ ID NO: 1111126 - RNA, 22 nt, Human
ucuuguccuaagagcuggauuc

SEQ ID NO: 1111127 - RNA, 22 nt, Human
cagcagaggaaagcaaaucuaa

SEQ ID NO: 1111128 - RNA, 22 nt, Human
agguggggugagcugcagacua

SEQ ID NO: 1111129 - RNA, 22 nt, Human
ucuggccugaaaguccaugcuu

SEQ ID NO: 1111130 - RNA, 23 nt, Human
uccagcagagccuuccaggaggg

SEQ ID NO: 1111131 - RNA, 22 nt, Human
uggcuucaucugcagcacugcc

SEQ ID NO: 1111132 - RNA, 22 nt, Human
acuucucuucauagguggcaau

SEQ ID NO: 1111133 - RNA, 22 nt, Human
ccaaagucuggagcagcagagc

SEQ ID NO: 1111134 - RNA, 22 nt, Human
ucauccaguaccauggaaggca

SEQ ID NO: 1111135 - RNA, 22 nt, Human
cuggccuggcaggggaccucua

SEQ ID NO: 1111136 - RNA, 22 nt, Human
aaggcgacacaggcagcaggcc

SEQ ID NO: 1111137 - RNA, 22 nt, Human
uggcagcauguuauguaaggaa

SEQ ID NO: 1111138 - RNA, 22 nt, Human
gggcuccaacggugagcaugga

SEQ ID NO: 1111139 - RNA, 22 nt, Human
caagagcugcaaauagcgugac

SEQ ID NO: 1111140 - RNA, 22 nt, Human
acagaggccccgugggagagcc

SEQ ID NO: 1111141 - RNA, 22 nt, Human
uuauccaaacuggugaaucauu

SEQ ID NO: 1111142 - RNA, 22 nt, Human
ccaggagucaauaaaggaagcu

SEQ ID NO: 1111143 - RNA, 22 nt, Human
aacagaacccgagugugaaucu

SEQ ID NO: 1111144 - RNA, 22 nt, Human
cuggcccauggugagcucuggg

SEQ ID NO: 1111145 - RNA, 22 nt, Human
ucaaguguaguggugucagguc

SEQ ID NO: 1111146 - RNA, 22 nt, Human
aaugcacauaaauauggucuua

SEQ ID NO: 1111147 - RNA, 22 nt, Human
cugaggugagcuucccugggcu

SEQ ID NO: 1111148 - RNA, 22 nt, Human
uucuucaaaauccagcaugauu

SEQ ID NO: 1111149 - RNA, 22 nt, Human
gcuguauuuaacaacuggcuca

SEQ ID NO: 1111150 - RNA, 20 nt, Human
uucuggaggcuacaagucug

SEQ ID NO: 1111151 - RNA, 22 nt, Human
uugugugguagcuucauugaac

SEQ ID NO: 1111152 - RNA, 22 nt, Human
uuuaaucaggcaaagcauaaua

SEQ ID NO: 1111153 - RNA, 23 nt, Human
agacccagagacuggcucugcuc

SEQ ID NO: 1111154 - RNA, 22 nt, Human
agggcugagacuaaggccagau

SEQ ID NO: 1111155 - RNA, 22 nt, Human
cucucugaggaaggagcaucug

SEQ ID NO: 1111156 - RNA, 22 nt, Human
caaaguuaugaaugauaagauu

SEQ ID NO: 1111157 - RNA, 22 nt, Human
cagacagaaggcuccuugaggu

SEQ ID NO: 1111158 - RNA, 22 nt, Human
agauuuagacugccuuaaucau

SEQ ID NO: 1111159 - RNA, 20 nt, Human
gaaaugugaccucuucugug

SEQ ID NO: 1111160 - RNA, 22 nt, Human
aagcugcagacccccugucuca

SEQ ID NO: 1111161 - RNA, 22 nt, Human
acugucugcuggccccugguua

SEQ ID NO: 1111162 - RNA, 22 nt, Human
auugaaagauauacuguucuca

SEQ ID NO: 1111163 - RNA, 22 nt, Human
agcaugaaagcauaggacaguc

SEQ ID NO: 1111164 - RNA, 22 nt, Human
uggcucagugaagagauaacuu

SEQ ID NO: 1111165 - RNA, 22 nt, Human
augggaggcaggcucagaaccg

SEQ ID NO: 1111166 - RNA, 22 nt, Human
uccucaggugacuagguaucuu

SEQ ID NO: 1111167 - RNA, 22 nt, Human
gaaagaggaaggagauguauua

SEQ ID NO: 1111168 - RNA, 22 nt, Human
ugggagcugggguuggacgucu

SEQ ID NO: 1111169 - RNA, 23 nt, Human
ugcuucucugcuugacaguucug

SEQ ID NO: 1111170 - RNA, 22 nt, Human
uggucucugacucugaagaccc

SEQ ID NO: 1111171 - RNA, 22 nt, Human
auggacagugugaagcagauag

SEQ ID NO: 1111172 - RNA, 22 nt, Human
acauguuagaaaugcagaaucu

SEQ ID NO: 1111173 - RNA, 21 nt, Human
gagugcagcaagguagagucu

SEQ ID NO: 1111174 - RNA, 22 nt, Human
uagagcugcuggacuguaacag

SEQ ID NO: 1111175 - RNA, 22 nt, Human
ucccagagaagagcuggaugga

SEQ ID NO: 1111176 - RNA, 22 nt, Human
cuggcucagacagcugugcagu

SEQ ID NO: 1111177 - RNA, 22 nt, Human
uggcuuccaaaggaaugggccu

SEQ ID NO: 1111178 - RNA, 22 nt, Human
auucuccagcucacuguccaua

SEQ ID NO: 1111179 - RNA, 22 nt, Human
ucaaaguuuguggcaauuuauu

SEQ ID NO: 1111180 - RNA, 22 nt, Human
ucugucacuuuuauuuacugaa

SEQ ID NO: 1111181 - RNA, 22 nt, Human
gcucucugaggugcuggcagag

SEQ ID NO: 1111182 - RNA, 22 nt, Human
ccagucugaggccuggugaggg

SEQ ID NO: 1111183 - RNA, 23 nt, Human
ucccuggaggcagguccagggcc

SEQ ID NO: 1111184 - RNA, 22 nt, Human
uagcagggaagaugaucagaau

SEQ ID NO: 1111185 - RNA, 22 nt, Human
auacaucuuccuuuuaaaaugc

SEQ ID NO: 1111186 - RNA, 22 nt, Human
agccucucuccagcuuggcaga

SEQ ID NO: 1111187 - RNA, 22 nt, Human
gcccagcagcugguggagaagg

SEQ ID NO: 1111188 - RNA, 22 nt, Human
ggcagaagaaaggcuaagucuc

SEQ ID NO: 1111189 - RNA, 22 nt, Human
cuggcucagugccuucagaagu

SEQ ID NO: 1111190 - RNA, 22 nt, Human
acugcuuuuagaaaucuauaga

SEQ ID NO: 1111191 - RNA, 22 nt, Human
guuagaaagugucugcuugggu

SEQ ID NO: 1111192 - RNA, 22 nt, Human
ccaggccuuccaguacgcagaa

SEQ ID NO: 1111193 - RNA, 22 nt, Human
acucugccuuucagcagaugaa

SEQ ID NO: 1111194 - RNA, 22 nt, Human
uucacauugguucuugauagcu

SEQ ID NO: 1111195 - RNA, 22 nt, Human
cucagcagugacaagagaguau

SEQ ID NO: 1111196 - RNA, 22 nt, Human
agugaaauagcauuuaugaagc

SEQ ID NO: 1111197 - RNA, 23 nt, Human
cagaccuggcagucauccucaac

SEQ ID NO: 1111198 - RNA, 22 nt, Human
uuguaacagcuguuuauauagu

SEQ ID NO: 1111199 - RNA, 22 nt, Human
acuguguguuugucuagcacag

SEQ ID NO: 1111200 - RNA, 22 nt, Human
uucucuuauucuggauaugcag

SEQ ID NO: 1111201 - RNA, 22 nt, Human
ccacaaguuucagcacccagag

SEQ ID NO: 1111202 - RNA, 22 nt, Human
caaggaaaaagcgagcucgggg

SEQ ID NO: 1111203 - RNA, 22 nt, Human
acuuucuaggucucaguccuuu

SEQ ID NO: 1111204 - RNA, 23 nt, Human
uggcucugagcuuccugguggcc

SEQ ID NO: 1111205 - RNA, 19 nt, Human
cagcugccuuuucuuugca

SEQ ID NO: 1111206 - RNA, 22 nt, Human
ugggcugcagggguugagagcu

SEQ ID NO: 1111207 - RNA, 22 nt, Human
auccaaaccuggacaugagugg

SEQ ID NO: 1111208 - RNA, 22 nt, Human
cuggcagcagcuucuggaucga

SEQ ID NO: 1111209 - RNA, 22 nt, Human
ggcuuccuaauacucccuacac

SEQ ID NO: 1111210 - RNA, 22 nt, Human
uggcagaguuauggguauuuau

SEQ ID NO: 1111211 - RNA, 22 nt, Human
ucauucagguugggcaaguguc

SEQ ID NO: 1111212 - RNA, 22 nt, Human
acugucacuccaacugagucgu

SEQ ID NO: 1111213 - RNA, 22 nt, Human
ggcaguggguuccccaaggcac

SEQ ID NO: 1111214 - RNA, 22 nt, Human
acagaguacauucagagacuau

SEQ ID NO: 1111215 - RNA, 22 nt, Human
gguggcagaggugcaucagccc

SEQ ID NO: 1111216 - RNA, 22 nt, Human
agcuggccuccgggugccuggg

SEQ ID NO: 1111217 - RNA, 22 nt, Human
acagccagaggugguccugggu

SEQ ID NO: 1111218 - RNA, 22 nt, Human
uuugaacaugcugcaugauaau

SEQ ID NO: 1111219 - RNA, 22 nt, Human
gagcuggugugugcccgagcac

SEQ ID NO: 1111220 - RNA, 22 nt, Human
cuggccugaggccgccuucaga

SEQ ID NO: 1111221 - RNA, 22 nt, Human
ggucucagacuggcaggcagug

SEQ ID NO: 1111222 - RNA, 22 nt, Human
ucucccaggugggugccuggag

SEQ ID NO: 1111223 - RNA, 22 nt, Human
ugauuuccuggcuuuggaguuc

SEQ ID NO: 1111224 - RNA, 22 nt, Human
ggagccaguauuuaguggucuu

SEQ ID NO: 1111225 - RNA, 22 nt, Human
ugucucaggggcauugaaauaa

SEQ ID NO: 1111226 - RNA, 23 nt, Human
caugggagugagaaugccagcuc

SEQ ID NO: 1111227 - RNA, 22 nt, Human
cagcagagguuggaacaguucu

SEQ ID NO: 1111228 - RNA, 22 nt, Human
gcugggagcccuggucugcucc

SEQ ID NO: 1111229 - RNA, 22 nt, Human
auaauaacaccugaauaggaaa

SEQ ID NO: 1111230 - RNA, 22 nt, Human
uagauuucgcugcaucucaauc

SEQ ID NO: 1111231 - RNA, 22 nt, Human
uugcuuccaguccaagucuguu

SEQ ID NO: 1111232 - RNA, 22 nt, Human
accaggggugucaacagcauuu

SEQ ID NO: 1111233 - RNA, 22 nt, Human
agcugccacaugcccaagggca

SEQ ID NO: 1111234 - RNA, 22 nt, Human
ccuuccaggugcaggcaagccu

SEQ ID NO: 1111235 - RNA, 22 nt, Human
cccagguggguuggccucuguc

SEQ ID NO: 1111236 - RNA, 22 nt, Human
gagcugagccuggguggaccgc

SEQ ID NO: 1111237 - RNA, 22 nt, Human
aagaacauuuuguagaaugaca

SEQ ID NO: 1111238 - RNA, 19 nt, Human
gcuccugggccucacucau

SEQ ID NO: 1111239 - RNA, 22 nt, Human
cagggcaguuugugccuaugag

SEQ ID NO: 1111240 - RNA, 22 nt, Human
ucauugcaguugaguuguguua

SEQ ID NO: 1111241 - RNA, 20 nt, Human
uuucagugguuugugccuag

SEQ ID NO: 1111242 - RNA, 22 nt, Human
guaaaucccauccuuucucugg

SEQ ID NO: 1111243 - RNA, 22 nt, Human
ggaaaguggugguggaaagagg

SEQ ID NO: 1111244 - RNA, 22 nt, Human
ccugggcaucucaugcaccugc

SEQ ID NO: 1111245 - RNA, 22 nt, Human
aguuauauaacuaucuagaugc

SEQ ID NO: 1111246 - RNA, 22 nt, Human
augugacaauauuuggucuuau

SEQ ID NO: 1111247 - RNA, 18 nt, Human
gguggcaggucagaugcc

SEQ ID NO: 1111248 - RNA, 22 nt, Human
aggcacugcuucuaaguaggaa

SEQ ID NO: 1111249 - RNA, 22 nt, Human
ggugccaggcucccagcucagg

SEQ ID NO: 1111250 - RNA, 19 nt, Human
acaagggcaggcaagguga

SEQ ID NO: 1111251 - RNA, 22 nt, Human
ugggccuguugggguugaguua

SEQ ID NO: 1111252 - RNA, 22 nt, Human
cuggccagcauuuuugcuuuag

SEQ ID NO: 1111253 - RNA, 22 nt, Human
agaaaguucacugguauauuuu

SEQ ID NO: 1111254 - RNA, 22 nt, Human
uggcagggccugaaucuuauac

SEQ ID NO: 1111255 - RNA, 22 nt, Human
cagggcugagaauuuagagaca

SEQ ID NO: 1111256 - RNA, 22 nt, Human
agcagcucacaggauuccugaa

SEQ ID NO: 1111257 - RNA, 22 nt, Human
aaacuguaagagaauaaacuac

SEQ ID NO: 1111258 - RNA, 22 nt, Human
cugggccagucucggccgcucu

SEQ ID NO: 1111259 - RNA, 22 nt, Human
acaggggcuccgaaggugaggg

SEQ ID NO: 1111260 - RNA, 21 nt, Human
ccuucuccacagggucuccgg

SEQ ID NO: 1111261 - RNA, 22 nt, Human
gagagugaggcaucaggggcag

SEQ ID NO: 1111262 - RNA, 22 nt, Human
gggccuggggugacguaccccu

SEQ ID NO: 1111263 - RNA, 22 nt, Human
cagucccaugagcccagaacau

SEQ ID NO: 1111264 - RNA, 22 nt, Human
agcagggggaguuagacuagau

SEQ ID NO: 1111265 - RNA, 22 nt, Human
auauuucuccaaauguuuucaa

SEQ ID NO: 1111266 - RNA, 22 nt, Human
aucuggcucgcuaggcucuggg

SEQ ID NO: 1111267 - RNA, 22 nt, Human
accacuguaucuccagcacauu

SEQ ID NO: 1111268 - RNA, 22 nt, Human
cugaagccaugugcucacuggu

SEQ ID NO: 1111269 - RNA, 22 nt, Human
gcacagccacugagugagaacc

SEQ ID NO: 1111270 - RNA, 23 nt, Human
cuuuuaacuugaucugagaccag

SEQ ID NO: 1111271 - RNA, 22 nt, Human
cagggcugcuggccgugcccuc

SEQ ID NO: 1111272 - RNA, 22 nt, Human
agccucugguccucccucagcu

SEQ ID NO: 1111273 - RNA, 22 nt, Human
aaaugcauguagaauaauagag

SEQ ID NO: 1111274 - RNA, 22 nt, Human
uugaaaggugcugugugcugau

SEQ ID NO: 1111275 - RNA, 22 nt, Human
ccuguggcucucuuuggagguc

SEQ ID NO: 1111276 - RNA, 20 nt, Human
acuuucucgguuucucaccu

SEQ ID NO: 1111277 - RNA, 22 nt, Human
uuagauauguuuuugcuaaugc

SEQ ID NO: 1111278 - RNA, 22 nt, Human
uggcuagcccuuguggggagag

SEQ ID NO: 1111279 - RNA, 22 nt, Human
uugcauugcuuggucuucaaga

SEQ ID NO: 1111280 - RNA, 22 nt, Human
cagcauugaucccaggcugugg

SEQ ID NO: 1111281 - RNA, 22 nt, Human
accucugccacuuucuaacucu

SEQ ID NO: 1111282 - RNA, 22 nt, Human
gccugccuuugugaggaagcgg

SEQ ID NO: 1111283 - RNA, 22 nt, Human
ggcuccagggaguggagagaag

SEQ ID NO: 1111284 - RNA, 22 nt, Human
gggcagcagagcccugccgagu

SEQ ID NO: 1111285 - RNA, 19 nt, Human
auacacauacguaaacuga

SEQ ID NO: 1111286 - RNA, 22 nt, Human
gaagagcuuagacagaaucaaa

SEQ ID NO: 1111287 - RNA, 22 nt, Human
uaaggcacccuucugaguagag

SEQ ID NO: 1111288 - RNA, 20 nt, Human
uaacagaaguagaagugggu

SEQ ID NO: 1111289 - RNA, 22 nt, Human
ugcugcuccccagcacacagca

SEQ ID NO: 1111290 - RNA, 22 nt, Human
cgcugggggaacagcgagggug

SEQ ID NO: 1111291 - RNA, 22 nt, Human
augggugugaaaauggucaucu

SEQ ID NO: 1111292 - RNA, 22 nt, Human
caggaacauuuaaccacagggu

SEQ ID NO: 1111293 - RNA, 19 nt, Human
acccagagcccuuugcagg

SEQ ID NO: 1111294 - RNA, 22 nt, Human
aguuuuucugggaggcacugcu

SEQ ID NO: 1111295 - RNA, 22 nt, Human
uggagcagcuaagccucugaga

SEQ ID NO: 1111296 - RNA, 22 nt, Human
cugaggcuuggaggggucuggu

SEQ ID NO: 1111297 - RNA, 19 nt, Human
agggcugcucuggccuggg

SEQ ID NO: 1111298 - RNA, 22 nt, Human
acauuucucagguaagucauuu

SEQ ID NO: 1111299 - RNA, 21 nt, Human
cccuguguuccacagcagaca

SEQ ID NO: 1111300 - RNA, 19 nt, Human
caagugaagccugggaugg

SEQ ID NO: 1111301 - RNA, 22 nt, Human
ugucuuuucuacuguaagcaua

SEQ ID NO: 1111302 - RNA, 22 nt, Human
cuauugaauuaacuauuaaagu

SEQ ID NO: 1111303 - RNA, 22 nt, Human
cagguacacucccuugugcuga

SEQ ID NO: 1111304 - RNA, 16 nt, Human
gggagggaguuggugg

SEQ ID NO: 1111305 - RNA, 22 nt, Human
ugggcucugugccagguuggug

SEQ ID NO: 1111306 - RNA, 22 nt, Human
agcugccauccuguucagcacc

SEQ ID NO: 1111307 - RNA, 22 nt, Human
cuggcuggucaucagcaguacg

SEQ ID NO: 1111308 - RNA, 22 nt, Human
agcagaaccugcagaccugucu

SEQ ID NO: 1111309 - RNA, 22 nt, Human
uugccuugauucuucucaugug

SEQ ID NO: 1111310 - RNA, 22 nt, Human
aggcccuguccauggugcugaa

SEQ ID NO: 1111311 - RNA, 22 nt, Human
gcugccucaggcaccuccuggc

SEQ ID NO: 1111312 - RNA, 22 nt, Human
agcagggguaacagaaggaaag

SEQ ID NO: 1111313 - RNA, 22 nt, Human
uauagagguggaaacugagguu

SEQ ID NO: 1111314 - RNA, 22 nt, Human
aucagcaagauguaauuucuau

SEQ ID NO: 1111315 - RNA, 22 nt, Human
ccucuguccuggggaguggagc

SEQ ID NO: 1111316 - RNA, 22 nt, Human
aacaugaaguuuucuauaguga

SEQ ID NO: 1111317 - RNA, 22 nt, Human
gauuuauuggucuuucauuggu

SEQ ID NO: 1111318 - RNA, 19 nt, Human
cuguccuuggcugcacugu

SEQ ID NO: 1111319 - RNA, 22 nt, Human
agugucauuccagggacccucg

SEQ ID NO: 1111320 - RNA, 22 nt, Human
ucagcugcucuguugagcugaa

SEQ ID NO: 1111321 - RNA, 22 nt, Human
ccugccaggcuuugggcuucug

SEQ ID NO: 1111322 - RNA, 22 nt, Human
ugaaaucuucacuaagucucuu

SEQ ID NO: 1111323 - RNA, 22 nt, Human
gccugguggugugcucaagugg

SEQ ID NO: 1111324 - RNA, 21 nt, Human
aaggaaaagcuuggucucuga

SEQ ID NO: 1111325 - RNA, 22 nt, Human
uggcagaguucgcugugccuuu

SEQ ID NO: 1111326 - RNA, 22 nt, Human
uauucacaggcuggagugaugu

SEQ ID NO: 1111327 - RNA, 22 nt, Human
ugggccaggauuucaagacccu

SEQ ID NO: 1111328 - RNA, 22 nt, Human
ucauaauacaaagaguucugca

SEQ ID NO: 1111329 - RNA, 22 nt, Human
uuccagaaaucuuucagcucaa

SEQ ID NO: 1111330 - RNA, 22 nt, Human
gaggccacgguuuuccuugggg

SEQ ID NO: 1111331 - RNA, 22 nt, Human
agcaucuggugagggccuaguu

SEQ ID NO: 1111332 - RNA, 22 nt, Human
ccacagggucagccacucugca

SEQ ID NO: 1111333 - RNA, 22 nt, Human
uuucaauguaacauuuccaggc

SEQ ID NO: 1111334 - RNA, 22 nt, Human
cugccuuugcccuugacacugu

SEQ ID NO: 1111335 - RNA, 22 nt, Human
cagagcugguguuacaagucca

SEQ ID NO: 1111336 - RNA, 22 nt, Human
augccuggacugacaugcacug

SEQ ID NO: 1111337 - RNA, 22 nt, Human
gcugccuguccugaggaguccg

SEQ ID NO: 1111338 - RNA, 22 nt, Human
gaggcaggguguugauuacaga

SEQ ID NO: 1111339 - RNA, 20 nt, Human
ggcagcucacuacuuucugu

SEQ ID NO: 1111340 - RNA, 22 nt, Human
ugcugggggugucucaccaggc

SEQ ID NO: 1111341 - RNA, 22 nt, Human
uggccuguggcuuaaggucugu

SEQ ID NO: 1111342 - RNA, 22 nt, Human
gcagggugccgacuucagggau

SEQ ID NO: 1111343 - RNA, 22 nt, Human
aacauuuaugguagucauugca

SEQ ID NO: 1111344 - RNA, 22 nt, Human
cccagcccugaccuauuggaaa

SEQ ID NO: 1111345 - RNA, 22 nt, Human
ggccugagcagacagcaugaug

SEQ ID NO: 1111346 - RNA, 22 nt, Human
uggcagaaguacacaagcaugc

SEQ ID NO: 1111347 - RNA, 22 nt, Human
guuccaggcaagugggauagga

SEQ ID NO: 1111348 - RNA, 22 nt, Human
gugccugguuuggggaauguuc

SEQ ID NO: 1111349 - RNA, 22 nt, Human
cagggagaggcaucauagggaa

SEQ ID NO: 1111350 - RNA, 20 nt, Human
acugagcugcauggagagga

SEQ ID NO: 1111351 - RNA, 22 nt, Human
ucuagaaauuuugccuuguauu

SEQ ID NO: 1111352 - RNA, 22 nt, Human
gccuggcuccuaaggacuggcu

SEQ ID NO: 1111353 - RNA, 22 nt, Human
cuggcucccagcuuucagggag

SEQ ID NO: 1111354 - RNA, 22 nt, Human
ccugugcccucagccuggcucu

SEQ ID NO: 1111355 - RNA, 21 nt, Human
uugaaggaucacuucuguacc

SEQ ID NO: 1111356 - RNA, 22 nt, Human
aggucaccauggcaugcuccac

SEQ ID NO: 1111357 - RNA, 19 nt, Human
cugaagucuuuucagcugg

SEQ ID NO: 1111358 - RNA, 22 nt, Human
ggcugcaggcaggguauccacu

SEQ ID NO: 1111359 - RNA, 22 nt, Human
gggaaauugugugagaucuuug

SEQ ID NO: 1111360 - RNA, 22 nt, Human
agagaacaaauuaaaggugguu

SEQ ID NO: 1111361 - RNA, 22 nt, Human
agcugcaggccucuccugggga

SEQ ID NO: 1111362 - RNA, 22 nt, Human
cuguggagcuuguggcaguggg

SEQ ID NO: 1111363 - RNA, 22 nt, Human
cugggaggcccacguugggaag

SEQ ID NO: 1111364 - RNA, 22 nt, Human
aaaugcacaauaaaguaaaggc

SEQ ID NO: 1111365 - RNA, 22 nt, Human
ucuuugcaugugcuucuuggcc

SEQ ID NO: 1111366 - RNA, 22 nt, Human
agugauggagcuuccucugcua

SEQ ID NO: 1111367 - RNA, 22 nt, Human
aggucacccguuugacuaucca

SEQ ID NO: 1111368 - RNA, 22 nt, Human
aaaugcacacaccaggaaacua

SEQ ID NO: 1111369 - RNA, 22 nt, Human
uacauuugcuuugauuuucagc

SEQ ID NO: 1111370 - RNA, 22 nt, Human
uuggcugagagaggaaaagggc

SEQ ID NO: 1111371 - RNA, 20 nt, Human
acaauagauuugagcaaagu

SEQ ID NO: 1111372 - RNA, 22 nt, Human
uccuugaacagagggccugggu

SEQ ID NO: 1111373 - RNA, 22 nt, Human
uggcagcacuugaacuugagcc

SEQ ID NO: 1111374 - RNA, 22 nt, Human
ccacaggggcccacgagccgcu

SEQ ID NO: 1111375 - RNA, 22 nt, Human
ccugggaagagcugacaggagg

SEQ ID NO: 1111376 - RNA, 22 nt, Human
aggagccaagcagaacuaagga

SEQ ID NO: 1111377 - RNA, 22 nt, Human
guccucaguaagagggccucug

SEQ ID NO: 1111378 - RNA, 22 nt, Human
cuggggccacaacggcgcacgc

SEQ ID NO: 1111379 - RNA, 22 nt, Human
cccaggaguuugaguucagcau

SEQ ID NO: 1111380 - RNA, 22 nt, Human
gcaggaagaugagcucagguaa

SEQ ID NO: 1111381 - RNA, 22 nt, Human
uuguaacagcugcuuaauagag

SEQ ID NO: 1111382 - RNA, 23 nt, Human
gcugcagcuguggauguucucag

SEQ ID NO: 1111383 - RNA, 22 nt, Human
auaauguagguauguguauuua

SEQ ID NO: 1111384 - RNA, 21 nt, Human
ugcagagauaucugaagcaga

SEQ ID NO: 1111385 - RNA, 22 nt, Human
aagccagccagugccagucuua

SEQ ID NO: 1111386 - RNA, 22 nt, Human
cuuugaaagcucccaggacuua

SEQ ID NO: 1111387 - RNA, 22 nt, Human
aaagacugguguguuacauaua

SEQ ID NO: 1111388 - RNA, 22 nt, Human
ccagaaaaugcagaacauagaa

SEQ ID NO: 1111389 - RNA, 22 nt, Human
cugcuuugauuagaagaguaca

SEQ ID NO: 1111390 - RNA, 22 nt, Human
aucagcugaaaaacaggcagca

SEQ ID NO: 1111391 - RNA, 22 nt, Human
uggcuggcgccgggcuagccac

SEQ ID NO: 1111392 - RNA, 22 nt, Human
gccuggucucuuucaugucagu

SEQ ID NO: 1111393 - RNA, 22 nt, Human
cuggguggcgucuggggccagu

SEQ ID NO: 1111394 - RNA, 22 nt, Human
ucuggcucuguguccccaccca

SEQ ID NO: 1111395 - RNA, 21 nt, Human
aggucccagguuugggcagca

SEQ ID NO: 1111396 - RNA, 22 nt, Human
ucucauucauacccuacaugcu

SEQ ID NO: 1111397 - RNA, 22 nt, Human
cuggcagcugugugaagaacug

SEQ ID NO: 1111398 - RNA, 20 nt, Human
cccuccagcaaccaggacuu

SEQ ID NO: 1111399 - RNA, 22 nt, Human
uccucagaugcucuuggacgcc

SEQ ID NO: 1111400 - RNA, 22 nt, Human
ccugucugaaggcagggggaug

SEQ ID NO: 1111401 - RNA, 22 nt, Human
agggcacaucugcugggaaugg

SEQ ID NO: 1111402 - RNA, 22 nt, Human
cugccuuggcccuaguucaugg

SEQ ID NO: 1111403 - RNA, 22 nt, Human
ugggauaguggccaggaccccc

SEQ ID NO: 1111404 - RNA, 22 nt, Human
uaggcaggugugcacugcccac

SEQ ID NO: 1111405 - RNA, 22 nt, Human
ucugccuggauuuuggaaagcu

SEQ ID NO: 1111406 - RNA, 22 nt, Human
aagcacaaugaacaucuuagau

SEQ ID NO: 1111407 - RNA, 22 nt, Human
agccacagagagggagcugcaa

SEQ ID NO: 1111408 - RNA, 22 nt, Human
ucagagcugcccaugcaagggg

SEQ ID NO: 1111409 - RNA, 22 nt, Human
cuggaagguuccucccagcucc

SEQ ID NO: 1111410 - RNA, 22 nt, Human
agcuuccuguugagagagggag

SEQ ID NO: 1111411 - RNA, 22 nt, Human
ccaggggaaacagggagcacuc

SEQ ID NO: 1111412 - RNA, 22 nt, Human
ucaguguccggagccugagugc

SEQ ID NO: 1111413 - RNA, 22 nt, Human
uguggccaccagagcugcuauu

SEQ ID NO: 1111414 - RNA, 22 nt, Human
gcaggcucuucuuucugcccag

SEQ ID NO: 1111415 - RNA, 22 nt, Human
uuucucuaaauagggaggcuua

SEQ ID NO: 1111416 - RNA, 22 nt, Human
gcugcccuaauaucacauguua

SEQ ID NO: 1111417 - RNA, 22 nt, Human
cacauguaguaagcaggcaaug

SEQ ID NO: 1111418 - RNA, 22 nt, Human
auggggcucugcggcugcuccc

SEQ ID NO: 1111419 - RNA, 22 nt, Human
agaaacauuuagauuauauguc

SEQ ID NO: 1111420 - RNA, 22 nt, Human
gagggugguggcuuaaggugcu

SEQ ID NO: 1111421 - RNA, 17 nt, Human
ugaaggaaggaugaugu

SEQ ID NO: 1111422 - RNA, 22 nt, Human
cccuggaguagcacugggucgc

SEQ ID NO: 1111423 - RNA, 22 nt, Human
agagcuggcugguagcccugau

SEQ ID NO: 1111424 - RNA, 21 nt, Human
gcaggcuggucaaaccucagu

SEQ ID NO: 1111425 - RNA, 22 nt, Human
aaaguguagagacuuuggaacc

SEQ ID NO: 1111426 - RNA, 22 nt, Human
ucugggcucuuaguguacccuc

SEQ ID NO: 1111427 - RNA, 22 nt, Human
cugcagaguggagccucggcug

SEQ ID NO: 1111428 - RNA, 22 nt, Human
agucauauguggcauuuucuaa

SEQ ID NO: 1111429 - RNA, 22 nt, Human
cucacugcccugaaguuggguu

SEQ ID NO: 1111430 - RNA, 22 nt, Human
caugggagcuaucuccaucacu

SEQ ID NO: 1111431 - RNA, 22 nt, Human
aaguuaugaaauuuggacagcu

SEQ ID NO: 1111432 - RNA, 22 nt, Human
agcugcugcgccucacccuggc

SEQ ID NO: 1111433 - RNA, 23 nt, Human
cccagcuuucccacugccgagag

SEQ ID NO: 1111434 - RNA, 22 nt, Human
uuggaaggcccugccuagcagg

SEQ ID NO: 1111435 - RNA, 22 nt, Human
augcaguaaauguucuaguuug

SEQ ID NO: 1111436 - RNA, 22 nt, Human
acagaccaaguuuccagcaggu

SEQ ID NO: 1111437 - RNA, 22 nt, Human
ucccagagucagagguggggcc

SEQ ID NO: 1111438 - RNA, 19 nt, Human
ccuggguccacucagacua

SEQ ID NO: 1111439 - RNA, 22 nt, Human
ugaagcaaacgcuucuguuccu

SEQ ID NO: 1111440 - RNA, 22 nt, Human
auaugccauuagcuagaaauaa

SEQ ID NO: 1111441 - RNA, 22 nt, Human
uuugcauugcauacaaggaacu

SEQ ID NO: 1111442 - RNA, 22 nt, Human
caggcugcagugcaguggcuau

SEQ ID NO: 1111443 - RNA, 22 nt, Human
ucacuugccuagcccaguucag

SEQ ID NO: 1111444 - RNA, 19 nt, Human
ugcuuccucaccaucuccc

SEQ ID NO: 1111445 - RNA, 22 nt, Human
uuacaaagagugccagagugug

SEQ ID NO: 1111446 - RNA, 22 nt, Human
cacacaugucucuccaugcucu

SEQ ID NO: 1111447 - RNA, 22 nt, Human
ucuagaaaaaaacugcugugga

SEQ ID NO: 1111448 - RNA, 22 nt, Human
caggaaccuaaugaaggcucac

SEQ ID NO: 1111449 - RNA, 22 nt, Human
ucacauacacuaggauauuuuu

SEQ ID NO: 1111450 - RNA, 22 nt, Human
agcuggagaugcccagcaccgg

SEQ ID NO: 1111451 - RNA, 22 nt, Human
aggaguggaauuacuggguucu

SEQ ID NO: 1111452 - RNA, 22 nt, Human
uccugccuucauacugcuguau

SEQ ID NO: 1111453 - RNA, 22 nt, Human
uagcagcuuccagagagggcag

SEQ ID NO: 1111454 - RNA, 22 nt, Human
auggggcugggauucuccucgg

SEQ ID NO: 1111455 - RNA, 22 nt, Human
caggcugaucagggcugggaug

SEQ ID NO: 1111456 - RNA, 22 nt, Human
gaggcaggcagauugcuugagg

SEQ ID NO: 1111457 - RNA, 22 nt, Human
ggcucuggugggaagguuagau

SEQ ID NO: 1111458 - RNA, 18 nt, Human
ugaacagaugaguugaag

SEQ ID NO: 1111459 - RNA, 22 nt, Human
gaugaagccugacuucucggug

SEQ ID NO: 1111460 - RNA, 22 nt, Human
uaagaaauuuaguuauagaaug

SEQ ID NO: 1111461 - RNA, 22 nt, Human
gcugucugucuucacaucucgc

SEQ ID NO: 1111462 - RNA, 22 nt, Human
uccugagagcagaguccaggug

SEQ ID NO: 1111463 - RNA, 22 nt, Human
cugccucuggccucaggcccag

SEQ ID NO: 1111464 - RNA, 22 nt, Human
ucugcucuaguugcuuccugcc

SEQ ID NO: 1111465 - RNA, 22 nt, Human
gugcuuccccaagccacagccu

SEQ ID NO: 1111466 - RNA, 20 nt, Human
uccagccacuuccgcugguc

SEQ ID NO: 1111467 - RNA, 22 nt, Human
ugucauaaaacacaagcuguug

SEQ ID NO: 1111468 - RNA, 22 nt, Human
cccauuuaucccaagguuacuc

SEQ ID NO: 1111469 - RNA, 22 nt, Human
uaagaacagugucugucucaca

SEQ ID NO: 1111470 - RNA, 22 nt, Human
ucaguuuuuaagaguuaugcga

SEQ ID NO: 1111471 - RNA, 22 nt, Human
ggcacugaucugauuucccucc

SEQ ID NO: 1111472 - RNA, 20 nt, Human
uacugggcaagcccacagac

SEQ ID NO: 1111473 - RNA, 22 nt, Human
aggacuucuccgauaagucaga

SEQ ID NO: 1111474 - RNA, 22 nt, Human
ccagucugugugccagccugcg

SEQ ID NO: 1111475 - RNA, 22 nt, Human
gacagaagaggaacuuggacag

SEQ ID NO: 1111476 - RNA, 22 nt, Human
cugaggcucccucgggucugcu

SEQ ID NO: 1111477 - RNA, 20 nt, Human
ccagcauguacacaugugga

SEQ ID NO: 1111478 - RNA, 22 nt, Human
aguguuccacacaucuggggaa

SEQ ID NO: 1111479 - RNA, 22 nt, Human
agggugggcuagacucuucccc

SEQ ID NO: 1111480 - RNA, 20 nt, Human
ccugucuccucuuaccuggc

SEQ ID NO: 1111481 - RNA, 22 nt, Human
aggguauaaagagcaagcagaa

SEQ ID NO: 1111482 - RNA, 22 nt, Human
gaaggcaggcuucugauuaggu

SEQ ID NO: 1111483 - RNA, 22 nt, Human
gugaaaucugaggcccaugaug

SEQ ID NO: 1111484 - RNA, 22 nt, Human
guccucugggcagcugccccac

SEQ ID NO: 1111485 - RNA, 22 nt, Human
cuggcuggcaaguagaacacaa

SEQ ID NO: 1111486 - RNA, 22 nt, Human
aguuauucauuuauucuguaca

SEQ ID NO: 1111487 - RNA, 22 nt, Human
ccugggaggcagagguugcagu

SEQ ID NO: 1111488 - RNA, 22 nt, Human
cacugaaggcuaggauuagaug

SEQ ID NO: 1111489 - RNA, 22 nt, Human
ccagcugcgggcaucgagaguu

SEQ ID NO: 1111490 - RNA, 22 nt, Human
gccuggagcagacgugucccgg

SEQ ID NO: 1111491 - RNA, 22 nt, Human
uauguguaggaggaggacaggg

SEQ ID NO: 1111492 - RNA, 23 nt, Human
acagagaucuugacuuguaugga

SEQ ID NO: 1111493 - RNA, 22 nt, Human
ggugcagaggagccagcugggg

SEQ ID NO: 1111494 - RNA, 22 nt, Human
ugcagcuccucuggcugccuga

SEQ ID NO: 1111495 - RNA, 22 nt, Human
cgugucaucugagccuugggcg

SEQ ID NO: 1111496 - RNA, 22 nt, Human
uugugaaacauucauggauuug

SEQ ID NO: 1111497 - RNA, 22 nt, Human
ugcagcucugaacagucaugaa

SEQ ID NO: 1111498 - RNA, 22 nt, Human
gcagcccagagcgcaggacccc

SEQ ID NO: 1111499 - RNA, 22 nt, Human
gcagaagggaauaaggagcuuu

SEQ ID NO: 1111500 - RNA, 22 nt, Human
augcacuugcguguuugcaaau

SEQ ID NO: 1111501 - RNA, 22 nt, Human
ucaugcacaugugucaccauca

SEQ ID NO: 1111502 - RNA, 22 nt, Human
ccagggcaauaggaacacuuuu

SEQ ID NO: 1111503 - RNA, 22 nt, Human
agugacagcugggaaggugaaa

SEQ ID NO: 1111504 - RNA, 22 nt, Human
uuucuagaggcuccaggggagu

SEQ ID NO: 1111505 - RNA, 22 nt, Human
auucaguaggucuagaauaaga

SEQ ID NO: 1111506 - RNA, 22 nt, Human
ucagcagggccuccuugugcag

SEQ ID NO: 1111507 - RNA, 22 nt, Human
gcugagaggcacuaucuccgga

SEQ ID NO: 1111508 - RNA, 22 nt, Human
cugcugggcuccucaugugacu

SEQ ID NO: 1111509 - RNA, 22 nt, Human
ggcugcucuucuuggcgaccuc

SEQ ID NO: 1111510 - RNA, 22 nt, Human
agggcagagaucugagugggca

SEQ ID NO: 1111511 - RNA, 22 nt, Human
gcagccacugggagugcuuaua

SEQ ID NO: 1111512 - RNA, 22 nt, Human
aacaaaugauaccaguucucaa

SEQ ID NO: 1111513 - RNA, 23 nt, Human
agccacuucuaucuugcuccugg

SEQ ID NO: 1111514 - RNA, 18 nt, Human
agaaggagcuaugggcag

SEQ ID NO: 1111515 - RNA, 22 nt, Human
ucagggacauuuagacacugau

SEQ ID NO: 1111516 - RNA, 22 nt, Human
ggcauguuucaucacaucaaga

SEQ ID NO: 1111517 - RNA, 19 nt, Human
cagcugcaccgugaccauc

SEQ ID NO: 1111518 - RNA, 22 nt, Human
gucucagaguccuacuuauucc

SEQ ID NO: 1111519 - RNA, 22 nt, Human
uucaaucauuuuuacauagucc

SEQ ID NO: 1111520 - RNA, 22 nt, Human
ggugaggcuaagugacacaggg

SEQ ID NO: 1111521 - RNA, 22 nt, Human
cccagcauggagugaggacuca

SEQ ID NO: 1111522 - RNA, 22 nt, Human
gcaaagguagccaaggagcuca

SEQ ID NO: 1111523 - RNA, 22 nt, Human
ucagaaauuuucucaguaguuc

SEQ ID NO: 1111524 - RNA, 22 nt, Human
gcugucugcugggucgcucagg

SEQ ID NO: 1111525 - RNA, 22 nt, Human
cagucccagacccagaaggugg

SEQ ID NO: 1111526 - RNA, 22 nt, Human
ucccagagccaagcuauggaug

SEQ ID NO: 1111527 - RNA, 20 nt, Human
gcccacucuaauccacuguc

SEQ ID NO: 1111528 - RNA, 22 nt, Human
ggaagagagggcugggccucaa

SEQ ID NO: 1111529 - RNA, 19 nt, Human
ucuggcuccugccaggcug

SEQ ID NO: 1111530 - RNA, 20 nt, Human
ugcagcugcaggaggguggg

SEQ ID NO: 1111531 - RNA, 22 nt, Human
gcucucugggugugucuagaua

SEQ ID NO: 1111532 - RNA, 22 nt, Human
ccauuuguucgcccagcuccaa

SEQ ID NO: 1111533 - RNA, 21 nt, Human
cccuugccugcacuccucggc

SEQ ID NO: 1111534 - RNA, 22 nt, Human
caguuuuugccauuaagaguaa

SEQ ID NO: 1111535 - RNA, 22 nt, Human
gaugagggccugguggcugugc

SEQ ID NO: 1111536 - RNA, 23 nt, Human
gaagcagaugucugaguaggcag

SEQ ID NO: 1111537 - RNA, 22 nt, Human
cugggccagcaacugcaaugga

SEQ ID NO: 1111538 - RNA, 22 nt, Human
uccuucagucuucugagccaua

SEQ ID NO: 1111539 - RNA, 22 nt, Human
cugccugugccaaugcuccuuu

SEQ ID NO: 1111540 - RNA, 22 nt, Human
ucaagagauugaauaauaacug

SEQ ID NO: 1111541 - RNA, 22 nt, Human
acagcagcaauagcagugacau

SEQ ID NO: 1111542 - RNA, 22 nt, Human
ucuggcuccacaccucacugca

SEQ ID NO: 1111543 - RNA, 19 nt, Human
uguagcaguuuaaaacaac

SEQ ID NO: 1111544 - RNA, 17 nt, Human
gcuuccugugcugggga

SEQ ID NO: 1111545 - RNA, 22 nt, Human
aauguguacuuuuucaugcuca

SEQ ID NO: 1111546 - RNA, 19 nt, Human
aacuagaaagguuuugaga

SEQ ID NO: 1111547 - RNA, 20 nt, Human
accuugaacccgccagccau

SEQ ID NO: 1111548 - RNA, 21 nt, Human
ccagcagcucaaggaucucuu

SEQ ID NO: 1111549 - RNA, 22 nt, Human
ggaccugccagaacucaggcua

SEQ ID NO: 1111550 - RNA, 22 nt, Human
uaugaagacaaugauagcauga

SEQ ID NO: 1111551 - RNA, 22 nt, Human
ccugccugcagaaaguaucucc

SEQ ID NO: 1111552 - RNA, 21 nt, Human
ucaaagcacauauuugcacau

SEQ ID NO: 1111553 - RNA, 22 nt, Human
uuccauaaucaccuuauucuuu

SEQ ID NO: 1111554 - RNA, 22 nt, Human
cuaaaugcccuacaaugacugg

SEQ ID NO: 1111555 - RNA, 22 nt, Human
ggcucuggaaaguguccuugau

SEQ ID NO: 1111556 - RNA, 23 nt, Human
ccugucugugcuggguggacaca

SEQ ID NO: 1111557 - RNA, 22 nt, Human
gagcugccugaacaagcagcag

SEQ ID NO: 1111558 - RNA, 22 nt, Human
cucuggagugcagccugguggc

SEQ ID NO: 1111559 - RNA, 22 nt, Human
augugcauuaaaugucaauguu

SEQ ID NO: 1111560 - RNA, 18 nt, Human
gcucugcccaggcugccc

SEQ ID NO: 1111561 - RNA, 22 nt, Human
acugugcaaugaguaauaaacu

SEQ ID NO: 1111562 - RNA, 22 nt, Human
uggccugccucccggcuucuuu

SEQ ID NO: 1111563 - RNA, 22 nt, Human
ucuggcucuaacuaggcaucag

SEQ ID NO: 1111564 - RNA, 22 nt, Human
aaaugccucugcuguacacaau

SEQ ID NO: 1111565 - RNA, 22 nt, Human
gcagcuggagcaucuucucauc

SEQ ID NO: 1111566 - RNA, 20 nt, Human
gcaaauggaucccacaagcc

SEQ ID NO: 1111567 - RNA, 19 nt, Human
gcuguauuaaagauacaug

SEQ ID NO: 1111568 - RNA, 22 nt, Human
ccuugcaggggaacaggcagug

SEQ ID NO: 1111569 - RNA, 22 nt, Human
agccaggauuggcugagccuua

SEQ ID NO: 1111570 - RNA, 22 nt, Human
ucucccagaggaucccagugga

SEQ ID NO: 1111571 - RNA, 22 nt, Human
gaagcccagggcguggccgggc

SEQ ID NO: 1111572 - RNA, 22 nt, Human
ggugcuggacacguggcacucc

SEQ ID NO: 1111573 - RNA, 22 nt, Human
guauacauagaugaugaacaag

SEQ ID NO: 1111574 - RNA, 22 nt, Human
agcugccugcuuaugagcucca

SEQ ID NO: 1111575 - RNA, 22 nt, Human
uauagaaguaagcauugugaug

SEQ ID NO: 1111576 - RNA, 22 nt, Human
gauuucaaagguucugcaugcc

SEQ ID NO: 1111577 - RNA, 22 nt, Human
uccaggacuagcauuucugaua

SEQ ID NO: 1111578 - RNA, 22 nt, Human
gagcacaggcuuugguggacac

SEQ ID NO: 1111579 - RNA, 22 nt, Human
uccagggaucuuuagagucuuu

SEQ ID NO: 1111580 - RNA, 22 nt, Human
cucaaguaagaaacagaauugg

SEQ ID NO: 1111581 - RNA, 22 nt, Human
gaaacccaaacuaagacaguag

SEQ ID NO: 1111582 - RNA, 22 nt, Human
uaagaagcuucugcuaaugccu

SEQ ID NO: 1111583 - RNA, 22 nt, Human
uccagggagagccgcugcucca

SEQ ID NO: 1111584 - RNA, 19 nt, Human
ggcucagggcgcugccgcc

SEQ ID NO: 1111585 - RNA, 19 nt, Human
agcagccaucgaccaugga

SEQ ID NO: 1111586 - RNA, 22 nt, Human
uccugccugcaaucccagcacu

SEQ ID NO: 1111587 - RNA, 22 nt, Human
ggccuagggaguggccaugccu

SEQ ID NO: 1111588 - RNA, 22 nt, Human
ucaggaucaggggccuuuccuu

SEQ ID NO: 1111589 - RNA, 22 nt, Human
ugaggccaaugacccugggcag

SEQ ID NO: 1111590 - RNA, 22 nt, Human
ucaggcacugcuuucugauaug

SEQ ID NO: 1111591 - RNA, 21 nt, Human
gccaccucgucucggagcagc

SEQ ID NO: 1111592 - RNA, 23 nt, Human
ucagagaaguuguaggcugggga

SEQ ID NO: 1111593 - RNA, 22 nt, Human
agaauucuguucuucgggugug

SEQ ID NO: 1111594 - RNA, 22 nt, Human
aagaauucacugguagagucaa

SEQ ID NO: 1111595 - RNA, 21 nt, Human
cuccugggcuaagauauagug

SEQ ID NO: 1111596 - RNA, 22 nt, Human
gaaaauguuuccuguuauuugc

SEQ ID NO: 1111597 - RNA, 22 nt, Human
uccuucagccaugggcucucca

SEQ ID NO: 1111598 - RNA, 17 nt, Human
cuggagccuccaacucc

SEQ ID NO: 1111599 - RNA, 22 nt, Human
cuggccuuggugcuugcagaca

SEQ ID NO: 1111600 - RNA, 22 nt, Human
aaagaaauagauggcauuuaaa

SEQ ID NO: 1111601 - RNA, 22 nt, Human
gccucugcaccaguacugugcc

SEQ ID NO: 1111602 - RNA, 22 nt, Human
uucacaggugacuggggauaac

SEQ ID NO: 1111603 - RNA, 22 nt, Human
acacaggggcucggcugggugc

SEQ ID NO: 1111604 - RNA, 22 nt, Human
ucuuuccuagaggcugaugagu

SEQ ID NO: 1111605 - RNA, 17 nt, Human
acagggcagaaacagcu

SEQ ID NO: 1111606 - RNA, 22 nt, Human
ucaagagaaggggaaauagacu

SEQ ID NO: 1111607 - RNA, 22 nt, Human
ccucugagaccagcucugcacc

SEQ ID NO: 1111608 - RNA, 22 nt, Human
cucccagggccaucgagucacu

SEQ ID NO: 1111609 - RNA, 18 nt, Human
aaaugcuaggcuacauga

SEQ ID NO: 1111610 - RNA, 22 nt, Human
aaaucaguuagugguaggauug

SEQ ID NO: 1111611 - RNA, 22 nt, Human
uaugcacauuaucuaauccauu

SEQ ID NO: 1111612 - RNA, 23 nt, Human
ccuggcuggauucucugcauuca

SEQ ID NO: 1111613 - RNA, 22 nt, Human
cacugcagaucagaggcugaga

SEQ ID NO: 1111614 - RNA, 22 nt, Human
acaaagucuuuuacaacaguca

SEQ ID NO: 1111615 - RNA, 22 nt, Human
ucccagagauuuccucuccuuc

SEQ ID NO: 1111616 - RNA, 18 nt, Human
agggaucaucacugcagc

SEQ ID NO: 1111617 - RNA, 22 nt, Human
gcagcccagguguagcucuuug

SEQ ID NO: 1111618 - RNA, 22 nt, Human
auccugggaagcugacauugaa

SEQ ID NO: 1111619 - RNA, 22 nt, Human
gcacagggccuggcacauaaga

SEQ ID NO: 1111620 - RNA, 22 nt, Human
ggugccagccuagugcaguggu

SEQ ID NO: 1111621 - RNA, 21 nt, Human
gggugggaggacacagcaggc

SEQ ID NO: 1111622 - RNA, 22 nt, Human
ugaagccacagagcaucugccu

SEQ ID NO: 1111623 - RNA, 22 nt, Human
cagggcuggcuguggcaaucuc

SEQ ID NO: 1111624 - RNA, 22 nt, Human
auggaaagggaagcaaggaaca

SEQ ID NO: 1111625 - RNA, 22 nt, Human
aagccagauagaagaacucauu

SEQ ID NO: 1111626 - RNA, 18 nt, Human
gcagcugcaguuguagcu

SEQ ID NO: 1111627 - RNA, 22 nt, Human
ugcagucuggauguccucagau

SEQ ID NO: 1111628 - RNA, 22 nt, Human
gucccugcccuccugggacuca

SEQ ID NO: 1111629 - RNA, 22 nt, Human
gcucugggaacugacugccuuc

SEQ ID NO: 1111630 - RNA, 22 nt, Human
agggcagagcugucuaaauggc

SEQ ID NO: 1111631 - RNA, 22 nt, Human
cagcauggcuugaguguuuccu

SEQ ID NO: 1111632 - RNA, 22 nt, Human
aggggugaaagagggcccucaa

SEQ ID NO: 1111633 - RNA, 22 nt, Human
caggaagagaacauggaggcug

SEQ ID NO: 1111634 - RNA, 22 nt, Human
uguggccuugcagccuggaggu

SEQ ID NO: 1111635 - RNA, 22 nt, Human
uccaggaggguuuucugccuuc

SEQ ID NO: 1111636 - RNA, 22 nt, Human
ggccucugaggacagccuuggc

SEQ ID NO: 1111637 - RNA, 22 nt, Human
cacagaggcaaccuucuggggu

SEQ ID NO: 1111638 - RNA, 22 nt, Human
ucugcucagugcuuaucucuaa

SEQ ID NO: 1111639 - RNA, 22 nt, Human
cagaaauucccauuucagauuc

SEQ ID NO: 1111640 - RNA, 22 nt, Human
ugcagugggccggaggccaggg

SEQ ID NO: 1111641 - RNA, 20 nt, Human
uguuucuuuuaaugagcggc

SEQ ID NO: 1111642 - RNA, 22 nt, Human
uccuggcccacuaugccagcau

SEQ ID NO: 1111643 - RNA, 22 nt, Human
ugggccuggcccuguggaggag

SEQ ID NO: 1111644 - RNA, 22 nt, Human
cacagaauuaagggagaaauau

SEQ ID NO: 1111645 - RNA, 22 nt, Human
ccaggcccugcuccucacacca

SEQ ID NO: 1111646 - RNA, 22 nt, Human
uuccucaugggguuccuucaga

SEQ ID NO: 1111647 - RNA, 22 nt, Human
ccuuaaaagaacuaucucuucu

SEQ ID NO: 1111648 - RNA, 22 nt, Human
cagcuuugauucuuucugccau

SEQ ID NO: 1111649 - RNA, 21 nt, Human
uccauaagagaccaucuccua

SEQ ID NO: 1111650 - RNA, 19 nt, Human
ccugugugggguagagauc

SEQ ID NO: 1111651 - RNA, 22 nt, Human
agaggccacuuugccugugaug

SEQ ID NO: 1111652 - RNA, 22 nt, Human
cagggccagcgcccaggcccag

SEQ ID NO: 1111653 - RNA, 21 nt, Human
cagagcagcguucugcugugg

SEQ ID NO: 1111654 - RNA, 22 nt, Human
cccagcaggucggugcugccug

SEQ ID NO: 1111655 - RNA, 22 nt, Human
gcagugaaucuggcaagaauuu

SEQ ID NO: 1111656 - RNA, 22 nt, Human
guccacauaggaacccagcuuc

SEQ ID NO: 1111657 - RNA, 22 nt, Human
cugagauggaguuucgcucuuc

SEQ ID NO: 1111658 - RNA, 22 nt, Human
uggccuggggaccugugagacc

SEQ ID NO: 1111659 - RNA, 22 nt, Human
gcagugcuuuagucuguccuuu

SEQ ID NO: 1111660 - RNA, 22 nt, Human
uggcagagaugaagaguuguuu

SEQ ID NO: 1111661 - RNA, 22 nt, Human
uugcagagaucagcagguuuga

SEQ ID NO: 1111662 - RNA, 22 nt, Human
ugaugguuuuauuaauaggacc

SEQ ID NO: 1111663 - RNA, 22 nt, Human
uucuuaaagaggcaaaacacag

SEQ ID NO: 1111664 - RNA, 22 nt, Human
aggccuguuccaggccccuuuu

SEQ ID NO: 1111665 - RNA, 22 nt, Human
agccuguccagaggacagggcu

SEQ ID NO: 1111666 - RNA, 22 nt, Human
caauagcagcuucugaaugcaa

SEQ ID NO: 1111667 - RNA, 22 nt, Human
aucccugcccucauggagcuua

SEQ ID NO: 1111668 - RNA, 22 nt, Human
agcugccuguccuaggccauca

SEQ ID NO: 1111669 - RNA, 22 nt, Human
ccaagggcucugacuugccugc

SEQ ID NO: 1111670 - RNA, 22 nt, Human
ucccugggcaucacguugcuuc

SEQ ID NO: 1111671 - RNA, 22 nt, Human
agagccugggaauuugcauguu

SEQ ID NO: 1111672 - RNA, 22 nt, Human
aaggcccuaauagagcacauau

SEQ ID NO: 1111673 - RNA, 22 nt, Human
gauuucaaggauguuagaggug

SEQ ID NO: 1111674 - RNA, 22 nt, Human
acacagggcaaugcuuugaccu

SEQ ID NO: 1111675 - RNA, 22 nt, Human
cugucuccuccacugcauggga

SEQ ID NO: 1111676 - RNA, 22 nt, Human
gaggaguggaguugcuggguug

SEQ ID NO: 1111677 - RNA, 22 nt, Human
caggcagcucgaugccuuguug

SEQ ID NO: 1111678 - RNA, 22 nt, Human
ccuggagcacagcccaguccca

SEQ ID NO: 1111679 - RNA, 22 nt, Human
cuggugccuccucccugugcuu

SEQ ID NO: 1111680 - RNA, 22 nt, Human
caauaugcaagcuauuaaguau

SEQ ID NO: 1111681 - RNA, 22 nt, Human
auugcacaaacacagucagacu

SEQ ID NO: 1111682 - RNA, 22 nt, Human
ccagaggucuccugcacgggau

SEQ ID NO: 1111683 - RNA, 22 nt, Human
gcaggggcugagcaccagcggg

SEQ ID NO: 1111684 - RNA, 22 nt, Human
uccuggagcuuccuucauggua

SEQ ID NO: 1111685 - RNA, 22 nt, Human
gagagcugcagccgagaggggg

SEQ ID NO: 1111686 - RNA, 22 nt, Human
gugugcagaagacacaagacau

SEQ ID NO: 1111687 - RNA, 17 nt, Human
guccugggaggagagag

SEQ ID NO: 1111688 - RNA, 22 nt, Human
guucauauuacuuugagugcag

SEQ ID NO: 1111689 - RNA, 22 nt, Human
acuccuggggauccauuccuuu

SEQ ID NO: 1111690 - RNA, 18 nt, Human
acagaggcagacauguau

SEQ ID NO: 1111691 - RNA, 22 nt, Human
aggcacugaaggaagcuugcgc

SEQ ID NO: 1111692 - RNA, 22 nt, Human
cagaggccucacuuccagccag

SEQ ID NO: 1111693 - RNA, 22 nt, Human
ugagggaggcccuuugagcaga

SEQ ID NO: 1111694 - RNA, 20 nt, Human
cagcucugggaaagaggcca

SEQ ID NO: 1111695 - RNA, 22 nt, Human
cuguuuauuacacuggauagca

SEQ ID NO: 1111696 - RNA, 22 nt, Human
auuauguagguuaggugguugu

SEQ ID NO: 1111697 - RNA, 22 nt, Human
uggccugggccggcagauauac

SEQ ID NO: 1111698 - RNA, 22 nt, Human
auuucacucuuaauugcuuccu

SEQ ID NO: 1111699 - RNA, 22 nt, Human
cugcuuuguguggucccuccag

SEQ ID NO: 1111700 - RNA, 22 nt, Human
caguguccucagccagcagcua

SEQ ID NO: 1111701 - RNA, 22 nt, Human
ggaggaugccaagcugugcaca

SEQ ID NO: 1111702 - RNA, 22 nt, Human
caggcacuguguuaggcacugu

SEQ ID NO: 1111703 - RNA, 22 nt, Human
uuacaaagcguugagacaagua

SEQ ID NO: 1111704 - RNA, 22 nt, Human
aaggccagcuuguagggcuggu

SEQ ID NO: 1111705 - RNA, 18 nt, Human
gccugccuagagcuugcc

SEQ ID NO: 1111706 - RNA, 22 nt, Human
cccaaggccucuccuuggcuug

SEQ ID NO: 1111707 - RNA, 20 nt, Human
uguauauuuucugguguaaa

SEQ ID NO: 1111708 - RNA, 22 nt, Human
aggccugaaguguggagugggg

SEQ ID NO: 1111709 - RNA, 22 nt, Human
ucuggagauaagacagacagau

SEQ ID NO: 1111710 - RNA, 22 nt, Human
gucccaggcagagucaggaggg

SEQ ID NO: 1111711 - RNA, 22 nt, Human
auacauguuguaccauauguuu

SEQ ID NO: 1111712 - RNA, 22 nt, Human
caggccugggcuucggggcuga

SEQ ID NO: 1111713 - RNA, 22 nt, Human
uuaaacagguuuuugaauggcc

SEQ ID NO: 1111714 - RNA, 22 nt, Human
uguguacauaucuauccuagau

SEQ ID NO: 1111715 - RNA, 22 nt, Human
ccaccaggacagcccugagggg

SEQ ID NO: 1111716 - RNA, 22 nt, Human
ggcaggagaaaggucucuucuu

SEQ ID NO: 1111717 - RNA, 22 nt, Human
accagcagaguugaggaggaca

SEQ ID NO: 1111718 - RNA, 22 nt, Human
gaaaggagggaaacagagcggu

SEQ ID NO: 1111719 - RNA, 22 nt, Human
ucucaccauggugcuugcuuau

SEQ ID NO: 1111720 - RNA, 22 nt, Human
agugagggaugaagaacugcgg

SEQ ID NO: 1111721 - RNA, 22 nt, Human
aaguuacuggcaagggcugcag

SEQ ID NO: 1111722 - RNA, 22 nt, Human
agcaguggagcgagauguuuaa

SEQ ID NO: 1111723 - RNA, 20 nt, Human
aguguuccggaagacuggca

SEQ ID NO: 1111724 - RNA, 19 nt, Human
agccagggugagaaggagc

SEQ ID NO: 1111725 - RNA, 22 nt, Human
ucacaugcccuguauuuaccag

SEQ ID NO: 1111726 - RNA, 22 nt, Human
cagucacacaaguggacuuggg

SEQ ID NO: 1111727 - RNA, 22 nt, Human
uggcuggacagugggcagugga

SEQ ID NO: 1111728 - RNA, 22 nt, Human
cucccuggcacagcgagagguu

SEQ ID NO: 1111729 - RNA, 22 nt, Human
aagagcugcccaaggugaacag

SEQ ID NO: 1111730 - RNA, 22 nt, Human
ucugccagugguuuggcccuga

SEQ ID NO: 1111731 - RNA, 22 nt, Human
acagagcauuugggacagagag

SEQ ID NO: 1111732 - RNA, 22 nt, Human
uggaggagggcuggugucugua

SEQ ID NO: 1111733 - RNA, 22 nt, Human
acaugcaugucuaugggcaggu

SEQ ID NO: 1111734 - RNA, 22 nt, Human
cccucccagaugggcuugaggu

SEQ ID NO: 1111735 - RNA, 20 nt, Human
cucaggauugucuagccccu

SEQ ID NO: 1111736 - RNA, 22 nt, Human
agagcugagaauguggcuuccu

SEQ ID NO: 1111737 - RNA, 22 nt, Human
gcacacccucucaccagcacug

SEQ ID NO: 1111738 - RNA, 22 nt, Human
ggaccagagcucgggcuucuca

SEQ ID NO: 1111739 - RNA, 22 nt, Human
aucuggcucuuccuggaguucc

SEQ ID NO: 1111740 - RNA, 22 nt, Human
ucaaaguaaaaguauagaguuu

SEQ ID NO: 1111741 - RNA, 22 nt, Human
agaaauuccuaagguacacaag

SEQ ID NO: 1111742 - RNA, 22 nt, Human
ucauucuccucuggaaaaggca

SEQ ID NO: 1111743 - RNA, 22 nt, Human
agggacacugaugagaaauucu

SEQ ID NO: 1111744 - RNA, 19 nt, Human
ggcagaagguguaggggga

SEQ ID NO: 1111745 - RNA, 22 nt, Human
gcacagaacagagaaauagcca

SEQ ID NO: 1111746 - RNA, 22 nt, Human
gcagaggcuccauuuuacagau

SEQ ID NO: 1111747 - RNA, 22 nt, Human
gaaaugcaaauucucucucgcu

SEQ ID NO: 1111748 - RNA, 22 nt, Human
gggcuaggcuuggccagcacug

SEQ ID NO: 1111749 - RNA, 22 nt, Human
ccaggcagcucugauuuauguc

SEQ ID NO: 1111750 - RNA, 22 nt, Human
cagugcaugaaacaauaugcag

SEQ ID NO: 1111751 - RNA, 22 nt, Human
augcaguaaaauaggagguaau

SEQ ID NO: 1111752 - RNA, 22 nt, Human
agggggcaggagagaccugcug

SEQ ID NO: 1111753 - RNA, 22 nt, Human
aggggcugcuggguccgccccu

SEQ ID NO: 1111754 - RNA, 22 nt, Human
uggacagguugaguaggaggag

SEQ ID NO: 1111755 - RNA, 22 nt, Human
aagcgccacgagaagcuggacc

SEQ ID NO: 1111756 - RNA, 22 nt, Human
cucugagaggugagaagcagca

SEQ ID NO: 1111757 - RNA, 22 nt, Human
ugggcagauuaaugcaguggcu

SEQ ID NO: 1111758 - RNA, 22 nt, Human
ugugucagagguagagauggca

SEQ ID NO: 1111759 - RNA, 19 nt, Human
ggcccaaguacugagugcc

SEQ ID NO: 1111760 - RNA, 20 nt, Human
cuguccccgaggucaccagg

SEQ ID NO: 1111761 - RNA, 22 nt, Human
gcccuuccaacccagagggcaa

SEQ ID NO: 1111762 - RNA, 22 nt, Human
uugaaagggauauaucuuucug

SEQ ID NO: 1111763 - RNA, 22 nt, Human
augauugaccaucugcugggcu

SEQ ID NO: 1111764 - RNA, 21 nt, Human
aacaaagggaugcucaucuuu

SEQ ID NO: 1111765 - RNA, 22 nt, Human
ggcugcugcccaccccugcaug

SEQ ID NO: 1111766 - RNA, 22 nt, Human
guggaggagaggcgccuugcgg

SEQ ID NO: 1111767 - RNA, 22 nt, Human
cuuccaaacccaggguaugggc

SEQ ID NO: 1111768 - RNA, 17 nt, Human
ugguggcuggagucagg

SEQ ID NO: 1111769 - RNA, 22 nt, Human
ccugagugaauucccucacugu

SEQ ID NO: 1111770 - RNA, 22 nt, Human
ucacauuuuaucuauuuuaagu

SEQ ID NO: 1111771 - RNA, 22 nt, Human
aaggcccuggcaggaagcagga

SEQ ID NO: 1111772 - RNA, 20 nt, Human
gucagugucuucaguaguga

SEQ ID NO: 1111773 - RNA, 22 nt, Human
acaagagacaagagguucuucu

SEQ ID NO: 1111774 - RNA, 22 nt, Human
ccagcagaggggcggagugcag

SEQ ID NO: 1111775 - RNA, 22 nt, Human
agguggguaucaugagagauua

SEQ ID NO: 1111776 - RNA, 22 nt, Human
ucuuugcaggagcccuuugaac

SEQ ID NO: 1111777 - RNA, 22 nt, Human
gaggacagugugaucugccagc

SEQ ID NO: 1111778 - RNA, 22 nt, Human
cccucaggagaugucagcugga

SEQ ID NO: 1111779 - RNA, 22 nt, Human
ccuggaggagcgcugaccagcu

SEQ ID NO: 1111780 - RNA, 22 nt, Human
gaugguuugguaaaaguauguu

SEQ ID NO: 1111781 - RNA, 22 nt, Human
gcucaagagagaugcaguucuu

SEQ ID NO: 1111782 - RNA, 22 nt, Human
agugggcagugcgcucggaugc

SEQ ID NO: 1111783 - RNA, 18 nt, Human
caggucagccuggccuca

SEQ ID NO: 1111784 - RNA, 21 nt, Human
aaggagccuaggaggcucagg

SEQ ID NO: 1111785 - RNA, 22 nt, Human
cagaagcacuaggaggaaacgu

SEQ ID NO: 1111786 - RNA, 22 nt, Human
cccugggcaagcccuauuuucc

SEQ ID NO: 1111787 - RNA, 22 nt, Human
agaggaugauuuuaaggacacu

SEQ ID NO: 1111788 - RNA, 22 nt, Human
uaggcagggauuaggguugauu

SEQ ID NO: 1111789 - RNA, 22 nt, Human
cucuccuggggagcacacacac

SEQ ID NO: 1111790 - RNA, 22 nt, Human
agcagggcuuugcagacuuggg

SEQ ID NO: 1111791 - RNA, 22 nt, Human
agaaugcaguuugaaauaaggu

SEQ ID NO: 1111792 - RNA, 22 nt, Human
ugagcuuccucccugcauccau

SEQ ID NO: 1111793 - RNA, 22 nt, Human
agggaaaguaagcauuucauua

SEQ ID NO: 1111794 - RNA, 21 nt, Human
agcugggccucagccugcagu

SEQ ID NO: 1111795 - RNA, 22 nt, Human
uggcucagugacauuccuccca

SEQ ID NO: 1111796 - RNA, 22 nt, Human
ggcagcuguaagaugagugaau

SEQ ID NO: 1111797 - RNA, 19 nt, Human
ugggccugcaucugggucu

SEQ ID NO: 1111798 - RNA, 22 nt, Human
ggaggaccccagcagcucccca

SEQ ID NO: 1111799 - RNA, 22 nt, Human
ugggcagaucuuugguggcuag

SEQ ID NO: 1111800 - RNA, 22 nt, Human
uuaaguccuugguaauuuucuu

SEQ ID NO: 1111801 - RNA, 22 nt, Human
gcauggcagugaggauggugcu

SEQ ID NO: 1111802 - RNA, 22 nt, Human
ucacaggguaucugggauggau

SEQ ID NO: 1111803 - RNA, 18 nt, Human
ccuggcagccaugcgcgc

SEQ ID NO: 1111804 - RNA, 22 nt, Human
uacuuucuagcucuccccaguu

SEQ ID NO: 1111805 - RNA, 22 nt, Human
ggguggaggagaacaggcccca

SEQ ID NO: 1111806 - RNA, 19 nt, Human
ccucccacggauuccuucc

SEQ ID NO: 1111807 - RNA, 22 nt, Human
auaguaacuggcauguuuauga

SEQ ID NO: 1111808 - RNA, 22 nt, Human
gauggcacacagacauccccgc

SEQ ID NO: 1111809 - RNA, 22 nt, Human
gugagcaggauuucauggugua

SEQ ID NO: 1111810 - RNA, 22 nt, Human
aucaguuugauaauaaggcuug

SEQ ID NO: 1111811 - RNA, 22 nt, Human
ggcaggcuggcuuuguuccagg

SEQ ID NO: 1111812 - RNA, 22 nt, Human
uggcucuguuuuaugaguacca

SEQ ID NO: 1111813 - RNA, 22 nt, Human
ccacugucagaggggcugugcc

SEQ ID NO: 1111814 - RNA, 22 nt, Human
uacaaaguauauuucuagcugu

SEQ ID NO: 1111815 - RNA, 22 nt, Human
auagaaauggcagcuggugcua

SEQ ID NO: 1111816 - RNA, 22 nt, Human
cagaggccuuucuacagugaua

SEQ ID NO: 1111817 - RNA, 22 nt, Human
ucuggcucacuucaggcuucac

SEQ ID NO: 1111818 - RNA, 22 nt, Human
ugcaauaaggaguaauaguaaa

SEQ ID NO: 1111819 - RNA, 22 nt, Human
gcagugccuugcuucucugucu

SEQ ID NO: 1111820 - RNA, 22 nt, Human
aagauacauaaagguagagucu

SEQ ID NO: 1111821 - RNA, 21 nt, Human
ucacaugcccauuacuggagc

SEQ ID NO: 1111822 - RNA, 22 nt, Human
ggaggcaggaaagacagguuca

SEQ ID NO: 1111823 - RNA, 22 nt, Human
cugucaccuguucacugcagca

SEQ ID NO: 1111824 - RNA, 22 nt, Human
ccugaggcuuaaucugucccaa

SEQ ID NO: 1111825 - RNA, 22 nt, Human
uugaagcauuguggcuuguauu

SEQ ID NO: 1111826 - RNA, 19 nt, Human
ugucuuaauuaacucagag

SEQ ID NO: 1111827 - RNA, 22 nt, Human
ugagccuggcggaagcagcgug

SEQ ID NO: 1111828 - RNA, 22 nt, Human
cagcugcccauccugggaaaug

SEQ ID NO: 1111829 - RNA, 22 nt, Human
uaaggcauucucaugcugugaa

SEQ ID NO: 1111830 - RNA, 22 nt, Human
uagggcuauaagagaauaagac

SEQ ID NO: 1111831 - RNA, 22 nt, Human
ggcagccauggacacuggcuag

SEQ ID NO: 1111832 - RNA, 22 nt, Human
ggcagcaguccauggcccaagg

SEQ ID NO: 1111833 - RNA, 20 nt, Human
ccagagcagccacugaaguu

SEQ ID NO: 1111834 - RNA, 22 nt, Human
cugcagcugucucuacugggca

SEQ ID NO: 1111835 - RNA, 22 nt, Human
gaggcagcaugguaccuuggag

SEQ ID NO: 1111836 - RNA, 22 nt, Human
agccuggagcuugaguuaugag

SEQ ID NO: 1111837 - RNA, 19 nt, Human
caaggguugggucugucau

SEQ ID NO: 1111838 - RNA, 22 nt, Human
ggguggggcccaggaaaucuau

SEQ ID NO: 1111839 - RNA, 22 nt, Human
ggagaguggauuccagcuguau

SEQ ID NO: 1111840 - RNA, 22 nt, Human
ucuuugcagaauuuaacuuugc

SEQ ID NO: 1111841 - RNA, 22 nt, Human
cagucacauugcccugcauuua

SEQ ID NO: 1111842 - RNA, 22 nt, Human
caggcugcagcagcaguggccc

SEQ ID NO: 1111843 - RNA, 22 nt, Human
gcuggccacauugugccguccu

SEQ ID NO: 1111844 - RNA, 21 nt, Human
gcagcagaggcuugacagaca

SEQ ID NO: 1111845 - RNA, 22 nt, Human
auuucacucucccugccacuua

SEQ ID NO: 1111846 - RNA, 22 nt, Human
gggcucuguccauuccuucaua

SEQ ID NO: 1111847 - RNA, 22 nt, Human
cagagcugcucaugguggccag

SEQ ID NO: 1111848 - RNA, 22 nt, Human
ggcugccuugacccuggcuccg

SEQ ID NO: 1111849 - RNA, 22 nt, Human
uccugccucuuuucuuauucca

SEQ ID NO: 1111850 - RNA, 22 nt, Human
agugucauaugccacugcaucc

SEQ ID NO: 1111851 - RNA, 22 nt, Human
cccuggcaaaacacucucuuga

SEQ ID NO: 1111852 - RNA, 22 nt, Human
gcugaagcugcagcaggaggaa

SEQ ID NO: 1111853 - RNA, 22 nt, Human
caugcacaaagguaagaugcgu

SEQ ID NO: 1111854 - RNA, 22 nt, Human
agggcugccugacuccagagcc

SEQ ID NO: 1111855 - RNA, 22 nt, Human
aaauguguguauguacauauau

SEQ ID NO: 1111856 - RNA, 22 nt, Human
ucugcaggccucgacaaggcca

SEQ ID NO: 1111857 - RNA, 22 nt, Human
augauuuccaguuguugcuaag

SEQ ID NO: 1111858 - RNA, 22 nt, Human
gagggcugauaaaugcgcaugg

SEQ ID NO: 1111859 - RNA, 22 nt, Human
gccugucugcgucacgcuuauu

SEQ ID NO: 1111860 - RNA, 22 nt, Human
auucuccacacauccagaccuu

SEQ ID NO: 1111861 - RNA, 22 nt, Human
cugagcuuccaguuccuccagg

SEQ ID NO: 1111862 - RNA, 21 nt, Human
agcugcuuucagcuccuagag

SEQ ID NO: 1111863 - RNA, 22 nt, Human
caaaggcaguuacugaaugaag

SEQ ID NO: 1111864 - RNA, 22 nt, Human
cccagguggcagaagcugcagu

SEQ ID NO: 1111865 - RNA, 22 nt, Human
ccagcaccuugaucuuggaguu

SEQ ID NO: 1111866 - RNA, 22 nt, Human
ugagguaggugguaagagauac

SEQ ID NO: 1111867 - RNA, 23 nt, Human
aguacauucgaaaaauucuguga

SEQ ID NO: 1111868 - RNA, 22 nt, Human
uggcucagaaggcugccuucac

SEQ ID NO: 1111869 - RNA, 22 nt, Human
gguggccucugcaggccucgac

SEQ ID NO: 1111870 - RNA, 22 nt, Human
gccugcaguucugugcuaggca

SEQ ID NO: 1111871 - RNA, 22 nt, Human
uguguacucaauugagccauuu

SEQ ID NO: 1111872 - RNA, 22 nt, Human
gcugccucccccauggcuggaa

SEQ ID NO: 1111873 - RNA, 22 nt, Human
cauuucugggagacaugcuaga

SEQ ID NO: 1111874 - RNA, 22 nt, Human
gggggcuggaauauccaucaac

SEQ ID NO: 1111875 - RNA, 19 nt, Human
ucaaagcaagcauguucug

SEQ ID NO: 1111876 - RNA, 22 nt, Human
cagacagacagccguggccacc

SEQ ID NO: 1111877 - RNA, 22 nt, Human
ccucugggugggaggccgggcg

SEQ ID NO: 1111878 - RNA, 22 nt, Human
cccugccuuguuggagccuaug

SEQ ID NO: 1111879 - RNA, 22 nt, Human
acagagguguuccagaccuagg

SEQ ID NO: 1111880 - RNA, 22 nt, Human
aagugacaccucuucccuuucc

SEQ ID NO: 1111881 - RNA, 22 nt, Human
gaggggcagaaugugaucaggg

SEQ ID NO: 1111882 - RNA, 22 nt, Human
ugacagaaugugacucucagau

SEQ ID NO: 1111883 - RNA, 22 nt, Human
ggccuuggggaggauggugucc

SEQ ID NO: 1111884 - RNA, 22 nt, Human
auuaaaagcuucccaagaguua

SEQ ID NO: 1111885 - RNA, 22 nt, Human
aaagaacaauguggaaucuccu

SEQ ID NO: 1111886 - RNA, 22 nt, Human
uuacauuuggcuauguccucua

SEQ ID NO: 1111887 - RNA, 22 nt, Human
auuugucucugcacuuuacuca

SEQ ID NO: 1111888 - RNA, 22 nt, Human
augcaguacugauacaugccac

SEQ ID NO: 1111889 - RNA, 22 nt, Human
auugucuucuggucuuaucuuu

SEQ ID NO: 1111890 - RNA, 22 nt, Human
agggaggagaauggacuccuuc

SEQ ID NO: 1111891 - RNA, 22 nt, Human
ugggcagaggcucugaagucca

SEQ ID NO: 1111892 - RNA, 22 nt, Human
aaggcacucagccuugggacag

SEQ ID NO: 1111893 - RNA, 18 nt, Human
uuaagagcugaaagggga

SEQ ID NO: 1111894 - RNA, 22 nt, Human
ugucacagggauaccauggggc

SEQ ID NO: 1111895 - RNA, 22 nt, Human
caggcagcgcucguggccuggc

SEQ ID NO: 1111896 - RNA, 21 nt, Human
uuagcaaagcaaacacaugcu

SEQ ID NO: 1111897 - RNA, 22 nt, Human
ggccuggcauggggacuaaggg

SEQ ID NO: 1111898 - RNA, 22 nt, Human
uggcucagaguucaucuuuuag

SEQ ID NO: 1111899 - RNA, 21 nt, Human
uuacuuuugcaccaaccuaau

SEQ ID NO: 1111900 - RNA, 22 nt, Human
uuguuucauggggauguuuauu

SEQ ID NO: 1111901 - RNA, 22 nt, Human
gaaaugugugacaaguuucaau

SEQ ID NO: 1111902 - RNA, 22 nt, Human
gacagcauggugucuguucagg

SEQ ID NO: 1111903 - RNA, 22 nt, Human
agcagaacauuuucagggcugu

SEQ ID NO: 1111904 - RNA, 22 nt, Human
gacuguguccaugugcuggauu

SEQ ID NO: 1111905 - RNA, 22 nt, Human
ggcucaggaccugggauugcca

SEQ ID NO: 1111906 - RNA, 22 nt, Human
ucaguguagcagacuuguagcc

SEQ ID NO: 1111907 - RNA, 22 nt, Human
cugucagguuggucucagagcu

SEQ ID NO: 1111908 - RNA, 17 nt, Human
ucagcaaagacaaagga

SEQ ID NO: 1111909 - RNA, 22 nt, Human
caggcacagaguuauucauuua

SEQ ID NO: 1111910 - RNA, 22 nt, Human
cucuggaauuaaggaagccugu

SEQ ID NO: 1111911 - RNA, 22 nt, Human
acuccugguuuguguccuggcu

SEQ ID NO: 1111912 - RNA, 22 nt, Human
ggugaggcccagugaucugugu

SEQ ID NO: 1111913 - RNA, 22 nt, Human
caggggcucugagauugucuaa

SEQ ID NO: 1111914 - RNA, 22 nt, Human
uccagggagauacuggcugcca

SEQ ID NO: 1111915 - RNA, 21 nt, Human
ugcugccauagaccugaggga

SEQ ID NO: 1111916 - RNA, 22 nt, Human
cacagggcaggccccaggccuc

SEQ ID NO: 1111917 - RNA, 18 nt, Human
ucucagaggccauccuag

SEQ ID NO: 1111918 - RNA, 22 nt, Human
ccuucagaccuagacaggaauc

SEQ ID NO: 1111919 - RNA, 21 nt, Human
ggcuccugcuuugugaggggc

SEQ ID NO: 1111920 - RNA, 22 nt, Human
ggccuuggugccauggccaguu

SEQ ID NO: 1111921 - RNA, 22 nt, Human
gagguagccacagauagagacu

SEQ ID NO: 1111922 - RNA, 21 nt, Human
agaaauguaucauucuuuucc

SEQ ID NO: 1111923 - RNA, 22 nt, Human
caggcuggagugaguguagugg

SEQ ID NO: 1111924 - RNA, 22 nt, Human
gcuuccugagaaacaaucugau

SEQ ID NO: 1111925 - RNA, 22 nt, Human
cuggccaacuugcuuguuggca

SEQ ID NO: 1111926 - RNA, 21 nt, Human
ggagucagggucuggcugggg

SEQ ID NO: 1111927 - RNA, 22 nt, Human
ggagccagaggcugcugcugug

SEQ ID NO: 1111928 - RNA, 22 nt, Human
agcauuuauuucuuagaaauug

SEQ ID NO: 1111929 - RNA, 18 nt, Human
acauacauucugucugca

SEQ ID NO: 1111930 - RNA, 22 nt, Human
acugcagcaaagcccgugucuu

SEQ ID NO: 1111931 - RNA, 22 nt, Human
aagcagcauaauugcuauuuua

SEQ ID NO: 1111932 - RNA, 22 nt, Human
aggagccaugagugacaucaca

SEQ ID NO: 1111933 - RNA, 23 nt, Human
cuccucguaacucuguggugggu

SEQ ID NO: 1111934 - RNA, 22 nt, Human
ugcagaagcagagaguugccaa

SEQ ID NO: 1111935 - RNA, 22 nt, Human
acagccauagaugcuuauguaa

SEQ ID NO: 1111936 - RNA, 22 nt, Human
gaaaguuuauagguuauauaau

SEQ ID NO: 1111937 - RNA, 22 nt, Human
acuggcaguuugagaaugcauu

SEQ ID NO: 1111938 - RNA, 22 nt, Human
gugugccaccagucaaggugaa

SEQ ID NO: 1111939 - RNA, 22 nt, Human
aagacccacaaggcugaauguu

SEQ ID NO: 1111940 - RNA, 22 nt, Human
cauugacaucaggcuuggccaa

SEQ ID NO: 1111941 - RNA, 22 nt, Human
gccuaauaacuagcuguguaac

SEQ ID NO: 1111942 - RNA, 22 nt, Human
cucugcugcccaggccugcuag

SEQ ID NO: 1111943 - RNA, 22 nt, Human
gacaggaggcagagcucaggug

SEQ ID NO: 1111944 - RNA, 22 nt, Human
aggcucagcaucugauucauau

SEQ ID NO: 1111945 - RNA, 22 nt, Human
uggacaggugagugacucaggg

SEQ ID NO: 1111946 - RNA, 22 nt, Human
aggcuggcuggcaggggacaca

SEQ ID NO: 1111947 - RNA, 22 nt, Human
ugccugaggagucagggcaggu

SEQ ID NO: 1111948 - RNA, 22 nt, Human
agagugauggguugugcugacc

SEQ ID NO: 1111949 - RNA, 23 nt, Human
aggcuuccuaucuuagagcuggg

SEQ ID NO: 1111950 - RNA, 22 nt, Human
caaaugcuaacuucuuuccaaa

SEQ ID NO: 1111951 - RNA, 22 nt, Human
acuacuuugggccauuuguuua

SEQ ID NO: 1111952 - RNA, 22 nt, Human
uggcucaguuucaguccugguu

SEQ ID NO: 1111953 - RNA, 22 nt, Human
ccaggcugcucacaagcugccc

SEQ ID NO: 1111954 - RNA, 22 nt, Human
aaggucauuuaacaauuuauga

SEQ ID NO: 1111955 - RNA, 22 nt, Human
uuguguccugauuugacacaau

SEQ ID NO: 1111956 - RNA, 22 nt, Human
uccugccuagcaggugaccuau

SEQ ID NO: 1111957 - RNA, 22 nt, Human
uuucauaugggcauuggcaaua

SEQ ID NO: 1111958 - RNA, 21 nt, Human
ccaggcagagcugugaguucu

SEQ ID NO: 1111959 - RNA, 22 nt, Human
aagucacacuagacaacugagg

SEQ ID NO: 1111960 - RNA, 22 nt, Human
aaaaucaguacacuuuauuuug

SEQ ID NO: 1111961 - RNA, 22 nt, Human
aauuugcaugaugagaacaaua

SEQ ID NO: 1111962 - RNA, 22 nt, Human
ccacaggggucucuguagcuga

SEQ ID NO: 1111963 - RNA, 22 nt, Human
ugccucagcugaggccgcucca

SEQ ID NO: 1111964 - RNA, 22 nt, Human
uugaaggacaucuuguuucuag

SEQ ID NO: 1111965 - RNA, 17 nt, Human
auuuccucagggcugag

SEQ ID NO: 1111966 - RNA, 22 nt, Human
ccacagggaacaugacagccuu

SEQ ID NO: 1111967 - RNA, 22 nt, Human
gccacugcacuccagcccaggc

SEQ ID NO: 1111968 - RNA, 22 nt, Human
acacugaagagcacuuucaaag

SEQ ID NO: 1111969 - RNA, 22 nt, Human
ugccaggagagugcaugcaggg

SEQ ID NO: 1111970 - RNA, 22 nt, Human
acaaagucugaaaccugaggca

SEQ ID NO: 1111971 - RNA, 22 nt, Human
ggagagaaauugagguagcaag

SEQ ID NO: 1111972 - RNA, 22 nt, Human
uuuggaaaguugucacuuuaga

SEQ ID NO: 1111973 - RNA, 22 nt, Human
cacagcugccauggcugcacuu

SEQ ID NO: 1111974 - RNA, 22 nt, Human
uggaccugcuggaugggcaggu

SEQ ID NO: 1111975 - RNA, 22 nt, Human
ucugucacccagagugcagugg

SEQ ID NO: 1111976 - RNA, 19 nt, Human
uguuuuguuaaagcagucc

SEQ ID NO: 1111977 - RNA, 22 nt, Human
aaauuguugaucuacaguaagg

SEQ ID NO: 1111978 - RNA, 22 nt, Human
auguaacaggugaagcucugag

SEQ ID NO: 1111979 - RNA, 22 nt, Human
gccaggcuggugucacaacucu

SEQ ID NO: 1111980 - RNA, 22 nt, Human
uggaagcagugauucuugucug

SEQ ID NO: 1111981 - RNA, 22 nt, Human
auugaaagagaauguagcucuu

SEQ ID NO: 1111982 - RNA, 22 nt, Human
gaggagcuggcagcgucuccgc

SEQ ID NO: 1111983 - RNA, 22 nt, Human
augugugccccuuuuacucuuu

SEQ ID NO: 1111984 - RNA, 22 nt, Human
uggccuggcagagcaaggccug

SEQ ID NO: 1111985 - RNA, 22 nt, Human
agcugccaccucugccuuuggg

SEQ ID NO: 1111986 - RNA, 20 nt, Human
gcugccuguuucuguaagua

SEQ ID NO: 1111987 - RNA, 22 nt, Human
ucucacugggucacagcagagg

SEQ ID NO: 1111988 - RNA, 22 nt, Human
acauuuaaauaccuauguuucu

SEQ ID NO: 1111989 - RNA, 22 nt, Human
ccucucauagucuguauccuuu

SEQ ID NO: 1111990 - RNA, 22 nt, Human
agcugucuaccugcagaguccu

SEQ ID NO: 1111991 - RNA, 22 nt, Human
gagccugaauuugaccugcuua

SEQ ID NO: 1111992 - RNA, 22 nt, Human
ccuuuggguucaaucucggucu

SEQ ID NO: 1111993 - RNA, 22 nt, Human
uguguuccuucgucuucccuuc

SEQ ID NO: 1111994 - RNA, 22 nt, Human
ggucucuguugccuccaucaag

SEQ ID NO: 1111995 - RNA, 22 nt, Human
aagccaggaagagagccuucac

SEQ ID NO: 1111996 - RNA, 22 nt, Human
ucugaggcauaaccuguucugc

SEQ ID NO: 1111997 - RNA, 22 nt, Human
gcagugguggagcuuacauauc

SEQ ID NO: 1111998 - RNA, 22 nt, Human
cagggcagggauguugcggcag

SEQ ID NO: 1111999 - RNA, 22 nt, Human
accagagaaaacacagcaggcu

SEQ ID NO: 1112000 - RNA, 22 nt, Human
uaaauucugaucaaguuccuuc

SEQ ID NO: 1112001 - RNA, 20 nt, Human
cugggcagguguuugaucuc

SEQ ID NO: 1112002 - RNA, 22 nt, Human
guggccuggaugagcuucgaca

SEQ ID NO: 1112003 - RNA, 22 nt, Human
uaacagaaauauuuccagguga

SEQ ID NO: 1112004 - RNA, 22 nt, Human
ugucucugagaugacucccacc

SEQ ID NO: 1112005 - RNA, 22 nt, Human
cuagaaaaauacuuuauuguga

SEQ ID NO: 1112006 - RNA, 22 nt, Human
agauuucccacuccauguauug

SEQ ID NO: 1112007 - RNA, 22 nt, Human
agcagggcugcagugugucuuu

SEQ ID NO: 1112008 - RNA, 22 nt, Human
gguuugcacgauauuuccaugg

SEQ ID NO: 1112009 - RNA, 22 nt, Human
cagcagcucccauccgcugagc

SEQ ID NO: 1112010 - RNA, 22 nt, Human
agcucacaguguccuuccucaa

SEQ ID NO: 1112011 - RNA, 22 nt, Human
aaucaguuagaaggaagagaau

SEQ ID NO: 1112012 - RNA, 18 nt, Human
acauuucucucugcguga

SEQ ID NO: 1112013 - RNA, 22 nt, Human
cagcagcuucuguugaucagaa

SEQ ID NO: 1112014 - RNA, 22 nt, Human
caggugcccagcuccugcugug

SEQ ID NO: 1112015 - RNA, 22 nt, Human
cugcuuugaaaauaaacuuguc

SEQ ID NO: 1112016 - RNA, 22 nt, Human
aacaggagaguaaauauaugau

SEQ ID NO: 1112017 - RNA, 22 nt, Human
uggaaagaugaagauguuuaag

SEQ ID NO: 1112018 - RNA, 22 nt, Human
uggccaggggaguuccccucca

SEQ ID NO: 1112019 - RNA, 22 nt, Human
cuggccugggagcugcuagcgu

SEQ ID NO: 1112020 - RNA, 22 nt, Human
aaaugcacugaacacauguugu

SEQ ID NO: 1112021 - RNA, 22 nt, Human
aggcugggcuccgcccaacucc

SEQ ID NO: 1112022 - RNA, 22 nt, Human
ucagcugccucucccuggaaga

SEQ ID NO: 1112023 - RNA, 22 nt, Human
cccugaggggaguggugaggug

SEQ ID NO: 1112024 - RNA, 22 nt, Human
uggcugaauaaaauaugguguu

SEQ ID NO: 1112025 - RNA, 22 nt, Human
caagggccuccaccuugcucgu

SEQ ID NO: 1112026 - RNA, 22 nt, Human
agcuccugaaaagcgcuugcuu

SEQ ID NO: 1112027 - RNA, 19 nt, Human
ucccgcccacugagcgugc

SEQ ID NO: 1112028 - RNA, 22 nt, Human
cugcaggauucucccaguugga

SEQ ID NO: 1112029 - RNA, 22 nt, Human
ggccugcuuuccgagccugcag

SEQ ID NO: 1112030 - RNA, 22 nt, Human
ggagagugggagcaacuguugc

SEQ ID NO: 1112031 - RNA, 22 nt, Human
cugggacagcugagacaggaga

SEQ ID NO: 1112032 - RNA, 22 nt, Human
ucucagagagaugaaacuucca

SEQ ID NO: 1112033 - RNA, 22 nt, Human
cuggagagaccgaaagaggcug

SEQ ID NO: 1112034 - RNA, 22 nt, Human
gcagagccgugaauggauuuca

SEQ ID NO: 1112035 - RNA, 22 nt, Human
agagugaaguucaucgugcagc

SEQ ID NO: 1112036 - RNA, 22 nt, Human
ccucaggguggcaucagaucuu

SEQ ID NO: 1112037 - RNA, 22 nt, Human
gcacacaggcaguuuccagcca

SEQ ID NO: 1112038 - RNA, 22 nt, Human
aggggacacggcuucuccaggg

SEQ ID NO: 1112039 - RNA, 22 nt, Human
aaugcacagcuaaagugguucc

SEQ ID NO: 1112040 - RNA, 22 nt, Human
cuggcugguuacuauuucuggu

SEQ ID NO: 1112041 - RNA, 22 nt, Human
gaagagcugcucagaacaugau

SEQ ID NO: 1112042 - RNA, 22 nt, Human
cugcccugggauggucugugcg

SEQ ID NO: 1112043 - RNA, 22 nt, Human
aaguucaaggcagguccugagg

SEQ ID NO: 1112044 - RNA, 22 nt, Human
gcccaucaucacuguggaggcu

SEQ ID NO: 1112045 - RNA, 21 nt, Human
ccugcagcaccagaaggagau

SEQ ID NO: 1112046 - RNA, 17 nt, Human
ucuguccagggagugug

SEQ ID NO: 1112047 - RNA, 22 nt, Human
gccagccccuuagggcucuccc

SEQ ID NO: 1112048 - RNA, 22 nt, Human
uucuuuccucccagccuuugga

SEQ ID NO: 1112049 - RNA, 22 nt, Human
ugccugccaugcagaaagcuga

SEQ ID NO: 1112050 - RNA, 22 nt, Human
agguaggguuaauggagauaua

SEQ ID NO: 1112051 - RNA, 22 nt, Human
ugccuggguucccaccccaaag

SEQ ID NO: 1112052 - RNA, 22 nt, Human
ucuuuacaguccucugucaauc

SEQ ID NO: 1112053 - RNA, 22 nt, Human
auucaguucuaaggucagugcc

SEQ ID NO: 1112054 - RNA, 22 nt, Human
ucagagaaguaagguggggugc

SEQ ID NO: 1112055 - RNA, 21 nt, Human
ccaggguccagcugccauggu

SEQ ID NO: 1112056 - RNA, 22 nt, Human
aaaugugugcacaaagacagcu

SEQ ID NO: 1112057 - RNA, 22 nt, Human
ucccaaggcacagggcagggac

SEQ ID NO: 1112058 - RNA, 22 nt, Human
cugggagucuggccucuggucc

SEQ ID NO: 1112059 - RNA, 22 nt, Human
cagcauggagacaaagugggca

SEQ ID NO: 1112060 - RNA, 16 nt, Human
ugggcagaugagaaga

SEQ ID NO: 1112061 - RNA, 20 nt, Human
ugcuggggacauacagggug

SEQ ID NO: 1112062 - RNA, 22 nt, Human
uccaucagauucccuccugaga

SEQ ID NO: 1112063 - RNA, 22 nt, Human
agaaauguacgauguuaugcag

SEQ ID NO: 1112064 - RNA, 22 nt, Human
aaaugugcuugugaucagcugu

SEQ ID NO: 1112065 - RNA, 21 nt, Human
gggccacaccuucugcagacc

SEQ ID NO: 1112066 - RNA, 22 nt, Human
ugaugcugagccugggacugac

SEQ ID NO: 1112067 - RNA, 17 nt, Human
aggcagcucagaacauc

SEQ ID NO: 1112068 - RNA, 22 nt, Human
uccaggcuagguuuacaggaca

SEQ ID NO: 1112069 - RNA, 22 nt, Human
aaauguguuugauaggaauauu

SEQ ID NO: 1112070 - RNA, 22 nt, Human
cagggguguuuuuggccaggag

SEQ ID NO: 1112071 - RNA, 22 nt, Human
cauuugaugacucaacucauaa

SEQ ID NO: 1112072 - RNA, 22 nt, Human
gugcagugacccuggagagcug

SEQ ID NO: 1112073 - RNA, 22 nt, Human
uuuuccucuguuauuaguguga

SEQ ID NO: 1112074 - RNA, 22 nt, Human
cugcugagguccuugcucagac

SEQ ID NO: 1112075 - RNA, 21 nt, Human
uguucacauggagcagaaugu

SEQ ID NO: 1112076 - RNA, 22 nt, Human
gcugagagugagcacuggauau

SEQ ID NO: 1112077 - RNA, 22 nt, Human
uccagggagauggcagaggcug

SEQ ID NO: 1112078 - RNA, 22 nt, Human
cugcaguguucuggaaugcauu

SEQ ID NO: 1112079 - RNA, 22 nt, Human
aaauguguauaugaaacaugau

SEQ ID NO: 1112080 - RNA, 22 nt, Human
uagccucucuccuccacaaccu

SEQ ID NO: 1112081 - RNA, 22 nt, Human
aguggcagagcugugucuugaa

SEQ ID NO: 1112082 - RNA, 22 nt, Human
aagaauguucuuguagucauga

SEQ ID NO: 1112083 - RNA, 22 nt, Human
cagaguguuucuuugggugggu

SEQ ID NO: 1112084 - RNA, 22 nt, Human
cuuacauuaaguaagagauuga

SEQ ID NO: 1112085 - RNA, 23 nt, Human
agaugaggcuucuccauguuggu

SEQ ID NO: 1112086 - RNA, 22 nt, Human
uugcauaaaugcuuaaaauuug

SEQ ID NO: 1112087 - RNA, 22 nt, Human
ucaguuuuuacggucacaggga

SEQ ID NO: 1112088 - RNA, 22 nt, Human
cagagguagccgagugcaaucg

SEQ ID NO: 1112089 - RNA, 22 nt, Human
augggaggaagagaagaugucu

SEQ ID NO: 1112090 - RNA, 22 nt, Human
uuacaguauuguuaaacucuuu

SEQ ID NO: 1112091 - RNA, 22 nt, Human
uagagcuguaucaaagagccuu

SEQ ID NO: 1112092 - RNA, 22 nt, Human
ucuggcuccguguccgcuccca

SEQ ID NO: 1112093 - RNA, 22 nt, Human
cucccucugucuuguccagaaa

SEQ ID NO: 1112094 - RNA, 22 nt, Human
accagagcuggcucugagcacc

SEQ ID NO: 1112095 - RNA, 22 nt, Human
ucucugggaaugggccugggua

SEQ ID NO: 1112096 - RNA, 22 nt, Human
ucagcaauaugauaggcuuugu

SEQ ID NO: 1112097 - RNA, 22 nt, Human
ggucccaggaagugcggcggcg

SEQ ID NO: 1112098 - RNA, 22 nt, Human
agcugcaggcccaugcucaguc

SEQ ID NO: 1112099 - RNA, 22 nt, Human
gggcaugguggcaggcaccugu

SEQ ID NO: 1112100 - RNA, 18 nt, Human
acaaaggucugcaagacc

SEQ ID NO: 1112101 - RNA, 22 nt, Human
aaguucaagucugcaucuuuuu

SEQ ID NO: 1112102 - RNA, 19 nt, Human
uguggccaugguucagcug

SEQ ID NO: 1112103 - RNA, 22 nt, Human
agcucccauuaucuucugaaac

SEQ ID NO: 1112104 - RNA, 22 nt, Human
ggcaugggagugagcaaccuua

SEQ ID NO: 1112105 - RNA, 22 nt, Human
agaacagaagggaggaaggccu

SEQ ID NO: 1112106 - RNA, 22 nt, Human
aaagcucacaguaauacaaggc

SEQ ID NO: 1112107 - RNA, 22 nt, Human
uggagcaggugccaggugugug

SEQ ID NO: 1112108 - RNA, 22 nt, Human
caggcugcggucggcucugguc

SEQ ID NO: 1112109 - RNA, 22 nt, Human
acagugucaugucguguucccc

SEQ ID NO: 1112110 - RNA, 22 nt, Human
uuagcucagaaaauuuaaacuu

SEQ ID NO: 1112111 - RNA, 22 nt, Human
gguggguauaguuagggccucu

SEQ ID NO: 1112112 - RNA, 22 nt, Human
agcagccaguucucugugguag

SEQ ID NO: 1112113 - RNA, 22 nt, Human
aaagauuuaugaaguucaauua

SEQ ID NO: 1112114 - RNA, 22 nt, Human
uaauguguugaauauuuguaca

SEQ ID NO: 1112115 - RNA, 22 nt, Human
agcccuucaaccugccuacucc

SEQ ID NO: 1112116 - RNA, 22 nt, Human
uccucuggcucuuucccuagga

SEQ ID NO: 1112117 - RNA, 22 nt, Human
uagagaaaagcagggaucagga

SEQ ID NO: 1112118 - RNA, 21 nt, Human
ugagccaggcugacggcugug

SEQ ID NO: 1112119 - RNA, 22 nt, Human
ucagagugguagccuauuuucu

SEQ ID NO: 1112120 - RNA, 22 nt, Human
gaaggccuagggaugcucugcg

SEQ ID NO: 1112121 - RNA, 22 nt, Human
ucagaaaugaucguuauucauu

SEQ ID NO: 1112122 - RNA, 22 nt, Human
gucucccaucguuugugaggaa

SEQ ID NO: 1112123 - RNA, 22 nt, Human
gagugguaggcaguguuaggaa

SEQ ID NO: 1112124 - RNA, 17 nt, Human
ggccuuggggccucagu

SEQ ID NO: 1112125 - RNA, 19 nt, Human
ugucccagacuccgugucu

SEQ ID NO: 1112126 - RNA, 22 nt, Human
gagguagcaugcuggaagggac

SEQ ID NO: 1112127 - RNA, 22 nt, Human
gccuucagcccugacuggccag

SEQ ID NO: 1112128 - RNA, 21 nt, Human
uucaaugaaaacaaagugagg

SEQ ID NO: 1112129 - RNA, 22 nt, Human
agcuggagcuucaagcagguaa

SEQ ID NO: 1112130 - RNA, 22 nt, Human
cagagcaguaaaucuggggcac

SEQ ID NO: 1112131 - RNA, 22 nt, Human
uccuucagauuccugcuucugg

SEQ ID NO: 1112132 - RNA, 22 nt, Human
aacuucuugguccugagcuguu

SEQ ID NO: 1112133 - RNA, 22 nt, Human
aggagguggccugagcgugccc

SEQ ID NO: 1112134 - RNA, 22 nt, Human
gguggagcuggaccaggagagg

SEQ ID NO: 1112135 - RNA, 22 nt, Human
aagauuucugcuccugagagaa

SEQ ID NO: 1112136 - RNA, 22 nt, Human
aagggcugccagggggugccag

SEQ ID NO: 1112137 - RNA, 22 nt, Human
ugcucagggacaauggagaggg

SEQ ID NO: 1112138 - RNA, 21 nt, Human
accucaagcaacaaccaaggu

SEQ ID NO: 1112139 - RNA, 22 nt, Human
aagggaaaucauauggugcagu

SEQ ID NO: 1112140 - RNA, 22 nt, Human
ccagagccuggcaucugcauaa

SEQ ID NO: 1112141 - RNA, 22 nt, Human
ucucagaggugcccuggcaucu

SEQ ID NO: 1112142 - RNA, 22 nt, Human
agccacagcccacaggacucuu

SEQ ID NO: 1112143 - RNA, 22 nt, Human
cugugucccccucagccaggug

SEQ ID NO: 1112144 - RNA, 22 nt, Human
cuuccagagauagggccucaag

SEQ ID NO: 1112145 - RNA, 22 nt, Human
uggcagggccuaccccaauauc

SEQ ID NO: 1112146 - RNA, 22 nt, Human
agggccagaaucccucagucua

SEQ ID NO: 1112147 - RNA, 22 nt, Human
acagcagagacacucaggaggc

SEQ ID NO: 1112148 - RNA, 21 nt, Human
uccuuccuugagguccuuucc

SEQ ID NO: 1112149 - RNA, 22 nt, Human
gugccugugcggacucagggaa

SEQ ID NO: 1112150 - RNA, 23 nt, Human
ccugaagggucaggguccucagc

SEQ ID NO: 1112151 - RNA, 22 nt, Human
aggguagggcccggagacagac

SEQ ID NO: 1112152 - RNA, 22 nt, Human
agaccagcugccucccagggcc

SEQ ID NO: 1112153 - RNA, 22 nt, Human
ggccucgcggcuucugguggcu

SEQ ID NO: 1112154 - RNA, 22 nt, Human
gagagugagauccuccugggga

SEQ ID NO: 1112155 - RNA, 21 nt, Human
ugucagaaauaagcaugugau

SEQ ID NO: 1112156 - RNA, 22 nt, Human
uggacucagaaguguucuuuua

SEQ ID NO: 1112157 - RNA, 22 nt, Human
acauguggucaaucuguguagg

SEQ ID NO: 1112158 - RNA, 22 nt, Human
guaagcaucugucucuucugca

SEQ ID NO: 1112159 - RNA, 22 nt, Human
caggggcuuuuccucuauaagg

SEQ ID NO: 1112160 - RNA, 22 nt, Human
cugcccugaccugccucagagu

SEQ ID NO: 1112161 - RNA, 22 nt, Human
ucuucacaccgggcagcaggaa

SEQ ID NO: 1112162 - RNA, 22 nt, Human
aggguccaucaaggacugcaca

SEQ ID NO: 1112163 - RNA, 20 nt, Human
auugucagccuucagaggag

SEQ ID NO: 1112164 - RNA, 22 nt, Human
ugggugggagcacccugucugg

SEQ ID NO: 1112165 - RNA, 22 nt, Human
cagcugccccuccagggcuggg

SEQ ID NO: 1112166 - RNA, 22 nt, Human
cacagggcuucucauggggugc

SEQ ID NO: 1112167 - RNA, 17 nt, Human
aagauuucauuagcuga

SEQ ID NO: 1112168 - RNA, 19 nt, Human
ccaguagagacagcugcag

SEQ ID NO: 1112169 - RNA, 22 nt, Human
ucccagaggaaauggcagcuga

SEQ ID NO: 1112170 - RNA, 22 nt, Human
ggcucaagcagucugccugccu

SEQ ID NO: 1112171 - RNA, 22 nt, Human
gcccagcugucuggcagggaug

SEQ ID NO: 1112172 - RNA, 22 nt, Human
ugaaaggugacauuucuuggau

SEQ ID NO: 1112173 - RNA, 22 nt, Human
ugggcugcagagcccggccuuc

SEQ ID NO: 1112174 - RNA, 22 nt, Human
auugacaauuagcccuuaggug

SEQ ID NO: 1112175 - RNA, 22 nt, Human
gcagcguggggcugagucagcu

SEQ ID NO: 1112176 - RNA, 22 nt, Human
agcccuccucacaucagcgucc

SEQ ID NO: 1112177 - RNA, 22 nt, Human
aggagccaggaaaccugcucug

SEQ ID NO: 1112178 - RNA, 22 nt, Human
gguggccaggccagcucuggcc

SEQ ID NO: 1112179 - RNA, 22 nt, Human
auguagcagaagauguuuuccu

SEQ ID NO: 1112180 - RNA, 20 nt, Human
cagaccugcacccacuucga

SEQ ID NO: 1112181 - RNA, 22 nt, Human
cacugccuccccaggcuccaca

SEQ ID NO: 1112182 - RNA, 22 nt, Human
agucccagacuccaguuuucug

SEQ ID NO: 1112183 - RNA, 22 nt, Human
gggggcucugacucccucagcu

SEQ ID NO: 1112184 - RNA, 22 nt, Human
gggauggggggaagcguccaug

SEQ ID NO: 1112185 - RNA, 22 nt, Human
gaggccugcuuuggcacucugg

SEQ ID NO: 1112186 - RNA, 22 nt, Human
agccagcaugaagacagaggcc

SEQ ID NO: 1112187 - RNA, 22 nt, Human
uccaagaucuacagcaguuuag

SEQ ID NO: 1112188 - RNA, 22 nt, Human
ucauggcacuuagcacaguccu

SEQ ID NO: 1112189 - RNA, 22 nt, Human
agaaaucugacugcugugcaca

SEQ ID NO: 1112190 - RNA, 19 nt, Human
ucucaauguucagaaagcu

SEQ ID NO: 1112191 - RNA, 20 nt, Human
uaucaaucagaaagaagacu

SEQ ID NO: 1112192 - RNA, 22 nt, Human
ccuccuggugggcgcuucuggc

SEQ ID NO: 1112193 - RNA, 22 nt, Human
ucccagagucuucuccuguaau

SEQ ID NO: 1112194 - RNA, 22 nt, Human
ccugagacaugaaccaggcucc

SEQ ID NO: 1112195 - RNA, 22 nt, Human
aauuucaaacuaauaggaacca

SEQ ID NO: 1112196 - RNA, 22 nt, Human
auaucuuuuagagcaagcuugu

SEQ ID NO: 1112197 - RNA, 22 nt, Human
ucugggcccuaaaccagcucua

SEQ ID NO: 1112198 - RNA, 22 nt, Human
ccugucuggaacauggccuguu

SEQ ID NO: 1112199 - RNA, 22 nt, Human
cugggaggauacacaagaucag

SEQ ID NO: 1112200 - RNA, 22 nt, Human
ucaucaaagucaaagaaugacu

SEQ ID NO: 1112201 - RNA, 22 nt, Human
uaacagaaaggggacagaaaua

SEQ ID NO: 1112202 - RNA, 22 nt, Human
caucugccuaaguggcccuguu

SEQ ID NO: 1112203 - RNA, 20 nt, Human
cugugccuaaaccuccgggu

SEQ ID NO: 1112204 - RNA, 22 nt, Human
uagcagggccaggcugggaacc

SEQ ID NO: 1112205 - RNA, 22 nt, Human
uccucagacacccugcuggcuu

SEQ ID NO: 1112206 - RNA, 22 nt, Human
acucugugugaguagagccugu

SEQ ID NO: 1112207 - RNA, 22 nt, Human
uuuguaaagucuguucugaguu

SEQ ID NO: 1112208 - RNA, 22 nt, Human
uugucugaaagaucauuacauu

SEQ ID NO: 1112209 - RNA, 22 nt, Human
agacaaagaaaccguagaagca

SEQ ID NO: 1112210 - RNA, 23 nt, Human
ccucagcauggcaggagcccagc

SEQ ID NO: 1112211 - RNA, 19 nt, Human
ggucacagggguuacaagg

SEQ ID NO: 1112212 - RNA, 22 nt, Human
gcucugagcacugugcggcugg

SEQ ID NO: 1112213 - RNA, 22 nt, Human
cugagcuuggccaggaaugaau

SEQ ID NO: 1112214 - RNA, 22 nt, Human
caguggaggcucaagugugcuu

SEQ ID NO: 1112215 - RNA, 22 nt, Human
ggaggugguggcagugacaauu

SEQ ID NO: 1112216 - RNA, 22 nt, Human
cacacuagucuauccauuagcu

SEQ ID NO: 1112217 - RNA, 22 nt, Human
uaugcacaauaugaucuauuug

SEQ ID NO: 1112218 - RNA, 22 nt, Human
uccucugcuccaucuuuacugu

SEQ ID NO: 1112219 - RNA, 22 nt, Human
ugcauauuuuauaaagauggaa

SEQ ID NO: 1112220 - RNA, 22 nt, Human
cagaggcugcucuggguggcau

SEQ ID NO: 1112221 - RNA, 22 nt, Human
acaguuucuccauuuacaccuu

SEQ ID NO: 1112222 - RNA, 19 nt, Human
cgcaggagccgaggugacc

SEQ ID NO: 1112223 - RNA, 22 nt, Human
ccucagggucugaggagaccgu

SEQ ID NO: 1112224 - RNA, 22 nt, Human
ugccaggcccagcuccagagcu

SEQ ID NO: 1112225 - RNA, 22 nt, Human
cagcucugaggaacacuccuuu

SEQ ID NO: 1112226 - RNA, 22 nt, Human
cugaagccacgauagcuuccua

SEQ ID NO: 1112227 - RNA, 22 nt, Human
gugucaugggguuuguuauaca

SEQ ID NO: 1112228 - RNA, 22 nt, Human
gugcaugugucuuuauaguagc

SEQ ID NO: 1112229 - RNA, 23 nt, Human
aaagacugcugagaauuuuagga

SEQ ID NO: 1112230 - RNA, 22 nt, Human
ggccagaggccacagcuguguc

SEQ ID NO: 1112231 - RNA, 22 nt, Human
gugggacucuucuuuggcagug

SEQ ID NO: 1112232 - RNA, 20 nt, Human
uguucacaguaguugcugcu

SEQ ID NO: 1112233 - RNA, 21 nt, Human
aggugcagagccagggaccag

SEQ ID NO: 1112234 - RNA, 22 nt, Human
ggguccagacacuccagaggaa

SEQ ID NO: 1112235 - RNA, 22 nt, Human
cagaccuggaaaacaggcuugc

SEQ ID NO: 1112236 - RNA, 22 nt, Human
cuucucucugcauaggcauggg

SEQ ID NO: 1112237 - RNA, 22 nt, Human
uuccauaauaaccugagagaaa

SEQ ID NO: 1112238 - RNA, 22 nt, Human
acuccuggggcugccaucacag

SEQ ID NO: 1112239 - RNA, 22 nt, Human
gaaggaaaaauacucuguaagg

SEQ ID NO: 1112240 - RNA, 22 nt, Human
uucagagaugacaccugguguu

SEQ ID NO: 1112241 - RNA, 22 nt, Human
ucaguuuucauuucaugagcag

SEQ ID NO: 1112242 - RNA, 22 nt, Human
augcugaggacaaagagaucaa

SEQ ID NO: 1112243 - RNA, 22 nt, Human
ccuggagcaggagcugcagagg

SEQ ID NO: 1112244 - RNA, 22 nt, Human
uccagaggcuccaaagggagau

SEQ ID NO: 1112245 - RNA, 22 nt, Human
cccugcaggggaccugcagccu

SEQ ID NO: 1112246 - RNA, 22 nt, Human
agcaccugcacaguggaggaaa

SEQ ID NO: 1112247 - RNA, 22 nt, Human
ggaggaugagcuacgaggagcu

SEQ ID NO: 1112248 - RNA, 22 nt, Human
gugccugcugcagagucgcugu

SEQ ID NO: 1112249 - RNA, 22 nt, Human
aagaacaacugcuuuaaaagca

SEQ ID NO: 1112250 - RNA, 22 nt, Human
cauugcuguuaauugucucuag

SEQ ID NO: 1112251 - RNA, 22 nt, Human
cagggcaggaauuugacauugc

SEQ ID NO: 1112252 - RNA, 22 nt, Human
ggcagaggaagcuggaaguggg

SEQ ID NO: 1112253 - RNA, 22 nt, Human
ggcaaaguuuucaucucauaac

SEQ ID NO: 1112254 - RNA, 22 nt, Human
acauuucuaguuguucaucucc

SEQ ID NO: 1112255 - RNA, 22 nt, Human
cacagggcuuugauggcugagu

SEQ ID NO: 1112256 - RNA, 22 nt, Human
acaugucaauuuaguacucuua

SEQ ID NO: 1112257 - RNA, 22 nt, Human
cugcuggagguuggagcaugca

SEQ ID NO: 1112258 - RNA, 22 nt, Human
ccaggccuguguuguguggagg

SEQ ID NO: 1112259 - RNA, 22 nt, Human
aaugauggucauggcaacuuuu

SEQ ID NO: 1112260 - RNA, 22 nt, Human
ucugccuggguguggagcagag

SEQ ID NO: 1112261 - RNA, 22 nt, Human
cagugcuccugauguacccuug

SEQ ID NO: 1112262 - RNA, 22 nt, Human
gguuugcaugugauguugggca

SEQ ID NO: 1112263 - RNA, 22 nt, Human
ucaggugggaccugcuaggaca

SEQ ID NO: 1112264 - RNA, 22 nt, Human
ucuuucucucuaaucaagcaca

SEQ ID NO: 1112265 - RNA, 17 nt, Human
aggccucccuccaggcc

SEQ ID NO: 1112266 - RNA, 22 nt, Human
auugacaauguauuuguaucug

SEQ ID NO: 1112267 - RNA, 22 nt, Human
aaggccugggaggccucucuuc

SEQ ID NO: 1112268 - RNA, 22 nt, Human
uacagaguggugagaucuuuug

SEQ ID NO: 1112269 - RNA, 22 nt, Human
gcucucuggaggccauggacag

SEQ ID NO: 1112270 - RNA, 23 nt, Human
cauggcagcaagagcucauggcc

SEQ ID NO: 1112271 - RNA, 22 nt, Human
cucaguuucugacauuaaaauc

SEQ ID NO: 1112272 - RNA, 21 nt, Human
agggaaagaaaaugagcuaau

SEQ ID NO: 1112273 - RNA, 22 nt, Human
ggguaauuggggccuugcagug

SEQ ID NO: 1112274 - RNA, 22 nt, Human
acaggcuuacaggcugcaagua

SEQ ID NO: 1112275 - RNA, 22 nt, Human
ggcugcuuuaucggcugcugaa

SEQ ID NO: 1112276 - RNA, 22 nt, Human
ggcucaggacacagugguuuag

SEQ ID NO: 1112277 - RNA, 22 nt, Human
uggaugcuguaggacacgcucu

SEQ ID NO: 1112278 - RNA, 22 nt, Human
agaaaugugaauuucauuuccu

SEQ ID NO: 1112279 - RNA, 22 nt, Human
cccuggagggcagacagaugcc

SEQ ID NO: 1112280 - RNA, 22 nt, Human
uccucacagucaacacuuugag

SEQ ID NO: 1112281 - RNA, 22 nt, Human
aaaguucaugguguuauagaaa

SEQ ID NO: 1112282 - RNA, 22 nt, Human
auaugucgcuacaucauuagau

SEQ ID NO: 1112283 - RNA, 22 nt, Human
ugacagcugagccccaggcaag

SEQ ID NO: 1112284 - RNA, 22 nt, Human
aaugagcuagaccugcuuccuc

SEQ ID NO: 1112285 - RNA, 22 nt, Human
ucucagagauuuauggaaaacu

SEQ ID NO: 1112286 - RNA, 22 nt, Human
acagggccucagccagggcaga

SEQ ID NO: 1112287 - RNA, 22 nt, Human
uucaaagugcauguuccucaga

SEQ ID NO: 1112288 - RNA, 22 nt, Human
ugcguugcgcuccugcagcagg

SEQ ID NO: 1112289 - RNA, 22 nt, Human
ggcagggguccugguguugacu

SEQ ID NO: 1112290 - RNA, 22 nt, Human
cuggagccgcauggagcaggga

SEQ ID NO: 1112291 - RNA, 22 nt, Human
ccucagggacuccaugcugcag

SEQ ID NO: 1112292 - RNA, 22 nt, Human
aaaugaacaguugcauucucug

SEQ ID NO: 1112293 - RNA, 22 nt, Human
caguggucugugcuucuguaca

SEQ ID NO: 1112294 - RNA, 22 nt, Human
agaggagcugggaggcccucgu

SEQ ID NO: 1112295 - RNA, 22 nt, Human
uagaaaauagggccuguggagc

SEQ ID NO: 1112296 - RNA, 22 nt, Human
uccauaagcagguucuuccuga

SEQ ID NO: 1112297 - RNA, 22 nt, Human
agggaaggaaaagcugucgcuu

SEQ ID NO: 1112298 - RNA, 22 nt, Human
gaggcugcaggcaaugcugccc

SEQ ID NO: 1112299 - RNA, 19 nt, Human
gcacacccugcaccaccau

SEQ ID NO: 1112300 - RNA, 22 nt, Human
aaaugucuguuagucauaucau

SEQ ID NO: 1112301 - RNA, 22 nt, Human
gccucugcucucagguagccuc

SEQ ID NO: 1112302 - RNA, 22 nt, Human
uagcagugccaggauuuugcug

SEQ ID NO: 1112303 - RNA, 20 nt, Human
aggcagacaaggagucuguu

SEQ ID NO: 1112304 - RNA, 19 nt, Human
gaaggagagcugaguuagg

SEQ ID NO: 1112305 - RNA, 22 nt, Human
cacagggccacuuucccaguaa

SEQ ID NO: 1112306 - RNA, 22 nt, Human
cccagacauaacagcagagagg

SEQ ID NO: 1112307 - RNA, 22 nt, Human
agaauucuggaguugggaggaa

SEQ ID NO: 1112308 - RNA, 22 nt, Human
uggaggaaguggcuggccagaa

SEQ ID NO: 1112309 - RNA, 22 nt, Human
uuucaaugacacaaaagagaaa

SEQ ID NO: 1112310 - RNA, 22 nt, Human
aaggacuccaauucuuucaucu

SEQ ID NO: 1112311 - RNA, 22 nt, Human
gagaugaauguaaacaaaggca

SEQ ID NO: 1112312 - RNA, 17 nt, Human
agcagcuggcacaggag

SEQ ID NO: 1112313 - RNA, 22 nt, Human
augaugugugcugaucaagcuu

SEQ ID NO: 1112314 - RNA, 22 nt, Human
cagagggagcccuccaggagca

SEQ ID NO: 1112315 - RNA, 22 nt, Human
gcagcuuggugaaaggugaugg

SEQ ID NO: 1112316 - RNA, 22 nt, Human
uccaggagagguguggggacug

SEQ ID NO: 1112317 - RNA, 22 nt, Human
auugagaauccauuugagauga

SEQ ID NO: 1112318 - RNA, 22 nt, Human
aggcacugacaauucuggacug

SEQ ID NO: 1112319 - RNA, 22 nt, Human
accucugcaguagggcugugcc

SEQ ID NO: 1112320 - RNA, 22 nt, Human
aagccaggcaugcuuggacagu

SEQ ID NO: 1112321 - RNA, 22 nt, Human
guggagaccuccuaggaugugu

SEQ ID NO: 1112322 - RNA, 22 nt, Human
uuucagauggagguuuaggaca

SEQ ID NO: 1112323 - RNA, 22 nt, Human
ucacguuuuacugagugagaua

SEQ ID NO: 1112324 - RNA, 22 nt, Human
agcagccauagauagcaugcaa

SEQ ID NO: 1112325 - RNA, 22 nt, Human
ccugucugagccagggugggca

SEQ ID NO: 1112326 - RNA, 22 nt, Human
gaguccaguuguucacagaggc

SEQ ID NO: 1112327 - RNA, 22 nt, Human
cccagggagguagcaggagaaa

SEQ ID NO: 1112328 - RNA, 22 nt, Human
ugcugccuugaccuccugggcu

SEQ ID NO: 1112329 - RNA, 21 nt, Human
ucugggcccaugcugccucac

SEQ ID NO: 1112330 - RNA, 22 nt, Human
gcagcugggccccagccucucc

SEQ ID NO: 1112331 - RNA, 22 nt, Human
caggggacaguaugguggauga

SEQ ID NO: 1112332 - RNA, 22 nt, Human
cagagcuguugcggggcuuggc

SEQ ID NO: 1112333 - RNA, 22 nt, Human
ugcaagcacucaaugcaaacag

SEQ ID NO: 1112334 - RNA, 22 nt, Human
uacaaacuuguuuuaaguaagu

SEQ ID NO: 1112335 - RNA, 22 nt, Human
caaaugugacuuuugggcuucu

SEQ ID NO: 1112336 - RNA, 22 nt, Human
ggccugagcuugggcagcguau

SEQ ID NO: 1112337 - RNA, 22 nt, Human
uaguaucuuucuauauuuccca

SEQ ID NO: 1112338 - RNA, 22 nt, Human
augggagugacagggccacugg

SEQ ID NO: 1112339 - RNA, 22 nt, Human
gcagggcuauuggaaggagaug

SEQ ID NO: 1112340 - RNA, 22 nt, Human
uuauuuuuaaaaguucacacag

SEQ ID NO: 1112341 - RNA, 22 nt, Human
ugggcuguggagcaccuuugca

SEQ ID NO: 1112342 - RNA, 22 nt, Human
aggugaguuacaggaggagguc

SEQ ID NO: 1112343 - RNA, 22 nt, Human
ugcuggcugggcugcuggagac

SEQ ID NO: 1112344 - RNA, 22 nt, Human
acauuucugagcagggagcugu

SEQ ID NO: 1112345 - RNA, 22 nt, Human
ucugcuguaaagaauuucugcc

SEQ ID NO: 1112346 - RNA, 22 nt, Human
aaugggagguaguaugggaggu

SEQ ID NO: 1112347 - RNA, 22 nt, Human
acagggccauuaucuguucuag

SEQ ID NO: 1112348 - RNA, 22 nt, Human
cucaggauucucgacacucaca

SEQ ID NO: 1112349 - RNA, 22 nt, Human
gaauuguagagggaacagaagc

SEQ ID NO: 1112350 - RNA, 22 nt, Human
ucacaggguuuggaagccuccu

SEQ ID NO: 1112351 - RNA, 22 nt, Human
uccuuuuugguccaaggugacc

SEQ ID NO: 1112352 - RNA, 22 nt, Human
acaaaguccugguguauggcca

SEQ ID NO: 1112353 - RNA, 22 nt, Human
ggcaggugugagaucgaggcca

SEQ ID NO: 1112354 - RNA, 20 nt, Human
acuggagccaucucagccua

SEQ ID NO: 1112355 - RNA, 21 nt, Human
ggagcugcaggagccgaaggc

SEQ ID NO: 1112356 - RNA, 22 nt, Human
acaggcagcacuaaucucuggu

SEQ ID NO: 1112357 - RNA, 22 nt, Human
ugcccacauucaaaaggugaug

SEQ ID NO: 1112358 - RNA, 22 nt, Human
ucaggggcccuucccucagcag

SEQ ID NO: 1112359 - RNA, 22 nt, Human
aucaguuuuguucacuacuaua

SEQ ID NO: 1112360 - RNA, 22 nt, Human
aacaguaucuuuuaucagaaau

SEQ ID NO: 1112361 - RNA, 22 nt, Human
cccuggaggcggauguugcagu

SEQ ID NO: 1112362 - RNA, 22 nt, Human
cccugccugugggcaucaacau

SEQ ID NO: 1112363 - RNA, 21 nt, Human
uauacaugugugcauacgugu

SEQ ID NO: 1112364 - RNA, 22 nt, Human
gggucuggacggcugcaggaag

SEQ ID NO: 1112365 - RNA, 22 nt, Human
ggcugccucugaugugcagacg

SEQ ID NO: 1112366 - RNA, 21 nt, Human
uccacaaguuagaaggaaauu

SEQ ID NO: 1112367 - RNA, 22 nt, Human
cuggccagacuacacaugugug

SEQ ID NO: 1112368 - RNA, 22 nt, Human
uggucucuucuuccaagauggc

SEQ ID NO: 1112369 - RNA, 22 nt, Human
caggagcaaggagcagugggau

SEQ ID NO: 1112370 - RNA, 22 nt, Human
gaggccacagcuaucagggaca

SEQ ID NO: 1112371 - RNA, 22 nt, Human
ugcagccauuuucugccaaugc

SEQ ID NO: 1112372 - RNA, 20 nt, Human
agcugaggcaccugagguua

SEQ ID NO: 1112373 - RNA, 19 nt, Human
uggcagaggcaguuuguac

SEQ ID NO: 1112374 - RNA, 22 nt, Human
aguacauuuauuaaugguaaaa

SEQ ID NO: 1112375 - RNA, 22 nt, Human
ucugcugcacaaauucaucucu

SEQ ID NO: 1112376 - RNA, 22 nt, Human
ggccugagucacaucaggagag

SEQ ID NO: 1112377 - RNA, 22 nt, Human
agcagccagugggagugauaca

SEQ ID NO: 1112378 - RNA, 22 nt, Human
caagaauuguacaaacugggug

SEQ ID NO: 1112379 - RNA, 20 nt, Human
acagaaagagagaaugucag

SEQ ID NO: 1112380 - RNA, 22 nt, Human
ugcucuggagggugaagcuuuu

SEQ ID NO: 1112381 - RNA, 22 nt, Human
cacauguuuggcaugucaccaa

SEQ ID NO: 1112382 - RNA, 22 nt, Human
cugggcacuugcucacagcucu

SEQ ID NO: 1112383 - RNA, 23 nt, Human
cauguacagaguuugauaaagug

SEQ ID NO: 1112384 - RNA, 22 nt, Human
aaggagagagcuuugcuggaac

SEQ ID NO: 1112385 - RNA, 22 nt, Human
ggcuggcacugaggagagcucu

SEQ ID NO: 1112386 - RNA, 22 nt, Human
ucucuggagggcuccaggcggg

SEQ ID NO: 1112387 - RNA, 22 nt, Human
gagagcuggguucaaguagcug

SEQ ID NO: 1112388 - RNA, 22 nt, Human
agugaaauaugcccauugcugu

SEQ ID NO: 1112389 - RNA, 22 nt, Human
auacaagacucagcacagacgg

SEQ ID NO: 1112390 - RNA, 22 nt, Human
uuaugcuaguauaguccuuaga

SEQ ID NO: 1112391 - RNA, 22 nt, Human
ucugcgcugccuugauccuugg

SEQ ID NO: 1112392 - RNA, 23 nt, Human
agaugaaagcuucccaucacagu

SEQ ID NO: 1112393 - RNA, 22 nt, Human
cucuggagcaccgggcuaucca

SEQ ID NO: 1112394 - RNA, 22 nt, Human
agcucccagggcugggcaaguu

SEQ ID NO: 1112395 - RNA, 22 nt, Human
uauguacaucguugaauucaaa

SEQ ID NO: 1112396 - RNA, 21 nt, Human
acaugcauagagagauuucug

SEQ ID NO: 1112397 - RNA, 22 nt, Human
cugccugugugugccugcagaa

SEQ ID NO: 1112398 - RNA, 22 nt, Human
aaaggcuccuucucccaugacc

SEQ ID NO: 1112399 - RNA, 22 nt, Human
cagggccuucguaaguguccgg

SEQ ID NO: 1112400 - RNA, 22 nt, Human
uggcuggcuuguucacugacug

SEQ ID NO: 1112401 - RNA, 23 nt, Human
acucacaaagcaggaucauguug

SEQ ID NO: 1112402 - RNA, 22 nt, Human
gagcaggcucugccuguguguc

SEQ ID NO: 1112403 - RNA, 22 nt, Human
aaaguuuccugcuaagugcuau

SEQ ID NO: 1112404 - RNA, 22 nt, Human
ccaggagcuggagggugcagug

SEQ ID NO: 1112405 - RNA, 17 nt, Human
aggcuggcucacaggga

SEQ ID NO: 1112406 - RNA, 22 nt, Human
ugcccugugugugcaagcacug

SEQ ID NO: 1112407 - RNA, 22 nt, Human
ggcacugggcaccggcugaggg

SEQ ID NO: 1112408 - RNA, 22 nt, Human
gcugccuugaacuuggccuggg

SEQ ID NO: 1112409 - RNA, 22 nt, Human
uaguuacagcaggcaggauaua

SEQ ID NO: 1112410 - RNA, 22 nt, Human
ggcugccugcucaggugcggcg

SEQ ID NO: 1112411 - RNA, 22 nt, Human
cccugccuugggguccacaccg

SEQ ID NO: 1112412 - RNA, 22 nt, Human
cucuggacagcaggugcugugg

SEQ ID NO: 1112413 - RNA, 22 nt, Human
ucaugccacuuacaaaauaaug

SEQ ID NO: 1112414 - RNA, 22 nt, Human
aggcacugugcagucccaagca

SEQ ID NO: 1112415 - RNA, 22 nt, Human
acuuuguauaagacaauaaaga

SEQ ID NO: 1112416 - RNA, 19 nt, Human
ccugggagucagcugaagg

SEQ ID NO: 1112417 - RNA, 21 nt, Human
gcagagccggggcgagaaggc

SEQ ID NO: 1112418 - RNA, 22 nt, Human
ucacagacaauuguuuuggugu

SEQ ID NO: 1112419 - RNA, 22 nt, Human
ccagagcuucggggcggcugua

SEQ ID NO: 1112420 - RNA, 20 nt, Human
gucagaggacccuagagcga

SEQ ID NO: 1112421 - RNA, 22 nt, Human
caggugggaccaugauagggca

SEQ ID NO: 1112422 - RNA, 22 nt, Human
uggcagagucugggcuugggca

SEQ ID NO: 1112423 - RNA, 22 nt, Human
ccagcagagucuaggaaggagg

SEQ ID NO: 1112424 - RNA, 22 nt, Human
acacagaaccucauagccucuc

SEQ ID NO: 1112425 - RNA, 22 nt, Human
ugugacaucgcugugucuguuu

SEQ ID NO: 1112426 - RNA, 18 nt, Human
gagcugccauauuuaguu

SEQ ID NO: 1112427 - RNA, 22 nt, Human
cucugggcaaguaugauagaaa

SEQ ID NO: 1112428 - RNA, 22 nt, Human
uaaagguagugugacauauugu

SEQ ID NO: 1112429 - RNA, 22 nt, Human
acagcagagugugagauagcca

SEQ ID NO: 1112430 - RNA, 22 nt, Human
cagcuucccuuggcugagcaga

SEQ ID NO: 1112431 - RNA, 22 nt, Human
aacagaaaagguagguggcuuu

SEQ ID NO: 1112432 - RNA, 22 nt, Human
ccuccugguccagcaucucuuu

SEQ ID NO: 1112433 - RNA, 20 nt, Human
gcagcugcccccagucccug

SEQ ID NO: 1112434 - RNA, 17 nt, Human
uuuucucucuuggauuc

SEQ ID NO: 1112435 - RNA, 22 nt, Human
acaaagucacaauaauuaaccu

SEQ ID NO: 1112436 - RNA, 22 nt, Human
aagcuuccugaaugcucauuua

SEQ ID NO: 1112437 - RNA, 22 nt, Human
ccuccagcugccucagucucuu

SEQ ID NO: 1112438 - RNA, 22 nt, Human
gagugaaaaaggaagggccaua

SEQ ID NO: 1112439 - RNA, 22 nt, Human
agaaaugacacacaugagacau

SEQ ID NO: 1112440 - RNA, 22 nt, Human
uaaaucaguuucucuuauuggu

SEQ ID NO: 1112441 - RNA, 22 nt, Human
ggcugccugaggcugaggcccg

SEQ ID NO: 1112442 - RNA, 18 nt, Human
cucagggcaucagucugg

SEQ ID NO: 1112443 - RNA, 22 nt, Human
cagaguguugaccauaagccca

SEQ ID NO: 1112444 - RNA, 22 nt, Human
gccuggguuccaugaucuccag

SEQ ID NO: 1112445 - RNA, 22 nt, Human
ccagcucucagcgggagacuca

SEQ ID NO: 1112446 - RNA, 22 nt, Human
cucuggaguucuucaagcuacu

SEQ ID NO: 1112447 - RNA, 22 nt, Human
cagggccauaucuugugcacca

SEQ ID NO: 1112448 - RNA, 22 nt, Human
gcucucagguacaaagcugugu

SEQ ID NO: 1112449 - RNA, 22 nt, Human
cagaguggcagucccaggccca

SEQ ID NO: 1112450 - RNA, 22 nt, Human
aggagagucuugagucacuggu

SEQ ID NO: 1112451 - RNA, 22 nt, Human
gggcugggauggcuugaagauu

SEQ ID NO: 1112452 - RNA, 22 nt, Human
augggaugcauggcuguggcca

SEQ ID NO: 1112453 - RNA, 22 nt, Human
ccuccagggcagacggggagca

SEQ ID NO: 1112454 - RNA, 22 nt, Human
caggagugucuccacacagcaa

SEQ ID NO: 1112455 - RNA, 20 nt, Human
cuaucuccuggcgugccuuc

SEQ ID NO: 1112456 - RNA, 22 nt, Human
agaaauguauagugaauuuuuc

SEQ ID NO: 1112457 - RNA, 22 nt, Human
aaagucauguaaugauaugauu

SEQ ID NO: 1112458 - RNA, 22 nt, Human
cuggccaguuguccuggcuugg

SEQ ID NO: 1112459 - RNA, 22 nt, Human
gccugagacagugugguccaau

SEQ ID NO: 1112460 - RNA, 22 nt, Human
cagagcagggugcaccuugggc

SEQ ID NO: 1112461 - RNA, 22 nt, Human
cacuggugacuucugagcugga

SEQ ID NO: 1112462 - RNA, 17 nt, Human
uguuccauuugaccacc

SEQ ID NO: 1112463 - RNA, 22 nt, Human
uugcauaaaagaguauaucuua

SEQ ID NO: 1112464 - RNA, 22 nt, Human
cggggacacacuggcagcuccu

SEQ ID NO: 1112465 - RNA, 22 nt, Human
ugacacaggcagcucccagcac

SEQ ID NO: 1112466 - RNA, 22 nt, Human
uuuccauauuuggucuuuggga

SEQ ID NO: 1112467 - RNA, 22 nt, Human
aguacuuugcacuuugcucaga

SEQ ID NO: 1112468 - RNA, 22 nt, Human
gggcccuggauuuaagcaugga

SEQ ID NO: 1112469 - RNA, 22 nt, Human
agagugauucuaguuagggaau

SEQ ID NO: 1112470 - RNA, 22 nt, Human
uacauuccauguguguguauuc

SEQ ID NO: 1112471 - RNA, 17 nt, Human
agaggcagauacuugga

SEQ ID NO: 1112472 - RNA, 23 nt, Human
cagggcugguagggaagagcgug

SEQ ID NO: 1112473 - RNA, 22 nt, Human
uaugcacaccuggguccuuguc

SEQ ID NO: 1112474 - RNA, 22 nt, Human
ccucccacauugaggacaugcu

SEQ ID NO: 1112475 - RNA, 20 nt, Human
gccuggaggcagagauaaag

SEQ ID NO: 1112476 - RNA, 22 nt, Human
cagaguacugggagaacagaag

SEQ ID NO: 1112477 - RNA, 22 nt, Human
ugaggcaguucuuacuuguauu

SEQ ID NO: 1112478 - RNA, 22 nt, Human
uggaggugagugugguacagca

SEQ ID NO: 1112479 - RNA, 22 nt, Human
gcaaggcagcgcggaguagcua

SEQ ID NO: 1112480 - RNA, 22 nt, Human
gcagcuggugcaaaugucacuc

SEQ ID NO: 1112481 - RNA, 22 nt, Human
ugguccaggguguaguacagag

SEQ ID NO: 1112482 - RNA, 22 nt, Human
ccagcugcuugggaaaaugucu

SEQ ID NO: 1112483 - RNA, 22 nt, Human
agcucccagcuccuuugagaga

SEQ ID NO: 1112484 - RNA, 19 nt, Human
agugaaauggaguauucaa

SEQ ID NO: 1112485 - RNA, 22 nt, Human
cccaugccuucugacucacagg

SEQ ID NO: 1112486 - RNA, 22 nt, Human
agaagugccauacuguggucca

SEQ ID NO: 1112487 - RNA, 22 nt, Human
auuuguacaaauuuauguuagu

SEQ ID NO: 1112488 - RNA, 22 nt, Human
auucacagggacaaugggagag

SEQ ID NO: 1112489 - RNA, 20 nt, Human
agaguaacuggcacauaggg

SEQ ID NO: 1112490 - RNA, 22 nt, Human
auggaagguccuacagagcgca

SEQ ID NO: 1112491 - RNA, 22 nt, Human
agcugcucuuugaaggacacuu

SEQ ID NO: 1112492 - RNA, 22 nt, Human
ggcugccaggagggaggccagu

SEQ ID NO: 1112493 - RNA, 19 nt, Human
caugagcugcucacuuccc

SEQ ID NO: 1112494 - RNA, 22 nt, Human
gcugccugccuaguuccacagu

SEQ ID NO: 1112495 - RNA, 22 nt, Human
cagaaugcaaauuuuauaauau

SEQ ID NO: 1112496 - RNA, 22 nt, Human
agcugcagagguuugugcaaca

SEQ ID NO: 1112497 - RNA, 22 nt, Human
auguuacauaguccuuauuugu

SEQ ID NO: 1112498 - RNA, 22 nt, Human
aagggcagaauagagaagaugg

SEQ ID NO: 1112499 - RNA, 22 nt, Human
cugccuugaaaaugaagcuuua

SEQ ID NO: 1112500 - RNA, 22 nt, Human
ugggacacccucacgccugcac

SEQ ID NO: 1112501 - RNA, 22 nt, Human
aagaaaagaaaccugaggcuuu

SEQ ID NO: 1112502 - RNA, 22 nt, Human
ccacagcaugcaggccugacac

SEQ ID NO: 1112503 - RNA, 22 nt, Human
augaugguggguaauguguaaa

SEQ ID NO: 1112504 - RNA, 22 nt, Human
ccaggccuggccaggggaugcc

SEQ ID NO: 1112505 - RNA, 22 nt, Human
gcccagcuggcuuccagcacau

SEQ ID NO: 1112506 - RNA, 22 nt, Human
agagcuggccagggaucacucu

SEQ ID NO: 1112507 - RNA, 22 nt, Human
acacugaauauacaaugaauau

SEQ ID NO: 1112508 - RNA, 22 nt, Human
uuaagucauuucugauuauaga

SEQ ID NO: 1112509 - RNA, 22 nt, Human
ccucucucuccugcacacacac

SEQ ID NO: 1112510 - RNA, 22 nt, Human
aaaaaugucauuauggaacuga

SEQ ID NO: 1112511 - RNA, 22 nt, Human
gcuggggaggcagcagagaaca

SEQ ID NO: 1112512 - RNA, 22 nt, Human
uggcugcucaagggaggaggcu

SEQ ID NO: 1112513 - RNA, 22 nt, Human
ugagugaggaagcgguggagga

SEQ ID NO: 1112514 - RNA, 22 nt, Human
ugacuuccugcacucaggugau

SEQ ID NO: 1112515 - RNA, 22 nt, Human
uagagcuggaaaacugcaggua

SEQ ID NO: 1112516 - RNA, 19 nt, Human
ugcucauggggacuucucc

SEQ ID NO: 1112517 - RNA, 22 nt, Human
agccaaagaucagugugcaagu

SEQ ID NO: 1112518 - RNA, 22 nt, Human
cucaggacccgguccagguggg

SEQ ID NO: 1112519 - RNA, 22 nt, Human
uucaaugaggauagaacuggau

SEQ ID NO: 1112520 - RNA, 22 nt, Human
ugcagcugcuugauucaucuug

SEQ ID NO: 1112521 - RNA, 22 nt, Human
caggugcucccagagaagugcu

SEQ ID NO: 1112522 - RNA, 22 nt, Human
gccaccagccccaugcgcugug

SEQ ID NO: 1112523 - RNA, 22 nt, Human
uucucuggaacugaaacaagau

SEQ ID NO: 1112524 - RNA, 22 nt, Human
gacagccaugcacuucugcugu

SEQ ID NO: 1112525 - RNA, 22 nt, Human
ugcuggggguucagaugaguaa

SEQ ID NO: 1112526 - RNA, 22 nt, Human
uggccuuggacagagcgcuccu

SEQ ID NO: 1112527 - RNA, 21 nt, Human
uccuccuucaaguccuggccu

SEQ ID NO: 1112528 - RNA, 22 nt, Human
gaugcugagagguggagggaac

SEQ ID NO: 1112529 - RNA, 22 nt, Human
aggggcuggaguucgagguuac

SEQ ID NO: 1112530 - RNA, 22 nt, Human
gcccagcacauugcugaggacc

SEQ ID NO: 1112531 - RNA, 22 nt, Human
ucagaagcugguguccuuugaa

SEQ ID NO: 1112532 - RNA, 21 nt, Human
ugcucaugcaaugcaugucca

SEQ ID NO: 1112533 - RNA, 22 nt, Human
ucagagugaccuuacauggucu

SEQ ID NO: 1112534 - RNA, 22 nt, Human
guuugcauuucuugaacuauau

SEQ ID NO: 1112535 - RNA, 22 nt, Human
acauuugucuucuuucagauua

SEQ ID NO: 1112536 - RNA, 22 nt, Human
ugauuucaaguagugacaugcu

SEQ ID NO: 1112537 - RNA, 22 nt, Human
gggcacugcuggaggcucccug

SEQ ID NO: 1112538 - RNA, 22 nt, Human
ccaggaggcagagguuacagug

SEQ ID NO: 1112539 - RNA, 19 nt, Human
uggcugggcgugccuccgu

SEQ ID NO: 1112540 - RNA, 22 nt, Human
augaagcugguuuuggcuuggg

SEQ ID NO: 1112541 - RNA, 22 nt, Human
gagccuucaucgcagccuuguu

SEQ ID NO: 1112542 - RNA, 22 nt, Human
cuguccauuuucgugccuccuu

SEQ ID NO: 1112543 - RNA, 22 nt, Human
ucccagaggcuccagucucuau

SEQ ID NO: 1112544 - RNA, 22 nt, Human
uauaacaguuuaggugguguca

SEQ ID NO: 1112545 - RNA, 22 nt, Human
acagaaauuagcagugaguuua

SEQ ID NO: 1112546 - RNA, 22 nt, Human
cucugggcaaguuucuucauga

SEQ ID NO: 1112547 - RNA, 22 nt, Human
uguggugagaaacugguagauu

SEQ ID NO: 1112548 - RNA, 22 nt, Human
agccaggggauucaucagggac

SEQ ID NO: 1112549 - RNA, 22 nt, Human
ucucagggugaggaaagaauuu

SEQ ID NO: 1112550 - RNA, 22 nt, Human
cagacuugacggcagcugcuuu

SEQ ID NO: 1112551 - RNA, 22 nt, Human
aaaugcuguaacugauauucug

SEQ ID NO: 1112552 - RNA, 21 nt, Human
cugccuugaaugguacuggga

SEQ ID NO: 1112553 - RNA, 20 nt, Human
ugcuuccuggccacugcggg

SEQ ID NO: 1112554 - RNA, 22 nt, Human
cagagugaaaacugagcucaaa

SEQ ID NO: 1112555 - RNA, 22 nt, Human
cccucugccugggaccaagucc

SEQ ID NO: 1112556 - RNA, 22 nt, Human
cagugcaguugguggcaggggu

SEQ ID NO: 1112557 - RNA, 22 nt, Human
cacaggagguuaggaagugguc

SEQ ID NO: 1112558 - RNA, 22 nt, Human
agguaacacuacuuaguauacu

SEQ ID NO: 1112559 - RNA, 22 nt, Human
agagcuguggauaguccuggau

SEQ ID NO: 1112560 - RNA, 22 nt, Human
caggauccccaggucgccgucc

SEQ ID NO: 1112561 - RNA, 22 nt, Human
ggacucagcagccaggaguggc

SEQ ID NO: 1112562 - RNA, 21 nt, Human
gcugcugccccuagugaggcc

SEQ ID NO: 1112563 - RNA, 22 nt, Human
cucaggauuuaaaggggcacuc

SEQ ID NO: 1112564 - RNA, 22 nt, Human
acaguaauauugaugcucguca

SEQ ID NO: 1112565 - RNA, 22 nt, Human
cacugcauggaugauggcugua

SEQ ID NO: 1112566 - RNA, 22 nt, Human
agcuuuauucaugauuucaggg

SEQ ID NO: 1112567 - RNA, 22 nt, Human
cugccuggggaaugugaggauu

SEQ ID NO: 1112568 - RNA, 22 nt, Human
cugcucuguuaauuaaacuuug

SEQ ID NO: 1112569 - RNA, 22 nt, Human
gccuggagcucaugugggcauu

SEQ ID NO: 1112570 - RNA, 21 nt, Human
guauucuuuaugaagugaaaa

SEQ ID NO: 1112571 - RNA, 22 nt, Human
cccuggaggucagaggccuggg

SEQ ID NO: 1112572 - RNA, 22 nt, Human
aaggagaguacaggaguuggua

SEQ ID NO: 1112573 - RNA, 22 nt, Human
agggccuggugaccuggguccu

SEQ ID NO: 1112574 - RNA, 22 nt, Human
agauggggcagaauggagccau

SEQ ID NO: 1112575 - RNA, 22 nt, Human
ccagcuccuucugucuguggag

SEQ ID NO: 1112576 - RNA, 22 nt, Human
gcugggcagccccuacagagag

SEQ ID NO: 1112577 - RNA, 22 nt, Human
ggccuuggugcucuguguugca

SEQ ID NO: 1112578 - RNA, 22 nt, Human
cgcuggggcuuuuugcuugaga

SEQ ID NO: 1112579 - RNA, 22 nt, Human
agcccuggcccggcugugcuuu

SEQ ID NO: 1112580 - RNA, 22 nt, Human
ugcauuaugcuugugcuguaua

SEQ ID NO: 1112581 - RNA, 22 nt, Human
ccacagggcacagacaggaagc

SEQ ID NO: 1112582 - RNA, 22 nt, Human
agcaggagcccuuaucaccagg

SEQ ID NO: 1112583 - RNA, 22 nt, Human
ggccucggcccacugcugcggu

SEQ ID NO: 1112584 - RNA, 22 nt, Human
agggccagggaagcuguauuuu

SEQ ID NO: 1112585 - RNA, 22 nt, Human
cagguggcuucucccuaggcca

SEQ ID NO: 1112586 - RNA, 22 nt, Human
gggcauggugaugugcaccugu

SEQ ID NO: 1112587 - RNA, 22 nt, Human
aucuggcugagcgaggcccaca

SEQ ID NO: 1112588 - RNA, 22 nt, Human
cacugcuuauaaauucuaggca

SEQ ID NO: 1112589 - RNA, 18 nt, Human
ccuggaccugucuccuuu

SEQ ID NO: 1112590 - RNA, 22 nt, Human
cagcugccuucugcgggaaguc

SEQ ID NO: 1112591 - RNA, 22 nt, Human
ggcaugggguguauguggcacg

SEQ ID NO: 1112592 - RNA, 22 nt, Human
ugccagggugucaggagagcua

SEQ ID NO: 1112593 - RNA, 22 nt, Human
cucccaggcacagggaggagcc

SEQ ID NO: 1112594 - RNA, 22 nt, Human
cuccaggggccagaagccuggc

SEQ ID NO: 1112595 - RNA, 22 nt, Human
acguuuucagugacugugcuuc

SEQ ID NO: 1112596 - RNA, 22 nt, Human
gggagagaugcugauugccaau

SEQ ID NO: 1112597 - RNA, 22 nt, Human
ucucagagaugucaagagucua

SEQ ID NO: 1112598 - RNA, 22 nt, Human
uuuccucugagugagcugggag

SEQ ID NO: 1112599 - RNA, 22 nt, Human
uccugucugucuuuggucccuu

SEQ ID NO: 1112600 - RNA, 17 nt, Human
ucaugcccaacuauuac

SEQ ID NO: 1112601 - RNA, 22 nt, Human
uggcucugggaaucuguugcuu

SEQ ID NO: 1112602 - RNA, 22 nt, Human
uuagaaacccagacucuuaggu

SEQ ID NO: 1112603 - RNA, 22 nt, Human
aagucauuaucucuucuaaucu

SEQ ID NO: 1112604 - RNA, 22 nt, Human
uuauguaauuuguuugcucuuc

SEQ ID NO: 1112605 - RNA, 18 nt, Human
uggcucuggacuugcucc

SEQ ID NO: 1112606 - RNA, 22 nt, Human
aaacuguaaacacagcaguaca

SEQ ID NO: 1112607 - RNA, 22 nt, Human
cagaguguauucugcaguugca

SEQ ID NO: 1112608 - RNA, 23 nt, Human
uccuucagagccucccuccaagc

SEQ ID NO: 1112609 - RNA, 22 nt, Human
gccggggcuggggagagacaug

SEQ ID NO: 1112610 - RNA, 17 nt, Human
uucucuuccuggauagu

SEQ ID NO: 1112611 - RNA, 22 nt, Human
agggcucugagugggaaagagg

SEQ ID NO: 1112612 - RNA, 22 nt, Human
uauuucugaggcccaggaagug

SEQ ID NO: 1112613 - RNA, 22 nt, Human
acuugauuuugaaccuuucuac

SEQ ID NO: 1112614 - RNA, 22 nt, Human
gccuggugaaaggcagagagcg

SEQ ID NO: 1112615 - RNA, 18 nt, Human
ccugagcccugcuuacuu

SEQ ID NO: 1112616 - RNA, 22 nt, Human
uaagaacagauaaaguuucccc

SEQ ID NO: 1112617 - RNA, 22 nt, Human
cccaggcuggagugcaauggca

SEQ ID NO: 1112618 - RNA, 23 nt, Human
ggucccaguggagaggccucacc

SEQ ID NO: 1112619 - RNA, 22 nt, Human
guuuuuaucuaauagcaguuau

SEQ ID NO: 1112620 - RNA, 22 nt, Human
ccugucuggccuuccacggggg

SEQ ID NO: 1112621 - RNA, 22 nt, Human
cccucugcucaggugcauaggc

SEQ ID NO: 1112622 - RNA, 22 nt, Human
ccuccugggacaggcuggcaca

SEQ ID NO: 1112623 - RNA, 22 nt, Human
uaaggcacccauguucauacag

SEQ ID NO: 1112624 - RNA, 22 nt, Human
uaacacugauuuguucucaggg

SEQ ID NO: 1112625 - RNA, 22 nt, Human
agcaggaggguuuuguagaguc

SEQ ID NO: 1112626 - RNA, 22 nt, Human
agggacagaugaaugacugagu

SEQ ID NO: 1112627 - RNA, 22 nt, Human
gaugaggggucauuggcuggga

SEQ ID NO: 1112628 - RNA, 22 nt, Human
agcccuagagcuggaggucagu

SEQ ID NO: 1112629 - RNA, 22 nt, Human
ucuggccagugaaaugcagaau

SEQ ID NO: 1112630 - RNA, 22 nt, Human
uguuccauaaguggugcuuugu

SEQ ID NO: 1112631 - RNA, 22 nt, Human
gccagagccacuuuugggugau

SEQ ID NO: 1112632 - RNA, 22 nt, Human
agugcugaagacuggcuaggga

SEQ ID NO: 1112633 - RNA, 20 nt, Human
ucagaggcugccagcugggg

SEQ ID NO: 1112634 - RNA, 22 nt, Human
caggguggcacucagcgcaucu

SEQ ID NO: 1112635 - RNA, 22 nt, Human
acuuugcaaugggcagaaccca

SEQ ID NO: 1112636 - RNA, 22 nt, Human
auugucuguacuuuaaaaaugu

SEQ ID NO: 1112637 - RNA, 22 nt, Human
aauucauccaugaacaauucca

SEQ ID NO: 1112638 - RNA, 19 nt, Human
auuuacugccuaaaaucuc

SEQ ID NO: 1112639 - RNA, 22 nt, Human
uauagaagagacaugugcauag

SEQ ID NO: 1112640 - RNA, 22 nt, Human
uugcucagcacuggagccagcu

SEQ ID NO: 1112641 - RNA, 22 nt, Human
agauuucaaugugagcauuagu

SEQ ID NO: 1112642 - RNA, 22 nt, Human
cugaaugucgaucagcuugggu

SEQ ID NO: 1112643 - RNA, 22 nt, Human
acagccuguguaccagcuggga

SEQ ID NO: 1112644 - RNA, 22 nt, Human
uccucuggauauaagccucacc

SEQ ID NO: 1112645 - RNA, 22 nt, Human
cagagcagagugauuguucugg

SEQ ID NO: 1112646 - RNA, 22 nt, Human
cgcaccacugaauuccagccug

SEQ ID NO: 1112647 - RNA, 22 nt, Human
uuagaaaggagcuuauuucuuu

SEQ ID NO: 1112648 - RNA, 22 nt, Human
ugggggacugcacuggcgucag

SEQ ID NO: 1112649 - RNA, 22 nt, Human
aagguacaaaguauuauuuaaa

SEQ ID NO: 1112650 - RNA, 22 nt, Human
gcacagagggcagugagccucu

SEQ ID NO: 1112651 - RNA, 22 nt, Human
cauggcagagaaggggaacugg

SEQ ID NO: 1112652 - RNA, 22 nt, Human
caggguacagaguuuucuaaac

SEQ ID NO: 1112653 - RNA, 22 nt, Human
ugagccuguggggugacaacca

SEQ ID NO: 1112654 - RNA, 22 nt, Human
ccagggcauguaacuaauggug

SEQ ID NO: 1112655 - RNA, 22 nt, Human
gacagcagacagaacuaccugc

SEQ ID NO: 1112656 - RNA, 22 nt, Human
caggguagacaguaggugucug

SEQ ID NO: 1112657 - RNA, 22 nt, Human
auguaguauuuggaaauguaaa

SEQ ID NO: 1112658 - RNA, 22 nt, Human
ucuucucccaucuccaggcagg

SEQ ID NO: 1112659 - RNA, 22 nt, Human
ucuccuggauggaccuucucuu

SEQ ID NO: 1112660 - RNA, 22 nt, Human
ucugucugagggagugacauuu

SEQ ID NO: 1112661 - RNA, 21 nt, Human
ggcagaaguagcauggacggg

SEQ ID NO: 1112662 - RNA, 22 nt, Human
aucuaagaguuaacaucaagaa

SEQ ID NO: 1112663 - RNA, 22 nt, Human
aaggcagauauaaagacuagag

SEQ ID NO: 1112664 - RNA, 22 nt, Human
ucuggcucccuggagcuccaca

SEQ ID NO: 1112665 - RNA, 22 nt, Human
cucaggauugugccuagggaga

SEQ ID NO: 1112666 - RNA, 22 nt, Human
cagagccauccaggugccuguu

SEQ ID NO: 1112667 - RNA, 22 nt, Human
cugggccugucagggcuuuuug

SEQ ID NO: 1112668 - RNA, 22 nt, Human
ucugcaggacugaggccuguuu

SEQ ID NO: 1112669 - RNA, 22 nt, Human
ggucaugcugugaaucagugcu

SEQ ID NO: 1112670 - RNA, 22 nt, Human
ugggaggcuuccagaccuugcu

SEQ ID NO: 1112671 - RNA, 22 nt, Human
guggcaggucccauuggagcag

SEQ ID NO: 1112672 - RNA, 22 nt, Human
aagugguaggaagagagcacug

SEQ ID NO: 1112673 - RNA, 22 nt, Human
gugcauauaugcacauaugugu

SEQ ID NO: 1112674 - RNA, 22 nt, Human
gucccugcaucaccacgggacu

SEQ ID NO: 1112675 - RNA, 22 nt, Human
agagccaggcggcugggcaccu

SEQ ID NO: 1112676 - RNA, 22 nt, Human
ggcuucugagugcucugcuguu

SEQ ID NO: 1112677 - RNA, 22 nt, Human
ugccugggccuucccaccucug

SEQ ID NO: 1112678 - RNA, 22 nt, Human
gccugccuggagcuugagguga

SEQ ID NO: 1112679 - RNA, 22 nt, Human
uggccuuccuggugacucauga

SEQ ID NO: 1112680 - RNA, 22 nt, Human
gaggcugcggggaggagccugc

SEQ ID NO: 1112681 - RNA, 22 nt, Human
cacagggcagugcugcccacuc

SEQ ID NO: 1112682 - RNA, 23 nt, Human
agcccagcagagaaccuaggucc

SEQ ID NO: 1112683 - RNA, 22 nt, Human
uaauuuaauuucaugccagccu

SEQ ID NO: 1112684 - RNA, 22 nt, Human
acauuucucauaggagagccac

SEQ ID NO: 1112685 - RNA, 22 nt, Human
gagcagugguugaacagaggca

SEQ ID NO: 1112686 - RNA, 22 nt, Human
uggcucaguggcagccgcagcu

SEQ ID NO: 1112687 - RNA, 22 nt, Human
agcaggcuaagggaccuguuua

SEQ ID NO: 1112688 - RNA, 21 nt, Human
gcugccaccgcgugcuccagg

SEQ ID NO: 1112689 - RNA, 22 nt, Human
gcugagcugcuguucauccugc

SEQ ID NO: 1112690 - RNA, 22 nt, Human
gacccugccaugagugacaggg

SEQ ID NO: 1112691 - RNA, 22 nt, Human
ugucaguguauacauacaguau

SEQ ID NO: 1112692 - RNA, 22 nt, Human
gcugcugguccucagagcucau

SEQ ID NO: 1112693 - RNA, 22 nt, Human
caggcaccccaggugagcacug

SEQ ID NO: 1112694 - RNA, 22 nt, Human
uguguccauucaggcacugacc

SEQ ID NO: 1112695 - RNA, 22 nt, Human
aauccagguggcggagguugug

SEQ ID NO: 1112696 - RNA, 22 nt, Human
caggaaccuaaagagacauuac

SEQ ID NO: 1112697 - RNA, 22 nt, Human
ggccugcuccgggggcugagcu

SEQ ID NO: 1112698 - RNA, 22 nt, Human
aggucauuccagccauuccccu

SEQ ID NO: 1112699 - RNA, 22 nt, Human
acuguguggaaauuugugaggg

SEQ ID NO: 1112700 - RNA, 22 nt, Human
gcuguucccauguggggcucag

SEQ ID NO: 1112701 - RNA, 20 nt, Human
cccucugcacauggcugugg

SEQ ID NO: 1112702 - RNA, 22 nt, Human
ggaugcuggggaccaaucucug

SEQ ID NO: 1112703 - RNA, 21 nt, Human
uucaaagagugggcauuguca

SEQ ID NO: 1112704 - RNA, 22 nt, Human
acauugaucagccucccaugca

SEQ ID NO: 1112705 - RNA, 22 nt, Human
cuggccacaugugugcugagca

SEQ ID NO: 1112706 - RNA, 22 nt, Human
ggccugaggcgucccagcugug

SEQ ID NO: 1112707 - RNA, 22 nt, Human
guuauguaugggggccuuauga

SEQ ID NO: 1112708 - RNA, 22 nt, Human
ggcugcuggaagacugaacaag

SEQ ID NO: 1112709 - RNA, 19 nt, Human
ggcugcugguuacagaggc

SEQ ID NO: 1112710 - RNA, 22 nt, Human
gcagggcugcagagggcacugu

SEQ ID NO: 1112711 - RNA, 21 nt, Human
uccucagggccccagagcacu

SEQ ID NO: 1112712 - RNA, 22 nt, Human
aggagcugcauggauaccuggu

SEQ ID NO: 1112713 - RNA, 22 nt, Human
guaggaagcucugaggcuaguu

SEQ ID NO: 1112714 - RNA, 22 nt, Human
ugugaaaggggucacagggaaa

SEQ ID NO: 1112715 - RNA, 22 nt, Human
uagaaacauguucuguucuguu

SEQ ID NO: 1112716 - RNA, 22 nt, Human
ucaucuucuauuaauagggaga

SEQ ID NO: 1112717 - RNA, 22 nt, Human
ccuaugccugucacucugcgcu

SEQ ID NO: 1112718 - RNA, 22 nt, Human
agcagcugggcucagagcuggg

SEQ ID NO: 1112719 - RNA, 22 nt, Human
guaucuuuugguggaaaaauaa

SEQ ID NO: 1112720 - RNA, 22 nt, Human
gcaguggggaaugcuggggaga

SEQ ID NO: 1112721 - RNA, 22 nt, Human
gcccagcacagcuggaagaguc

SEQ ID NO: 1112722 - RNA, 19 nt, Human
ugucucugaaagaugagcu

SEQ ID NO: 1112723 - RNA, 22 nt, Human
agagguagagguugcagugagc

SEQ ID NO: 1112724 - RNA, 22 nt, Human
ucugccugaaauucacauguaa

SEQ ID NO: 1112725 - RNA, 22 nt, Human
aagcaagacagaaguuacugcc

SEQ ID NO: 1112726 - RNA, 22 nt, Human
cggcagagacggcgcuuugaac

SEQ ID NO: 1112727 - RNA, 18 nt, Human
uacaugcauaaaugaagc

SEQ ID NO: 1112728 - RNA, 22 nt, Human
uggagggaacccaggcugcucu

SEQ ID NO: 1112729 - RNA, 22 nt, Human
ccuuuuucccuggagggacagc

SEQ ID NO: 1112730 - RNA, 22 nt, Human
cagggccuuauccugccauuga

SEQ ID NO: 1112731 - RNA, 22 nt, Human
aaaggucaaaaucgugacauug

SEQ ID NO: 1112732 - RNA, 22 nt, Human
agucccuguacuuuccacugcc

SEQ ID NO: 1112733 - RNA, 22 nt, Human
ggggugggcgugcagggacacc

SEQ ID NO: 1112734 - RNA, 22 nt, Human
uaguuuuuucaacaaauggugc

SEQ ID NO: 1112735 - RNA, 22 nt, Human
ccugugaggucaucugugguaa

SEQ ID NO: 1112736 - RNA, 22 nt, Human
ucucugcucugugccucaguuu

SEQ ID NO: 1112737 - RNA, 22 nt, Human
auguguacaaccaagcacuaaa

SEQ ID NO: 1112738 - RNA, 22 nt, Human
agaauuguaagcaauuugauua

SEQ ID NO: 1112739 - RNA, 22 nt, Human
cacagguguucuugcagugaaa

SEQ ID NO: 1112740 - RNA, 22 nt, Human
gacauucacaguuuccgauggu

SEQ ID NO: 1112741 - RNA, 22 nt, Human
uaagaacauaaauucauacggg

SEQ ID NO: 1112742 - RNA, 22 nt, Human
aggcucagcugguggugaucgc

SEQ ID NO: 1112743 - RNA, 22 nt, Human
ugaagcaggcauugacugauga

SEQ ID NO: 1112744 - RNA, 22 nt, Human
acagagcugggugcccccugga

SEQ ID NO: 1112745 - RNA, 19 nt, Human
gcaggcacagcccugggug

SEQ ID NO: 1112746 - RNA, 22 nt, Human
ggcagcagcaagguuggagcug

SEQ ID NO: 1112747 - RNA, 22 nt, Human
ggcuucucucuucacauggcuu

SEQ ID NO: 1112748 - RNA, 22 nt, Human
aagggcagccugacucacgguc

SEQ ID NO: 1112749 - RNA, 20 nt, Human
ggccuuggguuucgccuguu

SEQ ID NO: 1112750 - RNA, 22 nt, Human
auauacuuggagacuaucauug

SEQ ID NO: 1112751 - RNA, 22 nt, Human
agcugcucccuauccuuuccuu

SEQ ID NO: 1112752 - RNA, 22 nt, Human
aacuuuauuguuaggggcuaaa

SEQ ID NO: 1112753 - RNA, 22 nt, Human
aaagcccauguggaaguacagg

SEQ ID NO: 1112754 - RNA, 22 nt, Human
uggcugcuagccagagcuucag

SEQ ID NO: 1112755 - RNA, 22 nt, Human
agggcagaaguacagacacuua

SEQ ID NO: 1112756 - RNA, 22 nt, Human
agaauuagucacaauuauagga

SEQ ID NO: 1112757 - RNA, 22 nt, Human
ucuggcuccuggcuccacugcc

SEQ ID NO: 1112758 - RNA, 22 nt, Human
cacugugucaguuugguuagac

SEQ ID NO: 1112759 - RNA, 22 nt, Human
gauuuccuaauguggaucucug

SEQ ID NO: 1112760 - RNA, 22 nt, Human
gccuucugauugcuggacugac

SEQ ID NO: 1112761 - RNA, 22 nt, Human
cucucaggcuugggucguggca

SEQ ID NO: 1112762 - RNA, 22 nt, Human
caggggcuuaagugacagaagg

SEQ ID NO: 1112763 - RNA, 21 nt, Human
ucccagggccaggugccauca

SEQ ID NO: 1112764 - RNA, 22 nt, Human
cagaacauuccaugugcccugc

SEQ ID NO: 1112765 - RNA, 22 nt, Human
uggacagcgaaagugccuggga

SEQ ID NO: 1112766 - RNA, 22 nt, Human
caguacuugggggguucuaagu

SEQ ID NO: 1112767 - RNA, 22 nt, Human
cugaggaugguguggucuucuc

SEQ ID NO: 1112768 - RNA, 20 nt, Human
ccuggaagagcuccccaggc

SEQ ID NO: 1112769 - RNA, 22 nt, Human
cucaccacagagccuguccagc

SEQ ID NO: 1112770 - RNA, 22 nt, Human
augaagucuagcaagcauugaa

SEQ ID NO: 1112771 - RNA, 21 nt, Human
ugguggagugugcugagcaug

SEQ ID NO: 1112772 - RNA, 22 nt, Human
ucaaugauuagaguuuagugug

SEQ ID NO: 1112773 - RNA, 22 nt, Human
agaaaguucugugaguuguuca

SEQ ID NO: 1112774 - RNA, 22 nt, Human
uuguccuuaccucaaucuggaa

SEQ ID NO: 1112775 - RNA, 22 nt, Human
ucccaguguggcaggccaugga

SEQ ID NO: 1112776 - RNA, 22 nt, Human
accacugcccauggugaaaacu

SEQ ID NO: 1112777 - RNA, 22 nt, Human
gggcuggaggaccggccucgga

SEQ ID NO: 1112778 - RNA, 22 nt, Human
auuuaucaccaguuagcugacu

SEQ ID NO: 1112779 - RNA, 22 nt, Human
ggagugggcagcacugcccugu

SEQ ID NO: 1112780 - RNA, 22 nt, Human
acuggcagagguuggacaccau

SEQ ID NO: 1112781 - RNA, 22 nt, Human
guacuuccguggacuaauuguu

SEQ ID NO: 1112782 - RNA, 22 nt, Human
uuugcauugccucugacuuaug

SEQ ID NO: 1112783 - RNA, 22 nt, Human
uaaugcacagaauugacauggg

SEQ ID NO: 1112784 - RNA, 22 nt, Human
cccugagaugccucacccuagu

SEQ ID NO: 1112785 - RNA, 20 nt, Human
agugcaagaaagcacagcug

SEQ ID NO: 1112786 - RNA, 22 nt, Human
gcccagcaccucucucaggguu

SEQ ID NO: 1112787 - RNA, 22 nt, Human
gugcuuccaucuagagggucac

SEQ ID NO: 1112788 - RNA, 22 nt, Human
cucaggaugcaauuccaucaag

SEQ ID NO: 1112789 - RNA, 22 nt, Human
gcagauggugggggaggaguac

SEQ ID NO: 1112790 - RNA, 22 nt, Human
ccagggucuuggagaggagugc

SEQ ID NO: 1112791 - RNA, 22 nt, Human
ggaggccaugaggcucuaggug

SEQ ID NO: 1112792 - RNA, 22 nt, Human
aggccucacucucagagcuucu

SEQ ID NO: 1112793 - RNA, 22 nt, Human
cauuucuguucucuuccuguac

SEQ ID NO: 1112794 - RNA, 22 nt, Human
cagagcugcaaaugccccuccg

SEQ ID NO: 1112795 - RNA, 22 nt, Human
cugucaucacaguugagcagcc

SEQ ID NO: 1112796 - RNA, 19 nt, Human
aggugaugugacucuagaa

SEQ ID NO: 1112797 - RNA, 22 nt, Human
caggagcccguugcuccggcgg

SEQ ID NO: 1112798 - RNA, 22 nt, Human
uggaaagaauuccuaugguuca

SEQ ID NO: 1112799 - RNA, 22 nt, Human
ccacagggcacaagggagguug

SEQ ID NO: 1112800 - RNA, 22 nt, Human
uauauguaagcuauguaagagu

SEQ ID NO: 1112801 - RNA, 22 nt, Human
cccagcuccagagccagaaaca

SEQ ID NO: 1112802 - RNA, 19 nt, Human
uagcugccuguuaccucca

SEQ ID NO: 1112803 - RNA, 22 nt, Human
ccuggaaguuggagguugcagu

SEQ ID NO: 1112804 - RNA, 18 nt, Human
gggcccuggcguccgccc

SEQ ID NO: 1112805 - RNA, 22 nt, Human
aggcugucugaccccagagccc

SEQ ID NO: 1112806 - RNA, 22 nt, Human
uggccucuuacgacauagccuu

SEQ ID NO: 1112807 - RNA, 22 nt, Human
cugagaggcacaaggcauuucg

SEQ ID NO: 1112808 - RNA, 22 nt, Human
guggcugcuaagucuccuuccu

SEQ ID NO: 1112809 - RNA, 22 nt, Human
aggcuccaugcaaaggcuguuu

SEQ ID NO: 1112810 - RNA, 22 nt, Human
gccagggaggcuguaggguccu

SEQ ID NO: 1112811 - RNA, 22 nt, Human
gcuggccuugugucugaggaag

SEQ ID NO: 1112812 - RNA, 22 nt, Human
uugcaggggaaggagcagagcu

SEQ ID NO: 1112813 - RNA, 22 nt, Human
caggccugugaguugaggcccc

SEQ ID NO: 1112814 - RNA, 22 nt, Human
gccugguggacacugggcauca

SEQ ID NO: 1112815 - RNA, 22 nt, Human
gaaaugcauaaucuuaguagau

SEQ ID NO: 1112816 - RNA, 22 nt, Human
ugucucagauacgccaucaagg

SEQ ID NO: 1112817 - RNA, 22 nt, Human
cccuggagucagguuggccugg

SEQ ID NO: 1112818 - RNA, 22 nt, Human
uacauguauugauuucucuucu

SEQ ID NO: 1112819 - RNA, 22 nt, Human
uggcagagcaaaaagauagaau

SEQ ID NO: 1112820 - RNA, 22 nt, Human
ucaguuuugaaaacauugaaug

SEQ ID NO: 1112821 - RNA, 22 nt, Human
gaugcugaagugaagugaucuu

SEQ ID NO: 1112822 - RNA, 22 nt, Human
acagggcagaaauguugcaucu

SEQ ID NO: 1112823 - RNA, 22 nt, Human
ccugccuguacuagagacccag

SEQ ID NO: 1112824 - RNA, 22 nt, Human
cccccaggcucugacacaggag

SEQ ID NO: 1112825 - RNA, 22 nt, Human
gcuggccaguguggugaccacc

SEQ ID NO: 1112826 - RNA, 23 nt, Human
gcugagguacauuuacaggaaga

SEQ ID NO: 1112827 - RNA, 22 nt, Human
agcagcuggggccugugacgau

SEQ ID NO: 1112828 - RNA, 22 nt, Human
guggagacuucuacuagagacc

SEQ ID NO: 1112829 - RNA, 22 nt, Human
aaaagagucuuaggcagucaua

SEQ ID NO: 1112830 - RNA, 22 nt, Human
uggcucuguugugcugagccag

SEQ ID NO: 1112831 - RNA, 22 nt, Human
cugucagcacucuacuacagau

SEQ ID NO: 1112832 - RNA, 22 nt, Human
agggcugcugcuccgggcccag

SEQ ID NO: 1112833 - RNA, 21 nt, Human
cacucaggguaugugccaggc

SEQ ID NO: 1112834 - RNA, 22 nt, Human
auccuugaacuuagacacuagg

SEQ ID NO: 1112835 - RNA, 22 nt, Human
uacauuaucuuguuaucuuuca

SEQ ID NO: 1112836 - RNA, 20 nt, Human
aaaguguaagcauauaauua

SEQ ID NO: 1112837 - RNA, 22 nt, Human
augaugguaaauucaguauccg

SEQ ID NO: 1112838 - RNA, 22 nt, Human
aaaucagugcucauuugaaagg

SEQ ID NO: 1112839 - RNA, 18 nt, Human
aggccagcccugcuacug

SEQ ID NO: 1112840 - RNA, 22 nt, Human
ccugggagugucagacuugcuu

SEQ ID NO: 1112841 - RNA, 22 nt, Human
ucccagaggacuguuggugcua

SEQ ID NO: 1112842 - RNA, 22 nt, Human
uggcucagaacuacuucuaguu

SEQ ID NO: 1112843 - RNA, 22 nt, Human
ucccacugcuuugcucugcuca

SEQ ID NO: 1112844 - RNA, 22 nt, Human
aagauacugaugauguaggcua

SEQ ID NO: 1112845 - RNA, 22 nt, Human
gcucuggacuggggccugagaa

SEQ ID NO: 1112846 - RNA, 22 nt, Human
gauucugagcugguguuuuacg

SEQ ID NO: 1112847 - RNA, 22 nt, Human
uuagaaaaaggcuguggucuua

SEQ ID NO: 1112848 - RNA, 19 nt, Human
ugggcuuccccagggcaga

SEQ ID NO: 1112849 - RNA, 22 nt, Human
aagaacaguugggaggugagcc

SEQ ID NO: 1112850 - RNA, 22 nt, Human
cugccuggcuaaacucaagucg

SEQ ID NO: 1112851 - RNA, 22 nt, Human
ugggcugccagcucuccagaug

SEQ ID NO: 1112852 - RNA, 22 nt, Human
gaaaugcaggcuuggauucagc

SEQ ID NO: 1112853 - RNA, 22 nt, Human
ggccuugggcuggcugcaguau

SEQ ID NO: 1112854 - RNA, 22 nt, Human
aggacagaccuaggacuggagc

SEQ ID NO: 1112855 - RNA, 22 nt, Human
gugugccaacaaaagacagugc

SEQ ID NO: 1112856 - RNA, 22 nt, Human
ugcuguagcccugcacagugca

SEQ ID NO: 1112857 - RNA, 22 nt, Human
uagaaaagaauuuuauuugaua

SEQ ID NO: 1112858 - RNA, 22 nt, Human
agcucugggccaggaacccuaa

SEQ ID NO: 1112859 - RNA, 22 nt, Human
ucugucaccgagggcauccaaa

SEQ ID NO: 1112860 - RNA, 22 nt, Human
cugggcagagcuaacaccugag

SEQ ID NO: 1112861 - RNA, 22 nt, Human
uucaaugagcccaagaacguga

SEQ ID NO: 1112862 - RNA, 21 nt, Human
agcugagcccagaagacuggu

SEQ ID NO: 1112863 - RNA, 22 nt, Human
gguggccucgguggugcacagg

SEQ ID NO: 1112864 - RNA, 22 nt, Human
ggcagcacugcagcuuguuggg

SEQ ID NO: 1112865 - RNA, 22 nt, Human
cuggcccuucucuugcuuccug

SEQ ID NO: 1112866 - RNA, 22 nt, Human
ccagguggcuucugcccgaugu

SEQ ID NO: 1112867 - RNA, 22 nt, Human
gagcccucucuguaggcaagua

SEQ ID NO: 1112868 - RNA, 22 nt, Human
ugucaugcccaggagcaaggua

SEQ ID NO: 1112869 - RNA, 22 nt, Human
ccagcuggugacauccccaacc

SEQ ID NO: 1112870 - RNA, 22 nt, Human
agcacuuuccuggcaaaugugg

SEQ ID NO: 1112871 - RNA, 22 nt, Human
acugugcaugaaccgaaacaaa

SEQ ID NO: 1112872 - RNA, 21 nt, Human
gcacagggacagaucaucaca

SEQ ID NO: 1112873 - RNA, 22 nt, Human
aggcaggcucaggcccaugcuu

SEQ ID NO: 1112874 - RNA, 22 nt, Human
auguaacuucugugaaucugac

SEQ ID NO: 1112875 - RNA, 22 nt, Human
ugugccuucucaguccugcuca

SEQ ID NO: 1112876 - RNA, 22 nt, Human
gcugagugagguccagagcuug

SEQ ID NO: 1112877 - RNA, 22 nt, Human
auacauuagaaucugguacuca

SEQ ID NO: 1112878 - RNA, 22 nt, Human
agccccuuccaguucucagauc

SEQ ID NO: 1112879 - RNA, 22 nt, Human
uuuccaauaaagugucauuguu

SEQ ID NO: 1112880 - RNA, 22 nt, Human
agcucccagagcucgagaguaa

SEQ ID NO: 1112881 - RNA, 22 nt, Human
aagcagcagaccugauuuugaa

SEQ ID NO: 1112882 - RNA, 22 nt, Human
cuggcugcgucugcucugacag

SEQ ID NO: 1112883 - RNA, 22 nt, Human
cagcucccuauggugaggcgac

SEQ ID NO: 1112884 - RNA, 22 nt, Human
acugaaauacugcucuuggauu

SEQ ID NO: 1112885 - RNA, 22 nt, Human
ugugcaguuucuauguugucca

SEQ ID NO: 1112886 - RNA, 22 nt, Human
ggcugcagcagagggacucacg

SEQ ID NO: 1112887 - RNA, 17 nt, Human
uggacccuugggccucc

SEQ ID NO: 1112888 - RNA, 22 nt, Human
gccugccuucggugcgcagcgg

SEQ ID NO: 1112889 - RNA, 22 nt, Human
ccagcccuucccaacuggccag

SEQ ID NO: 1112890 - RNA, 22 nt, Human
acugcuuuucuaagauucugug

SEQ ID NO: 1112891 - RNA, 22 nt, Human
ccagggcagugggagaaggugc

SEQ ID NO: 1112892 - RNA, 22 nt, Human
caggugggccgggguuuguucu

SEQ ID NO: 1112893 - RNA, 22 nt, Human
uucaaugauuuuuagggaucau

SEQ ID NO: 1112894 - RNA, 22 nt, Human
uguguuuuacaaauucucuuaa

SEQ ID NO: 1112895 - RNA, 22 nt, Human
uggcucagaagaaaagguaaac

SEQ ID NO: 1112896 - RNA, 22 nt, Human
aauguacaauaagacaaagagg

SEQ ID NO: 1112897 - RNA, 22 nt, Human
aggcuggggaauugaauuugcu

SEQ ID NO: 1112898 - RNA, 22 nt, Human
gcacagaagagcuuuggaauga

SEQ ID NO: 1112899 - RNA, 22 nt, Human
ugguggcuguugcagaacugag

SEQ ID NO: 1112900 - RNA, 22 nt, Human
uccucaggucaaagcaggagaa

SEQ ID NO: 1112901 - RNA, 22 nt, Human
agauacauugaguuuccuccug

SEQ ID NO: 1112902 - RNA, 22 nt, Human
aguggcagaagucacuggguag

SEQ ID NO: 1112903 - RNA, 22 nt, Human
gcugagaguguaggauguuuac

SEQ ID NO: 1112904 - RNA, 22 nt, Human
ggccagaaguuggaaaagagcc

SEQ ID NO: 1112905 - RNA, 22 nt, Human
caguuucuuaucuucaaaauug

SEQ ID NO: 1112906 - RNA, 22 nt, Human
auaauuuacuaagcucuaccuu

SEQ ID NO: 1112907 - RNA, 22 nt, Human
ugugcuucagguugucgccacg

SEQ ID NO: 1112908 - RNA, 22 nt, Human
augucuaaaagauaaaguuuaa

SEQ ID NO: 1112909 - RNA, 20 nt, Human
gccuguccugagugucaugg

SEQ ID NO: 1112910 - RNA, 22 nt, Human
gagagaagaaagccaugguccu

SEQ ID NO: 1112911 - RNA, 20 nt, Human
acauugauuauguuuguaga

SEQ ID NO: 1112912 - RNA, 22 nt, Human
ugucaccucuuuggcugcagcu

SEQ ID NO: 1112913 - RNA, 18 nt, Human
cuucagugacagucuggc

SEQ ID NO: 1112914 - RNA, 22 nt, Human
agcaggaguuugaugcuuuuau

SEQ ID NO: 1112915 - RNA, 22 nt, Human
cagcuggcuccaccucugggcu

SEQ ID NO: 1112916 - RNA, 21 nt, Human
gggaaauuaggauugcucauc

SEQ ID NO: 1112917 - RNA, 23 nt, Human
auucuucauuaucuucuagaaaa

SEQ ID NO: 1112918 - RNA, 22 nt, Human
gugucaugggagucagaaguga

SEQ ID NO: 1112919 - RNA, 22 nt, Human
ucugagagguuaagcaauuuga

SEQ ID NO: 1112920 - RNA, 19 nt, Human
cugugcuuuaaacuccuau

SEQ ID NO: 1112921 - RNA, 22 nt, Human
uggcucagcgcggccuggucuu

SEQ ID NO: 1112922 - RNA, 22 nt, Human
agccacagggggugagggacaa

SEQ ID NO: 1112923 - RNA, 22 nt, Human
cugggcucagaugagaggaagg

SEQ ID NO: 1112924 - RNA, 22 nt, Human
uaaauucccaacucugcucuuc

SEQ ID NO: 1112925 - RNA, 22 nt, Human
ucugggcucugucagcaccucu

SEQ ID NO: 1112926 - RNA, 22 nt, Human
ucuggaaguuagaggaggaaag

SEQ ID NO: 1112927 - RNA, 22 nt, Human
aaugauguauuaguacaacaca

SEQ ID NO: 1112928 - RNA, 22 nt, Human
gcaguccucucauuggccuccu

SEQ ID NO: 1112929 - RNA, 22 nt, Human
gagccuggccuccugccucagc

SEQ ID NO: 1112930 - RNA, 22 nt, Human
agguggggaaaccagcgauccc

SEQ ID NO: 1112931 - RNA, 20 nt, Human
acccagcucugugcccuggg

SEQ ID NO: 1112932 - RNA, 22 nt, Human
cuggcaggcggcagagcccagg

SEQ ID NO: 1112933 - RNA, 22 nt, Human
cuguauuuaguuaaaaugcuaa

SEQ ID NO: 1112934 - RNA, 17 nt, Human
auuucacuuagcaugag

SEQ ID NO: 1112935 - RNA, 22 nt, Human
gcauugucaaaagugguaugac

SEQ ID NO: 1112936 - RNA, 22 nt, Human
ucaaugauagacaagaucuaag

SEQ ID NO: 1112937 - RNA, 22 nt, Human
agucccagugagaugaaccagg

SEQ ID NO: 1112938 - RNA, 22 nt, Human
caugucuguguacacaugcaca

SEQ ID NO: 1112939 - RNA, 22 nt, Human
cugcucuggggaagccagaugu

SEQ ID NO: 1112940 - RNA, 22 nt, Human
aggucauuacaauuaucauuuu

SEQ ID NO: 1112941 - RNA, 22 nt, Human
accugggagucacaccugagaa

SEQ ID NO: 1112942 - RNA, 22 nt, Human
uguuaacaucuuggacucguga

SEQ ID NO: 1112943 - RNA, 22 nt, Human
cagugcagccaaggacaggcac

SEQ ID NO: 1112944 - RNA, 22 nt, Human
cugugucucuccuuacaagacu

SEQ ID NO: 1112945 - RNA, 22 nt, Human
ucccagagccucugccacucug

SEQ ID NO: 1112946 - RNA, 22 nt, Human
ucucuccuuaucauuguguuua

SEQ ID NO: 1112947 - RNA, 22 nt, Human
uggcuccuaggauggugccugg

SEQ ID NO: 1112948 - RNA, 22 nt, Human
uaauguguccugaaagcuucug

SEQ ID NO: 1112949 - RNA, 22 nt, Human
ucacuguaucauguugcacuua

SEQ ID NO: 1112950 - RNA, 22 nt, Human
cuguccuccggccaccuacagu

SEQ ID NO: 1112951 - RNA, 22 nt, Human
agccucugacugucagcaaggu

SEQ ID NO: 1112952 - RNA, 22 nt, Human
agggacagucuacuguucacug

SEQ ID NO: 1112953 - RNA, 22 nt, Human
gugcugucguggaacugggcug

SEQ ID NO: 1112954 - RNA, 22 nt, Human
ugaaaguugcacauaagagaau

SEQ ID NO: 1112955 - RNA, 22 nt, Human
cccagagcugagucugauauau

SEQ ID NO: 1112956 - RNA, 17 nt, Human
gaaagguccuagaaauc

SEQ ID NO: 1112957 - RNA, 22 nt, Human
ccucagaguaggucucagcugu

SEQ ID NO: 1112958 - RNA, 22 nt, Human
cucugagcugaaacaugagcau

SEQ ID NO: 1112959 - RNA, 22 nt, Human
uggagcugggguuugaaucugg

SEQ ID NO: 1112960 - RNA, 22 nt, Human
guccucuggaagaugaguucuu

SEQ ID NO: 1112961 - RNA, 22 nt, Human
ugucccauggauaccaggcuau

SEQ ID NO: 1112962 - RNA, 22 nt, Human
uccacuuuagcaaugauugaau

SEQ ID NO: 1112963 - RNA, 22 nt, Human
acagaaauauucguggugcuug

SEQ ID NO: 1112964 - RNA, 22 nt, Human
ggcugcucugccuuccagcugg

SEQ ID NO: 1112965 - RNA, 22 nt, Human
ccugagaccaaguugcagccau

SEQ ID NO: 1112966 - RNA, 22 nt, Human
gggagggaaggaggcgccgugu

SEQ ID NO: 1112967 - RNA, 22 nt, Human
ugucucagggcagcagcagggg

SEQ ID NO: 1112968 - RNA, 22 nt, Human
ggugccaggcuguagucagggu

SEQ ID NO: 1112969 - RNA, 22 nt, Human
uaaccauauuuuccauuaaguu

SEQ ID NO: 1112970 - RNA, 22 nt, Human
ccaggccuccugugaguggacc

SEQ ID NO: 1112971 - RNA, 22 nt, Human
aggcagaaaauagucauccaaa

SEQ ID NO: 1112972 - RNA, 22 nt, Human
gccucugcaucuucgccgcacu

SEQ ID NO: 1112973 - RNA, 22 nt, Human
gggcuggcgggaaaggcaauuc

SEQ ID NO: 1112974 - RNA, 22 nt, Human
agauacauauagaaaacaucaa

SEQ ID NO: 1112975 - RNA, 21 nt, Human
guuugcaugaacaagucagcc

SEQ ID NO: 1112976 - RNA, 22 nt, Human
ugucuguacaaauuuucugugu

SEQ ID NO: 1112977 - RNA, 22 nt, Human
aagaggaacugggggcugaguc

SEQ ID NO: 1112978 - RNA, 22 nt, Human
uuuuucaugagacuagaaguca

SEQ ID NO: 1112979 - RNA, 22 nt, Human
gcaggcagagaaggaacauuua

SEQ ID NO: 1112980 - RNA, 22 nt, Human
acugugcuuucucuggaggcau

SEQ ID NO: 1112981 - RNA, 22 nt, Human
uggcucaggccuacgacgccuu

SEQ ID NO: 1112982 - RNA, 22 nt, Human
agcugccagggacugggcaugg

SEQ ID NO: 1112983 - RNA, 22 nt, Human
uucuuuccccauggaguucgga

SEQ ID NO: 1112984 - RNA, 22 nt, Human
agggccugucagcgguguccug

SEQ ID NO: 1112985 - RNA, 22 nt, Human
acagggcagugucuugaaaaau

SEQ ID NO: 1112986 - RNA, 22 nt, Human
cugacccauauaagaguggagg

SEQ ID NO: 1112987 - RNA, 22 nt, Human
gggacuggaacuacuggugcag

SEQ ID NO: 1112988 - RNA, 22 nt, Human
gccugggugucgaucacuagug

SEQ ID NO: 1112989 - RNA, 22 nt, Human
cccaggucugugccagcucuga

SEQ ID NO: 1112990 - RNA, 22 nt, Human
cugaaggagcauagucaguuuu

SEQ ID NO: 1112991 - RNA, 22 nt, Human
cagcugccacuugcucucggcu

SEQ ID NO: 1112992 - RNA, 22 nt, Human
ucccacacagcccgcucaccgg

SEQ ID NO: 1112993 - RNA, 15 nt, Human
cagucccagggaccc

SEQ ID NO: 1112994 - RNA, 22 nt, Human
ugcuauaagaauuauauuacuc

SEQ ID NO: 1112995 - RNA, 22 nt, Human
cuuugcauacaauuuuuagaaa

SEQ ID NO: 1112996 - RNA, 21 nt, Human
ggagucauuagucauuuccuu

SEQ ID NO: 1112997 - RNA, 22 nt, Human
acagagcauauaaagugcuuug

SEQ ID NO: 1112998 - RNA, 22 nt, Human
uggagggcaucuguggucaggc

SEQ ID NO: 1112999 - RNA, 22 nt, Human
gcugucuuccuugcuccaaggg

SEQ ID NO: 1113000 - RNA, 22 nt, Human
gcagcaggagaguuuguccugc

SEQ ID NO: 1113001 - RNA, 22 nt, Human
ucuggcucucaacaaauauuua

SEQ ID NO: 1113002 - RNA, 22 nt, Human
cuucagaacuauaaaaaguacu

SEQ ID NO: 1113003 - RNA, 22 nt, Human
uagaaaucauuuagaaguauug

SEQ ID NO: 1113004 - RNA, 22 nt, Human
ggauggagaugaccauggugac

SEQ ID NO: 1113005 - RNA, 22 nt, Human
uaacagaaauagaaaugagagu

SEQ ID NO: 1113006 - RNA, 22 nt, Human
gcaggcaguugcaguuuucuag

SEQ ID NO: 1113007 - RNA, 22 nt, Human
cuggccagaguuggagggugug

SEQ ID NO: 1113008 - RNA, 22 nt, Human
uggcucuggugcgggcuccugc

SEQ ID NO: 1113009 - RNA, 22 nt, Human
cuucuggaggacacuggcccca

SEQ ID NO: 1113010 - RNA, 22 nt, Human
ucucagagugguggucccucug

SEQ ID NO: 1113011 - RNA, 22 nt, Human
cugucugcuagaacaucuauac

SEQ ID NO: 1113012 - RNA, 20 nt, Human
ugcucaggauggagaggugu

SEQ ID NO: 1113013 - RNA, 22 nt, Human
agggcagagggugccucaccug

SEQ ID NO: 1113014 - RNA, 22 nt, Human
ugaacagauggcccagcagagg

SEQ ID NO: 1113015 - RNA, 22 nt, Human
uuuuaaucaugcuucuaugucc

SEQ ID NO: 1113016 - RNA, 22 nt, Human
agaggcugaaugaugucaucau

SEQ ID NO: 1113017 - RNA, 22 nt, Human
gggcauggaggucugucugcag

SEQ ID NO: 1113018 - RNA, 22 nt, Human
aguggcagagguugacugcagu

SEQ ID NO: 1113019 - RNA, 22 nt, Human
uggcagaaguucacuaguagcu

SEQ ID NO: 1113020 - RNA, 22 nt, Human
ggcacucagagauucaggcugu

SEQ ID NO: 1113021 - RNA, 22 nt, Human
gcaggggaguggcaggcccgga

SEQ ID NO: 1113022 - RNA, 22 nt, Human
uccuugaauggacauuacacug

SEQ ID NO: 1113023 - RNA, 20 nt, Human
ccucucugaagaggucaucu

SEQ ID NO: 1113024 - RNA, 22 nt, Human
ucccugcucagcucaccuggca

SEQ ID NO: 1113025 - RNA, 22 nt, Human
ggguuggggcccagcagucugc

SEQ ID NO: 1113026 - RNA, 22 nt, Human
aagaugcuuauugcuccugcag

SEQ ID NO: 1113027 - RNA, 22 nt, Human
uguguauuucuggaacagacua

SEQ ID NO: 1113028 - RNA, 22 nt, Human
augacagaaggccucccugaca

SEQ ID NO: 1113029 - RNA, 22 nt, Human
cucagaguucuccugggaggug

SEQ ID NO: 1113030 - RNA, 21 nt, Human
ugcaggaaagugcugcgaccc

SEQ ID NO: 1113031 - RNA, 22 nt, Human
ucuggcuccaggaccgggcaca

SEQ ID NO: 1113032 - RNA, 22 nt, Human
gcaaggcugcugccacccaucu

SEQ ID NO: 1113033 - RNA, 22 nt, Human
cacugcaguaacucuaggacug

SEQ ID NO: 1113034 - RNA, 20 nt, Human
ugcuccaucuaaagugauua

SEQ ID NO: 1113035 - RNA, 22 nt, Human
cagggcacaguuauggaggugg

SEQ ID NO: 1113036 - RNA, 17 nt, Human
agaaagaggauccacag

SEQ ID NO: 1113037 - RNA, 21 nt, Human
gcagagccugagguucuugag

SEQ ID NO: 1113038 - RNA, 22 nt, Human
uaggccaggacagagcuuccag

SEQ ID NO: 1113039 - RNA, 22 nt, Human
aggcacuguggaagacaugguu

SEQ ID NO: 1113040 - RNA, 22 nt, Human
agcuguccuggcucaggcugug

SEQ ID NO: 1113041 - RNA, 22 nt, Human
ccccaccugugcgucugccgca

SEQ ID NO: 1113042 - RNA, 22 nt, Human
cucaggagaugacagaagguau

SEQ ID NO: 1113043 - RNA, 19 nt, Human
gugaggauacugcucagag

SEQ ID NO: 1113044 - RNA, 22 nt, Human
gcucacugccauucucuagaug

SEQ ID NO: 1113045 - RNA, 22 nt, Human
ucacagugaugacgugggagca

SEQ ID NO: 1113046 - RNA, 22 nt, Human
gcccucucggcauagcaggggc

SEQ ID NO: 1113047 - RNA, 22 nt, Human
cuggugcuggagccuagucccu

SEQ ID NO: 1113048 - RNA, 22 nt, Human
gggccacacagaaccuccuggu

SEQ ID NO: 1113049 - RNA, 22 nt, Human
ccuccaggaacuugagagacac

SEQ ID NO: 1113050 - RNA, 22 nt, Human
ggggcuggcucacuaagagacu

SEQ ID NO: 1113051 - RNA, 22 nt, Human
cagaguguggcaucuuccaacu

SEQ ID NO: 1113052 - RNA, 19 nt, Human
agcaccugugagagccugg

SEQ ID NO: 1113053 - RNA, 22 nt, Human
aaaucaguuguuauauuaaaga

SEQ ID NO: 1113054 - RNA, 22 nt, Human
cugugcuugacagugggaagca

SEQ ID NO: 1113055 - RNA, 22 nt, Human
uccuuggcagcagggagcauga

SEQ ID NO: 1113056 - RNA, 22 nt, Human
ugcagggcuacaggacuacaac

SEQ ID NO: 1113057 - RNA, 22 nt, Human
uuggagcccugaggaucuggau

SEQ ID NO: 1113058 - RNA, 22 nt, Human
caguauguacucuuaucaugua

SEQ ID NO: 1113059 - RNA, 22 nt, Human
gcccaggccggagagcagugcu

SEQ ID NO: 1113060 - RNA, 22 nt, Human
ccagccagcugcccuuggggcc

SEQ ID NO: 1113061 - RNA, 22 nt, Human
ugcaauaaguuguguuaucacu

SEQ ID NO: 1113062 - RNA, 19 nt, Human
ggcugggucuggcagguuc

SEQ ID NO: 1113063 - RNA, 22 nt, Human
cccucugcugccuggcuggguc

SEQ ID NO: 1113064 - RNA, 22 nt, Human
gcaguggcuaggagucuggcgu

SEQ ID NO: 1113065 - RNA, 23 nt, Human
gggagccauggguggucauggag

SEQ ID NO: 1113066 - RNA, 22 nt, Human
gggcccuggggccugauuugca

SEQ ID NO: 1113067 - RNA, 22 nt, Human
cuguuuucaaagagagagaaug

SEQ ID NO: 1113068 - RNA, 22 nt, Human
auaaggcagucacuggaauguu

SEQ ID NO: 1113069 - RNA, 22 nt, Human
agcaauauaaauguuggguaga

SEQ ID NO: 1113070 - RNA, 20 nt, Human
ucucaggccccaguuuucuu

SEQ ID NO: 1113071 - RNA, 18 nt, Human
auccuugaugagaggucu

SEQ ID NO: 1113072 - RNA, 22 nt, Human
uuccauauuuguguggcaaaag

SEQ ID NO: 1113073 - RNA, 22 nt, Human
aucuuugaagaggacuugaagu

SEQ ID NO: 1113074 - RNA, 19 nt, Human
gggcucuggccucaguggg

SEQ ID NO: 1113075 - RNA, 22 nt, Human
gcucaggacuggaggagcgggg

SEQ ID NO: 1113076 - RNA, 22 nt, Human
caaugugugcuuacaggccagu

SEQ ID NO: 1113077 - RNA, 22 nt, Human
uuuuccucugcaauaaaagcag

SEQ ID NO: 1113078 - RNA, 22 nt, Human
aagccagguguugugguaagag

SEQ ID NO: 1113079 - RNA, 21 nt, Human
uagcacuucgcuguaauuggg

SEQ ID NO: 1113080 - RNA, 22 nt, Human
auggcccaggccuccuguggcu

SEQ ID NO: 1113081 - RNA, 22 nt, Human
ucugccuuccccauaaucugau

SEQ ID NO: 1113082 - RNA, 19 nt, Human
cugguccugacugaggggu

SEQ ID NO: 1113083 - RNA, 22 nt, Human
gcagcuggggaggucgugggga

SEQ ID NO: 1113084 - RNA, 22 nt, Human
ugaugcugcugggaguggugcu

SEQ ID NO: 1113085 - RNA, 22 nt, Human
acuguguccuauuuccuugaca

SEQ ID NO: 1113086 - RNA, 22 nt, Human
ucucucagaggccaggguccug

SEQ ID NO: 1113087 - RNA, 22 nt, Human
ucaaaaguuucacauagagaua

SEQ ID NO: 1113088 - RNA, 22 nt, Human
guggauggauugaggcaguggg

SEQ ID NO: 1113089 - RNA, 22 nt, Human
cugcccuggucccauggcugau

SEQ ID NO: 1113090 - RNA, 22 nt, Human
gccucucucuacccaguaugau

SEQ ID NO: 1113091 - RNA, 22 nt, Human
ucuggccuauuucugucagauc

SEQ ID NO: 1113092 - RNA, 22 nt, Human
ugggaguguucuuggcuugcuu

SEQ ID NO: 1113093 - RNA, 22 nt, Human
aguggcaggcggagauguagga

SEQ ID NO: 1113094 - RNA, 22 nt, Human
acagagccaaaaggacauagua

SEQ ID NO: 1113095 - RNA, 22 nt, Human
agcucccagucuccucuccaug

SEQ ID NO: 1113096 - RNA, 23 nt, Human
gggauauggaccuuggaggaguc

SEQ ID NO: 1113097 - RNA, 22 nt, Human
caggguggcaggcaccauggcc

SEQ ID NO: 1113098 - RNA, 17 nt, Human
acacagggagagggagc

SEQ ID NO: 1113099 - RNA, 22 nt, Human
uccauugucuuugguccuagcc

SEQ ID NO: 1113100 - RNA, 22 nt, Human
ucagggcaggacaguguaggcc

SEQ ID NO: 1113101 - RNA, 22 nt, Human
gcugccuggagcucagccugcc

SEQ ID NO: 1113102 - RNA, 22 nt, Human
gugcugucaauugcuuucagua

SEQ ID NO: 1113103 - RNA, 22 nt, Human
uccaugugccaaggggcagagg

SEQ ID NO: 1113104 - RNA, 22 nt, Human
uuuccucuccaccaggaggucu

SEQ ID NO: 1113105 - RNA, 22 nt, Human
ccuggagcacauggcaggaggc

SEQ ID NO: 1113106 - RNA, 22 nt, Human
gagaggcugacuggcuguccug

SEQ ID NO: 1113107 - RNA, 22 nt, Human
caggggcugugggcggagccuc

SEQ ID NO: 1113108 - RNA, 22 nt, Human
aucuggguucaccaugcuccug

SEQ ID NO: 1113109 - RNA, 22 nt, Human
agcuaggaaauugaggcugaga

SEQ ID NO: 1113110 - RNA, 22 nt, Human
gcaaagucugcaucuggaucag

SEQ ID NO: 1113111 - RNA, 22 nt, Human
gagcugugagggacacauugcu

SEQ ID NO: 1113112 - RNA, 22 nt, Human
cuucugugcuucacaguugcca

SEQ ID NO: 1113113 - RNA, 22 nt, Human
ucugcagcuucuugccagagag

SEQ ID NO: 1113114 - RNA, 21 nt, Human
uguaugcacgcacaugcacac

SEQ ID NO: 1113115 - RNA, 22 nt, Human
ugggcagagucguggggaauag

SEQ ID NO: 1113116 - RNA, 22 nt, Human
cucucugagugagggacaagcu

SEQ ID NO: 1113117 - RNA, 22 nt, Human
gccaggcagcugggagggugcc

SEQ ID NO: 1113118 - RNA, 22 nt, Human
uccuggagaauccugccaccug

SEQ ID NO: 1113119 - RNA, 22 nt, Human
auacuuacuuuucuucagacua

SEQ ID NO: 1113120 - RNA, 22 nt, Human
ggcucugcagugacuugagggg

SEQ ID NO: 1113121 - RNA, 22 nt, Human
cagcuggcauaccugggcccgg

SEQ ID NO: 1113122 - RNA, 22 nt, Human
uugauacaggcucuauuucauc

SEQ ID NO: 1113123 - RNA, 22 nt, Human
uugcucaggcuuagagcuacua

SEQ ID NO: 1113124 - RNA, 22 nt, Human
uguaugcuuguguauaauauaa

SEQ ID NO: 1113125 - RNA, 22 nt, Human
uguaugcaaauuuauuagcaca

SEQ ID NO: 1113126 - RNA, 22 nt, Human
uuugcauuaucucacuuauaua

SEQ ID NO: 1113127 - RNA, 22 nt, Human
agggcagcacagcugugcuccu

SEQ ID NO: 1113128 - RNA, 22 nt, Human
caggguggaauggaaugcuggc

SEQ ID NO: 1113129 - RNA, 22 nt, Human
uaagauaugguaggaaguuugg

SEQ ID NO: 1113130 - RNA, 22 nt, Human
acauacuaugaauacauguguc

SEQ ID NO: 1113131 - RNA, 20 nt, Human
uaaggcuguuuuguauuccu

SEQ ID NO: 1113132 - RNA, 22 nt, Human
gcuggccugaccugaggcuggg

SEQ ID NO: 1113133 - RNA, 21 nt, Human
cugcaucucauagaacauguc

SEQ ID NO: 1113134 - RNA, 18 nt, Human
aaggcuucaaagaguaga

SEQ ID NO: 1113135 - RNA, 22 nt, Human
cacauacaaugguguuauuugg

SEQ ID NO: 1113136 - RNA, 22 nt, Human
aggccagcucacccuggcuccu

SEQ ID NO: 1113137 - RNA, 20 nt, Human
gcacugaagguuccagggga

SEQ ID NO: 1113138 - RNA, 22 nt, Human
uuguaacagguacuaaauaacu

SEQ ID NO: 1113139 - RNA, 22 nt, Human
agcacaggaccaaggaagcugu

SEQ ID NO: 1113140 - RNA, 22 nt, Human
aaucuggcauguaagcuuagag

SEQ ID NO: 1113141 - RNA, 23 nt, Human
aaggucacagaacuuagcaagcc

SEQ ID NO: 1113142 - RNA, 22 nt, Human
cugaaggagaaggccacuguuc

SEQ ID NO: 1113143 - RNA, 20 nt, Human
gacaggagaguuagguaggu

SEQ ID NO: 1113144 - RNA, 19 nt, Human
uugaggggccaggggagau

SEQ ID NO: 1113145 - RNA, 22 nt, Human
gagcugccagacaugggaauga

SEQ ID NO: 1113146 - RNA, 22 nt, Human
ugaaggaaugaguauacuguuu

SEQ ID NO: 1113147 - RNA, 22 nt, Human
uggccaggcagguagaacggcc

SEQ ID NO: 1113148 - RNA, 22 nt, Human
gcucuccaaacccuguggcuuu

SEQ ID NO: 1113149 - RNA, 22 nt, Human
ggaggccaaggcagguggauca

SEQ ID NO: 1113150 - RNA, 22 nt, Human
acauugaugaaaagguaucauu

SEQ ID NO: 1113151 - RNA, 21 nt, Human
ccugagggugguugugaagau

SEQ ID NO: 1113152 - RNA, 22 nt, Human
ugcaccauguaaguggccacgu

SEQ ID NO: 1113153 - RNA, 22 nt, Human
uggagaagucaaagugaacagg

SEQ ID NO: 1113154 - RNA, 22 nt, Human
gcugagagaaaagugagguucu

SEQ ID NO: 1113155 - RNA, 22 nt, Human
aggcugaggcagguggaucauu

SEQ ID NO: 1113156 - RNA, 22 nt, Human
gcugucugucucugugacuuaa

SEQ ID NO: 1113157 - RNA, 17 nt, Human
aggcauggucuggggug

SEQ ID NO: 1113158 - RNA, 22 nt, Human
ccagggugaggaggcucccacg

SEQ ID NO: 1113159 - RNA, 22 nt, Human
aaggccauuauucugauauauu

SEQ ID NO: 1113160 - RNA, 19 nt, Human
aggacucuggaggcaugag

SEQ ID NO: 1113161 - RNA, 21 nt, Human
ccugccaggaaacugaguguc

SEQ ID NO: 1113162 - RNA, 22 nt, Human
agcagggcuugccgcuuguccu

SEQ ID NO: 1113163 - RNA, 22 nt, Human
augugaaagagguguucagugg

SEQ ID NO: 1113164 - RNA, 22 nt, Human
agagcccuuucuccaggcaccu

SEQ ID NO: 1113165 - RNA, 22 nt, Human
ccaggacuuauuacaguauaac

SEQ ID NO: 1113166 - RNA, 22 nt, Human
cugugcuuccaggauggcagcu

SEQ ID NO: 1113167 - RNA, 22 nt, Human
gugucccagcagcacauuggcu

SEQ ID NO: 1113168 - RNA, 22 nt, Human
uugcauuguugcaaugaaguau

SEQ ID NO: 1113169 - RNA, 22 nt, Human
ugggacagagugagcuuuggcc

SEQ ID NO: 1113170 - RNA, 22 nt, Human
gcagagguggcaucugggcucu

SEQ ID NO: 1113171 - RNA, 22 nt, Human
gccuggaggggccaggguggua

SEQ ID NO: 1113172 - RNA, 22 nt, Human
ugggcagauguccucugaagug

SEQ ID NO: 1113173 - RNA, 22 nt, Human
ugucucaggcccaagccaguaa

SEQ ID NO: 1113174 - RNA, 22 nt, Human
agccugagccccauccagcuga

SEQ ID NO: 1113175 - RNA, 22 nt, Human
ugagcccaggaguuggaggcug

SEQ ID NO: 1113176 - RNA, 22 nt, Human
ucaagauaccaccauuauaugu

SEQ ID NO: 1113177 - RNA, 22 nt, Human
auccaaagcccuaaguuaacug

SEQ ID NO: 1113178 - RNA, 22 nt, Human
aggucaaguuuagauagaguua

SEQ ID NO: 1113179 - RNA, 22 nt, Human
cuggagaggccccaagauauuu

SEQ ID NO: 1113180 - RNA, 22 nt, Human
agcagccauuuaaaaugaauug

SEQ ID NO: 1113181 - RNA, 22 nt, Human
uuuccucuucuggcaggcaggg

SEQ ID NO: 1113182 - RNA, 22 nt, Human
ugggcaggaugcguugauucuu

SEQ ID NO: 1113183 - RNA, 22 nt, Human
auacaugucaucauauguuugu

SEQ ID NO: 1113184 - RNA, 22 nt, Human
cugagccagagggagucggguc

SEQ ID NO: 1113185 - RNA, 22 nt, Human
ccugccagugaagcugacgggc

SEQ ID NO: 1113186 - RNA, 22 nt, Human
agcaguggcugaagauguuccu

SEQ ID NO: 1113187 - RNA, 22 nt, Human
ggcuggcaagugucugcucaug

SEQ ID NO: 1113188 - RNA, 19 nt, Human
caguggagauuggaggagg

SEQ ID NO: 1113189 - RNA, 20 nt, Human
ggguggaguugcggucugug

SEQ ID NO: 1113190 - RNA, 22 nt, Human
acuccagggcuccaucccuugu

SEQ ID NO: 1113191 - RNA, 22 nt, Human
gcucucuggguggugggcaaca

SEQ ID NO: 1113192 - RNA, 22 nt, Human
uaacagaagaaaacauauugga

SEQ ID NO: 1113193 - RNA, 22 nt, Human
cuggagccauguauagccuaug

SEQ ID NO: 1113194 - RNA, 22 nt, Human
ucugccugagggagcugaggaa

SEQ ID NO: 1113195 - RNA, 23 nt, Human
caguacuuaguguagcguuaauu

SEQ ID NO: 1113196 - RNA, 22 nt, Human
aagagggaggugcgggugcaga

SEQ ID NO: 1113197 - RNA, 22 nt, Human
uggguggcacuucuggggucca

SEQ ID NO: 1113198 - RNA, 22 nt, Human
gcagagcuguuaauggagcuga

SEQ ID NO: 1113199 - RNA, 22 nt, Human
uaguaaaaguuuaguugaaagu

SEQ ID NO: 1113200 - RNA, 22 nt, Human
caagggugguauugggagcaua

SEQ ID NO: 1113201 - RNA, 22 nt, Human
gcagcagaguuugggagauggu

SEQ ID NO: 1113202 - RNA, 22 nt, Human
ccucagggaggccucuguggcu

SEQ ID NO: 1113203 - RNA, 22 nt, Human
cacaggagcuguggggcagugu

SEQ ID NO: 1113204 - RNA, 22 nt, Human
uggcagggaguugcaggauuuc

SEQ ID NO: 1113205 - RNA, 22 nt, Human
aggccugagccccagguuuguu

SEQ ID NO: 1113206 - RNA, 22 nt, Human
cugggagcugucaggagcgugu

SEQ ID NO: 1113207 - RNA, 22 nt, Human
uuuguaaaaggaggaagcaugg

SEQ ID NO: 1113208 - RNA, 22 nt, Human
ugucacuucaggaaugcaggga

SEQ ID NO: 1113209 - RNA, 17 nt, Human
gagagcugcugcuuccg

SEQ ID NO: 1113210 - RNA, 22 nt, Human
ucuggcucuuugggugauugua

SEQ ID NO: 1113211 - RNA, 22 nt, Human
ugaaaucugcaugcaaaguccu

SEQ ID NO: 1113212 - RNA, 22 nt, Human
acacugaauguuuaagaacuug

SEQ ID NO: 1113213 - RNA, 22 nt, Human
cugcagaggucuugcugauggu

SEQ ID NO: 1113214 - RNA, 22 nt, Human
ggaggccaccugaccugcuguu

SEQ ID NO: 1113215 - RNA, 22 nt, Human
ggagucaggagcaggcugggcu

SEQ ID NO: 1113216 - RNA, 23 nt, Human
aggcagagccaaggucaaaaccc

SEQ ID NO: 1113217 - RNA, 22 nt, Human
gaggcagagucacaaagagucu

SEQ ID NO: 1113218 - RNA, 22 nt, Human
cagcuuccaucuccacugcccu

SEQ ID NO: 1113219 - RNA, 22 nt, Human
gcuggcaggguucucacugaaa

SEQ ID NO: 1113220 - RNA, 22 nt, Human
gucaugccagcggagcucggga

SEQ ID NO: 1113221 - RNA, 22 nt, Human
gcuggugagcaaaggagaagga

SEQ ID NO: 1113222 - RNA, 17 nt, Human
cugaggcccagggccca

SEQ ID NO: 1113223 - RNA, 22 nt, Human
agcagccacacgccuccuucuc

SEQ ID NO: 1113224 - RNA, 22 nt, Human
cuucaagauauuucuagaauca

SEQ ID NO: 1113225 - RNA, 22 nt, Human
ucagugucuugggcuugaaugc

SEQ ID NO: 1113226 - RNA, 22 nt, Human
aggcccugcccagagcuccucg

SEQ ID NO: 1113227 - RNA, 22 nt, Human
ucacugcagagaccucuaguca

SEQ ID NO: 1113228 - RNA, 22 nt, Human
caacagaagguguacuacugaa

SEQ ID NO: 1113229 - RNA, 22 nt, Human
acaggcuuuuuuagaaugacau

SEQ ID NO: 1113230 - RNA, 19 nt, Human
gagaggccugugcuugaag

SEQ ID NO: 1113231 - RNA, 22 nt, Human
ugggcagagaguagaggcaacg

SEQ ID NO: 1113232 - RNA, 22 nt, Human
gaggucaggggagaggcugaug

SEQ ID NO: 1113233 - RNA, 22 nt, Human
aguauuuccuggcuuaucugcu

SEQ ID NO: 1113234 - RNA, 22 nt, Human
gagggaaagguuaauacaugau

SEQ ID NO: 1113235 - RNA, 22 nt, Human
agcaggaaguagucuguaagca

SEQ ID NO: 1113236 - RNA, 22 nt, Human
uauguacaugauuucauuugcu

SEQ ID NO: 1113237 - RNA, 22 nt, Human
aggcugcuggcaggcguggacg

SEQ ID NO: 1113238 - RNA, 22 nt, Human
cuggccacuggagguggcaccc

SEQ ID NO: 1113239 - RNA, 22 nt, Human
ugggcagacgggagcuugccuu

SEQ ID NO: 1113240 - RNA, 19 nt, Human
ucacaggcaucuccccaga

SEQ ID NO: 1113241 - RNA, 22 nt, Human
ugagggcugcuuccagagcuag

SEQ ID NO: 1113242 - RNA, 22 nt, Human
ccccuuccaggaagcagaaucg

SEQ ID NO: 1113243 - RNA, 23 nt, Human
uggcucugagagguucagaugcu

SEQ ID NO: 1113244 - RNA, 22 nt, Human
ucagagaaaugaaguagggauu

SEQ ID NO: 1113245 - RNA, 22 nt, Human
gaagcagcaaaucugcaguauc

SEQ ID NO: 1113246 - RNA, 22 nt, Human
uuacaaaguucugaguucaaac

SEQ ID NO: 1113247 - RNA, 22 nt, Human
agccagagagccccagguucua

SEQ ID NO: 1113248 - RNA, 22 nt, Human
cugccucuugacagaucguggc

SEQ ID NO: 1113249 - RNA, 17 nt, Human
gccuggcccagccuggc

SEQ ID NO: 1113250 - RNA, 22 nt, Human
ucauccaguucacauggugagu

SEQ ID NO: 1113251 - RNA, 22 nt, Human
aagugaaacauguaucucuuua

SEQ ID NO: 1113252 - RNA, 22 nt, Human
ggucacugcucuaaacaaaagu

SEQ ID NO: 1113253 - RNA, 22 nt, Human
aaguuauugcagcaauccaagu

SEQ ID NO: 1113254 - RNA, 22 nt, Human
aguaaaaucuuaagcacagugg

SEQ ID NO: 1113255 - RNA, 22 nt, Human
ccucuuccacugggccccaucc

SEQ ID NO: 1113256 - RNA, 22 nt, Human
cagcugagcaucacuagucugg

SEQ ID NO: 1113257 - RNA, 22 nt, Human
uggcucagcugucacagccugg

SEQ ID NO: 1113258 - RNA, 22 nt, Human
agcuucuggaaggcaaggcuug

SEQ ID NO: 1113259 - RNA, 22 nt, Human
aaaugcaggaaauuaugcuuuu

SEQ ID NO: 1113260 - RNA, 22 nt, Human
ccaggagcaaagaucacuggga

SEQ ID NO: 1113261 - RNA, 22 nt, Human
ugggcagacugagcccuguccc

SEQ ID NO: 1113262 - RNA, 17 nt, Human
uucaaugauuaaugcau

SEQ ID NO: 1113263 - RNA, 22 nt, Human
aaaugucuuugaguauuucugc

SEQ ID NO: 1113264 - RNA, 22 nt, Human
cguguacagucuaucuuuuuuc

SEQ ID NO: 1113265 - RNA, 22 nt, Human
ugcccaggaucuggcgaugcuc

SEQ ID NO: 1113266 - RNA, 22 nt, Human
ucccuggccauuccucuaggcc

SEQ ID NO: 1113267 - RNA, 22 nt, Human
uggccucaagucugagggccuu

SEQ ID NO: 1113268 - RNA, 21 nt, Human
aaauguguuccauaaugcuuu

SEQ ID NO: 1113269 - RNA, 22 nt, Human
gugggugauguacuggaggcca

SEQ ID NO: 1113270 - RNA, 19 nt, Human
uggaggagaggaaaaguca

SEQ ID NO: 1113271 - RNA, 22 nt, Human
cagagaaacucagauagcugau

SEQ ID NO: 1113272 - RNA, 22 nt, Human
ggcucuggucagugaggggccu

SEQ ID NO: 1113273 - RNA, 22 nt, Human
uggcucaggugugagcugaaga

SEQ ID NO: 1113274 - RNA, 20 nt, Human
uggagcuguaaucuugucug

SEQ ID NO: 1113275 - RNA, 22 nt, Human
uguggcucucagauccuccaau

SEQ ID NO: 1113276 - RNA, 22 nt, Human
ugcauugcaguuaacucaguau

SEQ ID NO: 1113277 - RNA, 22 nt, Human
ccacagccauuccagggaggcu

SEQ ID NO: 1113278 - RNA, 22 nt, Human
ggcucuggugugaagcagccuc

SEQ ID NO: 1113279 - RNA, 22 nt, Human
ucaguuuuuaaaugauauaauu

SEQ ID NO: 1113280 - RNA, 22 nt, Human
agcuggguggagggcccacggu

SEQ ID NO: 1113281 - RNA, 22 nt, Human
cagcccuguccagcagagggug

SEQ ID NO: 1113282 - RNA, 22 nt, Human
ucuuucagccacuuaccugucu

SEQ ID NO: 1113283 - RNA, 22 nt, Human
ggcaggcugcuugggucauguc

SEQ ID NO: 1113284 - RNA, 22 nt, Human
gcucccuccaugaggcagaccg

SEQ ID NO: 1113285 - RNA, 22 nt, Human
uucugucacuuaggaggucaua

SEQ ID NO: 1113286 - RNA, 22 nt, Human
gggugggguucaggaaucuuca

SEQ ID NO: 1113287 - RNA, 22 nt, Human
ugagccagaggaggcugugugg

SEQ ID NO: 1113288 - RNA, 22 nt, Human
acaggcuucucacagaaaaggg

SEQ ID NO: 1113289 - RNA, 20 nt, Human
ggccugagcauggcuggcag

SEQ ID NO: 1113290 - RNA, 19 nt, Human
cugcucaggucagucuguc

SEQ ID NO: 1113291 - RNA, 22 nt, Human
cugcagcuauauuuucccacag

SEQ ID NO: 1113292 - RNA, 22 nt, Human
uuccuuccgggcaccaggcacu

SEQ ID NO: 1113293 - RNA, 22 nt, Human
agagcccucucauuggcuuauu

SEQ ID NO: 1113294 - RNA, 22 nt, Human
cagccagguaugggcgugcggg

SEQ ID NO: 1113295 - RNA, 22 nt, Human
gccuggagggcucuagagaggc

SEQ ID NO: 1113296 - RNA, 22 nt, Human
aagauucuacaguagguacauu

SEQ ID NO: 1113297 - RNA, 22 nt, Human
aaguucaaguguaaucuuuauu

SEQ ID NO: 1113298 - RNA, 22 nt, Human
acugggaggcaaagagcaagga

SEQ ID NO: 1113299 - RNA, 22 nt, Human
uaguccagccuuggguguagcc

SEQ ID NO: 1113300 - RNA, 22 nt, Human
ccuggccugugaaucugagagc

SEQ ID NO: 1113301 - RNA, 22 nt, Human
acugagcucuugacugggaguu

SEQ ID NO: 1113302 - RNA, 22 nt, Human
uauguacaccggggaagguggg

SEQ ID NO: 1113303 - RNA, 22 nt, Human
gucccuggaauggacucugcgc

SEQ ID NO: 1113304 - RNA, 22 nt, Human
gggccuggcaugcagccccguu

SEQ ID NO: 1113305 - RNA, 22 nt, Human
cagcuggcuggucagugcacaa

SEQ ID NO: 1113306 - RNA, 22 nt, Human
cugcugggcagaggcugcauga

SEQ ID NO: 1113307 - RNA, 22 nt, Human
ggcccagccggcgagucucgcg

SEQ ID NO: 1113308 - RNA, 18 nt, Human
aggcacuggaauuaaggg

SEQ ID NO: 1113309 - RNA, 22 nt, Human
ggcugcuggcauugagguaggu

SEQ ID NO: 1113310 - RNA, 22 nt, Human
aggacuccauguguccuggaga

SEQ ID NO: 1113311 - RNA, 22 nt, Human
agacuucucaguuuuauuagua

SEQ ID NO: 1113312 - RNA, 22 nt, Human
gcuggcuccucuguccucacgg

SEQ ID NO: 1113313 - RNA, 22 nt, Human
aucuggcuuuuaccccacggcc

SEQ ID NO: 1113314 - RNA, 22 nt, Human
ugcucuucggggccacugcuug

SEQ ID NO: 1113315 - RNA, 22 nt, Human
uccuugaagcaacgugcagaca

SEQ ID NO: 1113316 - RNA, 22 nt, Human
aaggccugcucagcugucugug

SEQ ID NO: 1113317 - RNA, 23 nt, Human
uggggccaagugaggaagggucu

SEQ ID NO: 1113318 - RNA, 22 nt, Human
gggagggaggugcugguucacg

SEQ ID NO: 1113319 - RNA, 22 nt, Human
agauuucaauggauauugcaag

SEQ ID NO: 1113320 - RNA, 22 nt, Human
ugcccacauggugccauggcca

SEQ ID NO: 1113321 - RNA, 22 nt, Human
auauguguacgugcaguauaua

SEQ ID NO: 1113322 - RNA, 22 nt, Human
cagggcuguggcuuugugcugu

SEQ ID NO: 1113323 - RNA, 22 nt, Human
uuaacagagugccuggcaugua

SEQ ID NO: 1113324 - RNA, 22 nt, Human
cagggccuuuuagcaucuucuc

SEQ ID NO: 1113325 - RNA, 22 nt, Human
cugggaggauucauugagguga

SEQ ID NO: 1113326 - RNA, 22 nt, Human
ucugagagcuguagaagccuau

SEQ ID NO: 1113327 - RNA, 22 nt, Human
accugccuucucaaggacauga

SEQ ID NO: 1113328 - RNA, 22 nt, Human
cauugcccaguaggaucaccag

SEQ ID NO: 1113329 - RNA, 22 nt, Human
gggacuguaaauucauauggcc

SEQ ID NO: 1113330 - RNA, 22 nt, Human
ccugucuguauugguuugcuau

SEQ ID NO: 1113331 - RNA, 22 nt, Human
ggcugccuucagacuccagcuu

SEQ ID NO: 1113332 - RNA, 22 nt, Human
uaguacuuaucucugucauugu

SEQ ID NO: 1113333 - RNA, 22 nt, Human
aaaacucugcaguuaguuucua

SEQ ID NO: 1113334 - RNA, 21 nt, Human
ugaaaguuggagucaaaugua

SEQ ID NO: 1113335 - RNA, 22 nt, Human
cuccagggaugagacagaguag

SEQ ID NO: 1113336 - RNA, 22 nt, Human
guuugcauguauuaagucaaua

SEQ ID NO: 1113337 - RNA, 20 nt, Human
ccugaggguuuguguucuuu

SEQ ID NO: 1113338 - RNA, 23 nt, Human
acaguuauagcugugaauaacau

SEQ ID NO: 1113339 - RNA, 22 nt, Human
acccaggagguggaggcugcag

SEQ ID NO: 1113340 - RNA, 22 nt, Human
ccuggggcucaagauggcgccg

SEQ ID NO: 1113341 - RNA, 22 nt, Human
cccugcagaaccacagacaaac

SEQ ID NO: 1113342 - RNA, 21 nt, Human
uggcugcuggcccucucucca

SEQ ID NO: 1113343 - RNA, 22 nt, Human
ugagcccaggaguuggagaccg

SEQ ID NO: 1113344 - RNA, 22 nt, Human
uggagcugagaaguggagcucu

SEQ ID NO: 1113345 - RNA, 20 nt, Human
ccugccugccucggcucauu

SEQ ID NO: 1113346 - RNA, 22 nt, Human
ucagaguguuuuacuaaacaag

SEQ ID NO: 1113347 - RNA, 22 nt, Human
aaguucaaucagaugaaaaagc

SEQ ID NO: 1113348 - RNA, 22 nt, Human
gcucuguguugucagaggcacc

SEQ ID NO: 1113349 - RNA, 22 nt, Human
acccagaggugucuagcaagcu

SEQ ID NO: 1113350 - RNA, 23 nt, Human
agagcuuagggaauucacaugag

SEQ ID NO: 1113351 - RNA, 22 nt, Human
uagggcaguuauaacauuagug

SEQ ID NO: 1113352 - RNA, 22 nt, Human
agugucauuuuguccaucuucu

SEQ ID NO: 1113353 - RNA, 22 nt, Human
gagagugauucccucccauaga

SEQ ID NO: 1113354 - RNA, 22 nt, Human
cuuugaaaacuuaaauaacagc

SEQ ID NO: 1113355 - RNA, 22 nt, Human
caguguguggauccucccagga

SEQ ID NO: 1113356 - RNA, 22 nt, Human
augaaacaugagaaauggagag

SEQ ID NO: 1113357 - RNA, 22 nt, Human
cuguggcuaggaagcuguggga

SEQ ID NO: 1113358 - RNA, 22 nt, Human
ccuggcagcaggugggcccgug

SEQ ID NO: 1113359 - RNA, 22 nt, Human
ccugcuucagggaugauggcac

SEQ ID NO: 1113360 - RNA, 22 nt, Human
acacacaacucauuguguaaua

SEQ ID NO: 1113361 - RNA, 22 nt, Human
uggcagcaaguucuugggaggu

SEQ ID NO: 1113362 - RNA, 22 nt, Human
ucagguguuagaagaaauuuca

SEQ ID NO: 1113363 - RNA, 22 nt, Human
accagagcgcucaagccuuccc

SEQ ID NO: 1113364 - RNA, 22 nt, Human
gugaccaucagagaauaacaaa

SEQ ID NO: 1113365 - RNA, 22 nt, Human
ucugagcuacgaugccugucac

SEQ ID NO: 1113366 - RNA, 22 nt, Human
ggaggagacaguaaaaagcacg

SEQ ID NO: 1113367 - RNA, 22 nt, Human
ugggggagauuagagcuucuua

SEQ ID NO: 1113368 - RNA, 22 nt, Human
caagagcugugaccucauucac

SEQ ID NO: 1113369 - RNA, 22 nt, Human
gaugugggguugagggaccagc

SEQ ID NO: 1113370 - RNA, 19 nt, Human
uggcugggugccaauggcc

SEQ ID NO: 1113371 - RNA, 22 nt, Human
gagcagugggaaggaacagggu

SEQ ID NO: 1113372 - RNA, 19 nt, Human
ugaggccaaggucacagau

SEQ ID NO: 1113373 - RNA, 22 nt, Human
ugggcagauguggcucuccuug

SEQ ID NO: 1113374 - RNA, 20 nt, Human
ugggcagcacugcuggcugg

SEQ ID NO: 1113375 - RNA, 22 nt, Human
ugaaggaauggaggaucagagc

SEQ ID NO: 1113376 - RNA, 22 nt, Human
ccucccucuuucagucccacag

SEQ ID NO: 1113377 - RNA, 20 nt, Human
ugggccugagccugugggcu

SEQ ID NO: 1113378 - RNA, 22 nt, Human
gacagagugcagggcuagaaga

SEQ ID NO: 1113379 - RNA, 22 nt, Human
ugcugccacaaauucagcugcc

SEQ ID NO: 1113380 - RNA, 20 nt, Human
gcugucuggauuagaagccu

SEQ ID NO: 1113381 - RNA, 22 nt, Human
guaaaugugcuucuuuuaacuu

SEQ ID NO: 1113382 - RNA, 23 nt, Human
agggguggucaguacccgcagug

SEQ ID NO: 1113383 - RNA, 22 nt, Human
uauaguaaaauuuucauuuaug

SEQ ID NO: 1113384 - RNA, 22 nt, Human
ccagagccagagaggugccugc

SEQ ID NO: 1113385 - RNA, 23 nt, Human
uggagcugacagucagagggagg

SEQ ID NO: 1113386 - RNA, 22 nt, Human
ccaaaauguuugaaugcaugug

SEQ ID NO: 1113387 - RNA, 22 nt, Human
ggggagaguccuuuccaguucc

SEQ ID NO: 1113388 - RNA, 22 nt, Human
gucuuucuuaauucaagugcuu

SEQ ID NO: 1113389 - RNA, 17 nt, Human
guuugcaugguguuaac

SEQ ID NO: 1113390 - RNA, 22 nt, Human
aagaugcagcuuccacuuuugc

SEQ ID NO: 1113391 - RNA, 22 nt, Human
cagaggcugaugugggaugggc

SEQ ID NO: 1113392 - RNA, 22 nt, Human
cccuggcaugcaugucccuggc

SEQ ID NO: 1113393 - RNA, 22 nt, Human
aagggcaggcagagaucauaua

SEQ ID NO: 1113394 - RNA, 22 nt, Human
uccuucaggguugaggccgacu

SEQ ID NO: 1113395 - RNA, 22 nt, Human
uagugauuaaaggcagaauguu

SEQ ID NO: 1113396 - RNA, 20 nt, Human
cuuugccuauucucugccug

SEQ ID NO: 1113397 - RNA, 17 nt, Human
aaaauucuguaaagagg

SEQ ID NO: 1113398 - RNA, 19 nt, Human
gcaggcaguggcauucgga

SEQ ID NO: 1113399 - RNA, 22 nt, Human
ucaagagaagugcuccacagua

SEQ ID NO: 1113400 - RNA, 22 nt, Human
ggagacagugacuuagagacug

SEQ ID NO: 1113401 - RNA, 22 nt, Human
augggaggaaggaggcccuuga

SEQ ID NO: 1113402 - RNA, 21 nt, Human
ggccugagcaccuguccaccu

SEQ ID NO: 1113403 - RNA, 22 nt, Human
guggccuggauagacuccaucu

SEQ ID NO: 1113404 - RNA, 22 nt, Human
gcucccacgcaauucuuuucag

SEQ ID NO: 1113405 - RNA, 20 nt, Human
uccaggagaacugggagccg

SEQ ID NO: 1113406 - RNA, 22 nt, Human
ggcuucugguaaagaccacacc

SEQ ID NO: 1113407 - RNA, 23 nt, Human
gagagcugacugucaagacuguu

SEQ ID NO: 1113408 - RNA, 22 nt, Human
ucaggagcagcaugggugagag

SEQ ID NO: 1113409 - RNA, 20 nt, Human
acagaauaugcugguugugg

SEQ ID NO: 1113410 - RNA, 22 nt, Human
uggccuggccacauccagcagg

SEQ ID NO: 1113411 - RNA, 22 nt, Human
acuuucucccacccacccgucu

SEQ ID NO: 1113412 - RNA, 22 nt, Human
acauuguauaaugauuaucaca

SEQ ID NO: 1113413 - RNA, 22 nt, Human
ggcacugaauuucuuggcaucu

SEQ ID NO: 1113414 - RNA, 22 nt, Human
gcucuguguccacagcuggaaa

SEQ ID NO: 1113415 - RNA, 20 nt, Human
agcugguuaucuuaauucuu

SEQ ID NO: 1113416 - RNA, 22 nt, Human
gaggggcucuuuaauaguaaca

SEQ ID NO: 1113417 - RNA, 22 nt, Human
gaggcagcaucuauggugggaa

SEQ ID NO: 1113418 - RNA, 22 nt, Human
aagcccagcaucccugcaccag

SEQ ID NO: 1113419 - RNA, 22 nt, Human
ccacagggcucuaggcgcuucc

SEQ ID NO: 1113420 - RNA, 22 nt, Human
cagcucugugggagcguaugug

SEQ ID NO: 1113421 - RNA, 22 nt, Human
agguaaggcuguaagcuaagcc

SEQ ID NO: 1113422 - RNA, 22 nt, Human
caaagaugcugauguuggauca

SEQ ID NO: 1113423 - RNA, 22 nt, Human
cuguccucuguccucagcagga

SEQ ID NO: 1113424 - RNA, 22 nt, Human
ugcccagcacugugccagucac

SEQ ID NO: 1113425 - RNA, 22 nt, Human
gaguggggcccacugcugggug

SEQ ID NO: 1113426 - RNA, 22 nt, Human
ccacagagagugucagccuuug

SEQ ID NO: 1113427 - RNA, 22 nt, Human
gugcauuugugcaugcacaugu

SEQ ID NO: 1113428 - RNA, 21 nt, Human
ucaggcaggcgcagagggaag

SEQ ID NO: 1113429 - RNA, 22 nt, Human
ucucaagagggaggcaaucaug

SEQ ID NO: 1113430 - RNA, 22 nt, Human
gccagggcucgcggucccucgu

SEQ ID NO: 1113431 - RNA, 22 nt, Human
uagagcuauuuagagcauuuua

SEQ ID NO: 1113432 - RNA, 17 nt, Human
cccagcuggcagugccg

SEQ ID NO: 1113433 - RNA, 22 nt, Human
aggugaguugguaggaaguuug

SEQ ID NO: 1113434 - RNA, 22 nt, Human
cucuccagaauaugccgccgug

SEQ ID NO: 1113435 - RNA, 22 nt, Human
gggcccacuggcugucugaccc

SEQ ID NO: 1113436 - RNA, 22 nt, Human
gaguuauucuagguccuuugua

SEQ ID NO: 1113437 - RNA, 22 nt, Human
uccucugcucagcauuccucac

SEQ ID NO: 1113438 - RNA, 22 nt, Human
aaucaguucuacaucuuaucca

SEQ ID NO: 1113439 - RNA, 22 nt, Human
gcagagccugugucugagcaaa

SEQ ID NO: 1113440 - RNA, 22 nt, Human
cugagcugggacucaguagcaa

SEQ ID NO: 1113441 - RNA, 22 nt, Human
uugcuauuuugagagucauagu

SEQ ID NO: 1113442 - RNA, 22 nt, Human
gggcuggaggugagcaggacag

SEQ ID NO: 1113443 - RNA, 22 nt, Human
gaggcagcuuggggcugugggu

SEQ ID NO: 1113444 - RNA, 23 nt, Human
agcuggaggcugucuacucccaa

SEQ ID NO: 1113445 - RNA, 22 nt, Human
uccacagaauguaagauccaca

SEQ ID NO: 1113446 - RNA, 22 nt, Human
gguaacaguauguagaguaaga

SEQ ID NO: 1113447 - RNA, 22 nt, Human
aagauuucucuccuggaaagca

SEQ ID NO: 1113448 - RNA, 22 nt, Human
aagagcauauuaauaguggaga

SEQ ID NO: 1113449 - RNA, 22 nt, Human
ggcugccugaacuuuggggaaa

SEQ ID NO: 1113450 - RNA, 22 nt, Human
uucuaacucuguuauguguuuc

SEQ ID NO: 1113451 - RNA, 21 nt, Human
uccauuguuuucccaggguuu

SEQ ID NO: 1113452 - RNA, 22 nt, Human
cuuauuauaaaauccuguuuga

SEQ ID NO: 1113453 - RNA, 22 nt, Human
agcuggaggauaacucacuucu

SEQ ID NO: 1113454 - RNA, 22 nt, Human
agccuggauccuaggcucagcu

SEQ ID NO: 1113455 - RNA, 22 nt, Human
gagcugccaagauuacaaucag

SEQ ID NO: 1113456 - RNA, 22 nt, Human
cauuagaagaacaguuauauua

SEQ ID NO: 1113457 - RNA, 22 nt, Human
aggaaaaagaguugcugccuuc

SEQ ID NO: 1113458 - RNA, 22 nt, Human
cagagccugccucuggcugugg

SEQ ID NO: 1113459 - RNA, 22 nt, Human
acaguggagaaggcaugaggcu

SEQ ID NO: 1113460 - RNA, 22 nt, Human
gagacauggcaaaagcacuggu

SEQ ID NO: 1113461 - RNA, 22 nt, Human
ucugccugccagucugguccuc

SEQ ID NO: 1113462 - RNA, 19 nt, Human
agaggcugucaccuguagc

SEQ ID NO: 1113463 - RNA, 22 nt, Human
ggcacugagaacaggcugacuu

SEQ ID NO: 1113464 - RNA, 19 nt, Human
caggagagcaugcacuuug

SEQ ID NO: 1113465 - RNA, 23 nt, Human
ucagcugcuuccuccugccugcc

SEQ ID NO: 1113466 - RNA, 22 nt, Human
uaaaugugcacagguuagaagg

SEQ ID NO: 1113467 - RNA, 19 nt, Human
ucugucacuggggguauuc

SEQ ID NO: 1113468 - RNA, 17 nt, Human
cuggagccaagagggcc

SEQ ID NO: 1113469 - RNA, 22 nt, Human
ggcugccacgucgaggguccaa

SEQ ID NO: 1113470 - RNA, 22 nt, Human
gagucacauuaauuuaauuuua

SEQ ID NO: 1113471 - RNA, 22 nt, Human
aaggcacuguacuaguuaguua

SEQ ID NO: 1113472 - RNA, 22 nt, Human
ggcugcugaguuggccaggaga

SEQ ID NO: 1113473 - RNA, 22 nt, Human
ucugucuccucugaggugccag

SEQ ID NO: 1113474 - RNA, 22 nt, Human
aggggagaguuaaugugaaugu

SEQ ID NO: 1113475 - RNA, 22 nt, Human
ccagagccucgcccggagccuc

SEQ ID NO: 1113476 - RNA, 22 nt, Human
uuguuuguaugcugagaagaau

SEQ ID NO: 1113477 - RNA, 20 nt, Human
accuuucaaaugauucagca

SEQ ID NO: 1113478 - RNA, 22 nt, Human
gcucccacaaccuucuugcucc

SEQ ID NO: 1113479 - RNA, 22 nt, Human
gagggucccgagcccugucaga

SEQ ID NO: 1113480 - RNA, 22 nt, Human
uggaagggggaagacagcucug

SEQ ID NO: 1113481 - RNA, 22 nt, Human
ugagagagccugaaucucuuac

SEQ ID NO: 1113482 - RNA, 22 nt, Human
acaaggcugaacagugaagccg

SEQ ID NO: 1113483 - RNA, 22 nt, Human
cagcuccugccugggcagcugu

SEQ ID NO: 1113484 - RNA, 22 nt, Human
cucagaaguucagccuagagua

SEQ ID NO: 1113485 - RNA, 22 nt, Human
ugcauuauaacugaauguuguu

SEQ ID NO: 1113486 - RNA, 22 nt, Human
aagaaauuaaggaaugcaacga

SEQ ID NO: 1113487 - RNA, 22 nt, Human
uggagcugagagccaggcuggc

SEQ ID NO: 1113488 - RNA, 22 nt, Human
augcugcacaagccacauguag

SEQ ID NO: 1113489 - RNA, 22 nt, Human
acucucucacagcuuggcugau

SEQ ID NO: 1113490 - RNA, 22 nt, Human
ggaguucacugugcaggcucug

SEQ ID NO: 1113491 - RNA, 22 nt, Human
ccacccugagccgcaagagcag

SEQ ID NO: 1113492 - RNA, 22 nt, Human
ugucucugaacagcuuacuaaa

SEQ ID NO: 1113493 - RNA, 22 nt, Human
gcucugaggcugugaggugcug

SEQ ID NO: 1113494 - RNA, 22 nt, Human
acuuuggaucugauguaaucag

SEQ ID NO: 1113495 - RNA, 22 nt, Human
agaauccugaugaaaaggagag

SEQ ID NO: 1113496 - RNA, 22 nt, Human
gggcugugagaguggggcugcu

SEQ ID NO: 1113497 - RNA, 22 nt, Human
gaaaagagaacaucugaggauc

SEQ ID NO: 1113498 - RNA, 21 nt, Human
gugucaugguugacuuuggca

SEQ ID NO: 1113499 - RNA, 18 nt, Human
gccugcaggcacgggggu

SEQ ID NO: 1113500 - RNA, 22 nt, Human
accugagaaugggggcaugugu

SEQ ID NO: 1113501 - RNA, 21 nt, Human
acagaacuguauagugauaaa

SEQ ID NO: 1113502 - RNA, 22 nt, Human
auaugcacauacauacauaggu

SEQ ID NO: 1113503 - RNA, 22 nt, Human
uggagcugggaguccugggcug

SEQ ID NO: 1113504 - RNA, 22 nt, Human
cacagugcaugaugggcagaag

SEQ ID NO: 1113505 - RNA, 22 nt, Human
cuggcagcuuccuuugcaucug

SEQ ID NO: 1113506 - RNA, 22 nt, Human
uguuaaauguuccuuuacugga

SEQ ID NO: 1113507 - RNA, 22 nt, Human
cuggagcucuguguguuccuga

SEQ ID NO: 1113508 - RNA, 19 nt, Human
uagaaugcccacuuaaaaa

SEQ ID NO: 1113509 - RNA, 22 nt, Human
cuggcuuccaugcuguaguggc

SEQ ID NO: 1113510 - RNA, 22 nt, Human
aacagaauugcugcugccaaug

SEQ ID NO: 1113511 - RNA, 23 nt, Human
uugucugugcuuuuccaguugcu

SEQ ID NO: 1113512 - RNA, 22 nt, Human
ucagcuccucaugcaggggaua

SEQ ID NO: 1113513 - RNA, 22 nt, Human
ucuacuuuucccuauacaguuu

SEQ ID NO: 1113514 - RNA, 18 nt, Human
cugcugcaggcacucagg

SEQ ID NO: 1113515 - RNA, 22 nt, Human
agggacuggcucucugagcagg

SEQ ID NO: 1113516 - RNA, 22 nt, Human
ccagggccucguguucugagug

SEQ ID NO: 1113517 - RNA, 22 nt, Human
gggcugugggacccggcacuuu

SEQ ID NO: 1113518 - RNA, 22 nt, Human
uucuuuaaaauagugagaaaga

SEQ ID NO: 1113519 - RNA, 22 nt, Human
ugcugccuuugggaccuggccu

SEQ ID NO: 1113520 - RNA, 17 nt, Human
ugccagccugucccagg

SEQ ID NO: 1113521 - RNA, 22 nt, Human
ugcucuggguccugggccuccu

SEQ ID NO: 1113522 - RNA, 22 nt, Human
auuugcagagcucugaauuuug

SEQ ID NO: 1113523 - RNA, 22 nt, Human
gagccuccuccuggugugccga

SEQ ID NO: 1113524 - RNA, 22 nt, Human
aagcagccagccaucaugcccg

SEQ ID NO: 1113525 - RNA, 22 nt, Human
ccagugggugcugggcucugcc

SEQ ID NO: 1113526 - RNA, 22 nt, Human
guacuucccugggaggcaagca

SEQ ID NO: 1113527 - RNA, 22 nt, Human
uggcagcagggaggccaguguu

SEQ ID NO: 1113528 - RNA, 22 nt, Human
auccaaagauggaaagaacuuu

SEQ ID NO: 1113529 - RNA, 22 nt, Human
cuggcuggccggaggcaucccu

SEQ ID NO: 1113530 - RNA, 22 nt, Human
uuccuccacgugacaggagcca

SEQ ID NO: 1113531 - RNA, 22 nt, Human
ucagccugcgucauggugacac

SEQ ID NO: 1113532 - RNA, 22 nt, Human
ggacucuguuuuccugaucacu

SEQ ID NO: 1113533 - RNA, 21 nt, Human
uaaauaauaaguugcugagau

SEQ ID NO: 1113534 - RNA, 22 nt, Human
gcagagcauguccucaggacag

SEQ ID NO: 1113535 - RNA, 22 nt, Human
cucccaagggguaagggagcug

SEQ ID NO: 1113536 - RNA, 22 nt, Human
aaaaguaauugaugcaaucgua

SEQ ID NO: 1113537 - RNA, 22 nt, Human
uuucaaagguggaagagugaau

SEQ ID NO: 1113538 - RNA, 22 nt, Human
gggccugacugagagcuccuca

SEQ ID NO: 1113539 - RNA, 22 nt, Human
ccugucugaggaggugcucuuu

SEQ ID NO: 1113540 - RNA, 22 nt, Human
aaucagaaaauucaguggaauu

SEQ ID NO: 1113541 - RNA, 22 nt, Human
aggccucacauugggcuucaag

SEQ ID NO: 1113542 - RNA, 22 nt, Human
acucucagaggguggcagcaau

SEQ ID NO: 1113543 - RNA, 17 nt, Human
cugagcauccgugcucu

SEQ ID NO: 1113544 - RNA, 22 nt, Human
ggguguccugugccaagcuggg

SEQ ID NO: 1113545 - RNA, 22 nt, Human
aaaucuguaagcaauugcucag

SEQ ID NO: 1113546 - RNA, 22 nt, Human
agucagugaaaacuagaauguu

SEQ ID NO: 1113547 - RNA, 19 nt, Human
agucucaguguacagaggc

SEQ ID NO: 1113548 - RNA, 22 nt, Human
aagauuuccauuucuagcucau

SEQ ID NO: 1113549 - RNA, 22 nt, Human
guuuacaaauauuuuaaauggu

SEQ ID NO: 1113550 - RNA, 22 nt, Human
gccuggagaggaagccggugga

SEQ ID NO: 1113551 - RNA, 20 nt, Human
gcugggggugugcugaguga

SEQ ID NO: 1113552 - RNA, 22 nt, Human
uauugacagagggucagaagag

SEQ ID NO: 1113553 - RNA, 22 nt, Human
cccagcuccuuggaugggcagg

SEQ ID NO: 1113554 - RNA, 21 nt, Human
aaaaugugagcgugaugcuua

SEQ ID NO: 1113555 - RNA, 22 nt, Human
aauauuucuccuucguuauagc

SEQ ID NO: 1113556 - RNA, 23 nt, Human
aagaauaaaugacauuaaaggug

SEQ ID NO: 1113557 - RNA, 22 nt, Human
ucaggaguccugccugcagccu

SEQ ID NO: 1113558 - RNA, 22 nt, Human
gcugcaggggggucuggacuug

SEQ ID NO: 1113559 - RNA, 22 nt, Human
aaggccugaacaugaggagaug

SEQ ID NO: 1113560 - RNA, 22 nt, Human
ggcagcuguggacgucgucauu

SEQ ID NO: 1113561 - RNA, 22 nt, Human
aaggcacugaaaaauugugugu

SEQ ID NO: 1113562 - RNA, 22 nt, Human
uguaugcagcaaaacaauuagu

SEQ ID NO: 1113563 - RNA, 22 nt, Human
cccuggcauaaaacuucuccag

SEQ ID NO: 1113564 - RNA, 22 nt, Human
gaaaugugcagaauguguuaga

SEQ ID NO: 1113565 - RNA, 22 nt, Human
caguaugagaguugaaucaagg

SEQ ID NO: 1113566 - RNA, 19 nt, Human
uggcuucuguuuucauguu

SEQ ID NO: 1113567 - RNA, 23 nt, Human
uggggagaguuacccuggaagcg

SEQ ID NO: 1113568 - RNA, 22 nt, Human
auguguagaacuguaaugccca

SEQ ID NO: 1113569 - RNA, 22 nt, Human
gugccaggugcuaagcugugcu

SEQ ID NO: 1113570 - RNA, 22 nt, Human
uagcagggaaggugugcugagc

SEQ ID NO: 1113571 - RNA, 22 nt, Human
gcaggcugauagaggauuccau

SEQ ID NO: 1113572 - RNA, 22 nt, Human
cuggcuccuccaaggccuggag

SEQ ID NO: 1113573 - RNA, 22 nt, Human
uuuaccaagcuuuaauuacaua

SEQ ID NO: 1113574 - RNA, 22 nt, Human
uggcacugccaaccugcuaggu

SEQ ID NO: 1113575 - RNA, 22 nt, Human
gagaagguggaccugaaggagc

SEQ ID NO: 1113576 - RNA, 22 nt, Human
cuacauuucccagcugccuucc

SEQ ID NO: 1113577 - RNA, 22 nt, Human
gcugcagcagaaguucucagag

SEQ ID NO: 1113578 - RNA, 20 nt, Human
auacaaagagauugauguau

SEQ ID NO: 1113579 - RNA, 22 nt, Human
aggcccuguuaugagccacugu

SEQ ID NO: 1113580 - RNA, 22 nt, Human
uguuccaucaguuuuugguuga

SEQ ID NO: 1113581 - RNA, 22 nt, Human
accugccucagugcagcuggau

SEQ ID NO: 1113582 - RNA, 22 nt, Human
agucccagcuucccccaugcag

SEQ ID NO: 1113583 - RNA, 22 nt, Human
aaaauguguuuaugcauuucgu

SEQ ID NO: 1113584 - RNA, 22 nt, Human
aagccaagaguuaacuauuugu

SEQ ID NO: 1113585 - RNA, 22 nt, Human
ugagcuucuuuauuuggccaga

SEQ ID NO: 1113586 - RNA, 22 nt, Human
aaaagggacuacucucagcucc

SEQ ID NO: 1113587 - RNA, 22 nt, Human
ggccugagucccaccuggcugu

SEQ ID NO: 1113588 - RNA, 23 nt, Human
ugcucccaggugacgcugcuguu

SEQ ID NO: 1113589 - RNA, 21 nt, Human
ggggcagagcuaggcccugca

SEQ ID NO: 1113590 - RNA, 22 nt, Human
ccugggaguggcacucacagca

SEQ ID NO: 1113591 - RNA, 22 nt, Human
ccugggugucaugggcagcugg

SEQ ID NO: 1113592 - RNA, 22 nt, Human
acauuucucaucuaguagagua

SEQ ID NO: 1113593 - RNA, 22 nt, Human
cugggggcaagcagacagcugu

SEQ ID NO: 1113594 - RNA, 22 nt, Human
gccugagccgccugagcggcgg

SEQ ID NO: 1113595 - RNA, 22 nt, Human
gcauuuagcuuuaaaauauuuc

SEQ ID NO: 1113596 - RNA, 22 nt, Human
uggcagggccugcucaucaucc

SEQ ID NO: 1113597 - RNA, 22 nt, Human
uuucuguauuuaaaagaucugg

SEQ ID NO: 1113598 - RNA, 22 nt, Human
cagggcuggauccuccagacuc

SEQ ID NO: 1113599 - RNA, 22 nt, Human
ugugugccugagccgugccugg

SEQ ID NO: 1113600 - RNA, 22 nt, Human
cucaggauccaucuccugcccu

SEQ ID NO: 1113601 - RNA, 22 nt, Human
uagugaaacaguuaucaaucug

SEQ ID NO: 1113602 - RNA, 22 nt, Human
ggagccugugcccaagcccaga

SEQ ID NO: 1113603 - RNA, 22 nt, Human
agcugcugaaugacacugcaag

SEQ ID NO: 1113604 - RNA, 22 nt, Human
caaggaaaacagaugaucaaca

SEQ ID NO: 1113605 - RNA, 18 nt, Human
gaugggagcaagagaaga

SEQ ID NO: 1113606 - RNA, 22 nt, Human
ugucauguguucuuaaauacau

SEQ ID NO: 1113607 - RNA, 22 nt, Human
guggcugcagcccagcggcacg

SEQ ID NO: 1113608 - RNA, 22 nt, Human
agggugccuggaagccacucac

SEQ ID NO: 1113609 - RNA, 22 nt, Human
ucccagggucaguggugaggcc

SEQ ID NO: 1113610 - RNA, 22 nt, Human
acaaaguuauucuuucagagga

SEQ ID NO: 1113611 - RNA, 22 nt, Human
uagagaaauaagcuuugccuug

SEQ ID NO: 1113612 - RNA, 22 nt, Human
uucauauauaugcacuacguac

SEQ ID NO: 1113613 - RNA, 22 nt, Human
acagguggagugguuagcaggc

SEQ ID NO: 1113614 - RNA, 22 nt, Human
gaggcaggcccugaaugaguca

SEQ ID NO: 1113615 - RNA, 22 nt, Human
ucuuccaguguagacaucugcc

SEQ ID NO: 1113616 - RNA, 22 nt, Human
gugcaugugucuuuauaguaga

SEQ ID NO: 1113617 - RNA, 22 nt, Human
ugguccagacauuucugaggua

SEQ ID NO: 1113618 - RNA, 22 nt, Human
uagagcugauaaugaggccaag

SEQ ID NO: 1113619 - RNA, 23 nt, Human
agggcccaagccuggacagcagg

SEQ ID NO: 1113620 - RNA, 22 nt, Human
cuggaagguucuuugugugccu

SEQ ID NO: 1113621 - RNA, 22 nt, Human
ucaugcccagagcaguaaauua

SEQ ID NO: 1113622 - RNA, 22 nt, Human
aaaguguugggaagaaagugca

SEQ ID NO: 1113623 - RNA, 20 nt, Human
ugggagcuggugaggucuca

SEQ ID NO: 1113624 - RNA, 20 nt, Human
cuggguggcaagcaaggggg

SEQ ID NO: 1113625 - RNA, 20 nt, Human
ugcagggcugccucccagcu

SEQ ID NO: 1113626 - RNA, 22 nt, Human
caguacuugggaaugcugggga

SEQ ID NO: 1113627 - RNA, 22 nt, Human
uuaaaaccaucagcuguaagau

SEQ ID NO: 1113628 - RNA, 20 nt, Human
gaggccucagccucagcucc

SEQ ID NO: 1113629 - RNA, 22 nt, Human
cugggcacuuuggggagccuac

SEQ ID NO: 1113630 - RNA, 22 nt, Human
aagaaucauccugcaagagucu

SEQ ID NO: 1113631 - RNA, 22 nt, Human
gugcagguguuuuggcugccag

SEQ ID NO: 1113632 - RNA, 22 nt, Human
gcauuccuacaggcugcuauga

SEQ ID NO: 1113633 - RNA, 22 nt, Human
ucucagagugacaaugagaauu

SEQ ID NO: 1113634 - RNA, 22 nt, Human
caggccucccggugcacacuga

SEQ ID NO: 1113635 - RNA, 22 nt, Human
gcagagugagccgaggcugcuc

SEQ ID NO: 1113636 - RNA, 19 nt, Human
uccugggcugggccagguc

SEQ ID NO: 1113637 - RNA, 22 nt, Human
ccaggaguuugaggcugcagug

SEQ ID NO: 1113638 - RNA, 22 nt, Human
gaaaucugaacucuguauccuu

SEQ ID NO: 1113639 - RNA, 22 nt, Human
agagccagagaccuggguucac

SEQ ID NO: 1113640 - RNA, 22 nt, Human
gggggcuguccugugcauugua

SEQ ID NO: 1113641 - RNA, 22 nt, Human
cagaguccuggacacagagaca

SEQ ID NO: 1113642 - RNA, 22 nt, Human
gaggcugcuguuagcccugggc

SEQ ID NO: 1113643 - RNA, 22 nt, Human
gccuggagugguccugcugccc

SEQ ID NO: 1113644 - RNA, 22 nt, Human
aaguucuaauuuugcauucagg

SEQ ID NO: 1113645 - RNA, 22 nt, Human
uaugagaaaauaaauaucuguu

SEQ ID NO: 1113646 - RNA, 22 nt, Human
ggcacugagaggcucuuccuaa

SEQ ID NO: 1113647 - RNA, 22 nt, Human
aaaaauaggucaaccguguaug

SEQ ID NO: 1113648 - RNA, 22 nt, Human
cagcuggcgggcagagccgcca

SEQ ID NO: 1113649 - RNA, 22 nt, Human
ugauuuccugugcgcccuuagg

SEQ ID NO: 1113650 - RNA, 22 nt, Human
uagcugugagcacccaggcugu

SEQ ID NO: 1113651 - RNA, 22 nt, Human
gcugggagcaaagccaugcaua

SEQ ID NO: 1113652 - RNA, 17 nt, Human
gcuuccucaugcaguuc

SEQ ID NO: 1113653 - RNA, 22 nt, Human
cugaaauuccauuucagccaca

SEQ ID NO: 1113654 - RNA, 22 nt, Human
uccagccuaauguucuucccac

SEQ ID NO: 1113655 - RNA, 21 nt, Human
uagaaaucagcuggugccucu

SEQ ID NO: 1113656 - RNA, 22 nt, Human
aaaucaguuggaacacaagcag

SEQ ID NO: 1113657 - RNA, 22 nt, Human
uguaggauuuucaccagaccuu

SEQ ID NO: 1113658 - RNA, 21 nt, Human
cacugcagccuugaccugggc

SEQ ID NO: 1113659 - RNA, 22 nt, Human
ccagcuccgggaguugcugcug

SEQ ID NO: 1113660 - RNA, 22 nt, Human
gccaccagugggggccugggca

SEQ ID NO: 1113661 - RNA, 22 nt, Human
agguacagcaauauaagagguc

SEQ ID NO: 1113662 - RNA, 22 nt, Human
ggaugcaggggcagcagagccu

SEQ ID NO: 1113663 - RNA, 22 nt, Human
cagagcugauuggauccagaga

SEQ ID NO: 1113664 - RNA, 22 nt, Human
ugaacccaggagguugcaguga

SEQ ID NO: 1113665 - RNA, 22 nt, Human
agggcccauagaucgucagcuu

SEQ ID NO: 1113666 - RNA, 22 nt, Human
gcaggugguccccguggagugg

SEQ ID NO: 1113667 - RNA, 22 nt, Human
gccagcucagaugcaggaagga

SEQ ID NO: 1113668 - RNA, 22 nt, Human
acagagccacuuuggugccuac

SEQ ID NO: 1113669 - RNA, 20 nt, Human
gcagagcuguucugugggga

SEQ ID NO: 1113670 - RNA, 22 nt, Human
uuuauugcauacacaaauguca

SEQ ID NO: 1113671 - RNA, 22 nt, Human
aggccagagaggggaccagccu

SEQ ID NO: 1113672 - RNA, 23 nt, Human
aaucuggcugauguuuuuucucu

SEQ ID NO: 1113673 - RNA, 22 nt, Human
uuugcauuuccagaguagcaga

SEQ ID NO: 1113674 - RNA, 22 nt, Human
ucacugcaaggaggcuucucaa

SEQ ID NO: 1113675 - RNA, 19 nt, Human
ugaagcagcaaacucucag

SEQ ID NO: 1113676 - RNA, 22 nt, Human
cccaggcugaugggaugggcca

SEQ ID NO: 1113677 - RNA, 22 nt, Human
gguggccucucaugcaagguag

SEQ ID NO: 1113678 - RNA, 22 nt, Human
ugcccugcagugagugcgucug

SEQ ID NO: 1113679 - RNA, 22 nt, Human
cagcaauaagccagguuagaca

SEQ ID NO: 1113680 - RNA, 21 nt, Human
agggcagauuagcuguaagag

SEQ ID NO: 1113681 - RNA, 22 nt, Human
ugaagcagagugaaggugaauu

SEQ ID NO: 1113682 - RNA, 22 nt, Human
aagcagccucauuugugguaag

SEQ ID NO: 1113683 - RNA, 22 nt, Human
cacaggaggaggugcccgggcc

SEQ ID NO: 1113684 - RNA, 22 nt, Human
agagcuguagcuuccuagagcc

SEQ ID NO: 1113685 - RNA, 22 nt, Human
ugcugggcuagaagcugaggcc

SEQ ID NO: 1113686 - RNA, 22 nt, Human
ggccugugucugugccuguccu

SEQ ID NO: 1113687 - RNA, 21 nt, Human
gagcugggcgaggcuccgggg

SEQ ID NO: 1113688 - RNA, 22 nt, Human
ccugucaggguuugccucagaa

SEQ ID NO: 1113689 - RNA, 22 nt, Human
gcagcccaaaaaagagguagau

SEQ ID NO: 1113690 - RNA, 22 nt, Human
auauguguauuugguuagccua

SEQ ID NO: 1113691 - RNA, 22 nt, Human
ggugaaggaggaagcugaugga

SEQ ID NO: 1113692 - RNA, 22 nt, Human
gcagggcucaacaggacacccc

SEQ ID NO: 1113693 - RNA, 23 nt, Human
ucuggcuccauccuuggggaucc

SEQ ID NO: 1113694 - RNA, 22 nt, Human
ggagcuguugcgcaugcgcucg

SEQ ID NO: 1113695 - RNA, 22 nt, Human
caggagaagguuuggagugcag

SEQ ID NO: 1113696 - RNA, 22 nt, Human
uauaguacauggaaucuucaua

SEQ ID NO: 1113697 - RNA, 22 nt, Human
uacuuagagcgauaauuuauac

SEQ ID NO: 1113698 - RNA, 19 nt, Human
gccugcagaaaaggcaggg

SEQ ID NO: 1113699 - RNA, 22 nt, Human
gccugagcuacuagggagucug

SEQ ID NO: 1113700 - RNA, 22 nt, Human
ucccaagugucuuggaccaggg

SEQ ID NO: 1113701 - RNA, 22 nt, Human
gugucacaagagcccaggaaac

SEQ ID NO: 1113702 - RNA, 22 nt, Human
agcugccagcaucccggaaggg

SEQ ID NO: 1113703 - RNA, 19 nt, Human
uggcauugguccagauaaa

SEQ ID NO: 1113704 - RNA, 22 nt, Human
cugcccugcccaggccuugggc

SEQ ID NO: 1113705 - RNA, 22 nt, Human
ucagaacagaagcuggcuauaa

SEQ ID NO: 1113706 - RNA, 22 nt, Human
ggcugagcaauuuugaugacau

SEQ ID NO: 1113707 - RNA, 22 nt, Human
cugggcugucaauggcccucug

SEQ ID NO: 1113708 - RNA, 22 nt, Human
uaccuugggguuuuguugcucu

SEQ ID NO: 1113709 - RNA, 22 nt, Human
agccucucuuucugguggcuaa

SEQ ID NO: 1113710 - RNA, 22 nt, Human
ccugagagcgaguggccucaug

SEQ ID NO: 1113711 - RNA, 22 nt, Human
agagccuggacuuuucugagcc

SEQ ID NO: 1113712 - RNA, 22 nt, Human
ucacugggagaugugggaaggg

SEQ ID NO: 1113713 - RNA, 22 nt, Human
acugugugaaacaucaaugugu

SEQ ID NO: 1113714 - RNA, 22 nt, Human
gggcugcugcugccagcgacac

SEQ ID NO: 1113715 - RNA, 23 nt, Human
ucuccagugucucuucauugagu

SEQ ID NO: 1113716 - RNA, 21 nt, Human
aucagcaaaugccugucuccc

SEQ ID NO: 1113717 - RNA, 22 nt, Human
caguuucuacgacuuaagcaca

SEQ ID NO: 1113718 - RNA, 22 nt, Human
uccuugaaaaucuugguuuaga

SEQ ID NO: 1113719 - RNA, 22 nt, Human
uccagcucuaacaugcugggcc

SEQ ID NO: 1113720 - RNA, 22 nt, Human
acagccagggcauugucgccga

SEQ ID NO: 1113721 - RNA, 22 nt, Human
ggcccugugguuuugcaaaguc

SEQ ID NO: 1113722 - RNA, 22 nt, Human
agaggcuccaccuucucugucc

SEQ ID NO: 1113723 - RNA, 22 nt, Human
caguuucugggcguucacaggu

SEQ ID NO: 1113724 - RNA, 22 nt, Human
gugcaugugcauccauguguac

SEQ ID NO: 1113725 - RNA, 22 nt, Human
gcucuggcuacuguggcuaccg

SEQ ID NO: 1113726 - RNA, 22 nt, Human
ccuccugggccuugcucuguga

SEQ ID NO: 1113727 - RNA, 22 nt, Human
ucucuggccgagagucccuggg

SEQ ID NO: 1113728 - RNA, 22 nt, Human
aaugggagagaacacaaagucc

SEQ ID NO: 1113729 - RNA, 22 nt, Human
accuggcacuacaggcaccugu

SEQ ID NO: 1113730 - RNA, 22 nt, Human
cggcagcuccgcgccguaggac

SEQ ID NO: 1113731 - RNA, 20 nt, Human
gggguuggcuggcacaggga

SEQ ID NO: 1113732 - RNA, 22 nt, Human
cacauuuaauccuuuauaagua

SEQ ID NO: 1113733 - RNA, 15 nt, Human
aggcacugugggacc

SEQ ID NO: 1113734 - RNA, 22 nt, Human
ccaccagcagugugcaaggauu

SEQ ID NO: 1113735 - RNA, 22 nt, Human
gaggccugguagccgagcccca

SEQ ID NO: 1113736 - RNA, 22 nt, Human
ccagcucccugaagccuggucu

SEQ ID NO: 1113737 - RNA, 22 nt, Human
accugagcaugccaggagagug

SEQ ID NO: 1113738 - RNA, 22 nt, Human
aaggccaugcacauccuaggca

SEQ ID NO: 1113739 - RNA, 22 nt, Human
cacagaaaaaggcuugaaaauc

SEQ ID NO: 1113740 - RNA, 22 nt, Human
cccagcacuuugaauaugucac

SEQ ID NO: 1113741 - RNA, 22 nt, Human
augucuuucgcaucaguagcua

SEQ ID NO: 1113742 - RNA, 22 nt, Human
ggguccagcgacagcaggcuca

SEQ ID NO: 1113743 - RNA, 22 nt, Human
cugggcaguuuuacaucauugc

SEQ ID NO: 1113744 - RNA, 22 nt, Human
ucacaugcucaccuaagccaca

SEQ ID NO: 1113745 - RNA, 22 nt, Human
caggggcucuaaugcaugauca

SEQ ID NO: 1113746 - RNA, 22 nt, Human
gcagacagccagacugcacugg

SEQ ID NO: 1113747 - RNA, 22 nt, Human
guuugcauggaagacagugagu

SEQ ID NO: 1113748 - RNA, 22 nt, Human
ggucucagcuggaguccuuggu

SEQ ID NO: 1113749 - RNA, 22 nt, Human
cagagcaguccuugucaaucag

SEQ ID NO: 1113750 - RNA, 22 nt, Human
uagucuuuuuaauaaauaaugc

SEQ ID NO: 1113751 - RNA, 23 nt, Human
uugaaggagaaagcuuucuuggu

SEQ ID NO: 1113752 - RNA, 19 nt, Human
gcacugaagaguuggucac

SEQ ID NO: 1113753 - RNA, 22 nt, Human
agcuggugcugaagcucuugag

SEQ ID NO: 1113754 - RNA, 22 nt, Human
aaucaguuucuuggcaaguuua

SEQ ID NO: 1113755 - RNA, 22 nt, Human
cagcuugcaguacuuguuuuug

SEQ ID NO: 1113756 - RNA, 22 nt, Human
cugccuguuuucugauagauuu

SEQ ID NO: 1113757 - RNA, 18 nt, Human
gcagagugcgucucugug

SEQ ID NO: 1113758 - RNA, 22 nt, Human
gcccagcuccucugcagacccu

SEQ ID NO: 1113759 - RNA, 22 nt, Human
agugaccaaucaugguuagauu

SEQ ID NO: 1113760 - RNA, 19 nt, Human
augagcuggcauuucaggu

SEQ ID NO: 1113761 - RNA, 22 nt, Human
uuguggaaauacagacuccaag

SEQ ID NO: 1113762 - RNA, 22 nt, Human
ugcaccauacccauuccccucu

SEQ ID NO: 1113763 - RNA, 22 nt, Human
uauccaauucaccauugauggg

SEQ ID NO: 1113764 - RNA, 22 nt, Human
uggugccuugggccuacagcgc

SEQ ID NO: 1113765 - RNA, 22 nt, Human
uccuucagggcugaccacaggc

SEQ ID NO: 1113766 - RNA, 23 nt, Human
agccuucaggcaaugucaguaga

SEQ ID NO: 1113767 - RNA, 22 nt, Human
ugaaccagagucuccagugguu

SEQ ID NO: 1113768 - RNA, 22 nt, Human
uccagggacacagaguccuucu

SEQ ID NO: 1113769 - RNA, 22 nt, Human
gucuggagccacccuaagcauu

SEQ ID NO: 1113770 - RNA, 20 nt, Human
gcacugaaauucaauguuug

SEQ ID NO: 1113771 - RNA, 22 nt, Human
ugucccagacauaaguggacau

SEQ ID NO: 1113772 - RNA, 22 nt, Human
ccuccaggauaagucagggccu

SEQ ID NO: 1113773 - RNA, 22 nt, Human
uaauuuacuugcaaauaacaau

SEQ ID NO: 1113774 - RNA, 22 nt, Human
cagauaaaggcuuacuaguagu

SEQ ID NO: 1113775 - RNA, 22 nt, Human
agcuucuguucaucuuccaggc

SEQ ID NO: 1113776 - RNA, 22 nt, Human
ccagguggacggcgaguacagg

SEQ ID NO: 1113777 - RNA, 22 nt, Human
uagacacaucaaguauaguuaa

SEQ ID NO: 1113778 - RNA, 22 nt, Human
uuuccuaugauauucuaugugu

SEQ ID NO: 1113779 - RNA, 19 nt, Human
ugcucaggccaaggagccc

SEQ ID NO: 1113780 - RNA, 21 nt, Human
ugugucacuaacuagaggcua

SEQ ID NO: 1113781 - RNA, 22 nt, Human
cuguagcaaguuauucaauaaa

SEQ ID NO: 1113782 - RNA, 22 nt, Human
uggcuggggccugaauccugca

SEQ ID NO: 1113783 - RNA, 22 nt, Human
ugggcagacgcuguuggaaggc

SEQ ID NO: 1113784 - RNA, 22 nt, Human
ccugggucuugguucaugcucu

SEQ ID NO: 1113785 - RNA, 22 nt, Human
uauuucuguaugcauaaaagga

SEQ ID NO: 1113786 - RNA, 22 nt, Human
aaucacaauuacuuuugcacca

SEQ ID NO: 1113787 - RNA, 22 nt, Human
gauaugaaguggcauugugaag

SEQ ID NO: 1113788 - RNA, 22 nt, Human
aggcccuggcacugccugggag

SEQ ID NO: 1113789 - RNA, 22 nt, Human
ucagaggacgcacuaggguugu

SEQ ID NO: 1113790 - RNA, 22 nt, Human
gccagaaacauacacaucacuu

SEQ ID NO: 1113791 - RNA, 22 nt, Human
cuccccagguucaggagguggg

SEQ ID NO: 1113792 - RNA, 22 nt, Human
ccugggcuuucaaaaccagccu

SEQ ID NO: 1113793 - RNA, 22 nt, Human
gucugcccucacgccagcuggg

SEQ ID NO: 1113794 - RNA, 22 nt, Human
caggaggaacaagagguucugg

SEQ ID NO: 1113795 - RNA, 22 nt, Human
uggcagcuguguccagguagaa

SEQ ID NO: 1113796 - RNA, 22 nt, Human
aguuuuaugcaguguucugaua

SEQ ID NO: 1113797 - RNA, 22 nt, Human
ccucugggagacugcuacugag

SEQ ID NO: 1113798 - RNA, 22 nt, Human
cagagcuggagaaguggauuua

SEQ ID NO: 1113799 - RNA, 22 nt, Human
agucucugcaugaugcagcaca

SEQ ID NO: 1113800 - RNA, 22 nt, Human
uugaaaggguuaaagugguaaa

SEQ ID NO: 1113801 - RNA, 22 nt, Human
ggcugucugugguggagcguug

SEQ ID NO: 1113802 - RNA, 22 nt, Human
uagcccagagucccaauuccag

SEQ ID NO: 1113803 - RNA, 22 nt, Human
aaaaagauguccugaaguuuag

SEQ ID NO: 1113804 - RNA, 22 nt, Human
ggagcauguggggugagcaggg

SEQ ID NO: 1113805 - RNA, 22 nt, Human
ccucagggccaucucugucccu

SEQ ID NO: 1113806 - RNA, 22 nt, Human
ucugcagcuuuuugguggggug

SEQ ID NO: 1113807 - RNA, 22 nt, Human
aagccgggccugagaaaugaca

SEQ ID NO: 1113808 - RNA, 18 nt, Human
cagcagagacauucaaaa

SEQ ID NO: 1113809 - RNA, 22 nt, Human
uggcccugacugauguggaggg

SEQ ID NO: 1113810 - RNA, 22 nt, Human
ugcagaagaccuuccagggcug

SEQ ID NO: 1113811 - RNA, 22 nt, Human
guaucuuuuacaccaggaaauu

SEQ ID NO: 1113812 - RNA, 22 nt, Human
ccaggagcauuaagagaacaua

SEQ ID NO: 1113813 - RNA, 22 nt, Human
ucaggccacuucacaggugauu

SEQ ID NO: 1113814 - RNA, 18 nt, Human
gggcacuggggacuggag

SEQ ID NO: 1113815 - RNA, 22 nt, Human
uaaaaguggauaagcuguagga

SEQ ID NO: 1113816 - RNA, 22 nt, Human
cugcugcucagugucaucaugu

SEQ ID NO: 1113817 - RNA, 22 nt, Human
acacaguaccccaaggcugggc

SEQ ID NO: 1113818 - RNA, 22 nt, Human
gugccuggcaugcgccggugcu

SEQ ID NO: 1113819 - RNA, 22 nt, Human
uaaagguaacaugaacugcuuu

SEQ ID NO: 1113820 - RNA, 22 nt, Human
cccucagcuccacccucagcag

SEQ ID NO: 1113821 - RNA, 22 nt, Human
caggcugccgugaagcaggccu

SEQ ID NO: 1113822 - RNA, 22 nt, Human
agcucccagcagagcuggccac

SEQ ID NO: 1113823 - RNA, 22 nt, Human
uagggcagauucgguggaguuu

SEQ ID NO: 1113824 - RNA, 22 nt, Human
cugcagugcaagcccagaugga

SEQ ID NO: 1113825 - RNA, 22 nt, Human
agucccagccuguaggauuggg

SEQ ID NO: 1113826 - RNA, 22 nt, Human
uacagaaaucacaucgcuuuga

SEQ ID NO: 1113827 - RNA, 22 nt, Human
uaaaugugcacuuuacuuuuca

SEQ ID NO: 1113828 - RNA, 22 nt, Human
ugaagcaggaaacuucuuguuu

SEQ ID NO: 1113829 - RNA, 22 nt, Human
agcagccagaaagggcagucga

SEQ ID NO: 1113830 - RNA, 22 nt, Human
aucaaaguccaucagaagguag

SEQ ID NO: 1113831 - RNA, 22 nt, Human
acuuagaacaggcagaauucca

SEQ ID NO: 1113832 - RNA, 22 nt, Human
gcagcuggucuggccuagagua

SEQ ID NO: 1113833 - RNA, 22 nt, Human
ucacaacuugaagcugauuuaa

SEQ ID NO: 1113834 - RNA, 22 nt, Human
aggcacugagaggcuguguugc

SEQ ID NO: 1113835 - RNA, 22 nt, Human
agaggcaguauacaauccgagc

SEQ ID NO: 1113836 - RNA, 22 nt, Human
acauuuaaugauccuacuguga

SEQ ID NO: 1113837 - RNA, 22 nt, Human
ucugagggugggagaaggagcu

SEQ ID NO: 1113838 - RNA, 22 nt, Human
aauaguguuguucacucaggag

SEQ ID NO: 1113839 - RNA, 22 nt, Human
ggagcuggcuacagagaacucc

SEQ ID NO: 1113840 - RNA, 22 nt, Human
agugaaauuuguuuagauaggu

SEQ ID NO: 1113841 - RNA, 21 nt, Human
gugcucugggcagcagagggc

SEQ ID NO: 1113842 - RNA, 22 nt, Human
gagaggaguaggcugauggugc

SEQ ID NO: 1113843 - RNA, 22 nt, Human
cugggagauugcuagagaugca

SEQ ID NO: 1113844 - RNA, 22 nt, Human
agaaaaggcuugaagagguuuu

SEQ ID NO: 1113845 - RNA, 22 nt, Human
cugucaguaggcucccaucauu

SEQ ID NO: 1113846 - RNA, 22 nt, Human
aggugcuggagucugggcagga

SEQ ID NO: 1113847 - RNA, 22 nt, Human
aaguguuaaaagauuaaaugcu

SEQ ID NO: 1113848 - RNA, 22 nt, Human
acuccuggguugcaguccucaa

SEQ ID NO: 1113849 - RNA, 22 nt, Human
agaggucauaucucagaagaga

SEQ ID NO: 1113850 - RNA, 22 nt, Human
uccagggaugccagccauguug

SEQ ID NO: 1113851 - RNA, 21 nt, Human
uccugccuuaguccagagcag

SEQ ID NO: 1113852 - RNA, 19 nt, Human
accucugcagagauguuua

SEQ ID NO: 1113853 - RNA, 19 nt, Human
uggcuuccaucucucucau

SEQ ID NO: 1113854 - RNA, 22 nt, Human
aaaaaaucagaucuuugguuaa

SEQ ID NO: 1113855 - RNA, 22 nt, Human
ucucagggccccaaaggcuagu

SEQ ID NO: 1113856 - RNA, 22 nt, Human
uuuucuaacaucuaguaauuug

SEQ ID NO: 1113857 - RNA, 22 nt, Human
ucugugacuugcgggaggagaa

SEQ ID NO: 1113858 - RNA, 22 nt, Human
cugggcuacguguugacagcau

SEQ ID NO: 1113859 - RNA, 22 nt, Human
ggcccucccugagccagguggg

SEQ ID NO: 1113860 - RNA, 22 nt, Human
cacaagagagugcgcguugcaa

SEQ ID NO: 1113861 - RNA, 22 nt, Human
acagcuggcaggggggcaugaa

SEQ ID NO: 1113862 - RNA, 22 nt, Human
gaaggagagggucaaggauaau

SEQ ID NO: 1113863 - RNA, 22 nt, Human
cuccucuggcuuccuggaggca

SEQ ID NO: 1113864 - RNA, 22 nt, Human
gcucugcucuaacauuccugac

SEQ ID NO: 1113865 - RNA, 22 nt, Human
uggccugggcaugaagcaucgu

SEQ ID NO: 1113866 - RNA, 20 nt, Human
aagagaagaagucuuugaaa

SEQ ID NO: 1113867 - RNA, 22 nt, Human
uaucuuugcaaauaucucuaag

SEQ ID NO: 1113868 - RNA, 19 nt, Human
agggaaggauucugucauu

SEQ ID NO: 1113869 - RNA, 22 nt, Human
cccugagcccauaguugacauu

SEQ ID NO: 1113870 - RNA, 22 nt, Human
gccaggcugaggcucuggaaga

SEQ ID NO: 1113871 - RNA, 22 nt, Human
cacaggcuugucagcaugaggc

SEQ ID NO: 1113872 - RNA, 22 nt, Human
agagcugcaccuaugcagaccu

SEQ ID NO: 1113873 - RNA, 22 nt, Human
ggcacugagcgggcucugagcg

SEQ ID NO: 1113874 - RNA, 22 nt, Human
aggcagagagcaguggccgucu

SEQ ID NO: 1113875 - RNA, 22 nt, Human
uugucccaggacuugcauagau

SEQ ID NO: 1113876 - RNA, 18 nt, Human
ugucucaggcugaaacag

SEQ ID NO: 1113877 - RNA, 20 nt, Human
agaauucuuacccuuugaug

SEQ ID NO: 1113878 - RNA, 21 nt, Human
ugccagggauuuacagagccu

SEQ ID NO: 1113879 - RNA, 22 nt, Human
cagcucccgccaucgggaggca

SEQ ID NO: 1113880 - RNA, 22 nt, Human
uggggcugucccgguuuggcga

SEQ ID NO: 1113881 - RNA, 18 nt, Human
gucaccuggaucagauua

SEQ ID NO: 1113882 - RNA, 22 nt, Human
cagagggcucaguccugcugga

SEQ ID NO: 1113883 - RNA, 22 nt, Human
gagaaagauguaggcugggagg

SEQ ID NO: 1113884 - RNA, 19 nt, Human
cagucccaaauucuuguca

SEQ ID NO: 1113885 - RNA, 17 nt, Human
agcagaagucagaggga

SEQ ID NO: 1113886 - RNA, 22 nt, Human
uccugccuguuuaccuguacuu

SEQ ID NO: 1113887 - RNA, 19 nt, Human
ggacacagaaagcugcauu

SEQ ID NO: 1113888 - RNA, 22 nt, Human
acagaaauugggcaaauggaag

SEQ ID NO: 1113889 - RNA, 22 nt, Human
guggcugcucgggcuccggccc

SEQ ID NO: 1113890 - RNA, 22 nt, Human
ugcaagggcuuagggggcugug

SEQ ID NO: 1113891 - RNA, 22 nt, Human
acacaggggaaaguggagcuga

SEQ ID NO: 1113892 - RNA, 22 nt, Human
agcaguggaccucagugcuauu

SEQ ID NO: 1113893 - RNA, 23 nt, Human
gccuucagcucgggaaggcuccc

SEQ ID NO: 1113894 - RNA, 22 nt, Human
ggcuggagugggcuccagaguu

SEQ ID NO: 1113895 - RNA, 22 nt, Human
uuagcuaaacuguaacuagaau

SEQ ID NO: 1113896 - RNA, 22 nt, Human
agaaagaacguugguuaucuua

SEQ ID NO: 1113897 - RNA, 22 nt, Human
acucacuuuccauucaagcacc

SEQ ID NO: 1113898 - RNA, 22 nt, Human
ucccccacucuaaaggagccuu

SEQ ID NO: 1113899 - RNA, 22 nt, Human
cuucucuucccagggacacagg

SEQ ID NO: 1113900 - RNA, 22 nt, Human
uuagaaauacaagugagguuga

SEQ ID NO: 1113901 - RNA, 22 nt, Human
ggaggcuccacugcucuuccug

SEQ ID NO: 1113902 - RNA, 22 nt, Human
cugagauggccacugggucuca

SEQ ID NO: 1113903 - RNA, 21 nt, Human
ugcugccaucaugcagagaug

SEQ ID NO: 1113904 - RNA, 22 nt, Human
ugugcugguacaugugaggaug

SEQ ID NO: 1113905 - RNA, 22 nt, Human
uggcucugccacuaacuuggua

SEQ ID NO: 1113906 - RNA, 22 nt, Human
cguggccuuugagugagcuccc

SEQ ID NO: 1113907 - RNA, 22 nt, Human
ccacccuuggguucggaggccg

SEQ ID NO: 1113908 - RNA, 22 nt, Human
uuucucaucuggaaacagugcu

SEQ ID NO: 1113909 - RNA, 19 nt, Human
gagcacagcggcauuuggu

SEQ ID NO: 1113910 - RNA, 22 nt, Human
aucagcaaucucguguauuagg

SEQ ID NO: 1113911 - RNA, 22 nt, Human
ucugucacccaggcuggagugc

SEQ ID NO: 1113912 - RNA, 22 nt, Human
cagaguguuagcgcugguuggg

SEQ ID NO: 1113913 - RNA, 22 nt, Human
uccugucagugaggcagaugaa

SEQ ID NO: 1113914 - RNA, 22 nt, Human
cuucuugcugggggccucagug

SEQ ID NO: 1113915 - RNA, 22 nt, Human
ucccagccugacagugcaucaa

SEQ ID NO: 1113916 - RNA, 22 nt, Human
gguagcacauugcauuaggaga

SEQ ID NO: 1113917 - RNA, 22 nt, Human
cagcccaaagccccaggcuaga

SEQ ID NO: 1113918 - RNA, 22 nt, Human
cuggagggugagccucaucucu

SEQ ID NO: 1113919 - RNA, 22 nt, Human
uuugcauugcauuaaguauucu

SEQ ID NO: 1113920 - RNA, 22 nt, Human
uacaugcuccacuuucuccugu

SEQ ID NO: 1113921 - RNA, 22 nt, Human
cagggagaaaucuccaggaggu

SEQ ID NO: 1113922 - RNA, 22 nt, Human
ggaggggccggcugccugccac

SEQ ID NO: 1113923 - RNA, 22 nt, Human
gcccucagaugggaaaggaggg

SEQ ID NO: 1113924 - RNA, 22 nt, Human
cugggccauggaagucucugcc

SEQ ID NO: 1113925 - RNA, 22 nt, Human
uccugggcugcagggaagagca

SEQ ID NO: 1113926 - RNA, 22 nt, Human
gguagcagggcugugagucaga

SEQ ID NO: 1113927 - RNA, 22 nt, Human
cagcagagcauuugguaggagg

SEQ ID NO: 1113928 - RNA, 22 nt, Human
accccagaggcggaggcugcag

SEQ ID NO: 1113929 - RNA, 22 nt, Human
uacauuguuuuuucuugccauc

SEQ ID NO: 1113930 - RNA, 17 nt, Human
uucaagauauugaaaug

SEQ ID NO: 1113931 - RNA, 22 nt, Human
cuuggcagauccaaaaaugaca

SEQ ID NO: 1113932 - RNA, 22 nt, Human
aaugcuagugugauauguaagg

SEQ ID NO: 1113933 - RNA, 17 nt, Human
gcuggcugacccaugcc

SEQ ID NO: 1113934 - RNA, 22 nt, Human
guggcucuccauugacauggaa

SEQ ID NO: 1113935 - RNA, 22 nt, Human
uccuggaguugugcagugcaca

SEQ ID NO: 1113936 - RNA, 23 nt, Human
aguuccagaaaaaugcucaagca

SEQ ID NO: 1113937 - RNA, 22 nt, Human
cucucugcuguauccuuaggcu

SEQ ID NO: 1113938 - RNA, 19 nt, Human
ggcugccuggagcgagggc

SEQ ID NO: 1113939 - RNA, 22 nt, Human
ucugcagaaguggcugggccac

SEQ ID NO: 1113940 - RNA, 22 nt, Human
ugguuuugcuccaguauaaaua

SEQ ID NO: 1113941 - RNA, 22 nt, Human
gucuggaggaggaagaaggcac

SEQ ID NO: 1113942 - RNA, 22 nt, Human
caacagaaggaagcagggucag

SEQ ID NO: 1113943 - RNA, 22 nt, Human
cagagccagcuguccuuggcau

SEQ ID NO: 1113944 - RNA, 22 nt, Human
uagcugccuagacagcuauagc

SEQ ID NO: 1113945 - RNA, 22 nt, Human
gugucauguagaaauugaugaa

SEQ ID NO: 1113946 - RNA, 22 nt, Human
cagaaaaccugacucuagaacu

SEQ ID NO: 1113947 - RNA, 22 nt, Human
ggggcagagagaaggaagcuug

SEQ ID NO: 1113948 - RNA, 22 nt, Human
ccaccagcuuugccacccugcu

SEQ ID NO: 1113949 - RNA, 22 nt, Human
ucagagugggagaaugugccaa

SEQ ID NO: 1113950 - RNA, 21 nt, Human
gagugcaggucugaugccauc

SEQ ID NO: 1113951 - RNA, 22 nt, Human
ggccucucauguccugggcuuc

SEQ ID NO: 1113952 - RNA, 22 nt, Human
gugucauggaaaauugcaaugg

SEQ ID NO: 1113953 - RNA, 22 nt, Human
ucacuuuugaucccuaugcagu

SEQ ID NO: 1113954 - RNA, 22 nt, Human
agagacaggguuuugccauguu

SEQ ID NO: 1113955 - RNA, 22 nt, Human
gaggccuguagucauggaugua

SEQ ID NO: 1113956 - RNA, 22 nt, Human
gccucugcggagcuguacauca

SEQ ID NO: 1113957 - RNA, 22 nt, Human
gcuggccuccugcuagauggaa

SEQ ID NO: 1113958 - RNA, 22 nt, Human
uugugucccccuuugagagcca

SEQ ID NO: 1113959 - RNA, 22 nt, Human
ugcagagggacagccacagcuc

SEQ ID NO: 1113960 - RNA, 22 nt, Human
auuugucuucaguagguucuuc

SEQ ID NO: 1113961 - RNA, 22 nt, Human
uaaauguggagacucaggaguc

SEQ ID NO: 1113962 - RNA, 22 nt, Human
uggcagagaacacggcugaucu

SEQ ID NO: 1113963 - RNA, 22 nt, Human
uggcagagagagugcagucgac

SEQ ID NO: 1113964 - RNA, 22 nt, Human
ucuagaaacaugacauugaucu

SEQ ID NO: 1113965 - RNA, 22 nt, Human
uuugcaauuugugcugcaaaug

SEQ ID NO: 1113966 - RNA, 22 nt, Human
cugaggccuaagacaugaauga

SEQ ID NO: 1113967 - RNA, 22 nt, Human
guggcugcuacagagcuggagg

SEQ ID NO: 1113968 - RNA, 22 nt, Human
aaaugaccagaauacaggcuuc

SEQ ID NO: 1113969 - RNA, 22 nt, Human
cugaggcugcccagggccaggu

SEQ ID NO: 1113970 - RNA, 22 nt, Human
ugcuggggauccguaccaaccc

SEQ ID NO: 1113971 - RNA, 22 nt, Human
gcucuggacccuggaguggcug

SEQ ID NO: 1113972 - RNA, 22 nt, Human
uucacaggauauaugugcaggg

SEQ ID NO: 1113973 - RNA, 22 nt, Human
uagaaacucaggauacucuucc

SEQ ID NO: 1113974 - RNA, 22 nt, Human
acauuucuuccacaugcugcug

SEQ ID NO: 1113975 - RNA, 22 nt, Human
gcaugguggccuuaggguagcc

SEQ ID NO: 1113976 - RNA, 22 nt, Human
caaagggcucuagacucagcag

SEQ ID NO: 1113977 - RNA, 22 nt, Human
ccagcuccaaguuugggcauca

SEQ ID NO: 1113978 - RNA, 19 nt, Human
gccugccuggguuucugag

SEQ ID NO: 1113979 - RNA, 22 nt, Human
cagaggcugggaccucaggcau

SEQ ID NO: 1113980 - RNA, 22 nt, Human
cagcagugcuucagugugagau

SEQ ID NO: 1113981 - RNA, 22 nt, Human
uuugacagauccuuaacucagc

SEQ ID NO: 1113982 - RNA, 22 nt, Human
cugccagcucgccacaaugaca

SEQ ID NO: 1113983 - RNA, 20 nt, Human
agaaucugacccagagagac

SEQ ID NO: 1113984 - RNA, 22 nt, Human
cccuucccuucugggagaucca

SEQ ID NO: 1113985 - RNA, 22 nt, Human
uuccuguaguugugcaauguac

SEQ ID NO: 1113986 - RNA, 22 nt, Human
aggcaguguguagcuggaagag

SEQ ID NO: 1113987 - RNA, 22 nt, Human
gugucccagccccacaggccug

SEQ ID NO: 1113988 - RNA, 22 nt, Human
gcagacagacugcagugauuuu

SEQ ID NO: 1113989 - RNA, 22 nt, Human
ggugcagaaggaagggagcugg

SEQ ID NO: 1113990 - RNA, 22 nt, Human
gcagagcugggucuguauccaa

SEQ ID NO: 1113991 - RNA, 22 nt, Human
caggccagguggcaggcaaaac

SEQ ID NO: 1113992 - RNA, 22 nt, Human
cuuccucccccacacacucacu

SEQ ID NO: 1113993 - RNA, 22 nt, Human
uucaacacaggaacaugauaua

SEQ ID NO: 1113994 - RNA, 22 nt, Human
uuuccuuccuugcuagccugag

SEQ ID NO: 1113995 - RNA, 22 nt, Human
uggcugcugagaaggcagcugu

SEQ ID NO: 1113996 - RNA, 22 nt, Human
auaacagaugugaagugcuaau

SEQ ID NO: 1113997 - RNA, 22 nt, Human
cagaagcauuccagcaaauagu

SEQ ID NO: 1113998 - RNA, 22 nt, Human
cagcagugaugugugaggguuc

SEQ ID NO: 1113999 - RNA, 22 nt, Human
cuguguccugcgucaagccaau

SEQ ID NO: 1114000 - RNA, 22 nt, Human
ugcagaagcagagccgguggcc

SEQ ID NO: 1114001 - RNA, 21 nt, Human
gcccucaggggaggauggccu

SEQ ID NO: 1114002 - RNA, 22 nt, Human
cacaguggauugggugaugccc

SEQ ID NO: 1114003 - RNA, 20 nt, Human
caggccagagguuugauggc

SEQ ID NO: 1114004 - RNA, 22 nt, Human
ccuccugggcuccugucugcac

SEQ ID NO: 1114005 - RNA, 20 nt, Human
gcugccagugccugaugcuu

SEQ ID NO: 1114006 - RNA, 21 nt, Human
cgggcuggccgggcccucacc

SEQ ID NO: 1114007 - RNA, 22 nt, Human
agggcacagccuaaagccuaug

SEQ ID NO: 1114008 - RNA, 22 nt, Human
agggagcaugggugaagcaggc

SEQ ID NO: 1114009 - RNA, 22 nt, Human
uggccugccccgagauccuggc

SEQ ID NO: 1114010 - RNA, 22 nt, Human
caggggcaagaaugcugucagc

SEQ ID NO: 1114011 - RNA, 22 nt, Human
aaugccaguguguugauuccag

SEQ ID NO: 1114012 - RNA, 22 nt, Human
ucaucacucauuggacaacaga

SEQ ID NO: 1114013 - RNA, 22 nt, Human
acagaauugauggaaaucucag

SEQ ID NO: 1114014 - RNA, 22 nt, Human
uuaucauugucgcagucuaauu

SEQ ID NO: 1114015 - RNA, 22 nt, Human
uuuuccuaguaggccuauuaga

SEQ ID NO: 1114016 - RNA, 22 nt, Human
agccugguguggggcugcagag

SEQ ID NO: 1114017 - RNA, 22 nt, Human
ggucagggggaucugugaggua

SEQ ID NO: 1114018 - RNA, 20 nt, Human
uauuuagauucaaguaugga

SEQ ID NO: 1114019 - RNA, 21 nt, Human
uucuuuccccagaggacuaaa

SEQ ID NO: 1114020 - RNA, 22 nt, Human
ugggccugugaugcugggcuau

SEQ ID NO: 1114021 - RNA, 22 nt, Human
auguagcaucuauccugauaaa

SEQ ID NO: 1114022 - RNA, 22 nt, Human
aucuacagcugucugcacagua

SEQ ID NO: 1114023 - RNA, 22 nt, Human
gccuccugguugcuucuccaac

SEQ ID NO: 1114024 - RNA, 22 nt, Human
ggcagcucaccucugguccagg

SEQ ID NO: 1114025 - RNA, 22 nt, Human
uucuuacagcccuauuacuaaa

SEQ ID NO: 1114026 - RNA, 22 nt, Human
ucucuucuugauuuucacugga

SEQ ID NO: 1114027 - RNA, 22 nt, Human
gucauugcaguggcaaaucaca

SEQ ID NO: 1114028 - RNA, 22 nt, Human
ccugacgaaaggcgugcuggag

SEQ ID NO: 1114029 - RNA, 23 nt, Human
acagcugcaccuggccgccuggc

SEQ ID NO: 1114030 - RNA, 22 nt, Human
uggcucaggaucuaagcagaau

SEQ ID NO: 1114031 - RNA, 22 nt, Human
aaagccuucaaguagauguaag

SEQ ID NO: 1114032 - RNA, 22 nt, Human
cuccaggagcugugucuuucuu

SEQ ID NO: 1114033 - RNA, 22 nt, Human
ugauuuccuaggucuggagaag

SEQ ID NO: 1114034 - RNA, 22 nt, Human
ugagcccaggaguaugaggcug

SEQ ID NO: 1114035 - RNA, 22 nt, Human
caggaggcaucauggagcggac

SEQ ID NO: 1114036 - RNA, 22 nt, Human
aucaguuugagugcugugucaa

SEQ ID NO: 1114037 - RNA, 22 nt, Human
cagcaggcucugaguggcugcc

SEQ ID NO: 1114038 - RNA, 22 nt, Human
uaaggcacccgugagcugccag

SEQ ID NO: 1114039 - RNA, 22 nt, Human
uccaagggcagccauagaacuu

SEQ ID NO: 1114040 - RNA, 22 nt, Human
uugaagauggaucgccacucuc

SEQ ID NO: 1114041 - RNA, 22 nt, Human
acugucuccucaucaugccugg

SEQ ID NO: 1114042 - RNA, 22 nt, Human
guggcucucgccagccugcggg

SEQ ID NO: 1114043 - RNA, 23 nt, Human
gcagacagagcagacuaagacaa

SEQ ID NO: 1114044 - RNA, 22 nt, Human
aaaguguaaaagcauguuaggg

SEQ ID NO: 1114045 - RNA, 22 nt, Human
guggggggacguuggucacuuu

SEQ ID NO: 1114046 - RNA, 22 nt, Human
cuccagggagcuguggagguuu

SEQ ID NO: 1114047 - RNA, 22 nt, Human
uuuuggucagguuggucucgaa

SEQ ID NO: 1114048 - RNA, 22 nt, Human
ucagaggugguaaaggacagca

SEQ ID NO: 1114049 - RNA, 22 nt, Human
aggagcuggguuccuuuggugg

SEQ ID NO: 1114050 - RNA, 22 nt, Human
gcugagagcggccagcugggaa

SEQ ID NO: 1114051 - RNA, 22 nt, Human
agucuccuuggccucaaugccu

SEQ ID NO: 1114052 - RNA, 22 nt, Human
ccagucccaucucugucgcuua

SEQ ID NO: 1114053 - RNA, 22 nt, Human
agggccuggcuucacuuucuca

SEQ ID NO: 1114054 - RNA, 22 nt, Human
ucccuggggauguuggccugcc

SEQ ID NO: 1114055 - RNA, 22 nt, Human
uuccuucucagcccucgaggau

SEQ ID NO: 1114056 - RNA, 22 nt, Human
aggaagcccuugucauuucugu

SEQ ID NO: 1114057 - RNA, 22 nt, Human
guuuuauaggugaaauauuacu

SEQ ID NO: 1114058 - RNA, 22 nt, Human
guggcccugucccaggccuccu

SEQ ID NO: 1114059 - RNA, 22 nt, Human
cagagagagucaaaucuuugcu

SEQ ID NO: 1114060 - RNA, 20 nt, Human
cucugcagcaaggccugggu

SEQ ID NO: 1114061 - RNA, 23 nt, Human
ugcucugugaauaguuggugacu

SEQ ID NO: 1114062 - RNA, 22 nt, Human
acagcacaaucugagucccaga

SEQ ID NO: 1114063 - RNA, 22 nt, Human
aguauuucuaguugguucuacu

SEQ ID NO: 1114064 - RNA, 22 nt, Human
ucugaaaguaucuggaucuuuu

SEQ ID NO: 1114065 - RNA, 19 nt, Human
ggcugucucggcccagcca

SEQ ID NO: 1114066 - RNA, 22 nt, Human
uucauuacugcgguagucacac

SEQ ID NO: 1114067 - RNA, 22 nt, Human
ugcagcugaggccagcuaugcc

SEQ ID NO: 1114068 - RNA, 22 nt, Human
cauugcacuccaucuugggcaa

SEQ ID NO: 1114069 - RNA, 22 nt, Human
ccugccaggagcuggugcugca

SEQ ID NO: 1114070 - RNA, 22 nt, Human
ggcugccugggagcccuccucu

SEQ ID NO: 1114071 - RNA, 22 nt, Human
agccagagcugaugucauucuc

SEQ ID NO: 1114072 - RNA, 22 nt, Human
uguccucacaggaaugaacuuu

SEQ ID NO: 1114073 - RNA, 22 nt, Human
ccuggcagcuaagugcuuugag

SEQ ID NO: 1114074 - RNA, 22 nt, Human
uuuccucuccggggccuccagg

SEQ ID NO: 1114075 - RNA, 22 nt, Human
cauugaaaccuaacauaggcug

SEQ ID NO: 1114076 - RNA, 22 nt, Human
uccuggagauaauugcagugaa

SEQ ID NO: 1114077 - RNA, 22 nt, Human
gauggcagguaguggucucauc

SEQ ID NO: 1114078 - RNA, 22 nt, Human
cccagcaucccagugggcagca

SEQ ID NO: 1114079 - RNA, 20 nt, Human
uaugaguauuacuuucagga

SEQ ID NO: 1114080 - RNA, 22 nt, Human
cagaccugagguugaguaccag

SEQ ID NO: 1114081 - RNA, 22 nt, Human
ugcugcucaaugagaugccauc

SEQ ID NO: 1114082 - RNA, 22 nt, Human
uggcagggugccaguugcgagu

SEQ ID NO: 1114083 - RNA, 22 nt, Human
ggagccagagggaugcaguuga

SEQ ID NO: 1114084 - RNA, 22 nt, Human
uggagcaggccggaaguggcuu

SEQ ID NO: 1114085 - RNA, 22 nt, Human
caguguggagggagagagccug

SEQ ID NO: 1114086 - RNA, 21 nt, Human
ggccugaguauaggacaggcc

SEQ ID NO: 1114087 - RNA, 22 nt, Human
gaggcugguaggaaaggaaaca

SEQ ID NO: 1114088 - RNA, 22 nt, Human
agaaaugugagccccuuaucaa

SEQ ID NO: 1114089 - RNA, 22 nt, Human
uggaggaaaauuacuggggucu

SEQ ID NO: 1114090 - RNA, 22 nt, Human
cagggugcgccacucagaugua

SEQ ID NO: 1114091 - RNA, 22 nt, Human
ucugccuggauuccauucucca

SEQ ID NO: 1114092 - RNA, 20 nt, Human
ugcucugucuaaaacuuccc

SEQ ID NO: 1114093 - RNA, 22 nt, Human
cugagccauaagggaggcuggg

SEQ ID NO: 1114094 - RNA, 22 nt, Human
agugucugccagcugccaggug

SEQ ID NO: 1114095 - RNA, 22 nt, Human
aguauacauauauuagccuucg

SEQ ID NO: 1114096 - RNA, 22 nt, Human
uacuuugucauucuaaccuucc

SEQ ID NO: 1114097 - RNA, 22 nt, Human
cuccuuccugguuagcaccuua

SEQ ID NO: 1114098 - RNA, 22 nt, Human
aauagguagccagauauauaaa

SEQ ID NO: 1114099 - RNA, 22 nt, Human
aauggcugggaguguauuuugg

SEQ ID NO: 1114100 - RNA, 22 nt, Human
cagggcagagccaggauuucaa

SEQ ID NO: 1114101 - RNA, 22 nt, Human
uagcacauaacuuagaauaguu

SEQ ID NO: 1114102 - RNA, 22 nt, Human
uguggcucucaugcacucccag

SEQ ID NO: 1114103 - RNA, 22 nt, Human
gucuggaguggggccugagaau

SEQ ID NO: 1114104 - RNA, 23 nt, Human
gcagaggagcaagcuggacacca

SEQ ID NO: 1114105 - RNA, 22 nt, Human
cacaggguuguucugaggauuc

SEQ ID NO: 1114106 - RNA, 22 nt, Human
gccaguuccuguggagucagag

SEQ ID NO: 1114107 - RNA, 22 nt, Human
ggagaggugaauggcugcucua

SEQ ID NO: 1114108 - RNA, 22 nt, Human
agcuguguagggaaucagagaa

SEQ ID NO: 1114109 - RNA, 22 nt, Human
gaggugggagggcagucccuaa

SEQ ID NO: 1114110 - RNA, 22 nt, Human
aaggccaugaccacuugcugug

SEQ ID NO: 1114111 - RNA, 22 nt, Human
uuaauaaacaggugcagcugaa

SEQ ID NO: 1114112 - RNA, 20 nt, Human
ucagccagcuaacaugggga

SEQ ID NO: 1114113 - RNA, 22 nt, Human
cagcugccaagaaucuuuucua

SEQ ID NO: 1114114 - RNA, 22 nt, Human
auucccaucgucaacuucacug

SEQ ID NO: 1114115 - RNA, 22 nt, Human
ucugcuggccuuagcaggucua

SEQ ID NO: 1114116 - RNA, 23 nt, Human
agggaaaguaguaauggccuuug

SEQ ID NO: 1114117 - RNA, 22 nt, Human
gugggggcaggcagugcuagga

SEQ ID NO: 1114118 - RNA, 23 nt, Human
ugcagcugccucuggcgggccgg

SEQ ID NO: 1114119 - RNA, 22 nt, Human
uuaugacaggaaaaucacagaa

SEQ ID NO: 1114120 - RNA, 22 nt, Human
aaaucaguucacguucugaggu

SEQ ID NO: 1114121 - RNA, 22 nt, Human
cacccagcagcacuuaagacua

SEQ ID NO: 1114122 - RNA, 22 nt, Human
cuggcuccaucacugggugaug

SEQ ID NO: 1114123 - RNA, 22 nt, Human
gcucuggguagccacugccugg

SEQ ID NO: 1114124 - RNA, 21 nt, Human
agcagccauggaugguaugua

SEQ ID NO: 1114125 - RNA, 22 nt, Human
ucagagccccuccgcuguccca

SEQ ID NO: 1114126 - RNA, 22 nt, Human
cagagagcuuagugugcugcau

SEQ ID NO: 1114127 - RNA, 22 nt, Human
gcaggaugagugaguacauuua

SEQ ID NO: 1114128 - RNA, 22 nt, Human
uccuccaggucuaggguggcuu

SEQ ID NO: 1114129 - RNA, 22 nt, Human
gagcccaggcagagguugcagu

SEQ ID NO: 1114130 - RNA, 22 nt, Human
aaauguaguauguugcauguau

SEQ ID NO: 1114131 - RNA, 22 nt, Human
uauuucaugugcaccauaauuc

SEQ ID NO: 1114132 - RNA, 22 nt, Human
uugcaccaaaugaguuaaaauu

SEQ ID NO: 1114133 - RNA, 22 nt, Human
auggcagcaaaugucuggcugg

SEQ ID NO: 1114134 - RNA, 21 nt, Human
agacagagugcagucuacaua

SEQ ID NO: 1114135 - RNA, 22 nt, Human
cugcagggcccgccugagcccu

SEQ ID NO: 1114136 - RNA, 22 nt, Human
agggccuggaacuggagaccac

SEQ ID NO: 1114137 - RNA, 22 nt, Human
ccauggccgccgcugcucagga

SEQ ID NO: 1114138 - RNA, 22 nt, Human
uguggccuggaaggggcugcuc

SEQ ID NO: 1114139 - RNA, 22 nt, Human
uaucuacuccucuuucagaugc

SEQ ID NO: 1114140 - RNA, 22 nt, Human
acacagggcugcgccugacccc

SEQ ID NO: 1114141 - RNA, 22 nt, Human
gagaggccaaaaucccugcccc

SEQ ID NO: 1114142 - RNA, 22 nt, Human
agagccugaggccaggaaaaug

SEQ ID NO: 1114143 - RNA, 22 nt, Human
uccagccaacugccuagggagc

SEQ ID NO: 1114144 - RNA, 22 nt, Human
ugucucaguucccuucucugga

SEQ ID NO: 1114145 - RNA, 22 nt, Human
gagcuguccuaccaggaguccu

SEQ ID NO: 1114146 - RNA, 22 nt, Human
cugaggucaauuaaucaacaac

SEQ ID NO: 1114147 - RNA, 22 nt, Human
agccucucuguuagucacuggg

SEQ ID NO: 1114148 - RNA, 22 nt, Human
uucaagaucuuccaaaggauac

SEQ ID NO: 1114149 - RNA, 22 nt, Human
uagaaaagauaacauucugugc

SEQ ID NO: 1114150 - RNA, 22 nt, Human
ggccucugggguccugagccca

SEQ ID NO: 1114151 - RNA, 22 nt, Human
auuguauuagcacaauacaauu

SEQ ID NO: 1114152 - RNA, 22 nt, Human
aaagaaggaccuggaggaggau

SEQ ID NO: 1114153 - RNA, 19 nt, Human
gcaggguguugacuguccc

SEQ ID NO: 1114154 - RNA, 22 nt, Human
caaagugcuaggauuacaggcc

SEQ ID NO: 1114155 - RNA, 22 nt, Human
gcaccugggacccagaggcacc

SEQ ID NO: 1114156 - RNA, 22 nt, Human
ugcaaucucggcacuuugggag

SEQ ID NO: 1114157 - RNA, 19 nt, Human
cugaggugcaguaagaggc

SEQ ID NO: 1114158 - RNA, 22 nt, Human
auauuucuugagcaccugguau

SEQ ID NO: 1114159 - RNA, 22 nt, Human
aaaugucuuuaucucauguaac

SEQ ID NO: 1114160 - RNA, 22 nt, Human
gucccaggugggcuccaccucu

SEQ ID NO: 1114161 - RNA, 22 nt, Human
aggagcccugcgggaggcagag

SEQ ID NO: 1114162 - RNA, 22 nt, Human
uacaaagugagcaaccucuuuu

SEQ ID NO: 1114163 - RNA, 22 nt, Human
cuuguacaggaauccaugguau

SEQ ID NO: 1114164 - RNA, 22 nt, Human
aacaugaaaguugcuaagugca

SEQ ID NO: 1114165 - RNA, 23 nt, Human
uggcuucugccccauucucucca

SEQ ID NO: 1114166 - RNA, 22 nt, Human
agugcugucccgacaacugagg

SEQ ID NO: 1114167 - RNA, 22 nt, Human
ccagucagccaagcugcagcgg

SEQ ID NO: 1114168 - RNA, 22 nt, Human
gcucucugucguuaugcuucau

SEQ ID NO: 1114169 - RNA, 22 nt, Human
ccuguguguaggccaggggagu

SEQ ID NO: 1114170 - RNA, 19 nt, Human
gccucugcuggggacaggc

SEQ ID NO: 1114171 - RNA, 22 nt, Human
gucaaguuaagauaaggucaug

SEQ ID NO: 1114172 - RNA, 22 nt, Human
gaggcaggcacuguuaucagca

SEQ ID NO: 1114173 - RNA, 22 nt, Human
ccacugucuuuuccaggcugaa

SEQ ID NO: 1114174 - RNA, 22 nt, Human
agcugcucugauaaaccuacuu

SEQ ID NO: 1114175 - RNA, 22 nt, Human
gaaggaaaggucucaugccuuu

SEQ ID NO: 1114176 - RNA, 22 nt, Human
ugcacacaaaugugaacgugcc

SEQ ID NO: 1114177 - RNA, 22 nt, Human
ggcucugcugguaagaugccuc

SEQ ID NO: 1114178 - RNA, 21 nt, Human
agcucagccgggcacaguggc

SEQ ID NO: 1114179 - RNA, 22 nt, Human
guaagagcacugucuccugcug

SEQ ID NO: 1114180 - RNA, 22 nt, Human
cugggagagaagcgaagcuggg

SEQ ID NO: 1114181 - RNA, 22 nt, Human
cagaaagaccugggcucaagag

SEQ ID NO: 1114182 - RNA, 21 nt, Human
aggcugcuggcucaggguccu

SEQ ID NO: 1114183 - RNA, 22 nt, Human
cagcacuggggggauucggagc

SEQ ID NO: 1114184 - RNA, 22 nt, Human
agcagccacagcagaucugagu

SEQ ID NO: 1114185 - RNA, 22 nt, Human
augccagucaaagaagaugaca

SEQ ID NO: 1114186 - RNA, 22 nt, Human
agggcagaaaccaccuugaugg

SEQ ID NO: 1114187 - RNA, 22 nt, Human
cuggagcuaggaaguccaagau

SEQ ID NO: 1114188 - RNA, 22 nt, Human
aucccuggacggcgccucccca

SEQ ID NO: 1114189 - RNA, 22 nt, Human
acccagagcugggcuuggcaaa

SEQ ID NO: 1114190 - RNA, 22 nt, Human
aaaguguugggauuacaggugu

SEQ ID NO: 1114191 - RNA, 22 nt, Human
aggucacacaacugucagaggc

SEQ ID NO: 1114192 - RNA, 22 nt, Human
aaaugcauuuuuaauuagaccc

SEQ ID NO: 1114193 - RNA, 22 nt, Human
uuugaguugcuuauuuaauagg

SEQ ID NO: 1114194 - RNA, 22 nt, Human
ggccccaggaccuccacggucc

SEQ ID NO: 1114195 - RNA, 22 nt, Human
uuuccucuuauacaguguuuau

SEQ ID NO: 1114196 - RNA, 22 nt, Human
ucagcagggaggcucugugccc

SEQ ID NO: 1114197 - RNA, 22 nt, Human
uugaacagcuguuacauuguua

SEQ ID NO: 1114198 - RNA, 22 nt, Human
uggcucucagcucccagcagcc

SEQ ID NO: 1114199 - RNA, 23 nt, Human
ccugcagcugcuggggcuccacc

SEQ ID NO: 1114200 - RNA, 22 nt, Human
gggcuggcaucaguugccgaga

SEQ ID NO: 1114201 - RNA, 22 nt, Human
caggcaggagccagggauucca

SEQ ID NO: 1114202 - RNA, 22 nt, Human
acugaaggguaaugugggagcc

SEQ ID NO: 1114203 - RNA, 18 nt, Human
accugccuguucuucucu

SEQ ID NO: 1114204 - RNA, 22 nt, Human
cuguuuaucuaggaguugcagg

SEQ ID NO: 1114205 - RNA, 22 nt, Human
agcuucuggaagccuggcagca

SEQ ID NO: 1114206 - RNA, 19 nt, Human
uacauuuguguacacuugu

SEQ ID NO: 1114207 - RNA, 22 nt, Human
ugggcucugcaucagugcccau

SEQ ID NO: 1114208 - RNA, 22 nt, Human
caggaaaaaugccaggagucag

SEQ ID NO: 1114209 - RNA, 22 nt, Human
agaaguaggcagggcuguauca

SEQ ID NO: 1114210 - RNA, 22 nt, Human
cuggagcugcuguccuugggug

SEQ ID NO: 1114211 - RNA, 22 nt, Human
gggcuccagcccgggaccaggu

SEQ ID NO: 1114212 - RNA, 22 nt, Human
ggggcagaguagcuggggugug

SEQ ID NO: 1114213 - RNA, 22 nt, Human
guccucagucaguuuggugggg

SEQ ID NO: 1114214 - RNA, 22 nt, Human
caguggccugagccaggcuucc

SEQ ID NO: 1114215 - RNA, 22 nt, Human
ugcagucuuccagcugcacaaa

SEQ ID NO: 1114216 - RNA, 22 nt, Human
cagugccucuuaagugucaccc

SEQ ID NO: 1114217 - RNA, 22 nt, Human
ucacaugcuugaggaaagaaaa

SEQ ID NO: 1114218 - RNA, 22 nt, Human
cagaggaggccaccgcauaggc

SEQ ID NO: 1114219 - RNA, 22 nt, Human
gccuuggccaacaccuugcaaa

SEQ ID NO: 1114220 - RNA, 22 nt, Human
uucuaguguccuuggacuugcu

SEQ ID NO: 1114221 - RNA, 22 nt, Human
aaaauacacauacuaggggaaa

SEQ ID NO: 1114222 - RNA, 22 nt, Human
guggagacgggacagaagcuaa

SEQ ID NO: 1114223 - RNA, 22 nt, Human
uggagcagagaugguggccuuc

SEQ ID NO: 1114224 - RNA, 22 nt, Human
ugcaggagcagagauggcugga

SEQ ID NO: 1114225 - RNA, 22 nt, Human
ucuggcagggguucugcacuug

SEQ ID NO: 1114226 - RNA, 22 nt, Human
ugagccugcugucgcuggaccc

SEQ ID NO: 1114227 - RNA, 22 nt, Human
gagggcugcaaugagacagaga

SEQ ID NO: 1114228 - RNA, 22 nt, Human
uggcucaggccacuucuuuuau

SEQ ID NO: 1114229 - RNA, 18 nt, Human
acauuucuccuucugacc

SEQ ID NO: 1114230 - RNA, 22 nt, Human
acauuucugcaucucagagcua

SEQ ID NO: 1114231 - RNA, 22 nt, Human
uccugcagccacugcaggcaga

SEQ ID NO: 1114232 - RNA, 22 nt, Human
caccaucagcagcaggugucaa

SEQ ID NO: 1114233 - RNA, 22 nt, Human
uggagccaaggccaguucucag

SEQ ID NO: 1114234 - RNA, 22 nt, Human
uccuguaguugcuaaguuuguu

SEQ ID NO: 1114235 - RNA, 22 nt, Human
cugcccuguuuggacagcccgg

SEQ ID NO: 1114236 - RNA, 22 nt, Human
aucagcaagcauuuauugagug

SEQ ID NO: 1114237 - RNA, 22 nt, Human
auuauguagcuaaaaauugugu

SEQ ID NO: 1114238 - RNA, 22 nt, Human
gccuggagccucagcaaggagg

SEQ ID NO: 1114239 - RNA, 22 nt, Human
uucagaaagugaaucuuguuau

SEQ ID NO: 1114240 - RNA, 23 nt, Human
uugcuucugugcaauucaguacu

SEQ ID NO: 1114241 - RNA, 22 nt, Human
ccugucugcaugaucccugcca

SEQ ID NO: 1114242 - RNA, 22 nt, Human
uggcagcagacaaaaggccauu

SEQ ID NO: 1114243 - RNA, 22 nt, Human
ugccagugggugugcagagacu

SEQ ID NO: 1114244 - RNA, 17 nt, Human
ucaggauccaggguucu

SEQ ID NO: 1114245 - RNA, 22 nt, Human
aggaguguggccagggcucugg

SEQ ID NO: 1114246 - RNA, 22 nt, Human
uuucagugcuucuguuuaccgg

SEQ ID NO: 1114247 - RNA, 19 nt, Human
uccucaggggcucacagac

SEQ ID NO: 1114248 - RNA, 19 nt, Human
auuccucaaggacagaaau

SEQ ID NO: 1114249 - RNA, 22 nt, Human
gcaggagcucguuuccaggcug

SEQ ID NO: 1114250 - RNA, 22 nt, Human
uguaugcaccauuguauuaccu

SEQ ID NO: 1114251 - RNA, 22 nt, Human
uuauuuaauuuucucacucaga

SEQ ID NO: 1114252 - RNA, 20 nt, Human
aagcagaagcugcucucagc

SEQ ID NO: 1114253 - RNA, 22 nt, Human
cccagagccucauucuguuggg

SEQ ID NO: 1114254 - RNA, 22 nt, Human
gucaaacaaauuaacauaucca

SEQ ID NO: 1114255 - RNA, 22 nt, Human
ccagcagcuguggcuuugccuc

SEQ ID NO: 1114256 - RNA, 22 nt, Human
cacagaguggaggcuuggccug

SEQ ID NO: 1114257 - RNA, 22 nt, Human
aggccuguuccuuccugggcac

SEQ ID NO: 1114258 - RNA, 22 nt, Human
agcagggccucuggcacugguc

SEQ ID NO: 1114259 - RNA, 22 nt, Human
cugggguggugcaggccucaug

SEQ ID NO: 1114260 - RNA, 22 nt, Human
gagagcugggggacuguggaug

SEQ ID NO: 1114261 - RNA, 22 nt, Human
aaguguguauuguuuaugcugc

SEQ ID NO: 1114262 - RNA, 22 nt, Human
guguggcugccagccaagaggc

SEQ ID NO: 1114263 - RNA, 22 nt, Human
caggguuucaccauguuagcag

SEQ ID NO: 1114264 - RNA, 22 nt, Human
ccaggaggcggaagguacagug

SEQ ID NO: 1114265 - RNA, 19 nt, Human
cccucaggucugagcaguc

SEQ ID NO: 1114266 - RNA, 22 nt, Human
ccaaaguccauaguuuacauaa

SEQ ID NO: 1114267 - RNA, 22 nt, Human
gaaaagcuaggccaguucagcu

SEQ ID NO: 1114268 - RNA, 22 nt, Human
aggcuccuuguucaucauccau

SEQ ID NO: 1114269 - RNA, 22 nt, Human
ggcagcugggucacaccgaucu

SEQ ID NO: 1114270 - RNA, 22 nt, Human
cuccuggacauggagcggagga

SEQ ID NO: 1114271 - RNA, 22 nt, Human
cuggcaggagcauucacagagg

SEQ ID NO: 1114272 - RNA, 22 nt, Human
ugcaggggcuugucugggccug

SEQ ID NO: 1114273 - RNA, 22 nt, Human
aagaaaugcagaaaugugcugg

SEQ ID NO: 1114274 - RNA, 22 nt, Human
gaaggaagugcucauacuaguu

SEQ ID NO: 1114275 - RNA, 17 nt, Human
cccugccaccaggaagc

SEQ ID NO: 1114276 - RNA, 20 nt, Human
ccagucccugagcaccaggg

SEQ ID NO: 1114277 - RNA, 22 nt, Human
gcugucucauacaaggcccugc

SEQ ID NO: 1114278 - RNA, 22 nt, Human
agaaauguuguggguuuuguua

SEQ ID NO: 1114279 - RNA, 22 nt, Human
ucucuggaagcgcagaucuguu

SEQ ID NO: 1114280 - RNA, 22 nt, Human
ggagucagccugucagagugua

SEQ ID NO: 1114281 - RNA, 22 nt, Human
cuccuuccugccccagugauaa

SEQ ID NO: 1114282 - RNA, 22 nt, Human
uggcuggcuagugggcaggauu

SEQ ID NO: 1114283 - RNA, 22 nt, Human
gggcugcugcccaggaggcacc

SEQ ID NO: 1114284 - RNA, 22 nt, Human
auuguaucuugucauuaugcau

SEQ ID NO: 1114285 - RNA, 22 nt, Human
cugccuggucucaggcaugggg

SEQ ID NO: 1114286 - RNA, 22 nt, Human
caggccuggcccccggcacacc

SEQ ID NO: 1114287 - RNA, 22 nt, Human
acauuucuuagccuaguuccag

SEQ ID NO: 1114288 - RNA, 22 nt, Human
gcuggccaggugcuuugguucu

SEQ ID NO: 1114289 - RNA, 22 nt, Human
agacaacaccaaaugcuagugu

SEQ ID NO: 1114290 - RNA, 23 nt, Human
aggagccaggaaccagcuucccc

SEQ ID NO: 1114291 - RNA, 22 nt, Human
cugggaggcggagguuguagug

SEQ ID NO: 1114292 - RNA, 22 nt, Human
cuucagaggggacucaaaguca

SEQ ID NO: 1114293 - RNA, 22 nt, Human
guccucuguagggcugggccac

SEQ ID NO: 1114294 - RNA, 19 nt, Human
auaaggcaauuggauuugg

SEQ ID NO: 1114295 - RNA, 22 nt, Human
cacuguguaagaagaugggcuu

SEQ ID NO: 1114296 - RNA, 23 nt, Human
gccucagagaaacagcugcacac

SEQ ID NO: 1114297 - RNA, 21 nt, Human
aggagggcacaaggccaggaa

SEQ ID NO: 1114298 - RNA, 22 nt, Human
ccauggcauuuuaugugucuua

SEQ ID NO: 1114299 - RNA, 22 nt, Human
caggggcaggugugagaucauc

SEQ ID NO: 1114300 - RNA, 22 nt, Human
cuaucuuucgauucuagcuuaa

SEQ ID NO: 1114301 - RNA, 22 nt, Human
ucuuugcaaauguuauuaucuu

SEQ ID NO: 1114302 - RNA, 22 nt, Human
cgcugccaggucaccaggggua

SEQ ID NO: 1114303 - RNA, 22 nt, Human
ugcagggccgcuggaggucaug

SEQ ID NO: 1114304 - RNA, 22 nt, Human
agcaaaguagcugcuguucuua

SEQ ID NO: 1114305 - RNA, 22 nt, Human
cuggagcccaggccuggugucu

SEQ ID NO: 1114306 - RNA, 22 nt, Human
gaggcaugucuggccuguccca

SEQ ID NO: 1114307 - RNA, 22 nt, Human
cuuaacagagagaaguguugcu

SEQ ID NO: 1114308 - RNA, 22 nt, Human
aggaccugacuggcuccugcuu

SEQ ID NO: 1114309 - RNA, 22 nt, Human
ccauaagguugaaaacuguaca

SEQ ID NO: 1114310 - RNA, 22 nt, Human
caagugucuauaucagugcuug

SEQ ID NO: 1114311 - RNA, 23 nt, Human
ggccucuguguucugcccacaug

SEQ ID NO: 1114312 - RNA, 22 nt, Human
auugacaaggaaacuauaccag

SEQ ID NO: 1114313 - RNA, 22 nt, Human
acucugccaucccaggugcugu

SEQ ID NO: 1114314 - RNA, 22 nt, Human
uggggguguccuggugcacaca

SEQ ID NO: 1114315 - RNA, 22 nt, Human
aaggcccuggccccagcuucuu

SEQ ID NO: 1114316 - RNA, 22 nt, Human
cuuacauuuaaucaugugucau

SEQ ID NO: 1114317 - RNA, 22 nt, Human
agggugcagaaggagccuagga

SEQ ID NO: 1114318 - RNA, 22 nt, Human
acuggacagaggaaauauggag

SEQ ID NO: 1114319 - RNA, 22 nt, Human
uggaggaaucagggcuuaggcu

SEQ ID NO: 1114320 - RNA, 22 nt, Human
aggcucugugacaaucaagcug

SEQ ID NO: 1114321 - RNA, 22 nt, Human
aaaguucugggggagaagaacg

SEQ ID NO: 1114322 - RNA, 22 nt, Human
cuuguggcccauggcuuccugc

SEQ ID NO: 1114323 - RNA, 18 nt, Human
gcugagguggugucagag

SEQ ID NO: 1114324 - RNA, 21 nt, Human
ucauuuuuauugcuaccuugc

SEQ ID NO: 1114325 - RNA, 22 nt, Human
cacugaaucucaaggggagggu

SEQ ID NO: 1114326 - RNA, 22 nt, Human
gggcucuggaaggugcaccaug

SEQ ID NO: 1114327 - RNA, 23 nt, Human
ugggggugcacgggccacaucuu

SEQ ID NO: 1114328 - RNA, 22 nt, Human
ugccucugcugcuguggcauca

SEQ ID NO: 1114329 - RNA, 22 nt, Human
cugugggcugaaagugcucccg

SEQ ID NO: 1114330 - RNA, 22 nt, Human
gccagguggcugagcagcugca

SEQ ID NO: 1114331 - RNA, 22 nt, Human
agcccagcagaaaguccagccu

SEQ ID NO: 1114332 - RNA, 22 nt, Human
ugcagggcacacgcacgggugu

SEQ ID NO: 1114333 - RNA, 22 nt, Human
uaaaugugucuauggacccgcc

SEQ ID NO: 1114334 - RNA, 22 nt, Human
uggagcaggugcucaggguaau

SEQ ID NO: 1114335 - RNA, 22 nt, Human
ccaguuuuuccagugcuuucug

SEQ ID NO: 1114336 - RNA, 22 nt, Human
aggugagguuugggagguguca

SEQ ID NO: 1114337 - RNA, 18 nt, Human
uccuccuuuggccuuuuc

SEQ ID NO: 1114338 - RNA, 22 nt, Human
ucagagucauugcaaguagaag

SEQ ID NO: 1114339 - RNA, 22 nt, Human
acccucccauuuccauguagca

SEQ ID NO: 1114340 - RNA, 22 nt, Human
agagaagagcaaugauaaauuu

SEQ ID NO: 1114341 - RNA, 22 nt, Human
ggcugccuacuuucccagaguu

SEQ ID NO: 1114342 - RNA, 22 nt, Human
ugaggaggucagagucuggcug

SEQ ID NO: 1114343 - RNA, 22 nt, Human
agugacugggcagggcagggcc

SEQ ID NO: 1114344 - RNA, 22 nt, Human
ggccugagcucuggggaggcaa

SEQ ID NO: 1114345 - RNA, 22 nt, Human
uaagacaugguugaucuagugu

SEQ ID NO: 1114346 - RNA, 21 nt, Human
gcucucugcaugguggcucag

SEQ ID NO: 1114347 - RNA, 22 nt, Human
ugcagaagaaaacagcugugug

SEQ ID NO: 1114348 - RNA, 22 nt, Human
ccugugcauccgguggucauug

SEQ ID NO: 1114349 - RNA, 22 nt, Human
ugauuaacugucuauuaaucau

SEQ ID NO: 1114350 - RNA, 22 nt, Human
cugagggcaugaacauuccaua

SEQ ID NO: 1114351 - RNA, 22 nt, Human
gagcagcuagauaaagcccuuc

SEQ ID NO: 1114352 - RNA, 22 nt, Human
aaaauguaaagcuugaguguag

SEQ ID NO: 1114353 - RNA, 22 nt, Human
caugcuuucuguccaaauguua

SEQ ID NO: 1114354 - RNA, 22 nt, Human
aaaugcaauuguauguacucca

SEQ ID NO: 1114355 - RNA, 22 nt, Human
augguuuguaacccaauacucc

SEQ ID NO: 1114356 - RNA, 21 nt, Human
uggagcugccacuuguccucc

SEQ ID NO: 1114357 - RNA, 22 nt, Human
agucccagcuacucaagaggcu

SEQ ID NO: 1114358 - RNA, 22 nt, Human
ugucucugcuuuccuugcaggg

SEQ ID NO: 1114359 - RNA, 22 nt, Human
uuuguuuucaaugugucauuca

SEQ ID NO: 1114360 - RNA, 22 nt, Human
cauguacaguuuuucuguccug

SEQ ID NO: 1114361 - RNA, 22 nt, Human
ugaggcaggagguugagaacug

SEQ ID NO: 1114362 - RNA, 22 nt, Human
gccuggaggaauguagcugagg

SEQ ID NO: 1114363 - RNA, 23 nt, Human
gcauugucuccccacuucugggc

SEQ ID NO: 1114364 - RNA, 22 nt, Human
gcucugggugaacuuggagcaa

SEQ ID NO: 1114365 - RNA, 22 nt, Human
ucugccuugagguccucagcuc

SEQ ID NO: 1114366 - RNA, 22 nt, Human
aggcagagaaaaaccagauaug

SEQ ID NO: 1114367 - RNA, 22 nt, Human
ugcagccaucuuucuuggagga

SEQ ID NO: 1114368 - RNA, 22 nt, Human
gccugcagaggugcugcuagcu

SEQ ID NO: 1114369 - RNA, 22 nt, Human
cacagggccuggggcagcugcu

SEQ ID NO: 1114370 - RNA, 22 nt, Human
ugucacauaauuuaucuguagg

SEQ ID NO: 1114371 - RNA, 22 nt, Human
guggguggaggcgucgagggca

SEQ ID NO: 1114372 - RNA, 22 nt, Human
aagggcagagggaaucccacau

SEQ ID NO: 1114373 - RNA, 22 nt, Human
cagguggggcgcccucaggcag

SEQ ID NO: 1114374 - RNA, 22 nt, Human
ucucaccaaagccuugaccaua

SEQ ID NO: 1114375 - RNA, 22 nt, Human
ugcuuaauauugugauguaaua

SEQ ID NO: 1114376 - RNA, 22 nt, Human
ggcugccauaacagaguaccac

SEQ ID NO: 1114377 - RNA, 19 nt, Human
gccugggaugggcagaacu

SEQ ID NO: 1114378 - RNA, 22 nt, Human
ccaguugguuucaaugggacag

SEQ ID NO: 1114379 - RNA, 22 nt, Human
uugggcugaaguagagggcaga

SEQ ID NO: 1114380 - RNA, 22 nt, Human
ugugaaagucaaauuaauugaa

SEQ ID NO: 1114381 - RNA, 22 nt, Human
aaguucaagucuccugaguaua

SEQ ID NO: 1114382 - RNA, 22 nt, Human
ugggcagacauugaguuuguuc

SEQ ID NO: 1114383 - RNA, 22 nt, Human
ggcagaggaaggaugaauucac

SEQ ID NO: 1114384 - RNA, 22 nt, Human
gccaggcuggugcaaggauauu

SEQ ID NO: 1114385 - RNA, 22 nt, Human
aagagagagcauucuucuguua

SEQ ID NO: 1114386 - RNA, 22 nt, Human
cagaauuugaaguaauauucca

SEQ ID NO: 1114387 - RNA, 22 nt, Human
augcuauacucaaagaaauuca

SEQ ID NO: 1114388 - RNA, 22 nt, Human
gaaaucugcuucuugcauagua

SEQ ID NO: 1114389 - RNA, 22 nt, Human
acugcaggagacacagcugcug

SEQ ID NO: 1114390 - RNA, 22 nt, Human
uggagcaggacugcugcccuca

SEQ ID NO: 1114391 - RNA, 22 nt, Human
gccccucccagucaggagcacu

SEQ ID NO: 1114392 - RNA, 23 nt, Human
ucagaaugcacugaauuuacccu

SEQ ID NO: 1114393 - RNA, 22 nt, Human
ucaguuuucucauuuaugagau

SEQ ID NO: 1114394 - RNA, 22 nt, Human
acaaagcuagagaagagaauug

SEQ ID NO: 1114395 - RNA, 22 nt, Human
ugagcuucaaaauaugugaauc

SEQ ID NO: 1114396 - RNA, 22 nt, Human
acauuucuugaugccucuguga

SEQ ID NO: 1114397 - RNA, 22 nt, Human
ggucccaggcugcgggcuggug

SEQ ID NO: 1114398 - RNA, 17 nt, Human
cucuccuuccucugagg

SEQ ID NO: 1114399 - RNA, 22 nt, Human
cagggugccaaagaacaaauau

SEQ ID NO: 1114400 - RNA, 20 nt, Human
uggagccacagucagguucc

SEQ ID NO: 1114401 - RNA, 22 nt, Human
gggugacauuucccaaugagcc

SEQ ID NO: 1114402 - RNA, 22 nt, Human
acaggcugccuaccaaguauca

SEQ ID NO: 1114403 - RNA, 22 nt, Human
caccagggcucugagcucugaa

SEQ ID NO: 1114404 - RNA, 22 nt, Human
uuaugacauaugaguacaagua

SEQ ID NO: 1114405 - RNA, 22 nt, Human
gcagcugccccgacugugaguc

SEQ ID NO: 1114406 - RNA, 22 nt, Human
uccugagaugagacagugcugc

SEQ ID NO: 1114407 - RNA, 22 nt, Human
gcacccagccagcaucucagag

SEQ ID NO: 1114408 - RNA, 22 nt, Human
agccugagugcuuaggacuguu

SEQ ID NO: 1114409 - RNA, 22 nt, Human
gguggcaggcccugagcauccc

SEQ ID NO: 1114410 - RNA, 22 nt, Human
ugugacaugugucaucuuuucu

SEQ ID NO: 1114411 - RNA, 22 nt, Human
cagggacauugguggccagguu

SEQ ID NO: 1114412 - RNA, 22 nt, Human
uuugcauuuugauaagaucacu

SEQ ID NO: 1114413 - RNA, 22 nt, Human
uccauguggccagacacuggca

SEQ ID NO: 1114414 - RNA, 19 nt, Human
gaguuauugccagggcaug

SEQ ID NO: 1114415 - RNA, 22 nt, Human
cccuguccuggaugggagcacu

SEQ ID NO: 1114416 - RNA, 22 nt, Human
agaacagaugugggcagaccug

SEQ ID NO: 1114417 - RNA, 22 nt, Human
gagcagcugguaggugaaccca

SEQ ID NO: 1114418 - RNA, 22 nt, Human
gcucagagcuugaaguuccacu

SEQ ID NO: 1114419 - RNA, 22 nt, Human
ggucagguuuuuaggagugacc

SEQ ID NO: 1114420 - RNA, 22 nt, Human
ggaagaagggucauuggcagcc

SEQ ID NO: 1114421 - RNA, 22 nt, Human
cugggccucauccucagaguuu

SEQ ID NO: 1114422 - RNA, 22 nt, Human
ugcucugcaagcaggagcaaga

SEQ ID NO: 1114423 - RNA, 22 nt, Human
acaugcauacaagcacauguag

SEQ ID NO: 1114424 - RNA, 22 nt, Human
acauuucucauucuccccuaac

SEQ ID NO: 1114425 - RNA, 22 nt, Human
gagcugccuguugcauagcaac

SEQ ID NO: 1114426 - RNA, 22 nt, Human
ugucccuggaacuauggcucca

SEQ ID NO: 1114427 - RNA, 22 nt, Human
ccagucacuggaaaaugggaau

SEQ ID NO: 1114428 - RNA, 20 nt, Human
uggggccuguuucugugguu

SEQ ID NO: 1114429 - RNA, 22 nt, Human
aaaugguguuucuaaugcuaga

SEQ ID NO: 1114430 - RNA, 22 nt, Human
cugccagcucaaagcgcagcua

SEQ ID NO: 1114431 - RNA, 22 nt, Human
gagagcugggcuuugggugaag

SEQ ID NO: 1114432 - RNA, 22 nt, Human
gggccucucccuucucacgcau

SEQ ID NO: 1114433 - RNA, 22 nt, Human
aucuggcuauuucuggucgggg

SEQ ID NO: 1114434 - RNA, 22 nt, Human
agggcuggcaagggauugaaau

SEQ ID NO: 1114435 - RNA, 22 nt, Human
aagggcaggugggcauuucugg

SEQ ID NO: 1114436 - RNA, 22 nt, Human
ucagggcagaauccaaagaauu

SEQ ID NO: 1114437 - RNA, 22 nt, Human
uuccauaacugaccgaaugcau

SEQ ID NO: 1114438 - RNA, 22 nt, Human
aucuacaggcugaggugggagg

SEQ ID NO: 1114439 - RNA, 22 nt, Human
aagaguuaagcaacagauacca

SEQ ID NO: 1114440 - RNA, 22 nt, Human
acagggucaagggugcuacaag

SEQ ID NO: 1114441 - RNA, 22 nt, Human
aguuuuucugcuggucucacua

SEQ ID NO: 1114442 - RNA, 22 nt, Human
gaaggagagagacaucgucccu

SEQ ID NO: 1114443 - RNA, 22 nt, Human
cauguaaaacacucagaacagu

SEQ ID NO: 1114444 - RNA, 22 nt, Human
aaauucuuucauggcuaauaag

SEQ ID NO: 1114445 - RNA, 22 nt, Human
ugcuauugugaacagugccaca

SEQ ID NO: 1114446 - RNA, 22 nt, Human
caggguggggcuggcuaucaaa

SEQ ID NO: 1114447 - RNA, 22 nt, Human
uccugcagagccgcccucaggu

SEQ ID NO: 1114448 - RNA, 22 nt, Human
uuauugccugauugaggucauu

SEQ ID NO: 1114449 - RNA, 22 nt, Human
gcugcagcuuuaggauccagug

SEQ ID NO: 1114450 - RNA, 22 nt, Human
ccugggaggcggagguugcagg

SEQ ID NO: 1114451 - RNA, 22 nt, Human
uggguggaauaaaucaguucug

SEQ ID NO: 1114452 - RNA, 22 nt, Human
gcccauggcagaacugugagca

SEQ ID NO: 1114453 - RNA, 22 nt, Human
gugggcuucuguuagggaggcu

SEQ ID NO: 1114454 - RNA, 22 nt, Human
ccugggaggcuguuuccagccu

SEQ ID NO: 1114455 - RNA, 22 nt, Human
ccaucuccacugucccugucaa

SEQ ID NO: 1114456 - RNA, 22 nt, Human
auguacaaaaugccacugaauu

SEQ ID NO: 1114457 - RNA, 22 nt, Human
ucuuccucucuaauugaucaga

SEQ ID NO: 1114458 - RNA, 22 nt, Human
gucacuggggccacaugcagaa

SEQ ID NO: 1114459 - RNA, 22 nt, Human
ggccugagaaccauggggccaa

SEQ ID NO: 1114460 - RNA, 22 nt, Human
gcugccugggcaggaggcgcug

SEQ ID NO: 1114461 - RNA, 22 nt, Human
ugcaggugccucuugagcuugu

SEQ ID NO: 1114462 - RNA, 22 nt, Human
uuggaggcaaugggaaggaggc

SEQ ID NO: 1114463 - RNA, 22 nt, Human
guggcucuaggugagcauggag

SEQ ID NO: 1114464 - RNA, 22 nt, Human
agagcugggacuuggacucaau

SEQ ID NO: 1114465 - RNA, 22 nt, Human
caagccucagaaucuucuccau

SEQ ID NO: 1114466 - RNA, 21 nt, Human
ccucugcucgggcaugcguuu

SEQ ID NO: 1114467 - RNA, 22 nt, Human
auccuugagccuuaucuuuugu

SEQ ID NO: 1114468 - RNA, 22 nt, Human
gccuugcuuugcuucuggacag

SEQ ID NO: 1114469 - RNA, 22 nt, Human
ugcaugcauaaauguacacaca

SEQ ID NO: 1114470 - RNA, 22 nt, Human
cagagccacugucugccaggca

SEQ ID NO: 1114471 - RNA, 22 nt, Human
auuucuuuucaagagggugcuu

SEQ ID NO: 1114472 - RNA, 22 nt, Human
uccaggagaggccugaccaggu

SEQ ID NO: 1114473 - RNA, 22 nt, Human
ugucucugauaaguaguucagu

SEQ ID NO: 1114474 - RNA, 20 nt, Human
aaagucuuaugguuaauuuu

SEQ ID NO: 1114475 - RNA, 22 nt, Human
aagggacuuugucagcuuucca

SEQ ID NO: 1114476 - RNA, 22 nt, Human
cugagccuuauucaccagcccu

SEQ ID NO: 1114477 - RNA, 22 nt, Human
gccagcaguccugcugugugcc

SEQ ID NO: 1114478 - RNA, 22 nt, Human
ggcugcagcggauuggggauug

SEQ ID NO: 1114479 - RNA, 22 nt, Human
cauggcaggaggcugcuggcag

SEQ ID NO: 1114480 - RNA, 22 nt, Human
uuucuucugagaucagggagaa

SEQ ID NO: 1114481 - RNA, 22 nt, Human
gcaucuuucuguccauucagca

SEQ ID NO: 1114482 - RNA, 22 nt, Human
agaauuguugggguaauaaaag

SEQ ID NO: 1114483 - RNA, 22 nt, Human
ccuuccuggcuguccgccugau

SEQ ID NO: 1114484 - RNA, 22 nt, Human
ccugcagguccccggaugcgca

SEQ ID NO: 1114485 - RNA, 22 nt, Human
cccagcucaucaggagccgccc

SEQ ID NO: 1114486 - RNA, 22 nt, Human
cccaggcucccaggugggacaa

SEQ ID NO: 1114487 - RNA, 22 nt, Human
ucucagaggcccgacguucucc

SEQ ID NO: 1114488 - RNA, 22 nt, Human
cacugaagccugggaguaagac

SEQ ID NO: 1114489 - RNA, 22 nt, Human
acauuucuccuugcaggaguca

SEQ ID NO: 1114490 - RNA, 22 nt, Human
agcagcaggcuguguggacuga

SEQ ID NO: 1114491 - RNA, 22 nt, Human
cuuagaaaucgaacucagguua

SEQ ID NO: 1114492 - RNA, 21 nt, Human
uggcucugcucagagcagucc

SEQ ID NO: 1114493 - RNA, 20 nt, Human
uugcagcagugaggugaagg

SEQ ID NO: 1114494 - RNA, 22 nt, Human
gagcuuggugaugccuccuggu

SEQ ID NO: 1114495 - RNA, 22 nt, Human
cuggccuucagacucggacuga

SEQ ID NO: 1114496 - RNA, 19 nt, Human
ggaagagaggaaaggugga

SEQ ID NO: 1114497 - RNA, 22 nt, Human
ccagcucugcagggccuggggu

SEQ ID NO: 1114498 - RNA, 22 nt, Human
accaggcuggagugcaguggcg

SEQ ID NO: 1114499 - RNA, 22 nt, Human
cacugccugugagcugugugcc

SEQ ID NO: 1114500 - RNA, 19 nt, Human
aggcagcacccaguccuug

SEQ ID NO: 1114501 - RNA, 22 nt, Human
aguaggaggcgggagcaugaag

SEQ ID NO: 1114502 - RNA, 22 nt, Human
uguggccuccuguuccugggua

SEQ ID NO: 1114503 - RNA, 22 nt, Human
uccugcaggccuguucccagua

SEQ ID NO: 1114504 - RNA, 23 nt, Human
gagguacagcaccagugaauagg

SEQ ID NO: 1114505 - RNA, 22 nt, Human
uagcugucagcaaucaaguggu

SEQ ID NO: 1114506 - RNA, 22 nt, Human
aucuggcucaccuggguaaaua

SEQ ID NO: 1114507 - RNA, 18 nt, Human
cccagcuccacuucccuc

SEQ ID NO: 1114508 - RNA, 22 nt, Human
uccagggaaggugugaggcugg

SEQ ID NO: 1114509 - RNA, 22 nt, Human
agaugcugucacacacacuguu

SEQ ID NO: 1114510 - RNA, 22 nt, Human
caaugugucaggaaaagggcca

SEQ ID NO: 1114511 - RNA, 23 nt, Human
cucccuggaguuucuggaagaug

SEQ ID NO: 1114512 - RNA, 22 nt, Human
uguuuaagcugaugagguaucg

SEQ ID NO: 1114513 - RNA, 22 nt, Human
ggggcugggauuugaacccagg

SEQ ID NO: 1114514 - RNA, 22 nt, Human
uucauuccuucccuaagcaacu

SEQ ID NO: 1114515 - RNA, 22 nt, Human
cccagcuccaagggacagcgaa

SEQ ID NO: 1114516 - RNA, 22 nt, Human
ccuggcacgaagggcugagguu

SEQ ID NO: 1114517 - RNA, 22 nt, Human
gccaccagggggcuccagugag

SEQ ID NO: 1114518 - RNA, 22 nt, Human
auacauuagcucauaugauuaa

SEQ ID NO: 1114519 - RNA, 20 nt, Human
cuuuggcaaugagaacaggg

SEQ ID NO: 1114520 - RNA, 22 nt, Human
ccagcagacacacaggcguggg

SEQ ID NO: 1114521 - RNA, 22 nt, Human
agccagggagguggagguugca

SEQ ID NO: 1114522 - RNA, 22 nt, Human
uggcuggcaguaggcuaguggc

SEQ ID NO: 1114523 - RNA, 22 nt, Human
acagggcccuugccagcacaag

SEQ ID NO: 1114524 - RNA, 22 nt, Human
ugcugucccuaagucucuucaa

SEQ ID NO: 1114525 - RNA, 22 nt, Human
ugaggccagucucaucacaggc

SEQ ID NO: 1114526 - RNA, 22 nt, Human
acugcuuacaaaaggaaagaau

SEQ ID NO: 1114527 - RNA, 22 nt, Human
ccuggcaggcuggggacagugc

SEQ ID NO: 1114528 - RNA, 23 nt, Human
ucacagggcacuggcugggguug

SEQ ID NO: 1114529 - RNA, 22 nt, Human
aagccuuccugagugcaaggcc

SEQ ID NO: 1114530 - RNA, 22 nt, Human
uugucuuaaauggauggacaau

SEQ ID NO: 1114531 - RNA, 22 nt, Human
auaugcacacucugcccacaga

SEQ ID NO: 1114532 - RNA, 22 nt, Human
aagggcugaaagaccuugggca

SEQ ID NO: 1114533 - RNA, 22 nt, Human
cagagguagaaggcaugcagug

SEQ ID NO: 1114534 - RNA, 22 nt, Human
ccaggccuuucuucuuggucug

SEQ ID NO: 1114535 - RNA, 22 nt, Human
caggcccugggcaggaucagcc

SEQ ID NO: 1114536 - RNA, 22 nt, Human
cagcugccacaggacuuucuga

SEQ ID NO: 1114537 - RNA, 22 nt, Human
aaaucaguucucccuuucuuca

SEQ ID NO: 1114538 - RNA, 22 nt, Human
ugcagcuguaacagaggccuca

SEQ ID NO: 1114539 - RNA, 22 nt, Human
gucagugucuuaacagagauua

SEQ ID NO: 1114540 - RNA, 22 nt, Human
aucagcaagcaugguuaggugu

SEQ ID NO: 1114541 - RNA, 22 nt, Human
uccugccuaccuugcggaggug

SEQ ID NO: 1114542 - RNA, 22 nt, Human
ugcacacaguucucaggaaaga

SEQ ID NO: 1114543 - RNA, 22 nt, Human
cagguccccuccccuaccaggc

SEQ ID NO: 1114544 - RNA, 22 nt, Human
augucuuuauaaauguauaaug

SEQ ID NO: 1114545 - RNA, 22 nt, Human
ggaggccacgguuuagcaccga

SEQ ID NO: 1114546 - RNA, 22 nt, Human
uaaguucaaugaacucaguucu

SEQ ID NO: 1114547 - RNA, 22 nt, Human
ucugguaaccuuuaucccuccu

SEQ ID NO: 1114548 - RNA, 22 nt, Human
ugcccaaguguuuggcugaguc

SEQ ID NO: 1114549 - RNA, 22 nt, Human
ggcccaucucuugcucuggguu

SEQ ID NO: 1114550 - RNA, 22 nt, Human
cacugcuuucacaguuuguucc

SEQ ID NO: 1114551 - RNA, 22 nt, Human
uagcugcccaucuuuccuuuag

SEQ ID NO: 1114552 - RNA, 22 nt, Human
cauugcacuucugcuuuuccuc

SEQ ID NO: 1114553 - RNA, 22 nt, Human
ucuguggcacgauugcacugca

SEQ ID NO: 1114554 - RNA, 22 nt, Human
ugcagaagcugcaggucagugg

SEQ ID NO: 1114555 - RNA, 21 nt, Human
uuacuuuugcagcaaccuaau

SEQ ID NO: 1114556 - RNA, 22 nt, Human
ugucuagggagcugcucaggcu

SEQ ID NO: 1114557 - RNA, 22 nt, Human
agugcuguccaguuucacaggu

SEQ ID NO: 1114558 - RNA, 22 nt, Human
uugugaaauguuucaaaauagu

SEQ ID NO: 1114559 - RNA, 22 nt, Human
cuggugggagcagcaggcagcu

SEQ ID NO: 1114560 - RNA, 22 nt, Human
ugcagagguguugcugagauaa

SEQ ID NO: 1114561 - RNA, 22 nt, Human
aucuggcuauugacauguuaua

SEQ ID NO: 1114562 - RNA, 22 nt, Human
acagcagcuaaaggugucuccu

SEQ ID NO: 1114563 - RNA, 22 nt, Human
ggagaaggaagaaagcuacuau

SEQ ID NO: 1114564 - RNA, 22 nt, Human
ucagggcauguauguuucuuua

SEQ ID NO: 1114565 - RNA, 22 nt, Human
auuguaaguagaaauguuaugg

SEQ ID NO: 1114566 - RNA, 22 nt, Human
ucagagaacacagaggugaugu

SEQ ID NO: 1114567 - RNA, 22 nt, Human
ugcugccucagcuuccugggcu

SEQ ID NO: 1114568 - RNA, 22 nt, Human
ggcuggagauaugucuggaaca

SEQ ID NO: 1114569 - RNA, 16 nt, Human
ccaccugcagcucuca

SEQ ID NO: 1114570 - RNA, 21 nt, Human
agccuggcccagggggaggcu

SEQ ID NO: 1114571 - RNA, 21 nt, Human
ccugggccaaauucccuggac

SEQ ID NO: 1114572 - RNA, 22 nt, Human
cucagggucugguccuuagauu

SEQ ID NO: 1114573 - RNA, 22 nt, Human
uacauucuggaaaggcacagac

SEQ ID NO: 1114574 - RNA, 20 nt, Human
ccacaggaguccagucgacc

SEQ ID NO: 1114575 - RNA, 22 nt, Human
ucuccucugcgcggcagugccc

SEQ ID NO: 1114576 - RNA, 22 nt, Human
ccugccagcauggcuuaucucc

SEQ ID NO: 1114577 - RNA, 22 nt, Human
ugcugccaaaugcgagcucugu

SEQ ID NO: 1114578 - RNA, 22 nt, Human
caugaagcacagcucucuuuuu

SEQ ID NO: 1114579 - RNA, 22 nt, Human
ggagagagaugccgccuugcuc

SEQ ID NO: 1114580 - RNA, 22 nt, Human
uggcucaggggucuggcucugu

SEQ ID NO: 1114581 - RNA, 18 nt, Human
aagccagagaccacugcc

SEQ ID NO: 1114582 - RNA, 22 nt, Human
gcagagcucaagguguucagcu

SEQ ID NO: 1114583 - RNA, 22 nt, Human
gcucccagcaauugaggcagcc

SEQ ID NO: 1114584 - RNA, 22 nt, Human
ucauugcaccccagucccagcu

SEQ ID NO: 1114585 - RNA, 17 nt, Human
cucugcagugcauggcu

SEQ ID NO: 1114586 - RNA, 22 nt, Human
ugauuucauaguauauacauga

SEQ ID NO: 1114587 - RNA, 22 nt, Human
gucagcugucuccccagagugg

SEQ ID NO: 1114588 - RNA, 22 nt, Human
aaguaugacauuuaagacaauu

SEQ ID NO: 1114589 - RNA, 22 nt, Human
agguagagcuccaguagaaaau

SEQ ID NO: 1114590 - RNA, 22 nt, Human
cagcucuguaaauuccuucauc

SEQ ID NO: 1114591 - RNA, 22 nt, Human
uugaggaguguuuagggugagg

SEQ ID NO: 1114592 - RNA, 22 nt, Human
gacccuguuucuacaaauaauu

SEQ ID NO: 1114593 - RNA, 22 nt, Human
agggcagaccacgugcaaggau

SEQ ID NO: 1114594 - RNA, 22 nt, Human
cagcccagcagggucuggcccu

SEQ ID NO: 1114595 - RNA, 22 nt, Human
uuuauguaguuacggacuauca

SEQ ID NO: 1114596 - RNA, 22 nt, Human
gccagagcacaggcugguagua

SEQ ID NO: 1114597 - RNA, 22 nt, Human
agccagaggccagccugccuca

SEQ ID NO: 1114598 - RNA, 22 nt, Human
gauuucaauccagcuuucuucu

SEQ ID NO: 1114599 - RNA, 22 nt, Human
ucagggacuuacaaaccagaag

SEQ ID NO: 1114600 - RNA, 21 nt, Human
uucagcaguccucuagagaua

SEQ ID NO: 1114601 - RNA, 17 nt, Human
gcugcagcgguaggcag

SEQ ID NO: 1114602 - RNA, 22 nt, Human
acagagcuucccagccugagca

SEQ ID NO: 1114603 - RNA, 22 nt, Human
ccugccugucccucaguccaca

SEQ ID NO: 1114604 - RNA, 22 nt, Human
agugacugacaccuguaauccc

SEQ ID NO: 1114605 - RNA, 22 nt, Human
gcucugugccacaugcaguguu

SEQ ID NO: 1114606 - RNA, 20 nt, Human
ggggcccaagcccucuugcc

SEQ ID NO: 1114607 - RNA, 17 nt, Human
cacaggugugguuugag

SEQ ID NO: 1114608 - RNA, 22 nt, Human
uggucaguugcaucagagaagu

SEQ ID NO: 1114609 - RNA, 22 nt, Human
agugccaggagcaaggagcucc

SEQ ID NO: 1114610 - RNA, 22 nt, Human
ugugccugaguuggcugaguac

SEQ ID NO: 1114611 - RNA, 22 nt, Human
ggcucugcccagguggacagca

SEQ ID NO: 1114612 - RNA, 22 nt, Human
cugggccuagaggaagcugaca

SEQ ID NO: 1114613 - RNA, 22 nt, Human
cagagggcucuuggcugccugc

SEQ ID NO: 1114614 - RNA, 22 nt, Human
acuuugcagagccagaagagaa

SEQ ID NO: 1114615 - RNA, 22 nt, Human
ugggagagugcucaaugugcaa

SEQ ID NO: 1114616 - RNA, 22 nt, Human
uagcugccauugcuccaggaag

SEQ ID NO: 1114617 - RNA, 22 nt, Human
gccugccugcugugugcaaguu

SEQ ID NO: 1114618 - RNA, 22 nt, Human
aagaaauauugggccuuauaaa

SEQ ID NO: 1114619 - RNA, 22 nt, Human
agccucuguagaaagcagugug

SEQ ID NO: 1114620 - RNA, 22 nt, Human
uggcucugaucagauguccagu

SEQ ID NO: 1114621 - RNA, 22 nt, Human
cagugguggaaugaggaauugu

SEQ ID NO: 1114622 - RNA, 22 nt, Human
uccagucauuuccauuguuccc

SEQ ID NO: 1114623 - RNA, 22 nt, Human
ccuuucucuggcagcaggacag

SEQ ID NO: 1114624 - RNA, 22 nt, Human
ugggcugccggcaggcucugcc

SEQ ID NO: 1114625 - RNA, 22 nt, Human
caggccugaguguggaagucuu

SEQ ID NO: 1114626 - RNA, 23 nt, Human
ugagcugguauuguccaucucca

SEQ ID NO: 1114627 - RNA, 22 nt, Human
gcugucaggccaugugggccuu

SEQ ID NO: 1114628 - RNA, 22 nt, Human
agcagcucuggcacuguagcau

SEQ ID NO: 1114629 - RNA, 22 nt, Human
gcugcuuccuuuccugcugacc

SEQ ID NO: 1114630 - RNA, 20 nt, Human
aggagcugaauuagaggguu

SEQ ID NO: 1114631 - RNA, 22 nt, Human
ucuucagauugcacugagcaag

SEQ ID NO: 1114632 - RNA, 22 nt, Human
ggcuucagugacuggugcccuc

SEQ ID NO: 1114633 - RNA, 22 nt, Human
ucauggagacuuugagccuguu

SEQ ID NO: 1114634 - RNA, 22 nt, Human
uggcucagccuggcccuuucau

SEQ ID NO: 1114635 - RNA, 23 nt, Human
uggcagcuguguaagagaaagca

SEQ ID NO: 1114636 - RNA, 22 nt, Human
agaaaucucaguaucucaggga

SEQ ID NO: 1114637 - RNA, 22 nt, Human
cacagggcagugauuguccaca

SEQ ID NO: 1114638 - RNA, 22 nt, Human
agccaagcacucaacuccugga

SEQ ID NO: 1114639 - RNA, 22 nt, Human
aguaaacauaauuuaccuguag

SEQ ID NO: 1114640 - RNA, 22 nt, Human
cagcuggaugggagaccauguu

SEQ ID NO: 1114641 - RNA, 22 nt, Human
ggaaagagcccagcagugcuug

SEQ ID NO: 1114642 - RNA, 22 nt, Human
ugcuggcccaugaagacgcagu

SEQ ID NO: 1114643 - RNA, 22 nt, Human
uugacagcaaagauugugccua

SEQ ID NO: 1114644 - RNA, 22 nt, Human
gugucaugcacacucaguguug

SEQ ID NO: 1114645 - RNA, 22 nt, Human
ucagcaguuuuauaugcagcuu

SEQ ID NO: 1114646 - RNA, 23 nt, Human
agaauuguaaauagaauauaccu

SEQ ID NO: 1114647 - RNA, 22 nt, Human
ucagggcaaagggcagaguuug

SEQ ID NO: 1114648 - RNA, 22 nt, Human
ucagccuggcaggauggccugg

SEQ ID NO: 1114649 - RNA, 22 nt, Human
uggcuggcaaggcuggagucag

SEQ ID NO: 1114650 - RNA, 22 nt, Human
uagacagauuuaaaggaaugga

SEQ ID NO: 1114651 - RNA, 22 nt, Human
gagagucacugucugcauuucc

SEQ ID NO: 1114652 - RNA, 22 nt, Human
cccauuuaaacacaagcuuuca

SEQ ID NO: 1114653 - RNA, 22 nt, Human
agcuuccugaugcaagagggcu

SEQ ID NO: 1114654 - RNA, 22 nt, Human
gagaccaggaaguacagcagcc

SEQ ID NO: 1114655 - RNA, 18 nt, Human
ggaaaaggagugucuagc

SEQ ID NO: 1114656 - RNA, 22 nt, Human
gacaucauagggugggaggaaa

SEQ ID NO: 1114657 - RNA, 20 nt, Human
uacauucaaaacaaacucug

SEQ ID NO: 1114658 - RNA, 22 nt, Human
cugccuuggaaaaugugguaau

SEQ ID NO: 1114659 - RNA, 22 nt, Human
cuggcagcucugagucccuucu

SEQ ID NO: 1114660 - RNA, 22 nt, Human
ccugggcuucugucuagauguu

SEQ ID NO: 1114661 - RNA, 22 nt, Human
gcauguguggaggagaugugcu

SEQ ID NO: 1114662 - RNA, 22 nt, Human
cuggggggagcugcguccagca

SEQ ID NO: 1114663 - RNA, 22 nt, Human
agcccaagcuaugaggugaccu

SEQ ID NO: 1114664 - RNA, 22 nt, Human
gaggugaguggaucacgagguc

SEQ ID NO: 1114665 - RNA, 22 nt, Human
cacagcuuaugccacugauugg

SEQ ID NO: 1114666 - RNA, 22 nt, Human
ugcugccacauuuaaagagggg

SEQ ID NO: 1114667 - RNA, 22 nt, Human
uacaguaucuucuggcaagcau

SEQ ID NO: 1114668 - RNA, 22 nt, Human
gaagcagcuuucuggugaggag

SEQ ID NO: 1114669 - RNA, 22 nt, Human
ucugccagaaguucugagagua

SEQ ID NO: 1114670 - RNA, 22 nt, Human
caggagacaauggcuguggggc

SEQ ID NO: 1114671 - RNA, 22 nt, Human
uccuucaguuaucacaguacug

SEQ ID NO: 1114672 - RNA, 22 nt, Human
ucaggaucggccuuuuuuuaag

SEQ ID NO: 1114673 - RNA, 22 nt, Human
gguggguuuggaagagcaggcu

SEQ ID NO: 1114674 - RNA, 22 nt, Human
agcaauauuucagcuagcaggu

SEQ ID NO: 1114675 - RNA, 22 nt, Human
ugggcuggcccaccacaccucg

SEQ ID NO: 1114676 - RNA, 22 nt, Human
aaaagacauaugugggcauucu

SEQ ID NO: 1114677 - RNA, 22 nt, Human
cuuccucacggugcaacaggaa

SEQ ID NO: 1114678 - RNA, 22 nt, Human
uucaagauggcaccagugagug

SEQ ID NO: 1114679 - RNA, 22 nt, Human
ggcaggugcucugugggccugg

SEQ ID NO: 1114680 - RNA, 22 nt, Human
ggguccagcuacaucagggugg

SEQ ID NO: 1114681 - RNA, 20 nt, Human
cagagacccaggcuucagcu

SEQ ID NO: 1114682 - RNA, 22 nt, Human
agcugagcugcagaugacugua

SEQ ID NO: 1114683 - RNA, 22 nt, Human
agggccugggauguccuccuag

SEQ ID NO: 1114684 - RNA, 22 nt, Human
ccagcuggagcucgcagauagg

SEQ ID NO: 1114685 - RNA, 22 nt, Human
gcugcucugugacagccuccgg

SEQ ID NO: 1114686 - RNA, 22 nt, Human
accuuuuuucagaacucuaaag

SEQ ID NO: 1114687 - RNA, 22 nt, Human
ugccuggguccaggccaagccu

SEQ ID NO: 1114688 - RNA, 22 nt, Human
gcucccagggcagcgcagaaga

SEQ ID NO: 1114689 - RNA, 22 nt, Human
gccucugcaucaucacuccagc

SEQ ID NO: 1114690 - RNA, 22 nt, Human
agaagccagcuucagcugcccg

SEQ ID NO: 1114691 - RNA, 22 nt, Human
uuuuccucugagcuuugaauaa

SEQ ID NO: 1114692 - RNA, 22 nt, Human
cauuauguucaguagcuuaaaa

SEQ ID NO: 1114693 - RNA, 22 nt, Human
gcccagaaguugaggcugcagu

SEQ ID NO: 1114694 - RNA, 22 nt, Human
agcagaugagccucaugacugg

SEQ ID NO: 1114695 - RNA, 22 nt, Human
uauauuaacacccacuugccuc

SEQ ID NO: 1114696 - RNA, 22 nt, Human
guggccuggaguuugauguagg

SEQ ID NO: 1114697 - RNA, 22 nt, Human
ccagcuggugggucuuucucug

SEQ ID NO: 1114698 - RNA, 22 nt, Human
ccauuugucaccucugcacucc

SEQ ID NO: 1114699 - RNA, 22 nt, Human
uggggcuggcuauugucucccu

SEQ ID NO: 1114700 - RNA, 18 nt, Human
ccgggcuuuggugacaca

SEQ ID NO: 1114701 - RNA, 22 nt, Human
gcagcagaugcuuucauggaca

SEQ ID NO: 1114702 - RNA, 22 nt, Human
accaaggagacaaagguguauu

SEQ ID NO: 1114703 - RNA, 22 nt, Human
gugaggugguacaauauuaacu

SEQ ID NO: 1114704 - RNA, 22 nt, Human
gaagcagccacggggagacaga

SEQ ID NO: 1114705 - RNA, 22 nt, Human
agcagccacagucugggacagg

SEQ ID NO: 1114706 - RNA, 18 nt, Human
caggaugagugaugggga

SEQ ID NO: 1114707 - RNA, 20 nt, Human
ugagugauggaggcggguca

SEQ ID NO: 1114708 - RNA, 22 nt, Human
ggcucaggaugagccuucucau

SEQ ID NO: 1114709 - RNA, 22 nt, Human
ugauuuccaguugcugggugcu

SEQ ID NO: 1114710 - RNA, 22 nt, Human
gcagagugauggaaugugggug

SEQ ID NO: 1114711 - RNA, 22 nt, Human
auaauuaauuucaguaaucucc

SEQ ID NO: 1114712 - RNA, 20 nt, Human
ggcugccuccuuccuuuccu

SEQ ID NO: 1114713 - RNA, 22 nt, Human
ugugccagaaaauaugcugagg

SEQ ID NO: 1114714 - RNA, 22 nt, Human
uuaaaaugcagauucugauuca

SEQ ID NO: 1114715 - RNA, 22 nt, Human
gaaaugugggucaugacccauu

SEQ ID NO: 1114716 - RNA, 21 nt, Human
uaaaugugagcagggcugggc

SEQ ID NO: 1114717 - RNA, 22 nt, Human
uugaagcauuucuuugagcuuc

SEQ ID NO: 1114718 - RNA, 22 nt, Human
gcaggcagagguggaggagaca

SEQ ID NO: 1114719 - RNA, 20 nt, Human
cagaaggucuaagcuuuaga

SEQ ID NO: 1114720 - RNA, 22 nt, Human
gcagcugaagcugcaguuccag

SEQ ID NO: 1114721 - RNA, 22 nt, Human
ccucaggcuuacgggcaaugga

SEQ ID NO: 1114722 - RNA, 22 nt, Human
uuagugucuucuucauccucug

SEQ ID NO: 1114723 - RNA, 22 nt, Human
agcugccacugagggugcacag

SEQ ID NO: 1114724 - RNA, 22 nt, Human
gcugccuucaguucugauucau

SEQ ID NO: 1114725 - RNA, 20 nt, Human
gucucagaauggauuugcau

SEQ ID NO: 1114726 - RNA, 22 nt, Human
gaagaagcaggaguguguagca

SEQ ID NO: 1114727 - RNA, 22 nt, Human
gagguacaugaggauacacagg

SEQ ID NO: 1114728 - RNA, 22 nt, Human
cauggccuugagugacugcacu

SEQ ID NO: 1114729 - RNA, 22 nt, Human
ugcagcucauugguguccuggu

SEQ ID NO: 1114730 - RNA, 22 nt, Human
agagccugaggaugucccagcu

SEQ ID NO: 1114731 - RNA, 22 nt, Human
agagcagagggcucugggacaa

SEQ ID NO: 1114732 - RNA, 22 nt, Human
gagcaggccagcaauggaaggg

SEQ ID NO: 1114733 - RNA, 22 nt, Human
aggagaaagacuggacagccaa

SEQ ID NO: 1114734 - RNA, 18 nt, Human
cucucugggugaggacaa

SEQ ID NO: 1114735 - RNA, 22 nt, Human
gcagggcuaauggggcaaguag

SEQ ID NO: 1114736 - RNA, 22 nt, Human
ggcugcagauagccagccacca

SEQ ID NO: 1114737 - RNA, 18 nt, Human
ggagagugagaucaaaca

SEQ ID NO: 1114738 - RNA, 22 nt, Human
acuguacacgugucauuuacag

SEQ ID NO: 1114739 - RNA, 20 nt, Human
gcaggcagggaaugggggug

SEQ ID NO: 1114740 - RNA, 22 nt, Human
uccugggccuguacuccauccg

SEQ ID NO: 1114741 - RNA, 22 nt, Human
caggaaggcccaccuguccugu

SEQ ID NO: 1114742 - RNA, 22 nt, Human
accucaggauguggacacagaa

SEQ ID NO: 1114743 - RNA, 21 nt, Human
ggcagccugacccccagagag

SEQ ID NO: 1114744 - RNA, 22 nt, Human
cccuggaggcggagcuugcagu

SEQ ID NO: 1114745 - RNA, 22 nt, Human
caggugggagcggagacugauu

SEQ ID NO: 1114746 - RNA, 22 nt, Human
uccagagccuauauguucaacu

SEQ ID NO: 1114747 - RNA, 22 nt, Human
acugggccggugcagaguaguu

SEQ ID NO: 1114748 - RNA, 22 nt, Human
ugcuccuuccucauccugugca

SEQ ID NO: 1114749 - RNA, 22 nt, Human
acagaauugaaaguauaaucug

SEQ ID NO: 1114750 - RNA, 22 nt, Human
cuggcucaauaaauauuagcug

SEQ ID NO: 1114751 - RNA, 22 nt, Human
ugagccuguccugugcauguga

SEQ ID NO: 1114752 - RNA, 22 nt, Human
cauugcacgggcgucugucugu

SEQ ID NO: 1114753 - RNA, 22 nt, Human
cucacugucuguacuagcugau

SEQ ID NO: 1114754 - RNA, 22 nt, Human
uaaagguaguuuuaaaggugcu

SEQ ID NO: 1114755 - RNA, 22 nt, Human
guggccuggcgagcuggcgcgg

SEQ ID NO: 1114756 - RNA, 21 nt, Human
acagcagggcuggcaugacag

SEQ ID NO: 1114757 - RNA, 22 nt, Human
gggaguggguuuggccuaggcc

SEQ ID NO: 1114758 - RNA, 22 nt, Human
ggcagagcuugcagugagccga

SEQ ID NO: 1114759 - RNA, 22 nt, Human
ccuggagauuauuugguccaau

SEQ ID NO: 1114760 - RNA, 22 nt, Human
augggaggguggaaaggcucug

SEQ ID NO: 1114761 - RNA, 22 nt, Human
ugaggcuguucuaccagggcca

SEQ ID NO: 1114762 - RNA, 22 nt, Human
gcugucugcaucucuagagcuu

SEQ ID NO: 1114763 - RNA, 22 nt, Human
uucuuucccagaagauauguuu

SEQ ID NO: 1114764 - RNA, 22 nt, Human
auagaaaacagauguccuuaaa

SEQ ID NO: 1114765 - RNA, 22 nt, Human
cucagggcaguauggcugagag

SEQ ID NO: 1114766 - RNA, 20 nt, Human
uguugauuggugucaucuca

SEQ ID NO: 1114767 - RNA, 22 nt, Human
agcgggugcugugucagcccuc

SEQ ID NO: 1114768 - RNA, 22 nt, Human
ucucagagggaaacaugaguga

SEQ ID NO: 1114769 - RNA, 22 nt, Human
uacccaggagaaacagcagggc

SEQ ID NO: 1114770 - RNA, 22 nt, Human
cagagccugccaccuuucuccc

SEQ ID NO: 1114771 - RNA, 22 nt, Human
agcugucagugcugugccugua

SEQ ID NO: 1114772 - RNA, 22 nt, Human
ggcuucccaaggagccaggaug

SEQ ID NO: 1114773 - RNA, 22 nt, Human
acuuguguaacacagaaagaac

SEQ ID NO: 1114774 - RNA, 22 nt, Human
cugccucucaggucccugagau

SEQ ID NO: 1114775 - RNA, 19 nt, Human
gagcccucuccauggccac

SEQ ID NO: 1114776 - RNA, 22 nt, Human
ucaguuuuaagguuugagaauu

SEQ ID NO: 1114777 - RNA, 22 nt, Human
acuuccuggcugggugaccugg

SEQ ID NO: 1114778 - RNA, 22 nt, Human
cugagccaaggggacagugaca

SEQ ID NO: 1114779 - RNA, 22 nt, Human
ccaggagucuggaugagguguc

SEQ ID NO: 1114780 - RNA, 22 nt, Human
ucucagagggaggauuacugcc

SEQ ID NO: 1114781 - RNA, 20 nt, Human
gccugcagagaaggucagag

SEQ ID NO: 1114782 - RNA, 22 nt, Human
gugcccugguccccagcauaua

SEQ ID NO: 1114783 - RNA, 22 nt, Human
cuuccuggccauugccauggca

SEQ ID NO: 1114784 - RNA, 20 nt, Human
aggcucagagcaguaguaca

SEQ ID NO: 1114785 - RNA, 22 nt, Human
cacagcuuguuuagugacucac

SEQ ID NO: 1114786 - RNA, 22 nt, Human
ucaaggcuaaacuuucagagua

SEQ ID NO: 1114787 - RNA, 23 nt, Human
ccaggcaguagcuauugaaguga

SEQ ID NO: 1114788 - RNA, 22 nt, Human
ggcagcucugaugaugcucugg

SEQ ID NO: 1114789 - RNA, 22 nt, Human
uagugcacacgcauguagcagu

SEQ ID NO: 1114790 - RNA, 22 nt, Human
ugcauauuuguaugauguuuag

SEQ ID NO: 1114791 - RNA, 22 nt, Human
guguuuccaguucagaaagcaa

SEQ ID NO: 1114792 - RNA, 18 nt, Human
aggccugggaagcugagg

SEQ ID NO: 1114793 - RNA, 22 nt, Human
gaaaaaugagcugaugucaggg

SEQ ID NO: 1114794 - RNA, 22 nt, Human
uccagcagaaaagagguaggga

SEQ ID NO: 1114795 - RNA, 22 nt, Human
ccuggagcuuuuccauccugga

SEQ ID NO: 1114796 - RNA, 22 nt, Human
aauaugugagguauguucagug

SEQ ID NO: 1114797 - RNA, 22 nt, Human
uggggccuggucagagcugcac

SEQ ID NO: 1114798 - RNA, 22 nt, Human
ccaaagagcuagaauuauaggc

SEQ ID NO: 1114799 - RNA, 22 nt, Human
gcuggccauggggagugaggag

SEQ ID NO: 1114800 - RNA, 22 nt, Human
gcugucuucacuuccugguuuc

SEQ ID NO: 1114801 - RNA, 22 nt, Human
agggcagcacaaggcauggacu

SEQ ID NO: 1114802 - RNA, 17 nt, Human
aggaaacauuuucuuuc

SEQ ID NO: 1114803 - RNA, 22 nt, Human
ucagaacauuuaaaaagugguu

SEQ ID NO: 1114804 - RNA, 22 nt, Human
cucugcagaggcccaaggcuga

SEQ ID NO: 1114805 - RNA, 22 nt, Human
accucugcucaagaccccuccg

SEQ ID NO: 1114806 - RNA, 22 nt, Human
gcugagcugaggcagggcuggg

SEQ ID NO: 1114807 - RNA, 22 nt, Human
ggcagggagagcaugcugauaa

SEQ ID NO: 1114808 - RNA, 22 nt, Human
uagccaggcgaggucagugucg

SEQ ID NO: 1114809 - RNA, 22 nt, Human
ccaggacuuuaaguccagcacu

SEQ ID NO: 1114810 - RNA, 22 nt, Human
gcacccaggccggcgacugcag

SEQ ID NO: 1114811 - RNA, 22 nt, Human
ggccugcuauuggugggcagac

SEQ ID NO: 1114812 - RNA, 22 nt, Human
aauaauuuugagagccuggaaa

SEQ ID NO: 1114813 - RNA, 22 nt, Human
uccagccaugcaugacaaucac

SEQ ID NO: 1114814 - RNA, 22 nt, Human
aggcacugaagaacucuuuuug

SEQ ID NO: 1114815 - RNA, 19 nt, Human
agcaaauauaauaguguuc

SEQ ID NO: 1114816 - RNA, 23 nt, Human
uuugcaaauuggacacaaccaca

SEQ ID NO: 1114817 - RNA, 22 nt, Human
uagcugccaaaagggugggcua

SEQ ID NO: 1114818 - RNA, 22 nt, Human
cuugcaggauuuugcugcugua

SEQ ID NO: 1114819 - RNA, 19 nt, Human
gccugagccagccaugcaa

SEQ ID NO: 1114820 - RNA, 22 nt, Human
caguguacuuggaauguaacag

SEQ ID NO: 1114821 - RNA, 22 nt, Human
gcaggggaguggaugauggauu

SEQ ID NO: 1114822 - RNA, 22 nt, Human
uacauauacugagugauuugcu

SEQ ID NO: 1114823 - RNA, 22 nt, Human
gagcccagguucugcuuccagc

SEQ ID NO: 1114824 - RNA, 22 nt, Human
aggcccuggguuagggcccacu

SEQ ID NO: 1114825 - RNA, 22 nt, Human
ucugucacucuagagauggcag

SEQ ID NO: 1114826 - RNA, 22 nt, Human
cugcccagaaucacucacucga

SEQ ID NO: 1114827 - RNA, 22 nt, Human
augcaguaaauguuaagaaaaa

SEQ ID NO: 1114828 - RNA, 22 nt, Human
gcccuuccuuagacagcaggau

SEQ ID NO: 1114829 - RNA, 22 nt, Human
ucacaugcuacugagccagacc

SEQ ID NO: 1114830 - RNA, 22 nt, Human
ccuggagcgcgggucaagcugg

SEQ ID NO: 1114831 - RNA, 22 nt, Human
ggcaaaaaccacaauuacuuuu

SEQ ID NO: 1114832 - RNA, 22 nt, Human
cugggcagaauuuuaggauggc

SEQ ID NO: 1114833 - RNA, 22 nt, Human
aaguguguugacugaauugggg

SEQ ID NO: 1114834 - RNA, 22 nt, Human
gacagaguuguugauguaugcu

SEQ ID NO: 1114835 - RNA, 22 nt, Human
acugaaggaaacuuuuguguuu

SEQ ID NO: 1114836 - RNA, 22 nt, Human
accccaagacaguagaagagaa

SEQ ID NO: 1114837 - RNA, 22 nt, Human
uacaaagucaccagcuucuugc

SEQ ID NO: 1114838 - RNA, 22 nt, Human
gcccacagcucguuccucuccu

SEQ ID NO: 1114839 - RNA, 20 nt, Human
agccagaagaaggcuggaga

SEQ ID NO: 1114840 - RNA, 22 nt, Human
gcacagguugcaaaaguucaca

SEQ ID NO: 1114841 - RNA, 19 nt, Human
cugcugggugcugagggag

SEQ ID NO: 1114842 - RNA, 18 nt, Human
cucugcuaaugggcagcu

SEQ ID NO: 1114843 - RNA, 20 nt, Human
gcagagccucacugcaaggg

SEQ ID NO: 1114844 - RNA, 18 nt, Human
cggcagagugcuucuagc

SEQ ID NO: 1114845 - RNA, 22 nt, Human
gcagccugaugaucuggguugu

SEQ ID NO: 1114846 - RNA, 22 nt, Human
guuuuguugcugcagagcucaa

SEQ ID NO: 1114847 - RNA, 22 nt, Human
gcugccaugccacagcacucac

SEQ ID NO: 1114848 - RNA, 22 nt, Human
uccugagggcgauucagcaggu

SEQ ID NO: 1114849 - RNA, 22 nt, Human
uugcauugaucccagcuugggc

SEQ ID NO: 1114850 - RNA, 22 nt, Human
caguacuuaguucucaugguuu

SEQ ID NO: 1114851 - RNA, 22 nt, Human
ugcagcuguuacggacccuguc

SEQ ID NO: 1114852 - RNA, 22 nt, Human
guuauguaugagggaaugauua

SEQ ID NO: 1114853 - RNA, 22 nt, Human
aggacugggugcagagggcauc

SEQ ID NO: 1114854 - RNA, 22 nt, Human
cagagccaggguugcaccccug

SEQ ID NO: 1114855 - RNA, 22 nt, Human
gccccagccaaggugacacgaa

SEQ ID NO: 1114856 - RNA, 22 nt, Human
augaacacauguacacauuucu

SEQ ID NO: 1114857 - RNA, 18 nt, Human
acagacaaaauggaaaug

SEQ ID NO: 1114858 - RNA, 22 nt, Human
ugugcuucugcagagacuauuu

SEQ ID NO: 1114859 - RNA, 21 nt, Human
agucccaggggugagugaugu

SEQ ID NO: 1114860 - RNA, 23 nt, Human
gugugccaagcacugugccagga

SEQ ID NO: 1114861 - RNA, 22 nt, Human
caagcccaggauuccccaguua

SEQ ID NO: 1114862 - RNA, 22 nt, Human
agagcccugaagcagagcuaaa

SEQ ID NO: 1114863 - RNA, 22 nt, Human
gagccagccgcaagagcuguga

SEQ ID NO: 1114864 - RNA, 22 nt, Human
cuguggugagcaacugacugaa

SEQ ID NO: 1114865 - RNA, 22 nt, Human
ucugucucaaguucuugcacuc

SEQ ID NO: 1114866 - RNA, 22 nt, Human
caggagugagaugcgaucacuu

SEQ ID NO: 1114867 - RNA, 22 nt, Human
ugaaccaggaggcagccagcac

SEQ ID NO: 1114868 - RNA, 22 nt, Human
cuggccgguauuugccucuggg

SEQ ID NO: 1114869 - RNA, 21 nt, Human
gcaggaugcaucuuggugucu

SEQ ID NO: 1114870 - RNA, 22 nt, Human
gccaggcauucuagaaguagug

SEQ ID NO: 1114871 - RNA, 22 nt, Human
aagagagaacucccuucgccag

SEQ ID NO: 1114872 - RNA, 22 nt, Human
ugaggcucaaggucugguggag

SEQ ID NO: 1114873 - RNA, 22 nt, Human
agcagcucaaagccugcaagga

SEQ ID NO: 1114874 - RNA, 22 nt, Human
cagcccagcagucuuagccugc

SEQ ID NO: 1114875 - RNA, 22 nt, Human
uuaaacagagucugaaauguaa

SEQ ID NO: 1114876 - RNA, 22 nt, Human
agcagccaagguaaccugugcu

SEQ ID NO: 1114877 - RNA, 22 nt, Human
gugccucagcaccgccugcagc

SEQ ID NO: 1114878 - RNA, 22 nt, Human
agauuuccugcacugccuuuga

SEQ ID NO: 1114879 - RNA, 18 nt, Human
aguaguggguuuagcuuc

SEQ ID NO: 1114880 - RNA, 20 nt, Human
accauaauguuaauuacaaa

SEQ ID NO: 1114881 - RNA, 22 nt, Human
ugaagcugugggcaguggagcc

SEQ ID NO: 1114882 - RNA, 22 nt, Human
cagcugccuguauuguccucau

SEQ ID NO: 1114883 - RNA, 22 nt, Human
uuccucucucuugccagaaugu

SEQ ID NO: 1114884 - RNA, 22 nt, Human
uccugggcuguggccccgggca

SEQ ID NO: 1114885 - RNA, 22 nt, Human
cagcuggaucccugcagaacuu

SEQ ID NO: 1114886 - RNA, 22 nt, Human
ucacuggggccuuuggucagga

SEQ ID NO: 1114887 - RNA, 20 nt, Human
cugcugugugugccucagcc

SEQ ID NO: 1114888 - RNA, 22 nt, Human
caguagcaggcaggugcuuuug

SEQ ID NO: 1114889 - RNA, 22 nt, Human
ugucccagacacaguaugcgcu

SEQ ID NO: 1114890 - RNA, 22 nt, Human
ugagcuggucacuccuucugaa

SEQ ID NO: 1114891 - RNA, 23 nt, Human
agucucagcuggaaacauguguc

SEQ ID NO: 1114892 - RNA, 22 nt, Human
gggagguucuguucgcacuuga

SEQ ID NO: 1114893 - RNA, 22 nt, Human
cagagcugcagauugaaggcau

SEQ ID NO: 1114894 - RNA, 22 nt, Human
ucugggcagcagcagcuaguag

SEQ ID NO: 1114895 - RNA, 22 nt, Human
gcacagggagcaggucucuggu

SEQ ID NO: 1114896 - RNA, 23 nt, Human
uaagaacagacaagcauuuacau

SEQ ID NO: 1114897 - RNA, 22 nt, Human
uccugugccuccaccugcuccg

SEQ ID NO: 1114898 - RNA, 22 nt, Human
aggccagguuccucaaucuuga

SEQ ID NO: 1114899 - RNA, 22 nt, Human
ugcuuuuaagaacaaugcugcu

SEQ ID NO: 1114900 - RNA, 18 nt, Human
gcugccugcauuccucac

SEQ ID NO: 1114901 - RNA, 22 nt, Human
cugggagggguagccaauccua

SEQ ID NO: 1114902 - RNA, 22 nt, Human
aagaaugucguugguauuuuaa

SEQ ID NO: 1114903 - RNA, 22 nt, Human
cauaagaaauaaugaugaugac

SEQ ID NO: 1114904 - RNA, 22 nt, Human
ucuguccucuuugaagcugcuc

SEQ ID NO: 1114905 - RNA, 22 nt, Human
ugagaauuacaaaugagucaca

SEQ ID NO: 1114906 - RNA, 17 nt, Human
ugcugccaagucccaac

SEQ ID NO: 1114907 - RNA, 22 nt, Human
cuugaaagcuuugcgucuucua

SEQ ID NO: 1114908 - RNA, 22 nt, Human
uuccauaaugagauucccagcc

SEQ ID NO: 1114909 - RNA, 22 nt, Human
aagcagccaccucaucuccacu

SEQ ID NO: 1114910 - RNA, 22 nt, Human
gcuggucacucugggagcugcu

SEQ ID NO: 1114911 - RNA, 22 nt, Human
ccagcuggaagagugcagaacu

SEQ ID NO: 1114912 - RNA, 22 nt, Human
gcagcuggacccacacggcuua

SEQ ID NO: 1114913 - RNA, 22 nt, Human
agggaguguaaauggugcucag

SEQ ID NO: 1114914 - RNA, 22 nt, Human
ucccagcagggccgaccagccu

SEQ ID NO: 1114915 - RNA, 23 nt, Human
ugggccuggccucccaguccagc

SEQ ID NO: 1114916 - RNA, 22 nt, Human
aaagaauuuguacacccuacua

SEQ ID NO: 1114917 - RNA, 22 nt, Human
uugacaauugggagauauaaag

SEQ ID NO: 1114918 - RNA, 22 nt, Human
cuugggagacacaagaagacau

SEQ ID NO: 1114919 - RNA, 22 nt, Human
aaagauuuaagaauaauuugug

SEQ ID NO: 1114920 - RNA, 22 nt, Human
ugcagggccagacuggguugga

SEQ ID NO: 1114921 - RNA, 21 nt, Human
guggccugauuaugaaugggu

SEQ ID NO: 1114922 - RNA, 21 nt, Human
gcagccacagccaccaagcua

SEQ ID NO: 1114923 - RNA, 22 nt, Human
cccagccuggugcacugugggg

SEQ ID NO: 1114924 - RNA, 22 nt, Human
ucuggauggucagcucuuccug

SEQ ID NO: 1114925 - RNA, 22 nt, Human
cucagagcaaugaacaugcaaa

SEQ ID NO: 1114926 - RNA, 22 nt, Human
aucuagaaguggcaugaauuac

SEQ ID NO: 1114927 - RNA, 22 nt, Human
aggcugcuucagcugcagggag

SEQ ID NO: 1114928 - RNA, 22 nt, Human
uauuucuggcuuugagggugau

SEQ ID NO: 1114929 - RNA, 22 nt, Human
aguaaaaauugaggugcaaaau

SEQ ID NO: 1114930 - RNA, 22 nt, Human
ugcuagaaaucugaaacuagca

SEQ ID NO: 1114931 - RNA, 22 nt, Human
ucuggagcuuccucauuuacag

SEQ ID NO: 1114932 - RNA, 22 nt, Human
caaaugcauagaaagaugaaac

SEQ ID NO: 1114933 - RNA, 18 nt, Human
ugcucuggucucacuugg

SEQ ID NO: 1114934 - RNA, 22 nt, Human
ucccagggcagcuguccagaag

SEQ ID NO: 1114935 - RNA, 22 nt, Human
ugggcagagucauacaggagac

SEQ ID NO: 1114936 - RNA, 22 nt, Human
cccaaggcauggcaugguggca

SEQ ID NO: 1114937 - RNA, 23 nt, Human
uccuccuuuugcuugugcuuccc

SEQ ID NO: 1114938 - RNA, 22 nt, Human
cuggugagacgguugacaggag

SEQ ID NO: 1114939 - RNA, 22 nt, Human
uacauucaacaugucacuaugu

SEQ ID NO: 1114940 - RNA, 22 nt, Human
augaaggauggcuggcugcccu

SEQ ID NO: 1114941 - RNA, 22 nt, Human
cucucuucccgugaguguugca

SEQ ID NO: 1114942 - RNA, 18 nt, Human
uggguggcuagggaguuu

SEQ ID NO: 1114943 - RNA, 22 nt, Human
cuguccuuacugcuucuggcuu

SEQ ID NO: 1114944 - RNA, 22 nt, Human
gcugccaauccagcugugggag

SEQ ID NO: 1114945 - RNA, 22 nt, Human
ccuggcagaauauuaaagugca

SEQ ID NO: 1114946 - RNA, 18 nt, Human
uccugccugcgggcuccc

SEQ ID NO: 1114947 - RNA, 22 nt, Human
uuggcagggccaggcucucucu

SEQ ID NO: 1114948 - RNA, 22 nt, Human
ugcuucaggaagaaacgccagg

SEQ ID NO: 1114949 - RNA, 22 nt, Human
cccaggcagggacgugcucugg

SEQ ID NO: 1114950 - RNA, 22 nt, Human
uuaucguacgcuucagaaauuu

SEQ ID NO: 1114951 - RNA, 22 nt, Human
gcuucccacagcuggacugggg

SEQ ID NO: 1114952 - RNA, 21 nt, Human
gccauuguuuucuaccuggag

SEQ ID NO: 1114953 - RNA, 22 nt, Human
aggcagcagccacaaggccuga

SEQ ID NO: 1114954 - RNA, 22 nt, Human
ggagccaggcaaucuguacuuu

SEQ ID NO: 1114955 - RNA, 22 nt, Human
gcugggaggaucucucccuguc

SEQ ID NO: 1114956 - RNA, 19 nt, Human
uccauaagcuuguguucau

SEQ ID NO: 1114957 - RNA, 22 nt, Human
cacaggcuccggccuugcagcc

SEQ ID NO: 1114958 - RNA, 22 nt, Human
cccagcagaccgcugugauggc

SEQ ID NO: 1114959 - RNA, 22 nt, Human
gagaggucaucucccaucagca

SEQ ID NO: 1114960 - RNA, 22 nt, Human
aaaaaguuucaacugccaacuc

SEQ ID NO: 1114961 - RNA, 21 nt, Human
ugauuuccaucuuaaaauaaa

SEQ ID NO: 1114962 - RNA, 22 nt, Human
cccaagcagggugcagaggcau

SEQ ID NO: 1114963 - RNA, 22 nt, Human
uuaguaaauaaagucuacuuuc

SEQ ID NO: 1114964 - RNA, 22 nt, Human
guggccucuguuggcuccuagg

SEQ ID NO: 1114965 - RNA, 22 nt, Human
cccagccaaggugcugguguug

SEQ ID NO: 1114966 - RNA, 22 nt, Human
agacagcaggggagucugguuu

SEQ ID NO: 1114967 - RNA, 22 nt, Human
uccagcagaccaucaaggcuca

SEQ ID NO: 1114968 - RNA, 22 nt, Human
aaugcacaugucuuggccucac

SEQ ID NO: 1114969 - RNA, 22 nt, Human
uagcacaucuggcgcuuauagg

SEQ ID NO: 1114970 - RNA, 22 nt, Human
uaaguucaguuggucgaaguag

SEQ ID NO: 1114971 - RNA, 22 nt, Human
acaguaccugcucucaagcaaa

SEQ ID NO: 1114972 - RNA, 22 nt, Human
ugcagugguugagagcccagac

SEQ ID NO: 1114973 - RNA, 22 nt, Human
ccugcccagcuucaccucaggc

SEQ ID NO: 1114974 - RNA, 22 nt, Human
acugggaggcaucuggagcuga

SEQ ID NO: 1114975 - RNA, 22 nt, Human
agaguggggaagguguugagaa

SEQ ID NO: 1114976 - RNA, 22 nt, Human
acugccuugaaagauuguugag

SEQ ID NO: 1114977 - RNA, 22 nt, Human
agugacucacuagcucucagug

SEQ ID NO: 1114978 - RNA, 22 nt, Human
uggcucuguuuguuaacuagac

SEQ ID NO: 1114979 - RNA, 22 nt, Human
cccuggagcaucucugcugucu

SEQ ID NO: 1114980 - RNA, 22 nt, Human
agaugguguuuccccaggugga

SEQ ID NO: 1114981 - RNA, 22 nt, Human
gcagugggagcuuaggcagugc

SEQ ID NO: 1114982 - RNA, 22 nt, Human
aagcugccauagaacgagaggu

SEQ ID NO: 1114983 - RNA, 22 nt, Human
aucuggcuuuuacugaauugcu

SEQ ID NO: 1114984 - RNA, 22 nt, Human
gucccuggucuaccguggcuuc

SEQ ID NO: 1114985 - RNA, 22 nt, Human
uccuuuccagccucaccucagc

SEQ ID NO: 1114986 - RNA, 22 nt, Human
gagcagcugagcuggaaugaga

SEQ ID NO: 1114987 - RNA, 22 nt, Human
cugggcacacagugacucugca

SEQ ID NO: 1114988 - RNA, 22 nt, Human
gccaggcagccacccucugcga

SEQ ID NO: 1114989 - RNA, 22 nt, Human
uuuccucuuugugacacagcug

SEQ ID NO: 1114990 - RNA, 19 nt, Human
agcuggggcgguguguguu

SEQ ID NO: 1114991 - RNA, 22 nt, Human
cugcuuuggcucagugacauca

SEQ ID NO: 1114992 - RNA, 22 nt, Human
gcuggcaucacuggcuucggug

SEQ ID NO: 1114993 - RNA, 22 nt, Human
gagcagaugugugccaggaugc

SEQ ID NO: 1114994 - RNA, 22 nt, Human
agagugaaguaauuguuaggau

SEQ ID NO: 1114995 - RNA, 22 nt, Human
gccaggcugcuccagggaggcc

SEQ ID NO: 1114996 - RNA, 22 nt, Human
guguaauuauauaaagaucuac

SEQ ID NO: 1114997 - RNA, 22 nt, Human
ggcugccugugcccaggcacac

SEQ ID NO: 1114998 - RNA, 22 nt, Human
cauugaaaaacguugacugagu

SEQ ID NO: 1114999 - RNA, 21 nt, Human
acagggcaugcagcuggcugu

SEQ ID NO: 1115000 - RNA, 22 nt, Human
cuccucugucuggcccugagcc

SEQ ID NO: 1115001 - RNA, 22 nt, Human
cuggcagcguguuuaugaacau

SEQ ID NO: 1115002 - RNA, 20 nt, Human
ggccuuggccucuuugcagc

SEQ ID NO: 1115003 - RNA, 22 nt, Human
agccauggcgccacuagaggga

SEQ ID NO: 1115004 - RNA, 22 nt, Human
ucagagucucccccaguuuggg

SEQ ID NO: 1115005 - RNA, 22 nt, Human
ccaggcugccgaggaaagaaag

SEQ ID NO: 1115006 - RNA, 22 nt, Human
ggcagcagaacuggcccuguau

SEQ ID NO: 1115007 - RNA, 20 nt, Human
ugcagagcuggcuggcuccu

SEQ ID NO: 1115008 - RNA, 22 nt, Human
aagggaggggauguaagccugg

SEQ ID NO: 1115009 - RNA, 22 nt, Human
caggcuggagugcaguugugca

SEQ ID NO: 1115010 - RNA, 22 nt, Human
aggccagcuguuacuagagcca

SEQ ID NO: 1115011 - RNA, 22 nt, Human
gcagcuggagccagccagacac

SEQ ID NO: 1115012 - RNA, 22 nt, Human
uccagagcagguggucagaagg

SEQ ID NO: 1115013 - RNA, 22 nt, Human
uugacaagaaucguugccuugg

SEQ ID NO: 1115014 - RNA, 22 nt, Human
ggcgugggaaguggggcuucug

SEQ ID NO: 1115015 - RNA, 23 nt, Human
acugagccagggccugggucagc

SEQ ID NO: 1115016 - RNA, 22 nt, Human
gccugaaguuucaugccucuau

SEQ ID NO: 1115017 - RNA, 22 nt, Human
uacauaguuccauuuacaggaa

SEQ ID NO: 1115018 - RNA, 22 nt, Human
ucaccagucuuucuuaccauug

SEQ ID NO: 1115019 - RNA, 22 nt, Human
ucacuuaaaaauucuaguuaug

SEQ ID NO: 1115020 - RNA, 20 nt, Human
uucaggauucuagaccacac

SEQ ID NO: 1115021 - RNA, 22 nt, Human
agacccugcaccucucgugggc

SEQ ID NO: 1115022 - RNA, 22 nt, Human
uguguguauaugcauuuaucua

SEQ ID NO: 1115023 - RNA, 22 nt, Human
uagagcuagcuucaaaaugcga

SEQ ID NO: 1115024 - RNA, 22 nt, Human
cagggcccaagacacaaugagg

SEQ ID NO: 1115025 - RNA, 22 nt, Human
guccucuguguaggcugcagac

SEQ ID NO: 1115026 - RNA, 22 nt, Human
cccagggucccugcucucugug

SEQ ID NO: 1115027 - RNA, 22 nt, Human
gaacagcugcuagagaucugug

SEQ ID NO: 1115028 - RNA, 22 nt, Human
uguauacauuuaacuagauaga

SEQ ID NO: 1115029 - RNA, 22 nt, Human
cuggcagcccaaccuagagucu

SEQ ID NO: 1115030 - RNA, 22 nt, Human
uggagcaagcuggagagaacau

SEQ ID NO: 1115031 - RNA, 22 nt, Human
gcucugagaggugcagcaguaa

SEQ ID NO: 1115032 - RNA, 18 nt, Human
cguuuuuccgggauugca

SEQ ID NO: 1115033 - RNA, 21 nt, Human
cugcucuggggaccggcugug

SEQ ID NO: 1115034 - RNA, 22 nt, Human
cacuacuugaaagaauuacaga

SEQ ID NO: 1115035 - RNA, 22 nt, Human
gagcucuguguagccugagggu

SEQ ID NO: 1115036 - RNA, 22 nt, Human
auaguacacauccuacaauguu

SEQ ID NO: 1115037 - RNA, 22 nt, Human
agcaggcuccuuccuucucugg

SEQ ID NO: 1115038 - RNA, 22 nt, Human
cuuccugcauugugccagaguu

SEQ ID NO: 1115039 - RNA, 22 nt, Human
ggacuggacucucaggcucaca

SEQ ID NO: 1115040 - RNA, 22 nt, Human
aggggagccccugguccuggug

SEQ ID NO: 1115041 - RNA, 22 nt, Human
guacaguuuucaguguucacug

SEQ ID NO: 1115042 - RNA, 22 nt, Human
uguccacaucacucacuuguca

SEQ ID NO: 1115043 - RNA, 22 nt, Human
agcaggagcugugggaagaugg

SEQ ID NO: 1115044 - RNA, 22 nt, Human
ggcaggcaggagcgugcuuggg

SEQ ID NO: 1115045 - RNA, 17 nt, Human
aggcugcugggccaggg

SEQ ID NO: 1115046 - RNA, 22 nt, Human
acagcaagccagcuugucacug

SEQ ID NO: 1115047 - RNA, 22 nt, Human
ggcugccagugagugcagaccg

SEQ ID NO: 1115048 - RNA, 22 nt, Human
gggcucugggauucagagcaag

SEQ ID NO: 1115049 - RNA, 18 nt, Human
cugaggcuggcaggagcc

SEQ ID NO: 1115050 - RNA, 22 nt, Human
uggcacugggaugcuacuguua

SEQ ID NO: 1115051 - RNA, 22 nt, Human
cugggcugagccugggcugugu

SEQ ID NO: 1115052 - RNA, 22 nt, Human
gccuccccugcaauuguccuug

SEQ ID NO: 1115053 - RNA, 22 nt, Human
ucugaagaacugaguaaacaug

SEQ ID NO: 1115054 - RNA, 22 nt, Human
ggcuucuccagguacugagcau

SEQ ID NO: 1115055 - RNA, 22 nt, Human
uuagaaaucugcugccaugcaa

SEQ ID NO: 1115056 - RNA, 22 nt, Human
ccagagccuaagaucugauccu

SEQ ID NO: 1115057 - RNA, 22 nt, Human
ucauugucuugauaugauuguc

SEQ ID NO: 1115058 - RNA, 23 nt, Human
cugucuccugggcuagguggaau

SEQ ID NO: 1115059 - RNA, 22 nt, Human
cugcagagcuaggcugagugaa

SEQ ID NO: 1115060 - RNA, 22 nt, Human
gggaguguugagcgcccugcca

SEQ ID NO: 1115061 - RNA, 22 nt, Human
uuccucagaaaauacuguccaa

SEQ ID NO: 1115062 - RNA, 22 nt, Human
uggcacugaccccaggccugug

SEQ ID NO: 1115063 - RNA, 22 nt, Human
gccuucugcgcucgugucuccg

SEQ ID NO: 1115064 - RNA, 22 nt, Human
aggcucagauccuuguguccug

SEQ ID NO: 1115065 - RNA, 22 nt, Human
cacaggaggaggccagagcgua

SEQ ID NO: 1115066 - RNA, 22 nt, Human
aggaaaaaccuguuaaugguag

SEQ ID NO: 1115067 - RNA, 22 nt, Human
guguuccauguuugagguaguu

SEQ ID NO: 1115068 - RNA, 21 nt, Human
aggcacuguuugugguuuggg

SEQ ID NO: 1115069 - RNA, 22 nt, Human
uuucaguggguuuauuucaugu

SEQ ID NO: 1115070 - RNA, 22 nt, Human
uggcugggccgggccuugugcc

SEQ ID NO: 1115071 - RNA, 22 nt, Human
ggccgggcaggucucagccagc

SEQ ID NO: 1115072 - RNA, 22 nt, Human
cccagcucucucaguucugcuu

SEQ ID NO: 1115073 - RNA, 22 nt, Human
aagcccagaugugagaacugag

SEQ ID NO: 1115074 - RNA, 22 nt, Human
gcaaggaccuuugagcgugcca

SEQ ID NO: 1115075 - RNA, 22 nt, Human
uccucaggauguggaguagaau

SEQ ID NO: 1115076 - RNA, 22 nt, Human
gaugggaggaaccugggucccu

SEQ ID NO: 1115077 - RNA, 22 nt, Human
ucccaggaucugagggcagaga

SEQ ID NO: 1115078 - RNA, 22 nt, Human
gcccucagaggacagcugacuu

SEQ ID NO: 1115079 - RNA, 22 nt, Human
cucugugccucaguuuucuucu

SEQ ID NO: 1115080 - RNA, 22 nt, Human
gcugccaguaguuggagcucca

SEQ ID NO: 1115081 - RNA, 19 nt, Human
uguuggugcggauguggag

SEQ ID NO: 1115082 - RNA, 22 nt, Human
cugcucugcaaggcacagugau

SEQ ID NO: 1115083 - RNA, 22 nt, Human
uggcucagcauucacuggucuu

SEQ ID NO: 1115084 - RNA, 22 nt, Human
gcauuguccugcuucugagugu

SEQ ID NO: 1115085 - RNA, 22 nt, Human
uugaaaggugacauuguuagag

SEQ ID NO: 1115086 - RNA, 22 nt, Human
aucaauucuuaggaaaauagcu

SEQ ID NO: 1115087 - RNA, 22 nt, Human
ccuggguggcagagguugcagu

SEQ ID NO: 1115088 - RNA, 20 nt, Human
ugcagggcucugcuucucuc

SEQ ID NO: 1115089 - RNA, 22 nt, Human
uguggccuccccacuucugggg

SEQ ID NO: 1115090 - RNA, 22 nt, Human
agcccaugcaacaggccuagcg

SEQ ID NO: 1115091 - RNA, 21 nt, Human
agcaggaggcagucacagcuc

SEQ ID NO: 1115092 - RNA, 18 nt, Human
cacaggcucccagugagg

SEQ ID NO: 1115093 - RNA, 22 nt, Human
ugcucagacaagcugaacagua

SEQ ID NO: 1115094 - RNA, 22 nt, Human
uuucacauacaguguauaguag

SEQ ID NO: 1115095 - RNA, 22 nt, Human
auugucgcuuauuuaggugcuu

SEQ ID NO: 1115096 - RNA, 23 nt, Human
cagcugaagcagccugggcugga

SEQ ID NO: 1115097 - RNA, 22 nt, Human
acagcugggugcugcucagagc

SEQ ID NO: 1115098 - RNA, 22 nt, Human
ccagggcaugggaagaacugaa

SEQ ID NO: 1115099 - RNA, 22 nt, Human
gggagagagagcucauguugaa

SEQ ID NO: 1115100 - RNA, 23 nt, Human
cuggccuccgacacuggccaaga

SEQ ID NO: 1115101 - RNA, 22 nt, Human
gcacugaaaauguuggauucca

SEQ ID NO: 1115102 - RNA, 22 nt, Human
ucucccacagccgugcuucaag

SEQ ID NO: 1115103 - RNA, 22 nt, Human
ccuggccuccuggccuucucau

SEQ ID NO: 1115104 - RNA, 22 nt, Human
ugcacccucaucagucaaaugg

SEQ ID NO: 1115105 - RNA, 22 nt, Human
gccacaugcaauugcagcacgu

SEQ ID NO: 1115106 - RNA, 22 nt, Human
cagcccuggaacagcugacuca

SEQ ID NO: 1115107 - RNA, 22 nt, Human
ugagcccuaagggucaagcagg

SEQ ID NO: 1115108 - RNA, 18 nt, Human
ugacucacccugucagug

SEQ ID NO: 1115109 - RNA, 22 nt, Human
cugggcagugguggcaucuuug

SEQ ID NO: 1115110 - RNA, 22 nt, Human
cagugcaguuucccagaugcug

SEQ ID NO: 1115111 - RNA, 22 nt, Human
ucgugucagaucagagguuccu

SEQ ID NO: 1115112 - RNA, 22 nt, Human
uccagcagggaauuaguagucu

SEQ ID NO: 1115113 - RNA, 21 nt, Human
ccuccaggagcagagcccuga

SEQ ID NO: 1115114 - RNA, 22 nt, Human
gugggaugcaguggugaguggc

SEQ ID NO: 1115115 - RNA, 21 nt, Human
ggucuuccaaauaaggagaaa

SEQ ID NO: 1115116 - RNA, 22 nt, Human
gaagcagcucagauugacugaa

SEQ ID NO: 1115117 - RNA, 22 nt, Human
agguuauaugucauacugaagu

SEQ ID NO: 1115118 - RNA, 22 nt, Human
ucuguaucacccguucccagaa

SEQ ID NO: 1115119 - RNA, 22 nt, Human
agagaugucgccuugcccaggg

SEQ ID NO: 1115120 - RNA, 22 nt, Human
uagaaaucuacuuagacuuucu

SEQ ID NO: 1115121 - RNA, 22 nt, Human
uccucacaagcaagcacaggua

SEQ ID NO: 1115122 - RNA, 22 nt, Human
ugcuggggucauggggcgcccg

SEQ ID NO: 1115123 - RNA, 22 nt, Human
ccaggccugcaucugcugcgca

SEQ ID NO: 1115124 - RNA, 22 nt, Human
aaaaguauuggccaccauuucu

SEQ ID NO: 1115125 - RNA, 22 nt, Human
ugcucuggaguggcuugugcac

SEQ ID NO: 1115126 - RNA, 22 nt, Human
cuuaacagcaagaucuguguca

SEQ ID NO: 1115127 - RNA, 22 nt, Human
gcugcucuccauggccgugagu

SEQ ID NO: 1115128 - RNA, 20 nt, Human
gugcauuucaccuguacugu

SEQ ID NO: 1115129 - RNA, 22 nt, Human
ggaucauuaacacauccaucac

SEQ ID NO: 1115130 - RNA, 22 nt, Human
gaguuguucaacgugugugaaa

SEQ ID NO: 1115131 - RNA, 22 nt, Human
agccuccaucccaugcacaaag

SEQ ID NO: 1115132 - RNA, 22 nt, Human
cugaaggauuagagagcacuua

SEQ ID NO: 1115133 - RNA, 22 nt, Human
uuagaaaugauuucaccucuuu

SEQ ID NO: 1115134 - RNA, 22 nt, Human
ucagaggaauaaugcugcauuu

SEQ ID NO: 1115135 - RNA, 21 nt, Human
ucagggcagugggagguuccu

SEQ ID NO: 1115136 - RNA, 22 nt, Human
gagggcagugaauuuugaagcu

SEQ ID NO: 1115137 - RNA, 22 nt, Human
uccugucugcucacagagcugg

SEQ ID NO: 1115138 - RNA, 22 nt, Human
agccuucauaaucuugggcuuu

SEQ ID NO: 1115139 - RNA, 22 nt, Human
ccuggcagacagcacugaagcu

SEQ ID NO: 1115140 - RNA, 21 nt, Human
uuugcauuuuacaugugggga

SEQ ID NO: 1115141 - RNA, 21 nt, Human
gacaggggaagaagcaaggag

SEQ ID NO: 1115142 - RNA, 22 nt, Human
ucucagagagcuguguuuuccu

SEQ ID NO: 1115143 - RNA, 22 nt, Human
ccuccaaguuugacucaggaca

SEQ ID NO: 1115144 - RNA, 22 nt, Human
aucaguuuggaacauucaggcc

SEQ ID NO: 1115145 - RNA, 22 nt, Human
auccuugagccaaugacugauu

SEQ ID NO: 1115146 - RNA, 22 nt, Human
ugaggcaggaguucaggcugcg

SEQ ID NO: 1115147 - RNA, 22 nt, Human
agccaagcaccacuggcacucg

SEQ ID NO: 1115148 - RNA, 22 nt, Human
ggcucaggccagaccacgacuc

SEQ ID NO: 1115149 - RNA, 22 nt, Human
gaagcccaggcuuccuuggcuu

SEQ ID NO: 1115150 - RNA, 21 nt, Human
ugggcacugagggugcugcuc

SEQ ID NO: 1115151 - RNA, 22 nt, Human
ugcugccaugcagagcaacaga

SEQ ID NO: 1115152 - RNA, 22 nt, Human
ucaccuuagcuagaggaagaga

SEQ ID NO: 1115153 - RNA, 23 nt, Human
aggagaagagauuuccacaugca

SEQ ID NO: 1115154 - RNA, 22 nt, Human
guuggccugaauggucaagagg

SEQ ID NO: 1115155 - RNA, 22 nt, Human
ggacaggguaaguacuagugug

SEQ ID NO: 1115156 - RNA, 22 nt, Human
gggagcugagggaccucugugg

SEQ ID NO: 1115157 - RNA, 22 nt, Human
uggggaggacgggcgccuuccu

SEQ ID NO: 1115158 - RNA, 22 nt, Human
gcagccuguuguaccagccugu

SEQ ID NO: 1115159 - RNA, 20 nt, Human
gccagcacagggagcaguuc

SEQ ID NO: 1115160 - RNA, 22 nt, Human
gcucagagaugucugcugccuu

SEQ ID NO: 1115161 - RNA, 22 nt, Human
cagugucuuauuuguagcucag

SEQ ID NO: 1115162 - RNA, 22 nt, Human
cacagaauaaauugguaucaga

SEQ ID NO: 1115163 - RNA, 22 nt, Human
agucccagcucagaaccacuag

SEQ ID NO: 1115164 - RNA, 22 nt, Human
agccacaggaaacagagacagc

SEQ ID NO: 1115165 - RNA, 22 nt, Human
gaggcagagugcaccccaggag

SEQ ID NO: 1115166 - RNA, 22 nt, Human
uaaaugugucuuuuuaaggccu

SEQ ID NO: 1115167 - RNA, 22 nt, Human
guagaagugaugucauguuaua

SEQ ID NO: 1115168 - RNA, 22 nt, Human
aaaguuuuagaacuaggaagca

SEQ ID NO: 1115169 - RNA, 22 nt, Human
guccucuggccuuucccaggac

SEQ ID NO: 1115170 - RNA, 22 nt, Human
gcucaggaaaacagucuaguaa

SEQ ID NO: 1115171 - RNA, 22 nt, Human
ggcagcuuuuaucccugacaga

SEQ ID NO: 1115172 - RNA, 22 nt, Human
ggcagccaugucccagggcuuc

SEQ ID NO: 1115173 - RNA, 22 nt, Human
uggcuuccacugugugcccccu

SEQ ID NO: 1115174 - RNA, 21 nt, Human
guuuuaagggagaaaaccuag

SEQ ID NO: 1115175 - RNA, 22 nt, Human
uauucacaguugauuuacaguu

SEQ ID NO: 1115176 - RNA, 22 nt, Human
ucaggcagaugcagggauggau

SEQ ID NO: 1115177 - RNA, 22 nt, Human
ccucugcagcagagagccagag

SEQ ID NO: 1115178 - RNA, 22 nt, Human
agccuggaggccaggagacagu

SEQ ID NO: 1115179 - RNA, 21 nt, Human
guggcccugccgcagugucca

SEQ ID NO: 1115180 - RNA, 22 nt, Human
gucccagaugucuggaacuccc

SEQ ID NO: 1115181 - RNA, 22 nt, Human
ggaaccaggaguuacacgaguu

SEQ ID NO: 1115182 - RNA, 22 nt, Human
gcuugcuggugccugcaggcuc

SEQ ID NO: 1115183 - RNA, 22 nt, Human
ccagagccugcugagccccauu

SEQ ID NO: 1115184 - RNA, 22 nt, Human
gcaugcugcaccagagccucuc

SEQ ID NO: 1115185 - RNA, 23 nt, Human
acagggcauugcuggccucgagg

SEQ ID NO: 1115186 - RNA, 19 nt, Human
aggcugcaagguggugggc

SEQ ID NO: 1115187 - RNA, 22 nt, Human
cagggccaccguguuugcugcu

SEQ ID NO: 1115188 - RNA, 22 nt, Human
ccaggcauccauugcuuccucu

SEQ ID NO: 1115189 - RNA, 22 nt, Human
agcugguuagcaaucuaaguga

SEQ ID NO: 1115190 - RNA, 22 nt, Human
ccaguccagugccaugcauggc

SEQ ID NO: 1115191 - RNA, 22 nt, Human
cugcucugaagccaggauucug

SEQ ID NO: 1115192 - RNA, 22 nt, Human
cacaagacuuauuuguguagaa

SEQ ID NO: 1115193 - RNA, 22 nt, Human
ggccucuggucaagacaagcau

SEQ ID NO: 1115194 - RNA, 22 nt, Human
gcagcugccuauucagggcuug

SEQ ID NO: 1115195 - RNA, 22 nt, Human
gcugcccaggguggagccggcu

SEQ ID NO: 1115196 - RNA, 22 nt, Human
acagcugugaaaauccacagga

SEQ ID NO: 1115197 - RNA, 22 nt, Human
uuugcauugcagugguuuacag

SEQ ID NO: 1115198 - RNA, 22 nt, Human
ccugggucacucaggcaggcgg

SEQ ID NO: 1115199 - RNA, 22 nt, Human
ccagagucuaugaguccucauu

SEQ ID NO: 1115200 - RNA, 21 nt, Human
gccagggaagagaguuggcug

SEQ ID NO: 1115201 - RNA, 22 nt, Human
uggcucugcugaaccuagugca

SEQ ID NO: 1115202 - RNA, 22 nt, Human
uggcccugacacgugguacugg

SEQ ID NO: 1115203 - RNA, 22 nt, Human
gagagcugucagcguagcaccg

SEQ ID NO: 1115204 - RNA, 22 nt, Human
ugugcccauuccacuugaguac

SEQ ID NO: 1115205 - RNA, 22 nt, Human
ucaguuuucucaucugugaaau

SEQ ID NO: 1115206 - RNA, 22 nt, Human
cacaccuguaauaccagcuacu

SEQ ID NO: 1115207 - RNA, 22 nt, Human
ucugccugcuaacuccugcacc

SEQ ID NO: 1115208 - RNA, 22 nt, Human
ccagccuggacugggucuugug

SEQ ID NO: 1115209 - RNA, 22 nt, Human
cuggcucuaucuccaaggcugg

SEQ ID NO: 1115210 - RNA, 22 nt, Human
acaggggauugauuggaagucu

SEQ ID NO: 1115211 - RNA, 22 nt, Human
agucuucagagaaauuaacucu

SEQ ID NO: 1115212 - RNA, 22 nt, Human
uaugcacacauuagcacagggu

SEQ ID NO: 1115213 - RNA, 22 nt, Human
uuacugaaaauucuucaggauu

SEQ ID NO: 1115214 - RNA, 22 nt, Human
aaguuugagagccuuuaguaua

SEQ ID NO: 1115215 - RNA, 22 nt, Human
cucugagcagaggccguggcua

SEQ ID NO: 1115216 - RNA, 22 nt, Human
gcaggaugccagggcagcagcg

SEQ ID NO: 1115217 - RNA, 22 nt, Human
ccgggcgggggcucucgucacc

SEQ ID NO: 1115218 - RNA, 22 nt, Human
agcccagcaaagggagguucag

SEQ ID NO: 1115219 - RNA, 22 nt, Human
ugucacaaacauacauuauaga

SEQ ID NO: 1115220 - RNA, 22 nt, Human
gaaagagaaccugggccuagau

SEQ ID NO: 1115221 - RNA, 22 nt, Human
aggguauguuuuuaucuacugu

SEQ ID NO: 1115222 - RNA, 22 nt, Human
cuuccucaugugcaaugcaagc

SEQ ID NO: 1115223 - RNA, 22 nt, Human
ucaaaguagggguaagccaggc

SEQ ID NO: 1115224 - RNA, 22 nt, Human
caugggaggucugcaaggugcu

SEQ ID NO: 1115225 - RNA, 22 nt, Human
acuggaagccaguugacaauca

SEQ ID NO: 1115226 - RNA, 22 nt, Human
ugggacugcucuugcugggguc

SEQ ID NO: 1115227 - RNA, 22 nt, Human
cagcaggguauacagggaauuu

SEQ ID NO: 1115228 - RNA, 22 nt, Human
agguggguccuggcucugccau

SEQ ID NO: 1115229 - RNA, 22 nt, Human
ccuguccuccaagagcacaucu

SEQ ID NO: 1115230 - RNA, 22 nt, Human
cuuggcagagggcugggcucag

SEQ ID NO: 1115231 - RNA, 22 nt, Human
auaauuuaauuuucacaguggu

SEQ ID NO: 1115232 - RNA, 20 nt, Human
cuucaggacccauccucccc

SEQ ID NO: 1115233 - RNA, 19 nt, Human
ucuggagcugaugcaggug

SEQ ID NO: 1115234 - RNA, 22 nt, Human
ccugccagucacuaugucaccu

SEQ ID NO: 1115235 - RNA, 22 nt, Human
aagggcaggcacccacccucac

SEQ ID NO: 1115236 - RNA, 18 nt, Human
cugagggcagccccuggg

SEQ ID NO: 1115237 - RNA, 22 nt, Human
accugccuaucagcugccugcu

SEQ ID NO: 1115238 - RNA, 22 nt, Human
gccagcaguauguccuggcagu

SEQ ID NO: 1115239 - RNA, 22 nt, Human
acugucaccaucagagcgggaa

SEQ ID NO: 1115240 - RNA, 22 nt, Human
ucucacucauuuccuaggucuu

SEQ ID NO: 1115241 - RNA, 22 nt, Human
gcugccugcacagagcugcuuu

SEQ ID NO: 1115242 - RNA, 22 nt, Human
ucucagagaucuuucugcaugu

SEQ ID NO: 1115243 - RNA, 20 nt, Human
gugugaagcccucaggagga

SEQ ID NO: 1115244 - RNA, 22 nt, Human
cccaggaggucgaagcugcagu

SEQ ID NO: 1115245 - RNA, 22 nt, Human
cccagaaggucgaggcugcagu

SEQ ID NO: 1115246 - RNA, 22 nt, Human
ucaaacuguuuacagugagaua

SEQ ID NO: 1115247 - RNA, 22 nt, Human
cuguacaucucugaggacagua

SEQ ID NO: 1115248 - RNA, 18 nt, Human
aggcccuggccucgaaca

SEQ ID NO: 1115249 - RNA, 22 nt, Human
ggagaagggacagacucagcuu

SEQ ID NO: 1115250 - RNA, 22 nt, Human
uccucugccccagaugaaauuu

SEQ ID NO: 1115251 - RNA, 22 nt, Human
guuguauucuucaauaucagag

SEQ ID NO: 1115252 - RNA, 22 nt, Human
uuuaucuuuggaucuucagaaa

SEQ ID NO: 1115253 - RNA, 22 nt, Human
agaaugcauuuuguguagcuau

SEQ ID NO: 1115254 - RNA, 22 nt, Human
agagcugcccacacagcagauu

SEQ ID NO: 1115255 - RNA, 22 nt, Human
uggaggcaucagagugcuuggc

SEQ ID NO: 1115256 - RNA, 22 nt, Human
uggagcuggaauuucugggccu

SEQ ID NO: 1115257 - RNA, 22 nt, Human
agcccucauggaacagcuccua

SEQ ID NO: 1115258 - RNA, 22 nt, Human
ucucuuuuauguacacccugac

SEQ ID NO: 1115259 - RNA, 22 nt, Human
ccuggccuggcacucccucugc

SEQ ID NO: 1115260 - RNA, 22 nt, Human
caggggccaggcugucugcugu

SEQ ID NO: 1115261 - RNA, 22 nt, Human
ggaggcucugcuccguguguuc

SEQ ID NO: 1115262 - RNA, 22 nt, Human
uuccugagggacuuuugagauu

SEQ ID NO: 1115263 - RNA, 22 nt, Human
aaggcugauuagacugauagcu

SEQ ID NO: 1115264 - RNA, 22 nt, Human
cauggccugccuccuccuggug

SEQ ID NO: 1115265 - RNA, 22 nt, Human
uggagcuggaauuugagcugga

SEQ ID NO: 1115266 - RNA, 20 nt, Human
cucuccuugccgacuuggca

SEQ ID NO: 1115267 - RNA, 22 nt, Human
uauaacacucagaaagaaucau

SEQ ID NO: 1115268 - RNA, 22 nt, Human
uagggcagccuuauagcuccca

SEQ ID NO: 1115269 - RNA, 22 nt, Human
uccucccacauaggacaauggg

SEQ ID NO: 1115270 - RNA, 22 nt, Human
gccagggagucugggccacaga

SEQ ID NO: 1115271 - RNA, 22 nt, Human
acaggagugaaucuggcacuua

SEQ ID NO: 1115272 - RNA, 22 nt, Human
agagugaagguugacacuucac

SEQ ID NO: 1115273 - RNA, 22 nt, Human
cuggagagggagcccuggcagu

SEQ ID NO: 1115274 - RNA, 23 nt, Human
gcugucugucaucucugcgggag

SEQ ID NO: 1115275 - RNA, 22 nt, Human
gcagguggcagaggugggaucu

SEQ ID NO: 1115276 - RNA, 22 nt, Human
ucccagagcugauaagccuuua

SEQ ID NO: 1115277 - RNA, 20 nt, Human
cuccagggaacagacuggag

SEQ ID NO: 1115278 - RNA, 22 nt, Human
accuuuuuguucuguucucagc

SEQ ID NO: 1115279 - RNA, 22 nt, Human
uccucuucugcccaucagaggc

SEQ ID NO: 1115280 - RNA, 22 nt, Human
ucucaagcuuguugguauguuu

SEQ ID NO: 1115281 - RNA, 22 nt, Human
gcacugaaugcuuuuacuguaa

SEQ ID NO: 1115282 - RNA, 22 nt, Human
gcugccuguguggccacucacu

SEQ ID NO: 1115283 - RNA, 22 nt, Human
agcagggcagugcuucagcucu

SEQ ID NO: 1115284 - RNA, 22 nt, Human
guuugcauaaaguggaugcagg

SEQ ID NO: 1115285 - RNA, 22 nt, Human
ggcuucccagcagagggcgcac

SEQ ID NO: 1115286 - RNA, 22 nt, Human
aggccugaaggaagaugagcug

SEQ ID NO: 1115287 - RNA, 22 nt, Human
acauuucuuugcuagacagcag

SEQ ID NO: 1115288 - RNA, 22 nt, Human
cuggaugcuuccucucugcuag

SEQ ID NO: 1115289 - RNA, 22 nt, Human
ucaccugggagggcugugguag

SEQ ID NO: 1115290 - RNA, 22 nt, Human
ugccaggcuaaguggaggacuu

SEQ ID NO: 1115291 - RNA, 22 nt, Human
acugaaggaagcgggcaggggu

SEQ ID NO: 1115292 - RNA, 22 nt, Human
cccuccagagcuugaccugcug

SEQ ID NO: 1115293 - RNA, 22 nt, Human
agaggaugguugaggaagaccu

SEQ ID NO: 1115294 - RNA, 22 nt, Human
ugggcuccagcaccugugcucu

SEQ ID NO: 1115295 - RNA, 22 nt, Human
cuucuaggcuucucagggggca

SEQ ID NO: 1115296 - RNA, 22 nt, Human
uggcagagagacucuccuugau

SEQ ID NO: 1115297 - RNA, 22 nt, Human
gccuucagcggccgcucgcugc

SEQ ID NO: 1115298 - RNA, 22 nt, Human
uugaagcauuugcuauagcauu

SEQ ID NO: 1115299 - RNA, 22 nt, Human
aaggacagaaacagauugcugg

SEQ ID NO: 1115300 - RNA, 22 nt, Human
cauauaaauacaacauguguua

SEQ ID NO: 1115301 - RNA, 22 nt, Human
gagggggcgugcaaggcuccgc

SEQ ID NO: 1115302 - RNA, 22 nt, Human
gccugagaaggauaggaagcga

SEQ ID NO: 1115303 - RNA, 22 nt, Human
caagagcuagacuuugucagga

SEQ ID NO: 1115304 - RNA, 22 nt, Human
aguuuagaguucaaauuaguuc

SEQ ID NO: 1115305 - RNA, 22 nt, Human
ccaggagcaggagcuggacaga

SEQ ID NO: 1115306 - RNA, 22 nt, Human
agggaugguggagguugcaagu

SEQ ID NO: 1115307 - RNA, 22 nt, Human
guuauaaauaccuaauaggauu

SEQ ID NO: 1115308 - RNA, 22 nt, Human
cagccccucccucaggcaggug

SEQ ID NO: 1115309 - RNA, 22 nt, Human
cugggaguugacgaggcuugua

SEQ ID NO: 1115310 - RNA, 20 nt, Human
ugcagcugguuucacaggga

SEQ ID NO: 1115311 - RNA, 22 nt, Human
guggccugaugccagcccugug

SEQ ID NO: 1115312 - RNA, 22 nt, Human
aaagauuucacaucccaagccu

SEQ ID NO: 1115313 - RNA, 22 nt, Human
ugucaugccaggaaauaguccc

SEQ ID NO: 1115314 - RNA, 21 nt, Human
acagacagggccagugucccc

SEQ ID NO: 1115315 - RNA, 22 nt, Human
caggaggaggugagguagaacu

SEQ ID NO: 1115316 - RNA, 22 nt, Human
acacaugcauaagccuucccuu

SEQ ID NO: 1115317 - RNA, 22 nt, Human
agauguuccagccaaugggaau

SEQ ID NO: 1115318 - RNA, 22 nt, Human
aggucauuuuugccuucuauuu

SEQ ID NO: 1115319 - RNA, 22 nt, Human
uguccucuuccagugcuccuuc

SEQ ID NO: 1115320 - RNA, 22 nt, Human
guccagggcuaaaucagguucc

SEQ ID NO: 1115321 - RNA, 22 nt, Human
ggcaguggugggaggcucgcuc

SEQ ID NO: 1115322 - RNA, 22 nt, Human
uguggccagcagguggcugugu

SEQ ID NO: 1115323 - RNA, 21 nt, Human
ccuauugaauauaggaagauu

SEQ ID NO: 1115324 - RNA, 22 nt, Human
gagaaagacguaggcugggagg

SEQ ID NO: 1115325 - RNA, 22 nt, Human
ccuggccacucagguguggggc

SEQ ID NO: 1115326 - RNA, 22 nt, Human
gccagcucagugccaggccccu

SEQ ID NO: 1115327 - RNA, 22 nt, Human
acagugucugacacauuguagc

SEQ ID NO: 1115328 - RNA, 22 nt, Human
caguggguaggaaaggcucuuc

SEQ ID NO: 1115329 - RNA, 22 nt, Human
cuguuuauaaauagaggggagu

SEQ ID NO: 1115330 - RNA, 22 nt, Human
acaggcugcugagccauuugcu

SEQ ID NO: 1115331 - RNA, 22 nt, Human
ccaaagucagugcucagucguc

SEQ ID NO: 1115332 - RNA, 22 nt, Human
ucccagcauaacaaacugcccg

SEQ ID NO: 1115333 - RNA, 22 nt, Human
cacugggcaauucugagccuaa

SEQ ID NO: 1115334 - RNA, 19 nt, Human
acuuucuccaggaccuguu

SEQ ID NO: 1115335 - RNA, 22 nt, Human
aggccugggacgggagccguga

SEQ ID NO: 1115336 - RNA, 22 nt, Human
uagggaggcuacuucuuguagg

SEQ ID NO: 1115337 - RNA, 22 nt, Human
uccuggaguauuucuguggugu

SEQ ID NO: 1115338 - RNA, 17 nt, Human
ucaggcugugccuggua

SEQ ID NO: 1115339 - RNA, 22 nt, Human
uccagcagguuggucaggugca

SEQ ID NO: 1115340 - RNA, 22 nt, Human
ucugguuagccaauaaugccaa

SEQ ID NO: 1115341 - RNA, 22 nt, Human
gucccuuggcucacaaacagcu

SEQ ID NO: 1115342 - RNA, 22 nt, Human
ugccagcacaaguuaagagauc

SEQ ID NO: 1115343 - RNA, 22 nt, Human
ugccaggccucaggagucucca

SEQ ID NO: 1115344 - RNA, 22 nt, Human
ugaagcagauggucuggucauu

SEQ ID NO: 1115345 - RNA, 22 nt, Human
gaguuauuuguagggauuauau

SEQ ID NO: 1115346 - RNA, 22 nt, Human
aggcagagcugauguucuguga

SEQ ID NO: 1115347 - RNA, 22 nt, Human
cagaaauggaauuuuccaucac

SEQ ID NO: 1115348 - RNA, 22 nt, Human
cagaggcuguguaggcagacug

SEQ ID NO: 1115349 - RNA, 22 nt, Human
aucuuccuucacuuucucccac

SEQ ID NO: 1115350 - RNA, 22 nt, Human
aaggcagccucugccagccggg

SEQ ID NO: 1115351 - RNA, 22 nt, Human
gggagggaaggaccuuaugaau

SEQ ID NO: 1115352 - RNA, 23 nt, Human
gccucuggagccccagugcucag

SEQ ID NO: 1115353 - RNA, 22 nt, Human
aggcugcaggucugggucaugu

SEQ ID NO: 1115354 - RNA, 19 nt, Human
ccuuccuccccagggccau

SEQ ID NO: 1115355 - RNA, 22 nt, Human
aggaggcccuagagcucuagag

SEQ ID NO: 1115356 - RNA, 22 nt, Human
uguggccucaaggcugcccuca

SEQ ID NO: 1115357 - RNA, 22 nt, Human
cuggcucauagagcagcuccaa

SEQ ID NO: 1115358 - RNA, 22 nt, Human
gaggaaugucagcacaggccuc

SEQ ID NO: 1115359 - RNA, 22 nt, Human
gaggccuggcugggaggaggug

SEQ ID NO: 1115360 - RNA, 22 nt, Human
aagaguuuucuauaaucuuggc

SEQ ID NO: 1115361 - RNA, 23 nt, Human
agccucuuuucuccugcccugca

SEQ ID NO: 1115362 - RNA, 22 nt, Human
aggccucagugaucaucaucag

SEQ ID NO: 1115363 - RNA, 20 nt, Human
gcucccagccugcagucccc

SEQ ID NO: 1115364 - RNA, 22 nt, Human
cacacaggagagugcuggaggu

SEQ ID NO: 1115365 - RNA, 22 nt, Human
uccuggagagugggcgagcaca

SEQ ID NO: 1115366 - RNA, 22 nt, Human
ucgagucauguucucccauuaa

SEQ ID NO: 1115367 - RNA, 22 nt, Human
cugcugcugagagcucagccug

SEQ ID NO: 1115368 - RNA, 22 nt, Human
gcugucugggaggccuccacuu

SEQ ID NO: 1115369 - RNA, 22 nt, Human
ccucugaggucauggacuuggc

SEQ ID NO: 1115370 - RNA, 22 nt, Human
agccccaggcccggacgccucu

SEQ ID NO: 1115371 - RNA, 22 nt, Human
gcugagagcaguguggccuuaa

SEQ ID NO: 1115372 - RNA, 23 nt, Human
acagcaagaggaccagaugugag

SEQ ID NO: 1115373 - RNA, 22 nt, Human
gaaaucugcggugaggccugag

SEQ ID NO: 1115374 - RNA, 18 nt, Human
uggcucugcagccagaug

SEQ ID NO: 1115375 - RNA, 22 nt, Human
uuucucugaggcuggccucccu

SEQ ID NO: 1115376 - RNA, 22 nt, Human
aaucagaauuuauugaaucuuu

SEQ ID NO: 1115377 - RNA, 19 nt, Human
cucugccucuggcuguggc

SEQ ID NO: 1115378 - RNA, 22 nt, Human
gccugcagaacugugaggcaau

SEQ ID NO: 1115379 - RNA, 22 nt, Human
cagggccucuccuccaggaacu

SEQ ID NO: 1115380 - RNA, 23 nt, Human
ugaugggaaggaacgacuaccac

SEQ ID NO: 1115381 - RNA, 22 nt, Human
uguccugcaacugaaggagaag

SEQ ID NO: 1115382 - RNA, 22 nt, Human
uuugcuauuuuucugugcagcu

SEQ ID NO: 1115383 - RNA, 22 nt, Human
ccaggaagcggugagggcugcc

SEQ ID NO: 1115384 - RNA, 22 nt, Human
guggccuuuccugaagaaauga

SEQ ID NO: 1115385 - RNA, 22 nt, Human
cucucccccacagcagccuucu

SEQ ID NO: 1115386 - RNA, 22 nt, Human
ucaggcaggcagagggcaaaug

SEQ ID NO: 1115387 - RNA, 22 nt, Human
ucuaggagcaugaagggaaggc

SEQ ID NO: 1115388 - RNA, 22 nt, Human
gugagcagaacagguggcuucu

SEQ ID NO: 1115389 - RNA, 22 nt, Human
cagccagccucucaaccaugca

SEQ ID NO: 1115390 - RNA, 22 nt, Human
ucugaggcuauguucaggcuaa

SEQ ID NO: 1115391 - RNA, 22 nt, Human
ugugaaggcagcagcucugucc

SEQ ID NO: 1115392 - RNA, 22 nt, Human
cccuggaagguucucuggcuca

SEQ ID NO: 1115393 - RNA, 22 nt, Human
cucucuggcuuggcacggagau

SEQ ID NO: 1115394 - RNA, 18 nt, Human
gccugggaggaggaaaug

SEQ ID NO: 1115395 - RNA, 22 nt, Human
uucaagauggccccagugagcc

SEQ ID NO: 1115396 - RNA, 21 nt, Human
ucaggggcuguguuuuccauc

SEQ ID NO: 1115397 - RNA, 22 nt, Human
ugucucaguacacuccgauguu

SEQ ID NO: 1115398 - RNA, 22 nt, Human
gcagggcagccacaggcccccu

SEQ ID NO: 1115399 - RNA, 22 nt, Human
guggcuucuggcugggccucag

SEQ ID NO: 1115400 - RNA, 21 nt, Human
ugcaggagucugugagucagg

SEQ ID NO: 1115401 - RNA, 19 nt, Human
acacagggcuagaguuaca

SEQ ID NO: 1115402 - RNA, 22 nt, Human
uacagucuuuggaaagagauag

SEQ ID NO: 1115403 - RNA, 22 nt, Human
cuggcagguccagcuggacuca

SEQ ID NO: 1115404 - RNA, 22 nt, Human
cuuuccuagauggccaucuuuc

SEQ ID NO: 1115405 - RNA, 22 nt, Human
ugaaguccuagaacuccuggua

SEQ ID NO: 1115406 - RNA, 22 nt, Human
gccuuccuuacaccugcucagc

SEQ ID NO: 1115407 - RNA, 22 nt, Human
caggagcagaggguggucagca

SEQ ID NO: 1115408 - RNA, 22 nt, Human
aucaguuuguauaugaaacacu

SEQ ID NO: 1115409 - RNA, 22 nt, Human
ucugucuccugccagugccucu

SEQ ID NO: 1115410 - RNA, 22 nt, Human
agggcagaaauauugauacugu

SEQ ID NO: 1115411 - RNA, 22 nt, Human
uaaguucauuagacuacagaua

SEQ ID NO: 1115412 - RNA, 22 nt, Human
cagcuugcuaauuuugacuuca

SEQ ID NO: 1115413 - RNA, 21 nt, Human
aagggagauaggaaucaggcc

SEQ ID NO: 1115414 - RNA, 22 nt, Human
guuugucuuaauuaggcaucga

SEQ ID NO: 1115415 - RNA, 22 nt, Human
gagcucaggagcaucagaagaa

SEQ ID NO: 1115416 - RNA, 22 nt, Human
aggugccagcucucaggcagga

SEQ ID NO: 1115417 - RNA, 22 nt, Human
ugaugauguuuaucuugguauu

SEQ ID NO: 1115418 - RNA, 19 nt, Human
augucccaccgccccugag

SEQ ID NO: 1115419 - RNA, 22 nt, Human
ccugagggcgccgagcucccag

SEQ ID NO: 1115420 - RNA, 22 nt, Human
ccagccagucccgcaugaccgc

SEQ ID NO: 1115421 - RNA, 22 nt, Human
agcugucuuucugccuccugau

SEQ ID NO: 1115422 - RNA, 23 nt, Human
gggagccaggaccucgcgcccca

SEQ ID NO: 1115423 - RNA, 22 nt, Human
caauguguuugcauauuaaaau

SEQ ID NO: 1115424 - RNA, 22 nt, Human
uuauuauuuuguguacagcaaa

SEQ ID NO: 1115425 - RNA, 22 nt, Human
acuuuuuacaggguguauacca

SEQ ID NO: 1115426 - RNA, 19 nt, Human
gggaugggcccucacccuc

SEQ ID NO: 1115427 - RNA, 19 nt, Human
aagcagcccuggcaagagc

SEQ ID NO: 1115428 - RNA, 22 nt, Human
aaaucaguuaagaugaggccau

SEQ ID NO: 1115429 - RNA, 22 nt, Human
aacccuggggcagcugcuaggg

SEQ ID NO: 1115430 - RNA, 19 nt, Human
ugcagccacgugagagacu

SEQ ID NO: 1115431 - RNA, 18 nt, Human
caugucugcgccacaagg

SEQ ID NO: 1115432 - RNA, 22 nt, Human
ggcugggcucgcugauuggcug

SEQ ID NO: 1115433 - RNA, 22 nt, Human
caggcacuagcagaaugaggcu

SEQ ID NO: 1115434 - RNA, 22 nt, Human
agcccaagcauaggagggaggc

SEQ ID NO: 1115435 - RNA, 20 nt, Human
gagggcaggcacccauuuca

SEQ ID NO: 1115436 - RNA, 22 nt, Human
cccagcacaggcaauuccauac

SEQ ID NO: 1115437 - RNA, 22 nt, Human
gcugucacacaugggaucucag

SEQ ID NO: 1115438 - RNA, 22 nt, Human
ucaggagaaucagggcuguccu

SEQ ID NO: 1115439 - RNA, 21 nt, Human
ccagagccugcugagcccccu

SEQ ID NO: 1115440 - RNA, 22 nt, Human
gccaggaguucagaugcauguu

SEQ ID NO: 1115441 - RNA, 22 nt, Human
aggaggccgggauucuggagau

SEQ ID NO: 1115442 - RNA, 20 nt, Human
agcccaggccugugugaguc

SEQ ID NO: 1115443 - RNA, 22 nt, Human
ucugcaggaaaaaagugccugg

SEQ ID NO: 1115444 - RNA, 22 nt, Human
gagggguguggagccaucaguu

SEQ ID NO: 1115445 - RNA, 22 nt, Human
cauuaugugggaaaauguucuu

SEQ ID NO: 1115446 - RNA, 22 nt, Human
aggagcugaaacuucucauaug

SEQ ID NO: 1115447 - RNA, 22 nt, Human
aguggcagccgagcaggagaug

SEQ ID NO: 1115448 - RNA, 22 nt, Human
uaaaugcaaugugcuuuaccag

SEQ ID NO: 1115449 - RNA, 22 nt, Human
ggcaguggguggaucucaggga

SEQ ID NO: 1115450 - RNA, 22 nt, Human
cagggcagccaggccccguggg

SEQ ID NO: 1115451 - RNA, 22 nt, Human
cuucuuuccuuccuccaguggc

SEQ ID NO: 1115452 - RNA, 22 nt, Human
cagcugccugucuggaggcaau

SEQ ID NO: 1115453 - RNA, 22 nt, Human
cccagacuccucuggcuggugg

SEQ ID NO: 1115454 - RNA, 22 nt, Human
cucacuggcaagacuacaggug

SEQ ID NO: 1115455 - RNA, 23 nt, Human
uggccucuccccaccuggcagaa

SEQ ID NO: 1115456 - RNA, 22 nt, Human
cugaaggauuuaguucuuugcu

SEQ ID NO: 1115457 - RNA, 22 nt, Human
uuuugaaagaguccugcuacag

SEQ ID NO: 1115458 - RNA, 22 nt, Human
gcccagaguucaaggcugcagu

SEQ ID NO: 1115459 - RNA, 22 nt, Human
ucacgagaggcacagaauagag

SEQ ID NO: 1115460 - RNA, 22 nt, Human
ccugugugcacacgaggccaug

SEQ ID NO: 1115461 - RNA, 22 nt, Human
ugggcucugaagucagucugcu

SEQ ID NO: 1115462 - RNA, 22 nt, Human
agccuggaccaggggccucaga

SEQ ID NO: 1115463 - RNA, 22 nt, Human
cugaggcucaagggcagguggg

SEQ ID NO: 1115464 - RNA, 22 nt, Human
auccuugacacacuccaguacu

SEQ ID NO: 1115465 - RNA, 22 nt, Human
aaaagucagucucuccuagcuc

SEQ ID NO: 1115466 - RNA, 19 nt, Human
ccuuugaaucaggacacuu

SEQ ID NO: 1115467 - RNA, 22 nt, Human
ccucugccaccucccacgaggc

SEQ ID NO: 1115468 - RNA, 22 nt, Human
uaccuuuugcuuauuaugacac

SEQ ID NO: 1115469 - RNA, 22 nt, Human
aucacaggugguaggaaaagaa

SEQ ID NO: 1115470 - RNA, 22 nt, Human
ccuggcugguggcagcgacaag

SEQ ID NO: 1115471 - RNA, 22 nt, Human
ucccagaggcaguugguaacuu

SEQ ID NO: 1115472 - RNA, 19 nt, Human
cagagcagugguuccugaa

SEQ ID NO: 1115473 - RNA, 22 nt, Human
cagggccacccucugcugggug

SEQ ID NO: 1115474 - RNA, 22 nt, Human
caaaggagguaaugggugugag

SEQ ID NO: 1115475 - RNA, 22 nt, Human
uuacuuugaugaucaaugagcg

SEQ ID NO: 1115476 - RNA, 22 nt, Human
ccaaggagaaugacaccaugga

SEQ ID NO: 1115477 - RNA, 22 nt, Human
cagccagcuggcacugugagua

SEQ ID NO: 1115478 - RNA, 19 nt, Human
gccacuccugaugcugccc

SEQ ID NO: 1115479 - RNA, 23 nt, Human
ggccauggagacuuagaaugggc

SEQ ID NO: 1115480 - RNA, 22 nt, Human
uguuccuaaauaugaauggaga

SEQ ID NO: 1115481 - RNA, 22 nt, Human
gcugguuaggugagggugcgcc

SEQ ID NO: 1115482 - RNA, 22 nt, Human
gauuucuucauucauuagaugg

SEQ ID NO: 1115483 - RNA, 18 nt, Human
ucuuggaguaaugaucaa

SEQ ID NO: 1115484 - RNA, 20 nt, Human
cagcaggaaaagugccucag

SEQ ID NO: 1115485 - RNA, 22 nt, Human
uagcagcucugauucugggccc

SEQ ID NO: 1115486 - RNA, 20 nt, Human
ggcucuggaaucuggugggc

SEQ ID NO: 1115487 - RNA, 22 nt, Human
uauugacaauuugugaaacuau

SEQ ID NO: 1115488 - RNA, 19 nt, Human
agagaggcugugugaggga

SEQ ID NO: 1115489 - RNA, 22 nt, Human
caugggcuuuggaggcuggagg

SEQ ID NO: 1115490 - RNA, 22 nt, Human
ggcaaaaacagcaaugacuuuu

SEQ ID NO: 1115491 - RNA, 23 nt, Human
ucacaggggccagcgcucugugg

SEQ ID NO: 1115492 - RNA, 19 nt, Human
guggccagggcaggggcug

SEQ ID NO: 1115493 - RNA, 22 nt, Human
uacuuuagaaggaaauaaguuc

SEQ ID NO: 1115494 - RNA, 23 nt, Human
uucuuucaagaaguucacagugc

SEQ ID NO: 1115495 - RNA, 22 nt, Human
cacucccuucaggagccuagga

SEQ ID NO: 1115496 - RNA, 22 nt, Human
ggugggcacauucagucucugu

SEQ ID NO: 1115497 - RNA, 22 nt, Human
cccuggguucuggcugggcugc

SEQ ID NO: 1115498 - RNA, 22 nt, Human
agccaggaaccagcuacagucu

SEQ ID NO: 1115499 - RNA, 22 nt, Human
cugaggccucucuccugggcuu

SEQ ID NO: 1115500 - RNA, 22 nt, Human
ugcugugcuggcggcagaggcc

SEQ ID NO: 1115501 - RNA, 22 nt, Human
cccuccccacaaagcuucacac

SEQ ID NO: 1115502 - RNA, 22 nt, Human
gcccugucggaacugcgaccuc

SEQ ID NO: 1115503 - RNA, 22 nt, Human
ucuggcuccaccuccuuuacua

SEQ ID NO: 1115504 - RNA, 22 nt, Human
ccucugcaccauagccuucagc

SEQ ID NO: 1115505 - RNA, 22 nt, Human
uucucuucuguucagugcccaa

SEQ ID NO: 1115506 - RNA, 22 nt, Human
cuggagcccugaaugggcagga

SEQ ID NO: 1115507 - RNA, 20 nt, Human
cuuccacacaagaagcacag

SEQ ID NO: 1115508 - RNA, 22 nt, Human
agaaagaacgcacuugugcugc

SEQ ID NO: 1115509 - RNA, 22 nt, Human
acccaggguagagugcaguggc

SEQ ID NO: 1115510 - RNA, 22 nt, Human
gucugcugcagagcauggcuuu

SEQ ID NO: 1115511 - RNA, 22 nt, Human
cugagaggugacagcgugcugg

SEQ ID NO: 1115512 - RNA, 22 nt, Human
gaugauuuuaugucuugucauu

SEQ ID NO: 1115513 - RNA, 22 nt, Human
ccagcucugccaagcgucagcu

SEQ ID NO: 1115514 - RNA, 22 nt, Human
uccuucagugucccgcucaggu

SEQ ID NO: 1115515 - RNA, 22 nt, Human
agaguguuuuucugucaaggac

SEQ ID NO: 1115516 - RNA, 22 nt, Human
ggcccaaggcccaggucgagcu

SEQ ID NO: 1115517 - RNA, 20 nt, Human
uggcuccugcgguggaacca

SEQ ID NO: 1115518 - RNA, 22 nt, Human
cuuccugaacaaugccaucaau

SEQ ID NO: 1115519 - RNA, 22 nt, Human
ucuggagcuggcagggcccugg

SEQ ID NO: 1115520 - RNA, 22 nt, Human
agaggccagcagugccuaucug

SEQ ID NO: 1115521 - RNA, 22 nt, Human
guuugauucaagaacaaagagu

SEQ ID NO: 1115522 - RNA, 22 nt, Human
aguguacauguuuacagcaucu

SEQ ID NO: 1115523 - RNA, 22 nt, Human
uauuacugagguuuuauggagu

SEQ ID NO: 1115524 - RNA, 22 nt, Human
gacagggcauggugcagaguuc

SEQ ID NO: 1115525 - RNA, 22 nt, Human
gcuggccugcgagggcaggcug

SEQ ID NO: 1115526 - RNA, 22 nt, Human
ugcugccaggucuugcugucca

SEQ ID NO: 1115527 - RNA, 22 nt, Human
gccucuggucccucaugcugug

SEQ ID NO: 1115528 - RNA, 22 nt, Human
guggagccaggaucuccgcaca

SEQ ID NO: 1115529 - RNA, 22 nt, Human
cccuguccuuggcugugaggcu

SEQ ID NO: 1115530 - RNA, 22 nt, Human
acuuucucaaaucagacuuuaa

SEQ ID NO: 1115531 - RNA, 22 nt, Human
aggccuggccuuuauguucaag

SEQ ID NO: 1115532 - RNA, 22 nt, Human
ggcuccugggaugggacugagc

SEQ ID NO: 1115533 - RNA, 22 nt, Human
gccagcagccacagaagucacu

SEQ ID NO: 1115534 - RNA, 22 nt, Human
gguacaaggagugaagguuugg

SEQ ID NO: 1115535 - RNA, 22 nt, Human
uuuccucuucuucccaugucau

SEQ ID NO: 1115536 - RNA, 22 nt, Human
cacaagucuguggucuccaaca

SEQ ID NO: 1115537 - RNA, 22 nt, Human
agaggcaggaagagcugauuuu

SEQ ID NO: 1115538 - RNA, 22 nt, Human
ugccaggcccugugcuggaugc

SEQ ID NO: 1115539 - RNA, 22 nt, Human
gagagcuguguucauucuacca

SEQ ID NO: 1115540 - RNA, 22 nt, Human
ggagccuuccagacugcccaca

SEQ ID NO: 1115541 - RNA, 22 nt, Human
gcauuccugagaaugcagagug

SEQ ID NO: 1115542 - RNA, 22 nt, Human
auucagcauaaucaguagcuug

SEQ ID NO: 1115543 - RNA, 22 nt, Human
uuccauaauuaaguggagagaa

SEQ ID NO: 1115544 - RNA, 17 nt, Human
ugcauuguaggcuagcc

SEQ ID NO: 1115545 - RNA, 22 nt, Human
ucacugaauacuugucucaucc

SEQ ID NO: 1115546 - RNA, 21 nt, Human
uggcucugagccucauggcug

SEQ ID NO: 1115547 - RNA, 22 nt, Human
ugggccacaagccaugggacca

SEQ ID NO: 1115548 - RNA, 22 nt, Human
cagggccucauccucagagauu

SEQ ID NO: 1115549 - RNA, 22 nt, Human
ucuguggccuguguccaagugc

SEQ ID NO: 1115550 - RNA, 22 nt, Human
ucagggcagguuaacuugggug

SEQ ID NO: 1115551 - RNA, 22 nt, Human
uuucuguagggauuucacaguu

SEQ ID NO: 1115552 - RNA, 22 nt, Human
gagagugagauaauuucacaua

SEQ ID NO: 1115553 - RNA, 22 nt, Human
gcccaggcuagcguagagugca

SEQ ID NO: 1115554 - RNA, 22 nt, Human
uguauuuucugaagauaaucaa

SEQ ID NO: 1115555 - RNA, 22 nt, Human
aggcucugguuggcaaguaaag

SEQ ID NO: 1115556 - RNA, 22 nt, Human
cugcccugacugaccuuuugaa

SEQ ID NO: 1115557 - RNA, 22 nt, Human
ucuggagagucacagugccaga

SEQ ID NO: 1115558 - RNA, 22 nt, Human
ggaggagacccugugucaguuu

SEQ ID NO: 1115559 - RNA, 20 nt, Human
cugccuggaggccucuaccu

SEQ ID NO: 1115560 - RNA, 19 nt, Human
ugacaggcuguugccuuga

SEQ ID NO: 1115561 - RNA, 22 nt, Human
ucaagagagugcugcuuggggu

SEQ ID NO: 1115562 - RNA, 19 nt, Human
augauggucccauucaccu

SEQ ID NO: 1115563 - RNA, 22 nt, Human
uuugcaaauaccaugaaacuug

SEQ ID NO: 1115564 - RNA, 22 nt, Human
gaugugagugguagcugggauu

SEQ ID NO: 1115565 - RNA, 22 nt, Human
gaccugccugagcugccucugc

SEQ ID NO: 1115566 - RNA, 22 nt, Human
acucugcuuauugcugcaggca

SEQ ID NO: 1115567 - RNA, 22 nt, Human
aaggcugagacagcacaggucc

SEQ ID NO: 1115568 - RNA, 22 nt, Human
ugcaguggaagagguggagauc

SEQ ID NO: 1115569 - RNA, 22 nt, Human
ugcucugguaacucacuuccau

SEQ ID NO: 1115570 - RNA, 22 nt, Human
caugcacuuaccugaaauucaa

SEQ ID NO: 1115571 - RNA, 22 nt, Human
agcuccuccugugccaggccag

SEQ ID NO: 1115572 - RNA, 23 nt, Human
gccaggcuccggucuguggccac

SEQ ID NO: 1115573 - RNA, 22 nt, Human
uggccuugggcagguggccugc

SEQ ID NO: 1115574 - RNA, 20 nt, Human
uccaagcccuccuuccauuc

SEQ ID NO: 1115575 - RNA, 22 nt, Human
cagcaguguacaaggugucaga

SEQ ID NO: 1115576 - RNA, 22 nt, Human
cagcugcccaggccaccuggag

SEQ ID NO: 1115577 - RNA, 22 nt, Human
uaagugcaauguuuuacuuaaa

SEQ ID NO: 1115578 - RNA, 22 nt, Human
auuguacaaugccuggaacauu

SEQ ID NO: 1115579 - RNA, 22 nt, Human
auacaaguugugauaauguaaa

SEQ ID NO: 1115580 - RNA, 22 nt, Human
ugggcacuguagcuggugcugg

SEQ ID NO: 1115581 - RNA, 22 nt, Human
aaaucugguucaguaaguccuc

SEQ ID NO: 1115582 - RNA, 22 nt, Human
gaggaagcagggcuuggcugag

SEQ ID NO: 1115583 - RNA, 22 nt, Human
cagggacaugacuggucucugu

SEQ ID NO: 1115584 - RNA, 22 nt, Human
agggaagaaaauccaucgcugc

SEQ ID NO: 1115585 - RNA, 22 nt, Human
agcugccugggcuuguacaccu

SEQ ID NO: 1115586 - RNA, 19 nt, Human
uggccagguacugucugcu

SEQ ID NO: 1115587 - RNA, 22 nt, Human
caggcuugcugcuagagcacuu

SEQ ID NO: 1115588 - RNA, 22 nt, Human
gcagccagaagacucagaacaa

SEQ ID NO: 1115589 - RNA, 22 nt, Human
ugccagaagugcuuuauaagug

SEQ ID NO: 1115590 - RNA, 22 nt, Human
ugaaagaacuagcaucuucaag

SEQ ID NO: 1115591 - RNA, 17 nt, Human
accagccucuccugggg

SEQ ID NO: 1115592 - RNA, 22 nt, Human
gcacagccagcaucugagggau

SEQ ID NO: 1115593 - RNA, 22 nt, Human
aguuuuauuccaaugugcagca

SEQ ID NO: 1115594 - RNA, 22 nt, Human
cugucucugucuuaacucccag

SEQ ID NO: 1115595 - RNA, 22 nt, Human
uggccgggccgggcgccuccac

SEQ ID NO: 1115596 - RNA, 22 nt, Human
auugaaagauaggcuacugugg

SEQ ID NO: 1115597 - RNA, 22 nt, Human
guggccugccgugugguauggg

SEQ ID NO: 1115598 - RNA, 22 nt, Human
aagcugccaaugguaagcugcu

SEQ ID NO: 1115599 - RNA, 22 nt, Human
ugauuuccacgugcacccaggu

SEQ ID NO: 1115600 - RNA, 22 nt, Human
aaggccuggauuuagguuguga

SEQ ID NO: 1115601 - RNA, 22 nt, Human
gcauuauuaauagcugcaugag

SEQ ID NO: 1115602 - RNA, 22 nt, Human
ggcucuggagacauguggagag

SEQ ID NO: 1115603 - RNA, 22 nt, Human
cucugcuuggaacuggacagaa

SEQ ID NO: 1115604 - RNA, 22 nt, Human
ccacagaaaguugucuagagua

SEQ ID NO: 1115605 - RNA, 22 nt, Human
ugccugggaaccaauccuggcu

SEQ ID NO: 1115606 - RNA, 22 nt, Human
auguagcaugaggcacugugcc

SEQ ID NO: 1115607 - RNA, 20 nt, Human
uacagaaacaggacuuuugg

SEQ ID NO: 1115608 - RNA, 22 nt, Human
ucugaggcauacccaggccccc

SEQ ID NO: 1115609 - RNA, 22 nt, Human
gggcacuguacacugugcaugg

SEQ ID NO: 1115610 - RNA, 22 nt, Human
uugacaauguccuuugaauuuc

SEQ ID NO: 1115611 - RNA, 22 nt, Human
ggcacagggagccgcaguugca

SEQ ID NO: 1115612 - RNA, 23 nt, Human
uugaaagguagcuggcagcuaga

SEQ ID NO: 1115613 - RNA, 22 nt, Human
agcucuccacacauaggacuag

SEQ ID NO: 1115614 - RNA, 22 nt, Human
ucacaccuguaaucccaggccu

SEQ ID NO: 1115615 - RNA, 22 nt, Human
gcacagaaguaaaauacaaguc

SEQ ID NO: 1115616 - RNA, 22 nt, Human
cuacauggagaagaaaauucuu

SEQ ID NO: 1115617 - RNA, 22 nt, Human
caaaguuaucaacugcaacauu

SEQ ID NO: 1115618 - RNA, 22 nt, Human
gcaggcaggagcccaacugccu

SEQ ID NO: 1115619 - RNA, 22 nt, Human
aaagauuucagaagccugugcc

SEQ ID NO: 1115620 - RNA, 22 nt, Human
aggaagccuggggcugcccucg

SEQ ID NO: 1115621 - RNA, 17 nt, Human
uuccucucacauuuuuu

SEQ ID NO: 1115622 - RNA, 22 nt, Human
agaaauguuuauggcugccuau

SEQ ID NO: 1115623 - RNA, 22 nt, Human
aagaauuauugcaauacuagau

SEQ ID NO: 1115624 - RNA, 22 nt, Human
aaauaauguuaggccuuugcuc

SEQ ID NO: 1115625 - RNA, 22 nt, Human
aagaauguggguggauaugaug

SEQ ID NO: 1115626 - RNA, 22 nt, Human
ucuggcucuauaacuccuagcu

SEQ ID NO: 1115627 - RNA, 22 nt, Human
cagacacagcaauucuguguug

SEQ ID NO: 1115628 - RNA, 22 nt, Human
agcugucuccagauacaggauu

SEQ ID NO: 1115629 - RNA, 22 nt, Human
agagcagccugugaugaugcac

SEQ ID NO: 1115630 - RNA, 22 nt, Human
ccugucuguccucucaugagcc

SEQ ID NO: 1115631 - RNA, 22 nt, Human
uuaacagagaacauagaaguag

SEQ ID NO: 1115632 - RNA, 23 nt, Human
uuuuaauuuggacauaagaagau

SEQ ID NO: 1115633 - RNA, 22 nt, Human
ugggccugacucaccugccucc

SEQ ID NO: 1115634 - RNA, 22 nt, Human
ccagagacgucggucagggcgc

SEQ ID NO: 1115635 - RNA, 22 nt, Human
auaagaaacauuauucuuucca

SEQ ID NO: 1115636 - RNA, 22 nt, Human
cuuggccucuucucaggguggg

SEQ ID NO: 1115637 - RNA, 20 nt, Human
ucaggcaguggggaaaggca

SEQ ID NO: 1115638 - RNA, 22 nt, Human
caggcacugugcaagggucucg

SEQ ID NO: 1115639 - RNA, 22 nt, Human
gcuguauuccugcacuguauag

SEQ ID NO: 1115640 - RNA, 22 nt, Human
auaaggcagugacuucaucuau

SEQ ID NO: 1115641 - RNA, 23 nt, Human
ggcuggcccggggcugcuccuga

SEQ ID NO: 1115642 - RNA, 20 nt, Human
uggagccaaggugugucugg

SEQ ID NO: 1115643 - RNA, 21 nt, Human
gcaggguccuuuccauuccua

SEQ ID NO: 1115644 - RNA, 17 nt, Human
gcugagugcagggaguc

SEQ ID NO: 1115645 - RNA, 22 nt, Human
agcugcucaggagagccagguc

SEQ ID NO: 1115646 - RNA, 22 nt, Human
ucaaaccaccuuguuacugggg

SEQ ID NO: 1115647 - RNA, 22 nt, Human
agucaguggcuccgagccuggu

SEQ ID NO: 1115648 - RNA, 22 nt, Human
ugcagcaggagccaggccuggu

SEQ ID NO: 1115649 - RNA, 22 nt, Human
acaguguccuuguggucccugu

SEQ ID NO: 1115650 - RNA, 22 nt, Human
caggggcuguggcacauggugu

SEQ ID NO: 1115651 - RNA, 22 nt, Human
ugaagccuuguguggccucucu

SEQ ID NO: 1115652 - RNA, 21 nt, Human
ccaggcuccugaggcugguca

SEQ ID NO: 1115653 - RNA, 22 nt, Human
gagauuggauuuaauggccaaa

SEQ ID NO: 1115654 - RNA, 22 nt, Human
cccagcauccucagggagcggg

SEQ ID NO: 1115655 - RNA, 22 nt, Human
gaaaaaugcuccaaaucugugg

SEQ ID NO: 1115656 - RNA, 22 nt, Human
uaaggcaccauaauauauuuaa

SEQ ID NO: 1115657 - RNA, 22 nt, Human
gggcacugugcuaggugcugag

SEQ ID NO: 1115658 - RNA, 20 nt, Human
cccuggccuguuucaugccc

SEQ ID NO: 1115659 - RNA, 22 nt, Human
augcugagacuggagcagcugg

SEQ ID NO: 1115660 - RNA, 22 nt, Human
ccagcagaagcucccgcugggu

SEQ ID NO: 1115661 - RNA, 22 nt, Human
aacaaauguguggcaguguggg

SEQ ID NO: 1115662 - RNA, 22 nt, Human
ucacaacucuuuccauuuaaua

SEQ ID NO: 1115663 - RNA, 22 nt, Human
auuauaaagaacaugugugugg

SEQ ID NO: 1115664 - RNA, 22 nt, Human
accaaggagaaggugcaagcuu

SEQ ID NO: 1115665 - RNA, 22 nt, Human
uuuccucuuccgagggggaggc

SEQ ID NO: 1115666 - RNA, 22 nt, Human
caaaguuuggcucucaugacau

SEQ ID NO: 1115667 - RNA, 22 nt, Human
ucauugcagugauguuguaugu

SEQ ID NO: 1115668 - RNA, 22 nt, Human
cuguacaucccgagagccagua

SEQ ID NO: 1115669 - RNA, 22 nt, Human
acugcaucugaaacauggguca

SEQ ID NO: 1115670 - RNA, 20 nt, Human
uccugagauuuaagggguuc

SEQ ID NO: 1115671 - RNA, 22 nt, Human
aaauugugcucacacugauauu

SEQ ID NO: 1115672 - RNA, 22 nt, Human
uagaaauguugguauuaacauu

SEQ ID NO: 1115673 - RNA, 21 nt, Human
gcagccagacgggauucaguu

SEQ ID NO: 1115674 - RNA, 22 nt, Human
uauuaguagcuugaaauuggug

SEQ ID NO: 1115675 - RNA, 22 nt, Human
cuggcagcuuagcacucugguu

SEQ ID NO: 1115676 - RNA, 22 nt, Human
ccugauggagcccugcugcaug

SEQ ID NO: 1115677 - RNA, 22 nt, Human
cugggcacaaguggcccuggau

SEQ ID NO: 1115678 - RNA, 22 nt, Human
ugcugccuucuaggcgugcccu

SEQ ID NO: 1115679 - RNA, 22 nt, Human
agccugccuugggcugcuugag

SEQ ID NO: 1115680 - RNA, 22 nt, Human
cagugcauaaucuaaauggggg

SEQ ID NO: 1115681 - RNA, 22 nt, Human
gcagggacaucuuugucuagua

SEQ ID NO: 1115682 - RNA, 22 nt, Human
ucaggacagccagggugcagac

SEQ ID NO: 1115683 - RNA, 22 nt, Human
gcucccuguucucagccaugau

SEQ ID NO: 1115684 - RNA, 22 nt, Human
aggcagagcuggguuuugaaau

SEQ ID NO: 1115685 - RNA, 22 nt, Human
aggagucauugagagggguccu

SEQ ID NO: 1115686 - RNA, 21 nt, Human
ucucuggaguuagcagagaga

SEQ ID NO: 1115687 - RNA, 22 nt, Human
auuuaugacuggugaauagaac

SEQ ID NO: 1115688 - RNA, 22 nt, Human
accagagcuggcagaguaucaa

SEQ ID NO: 1115689 - RNA, 22 nt, Human
uggagaugaauauguguaccug

SEQ ID NO: 1115690 - RNA, 22 nt, Human
uagaaagcuugggguguuuaaa

SEQ ID NO: 1115691 - RNA, 22 nt, Human
aauuuagaauucgcuagcuaau

SEQ ID NO: 1115692 - RNA, 22 nt, Human
ucccagccuuucuuuucugcug

SEQ ID NO: 1115693 - RNA, 22 nt, Human
aaaggugacugcagcagcuauu

SEQ ID NO: 1115694 - RNA, 23 nt, Human
uccucccaaauuucagccucauu

SEQ ID NO: 1115695 - RNA, 22 nt, Human
cugccgagugggucaugaggca

SEQ ID NO: 1115696 - RNA, 22 nt, Human
gcaguggauccaaugguaucuu

SEQ ID NO: 1115697 - RNA, 22 nt, Human
auggcucauuuaucuugcagcc

SEQ ID NO: 1115698 - RNA, 22 nt, Human
cagggcaguaccgcccucuggc

SEQ ID NO: 1115699 - RNA, 22 nt, Human
gggaaccagccgcuuccgccuc

SEQ ID NO: 1115700 - RNA, 22 nt, Human
gggcagggguagcauuccaagu

SEQ ID NO: 1115701 - RNA, 22 nt, Human
gcugccucugcgacucugggcg

SEQ ID NO: 1115702 - RNA, 22 nt, Human
cugccaaggcuggggaggacaa

SEQ ID NO: 1115703 - RNA, 22 nt, Human
agccagcugccuuucacaucug

SEQ ID NO: 1115704 - RNA, 22 nt, Human
aguuggagugaacaugagauug

SEQ ID NO: 1115705 - RNA, 22 nt, Human
aguucuuuugugaacauaugcu

SEQ ID NO: 1115706 - RNA, 20 nt, Human
cucugcugcccgccggcugc

SEQ ID NO: 1115707 - RNA, 22 nt, Human
ggcuccuggcaucuggugggua

SEQ ID NO: 1115708 - RNA, 22 nt, Human
ugggaugggaucucgcuguguc

SEQ ID NO: 1115709 - RNA, 22 nt, Human
agggagcucaguuggaagcggu

SEQ ID NO: 1115710 - RNA, 22 nt, Human
cccaggcuggauuucgguggca

SEQ ID NO: 1115711 - RNA, 22 nt, Human
aaguucaagcucugccuaaaau

SEQ ID NO: 1115712 - RNA, 22 nt, Human
cccagcccaucucaaaggucua

SEQ ID NO: 1115713 - RNA, 22 nt, Human
uccauuuuguagguaugcuaca

SEQ ID NO: 1115714 - RNA, 20 nt, Human
gucugaggagcagugggaaa

SEQ ID NO: 1115715 - RNA, 22 nt, Human
caggcagcugaggacuuugcua

SEQ ID NO: 1115716 - RNA, 22 nt, Human
agcugcucuugggugacuucaa

SEQ ID NO: 1115717 - RNA, 22 nt, Human
gagacaaaaguuggagugcaag

SEQ ID NO: 1115718 - RNA, 22 nt, Human
ggucccagcuggucacugucag

SEQ ID NO: 1115719 - RNA, 22 nt, Human
caggucccgccccgggcugacc

SEQ ID NO: 1115720 - RNA, 22 nt, Human
aagggccuccuggggagccugg

SEQ ID NO: 1115721 - RNA, 22 nt, Human
aauggacaggagagcauaguca

SEQ ID NO: 1115722 - RNA, 22 nt, Human
gcuguauuuauuuucuaggguu

SEQ ID NO: 1115723 - RNA, 22 nt, Human
cagucccaguuugagacucugg

SEQ ID NO: 1115724 - RNA, 22 nt, Human
aagacagaccacgugacagggc

SEQ ID NO: 1115725 - RNA, 22 nt, Human
ggagccugugggaugagaugug

SEQ ID NO: 1115726 - RNA, 22 nt, Human
aaugucugagucucuguauccc

SEQ ID NO: 1115727 - RNA, 22 nt, Human
uugaagcaggaaaauuucuauu

SEQ ID NO: 1115728 - RNA, 22 nt, Human
cuguagccagaagcagaaggcc

SEQ ID NO: 1115729 - RNA, 22 nt, Human
agugucugaaccaccggggcau

SEQ ID NO: 1115730 - RNA, 22 nt, Human
gaagaacaccugcugcccagug

SEQ ID NO: 1115731 - RNA, 22 nt, Human
gcugccagcucacucuccugag

SEQ ID NO: 1115732 - RNA, 22 nt, Human
ccugggagagucuguggucucc

SEQ ID NO: 1115733 - RNA, 22 nt, Human
gcacagcaauuucuauaagcuc

SEQ ID NO: 1115734 - RNA, 22 nt, Human
cuaaaugccuuuccuaccuaac

SEQ ID NO: 1115735 - RNA, 22 nt, Human
ccugcagagccacgugccagcg

SEQ ID NO: 1115736 - RNA, 23 nt, Human
ggcugagacuacaggcgcuugcc

SEQ ID NO: 1115737 - RNA, 22 nt, Human
cuguccugcaguugggggcagg

SEQ ID NO: 1115738 - RNA, 22 nt, Human
acugcagccuugaacucugggc

SEQ ID NO: 1115739 - RNA, 22 nt, Human
auggcagggcagccucucagag

SEQ ID NO: 1115740 - RNA, 22 nt, Human
ggagcugaugacgucaccaugg

SEQ ID NO: 1115741 - RNA, 22 nt, Human
uggucaggcugcucugcggcgu

SEQ ID NO: 1115742 - RNA, 22 nt, Human
ucugccugcaguguggcagggc

SEQ ID NO: 1115743 - RNA, 22 nt, Human
gccuggguccacugaucaugcu

SEQ ID NO: 1115744 - RNA, 22 nt, Human
agccucugcacgggcacgggug

SEQ ID NO: 1115745 - RNA, 22 nt, Human
ggucccugguucccucugagcu

SEQ ID NO: 1115746 - RNA, 22 nt, Human
gacagcagggacauguaggaag

SEQ ID NO: 1115747 - RNA, 22 nt, Human
aagagggcugcaaucuuauugc

SEQ ID NO: 1115748 - RNA, 22 nt, Human
uggccuggggaagaccaugggc

SEQ ID NO: 1115749 - RNA, 21 nt, Human
ugggcagauggcaguguggcu

SEQ ID NO: 1115750 - RNA, 22 nt, Human
uccuugaauccuagcauccuau

SEQ ID NO: 1115751 - RNA, 22 nt, Human
aguacuuuacuucuuacaguuu

SEQ ID NO: 1115752 - RNA, 22 nt, Human
agagcugcaauuucauguggug

SEQ ID NO: 1115753 - RNA, 22 nt, Human
ggagccuugggcgcucucccau

SEQ ID NO: 1115754 - RNA, 22 nt, Human
aagucagagcaacugagacauu

SEQ ID NO: 1115755 - RNA, 22 nt, Human
ggcuucugaaaucucugugcgu

SEQ ID NO: 1115756 - RNA, 22 nt, Human
ucccacucccaggcaggccucu

SEQ ID NO: 1115757 - RNA, 22 nt, Human
aggacucaucccugcuugucag

SEQ ID NO: 1115758 - RNA, 20 nt, Human
ucucugcuguccacauuugc

SEQ ID NO: 1115759 - RNA, 22 nt, Human
cccagggacagaugggcagcua

SEQ ID NO: 1115760 - RNA, 22 nt, Human
auguguauacuugugcuuacuc

SEQ ID NO: 1115761 - RNA, 22 nt, Human
aguacagaccugucucuuccug

SEQ ID NO: 1115762 - RNA, 22 nt, Human
uguggcuuaagaaugccuuuaa

SEQ ID NO: 1115763 - RNA, 22 nt, Human
uggcucagucauggaugaguaa

SEQ ID NO: 1115764 - RNA, 22 nt, Human
gaagcagcuagcccacuaguca

SEQ ID NO: 1115765 - RNA, 22 nt, Human
aggucauuuccuuagaggcaga

SEQ ID NO: 1115766 - RNA, 22 nt, Human
cccaguccuaaagcagacgcca

SEQ ID NO: 1115767 - RNA, 22 nt, Human
acagacauuuucuguauugccu

SEQ ID NO: 1115768 - RNA, 22 nt, Human
uuaaugcagaaaucaaacugac

SEQ ID NO: 1115769 - RNA, 22 nt, Human
aggcacugacucaagggagcca

SEQ ID NO: 1115770 - RNA, 22 nt, Human
agggccuggcgcguggccgccg

SEQ ID NO: 1115771 - RNA, 22 nt, Human
ugaaaucugucccacuuuagcu

SEQ ID NO: 1115772 - RNA, 22 nt, Human
acagccaggagccaugggcagg

SEQ ID NO: 1115773 - RNA, 22 nt, Human
ggcagccauacucagaccuggg

SEQ ID NO: 1115774 - RNA, 22 nt, Human
uuuccucugucaugacagcuga

SEQ ID NO: 1115775 - RNA, 22 nt, Human
cugucucucuaggacacugggg

SEQ ID NO: 1115776 - RNA, 22 nt, Human
ugguaaagaaggcuagaucuga

SEQ ID NO: 1115777 - RNA, 23 nt, Human
uggcuggcagaaacugaagcaug

SEQ ID NO: 1115778 - RNA, 22 nt, Human
ugacagggcuagaggcaaugca

SEQ ID NO: 1115779 - RNA, 22 nt, Human
acucccacuccagaguagaagc

SEQ ID NO: 1115780 - RNA, 22 nt, Human
ccaggcagagugcuccagaaag

SEQ ID NO: 1115781 - RNA, 22 nt, Human
ccagcagcgauagggugagugc

SEQ ID NO: 1115782 - RNA, 23 nt, Human
auaaggcauaaagguacauugga

SEQ ID NO: 1115783 - RNA, 22 nt, Human
gaguaagagcuggcuuuggugu

SEQ ID NO: 1115784 - RNA, 22 nt, Human
gucucagauaacauguauucua

SEQ ID NO: 1115785 - RNA, 22 nt, Human
aaugcacagcguuccaugcuug

SEQ ID NO: 1115786 - RNA, 22 nt, Human
gcucucugccauaugaggauac

SEQ ID NO: 1115787 - RNA, 22 nt, Human
uggaaagagguagaggaucugg

SEQ ID NO: 1115788 - RNA, 22 nt, Human
cucagagucugcauuucuguca

SEQ ID NO: 1115789 - RNA, 21 nt, Human
aaagaacaggcagauguucuu

SEQ ID NO: 1115790 - RNA, 22 nt, Human
gccucuggggcagcugagucau

SEQ ID NO: 1115791 - RNA, 21 nt, Human
ccucuggcuugugcugugccc

SEQ ID NO: 1115792 - RNA, 22 nt, Human
guuccuauauagccuuaaggau

SEQ ID NO: 1115793 - RNA, 22 nt, Human
ugaaaaggguagaucccuaagu

SEQ ID NO: 1115794 - RNA, 22 nt, Human
cucaccaggaacagcugcggag

SEQ ID NO: 1115795 - RNA, 22 nt, Human
ugccugucuccucugcagggug

SEQ ID NO: 1115796 - RNA, 22 nt, Human
gacagguggggaaacuaaggua

SEQ ID NO: 1115797 - RNA, 22 nt, Human
auugaaaggcaaaguaggaagc

SEQ ID NO: 1115798 - RNA, 22 nt, Human
uacaaaguuugggguccucaaa

SEQ ID NO: 1115799 - RNA, 22 nt, Human
guuauguaaucuaacacucagu

SEQ ID NO: 1115800 - RNA, 22 nt, Human
gccuaggaguacagaaugguuu

SEQ ID NO: 1115801 - RNA, 22 nt, Human
cagucccacaagaucuccacaa

SEQ ID NO: 1115802 - RNA, 22 nt, Human
caggcacuucugcugcuugucu

SEQ ID NO: 1115803 - RNA, 22 nt, Human
aguaacaagugccaacguuaga

SEQ ID NO: 1115804 - RNA, 22 nt, Human
aaggcugccucugccagaggag

SEQ ID NO: 1115805 - RNA, 22 nt, Human
gggccccaaaaugccaggcucu

SEQ ID NO: 1115806 - RNA, 18 nt, Human
gcccugguggagcuggug

SEQ ID NO: 1115807 - RNA, 22 nt, Human
augucacagucugacucaguga

SEQ ID NO: 1115808 - RNA, 22 nt, Human
cuggcagcuucaggacacucgg

SEQ ID NO: 1115809 - RNA, 22 nt, Human
uggcccgaccucugcucaugca

SEQ ID NO: 1115810 - RNA, 22 nt, Human
agguaagggucacaguucauau

SEQ ID NO: 1115811 - RNA, 22 nt, Human
caccagcagaagacugagggug

SEQ ID NO: 1115812 - RNA, 22 nt, Human
ggcacugggagaggugagacgg

SEQ ID NO: 1115813 - RNA, 22 nt, Human
acccaggccugagagacaggag

SEQ ID NO: 1115814 - RNA, 22 nt, Human
augggaggcagcagagcccagc

SEQ ID NO: 1115815 - RNA, 22 nt, Human
gggcagcugccaagugcaucgc

SEQ ID NO: 1115816 - RNA, 22 nt, Human
ugugaagcuggauccuggagcu

SEQ ID NO: 1115817 - RNA, 22 nt, Human
ucccuggguccugcuugcucuc

SEQ ID NO: 1115818 - RNA, 22 nt, Human
uuaauacagucuccagaaguaa

SEQ ID NO: 1115819 - RNA, 22 nt, Human
cccaggcuggagugcaauggug

SEQ ID NO: 1115820 - RNA, 22 nt, Human
gcagggcuguucaggagggugg

SEQ ID NO: 1115821 - RNA, 22 nt, Human
ggcaggguggcccuccagugag

SEQ ID NO: 1115822 - RNA, 21 nt, Human
aggaaguggccagauugggaa

SEQ ID NO: 1115823 - RNA, 22 nt, Human
cugagaggaugcugcaguggag

SEQ ID NO: 1115824 - RNA, 22 nt, Human
agugaggcuaauaggcaauggu

SEQ ID NO: 1115825 - RNA, 22 nt, Human
cucuggagggaggcugagcugg

SEQ ID NO: 1115826 - RNA, 22 nt, Human
ucagggcaucaucaugaauaua

SEQ ID NO: 1115827 - RNA, 22 nt, Human
gcccugagacugagcauggguu

SEQ ID NO: 1115828 - RNA, 22 nt, Human
aguauuucugcucaugaaagag

SEQ ID NO: 1115829 - RNA, 20 nt, Human
agugugcauuuagagucugc

SEQ ID NO: 1115830 - RNA, 16 nt, Human
ggagagugucugcaaa

SEQ ID NO: 1115831 - RNA, 23 nt, Human
gugauuucagggaacagaaucag

SEQ ID NO: 1115832 - RNA, 22 nt, Human
acugggccuugccauggcagcc

SEQ ID NO: 1115833 - RNA, 22 nt, Human
gccccagcucugccacaacuag

SEQ ID NO: 1115834 - RNA, 22 nt, Human
gcagaggcaaucagguaugugg

SEQ ID NO: 1115835 - RNA, 22 nt, Human
gugaggggaguaaagccauguu

SEQ ID NO: 1115836 - RNA, 22 nt, Human
acagguggaggcuuuaggaggu

SEQ ID NO: 1115837 - RNA, 22 nt, Human
uggcugcugcuuggucuucuuc

SEQ ID NO: 1115838 - RNA, 22 nt, Human
cugucacacugauaucaggcuu

SEQ ID NO: 1115839 - RNA, 19 nt, Human
cccagcuugaccaccugcu

SEQ ID NO: 1115840 - RNA, 22 nt, Human
ucucugcugagaagggcuggca

SEQ ID NO: 1115841 - RNA, 22 nt, Human
gaggccuggcugucagucccca

SEQ ID NO: 1115842 - RNA, 22 nt, Human
augcagcaguuuacaaagcaau

SEQ ID NO: 1115843 - RNA, 22 nt, Human
cagggccaaguuggugccuuuu

SEQ ID NO: 1115844 - RNA, 22 nt, Human
aaguucaaguaguguuacaugg

SEQ ID NO: 1115845 - RNA, 22 nt, Human
accagagcagacuacuggaggu

SEQ ID NO: 1115846 - RNA, 22 nt, Human
augaugguuguccuaggugcau

SEQ ID NO: 1115847 - RNA, 22 nt, Human
cugccaggacugacgucuucag

SEQ ID NO: 1115848 - RNA, 22 nt, Human
ccugccucaucaacuugucgug

SEQ ID NO: 1115849 - RNA, 22 nt, Human
gcuggaaggcuaggcucaguug

SEQ ID NO: 1115850 - RNA, 22 nt, Human
uacaugcucaguaacuuucagu

SEQ ID NO: 1115851 - RNA, 22 nt, Human
gugggaugguagguagguaaua

SEQ ID NO: 1115852 - RNA, 22 nt, Human
uggcucaguuugggggauugaa

SEQ ID NO: 1115853 - RNA, 22 nt, Human
cugggagaugacucagagcagg

SEQ ID NO: 1115854 - RNA, 22 nt, Human
ugcccuguuccugccuccagcu

SEQ ID NO: 1115855 - RNA, 22 nt, Human
aagcucugcucagcagacuagg

SEQ ID NO: 1115856 - RNA, 22 nt, Human
cacccagccuucacacaggagu

SEQ ID NO: 1115857 - RNA, 22 nt, Human
cugagguggaacagaggugaag

SEQ ID NO: 1115858 - RNA, 19 nt, Human
gggcuccuugggccucucu

SEQ ID NO: 1115859 - RNA, 19 nt, Human
gagguggguccccgcagcc

SEQ ID NO: 1115860 - RNA, 22 nt, Human
acauacauaugacaacuuuccu

SEQ ID NO: 1115861 - RNA, 22 nt, Human
acagcuguggggacucuugccc

SEQ ID NO: 1115862 - RNA, 22 nt, Human
augcaccugaacuccaucagcu

SEQ ID NO: 1115863 - RNA, 22 nt, Human
ucaaagcaucagucaauuuagg

SEQ ID NO: 1115864 - RNA, 22 nt, Human
agucccagagaggucggggcca

SEQ ID NO: 1115865 - RNA, 22 nt, Human
ucuucuccagugcuucugcaca

SEQ ID NO: 1115866 - RNA, 22 nt, Human
ccuggcaguuuugcccaggauu

SEQ ID NO: 1115867 - RNA, 22 nt, Human
ucacauuuuccuugguaucugu

SEQ ID NO: 1115868 - RNA, 22 nt, Human
uggccuggcucacagugagauu

SEQ ID NO: 1115869 - RNA, 22 nt, Human
gcagggugugucucauacaguu

SEQ ID NO: 1115870 - RNA, 22 nt, Human
uacagauacagaucuagauaca

SEQ ID NO: 1115871 - RNA, 22 nt, Human
ccuggcugcauuuugcuggaug

SEQ ID NO: 1115872 - RNA, 22 nt, Human
aagcugcccucauucccagugc

SEQ ID NO: 1115873 - RNA, 22 nt, Human
ucucagagaagugaugagcaau

SEQ ID NO: 1115874 - RNA, 22 nt, Human
uggcagaggcucugugauguug

SEQ ID NO: 1115875 - RNA, 22 nt, Human
caaauccagaucccagucguag

SEQ ID NO: 1115876 - RNA, 22 nt, Human
uaaaguuuggcagacaauaaca

SEQ ID NO: 1115877 - RNA, 19 nt, Human
cugagcagcggcagcacuu

SEQ ID NO: 1115878 - RNA, 22 nt, Human
auacauguucguguacauguuc

SEQ ID NO: 1115879 - RNA, 22 nt, Human
aaaggucagcugccaucguucu

SEQ ID NO: 1115880 - RNA, 22 nt, Human
aggaccuguagggccugcaucc

SEQ ID NO: 1115881 - RNA, 22 nt, Human
uuugcauuuuagauuuaggccu

SEQ ID NO: 1115882 - RNA, 22 nt, Human
cccuggagugccggaaucaaga

SEQ ID NO: 1115883 - RNA, 22 nt, Human
agcagagccagaauuggaccag

SEQ ID NO: 1115884 - RNA, 22 nt, Human
aacagcaauagcacuauucauu

SEQ ID NO: 1115885 - RNA, 22 nt, Human
gucagaggggcagcugccaggc

SEQ ID NO: 1115886 - RNA, 22 nt, Human
ugaagcagaggggucuugagcu

SEQ ID NO: 1115887 - RNA, 22 nt, Human
agcuugaguuuuggaugaagug

SEQ ID NO: 1115888 - RNA, 22 nt, Human
ucugagagagggucagaugcua

SEQ ID NO: 1115889 - RNA, 22 nt, Human
uggcaggggaggugcuugcuua

SEQ ID NO: 1115890 - RNA, 22 nt, Human
uauguacauggagagcaauuga

SEQ ID NO: 1115891 - RNA, 22 nt, Human
guggugcauccuugaguaagcu

SEQ ID NO: 1115892 - RNA, 22 nt, Human
aaggaaagacauauaaaugacu

SEQ ID NO: 1115893 - RNA, 22 nt, Human
ucugucugcaccuaagcacagu

SEQ ID NO: 1115894 - RNA, 22 nt, Human
uucaagaucgaguuuaaaguga

SEQ ID NO: 1115895 - RNA, 19 nt, Human
acauuuagaauguacuugc

SEQ ID NO: 1115896 - RNA, 22 nt, Human
acugcuuuagaccuagagcucu

SEQ ID NO: 1115897 - RNA, 18 nt, Human
aaguaacagaagagcaca

SEQ ID NO: 1115898 - RNA, 22 nt, Human
ugugaggagaggcccagcuccc

SEQ ID NO: 1115899 - RNA, 21 nt, Human
acaggcucuggggaugcuggg

SEQ ID NO: 1115900 - RNA, 20 nt, Human
gccugccucagcuagcugag

SEQ ID NO: 1115901 - RNA, 22 nt, Human
gcucagagaaucagcagacacc

SEQ ID NO: 1115902 - RNA, 22 nt, Human
aggauccuuuggccacuucuua

SEQ ID NO: 1115903 - RNA, 22 nt, Human
uugaaaggugaacaugaugcac

SEQ ID NO: 1115904 - RNA, 22 nt, Human
acaggugguaaaauggacuguc

SEQ ID NO: 1115905 - RNA, 22 nt, Human
ucaaacuagccugacugguauu

SEQ ID NO: 1115906 - RNA, 22 nt, Human
gggcugagggguaucucauggg

SEQ ID NO: 1115907 - RNA, 22 nt, Human
auuauguauuugguauaguuug

SEQ ID NO: 1115908 - RNA, 22 nt, Human
ugggcagagaucuggaucaaac

SEQ ID NO: 1115909 - RNA, 22 nt, Human
caggaaagggaugggcugccac

SEQ ID NO: 1115910 - RNA, 22 nt, Human
gggcuggucuggcuuagucagg

SEQ ID NO: 1115911 - RNA, 22 nt, Human
agauuucccucuuguauuugca

SEQ ID NO: 1115912 - RNA, 22 nt, Human
ccugggcuggaguacagcagug

SEQ ID NO: 1115913 - RNA, 22 nt, Human
auguaucagauaaagcaugugg

SEQ ID NO: 1115914 - RNA, 22 nt, Human
gcucccacugcagcccugagcc

SEQ ID NO: 1115915 - RNA, 22 nt, Human
auauucacugagcauaaagcca

SEQ ID NO: 1115916 - RNA, 22 nt, Human
uuccagaauuuuguucugcuug

SEQ ID NO: 1115917 - RNA, 22 nt, Human
auuguacuuuuauuacauguag

SEQ ID NO: 1115918 - RNA, 22 nt, Human
cagagccagcaguggggacagg

SEQ ID NO: 1115919 - RNA, 22 nt, Human
ugagccuggguggucgaggcug

SEQ ID NO: 1115920 - RNA, 22 nt, Human
gaaaucugcccagugcacuggu

SEQ ID NO: 1115921 - RNA, 22 nt, Human
uauuucugggaguucagaaauu

SEQ ID NO: 1115922 - RNA, 23 nt, Human
aggcacugaaugugucagugagu

SEQ ID NO: 1115923 - RNA, 22 nt, Human
uagagcaguuggcagcuguauu

SEQ ID NO: 1115924 - RNA, 22 nt, Human
uuguuuucuccacugcaucuua

SEQ ID NO: 1115925 - RNA, 22 nt, Human
ugccagggcugcuacuggcuga

SEQ ID NO: 1115926 - RNA, 22 nt, Human
ccugggagugugccaucucugu

SEQ ID NO: 1115927 - RNA, 22 nt, Human
ucccacugugaauccaaggccu

SEQ ID NO: 1115928 - RNA, 22 nt, Human
auaagagcuagucuuuuccuug

SEQ ID NO: 1115929 - RNA, 22 nt, Human
gccacccccaaguagguggucu

SEQ ID NO: 1115930 - RNA, 22 nt, Human
cagggugccuguccucagcaaa

SEQ ID NO: 1115931 - RNA, 22 nt, Human
ccuucucuacuccugaugcaug

SEQ ID NO: 1115932 - RNA, 22 nt, Human
uaucuauuccaaauaucagcgu

SEQ ID NO: 1115933 - RNA, 22 nt, Human
ucccagauuguugauggcuuaa

SEQ ID NO: 1115934 - RNA, 22 nt, Human
ugugcuucuugcagcuccugua

SEQ ID NO: 1115935 - RNA, 22 nt, Human
agcugccaaguuucucaguuua

SEQ ID NO: 1115936 - RNA, 22 nt, Human
agcagagcgccugcucagaggg

SEQ ID NO: 1115937 - RNA, 22 nt, Human
aggcacugauucucagaguuac

SEQ ID NO: 1115938 - RNA, 22 nt, Human
uaucuuuagaggaagagaaucu

SEQ ID NO: 1115939 - RNA, 18 nt, Human
gcagcugacacuggaguu

SEQ ID NO: 1115940 - RNA, 22 nt, Human
cauuucugcagaauugcucuuc

SEQ ID NO: 1115941 - RNA, 22 nt, Human
agcuggccuuagugagcaccug

SEQ ID NO: 1115942 - RNA, 22 nt, Human
gucauuguguggacauggagaa

SEQ ID NO: 1115943 - RNA, 22 nt, Human
acacagggauauuucagguggu

SEQ ID NO: 1115944 - RNA, 22 nt, Human
gaggccugguuugcaugagaau

SEQ ID NO: 1115945 - RNA, 22 nt, Human
cagggcagaaggcacucuacuc

SEQ ID NO: 1115946 - RNA, 22 nt, Human
ugccugucuuggaguccuggcc

SEQ ID NO: 1115947 - RNA, 22 nt, Human
ugcugccagccaggccauggag

SEQ ID NO: 1115948 - RNA, 22 nt, Human
gcauucaucuuccuccaugcag

SEQ ID NO: 1115949 - RNA, 22 nt, Human
uauccuuguacuauaguauuua

SEQ ID NO: 1115950 - RNA, 22 nt, Human
ucuggagccacaaaccucagcu

SEQ ID NO: 1115951 - RNA, 22 nt, Human
uaaaguucagugcaugaaugug

SEQ ID NO: 1115952 - RNA, 21 nt, Human
ugcagcugacacugguaugcc

SEQ ID NO: 1115953 - RNA, 22 nt, Human
gccuggcuccuaagagcacaac

SEQ ID NO: 1115954 - RNA, 23 nt, Human
ugcugggcagagcuggugcugag

SEQ ID NO: 1115955 - RNA, 22 nt, Human
ucugggagacguguguugucag

SEQ ID NO: 1115956 - RNA, 22 nt, Human
gagcagcuuaugucaagccaga

SEQ ID NO: 1115957 - RNA, 22 nt, Human
gagcuuccugaugccgaccagu

SEQ ID NO: 1115958 - RNA, 22 nt, Human
gcucugagccgggggccugucc

SEQ ID NO: 1115959 - RNA, 22 nt, Human
ugggcugcccaagguggccaug

SEQ ID NO: 1115960 - RNA, 22 nt, Human
aagcagcugauuucacagcuca

SEQ ID NO: 1115961 - RNA, 22 nt, Human
ccugugugucugucacugcaca

SEQ ID NO: 1115962 - RNA, 22 nt, Human
gaguguggugaacaggagcacc

SEQ ID NO: 1115963 - RNA, 22 nt, Human
aggagucauaaaugugaacaaa

SEQ ID NO: 1115964 - RNA, 21 nt, Human
ccuggcagaagccugauaugc

SEQ ID NO: 1115965 - RNA, 22 nt, Human
aaaugcaucagcucauaagaga

SEQ ID NO: 1115966 - RNA, 22 nt, Human
uggccucugcaauggauucacc

SEQ ID NO: 1115967 - RNA, 22 nt, Human
ggcucagguuaccagucccucc

SEQ ID NO: 1115968 - RNA, 22 nt, Human
ugguccugagcaccagccugac

SEQ ID NO: 1115969 - RNA, 22 nt, Human
uccagggacagcgcuggagcua

SEQ ID NO: 1115970 - RNA, 22 nt, Human
uuucuuauauucugucauuguu

SEQ ID NO: 1115971 - RNA, 22 nt, Human
ggugggcaggcgaggcccaggu

SEQ ID NO: 1115972 - RNA, 22 nt, Human
cccagccucagcuuuacuucca

SEQ ID NO: 1115973 - RNA, 21 nt, Human
gcuccuggugcugcguggcgc

SEQ ID NO: 1115974 - RNA, 22 nt, Human
ugaaaucuuuaguuucuguccc

SEQ ID NO: 1115975 - RNA, 22 nt, Human
ccacagggugucaucagcuuga

SEQ ID NO: 1115976 - RNA, 22 nt, Human
uuggccuuguuaaggaggcccu

SEQ ID NO: 1115977 - RNA, 22 nt, Human
agcagcuguggaaaaguaacua

SEQ ID NO: 1115978 - RNA, 22 nt, Human
gagccaggucgggccgcggcga

SEQ ID NO: 1115979 - RNA, 22 nt, Human
gugugcaugcauagacaccaca

SEQ ID NO: 1115980 - RNA, 22 nt, Human
aguuucuaccgguacauucagg

SEQ ID NO: 1115981 - RNA, 22 nt, Human
ggcucuggcguccaauggagcg

SEQ ID NO: 1115982 - RNA, 22 nt, Human
ucagggcagccuaaggcaccuc

SEQ ID NO: 1115983 - RNA, 22 nt, Human
gggcuugcugauuugggcagga

SEQ ID NO: 1115984 - RNA, 21 nt, Human
gggagcuggaaacugggugac

SEQ ID NO: 1115985 - RNA, 22 nt, Human
ccuggccuuaagggcagggagc

SEQ ID NO: 1115986 - RNA, 23 nt, Human
acacaauagaguacuauucagcc

SEQ ID NO: 1115987 - RNA, 22 nt, Human
caggaggcuccuagggcucugu

SEQ ID NO: 1115988 - RNA, 22 nt, Human
aagcugaggcccauggcaaggu

SEQ ID NO: 1115989 - RNA, 22 nt, Human
gccuggagcucggcugagggcg

SEQ ID NO: 1115990 - RNA, 22 nt, Human
agggcuggcaucucuaaugcug

SEQ ID NO: 1115991 - RNA, 22 nt, Human
agaggcuccuagccacuggcuu

SEQ ID NO: 1115992 - RNA, 22 nt, Human
ggcugccucaaagcucaagcuc

SEQ ID NO: 1115993 - RNA, 22 nt, Human
cucuggcuuugcucaugcaucc

SEQ ID NO: 1115994 - RNA, 22 nt, Human
agagccuggucugagauaggac

SEQ ID NO: 1115995 - RNA, 22 nt, Human
cugaggucucuuuccauaguga

SEQ ID NO: 1115996 - RNA, 22 nt, Human
ccagggugaccagcuggccuag

SEQ ID NO: 1115997 - RNA, 22 nt, Human
gccagagcaugcacugccugca

SEQ ID NO: 1115998 - RNA, 22 nt, Human
ugagccuggccugcagagacca

SEQ ID NO: 1115999 - RNA, 22 nt, Human
uucucuagguuuuagaugaaga

SEQ ID NO: 1116000 - RNA, 22 nt, Human
ucuuuccucugagcuccuguag

SEQ ID NO: 1116001 - RNA, 22 nt, Human
caugcuuugggucagaaaugcc

SEQ ID NO: 1116002 - RNA, 22 nt, Human
ccgggccucgggacaccgggua

SEQ ID NO: 1116003 - RNA, 22 nt, Human
ugaaagcuguccacuaggcugu

SEQ ID NO: 1116004 - RNA, 22 nt, Human
gaggccugucgcuaggccucug

SEQ ID NO: 1116005 - RNA, 22 nt, Human
ucuccugugcacccucccugug

SEQ ID NO: 1116006 - RNA, 22 nt, Human
cagcacugcugcuguacacaca

SEQ ID NO: 1116007 - RNA, 22 nt, Human
ucuuugcaacucccauuuccau

SEQ ID NO: 1116008 - RNA, 22 nt, Human
uuguuucugaguuuucauguau

SEQ ID NO: 1116009 - RNA, 22 nt, Human
cuuguauuccccuaucucuaaa

SEQ ID NO: 1116010 - RNA, 22 nt, Human
cuucacauguuggaguccuuug

SEQ ID NO: 1116011 - RNA, 22 nt, Human
aagcagccuggcaugaugcuuu

SEQ ID NO: 1116012 - RNA, 22 nt, Human
ccucgaccuccccaggcucagg

SEQ ID NO: 1116013 - RNA, 23 nt, Human
gccucugcagccuaguuaguguc

SEQ ID NO: 1116014 - RNA, 22 nt, Human
cugccagcaaugugaccaugcu

SEQ ID NO: 1116015 - RNA, 22 nt, Human
ugcuugagacacauaugaauuu

SEQ ID NO: 1116016 - RNA, 22 nt, Human
ucauugcagacuaacaaucuca

SEQ ID NO: 1116017 - RNA, 22 nt, Human
ucacaggacccugaggguggcg

SEQ ID NO: 1116018 - RNA, 22 nt, Human
gcugagcugggacaguccuggg

SEQ ID NO: 1116019 - RNA, 22 nt, Human
cuuauguaaaacggaaagggaa

SEQ ID NO: 1116020 - RNA, 22 nt, Human
gugcuuucugcaugguuccuac

SEQ ID NO: 1116021 - RNA, 20 nt, Human
ugcuugucaugcacucaggc

SEQ ID NO: 1116022 - RNA, 19 nt, Human
cagagcugcuggccucguc

SEQ ID NO: 1116023 - RNA, 22 nt, Human
gaggcagaggaagguggucucu

SEQ ID NO: 1116024 - RNA, 22 nt, Human
agaaaucacaggaggcagaagg

SEQ ID NO: 1116025 - RNA, 22 nt, Human
aagccucaccuuuuagaagcua

SEQ ID NO: 1116026 - RNA, 22 nt, Human
aagccaggcugcacuugcuggg

SEQ ID NO: 1116027 - RNA, 22 nt, Human
gcaguaaaaaaggauaugugca

SEQ ID NO: 1116028 - RNA, 22 nt, Human
uccuuuuuauaguuagagaaac

SEQ ID NO: 1116029 - RNA, 22 nt, Human
auuucugauaaacguaagcugc

SEQ ID NO: 1116030 - RNA, 22 nt, Human
acuuccugcagcuucucagccc

SEQ ID NO: 1116031 - RNA, 22 nt, Human
aggucauuggggacuaucuccg

SEQ ID NO: 1116032 - RNA, 22 nt, Human
accuggcaugaagcaugccuua

SEQ ID NO: 1116033 - RNA, 22 nt, Human
cuguccuggagggcauaggacg

SEQ ID NO: 1116034 - RNA, 22 nt, Human
uuuuugaaggcugaugugauua

SEQ ID NO: 1116035 - RNA, 22 nt, Human
gagccugaaauacaggucacug

SEQ ID NO: 1116036 - RNA, 22 nt, Human
uuucacaaugcaauccuacuuc

SEQ ID NO: 1116037 - RNA, 22 nt, Human
gcaggccagcugugcagauggg

SEQ ID NO: 1116038 - RNA, 22 nt, Human
cuggccuuuagccccagugucu

SEQ ID NO: 1116039 - RNA, 20 nt, Human
gggaguggugguagccugug

SEQ ID NO: 1116040 - RNA, 22 nt, Human
aaaguuagaaugauaucaacga

SEQ ID NO: 1116041 - RNA, 22 nt, Human
caggcuugggagcagagccacu

SEQ ID NO: 1116042 - RNA, 22 nt, Human
ucugggcuuuacacugugcuua

SEQ ID NO: 1116043 - RNA, 22 nt, Human
cugcugcaggaugggcacucug

SEQ ID NO: 1116044 - RNA, 22 nt, Human
uguacaauagcuauuaucucca

SEQ ID NO: 1116045 - RNA, 22 nt, Human
uccagucaucucccuucacauu

SEQ ID NO: 1116046 - RNA, 22 nt, Human
uggcucugugcuucuaguaucu

SEQ ID NO: 1116047 - RNA, 21 nt, Human
gaaaggucuuaacuuacagag

SEQ ID NO: 1116048 - RNA, 22 nt, Human
aaggcagcagugcacgacugau

SEQ ID NO: 1116049 - RNA, 22 nt, Human
ggcucugcccagaugaagagga

SEQ ID NO: 1116050 - RNA, 22 nt, Human
aaacucuggagauguuuaugca

SEQ ID NO: 1116051 - RNA, 22 nt, Human
uugcucugacuggagugcagug

SEQ ID NO: 1116052 - RNA, 22 nt, Human
ggagacagugguagggccuaag

SEQ ID NO: 1116053 - RNA, 22 nt, Human
agaaacugaauuauuucugagg

SEQ ID NO: 1116054 - RNA, 23 nt, Human
caggcaggaugaggacuacacuc

SEQ ID NO: 1116055 - RNA, 22 nt, Human
caggcacuggccagucagcaca

SEQ ID NO: 1116056 - RNA, 21 nt, Human
ucuguacaucauugagucccc

SEQ ID NO: 1116057 - RNA, 22 nt, Human
uugcacuccagcccgagcaaca

SEQ ID NO: 1116058 - RNA, 22 nt, Human
auaaacacuucuagggcacaca

SEQ ID NO: 1116059 - RNA, 22 nt, Human
cccucccaggaguggccagaga

SEQ ID NO: 1116060 - RNA, 22 nt, Human
cucccugguguccccuccagga

SEQ ID NO: 1116061 - RNA, 22 nt, Human
ugaggcagaaauuccuguuuuc

SEQ ID NO: 1116062 - RNA, 22 nt, Human
uagcagaaccagcagucaauuu

SEQ ID NO: 1116063 - RNA, 22 nt, Human
gggcuggagccagcuguggcug

SEQ ID NO: 1116064 - RNA, 22 nt, Human
gcucaggaucagccaccucuuu

SEQ ID NO: 1116065 - RNA, 22 nt, Human
uugggugcugucauggggcacg

SEQ ID NO: 1116066 - RNA, 22 nt, Human
aggcucaggcaggaauggcgga

SEQ ID NO: 1116067 - RNA, 22 nt, Human
uccugccuugccugggacauca

SEQ ID NO: 1116068 - RNA, 22 nt, Human
ccuggcagcagcacaugccuuc

SEQ ID NO: 1116069 - RNA, 22 nt, Human
acagaaauaacuuuuuauguuu

SEQ ID NO: 1116070 - RNA, 22 nt, Human
ugucccagcagcuggguucucu

SEQ ID NO: 1116071 - RNA, 22 nt, Human
aggaccaacauagcagcagugg

SEQ ID NO: 1116072 - RNA, 22 nt, Human
gcagcaugagcuauacaaagua

SEQ ID NO: 1116073 - RNA, 22 nt, Human
gaaggcuggcuuucugagagca

SEQ ID NO: 1116074 - RNA, 22 nt, Human
cccugggcagucugcacuucag

SEQ ID NO: 1116075 - RNA, 22 nt, Human
ucaucaaagcgcuuggaguagg

SEQ ID NO: 1116076 - RNA, 22 nt, Human
caauaauauccugugcuguuug

SEQ ID NO: 1116077 - RNA, 22 nt, Human
ugcacacacaugaaguagcaug

SEQ ID NO: 1116078 - RNA, 22 nt, Human
gcugcucucagagcucaugcug

SEQ ID NO: 1116079 - RNA, 22 nt, Human
aggccugaggaccagauaaaug

SEQ ID NO: 1116080 - RNA, 22 nt, Human
uccuucaguucaauuaguccgu

SEQ ID NO: 1116081 - RNA, 22 nt, Human
aaggcagccgugugacugcaug

SEQ ID NO: 1116082 - RNA, 22 nt, Human
ugcccaagcagaggagugauuc

SEQ ID NO: 1116083 - RNA, 22 nt, Human
cucugugggggagaggcagcug

SEQ ID NO: 1116084 - RNA, 22 nt, Human
uggaagccaggcccgcuccuaa

SEQ ID NO: 1116085 - RNA, 22 nt, Human
ggucucagcccucgccagcagc

SEQ ID NO: 1116086 - RNA, 22 nt, Human
aagggcuggccacauucugggu

SEQ ID NO: 1116087 - RNA, 22 nt, Human
ccugaagaugcuguggccuggu

SEQ ID NO: 1116088 - RNA, 22 nt, Human
ccacuugugaaauaaucaaaua

SEQ ID NO: 1116089 - RNA, 22 nt, Human
ccaaggagcaaggcucaacaag

SEQ ID NO: 1116090 - RNA, 22 nt, Human
ucaaaugcacguagagaaaaua

SEQ ID NO: 1116091 - RNA, 22 nt, Human
gggccuggggacaccaccauga

SEQ ID NO: 1116092 - RNA, 22 nt, Human
ggcugcuugcuguuucuuggau

SEQ ID NO: 1116093 - RNA, 21 nt, Human
ugcuccuuagcugccccugcc

SEQ ID NO: 1116094 - RNA, 22 nt, Human
ucaguuuucaauuucaucagag

SEQ ID NO: 1116095 - RNA, 22 nt, Human
gguuugcauucugaaaggcuca

SEQ ID NO: 1116096 - RNA, 22 nt, Human
agggcaaguugagugugcgugg

SEQ ID NO: 1116097 - RNA, 22 nt, Human
gccaggcagcaggaagccagug

SEQ ID NO: 1116098 - RNA, 22 nt, Human
uacaaaguuuucuuggauugag

SEQ ID NO: 1116099 - RNA, 22 nt, Human
gccaggcuggcaaaaggaaacc

SEQ ID NO: 1116100 - RNA, 23 nt, Human
gcagagcugcccuauugccuugg

SEQ ID NO: 1116101 - RNA, 22 nt, Human
cucuggagguugagcccagcaa

SEQ ID NO: 1116102 - RNA, 22 nt, Human
cuggguggaaagugcugagaau

SEQ ID NO: 1116103 - RNA, 22 nt, Human
ugggaccaagucauuucuuuag

SEQ ID NO: 1116104 - RNA, 22 nt, Human
aguagaaagaaggcacugggcc

SEQ ID NO: 1116105 - RNA, 22 nt, Human
gagauauguuagaaagcuauug

SEQ ID NO: 1116106 - RNA, 22 nt, Human
ccagggugagugucauggguua

SEQ ID NO: 1116107 - RNA, 23 nt, Human
ucucagaggauuccugggccuug

SEQ ID NO: 1116108 - RNA, 22 nt, Human
cugcuuugaggggcucuguaua

SEQ ID NO: 1116109 - RNA, 21 nt, Human
ugggagagggcucagcuaccc

SEQ ID NO: 1116110 - RNA, 22 nt, Human
guguacauagaauugugcuuug

SEQ ID NO: 1116111 - RNA, 22 nt, Human
cugugugcugaaaugcagugag

SEQ ID NO: 1116112 - RNA, 23 nt, Human
aucaagauaauccagaugaccua

SEQ ID NO: 1116113 - RNA, 23 nt, Human
uggcucagcuaguuuuccauuuc

SEQ ID NO: 1116114 - RNA, 22 nt, Human
aaucaguuaaauauugaguaca

SEQ ID NO: 1116115 - RNA, 22 nt, Human
cugucuguucagauucauuacu

SEQ ID NO: 1116116 - RNA, 22 nt, Human
cagcagagcugugugggaaggg

SEQ ID NO: 1116117 - RNA, 22 nt, Human
ucagagugaggcgucaacauga

SEQ ID NO: 1116118 - RNA, 22 nt, Human
agaugauggccauguccucucc

SEQ ID NO: 1116119 - RNA, 23 nt, Human
cuggcuccgaagacuccaggauc

SEQ ID NO: 1116120 - RNA, 22 nt, Human
gcugccugauuuacauagugaa

SEQ ID NO: 1116121 - RNA, 22 nt, Human
gccucccuggcccacagcagcg

SEQ ID NO: 1116122 - RNA, 22 nt, Human
gaugguuuaugauagaugggaa

SEQ ID NO: 1116123 - RNA, 21 nt, Human
gggccuggcugcgcaggacgg

SEQ ID NO: 1116124 - RNA, 22 nt, Human
agcuggaggggccagcaggugu

SEQ ID NO: 1116125 - RNA, 18 nt, Human
gucuggaggucaggagcu

SEQ ID NO: 1116126 - RNA, 22 nt, Human
caaaugugguuucucagcauuc

SEQ ID NO: 1116127 - RNA, 22 nt, Human
aggagcugcuuaaaugguuggu

SEQ ID NO: 1116128 - RNA, 22 nt, Human
ugggcagaauugugguaguuaa

SEQ ID NO: 1116129 - RNA, 22 nt, Human
ugaagcagagaauuugacaguc

SEQ ID NO: 1116130 - RNA, 22 nt, Human
ggaggccaaggcaggcggauca

SEQ ID NO: 1116131 - RNA, 22 nt, Human
aggcugcuuucauggccgcccc

SEQ ID NO: 1116132 - RNA, 22 nt, Human
gccagcagcccagaaggacuuu

SEQ ID NO: 1116133 - RNA, 19 nt, Human
ccugcagggaugagagguu

SEQ ID NO: 1116134 - RNA, 22 nt, Human
uaacagaagaugaaacuucuuu

SEQ ID NO: 1116135 - RNA, 22 nt, Human
cugaggagagaucacguggugu

SEQ ID NO: 1116136 - RNA, 22 nt, Human
acagaaggcggggacaaggcgg

SEQ ID NO: 1116137 - RNA, 22 nt, Human
ucugggagauccaagcagaacu

SEQ ID NO: 1116138 - RNA, 22 nt, Human
gcagggcucauucuaguacaau

SEQ ID NO: 1116139 - RNA, 22 nt, Human
ugcccaggguggagugcagcgg

SEQ ID NO: 1116140 - RNA, 22 nt, Human
uguucuugggaaucuuacaguu

SEQ ID NO: 1116141 - RNA, 22 nt, Human
gcaaagucucaagacccaagug

SEQ ID NO: 1116142 - RNA, 22 nt, Human
uuccauuguuucugucuucacu

SEQ ID NO: 1116143 - RNA, 22 nt, Human
caugggcuacagaagcaugcug

SEQ ID NO: 1116144 - RNA, 22 nt, Human
ugcugcauuuaucuucucaaac

SEQ ID NO: 1116145 - RNA, 22 nt, Human
gggcugcugccaccagguggau

SEQ ID NO: 1116146 - RNA, 22 nt, Human
gaagcucucaaacucuccccuu

SEQ ID NO: 1116147 - RNA, 19 nt, Human
gagcagcugcacccauuga

SEQ ID NO: 1116148 - RNA, 22 nt, Human
uggggcuguggauucucacgaa

SEQ ID NO: 1116149 - RNA, 22 nt, Human
uaccaggcagcugcacagaggc

SEQ ID NO: 1116150 - RNA, 22 nt, Human
gcagggcugcugaaacuuguuu

SEQ ID NO: 1116151 - RNA, 22 nt, Human
gcaggccuuggcaaugagccug

SEQ ID NO: 1116152 - RNA, 18 nt, Human
ucugucuguacaaguauc

SEQ ID NO: 1116153 - RNA, 22 nt, Human
cccaggagauggagguugcagu

SEQ ID NO: 1116154 - RNA, 22 nt, Human
cagccagggagcaaagaguuga

SEQ ID NO: 1116155 - RNA, 21 nt, Human
agggccugugcucuccagguc

SEQ ID NO: 1116156 - RNA, 22 nt, Human
uggggugguaauacaccguucu

SEQ ID NO: 1116157 - RNA, 22 nt, Human
augugcaugcacuuacaugugu

SEQ ID NO: 1116158 - RNA, 22 nt, Human
gaggcagcaaaauauaucauaa

SEQ ID NO: 1116159 - RNA, 22 nt, Human
cuggccacaacuagcccaggac

SEQ ID NO: 1116160 - RNA, 22 nt, Human
uacaguuuguuacauuguuagu

SEQ ID NO: 1116161 - RNA, 22 nt, Human
acaggccugacacacagagggc

SEQ ID NO: 1116162 - RNA, 22 nt, Human
gcagggccagugcagagaggaa

SEQ ID NO: 1116163 - RNA, 22 nt, Human
gccaggugcuaucccugcgcug

SEQ ID NO: 1116164 - RNA, 22 nt, Human
uccugaggaaaguucaugaaug

SEQ ID NO: 1116165 - RNA, 22 nt, Human
agcucagggcgaucugucucgg

SEQ ID NO: 1116166 - RNA, 22 nt, Human
gaaggaaaacagaucugccuga

SEQ ID NO: 1116167 - RNA, 22 nt, Human
cacagguguaugaauaugucca

SEQ ID NO: 1116168 - RNA, 22 nt, Human
cagucccaucucccagguggcu

SEQ ID NO: 1116169 - RNA, 22 nt, Human
acuguguccucauguggcagaa

SEQ ID NO: 1116170 - RNA, 22 nt, Human
uggccugcagaggcuguggggc

SEQ ID NO: 1116171 - RNA, 22 nt, Human
uggcccugugugcaggcugcac

SEQ ID NO: 1116172 - RNA, 22 nt, Human
acugcuuuucagagucugccug

SEQ ID NO: 1116173 - RNA, 22 nt, Human
ugcugggcuaggguggagcucu

SEQ ID NO: 1116174 - RNA, 22 nt, Human
ggaggccaucagggagggcauu

SEQ ID NO: 1116175 - RNA, 22 nt, Human
uggcccugcagaacuagccugg

SEQ ID NO: 1116176 - RNA, 22 nt, Human
aaacugaauucccaagggcaug

SEQ ID NO: 1116177 - RNA, 20 nt, Human
ccugccuguguuugugauga

SEQ ID NO: 1116178 - RNA, 22 nt, Human
cauacuuuugcccugacauucu

SEQ ID NO: 1116179 - RNA, 22 nt, Human
cucaggcccacagcagacccac

SEQ ID NO: 1116180 - RNA, 22 nt, Human
agggcagauggaacuuccccga

SEQ ID NO: 1116181 - RNA, 22 nt, Human
cagcagguauguuuguucagca

SEQ ID NO: 1116182 - RNA, 22 nt, Human
aagggcaggaaaagauggaugu

SEQ ID NO: 1116183 - RNA, 22 nt, Human
agggcugguauguccaugaaag

SEQ ID NO: 1116184 - RNA, 22 nt, Human
gcuccagguauuugcccuuuua

SEQ ID NO: 1116185 - RNA, 22 nt, Human
ccacagaguuacaaaacaguca

SEQ ID NO: 1116186 - RNA, 22 nt, Human
ccaggccaaauucagucagcag

SEQ ID NO: 1116187 - RNA, 22 nt, Human
aucaguuuuuauuaauguagcu

SEQ ID NO: 1116188 - RNA, 22 nt, Human
uguaacaguaagccugugagcu

SEQ ID NO: 1116189 - RNA, 22 nt, Human
agucucugcaugccugcugugc

SEQ ID NO: 1116190 - RNA, 22 nt, Human
uccugggaagagaccugagcau

SEQ ID NO: 1116191 - RNA, 22 nt, Human
uauaagaaacaaggcaaauuuu

SEQ ID NO: 1116192 - RNA, 22 nt, Human
auucaguuaaaaacuguacuuc

SEQ ID NO: 1116193 - RNA, 22 nt, Human
ugcccuguuaucuuggaagagu

SEQ ID NO: 1116194 - RNA, 22 nt, Human
uauucacagcugccgcacucag

SEQ ID NO: 1116195 - RNA, 22 nt, Human
aggcugaggcagguggaucacc

SEQ ID NO: 1116196 - RNA, 22 nt, Human
cagguggggagaguguggagca

SEQ ID NO: 1116197 - RNA, 19 nt, Human
accaggcuuauggucagug

SEQ ID NO: 1116198 - RNA, 22 nt, Human
aucuaggauuugaaugcacagu

SEQ ID NO: 1116199 - RNA, 22 nt, Human
cccagggcuuuucucacuagac

SEQ ID NO: 1116200 - RNA, 22 nt, Human
gcccucucuucugcagccucca

SEQ ID NO: 1116201 - RNA, 22 nt, Human
gggugcugacuggggccugaaa

SEQ ID NO: 1116202 - RNA, 22 nt, Human
cagcaguguggaagcugagggg

SEQ ID NO: 1116203 - RNA, 21 nt, Human
aggugccaaggagaagcaggc

SEQ ID NO: 1116204 - RNA, 22 nt, Human
ggugcugguucaggguggcugu

SEQ ID NO: 1116205 - RNA, 22 nt, Human
gagauguacaauguguauuaau

SEQ ID NO: 1116206 - RNA, 22 nt, Human
ccagggcagaaaaagagggaau

SEQ ID NO: 1116207 - RNA, 22 nt, Human
aagcccagaugggagcauuuca

SEQ ID NO: 1116208 - RNA, 22 nt, Human
uccugccucacaguugaaguuu

SEQ ID NO: 1116209 - RNA, 22 nt, Human
ccucccaccguaucucaguggc

SEQ ID NO: 1116210 - RNA, 20 nt, Human
gucaucgccggcagcaaaga

SEQ ID NO: 1116211 - RNA, 22 nt, Human
aguugcagacgcagagauguug

SEQ ID NO: 1116212 - RNA, 19 nt, Human
cugggagguguucagagaa

SEQ ID NO: 1116213 - RNA, 22 nt, Human
ggccuguccagccugccuggcu

SEQ ID NO: 1116214 - RNA, 22 nt, Human
gagccucguggcggccacugcg

SEQ ID NO: 1116215 - RNA, 22 nt, Human
aaagagcuucauuuccauuuau

SEQ ID NO: 1116216 - RNA, 19 nt, Human
ggccccucucacaggaguu

SEQ ID NO: 1116217 - RNA, 22 nt, Human
aucaguuuaaaugggcuguugg

SEQ ID NO: 1116218 - RNA, 22 nt, Human
gcugucacaaauauuucucagc

SEQ ID NO: 1116219 - RNA, 22 nt, Human
gagcucuggcagggcaggucug

SEQ ID NO: 1116220 - RNA, 22 nt, Human
ggccugucucacccccgggugc

SEQ ID NO: 1116221 - RNA, 22 nt, Human
ugccuuggugcuucuucaugug

SEQ ID NO: 1116222 - RNA, 22 nt, Human
cucucugguuucagcgaagggg

SEQ ID NO: 1116223 - RNA, 22 nt, Human
caggggcuagcacuuaauguuu

SEQ ID NO: 1116224 - RNA, 22 nt, Human
caaaugcauaguuuauaagaag

SEQ ID NO: 1116225 - RNA, 22 nt, Human
gagggcaguagccucguacccu

SEQ ID NO: 1116226 - RNA, 22 nt, Human
gcagcuuuuuggaugucaguua

SEQ ID NO: 1116227 - RNA, 22 nt, Human
cuguacauauacauuuuuuucc

SEQ ID NO: 1116228 - RNA, 22 nt, Human
aggugcugccccgagaaggaug

SEQ ID NO: 1116229 - RNA, 22 nt, Human
cugagccagcgggcucacuuuu

SEQ ID NO: 1116230 - RNA, 22 nt, Human
guuuucuuugaaugcuucuaga

SEQ ID NO: 1116231 - RNA, 22 nt, Human
gggacagaaggaagugagcaca

SEQ ID NO: 1116232 - RNA, 22 nt, Human
agaaauguauucuguauguuuu

SEQ ID NO: 1116233 - RNA, 22 nt, Human
cuggccuuggaagggagcccgu

SEQ ID NO: 1116234 - RNA, 22 nt, Human
ccagcuccaggacugggagcug

SEQ ID NO: 1116235 - RNA, 22 nt, Human
cugcccuggcagccuaccaugg

SEQ ID NO: 1116236 - RNA, 22 nt, Human
ccugacucuggccaggccagcu

SEQ ID NO: 1116237 - RNA, 22 nt, Human
ugauggcuaucccuggaagggc

SEQ ID NO: 1116238 - RNA, 22 nt, Human
agaaggccuaacuugggggcaa

SEQ ID NO: 1116239 - RNA, 22 nt, Human
acagaguaucuaucaggaguau

SEQ ID NO: 1116240 - RNA, 22 nt, Human
cagaggccuauccaguguccau

SEQ ID NO: 1116241 - RNA, 22 nt, Human
cugggcacauuuugacuagugu

SEQ ID NO: 1116242 - RNA, 22 nt, Human
cagugcagaacacauggaaaau

SEQ ID NO: 1116243 - RNA, 22 nt, Human
ccugagcugaacuaagcaguuu

SEQ ID NO: 1116244 - RNA, 23 nt, Human
ucugggcaccuuguugacaugau

SEQ ID NO: 1116245 - RNA, 22 nt, Human
gggcugcacagaucuucaaggg

SEQ ID NO: 1116246 - RNA, 20 nt, Human
agugucugggccucaggccc

SEQ ID NO: 1116247 - RNA, 23 nt, Human
agucaguguaaguuuggaaugca

SEQ ID NO: 1116248 - RNA, 22 nt, Human
gcagccacuuugcaaccaagag

SEQ ID NO: 1116249 - RNA, 19 nt, Human
gcugugugaccuugggcaa

SEQ ID NO: 1116250 - RNA, 22 nt, Human
gaggaugugucuggucugggca

SEQ ID NO: 1116251 - RNA, 17 nt, Human
agcugagcuggccaggg

SEQ ID NO: 1116252 - RNA, 22 nt, Human
gcucugcucuugacuuaccagg

SEQ ID NO: 1116253 - RNA, 21 nt, Human
ggcccugguuacgccuccucu

SEQ ID NO: 1116254 - RNA, 22 nt, Human
ccuaagaauuaaugaauacacc

SEQ ID NO: 1116255 - RNA, 22 nt, Human
cugcagccuccugggguacaug

SEQ ID NO: 1116256 - RNA, 22 nt, Human
aggagaaggaagugcaucacua

SEQ ID NO: 1116257 - RNA, 22 nt, Human
cagagcugggaucccaugggcg

SEQ ID NO: 1116258 - RNA, 22 nt, Human
cuuauguaugcuacuuuguggu

SEQ ID NO: 1116259 - RNA, 22 nt, Human
ucugucaggagauuggcagcug

SEQ ID NO: 1116260 - RNA, 23 nt, Human
agcagccagagauccucggcccu

SEQ ID NO: 1116261 - RNA, 22 nt, Human
caagaacauugugaucacuuca

SEQ ID NO: 1116262 - RNA, 22 nt, Human
uccugccucuugccuucuucac

SEQ ID NO: 1116263 - RNA, 22 nt, Human
acaaaaauuagcugggcauggu

SEQ ID NO: 1116264 - RNA, 22 nt, Human
agucccagugagaugagccacg

SEQ ID NO: 1116265 - RNA, 22 nt, Human
ugaagcaguucucagaaguggg

SEQ ID NO: 1116266 - RNA, 22 nt, Human
gaggucaauaauaugugcuuua

SEQ ID NO: 1116267 - RNA, 22 nt, Human
gcccagagagaugcuguagacc

SEQ ID NO: 1116268 - RNA, 22 nt, Human
ccuccuggcccugggccuggaa

SEQ ID NO: 1116269 - RNA, 22 nt, Human
ugaagacacauacaagggaaug

SEQ ID NO: 1116270 - RNA, 22 nt, Human
caaauguguaaggaaguguuag

SEQ ID NO: 1116271 - RNA, 22 nt, Human
uggccugguccuugucaaggca

SEQ ID NO: 1116272 - RNA, 22 nt, Human
ccagcagccaccuucucgaaau

SEQ ID NO: 1116273 - RNA, 22 nt, Human
caggccugauacacugaacucu

SEQ ID NO: 1116274 - RNA, 22 nt, Human
ggggggugcugaucaguggagc

SEQ ID NO: 1116275 - RNA, 22 nt, Human
ccaggcugcuguugguguccgc

SEQ ID NO: 1116276 - RNA, 22 nt, Human
aaugcugcaagaggugaaaaga

SEQ ID NO: 1116277 - RNA, 22 nt, Human
uuccaguugguagaauguaagg

SEQ ID NO: 1116278 - RNA, 22 nt, Human
agcauuuaguuaguaaauguuu

SEQ ID NO: 1116279 - RNA, 22 nt, Human
uauugucuguccgggucaaagc

SEQ ID NO: 1116280 - RNA, 22 nt, Human
ugucaccaugccagcuucugcc

SEQ ID NO: 1116281 - RNA, 22 nt, Human
ccagcucuggcuucuugcuggg

SEQ ID NO: 1116282 - RNA, 22 nt, Human
aagagcuggcucuugcagcagc

SEQ ID NO: 1116283 - RNA, 22 nt, Human
ucuggccacccgaggccccugc

SEQ ID NO: 1116284 - RNA, 22 nt, Human
ggccuguguccuccuugcccug

SEQ ID NO: 1116285 - RNA, 22 nt, Human
cccagccuuugcuuccugguuc

SEQ ID NO: 1116286 - RNA, 22 nt, Human
gccugagcccaggugugcagag

SEQ ID NO: 1116287 - RNA, 22 nt, Human
uacauuccacuagugacuggcg

SEQ ID NO: 1116288 - RNA, 20 nt, Human
gccagcccugacacaggagc

SEQ ID NO: 1116289 - RNA, 22 nt, Human
cucuggaguggguggccgggag

SEQ ID NO: 1116290 - RNA, 22 nt, Human
gcugcagcagcugcaggguugu

SEQ ID NO: 1116291 - RNA, 22 nt, Human
ggcagcagggucuagauugaug

SEQ ID NO: 1116292 - RNA, 22 nt, Human
ugcugucugcaacaguacuaca

SEQ ID NO: 1116293 - RNA, 22 nt, Human
uccuggauucugcccugaaggc

SEQ ID NO: 1116294 - RNA, 17 nt, Human
uuccccugaccaagccu

SEQ ID NO: 1116295 - RNA, 22 nt, Human
guuuuccuucucagccauugcc

SEQ ID NO: 1116296 - RNA, 22 nt, Human
cagcugccagcuucucuccauc

SEQ ID NO: 1116297 - RNA, 22 nt, Human
gcaagcuggcuguuagaggaug

SEQ ID NO: 1116298 - RNA, 22 nt, Human
cuggagcugucuucacaggccu

SEQ ID NO: 1116299 - RNA, 22 nt, Human
ggaggccaguccuggccgggcu

SEQ ID NO: 1116300 - RNA, 22 nt, Human
cagguggggcagcugugggagc

SEQ ID NO: 1116301 - RNA, 22 nt, Human
gcagacuggucuucagccuugg

SEQ ID NO: 1116302 - RNA, 22 nt, Human
cuggccaggcuugggacagaca

SEQ ID NO: 1116303 - RNA, 22 nt, Human
ccagggcaacgcugucucagag

SEQ ID NO: 1116304 - RNA, 22 nt, Human
uuccucagagggcgcuggggaa

SEQ ID NO: 1116305 - RNA, 22 nt, Human
ucugccuuggcaaccacagcuu

SEQ ID NO: 1116306 - RNA, 22 nt, Human
gccuuugcaccaucagugcaau

SEQ ID NO: 1116307 - RNA, 22 nt, Human
gcuggagcuugagaggacaggg

SEQ ID NO: 1116308 - RNA, 20 nt, Human
ccagacagcaccugccuggu

SEQ ID NO: 1116309 - RNA, 22 nt, Human
cccagaggugcuucagaggugc

SEQ ID NO: 1116310 - RNA, 22 nt, Human
uccugcugagcgucugucauuu

SEQ ID NO: 1116311 - RNA, 19 nt, Human
cucuggccucuggaugcug

SEQ ID NO: 1116312 - RNA, 22 nt, Human
uuguaacaggcacucugugcca

SEQ ID NO: 1116313 - RNA, 22 nt, Human
agauacauuaguaguuacuugu

SEQ ID NO: 1116314 - RNA, 22 nt, Human
acagagcaguucuggagcuggc

SEQ ID NO: 1116315 - RNA, 22 nt, Human
gcuccugggcucuaccuugcua

SEQ ID NO: 1116316 - RNA, 22 nt, Human
cuucuggggauggagcccagaa

SEQ ID NO: 1116317 - RNA, 22 nt, Human
gcacaugagcugcugggauggg

SEQ ID NO: 1116318 - RNA, 22 nt, Human
uuuauuugucuugccauuuagu

SEQ ID NO: 1116319 - RNA, 22 nt, Human
aucuggcucucucauuuacaaa

SEQ ID NO: 1116320 - RNA, 22 nt, Human
ggcuugcuucuuguccaggaau

SEQ ID NO: 1116321 - RNA, 22 nt, Human
ggcugugccucaaggcuacuca

SEQ ID NO: 1116322 - RNA, 22 nt, Human
cugagcugaaacuugagaggcu

SEQ ID NO: 1116323 - RNA, 22 nt, Human
ugaaagguagcuggccucauag

SEQ ID NO: 1116324 - RNA, 22 nt, Human
cugaugcuauaagccacagugg

SEQ ID NO: 1116325 - RNA, 18 nt, Human
agccuggaggguugaagu

SEQ ID NO: 1116326 - RNA, 22 nt, Human
gaaggccauugcguccugggau

SEQ ID NO: 1116327 - RNA, 22 nt, Human
ucuggagaacuugcaagaggau

SEQ ID NO: 1116328 - RNA, 22 nt, Human
cugguccuccuugccuucagau

SEQ ID NO: 1116329 - RNA, 22 nt, Human
gccuggagggucccucucugga

SEQ ID NO: 1116330 - RNA, 22 nt, Human
caguacuucuuggaaacuggau

SEQ ID NO: 1116331 - RNA, 22 nt, Human
acucagaguuugcguuccauac

SEQ ID NO: 1116332 - RNA, 22 nt, Human
auacuuuggggguuaguguaga

SEQ ID NO: 1116333 - RNA, 22 nt, Human
uuauguacucugcaauguuuga

SEQ ID NO: 1116334 - RNA, 22 nt, Human
ucauccuuuugcaugggaaggc

SEQ ID NO: 1116335 - RNA, 22 nt, Human
gcagcugguuaaugggagaauu

SEQ ID NO: 1116336 - RNA, 22 nt, Human
cacagaagaaucaugcuguguu

SEQ ID NO: 1116337 - RNA, 19 nt, Human
ccucugccagcccgccucu

SEQ ID NO: 1116338 - RNA, 22 nt, Human
gccugggaacucugaucuccug

SEQ ID NO: 1116339 - RNA, 18 nt, Human
cagaaaucacaccagcac

SEQ ID NO: 1116340 - RNA, 22 nt, Human
cucagagaaaaggagcaagggu

SEQ ID NO: 1116341 - RNA, 22 nt, Human
gcagcuuuguggagaggcccau

SEQ ID NO: 1116342 - RNA, 22 nt, Human
guuuuuccugcugacuuggguc

SEQ ID NO: 1116343 - RNA, 22 nt, Human
uaauaucuacuucauagaguuu

SEQ ID NO: 1116344 - RNA, 22 nt, Human
ugagaaagugggugccuagcaa

SEQ ID NO: 1116345 - RNA, 22 nt, Human
ccugguguugugaaguagccgu

SEQ ID NO: 1116346 - RNA, 22 nt, Human
acagguggggaggcugagguuc

SEQ ID NO: 1116347 - RNA, 22 nt, Human
uccucagggggccaacccagcc

SEQ ID NO: 1116348 - RNA, 22 nt, Human
gggagccaugcuggucuucuuu

SEQ ID NO: 1116349 - RNA, 22 nt, Human
gucccuggggaaucagcuggag

SEQ ID NO: 1116350 - RNA, 18 nt, Human
gaggccugagaaccaggu

SEQ ID NO: 1116351 - RNA, 22 nt, Human
ggagccugggcauuaguaauuu

SEQ ID NO: 1116352 - RNA, 22 nt, Human
uuuauucuugagagugagaaga

SEQ ID NO: 1116353 - RNA, 23 nt, Human
gguggcaggaguggaugcugagc

SEQ ID NO: 1116354 - RNA, 22 nt, Human
ucuguagcaagugagaggcauu

SEQ ID NO: 1116355 - RNA, 22 nt, Human
aggacuucaucaccuguauaaa

SEQ ID NO: 1116356 - RNA, 22 nt, Human
cuccagggaaaggggcguccgc

SEQ ID NO: 1116357 - RNA, 20 nt, Human
aguaggggaaugcaagagca

SEQ ID NO: 1116358 - RNA, 22 nt, Human
uuucuuccuuaccuuacuagag

SEQ ID NO: 1116359 - RNA, 22 nt, Human
gccugagagacccauggggcaa

SEQ ID NO: 1116360 - RNA, 22 nt, Human
acuucuggugucauacugcauu

SEQ ID NO: 1116361 - RNA, 22 nt, Human
gcucugucuucagcacacagua

SEQ ID NO: 1116362 - RNA, 22 nt, Human
cugggcugcagcgggagcgacg

SEQ ID NO: 1116363 - RNA, 22 nt, Human
uucucuucaucucaguaaaugu

SEQ ID NO: 1116364 - RNA, 22 nt, Human
ugcagcuucuuguccugugauu

SEQ ID NO: 1116365 - RNA, 22 nt, Human
aagcaauauacugauaugauua

SEQ ID NO: 1116366 - RNA, 22 nt, Human
ggcagcugagcauggcuaccuu

SEQ ID NO: 1116367 - RNA, 22 nt, Human
ucagccagugccuugaucuugc

SEQ ID NO: 1116368 - RNA, 20 nt, Human
uccugggguaagccaugguc

SEQ ID NO: 1116369 - RNA, 22 nt, Human
aaugcacaaaaauuguauguaa

SEQ ID NO: 1116370 - RNA, 22 nt, Human
ggugcccaccugucuuccugga

SEQ ID NO: 1116371 - RNA, 22 nt, Human
cuacauuuugugauuaugaaau

SEQ ID NO: 1116372 - RNA, 22 nt, Human
uccuucagcucucuauuuagau

SEQ ID NO: 1116373 - RNA, 22 nt, Human
ugggccuguggcuuggcucuag

SEQ ID NO: 1116374 - RNA, 22 nt, Human
agaaaacauuacauaggugugu

SEQ ID NO: 1116375 - RNA, 22 nt, Human
cacaggcugcccgcagcuggga

SEQ ID NO: 1116376 - RNA, 17 nt, Human
gggcagggacuccuggg

SEQ ID NO: 1116377 - RNA, 22 nt, Human
ccuggcagcuguuuggcuuggc

SEQ ID NO: 1116378 - RNA, 22 nt, Human
cagcaauaacucaaagccauuu

SEQ ID NO: 1116379 - RNA, 18 nt, Human
agcuggggccucuggucc

SEQ ID NO: 1116380 - RNA, 19 nt, Human
gcucagagggcccugugcu

SEQ ID NO: 1116381 - RNA, 22 nt, Human
caagaaauguuuacugagcauc

SEQ ID NO: 1116382 - RNA, 22 nt, Human
acauuucucccugcaugccugc

SEQ ID NO: 1116383 - RNA, 22 nt, Human
ugucccaggcugaaguacagug

SEQ ID NO: 1116384 - RNA, 23 nt, Human
ugacacauuuccuuuccacugca

SEQ ID NO: 1116385 - RNA, 22 nt, Human
aggcacugggaauaugcugagg

SEQ ID NO: 1116386 - RNA, 18 nt, Human
ccuggagcuccacagcaa

SEQ ID NO: 1116387 - RNA, 22 nt, Human
agcagcauucucugguaugggg

SEQ ID NO: 1116388 - RNA, 22 nt, Human
uccuucagcuacucaguuucca

SEQ ID NO: 1116389 - RNA, 22 nt, Human
ggcagcaggagccaucugguag

SEQ ID NO: 1116390 - RNA, 22 nt, Human
augggaggaucacuugaggcca

SEQ ID NO: 1116391 - RNA, 18 nt, Human
caaagcucacguuccauc

SEQ ID NO: 1116392 - RNA, 22 nt, Human
aauacaaucaaauucacuagca

SEQ ID NO: 1116393 - RNA, 22 nt, Human
aguggggacuuaugccagcauu

SEQ ID NO: 1116394 - RNA, 22 nt, Human
ugcauugcauuugucaugaaga

SEQ ID NO: 1116395 - RNA, 22 nt, Human
ccugcugggccugagcaaugag

SEQ ID NO: 1116396 - RNA, 22 nt, Human
ccacugucugcaggccucagca

SEQ ID NO: 1116397 - RNA, 21 nt, Human
agagaagggacucuuccaguc

SEQ ID NO: 1116398 - RNA, 22 nt, Human
agacaaagacagcaucucaggu

SEQ ID NO: 1116399 - RNA, 22 nt, Human
cagggccaguucucgcagcagu

SEQ ID NO: 1116400 - RNA, 22 nt, Human
ggccagaggccauccuccugcu

SEQ ID NO: 1116401 - RNA, 22 nt, Human
cuggagccggcgagccccagcc

SEQ ID NO: 1116402 - RNA, 22 nt, Human
uugcauugaugucuauacgcug

SEQ ID NO: 1116403 - RNA, 22 nt, Human
ugauuuccaugaagcugaaggc

SEQ ID NO: 1116404 - RNA, 22 nt, Human
agucccagccuaggcugugcug

SEQ ID NO: 1116405 - RNA, 22 nt, Human
agagacaggauaucugcucaug

SEQ ID NO: 1116406 - RNA, 22 nt, Human
cagccagguucaaguccuuaua

SEQ ID NO: 1116407 - RNA, 22 nt, Human
agggacacaugugauuauuuau

SEQ ID NO: 1116408 - RNA, 22 nt, Human
agcuggcuccagaaggagucgu

SEQ ID NO: 1116409 - RNA, 22 nt, Human
ccagggugggaggcugaaggcg

SEQ ID NO: 1116410 - RNA, 22 nt, Human
aaucaguuaggguguuaaugag

SEQ ID NO: 1116411 - RNA, 22 nt, Human
ggaggguuagcaaaggcacaga

SEQ ID NO: 1116412 - RNA, 22 nt, Human
aggaggugacagccugcaucug

SEQ ID NO: 1116413 - RNA, 22 nt, Human
cucccuggaggugagcuggcac

SEQ ID NO: 1116414 - RNA, 22 nt, Human
ccacugaaggucaacauagagc

SEQ ID NO: 1116415 - RNA, 22 nt, Human
ggccucugguucacagggagga

SEQ ID NO: 1116416 - RNA, 22 nt, Human
ccauuguaaagaguauacuuug

SEQ ID NO: 1116417 - RNA, 22 nt, Human
ccugagggaggguauaggcugu

SEQ ID NO: 1116418 - RNA, 22 nt, Human
auguaacuguuauauuuuguug

SEQ ID NO: 1116419 - RNA, 22 nt, Human
ucaggcugugggcacuggccau

SEQ ID NO: 1116420 - RNA, 22 nt, Human
caaauguguuuuuucuucuaca

SEQ ID NO: 1116421 - RNA, 22 nt, Human
agggcccuccccgcucagggca

SEQ ID NO: 1116422 - RNA, 22 nt, Human
ugcucacugaacucuugcuguc

SEQ ID NO: 1116423 - RNA, 22 nt, Human
aggugcagcugguggagucugg

SEQ ID NO: 1116424 - RNA, 22 nt, Human
gagugcaucguggccauuuuaa

SEQ ID NO: 1116425 - RNA, 22 nt, Human
cugagcucuaaugucagccuug

SEQ ID NO: 1116426 - RNA, 17 nt, Human
ggccuugggcugcucuu

SEQ ID NO: 1116427 - RNA, 22 nt, Human
uuaagucacuuaucuaaagaca

SEQ ID NO: 1116428 - RNA, 22 nt, Human
ucuggagccuuggaugggaaag

SEQ ID NO: 1116429 - RNA, 22 nt, Human
gucuuuauuugagauugucauu

SEQ ID NO: 1116430 - RNA, 22 nt, Human
cagggugcagugucgcugcuag

SEQ ID NO: 1116431 - RNA, 22 nt, Human
uagugaaauuuaugcacagcua

SEQ ID NO: 1116432 - RNA, 22 nt, Human
auugacaaucuacuauguucug

SEQ ID NO: 1116433 - RNA, 22 nt, Human
aucagcaaggcaaucacugcag

SEQ ID NO: 1116434 - RNA, 22 nt, Human
uacaguauuaugagugauugaa

SEQ ID NO: 1116435 - RNA, 22 nt, Human
cugcccugccuggccagugugg

SEQ ID NO: 1116436 - RNA, 22 nt, Human
agcagugggggaguguuaguuu

SEQ ID NO: 1116437 - RNA, 22 nt, Human
gcuccacuugcagcuaggcuug

SEQ ID NO: 1116438 - RNA, 22 nt, Human
cucugggcaaagaugccucauc

SEQ ID NO: 1116439 - RNA, 22 nt, Human
gccucugcaacuccgccuuggu

SEQ ID NO: 1116440 - RNA, 22 nt, Human
cuugugcauuucauuccucagg

SEQ ID NO: 1116441 - RNA, 22 nt, Human
aggccuagaggaauggccaggg

SEQ ID NO: 1116442 - RNA, 22 nt, Human
auguaucagaaauagcauuggc

SEQ ID NO: 1116443 - RNA, 22 nt, Human
cuagagggauguuaggauagca

SEQ ID NO: 1116444 - RNA, 22 nt, Human
aggagagagcugagcuuugcug

SEQ ID NO: 1116445 - RNA, 22 nt, Human
uccucugcuggaagggcaagag

SEQ ID NO: 1116446 - RNA, 22 nt, Human
ggcagaguggagugcggccucc

SEQ ID NO: 1116447 - RNA, 22 nt, Human
cagcuuggaggaggaucuaaga

SEQ ID NO: 1116448 - RNA, 22 nt, Human
gauggcagucaaccaggugagg

SEQ ID NO: 1116449 - RNA, 22 nt, Human
gaaugcacucacccaucacuca

SEQ ID NO: 1116450 - RNA, 22 nt, Human
cucaggauuuacuaauuucaag

SEQ ID NO: 1116451 - RNA, 22 nt, Human
ggcugcuguacugaugucaguu

SEQ ID NO: 1116452 - RNA, 22 nt, Human
ggcagcuccucaaaaaauuaaa

SEQ ID NO: 1116453 - RNA, 22 nt, Human
cccaagggagugccuggucaac

SEQ ID NO: 1116454 - RNA, 22 nt, Human
agaagccauguuuaguaggaug

SEQ ID NO: 1116455 - RNA, 22 nt, Human
ucuuaaaaguaugccaauugga

SEQ ID NO: 1116456 - RNA, 22 nt, Human
gucaugccuggcuucuuagaca

SEQ ID NO: 1116457 - RNA, 22 nt, Human
ucccagggacaccaagcuguuu

SEQ ID NO: 1116458 - RNA, 21 nt, Human
aggccucuucauggccaugau

SEQ ID NO: 1116459 - RNA, 22 nt, Human
cagagguacaagcuaaguuggg

SEQ ID NO: 1116460 - RNA, 22 nt, Human
gcagagcuaucuucuggauuug

SEQ ID NO: 1116461 - RNA, 22 nt, Human
ccuggagcccaaggcagugaga

SEQ ID NO: 1116462 - RNA, 21 nt, Human
ucagaguguguuacagcaagc

SEQ ID NO: 1116463 - RNA, 22 nt, Human
aaacauugcuaaauaaugcugc

SEQ ID NO: 1116464 - RNA, 22 nt, Human
uaugcacacaucgcagcaggaa

SEQ ID NO: 1116465 - RNA, 20 nt, Human
ugccagggccagcagaggcu

SEQ ID NO: 1116466 - RNA, 17 nt, Human
cucagaguugcuuuguc

SEQ ID NO: 1116467 - RNA, 19 nt, Human
aggaaagguggccuuagca

SEQ ID NO: 1116468 - RNA, 22 nt, Human
gguuggggcgagcuggaggccc

SEQ ID NO: 1116469 - RNA, 22 nt, Human
cuuucaaugugccugccuuggg

SEQ ID NO: 1116470 - RNA, 22 nt, Human
ucaggagucugugcaguuccac

SEQ ID NO: 1116471 - RNA, 22 nt, Human
uaaaauguguuucuguaugguu

SEQ ID NO: 1116472 - RNA, 22 nt, Human
aagacauuuauuugaaucaauu

SEQ ID NO: 1116473 - RNA, 22 nt, Human
aaagaacaaaugauauaugguu

SEQ ID NO: 1116474 - RNA, 22 nt, Human
agucagcagccuggccaggaga

SEQ ID NO: 1116475 - RNA, 22 nt, Human
gcuuucucuucacugauguuca

SEQ ID NO: 1116476 - RNA, 22 nt, Human
gauuucaaccuaacaguaugac

SEQ ID NO: 1116477 - RNA, 20 nt, Human
aacagggggcugcagagggc

SEQ ID NO: 1116478 - RNA, 22 nt, Human
ucaguuuuucuauacuuuguag

SEQ ID NO: 1116479 - RNA, 22 nt, Human
cccacagguccccaugaacucg

SEQ ID NO: 1116480 - RNA, 22 nt, Human
ucagcugagcuccagcucauag

SEQ ID NO: 1116481 - RNA, 22 nt, Human
uggcuuccgccgcgggccucgg

SEQ ID NO: 1116482 - RNA, 22 nt, Human
gcuugcucaacccccgucucuc

SEQ ID NO: 1116483 - RNA, 21 nt, Human
uggcucugaaagagugcugca

SEQ ID NO: 1116484 - RNA, 22 nt, Human
cagagcugucauuugccaguga

SEQ ID NO: 1116485 - RNA, 22 nt, Human
ugcugccagagagacagggacu

SEQ ID NO: 1116486 - RNA, 21 nt, Human
cacaggugggucagugaggcc

SEQ ID NO: 1116487 - RNA, 22 nt, Human
cuuccugguuugaagcucgccg

SEQ ID NO: 1116488 - RNA, 22 nt, Human
ggcugcuggggacgugggagag

SEQ ID NO: 1116489 - RNA, 22 nt, Human
aguggugcugcgcgcggagcuc

SEQ ID NO: 1116490 - RNA, 22 nt, Human
gcucugugcaguucagggacac

SEQ ID NO: 1116491 - RNA, 22 nt, Human
gaugguuuggaaugaaguagcu

SEQ ID NO: 1116492 - RNA, 22 nt, Human
gccuuggcugaugugcgaauga

SEQ ID NO: 1116493 - RNA, 22 nt, Human
ucagaagaagagacuccacagc

SEQ ID NO: 1116494 - RNA, 22 nt, Human
auucuagaugcuguaaguagca

SEQ ID NO: 1116495 - RNA, 22 nt, Human
caagaaauuucuuaagaacuaa

SEQ ID NO: 1116496 - RNA, 22 nt, Human
aggcccugcuuuccagagcuca

SEQ ID NO: 1116497 - RNA, 20 nt, Human
ccucaagcagacugacagcu

SEQ ID NO: 1116498 - RNA, 22 nt, Human
agcugagccagcagcaacagga

SEQ ID NO: 1116499 - RNA, 22 nt, Human
uggugcugacaguucugagugc

SEQ ID NO: 1116500 - RNA, 22 nt, Human
auguccuuugcuucucuggucc

SEQ ID NO: 1116501 - RNA, 21 nt, Human
gggcuggacaugguggcucau

SEQ ID NO: 1116502 - RNA, 22 nt, Human
uccaggaggaggaaggcugcca

SEQ ID NO: 1116503 - RNA, 19 nt, Human
cagaccuguccagccugug

SEQ ID NO: 1116504 - RNA, 22 nt, Human
uccaguggagugugggggugaa

SEQ ID NO: 1116505 - RNA, 22 nt, Human
ucaaaguccuugcuuuuucugu

SEQ ID NO: 1116506 - RNA, 22 nt, Human
agugaaaucagguuuugacugc

SEQ ID NO: 1116507 - RNA, 22 nt, Human
uagggcaggugaagaaaagcua

SEQ ID NO: 1116508 - RNA, 22 nt, Human
ucucaggguuuguacaagugua

SEQ ID NO: 1116509 - RNA, 22 nt, Human
aggcucagagagcuguguccau

SEQ ID NO: 1116510 - RNA, 22 nt, Human
cugcucucuguuccccuggauc

SEQ ID NO: 1116511 - RNA, 22 nt, Human
cuggcugcuuguagacucgacu

SEQ ID NO: 1116512 - RNA, 22 nt, Human
cuguacaggugaggagggggcu

SEQ ID NO: 1116513 - RNA, 22 nt, Human
ugcuccagugagcuggccaucc

SEQ ID NO: 1116514 - RNA, 22 nt, Human
gauuucaaaaguagauccauca

SEQ ID NO: 1116515 - RNA, 22 nt, Human
gccucugccaagggggcugcgg

SEQ ID NO: 1116516 - RNA, 22 nt, Human
ccaaggaggccccaggucagcu

SEQ ID NO: 1116517 - RNA, 22 nt, Human
aagauuucuuacuuauugaugc

SEQ ID NO: 1116518 - RNA, 22 nt, Human
cugcagagaauuguggggcuuc

SEQ ID NO: 1116519 - RNA, 22 nt, Human
agguggggccaaaugcuacagu

SEQ ID NO: 1116520 - RNA, 22 nt, Human
agucucagggccacccggggaa

SEQ ID NO: 1116521 - RNA, 22 nt, Human
caaagugcugagauuacaggua

SEQ ID NO: 1116522 - RNA, 22 nt, Human
ucucagagauguuagggaagag

SEQ ID NO: 1116523 - RNA, 22 nt, Human
cuuagaaauuguuacucauuca

SEQ ID NO: 1116524 - RNA, 22 nt, Human
ucccagagcucugacaccagcu

SEQ ID NO: 1116525 - RNA, 21 nt, Human
gccuggcagguggaagggcuc

SEQ ID NO: 1116526 - RNA, 22 nt, Human
aaaugcacaaaguaaguguaau

SEQ ID NO: 1116527 - RNA, 22 nt, Human
uggccuggcugcccugucugga

SEQ ID NO: 1116528 - RNA, 22 nt, Human
agccaaggagugcagguggcuu

SEQ ID NO: 1116529 - RNA, 22 nt, Human
ucucucagggggaaggcugaag

SEQ ID NO: 1116530 - RNA, 22 nt, Human
ccuuuugcucucccauccagaa

SEQ ID NO: 1116531 - RNA, 22 nt, Human
ugcugcucucagccaccaggaa

SEQ ID NO: 1116532 - RNA, 22 nt, Human
ccucuuugugccugcaggcugc

SEQ ID NO: 1116533 - RNA, 22 nt, Human
ucugagagucucugaggcagau

SEQ ID NO: 1116534 - RNA, 22 nt, Human
cagagcuguuacuauucaugaa

SEQ ID NO: 1116535 - RNA, 22 nt, Human
uaggggugaggccaggcaucag

SEQ ID NO: 1116536 - RNA, 22 nt, Human
gccugguguccagaggcgagug

SEQ ID NO: 1116537 - RNA, 22 nt, Human
gcagcugcagguggucccaugc

SEQ ID NO: 1116538 - RNA, 22 nt, Human
gacacagagauaggccuguguu

SEQ ID NO: 1116539 - RNA, 22 nt, Human
accaggcugugaagugagacua

SEQ ID NO: 1116540 - RNA, 22 nt, Human
uggccuggugucugcgaggccu

SEQ ID NO: 1116541 - RNA, 22 nt, Human
ucacagggauggaauagaaaua

SEQ ID NO: 1116542 - RNA, 22 nt, Human
cuggguggcagagccugcagug

SEQ ID NO: 1116543 - RNA, 22 nt, Human
aggcacugugcuucuuauaugu

SEQ ID NO: 1116544 - RNA, 22 nt, Human
gaaaugugaccuacuuccuugu

SEQ ID NO: 1116545 - RNA, 22 nt, Human
uuccucugaaauggcuuggaaa

SEQ ID NO: 1116546 - RNA, 22 nt, Human
cagcagggggcagcgcagauca

SEQ ID NO: 1116547 - RNA, 22 nt, Human
uggcucaguuuagcagcucagu

SEQ ID NO: 1116548 - RNA, 22 nt, Human
cagugggcugugauggauucac

SEQ ID NO: 1116549 - RNA, 22 nt, Human
aauaauguugacgauagucuua

SEQ ID NO: 1116550 - RNA, 22 nt, Human
acaaaggugcgucccuucagcu

SEQ ID NO: 1116551 - RNA, 22 nt, Human
agggagccagaguugggagcuc

SEQ ID NO: 1116552 - RNA, 22 nt, Human
cggagccugcuuguugcagcug

SEQ ID NO: 1116553 - RNA, 18 nt, Human
uccagagcuacuguggug

SEQ ID NO: 1116554 - RNA, 22 nt, Human
gagcucagauucuggugucaga

SEQ ID NO: 1116555 - RNA, 22 nt, Human
caggugggcguggcgagaaggc

SEQ ID NO: 1116556 - RNA, 22 nt, Human
agguggaacguucaggugcuag

SEQ ID NO: 1116557 - RNA, 22 nt, Human
caggaccccauauucacugaac

SEQ ID NO: 1116558 - RNA, 22 nt, Human
gccucugcccauccaccaucag

SEQ ID NO: 1116559 - RNA, 23 nt, Human
ggacagggcccugcccuauggcc

SEQ ID NO: 1116560 - RNA, 22 nt, Human
ucagggcauggcugcacuuggc

SEQ ID NO: 1116561 - RNA, 22 nt, Human
aauaugcauguauacaugugua

SEQ ID NO: 1116562 - RNA, 22 nt, Human
guaacagaaagucaugcucauu

SEQ ID NO: 1116563 - RNA, 22 nt, Human
cugcuuugcauagcugccagag

SEQ ID NO: 1116564 - RNA, 22 nt, Human
cugucccaggagcuguaagaca

SEQ ID NO: 1116565 - RNA, 22 nt, Human
cagaaauguucuaaugauucag

SEQ ID NO: 1116566 - RNA, 22 nt, Human
guacuuccagccaagugagaca

SEQ ID NO: 1116567 - RNA, 22 nt, Human
gcaaaugcuaaaguguagagac

SEQ ID NO: 1116568 - RNA, 22 nt, Human
ggcaguggaggacccugugucu

SEQ ID NO: 1116569 - RNA, 20 nt, Human
gccugagcuauugccaggau

SEQ ID NO: 1116570 - RNA, 22 nt, Human
ccuggcucucugcagauccugg

SEQ ID NO: 1116571 - RNA, 22 nt, Human
acauuucuccuacuuguuauuu

SEQ ID NO: 1116572 - RNA, 22 nt, Human
aagcagcuuaaauuagagccug

SEQ ID NO: 1116573 - RNA, 22 nt, Human
acacagccgugaaucugcuucu

SEQ ID NO: 1116574 - RNA, 22 nt, Human
aagaacauguuaaaagauucac

SEQ ID NO: 1116575 - RNA, 22 nt, Human
uggccugaauuauggcagaucu

SEQ ID NO: 1116576 - RNA, 22 nt, Human
ccugggagcuguggaaaggcug

SEQ ID NO: 1116577 - RNA, 22 nt, Human
gcugugcagguccccacugccu

SEQ ID NO: 1116578 - RNA, 22 nt, Human
ucuggcuccugaguccaugcuc

SEQ ID NO: 1116579 - RNA, 22 nt, Human
uggagccauaacccuuucguac

SEQ ID NO: 1116580 - RNA, 18 nt, Human
uucaccagugugaugggu

SEQ ID NO: 1116581 - RNA, 20 nt, Human
gugggcagaugugugcaugg

SEQ ID NO: 1116582 - RNA, 22 nt, Human
caauguguguguuuuucucaac

SEQ ID NO: 1116583 - RNA, 22 nt, Human
ugcugucaguuggcaggaugag

SEQ ID NO: 1116584 - RNA, 22 nt, Human
ugcuuuauguuaucagaagggu

SEQ ID NO: 1116585 - RNA, 22 nt, Human
ccaggggcuggugcugagcugg

SEQ ID NO: 1116586 - RNA, 22 nt, Human
acugcagccuuugggcucauaa

SEQ ID NO: 1116587 - RNA, 22 nt, Human
uggcucaguaaucgagucuccu

SEQ ID NO: 1116588 - RNA, 22 nt, Human
aagcugcccaagacugaagcau

SEQ ID NO: 1116589 - RNA, 22 nt, Human
gucccagagagcacuaguccau

SEQ ID NO: 1116590 - RNA, 22 nt, Human
uggcucugggcaccguguccac

SEQ ID NO: 1116591 - RNA, 22 nt, Human
aggcacugaagugguaaaugua

SEQ ID NO: 1116592 - RNA, 22 nt, Human
gagccuggggacccuccugagu

SEQ ID NO: 1116593 - RNA, 19 nt, Human
ccuggaggugaagguucuc

SEQ ID NO: 1116594 - RNA, 22 nt, Human
caggcagcagaggaguguggga

SEQ ID NO: 1116595 - RNA, 22 nt, Human
ucccuggcuguguucaggugcg

SEQ ID NO: 1116596 - RNA, 22 nt, Human
cuggcagguuuggugucuggug

SEQ ID NO: 1116597 - RNA, 22 nt, Human
gcuggcccagggucaccuagga

SEQ ID NO: 1116598 - RNA, 22 nt, Human
agaagcugccuacaugaccagc

SEQ ID NO: 1116599 - RNA, 22 nt, Human
uggccucugggaaagcagauuc

SEQ ID NO: 1116600 - RNA, 22 nt, Human
caggugccgggaaugcagcaau

SEQ ID NO: 1116601 - RNA, 19 nt, Human
cugccuguuauggagagaa

SEQ ID NO: 1116602 - RNA, 22 nt, Human
caggugggcuugggagaacacu

SEQ ID NO: 1116603 - RNA, 22 nt, Human
ucagggcaaugucccucagaag

SEQ ID NO: 1116604 - RNA, 22 nt, Human
ugcauuguuugauaggugaauu

SEQ ID NO: 1116605 - RNA, 22 nt, Human
agcugcccuucucuugcccuug

SEQ ID NO: 1116606 - RNA, 22 nt, Human
cugcucugcagcuuggacuccc

SEQ ID NO: 1116607 - RNA, 22 nt, Human
ugcacagagagaugagacacgu

SEQ ID NO: 1116608 - RNA, 22 nt, Human
ucugucacuuauuaagauggau

SEQ ID NO: 1116609 - RNA, 20 nt, Human
ggaccagguggggcgguggc

SEQ ID NO: 1116610 - RNA, 22 nt, Human
ggcuagaauaauugacuucauu

SEQ ID NO: 1116611 - RNA, 22 nt, Human
uaaguuuaaauguacaugaagc

SEQ ID NO: 1116612 - RNA, 22 nt, Human
ggugggcagcucuuggcaggca

SEQ ID NO: 1116613 - RNA, 22 nt, Human
guggcugcuguccucucugguu

SEQ ID NO: 1116614 - RNA, 22 nt, Human
cugaagagcucuccuguccccu

SEQ ID NO: 1116615 - RNA, 22 nt, Human
ucauuuccucaaauucaagguu

SEQ ID NO: 1116616 - RNA, 22 nt, Human
acagacagauuuugucugaugu

SEQ ID NO: 1116617 - RNA, 22 nt, Human
aggccuguuggcgugggcucua

SEQ ID NO: 1116618 - RNA, 22 nt, Human
guggccugccagcagauggcgc

SEQ ID NO: 1116619 - RNA, 17 nt, Human
agccccucagcgucacc

SEQ ID NO: 1116620 - RNA, 22 nt, Human
gucaccagugcuaagaggugga

SEQ ID NO: 1116621 - RNA, 20 nt, Human
ucacaucuggcagcugauga

SEQ ID NO: 1116622 - RNA, 22 nt, Human
aagccucuggggccucaucugu

SEQ ID NO: 1116623 - RNA, 22 nt, Human
gcuggagccauuggcuuggccu

SEQ ID NO: 1116624 - RNA, 22 nt, Human
uggcugaaucugcagcaggaag

SEQ ID NO: 1116625 - RNA, 22 nt, Human
gagccugaugaaacaggcagac

SEQ ID NO: 1116626 - RNA, 19 nt, Human
cacagggcaggucucaugu

SEQ ID NO: 1116627 - RNA, 22 nt, Human
caagaaaugggauuugacugcc

SEQ ID NO: 1116628 - RNA, 22 nt, Human
uucuucaauuauuggaaagaaa

SEQ ID NO: 1116629 - RNA, 22 nt, Human
ugcugccaccccucaccagagc

SEQ ID NO: 1116630 - RNA, 22 nt, Human
acagugaaugcccaagaaaagu

SEQ ID NO: 1116631 - RNA, 22 nt, Human
ugccaggcgugguggugcgcac

SEQ ID NO: 1116632 - RNA, 22 nt, Human
uagcugccuuugggcuccugcu

SEQ ID NO: 1116633 - RNA, 22 nt, Human
cgccugggaguccacaccugcu

SEQ ID NO: 1116634 - RNA, 22 nt, Human
cagaaguaagauuacugugaga

SEQ ID NO: 1116635 - RNA, 22 nt, Human
gauuuagagaauguuuuguaag

SEQ ID NO: 1116636 - RNA, 22 nt, Human
ugccuggcaacuguggugggcu

SEQ ID NO: 1116637 - RNA, 22 nt, Human
uugcauugaaugcacauuuuua

SEQ ID NO: 1116638 - RNA, 22 nt, Human
gcugggaggaauuuggggaaua

SEQ ID NO: 1116639 - RNA, 22 nt, Human
auucuccaucaccacuggcacu

SEQ ID NO: 1116640 - RNA, 21 nt, Human
aggcucagcagguguauaaag

SEQ ID NO: 1116641 - RNA, 22 nt, Human
ggcagagguagcuggaaccagg

SEQ ID NO: 1116642 - RNA, 22 nt, Human
cacagcugaaguagccaugugg

SEQ ID NO: 1116643 - RNA, 22 nt, Human
ggcugagcacuuuaggcaggag

SEQ ID NO: 1116644 - RNA, 22 nt, Human
ucaaaguuuuugagaauuacau

SEQ ID NO: 1116645 - RNA, 22 nt, Human
ggauggagguucucagaugcuc

SEQ ID NO: 1116646 - RNA, 19 nt, Human
ccucuccgcccaccagccc

SEQ ID NO: 1116647 - RNA, 21 nt, Human
acagcaagccuuccuuucagg

SEQ ID NO: 1116648 - RNA, 22 nt, Human
ugacagaaauaguucuuaauuu

SEQ ID NO: 1116649 - RNA, 22 nt, Human
gggguugguuuaaaugcuugag

SEQ ID NO: 1116650 - RNA, 19 nt, Human
gguaaaagugagcuucagg

SEQ ID NO: 1116651 - RNA, 22 nt, Human
uucuuuggggaauauucugguu

SEQ ID NO: 1116652 - RNA, 22 nt, Human
ugggacagggaaucugaucccc

SEQ ID NO: 1116653 - RNA, 22 nt, Human
gagcucccuggagguucagaua

SEQ ID NO: 1116654 - RNA, 22 nt, Human
gauaccagacagggagggagaa

SEQ ID NO: 1116655 - RNA, 22 nt, Human
ucuuggagacucuuguauauuu

SEQ ID NO: 1116656 - RNA, 22 nt, Human
uugaaggaggcuccuuuuuaaa

SEQ ID NO: 1116657 - RNA, 22 nt, Human
gaggggcuggcuguggucccau

SEQ ID NO: 1116658 - RNA, 19 nt, Human
ggaugagggucaggcauag

SEQ ID NO: 1116659 - RNA, 22 nt, Human
ccagggcagcgccccuccacgc

SEQ ID NO: 1116660 - RNA, 22 nt, Human
gaggggcuugaggcccugaugg

SEQ ID NO: 1116661 - RNA, 22 nt, Human
gcucugcuugcaucaugacugc

SEQ ID NO: 1116662 - RNA, 18 nt, Human
uucagcagcagacacacu

SEQ ID NO: 1116663 - RNA, 22 nt, Human
caaaaugugagucccaccucaa

SEQ ID NO: 1116664 - RNA, 22 nt, Human
ugagcccagagaucugagcuau

SEQ ID NO: 1116665 - RNA, 22 nt, Human
agaaauaugcugauuagaugaa

SEQ ID NO: 1116666 - RNA, 22 nt, Human
ugggccugaaggagcugcgccc

SEQ ID NO: 1116667 - RNA, 22 nt, Human
aucucagggcuggagcccugga

SEQ ID NO: 1116668 - RNA, 22 nt, Human
ccagcccuugcugaaggguggc

SEQ ID NO: 1116669 - RNA, 22 nt, Human
aggcaggggagcuggaagggua

SEQ ID NO: 1116670 - RNA, 22 nt, Human
ggcugccauaacugauaccaua

SEQ ID NO: 1116671 - RNA, 22 nt, Human
cccuuccucccaggcuucugug

SEQ ID NO: 1116672 - RNA, 22 nt, Human
ggccucacccaucggugccuuu

SEQ ID NO: 1116673 - RNA, 22 nt, Human
uggagcauauucuggagcuugg

SEQ ID NO: 1116674 - RNA, 22 nt, Human
acagcagcacuauugacauuuu

SEQ ID NO: 1116675 - RNA, 22 nt, Human
uggcugccuagucccucagccu

SEQ ID NO: 1116676 - RNA, 22 nt, Human
cugcugcauuccucuuuaugag

SEQ ID NO: 1116677 - RNA, 22 nt, Human
uguauuuuuaggaaugcgcuau

SEQ ID NO: 1116678 - RNA, 22 nt, Human
uccauuggucucugugcccagg

SEQ ID NO: 1116679 - RNA, 22 nt, Human
acacaguaugaaaagucuaguu

SEQ ID NO: 1116680 - RNA, 22 nt, Human
ugucccaguucccaggguugcu

SEQ ID NO: 1116681 - RNA, 22 nt, Human
gcccugggauuggguggaggcu

SEQ ID NO: 1116682 - RNA, 22 nt, Human
cugccuggccugaucuccacgc

SEQ ID NO: 1116683 - RNA, 22 nt, Human
gccaggcuggaaagaacagaca

SEQ ID NO: 1116684 - RNA, 22 nt, Human
gcucuuccauuucucuugaacu

SEQ ID NO: 1116685 - RNA, 22 nt, Human
gaagagcuauguccagggagca

SEQ ID NO: 1116686 - RNA, 22 nt, Human
auccugggcagugugucacucu

SEQ ID NO: 1116687 - RNA, 22 nt, Human
gucccugggaugcccuucuggg

SEQ ID NO: 1116688 - RNA, 22 nt, Human
aggguggggugcuacaucuuua

SEQ ID NO: 1116689 - RNA, 22 nt, Human
ucauccaguuguggagagggaa

SEQ ID NO: 1116690 - RNA, 22 nt, Human
ugaagcagcuucuuucugucaa

SEQ ID NO: 1116691 - RNA, 19 nt, Human
cagaacagaggucauggcc

SEQ ID NO: 1116692 - RNA, 22 nt, Human
caagggcucuuuugaggaaugu

SEQ ID NO: 1116693 - RNA, 22 nt, Human
gggcuggcucccagguguugaa

SEQ ID NO: 1116694 - RNA, 22 nt, Human
agacagggucuugaucagagcu

SEQ ID NO: 1116695 - RNA, 19 nt, Human
aggcagaggcuuggcuagc

SEQ ID NO: 1116696 - RNA, 22 nt, Human
acccagagccagggucaggagc

SEQ ID NO: 1116697 - RNA, 18 nt, Human
agagcagcggcaucacac

SEQ ID NO: 1116698 - RNA, 22 nt, Human
uccugggcccaggcugccaggg

SEQ ID NO: 1116699 - RNA, 22 nt, Human
gcuggccugcugggcaccaccg

SEQ ID NO: 1116700 - RNA, 22 nt, Human
gcagagcagugcuugcccagcg

SEQ ID NO: 1116701 - RNA, 22 nt, Human
cucuccagccacagaagcugcu

SEQ ID NO: 1116702 - RNA, 22 nt, Human
cugcuucuaagaaccugcagcu

SEQ ID NO: 1116703 - RNA, 20 nt, Human
ccuccuggucaggugugcag

SEQ ID NO: 1116704 - RNA, 21 nt, Human
ggccucugucauccugggaag

SEQ ID NO: 1116705 - RNA, 22 nt, Human
gcagagcugucuaagucacuuc

SEQ ID NO: 1116706 - RNA, 19 nt, Human
ucaaugcaugaaaucagcc

SEQ ID NO: 1116707 - RNA, 20 nt, Human
cacguuuuuccacuagcaaa

SEQ ID NO: 1116708 - RNA, 22 nt, Human
uccugagauucugcauuucuaa

SEQ ID NO: 1116709 - RNA, 22 nt, Human
gccugagagucugcauuucuaa

SEQ ID NO: 1116710 - RNA, 22 nt, Human
aauuccugucuuaacaguucug

SEQ ID NO: 1116711 - RNA, 18 nt, Human
cccacggugcuguagggc

SEQ ID NO: 1116712 - RNA, 22 nt, Human
ccagcugggauuaagggaaaau

SEQ ID NO: 1116713 - RNA, 22 nt, Human
ucugucacugagcucaggauuc

SEQ ID NO: 1116714 - RNA, 22 nt, Human
cccugccucugaagcugcucag

SEQ ID NO: 1116715 - RNA, 23 nt, Human
ugcugguguuuuugggaccaggg

SEQ ID NO: 1116716 - RNA, 22 nt, Human
gcaggcagagagggguuuccag

SEQ ID NO: 1116717 - RNA, 22 nt, Human
ucaguauccacaaaugcucaaa

SEQ ID NO: 1116718 - RNA, 22 nt, Human
aaaguggucaccuucucauuuc

SEQ ID NO: 1116719 - RNA, 22 nt, Human
gcaggagucacugacuuggucc

SEQ ID NO: 1116720 - RNA, 22 nt, Human
cagagccaggccugcccucuuu

SEQ ID NO: 1116721 - RNA, 22 nt, Human
ggccucugcaacuggcuguggc

SEQ ID NO: 1116722 - RNA, 22 nt, Human
gcuggcucagggacuagaguuu

SEQ ID NO: 1116723 - RNA, 22 nt, Human
ccugggugaugugcugcccucg

SEQ ID NO: 1116724 - RNA, 22 nt, Human
guucaaagcuccugguacagua

SEQ ID NO: 1116725 - RNA, 22 nt, Human
ggccaggaagggaagaucagca

SEQ ID NO: 1116726 - RNA, 22 nt, Human
gaggcugccccuuccucagcug

SEQ ID NO: 1116727 - RNA, 22 nt, Human
aguggggaagagcaugggcccu

SEQ ID NO: 1116728 - RNA, 22 nt, Human
gagaaagcuucuuucccacagg

SEQ ID NO: 1116729 - RNA, 22 nt, Human
uggaaagacauucagccgcugg

SEQ ID NO: 1116730 - RNA, 22 nt, Human
acacuuuguuguggcauauacg

SEQ ID NO: 1116731 - RNA, 22 nt, Human
ccuauugacaauucucuucucc

SEQ ID NO: 1116732 - RNA, 22 nt, Human
guggguggaucaccugagguca

SEQ ID NO: 1116733 - RNA, 22 nt, Human
gcugccuggaauaacggcuggc

SEQ ID NO: 1116734 - RNA, 22 nt, Human
guuagaaacacauucuuauuga

SEQ ID NO: 1116735 - RNA, 22 nt, Human
ggucucaggagacuggagagca

SEQ ID NO: 1116736 - RNA, 22 nt, Human
accugccuaguugguucugccc

SEQ ID NO: 1116737 - RNA, 22 nt, Human
gcuggccugcaaagcccggcug

SEQ ID NO: 1116738 - RNA, 22 nt, Human
agugcagccgagaucaggugcu

SEQ ID NO: 1116739 - RNA, 22 nt, Human
acaaaguuugugguauuccaag

SEQ ID NO: 1116740 - RNA, 21 nt, Human
ugaggcuguuguaccagggag

SEQ ID NO: 1116741 - RNA, 22 nt, Human
agugaaauaaagcugccuaugg

SEQ ID NO: 1116742 - RNA, 22 nt, Human
gaagagcuaaaggcacaggcuu

SEQ ID NO: 1116743 - RNA, 22 nt, Human
ugagguggcuagggaggcacuc

SEQ ID NO: 1116744 - RNA, 22 nt, Human
cuguaauucacuagggucagcg

SEQ ID NO: 1116745 - RNA, 22 nt, Human
uggguagagcaggcuggggcuu

SEQ ID NO: 1116746 - RNA, 22 nt, Human
uguagcacagagcuuugacacu

SEQ ID NO: 1116747 - RNA, 22 nt, Human
agaugcugccucuccucacaag

SEQ ID NO: 1116748 - RNA, 21 nt, Human
gcccagcaaggugagaaggcc

SEQ ID NO: 1116749 - RNA, 22 nt, Human
gccaggcauuuguuaggugcug

SEQ ID NO: 1116750 - RNA, 21 nt, Human
agagaagaggacuuucucaca

SEQ ID NO: 1116751 - RNA, 22 nt, Human
ugcaagaggaauucuagaagca

SEQ ID NO: 1116752 - RNA, 22 nt, Human
ggcagcaggcgacuucccuauu

SEQ ID NO: 1116753 - RNA, 22 nt, Human
agguggggaggagugucucuuu

SEQ ID NO: 1116754 - RNA, 22 nt, Human
agcaggugaauuccuggaugug

SEQ ID NO: 1116755 - RNA, 22 nt, Human
gcaccugcaggaugagccaggg

SEQ ID NO: 1116756 - RNA, 22 nt, Human
augugaaacugaagcauccaua

SEQ ID NO: 1116757 - RNA, 22 nt, Human
ggcugcagagcugggugggccu

SEQ ID NO: 1116758 - RNA, 22 nt, Human
uugaagcaaauucugugcagua

SEQ ID NO: 1116759 - RNA, 22 nt, Human
uaaacaugugagugugcauaua

SEQ ID NO: 1116760 - RNA, 22 nt, Human
aguguggguuuuauggagcccu

SEQ ID NO: 1116761 - RNA, 22 nt, Human
gccagguggucuggcuccagag

SEQ ID NO: 1116762 - RNA, 22 nt, Human
aagcacagaaaaggagcaugga

SEQ ID NO: 1116763 - RNA, 19 nt, Human
ccugggaggcggagguugc

SEQ ID NO: 1116764 - RNA, 22 nt, Human
aucuuucagagcuccaucaggg

SEQ ID NO: 1116765 - RNA, 22 nt, Human
uggcagcugaggggaggcuuug

SEQ ID NO: 1116766 - RNA, 22 nt, Human
ucccagcgcggggggaggaucc

SEQ ID NO: 1116767 - RNA, 22 nt, Human
cugagagccuccuguuggcuag

SEQ ID NO: 1116768 - RNA, 22 nt, Human
aguguccaacucagcuugucaa

SEQ ID NO: 1116769 - RNA, 22 nt, Human
ucucuuucuauugcaccaugcu

SEQ ID NO: 1116770 - RNA, 18 nt, Human
uaaaugcauguuaauaac

SEQ ID NO: 1116771 - RNA, 22 nt, Human
cuggccugugggcugucuccgg

SEQ ID NO: 1116772 - RNA, 22 nt, Human
gcucagagcacucagacucagc

SEQ ID NO: 1116773 - RNA, 22 nt, Human
uggcagcuccuggggccagcac

SEQ ID NO: 1116774 - RNA, 22 nt, Human
ggaggccaaggcgggcggauca

SEQ ID NO: 1116775 - RNA, 22 nt, Human
gcucugcuggagggaaagagaa

SEQ ID NO: 1116776 - RNA, 22 nt, Human
cucaggauagauuguccucuca

SEQ ID NO: 1116777 - RNA, 22 nt, Human
gcccucagcuccuggacacaug

SEQ ID NO: 1116778 - RNA, 18 nt, Human
caguuuuuauaucuggca

SEQ ID NO: 1116779 - RNA, 22 nt, Human
auguaguguagagauuagucuc

SEQ ID NO: 1116780 - RNA, 22 nt, Human
agcucuggaauaaugaugugau

SEQ ID NO: 1116781 - RNA, 20 nt, Human
aauaaaagaagccuucaccc

SEQ ID NO: 1116782 - RNA, 22 nt, Human
gggaaauugucaacacucucaa

SEQ ID NO: 1116783 - RNA, 22 nt, Human
ugaagcaggugaauggaugucg

SEQ ID NO: 1116784 - RNA, 22 nt, Human
aaugcuguauaucuuagcuaau

SEQ ID NO: 1116785 - RNA, 22 nt, Human
ccaggagguggagauugcagug

SEQ ID NO: 1116786 - RNA, 22 nt, Human
ucccaggcuaggccucugcguu

SEQ ID NO: 1116787 - RNA, 23 nt, Human
acacaaggguaacugccagccau

SEQ ID NO: 1116788 - RNA, 22 nt, Human
uggcagagaaccugggcuuugu

SEQ ID NO: 1116789 - RNA, 22 nt, Human
cccagccucugggcucacccaa

SEQ ID NO: 1116790 - RNA, 22 nt, Human
gaggcugcuuugaugacaggag

SEQ ID NO: 1116791 - RNA, 22 nt, Human
gcugucacaagcaucuggggca

SEQ ID NO: 1116792 - RNA, 22 nt, Human
augcaguauaaaucauuucugg

SEQ ID NO: 1116793 - RNA, 22 nt, Human
auguuuuauauuuugcagcagu

SEQ ID NO: 1116794 - RNA, 22 nt, Human
uguauuagagcaguagaauuau

SEQ ID NO: 1116795 - RNA, 18 nt, Human
agcagcugucagaaugcc

SEQ ID NO: 1116796 - RNA, 22 nt, Human
gcucccugaaaagaacaaaguc

SEQ ID NO: 1116797 - RNA, 19 nt, Human
ggcugccuuuccuuaccag

SEQ ID NO: 1116798 - RNA, 22 nt, Human
gcucugcugagauaucugggag

SEQ ID NO: 1116799 - RNA, 22 nt, Human
uuucuggcagcgggacaggggu

SEQ ID NO: 1116800 - RNA, 22 nt, Human
cagcuuggcuuccgcuuuacug

SEQ ID NO: 1116801 - RNA, 17 nt, Human
aggugcuggagcaucag

SEQ ID NO: 1116802 - RNA, 22 nt, Human
agcugguggauuaugcuguaca

SEQ ID NO: 1116803 - RNA, 22 nt, Human
ggagggugcauuuuacccugug

SEQ ID NO: 1116804 - RNA, 20 nt, Human
ccugucugcaauggagguca

SEQ ID NO: 1116805 - RNA, 22 nt, Human
uuucacaaguuucaggauucug

SEQ ID NO: 1116806 - RNA, 22 nt, Human
aauguacaaggguuccaguuuu

SEQ ID NO: 1116807 - RNA, 22 nt, Human
ugccaggaggaggugggacaga

SEQ ID NO: 1116808 - RNA, 22 nt, Human
guuauguauugggaaauccaag

SEQ ID NO: 1116809 - RNA, 21 nt, Human
ccuggcugcacaguugcuggu

SEQ ID NO: 1116810 - RNA, 22 nt, Human
ggugaaggucuacugugugcca

SEQ ID NO: 1116811 - RNA, 22 nt, Human
gugugcaguagagaaagagcag

SEQ ID NO: 1116812 - RNA, 22 nt, Human
caucacagauguuguguggagu

SEQ ID NO: 1116813 - RNA, 22 nt, Human
ugagccugaguucaaggcugca

SEQ ID NO: 1116814 - RNA, 22 nt, Human
agagcuggggccagagucaagg

SEQ ID NO: 1116815 - RNA, 19 nt, Human
gcagccaccgcggcggccg

SEQ ID NO: 1116816 - RNA, 21 nt, Human
ggcagcugaccgcgcggugca

SEQ ID NO: 1116817 - RNA, 22 nt, Human
ucagaguggugguuuugccuuc

SEQ ID NO: 1116818 - RNA, 22 nt, Human
auggacaggcugagcuuccuca

SEQ ID NO: 1116819 - RNA, 22 nt, Human
gagccaggcccguacuugcugu

SEQ ID NO: 1116820 - RNA, 22 nt, Human
gagguacagaguguuccaaugu

SEQ ID NO: 1116821 - RNA, 19 nt, Human
ucagaggauuuggcuauga

SEQ ID NO: 1116822 - RNA, 22 nt, Human
ugaggcagcuuuuucugugugu

SEQ ID NO: 1116823 - RNA, 22 nt, Human
cuguguggacugguugaggccc

SEQ ID NO: 1116824 - RNA, 22 nt, Human
gcugccugaucauacaccaggg

SEQ ID NO: 1116825 - RNA, 22 nt, Human
cugagccagggccacacaugga

SEQ ID NO: 1116826 - RNA, 22 nt, Human
ccugggcagguguggcuucccc

SEQ ID NO: 1116827 - RNA, 22 nt, Human
agucaaagcuacaggcauuuga

SEQ ID NO: 1116828 - RNA, 22 nt, Human
agcugccaucugaagaacugca

SEQ ID NO: 1116829 - RNA, 22 nt, Human
aagcaggcauuccagagacaau

SEQ ID NO: 1116830 - RNA, 22 nt, Human
uaugagcuuccaguguugcaug

SEQ ID NO: 1116831 - RNA, 22 nt, Human
aguggggagguccaggccaccc

SEQ ID NO: 1116832 - RNA, 22 nt, Human
cgccaggcuugguagcucaugc

SEQ ID NO: 1116833 - RNA, 22 nt, Human
agucaguguucuccggagaggc

SEQ ID NO: 1116834 - RNA, 22 nt, Human
gcaaaugaguuguaacauaaaa

SEQ ID NO: 1116835 - RNA, 22 nt, Human
ugaugggaaaaugaggccuggg

SEQ ID NO: 1116836 - RNA, 22 nt, Human
gucucagauucagacaucuaca

SEQ ID NO: 1116837 - RNA, 22 nt, Human
caggugggccaugaaaaaugac

SEQ ID NO: 1116838 - RNA, 21 nt, Human
gcagccacugccuucaacaau

SEQ ID NO: 1116839 - RNA, 22 nt, Human
cagcaguggccaucuguguggu

SEQ ID NO: 1116840 - RNA, 22 nt, Human
ggcuucagugagcugagcucac

SEQ ID NO: 1116841 - RNA, 22 nt, Human
uuucuguaauuaaaagggcagg

SEQ ID NO: 1116842 - RNA, 22 nt, Human
ugccugggccucugaggaaggc

SEQ ID NO: 1116843 - RNA, 22 nt, Human
uugauacaggccuucuagauga

SEQ ID NO: 1116844 - RNA, 19 nt, Human
ggccaggcugacugugguc

SEQ ID NO: 1116845 - RNA, 22 nt, Human
uguuaucugagcaacgucgacg

SEQ ID NO: 1116846 - RNA, 22 nt, Human
aagcagaaaaacugagcuccaa

SEQ ID NO: 1116847 - RNA, 22 nt, Human
agggggaggcugugcugcgucu

SEQ ID NO: 1116848 - RNA, 22 nt, Human
aaucgguugaacccaggaagug

SEQ ID NO: 1116849 - RNA, 22 nt, Human
cacagggcagguacucucagag

SEQ ID NO: 1116850 - RNA, 22 nt, Human
cugaaggacuuggugauaguug

SEQ ID NO: 1116851 - RNA, 22 nt, Human
gcuggcaccugcaccaagcagg

SEQ ID NO: 1116852 - RNA, 22 nt, Human
gccuggaggggacagucucugg

SEQ ID NO: 1116853 - RNA, 22 nt, Human
agaaagcacucugucuuuuacc

SEQ ID NO: 1116854 - RNA, 22 nt, Human
ugcaauaaagugcuauaaaucc

SEQ ID NO: 1116855 - RNA, 22 nt, Human
guuuggggucugcagagcggcg

SEQ ID NO: 1116856 - RNA, 22 nt, Human
cacagcuucuccuugauaucgc

SEQ ID NO: 1116857 - RNA, 22 nt, Human
ugcucugucaagaaaagaugcc

SEQ ID NO: 1116858 - RNA, 22 nt, Human
cagaggcuaagaugagugggug

SEQ ID NO: 1116859 - RNA, 20 nt, Human
agucccuuuggucagguauu

SEQ ID NO: 1116860 - RNA, 22 nt, Human
cuggccugaucucaugcugucc

SEQ ID NO: 1116861 - RNA, 22 nt, Human
aagagcuggaagugaagauaac

SEQ ID NO: 1116862 - RNA, 16 nt, Human
ccacagggcaaggggc

SEQ ID NO: 1116863 - RNA, 20 nt, Human
auaauuuacccugcaccacu

SEQ ID NO: 1116864 - RNA, 22 nt, Human
ucccucuguguugggcaugccu

SEQ ID NO: 1116865 - RNA, 22 nt, Human
gcccugugccagucacgcugug

SEQ ID NO: 1116866 - RNA, 22 nt, Human
cggggcugcucguccuccugug

SEQ ID NO: 1116867 - RNA, 22 nt, Human
uccugggcuugcuccuccagcu

SEQ ID NO: 1116868 - RNA, 22 nt, Human
cccagggcccuggacagcuaca

SEQ ID NO: 1116869 - RNA, 22 nt, Human
gcugccacuuggucaugucaug

SEQ ID NO: 1116870 - RNA, 22 nt, Human
agaaaaaucuuggcgcuugucu

SEQ ID NO: 1116871 - RNA, 22 nt, Human
agaauucuuggugguuagaaua

SEQ ID NO: 1116872 - RNA, 22 nt, Human
caugagcugcugggagccuguc

SEQ ID NO: 1116873 - RNA, 22 nt, Human
ccagagccccugagcuucccug

SEQ ID NO: 1116874 - RNA, 22 nt, Human
aggcccaguagugcugccuuua

SEQ ID NO: 1116875 - RNA, 22 nt, Human
ggccuggaagaggacagagaaa

SEQ ID NO: 1116876 - RNA, 22 nt, Human
cacagcuggugcacuagcucug

SEQ ID NO: 1116877 - RNA, 22 nt, Human
uccuugaauugugccacuuacc

SEQ ID NO: 1116878 - RNA, 22 nt, Human
cuggcagguggauggggacucc

SEQ ID NO: 1116879 - RNA, 22 nt, Human
agacccugucaguguuaggaaa

SEQ ID NO: 1116880 - RNA, 19 nt, Human
agugucaucagcuacucag

SEQ ID NO: 1116881 - RNA, 22 nt, Human
aagcaucucuauguggagagug

SEQ ID NO: 1116882 - RNA, 22 nt, Human
agagauaugaguaguugugaca

SEQ ID NO: 1116883 - RNA, 22 nt, Human
aaguugaagcaugaaccaaggu

SEQ ID NO: 1116884 - RNA, 22 nt, Human
aacagaaugcaggggaugcugc

SEQ ID NO: 1116885 - RNA, 22 nt, Human
ugggccacuugaaaguggaugu

SEQ ID NO: 1116886 - RNA, 22 nt, Human
auuugucugcuugcugccuucc

SEQ ID NO: 1116887 - RNA, 22 nt, Human
ugcuggcuggccuggccuggac

SEQ ID NO: 1116888 - RNA, 20 nt, Human
aaaaacaguaaugcugaaga

SEQ ID NO: 1116889 - RNA, 22 nt, Human
ucuguaucuaauuuuacaguag

SEQ ID NO: 1116890 - RNA, 22 nt, Human
uucucucauucaaauuaaagug

SEQ ID NO: 1116891 - RNA, 22 nt, Human
uaaauuguuuucuagaaguugu

SEQ ID NO: 1116892 - RNA, 22 nt, Human
cagcuggccugaucccuguggc

SEQ ID NO: 1116893 - RNA, 22 nt, Human
gcuguggccaacaaaccacuuu

SEQ ID NO: 1116894 - RNA, 22 nt, Human
ucuggcucccagccugcucuca

SEQ ID NO: 1116895 - RNA, 22 nt, Human
aaagguaguacuucuagaaggg

SEQ ID NO: 1116896 - RNA, 22 nt, Human
uuauguaccugaauuaguaaag

SEQ ID NO: 1116897 - RNA, 22 nt, Human
ggcugaaacagauuucaagaca

SEQ ID NO: 1116898 - RNA, 22 nt, Human
agagggcauuaacucugucuug

SEQ ID NO: 1116899 - RNA, 22 nt, Human
gucagcaggguccccuugagug

SEQ ID NO: 1116900 - RNA, 22 nt, Human
caggcagccuucucgucucaca

SEQ ID NO: 1116901 - RNA, 23 nt, Human
ccuccugggcacaggccugaugg

SEQ ID NO: 1116902 - RNA, 22 nt, Human
auggauaagaacaaauaucuga

SEQ ID NO: 1116903 - RNA, 22 nt, Human
agcaugcugguguucauggcag

SEQ ID NO: 1116904 - RNA, 22 nt, Human
ccugcagaccacacucaguccu

SEQ ID NO: 1116905 - RNA, 22 nt, Human
gagcagaacaggccggguggga

SEQ ID NO: 1116906 - RNA, 22 nt, Human
cccugccuucuuggccuuuaaa

SEQ ID NO: 1116907 - RNA, 22 nt, Human
agccacagcuccuugguggaga

SEQ ID NO: 1116908 - RNA, 22 nt, Human
gcugcccugugguccagcaggu

SEQ ID NO: 1116909 - RNA, 21 nt, Human
ggacuuacauagguaaggggu

SEQ ID NO: 1116910 - RNA, 22 nt, Human
ccuggggagaagagcuuccccc

SEQ ID NO: 1116911 - RNA, 22 nt, Human
ucuggcucugacacuacuguua

SEQ ID NO: 1116912 - RNA, 22 nt, Human
cuuccuguugucacagucugcg

SEQ ID NO: 1116913 - RNA, 22 nt, Human
uaugcauauagaugcacacaca

SEQ ID NO: 1116914 - RNA, 19 nt, Human
ucucagagcccuagaggcc

SEQ ID NO: 1116915 - RNA, 22 nt, Human
uguaugcuuuccaaaaaugcug

SEQ ID NO: 1116916 - RNA, 22 nt, Human
gugucccaaucuacuuuucccu

SEQ ID NO: 1116917 - RNA, 22 nt, Human
ugccugggggacuaaggccaaa

SEQ ID NO: 1116918 - RNA, 22 nt, Human
uuuuaucaaucauuaagacauu

SEQ ID NO: 1116919 - RNA, 18 nt, Human
ccucaggggaccuggcag

SEQ ID NO: 1116920 - RNA, 23 nt, Human
aggaggaaaaguuaucugcugag

SEQ ID NO: 1116921 - RNA, 22 nt, Human
cacugaagcuuucauucucuug

SEQ ID NO: 1116922 - RNA, 22 nt, Human
uauguacaguccuuaacuuaaa

SEQ ID NO: 1116923 - RNA, 22 nt, Human
uggacucaaguccaaguucacg

SEQ ID NO: 1116924 - RNA, 22 nt, Human
aacauacagugagcaguggacu

SEQ ID NO: 1116925 - RNA, 21 nt, Human
ccugagccuguuuauccagaa

SEQ ID NO: 1116926 - RNA, 22 nt, Human
gccaggugggagacagacagca

SEQ ID NO: 1116927 - RNA, 22 nt, Human
agggagcuguggucagcucagu

SEQ ID NO: 1116928 - RNA, 22 nt, Human
acauuucuuucuauucaguagc

SEQ ID NO: 1116929 - RNA, 22 nt, Human
aucaaaguucguaacugauaac

SEQ ID NO: 1116930 - RNA, 22 nt, Human
cuugccuucuguuccuauagaa

SEQ ID NO: 1116931 - RNA, 22 nt, Human
ugcacacacgcggcacaucugu

SEQ ID NO: 1116932 - RNA, 22 nt, Human
ucccagccacagguguagcccu

SEQ ID NO: 1116933 - RNA, 22 nt, Human
agauuucccaaauacuuguuau

SEQ ID NO: 1116934 - RNA, 22 nt, Human
aguccaggaguugggugacauu

SEQ ID NO: 1116935 - RNA, 22 nt, Human
ucccagagugagccaggggcag

SEQ ID NO: 1116936 - RNA, 22 nt, Human
ucagagccaaucauggugcauu

SEQ ID NO: 1116937 - RNA, 22 nt, Human
ccugaggcccuggcugugcuga

SEQ ID NO: 1116938 - RNA, 22 nt, Human
cagggccuccccggcagucuuu

SEQ ID NO: 1116939 - RNA, 22 nt, Human
cauuucugugacacuuccaucu

SEQ ID NO: 1116940 - RNA, 22 nt, Human
aggcugccucgugagcucgcug

SEQ ID NO: 1116941 - RNA, 22 nt, Human
acagggcagagaggcaggcuug

SEQ ID NO: 1116942 - RNA, 22 nt, Human
ggcucugcgcgguaaagugacu

SEQ ID NO: 1116943 - RNA, 22 nt, Human
gagcagugagugaauguugccu

SEQ ID NO: 1116944 - RNA, 23 nt, Human
agagcuuucuaaaauguaaaucu

SEQ ID NO: 1116945 - RNA, 22 nt, Human
gcagacaggcccaguggaggga

SEQ ID NO: 1116946 - RNA, 21 nt, Human
ugaaaucugaugggacaaaug

SEQ ID NO: 1116947 - RNA, 20 nt, Human
uuccuguauacaaagaguuc

SEQ ID NO: 1116948 - RNA, 23 nt, Human
cagagcuggcucagagcugccug

SEQ ID NO: 1116949 - RNA, 22 nt, Human
augcauaauguauguauugacu

SEQ ID NO: 1116950 - RNA, 22 nt, Human
ggcugccugcuccuccugcacg

SEQ ID NO: 1116951 - RNA, 22 nt, Human
gcugucaccaaagcaggcacug

SEQ ID NO: 1116952 - RNA, 22 nt, Human
ucugggugcccuuugcucuguu

SEQ ID NO: 1116953 - RNA, 22 nt, Human
cuuggggcugucacucuggcau

SEQ ID NO: 1116954 - RNA, 22 nt, Human
cagucccagaagagccugggag

SEQ ID NO: 1116955 - RNA, 22 nt, Human
ugcagaagauggucugagcacc

SEQ ID NO: 1116956 - RNA, 22 nt, Human
caggggccggcuguccgugccc

SEQ ID NO: 1116957 - RNA, 22 nt, Human
gccaggcuguuuuuauuacugu

SEQ ID NO: 1116958 - RNA, 22 nt, Human
ucccagggugcgccugcccucg

SEQ ID NO: 1116959 - RNA, 22 nt, Human
aaaugguaagacaacacauuau

SEQ ID NO: 1116960 - RNA, 22 nt, Human
uugaaaggcacaggcaccuggg

SEQ ID NO: 1116961 - RNA, 22 nt, Human
cuguccuguagcuccaucaguc

SEQ ID NO: 1116962 - RNA, 17 nt, Human
gagauggguggaucacc

SEQ ID NO: 1116963 - RNA, 22 nt, Human
cuggggcucacuuuggucaggc

SEQ ID NO: 1116964 - RNA, 22 nt, Human
ugacaugcuuguuuuccuugaa

SEQ ID NO: 1116965 - RNA, 23 nt, Human
aggaggccugaaacugaggcuga

SEQ ID NO: 1116966 - RNA, 22 nt, Human
cugggccucaaucucagaguuu

SEQ ID NO: 1116967 - RNA, 21 nt, Human
agugaaaugaaguguaugcuc

SEQ ID NO: 1116968 - RNA, 22 nt, Human
uccaaacacccuccaugcugca

SEQ ID NO: 1116969 - RNA, 22 nt, Human
ucaauuaugccauugcaauauu

SEQ ID NO: 1116970 - RNA, 22 nt, Human
ucagagugcagcgggaggcugg

SEQ ID NO: 1116971 - RNA, 22 nt, Human
gaggccagaaugagcugaaugc

SEQ ID NO: 1116972 - RNA, 15 nt, Human
ugggcagaucacuug

SEQ ID NO: 1116973 - RNA, 19 nt, Human
cagaguacaccagauagga

SEQ ID NO: 1116974 - RNA, 22 nt, Human
cuuuuuccagcuucaggguggg

SEQ ID NO: 1116975 - RNA, 22 nt, Human
gcccugucccuuggcuucuagg

SEQ ID NO: 1116976 - RNA, 22 nt, Human
uggagggcaugcuguccauggg

SEQ ID NO: 1116977 - RNA, 22 nt, Human
uuuuuccaccguacuuccugag

SEQ ID NO: 1116978 - RNA, 22 nt, Human
gcugucuggaggcucugaggga

SEQ ID NO: 1116979 - RNA, 22 nt, Human
ucaucuaagagucuuacauuua

SEQ ID NO: 1116980 - RNA, 22 nt, Human
ccaaaguccauaguuuacuuua

SEQ ID NO: 1116981 - RNA, 22 nt, Human
cauucauuuacuuucaacagcu

SEQ ID NO: 1116982 - RNA, 22 nt, Human
ugucucagaguaucccugaacu

SEQ ID NO: 1116983 - RNA, 22 nt, Human
agcagcugagaugguaagauuc

SEQ ID NO: 1116984 - RNA, 22 nt, Human
ugcuaucucuauauccauuuau

SEQ ID NO: 1116985 - RNA, 22 nt, Human
agcugccaaguuggaguagcaa

SEQ ID NO: 1116986 - RNA, 22 nt, Human
gcagcugcaggcaggcuugcug

SEQ ID NO: 1116987 - RNA, 22 nt, Human
ugccugggguuggcaaacugcu

SEQ ID NO: 1116988 - RNA, 22 nt, Human
agacagcaugauacaugaugcu

SEQ ID NO: 1116989 - RNA, 22 nt, Human
augcaguacauacaaacacuga

SEQ ID NO: 1116990 - RNA, 22 nt, Human
gaggcuggugguuaguuccauu

SEQ ID NO: 1116991 - RNA, 22 nt, Human
uccuuucaccaaaaaguguugu

SEQ ID NO: 1116992 - RNA, 20 nt, Human
uucuuucaucuacacguugu

SEQ ID NO: 1116993 - RNA, 22 nt, Human
cagcaauaguguguuuguuuca

SEQ ID NO: 1116994 - RNA, 22 nt, Human
ugggagaagcagcagccaagug

SEQ ID NO: 1116995 - RNA, 22 nt, Human
gcuuggaaguaggauugggaga

SEQ ID NO: 1116996 - RNA, 22 nt, Human
aaggcacugacugugcagggga

SEQ ID NO: 1116997 - RNA, 22 nt, Human
uugcagggaccugcagaaagcu

SEQ ID NO: 1116998 - RNA, 22 nt, Human
ucagggacugcagagggaagcu

SEQ ID NO: 1116999 - RNA, 22 nt, Human
agggauguaaauucuucuucuu

SEQ ID NO: 1117000 - RNA, 20 nt, Human
aggcacuguugucuguaucc

SEQ ID NO: 1117001 - RNA, 22 nt, Human
acacagggggcauucuaggagu

SEQ ID NO: 1117002 - RNA, 22 nt, Human
uuucaaauaccauaaaccuaau

SEQ ID NO: 1117003 - RNA, 22 nt, Human
uuacauuagacccacuuucaug

SEQ ID NO: 1117004 - RNA, 22 nt, Human
accugagccuagggagguugag

SEQ ID NO: 1117005 - RNA, 22 nt, Human
uggaagcacuuggguuuuguug

SEQ ID NO: 1117006 - RNA, 22 nt, Human
caaggagaaaacggcuucugaa

SEQ ID NO: 1117007 - RNA, 22 nt, Human
ccagaggcuggguucaccucag

SEQ ID NO: 1117008 - RNA, 22 nt, Human
cagccagggucaggcagcuucu

SEQ ID NO: 1117009 - RNA, 22 nt, Human
gcugcucucucccuaaguuggg

SEQ ID NO: 1117010 - RNA, 19 nt, Human
agguggucuaggcuggaga

SEQ ID NO: 1117011 - RNA, 22 nt, Human
guccucuggugaaagcauuccc

SEQ ID NO: 1117012 - RNA, 22 nt, Human
uggcucugucaaacugcacaca

SEQ ID NO: 1117013 - RNA, 22 nt, Human
gcaggccucuguugagggccuu

SEQ ID NO: 1117014 - RNA, 22 nt, Human
gcaaggagacuguagggccaag

SEQ ID NO: 1117015 - RNA, 21 nt, Human
cagaggcugagagggcaaucu

SEQ ID NO: 1117016 - RNA, 19 nt, Human
augucuguugaauuucaua

SEQ ID NO: 1117017 - RNA, 22 nt, Human
aggccugaggaccuucuggagg

SEQ ID NO: 1117018 - RNA, 22 nt, Human
uucaagaugcacaguggcauuc

SEQ ID NO: 1117019 - RNA, 22 nt, Human
cugggaggacaacuuggagcuc

SEQ ID NO: 1117020 - RNA, 22 nt, Human
uauucacauguacauaugcuca

SEQ ID NO: 1117021 - RNA, 20 nt, Human
gccugcagguuggaugggau

SEQ ID NO: 1117022 - RNA, 22 nt, Human
uuaaacagucccagaggcugac

SEQ ID NO: 1117023 - RNA, 22 nt, Human
uuuccuucaucaucugagagcu

SEQ ID NO: 1117024 - RNA, 22 nt, Human
agcauggggcaaugcaugugcu

SEQ ID NO: 1117025 - RNA, 22 nt, Human
ucacaggguguacaucaccuau

SEQ ID NO: 1117026 - RNA, 22 nt, Human
uuuuauuggagugauaccaagc

SEQ ID NO: 1117027 - RNA, 22 nt, Human
ccacagggauaggaauggggcu

SEQ ID NO: 1117028 - RNA, 22 nt, Human
uccuccuucgggacugcuugac

SEQ ID NO: 1117029 - RNA, 22 nt, Human
uaauuuauuucaacugccaagg

SEQ ID NO: 1117030 - RNA, 22 nt, Human
ccagcuggagccaagguggacu

SEQ ID NO: 1117031 - RNA, 22 nt, Human
cugggcuggcgcauccgacacg

SEQ ID NO: 1117032 - RNA, 22 nt, Human
ucugagaguagagcugccucuu

SEQ ID NO: 1117033 - RNA, 22 nt, Human
ccagcucuuggugcacuuacau

SEQ ID NO: 1117034 - RNA, 22 nt, Human
ggcugccucuggaagcuggaga

SEQ ID NO: 1117035 - RNA, 22 nt, Human
agagccagguguagucucggag

SEQ ID NO: 1117036 - RNA, 22 nt, Human
aagaggaaaugauugacuauau

SEQ ID NO: 1117037 - RNA, 22 nt, Human
gauuucaagcccccagagauuc

SEQ ID NO: 1117038 - RNA, 22 nt, Human
cagguaagagacggauuggccc

SEQ ID NO: 1117039 - RNA, 22 nt, Human
ugaauggucacugagcaucugu

SEQ ID NO: 1117040 - RNA, 22 nt, Human
cacucugacuggcccugcagga

SEQ ID NO: 1117041 - RNA, 22 nt, Human
cucacaggcaucucaucaggcu

SEQ ID NO: 1117042 - RNA, 22 nt, Human
uuugggaagaggaaucucugga

SEQ ID NO: 1117043 - RNA, 20 nt, Human
aggaaaaauggaaacuggag

SEQ ID NO: 1117044 - RNA, 22 nt, Human
gggcugccuuucuucugggagc

SEQ ID NO: 1117045 - RNA, 22 nt, Human
caggacagagcccagacugugu

SEQ ID NO: 1117046 - RNA, 22 nt, Human
gcacccagaggucagcagugcu

SEQ ID NO: 1117047 - RNA, 22 nt, Human
auuugucuuugagugcccugcu

SEQ ID NO: 1117048 - RNA, 22 nt, Human
gggcaugguggugcacaccugu

SEQ ID NO: 1117049 - RNA, 22 nt, Human
ugggaaauguguuucuggacca

SEQ ID NO: 1117050 - RNA, 22 nt, Human
gcugugcuauaucucugagugu

SEQ ID NO: 1117051 - RNA, 22 nt, Human
agaggccaguggcugugcuguc

SEQ ID NO: 1117052 - RNA, 22 nt, Human
ucuuugcaugcauuuucccuua

SEQ ID NO: 1117053 - RNA, 22 nt, Human
ccuguguggccaggcuggaguc

SEQ ID NO: 1117054 - RNA, 19 nt, Human
auuugaaagcugugcuugc

SEQ ID NO: 1117055 - RNA, 22 nt, Human
ggcugagccuggagcaucuggu

SEQ ID NO: 1117056 - RNA, 22 nt, Human
gcaaaugcucuccuuggucagg

SEQ ID NO: 1117057 - RNA, 22 nt, Human
cuugcugggguaagucugugcu

SEQ ID NO: 1117058 - RNA, 22 nt, Human
ccagucccaggcagaaauccag

SEQ ID NO: 1117059 - RNA, 22 nt, Human
agcagaacugaugagacuugag

SEQ ID NO: 1117060 - RNA, 22 nt, Human
ugcaucuguucagagcugucga

SEQ ID NO: 1117061 - RNA, 22 nt, Human
agggacaguuacaucaucagac

SEQ ID NO: 1117062 - RNA, 22 nt, Human
ucucaggcuaccuugcacaagg

SEQ ID NO: 1117063 - RNA, 22 nt, Human
ucucugucugagccuggcagac

SEQ ID NO: 1117064 - RNA, 22 nt, Human
ucaggcagagcuguggagcucu

SEQ ID NO: 1117065 - RNA, 22 nt, Human
aggccuggccccaguugcuagg

SEQ ID NO: 1117066 - RNA, 22 nt, Human
caagaugaucccugaaggcagc

SEQ ID NO: 1117067 - RNA, 17 nt, Human
ugagacagggcaggccc

SEQ ID NO: 1117068 - RNA, 22 nt, Human
aaaguuucaauagaggaagugg

SEQ ID NO: 1117069 - RNA, 22 nt, Human
guguaauugaaauugagaacca

SEQ ID NO: 1117070 - RNA, 22 nt, Human
ugcaggcuuuagccccauggcu

SEQ ID NO: 1117071 - RNA, 22 nt, Human
aucuggcuuacgaagcacuggu

SEQ ID NO: 1117072 - RNA, 22 nt, Human
gagcugccggcccacaguacua

SEQ ID NO: 1117073 - RNA, 22 nt, Human
uaaguaaauuuauaaugugauu

SEQ ID NO: 1117074 - RNA, 22 nt, Human
cugccagcacugccuccugagg

SEQ ID NO: 1117075 - RNA, 20 nt, Human
ugaaaaggucaggagacaug

SEQ ID NO: 1117076 - RNA, 22 nt, Human
cuagaaauauuuuacagucaag

SEQ ID NO: 1117077 - RNA, 22 nt, Human
aaagaugucauacacauuaaga

SEQ ID NO: 1117078 - RNA, 22 nt, Human
uggcucaggguccccaaauggu

SEQ ID NO: 1117079 - RNA, 22 nt, Human
uuccuguaugucagugaagagc

SEQ ID NO: 1117080 - RNA, 22 nt, Human
ccacagggacuguuaaaacccu

SEQ ID NO: 1117081 - RNA, 22 nt, Human
cccugggacccgcugcagaggc

SEQ ID NO: 1117082 - RNA, 23 nt, Human
agaggcaggaguggcuugcccgg

SEQ ID NO: 1117083 - RNA, 21 nt, Human
ugauuuccagaaaauuggccc

SEQ ID NO: 1117084 - RNA, 23 nt, Human
ucucaggacacacaugucuauca

SEQ ID NO: 1117085 - RNA, 22 nt, Human
ucuuuccuuagaauaauucuuu

SEQ ID NO: 1117086 - RNA, 22 nt, Human
guucccauacaguaucagugcu

SEQ ID NO: 1117087 - RNA, 22 nt, Human
uagcaggguaaauguagaugga

SEQ ID NO: 1117088 - RNA, 22 nt, Human
aagggcuggcccugggaagagu

SEQ ID NO: 1117089 - RNA, 22 nt, Human
gcuggggagggcgucaaggcca

SEQ ID NO: 1117090 - RNA, 22 nt, Human
agucucugccagcuuguccucu

SEQ ID NO: 1117091 - RNA, 22 nt, Human
caguuauuaugaggucauuagg

SEQ ID NO: 1117092 - RNA, 22 nt, Human
ucucuggaauuuugagagugac

SEQ ID NO: 1117093 - RNA, 22 nt, Human
auacaguauuaccuguucagga

SEQ ID NO: 1117094 - RNA, 22 nt, Human
aggcugccuguuccaaucuccu

SEQ ID NO: 1117095 - RNA, 22 nt, Human
uggaggcauuuuagguugucac

SEQ ID NO: 1117096 - RNA, 22 nt, Human
cagcugccccgcuggcugacca

SEQ ID NO: 1117097 - RNA, 22 nt, Human
cccacaggcuagggguagggca

SEQ ID NO: 1117098 - RNA, 22 nt, Human
auguuacagaaagcaaagauga

SEQ ID NO: 1117099 - RNA, 22 nt, Human
agccccacacucucucugagaa

SEQ ID NO: 1117100 - RNA, 22 nt, Human
cagggacaauggcagagccuga

SEQ ID NO: 1117101 - RNA, 22 nt, Human
agggcuggcuaggugcguuccc

SEQ ID NO: 1117102 - RNA, 22 nt, Human
cauuuacagugagaguuuuuac

SEQ ID NO: 1117103 - RNA, 22 nt, Human
gugugccagacaugaugcuaug

SEQ ID NO: 1117104 - RNA, 22 nt, Human
gcugccuccugaaagcgcucug

SEQ ID NO: 1117105 - RNA, 22 nt, Human
gccugugcauagcagcggacuc

SEQ ID NO: 1117106 - RNA, 20 nt, Human
cugggaggucuuccaaauca

SEQ ID NO: 1117107 - RNA, 22 nt, Human
uuugcauuuguuuagaaccuga

SEQ ID NO: 1117108 - RNA, 22 nt, Human
caaaggcaacauauacuuguuu

SEQ ID NO: 1117109 - RNA, 20 nt, Human
ccuaggcaugcugagucucc

SEQ ID NO: 1117110 - RNA, 22 nt, Human
uaugaagauauaucugaucucu

SEQ ID NO: 1117111 - RNA, 22 nt, Human
gggcuuggcacaugggcucagc

SEQ ID NO: 1117112 - RNA, 22 nt, Human
uccucagggaagaugagccuca

SEQ ID NO: 1117113 - RNA, 22 nt, Human
ccaggaguuggagguugcagug

SEQ ID NO: 1117114 - RNA, 22 nt, Human
ccauaagguuuggggccaugca

SEQ ID NO: 1117115 - RNA, 22 nt, Human
ccacagagacagagcccagggu

SEQ ID NO: 1117116 - RNA, 22 nt, Human
agccagcuggugggucagcugg

SEQ ID NO: 1117117 - RNA, 22 nt, Human
aggucccaggcauagcuggucu

SEQ ID NO: 1117118 - RNA, 22 nt, Human
aacucaguucuuuccacaaugc

SEQ ID NO: 1117119 - RNA, 22 nt, Human
acacagggucuagaguuaggcc

SEQ ID NO: 1117120 - RNA, 22 nt, Human
gcugccugucccaggaugagga

SEQ ID NO: 1117121 - RNA, 22 nt, Human
ugcaccugagaggucucugagg

SEQ ID NO: 1117122 - RNA, 22 nt, Human
agcuguucccucacugcaguca

SEQ ID NO: 1117123 - RNA, 22 nt, Human
ugacagcauaacacuggucuug

SEQ ID NO: 1117124 - RNA, 21 nt, Human
cucuggaggcaagggagagug

SEQ ID NO: 1117125 - RNA, 22 nt, Human
agcagccauccuuagagaaaga

SEQ ID NO: 1117126 - RNA, 22 nt, Human
uggcucugugucucccagcagc

SEQ ID NO: 1117127 - RNA, 22 nt, Human
gggagcugguuccugcccucca

SEQ ID NO: 1117128 - RNA, 22 nt, Human
gguggccuccagggcauaggug

SEQ ID NO: 1117129 - RNA, 22 nt, Human
gcuggcuguguuucaucucuga

SEQ ID NO: 1117130 - RNA, 20 nt, Human
cccaggagugagcagcuuua

SEQ ID NO: 1117131 - RNA, 22 nt, Human
gaggccuggguuggaggugcau

SEQ ID NO: 1117132 - RNA, 22 nt, Human
uaugugcaguuugcucuuaaca

SEQ ID NO: 1117133 - RNA, 22 nt, Human
ggcagagacuggguuggcagag

SEQ ID NO: 1117134 - RNA, 23 nt, Human
ccuggcagcaaacgaggagguua

SEQ ID NO: 1117135 - RNA, 22 nt, Human
ggagcugggguuggcaucuucc

SEQ ID NO: 1117136 - RNA, 21 nt, Human
cugaggcagcacagcuaguca

SEQ ID NO: 1117137 - RNA, 22 nt, Human
gagccagccuucuucugagguc

SEQ ID NO: 1117138 - RNA, 22 nt, Human
gugucccaauguucaggacggc

SEQ ID NO: 1117139 - RNA, 21 nt, Human
uccaggaguggcugggcaggg

SEQ ID NO: 1117140 - RNA, 23 nt, Human
ggcagagagcauggcuggggccc

SEQ ID NO: 1117141 - RNA, 19 nt, Human
uuggaaggagccagagugg

SEQ ID NO: 1117142 - RNA, 22 nt, Human
gccuccuggccuuugcuccuca

SEQ ID NO: 1117143 - RNA, 22 nt, Human
cagcagcuacuuggagcagcag

SEQ ID NO: 1117144 - RNA, 22 nt, Human
ggucauuguucuuuucugugau

SEQ ID NO: 1117145 - RNA, 22 nt, Human
cccagccagccucuucccauau

SEQ ID NO: 1117146 - RNA, 22 nt, Human
cacugagaggucucauuuccaa

SEQ ID NO: 1117147 - RNA, 22 nt, Human
agcugcccccagggcugugcuu

SEQ ID NO: 1117148 - RNA, 22 nt, Human
uaacaucuuuagcagcucgaac

SEQ ID NO: 1117149 - RNA, 17 nt, Human
aggugcagaggcagagc

SEQ ID NO: 1117150 - RNA, 22 nt, Human
gaggggcugggguugacuccaa

SEQ ID NO: 1117151 - RNA, 22 nt, Human
agaucucaccucuguguauuau

SEQ ID NO: 1117152 - RNA, 22 nt, Human
ugaaauguuugaagaccacuga

SEQ ID NO: 1117153 - RNA, 18 nt, Human
gucauugcaacauacugu

SEQ ID NO: 1117154 - RNA, 22 nt, Human
uggauaaacucacuguaaguug

SEQ ID NO: 1117155 - RNA, 20 nt, Human
cccucccagaugcuucccaa

SEQ ID NO: 1117156 - RNA, 22 nt, Human
aggcagcuggcagcacccaggg

SEQ ID NO: 1117157 - RNA, 22 nt, Human
cacagcuucugagugaggauuu

SEQ ID NO: 1117158 - RNA, 22 nt, Human
gcuuuguguagaaggaggaugg

SEQ ID NO: 1117159 - RNA, 22 nt, Human
uaucuuuaacuugcaguauuua

SEQ ID NO: 1117160 - RNA, 22 nt, Human
cugggaggcacuauucaggagg

SEQ ID NO: 1117161 - RNA, 22 nt, Human
gcaugugucuccccaguggagg

SEQ ID NO: 1117162 - RNA, 22 nt, Human
caaagcucaugcucuuagccau

SEQ ID NO: 1117163 - RNA, 22 nt, Human
cagcccugccauggagccuccu

SEQ ID NO: 1117164 - RNA, 22 nt, Human
aggugagugugacugcaagaga

SEQ ID NO: 1117165 - RNA, 22 nt, Human
caggagugcagguggugaggca

SEQ ID NO: 1117166 - RNA, 22 nt, Human
uuuucacacaaggugauaaguu

SEQ ID NO: 1117167 - RNA, 22 nt, Human
cagcaggcugcgauugcucauu

SEQ ID NO: 1117168 - RNA, 22 nt, Human
gggcuucuagaccagcagugag

SEQ ID NO: 1117169 - RNA, 22 nt, Human
ggcucuggugcccuggcuccca

SEQ ID NO: 1117170 - RNA, 22 nt, Human
agccucugugacucacagguca

SEQ ID NO: 1117171 - RNA, 21 nt, Human
cugguguagcacucaggugcu

SEQ ID NO: 1117172 - RNA, 22 nt, Human
aggggugugcauccuggaggau

SEQ ID NO: 1117173 - RNA, 22 nt, Human
caguuaaaggcccaauaucugg

SEQ ID NO: 1117174 - RNA, 22 nt, Human
ggcugggccagggccuguggac

SEQ ID NO: 1117175 - RNA, 22 nt, Human
ucacagggcauuauggcuccag

SEQ ID NO: 1117176 - RNA, 22 nt, Human
uuacaaagaguguucuuuucca

SEQ ID NO: 1117177 - RNA, 17 nt, Human
uccagagcacagagcuc

SEQ ID NO: 1117178 - RNA, 22 nt, Human
cagcugccccauaaaucacagu

SEQ ID NO: 1117179 - RNA, 22 nt, Human
gguggcagcgucuaucugacau

SEQ ID NO: 1117180 - RNA, 22 nt, Human
cccuccagccauggacccaggu

SEQ ID NO: 1117181 - RNA, 22 nt, Human
aagcagugcgcucaucuaaggg

SEQ ID NO: 1117182 - RNA, 22 nt, Human
uagucucuggagacucuagggg

SEQ ID NO: 1117183 - RNA, 22 nt, Human
augaagauaagaccaggcugga

SEQ ID NO: 1117184 - RNA, 22 nt, Human
agccuccaaaugucaggucccg

SEQ ID NO: 1117185 - RNA, 22 nt, Human
ccccagccagcaggaccucuga

SEQ ID NO: 1117186 - RNA, 17 nt, Human
cgagggcuugcuggcuc

SEQ ID NO: 1117187 - RNA, 23 nt, Human
uguagcaucucuuauuucucagc

SEQ ID NO: 1117188 - RNA, 22 nt, Human
cuggagcuggcuuccuuccacu

SEQ ID NO: 1117189 - RNA, 22 nt, Human
accugccucuaagcagcaggug

SEQ ID NO: 1117190 - RNA, 22 nt, Human
ccugccuguaagauggguacaa

SEQ ID NO: 1117191 - RNA, 22 nt, Human
ccauggaguuccucuggucuau

SEQ ID NO: 1117192 - RNA, 22 nt, Human
aaguccaucucugccccacaca

SEQ ID NO: 1117193 - RNA, 22 nt, Human
guggagccaggggcuguaggua

SEQ ID NO: 1117194 - RNA, 22 nt, Human
aaggcacuagcagaauuaguga

SEQ ID NO: 1117195 - RNA, 22 nt, Human
ugagccugggagauggaggcug

SEQ ID NO: 1117196 - RNA, 22 nt, Human
ggaggccaaggcagguggaucg

SEQ ID NO: 1117197 - RNA, 22 nt, Human
guuaauaaagguauagaaucag

SEQ ID NO: 1117198 - RNA, 22 nt, Human
cagcccucagguccucagcagc

SEQ ID NO: 1117199 - RNA, 22 nt, Human
agggguggagaguguugccagu

SEQ ID NO: 1117200 - RNA, 22 nt, Human
caaaguccauaguuuacaauag

SEQ ID NO: 1117201 - RNA, 22 nt, Human
gcugccuuugugagccaagggg

SEQ ID NO: 1117202 - RNA, 22 nt, Human
aggcugggaagguaaaguugua

SEQ ID NO: 1117203 - RNA, 22 nt, Human
guggaggacaaaagaagccuuu

SEQ ID NO: 1117204 - RNA, 22 nt, Human
cugagagucagcuucuccuccu

SEQ ID NO: 1117205 - RNA, 22 nt, Human
cuuauguaaacuacagauaaua

SEQ ID NO: 1117206 - RNA, 22 nt, Human
ggcuggccucaggguccucgcu

SEQ ID NO: 1117207 - RNA, 22 nt, Human
agguuuucagcuguauccugag

SEQ ID NO: 1117208 - RNA, 22 nt, Human
uaggaaaagucuagauugauga

SEQ ID NO: 1117209 - RNA, 22 nt, Human
ccucagcucuucccugugcaca

SEQ ID NO: 1117210 - RNA, 22 nt, Human
cauuuguauguuccuccuuagg

SEQ ID NO: 1117211 - RNA, 20 nt, Human
gacaucauguacacauugcc

SEQ ID NO: 1117212 - RNA, 22 nt, Human
ccagcagcagcguccaaggaga

SEQ ID NO: 1117213 - RNA, 22 nt, Human
caagcagacaguaggccuagaa

SEQ ID NO: 1117214 - RNA, 20 nt, Human
cugggcugcccagcuauggg

SEQ ID NO: 1117215 - RNA, 19 nt, Human
ucugcuggcagaauucccu

SEQ ID NO: 1117216 - RNA, 17 nt, Human
ggugaguguccaggugg

SEQ ID NO: 1117217 - RNA, 22 nt, Human
uuaugggagcaauuggggaggu

SEQ ID NO: 1117218 - RNA, 22 nt, Human
aagagcuggucacagguccauu

SEQ ID NO: 1117219 - RNA, 22 nt, Human
gaggcugcccaacuggagugga

SEQ ID NO: 1117220 - RNA, 22 nt, Human
cuauugaaaguguacaauucaa

SEQ ID NO: 1117221 - RNA, 21 nt, Human
ggcacugagccagauggacuc

SEQ ID NO: 1117222 - RNA, 22 nt, Human
ucuggcuccacuuucuucauuu

SEQ ID NO: 1117223 - RNA, 22 nt, Human
uacauuuauaaggcuucucugu

SEQ ID NO: 1117224 - RNA, 22 nt, Human
gggugggaacaggaugccagga

SEQ ID NO: 1117225 - RNA, 20 nt, Human
ucauugcacauaauggaagc

SEQ ID NO: 1117226 - RNA, 22 nt, Human
ggcugccugccuccaagccggg

SEQ ID NO: 1117227 - RNA, 22 nt, Human
guccagggaaauagcgacaggg

SEQ ID NO: 1117228 - RNA, 22 nt, Human
gcucaggagcucuugguggcgc

SEQ ID NO: 1117229 - RNA, 22 nt, Human
ucacugaagacugggcucuaaa

SEQ ID NO: 1117230 - RNA, 22 nt, Human
uggguagagacacagucugggg

SEQ ID NO: 1117231 - RNA, 22 nt, Human
uccucacauggugagccacaca

SEQ ID NO: 1117232 - RNA, 22 nt, Human
uaguaacagauuuauacagucu

SEQ ID NO: 1117233 - RNA, 22 nt, Human
ugucucugugagaucugacgau

SEQ ID NO: 1117234 - RNA, 22 nt, Human
ggccugccucacagucagcacc

SEQ ID NO: 1117235 - RNA, 22 nt, Human
uaacacacugaaggugagaugg

SEQ ID NO: 1117236 - RNA, 22 nt, Human
agagcuggaaucagaccucagg

SEQ ID NO: 1117237 - RNA, 22 nt, Human
gagaaccucuccacaagucugg

SEQ ID NO: 1117238 - RNA, 22 nt, Human
agccaacuaggagauuaaggua

SEQ ID NO: 1117239 - RNA, 23 nt, Human
ccagccucugggucuucauccag

SEQ ID NO: 1117240 - RNA, 22 nt, Human
gcugggagccguaccugucacg

SEQ ID NO: 1117241 - RNA, 20 nt, Human
cucaggauacugcaaaguug

SEQ ID NO: 1117242 - RNA, 22 nt, Human
ggugucccaggccagcugugug

SEQ ID NO: 1117243 - RNA, 22 nt, Human
gcagagccaggagcccaggauc

SEQ ID NO: 1117244 - RNA, 22 nt, Human
cagcugcccaagccccagaugu

SEQ ID NO: 1117245 - RNA, 23 nt, Human
acaaaugcccauacaucuaguuc

SEQ ID NO: 1117246 - RNA, 23 nt, Human
uacauuguggauggaguccuggg

SEQ ID NO: 1117247 - RNA, 22 nt, Human
gucucccacuuucuggccucuu

SEQ ID NO: 1117248 - RNA, 22 nt, Human
ggugaagggccuuaggagacag

SEQ ID NO: 1117249 - RNA, 22 nt, Human
cuugcuuuguccagaaauucag

SEQ ID NO: 1117250 - RNA, 22 nt, Human
cuccugagcucugaggaagcuu

SEQ ID NO: 1117251 - RNA, 22 nt, Human
gggcacugaaugccaagcuagg

SEQ ID NO: 1117252 - RNA, 22 nt, Human
ucucucagcuuugagaccugcu

SEQ ID NO: 1117253 - RNA, 22 nt, Human
gcugugcagccaagugccucug

SEQ ID NO: 1117254 - RNA, 22 nt, Human
uguuauugagguuacuuauaag

SEQ ID NO: 1117255 - RNA, 22 nt, Human
ggcuccuguggcaagacagcuu

SEQ ID NO: 1117256 - RNA, 22 nt, Human
auccuuggaugugucuuuuugu

SEQ ID NO: 1117257 - RNA, 22 nt, Human
aggcuccuaucgcuuucagcaa

SEQ ID NO: 1117258 - RNA, 22 nt, Human
augcuuuuccuaaaaugaugcc

SEQ ID NO: 1117259 - RNA, 22 nt, Human
ucugcagcuugcacaggcaggc

SEQ ID NO: 1117260 - RNA, 20 nt, Human
uaagaacaagacuaggaagc

SEQ ID NO: 1117261 - RNA, 22 nt, Human
ugucccagauacuggacauaga

SEQ ID NO: 1117262 - RNA, 22 nt, Human
caggaucccuggccuccgccca

SEQ ID NO: 1117263 - RNA, 20 nt, Human
uccuggccuucucgggcagu

SEQ ID NO: 1117264 - RNA, 22 nt, Human
uggcagaguucgcuccuauuca

SEQ ID NO: 1117265 - RNA, 22 nt, Human
gggcagcucucacagcagccaa

SEQ ID NO: 1117266 - RNA, 18 nt, Human
agugugugcccuuucagg

SEQ ID NO: 1117267 - RNA, 22 nt, Human
uaucuugagagacaacacagca

SEQ ID NO: 1117268 - RNA, 22 nt, Human
aucuggcucacuuagucuagga

SEQ ID NO: 1117269 - RNA, 22 nt, Human
agaggcugggaaggguccccgg

SEQ ID NO: 1117270 - RNA, 22 nt, Human
agaaauguuacaguuguuauuu

SEQ ID NO: 1117271 - RNA, 22 nt, Human
agaggccuaauugcuacccuuu

SEQ ID NO: 1117272 - RNA, 22 nt, Human
ugaagccaucccucagauggcc

SEQ ID NO: 1117273 - RNA, 22 nt, Human
acauuucuggaguuucucaaca

SEQ ID NO: 1117274 - RNA, 22 nt, Human
aaguuacaggagaaagagauca

SEQ ID NO: 1117275 - RNA, 22 nt, Human
cugaaggauguguggugggagu

SEQ ID NO: 1117276 - RNA, 22 nt, Human
aucuggcuuggguguggguagc

SEQ ID NO: 1117277 - RNA, 22 nt, Human
ucauugcagcuucagguguuca

SEQ ID NO: 1117278 - RNA, 22 nt, Human
uugaagcagagaaauacuugaa

SEQ ID NO: 1117279 - RNA, 22 nt, Human
cugcagccucaaccuccugagc

SEQ ID NO: 1117280 - RNA, 22 nt, Human
cacuucaauuaacuucagcauu

SEQ ID NO: 1117281 - RNA, 22 nt, Human
guuuagaauucuaacuuuaagg

SEQ ID NO: 1117282 - RNA, 23 nt, Human
cagguggcuccacgagggguggg

SEQ ID NO: 1117283 - RNA, 22 nt, Human
ucucaggaguagugggauccau

SEQ ID NO: 1117284 - RNA, 22 nt, Human
gggauggcucaaaggagucagg

SEQ ID NO: 1117285 - RNA, 22 nt, Human
ggccaagauggaaggagagaug

SEQ ID NO: 1117286 - RNA, 22 nt, Human
caggccucaggggcucaggcug

SEQ ID NO: 1117287 - RNA, 22 nt, Human
acaguaauaaguguuggugagg

SEQ ID NO: 1117288 - RNA, 22 nt, Human
uccugccugagcguggaggagg

SEQ ID NO: 1117289 - RNA, 22 nt, Human
cucaggaugaaagucaugguga

SEQ ID NO: 1117290 - RNA, 22 nt, Human
ccugccugcguccucugagggc

SEQ ID NO: 1117291 - RNA, 22 nt, Human
ugaccaaagaguugcuuguauu

SEQ ID NO: 1117292 - RNA, 22 nt, Human
aagaugauagaucugucaaugu

SEQ ID NO: 1117293 - RNA, 22 nt, Human
uggaggagaauuuauggucgaa

SEQ ID NO: 1117294 - RNA, 17 nt, Human
ggaaaaggaugauacag

SEQ ID NO: 1117295 - RNA, 22 nt, Human
ccacagagacaggguccuugcu

SEQ ID NO: 1117296 - RNA, 22 nt, Human
ugugggcaggcccgggucugag

SEQ ID NO: 1117297 - RNA, 22 nt, Human
aaaugcacagaggccagagagg

SEQ ID NO: 1117298 - RNA, 22 nt, Human
guguacauauugagucugcuga

SEQ ID NO: 1117299 - RNA, 22 nt, Human
ugauuuccaauaaggagaaugu

SEQ ID NO: 1117300 - RNA, 22 nt, Human
uggcagggugggcuucagcccc

SEQ ID NO: 1117301 - RNA, 22 nt, Human
ggcagugaaugaaacagaggcu

SEQ ID NO: 1117302 - RNA, 22 nt, Human
agaguguaauaagggcaagggc

SEQ ID NO: 1117303 - RNA, 22 nt, Human
ccccuuccuuccucagacagcc

SEQ ID NO: 1117304 - RNA, 22 nt, Human
acagaaauauagaagguaggaa

SEQ ID NO: 1117305 - RNA, 22 nt, Human
cccauuuagauaacaguucaaa

SEQ ID NO: 1117306 - RNA, 22 nt, Human
agguauagaauugaaaggguuu

SEQ ID NO: 1117307 - RNA, 22 nt, Human
ucauuucuccgaccugcugucc

SEQ ID NO: 1117308 - RNA, 22 nt, Human
uagggcuauucugaguaauaau

SEQ ID NO: 1117309 - RNA, 22 nt, Human
caggccugacccugagcuucac

SEQ ID NO: 1117310 - RNA, 22 nt, Human
cccaggagguggagcuugcagu

SEQ ID NO: 1117311 - RNA, 22 nt, Human
aagaaauguagagccuaguaaa

SEQ ID NO: 1117312 - RNA, 22 nt, Human
gaaaaugugccuuuggguauug

SEQ ID NO: 1117313 - RNA, 22 nt, Human
ucugagcauugaauuuucuucc

SEQ ID NO: 1117314 - RNA, 23 nt, Human
ggcacugaagcuacaauggugag

SEQ ID NO: 1117315 - RNA, 22 nt, Human
gccagccugugggggcucugug

SEQ ID NO: 1117316 - RNA, 22 nt, Human
uauuuuguuaauaauccagucc

SEQ ID NO: 1117317 - RNA, 22 nt, Human
ggccaugguuggggaagacaug

SEQ ID NO: 1117318 - RNA, 22 nt, Human
gcugggcugagcuagacuuggc

SEQ ID NO: 1117319 - RNA, 22 nt, Human
ucuaggagaaccaucagggagg

SEQ ID NO: 1117320 - RNA, 22 nt, Human
ccagggcuggguuugucggugu

SEQ ID NO: 1117321 - RNA, 22 nt, Human
ccuggaagauucaccacuacca

SEQ ID NO: 1117322 - RNA, 22 nt, Human
uuagauaauguagagauaugag

SEQ ID NO: 1117323 - RNA, 22 nt, Human
ccugcacuaccuggggcugcug

SEQ ID NO: 1117324 - RNA, 22 nt, Human
gcagggcaugggcccugucugc

SEQ ID NO: 1117325 - RNA, 22 nt, Human
cugccagccaggccagguaggc

SEQ ID NO: 1117326 - RNA, 22 nt, Human
auguccuuccauuuugaucugu

SEQ ID NO: 1117327 - RNA, 22 nt, Human
ggcucuggguucugcaaugcgu

SEQ ID NO: 1117328 - RNA, 22 nt, Human
agggcugcugaggaagccuugc

SEQ ID NO: 1117329 - RNA, 22 nt, Human
uuguaacaaucugucauaaaug

SEQ ID NO: 1117330 - RNA, 22 nt, Human
uagaacagaguuccagugauca

SEQ ID NO: 1117331 - RNA, 22 nt, Human
gggagccaaggagagaggccuu

SEQ ID NO: 1117332 - RNA, 22 nt, Human
aacucagcauccugcacagaga

SEQ ID NO: 1117333 - RNA, 22 nt, Human
ucugggggcgaccagggacugc

SEQ ID NO: 1117334 - RNA, 22 nt, Human
acacagggcggaaagcaugaga

SEQ ID NO: 1117335 - RNA, 22 nt, Human
ggcaggugcaccugagccaucu

SEQ ID NO: 1117336 - RNA, 22 nt, Human
gaugcagaaaguagacaccauc

SEQ ID NO: 1117337 - RNA, 22 nt, Human
ccagguggaggugugagguccu

SEQ ID NO: 1117338 - RNA, 22 nt, Human
agucugcacucagguggagguc

SEQ ID NO: 1117339 - RNA, 22 nt, Human
cacugcuucuggaggaauuugg

SEQ ID NO: 1117340 - RNA, 22 nt, Human
aguaacuaugcuugagaaucag

SEQ ID NO: 1117341 - RNA, 22 nt, Human
ggcucaggcuggagugcagugg

SEQ ID NO: 1117342 - RNA, 22 nt, Human
agcagagccaggucucucugua

SEQ ID NO: 1117343 - RNA, 22 nt, Human
cccuccagcucaaagcaaccgg

SEQ ID NO: 1117344 - RNA, 22 nt, Human
gagcagcuguccccaaagcuuc

SEQ ID NO: 1117345 - RNA, 21 nt, Human
agcagcugcaguuucuaucug

SEQ ID NO: 1117346 - RNA, 22 nt, Human
cuuucucuguguuucacaugcu

SEQ ID NO: 1117347 - RNA, 22 nt, Human
gagagugucgggggccccagga

SEQ ID NO: 1117348 - RNA, 22 nt, Human
ugauuucccucaucauaacaga

SEQ ID NO: 1117349 - RNA, 22 nt, Human
cuuccucugcggcgccgggcgc

SEQ ID NO: 1117350 - RNA, 22 nt, Human
ccagcuggcacuguggcugccc

SEQ ID NO: 1117351 - RNA, 22 nt, Human
agcagcaggagccgugggguga

SEQ ID NO: 1117352 - RNA, 22 nt, Human
agggccagcacuccuggcagga

SEQ ID NO: 1117353 - RNA, 22 nt, Human
aaaugcauaucaaagacuugaa

SEQ ID NO: 1117354 - RNA, 22 nt, Human
cuggccugcugggugagguccu

SEQ ID NO: 1117355 - RNA, 22 nt, Human
ccacaggaccagaggagaucac

SEQ ID NO: 1117356 - RNA, 22 nt, Human
uggagccuguguuucugcccag

SEQ ID NO: 1117357 - RNA, 22 nt, Human
cucaggaggugguagaggcccu

SEQ ID NO: 1117358 - RNA, 22 nt, Human
ugcaggugaaaauuaugaggau

SEQ ID NO: 1117359 - RNA, 22 nt, Human
cuggagcagguuuaggaguccc

SEQ ID NO: 1117360 - RNA, 22 nt, Human
gcucccaggaugaggagccagg

SEQ ID NO: 1117361 - RNA, 23 nt, Human
uccaagggcuacaaacacagacc

SEQ ID NO: 1117362 - RNA, 23 nt, Human
ccugggcauuggcugcagcuucu

SEQ ID NO: 1117363 - RNA, 22 nt, Human
aucagugcuaaagcaaaugccc

SEQ ID NO: 1117364 - RNA, 22 nt, Human
agcucauggugcuaucucaggg

SEQ ID NO: 1117365 - RNA, 22 nt, Human
cacagccugcugcacucaagaa

SEQ ID NO: 1117366 - RNA, 22 nt, Human
aauucuagcauugugaaaauau

SEQ ID NO: 1117367 - RNA, 22 nt, Human
ggcccacuugaaauggagcuca

SEQ ID NO: 1117368 - RNA, 22 nt, Human
caguacuuuucaaccaguauga

SEQ ID NO: 1117369 - RNA, 22 nt, Human
caguggugaagagcaggggcuc

SEQ ID NO: 1117370 - RNA, 22 nt, Human
cugccuggaccggcagcccucc

SEQ ID NO: 1117371 - RNA, 22 nt, Human
aucucagacauguuguccauga

SEQ ID NO: 1117372 - RNA, 22 nt, Human
ccagagccggcucccucagcuu

SEQ ID NO: 1117373 - RNA, 22 nt, Human
cguguggucccggcaaggcaag

SEQ ID NO: 1117374 - RNA, 22 nt, Human
cacagguggcuccaaguuagag

SEQ ID NO: 1117375 - RNA, 22 nt, Human
cauugcacugcagcccgggcaa

SEQ ID NO: 1117376 - RNA, 22 nt, Human
cuccagggaggucugcaggacu

SEQ ID NO: 1117377 - RNA, 22 nt, Human
auacagaaaaugaugcagaguu

SEQ ID NO: 1117378 - RNA, 22 nt, Human
ucugccugcggcugcagguggc

SEQ ID NO: 1117379 - RNA, 22 nt, Human
ggggauggaggcgugugguccu

SEQ ID NO: 1117380 - RNA, 22 nt, Human
ugugcagggaagggcaugcuau

SEQ ID NO: 1117381 - RNA, 22 nt, Human
auucagcaguuccugcuucagu

SEQ ID NO: 1117382 - RNA, 22 nt, Human
gccaggcucucagugacugccc

SEQ ID NO: 1117383 - RNA, 22 nt, Human
gguguccaucaggcugugcuuc

SEQ ID NO: 1117384 - RNA, 22 nt, Human
gcugccacucugagcuugcuuc

SEQ ID NO: 1117385 - RNA, 21 nt, Human
agagagaaggccauauggucc

SEQ ID NO: 1117386 - RNA, 20 nt, Human
ugaaaggugggaauuguggg

SEQ ID NO: 1117387 - RNA, 22 nt, Human
aggccagggucccacacucgca

SEQ ID NO: 1117388 - RNA, 22 nt, Human
gagggauggugugagaggcuca

SEQ ID NO: 1117389 - RNA, 23 nt, Human
uggcaccaggcauucuaggggua

SEQ ID NO: 1117390 - RNA, 22 nt, Human
gcagcccaauggacugagacag

SEQ ID NO: 1117391 - RNA, 22 nt, Human
ccagagcccgggaccuggacuu

SEQ ID NO: 1117392 - RNA, 22 nt, Human
cccagacucaucccugggagcu

SEQ ID NO: 1117393 - RNA, 22 nt, Human
gaggggcucuugggcaugaagg

SEQ ID NO: 1117394 - RNA, 18 nt, Human
aggagccuuugcacugga

SEQ ID NO: 1117395 - RNA, 22 nt, Human
caggagcucuuaaggaugugau

SEQ ID NO: 1117396 - RNA, 22 nt, Human
ugcuggccgugagcucucggga

SEQ ID NO: 1117397 - RNA, 23 nt, Human
auaauaacgucugucuugucucu

SEQ ID NO: 1117398 - RNA, 22 nt, Human
guguaaggccccagguucuuua

SEQ ID NO: 1117399 - RNA, 22 nt, Human
aggcaguguauugcuagcggcu

SEQ ID NO: 1117400 - RNA, 22 nt, Human
gauuucaaguaucuugggcgag

SEQ ID NO: 1117401 - RNA, 20 nt, Human
ucugcccaccccggcuccca

SEQ ID NO: 1117402 - RNA, 22 nt, Human
gcugggcuugguuucccugcuu

SEQ ID NO: 1117403 - RNA, 22 nt, Human
uaggccagaggagcagcuuugg

SEQ ID NO: 1117404 - RNA, 22 nt, Human
uucaagauaauaggaaugaaaa

SEQ ID NO: 1117405 - RNA, 22 nt, Human
cuacauuuggagaguauaggaa

SEQ ID NO: 1117406 - RNA, 22 nt, Human
ugggacaguuguccuccacucu

SEQ ID NO: 1117407 - RNA, 22 nt, Human
acugugcacaauucuaaguccu

SEQ ID NO: 1117408 - RNA, 22 nt, Human
gccuggaguagcauggcaagcc

SEQ ID NO: 1117409 - RNA, 19 nt, Human
ucaaagucugagucacuuu

SEQ ID NO: 1117410 - RNA, 22 nt, Human
ugagccaggcucaagugauccu

SEQ ID NO: 1117411 - RNA, 22 nt, Human
uccucugcuguucugguucuuu

SEQ ID NO: 1117412 - RNA, 22 nt, Human
uggagcugauacagcuggcuuu

SEQ ID NO: 1117413 - RNA, 22 nt, Human
ggggauggauuccgggucccug

SEQ ID NO: 1117414 - RNA, 22 nt, Human
aagcccagcugaaagcauuuuu

SEQ ID NO: 1117415 - RNA, 22 nt, Human
uggcagcacuagguacugagcu

SEQ ID NO: 1117416 - RNA, 22 nt, Human
aggacuuagaacauuauguacu

SEQ ID NO: 1117417 - RNA, 22 nt, Human
ccugccugggcucacuugccag

SEQ ID NO: 1117418 - RNA, 22 nt, Human
ccucccaccauuuagagagagc

SEQ ID NO: 1117419 - RNA, 22 nt, Human
ugggcuacucugggagccuaac

SEQ ID NO: 1117420 - RNA, 22 nt, Human
aggccuggguguucaccagaag

SEQ ID NO: 1117421 - RNA, 22 nt, Human
cucccugggcagauguggcucu

SEQ ID NO: 1117422 - RNA, 22 nt, Human
gccucugcaauuacauugugcc

SEQ ID NO: 1117423 - RNA, 22 nt, Human
uauuucuuucagguauguguug

SEQ ID NO: 1117424 - RNA, 22 nt, Human
agaugcuucaguguuuaauuua

SEQ ID NO: 1117425 - RNA, 22 nt, Human
uuguauuagcuguaaauuuucu

SEQ ID NO: 1117426 - RNA, 22 nt, Human
cugcugggaaggucugcucagu

SEQ ID NO: 1117427 - RNA, 22 nt, Human
cuccaggccauggcugcggagg

SEQ ID NO: 1117428 - RNA, 22 nt, Human
caguggcaugguugacugcagu

SEQ ID NO: 1117429 - RNA, 19 nt, Human
cuggcagccugucuguguc

SEQ ID NO: 1117430 - RNA, 22 nt, Human
uacaaagcuguauagccugguc

SEQ ID NO: 1117431 - RNA, 22 nt, Human
ccucugagagaaggccuucagc

SEQ ID NO: 1117432 - RNA, 22 nt, Human
uuucauuacguguuugacuugu

SEQ ID NO: 1117433 - RNA, 22 nt, Human
uuucauaaugucacagucaaaa

SEQ ID NO: 1117434 - RNA, 21 nt, Human
ugaagccugaggcauagcccc

SEQ ID NO: 1117435 - RNA, 20 nt, Human
cagccuccacucacucagcu

SEQ ID NO: 1117436 - RNA, 22 nt, Human
uuuaagaugguauuuuauaaag

SEQ ID NO: 1117437 - RNA, 22 nt, Human
cagagcugcgcuuuuuccuggu

SEQ ID NO: 1117438 - RNA, 22 nt, Human
ugggcccugacuucaagcaucc

SEQ ID NO: 1117439 - RNA, 22 nt, Human
uauauagaaaagcagauguugg

SEQ ID NO: 1117440 - RNA, 22 nt, Human
auuucagcccaguaugagcccc

SEQ ID NO: 1117441 - RNA, 22 nt, Human
gguuggaggugggaauagcuag

SEQ ID NO: 1117442 - RNA, 22 nt, Human
uuugugaagggaacagaagugu

SEQ ID NO: 1117443 - RNA, 22 nt, Human
uggccugggugcugcugacauc

SEQ ID NO: 1117444 - RNA, 22 nt, Human
acauuugaggauguuaagaaug

SEQ ID NO: 1117445 - RNA, 22 nt, Human
acagaaagaagguguauuugag

SEQ ID NO: 1117446 - RNA, 22 nt, Human
uugcauguguaauuuuucuaaa

SEQ ID NO: 1117447 - RNA, 22 nt, Human
acaccagggccuagccagggcg

SEQ ID NO: 1117448 - RNA, 22 nt, Human
ggcagggaaacagcugauccca

SEQ ID NO: 1117449 - RNA, 22 nt, Human
gaggucaggcuugcagcagggu

SEQ ID NO: 1117450 - RNA, 22 nt, Human
gugcuaggauuacaggcauggg

SEQ ID NO: 1117451 - RNA, 22 nt, Human
agagccugucugccuuucuacc

SEQ ID NO: 1117452 - RNA, 18 nt, Human
aagaggaggagcagguug

SEQ ID NO: 1117453 - RNA, 22 nt, Human
cagcucucuaaggucuugcuuu

SEQ ID NO: 1117454 - RNA, 22 nt, Human
gugcagcugugugagagcucca

SEQ ID NO: 1117455 - RNA, 22 nt, Human
ggccucugcccucacuccuguc

SEQ ID NO: 1117456 - RNA, 22 nt, Human
agggccagcccauaaugccaaa

SEQ ID NO: 1117457 - RNA, 22 nt, Human
cugccugugccaccgccucauu

SEQ ID NO: 1117458 - RNA, 22 nt, Human
agagccuugaagaucuggaaaa

SEQ ID NO: 1117459 - RNA, 22 nt, Human
ccugucugcggaggaguggaag

SEQ ID NO: 1117460 - RNA, 22 nt, Human
aaugcuguaaagaugcuaucug

SEQ ID NO: 1117461 - RNA, 22 nt, Human
cucucccagucaggcucaggau

SEQ ID NO: 1117462 - RNA, 22 nt, Human
ccugggcuugcaucugugcugg

SEQ ID NO: 1117463 - RNA, 22 nt, Human
gauuucaaggaguuuucacagu

SEQ ID NO: 1117464 - RNA, 22 nt, Human
ccaggaggcagaaguugcagug

SEQ ID NO: 1117465 - RNA, 21 nt, Human
ucugucucuccacugcccugc

SEQ ID NO: 1117466 - RNA, 22 nt, Human
gggcagcucuggcugugggaag

SEQ ID NO: 1117467 - RNA, 18 nt, Human
uugagggaggggcagagu

SEQ ID NO: 1117468 - RNA, 22 nt, Human
agagccaggacugugucucacu

SEQ ID NO: 1117469 - RNA, 22 nt, Human
uagcagggguagauagagugug

SEQ ID NO: 1117470 - RNA, 22 nt, Human
cagcccagcacuaaguagauuu

SEQ ID NO: 1117471 - RNA, 22 nt, Human
ccaggccagcaggcacaccugc

SEQ ID NO: 1117472 - RNA, 22 nt, Human
ucaccacugaacagaccuuugg

SEQ ID NO: 1117473 - RNA, 20 nt, Human
uuccagagaucugcauuuua

SEQ ID NO: 1117474 - RNA, 22 nt, Human
uuuccucugacugcuccccugc

SEQ ID NO: 1117475 - RNA, 22 nt, Human
ugggagcaagcuggugcuggag

SEQ ID NO: 1117476 - RNA, 22 nt, Human
acugagcugcaagucagggagg

SEQ ID NO: 1117477 - RNA, 20 nt, Human
uccucagaagacauuugggg

SEQ ID NO: 1117478 - RNA, 22 nt, Human
uggcuucugggacuugugagca

SEQ ID NO: 1117479 - RNA, 22 nt, Human
ccagagccggauugugaagugc

SEQ ID NO: 1117480 - RNA, 22 nt, Human
ucuggcucauacaagccugcaa

SEQ ID NO: 1117481 - RNA, 22 nt, Human
aaugcacauauauguguauaca

SEQ ID NO: 1117482 - RNA, 22 nt, Human
gcacagggaggcuggccuggcc

SEQ ID NO: 1117483 - RNA, 22 nt, Human
cuacauuuguucuauagcuuuu

SEQ ID NO: 1117484 - RNA, 22 nt, Human
aaaaugcaugagaaugugcucg

SEQ ID NO: 1117485 - RNA, 20 nt, Human
ccuggcuuugcaucugugau

SEQ ID NO: 1117486 - RNA, 22 nt, Human
agcccaaggcuucccugcuggc

SEQ ID NO: 1117487 - RNA, 22 nt, Human
ggugggugagcccugggagcug

SEQ ID NO: 1117488 - RNA, 22 nt, Human
gccuuggccuuccuaggccuga

SEQ ID NO: 1117489 - RNA, 22 nt, Human
agaagccaauucugugugaguc

SEQ ID NO: 1117490 - RNA, 22 nt, Human
gcuggagguuucaccugaguuu

SEQ ID NO: 1117491 - RNA, 20 nt, Human
aaaauauguauaacucuucu

SEQ ID NO: 1117492 - RNA, 22 nt, Human
uaaauucuacaacuucaaagau

SEQ ID NO: 1117493 - RNA, 22 nt, Human
guuauugcaguauagaggucua

SEQ ID NO: 1117494 - RNA, 22 nt, Human
agagugaaggccagguuacagu

SEQ ID NO: 1117495 - RNA, 18 nt, Human
agaguguucucagugaaa

SEQ ID NO: 1117496 - RNA, 22 nt, Human
aggggccauuguucugcccgcu

SEQ ID NO: 1117497 - RNA, 22 nt, Human
aguguuucuggcaaaugaaagu

SEQ ID NO: 1117498 - RNA, 22 nt, Human
ggugugccuggggcuuagcugc

SEQ ID NO: 1117499 - RNA, 22 nt, Human
agaaauguggaucguuuuaaaa

SEQ ID NO: 1117500 - RNA, 22 nt, Human
gcagggucugaggccacagagg

SEQ ID NO: 1117501 - RNA, 22 nt, Human
guguccacggcugagaaugauu

SEQ ID NO: 1117502 - RNA, 17 nt, Human
ugaggccugcaucagug

SEQ ID NO: 1117503 - RNA, 20 nt, Human
gugccuggagaagaggcugu

SEQ ID NO: 1117504 - RNA, 22 nt, Human
uggcagcaauuagcuagagcug

SEQ ID NO: 1117505 - RNA, 22 nt, Human
uccucucagugugguuguggga

SEQ ID NO: 1117506 - RNA, 22 nt, Human
caguugaugggacucauguggg

SEQ ID NO: 1117507 - RNA, 22 nt, Human
auucaagagcccauguuuccug

SEQ ID NO: 1117508 - RNA, 22 nt, Human
gcuccuggcuccaggcagccaa

SEQ ID NO: 1117509 - RNA, 22 nt, Human
ccacucugcugugcuccaugau

SEQ ID NO: 1117510 - RNA, 22 nt, Human
uggcucugucacugugagcuau

SEQ ID NO: 1117511 - RNA, 22 nt, Human
agagcuguucagcagccagguu

SEQ ID NO: 1117512 - RNA, 22 nt, Human
gcugcagcccggcgcgccugag

SEQ ID NO: 1117513 - RNA, 22 nt, Human
agaguguuucagucuuccuaga

SEQ ID NO: 1117514 - RNA, 22 nt, Human
gggcugcuuuuuucuuagcaga

SEQ ID NO: 1117515 - RNA, 22 nt, Human
uugugcauuucucugagugugu

SEQ ID NO: 1117516 - RNA, 22 nt, Human
aaggcaggaugggaaaagauuu

SEQ ID NO: 1117517 - RNA, 22 nt, Human
cugagccauccauaccagcuua

SEQ ID NO: 1117518 - RNA, 22 nt, Human
ugcuuuggccacuagaauucag

SEQ ID NO: 1117519 - RNA, 20 nt, Human
ucugucucugagcuagacuu

SEQ ID NO: 1117520 - RNA, 22 nt, Human
acagcuggaggucugugagcac

SEQ ID NO: 1117521 - RNA, 22 nt, Human
gcagggcaaugaucccgagagg

SEQ ID NO: 1117522 - RNA, 22 nt, Human
agaagccauucccuguaggcuc

SEQ ID NO: 1117523 - RNA, 22 nt, Human
uggcucagagccuugagagcug

SEQ ID NO: 1117524 - RNA, 23 nt, Human
cccuggaguaaauucuuggaagg

SEQ ID NO: 1117525 - RNA, 18 nt, Human
ucugggcuucccgaggcu

SEQ ID NO: 1117526 - RNA, 22 nt, Human
cagaggcucuuccucacugccc

SEQ ID NO: 1117527 - RNA, 22 nt, Human
uagaaaugcaguguacuguguc

SEQ ID NO: 1117528 - RNA, 22 nt, Human
cccagggaaugacucuggccuu

SEQ ID NO: 1117529 - RNA, 22 nt, Human
ucagugcagaauagugaugcau

SEQ ID NO: 1117530 - RNA, 22 nt, Human
ucucagagccuaacuaaccuaa

SEQ ID NO: 1117531 - RNA, 22 nt, Human
ggccacuccgcugcuacuggaa

SEQ ID NO: 1117532 - RNA, 22 nt, Human
aggccugcagcaggagcaaacc

SEQ ID NO: 1117533 - RNA, 22 nt, Human
ggccucaguuucuucaacugua

SEQ ID NO: 1117534 - RNA, 22 nt, Human
cccagcaucuccaggcauggcc

SEQ ID NO: 1117535 - RNA, 22 nt, Human
aaacuguauauuuauggcaugu

SEQ ID NO: 1117536 - RNA, 22 nt, Human
agcagcugguaggaguggccac

SEQ ID NO: 1117537 - RNA, 22 nt, Human
aggccugacuugaauuuagggc

SEQ ID NO: 1117538 - RNA, 22 nt, Human
aggcccugaagucggccccuca

SEQ ID NO: 1117539 - RNA, 22 nt, Human
acucccagguugccuggcaggc

SEQ ID NO: 1117540 - RNA, 22 nt, Human
auugacaaauggauguugacau

SEQ ID NO: 1117541 - RNA, 22 nt, Human
gcucugucauuuugcagacacu

SEQ ID NO: 1117542 - RNA, 22 nt, Human
auguaucaauuaucugucugca

SEQ ID NO: 1117543 - RNA, 22 nt, Human
aacucaguguguuucuuaguau

SEQ ID NO: 1117544 - RNA, 19 nt, Human
gcauuucucuuuacagcca

SEQ ID NO: 1117545 - RNA, 17 nt, Human
gguggccugcaguggcu

SEQ ID NO: 1117546 - RNA, 23 nt, Human
ggcucugugcugggccugcagga

SEQ ID NO: 1117547 - RNA, 22 nt, Human
caguauguuugggagacaugac

SEQ ID NO: 1117548 - RNA, 22 nt, Human
ccacugggcguuucuguccaau

SEQ ID NO: 1117549 - RNA, 22 nt, Human
ccuggagcaaaaaucuaaggag

SEQ ID NO: 1117550 - RNA, 22 nt, Human
uggcagugccccuugaccagug

SEQ ID NO: 1117551 - RNA, 22 nt, Human
ggucccaggcucccucuugucc

SEQ ID NO: 1117552 - RNA, 21 nt, Human
acaugucucuaaucucaguga

SEQ ID NO: 1117553 - RNA, 22 nt, Human
ugcugggcuugaaagcugcuaa

SEQ ID NO: 1117554 - RNA, 21 nt, Human
ucagggcagcugcucuucaga

SEQ ID NO: 1117555 - RNA, 22 nt, Human
auuauaggcuugagccaccgug

SEQ ID NO: 1117556 - RNA, 22 nt, Human
agcuggagaucaugcugauacu

SEQ ID NO: 1117557 - RNA, 22 nt, Human
ccagcucuagccccauguggcu

SEQ ID NO: 1117558 - RNA, 20 nt, Human
aggaaaaggguggugguaga

SEQ ID NO: 1117559 - RNA, 22 nt, Human
cugagccaaccacagcaggagc

SEQ ID NO: 1117560 - RNA, 22 nt, Human
cugagcuggucuauggacuugg

SEQ ID NO: 1117561 - RNA, 22 nt, Human
ggacacagcugcagccacaccc

SEQ ID NO: 1117562 - RNA, 23 nt, Human
aguuuuucugcaugguucuguau

SEQ ID NO: 1117563 - RNA, 18 nt, Human
gcaggugccacugcuguu

SEQ ID NO: 1117564 - RNA, 22 nt, Human
gcuuuccuggcccugucccugc

SEQ ID NO: 1117565 - RNA, 22 nt, Human
accaucaguacuggaugcugac

SEQ ID NO: 1117566 - RNA, 22 nt, Human
agcagccacccagcugcucauu

SEQ ID NO: 1117567 - RNA, 16 nt, Human
gagggcagaggcggaa

SEQ ID NO: 1117568 - RNA, 22 nt, Human
ccugccuggcugucagcagagc

SEQ ID NO: 1117569 - RNA, 22 nt, Human
cagccugcccuggaagcccagc

SEQ ID NO: 1117570 - RNA, 22 nt, Human
cuagucacucagcacugacaaa

SEQ ID NO: 1117571 - RNA, 22 nt, Human
cccaggaggcagagcuugcagu

SEQ ID NO: 1117572 - RNA, 22 nt, Human
cugagaaggaagccuccacucu

SEQ ID NO: 1117573 - RNA, 22 nt, Human
agggaggaucugcuccuugucu

SEQ ID NO: 1117574 - RNA, 22 nt, Human
ccccagcucagugcagggacau

SEQ ID NO: 1117575 - RNA, 22 nt, Human
gacaugcaacaauuuggcauuu

SEQ ID NO: 1117576 - RNA, 22 nt, Human
aaauguguuucuuugugaaugg

SEQ ID NO: 1117577 - RNA, 22 nt, Human
aggaaaugcugaugcuccugga

SEQ ID NO: 1117578 - RNA, 22 nt, Human
cugcugcugcuaucuacccagg

SEQ ID NO: 1117579 - RNA, 22 nt, Human
cuucuuuacuuucuagaaauaa

SEQ ID NO: 1117580 - RNA, 22 nt, Human
gcaggagcuggaaagugauguu

SEQ ID NO: 1117581 - RNA, 22 nt, Human
cagcccugagaaggaggaucuc

SEQ ID NO: 1117582 - RNA, 19 nt, Human
ugccagcauuaggcugaag

SEQ ID NO: 1117583 - RNA, 22 nt, Human
ccagcagcccucuuccaagacu

SEQ ID NO: 1117584 - RNA, 20 nt, Human
gauuucaaagcagaguggcc

SEQ ID NO: 1117585 - RNA, 22 nt, Human
ggcuucuccccuuugagucuuc

SEQ ID NO: 1117586 - RNA, 20 nt, Human
aggagccauugacugcagca

SEQ ID NO: 1117587 - RNA, 22 nt, Human
cugggagucaccaggagcaagg

SEQ ID NO: 1117588 - RNA, 22 nt, Human
agcuucucaggagucugaggca

SEQ ID NO: 1117589 - RNA, 22 nt, Human
gagacacacacaggagguggca

SEQ ID NO: 1117590 - RNA, 22 nt, Human
uuuacuuugugucaagucaaga

SEQ ID NO: 1117591 - RNA, 22 nt, Human
acaggugugagaacaugccuug

SEQ ID NO: 1117592 - RNA, 22 nt, Human
ugagccaguggaagauggcagu

SEQ ID NO: 1117593 - RNA, 22 nt, Human
gggcugagucugcugccuguca

SEQ ID NO: 1117594 - RNA, 22 nt, Human
aacuuuaaggcuauaaauuaug

SEQ ID NO: 1117595 - RNA, 22 nt, Human
agccuggcccugcugaacucug

SEQ ID NO: 1117596 - RNA, 22 nt, Human
ggagccuguuaguugagugcuc

SEQ ID NO: 1117597 - RNA, 22 nt, Human
ugugcccaucccucuggagugu

SEQ ID NO: 1117598 - RNA, 22 nt, Human
gucccagggaagaaggcagcac

SEQ ID NO: 1117599 - RNA, 22 nt, Human
ccagcagcccacaggcgucccu

SEQ ID NO: 1117600 - RNA, 22 nt, Human
cagggcccauggcucagguagg

SEQ ID NO: 1117601 - RNA, 22 nt, Human
uaagacaauucuucagucacaa

SEQ ID NO: 1117602 - RNA, 22 nt, Human
caugggcucuucuggacugcac

SEQ ID NO: 1117603 - RNA, 19 nt, Human
agggagaauuccaagagga

SEQ ID NO: 1117604 - RNA, 22 nt, Human
ugcuggcuacugauggcaggcc

SEQ ID NO: 1117605 - RNA, 22 nt, Human
uuugcauuauauuuauagaaga

SEQ ID NO: 1117606 - RNA, 18 nt, Human
ugucauugccagggaagc

SEQ ID NO: 1117607 - RNA, 22 nt, Human
cagcugaauucuucagacucca

SEQ ID NO: 1117608 - RNA, 22 nt, Human
accucugcaaugcaaugucaug

SEQ ID NO: 1117609 - RNA, 22 nt, Human
cuguguccucccgcugcaccca

SEQ ID NO: 1117610 - RNA, 20 nt, Human
ugucaugcauuagaugaaga

SEQ ID NO: 1117611 - RNA, 22 nt, Human
uccuugaaaggggcugcagggc

SEQ ID NO: 1117612 - RNA, 22 nt, Human
aucaaaguuucccagaaguugu

SEQ ID NO: 1117613 - RNA, 22 nt, Human
uggcaguguauagguggcuccu

SEQ ID NO: 1117614 - RNA, 22 nt, Human
uggcuccuaucaaggagugggu

SEQ ID NO: 1117615 - RNA, 22 nt, Human
gaggacagcuuagggcuuccug

SEQ ID NO: 1117616 - RNA, 22 nt, Human
agagcccucuucacugccccuu

SEQ ID NO: 1117617 - RNA, 22 nt, Human
gggacuggcacagggcugggag

SEQ ID NO: 1117618 - RNA, 22 nt, Human
caggcagcaggagcccugcucg

SEQ ID NO: 1117619 - RNA, 22 nt, Human
agccugucugucuccaaagcug

SEQ ID NO: 1117620 - RNA, 22 nt, Human
caaagguauucucauuuuggaa

SEQ ID NO: 1117621 - RNA, 22 nt, Human
gugucacaugguuuacugcagc

SEQ ID NO: 1117622 - RNA, 20 nt, Human
uggcccuguuuucuccaggc

SEQ ID NO: 1117623 - RNA, 19 nt, Human
ccagcccugucacuucuug

SEQ ID NO: 1117624 - RNA, 22 nt, Human
agcagcauguugggaugugaaa

SEQ ID NO: 1117625 - RNA, 22 nt, Human
gagcaggcauucuaguggcuga

SEQ ID NO: 1117626 - RNA, 22 nt, Human
cgucccaguuccagccgcgcug

SEQ ID NO: 1117627 - RNA, 22 nt, Human
aagggcugaaugaaggguugaa

SEQ ID NO: 1117628 - RNA, 22 nt, Human
uagaaacacagaucugguguca

SEQ ID NO: 1117629 - RNA, 22 nt, Human
cagaaugagauaacccagauug

SEQ ID NO: 1117630 - RNA, 22 nt, Human
uggcagcagccauggaaggccc

SEQ ID NO: 1117631 - RNA, 22 nt, Human
ugccucugaggaagauuguguu

SEQ ID NO: 1117632 - RNA, 22 nt, Human
ucagggcucaccagccucugcc

SEQ ID NO: 1117633 - RNA, 23 nt, Human
uugcauguagcccaugaguaacu

SEQ ID NO: 1117634 - RNA, 22 nt, Human
aggggagcuaacaccagagccc

SEQ ID NO: 1117635 - RNA, 22 nt, Human
cuuucauucuuagauauuagug

SEQ ID NO: 1117636 - RNA, 22 nt, Human
agugugcugcuuaaacaguugu

SEQ ID NO: 1117637 - RNA, 22 nt, Human
agcugcagucaagcugggccac

SEQ ID NO: 1117638 - RNA, 22 nt, Human
aaaggucagacuuaggcugggc

SEQ ID NO: 1117639 - RNA, 22 nt, Human
gagccugagugcugccuccccu

SEQ ID NO: 1117640 - RNA, 22 nt, Human
gcccacacaccagcucaggagg

SEQ ID NO: 1117641 - RNA, 22 nt, Human
ggcaaaaaccgcaauaacuucu

SEQ ID NO: 1117642 - RNA, 22 nt, Human
gcuucauuacugacagucugug

SEQ ID NO: 1117643 - RNA, 18 nt, Human
gcugucugaggucugagg

SEQ ID NO: 1117644 - RNA, 22 nt, Human
agcagugggugacagagcugag

SEQ ID NO: 1117645 - RNA, 18 nt, Human
caggagcaggaguugaac

SEQ ID NO: 1117646 - RNA, 19 nt, Human
guggccucggagcgcgcgg

SEQ ID NO: 1117647 - RNA, 22 nt, Human
uauuuugucuucugcucaucac

SEQ ID NO: 1117648 - RNA, 22 nt, Human
gggaaggagccugcuugcuaga

SEQ ID NO: 1117649 - RNA, 22 nt, Human
agggccuggaacugugggcagg

SEQ ID NO: 1117650 - RNA, 22 nt, Human
auuuguaauuucuuaucugugu

SEQ ID NO: 1117651 - RNA, 22 nt, Human
ggagugaguacuggaguagcug

SEQ ID NO: 1117652 - RNA, 21 nt, Human
agauuguauggaggugagagg

SEQ ID NO: 1117653 - RNA, 22 nt, Human
gcaggagcugcucuccugacga

SEQ ID NO: 1117654 - RNA, 22 nt, Human
auaccuuuuagacauguaguug

SEQ ID NO: 1117655 - RNA, 22 nt, Human
ggagcugcuccuucagccaagu

SEQ ID NO: 1117656 - RNA, 20 nt, Human
uccugcaguuccuaggaggg

SEQ ID NO: 1117657 - RNA, 22 nt, Human
ugcuuuauuuauaaaauagcaa

SEQ ID NO: 1117658 - RNA, 22 nt, Human
uguaccuuuuucugugcaugcu

SEQ ID NO: 1117659 - RNA, 22 nt, Human
gaguggggcguggauccagcgu

SEQ ID NO: 1117660 - RNA, 22 nt, Human
ugcucucucaggccuggcccac

SEQ ID NO: 1117661 - RNA, 22 nt, Human
agucaguguagaaagcccaggc

SEQ ID NO: 1117662 - RNA, 22 nt, Human
aggccuggcaugagaccugaga

SEQ ID NO: 1117663 - RNA, 22 nt, Human
ggagaccagaaggaagcuucga

SEQ ID NO: 1117664 - RNA, 22 nt, Human
aggaccagccuccaggucucuu

SEQ ID NO: 1117665 - RNA, 22 nt, Human
cuggagccacugggucuuguau

SEQ ID NO: 1117666 - RNA, 21 nt, Human
ugccagcauuaaacagucauu

SEQ ID NO: 1117667 - RNA, 18 nt, Human
cugccuguugcugagagg

SEQ ID NO: 1117668 - RNA, 22 nt, Human
aaaugcuugcucuugauuauuu

SEQ ID NO: 1117669 - RNA, 22 nt, Human
cagggcaguuuuacuucucucu

SEQ ID NO: 1117670 - RNA, 22 nt, Human
ggcugcugugaccucaggugau

SEQ ID NO: 1117671 - RNA, 22 nt, Human
caagcuccuuacauccacaggg

SEQ ID NO: 1117672 - RNA, 22 nt, Human
uaagaacaagcuggggguucca

SEQ ID NO: 1117673 - RNA, 21 nt, Human
acagcagacaggcuuaggacc

SEQ ID NO: 1117674 - RNA, 22 nt, Human
gcuggagcugaguucccugggc

SEQ ID NO: 1117675 - RNA, 21 nt, Human
gucagcagauccagcacuugu

SEQ ID NO: 1117676 - RNA, 22 nt, Human
agcaggugcauggcgagcgcgg

SEQ ID NO: 1117677 - RNA, 19 nt, Human
aggccugggguuuugcacu

SEQ ID NO: 1117678 - RNA, 22 nt, Human
cuuggcugucuauaggaaagag

SEQ ID NO: 1117679 - RNA, 22 nt, Human
aagggaggaggauuuauuguac

SEQ ID NO: 1117680 - RNA, 22 nt, Human
ucacaggaaccaucagagaaau

SEQ ID NO: 1117681 - RNA, 22 nt, Human
aggugcagcaugaguccaacgg

SEQ ID NO: 1117682 - RNA, 22 nt, Human
uaugugaauacagcaguggaug

SEQ ID NO: 1117683 - RNA, 22 nt, Human
caaugauucugcaacugugugc

SEQ ID NO: 1117684 - RNA, 22 nt, Human
ccagcuuguuugaagcucguca

SEQ ID NO: 1117685 - RNA, 22 nt, Human
agaaaucuaagaugcucaagga

SEQ ID NO: 1117686 - RNA, 22 nt, Human
uccugcagagacagaggccuca

SEQ ID NO: 1117687 - RNA, 22 nt, Human
gcugaguguaaugauggcagag

SEQ ID NO: 1117688 - RNA, 22 nt, Human
aggcuucuaggguuggcagcgg

SEQ ID NO: 1117689 - RNA, 22 nt, Human
gggagcugagcuggaagagaau

SEQ ID NO: 1117690 - RNA, 21 nt, Human
uucaaaguuugccuaaagauu

SEQ ID NO: 1117691 - RNA, 22 nt, Human
agccccugggaguagcugcugc

SEQ ID NO: 1117692 - RNA, 22 nt, Human
aaauauguauggaguucaugaa

SEQ ID NO: 1117693 - RNA, 22 nt, Human
gcuggguggaucggaggcucug

SEQ ID NO: 1117694 - RNA, 22 nt, Human
caguaugucuacuggacaaagu

SEQ ID NO: 1117695 - RNA, 22 nt, Human
cucucugggggccaugccaaga

SEQ ID NO: 1117696 - RNA, 22 nt, Human
uacuuuggauccuuacaauagc

SEQ ID NO: 1117697 - RNA, 22 nt, Human
gccuuccuuuuaccaccagcca

SEQ ID NO: 1117698 - RNA, 22 nt, Human
cuucaagauccauagauauugc

SEQ ID NO: 1117699 - RNA, 19 nt, Human
gggcuuggggcugaagccu

SEQ ID NO: 1117700 - RNA, 22 nt, Human
uaucuguuccaggcacucagcu

SEQ ID NO: 1117701 - RNA, 22 nt, Human
caggaacacaaguucagggaug

SEQ ID NO: 1117702 - RNA, 22 nt, Human
gggcugcugccaaucacagccu

SEQ ID NO: 1117703 - RNA, 22 nt, Human
gagcagcuccagccgcaugacu

SEQ ID NO: 1117704 - RNA, 22 nt, Human
cagaagaauggugucugagcuc

SEQ ID NO: 1117705 - RNA, 22 nt, Human
cuugccuguggcuaguuggcuc

SEQ ID NO: 1117706 - RNA, 22 nt, Human
ccucuggcaacuucacagccca

SEQ ID NO: 1117707 - RNA, 22 nt, Human
gggcugcuguagagaacauguu

SEQ ID NO: 1117708 - RNA, 22 nt, Human
cagaaauguuuauauguggugu

SEQ ID NO: 1117709 - RNA, 22 nt, Human
gagugugucggucagcguggcg

SEQ ID NO: 1117710 - RNA, 18 nt, Human
caugggugacagguggau

SEQ ID NO: 1117711 - RNA, 20 nt, Human
gcugccuuguccugcuuggu

SEQ ID NO: 1117712 - RNA, 22 nt, Human
gaggccuggucuaugagauguu

SEQ ID NO: 1117713 - RNA, 22 nt, Human
uguaguaagugcgcaauaaaua

SEQ ID NO: 1117714 - RNA, 22 nt, Human
uggcugaacuaaugugcuguuu

SEQ ID NO: 1117715 - RNA, 19 nt, Human
aauguaguguuaugucaac

SEQ ID NO: 1117716 - RNA, 22 nt, Human
ucccuguccugggcaaucccag

SEQ ID NO: 1117717 - RNA, 21 nt, Human
ugcagcagaguaagcagggga

SEQ ID NO: 1117718 - RNA, 22 nt, Human
uuguaacacuuuucuauuaaua

SEQ ID NO: 1117719 - RNA, 22 nt, Human
cuggggcuucaaugcuucggug

SEQ ID NO: 1117720 - RNA, 22 nt, Human
gaaaugcagaaccugagaccau

SEQ ID NO: 1117721 - RNA, 22 nt, Human
ccagcccugaacccugcugcau

SEQ ID NO: 1117722 - RNA, 22 nt, Human
cuuuauguucaguacaaugcuu

SEQ ID NO: 1117723 - RNA, 22 nt, Human
cuccucccucuuugccacacau

SEQ ID NO: 1117724 - RNA, 22 nt, Human
agggcagcagcggcccaggccu

SEQ ID NO: 1117725 - RNA, 22 nt, Human
uccagcagguccgagacaaguu

SEQ ID NO: 1117726 - RNA, 20 nt, Human
cccugagacaaaggaggggc

SEQ ID NO: 1117727 - RNA, 22 nt, Human
uguucuuucaguuagacacagu

SEQ ID NO: 1117728 - RNA, 22 nt, Human
aggcuucccaagcagcugcaaa

SEQ ID NO: 1117729 - RNA, 22 nt, Human
cugggacacccaaggaaagagc

SEQ ID NO: 1117730 - RNA, 22 nt, Human
gggcuggcucugucuagaaagg

SEQ ID NO: 1117731 - RNA, 22 nt, Human
acacagggaggaggugcugugc

SEQ ID NO: 1117732 - RNA, 22 nt, Human
gccagcagguggagagaucaag

SEQ ID NO: 1117733 - RNA, 22 nt, Human
aggggcuguggaaaccaacucu

SEQ ID NO: 1117734 - RNA, 22 nt, Human
auaaggcaagcugucaguuugu

SEQ ID NO: 1117735 - RNA, 22 nt, Human
agcagcuuacauguggccuauc

SEQ ID NO: 1117736 - RNA, 22 nt, Human
guccucugaaguugugcaaugc

SEQ ID NO: 1117737 - RNA, 22 nt, Human
ugauacagucagcucacaauug

SEQ ID NO: 1117738 - RNA, 22 nt, Human
ugccugcuaggcccugcugggu

SEQ ID NO: 1117739 - RNA, 20 nt, Human
agucccagaucaaauuucug

SEQ ID NO: 1117740 - RNA, 22 nt, Human
gggggcuggacuuucccacaca

SEQ ID NO: 1117741 - RNA, 22 nt, Human
augagcugggccauccagugau

SEQ ID NO: 1117742 - RNA, 22 nt, Human
cagcaggcguugggagaaagac

SEQ ID NO: 1117743 - RNA, 22 nt, Human
ggggauggaauguaguagugau

SEQ ID NO: 1117744 - RNA, 22 nt, Human
uguauguguauguacauaugca

SEQ ID NO: 1117745 - RNA, 21 nt, Human
ucagaacaauuccaugccucc

SEQ ID NO: 1117746 - RNA, 22 nt, Human
aagauuuccuggauguaauucc

SEQ ID NO: 1117747 - RNA, 22 nt, Human
gggcuggaggagauccagaggc

SEQ ID NO: 1117748 - RNA, 22 nt, Human
gcucugcugaagccccuugcau

SEQ ID NO: 1117749 - RNA, 22 nt, Human
ggugcagcugcagccugggagc

SEQ ID NO: 1117750 - RNA, 22 nt, Human
ugccuggguguaaagggccaac

SEQ ID NO: 1117751 - RNA, 22 nt, Human
ugcauuguugaccaguugugca

SEQ ID NO: 1117752 - RNA, 22 nt, Human
acagguggcuuauuggcugauu

SEQ ID NO: 1117753 - RNA, 22 nt, Human
caguacuuaacuuauaggagag

SEQ ID NO: 1117754 - RNA, 22 nt, Human
gugcauuuggugacucucaccc

SEQ ID NO: 1117755 - RNA, 22 nt, Human
ccucugccugcacaucauccug

SEQ ID NO: 1117756 - RNA, 22 nt, Human
ugaaaucuacccuauucagggu

SEQ ID NO: 1117757 - RNA, 22 nt, Human
aggcugggaaauguagucuucc

SEQ ID NO: 1117758 - RNA, 22 nt, Human
auagacuugguuaguaaauuug

SEQ ID NO: 1117759 - RNA, 22 nt, Human
gcaggcagguggcaucuuguga

SEQ ID NO: 1117760 - RNA, 22 nt, Human
gcucccucugcucaggcacuug

SEQ ID NO: 1117761 - RNA, 22 nt, Human
guggccaggacauugccaggca

SEQ ID NO: 1117762 - RNA, 23 nt, Human
gggugggccaaauuagguagccu

SEQ ID NO: 1117763 - RNA, 22 nt, Human
auggauaauggugauaguugca

SEQ ID NO: 1117764 - RNA, 22 nt, Human
cacauuucuaggaaauuaaaug

SEQ ID NO: 1117765 - RNA, 22 nt, Human
ucuggaguccagauccauuugg

SEQ ID NO: 1117766 - RNA, 22 nt, Human
aaugaacaucaaaugccuacca

SEQ ID NO: 1117767 - RNA, 22 nt, Human
ucucuucuagcuucuugugguu

SEQ ID NO: 1117768 - RNA, 22 nt, Human
agcacagaguugcagagagcgu

SEQ ID NO: 1117769 - RNA, 22 nt, Human
uaaugaauaaacuugagaguca

SEQ ID NO: 1117770 - RNA, 18 nt, Human
aggaagcaggaggaaggc

SEQ ID NO: 1117771 - RNA, 21 nt, Human
gccugcagaccccaccaggcu

SEQ ID NO: 1117772 - RNA, 22 nt, Human
ucuugggauugcccugcaguuc

SEQ ID NO: 1117773 - RNA, 22 nt, Human
uacauggguagguuaagucaua

SEQ ID NO: 1117774 - RNA, 20 nt, Human
cguaaggcaagugcugcauc

SEQ ID NO: 1117775 - RNA, 22 nt, Human
cugggccugggaggccaggucu

SEQ ID NO: 1117776 - RNA, 22 nt, Human
uggcucagcugacucggcuucu

SEQ ID NO: 1117777 - RNA, 22 nt, Human
cccuggagugugacgaggcauu

SEQ ID NO: 1117778 - RNA, 22 nt, Human
ggucuuccgagaggccugugcu

SEQ ID NO: 1117779 - RNA, 22 nt, Human
cagcugaguguuggcauguuca

SEQ ID NO: 1117780 - RNA, 22 nt, Human
gcugcagccaaauucauuguca

SEQ ID NO: 1117781 - RNA, 22 nt, Human
gaggaaaagagacagguuauug

SEQ ID NO: 1117782 - RNA, 22 nt, Human
cagccagggagggcaaaugaga

SEQ ID NO: 1117783 - RNA, 22 nt, Human
uuuuccucugcagagcaguuag

SEQ ID NO: 1117784 - RNA, 22 nt, Human
gcugcucuuuucagagaugaga

SEQ ID NO: 1117785 - RNA, 22 nt, Human
gccagagcagaauagaguggcc

SEQ ID NO: 1117786 - RNA, 22 nt, Human
cugggaugucuauagaacacuu

SEQ ID NO: 1117787 - RNA, 22 nt, Human
aagggcagcugacagaugcuua

SEQ ID NO: 1117788 - RNA, 22 nt, Human
caugaagcuugaagcaguccac

SEQ ID NO: 1117789 - RNA, 22 nt, Human
augauggugagguugagcacag

SEQ ID NO: 1117790 - RNA, 22 nt, Human
agcuuuauauuuaaugaauucu

SEQ ID NO: 1117791 - RNA, 22 nt, Human
agauacauuguucuaagcauug

SEQ ID NO: 1117792 - RNA, 22 nt, Human
aaacagaaggguagguaaacau

SEQ ID NO: 1117793 - RNA, 22 nt, Human
caggaacaauguaagucucauu

SEQ ID NO: 1117794 - RNA, 22 nt, Human
aaagguuugcauggaauuuacc

SEQ ID NO: 1117795 - RNA, 22 nt, Human
ucccagagacaucauuucuccg

SEQ ID NO: 1117796 - RNA, 22 nt, Human
cacugaagccacuggaagagga

SEQ ID NO: 1117797 - RNA, 21 nt, Human
uggcucuguucaauauaugga

SEQ ID NO: 1117798 - RNA, 22 nt, Human
ccagcucuuuuggcugagugag

SEQ ID NO: 1117799 - RNA, 22 nt, Human
agccucugucaagcuuuucaaa

SEQ ID NO: 1117800 - RNA, 22 nt, Human
agggagaacaguugcagcagac

SEQ ID NO: 1117801 - RNA, 22 nt, Human
uggcucagccauucguguugcc

SEQ ID NO: 1117802 - RNA, 22 nt, Human
aggggcucaguuacuuuggcag

SEQ ID NO: 1117803 - RNA, 22 nt, Human
acaggcugcugggcuccgugcu

SEQ ID NO: 1117804 - RNA, 22 nt, Human
uggccagguugggcuuugcagc

SEQ ID NO: 1117805 - RNA, 23 nt, Human
agcuggguggccugcgugaagcu

SEQ ID NO: 1117806 - RNA, 22 nt, Human
acagagguaggacaugagauau

SEQ ID NO: 1117807 - RNA, 22 nt, Human
aggacccagaggcagaggacgu

SEQ ID NO: 1117808 - RNA, 22 nt, Human
uuugcauuaguuuagauuucaa

SEQ ID NO: 1117809 - RNA, 22 nt, Human
gccaggcagcagcgaggauggu

SEQ ID NO: 1117810 - RNA, 22 nt, Human
cugucugucaaguucaucucca

SEQ ID NO: 1117811 - RNA, 22 nt, Human
cccuggaggcaaagguugcagu

SEQ ID NO: 1117812 - RNA, 22 nt, Human
auggauaagucaaagaguaucc

SEQ ID NO: 1117813 - RNA, 18 nt, Human
gaagggagcuggaaugca

SEQ ID NO: 1117814 - RNA, 22 nt, Human
guccuggguccccgcaggucag

SEQ ID NO: 1117815 - RNA, 22 nt, Human
gggcaguggcucacgccuguaa

SEQ ID NO: 1117816 - RNA, 22 nt, Human
uucuuccucagcagggcugccu

SEQ ID NO: 1117817 - RNA, 22 nt, Human
acugucugcaaaacucauacuc

SEQ ID NO: 1117818 - RNA, 22 nt, Human
ggaggacaggggcugcagcaca

SEQ ID NO: 1117819 - RNA, 18 nt, Human
gagcccugagucugcaca

SEQ ID NO: 1117820 - RNA, 22 nt, Human
gucccuaguggaaagacaugau

SEQ ID NO: 1117821 - RNA, 22 nt, Human
ugcagaguaaaagcagaugcua

SEQ ID NO: 1117822 - RNA, 22 nt, Human
ccagggcugcugugggacucca

SEQ ID NO: 1117823 - RNA, 18 nt, Human
cuuucagauggauaugcu

SEQ ID NO: 1117824 - RNA, 22 nt, Human
uaaaugugaccuucauuuuaua

SEQ ID NO: 1117825 - RNA, 22 nt, Human
guuugcauguguacuuaauugg

SEQ ID NO: 1117826 - RNA, 21 nt, Human
auacuuugaauuacagccuug

SEQ ID NO: 1117827 - RNA, 23 nt, Human
acuuuagauaaauuaugugcaca

SEQ ID NO: 1117828 - RNA, 22 nt, Human
aggccuccugcagggaugagug

SEQ ID NO: 1117829 - RNA, 22 nt, Human
ucugccuucgcugcucccugaa

SEQ ID NO: 1117830 - RNA, 22 nt, Human
ccagcugguuaaaauagagaaa

SEQ ID NO: 1117831 - RNA, 22 nt, Human
ucugagaguccaucuccaagcc

SEQ ID NO: 1117832 - RNA, 22 nt, Human
aggaaaaucgagucuggaggca

SEQ ID NO: 1117833 - RNA, 22 nt, Human
cuggccucauagccaagcugug

SEQ ID NO: 1117834 - RNA, 22 nt, Human
acuuugcacuaaguuacucauu

SEQ ID NO: 1117835 - RNA, 22 nt, Human
uggggacaggagacuuacagcu

SEQ ID NO: 1117836 - RNA, 19 nt, Human
ggcuggcaagugacagugu

SEQ ID NO: 1117837 - RNA, 22 nt, Human
aggagggugauccgggcugguc

SEQ ID NO: 1117838 - RNA, 22 nt, Human
cuggcaggucucgcugacgugu

SEQ ID NO: 1117839 - RNA, 22 nt, Human
aggcucaguuugguuuccauug

SEQ ID NO: 1117840 - RNA, 21 nt, Human
ucagcagcuuuugcagucccu

SEQ ID NO: 1117841 - RNA, 22 nt, Human
acacaggagauauguaauggcu

SEQ ID NO: 1117842 - RNA, 22 nt, Human
gaagagcuuaguuguccuagaa

SEQ ID NO: 1117843 - RNA, 21 nt, Human
ccuucucuugcuucagcuuca

SEQ ID NO: 1117844 - RNA, 22 nt, Human
aagguacagaaauuaacaagga

SEQ ID NO: 1117845 - RNA, 20 nt, Human
uguacacaguacuuuacaau

SEQ ID NO: 1117846 - RNA, 22 nt, Human
ugcauuaucuuuaauguucuca

SEQ ID NO: 1117847 - RNA, 22 nt, Human
uggccuuggcagugagaagagu

SEQ ID NO: 1117848 - RNA, 22 nt, Human
ucccuggcugggggcugccuug

SEQ ID NO: 1117849 - RNA, 22 nt, Human
ugcagaagugagucaugaggaa

SEQ ID NO: 1117850 - RNA, 22 nt, Human
uccuucaguuaaagaucucaca

SEQ ID NO: 1117851 - RNA, 22 nt, Human
ucagcagggagaggagaaugca

SEQ ID NO: 1117852 - RNA, 23 nt, Human
auuuccuacuauaaaagagguaa

SEQ ID NO: 1117853 - RNA, 22 nt, Human
uagaaauguuagauguauugag

SEQ ID NO: 1117854 - RNA, 22 nt, Human
aggcuucccagcugagcucagc

SEQ ID NO: 1117855 - RNA, 22 nt, Human
ugagccugguugcagugucugg

SEQ ID NO: 1117856 - RNA, 18 nt, Human
uguacaguuaugagcauu

SEQ ID NO: 1117857 - RNA, 22 nt, Human
augggcuguccuaguccagccc

SEQ ID NO: 1117858 - RNA, 22 nt, Human
acaaagucaaauugcagccgcc

SEQ ID NO: 1117859 - RNA, 22 nt, Human
ccaaggcuggagugcaguggcg

SEQ ID NO: 1117860 - RNA, 22 nt, Human
ucaggcuggaaugcaguggggc

SEQ ID NO: 1117861 - RNA, 22 nt, Human
ggcagcaguaggagcuaaucuu

SEQ ID NO: 1117862 - RNA, 22 nt, Human
auggaaagcuaagccauuuacc

SEQ ID NO: 1117863 - RNA, 22 nt, Human
uccaguggugguuugaagggca

SEQ ID NO: 1117864 - RNA, 22 nt, Human
uuugaacaagagcuucacauua

SEQ ID NO: 1117865 - RNA, 22 nt, Human
cuggccucaccucagacuuacu

SEQ ID NO: 1117866 - RNA, 22 nt, Human
agcagggcucuguggagggugg

SEQ ID NO: 1117867 - RNA, 22 nt, Human
uaaauguguguagccaucugug

SEQ ID NO: 1117868 - RNA, 22 nt, Human
auaaggaaugauguaucaguuu

SEQ ID NO: 1117869 - RNA, 22 nt, Human
acauuucuaucauccuguaaug

SEQ ID NO: 1117870 - RNA, 16 nt, Human
gggcugggggauucug

SEQ ID NO: 1117871 - RNA, 22 nt, Human
uauuuguauuucaugcaguaaa

SEQ ID NO: 1117872 - RNA, 16 nt, Human
agaggccuugaggaag

SEQ ID NO: 1117873 - RNA, 22 nt, Human
gcucuguccagcgugcacagaa

SEQ ID NO: 1117874 - RNA, 18 nt, Human
acccucuggcuucugagc

SEQ ID NO: 1117875 - RNA, 22 nt, Human
gagaagcaauuuccaacugugc

SEQ ID NO: 1117876 - RNA, 22 nt, Human
cugcaggcccccuuccuggagu

SEQ ID NO: 1117877 - RNA, 22 nt, Human
ucagaagcauguggggagccug

SEQ ID NO: 1117878 - RNA, 21 nt, Human
agagccugagaucuuccagca

SEQ ID NO: 1117879 - RNA, 22 nt, Human
ugguaucagagccaucuguauu

SEQ ID NO: 1117880 - RNA, 19 nt, Human
gcauaaaaugucaaugugu

SEQ ID NO: 1117881 - RNA, 22 nt, Human
accaaggagccacauacaaccu

SEQ ID NO: 1117882 - RNA, 22 nt, Human
ugcagccaggaaauauuugcug

SEQ ID NO: 1117883 - RNA, 22 nt, Human
gcuggggucugugaggagggcu

SEQ ID NO: 1117884 - RNA, 22 nt, Human
ggaagagccuggggugucaggc

SEQ ID NO: 1117885 - RNA, 22 nt, Human
ugaagcaggaaccagcagcauu

SEQ ID NO: 1117886 - RNA, 20 nt, Human
gcuuuuucuaauagcagucc

SEQ ID NO: 1117887 - RNA, 22 nt, Human
ugaaagguguccaauauuucuc

SEQ ID NO: 1117888 - RNA, 22 nt, Human
ucucagagcuucagaaagcacc

SEQ ID NO: 1117889 - RNA, 22 nt, Human
uucauuccugagcccauauuua

SEQ ID NO: 1117890 - RNA, 22 nt, Human
ucucagagcuucaguuauuuuc

SEQ ID NO: 1117891 - RNA, 22 nt, Human
cucccuggcuuuguccugaggc

SEQ ID NO: 1117892 - RNA, 22 nt, Human
agccaggaauuggacaacacau

SEQ ID NO: 1117893 - RNA, 22 nt, Human
augacacaauuuuagagcugaa

SEQ ID NO: 1117894 - RNA, 22 nt, Human
ucagaagcaggagugugcacaa

SEQ ID NO: 1117895 - RNA, 22 nt, Human
uauguuaaauguuugauguuua

SEQ ID NO: 1117896 - RNA, 22 nt, Human
gugcuuaauacaugucaauaac

SEQ ID NO: 1117897 - RNA, 22 nt, Human
acccugagucagacagccugac

SEQ ID NO: 1117898 - RNA, 22 nt, Human
ccugccugcuuucugcuuugca

SEQ ID NO: 1117899 - RNA, 22 nt, Human
ggagcugcauuuagggagccuu

SEQ ID NO: 1117900 - RNA, 22 nt, Human
uccccagccgugaaggagagga

SEQ ID NO: 1117901 - RNA, 22 nt, Human
uggcacugggacagaugcucuc

SEQ ID NO: 1117902 - RNA, 22 nt, Human
cuggagccagccagggcccucu

SEQ ID NO: 1117903 - RNA, 22 nt, Human
agccuucacugggaccuuggau

SEQ ID NO: 1117904 - RNA, 22 nt, Human
gccaggcuccccggaucccugg

SEQ ID NO: 1117905 - RNA, 22 nt, Human
ucucaggaucuaauacauggua

SEQ ID NO: 1117906 - RNA, 22 nt, Human
ccagucacagguguguuuauau

SEQ ID NO: 1117907 - RNA, 22 nt, Human
gcugccuuuugcuccucccacc

SEQ ID NO: 1117908 - RNA, 22 nt, Human
ucugaggcuucagacuguacug

SEQ ID NO: 1117909 - RNA, 22 nt, Human
gugcagcagggggaagacagug

SEQ ID NO: 1117910 - RNA, 19 nt, Human
cccagagcauccugaacuu

SEQ ID NO: 1117911 - RNA, 22 nt, Human
cuucuuaaugacagauuaaaau

SEQ ID NO: 1117912 - RNA, 22 nt, Human
ugaagcaacuggacaaguuggc

SEQ ID NO: 1117913 - RNA, 22 nt, Human
caugcacagugauaucugaaga

SEQ ID NO: 1117914 - RNA, 22 nt, Human
cagccccucacagagcuguccu

SEQ ID NO: 1117915 - RNA, 22 nt, Human
gggcucugguacuuccuggcuc

SEQ ID NO: 1117916 - RNA, 22 nt, Human
auugcaccuuggguuuugaaag

SEQ ID NO: 1117917 - RNA, 22 nt, Human
ccucagagguuuucauucugua

SEQ ID NO: 1117918 - RNA, 22 nt, Human
accaugggucagccaccucagc

SEQ ID NO: 1117919 - RNA, 22 nt, Human
ugugccaugaggcucugauaug

SEQ ID NO: 1117920 - RNA, 22 nt, Human
ugcugucugauucagggugauu

SEQ ID NO: 1117921 - RNA, 22 nt, Human
accaaggaguuugguauuuuag

SEQ ID NO: 1117922 - RNA, 22 nt, Human
cacugcuuuaaggcugaguaac

SEQ ID NO: 1117923 - RNA, 22 nt, Human
gaggagagagggacugucugca

SEQ ID NO: 1117924 - RNA, 21 nt, Human
aggggacagaguagcuccagg

SEQ ID NO: 1117925 - RNA, 22 nt, Human
uagaacagaggguugcccagau

SEQ ID NO: 1117926 - RNA, 22 nt, Human
ccugggcucuauccugacccag

SEQ ID NO: 1117927 - RNA, 20 nt, Human
augccucuaauuuugcaaac

SEQ ID NO: 1117928 - RNA, 22 nt, Human
aagcugccugccacgcuagaua

SEQ ID NO: 1117929 - RNA, 18 nt, Human
acauuucuaugcuucugg

SEQ ID NO: 1117930 - RNA, 18 nt, Human
agggucagugucacuggc

SEQ ID NO: 1117931 - RNA, 22 nt, Human
aggccuggcuuugguuugcuga

SEQ ID NO: 1117932 - RNA, 22 nt, Human
cucugggcuuguugaccugcac

SEQ ID NO: 1117933 - RNA, 22 nt, Human
guccucugggcuuugagcaguc

SEQ ID NO: 1117934 - RNA, 22 nt, Human
gagguauguaugcuacauucuu

SEQ ID NO: 1117935 - RNA, 22 nt, Human
aguauguagugcaaucagucag

SEQ ID NO: 1117936 - RNA, 22 nt, Human
auguuacacauaggcauaaaug

SEQ ID NO: 1117937 - RNA, 22 nt, Human
gucuuguuugggauguggaugg

SEQ ID NO: 1117938 - RNA, 22 nt, Human
auuuagaaguuggagggcaaga

SEQ ID NO: 1117939 - RNA, 22 nt, Human
ucucagagggaaaggccaauuu

SEQ ID NO: 1117940 - RNA, 20 nt, Human
gcauugaguauagacagaug

SEQ ID NO: 1117941 - RNA, 22 nt, Human
auugaaagcacaaagaacaagu

SEQ ID NO: 1117942 - RNA, 22 nt, Human
ugcaggugugguuccucagcca

SEQ ID NO: 1117943 - RNA, 22 nt, Human
cugggcagcuaccaccacugcu

SEQ ID NO: 1117944 - RNA, 19 nt, Human
gagcugccuuuugaagacc

SEQ ID NO: 1117945 - RNA, 21 nt, Human
aggcagcucaggcccagagag

SEQ ID NO: 1117946 - RNA, 23 nt, Human
ucagugauguugaaccuagcagu

SEQ ID NO: 1117947 - RNA, 22 nt, Human
cugggcuguucugccccugggu

SEQ ID NO: 1117948 - RNA, 22 nt, Human
ccccuuccacagugcuuccuaa

SEQ ID NO: 1117949 - RNA, 22 nt, Human
aaggcugcuuuuaacaugcaua

SEQ ID NO: 1117950 - RNA, 22 nt, Human
uccucuggcccagcugccucug

SEQ ID NO: 1117951 - RNA, 22 nt, Human
aacagaauaguugauguacagu

SEQ ID NO: 1117952 - RNA, 22 nt, Human
cagcccugagagaaccaucuau

SEQ ID NO: 1117953 - RNA, 22 nt, Human
uguaagauauucagcuuauuga

SEQ ID NO: 1117954 - RNA, 22 nt, Human
ggcugccaggagaagcucagug

SEQ ID NO: 1117955 - RNA, 22 nt, Human
cugugccuggggggcagagcug

SEQ ID NO: 1117956 - RNA, 22 nt, Human
uuccagggcuaauuccugugga

SEQ ID NO: 1117957 - RNA, 22 nt, Human
caggggcagucugugugcgugg

SEQ ID NO: 1117958 - RNA, 23 nt, Human
uggcucagggucucuuaugaagu

SEQ ID NO: 1117959 - RNA, 22 nt, Human
gggccucugugcagaggggccu

SEQ ID NO: 1117960 - RNA, 22 nt, Human
aggauccugcgcuuugggggag

SEQ ID NO: 1117961 - RNA, 17 nt, Human
uagcugccccgaaugcu

SEQ ID NO: 1117962 - RNA, 22 nt, Human
gcagcugccgugagcucacgcc

SEQ ID NO: 1117963 - RNA, 21 nt, Human
guggcucugccaggacugaaa

SEQ ID NO: 1117964 - RNA, 22 nt, Human
aauaaacugcucaauugcauca

SEQ ID NO: 1117965 - RNA, 22 nt, Human
ugucuuccucuuggcuugagcu

SEQ ID NO: 1117966 - RNA, 22 nt, Human
ccagggcuccauugcucauccu

SEQ ID NO: 1117967 - RNA, 22 nt, Human
cucuggagcgcugcuucccgcg

SEQ ID NO: 1117968 - RNA, 22 nt, Human
uccuccagugucuggggccuug

SEQ ID NO: 1117969 - RNA, 22 nt, Human
agcaugcacaugacuggcuuaa

SEQ ID NO: 1117970 - RNA, 22 nt, Human
aagggagacaguugugugagga

SEQ ID NO: 1117971 - RNA, 22 nt, Human
cugguccuugacgcgugggagg

SEQ ID NO: 1117972 - RNA, 22 nt, Human
caggcagccaggggaccugucc

SEQ ID NO: 1117973 - RNA, 22 nt, Human
cagggagaagucuggucagucc

SEQ ID NO: 1117974 - RNA, 22 nt, Human
agggagcugcucugcuuccgug

SEQ ID NO: 1117975 - RNA, 22 nt, Human
ggaggggcagccauggaacucc

SEQ ID NO: 1117976 - RNA, 22 nt, Human
ugcagaaggccugacauugcac

SEQ ID NO: 1117977 - RNA, 22 nt, Human
gggagggacacaaagaguuccc

SEQ ID NO: 1117978 - RNA, 22 nt, Human
agagggcccauguugggcugcu

SEQ ID NO: 1117979 - RNA, 22 nt, Human
caguacuuauuucuauuuaggg

SEQ ID NO: 1117980 - RNA, 22 nt, Human
gcagcaggcacggucucgacau

SEQ ID NO: 1117981 - RNA, 22 nt, Human
gucucuggguuaagcagugcau

SEQ ID NO: 1117982 - RNA, 22 nt, Human
ggacagagcccugguggccuaa

SEQ ID NO: 1117983 - RNA, 22 nt, Human
aaggagcuuguucgccuuccuc

SEQ ID NO: 1117984 - RNA, 19 nt, Human
gcucugugaugcugagggg

SEQ ID NO: 1117985 - RNA, 22 nt, Human
ggcagcugauuagcaucaagga

SEQ ID NO: 1117986 - RNA, 22 nt, Human
ucagcuuggacagcuugguuga

SEQ ID NO: 1117987 - RNA, 22 nt, Human
ugggcagaguagcucagaagaa

SEQ ID NO: 1117988 - RNA, 22 nt, Human
ccucccuuggccauagccagcc

SEQ ID NO: 1117989 - RNA, 22 nt, Human
aggggaggagcuuuucuugccu

SEQ ID NO: 1117990 - RNA, 22 nt, Human
cacuuaagcaguuaauuuaucu

SEQ ID NO: 1117991 - RNA, 22 nt, Human
cuaggaggcgggggcugcagua

SEQ ID NO: 1117992 - RNA, 22 nt, Human
agucccagaugacccagcuacu

SEQ ID NO: 1117993 - RNA, 22 nt, Human
cccaucaggaacccaggagccc

SEQ ID NO: 1117994 - RNA, 22 nt, Human
cuuuauguccuugaagaguugu

SEQ ID NO: 1117995 - RNA, 20 nt, Human
uagaaaucuuauaaaagacu

SEQ ID NO: 1117996 - RNA, 22 nt, Human
gaugcacuugccccuccucaga

SEQ ID NO: 1117997 - RNA, 22 nt, Human
acaggcagggaccuuggcuaag

SEQ ID NO: 1117998 - RNA, 22 nt, Human
cugcugcucgaccagucccagg

SEQ ID NO: 1117999 - RNA, 22 nt, Human
uccucaugccgggucucacgcu

SEQ ID NO: 1118000 - RNA, 22 nt, Human
ccuggcuggcaagaucgugaag

SEQ ID NO: 1118001 - RNA, 22 nt, Human
ugugugcauucacaugcaugcc

SEQ ID NO: 1118002 - RNA, 20 nt, Human
acaaaugcauucugugacau

SEQ ID NO: 1118003 - RNA, 22 nt, Human
gccugggugaauuugauccuaa

SEQ ID NO: 1118004 - RNA, 22 nt, Human
uggagugaaguaaagaggacaa

SEQ ID NO: 1118005 - RNA, 23 nt, Human
aaccagauaaauggcuccagggc

SEQ ID NO: 1118006 - RNA, 22 nt, Human
uuaaacagacaguaaaugaaac

SEQ ID NO: 1118007 - RNA, 22 nt, Human
ugcugguggagaaaguggaggu

SEQ ID NO: 1118008 - RNA, 22 nt, Human
acauuucugucuuagggacugu

SEQ ID NO: 1118009 - RNA, 22 nt, Human
ugcccacaggaagacaccagcg

SEQ ID NO: 1118010 - RNA, 22 nt, Human
cagcugcccugccuugcccuua

SEQ ID NO: 1118011 - RNA, 22 nt, Human
uucaguuucagucuugcaaaaa

SEQ ID NO: 1118012 - RNA, 22 nt, Human
uccagccaagccuugguagcug

SEQ ID NO: 1118013 - RNA, 22 nt, Human
cauacauaugcauguguguaua

SEQ ID NO: 1118014 - RNA, 22 nt, Human
ccacagaggacaacugccuggc

SEQ ID NO: 1118015 - RNA, 22 nt, Human
uggcagaggagaauuaagauua

SEQ ID NO: 1118016 - RNA, 22 nt, Human
ucccagggacugggcuaggcuu

SEQ ID NO: 1118017 - RNA, 22 nt, Human
acaggugaccugcucauaugaa

SEQ ID NO: 1118018 - RNA, 22 nt, Human
gaaagaagcuuuagauggcuau

SEQ ID NO: 1118019 - RNA, 20 nt, Human
caccacagaauuggggacag

SEQ ID NO: 1118020 - RNA, 22 nt, Human
agcagcuggugagcaagcucag

SEQ ID NO: 1118021 - RNA, 22 nt, Human
agcagcucugagaggccagcac

SEQ ID NO: 1118022 - RNA, 22 nt, Human
cagcucugaagaaaggugucua

SEQ ID NO: 1118023 - RNA, 19 nt, Human
aucuuacagagcagaguac

SEQ ID NO: 1118024 - RNA, 22 nt, Human
agauuucagaugcucggcaguu

SEQ ID NO: 1118025 - RNA, 21 nt, Human
aacugcuggucuuuucugucu

SEQ ID NO: 1118026 - RNA, 22 nt, Human
ugguggcaauguccuggagaag

SEQ ID NO: 1118027 - RNA, 22 nt, Human
cuggccugaggucggcuguagg

SEQ ID NO: 1118028 - RNA, 21 nt, Human
cauugucgacauuuuccccuc

SEQ ID NO: 1118029 - RNA, 22 nt, Human
gcugagcucccagcaguaucug

SEQ ID NO: 1118030 - RNA, 22 nt, Human
ugccuucaaucaggauggucuc

SEQ ID NO: 1118031 - RNA, 22 nt, Human
ugagccuggagucguggagggg

SEQ ID NO: 1118032 - RNA, 22 nt, Human
ucccaggauguuggcggcaggu

SEQ ID NO: 1118033 - RNA, 22 nt, Human
cugccucucagccugaccgcca

SEQ ID NO: 1118034 - RNA, 22 nt, Human
uacaugcaugucacagaaugaa

SEQ ID NO: 1118035 - RNA, 19 nt, Human
ccagcagacacagcugccc

SEQ ID NO: 1118036 - RNA, 22 nt, Human
uuuauuauagugguggggacug

SEQ ID NO: 1118037 - RNA, 22 nt, Human
gccugugcuuaacugacgugag

SEQ ID NO: 1118038 - RNA, 22 nt, Human
uucauucccuuauauuagcauu

SEQ ID NO: 1118039 - RNA, 22 nt, Human
ccagcccugccagagagagcug

SEQ ID NO: 1118040 - RNA, 22 nt, Human
gccuggcacauugcaguggauu

SEQ ID NO: 1118041 - RNA, 22 nt, Human
auagucuuagaucagauaaagu

SEQ ID NO: 1118042 - RNA, 22 nt, Human
gccgaagcugccgucugguccu

SEQ ID NO: 1118043 - RNA, 22 nt, Human
agcugcagauucuaucuagaag

SEQ ID NO: 1118044 - RNA, 20 nt, Human
uaugaagauaugugaacagc

SEQ ID NO: 1118045 - RNA, 23 nt, Human
gacagagugagaccuugucuuac

SEQ ID NO: 1118046 - RNA, 22 nt, Human
gcagaagcccggucagcgcacg

SEQ ID NO: 1118047 - RNA, 22 nt, Human
cuggccuguccugacccagccu

SEQ ID NO: 1118048 - RNA, 22 nt, Human
uggaaagaaaaacaggccauga

SEQ ID NO: 1118049 - RNA, 22 nt, Human
cuggagccacuuuuuauccuuu

SEQ ID NO: 1118050 - RNA, 22 nt, Human
uggaagagggagcuggguggcc

SEQ ID NO: 1118051 - RNA, 22 nt, Human
aaaugcagguucuugagccaag

SEQ ID NO: 1118052 - RNA, 22 nt, Human
agcaggugacccaagcaggcug

SEQ ID NO: 1118053 - RNA, 22 nt, Human
ggaggccaaggaggagcuugcc

SEQ ID NO: 1118054 - RNA, 22 nt, Human
ggccaggagcaagccaggcucu

SEQ ID NO: 1118055 - RNA, 22 nt, Human
uguaugcagggcuuguaugcag

SEQ ID NO: 1118056 - RNA, 19 nt, Human
auaaggcaggaggaaauuu

SEQ ID NO: 1118057 - RNA, 22 nt, Human
ccagaggcauguucaaagcaau

SEQ ID NO: 1118058 - RNA, 22 nt, Human
uuugcauuuguucaaguauuga

SEQ ID NO: 1118059 - RNA, 22 nt, Human
ccagcccugccucucagggccc

SEQ ID NO: 1118060 - RNA, 22 nt, Human
uuucuaaaugguggcugcauug

SEQ ID NO: 1118061 - RNA, 22 nt, Human
ccagaagggcuauugcagugac

SEQ ID NO: 1118062 - RNA, 20 nt, Human
ggcagcaggaguuuccucuu

SEQ ID NO: 1118063 - RNA, 22 nt, Human
ugcuugggaauguggagucaga

SEQ ID NO: 1118064 - RNA, 22 nt, Human
gagguggccucaagcagucuuc

SEQ ID NO: 1118065 - RNA, 23 nt, Human
uggagcugggcucagacccuggg

SEQ ID NO: 1118066 - RNA, 22 nt, Human
agggcagccugagugcuggccc

SEQ ID NO: 1118067 - RNA, 22 nt, Human
cuuucacauaauugaccuugaa

SEQ ID NO: 1118068 - RNA, 22 nt, Human
uguaaucauuacaguacaugga

SEQ ID NO: 1118069 - RNA, 17 nt, Human
ucagagggaugagcagg

SEQ ID NO: 1118070 - RNA, 22 nt, Human
ccucucuguguggccucuccau

SEQ ID NO: 1118071 - RNA, 22 nt, Human
cauaucccauuggccaggacau

SEQ ID NO: 1118072 - RNA, 22 nt, Human
gcagauggacuguaugaccuga

SEQ ID NO: 1118073 - RNA, 22 nt, Human
aauguacaaaagucagccaacu

SEQ ID NO: 1118074 - RNA, 22 nt, Human
cugucaggggcggguggagcgg

SEQ ID NO: 1118075 - RNA, 22 nt, Human
ccacccagccagaugcaggaag

SEQ ID NO: 1118076 - RNA, 22 nt, Human
uaaacagaaagcagauguacuu

SEQ ID NO: 1118077 - RNA, 22 nt, Human
cuuccaaagcacuuuauggacc

SEQ ID NO: 1118078 - RNA, 22 nt, Human
uugcuuccucgaggccagcgug

SEQ ID NO: 1118079 - RNA, 22 nt, Human
aggaagccugcaggugacugcu

SEQ ID NO: 1118080 - RNA, 22 nt, Human
ucauguaaguauagaaagcagu

SEQ ID NO: 1118081 - RNA, 22 nt, Human
gcacagggcaacaggucuguua

SEQ ID NO: 1118082 - RNA, 22 nt, Human
agccagcaggugagugcagccu

SEQ ID NO: 1118083 - RNA, 22 nt, Human
gccaggcagauaugugagcuua

SEQ ID NO: 1118084 - RNA, 22 nt, Human
ggcugccugaggcagugagaga

SEQ ID NO: 1118085 - RNA, 22 nt, Human
gaauucuuuucuuucugaaagu

SEQ ID NO: 1118086 - RNA, 22 nt, Human
ggcuucuuccugugaacauguu

SEQ ID NO: 1118087 - RNA, 22 nt, Human
uggcucugaccagguagaggag

SEQ ID NO: 1118088 - RNA, 22 nt, Human
ggggcuguuuuuggaauggcug

SEQ ID NO: 1118089 - RNA, 22 nt, Human
uuuagaguugaguauucauugg

SEQ ID NO: 1118090 - RNA, 22 nt, Human
ugccuggcaagaggggcuggcu

SEQ ID NO: 1118091 - RNA, 22 nt, Human
cacacaggaugaagcagcagaa

SEQ ID NO: 1118092 - RNA, 22 nt, Human
ccagggcaucacauccaguguu

SEQ ID NO: 1118093 - RNA, 22 nt, Human
ggccuugguaaagggaugcaug

SEQ ID NO: 1118094 - RNA, 22 nt, Human
ugcagcccuuccuuccucuggg

SEQ ID NO: 1118095 - RNA, 22 nt, Human
ggagcagagcauuucacagccu

SEQ ID NO: 1118096 - RNA, 22 nt, Human
ccugggagggcaagugcugaug

SEQ ID NO: 1118097 - RNA, 22 nt, Human
aguguauugauuggaacagccu

SEQ ID NO: 1118098 - RNA, 22 nt, Human
gcuggccauucucuuugagaug

SEQ ID NO: 1118099 - RNA, 18 nt, Human
uggccuggagacaacucu

SEQ ID NO: 1118100 - RNA, 22 nt, Human
agagagcccgggccagggcaca

SEQ ID NO: 1118101 - RNA, 22 nt, Human
ucucagggagggcgagucagcg

SEQ ID NO: 1118102 - RNA, 22 nt, Human
ucccagaguucaaugggaaggu

SEQ ID NO: 1118103 - RNA, 22 nt, Human
aaguucaagaucaagguuccag

SEQ ID NO: 1118104 - RNA, 22 nt, Human
ggcuucucucccccagcuccac

SEQ ID NO: 1118105 - RNA, 22 nt, Human
uuccaaagaaauugaccaagac

SEQ ID NO: 1118106 - RNA, 19 nt, Human
cuugguuaugguaugaugc

SEQ ID NO: 1118107 - RNA, 22 nt, Human
ggcaggagauaaaauauuaguu

SEQ ID NO: 1118108 - RNA, 22 nt, Human
cacaggcuuccaguccccagcu

SEQ ID NO: 1118109 - RNA, 19 nt, Human
cuggugcuugagugaguca

SEQ ID NO: 1118110 - RNA, 22 nt, Human
uuuuuccuuagggguuacucac

SEQ ID NO: 1118111 - RNA, 22 nt, Human
aggucaaaccacagcucuaggc

SEQ ID NO: 1118112 - RNA, 22 nt, Human
uuauuauugugaccugagaaug

SEQ ID NO: 1118113 - RNA, 22 nt, Human
uuacaugguuguuggaaaugcu

SEQ ID NO: 1118114 - RNA, 22 nt, Human
uccuuuccaugcuucuagaggc

SEQ ID NO: 1118115 - RNA, 22 nt, Human
uugaauucauuucucauugagu

SEQ ID NO: 1118116 - RNA, 19 nt, Human
uggggccuccugucccugg

SEQ ID NO: 1118117 - RNA, 22 nt, Human
acccuggggguggccagugcca

SEQ ID NO: 1118118 - RNA, 22 nt, Human
ugugugcagccucugucuuugg

SEQ ID NO: 1118119 - RNA, 20 nt, Human
ccagcugagccaaggggaga

SEQ ID NO: 1118120 - RNA, 22 nt, Human
gcagugugaccgagcuugcuuc

SEQ ID NO: 1118121 - RNA, 22 nt, Human
acagaguagcucaagaagauug

SEQ ID NO: 1118122 - RNA, 18 nt, Human
uggugaaggguggaggag

SEQ ID NO: 1118123 - RNA, 21 nt, Human
cugcuuuacuucagaggaucu

SEQ ID NO: 1118124 - RNA, 22 nt, Human
ugcucugugguccaagauggcu

SEQ ID NO: 1118125 - RNA, 22 nt, Human
uaaggcacuucaauguuuagaa

SEQ ID NO: 1118126 - RNA, 21 nt, Human
aguguccuugaucuugccuug

SEQ ID NO: 1118127 - RNA, 22 nt, Human
cauuuucucaaugaacccucuu

SEQ ID NO: 1118128 - RNA, 22 nt, Human
ugugaugguucacugggcauga

SEQ ID NO: 1118129 - RNA, 22 nt, Human
auauucuuccaaaacaucauuu

SEQ ID NO: 1118130 - RNA, 22 nt, Human
auugaauagaugcauuauacua

SEQ ID NO: 1118131 - RNA, 18 nt, Human
uccucucuuuccccaggg

SEQ ID NO: 1118132 - RNA, 22 nt, Human
agcugccagaugacagugcuau

SEQ ID NO: 1118133 - RNA, 22 nt, Human
ugcagaggagucagccugggca

SEQ ID NO: 1118134 - RNA, 22 nt, Human
cugggccaucagaggggcugga

SEQ ID NO: 1118135 - RNA, 22 nt, Human
ggggccuguagagcuucaggga

SEQ ID NO: 1118136 - RNA, 22 nt, Human
gcucccagauuucagccuugug

SEQ ID NO: 1118137 - RNA, 22 nt, Human
uggcagagcccagacuccaguc

SEQ ID NO: 1118138 - RNA, 22 nt, Human
gaggcccaguccugcaagcacg

SEQ ID NO: 1118139 - RNA, 22 nt, Human
cagcugucuaaguugagcagga

SEQ ID NO: 1118140 - RNA, 22 nt, Human
cuggagcauccaugcccagggu

SEQ ID NO: 1118141 - RNA, 22 nt, Human
ucagaggaaaggucagauggcu

SEQ ID NO: 1118142 - RNA, 22 nt, Human
ugagagucucagaccuccuggu

SEQ ID NO: 1118143 - RNA, 22 nt, Human
ggcagccagagggcagcuggau

SEQ ID NO: 1118144 - RNA, 22 nt, Human
agagccuggcucccagcuaccg

SEQ ID NO: 1118145 - RNA, 22 nt, Human
ucaaugauaucagcaggaugug

SEQ ID NO: 1118146 - RNA, 22 nt, Human
ggggcagaaagcccacagagug

SEQ ID NO: 1118147 - RNA, 22 nt, Human
uucacagggccacuggcaggag

SEQ ID NO: 1118148 - RNA, 22 nt, Human
uccucugcuccaggcuggacuu

SEQ ID NO: 1118149 - RNA, 22 nt, Human
uagucuuuugagaaguauaucu

SEQ ID NO: 1118150 - RNA, 22 nt, Human
accaggggaugguuggcacugu

SEQ ID NO: 1118151 - RNA, 22 nt, Human
cagggugggcacccagccucca

SEQ ID NO: 1118152 - RNA, 22 nt, Human
gagcugcugguugcuggugccu

SEQ ID NO: 1118153 - RNA, 22 nt, Human
ucugggagcacacgcagugauc

SEQ ID NO: 1118154 - RNA, 17 nt, Human
gauuuccugaaguucuu

SEQ ID NO: 1118155 - RNA, 22 nt, Human
ggagauagacuuggugagccac

SEQ ID NO: 1118156 - RNA, 22 nt, Human
gccuuucaguuccaucaaagga

SEQ ID NO: 1118157 - RNA, 22 nt, Human
aggauccuguauggagaagcug

SEQ ID NO: 1118158 - RNA, 22 nt, Human
ucagggcaccaaaaaagaugcc

SEQ ID NO: 1118159 - RNA, 22 nt, Human
ugcucuguugugcaugugggau

SEQ ID NO: 1118160 - RNA, 22 nt, Human
agccuggagaggcgccauacac

SEQ ID NO: 1118161 - RNA, 22 nt, Human
uggaaggcaugggaacuguucu

SEQ ID NO: 1118162 - RNA, 22 nt, Human
aaaucugggagcagcucggcca

SEQ ID NO: 1118163 - RNA, 22 nt, Human
guauucuugguuaucaaaauac

SEQ ID NO: 1118164 - RNA, 22 nt, Human
gcagcugggacacugaggccag

SEQ ID NO: 1118165 - RNA, 22 nt, Human
ucauugaacgaagagcuccauu

SEQ ID NO: 1118166 - RNA, 22 nt, Human
ggagagcaggguccugagauac

SEQ ID NO: 1118167 - RNA, 22 nt, Human
aaaguucagauuagacucaaga

SEQ ID NO: 1118168 - RNA, 22 nt, Human
gaggcugcugagagcccuguuu

SEQ ID NO: 1118169 - RNA, 22 nt, Human
ucuggcccagccccugagguca

SEQ ID NO: 1118170 - RNA, 22 nt, Human
uugaggagcaggaugggaggcu

SEQ ID NO: 1118171 - RNA, 22 nt, Human
uaaauguguuguggaugaaguu

SEQ ID NO: 1118172 - RNA, 22 nt, Human
ggucauugucagagccuguacu

SEQ ID NO: 1118173 - RNA, 20 nt, Human
aauguauauuuuaugccagg

SEQ ID NO: 1118174 - RNA, 22 nt, Human
gccagagcugagugagguucuu

SEQ ID NO: 1118175 - RNA, 22 nt, Human
ucccuggcagcuaagggugguc

SEQ ID NO: 1118176 - RNA, 22 nt, Human
gcagcugauggaaguccuauug

SEQ ID NO: 1118177 - RNA, 22 nt, Human
aguaaugucccuuaaauguggu

SEQ ID NO: 1118178 - RNA, 19 nt, Human
uuuggcacucugaaguguu

SEQ ID NO: 1118179 - RNA, 22 nt, Human
uggggccugagguggagcugca

SEQ ID NO: 1118180 - RNA, 22 nt, Human
cacugaaggaaggacuacugca

SEQ ID NO: 1118181 - RNA, 22 nt, Human
uggcucagcuuacuuuugaggg

SEQ ID NO: 1118182 - RNA, 22 nt, Human
ugcugcacucaccaacagauaa

SEQ ID NO: 1118183 - RNA, 22 nt, Human
ggcagccuccagggcacuggug

SEQ ID NO: 1118184 - RNA, 22 nt, Human
gggacaggccccucgcuagcuu

SEQ ID NO: 1118185 - RNA, 18 nt, Human
uuccauaauguauguaac

SEQ ID NO: 1118186 - RNA, 22 nt, Human
agagcagauggagcuggaagag

SEQ ID NO: 1118187 - RNA, 22 nt, Human
gcagggccagguacaagaagca

SEQ ID NO: 1118188 - RNA, 22 nt, Human
uagggcagccacccaggcugcu

SEQ ID NO: 1118189 - RNA, 22 nt, Human
ugagccagauaagggcucacgc

SEQ ID NO: 1118190 - RNA, 22 nt, Human
uggcugccuagugucugagcag

SEQ ID NO: 1118191 - RNA, 22 nt, Human
agccacagucaaccuguccaua

SEQ ID NO: 1118192 - RNA, 22 nt, Human
gauggguggucucagacuugcc

SEQ ID NO: 1118193 - RNA, 22 nt, Human
gcugggagugggcaagaugaga

SEQ ID NO: 1118194 - RNA, 22 nt, Human
gggacugggagauccuccuggc

SEQ ID NO: 1118195 - RNA, 22 nt, Human
ucuuacauauagcaugaguaca

SEQ ID NO: 1118196 - RNA, 22 nt, Human
ucuggccuuaucuguccaagcc

SEQ ID NO: 1118197 - RNA, 20 nt, Human
gagagcuggggaugaggcug

SEQ ID NO: 1118198 - RNA, 22 nt, Human
aggugccagaugcacagcugaa

SEQ ID NO: 1118199 - RNA, 22 nt, Human
uucacagggcagcagcugagcc

SEQ ID NO: 1118200 - RNA, 22 nt, Human
gaagcagcugccagagaugucu

SEQ ID NO: 1118201 - RNA, 22 nt, Human
cagcagccuacaaugcacagaa

SEQ ID NO: 1118202 - RNA, 22 nt, Human
gauccuugcaacucugugaggu

SEQ ID NO: 1118203 - RNA, 22 nt, Human
ggccucucuggcauggcugccc

SEQ ID NO: 1118204 - RNA, 22 nt, Human
gggcagugguccaggcuacagc

SEQ ID NO: 1118205 - RNA, 22 nt, Human
gguggguauugaauacaggugu

SEQ ID NO: 1118206 - RNA, 22 nt, Human
gagcuggugaucagcuggagga

SEQ ID NO: 1118207 - RNA, 22 nt, Human
acagcuguauccccagagcuca

SEQ ID NO: 1118208 - RNA, 22 nt, Human
gcugucuguggugucagcugac

SEQ ID NO: 1118209 - RNA, 22 nt, Human
ggcucuggcaaggggaggcuac

SEQ ID NO: 1118210 - RNA, 20 nt, Human
cucuggcuccgcgugaccgc

SEQ ID NO: 1118211 - RNA, 22 nt, Human
uggagcugguaaacagugacau

SEQ ID NO: 1118212 - RNA, 22 nt, Human
ccucacucugcacccugcagca

SEQ ID NO: 1118213 - RNA, 22 nt, Human
ugccuguccugaggaugagggu

SEQ ID NO: 1118214 - RNA, 22 nt, Human
aagguacaguuuuaagaauaag

SEQ ID NO: 1118215 - RNA, 22 nt, Human
ucugucugcucauuuaccucag

SEQ ID NO: 1118216 - RNA, 22 nt, Human
ucagaagacuacuaggacacau

SEQ ID NO: 1118217 - RNA, 22 nt, Human
uccuugaaugaagagaggugac

SEQ ID NO: 1118218 - RNA, 22 nt, Human
cagccaucccagccugugguuc

SEQ ID NO: 1118219 - RNA, 22 nt, Human
gccuggcacucacugaagaggc

SEQ ID NO: 1118220 - RNA, 22 nt, Human
uccugccucuccaugcuaacua

SEQ ID NO: 1118221 - RNA, 22 nt, Human
aacaaauguguuuuguaauuaa

SEQ ID NO: 1118222 - RNA, 22 nt, Human
ucacugcaaucucugccuucca

SEQ ID NO: 1118223 - RNA, 23 nt, Human
aucaaaguggaaaucaauuaucu

SEQ ID NO: 1118224 - RNA, 22 nt, Human
gucauuucuguuucuucagugc

SEQ ID NO: 1118225 - RNA, 22 nt, Human
agugggaggcggcugacgggcg

SEQ ID NO: 1118226 - RNA, 22 nt, Human
ucuccucaccaccagcagcaga

SEQ ID NO: 1118227 - RNA, 22 nt, Human
uuccauuuauucuuguccagau

SEQ ID NO: 1118228 - RNA, 22 nt, Human
aagauucucagagugaaagaau

SEQ ID NO: 1118229 - RNA, 22 nt, Human
agggccagaggcaccuugcagc

SEQ ID NO: 1118230 - RNA, 19 nt, Human
gcccugcaggagguggggc

SEQ ID NO: 1118231 - RNA, 22 nt, Human
cuccagggcagcauggcagugg

SEQ ID NO: 1118232 - RNA, 22 nt, Human
uugcauaaagauuuuauugcau

SEQ ID NO: 1118233 - RNA, 22 nt, Human
aguguccccuccaagggccugg

SEQ ID NO: 1118234 - RNA, 17 nt, Human
ggcagcugccacuuuuu

SEQ ID NO: 1118235 - RNA, 22 nt, Human
aaaggcuaugagauagaagaua

SEQ ID NO: 1118236 - RNA, 21 nt, Human
ccagaggccucucuuggccac

SEQ ID NO: 1118237 - RNA, 22 nt, Human
caugggagguuggcuuggcaug

SEQ ID NO: 1118238 - RNA, 22 nt, Human
ggcacugaaccaggacacaagc

SEQ ID NO: 1118239 - RNA, 22 nt, Human
acagcaggauuuggcgauguug

SEQ ID NO: 1118240 - RNA, 22 nt, Human
agccuucagcaguucaggugcc

SEQ ID NO: 1118241 - RNA, 23 nt, Human
ccaaagucgaagucuaguccaga

SEQ ID NO: 1118242 - RNA, 22 nt, Human
agaacuuaggaacaacagcuua

SEQ ID NO: 1118243 - RNA, 22 nt, Human
cccaggagguggagguugcagu

SEQ ID NO: 1118244 - RNA, 22 nt, Human
ucagggcaggcgagcagcugcu

SEQ ID NO: 1118245 - RNA, 22 nt, Human
agaaguuaccacauacuucucu

SEQ ID NO: 1118246 - RNA, 22 nt, Human
ggcagauggaagaggcuggguc

SEQ ID NO: 1118247 - RNA, 22 nt, Human
gugccagcucuccccacaucug

SEQ ID NO: 1118248 - RNA, 22 nt, Human
gcagaggccaucaacuuugcca

SEQ ID NO: 1118249 - RNA, 17 nt, Human
ucuuuccugccaugcuc

SEQ ID NO: 1118250 - RNA, 22 nt, Human
cucaaggacuuauucaugccug

SEQ ID NO: 1118251 - RNA, 22 nt, Human
ucauugcacuccagccugggca

SEQ ID NO: 1118252 - RNA, 22 nt, Human
cacagaggacuguagcggggag

SEQ ID NO: 1118253 - RNA, 22 nt, Human
aaaucaguaaauguucauuaac

SEQ ID NO: 1118254 - RNA, 22 nt, Human
cagaagaaaguggggagacaag

SEQ ID NO: 1118255 - RNA, 22 nt, Human
gucccuggaucugggacagcug

SEQ ID NO: 1118256 - RNA, 22 nt, Human
ucuccuggucaccucagaaguc

SEQ ID NO: 1118257 - RNA, 22 nt, Human
gcguggugcugcccugcacaca

SEQ ID NO: 1118258 - RNA, 22 nt, Human
ggcucugccugcccagcagcac

SEQ ID NO: 1118259 - RNA, 22 nt, Human
ccucuggggugagugggccacu

SEQ ID NO: 1118260 - RNA, 22 nt, Human
agaggcaggagguugacuugag

SEQ ID NO: 1118261 - RNA, 22 nt, Human
aguuuauguagaauuggcaaua

SEQ ID NO: 1118262 - RNA, 22 nt, Human
ggaagggcaaaagagaugaacu

SEQ ID NO: 1118263 - RNA, 22 nt, Human
cagggcagagggaaacuccuuu

SEQ ID NO: 1118264 - RNA, 17 nt, Human
uccuucagugccucugc

SEQ ID NO: 1118265 - RNA, 22 nt, Human
uacuuuuagccuauuugauucu

SEQ ID NO: 1118266 - RNA, 22 nt, Human
acagagguguguguaggacagu

SEQ ID NO: 1118267 - RNA, 22 nt, Human
aucuggcucccuuggaauccgu

SEQ ID NO: 1118268 - RNA, 23 nt, Human
aacaauagguuuuggcagaauag

SEQ ID NO: 1118269 - RNA, 22 nt, Human
cugcccugagggccuguguguu

SEQ ID NO: 1118270 - RNA, 22 nt, Human
ucugccuggaugauggcagggc

SEQ ID NO: 1118271 - RNA, 22 nt, Human
agcagccagagucugaacauua

SEQ ID NO: 1118272 - RNA, 20 nt, Human
cagcugccuggcucugggau

SEQ ID NO: 1118273 - RNA, 22 nt, Human
agucuucccugugccagagugu

SEQ ID NO: 1118274 - RNA, 22 nt, Human
gggcagcagcaggaggucucug

SEQ ID NO: 1118275 - RNA, 22 nt, Human
auaugugugccauuucagcagu

SEQ ID NO: 1118276 - RNA, 22 nt, Human
cagccucucuguaucucaggau

SEQ ID NO: 1118277 - RNA, 22 nt, Human
accagagcuuacaugcuagaaa

SEQ ID NO: 1118278 - RNA, 18 nt, Human
uggagcaggaagccuggc

SEQ ID NO: 1118279 - RNA, 22 nt, Human
auagugguuggauaugucagag

SEQ ID NO: 1118280 - RNA, 22 nt, Human
ugcuggaggccugacuguguuu

SEQ ID NO: 1118281 - RNA, 22 nt, Human
ugccucuguugagccuuggcug

SEQ ID NO: 1118282 - RNA, 22 nt, Human
uggcucuggcgugaagcccaga

SEQ ID NO: 1118283 - RNA, 22 nt, Human
guaacacagaaaugaaauucca

SEQ ID NO: 1118284 - RNA, 22 nt, Human
ggagcugcucagagccaguccc

SEQ ID NO: 1118285 - RNA, 19 nt, Human
ugagaaggcaguggggagc

SEQ ID NO: 1118286 - RNA, 22 nt, Human
cagggcuguaaauuagugcuga

SEQ ID NO: 1118287 - RNA, 22 nt, Human
gagcugucucuauaugaaugcu

SEQ ID NO: 1118288 - RNA, 21 nt, Human
ccacaggggcuccccugucag

SEQ ID NO: 1118289 - RNA, 22 nt, Human
uggccucuuaggacauccucua

SEQ ID NO: 1118290 - RNA, 22 nt, Human
uuucaaauggagucgugaaaug

SEQ ID NO: 1118291 - RNA, 22 nt, Human
aucaguuucacuugcuugcaaa

SEQ ID NO: 1118292 - RNA, 22 nt, Human
ucauugcauuuauucacuggca

SEQ ID NO: 1118293 - RNA, 22 nt, Human
ggcccagcugugcuuccagccc

SEQ ID NO: 1118294 - RNA, 22 nt, Human
gccuaggagacaagcgugaaag

SEQ ID NO: 1118295 - RNA, 22 nt, Human
gcagccaccucccauggcgggg

SEQ ID NO: 1118296 - RNA, 22 nt, Human
cacugcaggucugagauggggg

SEQ ID NO: 1118297 - RNA, 22 nt, Human
caguagcagggauuauuuuagg

SEQ ID NO: 1118298 - RNA, 22 nt, Human
uggcagagcccagaacugagca

SEQ ID NO: 1118299 - RNA, 22 nt, Human
ggcucagguugggucacaugac

SEQ ID NO: 1118300 - RNA, 18 nt, Human
ccauuucaugauuauuac

SEQ ID NO: 1118301 - RNA, 22 nt, Human
cauggaaggcaaaagacacaga

SEQ ID NO: 1118302 - RNA, 22 nt, Human
uauuuccugcauggugauguaa

SEQ ID NO: 1118303 - RNA, 22 nt, Human
agcucccaauugacuugaacua

SEQ ID NO: 1118304 - RNA, 22 nt, Human
ugugucccuuggaaccucagcu

SEQ ID NO: 1118305 - RNA, 22 nt, Human
gcaaggcuuugugaauuuuaaa

SEQ ID NO: 1118306 - RNA, 22 nt, Human
agccccaguaagggagggccug

SEQ ID NO: 1118307 - RNA, 22 nt, Human
acagagcuguacaugugccaug

SEQ ID NO: 1118308 - RNA, 22 nt, Human
ugcauuauuugcaugugccugu

SEQ ID NO: 1118309 - RNA, 22 nt, Human
uucaagaucuggguuuucagcu

SEQ ID NO: 1118310 - RNA, 22 nt, Human
gaagagcuguagccugcucuuu

SEQ ID NO: 1118311 - RNA, 22 nt, Human
cagcacugcuucgcagccaggg

SEQ ID NO: 1118312 - RNA, 18 nt, Human
ucucuuuuccccucauug

SEQ ID NO: 1118313 - RNA, 22 nt, Human
guuuccauggcucuguuaaugg

SEQ ID NO: 1118314 - RNA, 22 nt, Human
ucaaguauaucuagucauuagg

SEQ ID NO: 1118315 - RNA, 22 nt, Human
cugggggcaauggucagagugu

SEQ ID NO: 1118316 - RNA, 22 nt, Human
aggcuauuuccacucuucucau

SEQ ID NO: 1118317 - RNA, 20 nt, Human
ucagagucaucaaagauggu

SEQ ID NO: 1118318 - RNA, 22 nt, Human
ugggauggcauccugggccuug

SEQ ID NO: 1118319 - RNA, 22 nt, Human
gccuggagaaaggaagguggga

SEQ ID NO: 1118320 - RNA, 22 nt, Human
gucuggggaagucagggcauca

SEQ ID NO: 1118321 - RNA, 22 nt, Human
ccuggagcucacugggagccgg

SEQ ID NO: 1118322 - RNA, 22 nt, Human
gcccauggacacccaagugcca

SEQ ID NO: 1118323 - RNA, 22 nt, Human
uguuuguucccucucuuuccug

SEQ ID NO: 1118324 - RNA, 22 nt, Human
cagcaggcagccauuucacugu

SEQ ID NO: 1118325 - RNA, 19 nt, Human
cucagcuguagcucaugug

SEQ ID NO: 1118326 - RNA, 22 nt, Human
ucacagugagccaugucagaga

SEQ ID NO: 1118327 - RNA, 22 nt, Human
agcagugaugcaugacagccua

SEQ ID NO: 1118328 - RNA, 22 nt, Human
ggcauggcuggguucuggugag

SEQ ID NO: 1118329 - RNA, 22 nt, Human
auaaguucagguaaagaaauca

SEQ ID NO: 1118330 - RNA, 22 nt, Human
ggggcagagcauagcuccaauu

SEQ ID NO: 1118331 - RNA, 20 nt, Human
aggagaaauucgggacaccu

SEQ ID NO: 1118332 - RNA, 22 nt, Human
uaacagaagagcaggcagcccu

SEQ ID NO: 1118333 - RNA, 22 nt, Human
uccaagaagucaucuaaacugu

SEQ ID NO: 1118334 - RNA, 22 nt, Human
cugaagaugucugagaugcuca

SEQ ID NO: 1118335 - RNA, 22 nt, Human
ugcagugccucggcagugcagc

SEQ ID NO: 1118336 - RNA, 22 nt, Human
caggcagccugagggaucuggg

SEQ ID NO: 1118337 - RNA, 22 nt, Human
acaaagguggaccauguggcuu

SEQ ID NO: 1118338 - RNA, 22 nt, Human
uccagggcuuggcugggacggu

SEQ ID NO: 1118339 - RNA, 22 nt, Human
ccacccuggacaggccucugag

SEQ ID NO: 1118340 - RNA, 18 nt, Human
uucacaggaaaugucuuu

SEQ ID NO: 1118341 - RNA, 22 nt, Human
aaggucauggcaaauuacuuuu

SEQ ID NO: 1118342 - RNA, 22 nt, Human
gaucaaaagcuggguucuaaaa

SEQ ID NO: 1118343 - RNA, 22 nt, Human
aguuacuugagacguuuaugaa

SEQ ID NO: 1118344 - RNA, 22 nt, Human
acacugcagaugaaagcauaag

SEQ ID NO: 1118345 - RNA, 22 nt, Human
ucuguggauuuuaguguucaug

SEQ ID NO: 1118346 - RNA, 22 nt, Human
cacugcaguuccccagugcgca

SEQ ID NO: 1118347 - RNA, 22 nt, Human
uuuuuaagagauucuccagucu

SEQ ID NO: 1118348 - RNA, 22 nt, Human
aggagccaguuccaccccagga

SEQ ID NO: 1118349 - RNA, 22 nt, Human
agggagcuuccgaacuacagcu

SEQ ID NO: 1118350 - RNA, 22 nt, Human
gcugccaccguggagaugagug

SEQ ID NO: 1118351 - RNA, 22 nt, Human
gccaggcuccaggcccuccuga

SEQ ID NO: 1118352 - RNA, 22 nt, Human
uccuugaaugaauguucucucc

SEQ ID NO: 1118353 - RNA, 22 nt, Human
uguacuuccccaaugacagcac

SEQ ID NO: 1118354 - RNA, 22 nt, Human
gcuggccugggcagccugucgg

SEQ ID NO: 1118355 - RNA, 22 nt, Human
gaacccaguccaggugcagccu

SEQ ID NO: 1118356 - RNA, 22 nt, Human
ccagggcagggaccacgugucu

SEQ ID NO: 1118357 - RNA, 22 nt, Human
uuaaacaguguuucaugugggg

SEQ ID NO: 1118358 - RNA, 23 nt, Human
ugcagagggacugaagccagcuu

SEQ ID NO: 1118359 - RNA, 22 nt, Human
agaggcuggauugagcauagac

SEQ ID NO: 1118360 - RNA, 22 nt, Human
ugaaagcucugucaucauuccu

SEQ ID NO: 1118361 - RNA, 22 nt, Human
ucccuggagauaacuucuggga

SEQ ID NO: 1118362 - RNA, 22 nt, Human
uaucuacaggugucagguaaga

SEQ ID NO: 1118363 - RNA, 22 nt, Human
ugccugucuuaauaucuggaaa

SEQ ID NO: 1118364 - RNA, 18 nt, Human
uccagagguguuggagcc

SEQ ID NO: 1118365 - RNA, 22 nt, Human
agggcagcauugccuuucucca

SEQ ID NO: 1118366 - RNA, 22 nt, Human
ugaaggagcucaaugaugaugc

SEQ ID NO: 1118367 - RNA, 20 nt, Human
acagccagaggaggcagaca

SEQ ID NO: 1118368 - RNA, 22 nt, Human
cacuggggaaaacaggcuucuu

SEQ ID NO: 1118369 - RNA, 22 nt, Human
augauggugggagaugacccag

SEQ ID NO: 1118370 - RNA, 22 nt, Human
agacccagaaagcagcugcauu

SEQ ID NO: 1118371 - RNA, 22 nt, Human
gagcugcccugagcuuugcaug

SEQ ID NO: 1118372 - RNA, 22 nt, Human
gugcauguuaaugguguacaaa

SEQ ID NO: 1118373 - RNA, 18 nt, Human
ucugucucuguccuugcu

SEQ ID NO: 1118374 - RNA, 22 nt, Human
cccuucagcugagugggacagc

SEQ ID NO: 1118375 - RNA, 22 nt, Human
aucuggcucauucagggaacgg

SEQ ID NO: 1118376 - RNA, 17 nt, Human
cagacagauauccuggg

SEQ ID NO: 1118377 - RNA, 22 nt, Human
cacagggcagagaccugggugc

SEQ ID NO: 1118378 - RNA, 22 nt, Human
gccagcucccaagugagccccu

SEQ ID NO: 1118379 - RNA, 22 nt, Human
ggccagggccuggggacugucc

SEQ ID NO: 1118380 - RNA, 22 nt, Human
uacauuaacuuacguccacaug

SEQ ID NO: 1118381 - RNA, 22 nt, Human
agcuggggcugcagagaacagg

SEQ ID NO: 1118382 - RNA, 22 nt, Human
ugcugccuuagcagccaggcaa

SEQ ID NO: 1118383 - RNA, 22 nt, Human
uggcccuguguccugcugccag

SEQ ID NO: 1118384 - RNA, 21 nt, Human
ucuuugcaucaguuguuuucu

SEQ ID NO: 1118385 - RNA, 22 nt, Human
cacauuucucuaccucacacaa

SEQ ID NO: 1118386 - RNA, 22 nt, Human
agucccagaucuccauucgguc

SEQ ID NO: 1118387 - RNA, 22 nt, Human
cuggggugugcucagagcaggg

SEQ ID NO: 1118388 - RNA, 22 nt, Human
ugcaguggaaucuggagagcag

SEQ ID NO: 1118389 - RNA, 22 nt, Human
gagagcacaugaacauggagga

SEQ ID NO: 1118390 - RNA, 22 nt, Human
auacauacguacauacguaugu

SEQ ID NO: 1118391 - RNA, 22 nt, Human
uccucagaaaccccugugaggu

SEQ ID NO: 1118392 - RNA, 22 nt, Human
uuagucaauagugaauauagag

SEQ ID NO: 1118393 - RNA, 22 nt, Human
cagggcagugaagaacacacgu

SEQ ID NO: 1118394 - RNA, 22 nt, Human
uccuugaagagugggcggucga

SEQ ID NO: 1118395 - RNA, 19 nt, Human
ugucacugucauggcccag

SEQ ID NO: 1118396 - RNA, 22 nt, Human
ccucuggcuguaccacuggcac

SEQ ID NO: 1118397 - RNA, 22 nt, Human
aaacagaaauuuccucaugcuc

SEQ ID NO: 1118398 - RNA, 22 nt, Human
agccagcagggcuuagaggaca

SEQ ID NO: 1118399 - RNA, 23 nt, Human
acuuaaaugguucuuuaucucag

SEQ ID NO: 1118400 - RNA, 22 nt, Human
acaagagauuaucuacagauga

SEQ ID NO: 1118401 - RNA, 22 nt, Human
gugucccacucuggaggugaag

SEQ ID NO: 1118402 - RNA, 22 nt, Human
acagggccaggugagaggugcu

SEQ ID NO: 1118403 - RNA, 22 nt, Human
gcucugcuguguuuguucagca

SEQ ID NO: 1118404 - RNA, 22 nt, Human
ggccugugagcccuugcaugua

SEQ ID NO: 1118405 - RNA, 22 nt, Human
cauuguauugaggauacuuaag

SEQ ID NO: 1118406 - RNA, 22 nt, Human
guggcagcaaaauccugcauuc

SEQ ID NO: 1118407 - RNA, 22 nt, Human
gcagggcuguggacacuuuggu

SEQ ID NO: 1118408 - RNA, 22 nt, Human
ccuccaggcugaauaucuagaa

SEQ ID NO: 1118409 - RNA, 22 nt, Human
ucaaugauaguacaaucagccu

SEQ ID NO: 1118410 - RNA, 22 nt, Human
acagagccuccaggagugcugg

SEQ ID NO: 1118411 - RNA, 22 nt, Human
cagcauggggaucacuguaggc

SEQ ID NO: 1118412 - RNA, 22 nt, Human
ucacagaauagcacuguaagcg

SEQ ID NO: 1118413 - RNA, 21 nt, Human
cucaggaucuuauauauuagu

SEQ ID NO: 1118414 - RNA, 22 nt, Human
ugaaacagucuccagacuugga

SEQ ID NO: 1118415 - RNA, 22 nt, Human
ugguccugccccgugcacagag

SEQ ID NO: 1118416 - RNA, 22 nt, Human
ccugccugcggcccgcggggag

SEQ ID NO: 1118417 - RNA, 22 nt, Human
ggaggccuagccagcuccaguu

SEQ ID NO: 1118418 - RNA, 22 nt, Human
gccaccucuuugucucugccgc

SEQ ID NO: 1118419 - RNA, 22 nt, Human
aggcuggaguacaguggcuauu

SEQ ID NO: 1118420 - RNA, 22 nt, Human
ucaaagucucugcuucuguaac

SEQ ID NO: 1118421 - RNA, 22 nt, Human
cagacuggccacaucugcacug

SEQ ID NO: 1118422 - RNA, 22 nt, Human
cucuggaggccuaaggaagugg

SEQ ID NO: 1118423 - RNA, 22 nt, Human
uugagucaguaauuccauuucu

SEQ ID NO: 1118424 - RNA, 17 nt, Human
gcacugaacaauccugu

SEQ ID NO: 1118425 - RNA, 22 nt, Human
uuuugaaagggugauuuggcuu

SEQ ID NO: 1118426 - RNA, 22 nt, Human
ggagccaggggaccuucacaga

SEQ ID NO: 1118427 - RNA, 22 nt, Human
aguggcaguagaugagcugguu

SEQ ID NO: 1118428 - RNA, 22 nt, Human
ugcagccaucgcagagucugua

SEQ ID NO: 1118429 - RNA, 22 nt, Human
aaugggaggauuuucucucuug

SEQ ID NO: 1118430 - RNA, 22 nt, Human
ccagaccacccuggccaugcac

SEQ ID NO: 1118431 - RNA, 22 nt, Human
aaaguguggagauugaacuaaa

SEQ ID NO: 1118432 - RNA, 22 nt, Human
cagggugacugcccuggccacu

SEQ ID NO: 1118433 - RNA, 22 nt, Human
ucaggggacagccagcuggagg

SEQ ID NO: 1118434 - RNA, 22 nt, Human
uccagggaccucccugagagcu

SEQ ID NO: 1118435 - RNA, 22 nt, Human
ucacugcagacaaccucaguca

SEQ ID NO: 1118436 - RNA, 22 nt, Human
gaguggagcaaaagagguagau

SEQ ID NO: 1118437 - RNA, 22 nt, Human
acccugggucauauacagugug

SEQ ID NO: 1118438 - RNA, 22 nt, Human
ucagccucucugaguccagacc

SEQ ID NO: 1118439 - RNA, 22 nt, Human
cugcucugugguccaugagaca

SEQ ID NO: 1118440 - RNA, 22 nt, Human
uuaguaauguguuaauaugaau

SEQ ID NO: 1118441 - RNA, 22 nt, Human
auacauguaacugcauuguaau

SEQ ID NO: 1118442 - RNA, 22 nt, Human
aggugccagugcuguggucccc

SEQ ID NO: 1118443 - RNA, 22 nt, Human
ugaagcaggaucguuugcuuca

SEQ ID NO: 1118444 - RNA, 22 nt, Human
caggggcuguuugccucaggcc

SEQ ID NO: 1118445 - RNA, 22 nt, Human
aggcagaauguuggaaaggaag

SEQ ID NO: 1118446 - RNA, 22 nt, Human
aggcuucuuagauuggcuggag

SEQ ID NO: 1118447 - RNA, 23 nt, Human
agaaaagcuuggacacauggccu

SEQ ID NO: 1118448 - RNA, 22 nt, Human
ccaggcucaggugcgagagaca

SEQ ID NO: 1118449 - RNA, 22 nt, Human
acauuucugcuagaauagguga

SEQ ID NO: 1118450 - RNA, 21 nt, Human
aacauuucugggagaacucac

SEQ ID NO: 1118451 - RNA, 22 nt, Human
guucacaucacuucacugaacc

SEQ ID NO: 1118452 - RNA, 22 nt, Human
ccugccuggagcugagugugga

SEQ ID NO: 1118453 - RNA, 22 nt, Human
ugggcuggugagggaucauuua

SEQ ID NO: 1118454 - RNA, 22 nt, Human
gggcugucaugugucagugacc

SEQ ID NO: 1118455 - RNA, 22 nt, Human
cucccacuccuggcucaccaca

SEQ ID NO: 1118456 - RNA, 19 nt, Human
ccagucccauacaggagau

SEQ ID NO: 1118457 - RNA, 23 nt, Human
aucagucuugguagcugugccca

SEQ ID NO: 1118458 - RNA, 22 nt, Human
ugucugucugcaagccagaaag

SEQ ID NO: 1118459 - RNA, 22 nt, Human
cauuuagaaacuguuuuuaaca

SEQ ID NO: 1118460 - RNA, 22 nt, Human
gagcucagcccaaagagcagug

SEQ ID NO: 1118461 - RNA, 22 nt, Human
gaggcuggcagaaaagcacagg

SEQ ID NO: 1118462 - RNA, 21 nt, Human
aaugugugcuauuuaucuuuu

SEQ ID NO: 1118463 - RNA, 22 nt, Human
ggcucaggagaggggcuaaaag

SEQ ID NO: 1118464 - RNA, 23 nt, Human
augcaguauaugucaguaguuua

SEQ ID NO: 1118465 - RNA, 22 nt, Human
ugaagccagcuuuggaagacac

SEQ ID NO: 1118466 - RNA, 22 nt, Human
ccaggcuggagugcaauggugc

SEQ ID NO: 1118467 - RNA, 22 nt, Human
gcuggccauauauuuugcuguu

SEQ ID NO: 1118468 - RNA, 22 nt, Human
agggucugacaaugugacuuag

SEQ ID NO: 1118469 - RNA, 22 nt, Human
ccugccagauccccugagcuga

SEQ ID NO: 1118470 - RNA, 22 nt, Human
cauugcucaggcccagcaggaa

SEQ ID NO: 1118471 - RNA, 22 nt, Human
aacugcauuugcauaaguccau

SEQ ID NO: 1118472 - RNA, 22 nt, Human
cggcuggguagaggugccgggu

SEQ ID NO: 1118473 - RNA, 22 nt, Human
uggcacugccuggcagggcccc

SEQ ID NO: 1118474 - RNA, 22 nt, Human
uuauuuucagcuaggaaagcca

SEQ ID NO: 1118475 - RNA, 22 nt, Human
gagcuuugcuggaagccugggg

SEQ ID NO: 1118476 - RNA, 22 nt, Human
auugaaagauuuugggcucaug

SEQ ID NO: 1118477 - RNA, 20 nt, Human
ggcacuggaagcacacagga

SEQ ID NO: 1118478 - RNA, 22 nt, Human
gagcucugacugcugggugaca

SEQ ID NO: 1118479 - RNA, 22 nt, Human
cauggcaggugcagauucugug

SEQ ID NO: 1118480 - RNA, 22 nt, Human
acucaagauagggaaaguacaa

SEQ ID NO: 1118481 - RNA, 22 nt, Human
aagcgccaugguuccugcgcag

SEQ ID NO: 1118482 - RNA, 22 nt, Human
augggcagcagcugccauucau

SEQ ID NO: 1118483 - RNA, 22 nt, Human
ggcugaaguguaguggcucacu

SEQ ID NO: 1118484 - RNA, 22 nt, Human
aauuucaauuacuuuugcacca

SEQ ID NO: 1118485 - RNA, 22 nt, Human
aacaucagaauauccauguugg

SEQ ID NO: 1118486 - RNA, 22 nt, Human
ccaggaaugaaauguagauaaa

SEQ ID NO: 1118487 - RNA, 22 nt, Human
auccaguucucagugcuuacag

SEQ ID NO: 1118488 - RNA, 22 nt, Human
gugcugcagagucucgugccgc

SEQ ID NO: 1118489 - RNA, 22 nt, Human
aaugagcugcugcuguuccacc

SEQ ID NO: 1118490 - RNA, 22 nt, Human
agcagcucuguuuaccuggagg

SEQ ID NO: 1118491 - RNA, 22 nt, Human
cugugcccuggccaggccucuc

SEQ ID NO: 1118492 - RNA, 22 nt, Human
gggcagagguucaacuucaaca

SEQ ID NO: 1118493 - RNA, 22 nt, Human
ucugucacucccugaugaugaa

SEQ ID NO: 1118494 - RNA, 21 nt, Human
gauuucacuuaccuucauuua

SEQ ID NO: 1118495 - RNA, 20 nt, Human
cccagggaccugagcuccau

SEQ ID NO: 1118496 - RNA, 22 nt, Human
uuuggaaaguguacaaauuuga

SEQ ID NO: 1118497 - RNA, 18 nt, Human
guccugagcucugcugua

SEQ ID NO: 1118498 - RNA, 22 nt, Human
uccauuuucaucucauguauaa

SEQ ID NO: 1118499 - RNA, 21 nt, Human
cagaggcagguccugggacgg

SEQ ID NO: 1118500 - RNA, 22 nt, Human
gcauccagucuuggcuccugga

SEQ ID NO: 1118501 - RNA, 22 nt, Human
uggcuuccugcauggauccucu

SEQ ID NO: 1118502 - RNA, 22 nt, Human
ugaugggacugccagcugcuga

SEQ ID NO: 1118503 - RNA, 22 nt, Human
uagagcauuuagaggggcagga

SEQ ID NO: 1118504 - RNA, 22 nt, Human
cuccucccugcgauugcucugc

SEQ ID NO: 1118505 - RNA, 22 nt, Human
gaugcacuuucuuuucaacagu

SEQ ID NO: 1118506 - RNA, 21 nt, Human
agaaaauggcguuuuagauuu

SEQ ID NO: 1118507 - RNA, 22 nt, Human
uggugcaagucucugaggaggg

SEQ ID NO: 1118508 - RNA, 22 nt, Human
augaaaacggaccagagcuauu

SEQ ID NO: 1118509 - RNA, 21 nt, Human
aggcagaaagagcccaggcug

SEQ ID NO: 1118510 - RNA, 22 nt, Human
ccugggcagggcuggacucuca

SEQ ID NO: 1118511 - RNA, 22 nt, Human
gaggcucagagggagcaugguc

SEQ ID NO: 1118512 - RNA, 21 nt, Human
gccaccccuggcacaggugcu

SEQ ID NO: 1118513 - RNA, 22 nt, Human
uguaugugcuugagaagguggg

SEQ ID NO: 1118514 - RNA, 22 nt, Human
gcaggggcugcugggaacucgg

SEQ ID NO: 1118515 - RNA, 17 nt, Human
gcaaucucagucuccuu

SEQ ID NO: 1118516 - RNA, 22 nt, Human
ggggacccucaggacugcgucu

SEQ ID NO: 1118517 - RNA, 22 nt, Human
ggucucagaucuuuauuaaggc

SEQ ID NO: 1118518 - RNA, 22 nt, Human
acauguguauagccuguauaga

SEQ ID NO: 1118519 - RNA, 22 nt, Human
cagguggagcugacugagggca

SEQ ID NO: 1118520 - RNA, 22 nt, Human
ugcucacagcccagaacauaau

SEQ ID NO: 1118521 - RNA, 20 nt, Human
ggagagcagggaagacagua

SEQ ID NO: 1118522 - RNA, 22 nt, Human
uacaaagccugguagauaucug

SEQ ID NO: 1118523 - RNA, 22 nt, Human
ucaggagauggucuuuauaggc

SEQ ID NO: 1118524 - RNA, 22 nt, Human
ugggcuccucgucacucgcugu

SEQ ID NO: 1118525 - RNA, 22 nt, Human
gcucaaggcaggcagacaugag

SEQ ID NO: 1118526 - RNA, 22 nt, Human
aagggcagaaagggacgcuuug

SEQ ID NO: 1118527 - RNA, 22 nt, Human
gaagagcugcaguuuccugggc

SEQ ID NO: 1118528 - RNA, 22 nt, Human
cagagcuggagcuugaauggag

SEQ ID NO: 1118529 - RNA, 22 nt, Human
aggggcugacuggaaagugcca

SEQ ID NO: 1118530 - RNA, 22 nt, Human
gcuggcugggucccugagaggc

SEQ ID NO: 1118531 - RNA, 23 nt, Human
gggagaauaugaggaugauggug

SEQ ID NO: 1118532 - RNA, 22 nt, Human
ccagccucacuggcaucaccua

SEQ ID NO: 1118533 - RNA, 22 nt, Human
cagagacagaaaauggaucuag

SEQ ID NO: 1118534 - RNA, 22 nt, Human
gagcucagcacuaaaaucaugu

SEQ ID NO: 1118535 - RNA, 22 nt, Human
cagcaguggaacuacccaggga

SEQ ID NO: 1118536 - RNA, 22 nt, Human
uauaucuuauaugugcagguac

SEQ ID NO: 1118537 - RNA, 22 nt, Human
ccagccugaaaugccucauccu

SEQ ID NO: 1118538 - RNA, 22 nt, Human
ccagcccuugagauggaaggga

SEQ ID NO: 1118539 - RNA, 22 nt, Human
agugaguggacccugcaaggaa

SEQ ID NO: 1118540 - RNA, 22 nt, Human
acagcagccugcagcccugugu

SEQ ID NO: 1118541 - RNA, 22 nt, Human
ggaaagagcuaaaagggugaga

SEQ ID NO: 1118542 - RNA, 22 nt, Human
acuuucuccagaaaaccaagga

SEQ ID NO: 1118543 - RNA, 22 nt, Human
uuggcuucuggcagucuggacg

SEQ ID NO: 1118544 - RNA, 22 nt, Human
cucaggccauucuuccagcugc

SEQ ID NO: 1118545 - RNA, 22 nt, Human
ucccagagaaagucaaggucuu

SEQ ID NO: 1118546 - RNA, 23 nt, Human
ggagccuggcauaugagacgcau

SEQ ID NO: 1118547 - RNA, 22 nt, Human
gcagccacucucauuccacgug

SEQ ID NO: 1118548 - RNA, 22 nt, Human
agcugggucuugggccaggaga

SEQ ID NO: 1118549 - RNA, 22 nt, Human
gccaugccugugucuccaggcc

SEQ ID NO: 1118550 - RNA, 22 nt, Human
agagccagcaacucuagcccug

SEQ ID NO: 1118551 - RNA, 22 nt, Human
caagagcuacccugugccauau

SEQ ID NO: 1118552 - RNA, 22 nt, Human
uaugcacacaggcuuaauucau

SEQ ID NO: 1118553 - RNA, 22 nt, Human
cagcaucaccgccauuucugau

SEQ ID NO: 1118554 - RNA, 22 nt, Human
cugggcugcaucaaagaggcau

SEQ ID NO: 1118555 - RNA, 22 nt, Human
acugucucucuagcaguucagg

SEQ ID NO: 1118556 - RNA, 20 nt, Human
auguagaugaaagcaaaggc

SEQ ID NO: 1118557 - RNA, 22 nt, Human
gccugccuguuggcugaggugc

SEQ ID NO: 1118558 - RNA, 19 nt, Human
ucucagaggaaaaauugcu

SEQ ID NO: 1118559 - RNA, 22 nt, Human
gaaaugcagauucugauucugu

SEQ ID NO: 1118560 - RNA, 22 nt, Human
cccagcauuucugggcugcacu

SEQ ID NO: 1118561 - RNA, 22 nt, Human
gccuucaguagugucagcugua

SEQ ID NO: 1118562 - RNA, 20 nt, Human
cagcuuggaugagaggcuga

SEQ ID NO: 1118563 - RNA, 22 nt, Human
gccugagauucugcauuucuaa

SEQ ID NO: 1118564 - RNA, 22 nt, Human
guggccaggccgacugccaggc

SEQ ID NO: 1118565 - RNA, 22 nt, Human
gcaggguccauggaggcagccc

SEQ ID NO: 1118566 - RNA, 22 nt, Human
ccagccuggguguuagaagaca

SEQ ID NO: 1118567 - RNA, 22 nt, Human
ggaugcugcuaucaggcuucga

SEQ ID NO: 1118568 - RNA, 22 nt, Human
uggcagcuccggguaggggcug

SEQ ID NO: 1118569 - RNA, 17 nt, Human
ggagagugggaauggcc

SEQ ID NO: 1118570 - RNA, 22 nt, Human
uccuugaagcuuguaucuaaua

SEQ ID NO: 1118571 - RNA, 22 nt, Human
gaggaggcuaagugggcucugg

SEQ ID NO: 1118572 - RNA, 22 nt, Human
cagcagcaaaucuagaagagga

SEQ ID NO: 1118573 - RNA, 22 nt, Human
cagaaguaagauuacugugagu

SEQ ID NO: 1118574 - RNA, 22 nt, Human
ucccagcagagccagcaagccg

SEQ ID NO: 1118575 - RNA, 22 nt, Human
gccaggccugcaagugcuggug

SEQ ID NO: 1118576 - RNA, 22 nt, Human
cacugcuuaguugguaaaugug

SEQ ID NO: 1118577 - RNA, 22 nt, Human
aggagugcaaauaguccagaga

SEQ ID NO: 1118578 - RNA, 22 nt, Human
ugaacgcagguccacauggcuc

SEQ ID NO: 1118579 - RNA, 21 nt, Human
uuucugucucugccacuaguu

SEQ ID NO: 1118580 - RNA, 22 nt, Human
uuuauguaauuucauaggugug

SEQ ID NO: 1118581 - RNA, 22 nt, Human
cauugaaauauggaaacugaug

SEQ ID NO: 1118582 - RNA, 22 nt, Human
agagccagcaagugaauaguga

SEQ ID NO: 1118583 - RNA, 22 nt, Human
cagggccugagggcugcucugc

SEQ ID NO: 1118584 - RNA, 22 nt, Human
uggcccugacagguccugggca

SEQ ID NO: 1118585 - RNA, 22 nt, Human
cucccagagaccaagcugagaa

SEQ ID NO: 1118586 - RNA, 22 nt, Human
uccagccacucagcagggauug

SEQ ID NO: 1118587 - RNA, 22 nt, Human
aauuuagauugauaaacaugga

SEQ ID NO: 1118588 - RNA, 22 nt, Human
ugcaauaacccaguaucuguga

SEQ ID NO: 1118589 - RNA, 22 nt, Human
ugagggaguuggguguauagga

SEQ ID NO: 1118590 - RNA, 22 nt, Human
gcuguccucuuggacucagggc

SEQ ID NO: 1118591 - RNA, 22 nt, Human
aaaaucugguaauuugaaugug

SEQ ID NO: 1118592 - RNA, 18 nt, Human
uggcagcaggaagccauu

SEQ ID NO: 1118593 - RNA, 22 nt, Human
ggcggggguccaggagccugca

SEQ ID NO: 1118594 - RNA, 22 nt, Human
accugccuauggagccacaugg

SEQ ID NO: 1118595 - RNA, 20 nt, Human
cacaagagaauacacacugg

SEQ ID NO: 1118596 - RNA, 23 nt, Human
gugcucugcggucugcuagucug

SEQ ID NO: 1118597 - RNA, 22 nt, Human
caggcagauuugcugcccucca

SEQ ID NO: 1118598 - RNA, 22 nt, Human
ggacccugggcuugcuccuggg

SEQ ID NO: 1118599 - RNA, 22 nt, Human
agcagcugaucaaagcacuuau

SEQ ID NO: 1118600 - RNA, 22 nt, Human
gcugucaguuuuacccacagac

SEQ ID NO: 1118601 - RNA, 20 nt, Human
ucacaggggaccaggagcag

SEQ ID NO: 1118602 - RNA, 22 nt, Human
gaauguaauagucaguagaaca

SEQ ID NO: 1118603 - RNA, 22 nt, Human
aagcugccagcugagcugaggc

SEQ ID NO: 1118604 - RNA, 22 nt, Human
gcagagugaggaagagcuucca

SEQ ID NO: 1118605 - RNA, 17 nt, Human
uggagcugcguguguuc

SEQ ID NO: 1118606 - RNA, 22 nt, Human
acuccugggugcugaccagcgu

SEQ ID NO: 1118607 - RNA, 22 nt, Human
uccagucaagcuugagaauuuc

SEQ ID NO: 1118608 - RNA, 22 nt, Human
ggcccacacugacagcugagcu

SEQ ID NO: 1118609 - RNA, 23 nt, Human
uuguuuuuagagguggcaugaga

SEQ ID NO: 1118610 - RNA, 22 nt, Human
gccuggcccagggcuccgcagg

SEQ ID NO: 1118611 - RNA, 22 nt, Human
ggccuggcucuugcccagccug

SEQ ID NO: 1118612 - RNA, 22 nt, Human
gcagcugcuggaaguuccugcc

SEQ ID NO: 1118613 - RNA, 22 nt, Human
ggagggagcauccccuugcuga

SEQ ID NO: 1118614 - RNA, 22 nt, Human
guugggaagcagauggaugagc

SEQ ID NO: 1118615 - RNA, 21 nt, Human
uggccucccacacuuccaugg

SEQ ID NO: 1118616 - RNA, 22 nt, Human
ccagagcugcauccagcagguu

SEQ ID NO: 1118617 - RNA, 22 nt, Human
uguggcugucuguucuccuagg

SEQ ID NO: 1118618 - RNA, 22 nt, Human
ucagaacagaagaaggaacacg

SEQ ID NO: 1118619 - RNA, 19 nt, Human
gcuggcagauguggccgug

SEQ ID NO: 1118620 - RNA, 22 nt, Human
agggcagcuagcuguagaaaga

SEQ ID NO: 1118621 - RNA, 22 nt, Human
cuuucagagguuacucaggaaa

SEQ ID NO: 1118622 - RNA, 22 nt, Human
ggcuggguuauuuauggccaag

SEQ ID NO: 1118623 - RNA, 22 nt, Human
cucuugggagugcucuggagaa

SEQ ID NO: 1118624 - RNA, 19 nt, Human
acacugaauguagaauugg

SEQ ID NO: 1118625 - RNA, 22 nt, Human
uggccuccccuaacagccucuu

SEQ ID NO: 1118626 - RNA, 22 nt, Human
ugggugggagcgcccugucugg

SEQ ID NO: 1118627 - RNA, 22 nt, Human
cccagccugugacagccguccu

SEQ ID NO: 1118628 - RNA, 22 nt, Human
ggagugggaacaaugacauggu

SEQ ID NO: 1118629 - RNA, 22 nt, Human
cuguuuauacgacagguggagg

SEQ ID NO: 1118630 - RNA, 20 nt, Human
aggaagccaaaggcugucuu

SEQ ID NO: 1118631 - RNA, 22 nt, Human
cagagacauuaagugccaugau

SEQ ID NO: 1118632 - RNA, 22 nt, Human
guguaucaaagcacagacuuca

SEQ ID NO: 1118633 - RNA, 22 nt, Human
ccagcugauucgguggugguug

SEQ ID NO: 1118634 - RNA, 20 nt, Human
aggcacuggggauagguaag

SEQ ID NO: 1118635 - RNA, 22 nt, Human
agcugggccugagcuggaagcu

SEQ ID NO: 1118636 - RNA, 22 nt, Human
aaaaguucccugguuagaaaag

SEQ ID NO: 1118637 - RNA, 22 nt, Human
ucugagccguauggcuuggcua

SEQ ID NO: 1118638 - RNA, 22 nt, Human
caaaugcagucccuuuguugcu

SEQ ID NO: 1118639 - RNA, 22 nt, Human
acagagcuuaauucaggagcuu

SEQ ID NO: 1118640 - RNA, 22 nt, Human
aguaucaaggaucuccagcacc

SEQ ID NO: 1118641 - RNA, 22 nt, Human
uggcuuccugcacagugucugc

SEQ ID NO: 1118642 - RNA, 17 nt, Human
ccugggaggaguuauga

SEQ ID NO: 1118643 - RNA, 22 nt, Human
ucucagaguuccucuggagucc

SEQ ID NO: 1118644 - RNA, 22 nt, Human
ugcauauugugaaaauguagau

SEQ ID NO: 1118645 - RNA, 22 nt, Human
caguuuuuagauuaguuggugg

SEQ ID NO: 1118646 - RNA, 22 nt, Human
aaaugcagauuuugaugcagca

SEQ ID NO: 1118647 - RNA, 22 nt, Human
ggccagggggcuucagacucca

SEQ ID NO: 1118648 - RNA, 22 nt, Human
aagauuucagaguuugggggaa

SEQ ID NO: 1118649 - RNA, 22 nt, Human
acacccagagcgccagugccga

SEQ ID NO: 1118650 - RNA, 22 nt, Human
agggcugccauuucuggcccaa

SEQ ID NO: 1118651 - RNA, 22 nt, Human
ccaggcucugucuggucagaag

SEQ ID NO: 1118652 - RNA, 22 nt, Human
agccagcuggagaccacuguuu

SEQ ID NO: 1118653 - RNA, 22 nt, Human
gacagggcgagacucagucuca

SEQ ID NO: 1118654 - RNA, 22 nt, Human
ccacagggccuuuccugcuggc

SEQ ID NO: 1118655 - RNA, 22 nt, Human
acugucuuccaggucuggaggu

SEQ ID NO: 1118656 - RNA, 23 nt, Human
aucaaacuggugagaaugucagu

SEQ ID NO: 1118657 - RNA, 22 nt, Human
ucuccaagcagggcugcaaggc

SEQ ID NO: 1118658 - RNA, 22 nt, Human
uccagaguacggaagagucauc

SEQ ID NO: 1118659 - RNA, 22 nt, Human
ugugccauuucuauucugcagc

SEQ ID NO: 1118660 - RNA, 21 nt, Human
ugcuuuaugggaaaaauguca

SEQ ID NO: 1118661 - RNA, 22 nt, Human
cuggagcucuccagagccccgu

SEQ ID NO: 1118662 - RNA, 22 nt, Human
cuggccuuuuguuucuggagaa

SEQ ID NO: 1118663 - RNA, 22 nt, Human
gucccagaaacauauugcuggu

SEQ ID NO: 1118664 - RNA, 22 nt, Human
ugcuggccaacaaggcuccaag

SEQ ID NO: 1118665 - RNA, 22 nt, Human
agugggcagcccaggaggucuu

SEQ ID NO: 1118666 - RNA, 22 nt, Human
gcuccagaugaaaggccagagg

SEQ ID NO: 1118667 - RNA, 22 nt, Human
uucagcagugcagacacccagu

SEQ ID NO: 1118668 - RNA, 22 nt, Human
agccugcaggaugggcagcacc

SEQ ID NO: 1118669 - RNA, 22 nt, Human
uuacaguaugaucaacuuuuca

SEQ ID NO: 1118670 - RNA, 22 nt, Human
caggcuugauuauucagacaau

SEQ ID NO: 1118671 - RNA, 22 nt, Human
uccuuggcuuucuggagcuucu

SEQ ID NO: 1118672 - RNA, 22 nt, Human
cucugaacucuugggcagcaug

SEQ ID NO: 1118673 - RNA, 22 nt, Human
ggcacugagcugccuuggggca

SEQ ID NO: 1118674 - RNA, 22 nt, Human
aguggcaggaaaguggaagaga

SEQ ID NO: 1118675 - RNA, 18 nt, Human
gaggauggaaggagaugc

SEQ ID NO: 1118676 - RNA, 22 nt, Human
aggcagcaaagaaaugaugcug

SEQ ID NO: 1118677 - RNA, 21 nt, Human
ugauccuuucccccauguugc

SEQ ID NO: 1118678 - RNA, 22 nt, Human
ugccuuccuggagcugaaggcu

SEQ ID NO: 1118679 - RNA, 22 nt, Human
agggcagaaaucgauuacaccu

SEQ ID NO: 1118680 - RNA, 22 nt, Human
agugaccaacaaugcugagaag

SEQ ID NO: 1118681 - RNA, 22 nt, Human
ucucacuggguauaaaugagua

SEQ ID NO: 1118682 - RNA, 22 nt, Human
agcugccaggccccugagaacc

SEQ ID NO: 1118683 - RNA, 22 nt, Human
gcugaagggagugcugagucug

SEQ ID NO: 1118684 - RNA, 22 nt, Human
ucagaggauugccucagcgagc

SEQ ID NO: 1118685 - RNA, 22 nt, Human
uuccgcuggggccgccuggcgg

SEQ ID NO: 1118686 - RNA, 22 nt, Human
agaugaaaagauaagcagcaau

SEQ ID NO: 1118687 - RNA, 22 nt, Human
acagcagccuuguugguuucga

SEQ ID NO: 1118688 - RNA, 20 nt, Human
cccugcagccaugggagugg

SEQ ID NO: 1118689 - RNA, 22 nt, Human
acugaaggaaagccuuugcaug

SEQ ID NO: 1118690 - RNA, 22 nt, Human
cagcucugggugacaggagggc

SEQ ID NO: 1118691 - RNA, 22 nt, Human
cucagcccagcccaggaccagg

SEQ ID NO: 1118692 - RNA, 22 nt, Human
gagggagagugauggaccauug

SEQ ID NO: 1118693 - RNA, 22 nt, Human
acagggcaaccucugggagacu

SEQ ID NO: 1118694 - RNA, 22 nt, Human
guacucucuugaaggccuuucu

SEQ ID NO: 1118695 - RNA, 18 nt, Human
gaaaugugauucuagggc

SEQ ID NO: 1118696 - RNA, 22 nt, Human
agagcuuauaucuuggccaucc

SEQ ID NO: 1118697 - RNA, 22 nt, Human
cugaagcaaaggaucgagcuaa

SEQ ID NO: 1118698 - RNA, 22 nt, Human
caguagcacucugucagugaag

SEQ ID NO: 1118699 - RNA, 22 nt, Human
ucagggcauacucuucaagguc

SEQ ID NO: 1118700 - RNA, 22 nt, Human
acagccugagaguggagcuggc

SEQ ID NO: 1118701 - RNA, 18 nt, Human
ucagagguacagaaaagu

SEQ ID NO: 1118702 - RNA, 22 nt, Human
ugauuucccuguagccucugaa

SEQ ID NO: 1118703 - RNA, 22 nt, Human
ugucaugcagguuuguuauaga

SEQ ID NO: 1118704 - RNA, 22 nt, Human
cagagugaaauaggggaucaag

SEQ ID NO: 1118705 - RNA, 21 nt, Human
acccuggguucuccauacccu

SEQ ID NO: 1118706 - RNA, 22 nt, Human
cuguggcuaugguguacauacu

SEQ ID NO: 1118707 - RNA, 22 nt, Human
uuggaaggugagucccuggguu

SEQ ID NO: 1118708 - RNA, 22 nt, Human
aguuuauagcccagauucaugg

SEQ ID NO: 1118709 - RNA, 22 nt, Human
uugaagcacaaugucuuuuauc

SEQ ID NO: 1118710 - RNA, 22 nt, Human
uaaaaguuuuaguuguacauaa

SEQ ID NO: 1118711 - RNA, 19 nt, Human
ucaaaugccaaugucacag

SEQ ID NO: 1118712 - RNA, 22 nt, Human
ggccucugguucguggugaccu

SEQ ID NO: 1118713 - RNA, 22 nt, Human
agauuuagugguggaauuuugg

SEQ ID NO: 1118714 - RNA, 22 nt, Human
acuuuauuuccuauugcaucca

SEQ ID NO: 1118715 - RNA, 20 nt, Human
gcagcugaaaguaugacacc

SEQ ID NO: 1118716 - RNA, 22 nt, Human
cucugagcuccuggaagcgugc

SEQ ID NO: 1118717 - RNA, 23 nt, Human
cucugcaggagagugggcagggc

SEQ ID NO: 1118718 - RNA, 22 nt, Human
cugaggaguuuggguuguucaa

SEQ ID NO: 1118719 - RNA, 22 nt, Human
gcagccaggaaagcuggacccu

SEQ ID NO: 1118720 - RNA, 22 nt, Human
cccaggaggcagagguugcagu

SEQ ID NO: 1118721 - RNA, 17 nt, Human
gagugcugguggagcuc

SEQ ID NO: 1118722 - RNA, 22 nt, Human
cccagcugcaccucuauggccu

SEQ ID NO: 1118723 - RNA, 19 nt, Human
agauggggaagagugugag

SEQ ID NO: 1118724 - RNA, 22 nt, Human
gcucugucaacagcuagcugug

SEQ ID NO: 1118725 - RNA, 22 nt, Human
cuacccaggcuggagugcagua

SEQ ID NO: 1118726 - RNA, 22 nt, Human
ugucagugaguuaguugcaagu

SEQ ID NO: 1118727 - RNA, 22 nt, Human
cucugcaggggaggcaugcacu

SEQ ID NO: 1118728 - RNA, 19 nt, Human
acagaagcauagaaaagga

SEQ ID NO: 1118729 - RNA, 22 nt, Human
gggcagaggggcgcuucccucu

SEQ ID NO: 1118730 - RNA, 22 nt, Human
cauugcacagcccuguggugau

SEQ ID NO: 1118731 - RNA, 23 nt, Human
ugucccagagggagggauaggcu

SEQ ID NO: 1118732 - RNA, 22 nt, Human
ugggcuguccagcaccugggcu

SEQ ID NO: 1118733 - RNA, 22 nt, Human
cagacuuucaaggagugaaggc

SEQ ID NO: 1118734 - RNA, 22 nt, Human
ggagagcugguagcuggcucca

SEQ ID NO: 1118735 - RNA, 22 nt, Human
aagauuuccuucaguagagcua

SEQ ID NO: 1118736 - RNA, 22 nt, Human
ggcuccuggggaggugagcuug

SEQ ID NO: 1118737 - RNA, 22 nt, Human
auccuugagaaaauaaaugacc

SEQ ID NO: 1118738 - RNA, 22 nt, Human
agagccuggaccugagcuacaa

SEQ ID NO: 1118739 - RNA, 22 nt, Human
aagaacagauucagccugaacu

SEQ ID NO: 1118740 - RNA, 22 nt, Human
ugcccuuggguaacuugcugau

SEQ ID NO: 1118741 - RNA, 22 nt, Human
aagcccaguuucacacugagac

SEQ ID NO: 1118742 - RNA, 22 nt, Human
uauguacaaucagcaguucaua

SEQ ID NO: 1118743 - RNA, 22 nt, Human
aguugaaauuagaguccuggcu

SEQ ID NO: 1118744 - RNA, 22 nt, Human
uggagcaggaagucuauggcug

SEQ ID NO: 1118745 - RNA, 22 nt, Human
cauguacacucauguaacuaua

SEQ ID NO: 1118746 - RNA, 22 nt, Human
ucucagggcgcagugaggcagu

SEQ ID NO: 1118747 - RNA, 22 nt, Human
gagcccuggcagucugggaugg

SEQ ID NO: 1118748 - RNA, 22 nt, Human
gcucugagucucagcuaccaca

SEQ ID NO: 1118749 - RNA, 22 nt, Human
gggagagagaaaacguggcgca

SEQ ID NO: 1118750 - RNA, 17 nt, Human
ccuuucucuuucaucuc

SEQ ID NO: 1118751 - RNA, 22 nt, Human
guauuuauaggggaaugagagu

SEQ ID NO: 1118752 - RNA, 22 nt, Human
cucuuuccucagccacagucua

SEQ ID NO: 1118753 - RNA, 22 nt, Human
ugcucccaggcucuguggucug

SEQ ID NO: 1118754 - RNA, 22 nt, Human
gagagcuguccggcugagcagc

SEQ ID NO: 1118755 - RNA, 22 nt, Human
agugaaauuccuggucuuuguu

SEQ ID NO: 1118756 - RNA, 22 nt, Human
gccagacacuccccugggcagg

SEQ ID NO: 1118757 - RNA, 22 nt, Human
ccugagcuggaagagcuugugc

SEQ ID NO: 1118758 - RNA, 22 nt, Human
uggggcugugagacuacaggau

SEQ ID NO: 1118759 - RNA, 22 nt, Human
uggcuggcccugggagugcaga

SEQ ID NO: 1118760 - RNA, 22 nt, Human
ugcucccaaacgaccuacugug

SEQ ID NO: 1118761 - RNA, 22 nt, Human
aggcuggcgacaucuggcgggc

SEQ ID NO: 1118762 - RNA, 22 nt, Human
uggagccagagcgcagccuggg

SEQ ID NO: 1118763 - RNA, 22 nt, Human
ugaaagguuaaaaguaguauug

SEQ ID NO: 1118764 - RNA, 19 nt, Human
ccugucugucuucagcuag

SEQ ID NO: 1118765 - RNA, 21 nt, Human
ggucagggggugccuccaggu

SEQ ID NO: 1118766 - RNA, 22 nt, Human
aggcacugggggaugagcaagg

SEQ ID NO: 1118767 - RNA, 22 nt, Human
cugagauggaguuuugcucuug

SEQ ID NO: 1118768 - RNA, 22 nt, Human
uacagggguaacaguggggaau

SEQ ID NO: 1118769 - RNA, 22 nt, Human
gccaggcucagcagucaaccug

SEQ ID NO: 1118770 - RNA, 22 nt, Human
aaucuuucccuauuaaaugugg

SEQ ID NO: 1118771 - RNA, 22 nt, Human
augauucagcaauuuuauaucu

SEQ ID NO: 1118772 - RNA, 22 nt, Human
aauuaacaaauguagcugugau

SEQ ID NO: 1118773 - RNA, 22 nt, Human
agccuggauucgugcauccaca

SEQ ID NO: 1118774 - RNA, 22 nt, Human
uugggguguuggauggagcaag

SEQ ID NO: 1118775 - RNA, 22 nt, Human
cugccuggguucaaguccuguu

SEQ ID NO: 1118776 - RNA, 22 nt, Human
agggggugcuacuuccagaguu

SEQ ID NO: 1118777 - RNA, 22 nt, Human
auggaaaggcuguggaaacuua

SEQ ID NO: 1118778 - RNA, 22 nt, Human
ucucccacagucucccauggcu

SEQ ID NO: 1118779 - RNA, 22 nt, Human
gcucagaggaugcuccuuuaug

SEQ ID NO: 1118780 - RNA, 22 nt, Human
cugagcccaggcgggagcugag

SEQ ID NO: 1118781 - RNA, 22 nt, Human
uucauguaauuccauaagguaa

SEQ ID NO: 1118782 - RNA, 22 nt, Human
cuuguagaauugaaauggucuc

SEQ ID NO: 1118783 - RNA, 22 nt, Human
aauaacaggcucaucagaugcu

SEQ ID NO: 1118784 - RNA, 22 nt, Human
ugaggcagcaauuguauuguau

SEQ ID NO: 1118785 - RNA, 19 nt, Human
acagggcagcaauaggaua

SEQ ID NO: 1118786 - RNA, 22 nt, Human
uaagaacaagauguuccuguuu

SEQ ID NO: 1118787 - RNA, 22 nt, Human
agcugcugagagucugccgggc

SEQ ID NO: 1118788 - RNA, 23 nt, Human
uccagcagccaagaaggguagaa

SEQ ID NO: 1118789 - RNA, 22 nt, Human
ucaagcaggguagcaagcuggu

SEQ ID NO: 1118790 - RNA, 22 nt, Human
uauugaguuacagaaaauacuu

SEQ ID NO: 1118791 - RNA, 22 nt, Human
agaacagaggccuuauguuuca

SEQ ID NO: 1118792 - RNA, 22 nt, Human
ggcuggaaaagacaaagcuauu

SEQ ID NO: 1118793 - RNA, 22 nt, Human
ugucucagaggcaggaagagcc

SEQ ID NO: 1118794 - RNA, 18 nt, Human
cagggccccagaauuauc

SEQ ID NO: 1118795 - RNA, 22 nt, Human
aggcaguggcugagaccagggg

SEQ ID NO: 1118796 - RNA, 22 nt, Human
ccagcuggcaggagagucaggg

SEQ ID NO: 1118797 - RNA, 22 nt, Human
ggcuccugaaagacuaugggaa

SEQ ID NO: 1118798 - RNA, 19 nt, Human
acagaaauuaguuauuuuc

SEQ ID NO: 1118799 - RNA, 22 nt, Human
cccagacugcagagcgggcaga

SEQ ID NO: 1118800 - RNA, 22 nt, Human
ggucacaggggagaagagugau

SEQ ID NO: 1118801 - RNA, 20 nt, Human
uguuccaugacuauuuggau

SEQ ID NO: 1118802 - RNA, 19 nt, Human
acaggcagaauugggugug

SEQ ID NO: 1118803 - RNA, 22 nt, Human
ggagccagugcccucuggugga

SEQ ID NO: 1118804 - RNA, 22 nt, Human
cucuguccacagguuugucccu

SEQ ID NO: 1118805 - RNA, 22 nt, Human
aggucaaggccaaaagaguggu

SEQ ID NO: 1118806 - RNA, 22 nt, Human
ccuggccucgugcucacggcuc

SEQ ID NO: 1118807 - RNA, 22 nt, Human
aggacccugagcgggcaugccg

SEQ ID NO: 1118808 - RNA, 22 nt, Human
gggcagugguuacacagcugag

SEQ ID NO: 1118809 - RNA, 22 nt, Human
guuugcauaucugugaaaugga

SEQ ID NO: 1118810 - RNA, 22 nt, Human
ccaggccucuggcugcuuaguc

SEQ ID NO: 1118811 - RNA, 22 nt, Human
ucaguuuucucaucuguaauuu

SEQ ID NO: 1118812 - RNA, 22 nt, Human
ccagcugcagguguuccagaug

SEQ ID NO: 1118813 - RNA, 22 nt, Human
ggcagugaaaaaguauguuucc

SEQ ID NO: 1118814 - RNA, 22 nt, Human
agugucugccaacugcaugguc

SEQ ID NO: 1118815 - RNA, 22 nt, Human
gaacagaauuaccgaagaucug

SEQ ID NO: 1118816 - RNA, 22 nt, Human
cuggggacuugcagacacaauu

SEQ ID NO: 1118817 - RNA, 22 nt, Human
gguggccugcccugaucccugg

SEQ ID NO: 1118818 - RNA, 22 nt, Human
gccugucaauuuuguguacaau

SEQ ID NO: 1118819 - RNA, 22 nt, Human
aggcucugcagaccccagcugu

SEQ ID NO: 1118820 - RNA, 22 nt, Human
cacugaagguaggaccaaggcu

SEQ ID NO: 1118821 - RNA, 22 nt, Human
cagugcauagauccugaggccu

SEQ ID NO: 1118822 - RNA, 22 nt, Human
ucucagaguuuacggggcugaa

SEQ ID NO: 1118823 - RNA, 17 nt, Human
uuccuggaagucauucc

SEQ ID NO: 1118824 - RNA, 22 nt, Human
ucugagcuuuuauuaucaaccu

SEQ ID NO: 1118825 - RNA, 22 nt, Human
gcugcucuugaggggcucacug

SEQ ID NO: 1118826 - RNA, 23 nt, Human
ucugcucugaaguucggcugagc

SEQ ID NO: 1118827 - RNA, 22 nt, Human
gugggcuggacccuccugcucc

SEQ ID NO: 1118828 - RNA, 22 nt, Human
aaaguuacuaucacaaugaaau

SEQ ID NO: 1118829 - RNA, 22 nt, Human
cagccaggagcucccccugcuc

SEQ ID NO: 1118830 - RNA, 22 nt, Human
gcucagagggaacaaggggcug

SEQ ID NO: 1118831 - RNA, 22 nt, Human
agccaggaaugcaugcucugcu

SEQ ID NO: 1118832 - RNA, 22 nt, Human
uccucugccaaagggaguugcc

SEQ ID NO: 1118833 - RNA, 22 nt, Human
gugcgccagcucaaggggaggc

SEQ ID NO: 1118834 - RNA, 22 nt, Human
uggcuucagacuucugcuacgu

SEQ ID NO: 1118835 - RNA, 22 nt, Human
ugcuucucccaaccagggccug

SEQ ID NO: 1118836 - RNA, 22 nt, Human
agucucagaaaauaugcuuuuu

SEQ ID NO: 1118837 - RNA, 22 nt, Human
cacagcagagggagccauugaa

SEQ ID NO: 1118838 - RNA, 22 nt, Human
uaccuugggcuauuaucuuuga

SEQ ID NO: 1118839 - RNA, 22 nt, Human
agccauugaauuuagugccuuu

SEQ ID NO: 1118840 - RNA, 22 nt, Human
aguguuucccaguaggaugaaa

SEQ ID NO: 1118841 - RNA, 22 nt, Human
gcucaagggaugggagugggug

SEQ ID NO: 1118842 - RNA, 22 nt, Human
auaaaaacugacccauccuuug

SEQ ID NO: 1118843 - RNA, 22 nt, Human
aaaugugucauauucaaaguca

SEQ ID NO: 1118844 - RNA, 22 nt, Human
uaugcauaugaccccaagcuug

SEQ ID NO: 1118845 - RNA, 22 nt, Human
gggcugccaagccugccugccu

SEQ ID NO: 1118846 - RNA, 22 nt, Human
uacauguaggugacauuuuaau

SEQ ID NO: 1118847 - RNA, 22 nt, Human
ugucccagucaaggcugucauc

SEQ ID NO: 1118848 - RNA, 22 nt, Human
ccugucagaugaaguaauugug

SEQ ID NO: 1118849 - RNA, 22 nt, Human
caucaguguggcaguucacugu

SEQ ID NO: 1118850 - RNA, 22 nt, Human
uccuuggcaugccgucuucucc

SEQ ID NO: 1118851 - RNA, 21 nt, Human
aaggcagaagcauggaaugag

SEQ ID NO: 1118852 - RNA, 22 nt, Human
ugucucagaauggcucauaaua

SEQ ID NO: 1118853 - RNA, 20 nt, Human
ccagguggugccuggagagg

SEQ ID NO: 1118854 - RNA, 22 nt, Human
cggggcugcgcucuuccugccg

SEQ ID NO: 1118855 - RNA, 22 nt, Human
uguguacacaaugauugcagag

SEQ ID NO: 1118856 - RNA, 22 nt, Human
ugcagcauugcaaagcagucuu

SEQ ID NO: 1118857 - RNA, 22 nt, Human
ccuguguggaaaccgcaugacg

SEQ ID NO: 1118858 - RNA, 22 nt, Human
agggaagagcuugcaagaaacc

SEQ ID NO: 1118859 - RNA, 22 nt, Human
cuggagcuccagggucuccucu

SEQ ID NO: 1118860 - RNA, 22 nt, Human
auuuuuccaugauacuuaucug

SEQ ID NO: 1118861 - RNA, 22 nt, Human
cagguggaucucuaaggacuga

SEQ ID NO: 1118862 - RNA, 22 nt, Human
uugaacauuaacuucagucuau

SEQ ID NO: 1118863 - RNA, 23 nt, Human
agcagccauagggaagcaauaca

SEQ ID NO: 1118864 - RNA, 21 nt, Human
gggcagaggggccuccugggu

SEQ ID NO: 1118865 - RNA, 22 nt, Human
gggaucagaaacauagcccuga

SEQ ID NO: 1118866 - RNA, 22 nt, Human
aaaagagguuaaccaggugugu

SEQ ID NO: 1118867 - RNA, 22 nt, Human
ccucagagccuccagaaggaau

SEQ ID NO: 1118868 - RNA, 22 nt, Human
ugaggggagaagcagcagccug

SEQ ID NO: 1118869 - RNA, 22 nt, Human
ucugaggcccugcaggcagugu

SEQ ID NO: 1118870 - RNA, 22 nt, Human
gagagugaggccugggaaucua

SEQ ID NO: 1118871 - RNA, 22 nt, Human
caggugaccuuuguccuaaguu

SEQ ID NO: 1118872 - RNA, 22 nt, Human
cccugcagccuugcaugccuuc

SEQ ID NO: 1118873 - RNA, 22 nt, Human
gcugcagcaagcccuccagggg

SEQ ID NO: 1118874 - RNA, 22 nt, Human
uuucaguguaagguuuccagga

SEQ ID NO: 1118875 - RNA, 22 nt, Human
cucccaggguagggagagacua

SEQ ID NO: 1118876 - RNA, 22 nt, Human
auaaacagcuccauuuagugcc

SEQ ID NO: 1118877 - RNA, 22 nt, Human
aggaagcucggagagggcaaau

SEQ ID NO: 1118878 - RNA, 19 nt, Human
ggcucucuuaaagcuguuu

SEQ ID NO: 1118879 - RNA, 22 nt, Human
aucagcaaucaaauugcagagu

SEQ ID NO: 1118880 - RNA, 22 nt, Human
agccccaguccgcugcgggcgg

SEQ ID NO: 1118881 - RNA, 23 nt, Human
aagcuuccuucacgucuccuggg

SEQ ID NO: 1118882 - RNA, 22 nt, Human
uagaaaucagguuuuuagaaag

SEQ ID NO: 1118883 - RNA, 22 nt, Human
aauuuggcagugucuugaagua

SEQ ID NO: 1118884 - RNA, 22 nt, Human
uugcagggcaggaccauggaca

SEQ ID NO: 1118885 - RNA, 22 nt, Human
guguguccucaguaguggcaug

SEQ ID NO: 1118886 - RNA, 22 nt, Human
gagguucacaggcuaucacagu

SEQ ID NO: 1118887 - RNA, 22 nt, Human
ugcuucaggagaugucaccaug

SEQ ID NO: 1118888 - RNA, 22 nt, Human
cagggcugguuugucgaagaaa

SEQ ID NO: 1118889 - RNA, 22 nt, Human
cggcuggggcuguccccaugac

SEQ ID NO: 1118890 - RNA, 20 nt, Human
ugccaugguaacagagugug

SEQ ID NO: 1118891 - RNA, 22 nt, Human
cagagcugacccaaggauugaa

SEQ ID NO: 1118892 - RNA, 22 nt, Human
gggauggggagcuggaaagggg

SEQ ID NO: 1118893 - RNA, 22 nt, Human
gccugagcaggcguggaccaug

SEQ ID NO: 1118894 - RNA, 22 nt, Human
agaggggcucauauccugucau

SEQ ID NO: 1118895 - RNA, 22 nt, Human
cugggagcccugacuagccugg

SEQ ID NO: 1118896 - RNA, 22 nt, Human
cccaggagguagagguugcagu

SEQ ID NO: 1118897 - RNA, 22 nt, Human
gcugucuccauagcuguguguc

SEQ ID NO: 1118898 - RNA, 22 nt, Human
agccucucugaugugacagcua

SEQ ID NO: 1118899 - RNA, 22 nt, Human
guuugcauuuauuagucuucug

SEQ ID NO: 1118900 - RNA, 22 nt, Human
cagagcucagagcagggcacuc

SEQ ID NO: 1118901 - RNA, 22 nt, Human
ucuggagcgaggucccugucug

SEQ ID NO: 1118902 - RNA, 22 nt, Human
uugucugugaaauggaaauagu

SEQ ID NO: 1118903 - RNA, 22 nt, Human
cccaggccccagggcuugucag

SEQ ID NO: 1118904 - RNA, 22 nt, Human
uuccauauguauauagcuguua

SEQ ID NO: 1118905 - RNA, 19 nt, Human
agccuggcuuugcucugcu

SEQ ID NO: 1118906 - RNA, 22 nt, Human
uggcucuggggacaguaagucc

SEQ ID NO: 1118907 - RNA, 22 nt, Human
agggcugcaucugccuggugaa

SEQ ID NO: 1118908 - RNA, 22 nt, Human
aagaggaagucuccauggagag

SEQ ID NO: 1118909 - RNA, 22 nt, Human
uccagccaugacucggacagug

SEQ ID NO: 1118910 - RNA, 22 nt, Human
acaauguaggauauguacuugu

SEQ ID NO: 1118911 - RNA, 22 nt, Human
acagaacugggaaaugcacaua

SEQ ID NO: 1118912 - RNA, 22 nt, Human
gugccagcaguuauggugauuu

SEQ ID NO: 1118913 - RNA, 22 nt, Human
augggggccugaacaggcaaaa

SEQ ID NO: 1118914 - RNA, 22 nt, Human
ggcagcucacugauuagcaauu

SEQ ID NO: 1118915 - RNA, 18 nt, Human
uggacaggguggagaaaa

SEQ ID NO: 1118916 - RNA, 22 nt, Human
uaggccagcccuuaguccuguc

SEQ ID NO: 1118917 - RNA, 22 nt, Human
ugaggugaagaguggagcucag

SEQ ID NO: 1118918 - RNA, 22 nt, Human
agguaaagacagugaaagaggg

SEQ ID NO: 1118919 - RNA, 22 nt, Human
ugaaggaaugagggaguggguc

SEQ ID NO: 1118920 - RNA, 22 nt, Human
ccuuggcccuagccucaggcaa

SEQ ID NO: 1118921 - RNA, 22 nt, Human
gccccuggcuggccagcuccuc

SEQ ID NO: 1118922 - RNA, 22 nt, Human
acagauauaugauuguguaaau

SEQ ID NO: 1118923 - RNA, 22 nt, Human
ucaguguaaguuauguagaugu

SEQ ID NO: 1118924 - RNA, 22 nt, Human
gcugucugucucugucccacca

SEQ ID NO: 1118925 - RNA, 21 nt, Human
cauuucuauugaugagaaaag

SEQ ID NO: 1118926 - RNA, 22 nt, Human
agggggcccuugcaggugagcg

SEQ ID NO: 1118927 - RNA, 22 nt, Human
cagagcagaaaccugggugauu

SEQ ID NO: 1118928 - RNA, 22 nt, Human
gggaaggagguggcuugaagug

SEQ ID NO: 1118929 - RNA, 22 nt, Human
aagcuggagaguuaggugaaua

SEQ ID NO: 1118930 - RNA, 22 nt, Human
aaugcugcucucauaauuauag

SEQ ID NO: 1118931 - RNA, 22 nt, Human
ggucccagaauugguuagcaca

SEQ ID NO: 1118932 - RNA, 22 nt, Human
ugcaugcagcuggugauaagaa

SEQ ID NO: 1118933 - RNA, 20 nt, Human
gagauuuccaaucaugccca

SEQ ID NO: 1118934 - RNA, 22 nt, Human
caucagcagucacaugaugcug

SEQ ID NO: 1118935 - RNA, 22 nt, Human
auguacauuuagaucauuucug

SEQ ID NO: 1118936 - RNA, 22 nt, Human
aauguguauaugaacauacagg

SEQ ID NO: 1118937 - RNA, 22 nt, Human
ggcucugcuucagaaggcucau

SEQ ID NO: 1118938 - RNA, 22 nt, Human
gcugagcuagcuaucucagucu

SEQ ID NO: 1118939 - RNA, 22 nt, Human
ggagccuguggcugcuugaagc

SEQ ID NO: 1118940 - RNA, 22 nt, Human
uuccucuccucccaccagguga

SEQ ID NO: 1118941 - RNA, 22 nt, Human
uuacuuuggauggucaagaaag

SEQ ID NO: 1118942 - RNA, 22 nt, Human
gcagggaggaagagaugcuucc

SEQ ID NO: 1118943 - RNA, 22 nt, Human
ugugggcucccccucacucugu

SEQ ID NO: 1118944 - RNA, 22 nt, Human
acuggcagccacaacuggcagg

SEQ ID NO: 1118945 - RNA, 22 nt, Human
guaacugaggcagcuuuuaaga

SEQ ID NO: 1118946 - RNA, 22 nt, Human
uaaguucauaagcuuauucuua

SEQ ID NO: 1118947 - RNA, 22 nt, Human
aaauaauuauagcgagucuauc

SEQ ID NO: 1118948 - RNA, 22 nt, Human
gcagcguggggacaggagcuca

SEQ ID NO: 1118949 - RNA, 22 nt, Human
cugcagggcagggccuccuggc

SEQ ID NO: 1118950 - RNA, 22 nt, Human
gcucaggauuucauccaugugu

SEQ ID NO: 1118951 - RNA, 22 nt, Human
ugggcaaguaucggacucugag

SEQ ID NO: 1118952 - RNA, 22 nt, Human
gagagcuggccagcuucaguau

SEQ ID NO: 1118953 - RNA, 22 nt, Human
cugagcugguggaagcaugcag

SEQ ID NO: 1118954 - RNA, 22 nt, Human
cgcuggccauagccuccugugu

SEQ ID NO: 1118955 - RNA, 22 nt, Human
aagaugauaggacuugcuuaag

SEQ ID NO: 1118956 - RNA, 20 nt, Human
gcugcucuccacggucugca

SEQ ID NO: 1118957 - RNA, 22 nt, Human
accucugcaacccuggaauggg

SEQ ID NO: 1118958 - RNA, 22 nt, Human
caugaagcauguuuugucauga

SEQ ID NO: 1118959 - RNA, 22 nt, Human
aggaggcugguucaggccauau

SEQ ID NO: 1118960 - RNA, 22 nt, Human
aggcccaguuauccuacuuguu

SEQ ID NO: 1118961 - RNA, 22 nt, Human
guucacauccuugugaggauuu

SEQ ID NO: 1118962 - RNA, 22 nt, Human
acagcuguggccacuugcaucc

SEQ ID NO: 1118963 - RNA, 22 nt, Human
caguagcacuagauaugugugg

SEQ ID NO: 1118964 - RNA, 20 nt, Human
cagcccuccaguggaggcag

SEQ ID NO: 1118965 - RNA, 22 nt, Human
aagaacagguucuagaaccauu

SEQ ID NO: 1118966 - RNA, 21 nt, Human
aguucauacugaguaacaaaa

SEQ ID NO: 1118967 - RNA, 22 nt, Human
gggaggugauggcaagcagcgg

SEQ ID NO: 1118968 - RNA, 21 nt, Human
gaggccacuaauaggggcaga

SEQ ID NO: 1118969 - RNA, 22 nt, Human
ucucucagucagaugcuaaaga

SEQ ID NO: 1118970 - RNA, 22 nt, Human
aggggugauuugggacaggaca

SEQ ID NO: 1118971 - RNA, 22 nt, Human
uuggcucaggaccccugugacu

SEQ ID NO: 1118972 - RNA, 22 nt, Human
cugucuccagggcaggugcagg

SEQ ID NO: 1118973 - RNA, 22 nt, Human
cugcccuguggcucugagucau

SEQ ID NO: 1118974 - RNA, 22 nt, Human
gcagccacuaguuuuccuguuu

SEQ ID NO: 1118975 - RNA, 22 nt, Human
ccacacagggggaugaguuauu

SEQ ID NO: 1118976 - RNA, 22 nt, Human
agggcuggagccacagcuggga

SEQ ID NO: 1118977 - RNA, 22 nt, Human
gcugaagcccacguggcuugua

SEQ ID NO: 1118978 - RNA, 22 nt, Human
gggcagccucggugccugcugc

SEQ ID NO: 1118979 - RNA, 22 nt, Human
cagcaggggaacugugggccag

SEQ ID NO: 1118980 - RNA, 22 nt, Human
uggcagaggaggcucagauuga

SEQ ID NO: 1118981 - RNA, 22 nt, Human
agcuggcccucgagagccaauu

SEQ ID NO: 1118982 - RNA, 22 nt, Human
gggccugggaacuugcauuuag

SEQ ID NO: 1118983 - RNA, 22 nt, Human
agggagagguugaaaccucagu

SEQ ID NO: 1118984 - RNA, 22 nt, Human
cugccuguuagucuagcaguua

SEQ ID NO: 1118985 - RNA, 22 nt, Human
uucuuucagaacacaagugauu

SEQ ID NO: 1118986 - RNA, 21 nt, Human
aauaaaacaguuggugucaau

SEQ ID NO: 1118987 - RNA, 22 nt, Human
aaaugcagcagcuaauugaaaa

SEQ ID NO: 1118988 - RNA, 17 nt, Human
agguggcugcugcgccu

SEQ ID NO: 1118989 - RNA, 22 nt, Human
agucucugcacaguaagaagca

SEQ ID NO: 1118990 - RNA, 18 nt, Human
gggaucaggcugccuagg

SEQ ID NO: 1118991 - RNA, 22 nt, Human
auacagaagaacuauagccacu

SEQ ID NO: 1118992 - RNA, 22 nt, Human
cucugagagagcuggugagcac

SEQ ID NO: 1118993 - RNA, 22 nt, Human
uaagacauuugaaaugugaucc

SEQ ID NO: 1118994 - RNA, 22 nt, Human
agcccagaggcugggcgugcau

SEQ ID NO: 1118995 - RNA, 22 nt, Human
cugcucugagaggcucuuccua

SEQ ID NO: 1118996 - RNA, 22 nt, Human
guugggaaggcaagaaguagaa

SEQ ID NO: 1118997 - RNA, 22 nt, Human
cagugucuccagaugcuccaau

SEQ ID NO: 1118998 - RNA, 22 nt, Human
aaaaguuuaagacucauucuag

SEQ ID NO: 1118999 - RNA, 22 nt, Human
gcugagagcaaagcaugucuag

SEQ ID NO: 1119000 - RNA, 22 nt, Human
cuggcucaguucuugguuuuca

SEQ ID NO: 1119001 - RNA, 22 nt, Human
gucucagggacugcuucugggg

SEQ ID NO: 1119002 - RNA, 22 nt, Human
cauguacauucuguagauggag

SEQ ID NO: 1119003 - RNA, 22 nt, Human
aggcugucaucuuugcaggcag

SEQ ID NO: 1119004 - RNA, 22 nt, Human
ugcugccaccugguggcugaag

SEQ ID NO: 1119005 - RNA, 22 nt, Human
caggaguggugugagggacucc

SEQ ID NO: 1119006 - RNA, 22 nt, Human
ccugcagcuccggauuucuggg

SEQ ID NO: 1119007 - RNA, 22 nt, Human
cuagaaaugcucaagagaaagu

SEQ ID NO: 1119008 - RNA, 22 nt, Human
acaauucuggguauuuauauag

SEQ ID NO: 1119009 - RNA, 22 nt, Human
agggcagcagcccauggcucug

SEQ ID NO: 1119010 - RNA, 22 nt, Human
augcaguggcagcuccuggugu

SEQ ID NO: 1119011 - RNA, 22 nt, Human
cacaguggcagguguggguugu

SEQ ID NO: 1119012 - RNA, 22 nt, Human
ggcagauggagaagcagcaggu

SEQ ID NO: 1119013 - RNA, 22 nt, Human
uggggcuggcacagucucuauu

SEQ ID NO: 1119014 - RNA, 22 nt, Human
acuuccugcuaugagcuucugu

SEQ ID NO: 1119015 - RNA, 22 nt, Human
uucaagaugucuucacaauagu

SEQ ID NO: 1119016 - RNA, 22 nt, Human
ugucauuuaguccucugugugu

SEQ ID NO: 1119017 - RNA, 22 nt, Human
uauguacauaacaugaaaugca

SEQ ID NO: 1119018 - RNA, 22 nt, Human
cugcagugaaaucaggaagcaa

SEQ ID NO: 1119019 - RNA, 22 nt, Human
agcucacagaaauccugcagga

SEQ ID NO: 1119020 - RNA, 22 nt, Human
agccacgucccugucaggguca

SEQ ID NO: 1119021 - RNA, 22 nt, Human
ggcccagcacagugcuuggggg

SEQ ID NO: 1119022 - RNA, 22 nt, Human
gucucccaaccccugugcccag

SEQ ID NO: 1119023 - RNA, 22 nt, Human
ggauaagaaaauuguaauaacu

SEQ ID NO: 1119024 - RNA, 19 nt, Human
aagggcugggcaccucacu

SEQ ID NO: 1119025 - RNA, 22 nt, Human
gagagaagaauguuccgaggcc

SEQ ID NO: 1119026 - RNA, 22 nt, Human
augaaauaucuugaagaaauuc

SEQ ID NO: 1119027 - RNA, 22 nt, Human
cagcccaggccgacaguuccuc

SEQ ID NO: 1119028 - RNA, 22 nt, Human
ccuggugcuuaccagagcuuuu

SEQ ID NO: 1119029 - RNA, 22 nt, Human
ucuccuucgaggcccagcuccc

SEQ ID NO: 1119030 - RNA, 22 nt, Human
cccccagccagcagugcucagc

SEQ ID NO: 1119031 - RNA, 21 nt, Human
gcacagugccaggcacacagu

SEQ ID NO: 1119032 - RNA, 22 nt, Human
acuaaggaauaugacaaacuca

SEQ ID NO: 1119033 - RNA, 22 nt, Human
caaggaaacaugaaaugcauug

SEQ ID NO: 1119034 - RNA, 22 nt, Human
uccagggaugguaaugagcagu

SEQ ID NO: 1119035 - RNA, 22 nt, Human
cauggggagacaccuagggaaa

SEQ ID NO: 1119036 - RNA, 22 nt, Human
uucccaggcugugcuaccagag

SEQ ID NO: 1119037 - RNA, 22 nt, Human
gcacccagcccagggcgugaug

SEQ ID NO: 1119038 - RNA, 22 nt, Human
gagaggccaccugacgagcagu

SEQ ID NO: 1119039 - RNA, 22 nt, Human
aaggagaaaugguagaugugca

SEQ ID NO: 1119040 - RNA, 22 nt, Human
ugggccuggaguuuguccagag

SEQ ID NO: 1119041 - RNA, 23 nt, Human
uuacaguaggaguuggaaaacca

SEQ ID NO: 1119042 - RNA, 22 nt, Human
uacaguaaccagucuacuuaga

SEQ ID NO: 1119043 - RNA, 22 nt, Human
auaacagauacucucugugagg

SEQ ID NO: 1119044 - RNA, 22 nt, Human
augucuuuggcuuugacauggc

SEQ ID NO: 1119045 - RNA, 22 nt, Human
ccugccugaaggucagccaccc

SEQ ID NO: 1119046 - RNA, 22 nt, Human
guugaguggguuaggaugcuga

SEQ ID NO: 1119047 - RNA, 23 nt, Human
gcccaugcuguugggcccgagca

SEQ ID NO: 1119048 - RNA, 22 nt, Human
uuugcauuccugccugcauuca

SEQ ID NO: 1119049 - RNA, 22 nt, Human
agauggguaacuggagucugcu

SEQ ID NO: 1119050 - RNA, 22 nt, Human
aagugacaaaaggguauccaaa

SEQ ID NO: 1119051 - RNA, 22 nt, Human
ggcccugggaugcucagcagug

SEQ ID NO: 1119052 - RNA, 22 nt, Human
ucccagccuuccuuguggugaa

SEQ ID NO: 1119053 - RNA, 22 nt, Human
cggcuggguucggcugcaggcc

SEQ ID NO: 1119054 - RNA, 22 nt, Human
gaugggggccagggccugcuuu

SEQ ID NO: 1119055 - RNA, 22 nt, Human
cagcugaacauguagagcaucu

SEQ ID NO: 1119056 - RNA, 22 nt, Human
ccagggcacuuaggcccagccc

SEQ ID NO: 1119057 - RNA, 22 nt, Human
ugggcaagucacuucugucuuu

SEQ ID NO: 1119058 - RNA, 22 nt, Human
gcguaaggccucuggucucgga

SEQ ID NO: 1119059 - RNA, 22 nt, Human
cuggcagcaguuaugaaacaau

SEQ ID NO: 1119060 - RNA, 22 nt, Human
cuguccuugcuggccagguaug

SEQ ID NO: 1119061 - RNA, 22 nt, Human
auucauucugaccucaagagaa

SEQ ID NO: 1119062 - RNA, 22 nt, Human
gaaaucugucuuuguuugaaua

SEQ ID NO: 1119063 - RNA, 22 nt, Human
gguggggucacgacagagggaa

SEQ ID NO: 1119064 - RNA, 22 nt, Human
gggcugggcaugguguucccuc

SEQ ID NO: 1119065 - RNA, 22 nt, Human
gcccucugcuggccucaccucg

SEQ ID NO: 1119066 - RNA, 22 nt, Human
ccagggcaggggcuggaguuca

SEQ ID NO: 1119067 - RNA, 22 nt, Human
uggcagcaguggagguagaaag

SEQ ID NO: 1119068 - RNA, 22 nt, Human
cacugaaggacaguaggaaggg

SEQ ID NO: 1119069 - RNA, 22 nt, Human
gcuggccagggcugcucgcgga

SEQ ID NO: 1119070 - RNA, 22 nt, Human
ucagaggagaaguugggaaaau

SEQ ID NO: 1119071 - RNA, 22 nt, Human
auaauaaaccaggaugggucug

SEQ ID NO: 1119072 - RNA, 22 nt, Human
uuaaaguucauuaaaugagcca

SEQ ID NO: 1119073 - RNA, 22 nt, Human
gguccuggaaauugacggaaag

SEQ ID NO: 1119074 - RNA, 22 nt, Human
uggcccugcugggucagagcug

SEQ ID NO: 1119075 - RNA, 22 nt, Human
gagcugcuucugugugccgggu

SEQ ID NO: 1119076 - RNA, 22 nt, Human
aagcagaauuucccacuaguug

SEQ ID NO: 1119077 - RNA, 22 nt, Human
gagauggggucagcugggacau

SEQ ID NO: 1119078 - RNA, 21 nt, Human
agcagaacagucgagcacugc

SEQ ID NO: 1119079 - RNA, 20 nt, Human
gugcuucagaagccauugcu

SEQ ID NO: 1119080 - RNA, 22 nt, Human
ucuuuccuaggugauaugcaau

SEQ ID NO: 1119081 - RNA, 22 nt, Human
cuggggcuggugaggcaggcuc

SEQ ID NO: 1119082 - RNA, 22 nt, Human
uuccaaaggaauggggagcuau

SEQ ID NO: 1119083 - RNA, 22 nt, Human
ugucccaggccucauguugcca

SEQ ID NO: 1119084 - RNA, 22 nt, Human
cagagguauugcaaaagccuag

SEQ ID NO: 1119085 - RNA, 18 nt, Human
ugggcugccuggccucug

SEQ ID NO: 1119086 - RNA, 22 nt, Human
aagcaaagaguuuaguggguga

SEQ ID NO: 1119087 - RNA, 22 nt, Human
gccagggaacccaagggccuca

SEQ ID NO: 1119088 - RNA, 22 nt, Human
gagaaacuuggaguuauucugg

SEQ ID NO: 1119089 - RNA, 22 nt, Human
uguauuuugugaggaucacucu

SEQ ID NO: 1119090 - RNA, 22 nt, Human
caugucuggguauaugcauaug

SEQ ID NO: 1119091 - RNA, 22 nt, Human
acagcuuuucaauucugcugag

SEQ ID NO: 1119092 - RNA, 22 nt, Human
uggaaggggagcuggaaagggg

SEQ ID NO: 1119093 - RNA, 22 nt, Human
uggguaaacugggucuggagag

SEQ ID NO: 1119094 - RNA, 22 nt, Human
gaagcccuauccucuccuggga

SEQ ID NO: 1119095 - RNA, 22 nt, Human
agucccaggcagccgagccggu

SEQ ID NO: 1119096 - RNA, 22 nt, Human
ccucagccuuggccccaggcag

SEQ ID NO: 1119097 - RNA, 22 nt, Human
uguacacugcaggaugcauugc

SEQ ID NO: 1119098 - RNA, 22 nt, Human
ucucaggccccugaguuucucu

SEQ ID NO: 1119099 - RNA, 22 nt, Human
gccaggugcauggcugagucuc

SEQ ID NO: 1119100 - RNA, 22 nt, Human
gcuggaccaggugugcacaggc

SEQ ID NO: 1119101 - RNA, 22 nt, Human
uaagaauuguguugaauagagu

SEQ ID NO: 1119102 - RNA, 22 nt, Human
caggccucuccuuagucuggca

SEQ ID NO: 1119103 - RNA, 22 nt, Human
gcugcagcucgccuuccggccu

SEQ ID NO: 1119104 - RNA, 22 nt, Human
gugcagggcuggcaccggaggc

SEQ ID NO: 1119105 - RNA, 22 nt, Human
cagcauggugccagugagucca

SEQ ID NO: 1119106 - RNA, 22 nt, Human
ucaggccacggcucacugagac

SEQ ID NO: 1119107 - RNA, 22 nt, Human
auaaaacuuauuagaauugugu

SEQ ID NO: 1119108 - RNA, 22 nt, Human
aggcaaaauuacaaaguuauua

SEQ ID NO: 1119109 - RNA, 22 nt, Human
cugcagagguugguucuaagau

SEQ ID NO: 1119110 - RNA, 20 nt, Human
ugucauuguuucuaggaccu

SEQ ID NO: 1119111 - RNA, 22 nt, Human
aagacuuucucccaaauccuca

SEQ ID NO: 1119112 - RNA, 22 nt, Human
uuugcauuuauaaguuggugga

SEQ ID NO: 1119113 - RNA, 22 nt, Human
cugggguggauggguccaaguu

SEQ ID NO: 1119114 - RNA, 22 nt, Human
ucuccuuugaaaguuaggacug

SEQ ID NO: 1119115 - RNA, 18 nt, Human
cagcugccagcucaugga

SEQ ID NO: 1119116 - RNA, 22 nt, Human
auuucuucaggucagaaauaga

SEQ ID NO: 1119117 - RNA, 20 nt, Human
agacccuguguccuguggcc

SEQ ID NO: 1119118 - RNA, 22 nt, Human
uuaacagacauauauauuugua

SEQ ID NO: 1119119 - RNA, 22 nt, Human
uguggcuguguccaccugcugc

SEQ ID NO: 1119120 - RNA, 22 nt, Human
augcaagauguauagaagacuu

SEQ ID NO: 1119121 - RNA, 22 nt, Human
guacaaaguggaccugauagua

SEQ ID NO: 1119122 - RNA, 22 nt, Human
gggcuggaucuccugcaggcag

SEQ ID NO: 1119123 - RNA, 22 nt, Human
ugucccagggaaggcccagcac

SEQ ID NO: 1119124 - RNA, 22 nt, Human
uaaggcacgcauaagagggggc

SEQ ID NO: 1119125 - RNA, 22 nt, Human
cugcaggcucgaagacacggau

SEQ ID NO: 1119126 - RNA, 22 nt, Human
cuggcagcugcccgagaugccc

SEQ ID NO: 1119127 - RNA, 22 nt, Human
uggcagcuacagacagagguga

SEQ ID NO: 1119128 - RNA, 22 nt, Human
ucagagugaggcccagcaaucu

SEQ ID NO: 1119129 - RNA, 22 nt, Human
caggggaagaugccaagggaga

SEQ ID NO: 1119130 - RNA, 22 nt, Human
cugaaggaagcagguggccugu

SEQ ID NO: 1119131 - RNA, 22 nt, Human
ggagccuggccuggcucugugu

SEQ ID NO: 1119132 - RNA, 22 nt, Human
cucuggaguucucaugaggaac

SEQ ID NO: 1119133 - RNA, 21 nt, Human
guguuuccuguuuauggcuug

SEQ ID NO: 1119134 - RNA, 22 nt, Human
uggccugucuuguugugcuaga

SEQ ID NO: 1119135 - RNA, 22 nt, Human
gcaagauguuaacauagggaga

SEQ ID NO: 1119136 - RNA, 22 nt, Human
uuuccucuuuguaccuugacua

SEQ ID NO: 1119137 - RNA, 22 nt, Human
cauuuagagucuugcaauuuua

SEQ ID NO: 1119138 - RNA, 21 nt, Human
ugcauaaagaaauacaaauac

SEQ ID NO: 1119139 - RNA, 22 nt, Human
gaaacuguauguaguuuuuggg

SEQ ID NO: 1119140 - RNA, 22 nt, Human
aaugcaguuucauuuguagaau

SEQ ID NO: 1119141 - RNA, 22 nt, Human
cgcugccaggauccccugccgg

SEQ ID NO: 1119142 - RNA, 22 nt, Human
cugggcugcaguuccugguccu

SEQ ID NO: 1119143 - RNA, 22 nt, Human
ggcagucagugugguucauaaa

SEQ ID NO: 1119144 - RNA, 17 nt, Human
ccagguggaaucgugga

SEQ ID NO: 1119145 - RNA, 22 nt, Human
cagagacagggcagggagugug

SEQ ID NO: 1119146 - RNA, 22 nt, Human
agcacagauucugaagaguccu

SEQ ID NO: 1119147 - RNA, 22 nt, Human
agccuggauccauguggcuacc

SEQ ID NO: 1119148 - RNA, 22 nt, Human
cccucugaccuccugccacagu

SEQ ID NO: 1119149 - RNA, 22 nt, Human
gggagcuguaguccagauaccg

SEQ ID NO: 1119150 - RNA, 22 nt, Human
cugugcugauucagcacaggcc

SEQ ID NO: 1119151 - RNA, 22 nt, Human
gcuuccuucuaccacaucaugc

SEQ ID NO: 1119152 - RNA, 22 nt, Human
ccagggcagccaacccagaugc

SEQ ID NO: 1119153 - RNA, 22 nt, Human
cagagccaaaccucagggcccg

SEQ ID NO: 1119154 - RNA, 22 nt, Human
gcuguccugggaacaggcacua

SEQ ID NO: 1119155 - RNA, 22 nt, Human
ucauuacagagauauaaucuac

SEQ ID NO: 1119156 - RNA, 22 nt, Human
uuguccuuggaugaagcuggga

SEQ ID NO: 1119157 - RNA, 22 nt, Human
aaaguguugauaugugacaucc

SEQ ID NO: 1119158 - RNA, 22 nt, Human
agaugagggguagaaaggacuu

SEQ ID NO: 1119159 - RNA, 19 nt, Human
ugccugucaguagaucuca

SEQ ID NO: 1119160 - RNA, 22 nt, Human
ggcagcagggcugucucccuac

SEQ ID NO: 1119161 - RNA, 20 nt, Human
acauguacuaaugaauacag

SEQ ID NO: 1119162 - RNA, 22 nt, Human
ugggccugauucuugaauccug

SEQ ID NO: 1119163 - RNA, 22 nt, Human
gagcacagaaucuucccaugca

SEQ ID NO: 1119164 - RNA, 22 nt, Human
uccucaggaucuaggagugcuu

SEQ ID NO: 1119165 - RNA, 22 nt, Human
gccuggugguauccuggcaaga

SEQ ID NO: 1119166 - RNA, 22 nt, Human
uuuaaauaggacuccugggggu

SEQ ID NO: 1119167 - RNA, 22 nt, Human
agucauaauuauaaacaucagu

SEQ ID NO: 1119168 - RNA, 22 nt, Human
uugcauugugauuacagaggug

SEQ ID NO: 1119169 - RNA, 22 nt, Human
uguauuagaucugagaacuucu

SEQ ID NO: 1119170 - RNA, 23 nt, Human
uggcucucucagugcugcagagg

SEQ ID NO: 1119171 - RNA, 22 nt, Human
aacagaaaucauuuagggcucu

SEQ ID NO: 1119172 - RNA, 22 nt, Human
gauggggaugagaagugagcag

SEQ ID NO: 1119173 - RNA, 22 nt, Human
aggggcugccuggcuuggcacu

SEQ ID NO: 1119174 - RNA, 22 nt, Human
agaucaaagccaugagagauuu

SEQ ID NO: 1119175 - RNA, 22 nt, Human
cagcucugcugggaggaugcag

SEQ ID NO: 1119176 - RNA, 22 nt, Human
aggagaguaccauugggccgca

SEQ ID NO: 1119177 - RNA, 22 nt, Human
cucuggagguggagguugcagu

SEQ ID NO: 1119178 - RNA, 22 nt, Human
auccaguuuaugucauauucuu

SEQ ID NO: 1119179 - RNA, 22 nt, Human
gagcagggccacuucuguaccu

SEQ ID NO: 1119180 - RNA, 22 nt, Human
ccaaggagcaaguuuacaccug

SEQ ID NO: 1119181 - RNA, 22 nt, Human
cagcuccccaugguuccugaag

SEQ ID NO: 1119182 - RNA, 19 nt, Human
ccauggcaaugaucugaug

SEQ ID NO: 1119183 - RNA, 22 nt, Human
agugggcaugaucuggugucug

SEQ ID NO: 1119184 - RNA, 22 nt, Human
ugcucccagggacucuggcugg

SEQ ID NO: 1119185 - RNA, 22 nt, Human
accagcucagaagccagaaaga

SEQ ID NO: 1119186 - RNA, 22 nt, Human
ugccucagucuaaagucucuca

SEQ ID NO: 1119187 - RNA, 22 nt, Human
uaaaauguuugcaagagaccag

SEQ ID NO: 1119188 - RNA, 22 nt, Human
agggcccaggacagcaucaggg

SEQ ID NO: 1119189 - RNA, 22 nt, Human
uuuauuccaugugucuaugacc

SEQ ID NO: 1119190 - RNA, 22 nt, Human
cagaauuuuucgaauguacugu

SEQ ID NO: 1119191 - RNA, 22 nt, Human
uaaauguguuagucaugguuuu

SEQ ID NO: 1119192 - RNA, 22 nt, Human
ggagcagagcucuucaucugca

SEQ ID NO: 1119193 - RNA, 22 nt, Human
ucugaggcuaagagacagaggc

SEQ ID NO: 1119194 - RNA, 22 nt, Human
gaggggcugcccuggugucagg

SEQ ID NO: 1119195 - RNA, 22 nt, Human
gcugcugcgcuugucuacuguu

SEQ ID NO: 1119196 - RNA, 22 nt, Human
auaguggugagcugcauuuaug

SEQ ID NO: 1119197 - RNA, 22 nt, Human
cugaaggauucaaaauggcagg

SEQ ID NO: 1119198 - RNA, 22 nt, Human
aggaaaaauaaggcagcagggc

SEQ ID NO: 1119199 - RNA, 16 nt, Human
cagaguguaaacagga

SEQ ID NO: 1119200 - RNA, 22 nt, Human
uuaauaaaguaugaauuggaaa

SEQ ID NO: 1119201 - RNA, 22 nt, Human
uuugacagcuuguuacaaaguu

SEQ ID NO: 1119202 - RNA, 22 nt, Human
uaauuuaauccaaguguuacau

SEQ ID NO: 1119203 - RNA, 22 nt, Human
acuuggagagcauugcugggga

SEQ ID NO: 1119204 - RNA, 22 nt, Human
ggccccacgggggaguccuagu

SEQ ID NO: 1119205 - RNA, 22 nt, Human
ggcccuguuagagcucccacaa

SEQ ID NO: 1119206 - RNA, 22 nt, Human
gggcacuguggggcccaugcug

SEQ ID NO: 1119207 - RNA, 23 nt, Human
ugagcccaggaggucaaggcugc

SEQ ID NO: 1119208 - RNA, 22 nt, Human
agggcuggcuccguuaccuuga

SEQ ID NO: 1119209 - RNA, 22 nt, Human
guggccugggguuuguucugag

SEQ ID NO: 1119210 - RNA, 22 nt, Human
cauucugugauucuaaaucccu

SEQ ID NO: 1119211 - RNA, 22 nt, Human
aauguguguucggggcccagag

SEQ ID NO: 1119212 - RNA, 22 nt, Human
ggggagugacgcagggccauag

SEQ ID NO: 1119213 - RNA, 22 nt, Human
guggcagcugguaugcagacag

SEQ ID NO: 1119214 - RNA, 22 nt, Human
cuucaagaagacagcagagcau

SEQ ID NO: 1119215 - RNA, 18 nt, Human
uccugccugugccccagg

SEQ ID NO: 1119216 - RNA, 22 nt, Human
ccuggcagguggcgcccucggc

SEQ ID NO: 1119217 - RNA, 22 nt, Human
ucagagcuuaucucuugcugga

SEQ ID NO: 1119218 - RNA, 22 nt, Human
cauugcacaucugagaagagau

SEQ ID NO: 1119219 - RNA, 22 nt, Human
cagccuucugaaugaacguacu

SEQ ID NO: 1119220 - RNA, 22 nt, Human
agcaggcuuguuaugucugaga

SEQ ID NO: 1119221 - RNA, 22 nt, Human
agugcauugcaucucugcuuca

SEQ ID NO: 1119222 - RNA, 19 nt, Human
cuguggcugaccucuggcc

SEQ ID NO: 1119223 - RNA, 22 nt, Human
aggggcuggcuuaucugagagu

SEQ ID NO: 1119224 - RNA, 22 nt, Human
gugacucacacaggccugggcu

SEQ ID NO: 1119225 - RNA, 22 nt, Human
gcugauccuuuuaugucuagcu

SEQ ID NO: 1119226 - RNA, 22 nt, Human
ugggacagugugccuugcuccu

SEQ ID NO: 1119227 - RNA, 22 nt, Human
cuugaaagauuuggccucugug

SEQ ID NO: 1119228 - RNA, 22 nt, Human
ugaaagcacucacuucugcucu

SEQ ID NO: 1119229 - RNA, 22 nt, Human
ucaguaacuuacuuauucaccu

SEQ ID NO: 1119230 - RNA, 20 nt, Human
cacagcuugccuuuuaugac

SEQ ID NO: 1119231 - RNA, 22 nt, Human
caagagcugaggcuggagaggu

SEQ ID NO: 1119232 - RNA, 22 nt, Human
ccugggcaaaugccagagacaa

SEQ ID NO: 1119233 - RNA, 22 nt, Human
ccagggugugagaaggaaguag

SEQ ID NO: 1119234 - RNA, 22 nt, Human
uagaauaugugguaggaucugg

SEQ ID NO: 1119235 - RNA, 22 nt, Human
agggcagacuaggauggaagug

SEQ ID NO: 1119236 - RNA, 22 nt, Human
aggucagaagugccagggaauu

SEQ ID NO: 1119237 - RNA, 20 nt, Human
ccugggcuccaggagccccg

SEQ ID NO: 1119238 - RNA, 22 nt, Human
auuuaaaugcuuaagaggguuu

SEQ ID NO: 1119239 - RNA, 22 nt, Human
aagcugccacacggugaguacu

SEQ ID NO: 1119240 - RNA, 22 nt, Human
ggcucccugccuguccucaguc

SEQ ID NO: 1119241 - RNA, 22 nt, Human
ugccagcaguagcaguaggcca

SEQ ID NO: 1119242 - RNA, 22 nt, Human
ucagaggucacacagcaaguuu

SEQ ID NO: 1119243 - RNA, 22 nt, Human
cuggaggcugaguugggucucc

SEQ ID NO: 1119244 - RNA, 22 nt, Human
acacagggcagagagcuggcuc

SEQ ID NO: 1119245 - RNA, 17 nt, Human
ggccuguguggcugcag

SEQ ID NO: 1119246 - RNA, 22 nt, Human
uccaggcuggacaugaggcggg

SEQ ID NO: 1119247 - RNA, 22 nt, Human
ggcugcugguggaaugguaggc

SEQ ID NO: 1119248 - RNA, 22 nt, Human
caucacuguccaaaguucaguu

SEQ ID NO: 1119249 - RNA, 21 nt, Human
cuguuucuugugaagugacac

SEQ ID NO: 1119250 - RNA, 23 nt, Human
cccagcgcugagcccugcaggca

SEQ ID NO: 1119251 - RNA, 22 nt, Human
aaguuauaucaucucauugacg

SEQ ID NO: 1119252 - RNA, 22 nt, Human
gcugagguggagauugcaguga

SEQ ID NO: 1119253 - RNA, 22 nt, Human
uucauguauuuaucauguaaau

SEQ ID NO: 1119254 - RNA, 22 nt, Human
acauuucuuuucaucucuauau

SEQ ID NO: 1119255 - RNA, 22 nt, Human
caucaaauggcaagugaaagcu

SEQ ID NO: 1119256 - RNA, 22 nt, Human
uggcccugcuggccaaaggcua

SEQ ID NO: 1119257 - RNA, 22 nt, Human
cucuuccuacagucugcuaugc

SEQ ID NO: 1119258 - RNA, 22 nt, Human
ugggccugaguuugggaacugg

SEQ ID NO: 1119259 - RNA, 22 nt, Human
ugucacauaggcaaaauguuuu

SEQ ID NO: 1119260 - RNA, 22 nt, Human
cagggcaggaugcugugauuau

SEQ ID NO: 1119261 - RNA, 22 nt, Human
gugucccaggccucuggaauua

SEQ ID NO: 1119262 - RNA, 22 nt, Human
auggacagugugucuguuucca

SEQ ID NO: 1119263 - RNA, 21 nt, Human
uccucugcucucauaccacaa

SEQ ID NO: 1119264 - RNA, 22 nt, Human
ggcugcuucucacucauuugca

SEQ ID NO: 1119265 - RNA, 22 nt, Human
ugggcugcacccucagccucug

SEQ ID NO: 1119266 - RNA, 22 nt, Human
gcugggcaccggagagacccca

SEQ ID NO: 1119267 - RNA, 22 nt, Human
caggaacagcaccaggagcuag

SEQ ID NO: 1119268 - RNA, 22 nt, Human
aucauuccacauguaccacuag

SEQ ID NO: 1119269 - RNA, 22 nt, Human
ugcuuccuucccguucuucucc

SEQ ID NO: 1119270 - RNA, 22 nt, Human
aaucaguuguucacucugaaaa

SEQ ID NO: 1119271 - RNA, 22 nt, Human
ccuggcagcgccgaagcuggcc

SEQ ID NO: 1119272 - RNA, 22 nt, Human
gcuaggagauugagcucugaag

SEQ ID NO: 1119273 - RNA, 22 nt, Human
cccccaaggccaggcugagacc

SEQ ID NO: 1119274 - RNA, 22 nt, Human
ugucauugaggaaaacuaggug

SEQ ID NO: 1119275 - RNA, 20 nt, Human
gagauggcuaagugcugaac

SEQ ID NO: 1119276 - RNA, 22 nt, Human
uccuggagccacggagcuuuca

SEQ ID NO: 1119277 - RNA, 22 nt, Human
uucacauuagugguucuauaua

SEQ ID NO: 1119278 - RNA, 22 nt, Human
agggcugcccagugugagagcu

SEQ ID NO: 1119279 - RNA, 22 nt, Human
gccuuugccugcgacguggcug

SEQ ID NO: 1119280 - RNA, 21 nt, Human
ggccucugccuugccccacuc

SEQ ID NO: 1119281 - RNA, 22 nt, Human
uauuucugucagccagauaugg

SEQ ID NO: 1119282 - RNA, 22 nt, Human
gcugccugaagugucuacacug

SEQ ID NO: 1119283 - RNA, 22 nt, Human
acagcagcuaaccccugggcca

SEQ ID NO: 1119284 - RNA, 23 nt, Human
ccugugugcccuuaauucacagc

SEQ ID NO: 1119285 - RNA, 19 nt, Human
ggaggccuggguauuugcc

SEQ ID NO: 1119286 - RNA, 22 nt, Human
acagggcagagggcaguuggua

SEQ ID NO: 1119287 - RNA, 22 nt, Human
agguggagaagagaugggcagu

SEQ ID NO: 1119288 - RNA, 22 nt, Human
agcuuccuacaaccaucucaga

SEQ ID NO: 1119289 - RNA, 22 nt, Human
ucacacgugagguucuauccug

SEQ ID NO: 1119290 - RNA, 21 nt, Human
ggugggcacaggagagcagag

SEQ ID NO: 1119291 - RNA, 22 nt, Human
gcauccagagguagccacugug

SEQ ID NO: 1119292 - RNA, 22 nt, Human
cuguucaugcugauucuguaug

SEQ ID NO: 1119293 - RNA, 22 nt, Human
ggcugagggccagggcuagucu

SEQ ID NO: 1119294 - RNA, 17 nt, Human
ucuggccuuccugaacu

SEQ ID NO: 1119295 - RNA, 22 nt, Human
augucccagcugagagacaacu

SEQ ID NO: 1119296 - RNA, 22 nt, Human
cacccaggcuagagugcagugg

SEQ ID NO: 1119297 - RNA, 22 nt, Human
ucugucacuauuggccagaaca

SEQ ID NO: 1119298 - RNA, 22 nt, Human
gcugccucuguagcuuuggacc

SEQ ID NO: 1119299 - RNA, 22 nt, Human
uuauuuucuccucagaaagugg

SEQ ID NO: 1119300 - RNA, 22 nt, Human
acagagcacauagauuggaguu

SEQ ID NO: 1119301 - RNA, 22 nt, Human
caagagcucaccggagagcauu

SEQ ID NO: 1119302 - RNA, 22 nt, Human
gcuuccuggagggagagagcug

SEQ ID NO: 1119303 - RNA, 20 nt, Human
cacaggccuugugagcagac

SEQ ID NO: 1119304 - RNA, 22 nt, Human
uuuauuauucucuggagaaugu

SEQ ID NO: 1119305 - RNA, 22 nt, Human
gcucugcuggaaguucucugga

SEQ ID NO: 1119306 - RNA, 22 nt, Human
gcaucuucacacaaagccagug

SEQ ID NO: 1119307 - RNA, 22 nt, Human
agagugaaaagcuagagcagua

SEQ ID NO: 1119308 - RNA, 22 nt, Human
aaugaugguuucaucacuugaa

SEQ ID NO: 1119309 - RNA, 22 nt, Human
cucacagguaccagcacccucc

SEQ ID NO: 1119310 - RNA, 22 nt, Human
gccauuuagggaggcaagguga

SEQ ID NO: 1119311 - RNA, 22 nt, Human
acagagcacugcccugugccgc

SEQ ID NO: 1119312 - RNA, 22 nt, Human
cuggcagccaagugggauacuc

SEQ ID NO: 1119313 - RNA, 21 nt, Human
ucucugggcccuccugugggg

SEQ ID NO: 1119314 - RNA, 21 nt, Human
gccagagcaguacaaugaggu

SEQ ID NO: 1119315 - RNA, 22 nt, Human
gcagaugguggggcaggaaaau

SEQ ID NO: 1119316 - RNA, 22 nt, Human
cuucccugauaagagccucaga

SEQ ID NO: 1119317 - RNA, 20 nt, Human
gaggaaaagcugccaggccu

SEQ ID NO: 1119318 - RNA, 22 nt, Human
caaagguaguauauauauuguu

SEQ ID NO: 1119319 - RNA, 22 nt, Human
caggccuggguucaaaucccuu

SEQ ID NO: 1119320 - RNA, 22 nt, Human
agucucagccacacagaccuau

SEQ ID NO: 1119321 - RNA, 22 nt, Human
ggcaccugcucaucuggacuca

SEQ ID NO: 1119322 - RNA, 22 nt, Human
cagcaggcccaggugcugguga

SEQ ID NO: 1119323 - RNA, 22 nt, Human
gcagugggaagguuggcacaug

SEQ ID NO: 1119324 - RNA, 22 nt, Human
uuagucuucuuccuuauauguu

SEQ ID NO: 1119325 - RNA, 22 nt, Human
aggggccuggacauggacgcgc

SEQ ID NO: 1119326 - RNA, 22 nt, Human
aaugaugggaaggagaaaagca

SEQ ID NO: 1119327 - RNA, 22 nt, Human
ugcuggcccaguauggacugca

SEQ ID NO: 1119328 - RNA, 22 nt, Human
cagggucuuauaaggccaauuu

SEQ ID NO: 1119329 - RNA, 22 nt, Human
uggagcaggugggaugucguga

SEQ ID NO: 1119330 - RNA, 22 nt, Human
cccaagaucuuucgugcacuaa

SEQ ID NO: 1119331 - RNA, 22 nt, Human
uuuccucuaaacgcauuugcuu

SEQ ID NO: 1119332 - RNA, 22 nt, Human
cuggcuggccggagcgaggcgg

SEQ ID NO: 1119333 - RNA, 22 nt, Human
cugggaggugcagcaaaaauca

SEQ ID NO: 1119334 - RNA, 22 nt, Human
cucccuggaggcccagaccugg

SEQ ID NO: 1119335 - RNA, 21 nt, Human
uugaagcaaggguggcucuga

SEQ ID NO: 1119336 - RNA, 22 nt, Human
ggcucugggucuguggggagcg

SEQ ID NO: 1119337 - RNA, 22 nt, Human
uuucauguuuucuuaaauggca

SEQ ID NO: 1119338 - RNA, 22 nt, Human
cagggguggcugcagcagaggu

SEQ ID NO: 1119339 - RNA, 22 nt, Human
cucuggaauguuuacaugcccu

SEQ ID NO: 1119340 - RNA, 22 nt, Human
uaaggcagaaauaugagcaggg

SEQ ID NO: 1119341 - RNA, 22 nt, Human
ugcuggggcucugaccacucca

SEQ ID NO: 1119342 - RNA, 22 nt, Human
gcuggccuucugcagaguucug

SEQ ID NO: 1119343 - RNA, 22 nt, Human
cagagccuuccuagcagacucu

SEQ ID NO: 1119344 - RNA, 22 nt, Human
guggcuucacauggcauuuggc

SEQ ID NO: 1119345 - RNA, 22 nt, Human
ccuuucucuuugcugaucaugu

SEQ ID NO: 1119346 - RNA, 17 nt, Human
agcagcuggguugaucu

SEQ ID NO: 1119347 - RNA, 18 nt, Human
ucaaagucuggcuccacu

SEQ ID NO: 1119348 - RNA, 22 nt, Human
ugggaggaaugucacugagcca

SEQ ID NO: 1119349 - RNA, 22 nt, Human
agggcuggaggguacuaguuua

SEQ ID NO: 1119350 - RNA, 22 nt, Human
ggccucugccucaucugggcac

SEQ ID NO: 1119351 - RNA, 22 nt, Human
gaagcccacguuuggugaugua

SEQ ID NO: 1119352 - RNA, 22 nt, Human
uucaaucauuagaaucucaggc

SEQ ID NO: 1119353 - RNA, 21 nt, Human
cagagcuguccaaacccugac

SEQ ID NO: 1119354 - RNA, 22 nt, Human
ugaaggaagaauaggcaguguu

SEQ ID NO: 1119355 - RNA, 22 nt, Human
ugcagcuucuccaucuccuugu

SEQ ID NO: 1119356 - RNA, 22 nt, Human
auuuuuaugacaaaccauccuc

SEQ ID NO: 1119357 - RNA, 22 nt, Human
gaaugugucacccugucccaug

SEQ ID NO: 1119358 - RNA, 22 nt, Human
auacaaagacaaaucucaaucu

SEQ ID NO: 1119359 - RNA, 23 nt, Human
ggagugcaauggcgccaucucgg

SEQ ID NO: 1119360 - RNA, 22 nt, Human
uugggcaaaguguuucuggagc

SEQ ID NO: 1119361 - RNA, 22 nt, Human
ggagauggcucugcaaggucua

SEQ ID NO: 1119362 - RNA, 22 nt, Human
agcagacaacccagaugaccca

SEQ ID NO: 1119363 - RNA, 22 nt, Human
uuauuuauggcacuguuggugg

SEQ ID NO: 1119364 - RNA, 18 nt, Human
agcugcagaccaggaggu

SEQ ID NO: 1119365 - RNA, 22 nt, Human
cagcaucuaaucuucaugccgg

SEQ ID NO: 1119366 - RNA, 22 nt, Human
gccuuuuuuguugcucugucac

SEQ ID NO: 1119367 - RNA, 22 nt, Human
ccaggagcagauauggacauaa

SEQ ID NO: 1119368 - RNA, 22 nt, Human
aguguccccuacagaggcauuc

SEQ ID NO: 1119369 - RNA, 22 nt, Human
ucucuuccaguaagagucuuua

SEQ ID NO: 1119370 - RNA, 22 nt, Human
gacaaaggaucagagguuggga

SEQ ID NO: 1119371 - RNA, 22 nt, Human
auguuauuuuggaaaauacaaa

SEQ ID NO: 1119372 - RNA, 22 nt, Human
uccaaagggaagcgcuuucugu

SEQ ID NO: 1119373 - RNA, 22 nt, Human
aucauaaagugcuaucugauug

SEQ ID NO: 1119374 - RNA, 22 nt, Human
auugaaagaguuuucugcugca

SEQ ID NO: 1119375 - RNA, 22 nt, Human
uuagaaaacauaagugguaaag

SEQ ID NO: 1119376 - RNA, 22 nt, Human
ugggcagaggcagcagaaaccu

SEQ ID NO: 1119377 - RNA, 19 nt, Human
ucucuggggacacuuucac

SEQ ID NO: 1119378 - RNA, 22 nt, Human
cagagcugugauaaauagauau

SEQ ID NO: 1119379 - RNA, 22 nt, Human
uuuccucugcugccauugcccc

SEQ ID NO: 1119380 - RNA, 22 nt, Human
guggccucaugucuauaaagag

SEQ ID NO: 1119381 - RNA, 22 nt, Human
cuacuuuaauuuucugcagaga

SEQ ID NO: 1119382 - RNA, 22 nt, Human
uucaggagcuggcugcgaagga

SEQ ID NO: 1119383 - RNA, 22 nt, Human
uagcagcugugaguaaaagcca

SEQ ID NO: 1119384 - RNA, 22 nt, Human
auuugucuuuggaccugugaga

SEQ ID NO: 1119385 - RNA, 22 nt, Human
ggcaggaggugaguggcgggug

SEQ ID NO: 1119386 - RNA, 22 nt, Human
ggggcagaaguagugccccuga

SEQ ID NO: 1119387 - RNA, 18 nt, Human
gguggcucagucaugggg

SEQ ID NO: 1119388 - RNA, 22 nt, Human
cuggagccaugucuugacugcu

SEQ ID NO: 1119389 - RNA, 22 nt, Human
ugagagugguucagcucagaag

SEQ ID NO: 1119390 - RNA, 22 nt, Human
gcucagaaaagugaggcucagu

SEQ ID NO: 1119391 - RNA, 20 nt, Human
ggucccugcccucugucauc

SEQ ID NO: 1119392 - RNA, 22 nt, Human
agucccagaucuacaggaggga

SEQ ID NO: 1119393 - RNA, 22 nt, Human
cuggggcugcagcgaucuucau

SEQ ID NO: 1119394 - RNA, 22 nt, Human
ccuggcagcauugguagagauu

SEQ ID NO: 1119395 - RNA, 22 nt, Human
gagaggagucccuaucacaguu

SEQ ID NO: 1119396 - RNA, 22 nt, Human
uuuuccucuguauuugaaaugc

SEQ ID NO: 1119397 - RNA, 22 nt, Human
ggucccaggauugguugcgcag

SEQ ID NO: 1119398 - RNA, 22 nt, Human
ggagcugucuguagggcacagg

SEQ ID NO: 1119399 - RNA, 22 nt, Human
uucacaggaauguaggggucuu

SEQ ID NO: 1119400 - RNA, 22 nt, Human
ggcagggucuggacugaaagcu

SEQ ID NO: 1119401 - RNA, 22 nt, Human
ugcaguggugguaaagaugcuc

SEQ ID NO: 1119402 - RNA, 23 nt, Human
ucuggcucuaugugacagcucuc

SEQ ID NO: 1119403 - RNA, 22 nt, Human
ggcagcugaccuagcaccaucc

SEQ ID NO: 1119404 - RNA, 22 nt, Human
ucacaggagggagagacaccca

SEQ ID NO: 1119405 - RNA, 18 nt, Human
ccuggcuuccaucuuggu

SEQ ID NO: 1119406 - RNA, 22 nt, Human
gcaagcaagcagguagagcuga

SEQ ID NO: 1119407 - RNA, 22 nt, Human
aagggcagcuauuaucgucauc

SEQ ID NO: 1119408 - RNA, 22 nt, Human
ugcugccuccaacuccugggcu

SEQ ID NO: 1119409 - RNA, 22 nt, Human
uccucaggcugccuggaagacu

SEQ ID NO: 1119410 - RNA, 21 nt, Human
gagacagacuuucguccccug

SEQ ID NO: 1119411 - RNA, 22 nt, Human
gaagaacacuucaugauucauu

SEQ ID NO: 1119412 - RNA, 22 nt, Human
uaggagcuaaaauauuuuauau

SEQ ID NO: 1119413 - RNA, 22 nt, Human
uaacacugguauuucauuuagu

SEQ ID NO: 1119414 - RNA, 22 nt, Human
cugagcugggcucucuugaggg

SEQ ID NO: 1119415 - RNA, 22 nt, Human
aagggccauaacuugcaguguu

SEQ ID NO: 1119416 - RNA, 22 nt, Human
auaaggcagucccuuaacaagg

SEQ ID NO: 1119417 - RNA, 22 nt, Human
agagcagguggcaacucuggga

SEQ ID NO: 1119418 - RNA, 22 nt, Human
uuccuguauucuaaagggaaag

SEQ ID NO: 1119419 - RNA, 22 nt, Human
aaagcaaugaugguagacacgu

SEQ ID NO: 1119420 - RNA, 20 nt, Human
aggcucagcugagcucuugg

SEQ ID NO: 1119421 - RNA, 22 nt, Human
ugcuuccugaggccgucuucuc

SEQ ID NO: 1119422 - RNA, 23 nt, Human
aggauccugguacaggagcagag

SEQ ID NO: 1119423 - RNA, 18 nt, Human
uggagcugagugcugugc

SEQ ID NO: 1119424 - RNA, 22 nt, Human
ugcugggggcuuucuggauacc

SEQ ID NO: 1119425 - RNA, 22 nt, Human
ccucugcucccuggugucugag

SEQ ID NO: 1119426 - RNA, 22 nt, Human
uucuggagcuaaaguccacucu

SEQ ID NO: 1119427 - RNA, 22 nt, Human
aacagcagggggaccugcuggu

SEQ ID NO: 1119428 - RNA, 22 nt, Human
uaggccaguggcagguugugug

SEQ ID NO: 1119429 - RNA, 22 nt, Human
aaaagguagauucuccuucuau

SEQ ID NO: 1119430 - RNA, 22 nt, Human
guagcuuauuagggauaauagu

SEQ ID NO: 1119431 - RNA, 22 nt, Human
caggccuggggcuggcuuccag

SEQ ID NO: 1119432 - RNA, 22 nt, Human
cuggggcucucuggaaugcuug

SEQ ID NO: 1119433 - RNA, 22 nt, Human
uguggcugcucaggugcagacc

SEQ ID NO: 1119434 - RNA, 20 nt, Human
ccaccuggccaaggcugugc

SEQ ID NO: 1119435 - RNA, 17 nt, Human
gccuuccuuccuccaca

SEQ ID NO: 1119436 - RNA, 22 nt, Human
agagugggccucugagucccag

SEQ ID NO: 1119437 - RNA, 22 nt, Human
gcagaaggucuggcacuucagg

SEQ ID NO: 1119438 - RNA, 22 nt, Human
aaggucauuguugcauguucuc

SEQ ID NO: 1119439 - RNA, 22 nt, Human
cuggggcugcgguggaggagcc

SEQ ID NO: 1119440 - RNA, 22 nt, Human
ugaggccaggaucccaggcucu

SEQ ID NO: 1119441 - RNA, 22 nt, Human
ccugcucugguuuagucagucu

SEQ ID NO: 1119442 - RNA, 22 nt, Human
cagcagcugggaaggaggcuga

SEQ ID NO: 1119443 - RNA, 22 nt, Human
cucuggccagagccugcgggaa

SEQ ID NO: 1119444 - RNA, 22 nt, Human
gcagccagccccucugaccucu

SEQ ID NO: 1119445 - RNA, 22 nt, Human
gcagagccuugcgucaugugcc

SEQ ID NO: 1119446 - RNA, 22 nt, Human
uucuguguggguagcuccuguu

SEQ ID NO: 1119447 - RNA, 22 nt, Human
aauaaauguuaagauugucuca

SEQ ID NO: 1119448 - RNA, 18 nt, Human
gaaaggagagacaguagg

SEQ ID NO: 1119449 - RNA, 22 nt, Human
ugagcuguagcagaugcuguug

SEQ ID NO: 1119450 - RNA, 22 nt, Human
uagcuuuacaaagugcugcacc

SEQ ID NO: 1119451 - RNA, 22 nt, Human
agccagccaguucacuaggaaa

SEQ ID NO: 1119452 - RNA, 22 nt, Human
uccagggccaagucauggaacc

SEQ ID NO: 1119453 - RNA, 22 nt, Human
uccuggaggggacagcaugggc

SEQ ID NO: 1119454 - RNA, 22 nt, Human
cuucagggugacgcaggcugca

SEQ ID NO: 1119455 - RNA, 22 nt, Human
gcccagcugcacccuggugggu

SEQ ID NO: 1119456 - RNA, 22 nt, Human
cagggagaucuuggcuccuggu

SEQ ID NO: 1119457 - RNA, 22 nt, Human
gugcucuguguauuaggauguc

SEQ ID NO: 1119458 - RNA, 22 nt, Human
cagagcagugaggaguugugua

SEQ ID NO: 1119459 - RNA, 22 nt, Human
gggcugcacguauucugcucac

SEQ ID NO: 1119460 - RNA, 18 nt, Human
aagcugcccucaggcagg

SEQ ID NO: 1119461 - RNA, 22 nt, Human
caggaaagaaaugagaacacca

SEQ ID NO: 1119462 - RNA, 22 nt, Human
ggcucacgcaauuaucccggcc

SEQ ID NO: 1119463 - RNA, 20 nt, Human
gcugaccccugcugucaugc

SEQ ID NO: 1119464 - RNA, 22 nt, Human
aagagcuggauggaaucuggga

SEQ ID NO: 1119465 - RNA, 22 nt, Human
uuccuauuuccaugaaacacaa

SEQ ID NO: 1119466 - RNA, 22 nt, Human
gcugccacauuuucaggacuaa

SEQ ID NO: 1119467 - RNA, 22 nt, Human
ggccuggccuccagaugugggc

SEQ ID NO: 1119468 - RNA, 20 nt, Human
ggcugugcccuuccguggcc

SEQ ID NO: 1119469 - RNA, 22 nt, Human
ugucagggcaugcgguccagcc

SEQ ID NO: 1119470 - RNA, 22 nt, Human
ugcaggcaggggaugagcagcc

SEQ ID NO: 1119471 - RNA, 22 nt, Human
uuacaggggacauuggggacau

SEQ ID NO: 1119472 - RNA, 22 nt, Human
gcagcuggggccacacuuaggc

SEQ ID NO: 1119473 - RNA, 22 nt, Human
cagccugggcuccagagucccu

SEQ ID NO: 1119474 - RNA, 22 nt, Human
agaaugcaagauaaacuuuauu

SEQ ID NO: 1119475 - RNA, 22 nt, Human
cugggagcggcugucacugguu

SEQ ID NO: 1119476 - RNA, 22 nt, Human
guggccagaagacugcaaugcu

SEQ ID NO: 1119477 - RNA, 22 nt, Human
ccucuccuugcacccgucccgc

SEQ ID NO: 1119478 - RNA, 22 nt, Human
ccucucuguaagggucccuccc

SEQ ID NO: 1119479 - RNA, 22 nt, Human
aggcugggcaccguuuugaucc

SEQ ID NO: 1119480 - RNA, 22 nt, Human
agaagccacuggagguugagau

SEQ ID NO: 1119481 - RNA, 22 nt, Human
uuucaugugcaauuagcaauau

SEQ ID NO: 1119482 - RNA, 22 nt, Human
gcucccaccaggcagaccuacc

SEQ ID NO: 1119483 - RNA, 22 nt, Human
caccagcuacagacuacugugu

SEQ ID NO: 1119484 - RNA, 22 nt, Human
cagggccagagagggcuggcug

SEQ ID NO: 1119485 - RNA, 23 nt, Human
uuucuguuggguauauauccaag

SEQ ID NO: 1119486 - RNA, 22 nt, Human
cuccaguaucuguaggaaaagg

SEQ ID NO: 1119487 - RNA, 22 nt, Human
augcaucauggaaaacucaguu

SEQ ID NO: 1119488 - RNA, 22 nt, Human
uaaaugugggggccacgggcuu

SEQ ID NO: 1119489 - RNA, 22 nt, Human
ugggcacaaacaucugccuguu

SEQ ID NO: 1119490 - RNA, 22 nt, Human
gccugccucaaaaucccaguuc

SEQ ID NO: 1119491 - RNA, 22 nt, Human
uaacagaauccuguuauugcca

SEQ ID NO: 1119492 - RNA, 22 nt, Human
uguggcccagaugagugugcua

SEQ ID NO: 1119493 - RNA, 22 nt, Human
aaguuugacagaaguuucuaau

SEQ ID NO: 1119494 - RNA, 22 nt, Human
ugccacagaggugaagcccacu

SEQ ID NO: 1119495 - RNA, 22 nt, Human
aagagguugucugugaugaguu

SEQ ID NO: 1119496 - RNA, 22 nt, Human
acuuucucaggaauucacagac

SEQ ID NO: 1119497 - RNA, 22 nt, Human
ucuguuccauguuuuguuccau

SEQ ID NO: 1119498 - RNA, 22 nt, Human
aaaucaaaagacauguguuuua

SEQ ID NO: 1119499 - RNA, 22 nt, Human
agacaggacacaagcugcauaa

SEQ ID NO: 1119500 - RNA, 22 nt, Human
guccuggcccacuggcaggcug

SEQ ID NO: 1119501 - RNA, 22 nt, Human
acaggcagcgucauugcugcuc

SEQ ID NO: 1119502 - RNA, 22 nt, Human
cauugucacccaaagcucauag

SEQ ID NO: 1119503 - RNA, 22 nt, Human
uucuggagaucugccuauggga

SEQ ID NO: 1119504 - RNA, 22 nt, Human
ugggcaggauaauaucucaugu

SEQ ID NO: 1119505 - RNA, 22 nt, Human
auaaaaguaggaccaacuuaca

SEQ ID NO: 1119506 - RNA, 22 nt, Human
agagacaggguuuugucguguu

SEQ ID NO: 1119507 - RNA, 22 nt, Human
aaaggugacacucugccagcug

SEQ ID NO: 1119508 - RNA, 22 nt, Human
agcugguguccuccuggagcug

SEQ ID NO: 1119509 - RNA, 17 nt, Human
ggugagaccucccacuc

SEQ ID NO: 1119510 - RNA, 22 nt, Human
uggagcagagaugggagcccaa

SEQ ID NO: 1119511 - RNA, 22 nt, Human
ggcucuggagcacagacgucug

SEQ ID NO: 1119512 - RNA, 22 nt, Human
gcccugagggguggugucugua

SEQ ID NO: 1119513 - RNA, 22 nt, Human
ggaaggaggaugcucuggccuu

SEQ ID NO: 1119514 - RNA, 22 nt, Human
ucccagcagcauagcucagaau

SEQ ID NO: 1119515 - RNA, 19 nt, Human
uagcagcugccaaaggaga

SEQ ID NO: 1119516 - RNA, 22 nt, Human
agcagccaggaaucugcagagc

SEQ ID NO: 1119517 - RNA, 22 nt, Human
uuuauguacauauccacaagga

SEQ ID NO: 1119518 - RNA, 22 nt, Human
ucucugggugauggcagggcac

SEQ ID NO: 1119519 - RNA, 22 nt, Human
gccaggcacaguucuaggugcu

SEQ ID NO: 1119520 - RNA, 22 nt, Human
gagcagggagacaacucuggug

SEQ ID NO: 1119521 - RNA, 22 nt, Human
gaacagcuucuugggagcuggg

SEQ ID NO: 1119522 - RNA, 22 nt, Human
agauacauagcugugagcacac

SEQ ID NO: 1119523 - RNA, 22 nt, Human
gcucagaggagcaucauaagga

SEQ ID NO: 1119524 - RNA, 22 nt, Human
uguacacaauucuuaacauaca

SEQ ID NO: 1119525 - RNA, 22 nt, Human
uccagccaccaccuugauugcc

SEQ ID NO: 1119526 - RNA, 22 nt, Human
acccuggguucccgcagcacca

SEQ ID NO: 1119527 - RNA, 22 nt, Human
ggugcagaucuuucucuucagg

SEQ ID NO: 1119528 - RNA, 22 nt, Human
gaaaauguuagcuucauaguca

SEQ ID NO: 1119529 - RNA, 22 nt, Human
gaggccuggaccagccacagag

SEQ ID NO: 1119530 - RNA, 22 nt, Human
ugugccuggaucucugugacaa

SEQ ID NO: 1119531 - RNA, 22 nt, Human
gucagaggaauggaugagugau

SEQ ID NO: 1119532 - RNA, 22 nt, Human
uaaugugugucaucaguagagu

SEQ ID NO: 1119533 - RNA, 23 nt, Human
ggaaagagaggaguugugcauag

SEQ ID NO: 1119534 - RNA, 22 nt, Human
uuccucaucugugcaccucacu

SEQ ID NO: 1119535 - RNA, 22 nt, Human
ugcaggagaaaguacggagcgu

SEQ ID NO: 1119536 - RNA, 22 nt, Human
ggaggccauaguuugggaguca

SEQ ID NO: 1119537 - RNA, 22 nt, Human
gcaggugggggucggugcaucu

SEQ ID NO: 1119538 - RNA, 22 nt, Human
auugacaagacaauggcucuua

SEQ ID NO: 1119539 - RNA, 22 nt, Human
cucuuucaguucugauagucuc

SEQ ID NO: 1119540 - RNA, 22 nt, Human
auguaucaacaaauuguacagu

SEQ ID NO: 1119541 - RNA, 22 nt, Human
agggcagcucucaccucuggcc

SEQ ID NO: 1119542 - RNA, 22 nt, Human
uauucacaaaaugagguccuca

SEQ ID NO: 1119543 - RNA, 22 nt, Human
aagcugccaccagcccagggca

SEQ ID NO: 1119544 - RNA, 22 nt, Human
cccuggugguacggcacuggca

SEQ ID NO: 1119545 - RNA, 22 nt, Human
aaagauuugaaauuaggcauca

SEQ ID NO: 1119546 - RNA, 22 nt, Human
gggcugcuuuuaagggucucag

SEQ ID NO: 1119547 - RNA, 22 nt, Human
ugccagaagauucucuaucaga

SEQ ID NO: 1119548 - RNA, 22 nt, Human
gagguuagaggucagugcaguc

SEQ ID NO: 1119549 - RNA, 22 nt, Human
uuccaguuaaggaagcuauucu

SEQ ID NO: 1119550 - RNA, 22 nt, Human
aagcugccugggaggaagggcu

SEQ ID NO: 1119551 - RNA, 22 nt, Human
gugcucaggaagcuguuccugc

SEQ ID NO: 1119552 - RNA, 22 nt, Human
ggaugcaggacggcauggaugu

SEQ ID NO: 1119553 - RNA, 19 nt, Human
ucugaggguccagaugcau

SEQ ID NO: 1119554 - RNA, 20 nt, Human
auacacauauucuugcaacu

SEQ ID NO: 1119555 - RNA, 22 nt, Human
gcaggggcaggagaucucaggc

SEQ ID NO: 1119556 - RNA, 22 nt, Human
aucaaaguaggcauauguuuuu

SEQ ID NO: 1119557 - RNA, 22 nt, Human
ggagcagagcugggcuuggcug

SEQ ID NO: 1119558 - RNA, 22 nt, Human
aagaauguucauuaaacuguug

SEQ ID NO: 1119559 - RNA, 22 nt, Human
cccaggagagaggccaguuggc

SEQ ID NO: 1119560 - RNA, 22 nt, Human
guuguauagagggcaugaaucu

SEQ ID NO: 1119561 - RNA, 22 nt, Human
ccaggguggcguagaugcuggg

SEQ ID NO: 1119562 - RNA, 22 nt, Human
cuggagccccagacagggagag

SEQ ID NO: 1119563 - RNA, 22 nt, Human
aaaguucagugccuucuauaca

SEQ ID NO: 1119564 - RNA, 22 nt, Human
uggcucucaggccugcugcguu

SEQ ID NO: 1119565 - RNA, 22 nt, Human
gcugucaggaacaugccuuggu

SEQ ID NO: 1119566 - RNA, 22 nt, Human
aacagugagaagguggacagga

SEQ ID NO: 1119567 - RNA, 22 nt, Human
auguguaggugaaucgaggcug

SEQ ID NO: 1119568 - RNA, 20 nt, Human
gccuggaggcaaugggaaga

SEQ ID NO: 1119569 - RNA, 22 nt, Human
ccccagcugcauacuugccaag

SEQ ID NO: 1119570 - RNA, 19 nt, Human
ggagccuggagcacgugcc

SEQ ID NO: 1119571 - RNA, 22 nt, Human
uucacauuauaaucaguucugc

SEQ ID NO: 1119572 - RNA, 22 nt, Human
ugggggucaggaugaggccuug

SEQ ID NO: 1119573 - RNA, 22 nt, Human
agccacagcaacaagugcaauu

SEQ ID NO: 1119574 - RNA, 22 nt, Human
gcugucuugcucacucuugcag

SEQ ID NO: 1119575 - RNA, 22 nt, Human
uuuucauuuacauuagggaaga

SEQ ID NO: 1119576 - RNA, 22 nt, Human
uacuuuaaaaacugauaauuca

SEQ ID NO: 1119577 - RNA, 22 nt, Human
aucucccagccacagcauucuu

SEQ ID NO: 1119578 - RNA, 22 nt, Human
agcagagcggggccuccggaag

SEQ ID NO: 1119579 - RNA, 22 nt, Human
cuccuugguguaguacugagca

SEQ ID NO: 1119580 - RNA, 22 nt, Human
ggcucaggccuguaauccuagc

SEQ ID NO: 1119581 - RNA, 22 nt, Human
agggcucugggguggcagagau

SEQ ID NO: 1119582 - RNA, 22 nt, Human
agggcagagaaauguaguugag

SEQ ID NO: 1119583 - RNA, 17 nt, Human
ugagcaguagaagaugc

SEQ ID NO: 1119584 - RNA, 22 nt, Human
cugucuguuuuaccuucuccag

SEQ ID NO: 1119585 - RNA, 22 nt, Human
aucuggcugcugugcuuaagcu

SEQ ID NO: 1119586 - RNA, 20 nt, Human
ccugucuggagacaaagaga

SEQ ID NO: 1119587 - RNA, 22 nt, Human
uccagccaagggagguuacuag

SEQ ID NO: 1119588 - RNA, 22 nt, Human
agggaucaaaaaauguacaugc

SEQ ID NO: 1119589 - RNA, 22 nt, Human
uugaagcaaggcgaaucuugug

SEQ ID NO: 1119590 - RNA, 22 nt, Human
uuccaggaauucagcucucagu

SEQ ID NO: 1119591 - RNA, 19 nt, Human
cagagccucagagcuagaa

SEQ ID NO: 1119592 - RNA, 19 nt, Human
ggaccagguccugggcagc

SEQ ID NO: 1119593 - RNA, 22 nt, Human
aaaugucuuucuucugcuacgu

SEQ ID NO: 1119594 - RNA, 22 nt, Human
cucacugcaaguuccaccuacc

SEQ ID NO: 1119595 - RNA, 22 nt, Human
ggcagcuggccuccucgcccac

SEQ ID NO: 1119596 - RNA, 22 nt, Human
agcagcuucuuucacuccugga

SEQ ID NO: 1119597 - RNA, 22 nt, Human
gaacagcccuguuaagucuguu

SEQ ID NO: 1119598 - RNA, 22 nt, Human
acagaagagcacauuuaguaug

SEQ ID NO: 1119599 - RNA, 21 nt, Human
agcagcugggcaacauggagg

SEQ ID NO: 1119600 - RNA, 22 nt, Human
uccucuggggucagggcacuac

SEQ ID NO: 1119601 - RNA, 22 nt, Human
ugugcagcuaguccuggacuug

SEQ ID NO: 1119602 - RNA, 22 nt, Human
aaauauguaagauuagcacuag

SEQ ID NO: 1119603 - RNA, 22 nt, Human
gaagccccaaacccucgccauc

SEQ ID NO: 1119604 - RNA, 20 nt, Human
ccaagagcaugcaugaggaa

SEQ ID NO: 1119605 - RNA, 22 nt, Human
caccaggcuggagugcagaggu

SEQ ID NO: 1119606 - RNA, 22 nt, Human
cucaggaugcaggucacaggac

SEQ ID NO: 1119607 - RNA, 20 nt, Human
cagggccacgcuccaaggca

SEQ ID NO: 1119608 - RNA, 22 nt, Human
gcugguuagaaaacagagcuca

SEQ ID NO: 1119609 - RNA, 22 nt, Human
gacaggggucccucugggcugu

SEQ ID NO: 1119610 - RNA, 22 nt, Human
cucugugcccuacugcucagcu

SEQ ID NO: 1119611 - RNA, 22 nt, Human
ccaggcugggcuacaaguugag

SEQ ID NO: 1119612 - RNA, 22 nt, Human
cugugcuugcggguguggagcc

SEQ ID NO: 1119613 - RNA, 22 nt, Human
caggcugcagaggccuuucaug

SEQ ID NO: 1119614 - RNA, 22 nt, Human
cugggugguuuugaugugaauu

SEQ ID NO: 1119615 - RNA, 22 nt, Human
cuuguccuuuacuugagacuca

SEQ ID NO: 1119616 - RNA, 22 nt, Human
ugccugucuucaggagugucac

SEQ ID NO: 1119617 - RNA, 22 nt, Human
cucagggggaaucaggucacag

SEQ ID NO: 1119618 - RNA, 22 nt, Human
auaaacaguagagaaagguggu

SEQ ID NO: 1119619 - RNA, 22 nt, Human
uuuagaaauucaucuauggccu

SEQ ID NO: 1119620 - RNA, 21 nt, Human
cagagguggccugaccucuga

SEQ ID NO: 1119621 - RNA, 22 nt, Human
gcuguguccucacacagccuuu

SEQ ID NO: 1119622 - RNA, 22 nt, Human
gcacccagggacuuggcuggcc

SEQ ID NO: 1119623 - RNA, 22 nt, Human
ggaaccaguggaaugauaugcu

SEQ ID NO: 1119624 - RNA, 17 nt, Human
agguggguggaucaccu

SEQ ID NO: 1119625 - RNA, 22 nt, Human
agugugggugagggaggcccuc

SEQ ID NO: 1119626 - RNA, 22 nt, Human
cacugccuggaaggagagacau

SEQ ID NO: 1119627 - RNA, 20 nt, Human
cuguggcucaugcaucugcc

SEQ ID NO: 1119628 - RNA, 22 nt, Human
cagggccagccauccugcuggg

SEQ ID NO: 1119629 - RNA, 22 nt, Human
cccaggcugauguucagcgggu

SEQ ID NO: 1119630 - RNA, 22 nt, Human
cuccaggccagggaaguggaca

SEQ ID NO: 1119631 - RNA, 22 nt, Human
agaggccuaaccaagauguccu

SEQ ID NO: 1119632 - RNA, 22 nt, Human
ugcuuccuugagcucuccaauc

SEQ ID NO: 1119633 - RNA, 22 nt, Human
aggguggcaguuacuggagcaa

SEQ ID NO: 1119634 - RNA, 20 nt, Human
caggaggcaaggucaagguc

SEQ ID NO: 1119635 - RNA, 22 nt, Human
caucugcuguuccuuggacuca

SEQ ID NO: 1119636 - RNA, 22 nt, Human
agaugaagacucaggagcaggu

SEQ ID NO: 1119637 - RNA, 22 nt, Human
aagcagccacuggccaguuaua

SEQ ID NO: 1119638 - RNA, 22 nt, Human
uaagcuauuccugaagaagguu

SEQ ID NO: 1119639 - RNA, 22 nt, Human
agcccagccggauucccaguuc

SEQ ID NO: 1119640 - RNA, 22 nt, Human
aggccaaguagcuagcauugaa

SEQ ID NO: 1119641 - RNA, 22 nt, Human
gcauuuguguucuuccuagagc

SEQ ID NO: 1119642 - RNA, 22 nt, Human
guguccagagaaacucacagcu

SEQ ID NO: 1119643 - RNA, 22 nt, Human
uagaaaugauuuugaugcuuca

SEQ ID NO: 1119644 - RNA, 22 nt, Human
gcccagccuccaagcuccaagg

SEQ ID NO: 1119645 - RNA, 21 nt, Human
uggagcugaauuuuuggcauc

SEQ ID NO: 1119646 - RNA, 22 nt, Human
ugcugccauggucgcugguguc

SEQ ID NO: 1119647 - RNA, 22 nt, Human
cucuguagaaacagggcagaag

SEQ ID NO: 1119648 - RNA, 20 nt, Human
aagagcauaguacaggaaga

SEQ ID NO: 1119649 - RNA, 22 nt, Human
ccagugcaggugagcaccaggu

SEQ ID NO: 1119650 - RNA, 22 nt, Human
ggacuggccggcgcugaggccc

SEQ ID NO: 1119651 - RNA, 22 nt, Human
ugucuucaguaaaauacacuau

SEQ ID NO: 1119652 - RNA, 22 nt, Human
gccaggcuguggggaacuugaa

SEQ ID NO: 1119653 - RNA, 22 nt, Human
agagauguucauucagcauguu

SEQ ID NO: 1119654 - RNA, 22 nt, Human
ucaaaugcggucauggcuuuua

SEQ ID NO: 1119655 - RNA, 21 nt, Human
gccagccuguuuaccuguggu

SEQ ID NO: 1119656 - RNA, 22 nt, Human
gucccagaggacagggucacau

SEQ ID NO: 1119657 - RNA, 22 nt, Human
gggcugcuuccuggggaaugcu

SEQ ID NO: 1119658 - RNA, 22 nt, Human
gggcguggauggucagugcagg

SEQ ID NO: 1119659 - RNA, 22 nt, Human
ccucaugguacuuacuguagcu

SEQ ID NO: 1119660 - RNA, 22 nt, Human
cuacauuaaauuggcuuacuua

SEQ ID NO: 1119661 - RNA, 22 nt, Human
ucaggcugaggucaucugcauc

SEQ ID NO: 1119662 - RNA, 21 nt, Human
gcucccugcucagcuccuggg

SEQ ID NO: 1119663 - RNA, 22 nt, Human
aauuaacagagggcuuauuacu

SEQ ID NO: 1119664 - RNA, 22 nt, Human
gagacagcagggccagggccug

SEQ ID NO: 1119665 - RNA, 22 nt, Human
ggguggcacaggugcagagggu

SEQ ID NO: 1119666 - RNA, 23 nt, Human
uugugggcagauuccauggggag

SEQ ID NO: 1119667 - RNA, 22 nt, Human
ucagcuggagaugagaaccgaa

SEQ ID NO: 1119668 - RNA, 23 nt, Human
cccagagcacagccuccagaugc

SEQ ID NO: 1119669 - RNA, 22 nt, Human
agggccagagucuguguagaua

SEQ ID NO: 1119670 - RNA, 22 nt, Human
caggccuggagugcaauggcac

SEQ ID NO: 1119671 - RNA, 22 nt, Human
ucaggggagguugaaucgucuc

SEQ ID NO: 1119672 - RNA, 22 nt, Human
gagcaacaguuuaugguuuuuc

SEQ ID NO: 1119673 - RNA, 22 nt, Human
gcugccuggcuuuaguccacuu

SEQ ID NO: 1119674 - RNA, 22 nt, Human
aggauccuccuuagaaaagacc

SEQ ID NO: 1119675 - RNA, 22 nt, Human
cuggacagaaagggcugcugug

SEQ ID NO: 1119676 - RNA, 22 nt, Human
ucagcaguggcucucaugcagu

SEQ ID NO: 1119677 - RNA, 22 nt, Human
uauucacauucucaggccuggu

SEQ ID NO: 1119678 - RNA, 22 nt, Human
ccagcuccugggucuuagucag

SEQ ID NO: 1119679 - RNA, 22 nt, Human
uugaagcaugguacuuguucaa

SEQ ID NO: 1119680 - RNA, 22 nt, Human
ccucccacauccuagcucugcu

SEQ ID NO: 1119681 - RNA, 22 nt, Human
gugcuuccugccuggugccuuu

SEQ ID NO: 1119682 - RNA, 21 nt, Human
agcagcagaucuggugagggc

SEQ ID NO: 1119683 - RNA, 22 nt, Human
agccagccgggggaccacagug

SEQ ID NO: 1119684 - RNA, 22 nt, Human
agccaggauggucucgaucggc

SEQ ID NO: 1119685 - RNA, 22 nt, Human
guuccauaucacagcagacgaa

SEQ ID NO: 1119686 - RNA, 22 nt, Human
cagcugagcucccaggccauca

SEQ ID NO: 1119687 - RNA, 22 nt, Human
agugccuggaccccaugacaua

SEQ ID NO: 1119688 - RNA, 22 nt, Human
uagcagagcagggaucagagcc

SEQ ID NO: 1119689 - RNA, 22 nt, Human
ccuggcugaaccaaugaagugg

SEQ ID NO: 1119690 - RNA, 22 nt, Human
gcugucugggaugucacugcug

SEQ ID NO: 1119691 - RNA, 20 nt, Human
ccuggagccuggaaggaguc

SEQ ID NO: 1119692 - RNA, 17 nt, Human
gagaguguauuggaugc

SEQ ID NO: 1119693 - RNA, 22 nt, Human
gcaaagcugggugugaaugcac

SEQ ID NO: 1119694 - RNA, 22 nt, Human
ggucccagcugcucaagaggcu

SEQ ID NO: 1119695 - RNA, 22 nt, Human
ugaugggaggugcugcaggacc

SEQ ID NO: 1119696 - RNA, 20 nt, Human
ugcagaagaacguucugguu

SEQ ID NO: 1119697 - RNA, 22 nt, Human
ccauaaggagccagacauucca

SEQ ID NO: 1119698 - RNA, 22 nt, Human
cugccuggagcauucugaaggu

SEQ ID NO: 1119699 - RNA, 22 nt, Human
cgggcagauugggaagguucau

SEQ ID NO: 1119700 - RNA, 22 nt, Human
ugcuccauucucuagccagugc

SEQ ID NO: 1119701 - RNA, 18 nt, Human
cagaugagaugcaaucuc

SEQ ID NO: 1119702 - RNA, 22 nt, Human
gagccagguuggaggcugcagu

SEQ ID NO: 1119703 - RNA, 22 nt, Human
agccacagcgaaccucucuucc

SEQ ID NO: 1119704 - RNA, 22 nt, Human
cagcuucucagaaagcugaggu

SEQ ID NO: 1119705 - RNA, 22 nt, Human
ccaaagugcugggguuacaggc

SEQ ID NO: 1119706 - RNA, 20 nt, Human
guucucacugaucugcaggg

SEQ ID NO: 1119707 - RNA, 22 nt, Human
uuauguacaauguuaauguaaa

SEQ ID NO: 1119708 - RNA, 22 nt, Human
ugugccugucacccucagagag

SEQ ID NO: 1119709 - RNA, 22 nt, Human
agugcauuauauguuucaaugg

SEQ ID NO: 1119710 - RNA, 22 nt, Human
cccuggagguggagguugcagg

SEQ ID NO: 1119711 - RNA, 22 nt, Human
gcuggcagaauuucuucuugcu

SEQ ID NO: 1119712 - RNA, 22 nt, Human
uggcagcugucuguggggucuc

SEQ ID NO: 1119713 - RNA, 22 nt, Human
aagacauuacuggaaucugacu

SEQ ID NO: 1119714 - RNA, 22 nt, Human
uccugccuuagagcaaggaaaa

SEQ ID NO: 1119715 - RNA, 22 nt, Human
guggccagcaagugcugccucu

SEQ ID NO: 1119716 - RNA, 22 nt, Human
guggagcccugguagggacccc

SEQ ID NO: 1119717 - RNA, 22 nt, Human
gaaggagacccugaagaugcug

SEQ ID NO: 1119718 - RNA, 21 nt, Human
ugcccacagcaaaugcagagg

SEQ ID NO: 1119719 - RNA, 22 nt, Human
ugcauuguuuagaacucuuugg

SEQ ID NO: 1119720 - RNA, 22 nt, Human
accuuucauuaaagucuguagu

SEQ ID NO: 1119721 - RNA, 22 nt, Human
caggauggucagaugcauuguc

SEQ ID NO: 1119722 - RNA, 22 nt, Human
ccagcuccagguagaugggcag

SEQ ID NO: 1119723 - RNA, 21 nt, Human
agagaauugccuuagauguuc

SEQ ID NO: 1119724 - RNA, 22 nt, Human
uuuccucugaugcugacuugga

SEQ ID NO: 1119725 - RNA, 22 nt, Human
ggcacugaaguggguguugggu

SEQ ID NO: 1119726 - RNA, 17 nt, Human
gguguauggggagggaa

SEQ ID NO: 1119727 - RNA, 22 nt, Human
aaggccaggacaccaggggacu

SEQ ID NO: 1119728 - RNA, 22 nt, Human
ugccaggggaccuagggauguc

SEQ ID NO: 1119729 - RNA, 22 nt, Human
gaugauggacaaagcauuggug

SEQ ID NO: 1119730 - RNA, 22 nt, Human
aggggcugggacagagccaagc

SEQ ID NO: 1119731 - RNA, 22 nt, Human
gucccaggcuuauguggagcuu

SEQ ID NO: 1119732 - RNA, 22 nt, Human
uaagacacaugcguacaagaua

SEQ ID NO: 1119733 - RNA, 22 nt, Human
auaaagaggauguauuuacagc

SEQ ID NO: 1119734 - RNA, 22 nt, Human
ccaaagugcugagauuacaggu

SEQ ID NO: 1119735 - RNA, 22 nt, Human
augauacaagcaaaacuaauca

SEQ ID NO: 1119736 - RNA, 22 nt, Human
gcccaggcuggagugcaguagc

SEQ ID NO: 1119737 - RNA, 22 nt, Human
gaaaggucaguuccacuuccau

SEQ ID NO: 1119738 - RNA, 22 nt, Human
aaguuuaagguggaaguggugg

SEQ ID NO: 1119739 - RNA, 22 nt, Human
cagcccuggccccagguggucu

SEQ ID NO: 1119740 - RNA, 22 nt, Human
uaugcacgucuauuuaugaaga

SEQ ID NO: 1119741 - RNA, 22 nt, Human
gccuggcaggggccugggagug

SEQ ID NO: 1119742 - RNA, 22 nt, Human
gcagggugaaggucacauagaa

SEQ ID NO: 1119743 - RNA, 22 nt, Human
caguggggaggccaggauagaa

SEQ ID NO: 1119744 - RNA, 22 nt, Human
ggcucaggacugcagcguagag

SEQ ID NO: 1119745 - RNA, 22 nt, Human
uucuuuccacagaggggaugau

SEQ ID NO: 1119746 - RNA, 22 nt, Human
ccaggcagcaaauuuucugaau

SEQ ID NO: 1119747 - RNA, 22 nt, Human
ccuggaaggugaugguacagca

SEQ ID NO: 1119748 - RNA, 20 nt, Human
uucauucauuccacaacuuc

SEQ ID NO: 1119749 - RNA, 22 nt, Human
guggccugucagaagccguggg

SEQ ID NO: 1119750 - RNA, 22 nt, Human
ccuggcucuucagagguuccua

SEQ ID NO: 1119751 - RNA, 22 nt, Human
agaaaucauucccaaacccaua

SEQ ID NO: 1119752 - RNA, 22 nt, Human
ggcgaggccgggacaggcugga

SEQ ID NO: 1119753 - RNA, 22 nt, Human
aaaaguguccagauuaugaaga

SEQ ID NO: 1119754 - RNA, 22 nt, Human
ucuggccugggccugccggugc

SEQ ID NO: 1119755 - RNA, 22 nt, Human
uaaaugcagauuccugagccua

SEQ ID NO: 1119756 - RNA, 22 nt, Human
uaauaaaugaaagugcuggcau

SEQ ID NO: 1119757 - RNA, 18 nt, Human
cagauccaggcagcuauu

SEQ ID NO: 1119758 - RNA, 22 nt, Human
ggugaaggcacaagagggcaag

SEQ ID NO: 1119759 - RNA, 20 nt, Human
agugucuggugcagggccuc

SEQ ID NO: 1119760 - RNA, 21 nt, Human
agcuuccugcagugggagguc

SEQ ID NO: 1119761 - RNA, 23 nt, Human
gccugggacucaggaggagcuca

SEQ ID NO: 1119762 - RNA, 22 nt, Human
aggagcugacuuguaaagcauu

SEQ ID NO: 1119763 - RNA, 21 nt, Human
augaagucuaugcuucugugu

SEQ ID NO: 1119764 - RNA, 22 nt, Human
gauuucuguaacacuucagaua

SEQ ID NO: 1119765 - RNA, 22 nt, Human
caguauuuauggcuugaguauu

SEQ ID NO: 1119766 - RNA, 22 nt, Human
agcugcccugggucuugcugcu

SEQ ID NO: 1119767 - RNA, 21 nt, Human
gagugucuaauccaggcuguc

SEQ ID NO: 1119768 - RNA, 22 nt, Human
gcaaaaaaugcuuguugcuuag

SEQ ID NO: 1119769 - RNA, 22 nt, Human
gcuuagucaauuauaaauaggc

SEQ ID NO: 1119770 - RNA, 22 nt, Human
ggcuggccuguguggccgccac

SEQ ID NO: 1119771 - RNA, 21 nt, Human
ucagcagcaucugccuagagu

SEQ ID NO: 1119772 - RNA, 22 nt, Human
ucuguaguagguuguaguucuu

SEQ ID NO: 1119773 - RNA, 22 nt, Human
uccagggguaccggccaggcag

SEQ ID NO: 1119774 - RNA, 22 nt, Human
auacauauaugguacuuccugg

SEQ ID NO: 1119775 - RNA, 22 nt, Human
aggagcagaccguaguccugca

SEQ ID NO: 1119776 - RNA, 22 nt, Human
ccugggcaggaugggcccggug

SEQ ID NO: 1119777 - RNA, 22 nt, Human
aggcagcagggccacuggcuga

SEQ ID NO: 1119778 - RNA, 21 nt, Human
ucccacucuaaauggacugaa

SEQ ID NO: 1119779 - RNA, 22 nt, Human
agaagauuuagguugacgcuau

SEQ ID NO: 1119780 - RNA, 22 nt, Human
gccuucugaucgcuggacugac

SEQ ID NO: 1119781 - RNA, 22 nt, Human
cugggcagugcagcuauagaac

SEQ ID NO: 1119782 - RNA, 22 nt, Human
ccucccacuucuugcugagguc

SEQ ID NO: 1119783 - RNA, 22 nt, Human
ggcugcagaaguacuuccggau

SEQ ID NO: 1119784 - RNA, 22 nt, Human
gguggagcuguggacaggaagg

SEQ ID NO: 1119785 - RNA, 22 nt, Human
ucccaggguccucuucuggaau

SEQ ID NO: 1119786 - RNA, 22 nt, Human
ucagcugaaguggagaagcaga

SEQ ID NO: 1119787 - RNA, 22 nt, Human
gagcacagcuggagguagcauu

SEQ ID NO: 1119788 - RNA, 22 nt, Human
ucucaggguuuccugggggcug

SEQ ID NO: 1119789 - RNA, 22 nt, Human
aacaaauguaaaaugcagaugc

SEQ ID NO: 1119790 - RNA, 22 nt, Human
auuugucuagugguauucacgu

SEQ ID NO: 1119791 - RNA, 22 nt, Human
ggcucugcaugugagugggugg

SEQ ID NO: 1119792 - RNA, 22 nt, Human
gcagaagcugggcagcgaggug

SEQ ID NO: 1119793 - RNA, 22 nt, Human
ccucagagaaagguauggcuga

SEQ ID NO: 1119794 - RNA, 22 nt, Human
ugccaggcauauggccucuuug

SEQ ID NO: 1119795 - RNA, 22 nt, Human
agggguggccugccuuacuccc

SEQ ID NO: 1119796 - RNA, 22 nt, Human
ucaaaagucugcauucuucaca

SEQ ID NO: 1119797 - RNA, 22 nt, Human
gggcugacucugcacugagcca

SEQ ID NO: 1119798 - RNA, 22 nt, Human
acagaauuaaaguguuugugga

SEQ ID NO: 1119799 - RNA, 22 nt, Human
gaaaugcauggaucuuggcaga

SEQ ID NO: 1119800 - RNA, 22 nt, Human
gaaaucugaacaacagcuguca

SEQ ID NO: 1119801 - RNA, 22 nt, Human
ucucagaggucuucagccucug

SEQ ID NO: 1119802 - RNA, 22 nt, Human
cuucuccucugaguccugggag

SEQ ID NO: 1119803 - RNA, 22 nt, Human
ucccagggacucucugccuucc

SEQ ID NO: 1119804 - RNA, 22 nt, Human
aggaccaguaugagagcaucug

SEQ ID NO: 1119805 - RNA, 22 nt, Human
ugaacagaucaauagaacugac

SEQ ID NO: 1119806 - RNA, 22 nt, Human
uauguacauguuaaagggcaaa

SEQ ID NO: 1119807 - RNA, 22 nt, Human
gcacugcagccucagauggugg

SEQ ID NO: 1119808 - RNA, 22 nt, Human
uuagauaacaguagaauaucaa

SEQ ID NO: 1119809 - RNA, 22 nt, Human
ucauaaaacacaccagguaguu

SEQ ID NO: 1119810 - RNA, 22 nt, Human
agggaaagguagugaggucaca

SEQ ID NO: 1119811 - RNA, 22 nt, Human
caggccucuauggucagcugag

SEQ ID NO: 1119812 - RNA, 22 nt, Human
ugcagaggagcuggaaggcugg

SEQ ID NO: 1119813 - RNA, 22 nt, Human
ggcuucaccgcgggguugcagg

SEQ ID NO: 1119814 - RNA, 22 nt, Human
caagagcuggguggcaagcuag

SEQ ID NO: 1119815 - RNA, 22 nt, Human
gccuguccacuaaacagccaag

SEQ ID NO: 1119816 - RNA, 22 nt, Human
agccacaccuguccugccagcu

SEQ ID NO: 1119817 - RNA, 22 nt, Human
ccuggagccccucuggccagcc

SEQ ID NO: 1119818 - RNA, 22 nt, Human
cuggccugagaaugcuacccuu

SEQ ID NO: 1119819 - RNA, 22 nt, Human
guguggcugugggagauguuca

SEQ ID NO: 1119820 - RNA, 22 nt, Human
ugugcuucaucacuucucaguu

SEQ ID NO: 1119821 - RNA, 22 nt, Human
aggcagaggagaaugaucuucc

SEQ ID NO: 1119822 - RNA, 22 nt, Human
ugggcagaaggaagagccaccu

SEQ ID NO: 1119823 - RNA, 22 nt, Human
ugucccaguuuaucugggacug

SEQ ID NO: 1119824 - RNA, 22 nt, Human
uggcagggucuugcuguguugc

SEQ ID NO: 1119825 - RNA, 22 nt, Human
uguggucucguuauguugccca

SEQ ID NO: 1119826 - RNA, 22 nt, Human
caggcugggaacgccacccgcu

SEQ ID NO: 1119827 - RNA, 22 nt, Human
caggacaguuugcuuugcccug

SEQ ID NO: 1119828 - RNA, 22 nt, Human
cagggcagggagcuuagaauga

SEQ ID NO: 1119829 - RNA, 22 nt, Human
caagagcuuuagaaaugcucau

SEQ ID NO: 1119830 - RNA, 22 nt, Human
uagccucuggaauccuuucucu

SEQ ID NO: 1119831 - RNA, 22 nt, Human
gagcugggcacacgccacuuga

SEQ ID NO: 1119832 - RNA, 22 nt, Human
cacucugcagcugaagggcugg

SEQ ID NO: 1119833 - RNA, 22 nt, Human
aagggaggccagagguuuugca

SEQ ID NO: 1119834 - RNA, 22 nt, Human
aauguguagcauuuaaugcagu

SEQ ID NO: 1119835 - RNA, 22 nt, Human
uccacugcagcuucugauggaa

SEQ ID NO: 1119836 - RNA, 22 nt, Human
gggugggagucuggcccucaaa

SEQ ID NO: 1119837 - RNA, 22 nt, Human
gagucacaaagccuuucuuauu

SEQ ID NO: 1119838 - RNA, 22 nt, Human
ggaaaaggccauuguuucucug

SEQ ID NO: 1119839 - RNA, 22 nt, Human
gccugcuggcuguccauugcag

SEQ ID NO: 1119840 - RNA, 22 nt, Human
aaguaacaaugcuguugaauug

SEQ ID NO: 1119841 - RNA, 22 nt, Human
gacauuucaaucucauuauggg

SEQ ID NO: 1119842 - RNA, 22 nt, Human
cuggaagaggaagccagcugga

SEQ ID NO: 1119843 - RNA, 22 nt, Human
ugaggccacuuccccacagccc

SEQ ID NO: 1119844 - RNA, 22 nt, Human
ucagaggguggcugggagcauc

SEQ ID NO: 1119845 - RNA, 19 nt, Human
agcagagcagggccguggg

SEQ ID NO: 1119846 - RNA, 22 nt, Human
gcuccaggagagggaagcagau

SEQ ID NO: 1119847 - RNA, 22 nt, Human
acuggcagcuguaggaugcaug

SEQ ID NO: 1119848 - RNA, 22 nt, Human
uuagauaaauugcaacuugauu

SEQ ID NO: 1119849 - RNA, 22 nt, Human
gagagcugauagaugagcuacu

SEQ ID NO: 1119850 - RNA, 22 nt, Human
gcagagccaggcuggggcaggu

SEQ ID NO: 1119851 - RNA, 17 nt, Human
ucagcaggggccaagcu

SEQ ID NO: 1119852 - RNA, 22 nt, Human
ccucugcugcuguugagcaccg

SEQ ID NO: 1119853 - RNA, 22 nt, Human
acucugaggcaggucagggcag

SEQ ID NO: 1119854 - RNA, 22 nt, Human
cagagcugguaagugguagagg

SEQ ID NO: 1119855 - RNA, 22 nt, Human
gcugucuguucgagcguguguu

SEQ ID NO: 1119856 - RNA, 22 nt, Human
gccucaggacuggcauacucau

SEQ ID NO: 1119857 - RNA, 22 nt, Human
gccuccuggauuuuagugccau

SEQ ID NO: 1119858 - RNA, 22 nt, Human
gcagagccccucaagccagccu

SEQ ID NO: 1119859 - RNA, 22 nt, Human
ugggaggcagguaggugaugau

SEQ ID NO: 1119860 - RNA, 22 nt, Human
agcagagcuauucuugugcaau

SEQ ID NO: 1119861 - RNA, 22 nt, Human
augguuuguguggcccagauga

SEQ ID NO: 1119862 - RNA, 22 nt, Human
uagaaacugauagucuugugcu

SEQ ID NO: 1119863 - RNA, 22 nt, Human
gggugggaucuguggagccuca

SEQ ID NO: 1119864 - RNA, 22 nt, Human
cuguggcugcagccuugguccu

SEQ ID NO: 1119865 - RNA, 22 nt, Human
uggcagaguaggauggcccugu

SEQ ID NO: 1119866 - RNA, 19 nt, Human
uggcaggcccaggauggac

SEQ ID NO: 1119867 - RNA, 22 nt, Human
ucccuggaacagagagacaacg

SEQ ID NO: 1119868 - RNA, 22 nt, Human
ggcagcaguggcugcuauuguc

SEQ ID NO: 1119869 - RNA, 22 nt, Human
uggaggaugccauccaggauac

SEQ ID NO: 1119870 - RNA, 22 nt, Human
ugagaaccaugaaaagcuguca

SEQ ID NO: 1119871 - RNA, 20 nt, Human
agcuggccuguccuaggccu

SEQ ID NO: 1119872 - RNA, 22 nt, Human
uggcucagagcagggacucugg

SEQ ID NO: 1119873 - RNA, 17 nt, Human
ugcauuguuggaaauuu

SEQ ID NO: 1119874 - RNA, 22 nt, Human
caucuggcuagcuaucauugug

SEQ ID NO: 1119875 - RNA, 22 nt, Human
caggcagcagccacucugguau

SEQ ID NO: 1119876 - RNA, 22 nt, Human
uauuucugaauccaaaagguca

SEQ ID NO: 1119877 - RNA, 22 nt, Human
cagagccugcucacgucucugu

SEQ ID NO: 1119878 - RNA, 22 nt, Human
gcaugggcaagaggacuggggg

SEQ ID NO: 1119879 - RNA, 22 nt, Human
augggaguuuucucugaugcuc

SEQ ID NO: 1119880 - RNA, 22 nt, Human
aagggcuggaucucucugagca

SEQ ID NO: 1119881 - RNA, 22 nt, Human
ggaaggaggggcaaagcaguuc

SEQ ID NO: 1119882 - RNA, 22 nt, Human
ggcacugauaauguccucucuc

SEQ ID NO: 1119883 - RNA, 22 nt, Human
ccaggcugcuuagccuuaucuu

SEQ ID NO: 1119884 - RNA, 22 nt, Human
aauguuaaaaccuucagugcuu

SEQ ID NO: 1119885 - RNA, 22 nt, Human
uggggcuguccuuagucugaga

SEQ ID NO: 1119886 - RNA, 22 nt, Human
accaaggaagagauucucaguu

SEQ ID NO: 1119887 - RNA, 23 nt, Human
gcagauggccccagagugcugcc

SEQ ID NO: 1119888 - RNA, 22 nt, Human
ugcaagagguaaaaugaaagga

SEQ ID NO: 1119889 - RNA, 22 nt, Human
cucugagagcggucuguggcuu

SEQ ID NO: 1119890 - RNA, 22 nt, Human
caucagcaggcaacacucuugg

SEQ ID NO: 1119891 - RNA, 22 nt, Human
cugccagguuggcgcucgcucu

SEQ ID NO: 1119892 - RNA, 22 nt, Human
cuggaaugccucccugucagag

SEQ ID NO: 1119893 - RNA, 22 nt, Human
cccugccuacaggguuuucuuu

SEQ ID NO: 1119894 - RNA, 22 nt, Human
cucugcagaauuugagcugcuc

SEQ ID NO: 1119895 - RNA, 22 nt, Human
gggagggaggugaugcuuggcu

SEQ ID NO: 1119896 - RNA, 22 nt, Human
uaaagucaucuuuacaucuuug

SEQ ID NO: 1119897 - RNA, 22 nt, Human
ucccaggacaggccacauggaa

SEQ ID NO: 1119898 - RNA, 22 nt, Human
uauuuugacuauuaaaccaaca

SEQ ID NO: 1119899 - RNA, 22 nt, Human
acgcagaagggccuggcgugcc

SEQ ID NO: 1119900 - RNA, 23 nt, Human
uggcucugugucacauacaggau

SEQ ID NO: 1119901 - RNA, 21 nt, Human
gagcucucaggcaagaagcag

SEQ ID NO: 1119902 - RNA, 22 nt, Human
ggcagggugccuggcuccuguu

SEQ ID NO: 1119903 - RNA, 22 nt, Human
ugaaaucuuauacuuugguagu

SEQ ID NO: 1119904 - RNA, 22 nt, Human
gcuggcagguccaagauagagc

SEQ ID NO: 1119905 - RNA, 18 nt, Human
ggcugugcguggaggcug

SEQ ID NO: 1119906 - RNA, 22 nt, Human
acguuuucuagagaauaugcag

SEQ ID NO: 1119907 - RNA, 22 nt, Human
agcagcuccugccaugagugcu

SEQ ID NO: 1119908 - RNA, 22 nt, Human
ucagcaguguaguuuaucauuc

SEQ ID NO: 1119909 - RNA, 22 nt, Human
uacaaaugaaccaacuuugaug

SEQ ID NO: 1119910 - RNA, 22 nt, Human
ccagucccgcaugguccagaau

SEQ ID NO: 1119911 - RNA, 22 nt, Human
caaaugcaaaauauaacccugu

SEQ ID NO: 1119912 - RNA, 19 nt, Human
gcaugcuugguggcuucug

SEQ ID NO: 1119913 - RNA, 22 nt, Human
cugugccaggcccagcugacuu

SEQ ID NO: 1119914 - RNA, 22 nt, Human
acaaacuaccuacagauguuca

SEQ ID NO: 1119915 - RNA, 22 nt, Human
cagcuggguuuaguggggugug

SEQ ID NO: 1119916 - RNA, 22 nt, Human
cagucccagacauaguaaggga

SEQ ID NO: 1119917 - RNA, 18 nt, Human
gagacacaagggccugga

SEQ ID NO: 1119918 - RNA, 19 nt, Human
uuacaucugcaacacuggu

SEQ ID NO: 1119919 - RNA, 22 nt, Human
cuguccccgcgaguccagagcu

SEQ ID NO: 1119920 - RNA, 23 nt, Human
gcucugagggcuuaucccuccca

SEQ ID NO: 1119921 - RNA, 22 nt, Human
augaagcuaaacccugcagcca

SEQ ID NO: 1119922 - RNA, 22 nt, Human
gccuugccucagccauggaaac

SEQ ID NO: 1119923 - RNA, 22 nt, Human
aaaugcauugguuucuacuugu

SEQ ID NO: 1119924 - RNA, 22 nt, Human
uucucuuagcuguaaagucaau

SEQ ID NO: 1119925 - RNA, 22 nt, Human
uggcagcaauuugugauguuga

SEQ ID NO: 1119926 - RNA, 22 nt, Human
cuagaaauacaggcacgugcca

SEQ ID NO: 1119927 - RNA, 22 nt, Human
cuggcagcauuaacagagagca

SEQ ID NO: 1119928 - RNA, 22 nt, Human
cugccucuguugggcauggucu

SEQ ID NO: 1119929 - RNA, 22 nt, Human
gugcaguggcagauccuagcuc

SEQ ID NO: 1119930 - RNA, 22 nt, Human
cugcaggaauucaaagugagcu

SEQ ID NO: 1119931 - RNA, 22 nt, Human
gaggcagcugaaggagugacag

SEQ ID NO: 1119932 - RNA, 17 nt, Human
cauguguaugugggagu

SEQ ID NO: 1119933 - RNA, 22 nt, Human
auauucguggucaaguaaggcc

SEQ ID NO: 1119934 - RNA, 22 nt, Human
ugcucugggcaacagccucccu

SEQ ID NO: 1119935 - RNA, 22 nt, Human
aucaguuucuaccauguggaau

SEQ ID NO: 1119936 - RNA, 22 nt, Human
ccuuccuggagcccaugcagau

SEQ ID NO: 1119937 - RNA, 22 nt, Human
ggggugggguuacucauugugc

SEQ ID NO: 1119938 - RNA, 18 nt, Human
agcagaauucuaggguuc

SEQ ID NO: 1119939 - RNA, 22 nt, Human
cccuggaguccggagcucaccu

SEQ ID NO: 1119940 - RNA, 22 nt, Human
caaagguauaaguuaauauaca

SEQ ID NO: 1119941 - RNA, 22 nt, Human
acagagcugggaucugaaccca

SEQ ID NO: 1119942 - RNA, 22 nt, Human
uguuucagucccuguguucaau

SEQ ID NO: 1119943 - RNA, 22 nt, Human
cucugguguccuuuagaauuua

SEQ ID NO: 1119944 - RNA, 22 nt, Human
ugcagcucauugcuggggucug

SEQ ID NO: 1119945 - RNA, 22 nt, Human
ggggaugguggcauuuguaaaa

SEQ ID NO: 1119946 - RNA, 22 nt, Human
auucugucuuuuuaaaauaaua

SEQ ID NO: 1119947 - RNA, 22 nt, Human
aaggaagggaaauagugauguc

SEQ ID NO: 1119948 - RNA, 22 nt, Human
agugaaauggaugcugcuacug

SEQ ID NO: 1119949 - RNA, 22 nt, Human
gcagauggcugagccugcagau

SEQ ID NO: 1119950 - RNA, 22 nt, Human
ugacucuguaccugucugccuu

SEQ ID NO: 1119951 - RNA, 22 nt, Human
uugaaggacauccuauuucuag

SEQ ID NO: 1119952 - RNA, 22 nt, Human
cuggcugggagcgagcugcuca

SEQ ID NO: 1119953 - RNA, 22 nt, Human
aucagcaaguccuguuaauucu

SEQ ID NO: 1119954 - RNA, 16 nt, Human
uggaaggggucuccgg

SEQ ID NO: 1119955 - RNA, 21 nt, Human
uagggcaggcauuggaagaga

SEQ ID NO: 1119956 - RNA, 22 nt, Human
auaucacaaacaagucuguacu

SEQ ID NO: 1119957 - RNA, 22 nt, Human
gccugcuggauguggccaggcc

SEQ ID NO: 1119958 - RNA, 22 nt, Human
gcaggagagucugugccagguu

SEQ ID NO: 1119959 - RNA, 22 nt, Human
gacccagcuuaagucacauguu

SEQ ID NO: 1119960 - RNA, 22 nt, Human
uuguuuucacagcuuugcccgg

SEQ ID NO: 1119961 - RNA, 22 nt, Human
uaggaaaaauacagaauuauau

SEQ ID NO: 1119962 - RNA, 19 nt, Human
aggcucugagcuccuggag

SEQ ID NO: 1119963 - RNA, 22 nt, Human
gcagauggaaagugcuugaggg

SEQ ID NO: 1119964 - RNA, 22 nt, Human
gggcaggaugcaguuucagaga

SEQ ID NO: 1119965 - RNA, 22 nt, Human
agggaaauuaaugugagcaaug

SEQ ID NO: 1119966 - RNA, 20 nt, Human
cccuggagagaagcuccacg

SEQ ID NO: 1119967 - RNA, 22 nt, Human
ggugaggggagagugaaagaaa

SEQ ID NO: 1119968 - RNA, 22 nt, Human
aggucauugaaguuauuuucuu

SEQ ID NO: 1119969 - RNA, 22 nt, Human
uacauaguauucacauuguuuu

SEQ ID NO: 1119970 - RNA, 22 nt, Human
aaguaaaagcuuuaccaugcgc

SEQ ID NO: 1119971 - RNA, 21 nt, Human
gcaggggauagaaauggucug

SEQ ID NO: 1119972 - RNA, 22 nt, Human
ggggaugguagaccggugacgu

SEQ ID NO: 1119973 - RNA, 22 nt, Human
uggcucugagacacaggcucuc

SEQ ID NO: 1119974 - RNA, 22 nt, Human
cucucugaggcaggccuguggg

SEQ ID NO: 1119975 - RNA, 22 nt, Human
auauaaaguguuuagaaagcug

SEQ ID NO: 1119976 - RNA, 20 nt, Human
gcugaggucauuaugccuca

SEQ ID NO: 1119977 - RNA, 22 nt, Human
auuccaguucuccucucuaaag

SEQ ID NO: 1119978 - RNA, 22 nt, Human
aaaugaacucuuccugcauccc

SEQ ID NO: 1119979 - RNA, 22 nt, Human
cauugcaccacauugcaucccu

SEQ ID NO: 1119980 - RNA, 22 nt, Human
gcagcugaauguccauugcugc

SEQ ID NO: 1119981 - RNA, 22 nt, Human
gauuuccuugcauauugguaau

SEQ ID NO: 1119982 - RNA, 22 nt, Human
agagcagauggccagggggccu

SEQ ID NO: 1119983 - RNA, 22 nt, Human
gcugucacucuccggccuuccc

SEQ ID NO: 1119984 - RNA, 22 nt, Human
cccuggccagcucaugucugag

SEQ ID NO: 1119985 - RNA, 22 nt, Human
cugguucauccccuuccaggaa

SEQ ID NO: 1119986 - RNA, 21 nt, Human
aaacugaccuugccugagaca

SEQ ID NO: 1119987 - RNA, 22 nt, Human
uguccucaaggagcuucagucu

SEQ ID NO: 1119988 - RNA, 22 nt, Human
cagcugaguuuccaagucugcc

SEQ ID NO: 1119989 - RNA, 22 nt, Human
uggcaggagguuuucuccagga

SEQ ID NO: 1119990 - RNA, 22 nt, Human
aaauguauugcauaggauauuu

SEQ ID NO: 1119991 - RNA, 22 nt, Human
gauacaaauucaugucugaauu

SEQ ID NO: 1119992 - RNA, 22 nt, Human
ucuucucaguuucucuaggaug

SEQ ID NO: 1119993 - RNA, 22 nt, Human
ccaggccugauugggaaucuug

SEQ ID NO: 1119994 - RNA, 22 nt, Human
guccuggggaauacagaagccg

SEQ ID NO: 1119995 - RNA, 22 nt, Human
uggugcugauaauggcaggauu

SEQ ID NO: 1119996 - RNA, 22 nt, Human
ucacagaaauaagauaguuauu

SEQ ID NO: 1119997 - RNA, 22 nt, Human
ucaggcaguagaauugcuugaa

SEQ ID NO: 1119998 - RNA, 18 nt, Human
acagaacucaggggcacc

SEQ ID NO: 1119999 - RNA, 22 nt, Human
ggcaccuggagguuuacuggau

SEQ ID NO: 1120000 - RNA, 22 nt, Human
ggcucagguuuaaagugcuuua

SEQ ID NO: 1120001 - RNA, 22 nt, Human
uccuucaaagcuccuagugagc

SEQ ID NO: 1120002 - RNA, 22 nt, Human
auaugcauaugucaaaacuuau

SEQ ID NO: 1120003 - RNA, 22 nt, Human
ucacauuuucuacuacuguacg

SEQ ID NO: 1120004 - RNA, 22 nt, Human
guuacacaggaaaacauuagca

SEQ ID NO: 1120005 - RNA, 22 nt, Human
ucccagcccagauuugugugac

SEQ ID NO: 1120006 - RNA, 22 nt, Human
cagacacagauaugcauauggc

SEQ ID NO: 1120007 - RNA, 22 nt, Human
ccuggccugcucggcucuuaag

SEQ ID NO: 1120008 - RNA, 22 nt, Human
ugucacauugaauaugauuuau

SEQ ID NO: 1120009 - RNA, 22 nt, Human
ucacugcaaccucugccuuccg

SEQ ID NO: 1120010 - RNA, 22 nt, Human
ccaaggcuccucagcuggucuu

SEQ ID NO: 1120011 - RNA, 22 nt, Human
cugggcagugguggcccuuccc

SEQ ID NO: 1120012 - RNA, 21 nt, Human
agaugcugugcuccaggagca

SEQ ID NO: 1120013 - RNA, 21 nt, Human
aagccucaagcagaagacaga

SEQ ID NO: 1120014 - RNA, 22 nt, Human
gccugcagccucaagggcugag

SEQ ID NO: 1120015 - RNA, 22 nt, Human
uggagcugacucacaccagcua

SEQ ID NO: 1120016 - RNA, 22 nt, Human
ugucaccagcugcuccucagga

SEQ ID NO: 1120017 - RNA, 22 nt, Human
agguggagacccagagaaggcg

SEQ ID NO: 1120018 - RNA, 22 nt, Human
caaacugagcaucagaaaguuu

SEQ ID NO: 1120019 - RNA, 22 nt, Human
cugccagcagaggccagcgcug

SEQ ID NO: 1120020 - RNA, 22 nt, Human
cugaaggacacgugaggagcca

SEQ ID NO: 1120021 - RNA, 19 nt, Human
acccucucagugccugagg

SEQ ID NO: 1120022 - RNA, 22 nt, Human
uuccauaauaggcuuaagugaa

SEQ ID NO: 1120023 - RNA, 22 nt, Human
cagcucuggcgucagggagcga

SEQ ID NO: 1120024 - RNA, 22 nt, Human
agguggccggugccagccgggc

SEQ ID NO: 1120025 - RNA, 22 nt, Human
uaacagaaguuguucauugugg

SEQ ID NO: 1120026 - RNA, 22 nt, Human
ugcucuccggcuuccguggccu

SEQ ID NO: 1120027 - RNA, 22 nt, Human
gaagcagcgaaguggaagggac

SEQ ID NO: 1120028 - RNA, 22 nt, Human
ccuggagcacucucccuggcug

SEQ ID NO: 1120029 - RNA, 22 nt, Human
agccuggaauuaaggaaaugca

SEQ ID NO: 1120030 - RNA, 22 nt, Human
uugcucuguaauaaucuggggu

SEQ ID NO: 1120031 - RNA, 22 nt, Human
auguccuucuccucuuaccugc

SEQ ID NO: 1120032 - RNA, 22 nt, Human
uuugacaguaauaaagcacaag

SEQ ID NO: 1120033 - RNA, 22 nt, Human
agagcagcacguuguccccaca

SEQ ID NO: 1120034 - RNA, 19 nt, Human
uggcagcauugguaccuug

SEQ ID NO: 1120035 - RNA, 22 nt, Human
ugagacaguucugcagcugggu

SEQ ID NO: 1120036 - RNA, 22 nt, Human
gaagaacaagcagugcuuuccu

SEQ ID NO: 1120037 - RNA, 21 nt, Human
aagcaggacauaugaugcccu

SEQ ID NO: 1120038 - RNA, 22 nt, Human
gcucugaggcugggagcacucu

SEQ ID NO: 1120039 - RNA, 22 nt, Human
cagaacauucacucauaugugg

SEQ ID NO: 1120040 - RNA, 22 nt, Human
gggagggaaagcuugaucuguc

SEQ ID NO: 1120041 - RNA, 22 nt, Human
gggcacagagggucuugaagaa

SEQ ID NO: 1120042 - RNA, 19 nt, Human
uguguaaagucugugguca

SEQ ID NO: 1120043 - RNA, 22 nt, Human
accucugcuucccggguucaag

SEQ ID NO: 1120044 - RNA, 22 nt, Human
gagagcuguaauagucaugucu

SEQ ID NO: 1120045 - RNA, 22 nt, Human
uuuugucuaagaacuuugcaaa

SEQ ID NO: 1120046 - RNA, 22 nt, Human
gcacccaggcuugggcagcaac

SEQ ID NO: 1120047 - RNA, 18 nt, Human
cauuguacaaugcuuuau

SEQ ID NO: 1120048 - RNA, 22 nt, Human
ucucuggagcugcagauccagg

SEQ ID NO: 1120049 - RNA, 22 nt, Human
gagcagaacuacucacauaucg

SEQ ID NO: 1120050 - RNA, 22 nt, Human
uggcucaggagggaucuuugcu

SEQ ID NO: 1120051 - RNA, 22 nt, Human
aagaacugugcuccaggcucca

SEQ ID NO: 1120052 - RNA, 22 nt, Human
ccugggcucaagugauccuccu

SEQ ID NO: 1120053 - RNA, 22 nt, Human
acauuucucuuagaguuggacu

SEQ ID NO: 1120054 - RNA, 22 nt, Human
guggccuggaaaggcuggucug

SEQ ID NO: 1120055 - RNA, 22 nt, Human
gugugccaggaacuggcugcug

SEQ ID NO: 1120056 - RNA, 18 nt, Human
ugacagaaccuggagccu

SEQ ID NO: 1120057 - RNA, 22 nt, Human
ggcugcagggcagcuggugugg

SEQ ID NO: 1120058 - RNA, 22 nt, Human
ggccagaaaguuaagcuguggc

SEQ ID NO: 1120059 - RNA, 22 nt, Human
accaaggaagaaucuauuugag

SEQ ID NO: 1120060 - RNA, 22 nt, Human
aggcccugcccagugccacaag

SEQ ID NO: 1120061 - RNA, 22 nt, Human
uagcugccuaugugauaagaga

SEQ ID NO: 1120062 - RNA, 22 nt, Human
aaauugugagcuauagaucuag

SEQ ID NO: 1120063 - RNA, 22 nt, Human
ccugucuggccaccagggcgau

SEQ ID NO: 1120064 - RNA, 22 nt, Human
uucuuucccaguagaugugaaa

SEQ ID NO: 1120065 - RNA, 22 nt, Human
gggccagagcuuggcagcuggg

SEQ ID NO: 1120066 - RNA, 22 nt, Human
cccagcucaagcagagagcuaa

SEQ ID NO: 1120067 - RNA, 22 nt, Human
gccccugggagcagagccacca

SEQ ID NO: 1120068 - RNA, 22 nt, Human
agagcuggacgucugagcccua

SEQ ID NO: 1120069 - RNA, 22 nt, Human
cuggcuccauccuugagcucug

SEQ ID NO: 1120070 - RNA, 22 nt, Human
agcagagaagacacaggcuuca

SEQ ID NO: 1120071 - RNA, 22 nt, Human
ugcaucuuacguuuugaaaggg

SEQ ID NO: 1120072 - RNA, 22 nt, Human
gccagggggucagcaggcacuu

SEQ ID NO: 1120073 - RNA, 22 nt, Human
agagcuguuuggacaucugagu

SEQ ID NO: 1120074 - RNA, 22 nt, Human
uggcucagcuuuccccaucugg

SEQ ID NO: 1120075 - RNA, 22 nt, Human
aaggccugggaguacugggaca

SEQ ID NO: 1120076 - RNA, 22 nt, Human
uacaguagacaauguuaguaug

SEQ ID NO: 1120077 - RNA, 22 nt, Human
aguucacauuccgagguacugg

SEQ ID NO: 1120078 - RNA, 22 nt, Human
aauguguguauuucuaggcgag

SEQ ID NO: 1120079 - RNA, 22 nt, Human
acaggugggcuuaagagucggc

SEQ ID NO: 1120080 - RNA, 22 nt, Human
ggguguguuccuaaggaaacca

SEQ ID NO: 1120081 - RNA, 22 nt, Human
uggcccugcuaugauccugcaa

SEQ ID NO: 1120082 - RNA, 21 nt, Human
uccagggaacuucucaggaau

SEQ ID NO: 1120083 - RNA, 20 nt, Human
cccagccccuaccuguugcc

SEQ ID NO: 1120084 - RNA, 22 nt, Human
uggcucaguagcagugugguca

SEQ ID NO: 1120085 - RNA, 22 nt, Human
uaaaugcaguuaguacuugcca

SEQ ID NO: 1120086 - RNA, 22 nt, Human
caggguccaucuuucaucacug

SEQ ID NO: 1120087 - RNA, 22 nt, Human
gugccugcagcaauccauggca

SEQ ID NO: 1120088 - RNA, 22 nt, Human
guggcugggcuccgagcggcuu

SEQ ID NO: 1120089 - RNA, 22 nt, Human
agggcugcaccggggcuucgcg

SEQ ID NO: 1120090 - RNA, 22 nt, Human
cuucaagagaaugcagggaugu

SEQ ID NO: 1120091 - RNA, 22 nt, Human
uccuggagggaggcggugcuac

SEQ ID NO: 1120092 - RNA, 22 nt, Human
auguacauuuguaguaauauca

SEQ ID NO: 1120093 - RNA, 22 nt, Human
ucauugcagaaauaaaggugaa

SEQ ID NO: 1120094 - RNA, 22 nt, Human
gcugcuucucugauggagucca

SEQ ID NO: 1120095 - RNA, 22 nt, Human
ucuuuucuggacucugcaugga

SEQ ID NO: 1120096 - RNA, 22 nt, Human
cagaacugggcagggagcagag

SEQ ID NO: 1120097 - RNA, 22 nt, Human
uucugaggcacuggcucuccca

SEQ ID NO: 1120098 - RNA, 22 nt, Human
ggcugggcaaacaagacucuuc

SEQ ID NO: 1120099 - RNA, 22 nt, Human
cuggcagcgcagcaugaagucg

SEQ ID NO: 1120100 - RNA, 22 nt, Human
uuguuuuggagaugagcuaaaa

SEQ ID NO: 1120101 - RNA, 22 nt, Human
aaaaguuaccucuguaauauaa

SEQ ID NO: 1120102 - RNA, 22 nt, Human
gggauggggucaacauguaccu

SEQ ID NO: 1120103 - RNA, 22 nt, Human
gacugucauucuagugcccaug

SEQ ID NO: 1120104 - RNA, 22 nt, Human
uuucacauuuuauacuuaagcc

SEQ ID NO: 1120105 - RNA, 22 nt, Human
ucugugaacaucacauugacag

SEQ ID NO: 1120106 - RNA, 22 nt, Human
gcuggagauaguaggauccaua

SEQ ID NO: 1120107 - RNA, 22 nt, Human
ucagaguguggugagaugugca

SEQ ID NO: 1120108 - RNA, 22 nt, Human
agccuggagguaaugaggaaac

SEQ ID NO: 1120109 - RNA, 22 nt, Human
ucucaggaauagaguggcagca

SEQ ID NO: 1120110 - RNA, 22 nt, Human
ugagcccagucugucugacaug

SEQ ID NO: 1120111 - RNA, 22 nt, Human
gugcaugucggggugcauguca

SEQ ID NO: 1120112 - RNA, 22 nt, Human
uacauauagacaguuacucuag

SEQ ID NO: 1120113 - RNA, 22 nt, Human
gaggcagcagggcugguuccuu

SEQ ID NO: 1120114 - RNA, 22 nt, Human
caggccuggcugcagcucgccu

SEQ ID NO: 1120115 - RNA, 22 nt, Human
agagcucaagacgcucacagua

SEQ ID NO: 1120116 - RNA, 22 nt, Human
uuaugcuaagugcaacaagcca

SEQ ID NO: 1120117 - RNA, 22 nt, Human
ugggggugaaagucuggacagu

SEQ ID NO: 1120118 - RNA, 19 nt, Human
uugcauuguaguuggacug

SEQ ID NO: 1120119 - RNA, 19 nt, Human
ggcugucuggcguguggau

SEQ ID NO: 1120120 - RNA, 22 nt, Human
agcaggguuccaggaguugcag

SEQ ID NO: 1120121 - RNA, 22 nt, Human
auucuucacuguuucagaauga

SEQ ID NO: 1120122 - RNA, 22 nt, Human
acagggccucagcugauucugg

SEQ ID NO: 1120123 - RNA, 22 nt, Human
gccugggagggcagcagugugg

SEQ ID NO: 1120124 - RNA, 22 nt, Human
gcaggguauaauacuuagguga

SEQ ID NO: 1120125 - RNA, 22 nt, Human
uuuuccuacugauaaacaguua

SEQ ID NO: 1120126 - RNA, 22 nt, Human
cagcuggcccuuugguagccuu

SEQ ID NO: 1120127 - RNA, 22 nt, Human
cugggccagauccagccucaca

SEQ ID NO: 1120128 - RNA, 22 nt, Human
uucuugauuucaugcaguuaag

SEQ ID NO: 1120129 - RNA, 22 nt, Human
gcugucucggggcuuucuccug

SEQ ID NO: 1120130 - RNA, 22 nt, Human
auucuguauggaaaagcacuau

SEQ ID NO: 1120131 - RNA, 22 nt, Human
acauuuguaugcguuuuuacug

SEQ ID NO: 1120132 - RNA, 22 nt, Human
ugcugcucuguaaagugaugag

SEQ ID NO: 1120133 - RNA, 22 nt, Human
gccuggagggauagaaugcaag

SEQ ID NO: 1120134 - RNA, 22 nt, Human
agggccaggaacaccugaaggg

SEQ ID NO: 1120135 - RNA, 22 nt, Human
ugauuuuuagcuauucugaaga

SEQ ID NO: 1120136 - RNA, 22 nt, Human
gccuggagacagcagaggcggc

SEQ ID NO: 1120137 - RNA, 22 nt, Human
uauguagaagcugcucaaagaa

SEQ ID NO: 1120138 - RNA, 22 nt, Human
agcagcagauccaaaaaaugug

SEQ ID NO: 1120139 - RNA, 21 nt, Human
uaagaacauuaucuucuuccu

SEQ ID NO: 1120140 - RNA, 22 nt, Human
ugucucugguauuaggugaaaa

SEQ ID NO: 1120141 - RNA, 22 nt, Human
cggggcuguagcacagcugagc

SEQ ID NO: 1120142 - RNA, 20 nt, Human
uccuucaggcagggccuagu

SEQ ID NO: 1120143 - RNA, 22 nt, Human
gcaguggcaccgcuggcucugg

SEQ ID NO: 1120144 - RNA, 22 nt, Human
cuagagaggcagauguccugug

SEQ ID NO: 1120145 - RNA, 22 nt, Human
caggaaaggugugucaugaugg

SEQ ID NO: 1120146 - RNA, 22 nt, Human
cacauccuucagcugagcccag

SEQ ID NO: 1120147 - RNA, 22 nt, Human
cccagcucugcagaccugcccu

SEQ ID NO: 1120148 - RNA, 23 nt, Human
ggcagcucucaucugaugacuga

SEQ ID NO: 1120149 - RNA, 22 nt, Human
agugguaacuaaguccugcuua

SEQ ID NO: 1120150 - RNA, 22 nt, Human
gcucugcugcuuacuagauggu

SEQ ID NO: 1120151 - RNA, 22 nt, Human
uguuuauaccuugguauaacca

SEQ ID NO: 1120152 - RNA, 18 nt, Human
agcagcugugccacacug

SEQ ID NO: 1120153 - RNA, 22 nt, Human
cuucccuuggugaacagagcau

SEQ ID NO: 1120154 - RNA, 18 nt, Human
cagucccaaaccuuagga

SEQ ID NO: 1120155 - RNA, 22 nt, Human
caggaccuggaaugcuugugaa

SEQ ID NO: 1120156 - RNA, 22 nt, Human
cugggugaguugaugaaggaga

SEQ ID NO: 1120157 - RNA, 22 nt, Human
caggcugucugaauggaggccc

SEQ ID NO: 1120158 - RNA, 22 nt, Human
auacaucucauguaagagauaa

SEQ ID NO: 1120159 - RNA, 23 nt, Human
gucagggcuggggucagagugac

SEQ ID NO: 1120160 - RNA, 22 nt, Human
gaaugugugacucuauugagca

SEQ ID NO: 1120161 - RNA, 22 nt, Human
gugauuucuaaucaucugaaug

SEQ ID NO: 1120162 - RNA, 22 nt, Human
uggaagcaucacuucuugccug

SEQ ID NO: 1120163 - RNA, 22 nt, Human
ccugccagggccuuggaagaaa

SEQ ID NO: 1120164 - RNA, 22 nt, Human
ggagucccagcaaagccuuccc

SEQ ID NO: 1120165 - RNA, 19 nt, Human
gcucugagaggggcauggg

SEQ ID NO: 1120166 - RNA, 21 nt, Human
ugcaugcuauguuuuuauuuc

SEQ ID NO: 1120167 - RNA, 22 nt, Human
uuagauaaauuaagacuuuaca

SEQ ID NO: 1120168 - RNA, 22 nt, Human
agcuguguguuuccacugagcu

SEQ ID NO: 1120169 - RNA, 21 nt, Human
acagccugucaucucaugguc

SEQ ID NO: 1120170 - RNA, 22 nt, Human
gucugaggaagaugcaggggga

SEQ ID NO: 1120171 - RNA, 22 nt, Human
uggggcuggggaucuugagccu

SEQ ID NO: 1120172 - RNA, 22 nt, Human
gauuuccucacuaacauccauc

SEQ ID NO: 1120173 - RNA, 22 nt, Human
aucuucaacuugaucauuugaa

SEQ ID NO: 1120174 - RNA, 22 nt, Human
ccaggccucccuuuuccagcca

SEQ ID NO: 1120175 - RNA, 22 nt, Human
agcugauuccacuuuuucccca

SEQ ID NO: 1120176 - RNA, 22 nt, Human
cagagccagaacuagaccuugu

SEQ ID NO: 1120177 - RNA, 18 nt, Human
acauuucuaggugaaagc

SEQ ID NO: 1120178 - RNA, 23 nt, Human
aaaguguagccagguuaagaacc

SEQ ID NO: 1120179 - RNA, 22 nt, Human
ugccugaguuuaacccucagag

SEQ ID NO: 1120180 - RNA, 22 nt, Human
gcaccacaucaaugaggggagc

SEQ ID NO: 1120181 - RNA, 22 nt, Human
ccaaaguccacaguuuacauua

SEQ ID NO: 1120182 - RNA, 22 nt, Human
cagagagaggccacugcuauua

SEQ ID NO: 1120183 - RNA, 20 nt, Human
gccuggcacccggggcuggc

SEQ ID NO: 1120184 - RNA, 22 nt, Human
accaucagagcacaguccgugc

SEQ ID NO: 1120185 - RNA, 22 nt, Human
agauaacuuuuggguauucaug

SEQ ID NO: 1120186 - RNA, 22 nt, Human
caagagcauuuaguuagcuggu

SEQ ID NO: 1120187 - RNA, 22 nt, Human
gccugcagggugaugggcugcc

SEQ ID NO: 1120188 - RNA, 22 nt, Human
aggucauuguuaagucaccaua

SEQ ID NO: 1120189 - RNA, 22 nt, Human
cagggaguuuuuguuccucuag

SEQ ID NO: 1120190 - RNA, 22 nt, Human
ccuggagggcgccgcacagucc

SEQ ID NO: 1120191 - RNA, 22 nt, Human
aggcacuggguaauuaguagcu

SEQ ID NO: 1120192 - RNA, 22 nt, Human
cugggagcuagcucugagcuga

SEQ ID NO: 1120193 - RNA, 22 nt, Human
ugaacauauucaccucuaaaua

SEQ ID NO: 1120194 - RNA, 22 nt, Human
caggcagagugagguggucuaa

SEQ ID NO: 1120195 - RNA, 22 nt, Human
cugggaggcaccgcgucgugcu

SEQ ID NO: 1120196 - RNA, 22 nt, Human
uccagugguaguaaagaggucu

SEQ ID NO: 1120197 - RNA, 22 nt, Human
auggggugaccaugagcauuua

SEQ ID NO: 1120198 - RNA, 22 nt, Human
cagguggguacaucacagagac

SEQ ID NO: 1120199 - RNA, 22 nt, Human
aagagcuggaugaagaaaucaa

SEQ ID NO: 1120200 - RNA, 22 nt, Human
gggcugggaauggcuaaguaug

SEQ ID NO: 1120201 - RNA, 22 nt, Human
uugaggagcacuagucagguau

SEQ ID NO: 1120202 - RNA, 22 nt, Human
aaaguuugaaugauauauuagu

SEQ ID NO: 1120203 - RNA, 22 nt, Human
ugggcugcggauaggccucgga

SEQ ID NO: 1120204 - RNA, 22 nt, Human
ccaggccuagccccugagggua

SEQ ID NO: 1120205 - RNA, 23 nt, Human
gcugucaguuguuuuugucucua

SEQ ID NO: 1120206 - RNA, 22 nt, Human
aagagcuggaguuugcagcccu

SEQ ID NO: 1120207 - RNA, 22 nt, Human
gcuggcugaggucuagcucuuu

SEQ ID NO: 1120208 - RNA, 20 nt, Human
uagauuucauacuucucuuu

SEQ ID NO: 1120209 - RNA, 22 nt, Human
cuccagggggcauccacacagc

SEQ ID NO: 1120210 - RNA, 22 nt, Human
uaaagaacacagggaauagcac

SEQ ID NO: 1120211 - RNA, 22 nt, Human
agugaccauuuucagcuagagg

SEQ ID NO: 1120212 - RNA, 22 nt, Human
ucauugcaggcauuccccugcc

SEQ ID NO: 1120213 - RNA, 22 nt, Human
cuggguggcuguccagccagcc

SEQ ID NO: 1120214 - RNA, 22 nt, Human
ucagggcaaaagggaaaccauu

SEQ ID NO: 1120215 - RNA, 22 nt, Human
ucaggauccauagacucccaaa

SEQ ID NO: 1120216 - RNA, 19 nt, Human
agcagagcccugaagaucc

SEQ ID NO: 1120217 - RNA, 22 nt, Human
uuacaucuaaacugugaacaau

SEQ ID NO: 1120218 - RNA, 22 nt, Human
auuuguagugaagugaaaauaa

SEQ ID NO: 1120219 - RNA, 21 nt, Human
agaagccuggguggagguggg

SEQ ID NO: 1120220 - RNA, 20 nt, Human
gcaaggcacagugaggaggg

SEQ ID NO: 1120221 - RNA, 22 nt, Human
gccucugcucggacuuugccuc

SEQ ID NO: 1120222 - RNA, 22 nt, Human
cuggccuagcucucugcuugaa

SEQ ID NO: 1120223 - RNA, 22 nt, Human
agagcagugcugaagaguaggg

SEQ ID NO: 1120224 - RNA, 22 nt, Human
aguguugucaaacggcucagca

SEQ ID NO: 1120225 - RNA, 22 nt, Human
ucuguucuauuggucuaugugu

SEQ ID NO: 1120226 - RNA, 22 nt, Human
ggagugacucucggggccacua

SEQ ID NO: 1120227 - RNA, 22 nt, Human
ugucccucauugacgcugugcc

SEQ ID NO: 1120228 - RNA, 22 nt, Human
ggcagugacuguucagacgucc

SEQ ID NO: 1120229 - RNA, 22 nt, Human
aggcugcagugcagguaggauu

SEQ ID NO: 1120230 - RNA, 22 nt, Human
ugaagcagcaaaugaugggaga

SEQ ID NO: 1120231 - RNA, 22 nt, Human
ccugucauacuaacguaguggg

SEQ ID NO: 1120232 - RNA, 20 nt, Human
cuuagaaauuuuuacccugg

SEQ ID NO: 1120233 - RNA, 22 nt, Human
uggcagaguggaccauacucaa

SEQ ID NO: 1120234 - RNA, 17 nt, Human
uauguaguacuuauaaa

SEQ ID NO: 1120235 - RNA, 23 nt, Human
agccagggcacugguggagauug

SEQ ID NO: 1120236 - RNA, 22 nt, Human
auugucugaauccaaagcucug

SEQ ID NO: 1120237 - RNA, 22 nt, Human
ucagagugcagggaguagcagc

SEQ ID NO: 1120238 - RNA, 22 nt, Human
cuucccacuaguaucacagagc

SEQ ID NO: 1120239 - RNA, 22 nt, Human
ucagagaugcagugccaccuac

SEQ ID NO: 1120240 - RNA, 22 nt, Human
ugggcugcuguuacaggggcug

SEQ ID NO: 1120241 - RNA, 22 nt, Human
aaaggucaagcuggacucaggu

SEQ ID NO: 1120242 - RNA, 22 nt, Human
gccuggaguuguggugaagcca

SEQ ID NO: 1120243 - RNA, 22 nt, Human
gggcagcagaggaucccuuaau

SEQ ID NO: 1120244 - RNA, 22 nt, Human
ucaaauguucccuguacuggcc

SEQ ID NO: 1120245 - RNA, 22 nt, Human
ucaaaugcugccuuugugugcc

SEQ ID NO: 1120246 - RNA, 22 nt, Human
uggcucagucuggguugacuga

SEQ ID NO: 1120247 - RNA, 19 nt, Human
ucucacaucagcuccuagc

SEQ ID NO: 1120248 - RNA, 22 nt, Human
agcugcaguaaagcucuccagg

SEQ ID NO: 1120249 - RNA, 22 nt, Human
agcugcuccuuuccugcaggcg

SEQ ID NO: 1120250 - RNA, 22 nt, Human
ugggccuggagcccuggagagu

SEQ ID NO: 1120251 - RNA, 22 nt, Human
agcugcugcggaaagaugccac

SEQ ID NO: 1120252 - RNA, 22 nt, Human
gccuggcccagggcucuuguug

SEQ ID NO: 1120253 - RNA, 22 nt, Human
agagcagaggcauggccguggg

SEQ ID NO: 1120254 - RNA, 22 nt, Human
ucuuccagcaaugugaaaucac

SEQ ID NO: 1120255 - RNA, 22 nt, Human
acugugugcccugacgccaggg

SEQ ID NO: 1120256 - RNA, 22 nt, Human
cagagccaaaugcugugguuau

SEQ ID NO: 1120257 - RNA, 22 nt, Human
ucucuggggauggaccugggag

SEQ ID NO: 1120258 - RNA, 22 nt, Human
auguguaaaaagugcuuaauau

SEQ ID NO: 1120259 - RNA, 23 nt, Human
gggcugcuccaggccaaggcugg

SEQ ID NO: 1120260 - RNA, 22 nt, Human
uggcuccuucauucuccugcca

SEQ ID NO: 1120261 - RNA, 22 nt, Human
gccuggagaauuaaaaggaagg

SEQ ID NO: 1120262 - RNA, 22 nt, Human
cugggcugcaggaguggggcaa

SEQ ID NO: 1120263 - RNA, 22 nt, Human
ggcugccuucccugagccccgg

SEQ ID NO: 1120264 - RNA, 22 nt, Human
aggcugcuuccuuacguggcug

SEQ ID NO: 1120265 - RNA, 22 nt, Human
aguggcagaucucuggucugga

SEQ ID NO: 1120266 - RNA, 19 nt, Human
ggugaccaccuggucagug

SEQ ID NO: 1120267 - RNA, 19 nt, Human
gcagccaggugcucuaccu

SEQ ID NO: 1120268 - RNA, 22 nt, Human
gguggccuuucaguggaucagg

SEQ ID NO: 1120269 - RNA, 22 nt, Human
ccugccugcaaaaugggacaag

SEQ ID NO: 1120270 - RNA, 22 nt, Human
gcugugcagucuuuggugugcc

SEQ ID NO: 1120271 - RNA, 22 nt, Human
auggaaagccaguguuccauca

SEQ ID NO: 1120272 - RNA, 22 nt, Human
caaagucccagcugcuuagaga

SEQ ID NO: 1120273 - RNA, 22 nt, Human
cagggcuggcucaugaaaaguu

SEQ ID NO: 1120274 - RNA, 22 nt, Human
ggucccugaagaggccuggggu

SEQ ID NO: 1120275 - RNA, 22 nt, Human
uucaagauccagcacaacagug

SEQ ID NO: 1120276 - RNA, 22 nt, Human
gagccugggacugggggucaug

SEQ ID NO: 1120277 - RNA, 22 nt, Human
uacacuuuuuacuacagauucu

SEQ ID NO: 1120278 - RNA, 23 nt, Human
aggcugcagaagaauagggucau

SEQ ID NO: 1120279 - RNA, 22 nt, Human
ugggggugugccagggaccucc

SEQ ID NO: 1120280 - RNA, 22 nt, Human
caagaugccccugguagggauc

SEQ ID NO: 1120281 - RNA, 22 nt, Human
augcucuggaguacgugaaauu

SEQ ID NO: 1120282 - RNA, 21 nt, Human
agaaaaaccagcauguuuuca

SEQ ID NO: 1120283 - RNA, 22 nt, Human
gaggccugaggcugccuggagc

SEQ ID NO: 1120284 - RNA, 21 nt, Human
gcacagcaugaguguuggcau

SEQ ID NO: 1120285 - RNA, 22 nt, Human
uugaaaggccuguuuauccagc

SEQ ID NO: 1120286 - RNA, 21 nt, Human
gcagccagccgagaccaugcc

SEQ ID NO: 1120287 - RNA, 22 nt, Human
gcccccucuuuggagccagcca

SEQ ID NO: 1120288 - RNA, 21 nt, Human
ccagcuccaggaccuuggauc

SEQ ID NO: 1120289 - RNA, 22 nt, Human
gugucccaggagaggagacaau

SEQ ID NO: 1120290 - RNA, 22 nt, Human
accuuaaaacugacacauggag

SEQ ID NO: 1120291 - RNA, 22 nt, Human
uuugacaggacuaacauauggc

SEQ ID NO: 1120292 - RNA, 23 nt, Human
aguguuccaguugguugagagug

SEQ ID NO: 1120293 - RNA, 22 nt, Human
ggcuguccuuggccaaggcacu

SEQ ID NO: 1120294 - RNA, 22 nt, Human
cacauguacagaagcaggcugg

SEQ ID NO: 1120295 - RNA, 22 nt, Human
cauugcugugggcauuugcugc

SEQ ID NO: 1120296 - RNA, 22 nt, Human
uuuuaauacugcuauuguagga

SEQ ID NO: 1120297 - RNA, 22 nt, Human
gcuguuccugcuuagaggucgg

SEQ ID NO: 1120298 - RNA, 22 nt, Human
ucccagagcccaaguuggagag

SEQ ID NO: 1120299 - RNA, 22 nt, Human
gccacagggcagaugcgcagag

SEQ ID NO: 1120300 - RNA, 22 nt, Human
agucccagugacuuggccagaa

SEQ ID NO: 1120301 - RNA, 19 nt, Human
ucauucaggaccaguggau

SEQ ID NO: 1120302 - RNA, 22 nt, Human
agagccacugggagacagagca

SEQ ID NO: 1120303 - RNA, 22 nt, Human
ccagguggaaggucugugcucu

SEQ ID NO: 1120304 - RNA, 22 nt, Human
guagcccaccuggggagggcga

SEQ ID NO: 1120305 - RNA, 22 nt, Human
aagauuuagggccaguuuacau

SEQ ID NO: 1120306 - RNA, 22 nt, Human
aucuaagauguauugagcacuu

SEQ ID NO: 1120307 - RNA, 22 nt, Human
uuucuguuaggcaucauuuuaa

SEQ ID NO: 1120308 - RNA, 22 nt, Human
uguagcauguaaauugguuauu

SEQ ID NO: 1120309 - RNA, 22 nt, Human
gggagggaucugcuaggcaaug

SEQ ID NO: 1120310 - RNA, 22 nt, Human
cagcucaaguuucccaggucag

SEQ ID NO: 1120311 - RNA, 22 nt, Human
gcaggggcuacucugagcuucc

SEQ ID NO: 1120312 - RNA, 22 nt, Human
gcagggcacagacagugccaag

SEQ ID NO: 1120313 - RNA, 22 nt, Human
ugccagcccaccuuggggccuc

SEQ ID NO: 1120314 - RNA, 20 nt, Human
aagcaauauagugcaaaugu

SEQ ID NO: 1120315 - RNA, 22 nt, Human
agaauguagucuuggagauuua

SEQ ID NO: 1120316 - RNA, 22 nt, Human
caagagcuagaaauugguuaga

SEQ ID NO: 1120317 - RNA, 22 nt, Human
ugcugcacgauaaauaauuucu

SEQ ID NO: 1120318 - RNA, 22 nt, Human
ccacacagucaguuuccaagaa

SEQ ID NO: 1120319 - RNA, 22 nt, Human
gccuucugauaucucuuggcau

SEQ ID NO: 1120320 - RNA, 22 nt, Human
gaacaguaaauuuaugcagcac

SEQ ID NO: 1120321 - RNA, 22 nt, Human
cagggccuccuaaggcaucuaa

SEQ ID NO: 1120322 - RNA, 22 nt, Human
gcugucagugaggugagacaug

SEQ ID NO: 1120323 - RNA, 22 nt, Human
aacaucuuuuuguuugcugaaa

SEQ ID NO: 1120324 - RNA, 22 nt, Human
cauuucugucacguucuuuuau

SEQ ID NO: 1120325 - RNA, 22 nt, Human
cugccuggcauggagaagagaa

SEQ ID NO: 1120326 - RNA, 22 nt, Human
cuggggcccaucgagggcugag

SEQ ID NO: 1120327 - RNA, 22 nt, Human
ugcagcagguuccaaaggguua

SEQ ID NO: 1120328 - RNA, 22 nt, Human
cugggacuuuacccuguggccc

SEQ ID NO: 1120329 - RNA, 21 nt, Human
auugaaagucaacaaucaguu

SEQ ID NO: 1120330 - RNA, 22 nt, Human
gggcuggggcucaauaauuugu

SEQ ID NO: 1120331 - RNA, 22 nt, Human
aggagcugggcugcugcuggga

SEQ ID NO: 1120332 - RNA, 22 nt, Human
agcccccaaaagugcuuaugau

SEQ ID NO: 1120333 - RNA, 22 nt, Human
agaauaguggcaaugacugcac

SEQ ID NO: 1120334 - RNA, 22 nt, Human
uuccaaagucauguugcugaua

SEQ ID NO: 1120335 - RNA, 22 nt, Human
uacuuuuugucucuuugaaugu

SEQ ID NO: 1120336 - RNA, 22 nt, Human
gggcuucucuuuagugagcuga

SEQ ID NO: 1120337 - RNA, 18 nt, Human
ccagguggugacagagau

SEQ ID NO: 1120338 - RNA, 22 nt, Human
ggggacugccuuccacagacac

SEQ ID NO: 1120339 - RNA, 22 nt, Human
uggcuuccuccagagcaggagg

SEQ ID NO: 1120340 - RNA, 22 nt, Human
cugcucuggcguacucggcauc

SEQ ID NO: 1120341 - RNA, 22 nt, Human
ggcaaggccuugcccagcauuc

SEQ ID NO: 1120342 - RNA, 21 nt, Human
caggaaaagcggaagucuagc

SEQ ID NO: 1120343 - RNA, 22 nt, Human
gccuggcugagguggggaggca

SEQ ID NO: 1120344 - RNA, 22 nt, Human
agccagugcaacagcagugaag

SEQ ID NO: 1120345 - RNA, 18 nt, Human
aggcuucuuggcucaguc

SEQ ID NO: 1120346 - RNA, 22 nt, Human
guggcagagguuccucagugug

SEQ ID NO: 1120347 - RNA, 22 nt, Human
cccaggaggccaagguugcagu

SEQ ID NO: 1120348 - RNA, 22 nt, Human
acauuguagacuuuucauaugu

SEQ ID NO: 1120349 - RNA, 22 nt, Human
aggauccuuuuucugcuguuug

SEQ ID NO: 1120350 - RNA, 22 nt, Human
cuuagaaaugcagauucucagg

SEQ ID NO: 1120351 - RNA, 22 nt, Human
uccagggaagagcagaggcuac

SEQ ID NO: 1120352 - RNA, 22 nt, Human
caggccucagagaguggcgggg

SEQ ID NO: 1120353 - RNA, 22 nt, Human
ucagagugugacuuggucauga

SEQ ID NO: 1120354 - RNA, 22 nt, Human
gaguuauuaauggcugaguuug

SEQ ID NO: 1120355 - RNA, 22 nt, Human
ugguuucccauuaucugcagga

SEQ ID NO: 1120356 - RNA, 22 nt, Human
acauuuacagugcuagacaauc

SEQ ID NO: 1120357 - RNA, 22 nt, Human
ccaggguggaggcuggauggag

SEQ ID NO: 1120358 - RNA, 22 nt, Human
ggaaggucgagcugcaucuggc

SEQ ID NO: 1120359 - RNA, 22 nt, Human
aaggcugaguaaaacagagaac

SEQ ID NO: 1120360 - RNA, 22 nt, Human
ggagcugcacgcucugaagccu

SEQ ID NO: 1120361 - RNA, 22 nt, Human
aauugugcuaugauuaugaaag

SEQ ID NO: 1120362 - RNA, 22 nt, Human
ccugggagguggagguugcagu

SEQ ID NO: 1120363 - RNA, 17 nt, Human
agcuccugcccauggcu

SEQ ID NO: 1120364 - RNA, 22 nt, Human
cauugcuuugugcauauuuaaa

SEQ ID NO: 1120365 - RNA, 22 nt, Human
aucacaaaggcugcuucaugau

SEQ ID NO: 1120366 - RNA, 22 nt, Human
ugaagacagaccaaggagaaug

SEQ ID NO: 1120367 - RNA, 22 nt, Human
cugagccaaaaagcagagcuug

SEQ ID NO: 1120368 - RNA, 22 nt, Human
gggcagagacucagaaacagaa

SEQ ID NO: 1120369 - RNA, 22 nt, Human
ucugucacccgagcaggcgaga

SEQ ID NO: 1120370 - RNA, 22 nt, Human
uaaguucagaguucucauuugu

SEQ ID NO: 1120371 - RNA, 22 nt, Human
ugccugucucugacugccauua

SEQ ID NO: 1120372 - RNA, 22 nt, Human
ugcacacaaguuggagaaugaa

SEQ ID NO: 1120373 - RNA, 22 nt, Human
ccuggcuccugccucugcaggg

SEQ ID NO: 1120374 - RNA, 22 nt, Human
agcaguggccuggggcucugug

SEQ ID NO: 1120375 - RNA, 22 nt, Human
auuuugaaaccaaguuauuucc

SEQ ID NO: 1120376 - RNA, 20 nt, Human
agugacagagacuguguggc

SEQ ID NO: 1120377 - RNA, 22 nt, Human
ggagccugacagugcccagcau

SEQ ID NO: 1120378 - RNA, 22 nt, Human
ugcugucccccgugucugggcu

SEQ ID NO: 1120379 - RNA, 22 nt, Human
uuuuuccuuggaugugucucuc

SEQ ID NO: 1120380 - RNA, 22 nt, Human
gugccuggagcuaauguguaua

SEQ ID NO: 1120381 - RNA, 22 nt, Human
gcugugugaaaacugggccugg

SEQ ID NO: 1120382 - RNA, 22 nt, Human
gucugucaucugagauggagug

SEQ ID NO: 1120383 - RNA, 22 nt, Human
gcagugacagggcugcugccuu

SEQ ID NO: 1120384 - RNA, 22 nt, Human
ggcagcaugagccuggugaauu

SEQ ID NO: 1120385 - RNA, 22 nt, Human
ccugucugcaugagugagcaua

SEQ ID NO: 1120386 - RNA, 22 nt, Human
ucagggcauccauugccuguug

SEQ ID NO: 1120387 - RNA, 23 nt, Human
ugucacauuuaguuggcauuguu

SEQ ID NO: 1120388 - RNA, 22 nt, Human
acaugauuggacuccuuccccu

SEQ ID NO: 1120389 - RNA, 22 nt, Human
ucuggcucggauuugucuagca

SEQ ID NO: 1120390 - RNA, 22 nt, Human
aacucagucauaaagcgaaugc

SEQ ID NO: 1120391 - RNA, 22 nt, Human
caguagcauguaauaaagacag

SEQ ID NO: 1120392 - RNA, 22 nt, Human
agagccagccuucucagcuuac

SEQ ID NO: 1120393 - RNA, 21 nt, Human
agcagaggggacauguuugau

SEQ ID NO: 1120394 - RNA, 22 nt, Human
aggcacugauucuguuuuccau

SEQ ID NO: 1120395 - RNA, 22 nt, Human
ugagcaguaggucugaauagug

SEQ ID NO: 1120396 - RNA, 22 nt, Human
aagaauguuaguuucugauaca

SEQ ID NO: 1120397 - RNA, 22 nt, Human
uagcaguggaaucuuuugucca

SEQ ID NO: 1120398 - RNA, 22 nt, Human
ucuggcucugaauucacuucug

SEQ ID NO: 1120399 - RNA, 22 nt, Human
cauucauuagaauagauaugua

SEQ ID NO: 1120400 - RNA, 22 nt, Human
ucuguuccaguagaaaggugca

SEQ ID NO: 1120401 - RNA, 22 nt, Human
ccuggagguggagguugcagug

SEQ ID NO: 1120402 - RNA, 22 nt, Human
uuugggaaacuuaggggucaga

SEQ ID NO: 1120403 - RNA, 22 nt, Human
acagggcaccugagguaggaag

SEQ ID NO: 1120404 - RNA, 22 nt, Human
cagcaauauacacagucuaugg

SEQ ID NO: 1120405 - RNA, 20 nt, Human
cucucccagcacagcuuccu

SEQ ID NO: 1120406 - RNA, 22 nt, Human
gcacuaaaccaacauguaauaa

SEQ ID NO: 1120407 - RNA, 22 nt, Human
ugucucugugacuccuuccgcc

SEQ ID NO: 1120408 - RNA, 22 nt, Human
aaucagucauuagcucugaccu

SEQ ID NO: 1120409 - RNA, 22 nt, Human
gcucccagcauugcugcugaau

SEQ ID NO: 1120410 - RNA, 22 nt, Human
cccagcuccgagcuccgagccg

SEQ ID NO: 1120411 - RNA, 22 nt, Human
gagcuggcuccgccaugcugcu

SEQ ID NO: 1120412 - RNA, 22 nt, Human
aaggcuaugaucuuuuucauga

SEQ ID NO: 1120413 - RNA, 22 nt, Human
uucuccgcuaaguucucugcag

SEQ ID NO: 1120414 - RNA, 22 nt, Human
uugucuguccaggcaccccaag

SEQ ID NO: 1120415 - RNA, 22 nt, Human
cuguagcagugugcucuuuuuc

SEQ ID NO: 1120416 - RNA, 22 nt, Human
aaacagcugucauuguuuuaaa

SEQ ID NO: 1120417 - RNA, 22 nt, Human
aucuacaggauuuuacagaguu

SEQ ID NO: 1120418 - RNA, 22 nt, Human
agucucaggcagaggaaggcua

SEQ ID NO: 1120419 - RNA, 22 nt, Human
gcuguucugcgucccaggcugg

SEQ ID NO: 1120420 - RNA, 22 nt, Human
gcuucuggaggagcugggcuga

SEQ ID NO: 1120421 - RNA, 22 nt, Human
cagggcaguaacgggaacaucu

SEQ ID NO: 1120422 - RNA, 22 nt, Human
caaaguuuaaaguagauuucag

SEQ ID NO: 1120423 - RNA, 22 nt, Human
agaagcaguuauuuuuugcaca

SEQ ID NO: 1120424 - RNA, 22 nt, Human
gagccaggguuugaaacuagac

SEQ ID NO: 1120425 - RNA, 22 nt, Human
caguggccaugguggcaggggu

SEQ ID NO: 1120426 - RNA, 20 nt, Human
agagaauucccuuuggagau

SEQ ID NO: 1120427 - RNA, 22 nt, Human
ggcuccugauaggagaaugcgg

SEQ ID NO: 1120428 - RNA, 22 nt, Human
gugcauuucucauacacuaaau

SEQ ID NO: 1120429 - RNA, 22 nt, Human
gggaagggagggaccucagucu

SEQ ID NO: 1120430 - RNA, 22 nt, Human
ugcugccagggcucugcccaca

SEQ ID NO: 1120431 - RNA, 22 nt, Human
cagcuugggucaggugccugcu

SEQ ID NO: 1120432 - RNA, 22 nt, Human
uacauauuugucuuuguacugu

SEQ ID NO: 1120433 - RNA, 22 nt, Human
aauguguacaugacagauagaa

SEQ ID NO: 1120434 - RNA, 19 nt, Human
guuuuucccagacgaggca

SEQ ID NO: 1120435 - RNA, 19 nt, Human
ucccagagucuagagguug

SEQ ID NO: 1120436 - RNA, 22 nt, Human
cccaggucuaugccagcucuga

SEQ ID NO: 1120437 - RNA, 22 nt, Human
gcugucagcgcccaaggagcuc

SEQ ID NO: 1120438 - RNA, 22 nt, Human
cagggacagccuugggguggcg

SEQ ID NO: 1120439 - RNA, 22 nt, Human
cccacucuggcucccuucuagu

SEQ ID NO: 1120440 - RNA, 21 nt, Human
ugcagccauucagcccuaugc

SEQ ID NO: 1120441 - RNA, 22 nt, Human
ccuggcagcgugccgagcugcg

SEQ ID NO: 1120442 - RNA, 22 nt, Human
uugcauuguaggauguuagaag

SEQ ID NO: 1120443 - RNA, 22 nt, Human
cugugcaagacuuacuuuaaua

SEQ ID NO: 1120444 - RNA, 22 nt, Human
cugccugggccggccacccucu

SEQ ID NO: 1120445 - RNA, 20 nt, Human
agucucuguagugccugaga

SEQ ID NO: 1120446 - RNA, 22 nt, Human
cuggagagauccuccugaaaaa

SEQ ID NO: 1120447 - RNA, 22 nt, Human
gagcuuccacucuagaaggagu

SEQ ID NO: 1120448 - RNA, 22 nt, Human
ccucuucugagugagacucccu

SEQ ID NO: 1120449 - RNA, 22 nt, Human
aaaugcacagaaaggaugugga

SEQ ID NO: 1120450 - RNA, 23 nt, Human
aaaguugauuugcaguuuaagag

SEQ ID NO: 1120451 - RNA, 22 nt, Human
cugcccugcuugaugacagcga

SEQ ID NO: 1120452 - RNA, 22 nt, Human
aggaagccaugguggacgucua

SEQ ID NO: 1120453 - RNA, 22 nt, Human
ugacaauacagagagagcaaaa

SEQ ID NO: 1120454 - RNA, 22 nt, Human
cugggcuguaauguggcacuga

SEQ ID NO: 1120455 - RNA, 20 nt, Human
uggagcuccagcguccaugu

SEQ ID NO: 1120456 - RNA, 19 nt, Human
uuucaauggcuuagagaaa

SEQ ID NO: 1120457 - RNA, 22 nt, Human
cugugucccaguaccuugggua

SEQ ID NO: 1120458 - RNA, 22 nt, Human
gagggcagagucuaaugaugca

SEQ ID NO: 1120459 - RNA, 22 nt, Human
agggauggaagcucgucugcaa

SEQ ID NO: 1120460 - RNA, 18 nt, Human
aggcacagagcauacaua

SEQ ID NO: 1120461 - RNA, 22 nt, Human
aggcacugacagauucuguguc

SEQ ID NO: 1120462 - RNA, 22 nt, Human
cagacccucgggugaguuggcc

SEQ ID NO: 1120463 - RNA, 18 nt, Human
agagaugguguagaguuu

SEQ ID NO: 1120464 - RNA, 22 nt, Human
uggcucuguugagguauggauu

SEQ ID NO: 1120465 - RNA, 22 nt, Human
ugaaggaaagagggaacauccc

SEQ ID NO: 1120466 - RNA, 22 nt, Human
gcccucuggcagccuuggcugg

SEQ ID NO: 1120467 - RNA, 22 nt, Human
gugauugcccagcaccauuguu

SEQ ID NO: 1120468 - RNA, 22 nt, Human
acauuucucuugaugucucuau

SEQ ID NO: 1120469 - RNA, 22 nt, Human
gccuggagcccaguguggggcu

SEQ ID NO: 1120470 - RNA, 22 nt, Human
caggguccggcugccuggcugu

SEQ ID NO: 1120471 - RNA, 22 nt, Human
ucuggcucaggagcuguguuca

SEQ ID NO: 1120472 - RNA, 22 nt, Human
ucauacaucuuguauaucuauc

SEQ ID NO: 1120473 - RNA, 22 nt, Human
gagaaguuucugguuugcauag

SEQ ID NO: 1120474 - RNA, 22 nt, Human
gccuucugugcuccuggccuuu

SEQ ID NO: 1120475 - RNA, 19 nt, Human
cccaaggcccugggcaggc

SEQ ID NO: 1120476 - RNA, 22 nt, Human
guguggcugauugacaugguca

SEQ ID NO: 1120477 - RNA, 23 nt, Human
ugccucugccucccuagucugca

SEQ ID NO: 1120478 - RNA, 22 nt, Human
uugaacaguuuugucagguuca

SEQ ID NO: 1120479 - RNA, 23 nt, Human
cuggggcuuucaaaucugggcag

SEQ ID NO: 1120480 - RNA, 19 nt, Human
ugagaggcuuaaggcagcu

SEQ ID NO: 1120481 - RNA, 22 nt, Human
ugggauggagccugaguauagu

SEQ ID NO: 1120482 - RNA, 22 nt, Human
ugggcagaggacagggaagauc

SEQ ID NO: 1120483 - RNA, 22 nt, Human
ugugaaagauacuaggcagagg

SEQ ID NO: 1120484 - RNA, 22 nt, Human
aguguuucucagaagggccuau

SEQ ID NO: 1120485 - RNA, 22 nt, Human
uaaggcaccuguccaggcuggg

SEQ ID NO: 1120486 - RNA, 22 nt, Human
cucaggauauugggcuggagca

SEQ ID NO: 1120487 - RNA, 22 nt, Human
agcuggguguguaucagauaaa

SEQ ID NO: 1120488 - RNA, 22 nt, Human
cuguguggccucaagccagccu

SEQ ID NO: 1120489 - RNA, 22 nt, Human
uuuagaaauugcagagugggug

SEQ ID NO: 1120490 - RNA, 22 nt, Human
cuacauuuuaauaagcugcuua

SEQ ID NO: 1120491 - RNA, 22 nt, Human
agggccugagcuggcugaccuc

SEQ ID NO: 1120492 - RNA, 22 nt, Human
cacucugagaaguacaagcucc

SEQ ID NO: 1120493 - RNA, 22 nt, Human
ucagggcaagauugguuaauaa

SEQ ID NO: 1120494 - RNA, 22 nt, Human
gcagcugagcgugaggaagagu

SEQ ID NO: 1120495 - RNA, 22 nt, Human
agcagcugcagggagggucugc

SEQ ID NO: 1120496 - RNA, 22 nt, Human
cuggcucucugagauauugagu

SEQ ID NO: 1120497 - RNA, 22 nt, Human
agauuucacaugcugcucuauu

SEQ ID NO: 1120498 - RNA, 22 nt, Human
uuugcauuucucguaaggaaac

SEQ ID NO: 1120499 - RNA, 22 nt, Human
acuuccugcaaucguccacucc

SEQ ID NO: 1120500 - RNA, 18 nt, Human
gggcucugauccuucacc

SEQ ID NO: 1120501 - RNA, 22 nt, Human
agagccugcaucaggcuugggg

SEQ ID NO: 1120502 - RNA, 22 nt, Human
uucauucaucucuaaaaugccu

SEQ ID NO: 1120503 - RNA, 22 nt, Human
gagggcugccacguugggcgag

SEQ ID NO: 1120504 - RNA, 22 nt, Human
agggcagagacaugcuuccuga

SEQ ID NO: 1120505 - RNA, 21 nt, Human
auggagccuaagaguggaggu

SEQ ID NO: 1120506 - RNA, 22 nt, Human
aaggagucucagcugggccuga

SEQ ID NO: 1120507 - RNA, 22 nt, Human
ugggaggacuugugggcuucau

SEQ ID NO: 1120508 - RNA, 17 nt, Human
uggcuucccugggccac

SEQ ID NO: 1120509 - RNA, 22 nt, Human
auuucauugaaguuaauucuuc

SEQ ID NO: 1120510 - RNA, 22 nt, Human
gaggcugggaaguccaagacca

SEQ ID NO: 1120511 - RNA, 22 nt, Human
acaaaaguguaggaauuccuua

SEQ ID NO: 1120512 - RNA, 22 nt, Human
ggccauggaccccgagcugacc

SEQ ID NO: 1120513 - RNA, 23 nt, Human
cugcagucgccggccugggugcc

SEQ ID NO: 1120514 - RNA, 22 nt, Human
aaggcacuacgcugcuggggcg

SEQ ID NO: 1120515 - RNA, 22 nt, Human
uugaaaggaauacagaggccua

SEQ ID NO: 1120516 - RNA, 20 nt, Human
gccugagcuccgccuccugu

SEQ ID NO: 1120517 - RNA, 22 nt, Human
ccagggcuggugggagaugcug

SEQ ID NO: 1120518 - RNA, 22 nt, Human
ugcugcucuucaccauggccuc

SEQ ID NO: 1120519 - RNA, 21 nt, Human
accagcaggagaucagaagga

SEQ ID NO: 1120520 - RNA, 22 nt, Human
uccucaggcggugaggaggggc

SEQ ID NO: 1120521 - RNA, 22 nt, Human
ggugggcacccgagacuggauc

SEQ ID NO: 1120522 - RNA, 22 nt, Human
guuauguacuuuuuaaaucuug

SEQ ID NO: 1120523 - RNA, 22 nt, Human
auuuuucucuuuccacugagau

SEQ ID NO: 1120524 - RNA, 17 nt, Human
ucugggcuucagugguc

SEQ ID NO: 1120525 - RNA, 22 nt, Human
cucagcuggcaauucuggcucc

SEQ ID NO: 1120526 - RNA, 23 nt, Human
agcagggccagaauacuugcugu

SEQ ID NO: 1120527 - RNA, 22 nt, Human
ugucugagugugccugggcauu

SEQ ID NO: 1120528 - RNA, 22 nt, Human
cacagcuugggcucugacaaua

SEQ ID NO: 1120529 - RNA, 22 nt, Human
ugauuuccacagucaggggugc

SEQ ID NO: 1120530 - RNA, 22 nt, Human
gaaaggugccccauaggcagga

SEQ ID NO: 1120531 - RNA, 22 nt, Human
uuugcauuucuaaugagcuccg

SEQ ID NO: 1120532 - RNA, 22 nt, Human
agcugcuguccuaggcacugua

SEQ ID NO: 1120533 - RNA, 22 nt, Human
cugcucuguuucuuagcugggu

SEQ ID NO: 1120534 - RNA, 22 nt, Human
agagccugugauugucaucacc

SEQ ID NO: 1120535 - RNA, 22 nt, Human
caguuucucucaauaagcaucg

SEQ ID NO: 1120536 - RNA, 22 nt, Human
ggagugacucacagcugggaca

SEQ ID NO: 1120537 - RNA, 22 nt, Human
caggaugugaggaggccauuug

SEQ ID NO: 1120538 - RNA, 22 nt, Human
cugcugagcccuggcacaggug

SEQ ID NO: 1120539 - RNA, 22 nt, Human
uccuucagaggacggcagccag

SEQ ID NO: 1120540 - RNA, 22 nt, Human
gucaccagucccagcuccugaa

SEQ ID NO: 1120541 - RNA, 18 nt, Human
gugacagcugcuagcuca

SEQ ID NO: 1120542 - RNA, 22 nt, Human
uggguagaggaauugggcuacc

SEQ ID NO: 1120543 - RNA, 22 nt, Human
gaggagagggcugcgggcccac

SEQ ID NO: 1120544 - RNA, 22 nt, Human
uccagggcuggguuggcucagc

SEQ ID NO: 1120545 - RNA, 18 nt, Human
ggagccagucugucucug

SEQ ID NO: 1120546 - RNA, 22 nt, Human
uggcugucagcugccuggugcg

SEQ ID NO: 1120547 - RNA, 20 nt, Human
uccaguuuuggagacauucu

SEQ ID NO: 1120548 - RNA, 22 nt, Human
aguaaugugccugaaauacuug

SEQ ID NO: 1120549 - RNA, 22 nt, Human
gcagggcugggugggagacaga

SEQ ID NO: 1120550 - RNA, 22 nt, Human
agaauaaaucaaauguccugag

SEQ ID NO: 1120551 - RNA, 22 nt, Human
ugugcucuggaguugccuucac

SEQ ID NO: 1120552 - RNA, 22 nt, Human
ucucccaggcugcccuguggac

SEQ ID NO: 1120553 - RNA, 22 nt, Human
uuucacaaguaaaguccuaagu

SEQ ID NO: 1120554 - RNA, 17 nt, Human
agagagagcaugccacc

SEQ ID NO: 1120555 - RNA, 22 nt, Human
uugggaaggcguggaagcagaa

SEQ ID NO: 1120556 - RNA, 20 nt, Human
ccaggcacugucccaugcag

SEQ ID NO: 1120557 - RNA, 22 nt, Human
ugcugccacugguagucucauu

SEQ ID NO: 1120558 - RNA, 22 nt, Human
ggcagcuccuccuagucugccc

SEQ ID NO: 1120559 - RNA, 22 nt, Human
gcagcuggcucagagagguggg

SEQ ID NO: 1120560 - RNA, 20 nt, Human
ugaugguucuuuccggguug

SEQ ID NO: 1120561 - RNA, 22 nt, Human
aucaaaguggaaguuuacuagg

SEQ ID NO: 1120562 - RNA, 22 nt, Human
agcuuaggaggaugaugaacau

SEQ ID NO: 1120563 - RNA, 22 nt, Human
aggugauguccacagcuugcag

SEQ ID NO: 1120564 - RNA, 22 nt, Human
ccuggccucagccuagggcuga

SEQ ID NO: 1120565 - RNA, 22 nt, Human
ucuggagcuuguuucagauggu

SEQ ID NO: 1120566 - RNA, 22 nt, Human
acauuucuuccuaauuaucccu

SEQ ID NO: 1120567 - RNA, 17 nt, Human
ucugccgacugccagcu

SEQ ID NO: 1120568 - RNA, 22 nt, Human
gccccagguugccugucccagg

SEQ ID NO: 1120569 - RNA, 22 nt, Human
gggaccaggugggugcauuccg

SEQ ID NO: 1120570 - RNA, 20 nt, Human
ucugcucagcccucaguggc

SEQ ID NO: 1120571 - RNA, 22 nt, Human
ugucccagaucacaggagggga

SEQ ID NO: 1120572 - RNA, 22 nt, Human
augccaggccccacgcugggca

SEQ ID NO: 1120573 - RNA, 22 nt, Human
aaguucaagagugacauauuag

SEQ ID NO: 1120574 - RNA, 22 nt, Human
ggagccagagucugcaguguaa

SEQ ID NO: 1120575 - RNA, 22 nt, Human
guguccaucagcagccacugug

SEQ ID NO: 1120576 - RNA, 22 nt, Human
cccugcagccggccagcucauu

SEQ ID NO: 1120577 - RNA, 22 nt, Human
ugcaggcuguaaucugaggcua

SEQ ID NO: 1120578 - RNA, 22 nt, Human
cucaaggaaagucuggagaaga

SEQ ID NO: 1120579 - RNA, 22 nt, Human
agccuggccugggcaggcacau

SEQ ID NO: 1120580 - RNA, 22 nt, Human
ccucucccacguggcagaggcu

SEQ ID NO: 1120581 - RNA, 22 nt, Human
agggcugccugcucugcauuga

SEQ ID NO: 1120582 - RNA, 22 nt, Human
uguucaauccccagguccugaa

SEQ ID NO: 1120583 - RNA, 22 nt, Human
ucugcaggaggcuggcugcagg

SEQ ID NO: 1120584 - RNA, 22 nt, Human
ugaagcaggguggccagauugu

SEQ ID NO: 1120585 - RNA, 22 nt, Human
ggcacugacacuagcauggcac

SEQ ID NO: 1120586 - RNA, 20 nt, Human
auaaaauaacugccacaaga

SEQ ID NO: 1120587 - RNA, 22 nt, Human
agccuggcuguaaccucauggu

SEQ ID NO: 1120588 - RNA, 22 nt, Human
uuaauuuauguccaaaccagau

SEQ ID NO: 1120589 - RNA, 23 nt, Human
aggaacugaggccuagggaggua

SEQ ID NO: 1120590 - RNA, 22 nt, Human
caucacuguccucagcauucca

SEQ ID NO: 1120591 - RNA, 22 nt, Human
uggcucuguucgccaucaggag

SEQ ID NO: 1120592 - RNA, 22 nt, Human
aucaguuucugugaagaacaca

SEQ ID NO: 1120593 - RNA, 22 nt, Human
auguguccacaggugugagaga

SEQ ID NO: 1120594 - RNA, 22 nt, Human
agcugguucauucauucauggu

SEQ ID NO: 1120595 - RNA, 22 nt, Human
guccucugcuucaugcccugau

SEQ ID NO: 1120596 - RNA, 22 nt, Human
ggauccuuaacuaucacaguga

SEQ ID NO: 1120597 - RNA, 22 nt, Human
uagcuuuaccauagaagaguau

SEQ ID NO: 1120598 - RNA, 22 nt, Human
uggccugggccugccggugcaa

SEQ ID NO: 1120599 - RNA, 22 nt, Human
cuuguacauagagaagaagccu

SEQ ID NO: 1120600 - RNA, 22 nt, Human
uggcucagaugcucuuccagug

SEQ ID NO: 1120601 - RNA, 22 nt, Human
caugcacaacauacucaagagg

SEQ ID NO: 1120602 - RNA, 23 nt, Human
ccucccaccuauuucacuuucuu

SEQ ID NO: 1120603 - RNA, 22 nt, Human
uggagggcucuuucaccuggua

SEQ ID NO: 1120604 - RNA, 22 nt, Human
cucucuguuaugcuuucaugaa

SEQ ID NO: 1120605 - RNA, 22 nt, Human
agggagacacaugaggaaguca

SEQ ID NO: 1120606 - RNA, 22 nt, Human
ccaggcaggcgauggugcagug

SEQ ID NO: 1120607 - RNA, 22 nt, Human
cccuggagggauuucucaauca

SEQ ID NO: 1120608 - RNA, 23 nt, Human
cuugcagggcuggaggcuuagaa

SEQ ID NO: 1120609 - RNA, 22 nt, Human
agaccacagucaggcuccuggu

SEQ ID NO: 1120610 - RNA, 22 nt, Human
aggcaagggggcgccaccuucc

SEQ ID NO: 1120611 - RNA, 22 nt, Human
agagccuguuuugugggagaug

SEQ ID NO: 1120612 - RNA, 22 nt, Human
ggcuucauggaggaggugaguc

SEQ ID NO: 1120613 - RNA, 19 nt, Human
agaggccucagcagcuggc

SEQ ID NO: 1120614 - RNA, 23 nt, Human
cuggcucauccugguugcagugg

SEQ ID NO: 1120615 - RNA, 22 nt, Human
ucugcagauuuaucagcagcug

SEQ ID NO: 1120616 - RNA, 22 nt, Human
ucucagagaacaguuggugcuu

SEQ ID NO: 1120617 - RNA, 22 nt, Human
uaacagaauagcagaaacagaa

SEQ ID NO: 1120618 - RNA, 22 nt, Human
cccacucccugcacgccugccg

SEQ ID NO: 1120619 - RNA, 22 nt, Human
uuccuuguuuguagcucuggga

SEQ ID NO: 1120620 - RNA, 22 nt, Human
caggcugggcagccuccccggc

SEQ ID NO: 1120621 - RNA, 20 nt, Human
uuuuuccuucucuacaggca

SEQ ID NO: 1120622 - RNA, 22 nt, Human
ugcauuccuccaccuccugcac

SEQ ID NO: 1120623 - RNA, 22 nt, Human
aucuuucaguuucauaccaauu

SEQ ID NO: 1120624 - RNA, 22 nt, Human
gcagagccugacgggauuuuuc

SEQ ID NO: 1120625 - RNA, 22 nt, Human
ccagcauggcaccugagaugag

SEQ ID NO: 1120626 - RNA, 22 nt, Human
uggugaagucagcggagcccgg

SEQ ID NO: 1120627 - RNA, 22 nt, Human
uagcaggguccaaugugaggca

SEQ ID NO: 1120628 - RNA, 22 nt, Human
gcagggagguuugcugaccugg

SEQ ID NO: 1120629 - RNA, 22 nt, Human
ggcugagcucaggggcagcagg

SEQ ID NO: 1120630 - RNA, 23 nt, Human
ugcugggguaguuuguggcacag

SEQ ID NO: 1120631 - RNA, 22 nt, Human
cagaauuuagcacaauguaugg

SEQ ID NO: 1120632 - RNA, 22 nt, Human
uacuacauuaauaaaacauuca

SEQ ID NO: 1120633 - RNA, 22 nt, Human
cuggugccauucuguggccuag

SEQ ID NO: 1120634 - RNA, 22 nt, Human
uauuaucauugguaauaugguc

SEQ ID NO: 1120635 - RNA, 22 nt, Human
cacauuuaaagguugaagcuga

SEQ ID NO: 1120636 - RNA, 22 nt, Human
ugcccugucuaagcugucagua

SEQ ID NO: 1120637 - RNA, 22 nt, Human
aucuucaaagcacaucguuugu

SEQ ID NO: 1120638 - RNA, 22 nt, Human
uggccuggaagagaggucgagg

SEQ ID NO: 1120639 - RNA, 22 nt, Human
gccuguguggaugcgccggugc

SEQ ID NO: 1120640 - RNA, 22 nt, Human
uccagucaggcugaauucaagg

SEQ ID NO: 1120641 - RNA, 22 nt, Human
gcugcagcuguaggacacaauu

SEQ ID NO: 1120642 - RNA, 22 nt, Human
ggaguuggugagcaccaggcuu

SEQ ID NO: 1120643 - RNA, 22 nt, Human
caagggcucacggucugcuggg

SEQ ID NO: 1120644 - RNA, 22 nt, Human
acagccaggaauucuggagaag

SEQ ID NO: 1120645 - RNA, 22 nt, Human
ucaaagucacaacucucuaauu

SEQ ID NO: 1120646 - RNA, 22 nt, Human
uucuuacuaguauguuucagca

SEQ ID NO: 1120647 - RNA, 22 nt, Human
uuuauuauguacaggcacuaua

SEQ ID NO: 1120648 - RNA, 22 nt, Human
ggucucagcaguugcuuugacu

SEQ ID NO: 1120649 - RNA, 22 nt, Human
cuuuggaagugaccacaauccu

SEQ ID NO: 1120650 - RNA, 22 nt, Human
agauaauuugaguaaauuaauu

SEQ ID NO: 1120651 - RNA, 22 nt, Human
ccugaagagcacucuagaguug

SEQ ID NO: 1120652 - RNA, 22 nt, Human
gacagccucaugaggagcaaaa

SEQ ID NO: 1120653 - RNA, 19 nt, Human
gccagcagaaugaugaggc

SEQ ID NO: 1120654 - RNA, 22 nt, Human
uaugcacacauguaugcaugug

SEQ ID NO: 1120655 - RNA, 22 nt, Human
cagcuggcagaaccugcaucca

SEQ ID NO: 1120656 - RNA, 22 nt, Human
agcagcugagccccagcuguga

SEQ ID NO: 1120657 - RNA, 22 nt, Human
gagggcaggggucuugcacggu

SEQ ID NO: 1120658 - RNA, 22 nt, Human
agcugccacagagccuggccag

SEQ ID NO: 1120659 - RNA, 22 nt, Human
cagcccuggugccaagguuccc

SEQ ID NO: 1120660 - RNA, 22 nt, Human
ccugcaggggagagacuucuag

SEQ ID NO: 1120661 - RNA, 22 nt, Human
ggcaccuggauguagcagugaa

SEQ ID NO: 1120662 - RNA, 22 nt, Human
ggagaaggugcuggucacugug

SEQ ID NO: 1120663 - RNA, 17 nt, Human
agugaaauuuacauugc

SEQ ID NO: 1120664 - RNA, 22 nt, Human
cacaugggugugccuggaggaa

SEQ ID NO: 1120665 - RNA, 22 nt, Human
uuucuuaggcucuaaaaugacu

SEQ ID NO: 1120666 - RNA, 22 nt, Human
uuagaaaauuugcuucuuugga

SEQ ID NO: 1120667 - RNA, 20 nt, Human
uauuucugggcaaccauuua

SEQ ID NO: 1120668 - RNA, 23 nt, Human
ggccuccuggucuaggcuagacu

SEQ ID NO: 1120669 - RNA, 22 nt, Human
uuagaaaggaaucuucauuuca

SEQ ID NO: 1120670 - RNA, 22 nt, Human
uaugcacaguuacaagaauauc

SEQ ID NO: 1120671 - RNA, 22 nt, Human
guguuuccuaguuuaaugaaug

SEQ ID NO: 1120672 - RNA, 22 nt, Human
aucuggcugacuuugugggaca

SEQ ID NO: 1120673 - RNA, 22 nt, Human
cucuucagauaaaagggauauu

SEQ ID NO: 1120674 - RNA, 22 nt, Human
ccugcccuagagaugacacaau

SEQ ID NO: 1120675 - RNA, 22 nt, Human
ccaguggguaggccauggugag

SEQ ID NO: 1120676 - RNA, 21 nt, Human
guauugcagaguuaugugcuc

SEQ ID NO: 1120677 - RNA, 22 nt, Human
gagagcugggaaagccguggag

SEQ ID NO: 1120678 - RNA, 22 nt, Human
caagauggacauaaggagagaa

SEQ ID NO: 1120679 - RNA, 22 nt, Human
accuuucacgguaucagacauc

SEQ ID NO: 1120680 - RNA, 22 nt, Human
agaacuguccuuggaggagagu

SEQ ID NO: 1120681 - RNA, 22 nt, Human
agccuccacagaugcaaagggc

SEQ ID NO: 1120682 - RNA, 22 nt, Human
ucucugauguauaucagagaac

SEQ ID NO: 1120683 - RNA, 22 nt, Human
guccucugacucagccuuggga

SEQ ID NO: 1120684 - RNA, 22 nt, Human
uuugcauuugcaaauaaugaaa

SEQ ID NO: 1120685 - RNA, 22 nt, Human
gccucacugcagccccaggaag

SEQ ID NO: 1120686 - RNA, 22 nt, Human
guccucagagugggcagguccu

SEQ ID NO: 1120687 - RNA, 22 nt, Human
agcagcuguacuuucaucuguu

SEQ ID NO: 1120688 - RNA, 22 nt, Human
agauguguuucuaguuccugca

SEQ ID NO: 1120689 - RNA, 22 nt, Human
uaaaguucuggugagagguaag

SEQ ID NO: 1120690 - RNA, 22 nt, Human
ucugucaccauucagcuugaau

SEQ ID NO: 1120691 - RNA, 22 nt, Human
cugcagaggccucgccuccucu

SEQ ID NO: 1120692 - RNA, 22 nt, Human
ucaaagucauggcaggcucaga

SEQ ID NO: 1120693 - RNA, 22 nt, Human
ugggcagaguugugaugaacug

SEQ ID NO: 1120694 - RNA, 19 nt, Human
cucugccucccuccugggu

SEQ ID NO: 1120695 - RNA, 22 nt, Human
gcugccuguggcccuucugggu

SEQ ID NO: 1120696 - RNA, 22 nt, Human
auuuccucaugaucauaaugca

SEQ ID NO: 1120697 - RNA, 22 nt, Human
acagaacuuccugcuggagugg

SEQ ID NO: 1120698 - RNA, 22 nt, Human
uggacagguuugggugccuguu

SEQ ID NO: 1120699 - RNA, 22 nt, Human
acacugaauaauugagaguuga

SEQ ID NO: 1120700 - RNA, 22 nt, Human
gcugccuuuuaaagccucgcuu

SEQ ID NO: 1120701 - RNA, 18 nt, Human
aucucccauuggccaagg

SEQ ID NO: 1120702 - RNA, 22 nt, Human
ggggcugguggugguuucucca

SEQ ID NO: 1120703 - RNA, 22 nt, Human
uggcuucugcuuucaguggagg

SEQ ID NO: 1120704 - RNA, 22 nt, Human
aaugucugccugaacuuuauau

SEQ ID NO: 1120705 - RNA, 22 nt, Human
cuggaaggucuguccccacugc

SEQ ID NO: 1120706 - RNA, 22 nt, Human
gcucagagauguucaguagcuu

SEQ ID NO: 1120707 - RNA, 22 nt, Human
cacaggggcaaacuguagggga

SEQ ID NO: 1120708 - RNA, 20 nt, Human
agcuggagaagggcccuucc

SEQ ID NO: 1120709 - RNA, 22 nt, Human
augccuguaaucccagugcuuu

SEQ ID NO: 1120710 - RNA, 22 nt, Human
ucugggugaugaaaugcacugu

SEQ ID NO: 1120711 - RNA, 22 nt, Human
gcagcugcuguggcaucaagcu

SEQ ID NO: 1120712 - RNA, 22 nt, Human
uuugggaacucuaucauggaaa

SEQ ID NO: 1120713 - RNA, 22 nt, Human
uggcagcugauuagauggugcc

SEQ ID NO: 1120714 - RNA, 22 nt, Human
guaaaguucuauuugaauuuag

SEQ ID NO: 1120715 - RNA, 22 nt, Human
uaguaucuauuaguaacaagag

SEQ ID NO: 1120716 - RNA, 22 nt, Human
gcagugaaacaauaggaucaaa

SEQ ID NO: 1120717 - RNA, 22 nt, Human
gcagagcaguacucucuugacu

SEQ ID NO: 1120718 - RNA, 23 nt, Human
aggcccugccugucccucuuuuu

SEQ ID NO: 1120719 - RNA, 22 nt, Human
uccaguucuaggucacucucug

SEQ ID NO: 1120720 - RNA, 22 nt, Human
ugagccagucugucugggugaa

SEQ ID NO: 1120721 - RNA, 22 nt, Human
ucucccacgguacaggauaaac

SEQ ID NO: 1120722 - RNA, 22 nt, Human
gaagcagcuggugagauggagc

SEQ ID NO: 1120723 - RNA, 22 nt, Human
agggagguaggagcuucuagcu

SEQ ID NO: 1120724 - RNA, 22 nt, Human
ccagcagcuuuauuggcucucc

SEQ ID NO: 1120725 - RNA, 22 nt, Human
gccuggagcuacuggacacuga

SEQ ID NO: 1120726 - RNA, 22 nt, Human
aagccagcauuuucccauuccu

SEQ ID NO: 1120727 - RNA, 22 nt, Human
caccaggcugaaccagagggga

SEQ ID NO: 1120728 - RNA, 22 nt, Human
cucaggggaccuggcuccgagu

SEQ ID NO: 1120729 - RNA, 22 nt, Human
accaguccgcggagcuccgggg

SEQ ID NO: 1120730 - RNA, 22 nt, Human
gggcugugcugaguaggaggug

SEQ ID NO: 1120731 - RNA, 22 nt, Human
aggccaggcaacauucugaagu

SEQ ID NO: 1120732 - RNA, 20 nt, Human
ucugugugccaucaccuaac

SEQ ID NO: 1120733 - RNA, 21 nt, Human
ugcucacagaugugcucagug

SEQ ID NO: 1120734 - RNA, 22 nt, Human
guggcuucugcggugugcgcag

SEQ ID NO: 1120735 - RNA, 22 nt, Human
ccugccagcccgcguucaugcc

SEQ ID NO: 1120736 - RNA, 22 nt, Human
gaggaaaauggaguguaauuaa

SEQ ID NO: 1120737 - RNA, 22 nt, Human
auggggagagaagggcugagcu

SEQ ID NO: 1120738 - RNA, 22 nt, Human
gcaagcaguuguggcuucugag

SEQ ID NO: 1120739 - RNA, 22 nt, Human
cucuuccucucaugcggucaua

SEQ ID NO: 1120740 - RNA, 22 nt, Human
ccaggcagagggauccccaucc

SEQ ID NO: 1120741 - RNA, 19 nt, Human
acacagggaucagaggguu

SEQ ID NO: 1120742 - RNA, 22 nt, Human
gagcagcucgagaaggaagcag

SEQ ID NO: 1120743 - RNA, 20 nt, Human
caguagcaauaauuagaagc

SEQ ID NO: 1120744 - RNA, 22 nt, Human
cuuucacaguccugacugagcg

SEQ ID NO: 1120745 - RNA, 22 nt, Human
uuucacaucagagguagauuag

SEQ ID NO: 1120746 - RNA, 22 nt, Human
cuugaaagucacaugcagcccu

SEQ ID NO: 1120747 - RNA, 22 nt, Human
ggcagagcugcaugagcacuca

SEQ ID NO: 1120748 - RNA, 22 nt, Human
acugcagccuagggaccacagu

SEQ ID NO: 1120749 - RNA, 22 nt, Human
ugucaugccauuuaaaauguuu

SEQ ID NO: 1120750 - RNA, 22 nt, Human
uggcagagguauauugggagga

SEQ ID NO: 1120751 - RNA, 22 nt, Human
ggccucucuccuuggcuugcag

SEQ ID NO: 1120752 - RNA, 22 nt, Human
ugacacagauuagagacauacc

SEQ ID NO: 1120753 - RNA, 22 nt, Human
ugcaggugcguuuucaagccuc

SEQ ID NO: 1120754 - RNA, 19 nt, Human
gucacauuugucucccagg

SEQ ID NO: 1120755 - RNA, 21 nt, Human
ugggggagaauugguugcuuu

SEQ ID NO: 1120756 - RNA, 21 nt, Human
auccauccaucuuggccuaac

SEQ ID NO: 1120757 - RNA, 22 nt, Human
agcagaagaaagccacaugacu

SEQ ID NO: 1120758 - RNA, 22 nt, Human
uuacuuuguucucaagauaugu

SEQ ID NO: 1120759 - RNA, 22 nt, Human
ucucagggaccaugaugaugac

SEQ ID NO: 1120760 - RNA, 22 nt, Human
agaggcuguuacacucccagau

SEQ ID NO: 1120761 - RNA, 22 nt, Human
ugcauuauacuuuuagaaauuu

SEQ ID NO: 1120762 - RNA, 22 nt, Human
aagcagccuggacuugggcugg

SEQ ID NO: 1120763 - RNA, 22 nt, Human
aguguuccugcucucaggaagc

SEQ ID NO: 1120764 - RNA, 18 nt, Human
aggcuucccaggcaggcc

SEQ ID NO: 1120765 - RNA, 22 nt, Human
cccagcagccagaaugaggagc

SEQ ID NO: 1120766 - RNA, 22 nt, Human
aagcugcccuguguuagaguuc

SEQ ID NO: 1120767 - RNA, 16 nt, Human
agcagccagcacugga

SEQ ID NO: 1120768 - RNA, 22 nt, Human
ugucuccucauacugucauauu

SEQ ID NO: 1120769 - RNA, 22 nt, Human
cauugcacucuggcuggaacgg

SEQ ID NO: 1120770 - RNA, 22 nt, Human
agugaaaugauaguguaaauac

SEQ ID NO: 1120771 - RNA, 22 nt, Human
cagggccagcgucucgggcuau

SEQ ID NO: 1120772 - RNA, 22 nt, Human
aauuucaagucuugaagaagua

SEQ ID NO: 1120773 - RNA, 22 nt, Human
uaccugagcccagugcagcaua

SEQ ID NO: 1120774 - RNA, 22 nt, Human
aggcuggcuuggcucuccugug

SEQ ID NO: 1120775 - RNA, 21 nt, Human
uuguucuuccagaagcaaagu

SEQ ID NO: 1120776 - RNA, 22 nt, Human
aguacuucagaggcugcccagg

SEQ ID NO: 1120777 - RNA, 22 nt, Human
ccagcugcugugcagggaggcu

SEQ ID NO: 1120778 - RNA, 22 nt, Human
ggucccugcugaagccuuggug

SEQ ID NO: 1120779 - RNA, 22 nt, Human
ggaaagaggauaguggguaggu

SEQ ID NO: 1120780 - RNA, 22 nt, Human
caggguggcccuguggucucau

SEQ ID NO: 1120781 - RNA, 22 nt, Human
aaucuggcucagaagaagauga

SEQ ID NO: 1120782 - RNA, 22 nt, Human
ccugccuggaucagccauccug

SEQ ID NO: 1120783 - RNA, 22 nt, Human
aggucauuccuugucuucuugc

SEQ ID NO: 1120784 - RNA, 22 nt, Human
uuuuuccuagugcuuucuggua

SEQ ID NO: 1120785 - RNA, 22 nt, Human
gcaggcagaucaccugucagga

SEQ ID NO: 1120786 - RNA, 22 nt, Human
agccuggcacugaggcagggcg

SEQ ID NO: 1120787 - RNA, 22 nt, Human
aaggcacuuuucuaaagaccuu

SEQ ID NO: 1120788 - RNA, 22 nt, Human
uauuucugauugcucaugaggc

SEQ ID NO: 1120789 - RNA, 22 nt, Human
accauguuggccaagcuggucu

SEQ ID NO: 1120790 - RNA, 21 nt, Human
cagaggggcuagccuggcugc

SEQ ID NO: 1120791 - RNA, 22 nt, Human
cagccaggccuggugaccaaag

SEQ ID NO: 1120792 - RNA, 22 nt, Human
ugccuugguucucuacuuggag

SEQ ID NO: 1120793 - RNA, 22 nt, Human
cuggguggaucgcagccccagg

SEQ ID NO: 1120794 - RNA, 22 nt, Human
agcugaguuaauucaucacuua

SEQ ID NO: 1120795 - RNA, 22 nt, Human
uguauguaaaguuuguaauaga

SEQ ID NO: 1120796 - RNA, 22 nt, Human
aaagacuagcauuuauauguac

SEQ ID NO: 1120797 - RNA, 21 nt, Human
cagggcacacagaggauggua

SEQ ID NO: 1120798 - RNA, 22 nt, Human
agcugguaugaacaggauagga

SEQ ID NO: 1120799 - RNA, 22 nt, Human
cagccagcuucagauccaagcc

SEQ ID NO: 1120800 - RNA, 22 nt, Human
agagcugcaggguggacccagg

SEQ ID NO: 1120801 - RNA, 22 nt, Human
gcuggcuguguuccuucugcca

SEQ ID NO: 1120802 - RNA, 22 nt, Human
ccucauggaccucagacugucc

SEQ ID NO: 1120803 - RNA, 22 nt, Human
agucccaguucgguucuuccuc

SEQ ID NO: 1120804 - RNA, 22 nt, Human
ucuuuggauaucgcuagaccgu

SEQ ID NO: 1120805 - RNA, 22 nt, Human
gcucucugguuccagucaggaa

SEQ ID NO: 1120806 - RNA, 22 nt, Human
cagagagagugggguguggauu

SEQ ID NO: 1120807 - RNA, 22 nt, Human
guuccacaaaauguacccaguu

SEQ ID NO: 1120808 - RNA, 22 nt, Human
uccuggguccauggcagccgaa

SEQ ID NO: 1120809 - RNA, 22 nt, Human
aagagguaaccauagcaaccac

SEQ ID NO: 1120810 - RNA, 22 nt, Human
gggauggcuuuguggcugacuc

SEQ ID NO: 1120811 - RNA, 22 nt, Human
cuccagggagcugcgggagcca

SEQ ID NO: 1120812 - RNA, 22 nt, Human
auucucaaacaagugguuugau

SEQ ID NO: 1120813 - RNA, 22 nt, Human
gagggcugaagauuguggcccc

SEQ ID NO: 1120814 - RNA, 22 nt, Human
ggcccugagcugaaguacugug

SEQ ID NO: 1120815 - RNA, 22 nt, Human
gcugcucuggcucugcaguguc

SEQ ID NO: 1120816 - RNA, 22 nt, Human
uucacauuugcccuuaugugug

SEQ ID NO: 1120817 - RNA, 22 nt, Human
ugaugguugauuauaaaucagu

SEQ ID NO: 1120818 - RNA, 22 nt, Human
cugugaggcccugggugcugga

SEQ ID NO: 1120819 - RNA, 22 nt, Human
auuuuucucuccacuccauuaa

SEQ ID NO: 1120820 - RNA, 22 nt, Human
ccaucagcaugggagcaugggc

SEQ ID NO: 1120821 - RNA, 22 nt, Human
uggcucugcaccucaguguacc

SEQ ID NO: 1120822 - RNA, 22 nt, Human
uauuucuugaguggucaguuuc

SEQ ID NO: 1120823 - RNA, 18 nt, Human
ugucucugaauuccagug

SEQ ID NO: 1120824 - RNA, 22 nt, Human
agaugcugugaggaagcuagga

SEQ ID NO: 1120825 - RNA, 22 nt, Human
ggcaguagccagggacuggcag

SEQ ID NO: 1120826 - RNA, 22 nt, Human
gcugagguaggagguugcagug

SEQ ID NO: 1120827 - RNA, 22 nt, Human
ggagggagucagcugauuagaa

SEQ ID NO: 1120828 - RNA, 22 nt, Human
cucagaauuacaucccauuuua

SEQ ID NO: 1120829 - RNA, 22 nt, Human
ugcuggagaucauuaauguuca

SEQ ID NO: 1120830 - RNA, 22 nt, Human
uggccugguuguugcugccguu

SEQ ID NO: 1120831 - RNA, 22 nt, Human
aagccagggauuccugagggag

SEQ ID NO: 1120832 - RNA, 22 nt, Human
uaggcagcugcaaacuucgguc

SEQ ID NO: 1120833 - RNA, 22 nt, Human
augaguaagaccauaauuuuug

SEQ ID NO: 1120834 - RNA, 22 nt, Human
ggaggcccagagaggugaagug

SEQ ID NO: 1120835 - RNA, 22 nt, Human
gcagugguccaguucacaccca

SEQ ID NO: 1120836 - RNA, 22 nt, Human
aaauguguuccuuugcuacaga

SEQ ID NO: 1120837 - RNA, 22 nt, Human
ugggcacaggggaauggaugaa

SEQ ID NO: 1120838 - RNA, 19 nt, Human
ugucucagugucccuuccu

SEQ ID NO: 1120839 - RNA, 22 nt, Human
uuguuucagcuguaugcuaugu

SEQ ID NO: 1120840 - RNA, 22 nt, Human
cagggcagaacauauagauagu

SEQ ID NO: 1120841 - RNA, 22 nt, Human
cacugcagcaccaugcagggcu

SEQ ID NO: 1120842 - RNA, 17 nt, Human
agcagcugaagcagcca

SEQ ID NO: 1120843 - RNA, 20 nt, Human
cugagcugagcuccaugggu

SEQ ID NO: 1120844 - RNA, 22 nt, Human
gccuaauaugcaaaauugauac

SEQ ID NO: 1120845 - RNA, 22 nt, Human
aaaaugugcaguuuuuaagcug

SEQ ID NO: 1120846 - RNA, 22 nt, Human
ugcucuguaacaaauugacaug

SEQ ID NO: 1120847 - RNA, 19 nt, Human
acagagcucucugcuucug

SEQ ID NO: 1120848 - RNA, 22 nt, Human
cuugugcaauugacauugaauc

SEQ ID NO: 1120849 - RNA, 22 nt, Human
ucucagagauucagggagaagu

SEQ ID NO: 1120850 - RNA, 22 nt, Human
uggccucucuaccaggcagccu

SEQ ID NO: 1120851 - RNA, 22 nt, Human
gguucacacuuucaugauuuca

SEQ ID NO: 1120852 - RNA, 22 nt, Human
uguggcugacuccuggucccca

SEQ ID NO: 1120853 - RNA, 22 nt, Human
uggcucaggcuugaaaauagau

SEQ ID NO: 1120854 - RNA, 22 nt, Human
ucugcagcgugcaggcuggugc

SEQ ID NO: 1120855 - RNA, 22 nt, Human
ucuggcucaggucagacaggga

SEQ ID NO: 1120856 - RNA, 22 nt, Human
ucaugacaacuauauuauucca

SEQ ID NO: 1120857 - RNA, 22 nt, Human
ccucaggggcuuuucguuguug

SEQ ID NO: 1120858 - RNA, 22 nt, Human
cccuggaggaaaaucugaggcu

SEQ ID NO: 1120859 - RNA, 22 nt, Human
cagagcagaagcgguccucaca

SEQ ID NO: 1120860 - RNA, 22 nt, Human
gaacagaagaggcuggugccac

SEQ ID NO: 1120861 - RNA, 22 nt, Human
ggaggccaaggagggcggauca

SEQ ID NO: 1120862 - RNA, 22 nt, Human
aaaguuugcaauuuauguuaau

SEQ ID NO: 1120863 - RNA, 20 nt, Human
cuggcaggagcgagucuacc

SEQ ID NO: 1120864 - RNA, 22 nt, Human
caugagauaauuuuucuccagu

SEQ ID NO: 1120865 - RNA, 22 nt, Human
uccucagacuucccuuugugua

SEQ ID NO: 1120866 - RNA, 22 nt, Human
ccagagcccagggucaugcagg

SEQ ID NO: 1120867 - RNA, 22 nt, Human
acacaggaagucagcacugaug

SEQ ID NO: 1120868 - RNA, 22 nt, Human
cagggcccaggccacuggguug

SEQ ID NO: 1120869 - RNA, 22 nt, Human
aaagaggaaccaagagcacgug

SEQ ID NO: 1120870 - RNA, 22 nt, Human
ucccagagugugggcaucaagg

SEQ ID NO: 1120871 - RNA, 22 nt, Human
gagccaggcaccuucuguguug

SEQ ID NO: 1120872 - RNA, 22 nt, Human
cagcuggggcagccacgugcgg

SEQ ID NO: 1120873 - RNA, 22 nt, Human
ugaagcccugugucagcuucca

SEQ ID NO: 1120874 - RNA, 22 nt, Human
guauuugauagauuucaaagga

SEQ ID NO: 1120875 - RNA, 22 nt, Human
ggcucugcuggauugaggccag

SEQ ID NO: 1120876 - RNA, 22 nt, Human
gugcauuugacgaauacucacu

SEQ ID NO: 1120877 - RNA, 22 nt, Human
auugaaagcauggauuuggauu

SEQ ID NO: 1120878 - RNA, 23 nt, Human
uggugccucagaagcagugggcu

SEQ ID NO: 1120879 - RNA, 22 nt, Human
ggccugcuucucagugagcuug

SEQ ID NO: 1120880 - RNA, 22 nt, Human
uagaaauccccagucucauagu

SEQ ID NO: 1120881 - RNA, 20 nt, Human
ugucagugccugaggcacag

SEQ ID NO: 1120882 - RNA, 22 nt, Human
agcugagcuaguaguuccagug

SEQ ID NO: 1120883 - RNA, 22 nt, Human
gcugagggcuguaacagcagag

SEQ ID NO: 1120884 - RNA, 22 nt, Human
ggcccugggcagaggagugggc

SEQ ID NO: 1120885 - RNA, 22 nt, Human
gcaggcaguuugcuuuucccuc

SEQ ID NO: 1120886 - RNA, 22 nt, Human
ggcaggagggcggacaaugacc

SEQ ID NO: 1120887 - RNA, 22 nt, Human
uggggacauagccagucuggcu

SEQ ID NO: 1120888 - RNA, 22 nt, Human
uacauacacaaauauacuguuu

SEQ ID NO: 1120889 - RNA, 22 nt, Human
agccagggacgcugcaggcuac

SEQ ID NO: 1120890 - RNA, 22 nt, Human
ucaggggcugugcauuucccag

SEQ ID NO: 1120891 - RNA, 22 nt, Human
aaagauuugaguucugcuuaua

SEQ ID NO: 1120892 - RNA, 23 nt, Human
cccagcagagaugaggagggguc

SEQ ID NO: 1120893 - RNA, 20 nt, Human
cugcucugcuuugcaggugg

SEQ ID NO: 1120894 - RNA, 22 nt, Human
cugcugucuuuauuucacugcu

SEQ ID NO: 1120895 - RNA, 22 nt, Human
cauagcaacagcaucaagucaa

SEQ ID NO: 1120896 - RNA, 22 nt, Human
ggcacugacugugcagcgcacc

SEQ ID NO: 1120897 - RNA, 22 nt, Human
uuuucauuuuuguagaugcaag

SEQ ID NO: 1120898 - RNA, 22 nt, Human
gagcugaguuaccuccagauca

SEQ ID NO: 1120899 - RNA, 22 nt, Human
cauuuacuguugaaucccuagc

SEQ ID NO: 1120900 - RNA, 22 nt, Human
guccucugggagccuugagccu

SEQ ID NO: 1120901 - RNA, 22 nt, Human
ccaccagcuucagcagccgcgg

SEQ ID NO: 1120902 - RNA, 22 nt, Human
uggagccaggagccugggaguc

SEQ ID NO: 1120903 - RNA, 22 nt, Human
cuacugaguccuucagcugcca

SEQ ID NO: 1120904 - RNA, 18 nt, Human
cuccagggaacucaguca

SEQ ID NO: 1120905 - RNA, 22 nt, Human
aaucuggcauuugagaguagga

SEQ ID NO: 1120906 - RNA, 22 nt, Human
ucccagaguauuagcaauugcu

SEQ ID NO: 1120907 - RNA, 22 nt, Human
uguacaguaggaacuuguuauu

SEQ ID NO: 1120908 - RNA, 22 nt, Human
uuggaaggagucaaccagcuga

SEQ ID NO: 1120909 - RNA, 22 nt, Human
gagagcugcaagguagggcggg

SEQ ID NO: 1120910 - RNA, 18 nt, Human
gcuccuggaccaggucac

SEQ ID NO: 1120911 - RNA, 22 nt, Human
gcauuuauuucuuuacugcauc

SEQ ID NO: 1120912 - RNA, 22 nt, Human
ucuggcuccacucugugcaugc

SEQ ID NO: 1120913 - RNA, 22 nt, Human
cacagaaucugugacuccaaga

SEQ ID NO: 1120914 - RNA, 22 nt, Human
uggccugguaccacauagauuu

SEQ ID NO: 1120915 - RNA, 22 nt, Human
cugccacuuacuaggcauggug

SEQ ID NO: 1120916 - RNA, 22 nt, Human
uggcucaguuucugcccagcug

SEQ ID NO: 1120917 - RNA, 22 nt, Human
caaaguauauuggauugaaugg

SEQ ID NO: 1120918 - RNA, 22 nt, Human
uccuggaggcaaaugaagacuc

SEQ ID NO: 1120919 - RNA, 22 nt, Human
agcagcaacuuauuuuucuuau

SEQ ID NO: 1120920 - RNA, 22 nt, Human
agcugcugugugcucaggcagg

SEQ ID NO: 1120921 - RNA, 20 nt, Human
gaggcucugggcauggcgcc

SEQ ID NO: 1120922 - RNA, 22 nt, Human
acugaaagauaaaucaguuagc

SEQ ID NO: 1120923 - RNA, 22 nt, Human
ugacagggugauuaugagagcu

SEQ ID NO: 1120924 - RNA, 22 nt, Human
cugccgaguacagccauagaaa

SEQ ID NO: 1120925 - RNA, 22 nt, Human
agcagcucuuaacaaagcaugg

SEQ ID NO: 1120926 - RNA, 22 nt, Human
guucagggagggacagaugaag

SEQ ID NO: 1120927 - RNA, 22 nt, Human
agcaggcuuucaagagucuucu

SEQ ID NO: 1120928 - RNA, 19 nt, Human
acagaaauguaagugagac

SEQ ID NO: 1120929 - RNA, 22 nt, Human
cugagccaguagucagggacaa

SEQ ID NO: 1120930 - RNA, 22 nt, Human
aggaggccgauuucagaggucg

SEQ ID NO: 1120931 - RNA, 22 nt, Human
guucauuuaugauguaacaugu

SEQ ID NO: 1120932 - RNA, 22 nt, Human
uggcucagccagcccuaggaac

SEQ ID NO: 1120933 - RNA, 22 nt, Human
gggucucucucggcuccacgcg

SEQ ID NO: 1120934 - RNA, 22 nt, Human
ggaggugggagacauaggcggc

SEQ ID NO: 1120935 - RNA, 22 nt, Human
gccaccaggagcccaguccaaa

SEQ ID NO: 1120936 - RNA, 22 nt, Human
ggauccuucuuugaccucacag

SEQ ID NO: 1120937 - RNA, 22 nt, Human
ugaaaucuccucuuuauauauc

SEQ ID NO: 1120938 - RNA, 22 nt, Human
gagccuggagcuggaacgaagc

SEQ ID NO: 1120939 - RNA, 22 nt, Human
uagagcuggaauuugcagcaag

SEQ ID NO: 1120940 - RNA, 19 nt, Human
uacuuuuucaggacagagu

SEQ ID NO: 1120941 - RNA, 22 nt, Human
cucaguuucuucauauuguagg

SEQ ID NO: 1120942 - RNA, 22 nt, Human
agaauucuccuucagggcagga

SEQ ID NO: 1120943 - RNA, 19 nt, Human
agcauccagucaugggauc

SEQ ID NO: 1120944 - RNA, 22 nt, Human
gucucagaccacccucuuuggc

SEQ ID NO: 1120945 - RNA, 22 nt, Human
cucuccuugcagauggcugccu

SEQ ID NO: 1120946 - RNA, 22 nt, Human
gaaugcacacgugugugcaugc

SEQ ID NO: 1120947 - RNA, 22 nt, Human
ugucccagcacuuugggagucu

SEQ ID NO: 1120948 - RNA, 22 nt, Human
aaugaugguauugaugagcuaa

SEQ ID NO: 1120949 - RNA, 22 nt, Human
aauguguauacuggcaauuaag

SEQ ID NO: 1120950 - RNA, 22 nt, Human
ggggcagagaauaaaaaccuaa

SEQ ID NO: 1120951 - RNA, 22 nt, Human
agggcagagagaugaaugggau

SEQ ID NO: 1120952 - RNA, 22 nt, Human
uguacauuuagagcucaauaga

SEQ ID NO: 1120953 - RNA, 22 nt, Human
aaguucaaggugauaguggcag

SEQ ID NO: 1120954 - RNA, 22 nt, Human
caggccuccacuccacgcagac

SEQ ID NO: 1120955 - RNA, 22 nt, Human
agucucugugagcucccaaugg

SEQ ID NO: 1120956 - RNA, 22 nt, Human
gaugccugcauuucaggagagu

SEQ ID NO: 1120957 - RNA, 22 nt, Human
gcaggggcuaaggacacagaga

SEQ ID NO: 1120958 - RNA, 22 nt, Human
agcucccaggcagucaugagga

SEQ ID NO: 1120959 - RNA, 22 nt, Human
aggcacuguucccaguuauccu

SEQ ID NO: 1120960 - RNA, 22 nt, Human
agcagcugucccuuaacaucag

SEQ ID NO: 1120961 - RNA, 22 nt, Human
aggcacugaaagguggccagag

SEQ ID NO: 1120962 - RNA, 22 nt, Human
aaagaacaaauuagcuguuuua

SEQ ID NO: 1120963 - RNA, 22 nt, Human
agauggggcucaguguggaggc

SEQ ID NO: 1120964 - RNA, 19 nt, Human
uggcuccugccugccuucu

SEQ ID NO: 1120965 - RNA, 22 nt, Human
caaaguccuagaacagugcuug

SEQ ID NO: 1120966 - RNA, 22 nt, Human
accaucagucacauguagagaa

SEQ ID NO: 1120967 - RNA, 22 nt, Human
caggcuggaguuaccuuuaggg

SEQ ID NO: 1120968 - RNA, 23 nt, Human
uccugagaugagacagugcugcc

SEQ ID NO: 1120969 - RNA, 22 nt, Human
ugggcagaaugugggauccaga

SEQ ID NO: 1120970 - RNA, 22 nt, Human
cucugggcacauuuuccaggac

SEQ ID NO: 1120971 - RNA, 22 nt, Human
cagcugaggucaaagaagcagg

SEQ ID NO: 1120972 - RNA, 22 nt, Human
cccuggagggacagcugcucua

SEQ ID NO: 1120973 - RNA, 22 nt, Human
cauugcacuccagcuugggcaa

SEQ ID NO: 1120974 - RNA, 19 nt, Human
uggcagggagaguuugaag

SEQ ID NO: 1120975 - RNA, 22 nt, Human
uuccaguucccaugaggauuaa

SEQ ID NO: 1120976 - RNA, 22 nt, Human
cugaggcuuugugugcaugccu

SEQ ID NO: 1120977 - RNA, 22 nt, Human
gguccccagcaguggcugcuuc

SEQ ID NO: 1120978 - RNA, 22 nt, Human
uauuuagaacagacaauagaaa

SEQ ID NO: 1120979 - RNA, 22 nt, Human
ccugggcauucuuugaguucuc

SEQ ID NO: 1120980 - RNA, 22 nt, Human
gcugggcagccuggccgcugcc

SEQ ID NO: 1120981 - RNA, 22 nt, Human
auggccugggcccgcuucagau

SEQ ID NO: 1120982 - RNA, 22 nt, Human
accuggccauccagcuggcauc

SEQ ID NO: 1120983 - RNA, 22 nt, Human
auguacaguuucuagacucaaa

SEQ ID NO: 1120984 - RNA, 22 nt, Human
ggugacuggagggacccaggcc

SEQ ID NO: 1120985 - RNA, 22 nt, Human
uuugaaaauuuaagugcuacac

SEQ ID NO: 1120986 - RNA, 22 nt, Human
uagaucugauacaauucaucug

SEQ ID NO: 1120987 - RNA, 22 nt, Human
cucagaguccccaguggguuug

SEQ ID NO: 1120988 - RNA, 22 nt, Human
ugcuggccaauggcagaggcgg

SEQ ID NO: 1120989 - RNA, 22 nt, Human
ggccuugggauguggcugcagc

SEQ ID NO: 1120990 - RNA, 22 nt, Human
aagacaagcaucaaaucaggca

SEQ ID NO: 1120991 - RNA, 23 nt, Human
gccugccugaccugugcaaaguc

SEQ ID NO: 1120992 - RNA, 22 nt, Human
ggccucagaccggagcuggcca

SEQ ID NO: 1120993 - RNA, 22 nt, Human
gccugaugagcuuccagcugag

SEQ ID NO: 1120994 - RNA, 22 nt, Human
uguguacaagaguguuuacugu

SEQ ID NO: 1120995 - RNA, 22 nt, Human
cagagcuguccaaacccugaca

SEQ ID NO: 1120996 - RNA, 18 nt, Human
cccagcccaccauuucuc

SEQ ID NO: 1120997 - RNA, 22 nt, Human
gugcuuuccauccucccugcug

SEQ ID NO: 1120998 - RNA, 22 nt, Human
ugguaaaguguacugaauauga

SEQ ID NO: 1120999 - RNA, 22 nt, Human
aaaaaugaaacggcugguuggc

SEQ ID NO: 1121000 - RNA, 22 nt, Human
aggcuuccuggaggaagaggua

SEQ ID NO: 1121001 - RNA, 22 nt, Human
aguuauauuccauagauucaga

SEQ ID NO: 1121002 - RNA, 22 nt, Human
ugcauuugucuugucucaugaa

SEQ ID NO: 1121003 - RNA, 19 nt, Human
gcugucugaugcugagguc

SEQ ID NO: 1121004 - RNA, 22 nt, Human
agaaaucaugacuaagagcagu

SEQ ID NO: 1121005 - RNA, 22 nt, Human
ugccagccagguucugaggcua

SEQ ID NO: 1121006 - RNA, 23 nt, Human
cccuguagcccaggacaggcuuu

SEQ ID NO: 1121007 - RNA, 22 nt, Human
uacuuccagcaaucugcauauu

SEQ ID NO: 1121008 - RNA, 22 nt, Human
uggagcagggcaucacugugcg

SEQ ID NO: 1121009 - RNA, 22 nt, Human
gggcucuggauggagccugcag

SEQ ID NO: 1121010 - RNA, 22 nt, Human
ccagggcugagcugugaccaug

SEQ ID NO: 1121011 - RNA, 22 nt, Human
agcuggcauacuuugcuaggaa

SEQ ID NO: 1121012 - RNA, 17 nt, Human
agcugccagggagugug

SEQ ID NO: 1121013 - RNA, 22 nt, Human
ugccucuguggaaauggugguc

SEQ ID NO: 1121014 - RNA, 22 nt, Human
cagcagagcuuauguuggguca

SEQ ID NO: 1121015 - RNA, 22 nt, Human
cacaaugcguacauauaucaaa

SEQ ID NO: 1121016 - RNA, 22 nt, Human
gccuggugcuaugagggccagc

SEQ ID NO: 1121017 - RNA, 22 nt, Human
cccuggaguccuggcaguugau

SEQ ID NO: 1121018 - RNA, 22 nt, Human
cccuggaggaccccaauguggc

SEQ ID NO: 1121019 - RNA, 22 nt, Human
agauuguagaaacuguagcauu

SEQ ID NO: 1121020 - RNA, 19 nt, Human
ggcuccuguggcugcagcc

SEQ ID NO: 1121021 - RNA, 22 nt, Human
uagacacauccguggaagcuuc

SEQ ID NO: 1121022 - RNA, 22 nt, Human
ggucaggggcugcucuacagag

SEQ ID NO: 1121023 - RNA, 22 nt, Human
uggugcuguggaggggcagaag

SEQ ID NO: 1121024 - RNA, 21 nt, Human
acaggcuuuagaaaaugacuc

SEQ ID NO: 1121025 - RNA, 22 nt, Human
cacagggcaccaguuggccauc

SEQ ID NO: 1121026 - RNA, 23 nt, Human
ugcauuauccucucugaagacca

SEQ ID NO: 1121027 - RNA, 22 nt, Human
ggccaccuuccaguugccugca

SEQ ID NO: 1121028 - RNA, 22 nt, Human
uggccugggucacaccaggguc

SEQ ID NO: 1121029 - RNA, 22 nt, Human
gggugggccugucuggccaugu

SEQ ID NO: 1121030 - RNA, 22 nt, Human
uagagugguuaacaguuuagaa

SEQ ID NO: 1121031 - RNA, 22 nt, Human
ugacagaaagaauaugucaauc

SEQ ID NO: 1121032 - RNA, 22 nt, Human
ucccaaagcuacucuucugacu

SEQ ID NO: 1121033 - RNA, 20 nt, Human
ggcagagcuaugucuguugc

SEQ ID NO: 1121034 - RNA, 22 nt, Human
ugccucagagugggcuugcuau

SEQ ID NO: 1121035 - RNA, 22 nt, Human
aaugcacacauuugguacugaa

SEQ ID NO: 1121036 - RNA, 22 nt, Human
ggagcugaaggggugggcucag

SEQ ID NO: 1121037 - RNA, 22 nt, Human
aggagcugcaaauauuaguaau

SEQ ID NO: 1121038 - RNA, 22 nt, Human
agggagaaaauuggaugcacaa

SEQ ID NO: 1121039 - RNA, 22 nt, Human
gcagggcucugcuguaguccua

SEQ ID NO: 1121040 - RNA, 22 nt, Human
ucagcaaugagaacuggcauuu

SEQ ID NO: 1121041 - RNA, 22 nt, Human
ugguacuuggaggcagaaaaau

SEQ ID NO: 1121042 - RNA, 22 nt, Human
gccugcuguuaacugcaggaau

SEQ ID NO: 1121043 - RNA, 22 nt, Human
gcucugagagugggugauucug

SEQ ID NO: 1121044 - RNA, 22 nt, Human
uggccacccagcugacgccuuc

SEQ ID NO: 1121045 - RNA, 22 nt, Human
cuggccuggagccucugggugg

SEQ ID NO: 1121046 - RNA, 22 nt, Human
aucuggcuggauucuuagcguu

SEQ ID NO: 1121047 - RNA, 22 nt, Human
ucagaggagccaaaguucugag

SEQ ID NO: 1121048 - RNA, 22 nt, Human
aggcugagauagguggaucauu

SEQ ID NO: 1121049 - RNA, 22 nt, Human
cagcaauaaugucuacaaaucu

SEQ ID NO: 1121050 - RNA, 22 nt, Human
cagagccucagaauccugugga

SEQ ID NO: 1121051 - RNA, 22 nt, Human
cucuggagcauuucaccuacau

SEQ ID NO: 1121052 - RNA, 20 nt, Human
aggcagagcgcacuuuuaga

SEQ ID NO: 1121053 - RNA, 22 nt, Human
cucacaggagaaagucaugguc

SEQ ID NO: 1121054 - RNA, 22 nt, Human
gcagagugggagcccagggcug

SEQ ID NO: 1121055 - RNA, 22 nt, Human
ccagcccugucaccaacuggag

SEQ ID NO: 1121056 - RNA, 22 nt, Human
cagcuccagcccaggcagcucc

SEQ ID NO: 1121057 - RNA, 22 nt, Human
gaugcacaugugaguauagaag

SEQ ID NO: 1121058 - RNA, 21 nt, Human
uuaagagcuuagcaguaggcc

SEQ ID NO: 1121059 - RNA, 22 nt, Human
gcuggcugcgucaucacagggc

SEQ ID NO: 1121060 - RNA, 22 nt, Human
cccaggcagagagcuggugagc

SEQ ID NO: 1121061 - RNA, 22 nt, Human
ugggcugcugcggugcucuugg

SEQ ID NO: 1121062 - RNA, 22 nt, Human
aggucacauggauaaugaucag

SEQ ID NO: 1121063 - RNA, 22 nt, Human
cagaggugcauacaggucauua

SEQ ID NO: 1121064 - RNA, 22 nt, Human
gcuggccacacugcugauggag

SEQ ID NO: 1121065 - RNA, 22 nt, Human
guguuuccucacuucucugacu

SEQ ID NO: 1121066 - RNA, 22 nt, Human
aaaucagucccucuuggaauuu

SEQ ID NO: 1121067 - RNA, 22 nt, Human
auuugagaugguaaauaacuuu

SEQ ID NO: 1121068 - RNA, 22 nt, Human
ccuggcagcuccuccccggcgg

SEQ ID NO: 1121069 - RNA, 22 nt, Human
uuuguaaauagcaguacucaug

SEQ ID NO: 1121070 - RNA, 18 nt, Human
ggcugccuguuccugaag

SEQ ID NO: 1121071 - RNA, 22 nt, Human
uggggacacagagguucguugg

SEQ ID NO: 1121072 - RNA, 22 nt, Human
uagacagauuucuuguuagaca

SEQ ID NO: 1121073 - RNA, 22 nt, Human
aaugcacaugccacauguggua

SEQ ID NO: 1121074 - RNA, 22 nt, Human
ugccuaggaaaccucaugcuuc

SEQ ID NO: 1121075 - RNA, 22 nt, Human
cagcagggcccccgggugcgcc

SEQ ID NO: 1121076 - RNA, 22 nt, Human
aaaagguuuugaguacaaauau

SEQ ID NO: 1121077 - RNA, 22 nt, Human
ggugggcaacauuuggccugag

SEQ ID NO: 1121078 - RNA, 22 nt, Human
ugucuucaucuccaugcacaga

SEQ ID NO: 1121079 - RNA, 22 nt, Human
caaagcaaggcucaguuugaac

SEQ ID NO: 1121080 - RNA, 22 nt, Human
gcucacuggccugaagaggacg

SEQ ID NO: 1121081 - RNA, 22 nt, Human
caggaugggugucggccagcac

SEQ ID NO: 1121082 - RNA, 22 nt, Human
cucagaguccauaguuuacagu

SEQ ID NO: 1121083 - RNA, 22 nt, Human
gcaggcaggcuuccuugaacug

SEQ ID NO: 1121084 - RNA, 22 nt, Human
agaugggcgcccuggacugagg

SEQ ID NO: 1121085 - RNA, 22 nt, Human
ccuggcugggguagaagugagg

SEQ ID NO: 1121086 - RNA, 22 nt, Human
auugacaagcaguaugucuuag

SEQ ID NO: 1121087 - RNA, 22 nt, Human
guacauuuugagguuaaaacaa

SEQ ID NO: 1121088 - RNA, 22 nt, Human
ccuuuccuuuuuagugugggag

SEQ ID NO: 1121089 - RNA, 22 nt, Human
aaguucaauggaaaagcuuuag

SEQ ID NO: 1121090 - RNA, 22 nt, Human
agagaauuacagaagaauguca

SEQ ID NO: 1121091 - RNA, 22 nt, Human
ccucagaggugaacaucagugc

SEQ ID NO: 1121092 - RNA, 22 nt, Human
aagagcugauuaagucaugagg

SEQ ID NO: 1121093 - RNA, 22 nt, Human
acagagcaauaacagggagagg

SEQ ID NO: 1121094 - RNA, 22 nt, Human
cccuggagcugcuugcauguug

SEQ ID NO: 1121095 - RNA, 22 nt, Human
gcugggagucgcgucuguggcc

SEQ ID NO: 1121096 - RNA, 20 nt, Human
uaggcagagcugugcagccu

SEQ ID NO: 1121097 - RNA, 17 nt, Human
agugacuuggaaagagc

SEQ ID NO: 1121098 - RNA, 22 nt, Human
ggagauuuauagcacacuucag

SEQ ID NO: 1121099 - RNA, 22 nt, Human
cuauugaauagcccaaaucauu

SEQ ID NO: 1121100 - RNA, 22 nt, Human
uggcuuucucccccagcuucuc

SEQ ID NO: 1121101 - RNA, 22 nt, Human
agucccagcccaguccuguaag

SEQ ID NO: 1121102 - RNA, 22 nt, Human
cuugucugugucggauaaaacu

SEQ ID NO: 1121103 - RNA, 22 nt, Human
gcagauggugccaugucuugug

SEQ ID NO: 1121104 - RNA, 22 nt, Human
gccuggcaggccuguuggggcu

SEQ ID NO: 1121105 - RNA, 22 nt, Human
caaauguguagagcuuuugggg

SEQ ID NO: 1121106 - RNA, 22 nt, Human
ucaucacuguaucauugauaga

SEQ ID NO: 1121107 - RNA, 22 nt, Human
uucagugugugauaccugcugu

SEQ ID NO: 1121108 - RNA, 20 nt, Human
uccaagggcagcagaaucag

SEQ ID NO: 1121109 - RNA, 22 nt, Human
gccagagcugagacacgagucc

SEQ ID NO: 1121110 - RNA, 22 nt, Human
gaaugcagauggcugguguaug

SEQ ID NO: 1121111 - RNA, 22 nt, Human
acaauucucucauaucuuauua

SEQ ID NO: 1121112 - RNA, 22 nt, Human
gcacccagaauaaggacaggac

SEQ ID NO: 1121113 - RNA, 22 nt, Human
gcacacaguauaugcucauuaa

SEQ ID NO: 1121114 - RNA, 18 nt, Human
agcagagcccaugcauuc

SEQ ID NO: 1121115 - RNA, 22 nt, Human
uagauuucucauucauagauug

SEQ ID NO: 1121116 - RNA, 19 nt, Human
auagucuuuccaauuauac

SEQ ID NO: 1121117 - RNA, 22 nt, Human
ugcuggaggaguuuacuguggc

SEQ ID NO: 1121118 - RNA, 22 nt, Human
gcaaggcugagcacauuugcau

SEQ ID NO: 1121119 - RNA, 22 nt, Human
ccaggugguucaggucaccaua

SEQ ID NO: 1121120 - RNA, 22 nt, Human
ggcugcuguuucagagacuguu

SEQ ID NO: 1121121 - RNA, 22 nt, Human
cugugucggacgugggcagcag

SEQ ID NO: 1121122 - RNA, 22 nt, Human
gaggcagaaguugcagugagca

SEQ ID NO: 1121123 - RNA, 22 nt, Human
gaaguucaggugggaauugagc

SEQ ID NO: 1121124 - RNA, 22 nt, Human
ccagucccagcucugccaugcu

SEQ ID NO: 1121125 - RNA, 22 nt, Human
gccucugcacuguggcacacca

SEQ ID NO: 1121126 - RNA, 22 nt, Human
auugacaagugagcugggcugc

SEQ ID NO: 1121127 - RNA, 22 nt, Human
acagcagcauaaacugacuaag

SEQ ID NO: 1121128 - RNA, 22 nt, Human
agcaccuggucuccuggcgcug

SEQ ID NO: 1121129 - RNA, 19 nt, Human
uuagaaacuguugacacug

SEQ ID NO: 1121130 - RNA, 22 nt, Human
aggcccagggcugcucucugaa

SEQ ID NO: 1121131 - RNA, 22 nt, Human
ugcagugguguccagguguacu

SEQ ID NO: 1121132 - RNA, 22 nt, Human
ucccuuaaaacucauguguugu

SEQ ID NO: 1121133 - RNA, 22 nt, Human
ggccucucuccagucagugcag

SEQ ID NO: 1121134 - RNA, 22 nt, Human
gagcagcuggacaggccucccu

SEQ ID NO: 1121135 - RNA, 23 nt, Human
cagaagcaccuguugacugcugc

SEQ ID NO: 1121136 - RNA, 22 nt, Human
uaacagaaaagaacugaguuug

SEQ ID NO: 1121137 - RNA, 19 nt, Human
gcugcucugggucucaucu

SEQ ID NO: 1121138 - RNA, 22 nt, Human
acguguucaauuuccaucugac

SEQ ID NO: 1121139 - RNA, 22 nt, Human
ccagcugcaggggagcagugga

SEQ ID NO: 1121140 - RNA, 22 nt, Human
auaacagaguugggaagugaaa

SEQ ID NO: 1121141 - RNA, 22 nt, Human
uguuacacagcagaauagcaag

SEQ ID NO: 1121142 - RNA, 16 nt, Human
uguuagcugugcauua

SEQ ID NO: 1121143 - RNA, 22 nt, Human
aggagaguucacacuggucaga

SEQ ID NO: 1121144 - RNA, 22 nt, Human
aaccaggacaauuuugaaagua

SEQ ID NO: 1121145 - RNA, 22 nt, Human
gccagcccagcuccaggggaaa

SEQ ID NO: 1121146 - RNA, 22 nt, Human
ccaaaugcuccacugacuuugg

SEQ ID NO: 1121147 - RNA, 18 nt, Human
cagaaguccuucaaggcc

SEQ ID NO: 1121148 - RNA, 17 nt, Human
agaugcuggccacaugu

SEQ ID NO: 1121149 - RNA, 22 nt, Human
ccagcagagggucuuggccauu

SEQ ID NO: 1121150 - RNA, 22 nt, Human
guggcugguuuccugcaugcaa

SEQ ID NO: 1121151 - RNA, 22 nt, Human
cugcaggggccucgagcacagg

SEQ ID NO: 1121152 - RNA, 22 nt, Human
cugcagagcauaaaucugaaua

SEQ ID NO: 1121153 - RNA, 22 nt, Human
aaggcacugcuuugcugcgccc

SEQ ID NO: 1121154 - RNA, 22 nt, Human
agcucccagaagccagagucgg

SEQ ID NO: 1121155 - RNA, 22 nt, Human
ugcaggccucacaccuggcacc

SEQ ID NO: 1121156 - RNA, 22 nt, Human
agucucagaguaccugagggac

SEQ ID NO: 1121157 - RNA, 22 nt, Human
uggacucagugcugccauuccc

SEQ ID NO: 1121158 - RNA, 22 nt, Human
aacacaaagaagcugcaggauc

SEQ ID NO: 1121159 - RNA, 22 nt, Human
cagccagcugaauguaccauga

SEQ ID NO: 1121160 - RNA, 22 nt, Human
cccaggcugaguuagagguguc

SEQ ID NO: 1121161 - RNA, 18 nt, Human
augggaggggccaagaga

SEQ ID NO: 1121162 - RNA, 22 nt, Human
ccucccagugccuccagagcag

SEQ ID NO: 1121163 - RNA, 22 nt, Human
ccagcuugaagaugugcugguu

SEQ ID NO: 1121164 - RNA, 22 nt, Human
gagcccuccauggagccaggca

SEQ ID NO: 1121165 - RNA, 22 nt, Human
augguguagcaugugauaugac

SEQ ID NO: 1121166 - RNA, 22 nt, Human
ugggccacggggguggagagcu

SEQ ID NO: 1121167 - RNA, 22 nt, Human
ccugucugcagauaucucaggu

SEQ ID NO: 1121168 - RNA, 22 nt, Human
gccuggcaggccucaugagggg

SEQ ID NO: 1121169 - RNA, 22 nt, Human
uagccgggugugguggaacucc

SEQ ID NO: 1121170 - RNA, 22 nt, Human
ugccucugguuaucugguaccu

SEQ ID NO: 1121171 - RNA, 22 nt, Human
cugaggcaugaaugugggcuuu

SEQ ID NO: 1121172 - RNA, 22 nt, Human
aaggcucuuggagugaaugcag

SEQ ID NO: 1121173 - RNA, 22 nt, Human
gggagggaagguaccuguguga

SEQ ID NO: 1121174 - RNA, 22 nt, Human
auuuccuagccucucuugcagu

SEQ ID NO: 1121175 - RNA, 22 nt, Human
auuguauuuccagcuugaaugu

SEQ ID NO: 1121176 - RNA, 16 nt, Human
gccuggaguggcaggg

SEQ ID NO: 1121177 - RNA, 22 nt, Human
caggcagcugcuggguucagcc

SEQ ID NO: 1121178 - RNA, 22 nt, Human
uuagcugcauuaucaaaguuau

SEQ ID NO: 1121179 - RNA, 22 nt, Human
agucagugaaggcauugcucaa

SEQ ID NO: 1121180 - RNA, 22 nt, Human
cuuggcagcuuuuggaggagcc

SEQ ID NO: 1121181 - RNA, 22 nt, Human
gcugugugcucacguaguggaa

SEQ ID NO: 1121182 - RNA, 22 nt, Human
agaaaugcauuagcacauauag

SEQ ID NO: 1121183 - RNA, 22 nt, Human
gccugggaagacuaagugggag

SEQ ID NO: 1121184 - RNA, 22 nt, Human
gagauucuguagucaggcaucu

SEQ ID NO: 1121185 - RNA, 22 nt, Human
gccugccuagaauugcagcuuu

SEQ ID NO: 1121186 - RNA, 22 nt, Human
cuuauguacacacauauauugu

SEQ ID NO: 1121187 - RNA, 22 nt, Human
ucagaggaccuuacugagaacc

SEQ ID NO: 1121188 - RNA, 22 nt, Human
aucuacagugcacaggacagcc

SEQ ID NO: 1121189 - RNA, 22 nt, Human
ugccugaugcaggaguaucaga

SEQ ID NO: 1121190 - RNA, 22 nt, Human
uggaggcauaggccugggcccu

SEQ ID NO: 1121191 - RNA, 22 nt, Human
ugcucuggggagcuccucugcg

SEQ ID NO: 1121192 - RNA, 22 nt, Human
uuuuaagaugcuaguauuucag

SEQ ID NO: 1121193 - RNA, 22 nt, Human
acguuuucagccuuaauguaga

SEQ ID NO: 1121194 - RNA, 22 nt, Human
ucucugguggcuccaucaguag

SEQ ID NO: 1121195 - RNA, 22 nt, Human
acaggggaauuuacugucauua

SEQ ID NO: 1121196 - RNA, 22 nt, Human
ugucccaguuuugcagguuaga

SEQ ID NO: 1121197 - RNA, 22 nt, Human
agacuuugagcucuuagagaag

SEQ ID NO: 1121198 - RNA, 22 nt, Human
gccugucucuuggaacuuggua

SEQ ID NO: 1121199 - RNA, 22 nt, Human
agagcugaauuuggguggugga

SEQ ID NO: 1121200 - RNA, 22 nt, Human
uucacauuaucaggauuguuuc

SEQ ID NO: 1121201 - RNA, 22 nt, Human
gaaccaaguaggauacaaggag

SEQ ID NO: 1121202 - RNA, 22 nt, Human
cuggugugauugagcccaggug

SEQ ID NO: 1121203 - RNA, 22 nt, Human
cccagagcuccgguccugccca

SEQ ID NO: 1121204 - RNA, 22 nt, Human
uggccugacugucaggcuguau

SEQ ID NO: 1121205 - RNA, 22 nt, Human
uuucacaauuuuaaggagcaaa

SEQ ID NO: 1121206 - RNA, 22 nt, Human
uauugaaauucuucauguccuc

SEQ ID NO: 1121207 - RNA, 22 nt, Human
aacucaguuacauauuagaaua

SEQ ID NO: 1121208 - RNA, 22 nt, Human
cauggcccucuucuggagcaau

SEQ ID NO: 1121209 - RNA, 22 nt, Human
cagcuggcguggagugauugca

SEQ ID NO: 1121210 - RNA, 22 nt, Human
aggggccugguuggccucuguu

SEQ ID NO: 1121211 - RNA, 22 nt, Human
cucugggcaggaccaguggacc

SEQ ID NO: 1121212 - RNA, 22 nt, Human
acagccuguuugaucuggugcu

SEQ ID NO: 1121213 - RNA, 23 nt, Human
guggagccacaucacaggcuccu

SEQ ID NO: 1121214 - RNA, 22 nt, Human
ugcagcauuauucacaguagcc

SEQ ID NO: 1121215 - RNA, 22 nt, Human
gcugccaugguccaggcuccag

SEQ ID NO: 1121216 - RNA, 22 nt, Human
ucugagccaauuucugugucca

SEQ ID NO: 1121217 - RNA, 22 nt, Human
cucuguccuaugcuugauagaa

SEQ ID NO: 1121218 - RNA, 18 nt, Human
ucugagggugcgggagcu

SEQ ID NO: 1121219 - RNA, 21 nt, Human
ucugucugguuuuagaguggc

SEQ ID NO: 1121220 - RNA, 22 nt, Human
caguugcuacaguucaagugug

SEQ ID NO: 1121221 - RNA, 22 nt, Human
cugugcaguaggucagggcugg

SEQ ID NO: 1121222 - RNA, 22 nt, Human
uugcaccauuucacuuccauua

SEQ ID NO: 1121223 - RNA, 20 nt, Human
agagccuugaggaagaugau

SEQ ID NO: 1121224 - RNA, 22 nt, Human
uacccagcuucaagucaggacu

SEQ ID NO: 1121225 - RNA, 19 nt, Human
cauaauacaguggaucuga

SEQ ID NO: 1121226 - RNA, 22 nt, Human
uugcacagaugagggugaugcu

SEQ ID NO: 1121227 - RNA, 22 nt, Human
gcagagccaugggagguuuuug

SEQ ID NO: 1121228 - RNA, 22 nt, Human
augcaguagauaggcacuuuua

SEQ ID NO: 1121229 - RNA, 23 nt, Human
cauguacacacagcuguacagug

SEQ ID NO: 1121230 - RNA, 22 nt, Human
gucccagggaugcagacaugag

SEQ ID NO: 1121231 - RNA, 22 nt, Human
auuuauuaugggauuuggcaca

SEQ ID NO: 1121232 - RNA, 22 nt, Human
gcucuccacugaccacggggca

SEQ ID NO: 1121233 - RNA, 22 nt, Human
ucaaaugcuucuacuccuaaga

SEQ ID NO: 1121234 - RNA, 22 nt, Human
agcagccaaccuuacauucauc

SEQ ID NO: 1121235 - RNA, 21 nt, Human
aaagugguaaggauuauuuug

SEQ ID NO: 1121236 - RNA, 22 nt, Human
agcugguucagaaauuagaugg

SEQ ID NO: 1121237 - RNA, 22 nt, Human
agcccugggaggccagcuugua

SEQ ID NO: 1121238 - RNA, 22 nt, Human
cuggagccccaggcugugcaga

SEQ ID NO: 1121239 - RNA, 22 nt, Human
cagugccaugucugagccccua

SEQ ID NO: 1121240 - RNA, 22 nt, Human
ugagcugggcugggcugagcug

SEQ ID NO: 1121241 - RNA, 17 nt, Human
aguggcaggcagauggg

SEQ ID NO: 1121242 - RNA, 22 nt, Human
uauguuuuucaagugcacacua

SEQ ID NO: 1121243 - RNA, 22 nt, Human
ucccagaaaaaggaggcuauga

SEQ ID NO: 1121244 - RNA, 22 nt, Human
gaaggaagucauuagugcagac

SEQ ID NO: 1121245 - RNA, 22 nt, Human
cacagcagaaauaugaaggcag

SEQ ID NO: 1121246 - RNA, 21 nt, Human
ggcagcccgcccucuccuggc

SEQ ID NO: 1121247 - RNA, 22 nt, Human
gggcucugggaugcucuuagag

SEQ ID NO: 1121248 - RNA, 22 nt, Human
gaggccuggagccgccuaggcg

SEQ ID NO: 1121249 - RNA, 22 nt, Human
ggcaggagcucuccaguuugcc

SEQ ID NO: 1121250 - RNA, 22 nt, Human
cuggcccagucucagaguguca

SEQ ID NO: 1121251 - RNA, 20 nt, Human
ucucaggguucagcaaagua

SEQ ID NO: 1121252 - RNA, 20 nt, Human
aagaaacuugaaaguacaag

SEQ ID NO: 1121253 - RNA, 22 nt, Human
gggcuacauugugagagaaguu

SEQ ID NO: 1121254 - RNA, 22 nt, Human
gccuggcaggccugggccagca

SEQ ID NO: 1121255 - RNA, 22 nt, Human
uggccugauuuugcuaagagaa

SEQ ID NO: 1121256 - RNA, 22 nt, Human
ugggccagcaauugcugcucag

SEQ ID NO: 1121257 - RNA, 22 nt, Human
acaaaugcuuaguucaccaaaa

SEQ ID NO: 1121258 - RNA, 19 nt, Human
guggccugcgcugggugcg

SEQ ID NO: 1121259 - RNA, 22 nt, Human
caaaugcaugagaaauaagagg

SEQ ID NO: 1121260 - RNA, 22 nt, Human
auggccuggggagcaugggaag

SEQ ID NO: 1121261 - RNA, 18 nt, Human
uggagccagcucuaggau

SEQ ID NO: 1121262 - RNA, 22 nt, Human
gcuuccugauauucauacuguu

SEQ ID NO: 1121263 - RNA, 18 nt, Human
gggcaucauucacaaagu

SEQ ID NO: 1121264 - RNA, 18 nt, Human
ggccugaggauuucagca

SEQ ID NO: 1121265 - RNA, 22 nt, Human
cucagagucccuucccucgugg

SEQ ID NO: 1121266 - RNA, 22 nt, Human
caggguggaaaagcuaguugga

SEQ ID NO: 1121267 - RNA, 22 nt, Human
aucuggcuuaccuagggugccu

SEQ ID NO: 1121268 - RNA, 22 nt, Human
cacaugggcguaauguccaugg

SEQ ID NO: 1121269 - RNA, 22 nt, Human
aaaaguaauugcaauuuuguag

SEQ ID NO: 1121270 - RNA, 22 nt, Human
uacacauguuuggcaaguaugu

SEQ ID NO: 1121271 - RNA, 22 nt, Human
gaccagagaaaggcacuggaag

SEQ ID NO: 1121272 - RNA, 23 nt, Human
ucaguuuuggcuguucaguguug

SEQ ID NO: 1121273 - RNA, 22 nt, Human
agugaaaugacugaaucagaua

SEQ ID NO: 1121274 - RNA, 22 nt, Human
cuggccuuuaaaaugaccuuau

SEQ ID NO: 1121275 - RNA, 22 nt, Human
uuagagaaauucugguaaugua

SEQ ID NO: 1121276 - RNA, 22 nt, Human
gaggccugcagcguggucccug

SEQ ID NO: 1121277 - RNA, 22 nt, Human
ggcuggcauccagggaaaucca

SEQ ID NO: 1121278 - RNA, 22 nt, Human
ggucccaguugcccaggucagg

SEQ ID NO: 1121279 - RNA, 22 nt, Human
cgucuuccucuuacgaugcgcu

SEQ ID NO: 1121280 - RNA, 22 nt, Human
uguguacagcaggauuucucaa

SEQ ID NO: 1121281 - RNA, 18 nt, Human
uguuccaaggaaggaauc

SEQ ID NO: 1121282 - RNA, 22 nt, Human
cagccugcauuuguaucuguau

SEQ ID NO: 1121283 - RNA, 23 nt, Human
aggugccaacugagagcugagag

SEQ ID NO: 1121284 - RNA, 22 nt, Human
cugcugagcaucagggcugccc

SEQ ID NO: 1121285 - RNA, 22 nt, Human
aaguuauuuccucgugacugaa

SEQ ID NO: 1121286 - RNA, 22 nt, Human
ucagggacuaggugcugccuga

SEQ ID NO: 1121287 - RNA, 22 nt, Human
acaaaguuaacaguuggauagu

SEQ ID NO: 1121288 - RNA, 22 nt, Human
uccuucagaaaaccucagucuu

SEQ ID NO: 1121289 - RNA, 22 nt, Human
aacaaaugauuguugguuggag

SEQ ID NO: 1121290 - RNA, 22 nt, Human
ucccugggccuccugcuaugca

SEQ ID NO: 1121291 - RNA, 22 nt, Human
aagauuucugcuuuuggaggca

SEQ ID NO: 1121292 - RNA, 22 nt, Human
gcaggaguguauuugcauguaa

SEQ ID NO: 1121293 - RNA, 22 nt, Human
agccuccuggaguuucugggau

SEQ ID NO: 1121294 - RNA, 16 nt, Human
ccuuucucugccuucc

SEQ ID NO: 1121295 - RNA, 22 nt, Human
uguacaugugucuguauaucuu

SEQ ID NO: 1121296 - RNA, 22 nt, Human
gugccuuccccgguggucuguu

SEQ ID NO: 1121297 - RNA, 22 nt, Human
guauccuuugcggaaauuucua

SEQ ID NO: 1121298 - RNA, 20 nt, Human
uuguuucugcuauuuucuaa

SEQ ID NO: 1121299 - RNA, 20 nt, Human
ugugugcacacaugacauuc

SEQ ID NO: 1121300 - RNA, 22 nt, Human
ggcuuccuggggccuccugcaa

SEQ ID NO: 1121301 - RNA, 22 nt, Human
ucuggcucucucaucacccaau

SEQ ID NO: 1121302 - RNA, 22 nt, Human
cagcugccuaugaccuagccuc

SEQ ID NO: 1121303 - RNA, 22 nt, Human
ccugagccugaguggugcaggg

SEQ ID NO: 1121304 - RNA, 22 nt, Human
gcaggaguuaggcgucguggau

SEQ ID NO: 1121305 - RNA, 22 nt, Human
uauacagaaccgccugaagucu

SEQ ID NO: 1121306 - RNA, 17 nt, Human
aucuggcugcuucuaga

SEQ ID NO: 1121307 - RNA, 22 nt, Human
gggcaugagagggcagcuggca

SEQ ID NO: 1121308 - RNA, 22 nt, Human
gcuggccauggccugcgccauc

SEQ ID NO: 1121309 - RNA, 20 nt, Human
ccugggguacacuggcaugu

SEQ ID NO: 1121310 - RNA, 20 nt, Human
ccuccaggcacacccaugug

SEQ ID NO: 1121311 - RNA, 22 nt, Human
gugccugugccaggggugugcu

SEQ ID NO: 1121312 - RNA, 22 nt, Human
auuuaaauuuucugauggagag

SEQ ID NO: 1121313 - RNA, 22 nt, Human
agcaaggcagucagcuggcugg

SEQ ID NO: 1121314 - RNA, 22 nt, Human
aacccagccguguagcugccgc

SEQ ID NO: 1121315 - RNA, 22 nt, Human
ggcuggaaguccaagaucaagg

SEQ ID NO: 1121316 - RNA, 22 nt, Human
auuauguaacugugguucagca

SEQ ID NO: 1121317 - RNA, 22 nt, Human
ucagaacaauugggaaccauua

SEQ ID NO: 1121318 - RNA, 22 nt, Human
uuauacauguguuuugagauga

SEQ ID NO: 1121319 - RNA, 22 nt, Human
cagagccuaaaacgacuccacu

SEQ ID NO: 1121320 - RNA, 22 nt, Human
uuauuauaaugagggauaaaaa

SEQ ID NO: 1121321 - RNA, 22 nt, Human
cucagggacguuagaggacagg

SEQ ID NO: 1121322 - RNA, 22 nt, Human
uaugaguacaaggacucugucu

SEQ ID NO: 1121323 - RNA, 22 nt, Human
aaagccuugggauuugugauca

SEQ ID NO: 1121324 - RNA, 22 nt, Human
cuggcccagagagcagagcuua

SEQ ID NO: 1121325 - RNA, 22 nt, Human
augaaaacuuuagccucauuag

SEQ ID NO: 1121326 - RNA, 21 nt, Human
aaggccugcuuacugcuaguu

SEQ ID NO: 1121327 - RNA, 22 nt, Human
caagccugucucaccagugcua

SEQ ID NO: 1121328 - RNA, 22 nt, Human
uggagcagccaugaugacagag

SEQ ID NO: 1121329 - RNA, 22 nt, Human
ggagagcagggaggcugcucug

SEQ ID NO: 1121330 - RNA, 22 nt, Human
aacagacagaaaaaugugaucu

SEQ ID NO: 1121331 - RNA, 19 nt, Human
gcugugccucucuccugcu

SEQ ID NO: 1121332 - RNA, 22 nt, Human
cgcugggcgccgaccugcuggc

SEQ ID NO: 1121333 - RNA, 19 nt, Human
ucaggacugacuugaaguc

SEQ ID NO: 1121334 - RNA, 22 nt, Human
gugauuucagguuuuucauacu

SEQ ID NO: 1121335 - RNA, 22 nt, Human
ucacaucuuauuagaguaucuc

SEQ ID NO: 1121336 - RNA, 22 nt, Human
uaauuauaacaguuacaucuua

SEQ ID NO: 1121337 - RNA, 22 nt, Human
uauuucuguaacucagggucug

SEQ ID NO: 1121338 - RNA, 20 nt, Human
ggcucugcuugugagcagcc

SEQ ID NO: 1121339 - RNA, 22 nt, Human
uuccucuccucacaugagucac

SEQ ID NO: 1121340 - RNA, 22 nt, Human
gacagcaggagaucaugauaga

SEQ ID NO: 1121341 - RNA, 22 nt, Human
cccagcucucugcucuuagccu

SEQ ID NO: 1121342 - RNA, 22 nt, Human
cagccaggagccucugcaacua

SEQ ID NO: 1121343 - RNA, 22 nt, Human
ccucaggggugcccacagcugc

SEQ ID NO: 1121344 - RNA, 22 nt, Human
cugugcuggagaugggccagag

SEQ ID NO: 1121345 - RNA, 19 nt, Human
uccuccuuacuuccucuug

SEQ ID NO: 1121346 - RNA, 22 nt, Human
caggaaauaucuccuggcagag

SEQ ID NO: 1121347 - RNA, 22 nt, Human
agagacaccgcgcaucauggcu

SEQ ID NO: 1121348 - RNA, 20 nt, Human
ugcagcuucaccugugucau

SEQ ID NO: 1121349 - RNA, 22 nt, Human
gcagugcugaucccauggcaga

SEQ ID NO: 1121350 - RNA, 22 nt, Human
cuuuggcaaugaaacacaagaa

SEQ ID NO: 1121351 - RNA, 22 nt, Human
uucacauuggugauauguuucu

SEQ ID NO: 1121352 - RNA, 22 nt, Human
gcagcaggcuuuucauaccuug

SEQ ID NO: 1121353 - RNA, 23 nt, Human
gccugggacugguagugugaccu

SEQ ID NO: 1121354 - RNA, 22 nt, Human
caggcaggugcagauuccucuu

SEQ ID NO: 1121355 - RNA, 23 nt, Human
acagagguccaaacaguauaagc

SEQ ID NO: 1121356 - RNA, 22 nt, Human
caugcuuuaccaaagcagugau

SEQ ID NO: 1121357 - RNA, 22 nt, Human
cacacagaugguaagggaggga

SEQ ID NO: 1121358 - RNA, 22 nt, Human
aggcucagagaugaguaagcac

SEQ ID NO: 1121359 - RNA, 22 nt, Human
gccuaggaguggggauggcggu

SEQ ID NO: 1121360 - RNA, 22 nt, Human
agugaaaugauucugagcaaga

SEQ ID NO: 1121361 - RNA, 22 nt, Human
acacugaaugcuguuuagaaau

SEQ ID NO: 1121362 - RNA, 22 nt, Human
cagagccccucagcucucuccc

SEQ ID NO: 1121363 - RNA, 22 nt, Human
ccaccuccaccuauugccagcc

SEQ ID NO: 1121364 - RNA, 22 nt, Human
agccuucaaccuagcuagagca

SEQ ID NO: 1121365 - RNA, 22 nt, Human
aggaaaaaagucugugauuaua

SEQ ID NO: 1121366 - RNA, 22 nt, Human
gcugggagaggcccugaaguga

SEQ ID NO: 1121367 - RNA, 22 nt, Human
uucagagcaucucuaaagccag

SEQ ID NO: 1121368 - RNA, 22 nt, Human
uggccugccuucgcugagcuga

SEQ ID NO: 1121369 - RNA, 22 nt, Human
acagagcaugcucaguguguga

SEQ ID NO: 1121370 - RNA, 22 nt, Human
gauuauauaauggaagcucuug

SEQ ID NO: 1121371 - RNA, 22 nt, Human
uccauggguagcccugguugag

SEQ ID NO: 1121372 - RNA, 15 nt, Human
ugauuuccuacuaac

SEQ ID NO: 1121373 - RNA, 22 nt, Human
cccagcccccgagugucuggaa

SEQ ID NO: 1121374 - RNA, 22 nt, Human
ccugggugaaaucucuccugca

SEQ ID NO: 1121375 - RNA, 22 nt, Human
uucaaaggcaggauagcagcug

SEQ ID NO: 1121376 - RNA, 22 nt, Human
uucuggagagaaaccuuacaaa

SEQ ID NO: 1121377 - RNA, 22 nt, Human
ucuggccauggcaagccgagug

SEQ ID NO: 1121378 - RNA, 22 nt, Human
gcaguggggcgcugggaguugg

SEQ ID NO: 1121379 - RNA, 22 nt, Human
aaggagagguuguccguguugu

SEQ ID NO: 1121380 - RNA, 17 nt, Human
auccccagcaucuagaa

SEQ ID NO: 1121381 - RNA, 22 nt, Human
gcagacuguaucaaugucagua

SEQ ID NO: 1121382 - RNA, 22 nt, Human
acuuccuguguuggucuugcug

SEQ ID NO: 1121383 - RNA, 22 nt, Human
uuuauguaaguggaaugaugcc

SEQ ID NO: 1121384 - RNA, 22 nt, Human
ggcugcugguagggguaggaag

SEQ ID NO: 1121385 - RNA, 22 nt, Human
uacauuguucaugcaugagaaa

SEQ ID NO: 1121386 - RNA, 22 nt, Human
uggcagcaaaaccagaaucaga

SEQ ID NO: 1121387 - RNA, 22 nt, Human
cuggccuggucuggccucucca

SEQ ID NO: 1121388 - RNA, 22 nt, Human
cccagcaguuguuggugcacau

SEQ ID NO: 1121389 - RNA, 23 nt, Human
gccuggagaaaagcugcaguuca

SEQ ID NO: 1121390 - RNA, 22 nt, Human
uugugucugggggagugacauc

SEQ ID NO: 1121391 - RNA, 22 nt, Human
aaggcaggaugcggacccaucu

SEQ ID NO: 1121392 - RNA, 22 nt, Human
ggagagaauuccauggacaugu

SEQ ID NO: 1121393 - RNA, 22 nt, Human
cuggcagcgguuugcagccugg

SEQ ID NO: 1121394 - RNA, 22 nt, Human
acagaauuaucaggaaauguua

SEQ ID NO: 1121395 - RNA, 22 nt, Human
gaagagcugacagugucauccu

SEQ ID NO: 1121396 - RNA, 19 nt, Human
agcagcuggagguggagug

SEQ ID NO: 1121397 - RNA, 22 nt, Human
gcucccaccuuugcuaucagua

SEQ ID NO: 1121398 - RNA, 22 nt, Human
agggcagagcacugaauuggga

SEQ ID NO: 1121399 - RNA, 22 nt, Human
ugcagauucaaaugaaaugcaa

SEQ ID NO: 1121400 - RNA, 22 nt, Human
cacucaggcugugucaggagga

SEQ ID NO: 1121401 - RNA, 20 nt, Human
cccugagaccagagagcagc

SEQ ID NO: 1121402 - RNA, 22 nt, Human
gaugcacugcaguauauacugu

SEQ ID NO: 1121403 - RNA, 22 nt, Human
agucucagcuacuugggaggcu

SEQ ID NO: 1121404 - RNA, 20 nt, Human
ugaagcagccuugauucugu

SEQ ID NO: 1121405 - RNA, 22 nt, Human
cauacauugcucauucaguauc

SEQ ID NO: 1121406 - RNA, 21 nt, Human
ccccugggagcccugucagua

SEQ ID NO: 1121407 - RNA, 22 nt, Human
cugggagguggagguugcauug

SEQ ID NO: 1121408 - RNA, 22 nt, Human
ccagcagagcauggggaggaag

SEQ ID NO: 1121409 - RNA, 23 nt, Human
cuuuccuuucuuugacacccagc

SEQ ID NO: 1121410 - RNA, 23 nt, Human
uggcucuguggaucccucaggag

SEQ ID NO: 1121411 - RNA, 22 nt, Human
ggcuccuguccuccuggagcuc

SEQ ID NO: 1121412 - RNA, 22 nt, Human
caugugucaaaugauguagcug

SEQ ID NO: 1121413 - RNA, 23 nt, Human
ugcagccacucaggagcucagug

SEQ ID NO: 1121414 - RNA, 22 nt, Human
ucagcaaugugauacugugcaa

SEQ ID NO: 1121415 - RNA, 22 nt, Human
guccugggcccaggggcugccu

SEQ ID NO: 1121416 - RNA, 22 nt, Human
cuccuguauguugggcuucaca

SEQ ID NO: 1121417 - RNA, 22 nt, Human
gagcucauucauucauugccug

SEQ ID NO: 1121418 - RNA, 22 nt, Human
gccucugcugcaagccugguug

SEQ ID NO: 1121419 - RNA, 18 nt, Human
cuuguucuucucuuggcg

SEQ ID NO: 1121420 - RNA, 22 nt, Human
cugguuuagcuguaagguuccc

SEQ ID NO: 1121421 - RNA, 22 nt, Human
gagauggggaauaggagcaagc

SEQ ID NO: 1121422 - RNA, 22 nt, Human
ggucccaguccucucccugcua

SEQ ID NO: 1121423 - RNA, 22 nt, Human
uuagauaauguuauuguaauuu

SEQ ID NO: 1121424 - RNA, 22 nt, Human
cauuuacauuuaagguuaauau

SEQ ID NO: 1121425 - RNA, 22 nt, Human
gcugucugacuccaaguuggag

SEQ ID NO: 1121426 - RNA, 20 nt, Human
aaucagaaagugugagcucu

SEQ ID NO: 1121427 - RNA, 22 nt, Human
cuggcucaauuuguacugcugu

SEQ ID NO: 1121428 - RNA, 22 nt, Human
guggcugcagagggcacagcau

SEQ ID NO: 1121429 - RNA, 22 nt, Human
cccuggagcuagucugagcaga

SEQ ID NO: 1121430 - RNA, 18 nt, Human
ucacagugcucuugccua

SEQ ID NO: 1121431 - RNA, 22 nt, Human
cacauugaaaugacccaauaau

SEQ ID NO: 1121432 - RNA, 22 nt, Human
aagcuggcaauuaucaaaacug

SEQ ID NO: 1121433 - RNA, 22 nt, Human
ucauaacagcuaagucccuuuc

SEQ ID NO: 1121434 - RNA, 19 nt, Human
ucgagucaagacacuaggc

SEQ ID NO: 1121435 - RNA, 22 nt, Human
aggcugcucugcgaagucagcu

SEQ ID NO: 1121436 - RNA, 22 nt, Human
guggcccaggcuuggcgcuggc

SEQ ID NO: 1121437 - RNA, 21 nt, Human
ucuuguccuugcucucccacu

SEQ ID NO: 1121438 - RNA, 22 nt, Human
uuuaaaaaacuagucugagucu

SEQ ID NO: 1121439 - RNA, 22 nt, Human
gcugccaguguggcaugaugca

SEQ ID NO: 1121440 - RNA, 22 nt, Human
agcaccuguggcucaugcucgu

SEQ ID NO: 1121441 - RNA, 21 nt, Human
agaggccuuacaggauagacc

SEQ ID NO: 1121442 - RNA, 22 nt, Human
ucuggcucucauacucgccagu

SEQ ID NO: 1121443 - RNA, 21 nt, Human
acagaugggaugagcacacug

SEQ ID NO: 1121444 - RNA, 22 nt, Human
uccagugguuugaaaggggugu

SEQ ID NO: 1121445 - RNA, 22 nt, Human
agccauugaguuuuaugugcua

SEQ ID NO: 1121446 - RNA, 22 nt, Human
guucuccauucagcuuccugug

SEQ ID NO: 1121447 - RNA, 22 nt, Human
gugcagugaaaaaagaaugucc

SEQ ID NO: 1121448 - RNA, 22 nt, Human
auucuuggcaaggagauuuaaa

SEQ ID NO: 1121449 - RNA, 21 nt, Human
aagcuucccugcucuccaggg

SEQ ID NO: 1121450 - RNA, 22 nt, Human
ucuuuacacaagacaagaauaa

SEQ ID NO: 1121451 - RNA, 20 nt, Human
aggcugggguguuuugccca

SEQ ID NO: 1121452 - RNA, 22 nt, Human
gcaggaugggagcuucacucug

SEQ ID NO: 1121453 - RNA, 22 nt, Human
gcagagaaaguuuuguccucag

SEQ ID NO: 1121454 - RNA, 19 nt, Human
caguggccuggaggucucu

SEQ ID NO: 1121455 - RNA, 17 nt, Human
gcugccaccuuuggagc

SEQ ID NO: 1121456 - RNA, 20 nt, Human
cugccaugauugauagagug

SEQ ID NO: 1121457 - RNA, 22 nt, Human
ccaggagccacucaggcccaca

SEQ ID NO: 1121458 - RNA, 22 nt, Human
ucucagagaggggccgggccuu

SEQ ID NO: 1121459 - RNA, 22 nt, Human
ccuggugccacuagagaauguc

SEQ ID NO: 1121460 - RNA, 22 nt, Human
cugggaggcagucucucuagaa

SEQ ID NO: 1121461 - RNA, 22 nt, Human
agagugaucagauaucaggugu

SEQ ID NO: 1121462 - RNA, 22 nt, Human
gcccaugcacuuucugugaugg

SEQ ID NO: 1121463 - RNA, 22 nt, Human
uuuuuccuaagcaguggagcug

SEQ ID NO: 1121464 - RNA, 22 nt, Human
caggagcccagaguccucagcu

SEQ ID NO: 1121465 - RNA, 17 nt, Human
gcagccagugcagcagg

SEQ ID NO: 1121466 - RNA, 22 nt, Human
uggccugcuuucauuugaugcu

SEQ ID NO: 1121467 - RNA, 22 nt, Human
cacagcugcccuacuccaugug

SEQ ID NO: 1121468 - RNA, 20 nt, Human
gguagcagcugcugucaucc

SEQ ID NO: 1121469 - RNA, 22 nt, Human
aacaaauggaacacaaaucuuu

SEQ ID NO: 1121470 - RNA, 22 nt, Human
acugagcugugacaaugcuuaa

SEQ ID NO: 1121471 - RNA, 22 nt, Human
gcagggucuugagaggcagcca

SEQ ID NO: 1121472 - RNA, 22 nt, Human
gcugcccugucugcagcaggac

SEQ ID NO: 1121473 - RNA, 22 nt, Human
aucacgucaugguuugaucugg

SEQ ID NO: 1121474 - RNA, 22 nt, Human
ccugggcaacauagugagaccu

SEQ ID NO: 1121475 - RNA, 22 nt, Human
uccauggggcccaggaugagag

SEQ ID NO: 1121476 - RNA, 22 nt, Human
agggucaggagacacuggcaac

SEQ ID NO: 1121477 - RNA, 22 nt, Human
aacuagaacgucuaguugcugg

SEQ ID NO: 1121478 - RNA, 22 nt, Human
cuggcucuucagugcuugguuc

SEQ ID NO: 1121479 - RNA, 22 nt, Human
caggagcuacucagguuggguu

SEQ ID NO: 1121480 - RNA, 22 nt, Human
acagccuggacuggcucucugc

SEQ ID NO: 1121481 - RNA, 19 nt, Human
ugagagugaggaaggcuuc

SEQ ID NO: 1121482 - RNA, 23 nt, Human
auacauacagucuuacugacuuu

SEQ ID NO: 1121483 - RNA, 22 nt, Human
guccucaggaaagcagauaaca

SEQ ID NO: 1121484 - RNA, 22 nt, Human
cucaggaugucggugacuauug

SEQ ID NO: 1121485 - RNA, 22 nt, Human
agaggagguggugaugcuuuaa

SEQ ID NO: 1121486 - RNA, 22 nt, Human
acagagauguggaugagggauu

SEQ ID NO: 1121487 - RNA, 22 nt, Human
agaggcccucucucuccugaug

SEQ ID NO: 1121488 - RNA, 22 nt, Human
uacaaaaguaauuacgguuuuu

SEQ ID NO: 1121489 - RNA, 22 nt, Human
aguguguguuugggcgguuuau

SEQ ID NO: 1121490 - RNA, 20 nt, Human
uggcuccucuuggcuguggc

SEQ ID NO: 1121491 - RNA, 22 nt, Human
ugcaaacaggagaguaaguaua

SEQ ID NO: 1121492 - RNA, 22 nt, Human
cagcucccagagugaccagcag

SEQ ID NO: 1121493 - RNA, 22 nt, Human
ggucaggguuccagguaucuuc

SEQ ID NO: 1121494 - RNA, 22 nt, Human
aaaugugucaguuucauucucu

SEQ ID NO: 1121495 - RNA, 22 nt, Human
ggcucagggaaugaggaagaau

SEQ ID NO: 1121496 - RNA, 22 nt, Human
uggcugaauaauauucuguugu

SEQ ID NO: 1121497 - RNA, 22 nt, Human
cagcaaaauuugaggauugccu

SEQ ID NO: 1121498 - RNA, 22 nt, Human
ucaaaugcucuuugcagagagg

SEQ ID NO: 1121499 - RNA, 22 nt, Human
uguuuuaugagccauauaaccu

SEQ ID NO: 1121500 - RNA, 22 nt, Human
ucaaggugcugugcugugcuag

SEQ ID NO: 1121501 - RNA, 22 nt, Human
caugcuccaaaaacaagagaau

SEQ ID NO: 1121502 - RNA, 22 nt, Human
gcccucagaguuccccacagug

SEQ ID NO: 1121503 - RNA, 22 nt, Human
uuuuccuauaugcaaagaaugc

SEQ ID NO: 1121504 - RNA, 22 nt, Human
aacugcauucagaaagcucacu

SEQ ID NO: 1121505 - RNA, 22 nt, Human
uacaggaggauuaucaaaggau

SEQ ID NO: 1121506 - RNA, 22 nt, Human
ggucccaggagaauaggugcaa

SEQ ID NO: 1121507 - RNA, 22 nt, Human
cggcagcaaaggaagccagguc

SEQ ID NO: 1121508 - RNA, 22 nt, Human
ggcugccuccucgagacaggau

SEQ ID NO: 1121509 - RNA, 22 nt, Human
ugggcucuccuggaggacaaca

SEQ ID NO: 1121510 - RNA, 22 nt, Human
cuugccuucuuuuccuauagaa

SEQ ID NO: 1121511 - RNA, 22 nt, Human
agagcugaaaaagcugacccgg

SEQ ID NO: 1121512 - RNA, 22 nt, Human
cugcucuggcuguguacuucag

SEQ ID NO: 1121513 - RNA, 22 nt, Human
agggaagaagcugguaguaggu

SEQ ID NO: 1121514 - RNA, 22 nt, Human
uuugacagacauuuacuacauu

SEQ ID NO: 1121515 - RNA, 22 nt, Human
ccuggaaggcaggcauggauug

SEQ ID NO: 1121516 - RNA, 22 nt, Human
ugcagcugcuggcccaggugcu

SEQ ID NO: 1121517 - RNA, 22 nt, Human
ggcugccuccugcugggcugga

SEQ ID NO: 1121518 - RNA, 22 nt, Human
ugccucagaguugucccuacca

SEQ ID NO: 1121519 - RNA, 22 nt, Human
ggccagagaauaugccuuacgu

SEQ ID NO: 1121520 - RNA, 22 nt, Human
agggcagcagcuccuccuagcu

SEQ ID NO: 1121521 - RNA, 22 nt, Human
gcaggcuccaggccggccccuu

SEQ ID NO: 1121522 - RNA, 22 nt, Human
cagcaggcccagaguuucaugg

SEQ ID NO: 1121523 - RNA, 22 nt, Human
uucaaaacagcuagauauugga

SEQ ID NO: 1121524 - RNA, 22 nt, Human
agggcccucuggcaggccaggc

SEQ ID NO: 1121525 - RNA, 22 nt, Human
aaauguguuucgaaaacuggug

SEQ ID NO: 1121526 - RNA, 22 nt, Human
uaaaugcaagugcuccugggag

SEQ ID NO: 1121527 - RNA, 22 nt, Human
agugaaauugcuguaagaggaa

SEQ ID NO: 1121528 - RNA, 22 nt, Human
acagggcagguggcuacugguc

SEQ ID NO: 1121529 - RNA, 22 nt, Human
ggcugggcugcugggucagagc

SEQ ID NO: 1121530 - RNA, 22 nt, Human
gagcuggcaggaggcuccccga

SEQ ID NO: 1121531 - RNA, 22 nt, Human
gugccagggggcacugaacaga

SEQ ID NO: 1121532 - RNA, 22 nt, Human
auugaaagguuuugagcagaua

SEQ ID NO: 1121533 - RNA, 22 nt, Human
gucacacucagaaugacuagag

SEQ ID NO: 1121534 - RNA, 22 nt, Human
acugagcugcuugaagugaacu

SEQ ID NO: 1121535 - RNA, 22 nt, Human
agcuuuauuugucauucacggc

SEQ ID NO: 1121536 - RNA, 22 nt, Human
cucugagcccgcugcagcccca

SEQ ID NO: 1121537 - RNA, 22 nt, Human
gcugugugacugagagccuggc

SEQ ID NO: 1121538 - RNA, 19 nt, Human
agcuccugggcucugggcc

SEQ ID NO: 1121539 - RNA, 22 nt, Human
aaguucaaggaagccuccaguu

SEQ ID NO: 1121540 - RNA, 22 nt, Human
caggggcugagaaggaacgucc

SEQ ID NO: 1121541 - RNA, 22 nt, Human
cucagaaucugccaaguucagg

SEQ ID NO: 1121542 - RNA, 20 nt, Human
uccuugaaagugggguauau

SEQ ID NO: 1121543 - RNA, 22 nt, Human
ggcuuucuagaucuagcucugu

SEQ ID NO: 1121544 - RNA, 22 nt, Human
aucagcaaaaaugccuucagaa

SEQ ID NO: 1121545 - RNA, 22 nt, Human
ucccagagcucuggagguugga

SEQ ID NO: 1121546 - RNA, 22 nt, Human
uagaggugucacuuugggaagu

SEQ ID NO: 1121547 - RNA, 22 nt, Human
caagaacaguuugccaaauugg

SEQ ID NO: 1121548 - RNA, 22 nt, Human
ggcuggaaguccaagaucaaga

SEQ ID NO: 1121549 - RNA, 22 nt, Human
ccaggguggggcaggcccacug

SEQ ID NO: 1121550 - RNA, 22 nt, Human
cccugagagugagugccaccuu

SEQ ID NO: 1121551 - RNA, 22 nt, Human
aagccagguguuuaggccagcg

SEQ ID NO: 1121552 - RNA, 22 nt, Human
ugucccagguccuagaugacca

SEQ ID NO: 1121553 - RNA, 22 nt, Human
guggcugcagagccagcaagcu

SEQ ID NO: 1121554 - RNA, 22 nt, Human
agcugcucucacuggacgccug

SEQ ID NO: 1121555 - RNA, 22 nt, Human
auguuaaaugguuuauuauuaa

SEQ ID NO: 1121556 - RNA, 22 nt, Human
uguaucaaggguuuauguaagc

SEQ ID NO: 1121557 - RNA, 22 nt, Human
aaguugaaugcguacgugacau

SEQ ID NO: 1121558 - RNA, 22 nt, Human
aucaguuuaacugucaagagcc

SEQ ID NO: 1121559 - RNA, 22 nt, Human
cugcagccuaggugcagcuggg

SEQ ID NO: 1121560 - RNA, 22 nt, Human
gcugcaggcgccugcggucucu

SEQ ID NO: 1121561 - RNA, 22 nt, Human
ucccagcagucagagcuaugug

SEQ ID NO: 1121562 - RNA, 18 nt, Human
cauuaugugguuauagaa

SEQ ID NO: 1121563 - RNA, 22 nt, Human
gcuggccucuggagaagggcuu

SEQ ID NO: 1121564 - RNA, 22 nt, Human
agaaaagguugaaaguaggauu

SEQ ID NO: 1121565 - RNA, 22 nt, Human
gcuggcuguaucaccuggccag

SEQ ID NO: 1121566 - RNA, 22 nt, Human
gcuggcauuacaggagagaacc

SEQ ID NO: 1121567 - RNA, 18 nt, Human
ucagcuggggcugcagcc

SEQ ID NO: 1121568 - RNA, 22 nt, Human
cagcaauaagguaagcuucucc

SEQ ID NO: 1121569 - RNA, 22 nt, Human
cugcagcuguagaggacagugg

SEQ ID NO: 1121570 - RNA, 22 nt, Human
gccuucccacccugcgaggcug

SEQ ID NO: 1121571 - RNA, 22 nt, Human
ccagccaggcauugcaaacuga

SEQ ID NO: 1121572 - RNA, 21 nt, Human
ucucuacacuuucacuaggcu

SEQ ID NO: 1121573 - RNA, 22 nt, Human
ccugcagcuguaggagaaggcg

SEQ ID NO: 1121574 - RNA, 22 nt, Human
auuguggugucaguuauaggca

SEQ ID NO: 1121575 - RNA, 22 nt, Human
cccaggaggcagaaguugcagu

SEQ ID NO: 1121576 - RNA, 22 nt, Human
uuuuuaagcuccuuugauguca

SEQ ID NO: 1121577 - RNA, 22 nt, Human
cagcauuggguuaccuuuguuu

SEQ ID NO: 1121578 - RNA, 22 nt, Human
cugggcugugguguggcccaaa

SEQ ID NO: 1121579 - RNA, 18 nt, Human
uggcucagauggcuuuaa

SEQ ID NO: 1121580 - RNA, 22 nt, Human
agggggcaucagguccuggcuc

SEQ ID NO: 1121581 - RNA, 22 nt, Human
aaauaauugaguuggucaauau

SEQ ID NO: 1121582 - RNA, 22 nt, Human
ucuggagcaacagagcaggaca

SEQ ID NO: 1121583 - RNA, 22 nt, Human
ccaggcugggcggggaaccugg

SEQ ID NO: 1121584 - RNA, 17 nt, Human
uggcucugaggcugaau

SEQ ID NO: 1121585 - RNA, 22 nt, Human
ugguuugcccacucgagugauu

SEQ ID NO: 1121586 - RNA, 22 nt, Human
ucaggaaagaagaugcucagug

SEQ ID NO: 1121587 - RNA, 22 nt, Human
ggcuucaccaggugcaugcaug

SEQ ID NO: 1121588 - RNA, 22 nt, Human
ggccaggcuggucucagacuuc

SEQ ID NO: 1121589 - RNA, 22 nt, Human
auugucuuuggugcuuccagga

SEQ ID NO: 1121590 - RNA, 22 nt, Human
cagcuccugcagcugcugccgu

SEQ ID NO: 1121591 - RNA, 22 nt, Human
aaaugcagaucccugaaucuca

SEQ ID NO: 1121592 - RNA, 22 nt, Human
agauaugacuagaagcucauuu

SEQ ID NO: 1121593 - RNA, 22 nt, Human
cuccucuggaaauuccucugcc

SEQ ID NO: 1121594 - RNA, 23 nt, Human
cagggccaggcagcagcugucac

SEQ ID NO: 1121595 - RNA, 22 nt, Human
ugggugagugggaaaagcccag

SEQ ID NO: 1121596 - RNA, 21 nt, Human
ugccaggccugagcugggguc

SEQ ID NO: 1121597 - RNA, 22 nt, Human
ucaacacuauccaggcaaucuu

SEQ ID NO: 1121598 - RNA, 22 nt, Human
cugugcaagcccaagauaaaac

SEQ ID NO: 1121599 - RNA, 22 nt, Human
cagacaggcuagccagacucac

SEQ ID NO: 1121600 - RNA, 22 nt, Human
uaugaagaaguucugugaaaug

SEQ ID NO: 1121601 - RNA, 22 nt, Human
guacauguugguuguuuccagu

SEQ ID NO: 1121602 - RNA, 21 nt, Human
gcucuuggaaggggcucagcu

SEQ ID NO: 1121603 - RNA, 20 nt, Human
uccagcugucuuucagagac

SEQ ID NO: 1121604 - RNA, 17 nt, Human
ccagagcuacugagacu

SEQ ID NO: 1121605 - RNA, 22 nt, Human
gcugcccauuccacuggauggu

SEQ ID NO: 1121606 - RNA, 23 nt, Human
gugagcagcccacuaggaaugcc

SEQ ID NO: 1121607 - RNA, 22 nt, Human
cugggcuccuaaccauccaggu

SEQ ID NO: 1121608 - RNA, 22 nt, Human
ggagccuggcaaugcugcgucc

SEQ ID NO: 1121609 - RNA, 22 nt, Human
ucagugcuucggcgagcaccua

SEQ ID NO: 1121610 - RNA, 19 nt, Human
ucuggcuccgccucuuagu

SEQ ID NO: 1121611 - RNA, 22 nt, Human
uccucuggggcgugguccugga

SEQ ID NO: 1121612 - RNA, 22 nt, Human
ccaggagcaacuugaaggcaag

SEQ ID NO: 1121613 - RNA, 22 nt, Human
agccaggacguugcucagcucc

SEQ ID NO: 1121614 - RNA, 22 nt, Human
accagcuguguccuggcugcag

SEQ ID NO: 1121615 - RNA, 23 nt, Human
uggccugcagaguuucugcuggg

SEQ ID NO: 1121616 - RNA, 20 nt, Human
cucaguguggccugaguguu

SEQ ID NO: 1121617 - RNA, 22 nt, Human
cucuggacacuggcaugggguc

SEQ ID NO: 1121618 - RNA, 22 nt, Human
aggcacugaauauccaguaaaa

SEQ ID NO: 1121619 - RNA, 22 nt, Human
uagaaaguaaaucaguuuuauu

SEQ ID NO: 1121620 - RNA, 22 nt, Human
aaguuguauauaccgcuuuaag

SEQ ID NO: 1121621 - RNA, 22 nt, Human
agcauugccugccuauugcuaa

SEQ ID NO: 1121622 - RNA, 21 nt, Human
cagcuuugucugucuucgggg

SEQ ID NO: 1121623 - RNA, 22 nt, Human
acacaugagaaacaucaguugu

SEQ ID NO: 1121624 - RNA, 22 nt, Human
gccuggccgcuccgagcuccgc

SEQ ID NO: 1121625 - RNA, 20 nt, Human
gugggcagcaggcauacugg

SEQ ID NO: 1121626 - RNA, 21 nt, Human
cugcucugacagugaggccag

SEQ ID NO: 1121627 - RNA, 22 nt, Human
ugagcuggucuugaguguagcu

SEQ ID NO: 1121628 - RNA, 22 nt, Human
cuggcuccacucccugccugac

SEQ ID NO: 1121629 - RNA, 22 nt, Human
uuagggcuuuucugaauaggcc

SEQ ID NO: 1121630 - RNA, 22 nt, Human
ccuggagcuuggucacgcugcg

SEQ ID NO: 1121631 - RNA, 22 nt, Human
cagcugagucugagguucuuug

SEQ ID NO: 1121632 - RNA, 22 nt, Human
auuuccauacacccauuucuga

SEQ ID NO: 1121633 - RNA, 22 nt, Human
ugagcccagagcccuuguaggg

SEQ ID NO: 1121634 - RNA, 22 nt, Human
ggaaggagggcggcaaugauga

SEQ ID NO: 1121635 - RNA, 22 nt, Human
uuucuucucacccaggacagag

SEQ ID NO: 1121636 - RNA, 22 nt, Human
ggggcggggcucugagaagcau

SEQ ID NO: 1121637 - RNA, 22 nt, Human
gggcugggauugcuugcuguga

SEQ ID NO: 1121638 - RNA, 22 nt, Human
acacagccaggguaguaaggcu

SEQ ID NO: 1121639 - RNA, 22 nt, Human
caguuucuucaucaguuaagca

SEQ ID NO: 1121640 - RNA, 22 nt, Human
agggucuguggaugcaucuggg

SEQ ID NO: 1121641 - RNA, 22 nt, Human
agggacugagcuaggaucuagu

SEQ ID NO: 1121642 - RNA, 22 nt, Human
cagggcucaucugugugaccag

SEQ ID NO: 1121643 - RNA, 22 nt, Human
gaggaguguauuccacaccacu

SEQ ID NO: 1121644 - RNA, 20 nt, Human
guggccuguccuguuguggg

SEQ ID NO: 1121645 - RNA, 18 nt, Human
ggcucaggcuauccuaac

SEQ ID NO: 1121646 - RNA, 20 nt, Human
agcaggaaugaugcuuucau

SEQ ID NO: 1121647 - RNA, 22 nt, Human
uggcccugaggacccagugugg

SEQ ID NO: 1121648 - RNA, 22 nt, Human
cuggagccuucaccaggggaaa

SEQ ID NO: 1121649 - RNA, 22 nt, Human
gcucagagcaucccagugaaug

SEQ ID NO: 1121650 - RNA, 22 nt, Human
gccagggcaggggagcaucugc

SEQ ID NO: 1121651 - RNA, 23 nt, Human
ugggcaucuccucugugccaggc

SEQ ID NO: 1121652 - RNA, 22 nt, Human
caagagcucagaaacccuugcu

SEQ ID NO: 1121653 - RNA, 22 nt, Human
cugccugugcaugcagucagaa

SEQ ID NO: 1121654 - RNA, 23 nt, Human
cacugcagcguggucuggcagga

SEQ ID NO: 1121655 - RNA, 22 nt, Human
cugcagcuuuggaaaccuguuu

SEQ ID NO: 1121656 - RNA, 22 nt, Human
cagggcagcuuccuuuguuagg

SEQ ID NO: 1121657 - RNA, 22 nt, Human
ccugaagcaaggguaggcaggu

SEQ ID NO: 1121658 - RNA, 22 nt, Human
ugccucugugugcaggugagca

SEQ ID NO: 1121659 - RNA, 22 nt, Human
aaaaugaggucaauauccuuuu

SEQ ID NO: 1121660 - RNA, 20 nt, Human
cuguaucagguuacaaagua

SEQ ID NO: 1121661 - RNA, 22 nt, Human
gagcagugacuggagcaugaga

SEQ ID NO: 1121662 - RNA, 22 nt, Human
agaggggcucaagcaguggucu

SEQ ID NO: 1121663 - RNA, 22 nt, Human
gcaggccugacuguagggggca

SEQ ID NO: 1121664 - RNA, 17 nt, Human
aggagucucagaugagc

SEQ ID NO: 1121665 - RNA, 22 nt, Human
cugaaggagguagagugacaua

SEQ ID NO: 1121666 - RNA, 22 nt, Human
cagcugccaugacauguccugc

SEQ ID NO: 1121667 - RNA, 22 nt, Human
cuacuucugugaugaaacuaca

SEQ ID NO: 1121668 - RNA, 22 nt, Human
agaacagcagcacgucaagcug

SEQ ID NO: 1121669 - RNA, 22 nt, Human
acagaaugcguagugcauguug

SEQ ID NO: 1121670 - RNA, 22 nt, Human
uuccucucgcucuccggggccc

SEQ ID NO: 1121671 - RNA, 22 nt, Human
aggcaggugggucacuugaguc

SEQ ID NO: 1121672 - RNA, 23 nt, Human
uggccuggagagaaaagaugagu

SEQ ID NO: 1121673 - RNA, 22 nt, Human
cuggcucaugugaugagggcaa

SEQ ID NO: 1121674 - RNA, 22 nt, Human
gggccuggugcuucugacuccu

SEQ ID NO: 1121675 - RNA, 22 nt, Human
guaagggauuugaacauagguu

SEQ ID NO: 1121676 - RNA, 22 nt, Human
ucagguggcuucggggaguggc

SEQ ID NO: 1121677 - RNA, 22 nt, Human
guaacagaggguuugcagauau

SEQ ID NO: 1121678 - RNA, 22 nt, Human
uggcagcuuccugcucauagga

SEQ ID NO: 1121679 - RNA, 23 nt, Human
aaguaacagggauaauagcaguu

SEQ ID NO: 1121680 - RNA, 22 nt, Human
aagcaauaagccagauuuggau

SEQ ID NO: 1121681 - RNA, 22 nt, Human
cuacauuuuucaccgagccucu

SEQ ID NO: 1121682 - RNA, 22 nt, Human
gagagcccugcuccuaucccag

SEQ ID NO: 1121683 - RNA, 22 nt, Human
cuuauguauaauguuccacaua

SEQ ID NO: 1121684 - RNA, 22 nt, Human
uucaagucaaggaaagaggucu

SEQ ID NO: 1121685 - RNA, 22 nt, Human
uggguggcggccugguucugag

SEQ ID NO: 1121686 - RNA, 22 nt, Human
gcuggccucgcaggcaggaugu

SEQ ID NO: 1121687 - RNA, 22 nt, Human
gccucugcugacaagauggaca

SEQ ID NO: 1121688 - RNA, 22 nt, Human
augccacugacauggacaauuu

SEQ ID NO: 1121689 - RNA, 22 nt, Human
acccugggcuuggccugcucag

SEQ ID NO: 1121690 - RNA, 22 nt, Human
agagaggcgaguuaccugugcu

SEQ ID NO: 1121691 - RNA, 22 nt, Human
ggcagcuggguuggccagaaac

SEQ ID NO: 1121692 - RNA, 23 nt, Human
uggcagagacccagaaucuacau

SEQ ID NO: 1121693 - RNA, 21 nt, Human
gccucugcugucuuauuguga

SEQ ID NO: 1121694 - RNA, 22 nt, Human
cagcaggguuaagugacucacc

SEQ ID NO: 1121695 - RNA, 22 nt, Human
cugagcugcucccgcugcagcg

SEQ ID NO: 1121696 - RNA, 22 nt, Human
cagagccccccuucugaucaca

SEQ ID NO: 1121697 - RNA, 22 nt, Human
uaaggcacacaguugcugcaug

SEQ ID NO: 1121698 - RNA, 22 nt, Human
gccaggcaaauuaaggaaugca

SEQ ID NO: 1121699 - RNA, 22 nt, Human
gcaggggaguccacucuaugca

SEQ ID NO: 1121700 - RNA, 22 nt, Human
auccccagaaaauaggugccua

SEQ ID NO: 1121701 - RNA, 22 nt, Human
cucagaguccccacaucugggu

SEQ ID NO: 1121702 - RNA, 22 nt, Human
cucuggccgcagcucagcucug

SEQ ID NO: 1121703 - RNA, 22 nt, Human
aagggcaggagaagacggauau

SEQ ID NO: 1121704 - RNA, 22 nt, Human
acuuccugggcaugcagagucc

SEQ ID NO: 1121705 - RNA, 22 nt, Human
cagcccuuuccuucucagcuuu

SEQ ID NO: 1121706 - RNA, 22 nt, Human
ccugaggacacacgcugcagga

SEQ ID NO: 1121707 - RNA, 22 nt, Human
uccauuuacuauucucauaucg

SEQ ID NO: 1121708 - RNA, 22 nt, Human
gacagaggcaagaccagaagcc

SEQ ID NO: 1121709 - RNA, 22 nt, Human
cugccucuccccagaguggccc

SEQ ID NO: 1121710 - RNA, 22 nt, Human
gaaggagggugcggaucugagc

SEQ ID NO: 1121711 - RNA, 23 nt, Human
cuguggcugaguccuguuggagu

SEQ ID NO: 1121712 - RNA, 21 nt, Human
auuauuauuucuguguccagc

SEQ ID NO: 1121713 - RNA, 22 nt, Human
cucaggaucgcuugcccuaggg

SEQ ID NO: 1121714 - RNA, 22 nt, Human
aagggcagggaguuugugucua

SEQ ID NO: 1121715 - RNA, 22 nt, Human
ucuuugcaucccuuccauaguu

SEQ ID NO: 1121716 - RNA, 22 nt, Human
auucuuggagcagucaaagaag

SEQ ID NO: 1121717 - RNA, 22 nt, Human
agagccugcuguguaagucaca

SEQ ID NO: 1121718 - RNA, 22 nt, Human
cuggccuggcagggagggcaug

SEQ ID NO: 1121719 - RNA, 22 nt, Human
uggccuuguguuuuagagaaag

SEQ ID NO: 1121720 - RNA, 22 nt, Human
ggagcugggacccugucaucug

SEQ ID NO: 1121721 - RNA, 22 nt, Human
aacagacaacuccuguggcuca

SEQ ID NO: 1121722 - RNA, 20 nt, Human
ugggccuguggcagaagucu

SEQ ID NO: 1121723 - RNA, 22 nt, Human
ggcuggcuuucucuccgcaccu

SEQ ID NO: 1121724 - RNA, 23 nt, Human
ucuuuccucagcacacaccaaga

SEQ ID NO: 1121725 - RNA, 22 nt, Human
cuucccagaccuuagagugcag

SEQ ID NO: 1121726 - RNA, 22 nt, Human
cagggacugagauccagacugu

SEQ ID NO: 1121727 - RNA, 22 nt, Human
cuuauguauauuuggaacguac

SEQ ID NO: 1121728 - RNA, 22 nt, Human
cugcuuuguggaaucacacugg

SEQ ID NO: 1121729 - RNA, 22 nt, Human
agcagccagagaaugaugcagu

SEQ ID NO: 1121730 - RNA, 22 nt, Human
caguggcuguuucuggaaggca

SEQ ID NO: 1121731 - RNA, 22 nt, Human
ugaagcaguuacuggguguuaa

SEQ ID NO: 1121732 - RNA, 22 nt, Human
agccuggaagaaccugaagucu

SEQ ID NO: 1121733 - RNA, 22 nt, Human
ggugaagggugucauggcauuu

SEQ ID NO: 1121734 - RNA, 22 nt, Human
auccaaaucaugucagaagaac

SEQ ID NO: 1121735 - RNA, 22 nt, Human
agcuuccucaccucagaggucu

SEQ ID NO: 1121736 - RNA, 22 nt, Human
ccugccuggcuuccagaagaga

SEQ ID NO: 1121737 - RNA, 22 nt, Human
ccauuguaguaucuguuuuagu

SEQ ID NO: 1121738 - RNA, 23 nt, Human
uggcccugugcaugcugcuuccc

SEQ ID NO: 1121739 - RNA, 22 nt, Human
gggcuucucuuaugcuaacugg

SEQ ID NO: 1121740 - RNA, 22 nt, Human
uaaucacaucaggguaaauggg

SEQ ID NO: 1121741 - RNA, 23 nt, Human
ugggccuggaaagccuuagagag

SEQ ID NO: 1121742 - RNA, 22 nt, Human
gcucugggcugcccucuggaca

SEQ ID NO: 1121743 - RNA, 22 nt, Human
ggagggcugccagguggagcgg

SEQ ID NO: 1121744 - RNA, 23 nt, Human
uggcccugaaucuguccuggagg

SEQ ID NO: 1121745 - RNA, 22 nt, Human
ugcacagcgggugucugucagg

SEQ ID NO: 1121746 - RNA, 22 nt, Human
ccuggcaguggugaagaagagg

SEQ ID NO: 1121747 - RNA, 22 nt, Human
agccuggaguucccaggagaag

SEQ ID NO: 1121748 - RNA, 22 nt, Human
aaggcacucauucaaggagaua

SEQ ID NO: 1121749 - RNA, 22 nt, Human
gcccaugcucucaggcgggccu

SEQ ID NO: 1121750 - RNA, 22 nt, Human
gcucccaggaagagaagggcca

SEQ ID NO: 1121751 - RNA, 22 nt, Human
ccaggcucugcgcuggacaugg

SEQ ID NO: 1121752 - RNA, 22 nt, Human
caguggaggccuugggaccuuu

SEQ ID NO: 1121753 - RNA, 22 nt, Human
cuccuuccccuacucagcaucc

SEQ ID NO: 1121754 - RNA, 22 nt, Human
cauggacucugguuuggggagc

SEQ ID NO: 1121755 - RNA, 22 nt, Human
caggccaggcugcauuugcccc

SEQ ID NO: 1121756 - RNA, 22 nt, Human
gagccauacaaccuauaaagug

SEQ ID NO: 1121757 - RNA, 22 nt, Human
ggcauggcucggagucagaaca

SEQ ID NO: 1121758 - RNA, 19 nt, Human
ugagugggccccugcagac

SEQ ID NO: 1121759 - RNA, 22 nt, Human
agccuguggaucccugcacugg

SEQ ID NO: 1121760 - RNA, 22 nt, Human
aaacuuuaagacaguccucaag

SEQ ID NO: 1121761 - RNA, 22 nt, Human
gcucuggagauggagccuugag

SEQ ID NO: 1121762 - RNA, 22 nt, Human
aaaugcuguguuuuaacauaga

SEQ ID NO: 1121763 - RNA, 22 nt, Human
uaccuuggguugaguucauucu

SEQ ID NO: 1121764 - RNA, 20 nt, Human
aggagaugauccagagucag

SEQ ID NO: 1121765 - RNA, 22 nt, Human
uugaggagucaggggcacggaa

SEQ ID NO: 1121766 - RNA, 22 nt, Human
aucugguuuggggauccuugug

SEQ ID NO: 1121767 - RNA, 22 nt, Human
agccaaggcagcuagagcucug

SEQ ID NO: 1121768 - RNA, 22 nt, Human
gcagggacagggcagggccuuu

SEQ ID NO: 1121769 - RNA, 22 nt, Human
cuggagcaggcuugucccagcu

SEQ ID NO: 1121770 - RNA, 22 nt, Human
gcucucugccuuucucaaugac

SEQ ID NO: 1121771 - RNA, 18 nt, Human
acagaaauagcugugccu

SEQ ID NO: 1121772 - RNA, 22 nt, Human
guaggcagauaggagugcagcc

SEQ ID NO: 1121773 - RNA, 22 nt, Human
agauacaucuugaacuucuaga

SEQ ID NO: 1121774 - RNA, 22 nt, Human
cagggccaugaggcacaggguc

SEQ ID NO: 1121775 - RNA, 21 nt, Human
agcuuguguguaucacagugu

SEQ ID NO: 1121776 - RNA, 22 nt, Human
cuguggcuuucucugccuccuu

SEQ ID NO: 1121777 - RNA, 20 nt, Human
cugagcccccagccugcagg

SEQ ID NO: 1121778 - RNA, 22 nt, Human
ucagggcauucaagaggccugg

SEQ ID NO: 1121779 - RNA, 22 nt, Human
uaugcacauugguuuccucauu

SEQ ID NO: 1121780 - RNA, 22 nt, Human
ucuuuacaucacaauuguaugg

SEQ ID NO: 1121781 - RNA, 22 nt, Human
cuguccugauggugccacuggu

SEQ ID NO: 1121782 - RNA, 22 nt, Human
cucaggauagcugcgcagccug

SEQ ID NO: 1121783 - RNA, 22 nt, Human
gcagagcucuguucuuaucucc

SEQ ID NO: 1121784 - RNA, 22 nt, Human
cucagggccaaggaugcuguug

SEQ ID NO: 1121785 - RNA, 22 nt, Human
cuggagccuagguugaccuggg

SEQ ID NO: 1121786 - RNA, 22 nt, Human
uauugacaauaggcaacugagg

SEQ ID NO: 1121787 - RNA, 22 nt, Human
ugggcagaaaucaguaucagau

SEQ ID NO: 1121788 - RNA, 22 nt, Human
cuggcaggaagaggaaagguca

SEQ ID NO: 1121789 - RNA, 22 nt, Human
auaucuuuguuuuugccaagau

SEQ ID NO: 1121790 - RNA, 22 nt, Human
gggcagauggggcacaggcuga

SEQ ID NO: 1121791 - RNA, 22 nt, Human
gccagagccggcuucacaggau

SEQ ID NO: 1121792 - RNA, 22 nt, Human
ucucagaguuugaaucuggagu

SEQ ID NO: 1121793 - RNA, 22 nt, Human
ccuuucucauuuuaagcauuag

SEQ ID NO: 1121794 - RNA, 22 nt, Human
ugaaggugucuuugugaacauc

SEQ ID NO: 1121795 - RNA, 22 nt, Human
gcuggggcugggcugaggaaga

SEQ ID NO: 1121796 - RNA, 22 nt, Human
cucuggagaacuccuugugucu

SEQ ID NO: 1121797 - RNA, 18 nt, Human
cugaaggauccaggugua

SEQ ID NO: 1121798 - RNA, 22 nt, Human
cugauuccugauucaugcucuu

SEQ ID NO: 1121799 - RNA, 22 nt, Human
cugagccacugcuuguucagug

SEQ ID NO: 1121800 - RNA, 22 nt, Human
ggaggcugcugccucacguggg

SEQ ID NO: 1121801 - RNA, 22 nt, Human
gguucacauauugagaguauuc

SEQ ID NO: 1121802 - RNA, 22 nt, Human
ggccccugcggacugccuagag

SEQ ID NO: 1121803 - RNA, 22 nt, Human
gcagcuuggauuucuguaguuu

SEQ ID NO: 1121804 - RNA, 22 nt, Human
cuuacauugucuuaguuuucaa

SEQ ID NO: 1121805 - RNA, 22 nt, Human
acagggcauuuccucuaugugu

SEQ ID NO: 1121806 - RNA, 22 nt, Human
aaugcagugagccauuaaaugg

SEQ ID NO: 1121807 - RNA, 22 nt, Human
ucaaggaggugcuuggcuucac

SEQ ID NO: 1121808 - RNA, 22 nt, Human
gugggccucuugaggguggcua

SEQ ID NO: 1121809 - RNA, 22 nt, Human
aggccagguggucaugcuugcu

SEQ ID NO: 1121810 - RNA, 22 nt, Human
ggcaaaaaccauaauuacuuuu

SEQ ID NO: 1121811 - RNA, 22 nt, Human
uuuuaaguuaauauaauugagg

SEQ ID NO: 1121812 - RNA, 22 nt, Human
aagccagggucaggggccuccu

SEQ ID NO: 1121813 - RNA, 20 nt, Human
uccagggcuagggagcucau

SEQ ID NO: 1121814 - RNA, 22 nt, Human
cuuuggcaugguccucacuaua

SEQ ID NO: 1121815 - RNA, 22 nt, Human
ucagcugccuuucccaugcuag

SEQ ID NO: 1121816 - RNA, 22 nt, Human
cugugccuuuguagcugugccu

SEQ ID NO: 1121817 - RNA, 22 nt, Human
caggugcuguccugcacauguc

SEQ ID NO: 1121818 - RNA, 22 nt, Human
uguacauugucacucaucaagu

SEQ ID NO: 1121819 - RNA, 22 nt, Human
aaggcagagggcuggaucagag

SEQ ID NO: 1121820 - RNA, 22 nt, Human
augcaguacagauaauucuaca

SEQ ID NO: 1121821 - RNA, 22 nt, Human
ugccugugucacagugauguuu

SEQ ID NO: 1121822 - RNA, 18 nt, Human
gggcuguguucaugccca

SEQ ID NO: 1121823 - RNA, 22 nt, Human
agcugggagcagagccacagcc

SEQ ID NO: 1121824 - RNA, 22 nt, Human
cauaacuagagugaaauguuga

SEQ ID NO: 1121825 - RNA, 22 nt, Human
cagaagcaaaugccuugcugag

SEQ ID NO: 1121826 - RNA, 22 nt, Human
uugggcugaacccugcagcuga

SEQ ID NO: 1121827 - RNA, 22 nt, Human
uuaugaaagacauuucuguugg

SEQ ID NO: 1121828 - RNA, 22 nt, Human
ccaggcaggcagcguucucagg

SEQ ID NO: 1121829 - RNA, 22 nt, Human
cucuccuccaacagcccugccg

SEQ ID NO: 1121830 - RNA, 22 nt, Human
ugaaggcauugaugaaggaauc

SEQ ID NO: 1121831 - RNA, 22 nt, Human
gggccaggucggugaaugguca

SEQ ID NO: 1121832 - RNA, 22 nt, Human
cuggugcaggaaggagcuggca

SEQ ID NO: 1121833 - RNA, 22 nt, Human
uuggcugaagguuaagugcugg

SEQ ID NO: 1121834 - RNA, 22 nt, Human
aggugccaauuuucagugaaca

SEQ ID NO: 1121835 - RNA, 22 nt, Human
ccaaagucugcauuuuaacaug

SEQ ID NO: 1121836 - RNA, 22 nt, Human
gccucugcaugcucagcaccca

SEQ ID NO: 1121837 - RNA, 22 nt, Human
guaaaguucuacuagaaucaac

SEQ ID NO: 1121838 - RNA, 22 nt, Human
gggagcaggagccugccugcca

SEQ ID NO: 1121839 - RNA, 22 nt, Human
auaugaagucagacaaacuggg

SEQ ID NO: 1121840 - RNA, 22 nt, Human
agggucugacuccucuggcaag

SEQ ID NO: 1121841 - RNA, 22 nt, Human
gcacugcaucuacuggcaagua

SEQ ID NO: 1121842 - RNA, 22 nt, Human
agagcuguucaacguagcaaug

SEQ ID NO: 1121843 - RNA, 22 nt, Human
acauuucuaauuuaauguaaca

SEQ ID NO: 1121844 - RNA, 22 nt, Human
gggcacuggaaggcucucaggc

SEQ ID NO: 1121845 - RNA, 22 nt, Human
cucugagaaagcugugagcuaa

SEQ ID NO: 1121846 - RNA, 22 nt, Human
aauuagagaucaguucuuugac

SEQ ID NO: 1121847 - RNA, 23 nt, Human
ucugucaccuauggcugcucuuc

SEQ ID NO: 1121848 - RNA, 22 nt, Human
gcuggccugaccagccacaggc

SEQ ID NO: 1121849 - RNA, 22 nt, Human
cagcagcugcgugcccaggccg

SEQ ID NO: 1121850 - RNA, 22 nt, Human
aggguggagggagucccugagc

SEQ ID NO: 1121851 - RNA, 22 nt, Human
uggcugaaggaagauucuucua

SEQ ID NO: 1121852 - RNA, 22 nt, Human
ggacagaggguugacagaguau

SEQ ID NO: 1121853 - RNA, 22 nt, Human
aaucaguuguccaaaguucaca

SEQ ID NO: 1121854 - RNA, 22 nt, Human
ugcagaaggaggaggaaaucca

SEQ ID NO: 1121855 - RNA, 22 nt, Human
gugcucuggcuggucucccggu

SEQ ID NO: 1121856 - RNA, 22 nt, Human
gggccuccggggugagcugugg

SEQ ID NO: 1121857 - RNA, 19 nt, Human
aguguguacugaaagcacu

SEQ ID NO: 1121858 - RNA, 22 nt, Human
gagcugccaguguaugaauucu

SEQ ID NO: 1121859 - RNA, 22 nt, Human
auacaucuugucagauucaugu

SEQ ID NO: 1121860 - RNA, 20 nt, Human
agccugccagcuggcccaga

SEQ ID NO: 1121861 - RNA, 18 nt, Human
aaaaugcaggcgacaugg

SEQ ID NO: 1121862 - RNA, 21 nt, Human
ggccuuggcgggggccgaauu

SEQ ID NO: 1121863 - RNA, 22 nt, Human
acuuugaaacuaaaauucauua

SEQ ID NO: 1121864 - RNA, 22 nt, Human
uccagagguauguagagaguau

SEQ ID NO: 1121865 - RNA, 22 nt, Human
aggcacuguacuagguacaggg

SEQ ID NO: 1121866 - RNA, 22 nt, Human
agcccagguugaggcugcagug

SEQ ID NO: 1121867 - RNA, 22 nt, Human
gacccaggguuucugcacaggg

SEQ ID NO: 1121868 - RNA, 20 nt, Human
cagagaccugucuucacaga

SEQ ID NO: 1121869 - RNA, 20 nt, Human
gggcuggcgcauggggaaag

SEQ ID NO: 1121870 - RNA, 22 nt, Human
ugcaauaacuacuuuaauguug

SEQ ID NO: 1121871 - RNA, 22 nt, Human
cccaggagguggagguugcagc

SEQ ID NO: 1121872 - RNA, 22 nt, Human
uucucauucugacucaguguag

SEQ ID NO: 1121873 - RNA, 22 nt, Human
auguacaguggaaacuaacaaa

SEQ ID NO: 1121874 - RNA, 22 nt, Human
uaacagaaacagauaaguguaa

SEQ ID NO: 1121875 - RNA, 22 nt, Human
gcagagccccauugcuggcggg

SEQ ID NO: 1121876 - RNA, 22 nt, Human
gcaguggcuaagcucgcaugca

SEQ ID NO: 1121877 - RNA, 22 nt, Human
cagcugagaccagaaugcaggu

SEQ ID NO: 1121878 - RNA, 22 nt, Human
ucaagaaagggcuucaccagga

SEQ ID NO: 1121879 - RNA, 22 nt, Human
uguuuuauuucuccaagaggga

SEQ ID NO: 1121880 - RNA, 22 nt, Human
ggacacagauaaucacacagau

SEQ ID NO: 1121881 - RNA, 22 nt, Human
accugagggcccaaacuuggua

SEQ ID NO: 1121882 - RNA, 22 nt, Human
aggcucugaucagguggcugug

SEQ ID NO: 1121883 - RNA, 20 nt, Human
ugugcccaauguccagguuc

SEQ ID NO: 1121884 - RNA, 19 nt, Human
gggcuucugggaucaagag

SEQ ID NO: 1121885 - RNA, 22 nt, Human
ugggaggaucgcuugagcccag

SEQ ID NO: 1121886 - RNA, 22 nt, Human
aaggcacuugcccagagcugca

SEQ ID NO: 1121887 - RNA, 22 nt, Human
ugggccugggcuccuguccucu

SEQ ID NO: 1121888 - RNA, 22 nt, Human
gacagggcaagacucugucuaa

SEQ ID NO: 1121889 - RNA, 22 nt, Human
aggcacuggucuaccccuuagu

SEQ ID NO: 1121890 - RNA, 22 nt, Human
agugcacagcgugauguauugg

SEQ ID NO: 1121891 - RNA, 22 nt, Human
cuggcucacuagcccugcccug

SEQ ID NO: 1121892 - RNA, 23 nt, Human
uaguuauuuucucuguaauuugc

SEQ ID NO: 1121893 - RNA, 22 nt, Human
gugcucuccuggcugcccugac

SEQ ID NO: 1121894 - RNA, 22 nt, Human
ugcagggcccuugggguugaac

SEQ ID NO: 1121895 - RNA, 22 nt, Human
guuauaaaugacugcaaaaguu

SEQ ID NO: 1121896 - RNA, 22 nt, Human
uguaggacauguacuuguaaca

SEQ ID NO: 1121897 - RNA, 22 nt, Human
cccagcuaccucugcuaggaga

SEQ ID NO: 1121898 - RNA, 22 nt, Human
ggcuucccuuuccgagaggaga

SEQ ID NO: 1121899 - RNA, 22 nt, Human
cugggcaguuuauucaguucug

SEQ ID NO: 1121900 - RNA, 22 nt, Human
gggccuguguguucaggagccu

SEQ ID NO: 1121901 - RNA, 22 nt, Human
aagugagauuauauguacggga

SEQ ID NO: 1121902 - RNA, 22 nt, Human
uaagcauucaaugcuuagcacu

SEQ ID NO: 1121903 - RNA, 22 nt, Human
augucccaagauacagcuagag

SEQ ID NO: 1121904 - RNA, 22 nt, Human
cugcugccggcgagccucccuu

SEQ ID NO: 1121905 - RNA, 22 nt, Human
gagauuucuuuugaugccuguc

SEQ ID NO: 1121906 - RNA, 22 nt, Human
acuuccuguuaugugugccucu

SEQ ID NO: 1121907 - RNA, 17 nt, Human
acagagguuauacagac

SEQ ID NO: 1121908 - RNA, 22 nt, Human
agaugaagauaucugcaggggc

SEQ ID NO: 1121909 - RNA, 22 nt, Human
ggcugggagcuggacaggccgg

SEQ ID NO: 1121910 - RNA, 22 nt, Human
aggaugggccugggauaugcuu

SEQ ID NO: 1121911 - RNA, 22 nt, Human
uggaggaugagugugggcucug

SEQ ID NO: 1121912 - RNA, 22 nt, Human
cuucugggcauucagcugcaca

SEQ ID NO: 1121913 - RNA, 22 nt, Human
cacacaugaaucccuaguaccu

SEQ ID NO: 1121914 - RNA, 22 nt, Human
uuaugcuaaaugaaucaaguca

SEQ ID NO: 1121915 - RNA, 22 nt, Human
cugcccugucuuuuucugauga

SEQ ID NO: 1121916 - RNA, 22 nt, Human
ccagccugguucagaauuggcu

SEQ ID NO: 1121917 - RNA, 22 nt, Human
auuuauguaucuguguagauca

SEQ ID NO: 1121918 - RNA, 22 nt, Human
ucuuuccuacuuuauugugaac

SEQ ID NO: 1121919 - RNA, 22 nt, Human
caguuucuguuuuaaauagcag

SEQ ID NO: 1121920 - RNA, 22 nt, Human
ugcagcagcagggaggaggcuc

SEQ ID NO: 1121921 - RNA, 20 nt, Human
ccagagcugauggcugcccg

SEQ ID NO: 1121922 - RNA, 22 nt, Human
cuggcucaggguggucuggguc

SEQ ID NO: 1121923 - RNA, 22 nt, Human
ugcauuguugaauauuucauag

SEQ ID NO: 1121924 - RNA, 22 nt, Human
gugugcagugagcaaaagaucu

SEQ ID NO: 1121925 - RNA, 22 nt, Human
ugaagcagcaccauuuuagagc

SEQ ID NO: 1121926 - RNA, 22 nt, Human
cugggcagccucacacaauguu

SEQ ID NO: 1121927 - RNA, 22 nt, Human
cugucucuguugccuguaggug

SEQ ID NO: 1121928 - RNA, 22 nt, Human
auuuuucucucacacuuaccag

SEQ ID NO: 1121929 - RNA, 22 nt, Human
gggagccuugggagugccagcc

SEQ ID NO: 1121930 - RNA, 22 nt, Human
gaggugggaugugugugcuacu

SEQ ID NO: 1121931 - RNA, 22 nt, Human
cugagcugcggcaggcaccugg

SEQ ID NO: 1121932 - RNA, 22 nt, Human
ccagggugagaaaaggcuggau

SEQ ID NO: 1121933 - RNA, 22 nt, Human
acagaggaaggcugagcugccc

SEQ ID NO: 1121934 - RNA, 22 nt, Human
agcuggccuucggugucacugg

SEQ ID NO: 1121935 - RNA, 22 nt, Human
uguguauuaccauuuuacagcu

SEQ ID NO: 1121936 - RNA, 22 nt, Human
aaguuuuaacaaguacuuacua

SEQ ID NO: 1121937 - RNA, 22 nt, Human
augagcuguaagguggcuuccu

SEQ ID NO: 1121938 - RNA, 21 nt, Human
cagaaguaaggguaacuucuc

SEQ ID NO: 1121939 - RNA, 22 nt, Human
uucauucccaagaguaaacaua

SEQ ID NO: 1121940 - RNA, 22 nt, Human
ggguccagaguugaagagguua

SEQ ID NO: 1121941 - RNA, 22 nt, Human
ccagggcauccucacaucgcag

SEQ ID NO: 1121942 - RNA, 22 nt, Human
agcagcugccagagagaguucc

SEQ ID NO: 1121943 - RNA, 22 nt, Human
caggcacugugcuagauccuug

SEQ ID NO: 1121944 - RNA, 22 nt, Human
aggagcagaacuguuguggagg

SEQ ID NO: 1121945 - RNA, 22 nt, Human
ugucuguaagguguuuauguua

SEQ ID NO: 1121946 - RNA, 22 nt, Human
aggcugcagaacagucaggugc

SEQ ID NO: 1121947 - RNA, 22 nt, Human
ggccugcucugcagccucuaca

SEQ ID NO: 1121948 - RNA, 22 nt, Human
ucacuguauuugcugaugcaua

SEQ ID NO: 1121949 - RNA, 22 nt, Human
cccuggcagaaugucucugggc

SEQ ID NO: 1121950 - RNA, 22 nt, Human
auugaaaguccuaucuaaggga

SEQ ID NO: 1121951 - RNA, 22 nt, Human
ucagagagccucaggcacugcc

SEQ ID NO: 1121952 - RNA, 22 nt, Human
ccugggcaacauagugagaccc

SEQ ID NO: 1121953 - RNA, 21 nt, Human
agcagaggcagaauguaugca

SEQ ID NO: 1121954 - RNA, 22 nt, Human
gcacagggagacagccguggcc

SEQ ID NO: 1121955 - RNA, 22 nt, Human
acagaguauuggaaaggcagug

SEQ ID NO: 1121956 - RNA, 22 nt, Human
gcacacagccagcugagggcua

SEQ ID NO: 1121957 - RNA, 22 nt, Human
cuggcugccacuucagggucuu

SEQ ID NO: 1121958 - RNA, 22 nt, Human
ccucccucuguuagagcugucu

SEQ ID NO: 1121959 - RNA, 22 nt, Human
acagcuugcaauggcuuucaac

SEQ ID NO: 1121960 - RNA, 22 nt, Human
ugggcuggcguggagaguuuag

SEQ ID NO: 1121961 - RNA, 22 nt, Human
acauucaugucccacuucuagc

SEQ ID NO: 1121962 - RNA, 22 nt, Human
uggcucagugcauucacaguaa

SEQ ID NO: 1121963 - RNA, 22 nt, Human
uugggcuggcagagguggucuu

SEQ ID NO: 1121964 - RNA, 22 nt, Human
agggacacacuccaguguuauu

SEQ ID NO: 1121965 - RNA, 17 nt, Human
cccagagaugcugccuu

SEQ ID NO: 1121966 - RNA, 22 nt, Human
cacagagagcuacgugcagcgu

SEQ ID NO: 1121967 - RNA, 22 nt, Human
uucauucauuacgugccaggca

SEQ ID NO: 1121968 - RNA, 22 nt, Human
auaaggcacacauagauagggu

SEQ ID NO: 1121969 - RNA, 22 nt, Human
gcucccaguucccaaagugacc

SEQ ID NO: 1121970 - RNA, 22 nt, Human
aaagaacagauguguggugcau

SEQ ID NO: 1121971 - RNA, 22 nt, Human
ucaaagucuaucuguaauuacu

SEQ ID NO: 1121972 - RNA, 22 nt, Human
aucaguuuugggggacauacug

SEQ ID NO: 1121973 - RNA, 22 nt, Human
ccagcuccucuucccaguguca

SEQ ID NO: 1121974 - RNA, 22 nt, Human
uguccugggaaugggaugcagu

SEQ ID NO: 1121975 - RNA, 22 nt, Human
cacagaggaaaggcaguuggua

SEQ ID NO: 1121976 - RNA, 22 nt, Human
cuggcucauccagguguugcuc

SEQ ID NO: 1121977 - RNA, 22 nt, Human
gcaggagagccagcaggcuucc

SEQ ID NO: 1121978 - RNA, 22 nt, Human
aagccagguuccauggaggagc

SEQ ID NO: 1121979 - RNA, 20 nt, Human
agugccagggcaggugagag

SEQ ID NO: 1121980 - RNA, 22 nt, Human
ugggcugcuucuauuggugguc

SEQ ID NO: 1121981 - RNA, 22 nt, Human
guggauggauuuugaggaaugg

SEQ ID NO: 1121982 - RNA, 20 nt, Human
ucugaggcugagcucuacuu

SEQ ID NO: 1121983 - RNA, 22 nt, Human
uagggcagaguccaggaugggc

SEQ ID NO: 1121984 - RNA, 22 nt, Human
aguuuauguaaaauuaguaaug

SEQ ID NO: 1121985 - RNA, 22 nt, Human
ccuuucagaugggcauggaccg

SEQ ID NO: 1121986 - RNA, 22 nt, Human
cagucccacuagugccaauacc

SEQ ID NO: 1121987 - RNA, 22 nt, Human
gcagagcuucuguccuucagga

SEQ ID NO: 1121988 - RNA, 22 nt, Human
agccugagagccaagcugugca

SEQ ID NO: 1121989 - RNA, 22 nt, Human
gccucugcggggcccgagcccg

SEQ ID NO: 1121990 - RNA, 22 nt, Human
gugccuggcacacagaaggcaa

SEQ ID NO: 1121991 - RNA, 22 nt, Human
gugcuucucuucacacccaacu

SEQ ID NO: 1121992 - RNA, 22 nt, Human
ugcauccuuaaccagcaucacu

SEQ ID NO: 1121993 - RNA, 22 nt, Human
gcuuccuagaucugugguacuc

SEQ ID NO: 1121994 - RNA, 22 nt, Human
ucagccacuacccaccuuaaca

SEQ ID NO: 1121995 - RNA, 22 nt, Human
gccugccuuuguaugacccuga

SEQ ID NO: 1121996 - RNA, 22 nt, Human
uggcagcacaagguggcccaug

SEQ ID NO: 1121997 - RNA, 22 nt, Human
gggaucagcaagccacugcacc

SEQ ID NO: 1121998 - RNA, 22 nt, Human
gagagcugugguuugaccaggc

SEQ ID NO: 1121999 - RNA, 22 nt, Human
uucccaguauuaccuucaggaa

SEQ ID NO: 1122000 - RNA, 22 nt, Human
agggccucugacgcccccagcc

SEQ ID NO: 1122001 - RNA, 22 nt, Human
agugugugcaugcauucgugca

SEQ ID NO: 1122002 - RNA, 22 nt, Human
ucugagaggauuccugucccga

SEQ ID NO: 1122003 - RNA, 22 nt, Human
cucaggaggaggaaguucauug

SEQ ID NO: 1122004 - RNA, 20 nt, Human
agagccuggaaaaagacauc

SEQ ID NO: 1122005 - RNA, 22 nt, Human
aaaagcucuuucugcuguagau

SEQ ID NO: 1122006 - RNA, 22 nt, Human
acuuugaaggggaacauuuuaa

SEQ ID NO: 1122007 - RNA, 22 nt, Human
gcuggccucuacaggccggcca

SEQ ID NO: 1122008 - RNA, 22 nt, Human
ugauuuccccagucuugcugcu

SEQ ID NO: 1122009 - RNA, 22 nt, Human
agagucugaggcagcugcagcc

SEQ ID NO: 1122010 - RNA, 22 nt, Human
gcagggcagcuuagucccuguc

SEQ ID NO: 1122011 - RNA, 22 nt, Human
gcugucugcugugcacugagca

SEQ ID NO: 1122012 - RNA, 22 nt, Human
gggcugcuuauacugaugauaa

SEQ ID NO: 1122013 - RNA, 21 nt, Human
uuucaauguguucuuuguagu

SEQ ID NO: 1122014 - RNA, 22 nt, Human
caggcugaggcaguaggguuug

SEQ ID NO: 1122015 - RNA, 22 nt, Human
guacaugucaaaaaaugcauaa

SEQ ID NO: 1122016 - RNA, 22 nt, Human
ccagagcaauucucacagaacu

SEQ ID NO: 1122017 - RNA, 22 nt, Human
uggccugcagcucucagggaag

SEQ ID NO: 1122018 - RNA, 22 nt, Human
cagccugcuagggcaaugccuu

SEQ ID NO: 1122019 - RNA, 22 nt, Human
gcucagagauggggaaugaaaa

SEQ ID NO: 1122020 - RNA, 22 nt, Human
ucagcagcagcucagcauguuu

SEQ ID NO: 1122021 - RNA, 21 nt, Human
ucuggagcccuaagcugagaa

SEQ ID NO: 1122022 - RNA, 22 nt, Human
uacuguauuugauaagugaagu

SEQ ID NO: 1122023 - RNA, 22 nt, Human
agaagccauugaagcagaccuc

SEQ ID NO: 1122024 - RNA, 22 nt, Human
uaagaacaucuguccccagauu

SEQ ID NO: 1122025 - RNA, 18 nt, Human
aaugcacacauuuacucc

SEQ ID NO: 1122026 - RNA, 22 nt, Human
gcuucucuggccugcagggcau

SEQ ID NO: 1122027 - RNA, 22 nt, Human
acuguguggaccacucugaggc

SEQ ID NO: 1122028 - RNA, 23 nt, Human
uucaagauacgguuuccaggcug

SEQ ID NO: 1122029 - RNA, 22 nt, Human
ucacugcucucuaagcaucgcc

SEQ ID NO: 1122030 - RNA, 22 nt, Human
acagguggccccgagggagugg

SEQ ID NO: 1122031 - RNA, 22 nt, Human
cccagcuccuuacagggccgaa

SEQ ID NO: 1122032 - RNA, 22 nt, Human
gccuucaggaggguuccagaca

SEQ ID NO: 1122033 - RNA, 22 nt, Human
uguuuaaucuauaaaauggaga

SEQ ID NO: 1122034 - RNA, 22 nt, Human
uagaaguuaaaggaauacagaa

SEQ ID NO: 1122035 - RNA, 22 nt, Human
cagggccugccugguuccugga

SEQ ID NO: 1122036 - RNA, 22 nt, Human
auguaagguucagaguauguga

SEQ ID NO: 1122037 - RNA, 22 nt, Human
acagagcucccagccaucuccu

SEQ ID NO: 1122038 - RNA, 17 nt, Human
ucaggcugggugcagug

SEQ ID NO: 1122039 - RNA, 22 nt, Human
uacaaaguagaaauucaguaaa

SEQ ID NO: 1122040 - RNA, 22 nt, Human
gucacaggccuggaugaggggc

SEQ ID NO: 1122041 - RNA, 22 nt, Human
ggggccugcgagguucaacuuc

SEQ ID NO: 1122042 - RNA, 22 nt, Human
cugccugcuucugagccagagg

SEQ ID NO: 1122043 - RNA, 22 nt, Human
auuguggcuagacagucacaau

SEQ ID NO: 1122044 - RNA, 22 nt, Human
agccacagugcaagagagaaaa

SEQ ID NO: 1122045 - RNA, 22 nt, Human
agggcucuguccccagaggccc

SEQ ID NO: 1122046 - RNA, 22 nt, Human
accucccagcucugagcuuggg

SEQ ID NO: 1122047 - RNA, 22 nt, Human
gagagugaugaaugguuaaaca

SEQ ID NO: 1122048 - RNA, 23 nt, Human
gaguguucauagcaggcucuugc

SEQ ID NO: 1122049 - RNA, 22 nt, Human
aggcagcaugcucugcuucuac

SEQ ID NO: 1122050 - RNA, 22 nt, Human
gccucugggcucugccccuggc

SEQ ID NO: 1122051 - RNA, 22 nt, Human
gcugagugauugauauuuuagu

SEQ ID NO: 1122052 - RNA, 22 nt, Human
aguuacaaccaugacacaagca

SEQ ID NO: 1122053 - RNA, 22 nt, Human
gcucccagggaccgcagggcag

SEQ ID NO: 1122054 - RNA, 22 nt, Human
ugcucccaggcauucucuguug

SEQ ID NO: 1122055 - RNA, 22 nt, Human
caguguuccaggcggcagugaa

SEQ ID NO: 1122056 - RNA, 22 nt, Human
cuggccugagcacagcggcugc

SEQ ID NO: 1122057 - RNA, 22 nt, Human
ugggugcuucgucagcucugag

SEQ ID NO: 1122058 - RNA, 22 nt, Human
aaggcacugagccagccgucuc

SEQ ID NO: 1122059 - RNA, 22 nt, Human
ccuucugcuggucaucccagug

SEQ ID NO: 1122060 - RNA, 22 nt, Human
uagcugccagaccauucuuacu

SEQ ID NO: 1122061 - RNA, 22 nt, Human
cagcugugcuguauuaagcucu

SEQ ID NO: 1122062 - RNA, 22 nt, Human
auccaggguguggagagagcuc

SEQ ID NO: 1122063 - RNA, 22 nt, Human
uauuuugagguauuuuugagcu

SEQ ID NO: 1122064 - RNA, 19 nt, Human
ugaagcaggcagagaagau

SEQ ID NO: 1122065 - RNA, 22 nt, Human
gagcuguccgccccugggccga

SEQ ID NO: 1122066 - RNA, 22 nt, Human
ccagggcaggagaaagacucac

SEQ ID NO: 1122067 - RNA, 22 nt, Human
agaauuuuugauuaucuacucg

SEQ ID NO: 1122068 - RNA, 22 nt, Human
gaggagggagcuggaagcucuu

SEQ ID NO: 1122069 - RNA, 22 nt, Human
ggccucagugggccgcugcagg

SEQ ID NO: 1122070 - RNA, 22 nt, Human
agacagcugcucgcagagcuau

SEQ ID NO: 1122071 - RNA, 22 nt, Human
ccagagccucuuaugaagaucg

SEQ ID NO: 1122072 - RNA, 21 nt, Human
ccaccaggucuucugcucggg

SEQ ID NO: 1122073 - RNA, 22 nt, Human
caguccuggggaccaggcugag

SEQ ID NO: 1122074 - RNA, 22 nt, Human
uugcaaaagccgaggcacucca

SEQ ID NO: 1122075 - RNA, 21 nt, Human
ugggaugggucugggaccagc

SEQ ID NO: 1122076 - RNA, 22 nt, Human
ggugcucaagagggcauccucu

SEQ ID NO: 1122077 - RNA, 17 nt, Human
ugagaaguaggcaucau

SEQ ID NO: 1122078 - RNA, 22 nt, Human
ccaaggcuucccagagaugcuc

SEQ ID NO: 1122079 - RNA, 22 nt, Human
agggccugacacccuugccagc

SEQ ID NO: 1122080 - RNA, 22 nt, Human
cacccaggcagguggcugagaa

SEQ ID NO: 1122081 - RNA, 23 nt, Human
uggcagugaucaaaagcuuacau

SEQ ID NO: 1122082 - RNA, 22 nt, Human
ggccugggcccacugucaagag

SEQ ID NO: 1122083 - RNA, 23 nt, Human
ugcaggggaggcuuaaagcaggu

SEQ ID NO: 1122084 - RNA, 22 nt, Human
uaggacaggugaggggcugugg

SEQ ID NO: 1122085 - RNA, 22 nt, Human
gccagcuggagacuggcagggg

SEQ ID NO: 1122086 - RNA, 22 nt, Human
augcuuuacaguuuuccaaaca

SEQ ID NO: 1122087 - RNA, 22 nt, Human
agagcuggguggacuuguaguu

SEQ ID NO: 1122088 - RNA, 22 nt, Human
ugcuggggagugauugaccauc

SEQ ID NO: 1122089 - RNA, 22 nt, Human
aaggcugagagucacaguccua

SEQ ID NO: 1122090 - RNA, 23 nt, Human
ucugucacuuucugcuguggagu

SEQ ID NO: 1122091 - RNA, 23 nt, Human
uuucauaugguguggaugaagaa

SEQ ID NO: 1122092 - RNA, 22 nt, Human
uaaggucauggugaauaauaag

SEQ ID NO: 1122093 - RNA, 19 nt, Human
cugugcaggccgggcugag

SEQ ID NO: 1122094 - RNA, 22 nt, Human
ucuuuccuguaacugcuguuca

SEQ ID NO: 1122095 - RNA, 22 nt, Human
cagagcugagaauguugaugcu

SEQ ID NO: 1122096 - RNA, 22 nt, Human
cugcagaggguuugagcauccu

SEQ ID NO: 1122097 - RNA, 22 nt, Human
caggaugggauguagugggccc

SEQ ID NO: 1122098 - RNA, 22 nt, Human
guacauuuuacuuuguuugaau

SEQ ID NO: 1122099 - RNA, 22 nt, Human
ugugccaggcacuugcccaggc

SEQ ID NO: 1122100 - RNA, 22 nt, Human
acacaugcugauaagaauauaa

SEQ ID NO: 1122101 - RNA, 22 nt, Human
aucuggcuuucuuaaugacuua

SEQ ID NO: 1122102 - RNA, 22 nt, Human
gcagggugauagugaggcucag

SEQ ID NO: 1122103 - RNA, 22 nt, Human
uaaauguguaaaccuccauuac

SEQ ID NO: 1122104 - RNA, 22 nt, Human
ccagcagcucccucaggguccg

SEQ ID NO: 1122105 - RNA, 22 nt, Human
aaaaucugcuuccuuuuacaga

SEQ ID NO: 1122106 - RNA, 22 nt, Human
ugggccuggacaaggccacuag

SEQ ID NO: 1122107 - RNA, 22 nt, Human
aaacaugagcaucucuucaagc

SEQ ID NO: 1122108 - RNA, 22 nt, Human
ucaguuuugauuccugguucuc

SEQ ID NO: 1122109 - RNA, 20 nt, Human
cucucuggaaggugggagcc

SEQ ID NO: 1122110 - RNA, 22 nt, Human
gcuugggauaugcugauguaaa

SEQ ID NO: 1122111 - RNA, 22 nt, Human
uaagaacagugacagccaacau

SEQ ID NO: 1122112 - RNA, 22 nt, Human
ggcagggaggaggugaaaguga

SEQ ID NO: 1122113 - RNA, 22 nt, Human
gcugaaggaggcucugguacua

SEQ ID NO: 1122114 - RNA, 22 nt, Human
gcucaggaaacagcagggcuug

SEQ ID NO: 1122115 - RNA, 18 nt, Human
agcuggcccuggcugccg

SEQ ID NO: 1122116 - RNA, 22 nt, Human
cuggacuuuggcccaucugcca

SEQ ID NO: 1122117 - RNA, 21 nt, Human
cugugcuuuuuaagugugaug

SEQ ID NO: 1122118 - RNA, 22 nt, Human
ucugaggccccugggcaggaug

SEQ ID NO: 1122119 - RNA, 22 nt, Human
ggaccagagaagugagcaccug

SEQ ID NO: 1122120 - RNA, 22 nt, Human
agccuggacagcuacggagaac

SEQ ID NO: 1122121 - RNA, 22 nt, Human
gcccuggaaucucuccauggga

SEQ ID NO: 1122122 - RNA, 22 nt, Human
caagagcuggagaggcagucua

SEQ ID NO: 1122123 - RNA, 22 nt, Human
cugagcugggaguggauagugg

SEQ ID NO: 1122124 - RNA, 22 nt, Human
acauuaucccuggcacaacugc

SEQ ID NO: 1122125 - RNA, 22 nt, Human
uacagaaaaacuggcauugaag

SEQ ID NO: 1122126 - RNA, 22 nt, Human
uuuugaaagccagguuuguaug

SEQ ID NO: 1122127 - RNA, 22 nt, Human
cugugucccuugucccagagcc

SEQ ID NO: 1122128 - RNA, 22 nt, Human
ucucuggguuuuuguccuguac

SEQ ID NO: 1122129 - RNA, 22 nt, Human
ucccagcauuaaugccugucag

SEQ ID NO: 1122130 - RNA, 22 nt, Human
augggaugaacuugaucugcuu

SEQ ID NO: 1122131 - RNA, 22 nt, Human
acugaaggcuuaacucuuucau

SEQ ID NO: 1122132 - RNA, 22 nt, Human
agagaaaagaguucaggcuuug

SEQ ID NO: 1122133 - RNA, 22 nt, Human
guauuuucaagagcaguaguau

SEQ ID NO: 1122134 - RNA, 22 nt, Human
ggucccagguugacagggagac

SEQ ID NO: 1122135 - RNA, 22 nt, Human
gagacagaguuucacucuuguu

SEQ ID NO: 1122136 - RNA, 22 nt, Human
gagggacagcuaaagagaaauu

SEQ ID NO: 1122137 - RNA, 22 nt, Human
aaccaggacaauuugaauagaa

SEQ ID NO: 1122138 - RNA, 21 nt, Human
uggcucuggguaggagagugc

SEQ ID NO: 1122139 - RNA, 22 nt, Human
aagcugccuagaguugaauguc

SEQ ID NO: 1122140 - RNA, 22 nt, Human
aaaucuaggcucauccuggucc

SEQ ID NO: 1122141 - RNA, 19 nt, Human
ccagguggaacugagguag

SEQ ID NO: 1122142 - RNA, 22 nt, Human
ucaguggauauuucuguggcug

SEQ ID NO: 1122143 - RNA, 22 nt, Human
caguacuuugaagauauuuuag

SEQ ID NO: 1122144 - RNA, 22 nt, Human
gucccagggagguucagggcuu

SEQ ID NO: 1122145 - RNA, 22 nt, Human
ugcugaggagguggcugugcuu

SEQ ID NO: 1122146 - RNA, 22 nt, Human
uggggaagggcacccuggagac

SEQ ID NO: 1122147 - RNA, 23 nt, Human
ugauuuccagugagucaguggga

SEQ ID NO: 1122148 - RNA, 22 nt, Human
ggagcagacauaaccuuacaga

SEQ ID NO: 1122149 - RNA, 21 nt, Human
ugcuucucuagaucaacuacu

SEQ ID NO: 1122150 - RNA, 22 nt, Human
agggaaaggcugaugcuguggg

SEQ ID NO: 1122151 - RNA, 22 nt, Human
agcaguggcuggauggugugcu

SEQ ID NO: 1122152 - RNA, 22 nt, Human
aauguuguuuuucugcaugucu

SEQ ID NO: 1122153 - RNA, 22 nt, Human
ccucacagggccaggccccuca

SEQ ID NO: 1122154 - RNA, 22 nt, Human
uucugggacaucuggacaguuu

SEQ ID NO: 1122155 - RNA, 22 nt, Human
uuucaauguaugucuuucugag

SEQ ID NO: 1122156 - RNA, 22 nt, Human
gggcuacagacaugcucuaagc

SEQ ID NO: 1122157 - RNA, 22 nt, Human
gggcucagccccauugaaccag

SEQ ID NO: 1122158 - RNA, 22 nt, Human
aagagcuggagcugcuacagga

SEQ ID NO: 1122159 - RNA, 22 nt, Human
caggagcugggucuggaagcag

SEQ ID NO: 1122160 - RNA, 22 nt, Human
cuucaucaacucuaacaaaugu

SEQ ID NO: 1122161 - RNA, 22 nt, Human
cccaaggcugcagugagcauga

SEQ ID NO: 1122162 - RNA, 22 nt, Human
ucagcugaguucuagagcacuc

SEQ ID NO: 1122163 - RNA, 21 nt, Human
guggcccugguguggcugcac

SEQ ID NO: 1122164 - RNA, 22 nt, Human
ugcauuguaggauguuuagcag

SEQ ID NO: 1122165 - RNA, 22 nt, Human
gaaaaugugucaucccuacugu

SEQ ID NO: 1122166 - RNA, 22 nt, Human
cguuggagacacuugaggacuu

SEQ ID NO: 1122167 - RNA, 22 nt, Human
caaggccugccucuggcagaaa

SEQ ID NO: 1122168 - RNA, 22 nt, Human
cagcauggggcuuggagucagc

SEQ ID NO: 1122169 - RNA, 22 nt, Human
auaagguaugaaaaguaaaugg

SEQ ID NO: 1122170 - RNA, 22 nt, Human
ugugccuuaugaauucuuucug

SEQ ID NO: 1122171 - RNA, 22 nt, Human
agcagaaccacagcacuguuga

SEQ ID NO: 1122172 - RNA, 22 nt, Human
cacauaaguggguuccauugca

SEQ ID NO: 1122173 - RNA, 22 nt, Human
augaagcugaccuugucuugcu

SEQ ID NO: 1122174 - RNA, 22 nt, Human
agcugcccuggcggagcugcuc

SEQ ID NO: 1122175 - RNA, 22 nt, Human
cagagccaugguaugggcuugu

SEQ ID NO: 1122176 - RNA, 22 nt, Human
auccagggauaaaaguaagguu

SEQ ID NO: 1122177 - RNA, 22 nt, Human
ccugucagcugauggcuaugua

SEQ ID NO: 1122178 - RNA, 21 nt, Human
cuugaaagguagagucuacag

SEQ ID NO: 1122179 - RNA, 22 nt, Human
ggccccuggcaccaggcugauu

SEQ ID NO: 1122180 - RNA, 17 nt, Human
uuagcaaaauagcacuu

SEQ ID NO: 1122181 - RNA, 22 nt, Human
cacauuugaaggaauuagcauu

SEQ ID NO: 1122182 - RNA, 17 nt, Human
agauggcaggaggcaga

SEQ ID NO: 1122183 - RNA, 22 nt, Human
gugccugccccacuccucagca

SEQ ID NO: 1122184 - RNA, 22 nt, Human
aggaggccgcugaugggcuccc

SEQ ID NO: 1122185 - RNA, 22 nt, Human
caguggcagagaacagagaccu

SEQ ID NO: 1122186 - RNA, 22 nt, Human
uuuuccucaggaaugcuaagcu

SEQ ID NO: 1122187 - RNA, 23 nt, Human
uguaaaaugggguaguguuacca

SEQ ID NO: 1122188 - RNA, 22 nt, Human
ucagcagauggguuguguuggc

SEQ ID NO: 1122189 - RNA, 23 nt, Human
agacagaggcugaggcuggccgc

SEQ ID NO: 1122190 - RNA, 19 nt, Human
ucaguuuuagucaucaguu

SEQ ID NO: 1122191 - RNA, 19 nt, Human
ggccuggauuuagggcucc

SEQ ID NO: 1122192 - RNA, 22 nt, Human
ugaucagucccaugaucuucca

SEQ ID NO: 1122193 - RNA, 22 nt, Human
agccucucuuuauucccagcua

SEQ ID NO: 1122194 - RNA, 22 nt, Human
agugaaauacugucguuuuuag

SEQ ID NO: 1122195 - RNA, 22 nt, Human
caauauucaguggaaaagccau

SEQ ID NO: 1122196 - RNA, 22 nt, Human
uugauacauagcacaguuuagg

SEQ ID NO: 1122197 - RNA, 22 nt, Human
cucaggauggaagccuacagga

SEQ ID NO: 1122198 - RNA, 22 nt, Human
cugugagcuggguggccaggac

SEQ ID NO: 1122199 - RNA, 22 nt, Human
uuugggcaguagauguaucacu

SEQ ID NO: 1122200 - RNA, 22 nt, Human
aaaagaggagugguuuaugaca

SEQ ID NO: 1122201 - RNA, 22 nt, Human
agauuucagguuggggcagaag

SEQ ID NO: 1122202 - RNA, 22 nt, Human
aggccuggugugccggaugcag

SEQ ID NO: 1122203 - RNA, 22 nt, Human
aaauguguuuagaugguuuauu

SEQ ID NO: 1122204 - RNA, 22 nt, Human
gcaccaggcuuagagccccagg

SEQ ID NO: 1122205 - RNA, 22 nt, Human
ugcaguggaggccgugagacag

SEQ ID NO: 1122206 - RNA, 20 nt, Human
ugacucugcaaccgucucuc

SEQ ID NO: 1122207 - RNA, 22 nt, Human
aggcacuguggguguggccgga

SEQ ID NO: 1122208 - RNA, 22 nt, Human
gccugugcuuaacugacgugag

SEQ ID NO: 1122209 - RNA, 22 nt, Human
uuugugcaagagggccaccuua

SEQ ID NO: 1122210 - RNA, 22 nt, Human
guguggucgaaguucucccgga

SEQ ID NO: 1122211 - RNA, 22 nt, Human
ucccagucuagagccggauugg

SEQ ID NO: 1122212 - RNA, 22 nt, Human
aguggcaguagaugagcugguu

SEQ ID NO: 1122213 - RNA, 22 nt, Human
ccagugugcauuaucauguguc

SEQ ID NO: 1122214 - RNA, 22 nt, Human
cgggcacucagggucgaggugg

SEQ ID NO: 1122215 - RNA, 22 nt, Human
uucuccucagcaaggcagcuuu

SEQ ID NO: 1122216 - RNA, 22 nt, Human
uuauggcauucauuggggcuuu

SEQ ID NO: 1122217 - RNA, 22 nt, Human
ccugugggagggagcggcugga

SEQ ID NO: 1122218 - RNA, 19 nt, Human
acacaccagugccugugac

SEQ ID NO: 1122219 - RNA, 22 nt, Human
uccagccauaucuuguagcccu

SEQ ID NO: 1122220 - RNA, 22 nt, Human
cagcccacugccucugugguag

SEQ ID NO: 1122221 - RNA, 22 nt, Human
guguggcuaggauggcuuugcu

SEQ ID NO: 1122222 - RNA, 21 nt, Human
uccuccuguagaggguccugg

SEQ ID NO: 1122223 - RNA, 22 nt, Human
agccagucggggccaugcuggg

SEQ ID NO: 1122224 - RNA, 22 nt, Human
ccuaggcuaauucaguccagua

SEQ ID NO: 1122225 - RNA, 23 nt, Human
uagauccuuccaacuacucuuac

SEQ ID NO: 1122226 - RNA, 22 nt, Human
agcaccauugcaaauauggcag

SEQ ID NO: 1122227 - RNA, 22 nt, Human
gguggcaccuuacccugcgcag

SEQ ID NO: 1122228 - RNA, 22 nt, Human
gggcagcaggcuccacguuccu

SEQ ID NO: 1122229 - RNA, 22 nt, Human
gcacugggggcagcagugaggg

SEQ ID NO: 1122230 - RNA, 22 nt, Human
cucugggguggaggaggcugac

SEQ ID NO: 1122231 - RNA, 22 nt, Human
uuccuggugguggugacagcac

SEQ ID NO: 1122232 - RNA, 22 nt, Human
gcagcuuuggagguggaacucu

SEQ ID NO: 1122233 - RNA, 22 nt, Human
ucuccucuauuucuguauguau

SEQ ID NO: 1122234 - RNA, 22 nt, Human
ucuccucuccuuucauguuguu

SEQ ID NO: 1122235 - RNA, 22 nt, Human
gggcagcaaaucugagucuggu

SEQ ID NO: 1122236 - RNA, 17 nt, Human
ugaggccugcaucagug

SEQ ID NO: 1122237 - RNA, 22 nt, Human
ucgcagcacuagcccugcauug

SEQ ID NO: 1122238 - RNA, 17 nt, Human
uggcacagaggugcuau

SEQ ID NO: 1122239 - RNA, 22 nt, Human
acuuccagaaaugauuuaauuu

SEQ ID NO: 1122240 - RNA, 22 nt, Human
ccaggugugcucugcaguggau

SEQ ID NO: 1122241 - RNA, 22 nt, Human
uaacuucucugagccucauucc

SEQ ID NO: 1122242 - RNA, 21 nt, Human
uuccuccucuggagaagaaga

SEQ ID NO: 1122243 - RNA, 20 nt, Human
uccugggguaagccaugguc

SEQ ID NO: 1122244 - RNA, 20 nt, Human
ucucuaacaugaaugcuauc

SEQ ID NO: 1122245 - RNA, 22 nt, Human
cugagggccuucuaugcugagc

SEQ ID NO: 1122246 - RNA, 19 nt, Human
uggcagcauugguaccuug

SEQ ID NO: 1122247 - RNA, 22 nt, Human
ugguggcacugacaucagacac

SEQ ID NO: 1122248 - RNA, 21 nt, Human
ccaccaggucuucugcucggg

SEQ ID NO: 1122249 - RNA, 22 nt, Human
cucucagugccugcccuaggcu

SEQ ID NO: 1122250 - RNA, 22 nt, Human
ucuccuggcauuugguugagua

SEQ ID NO: 1122251 - RNA, 22 nt, Human
uccuggguccauggcagccgaa

SEQ ID NO: 1122252 - RNA, 22 nt, Human
ccuggggaccugccucagcccu

SEQ ID NO: 1122253 - RNA, 20 nt, Human
agcuuugguuaagccagugg

SEQ ID NO: 1122254 - RNA, 22 nt, Human
aggguugaagucugguccucau

SEQ ID NO: 1122255 - RNA, 22 nt, Human
uuuacagcuacuguccuauuuc

SEQ ID NO: 1122256 - RNA, 22 nt, Human
ucuuccuggauggggguugaug

SEQ ID NO: 1122257 - RNA, 22 nt, Human
ccaguccaggccauggauuuug

SEQ ID NO: 1122258 - RNA, 22 nt, Human
cagcuccagcccaggcagcucc

SEQ ID NO: 1122259 - RNA, 19 nt, Human
guuggcacugaaaauggcu

SEQ ID NO: 1122260 - RNA, 22 nt, Human
acaugggcaucuaugaggcucu

SEQ ID NO: 1122261 - RNA, 22 nt, Human
uaccugggcccaccagugccug

SEQ ID NO: 1122262 - RNA, 22 nt, Human
cccuggcucugccucagagccc

SEQ ID NO: 1122263 - RNA, 22 nt, Human
cugggcuuucaggcccuaaggc

SEQ ID NO: 1122264 - RNA, 22 nt, Human
uccuggggaggucgaggcugag

SEQ ID NO: 1122265 - RNA, 22 nt, Human
gucuccuuguggaucucaagga

SEQ ID NO: 1122266 - RNA, 22 nt, Human
ccuccugggccuugcucuguga

SEQ ID NO: 1122267 - RNA, 20 nt, Human
uccagccacuuccgcugguc

SEQ ID NO: 1122268 - RNA, 22 nt, Human
ccugcacuaccuggggcugcug

SEQ ID NO: 1122269 - RNA, 22 nt, Human
uucccuucuaguuuugagagac

SEQ ID NO: 1122270 - RNA, 22 nt, Human
uccuccuuuccccgcuggagcc

SEQ ID NO: 1122271 - RNA, 19 nt, Human
uccuggggaggggcauggc

SEQ ID NO: 1122272 - RNA, 22 nt, Human
uggccugauuuugcuaagagaa

SEQ ID NO: 1122273 - RNA, 22 nt, Human
uggcagcauuuuuuccagaaca

SEQ ID NO: 1122274 - RNA, 22 nt, Human
uggcagcagggccccuggagga

SEQ ID NO: 1122275 - RNA, 22 nt, Human
ccugguguuaucauaggucaug

SEQ ID NO: 1122276 - RNA, 22 nt, Human
aggggcacgaguagagcucuag

SEQ ID NO: 1122277 - RNA, 22 nt, Human
ccgcguggcacccuccuggagg

SEQ ID NO: 1122278 - RNA, 20 nt, Human
uccuccuugcagagcccaga

SEQ ID NO: 1122279 - RNA, 22 nt, Human
gucccucugccugugguucucu

SEQ ID NO: 1122280 - RNA, 22 nt, Human
aucccuggccacgaagcugccc

SEQ ID NO: 1122281 - RNA, 18 nt, Human
ucaguccuccauagagcu

SEQ ID NO: 1122282 - RNA, 22 nt, Human
cuccuuccugguuagcaccuua

SEQ ID NO: 1122283 - RNA, 22 nt, Human
ggggucugggcuuagcuggaau

SEQ ID NO: 1122284 - RNA, 22 nt, Human
auucccuuugacgaucccuagg

SEQ ID NO: 1122285 - RNA, 22 nt, Human
ucaccucucuggccgucuaccu

SEQ ID NO: 1122286 - RNA, 22 nt, Human
gggcagcaucaggaggggcuuu

SEQ ID NO: 1122287 - RNA, 22 nt, Human
gccuggggaacuugauccuguc

SEQ ID NO: 1122288 - RNA, 23 nt, Human
cugagggcuggucugaagucugc

SEQ ID NO: 1122289 - RNA, 22 nt, Human
ggucuccugaccuuuagucccu

SEQ ID NO: 1122290 - RNA, 22 nt, Human
gguggcugugagcauuauguga

SEQ ID NO: 1122291 - RNA, 22 nt, Human
ucacagcugggguuuuggcagc

SEQ ID NO: 1122292 - RNA, 22 nt, Human
gcacugggagucuguggggguu

SEQ ID NO: 1122293 - RNA, 22 nt, Human
cggggccuagucuaccucggca

SEQ ID NO: 1122294 - RNA, 22 nt, West Nile virus
guggcugguugugcagagcaga

SEQ ID NO: 1122295 - RNA, 22 nt, West Nile virus
guguucuagcaccaccagccac

SEQ ID NO: 1122296 - RNA, 22 nt, Human
ucucuggaagcgcagaucuguu

SEQ ID NO: 1122297 - RNA, 22 nt, Human
cuccagggggcauccacacagc

SEQ ID NO: 1122298 - RNA, 22 nt, Human
uuacauuuggcuauguccucua

SEQ ID NO: 1122299 - RNA, 22 nt, Human
cccugcaggggaccugcagccu

SEQ ID NO: 1122300 - RNA, 22 nt, Human
agcuguguagggaaucagagaa

SEQ ID NO: 1122301 - RNA, 22 nt, Human
gaugggaggaaccugggucccu

SEQ ID NO: 1122302 - RNA, 22 nt, Human
uauuucuuucagguauguguug

SEQ ID NO: 1122303 - RNA, 21 nt, Human
cuccugggcuaagauauagug

SEQ ID NO: 1122304 - RNA, 22 nt, Human
ggccugcuuuccgagccugcag

SEQ ID NO: 1122305 - RNA, 22 nt, Human
ugugcuucuugcagcuccugua

SEQ ID NO: 1122306 - RNA, 22 nt, Human
caggccugacccugagcuucac

SEQ ID NO: 1122307 - RNA, 22 nt, Human
ucggagcuguagaugaaacccu

SEQ ID NO: 1122308 - RNA, 22 nt, Human
uucuggagaucugccuauggga

SEQ ID NO: 1122309 - RNA, 22 nt, Human
agagacaggauaucugcucaug

SEQ ID NO: 1122310 - RNA, 22 nt, Human
gcuguguccucacacagccuuu

SEQ ID NO: 1122311 - RNA, 22 nt, Human
gucaugccuggcuucuuagaca

SEQ ID NO: 1122312 - RNA, 22 nt, Human
ugggugggagcgcccugucugg

SEQ ID NO: 1122313 - RNA, 22 nt, Human
gugucccacucuggaggugaag

SEQ ID NO: 1122314 - RNA, 18 nt, Human
uggguggcuagggaguuu

SEQ ID NO: 1122315 - RNA, 22 nt, Human
gugcuuccccaagccacagccu

SEQ ID NO: 1122316 - RNA, 22 nt, Human
ccuccagcgcgauccacuccgg

SEQ ID NO: 1122317 - RNA, 22 nt, Human
augcagagacagauguggcaug

SEQ ID NO: 1122318 - RNA, 22 nt, Human
cuggugccuccucccugugcuu

SEQ ID NO: 1122319 - RNA, 22 nt, Human
aaugggaggauuuucucucuug

SEQ ID NO: 1122320 - RNA, 22 nt, Human
agccuggaccaggggccucaga

SEQ ID NO: 1122321 - RNA, 22 nt, Human
uagcugccauugcuccaggaag

SEQ ID NO: 1122322 - RNA, 22 nt, Human
ugccugucuccucugcagggug

SEQ ID NO: 1122323 - RNA, 22 nt, Human
cccucugcaggcuggaccugcc

SEQ ID NO: 1122324 - RNA, 22 nt, Human
cagcugccugcaacacaagcuu

SEQ ID NO: 1122325 - RNA, 22 nt, Human
aggccuagaggaauggccaggg

SEQ ID NO: 1122326 - RNA, 22 nt, Human
ugugggcucccccucacucugu

SEQ ID NO: 1122327 - RNA, 23 nt, Human
ugagcugguauuguccaucucca

SEQ ID NO: 1122328 - RNA, 21 nt, Human
auugaaagucaacaaucaguu

SEQ ID NO: 1122329 - RNA, 22 nt, Human
uuggcuucucuuaacccuaaag

SEQ ID NO: 1122330 - RNA, 22 nt, Human
uuagagaaauucugguaaugua

SEQ ID NO: 1122331 - RNA, 22 nt, Human
caagagcucagaaacccuugcu

SEQ ID NO: 1122332 - RNA, 22 nt, Human
ugcugccaagcccgugcuccug

SEQ ID NO: 1122333 - RNA, 22 nt, Human
ugcauuucagaagaaaauucgg

SEQ ID NO: 1122334 - RNA, 22 nt, Human
acagcagcacuauugacauuuu

SEQ ID NO: 1122335 - RNA, 22 nt, Human
ucugucacuauuggccagaaca

SEQ ID NO: 1122336 - RNA, 22 nt, Human
cccucugcugccuggcuggguc

SEQ ID NO: 1122337 - RNA, 22 nt, Human
ccucuuugugccugcaggcugc

SEQ ID NO: 1122338 - RNA, 22 nt, Human
ggaggagacaguaaaaagcacg

SEQ ID NO: 1122339 - RNA, 22 nt, Human
acugucugcuggccccugguua

SEQ ID NO: 1122340 - RNA, 22 nt, Human
ugacuuccugcacucaggugau

SEQ ID NO: 1122341 - RNA, 22 nt, Human
cagcucuguaaauuccuucauc

SEQ ID NO: 1122342 - RNA, 22 nt, Human
ccaggccuuucuucuuggucug

SEQ ID NO: 1122343 - RNA, 22 nt, Human
gcacagcaauuucuauaagcuc

SEQ ID NO: 1122344 - RNA, 22 nt, Human
uaaugugugucaucaguagagu

SEQ ID NO: 1122345 - RNA, 22 nt, Human
acagaguacauucagagacuau

SEQ ID NO: 1122346 - RNA, 19 nt, Human
acagggcagcaauaggaua

SEQ ID NO: 1122347 - RNA, 22 nt, Human
ggccugcugacccaaguccugu

SEQ ID NO: 1122348 - RNA, 22 nt, Human
uuacuuuggauggucaagaaag

SEQ ID NO: 1122349 - RNA, 22 nt, Human
agaaauguuuauggcugccuau

SEQ ID NO: 1122350 - RNA, 22 nt, Human
agagcugcccacacagcagauu

SEQ ID NO: 1122351 - RNA, 22 nt, Human
uauaaagugugaacugugagua

SEQ ID NO: 1122352 - RNA, 20 nt, Human
agccagaagaaggcuggaga

SEQ ID NO: 1122353 - RNA, 22 nt, Human
gcugccugccuaguuccacagu

SEQ ID NO: 1122354 - RNA, 22 nt, Human
ugaggcagcuuuuucugugugu

SEQ ID NO: 1122355 - RNA, 22 nt, Human
ccagagucuaugaguccucauu

SEQ ID NO: 1122356 - RNA, 22 nt, Human
uaccuuggguugaguucauucu

SEQ ID NO: 1122357 - RNA, 22 nt, Human
cugcccugaccugccucagagu

SEQ ID NO: 1122358 - RNA, 22 nt, Human
aggagccccucuucaguccugg

SEQ ID NO: 1122359 - RNA, 22 nt, Human
uauguguggagccagccuggag

SEQ ID NO: 1122360 - RNA, 22 nt, Human
gccucugggcucugccccuggc

SEQ ID NO: 1122361 - RNA, 22 nt, Human
uugcuuccucgaggccagcgug

SEQ ID NO: 1122362 - RNA, 21 nt, Human
cugccuugaaugguacuggga

SEQ ID NO: 1122363 - RNA, 22 nt, Human
acccacgaagaugagcggcaug

SEQ ID NO: 1122364 - RNA, 22 nt, Human
agugcugaagacuggcuaggga

SEQ ID NO: 1122365 - RNA, 22 nt, Human
ccagagcccgggaccuggacuu

SEQ ID NO: 1122366 - RNA, 22 nt, Human
aggaggugacagccugcaucug

SEQ ID NO: 1122367 - RNA, 22 nt, Human
uauauuaacacccacuugccuc

SEQ ID NO: 1122368 - RNA, 22 nt, Human
aucuggcucucucauuuacaaa

SEQ ID NO: 1122369 - RNA, 22 nt, Human
ugaagcaguucucagaaguggg

SEQ ID NO: 1122370 - RNA, 22 nt, Human
cagcagggcccccgggugcgcc

SEQ ID NO: 1122371 - RNA, 22 nt, Human
uguuccaucaguuuuugguuga

SEQ ID NO: 1122372 - RNA, 22 nt, Human
gcacuaaaccaacauguaauaa

SEQ ID NO: 1122373 - RNA, 22 nt, Human
gccacccccaaguagguggucu

SEQ ID NO: 1122374 - RNA, 22 nt, Human
acagcugggugcugcucagagc

SEQ ID NO: 1122375 - RNA, 22 nt, Human
aagccaagaguuaacuauuugu

SEQ ID NO: 1122376 - RNA, 22 nt, Human
acagaggucauggagaguucuc

SEQ ID NO: 1122377 - RNA, 22 nt, Human
uggcucagucuggguugacuga

SEQ ID NO: 1122378 - RNA, 22 nt, Human
acaggcagggaccuuggcuaag

SEQ ID NO: 1122379 - RNA, 22 nt, Human
uguuuuaaucucccauugcucu

SEQ ID NO: 1122380 - RNA, 22 nt, Human
cagagcugggaucccaugggcg

SEQ ID NO: 1122381 - RNA, 22 nt, Human
aaguccauaguuugcauuaggg

SEQ ID NO: 1122382 - RNA, 19 nt, Human
gcacacccugcaccaccau

SEQ ID NO: 1122383 - RNA, 22 nt, Human
aaaguucaugguguuauagaaa

SEQ ID NO: 1122384 - RNA, 22 nt, Human
gcuggccagggcugcucgcgga

SEQ ID NO: 1122385 - RNA, 22 nt, Human
ugcauuguugaauauuucauag

SEQ ID NO: 1122386 - RNA, 23 nt, Human
agagcuuucuaaaauguaaaucu

SEQ ID NO: 1122387 - RNA, 22 nt, Human
caggauccuggcugcauggacg

SEQ ID NO: 1122388 - RNA, 22 nt, Human
ucucagagcaucauuuucuuag

SEQ ID NO: 1122389 - RNA, 22 nt, Human
uugcagggaccugcagaaagcu

SEQ ID NO: 1122390 - RNA, 22 nt, Human
cugacucuccucaagcauaaau

SEQ ID NO: 1122391 - RNA, 20 nt, Human
cagccuccacucacucagcu

SEQ ID NO: 1122392 - RNA, 22 nt, Human
uccucucagugugguuguggga

SEQ ID NO: 1122393 - RNA, 22 nt, Human
cuagaaauacaggcacgugcca

SEQ ID NO: 1122394 - RNA, 22 nt, Human
ucaguuuugauuccugguucuc

SEQ ID NO: 1122395 - RNA, 22 nt, Human
aaaaugcaugagaaugugcucg

SEQ ID NO: 1122396 - RNA, 22 nt, Human
cuucagggugacgcaggcugca

SEQ ID NO: 1122397 - RNA, 22 nt, Human
uccucagacuucccuuugugua

SEQ ID NO: 1122398 - RNA, 22 nt, Human
gagcugccuacauugccaagag

SEQ ID NO: 1122399 - RNA, 22 nt, Human
gagggcugauaacaggaauaca

SEQ ID NO: 1122400 - RNA, 22 nt, Human
ccuuucucauuuuaagcauuag

SEQ ID NO: 1122401 - RNA, 22 nt, Human
ugaaggaagaauaggcaguguu

SEQ ID NO: 1122402 - RNA, 22 nt, Human
gagguuagaggucagugcaguc

SEQ ID NO: 1122403 - RNA, 22 nt, Human
aaugaacaggugaaugucagau

SEQ ID NO: 1122404 - RNA, 20 nt, Human
guucucacugaucugcaggg

SEQ ID NO: 1122405 - RNA, 22 nt, Human
cugcucugacccuuucaccuuc

SEQ ID NO: 1122406 - RNA, 22 nt, Human
cuggguggcgucuggggccagu

SEQ ID NO: 1122407 - RNA, 22 nt, Human
uuucucuaaauagggaggcuua

SEQ ID NO: 1122408 - RNA, 19 nt, Human
cagcugcaccgugaccauc

SEQ ID NO: 1122409 - RNA, 22 nt, Human
caugggagcuaucuccaucacu

SEQ ID NO: 1122410 - RNA, 22 nt, Human
acagagguaggacaugagauau

SEQ ID NO: 1122411 - RNA, 22 nt, Human
aggcacugaagugguaaaugua

SEQ ID NO: 1122412 - RNA, 22 nt, Human
uucauucaucucuaaaaugccu

SEQ ID NO: 1122413 - RNA, 22 nt, Human
aagacuuucucccaaauccuca

SEQ ID NO: 1122414 - RNA, 22 nt, Human
ugggcucugcugcguaccaguu

SEQ ID NO: 1122415 - RNA, 18 nt, Human
cuucagugacagucuggc

SEQ ID NO: 1122416 - RNA, 22 nt, Human
ugccucugugggccuuccuggc

SEQ ID NO: 1122417 - RNA, 22 nt, Human
agccccaguccgcugcgggcgg

SEQ ID NO: 1122418 - RNA, 22 nt, Human
cagcaggcccagaguuucaugg

SEQ ID NO: 1122419 - RNA, 23 nt, Human
cauuucugggagauuuauaaaau

SEQ ID NO: 1122420 - RNA, 22 nt, Human
augcacaagaggcuagaaaaga

SEQ ID NO: 1122421 - RNA, 22 nt, Human
ucauaacagcuaagucccuuuc

SEQ ID NO: 1122422 - RNA, 22 nt, Human
gccagggcaggggagcaucugc

SEQ ID NO: 1122423 - RNA, 20 nt, Human
ggcacuggaagcacacagga

SEQ ID NO: 1122424 - RNA, 22 nt, Human
uggcagcacuagguacugagcu

SEQ ID NO: 1122425 - RNA, 22 nt, Human
ugcaccccauuuuacauuuaca

SEQ ID NO: 1122426 - RNA, 22 nt, Human
cagucccagcugcucagaaggc

SEQ ID NO: 1122427 - RNA, 22 nt, Human
agggaaggaaaagcugucgcuu

SEQ ID NO: 1122428 - RNA, 22 nt, Human
ucagggcauguauguuucuuua

SEQ ID NO: 1122429 - RNA, 19 nt, Human
agcuccugggcucugggcc

SEQ ID NO: 1122430 - RNA, 22 nt, Human
cucuggagugcagccugguggc

SEQ ID NO: 1122431 - RNA, 22 nt, Human
guccaugguugcuuucauguaa

SEQ ID NO: 1122432 - RNA, 22 nt, Human
ggugaaggaggaagcugaugga

SEQ ID NO: 1122433 - RNA, 22 nt, Human
cugaagccaugugcucacuggu

SEQ ID NO: 1122434 - RNA, 22 nt, Human
aaaugugugcacaaagacagcu

SEQ ID NO: 1122435 - RNA, 22 nt, Human
gccuggccugaacuaggaggug

SEQ ID NO: 1122436 - RNA, 22 nt, Human
aagcugccuuccaugugaggaa

SEQ ID NO: 1122437 - RNA, 22 nt, Human
agaggcaguauacaauccgagc

SEQ ID NO: 1122438 - RNA, 22 nt, Human
ugcaauaacccaguaucuguga

SEQ ID NO: 1122439 - RNA, 22 nt, Human
augggaggaaggaggcccuuga

SEQ ID NO: 1122440 - RNA, 22 nt, Human
aggucacacuuggaucauagaa

SEQ ID NO: 1122441 - RNA, 22 nt, Human
cauugcccaguaggaucaccag

SEQ ID NO: 1122442 - RNA, 22 nt, Human
aaaugcacaggagaaccaauuc

SEQ ID NO: 1122443 - RNA, 22 nt, Human
ucuggcucaggucagacaggga

SEQ ID NO: 1122444 - RNA, 22 nt, Human
auaucuuuuagagcaagcuugu

SEQ ID NO: 1122445 - RNA, 22 nt, Human
cagggcugaaaucaagguguag

SEQ ID NO: 1122446 - RNA, 22 nt, Human
gguaacaguauguagaguaaga

SEQ ID NO: 1122447 - RNA, 22 nt, Human
augucuuucucacagccaguuc

SEQ ID NO: 1122448 - RNA, 22 nt, Human
cuggugggaggcaagguggaag

SEQ ID NO: 1122449 - RNA, 22 nt, Human
cucucccagucaggcucaggau

SEQ ID NO: 1122450 - RNA, 20 nt, Human
auguuuuauaaaagaacggg

SEQ ID NO: 1122451 - RNA, 22 nt, Human
uugaaaggguuaaagugguaaa

SEQ ID NO: 1122452 - RNA, 22 nt, Human
ugugggcaggcccgggucugag

SEQ ID NO: 1122453 - RNA, 22 nt, Human
ugcugccaugcagagcaacaga

SEQ ID NO: 1122454 - RNA, 22 nt, Human
agccuggaggccaggagacagu

SEQ ID NO: 1122455 - RNA, 22 nt, Human
accaaugugaugauauuaggag

SEQ ID NO: 1122456 - RNA, 22 nt, Human
uguuuuaagggucaacugucac

SEQ ID NO: 1122457 - RNA, 22 nt, Human
ucugggugcccuuugcucuguu

SEQ ID NO: 1122458 - RNA, 22 nt, Human
ggcucugcugguaagaugccuc

SEQ ID NO: 1122459 - RNA, 22 nt, Human
ccagggcaauaggaacacuuuu

SEQ ID NO: 1122460 - RNA, 22 nt, Human
ucagaaaugaucguuauucauu

SEQ ID NO: 1122461 - RNA, 22 nt, Human
gcauuccugagaaugcagagug

SEQ ID NO: 1122462 - RNA, 22 nt, Human
ugagccuguccugugcauguga

SEQ ID NO: 1122463 - RNA, 22 nt, Human
ccugggagguggagguugcagc

SEQ ID NO: 1122464 - RNA, 22 nt, Human
acaagagauuaucuacagauga

SEQ ID NO: 1122465 - RNA, 22 nt, Human
ggagcagagcauuucacagccu

SEQ ID NO: 1122466 - RNA, 22 nt, Human
auuuugaaaagcauuugaguaa

SEQ ID NO: 1122467 - RNA, 22 nt, Human
ugucaugccauuuaaaauguuu

SEQ ID NO: 1122468 - RNA, 22 nt, Human
gcagagcuaucuucuggauuug

SEQ ID NO: 1122469 - RNA, 22 nt, Human
aaaaaugucauuauggaacuga

SEQ ID NO: 1122470 - RNA, 22 nt, Human
gcugccuguugaagggucugug

SEQ ID NO: 1122471 - RNA, 22 nt, Human
gagaaagcuucuuucccacagg

SEQ ID NO: 1122472 - RNA, 22 nt, Human
guggcugcagagccagcaagcu

SEQ ID NO: 1122473 - RNA, 22 nt, Human
cucaggaugaaagucaugguga

SEQ ID NO: 1122474 - RNA, 19 nt, Human
ccagagcccgccagauggg

SEQ ID NO: 1122475 - RNA, 22 nt, Human
guguacauagaauugugcuuug

SEQ ID NO: 1122476 - RNA, 22 nt, Human
ggucucagaucuuuauuaaggc

SEQ ID NO: 1122477 - RNA, 22 nt, Human
gugccagggggcacugaacaga

SEQ ID NO: 1122478 - RNA, 22 nt, Human
gcaguccucucauuggccuccu

SEQ ID NO: 1122479 - RNA, 22 nt, Human
caugaagcuugaagcaguccac

SEQ ID NO: 1122480 - RNA, 22 nt, Human
aaagauuucacaucccaagccu

SEQ ID NO: 1122481 - RNA, 20 nt, Human
agugugcauuuagagucugc

SEQ ID NO: 1122482 - RNA, 22 nt, Human
gcaucuuucuguccauucagca

SEQ ID NO: 1122483 - RNA, 22 nt, Human
ggagggcucaauugacuccuga

SEQ ID NO: 1122484 - RNA, 22 nt, Human
gccaggcuggcaaaaggaaacc

SEQ ID NO: 1122485 - RNA, 22 nt, Human
gaggcuggugguuaguuccauu

SEQ ID NO: 1122486 - RNA, 19 nt, Human
uggcuucuguuuucauguu

SEQ ID NO: 1122487 - RNA, 22 nt, Human
gcagggugauagugaggcucag

SEQ ID NO: 1122488 - RNA, 22 nt, Human
ccagcucuuggugcacuuacau

SEQ ID NO: 1122489 - RNA, 22 nt, Human
gagagugagauaauuucacaua

SEQ ID NO: 1122490 - RNA, 22 nt, Human
cugggcuucucccccuggcaga

SEQ ID NO: 1122491 - RNA, 22 nt, Human
ccugggagugucagacuugcuu

SEQ ID NO: 1122492 - RNA, 22 nt, Human
ggguccagacacuccagaggaa

SEQ ID NO: 1122493 - RNA, 22 nt, Human
cacaagagagugcgcguugcaa

SEQ ID NO: 1122494 - RNA, 22 nt, Human
uuagaaauacaagugagguuga

SEQ ID NO: 1122495 - RNA, 22 nt, Human
gugggaugcaguggugaguggc

SEQ ID NO: 1122496 - RNA, 22 nt, Human
aaggccauuauucugauauauu

SEQ ID NO: 1122497 - RNA, 22 nt, Human
ucauuuccucaaauucaagguu

SEQ ID NO: 1122498 - RNA, 17 nt, Human
gcagcagagagacccuc

SEQ ID NO: 1122499 - RNA, 22 nt, Human
gccuucugaucgcuggacugac

SEQ ID NO: 1122500 - RNA, 22 nt, Human
aggcugcuggcaggcguggacg

SEQ ID NO: 1122501 - RNA, 22 nt, Human
ccaaggagcugcaggcacuugu

SEQ ID NO: 1122502 - RNA, 22 nt, Human
acuguguggaaauuugugaggg

SEQ ID NO: 1122503 - RNA, 22 nt, Human
uuucuguauuuaaaagaucugg

SEQ ID NO: 1122504 - RNA, 22 nt, Human
acaaaaguguaggaauuccuua

SEQ ID NO: 1122505 - RNA, 22 nt, Human
ggagccugugcccaagcccaga

SEQ ID NO: 1122506 - RNA, 22 nt, Human
cauggccuugagugacugcacu

SEQ ID NO: 1122507 - RNA, 22 nt, Human
ucugaggccccugggcaggaug

SEQ ID NO: 1122508 - RNA, 22 nt, Human
ugcaggugcguuuucaagccuc

SEQ ID NO: 1122509 - RNA, 22 nt, Human
cagcugccaagaaucuuuucua

SEQ ID NO: 1122510 - RNA, 22 nt, Human
gcucccaccaggcagaccuacc

SEQ ID NO: 1122511 - RNA, 22 nt, Human
ccugccagggccuuggaagaaa

SEQ ID NO: 1122512 - RNA, 20 nt, Human
cagucccaauccagggccag

SEQ ID NO: 1122513 - RNA, 22 nt, Human
agcagcugagaugguaagauuc

SEQ ID NO: 1122514 - RNA, 22 nt, Human
uaaagguagcaugaaacugcaa

SEQ ID NO: 1122515 - RNA, 22 nt, Human
ucaguuuuucuauacuuuguag

SEQ ID NO: 1122516 - RNA, 22 nt, Human
aggcacugcagauuacaggcgc

SEQ ID NO: 1122517 - RNA, 22 nt, Human
acaccagggccuagccagggcg

SEQ ID NO: 1122518 - RNA, 22 nt, Human
cuggcagcgguuugcagccugg

SEQ ID NO: 1122519 - RNA, 17 nt, Human
uagcugccccgaaugcu

SEQ ID NO: 1122520 - RNA, 22 nt, Human
uuuuuccuaagcaguggagcug

SEQ ID NO: 1122521 - RNA, 22 nt, Human
aaaugcagauugucauucagga

SEQ ID NO: 1122522 - RNA, 22 nt, Human
ggauccuucuuugaccucacag

SEQ ID NO: 1122523 - RNA, 22 nt, Human
aucuucaaagcacaucguuugu

SEQ ID NO: 1122524 - RNA, 22 nt, Human
uauugaaaugaaugacagugau

SEQ ID NO: 1122525 - RNA, 22 nt, Human
uagggcagccacccaggcugcu

SEQ ID NO: 1122526 - RNA, 22 nt, Human
agaaugcuccagagcugaaaga

SEQ ID NO: 1122527 - RNA, 22 nt, Human
ggccugcuauuggugggcagac

SEQ ID NO: 1122528 - RNA, 22 nt, Human
ucccaggguccucuucuggaau

SEQ ID NO: 1122529 - RNA, 22 nt, Human
aggcacugacagauucuguguc

SEQ ID NO: 1122530 - RNA, 22 nt, Human
ggagcugggguuggcaucuucc

SEQ ID NO: 1122531 - RNA, 22 nt, Human
acauuucugcauguaggguaau

SEQ ID NO: 1122532 - RNA, 22 nt, Human
uuaucauugucgcagucuaauu

SEQ ID NO: 1122533 - RNA, 22 nt, Human
gugcagggagcccagaaggucc

SEQ ID NO: 1122534 - RNA, 22 nt, Human
gcagagcuucuguccuucagga

SEQ ID NO: 1122535 - RNA, 22 nt, Human
acccaggccugagagacaggag

SEQ ID NO: 1122536 - RNA, 22 nt, Human
uuaggcaauuugauuuuucaag

SEQ ID NO: 1122537 - RNA, 22 nt, Human
gcucuggagauggagccuugag

SEQ ID NO: 1122538 - RNA, 23 nt, Human
ggagugcaauggcgccaucucgg

SEQ ID NO: 1122539 - RNA, 22 nt, Human
ugcagcagcagggaggaggcuc

SEQ ID NO: 1122540 - RNA, 22 nt, Human
ccugagagcauuccacacugaa

SEQ ID NO: 1122541 - RNA, 22 nt, Human
acauacuuuuuaaaagauugcu

SEQ ID NO: 1122542 - RNA, 22 nt, Human
agagccagguguagucucggag

SEQ ID NO: 1122543 - RNA, 22 nt, Human
gagacacacacaggagguggca

SEQ ID NO: 1122544 - RNA, 22 nt, Human
uccuugaaugaauguucucucc

SEQ ID NO: 1122545 - RNA, 22 nt, Human
aaaguuugcaauuuauguuaau

SEQ ID NO: 1122546 - RNA, 22 nt, Human
ggaggccaucagggagggcauu

SEQ ID NO: 1122547 - RNA, 22 nt, Human
uuggcuucuggcagucuggacg

SEQ ID NO: 1122548 - RNA, 22 nt, Human
agugaaaugauaguguaaauac

SEQ ID NO: 1122549 - RNA, 22 nt, Human
ugugaagcuggauccuggagcu

SEQ ID NO: 1122550 - RNA, 22 nt, Human
cugaaggacuuggugauaguug

SEQ ID NO: 1122551 - RNA, 22 nt, Human
agagugaaguaauuguuaggau

SEQ ID NO: 1122552 - RNA, 22 nt, Human
caccugagugucaguauucuca

SEQ ID NO: 1122553 - RNA, 22 nt, Human
aaauguguuucuuugugaaugg

SEQ ID NO: 1122554 - RNA, 23 nt, Human
aggagccaggugcagcccuugug

SEQ ID NO: 1122555 - RNA, 22 nt, Human
aaagaauuuguacacccuacua

SEQ ID NO: 1122556 - RNA, 15 nt, Human
ugauuuccuacuaac

SEQ ID NO: 1122557 - RNA, 22 nt, Human
gccuggagcuacuggacacuga

SEQ ID NO: 1122558 - RNA, 22 nt, Human
auaagguaugaaaaguaaaugg

SEQ ID NO: 1122559 - RNA, 22 nt, Human
aggguauaaagagcaagcagaa

SEQ ID NO: 1122560 - RNA, 22 nt, Human
guggccugccagcagauggcgc

SEQ ID NO: 1122561 - RNA, 22 nt, Human
ccacagggcacagacaggaagc

SEQ ID NO: 1122562 - RNA, 22 nt, Human
ccaggcaucacgggcauguggc

SEQ ID NO: 1122563 - RNA, 22 nt, Human
ccugggaggcggagguugcagu

SEQ ID NO: 1122564 - RNA, 22 nt, Human
auguguagaacuguaaugccca

SEQ ID NO: 1122565 - RNA, 22 nt, Human
ccugcagaccacacucaguccu

SEQ ID NO: 1122566 - RNA, 22 nt, Human
ccagcucccugaagccuggucu

SEQ ID NO: 1122567 - RNA, 18 nt, Human
uguacaguuaugagcauu

SEQ ID NO: 1122568 - RNA, 22 nt, Human
aaguuugagaagcuuauagaua

SEQ ID NO: 1122569 - RNA, 22 nt, Human
ucuggcucugaauucacuucug

SEQ ID NO: 1122570 - RNA, 22 nt, Human
agagcugggacuuggacucaau

SEQ ID NO: 1122571 - RNA, 22 nt, Human
gccaugccugugucuccaggcc

SEQ ID NO: 1122572 - RNA, 22 nt, Human
gaggaaaauggaguguaauuaa

SEQ ID NO: 1122573 - RNA, 22 nt, Human
aguuauauaacuaucuagaugc

SEQ ID NO: 1122574 - RNA, 22 nt, Human
cugcagcuguagaggacagugg

SEQ ID NO: 1122575 - RNA, 22 nt, Human
ggcagagacuggguuggcagag

SEQ ID NO: 1122576 - RNA, 22 nt, Human
aggauccuuuuucugcuguuug

SEQ ID NO: 1122577 - RNA, 22 nt, Human
ggccgggcaggucucagccagc

SEQ ID NO: 1122578 - RNA, 22 nt, Human
agccaugcaccuuacucuugcu

SEQ ID NO: 1122579 - RNA, 20 nt, Human
cucucucuccauucccaggg

SEQ ID NO: 1122580 - RNA, 22 nt, Human
uggaaggagcuaaggaccuggg

SEQ ID NO: 1122581 - RNA, 22 nt, Human
aggucacauggauaaugaucag

SEQ ID NO: 1122582 - RNA, 22 nt, Human
cagggcugcuggccgugcccuc

SEQ ID NO: 1122583 - RNA, 22 nt, Human
ucuguucuauuggucuaugugu

SEQ ID NO: 1122584 - RNA, 22 nt, Human
agcagcucuguuuaccuggagg

SEQ ID NO: 1122585 - RNA, 22 nt, Human
cagaggcugcucuggguggcau

SEQ ID NO: 1122586 - RNA, 22 nt, Human
aggggccugguuggccucuguu

SEQ ID NO: 1122587 - RNA, 19 nt, Human
uaauccaaggcugcucuua

SEQ ID NO: 1122588 - RNA, 22 nt, Human
ugccugggccuucccaccucug

SEQ ID NO: 1122589 - RNA, 22 nt, Human
aauuucaauuacuuuugcacca

SEQ ID NO: 1122590 - RNA, 22 nt, Human
auucaguuaaaaacuguacuuc

SEQ ID NO: 1122591 - RNA, 22 nt, Human
agggccuggaacuggagaccac

SEQ ID NO: 1122592 - RNA, 22 nt, Human
cacacauugaauucauucuugu

SEQ ID NO: 1122593 - RNA, 22 nt, Human
uggcagcuccggguaggggcug

SEQ ID NO: 1122594 - RNA, 22 nt, Human
ugggacugcucuugcugggguc

SEQ ID NO: 1122595 - RNA, 22 nt, Human
agcugcucaggagagccagguc

SEQ ID NO: 1122596 - RNA, 22 nt, Human
caagaugaucccugaaggcagc

SEQ ID NO: 1122597 - RNA, 22 nt, Human
ggccacuccgcugcuacuggaa

SEQ ID NO: 1122598 - RNA, 22 nt, Human
agucugcacucagguggagguc

SEQ ID NO: 1122599 - RNA, 22 nt, Human
aaguguuaaaagauuaaaugcu

SEQ ID NO: 1122600 - RNA, 22 nt, Human
aggcaagggggcgccaccuucc

SEQ ID NO: 1122601 - RNA, 22 nt, Human
gugcuucucuucacacccaacu

SEQ ID NO: 1122602 - RNA, 22 nt, Human
ccugccugaaggucagccaccc

SEQ ID NO: 1122603 - RNA, 22 nt, Human
cuggaagguuccucccagcucc

SEQ ID NO: 1122604 - RNA, 22 nt, Human
gcccagcuuuuugaggcaggca

SEQ ID NO: 1122605 - RNA, 22 nt, Human
cacucugagaaguacaagcucc

SEQ ID NO: 1122606 - RNA, 22 nt, Human
uggaggaugagugugggcucug

SEQ ID NO: 1122607 - RNA, 22 nt, Human
gagccugggacugggggucaug

SEQ ID NO: 1122608 - RNA, 22 nt, Human
ugagccugguugcagugucugg

SEQ ID NO: 1122609 - RNA, 22 nt, Human
gggugggguguaucggauccua

SEQ ID NO: 1122610 - RNA, 22 nt, Human
ugccuguccugaggaugagggu

SEQ ID NO: 1122611 - RNA, 22 nt, Human
gaagccaagugcaaaugccuua

SEQ ID NO: 1122612 - RNA, 22 nt, Human
ucucuggaauuuugagagugac

SEQ ID NO: 1122613 - RNA, 22 nt, Human
agcugagcuaguaguuccagug

SEQ ID NO: 1122614 - RNA, 22 nt, Human
aacagacaacuccuguggcuca

SEQ ID NO: 1122615 - RNA, 22 nt, Human
ccagagugacgugaagugugaa

SEQ ID NO: 1122616 - RNA, 22 nt, Human
guuauguaugggggccuuauga

SEQ ID NO: 1122617 - RNA, 22 nt, Human
ucccuggguccugcuugcucuc

SEQ ID NO: 1122618 - RNA, 22 nt, Human
uggggugccgacagggagggca

SEQ ID NO: 1122619 - RNA, 22 nt, Human
uccuggaguugugcagugcaca

SEQ ID NO: 1122620 - RNA, 22 nt, Human
ggcucacgcaauuaucccggcc

SEQ ID NO: 1122621 - RNA, 22 nt, Human
aggccugcagcaggagcaaacc

SEQ ID NO: 1122622 - RNA, 22 nt, Human
cagcuggccugaucccuguggc

SEQ ID NO: 1122623 - RNA, 20 nt, Human
cacaggcuauaugagagcca

SEQ ID NO: 1122624 - RNA, 22 nt, Human
gcagggugccgacuucagggau

SEQ ID NO: 1122625 - RNA, 22 nt, Human
caggcugaucagggcugggaug

SEQ ID NO: 1122626 - RNA, 22 nt, Human
cauugcacugcagcccgggcaa

SEQ ID NO: 1122627 - RNA, 22 nt, Human
aguuuuaugcaguguucugaua

SEQ ID NO: 1122628 - RNA, 22 nt, Human
ucagccucucugaguccagacc

SEQ ID NO: 1122629 - RNA, 22 nt, Human
ugcuuaauauugugauguaaua

SEQ ID NO: 1122630 - RNA, 22 nt, Human
auacaagacucagcacagacgg

SEQ ID NO: 1122631 - RNA, 22 nt, Human
ggcacugacacuagcauggcac

SEQ ID NO: 1122632 - RNA, 22 nt, Human
ucacaacuugaagcugauuuaa

SEQ ID NO: 1122633 - RNA, 22 nt, Human
uguuuaagcugaugagguaucg

SEQ ID NO: 1122634 - RNA, 22 nt, Human
guccuggcuuaguucgcuguaa

SEQ ID NO: 1122635 - RNA, 22 nt, Human
auauguguauuugguuagccua

SEQ ID NO: 1122636 - RNA, 22 nt, Human
aaggcugccucugccagaggag

SEQ ID NO: 1122637 - RNA, 22 nt, Human
augacacaauuuuagagcugaa

SEQ ID NO: 1122638 - RNA, 22 nt, Human
agaggaugguugaggaagaccu

SEQ ID NO: 1122639 - RNA, 22 nt, Human
cuuuuuccagcuucaggguggg

SEQ ID NO: 1122640 - RNA, 19 nt, Human
auaaggcaauuggauuugg

SEQ ID NO: 1122641 - RNA, 22 nt, Human
cagcaauaaugucuacaaaucu

SEQ ID NO: 1122642 - RNA, 22 nt, Human
aggagcuguuuuguucagcaaa

SEQ ID NO: 1122643 - RNA, 22 nt, Human
cuucagaggggacucaaaguca

SEQ ID NO: 1122644 - RNA, 22 nt, Human
ucaaauaugugauagaagcuaa

SEQ ID NO: 1122645 - RNA, 22 nt, Human
cacugaaggaaggacuacugca

SEQ ID NO: 1122646 - RNA, 22 nt, Human
cacaggaggaggugcccgggcc

SEQ ID NO: 1122647 - RNA, 22 nt, Human
ccagcagcccacaggcgucccu

SEQ ID NO: 1122648 - RNA, 22 nt, Human
gccuggagaccugcuccucuac

SEQ ID NO: 1122649 - RNA, 22 nt, Human
gcugccucaggcaccuccuggc

SEQ ID NO: 1122650 - RNA, 22 nt, Human
gggccaggucggugaaugguca

SEQ ID NO: 1122651 - RNA, 22 nt, Human
cugcuuuggcucagugacauca

SEQ ID NO: 1122652 - RNA, 22 nt, Human
uuuccuaugauauucuaugugu

SEQ ID NO: 1122653 - RNA, 22 nt, Human
cagcugagaccagaaugcaggu

SEQ ID NO: 1122654 - RNA, 22 nt, Human
ggcagcucugaugaugcucugg

SEQ ID NO: 1122655 - RNA, 22 nt, Human
uuuaccaagcuuuaauuacaua

SEQ ID NO: 1122656 - RNA, 22 nt, Human
guccucuggugaaagcauuccc

SEQ ID NO: 1122657 - RNA, 22 nt, Human
agggggcaucagguccuggcuc

SEQ ID NO: 1122658 - RNA, 22 nt, Human
uaggccaggacagagcuuccag

SEQ ID NO: 1122659 - RNA, 22 nt, Human
cuggagccuagguugaccuggg

SEQ ID NO: 1122660 - RNA, 22 nt, Human
agcccagguugaggcugcagug

SEQ ID NO: 1122661 - RNA, 22 nt, Human
agaacuguccuuggaggagagu

SEQ ID NO: 1122662 - RNA, 22 nt, Human
uggcccgaccucugcucaugca

SEQ ID NO: 1122663 - RNA, 22 nt, Human
gaaaggucaguuccacuuccau

SEQ ID NO: 1122664 - RNA, 22 nt, Human
gcccagcugcacccuggugggu

SEQ ID NO: 1122665 - RNA, 22 nt, Human
ugcaggugguuuggacacugcu

SEQ ID NO: 1122666 - RNA, 22 nt, Human
ggaaccaggaguuacacgaguu

SEQ ID NO: 1122667 - RNA, 22 nt, Human
uagugaaacaguuaucaaucug

SEQ ID NO: 1122668 - RNA, 22 nt, Human
uagauuucucauucauagauug

SEQ ID NO: 1122669 - RNA, 22 nt, Human
aaggcacugaacuuaaauucug

SEQ ID NO: 1122670 - RNA, 22 nt, Human
ucacaggacccugaggguggcg

SEQ ID NO: 1122671 - RNA, 22 nt, Human
ucagcaaugagaacuggcauuu

SEQ ID NO: 1122672 - RNA, 22 nt, Human
auauuucuugagcaccugguau

SEQ ID NO: 1122673 - RNA, 22 nt, Human
agucagugaaaacuagaauguu

SEQ ID NO: 1122674 - RNA, 22 nt, Human
uccucagaugcucuuggacgcc

SEQ ID NO: 1122675 - RNA, 22 nt, Human
cuggacagaaagggcugcugug

SEQ ID NO: 1122676 - RNA, 22 nt, Human
cacaggguuguucugaggauuc

SEQ ID NO: 1122677 - RNA, 22 nt, Human
gauuuccuaauguggaucucug

SEQ ID NO: 1122678 - RNA, 22 nt, Human
ugggcccugacuucaagcaucc

SEQ ID NO: 1122679 - RNA, 22 nt, Human
gugcaugugcauccauguguac

SEQ ID NO: 1122680 - RNA, 22 nt, Human
cacagaaaaaggcuugaaaauc

SEQ ID NO: 1122681 - RNA, 22 nt, Human
aauucuagcauugugaaaauau

SEQ ID NO: 1122682 - RNA, 22 nt, Human
gaggaugugucuggucugggca

SEQ ID NO: 1122683 - RNA, 22 nt, Human
gacagcagggacauguaggaag

SEQ ID NO: 1122684 - RNA, 22 nt, Human
ccaggaagccucagaugcugag

SEQ ID NO: 1122685 - RNA, 22 nt, Human
acaggcucucagccaguuggca

SEQ ID NO: 1122686 - RNA, 22 nt, Human
ugagccuggagucguggagggg

SEQ ID NO: 1122687 - RNA, 19 nt, Human
gcuggcagauguggccgug

SEQ ID NO: 1122688 - RNA, 22 nt, Human
uuuauguaaguggaaugaugcc

SEQ ID NO: 1122689 - RNA, 22 nt, Human
ccuggcucucugcagauccugg

SEQ ID NO: 1122690 - RNA, 22 nt, Human
agauacaucuugaacuucuaga

SEQ ID NO: 1122691 - RNA, 22 nt, Human
gggguggauuccuacaggucca

SEQ ID NO: 1122692 - RNA, 22 nt, Human
uguauuuucugaagauaaucaa

SEQ ID NO: 1122693 - RNA, 22 nt, Human
uugcucugacuggagugcagug

SEQ ID NO: 1122694 - RNA, 22 nt, Human
aaucaguucuacaucuuaucca

SEQ ID NO: 1122695 - RNA, 22 nt, Human
gcuguccucuuggacucagggc

SEQ ID NO: 1122696 - RNA, 22 nt, Human
agggaaaggcugaugcuguggg

SEQ ID NO: 1122697 - RNA, 22 nt, Human
agguggggccaaaugcuacagu

SEQ ID NO: 1122698 - RNA, 22 nt, Human
gagacagaguuucacucuuguu

SEQ ID NO: 1122699 - RNA, 22 nt, Human
gccuggaguuguggugaagcca

SEQ ID NO: 1122700 - RNA, 22 nt, Human
aaaguguaaggaauuuaaguaa

SEQ ID NO: 1122701 - RNA, 22 nt, Human
uaggcagggauuaggguugauu

SEQ ID NO: 1122702 - RNA, 22 nt, Human
aaggucauuguugcauguucuc

SEQ ID NO: 1122703 - RNA, 22 nt, Human
gucaggauuuuaaaaucccagu

SEQ ID NO: 1122704 - RNA, 22 nt, Human
aaaucaguuggaacacaagcag

SEQ ID NO: 1122705 - RNA, 17 nt, Human
gcagugaaaagagauca

SEQ ID NO: 1122706 - RNA, 22 nt, Human
ucccaagugucuuggaccaggg

SEQ ID NO: 1122707 - RNA, 22 nt, Human
uugcauugaucccagcuugggc

SEQ ID NO: 1122708 - RNA, 22 nt, Human
augugugugaugggcgccgcca

SEQ ID NO: 1122709 - RNA, 22 nt, Human
ugccucugguuaucugguaccu

SEQ ID NO: 1122710 - RNA, 22 nt, Human
ucucaggcuaccuugcacaagg

SEQ ID NO: 1122711 - RNA, 22 nt, Human
ggccuggaagaggacagagaaa

SEQ ID NO: 1122712 - RNA, 22 nt, Human
caggaggcccaaagggcgcaga

SEQ ID NO: 1122713 - RNA, 22 nt, Human
uuucaaagguggaagagugaau

SEQ ID NO: 1122714 - RNA, 22 nt, Human
ucacagugaugacgugggagca

SEQ ID NO: 1122715 - RNA, 22 nt, Human
uuccauuguuucugucuucacu

SEQ ID NO: 1122716 - RNA, 22 nt, Human
ugcagccaggaaauauuugcug

SEQ ID NO: 1122717 - RNA, 22 nt, Human
guguuuccaguucagaaagcaa

SEQ ID NO: 1122718 - RNA, 22 nt, Human
uaacagaagaugaaacuucuuu

SEQ ID NO: 1122719 - RNA, 22 nt, Human
aaaaacugcaauuacuuuuguc

SEQ ID NO: 1122720 - RNA, 18 nt, Human
aaaaugcaggcgacaugg

SEQ ID NO: 1122721 - RNA, 22 nt, Human
uaugcacacauuagcacagggu

SEQ ID NO: 1122722 - RNA, 19 nt, Human
ggcucucccuugagagagc

SEQ ID NO: 1122723 - RNA, 20 nt, Human
agcccuguuuccuggagaga

SEQ ID NO: 1122724 - RNA, 22 nt, Human
uauucacagcugccgcacucag

SEQ ID NO: 1122725 - RNA, 22 nt, Human
uggcucaguggcagccgcagcu

SEQ ID NO: 1122726 - RNA, 22 nt, Human
cacacaugaaucccuaguaccu

SEQ ID NO: 1122727 - RNA, 22 nt, Human
aggaaaaauaaggcagcagggc

SEQ ID NO: 1122728 - RNA, 22 nt, Human
acucugagcaucccaagucuua

SEQ ID NO: 1122729 - RNA, 22 nt, Human
uaggaaaagucuagauugauga

SEQ ID NO: 1122730 - RNA, 22 nt, Human
ccuggccacucagguguggggc

SEQ ID NO: 1122731 - RNA, 21 nt, Human
uuaagagcuuagcaguaggcc

SEQ ID NO: 1122732 - RNA, 22 nt, Human
gaggccuggaccagccacagag

SEQ ID NO: 1122733 - RNA, 22 nt, Human
ccagccugguucagaauuggcu

SEQ ID NO: 1122734 - RNA, 22 nt, Human
aaggguggauuucugagcucua

SEQ ID NO: 1122735 - RNA, 21 nt, Human
ugcagccauucagcccuaugc

SEQ ID NO: 1122736 - RNA, 22 nt, Human
agcagggggaguuagacuagau

SEQ ID NO: 1122737 - RNA, 22 nt, Human
cccuggaggcggauguugcagu

SEQ ID NO: 1122738 - RNA, 22 nt, Human
ugccucuguugagccuuggcug

SEQ ID NO: 1122739 - RNA, 22 nt, Human
acagcuugcaauggcuuucaac

SEQ ID NO: 1122740 - RNA, 22 nt, Human
ggcucugcgcgguaaagugacu

SEQ ID NO: 1122741 - RNA, 22 nt, Human
aggcagcagggccacuggcuga

SEQ ID NO: 1122742 - RNA, 22 nt, Human
cagggcccaagacacaaugagg

SEQ ID NO: 1122743 - RNA, 22 nt, Human
uugaggagucaggggcacggaa

SEQ ID NO: 1122744 - RNA, 22 nt, Human
ugccuaggaaaccucaugcuuc

SEQ ID NO: 1122745 - RNA, 21 nt, Human
uggcacugcuuagcagguucc

SEQ ID NO: 1122746 - RNA, 22 nt, Human
cuguacaggugaggagggggcu

SEQ ID NO: 1122747 - RNA, 22 nt, Human
aagauuuccauuucuagcucau

SEQ ID NO: 1122748 - RNA, 22 nt, Human
aggaggcuguggagcacuccau

SEQ ID NO: 1122749 - RNA, 22 nt, Human
aaaucaguucacguucugaggu

SEQ ID NO: 1122750 - RNA, 22 nt, Human
uggcuuccacugugugcccccu

SEQ ID NO: 1122751 - RNA, 22 nt, Human
gcucccagcauugcugcugaau

SEQ ID NO: 1122752 - RNA, 22 nt, Human
agggacacacuccaguguuauu

SEQ ID NO: 1122753 - RNA, 18 nt, Human
uaaguaaggucauauggg

SEQ ID NO: 1122754 - RNA, 22 nt, Human
acauugaucagccucccaugca

SEQ ID NO: 1122755 - RNA, 21 nt, Human
ugauuuccagaaaauuggccc

SEQ ID NO: 1122756 - RNA, 22 nt, Human
uggccugguaccacauagauuu

SEQ ID NO: 1122757 - RNA, 20 nt, Human
cugggaggucuuccaaauca

SEQ ID NO: 1122758 - RNA, 22 nt, Human
accugagggcccaaacuuggua

SEQ ID NO: 1122759 - RNA, 16 nt, Human
gagggcagaggcggaa

SEQ ID NO: 1122760 - RNA, 22 nt, Human
cagggcagaacauauagauagu

SEQ ID NO: 1122761 - RNA, 22 nt, Human
uggggacacagagguucguugg

SEQ ID NO: 1122762 - RNA, 22 nt, Human
gcuggggucugugaggagggcu

SEQ ID NO: 1122763 - RNA, 22 nt, Human
uggcagcacaagguggcccaug

SEQ ID NO: 1122764 - RNA, 20 nt, Human
cugcugugugugccucagcc

SEQ ID NO: 1122765 - RNA, 23 nt, Human
gagcugggauacaggcuuacugc

SEQ ID NO: 1122766 - RNA, 22 nt, Human
caaaggcaacauauacuuguuu

SEQ ID NO: 1122767 - RNA, 23 nt, Human
cagagcuggcucagagcugccug

SEQ ID NO: 1122768 - RNA, 22 nt, Human
uuuauuauucucuggagaaugu

SEQ ID NO: 1122769 - RNA, 22 nt, Human
uggagcugaacuuugaggccag

SEQ ID NO: 1122770 - RNA, 22 nt, Human
ugagagugauugguucgaaugu

SEQ ID NO: 1122771 - RNA, 22 nt, Human
gcagcuggagcaucuucucauc

SEQ ID NO: 1122772 - RNA, 22 nt, Human
gccuccccugcaauuguccuug

SEQ ID NO: 1122773 - RNA, 22 nt, Human
uagaacagaguuccagugauca

SEQ ID NO: 1122774 - RNA, 22 nt, Human
gcugagguaggagguugcagug

SEQ ID NO: 1122775 - RNA, 22 nt, Human
agaauucuguucuucgggugug

SEQ ID NO: 1122776 - RNA, 22 nt, Human
uggcagcaauuagcuagagcug

SEQ ID NO: 1122777 - RNA, 23 nt, Human
cuggcucauccugguugcagugg

SEQ ID NO: 1122778 - RNA, 22 nt, Human
cagagccaggguugcaccccug

SEQ ID NO: 1122779 - RNA, 22 nt, Human
uacaaagugagcaaccucuuuu

SEQ ID NO: 1122780 - RNA, 22 nt, Human
gcagggcuauuggaaggagaug

SEQ ID NO: 1122781 - RNA, 22 nt, Human
aagcuuccugaaugcucauuua

SEQ ID NO: 1122782 - RNA, 22 nt, Human
uacuuuuagccuauuugauucu

SEQ ID NO: 1122783 - RNA, 22 nt, Human
gagacugcauuguccaaggguu

SEQ ID NO: 1122784 - RNA, 22 nt, Human
aaagguuaguucuuagaagugc

SEQ ID NO: 1122785 - RNA, 22 nt, Human
uuguuucaugaguguaaaggga

SEQ ID NO: 1122786 - RNA, 21 nt, Human
ucuuuccugcccaguugcccu

SEQ ID NO: 1122787 - RNA, 22 nt, Human
ggagaaggaagaaagcuacuau

SEQ ID NO: 1122788 - RNA, 22 nt, Human
cugcagccuaggugcagcuggg

SEQ ID NO: 1122789 - RNA, 22 nt, Human
cagcuuggcuuccgcuuuacug

SEQ ID NO: 1122790 - RNA, 22 nt, Human
acuuugugcccaacagaaagaa

SEQ ID NO: 1122791 - RNA, 22 nt, Human
gaauuguacgcuuuacauaggu

SEQ ID NO: 1122792 - RNA, 22 nt, Human
uauauagaaaagcagauguugg

SEQ ID NO: 1122793 - RNA, 21 nt, Human
cauugucgacauuuuccccuc

SEQ ID NO: 1122794 - RNA, 22 nt, Human
uguguguauaugcauuuaucua

SEQ ID NO: 1122795 - RNA, 17 nt, Human
gaaaguuucucucucuu

SEQ ID NO: 1122796 - RNA, 22 nt, Human
gcaggaaagguugagacuuugc

SEQ ID NO: 1122797 - RNA, 18 nt, Human
ucugucucuguccuugcu

SEQ ID NO: 1122798 - RNA, 22 nt, Human
uaugcacaguuacaagaauauc

SEQ ID NO: 1122799 - RNA, 22 nt, Human
gcacagggcaacaggucuguua

SEQ ID NO: 1122800 - RNA, 22 nt, Human
acucugccuuucagcagaugaa

SEQ ID NO: 1122801 - RNA, 22 nt, Human
ucagcugccuuucccaugcuag

SEQ ID NO: 1122802 - RNA, 22 nt, Human
guccauggcagagcccuucugc

SEQ ID NO: 1122803 - RNA, 22 nt, Human
uagcagcugugaguaaaagcca

SEQ ID NO: 1122804 - RNA, 22 nt, Human
aggcacugagaggcuguguugc

SEQ ID NO: 1122805 - RNA, 22 nt, Human
ugcaguggaaucuggagagcag

SEQ ID NO: 1122806 - RNA, 22 nt, Human
aaaguggucaccuucucauuuc

SEQ ID NO: 1122807 - RNA, 22 nt, Human
gcugaagcccacguggcuugua

SEQ ID NO: 1122808 - RNA, 22 nt, Human
acgcagaagggccuggcgugcc

SEQ ID NO: 1122809 - RNA, 22 nt, Human
aaguucaagucugcaucuuuuu

SEQ ID NO: 1122810 - RNA, 18 nt, Human
cauuaugugguuauagaa

SEQ ID NO: 1122811 - RNA, 22 nt, Human
uuguuacaucuuauguaagugg

SEQ ID NO: 1122812 - RNA, 20 nt, Human
ggcagcaggaguuuccucuu

SEQ ID NO: 1122813 - RNA, 22 nt, Human
cacagcugaaguagccaugugg

SEQ ID NO: 1122814 - RNA, 22 nt, Human
gagucacaaagccuuucuuauu

SEQ ID NO: 1122815 - RNA, 18 nt, Human
ggcucaggcuauccuaac

SEQ ID NO: 1122816 - RNA, 22 nt, Human
uggauaaacucacuguaaguug

SEQ ID NO: 1122817 - RNA, 22 nt, Human
gucugucaucugagauggagug

SEQ ID NO: 1122818 - RNA, 18 nt, Human
cuccagggaacucaguca

SEQ ID NO: 1122819 - RNA, 22 nt, Human
ugcugccuccaacuccugggcu

SEQ ID NO: 1122820 - RNA, 22 nt, Human
gugucaugggguuuguuauaca

SEQ ID NO: 1122821 - RNA, 23 nt, Human
caugccaguuugugcaggcagau

SEQ ID NO: 1122822 - RNA, 22 nt, Human
agagauucauguuuacuguagg

SEQ ID NO: 1122823 - RNA, 22 nt, Human
uccuucagccaugggcucucca

SEQ ID NO: 1122824 - RNA, 20 nt, Human
aggcacuggggauagguaag

SEQ ID NO: 1122825 - RNA, 22 nt, Human
acagcacaaucugagucccaga

SEQ ID NO: 1122826 - RNA, 22 nt, Human
cuggcugcgucugcucugacag

SEQ ID NO: 1122827 - RNA, 22 nt, Human
ugcaauaacuacuuuaauguug

SEQ ID NO: 1122828 - RNA, 22 nt, Human
augucacagucugacucaguga

SEQ ID NO: 1122829 - RNA, 22 nt, Human
acagccuguuugaucuggugcu

SEQ ID NO: 1122830 - RNA, 22 nt, Human
uccauuuucaucucauguauaa

SEQ ID NO: 1122831 - RNA, 22 nt, Human
ccucuggguaucuguggaagua

SEQ ID NO: 1122832 - RNA, 22 nt, Human
cauggcaggaggcugcuggcag

SEQ ID NO: 1122833 - RNA, 22 nt, Human
gagagugaggcaucaggggcag

SEQ ID NO: 1122834 - RNA, 22 nt, Human
auagauacauuagguaacuugu

SEQ ID NO: 1122835 - RNA, 22 nt, Human
gaaggcaggcuucugauuaggu

SEQ ID NO: 1122836 - RNA, 22 nt, Human
cuugcaggauuuugcugcugua

SEQ ID NO: 1122837 - RNA, 22 nt, Human
gcccucugcuggccucaccucg

SEQ ID NO: 1122838 - RNA, 22 nt, Human
ccaggaguuugaggcugcagug

SEQ ID NO: 1122839 - RNA, 20 nt, Human
ucugaggcugagcucuacuu

SEQ ID NO: 1122840 - RNA, 22 nt, Human
ucagcuggcaguucagaggcug

SEQ ID NO: 1122841 - RNA, 22 nt, Human
ucuccuucgaggcccagcuccc

SEQ ID NO: 1122842 - RNA, 22 nt, Human
cagcccagcagucuuagccugc

SEQ ID NO: 1122843 - RNA, 22 nt, Human
acuaaggaauaugacaaacuca

SEQ ID NO: 1122844 - RNA, 22 nt, Human
accugccucagugcagcuggau

SEQ ID NO: 1122845 - RNA, 22 nt, Human
gaguguuccagaaacuggcccu

SEQ ID NO: 1122846 - RNA, 22 nt, Human
gcagggugaaggucacauagaa

SEQ ID NO: 1122847 - RNA, 22 nt, Human
ggagcugcuccuucagccaagu

SEQ ID NO: 1122848 - RNA, 23 nt, Human
uggcagcuguguaagagaaagca

SEQ ID NO: 1122849 - RNA, 22 nt, Human
gcugccuggaauaacggcuggc

SEQ ID NO: 1122850 - RNA, 22 nt, Human
caagggcuucaaguggccaaga

SEQ ID NO: 1122851 - RNA, 22 nt, Human
agguggggaggagugucucuuu

SEQ ID NO: 1122852 - RNA, 22 nt, Human
augaaacaugagaaauggagag

SEQ ID NO: 1122853 - RNA, 22 nt, Human
ucccaggacaggccacauggaa

SEQ ID NO: 1122854 - RNA, 22 nt, Human
ucugaggcuauguucaggcuaa

SEQ ID NO: 1122855 - RNA, 22 nt, Human
cagggacagccuugggguggcg

SEQ ID NO: 1122856 - RNA, 22 nt, Human
ugcccaaguccuccaccgaggu

SEQ ID NO: 1122857 - RNA, 22 nt, Human
aaguuuguggucauuuauuaua

SEQ ID NO: 1122858 - RNA, 22 nt, Human
gauuuccuugcauauugguaau

SEQ ID NO: 1122859 - RNA, 22 nt, Human
gguucacacuaagcuuaagugg

SEQ ID NO: 1122860 - RNA, 23 nt, Human
cagaccuggcagucauccucaac

SEQ ID NO: 1122861 - RNA, 22 nt, Human
cuggagccauguauagccuaug

SEQ ID NO: 1122862 - RNA, 22 nt, Human
augucacagcucccauuccucc

SEQ ID NO: 1122863 - RNA, 22 nt, Human
gcaaaugcuaaaguguagagac

SEQ ID NO: 1122864 - RNA, 22 nt, Human
aaacuguauauuuauggcaugu

SEQ ID NO: 1122865 - RNA, 22 nt, Human
aggcugggcuccgcccaacucc

SEQ ID NO: 1122866 - RNA, 22 nt, Human
auaaagaggauguauuuacagc

SEQ ID NO: 1122867 - RNA, 22 nt, Human
ggcacagggagccgcaguugca

SEQ ID NO: 1122868 - RNA, 23 nt, Human
uccucccaaauuucagccucauu

SEQ ID NO: 1122869 - RNA, 22 nt, Human
ggacuggacucucaggcucaca

SEQ ID NO: 1122870 - RNA, 22 nt, Human
aggagcugcuuaaaugguuggu

SEQ ID NO: 1122871 - RNA, 22 nt, Human
gugcauuggugcgccacuucac

SEQ ID NO: 1122872 - RNA, 22 nt, Human
uagcugugagcacccaggcugu

SEQ ID NO: 1122873 - RNA, 23 nt, Human
uagggcagcugggagggacaugc

SEQ ID NO: 1122874 - RNA, 22 nt, Human
uauuuugucuucugcucaucac

SEQ ID NO: 1122875 - RNA, 22 nt, Human
uggcagagucucuccuuuccag

SEQ ID NO: 1122876 - RNA, 22 nt, Human
uggccuggaaaaaugcagaugg

SEQ ID NO: 1122877 - RNA, 20 nt, Human
aggagccauugacugcagca

SEQ ID NO: 1122878 - RNA, 22 nt, Human
guuuuccuucucagccauugcc

SEQ ID NO: 1122879 - RNA, 22 nt, Human
uacagaaaaacuggcauugaag

SEQ ID NO: 1122880 - RNA, 22 nt, Human
aaaaauaggucaaccguguaug

SEQ ID NO: 1122881 - RNA, 23 nt, Human
agaaaagcuuggacacauggccu

SEQ ID NO: 1122882 - RNA, 18 nt, Human
gcuccuggaccaggucac

SEQ ID NO: 1122883 - RNA, 22 nt, Human
acuuugaaacuaaaauucauua

SEQ ID NO: 1122884 - RNA, 22 nt, Human
uggcuggacagugggcagugga

SEQ ID NO: 1122885 - RNA, 22 nt, Human
accugccuucucaaggacauga

SEQ ID NO: 1122886 - RNA, 22 nt, Human
aaguucaagcucugccuaaaau

SEQ ID NO: 1122887 - RNA, 22 nt, Human
uguggccucaaggcugcccuca

SEQ ID NO: 1122888 - RNA, 22 nt, Human
cuggcagguggauggggacucc

SEQ ID NO: 1122889 - RNA, 23 nt, Human
gccugggacucaggaggagcuca

SEQ ID NO: 1122890 - RNA, 22 nt, Human
ggcugccuccucgagacaggau

SEQ ID NO: 1122891 - RNA, 22 nt, Human
aggcacugugcuucuuauaugu

SEQ ID NO: 1122892 - RNA, 22 nt, Human
uguguguguuuacaguuucuca

SEQ ID NO: 1122893 - RNA, 17 nt, Human
cacaggugugguuugag

SEQ ID NO: 1122894 - RNA, 18 nt, Human
cuuuaugugcagagcuuu

SEQ ID NO: 1122895 - RNA, 22 nt, Human
ccagaggucuccugcacgggau

SEQ ID NO: 1122896 - RNA, 22 nt, Human
uggcuuccuggacagaugcggu

SEQ ID NO: 1122897 - RNA, 20 nt, Human
uacauucaaaacaaacucug

SEQ ID NO: 1122898 - RNA, 22 nt, Human
gucucagggacugcuucugggg

SEQ ID NO: 1122899 - RNA, 22 nt, Human
ggcucuggagacauguggagag

SEQ ID NO: 1122900 - RNA, 17 nt, Human
gcuuccugugcugggga

SEQ ID NO: 1122901 - RNA, 22 nt, Human
agagcuuauaucuuggccaucc

SEQ ID NO: 1122902 - RNA, 22 nt, Human
uggcugggagcuggaacugggc

SEQ ID NO: 1122903 - RNA, 21 nt, Human
cacugcagccuugaccugggc

SEQ ID NO: 1122904 - RNA, 22 nt, Human
uguguauucagcaagcgaaaca

SEQ ID NO: 1122905 - RNA, 22 nt, Human
ugcagugggccggaggccaggg

SEQ ID NO: 1122906 - RNA, 22 nt, Human
agagaaggucacuaaggaccca

SEQ ID NO: 1122907 - RNA, 22 nt, Human
ucugggcugggagcguguggac

SEQ ID NO: 1122908 - RNA, 22 nt, Human
caggaguggugugagggacucc

SEQ ID NO: 1122909 - RNA, 22 nt, Human
ccugagacaugaaccaggcucc

SEQ ID NO: 1122910 - RNA, 22 nt, Human
ucucugguggcuccaucaguag

SEQ ID NO: 1122911 - RNA, 21 nt, Human
ucucugggaggacuugugaga

SEQ ID NO: 1122912 - RNA, 22 nt, Human
auucuuggagcagucaaagaag

SEQ ID NO: 1122913 - RNA, 22 nt, Human
aagaacagguucuagaaccauu

SEQ ID NO: 1122914 - RNA, 22 nt, Human
augccuguaaucccagugcuuu

SEQ ID NO: 1122915 - RNA, 22 nt, Human
cugaagccacgauagcuuccua

SEQ ID NO: 1122916 - RNA, 22 nt, Human
gagcagaacaggccggguggga

SEQ ID NO: 1122917 - RNA, 22 nt, Human
agucucaggcagaggaaggcua

SEQ ID NO: 1122918 - RNA, 20 nt, Human
cuggguggcaagcaaggggg

SEQ ID NO: 1122919 - RNA, 22 nt, Human
uuucacauacaguguauaguag

SEQ ID NO: 1122920 - RNA, 22 nt, Human
augucccaagauacagcuagag

SEQ ID NO: 1122921 - RNA, 22 nt, Human
uagaaaauagggccuguggagc

SEQ ID NO: 1122922 - RNA, 18 nt, Human
gcucugcccaggcugccc

SEQ ID NO: 1122923 - RNA, 22 nt, Human
ggaagagagggcugggccucaa

SEQ ID NO: 1122924 - RNA, 22 nt, Human
aauguuuucauuauccuaacug

SEQ ID NO: 1122925 - RNA, 22 nt, Human
uaaggcacccuucugaguagag

SEQ ID NO: 1122926 - RNA, 22 nt, Human
cucagcuggcaauucuggcucc

SEQ ID NO: 1122927 - RNA, 22 nt, Human
ggcucugccugcccagcagcac

SEQ ID NO: 1122928 - RNA, 22 nt, Human
ugucagggcaugcgguccagcc

SEQ ID NO: 1122929 - RNA, 22 nt, Human
uaaagguaugucuuaaucaaac

SEQ ID NO: 1122930 - RNA, 22 nt, Human
augugugcaaugcuauuuuggc

SEQ ID NO: 1122931 - RNA, 22 nt, Human
gccauccucugagcacuaggca

SEQ ID NO: 1122932 - RNA, 22 nt, Human
ggaggagacccugugucaguuu

SEQ ID NO: 1122933 - RNA, 22 nt, Human
ucccagagaaagucaaggucuu

SEQ ID NO: 1122934 - RNA, 22 nt, Human
ugucugucugcaagccagaaag

SEQ ID NO: 1122935 - RNA, 22 nt, Human
ugcuuccuucccguucuucucc

SEQ ID NO: 1122936 - RNA, 22 nt, Human
agggccugggguagcuuacugc

SEQ ID NO: 1122937 - RNA, 22 nt, Human
gcucugucuucagcacacagua

SEQ ID NO: 1122938 - RNA, 22 nt, Human
ucucucuucagagauaccuugc

SEQ ID NO: 1122939 - RNA, 22 nt, Human
agaaugcaagauaaacuuuauu

SEQ ID NO: 1122940 - RNA, 22 nt, Human
gcaggccucuguugagggccuu

SEQ ID NO: 1122941 - RNA, 22 nt, Human
cuggcuggucaucagcaguacg

SEQ ID NO: 1122942 - RNA, 22 nt, Human
ucaaggcuaaacuuucagagua

SEQ ID NO: 1122943 - RNA, 20 nt, Human
ucacaggggaccaggagcag

SEQ ID NO: 1122944 - RNA, 22 nt, Human
ucugggcagcagcagcuaguag

SEQ ID NO: 1122945 - RNA, 22 nt, Human
cagggccuuauccugccauuga

SEQ ID NO: 1122946 - RNA, 22 nt, Human
ccugaagaugcuguggccuggu

SEQ ID NO: 1122947 - RNA, 22 nt, Human
uccagggaagagcagaggcuac

SEQ ID NO: 1122948 - RNA, 22 nt, Human
ucagagaacacagaggugaugu

SEQ ID NO: 1122949 - RNA, 22 nt, Human
ugggcagaucuuugguggcuag

SEQ ID NO: 1122950 - RNA, 22 nt, Human
gcccuuccaacccagagggcaa

SEQ ID NO: 1122951 - RNA, 22 nt, Human
agcagccagagaaugaugcagu

SEQ ID NO: 1122952 - RNA, 22 nt, Human
agcucagggcgaucugucucgg

SEQ ID NO: 1122953 - RNA, 22 nt, Human
cugccagcacugccuccugagg

SEQ ID NO: 1122954 - RNA, 22 nt, Human
ugaagcaggaucguuugcuuca

SEQ ID NO: 1122955 - RNA, 22 nt, Human
agggcagagagaugaaugggau

SEQ ID NO: 1122956 - RNA, 22 nt, Human
cagcuggcagcccuggcccugc

SEQ ID NO: 1122957 - RNA, 22 nt, Human
acugaaggcuuaacucuuucau

SEQ ID NO: 1122958 - RNA, 22 nt, Human
agcccucauggaacagcuccua

SEQ ID NO: 1122959 - RNA, 22 nt, Human
ugaggccagucucaucacaggc

SEQ ID NO: 1122960 - RNA, 22 nt, Human
ggcaggagauaaaauauuaguu

SEQ ID NO: 1122961 - RNA, 18 nt, Human
gaugggagcaagagaaga

SEQ ID NO: 1122962 - RNA, 21 nt, Human
gccaccucgucucggagcagc

SEQ ID NO: 1122963 - RNA, 22 nt, Human
cagagugagggccugcaccugc

SEQ ID NO: 1122964 - RNA, 22 nt, Human
ccuauugacaauucucuucucc

SEQ ID NO: 1122965 - RNA, 22 nt, Human
ucauuacagagauauaaucuac

SEQ ID NO: 1122966 - RNA, 22 nt, Human
gccucugcggggcccgagcccg

SEQ ID NO: 1122967 - RNA, 22 nt, Human
uaaauguauaggcacuaaaccu

SEQ ID NO: 1122968 - RNA, 22 nt, Human
ucacaggguuuggaagccuccu

SEQ ID NO: 1122969 - RNA, 22 nt, Human
cugcucugugguccaugagaca

SEQ ID NO: 1122970 - RNA, 22 nt, Human
ucaaacuagccugacugguauu

SEQ ID NO: 1122971 - RNA, 22 nt, Human
agccuggcccugcugaacucug

SEQ ID NO: 1122972 - RNA, 22 nt, Human
gucccugcaucaccacgggacu

SEQ ID NO: 1122973 - RNA, 22 nt, Human
agagccaggcggcugggcaccu

SEQ ID NO: 1122974 - RNA, 22 nt, Human
acagguggccccgagggagugg

SEQ ID NO: 1122975 - RNA, 22 nt, Human
aacaaaugauaccaguucucaa

SEQ ID NO: 1122976 - RNA, 22 nt, Human
aaggccugaacaugaggagaug

SEQ ID NO: 1122977 - RNA, 22 nt, Human
uaaguucagaguucucauuugu

SEQ ID NO: 1122978 - RNA, 21 nt, Human
cugcucuggggaccggcugug

SEQ ID NO: 1122979 - RNA, 20 nt, Human
agccugccagcuggcccaga

SEQ ID NO: 1122980 - RNA, 22 nt, Human
gggcucuggauggagccugcag

SEQ ID NO: 1122981 - RNA, 22 nt, Human
gacaugcaacaauuuggcauuu

SEQ ID NO: 1122982 - RNA, 21 nt, Human
ucuggagcccuaagcugagaa

SEQ ID NO: 1122983 - RNA, 21 nt, Human
cccuguguuccacagcagaca

SEQ ID NO: 1122984 - RNA, 22 nt, Human
ggagcagagcucuucaucugca

SEQ ID NO: 1122985 - RNA, 18 nt, Human
ugaacagaugaguugaag

SEQ ID NO: 1122986 - RNA, 22 nt, Human
uucauauauaugcacuacguac

SEQ ID NO: 1122987 - RNA, 22 nt, Human
cuggcugcuuguagacucgacu

SEQ ID NO: 1122988 - RNA, 22 nt, Human
uggcacugggaugcuacuguua

SEQ ID NO: 1122989 - RNA, 22 nt, Human
ucugggagcacacgcagugauc

SEQ ID NO: 1122990 - RNA, 22 nt, Human
ggugcagaucuuucucuucagg

SEQ ID NO: 1122991 - RNA, 22 nt, Human
uccagccaacugccuagggagc

SEQ ID NO: 1122992 - RNA, 22 nt, Human
gcugucuggguugagggcccug

SEQ ID NO: 1122993 - RNA, 22 nt, Human
acuuccuguuaugugugccucu

SEQ ID NO: 1122994 - RNA, 22 nt, Human
aucaguuuugggggacauacug

SEQ ID NO: 1122995 - RNA, 22 nt, Human
ggagccuguuaguugagugcuc

SEQ ID NO: 1122996 - RNA, 22 nt, Human
ucagaggacaagcucccuggug

SEQ ID NO: 1122997 - RNA, 22 nt, Human
aaggcugaguaaaacagagaac

SEQ ID NO: 1122998 - RNA, 22 nt, Human
aagcugccauagaacgagaggu

SEQ ID NO: 1122999 - RNA, 22 nt, Human
aaguccauagguuucaugaggg

SEQ ID NO: 1123000 - RNA, 22 nt, Human
agccuggagaggcgccauacac

SEQ ID NO: 1123001 - RNA, 22 nt, Human
cccuggguucuggcugggcugc

SEQ ID NO: 1123002 - RNA, 22 nt, Human
gcuggccacauugugccguccu

SEQ ID NO: 1123003 - RNA, 22 nt, Human
caaaggagguaaugggugugag

SEQ ID NO: 1123004 - RNA, 22 nt, Human
gcauccagucuuggcuccugga

SEQ ID NO: 1123005 - RNA, 22 nt, Human
gaagcagcaaaucugcaguauc

SEQ ID NO: 1123006 - RNA, 20 nt, Human
gugcuucagaagccauugcu

SEQ ID NO: 1123007 - RNA, 22 nt, Human
caggagcucuuaaggaugugau

SEQ ID NO: 1123008 - RNA, 22 nt, Human
gccuggaggggacagucucugg

SEQ ID NO: 1123009 - RNA, 21 nt, Human
cucuggaggcaagggagagug

SEQ ID NO: 1123010 - RNA, 22 nt, Human
auguacacaugcaugcaugugc

SEQ ID NO: 1123011 - RNA, 22 nt, Human
gcagccagccccucugaccucu

SEQ ID NO: 1123012 - RNA, 22 nt, Human
ucaguggauauuucuguggcug

SEQ ID NO: 1123013 - RNA, 22 nt, Human
cugaggucaauuaaucaacaac

SEQ ID NO: 1123014 - RNA, 17 nt, Human
cccugccaccaggaagc

SEQ ID NO: 1123015 - RNA, 17 nt, Human
aggaaacauuuucuuuc

SEQ ID NO: 1123016 - RNA, 22 nt, Human
aagcugccugccacgcuagaua

SEQ ID NO: 1123017 - RNA, 22 nt, Human
gaagagcugcaguuuccugggc

SEQ ID NO: 1123018 - RNA, 22 nt, Human
cagcugucuaaguugagcagga

SEQ ID NO: 1123019 - RNA, 22 nt, Human
uccucugcuguucugguucuuu

SEQ ID NO: 1123020 - RNA, 22 nt, Human
ccaaggagaaugacaccaugga

SEQ ID NO: 1123021 - RNA, 22 nt, Human
ccccagccagcaggaccucuga

SEQ ID NO: 1123022 - RNA, 22 nt, Human
gucccagaugucuggaacuccc

SEQ ID NO: 1123023 - RNA, 17 nt, Human
uuuucucucuuggauuc

SEQ ID NO: 1123024 - RNA, 22 nt, Human
cucucuguuaugcuuucaugaa

SEQ ID NO: 1123025 - RNA, 22 nt, Human
uuaaacagagucugaaauguaa

SEQ ID NO: 1123026 - RNA, 22 nt, Human
gucucagaguccuacuuauucc

SEQ ID NO: 1123027 - RNA, 22 nt, Human
ugagccuggguggucgaggcug

SEQ ID NO: 1123028 - RNA, 23 nt, Human
aagcugccuucgcaguuggucug

SEQ ID NO: 1123029 - RNA, 22 nt, Human
acaggggcuccgaaggugaggg

SEQ ID NO: 1123030 - RNA, 22 nt, Human
aggggagccccugguccuggug

SEQ ID NO: 1123031 - RNA, 22 nt, Human
cagcugaguuacucugaggucu

SEQ ID NO: 1123032 - RNA, 22 nt, Human
agggcagcuaaggugcugacug

SEQ ID NO: 1123033 - RNA, 22 nt, Human
uaaaugugggggccacgggcuu

SEQ ID NO: 1123034 - RNA, 22 nt, Human
uccucaggcggugaggaggggc

SEQ ID NO: 1123035 - RNA, 22 nt, Human
gggauggcuuuguggcugacuc

SEQ ID NO: 1123036 - RNA, 22 nt, Human
guuauguacuuuuuaaaucuug

SEQ ID NO: 1123037 - RNA, 22 nt, Human
guacaguuuucaguguucacug

SEQ ID NO: 1123038 - RNA, 22 nt, Human
ccagggcaucacauccaguguu

SEQ ID NO: 1123039 - RNA, 22 nt, Human
gagcacagaaucuucccaugca

SEQ ID NO: 1123040 - RNA, 22 nt, Human
aauauuucuccuucguuauagc

SEQ ID NO: 1123041 - RNA, 22 nt, Human
ugcagcccuuccuuccucuggg

SEQ ID NO: 1123042 - RNA, 22 nt, Human
auccaaagauggaaagaacuuu

SEQ ID NO: 1123043 - RNA, 22 nt, Human
cacugcuuauaaauucuaggca

SEQ ID NO: 1123044 - RNA, 22 nt, Human
ugcagcuguuacggacccuguc

SEQ ID NO: 1123045 - RNA, 22 nt, Human
ccagccugaaaugccucauccu

SEQ ID NO: 1123046 - RNA, 22 nt, Human
uauuucugucagccagauaugg

SEQ ID NO: 1123047 - RNA, 22 nt, Human
gugaggugggcuggccagagac

SEQ ID NO: 1123048 - RNA, 22 nt, Human
ucacaugcuacugagccagacc

SEQ ID NO: 1123049 - RNA, 22 nt, Human
uuuccauauucugcgucugcca

SEQ ID NO: 1123050 - RNA, 22 nt, Human
cucacugcccugaaguuggguu

SEQ ID NO: 1123051 - RNA, 22 nt, Human
ucucagaguuuacggggcugaa

SEQ ID NO: 1123052 - RNA, 22 nt, Human
uguacaaugccagggaacacca

SEQ ID NO: 1123053 - RNA, 22 nt, Human
aaguucaauggaaaagcuuuag

SEQ ID NO: 1123054 - RNA, 22 nt, Human
ucacuuauaaaaugcaagaucu

SEQ ID NO: 1123055 - RNA, 22 nt, Human
ucucaccauggugcuugcuuau

SEQ ID NO: 1123056 - RNA, 22 nt, Human
gcugcucuccauggccgugagu

SEQ ID NO: 1123057 - RNA, 22 nt, Human
ccagcugagaaguguaaaguga

SEQ ID NO: 1123058 - RNA, 22 nt, Human
ggcucagguuuccuucccagcu

SEQ ID NO: 1123059 - RNA, 22 nt, Human
cucagaaguucagccuagagua

SEQ ID NO: 1123060 - RNA, 22 nt, Human
caccagggacaaugcuaggggu

SEQ ID NO: 1123061 - RNA, 22 nt, Human
agaaaaggcuugaagagguuuu

SEQ ID NO: 1123062 - RNA, 22 nt, Human
uccaggagaggccugaccaggu

SEQ ID NO: 1123063 - RNA, 22 nt, Human
gccugggaacucugaucuccug

SEQ ID NO: 1123064 - RNA, 22 nt, Human
cugcccugagucaugccagaug

SEQ ID NO: 1123065 - RNA, 22 nt, Human
aguguuguaugggaugacugcu

SEQ ID NO: 1123066 - RNA, 22 nt, Human
gccugagaaggauaggaagcga

SEQ ID NO: 1123067 - RNA, 22 nt, Human
uggguaaacugggucuggagag

SEQ ID NO: 1123068 - RNA, 22 nt, Human
ugcagcuccucuggcugccuga

SEQ ID NO: 1123069 - RNA, 22 nt, Human
cugaagagcucuccuguccccu

SEQ ID NO: 1123070 - RNA, 22 nt, Human
ucccagagcccaaguuggagag

SEQ ID NO: 1123071 - RNA, 22 nt, Human
cagcucugugcaggccugggga

SEQ ID NO: 1123072 - RNA, 22 nt, Human
ccagagcuucggggcggcugua

SEQ ID NO: 1123073 - RNA, 22 nt, Human
uuuauuguuguuagucauaagu

SEQ ID NO: 1123074 - RNA, 22 nt, Human
ccagcagccaccuucucgaaau

SEQ ID NO: 1123075 - RNA, 22 nt, Human
uguucuugggaaucuuacaguu

SEQ ID NO: 1123076 - RNA, 22 nt, Human
agggcagacuaggauggaagug

SEQ ID NO: 1123077 - RNA, 22 nt, Human
ggcuagaacuuuacacuuugca

SEQ ID NO: 1123078 - RNA, 22 nt, Human
gccaggaguucagaugcauguu

SEQ ID NO: 1123079 - RNA, 22 nt, Human
cagccugcagggcugccuguug

SEQ ID NO: 1123080 - RNA, 22 nt, Human
agggacuggcucucugagcagg

SEQ ID NO: 1123081 - RNA, 22 nt, Human
agcauggggcaaugcaugugcu

SEQ ID NO: 1123082 - RNA, 22 nt, Human
cugcagagcuaggcugagugaa

SEQ ID NO: 1123083 - RNA, 22 nt, Human
uaaaguuuggcagacaauaaca

SEQ ID NO: 1123084 - RNA, 22 nt, Human
ucugucacccaggcuggagugc

SEQ ID NO: 1123085 - RNA, 22 nt, Human
aaaaaucacuuuuauaggcagc

SEQ ID NO: 1123086 - RNA, 22 nt, Human
aagugguaggaagagagcacug

SEQ ID NO: 1123087 - RNA, 19 nt, Human
ccucugcgcuguccugcuc

SEQ ID NO: 1123088 - RNA, 22 nt, Human
gggugggccugucuggccaugu

SEQ ID NO: 1123089 - RNA, 22 nt, Human
agacccugcaccucucgugggc

SEQ ID NO: 1123090 - RNA, 22 nt, Human
uguccugggaaugggaugcagu

SEQ ID NO: 1123091 - RNA, 22 nt, Human
uaagacauuugaaaugugaucc

SEQ ID NO: 1123092 - RNA, 22 nt, Human
agugcugucccgacaacugagg

SEQ ID NO: 1123093 - RNA, 18 nt, Human
gguggcaggucagaugcc

SEQ ID NO: 1123094 - RNA, 22 nt, Human
agcccaugcaacaggccuagcg

SEQ ID NO: 1123095 - RNA, 19 nt, Human
ggcccaaguacugagugcc

SEQ ID NO: 1123096 - RNA, 22 nt, Human
ucagagccaaucauggugcauu

SEQ ID NO: 1123097 - RNA, 22 nt, Human
agauuuccugcacugccuuuga

SEQ ID NO: 1123098 - RNA, 21 nt, Human
gcacagcaugaguguuggcau

SEQ ID NO: 1123099 - RNA, 22 nt, Human
ggagccagugcccucuggugga

SEQ ID NO: 1123100 - RNA, 22 nt, Human
gaacagaauuaccgaagaucug

SEQ ID NO: 1123101 - RNA, 22 nt, Human
ucagagugguagccuauuuucu

SEQ ID NO: 1123102 - RNA, 22 nt, Human
gcagacuggucuucagccuugg

SEQ ID NO: 1123103 - RNA, 22 nt, Human
aggggcugcuggguccgccccu

SEQ ID NO: 1123104 - RNA, 22 nt, Human
ggccagggggcuucagacucca

SEQ ID NO: 1123105 - RNA, 21 nt, Human
ccugugugucugacugggcua

SEQ ID NO: 1123106 - RNA, 22 nt, Human
gggcacuguggggcccaugcug

SEQ ID NO: 1123107 - RNA, 22 nt, Human
ucugagaggauuccugucccga

SEQ ID NO: 1123108 - RNA, 22 nt, Human
uugaaagggauauaucuuucug

SEQ ID NO: 1123109 - RNA, 22 nt, Human
uauaacacucagaaagaaucau

SEQ ID NO: 1123110 - RNA, 22 nt, Human
ugcaccauuaauuuaugugaga

SEQ ID NO: 1123111 - RNA, 21 nt, Human
accucaagcaacaaccaaggu

SEQ ID NO: 1123112 - RNA, 22 nt, Human
uuugcauuguuucaaaagugaa

SEQ ID NO: 1123113 - RNA, 20 nt, Human
ugcagcugguuucacaggga

SEQ ID NO: 1123114 - RNA, 21 nt, Human
acagcagggcuggcaugacag

SEQ ID NO: 1123115 - RNA, 22 nt, Human
cagaguguugaccauaagccca

SEQ ID NO: 1123116 - RNA, 22 nt, Human
ccugggaggcugugggucugcu

SEQ ID NO: 1123117 - RNA, 22 nt, Human
auccuugacacacuccaguacu

SEQ ID NO: 1123118 - RNA, 22 nt, Human
ucugccuggguguggagcagag

SEQ ID NO: 1123119 - RNA, 22 nt, Human
ugcuggcugggcugcuggagac

SEQ ID NO: 1123120 - RNA, 22 nt, Human
uccuuccugcaggccaaguccu

SEQ ID NO: 1123121 - RNA, 22 nt, Human
aaguuuguucauucauucaucc

SEQ ID NO: 1123122 - RNA, 22 nt, Human
uccaaugugacuaucagggagc

SEQ ID NO: 1123123 - RNA, 22 nt, Human
ucagaagccggaagugcuccuc

SEQ ID NO: 1123124 - RNA, 22 nt, Human
aucaguuucugugaagaacaca

SEQ ID NO: 1123125 - RNA, 22 nt, Human
gccuggagacaaggacaaaggg

SEQ ID NO: 1123126 - RNA, 22 nt, Human
uaacagaaauaguaggugaggg

SEQ ID NO: 1123127 - RNA, 22 nt, Human
acugcagggcauccuggccaag

SEQ ID NO: 1123128 - RNA, 22 nt, Human
ucagcagggccuccuugugcag

SEQ ID NO: 1123129 - RNA, 22 nt, Human
cacuggugacuucugagcugga

SEQ ID NO: 1123130 - RNA, 22 nt, Human
ucaggagagaaagaauacaauu

SEQ ID NO: 1123131 - RNA, 22 nt, Human
gcugcucugcuguguaagcagg

SEQ ID NO: 1123132 - RNA, 19 nt, Human
auagaaaggguuaaagaca

SEQ ID NO: 1123133 - RNA, 21 nt, Human
ggcagcugaccgcgcggugca

SEQ ID NO: 1123134 - RNA, 22 nt, Human
uggcccugacuuggaggccuga

SEQ ID NO: 1123135 - RNA, 22 nt, Human
uguuuuaagagcgcacuuuaua

SEQ ID NO: 1123136 - RNA, 22 nt, Human
ugcagcugguuuagaacuagau

SEQ ID NO: 1123137 - RNA, 22 nt, Human
ugagggaggcccuuugagcaga

SEQ ID NO: 1123138 - RNA, 22 nt, Human
agagaggcugggcguagggcuu

SEQ ID NO: 1123139 - RNA, 22 nt, Human
uaagugcaauguuuuacuuaaa

SEQ ID NO: 1123140 - RNA, 23 nt, Human
ucuuuacauacugaugaguucuc

SEQ ID NO: 1123141 - RNA, 22 nt, Human
agucccagaucuacaggaggga

SEQ ID NO: 1123142 - RNA, 18 nt, Human
caugggugacagguggau

SEQ ID NO: 1123143 - RNA, 22 nt, Human
caggccucaggggcucaggcug

SEQ ID NO: 1123144 - RNA, 22 nt, Human
acagcuggcaggggggcaugaa

SEQ ID NO: 1123145 - RNA, 21 nt, Human
uuuauguacuucauagaguag

SEQ ID NO: 1123146 - RNA, 22 nt, Human
uaaggcauucucaugcugugaa

SEQ ID NO: 1123147 - RNA, 22 nt, Human
gaagagcuuagacagaaucaaa

SEQ ID NO: 1123148 - RNA, 22 nt, Human
caaagucccagcugcuuagaga

SEQ ID NO: 1123149 - RNA, 22 nt, Human
aagagcuggaguuugcagcccu

SEQ ID NO: 1123150 - RNA, 22 nt, Human
acuuaggccuugcuaagcauuu

SEQ ID NO: 1123151 - RNA, 22 nt, Human
uccagccaagccuugguagcug

SEQ ID NO: 1123152 - RNA, 21 nt, Human
auggagccuaagaguggaggu

SEQ ID NO: 1123153 - RNA, 22 nt, Human
caggggcucugggugaugugag

SEQ ID NO: 1123154 - RNA, 22 nt, Human
ugucucugauaaguaguucagu

SEQ ID NO: 1123155 - RNA, 22 nt, Human
cagcugggagcuccauuagaua

SEQ ID NO: 1123156 - RNA, 22 nt, Human
ugggagagugcucaaugugcaa

SEQ ID NO: 1123157 - RNA, 22 nt, Human
acugucugcaaaacucauacuc

SEQ ID NO: 1123158 - RNA, 22 nt, Human
aaaugucuaucuggcauauucc

SEQ ID NO: 1123159 - RNA, 22 nt, Human
ugucuucaguaaaauacacuau

SEQ ID NO: 1123160 - RNA, 22 nt, Human
gcagccacccucaaggcugaau

SEQ ID NO: 1123161 - RNA, 22 nt, Human
accaggggaugguuggcacugu

SEQ ID NO: 1123162 - RNA, 22 nt, Human
auaaacacuucuagggcacaca

SEQ ID NO: 1123163 - RNA, 22 nt, Human
gaugccugcauuucaggagagu

SEQ ID NO: 1123164 - RNA, 22 nt, Human
caggaggcaucauggagcggac

SEQ ID NO: 1123165 - RNA, 22 nt, Human
aagauguaucaguuaagucuuc

SEQ ID NO: 1123166 - RNA, 18 nt, Human
auuuugaacaaugcugua

SEQ ID NO: 1123167 - RNA, 22 nt, Human
ucaggagaaucagggcuguccu

SEQ ID NO: 1123168 - RNA, 20 nt, Human
cacaggccuugugagcagac

SEQ ID NO: 1123169 - RNA, 22 nt, Human
agagcagguggcaacucuggga

SEQ ID NO: 1123170 - RNA, 22 nt, Human
ggcuccuguccccucagcugcu

SEQ ID NO: 1123171 - RNA, 22 nt, Human
ugaaaucuuauacuuugguagu

SEQ ID NO: 1123172 - RNA, 22 nt, Human
cauggcagagaaggggaacugg

SEQ ID NO: 1123173 - RNA, 23 nt, Human
acagagguccaaacaguauaagc

SEQ ID NO: 1123174 - RNA, 22 nt, Human
aaaugucuuuaucucauguaac

SEQ ID NO: 1123175 - RNA, 22 nt, Human
ugccuggguguaaagggccaac

SEQ ID NO: 1123176 - RNA, 22 nt, Human
caggcuugcugcuagagcacuu

SEQ ID NO: 1123177 - RNA, 21 nt, Human
ccuucucuugcuucagcuuca

SEQ ID NO: 1123178 - RNA, 22 nt, Human
uuuuagauugggaaauguaaag

SEQ ID NO: 1123179 - RNA, 22 nt, Human
augggaggaucacuugaggcca

SEQ ID NO: 1123180 - RNA, 22 nt, Human
gagcuuccacucuagaaggagu

SEQ ID NO: 1123181 - RNA, 22 nt, Human
aagccucaccuuuuagaagcua

SEQ ID NO: 1123182 - RNA, 22 nt, Human
auaugaagucagacaaacuggg

SEQ ID NO: 1123183 - RNA, 22 nt, Human
ggaggcucugcuccguguguuc

SEQ ID NO: 1123184 - RNA, 22 nt, Human
gaagcagcgaaguggaagggac

SEQ ID NO: 1123185 - RNA, 22 nt, Human
uggagcaggaagucuauggcug

SEQ ID NO: 1123186 - RNA, 22 nt, Human
gccuggcugagguggggaggca

SEQ ID NO: 1123187 - RNA, 22 nt, Human
ggcugccugccuccaagccggg

SEQ ID NO: 1123188 - RNA, 22 nt, Human
ugcucacugaacucuugcuguc

SEQ ID NO: 1123189 - RNA, 22 nt, Human
cugccuugaggagguuguggga

SEQ ID NO: 1123190 - RNA, 22 nt, Human
uuugcauuuauaaguuggugga

SEQ ID NO: 1123191 - RNA, 22 nt, Human
ugggcugcuuccucagcugaga

SEQ ID NO: 1123192 - RNA, 21 nt, Human
uggcugccuacaugcugcagg

SEQ ID NO: 1123193 - RNA, 22 nt, Human
gggaaauugugugagaucuuug

SEQ ID NO: 1123194 - RNA, 22 nt, Human
gccugccugcugucaucugccu

SEQ ID NO: 1123195 - RNA, 22 nt, Human
aaaguccaauuuuguucaggcu

SEQ ID NO: 1123196 - RNA, 22 nt, Human
uuugaguugcuuauuuaauagg

SEQ ID NO: 1123197 - RNA, 22 nt, Human
cauugcacgggcgucugucugu

SEQ ID NO: 1123198 - RNA, 22 nt, Human
aggagugcaaauaguccagaga

SEQ ID NO: 1123199 - RNA, 22 nt, Human
uaaaguucagugcaugaaugug

SEQ ID NO: 1123200 - RNA, 22 nt, Human
cuguagcagugugcucuuuuuc

SEQ ID NO: 1123201 - RNA, 22 nt, Human
gcucuggguagccacugccugg

SEQ ID NO: 1123202 - RNA, 21 nt, Human
ucagaguguguuacagcaagc

SEQ ID NO: 1123203 - RNA, 22 nt, Human
uauacagaaccgccugaagucu

SEQ ID NO: 1123204 - RNA, 22 nt, Human
uuuuuccuuggaugugucucuc

SEQ ID NO: 1123205 - RNA, 22 nt, Human
uuucacaaguaaaguccuaagu

SEQ ID NO: 1123206 - RNA, 22 nt, Human
cuccagggagcugcgggagcca

SEQ ID NO: 1123207 - RNA, 22 nt, Human
cagccagggucaggcagcuucu

SEQ ID NO: 1123208 - RNA, 22 nt, Human
acacagggggcauucuaggagu

SEQ ID NO: 1123209 - RNA, 22 nt, Human
gggagggaagguaccuguguga

SEQ ID NO: 1123210 - RNA, 22 nt, Human
caggacaguauaggcuuuagga

SEQ ID NO: 1123211 - RNA, 22 nt, Human
cagcugaacauguagagcaucu

SEQ ID NO: 1123212 - RNA, 22 nt, Human
auaguacacauccuacaauguu

SEQ ID NO: 1123213 - RNA, 22 nt, Human
gggcugcugcugccagcgacac

SEQ ID NO: 1123214 - RNA, 22 nt, Human
guggugcaggccagcaggggcg

SEQ ID NO: 1123215 - RNA, 22 nt, Human
caugucuggguauaugcauaug

SEQ ID NO: 1123216 - RNA, 22 nt, Human
ugcaguggugguaaagaugcuc

SEQ ID NO: 1123217 - RNA, 22 nt, Human
caauguuucuuguaaccaguga

SEQ ID NO: 1123218 - RNA, 22 nt, Human
ccugucucccuggcauggcuca

SEQ ID NO: 1123219 - RNA, 23 nt, Human
ccaggcaguagcuauugaaguga

SEQ ID NO: 1123220 - RNA, 22 nt, Human
cuggcagcguguuuaugaacau

SEQ ID NO: 1123221 - RNA, 22 nt, Human
ucuuuccuagaggcugaugagu

SEQ ID NO: 1123222 - RNA, 22 nt, Human
aggaugggccugggauaugcuu

SEQ ID NO: 1123223 - RNA, 17 nt, Human
ggugagaccucccacuc

SEQ ID NO: 1123224 - RNA, 22 nt, Human
agcagcuggggccugugacgau

SEQ ID NO: 1123225 - RNA, 22 nt, Human
cugggccugguagggcuugaaa

SEQ ID NO: 1123226 - RNA, 22 nt, Human
agagccaggacugugucucacu

SEQ ID NO: 1123227 - RNA, 22 nt, Human
uugcaaaagccgaggcacucca

SEQ ID NO: 1123228 - RNA, 22 nt, Human
uccugggccuguacuccauccg

SEQ ID NO: 1123229 - RNA, 22 nt, Human
cagagcugucauuugccaguga

SEQ ID NO: 1123230 - RNA, 22 nt, Human
aaaguuugucacuuggcuagaa

SEQ ID NO: 1123231 - RNA, 22 nt, Human
gagauggggaauaggagcaagc

SEQ ID NO: 1123232 - RNA, 23 nt, Human
cagcugaagcagccugggcugga

SEQ ID NO: 1123233 - RNA, 21 nt, Human
agagcugggacuugccugaga

SEQ ID NO: 1123234 - RNA, 22 nt, Human
uaagaauuguguugaauagagu

SEQ ID NO: 1123235 - RNA, 23 nt, Human
ugggccuggaaagccuuagagag

SEQ ID NO: 1123236 - RNA, 19 nt, Human
ucauucaggaccaguggau

SEQ ID NO: 1123237 - RNA, 22 nt, Human
uccucaggcugccuggaagacu

SEQ ID NO: 1123238 - RNA, 21 nt, Human
auacuuugaauuacagccuug

SEQ ID NO: 1123239 - RNA, 22 nt, Human
agaagcaguuauuuuuugcaca

SEQ ID NO: 1123240 - RNA, 19 nt, Human
aacuagaaagguuuugaga

SEQ ID NO: 1123241 - RNA, 22 nt, Human
ugccugcucuuaccacucuccc

SEQ ID NO: 1123242 - RNA, 22 nt, Human
cuccagggaggucugcaggacu

SEQ ID NO: 1123243 - RNA, 22 nt, Human
ugaaagcuguccacuaggcugu

SEQ ID NO: 1123244 - RNA, 17 nt, Human
uggagcugcguguguuc

SEQ ID NO: 1123245 - RNA, 22 nt, Human
uccagucaggcugaauucaagg

SEQ ID NO: 1123246 - RNA, 22 nt, Human
ugccugcugcuaagcucuuugu

SEQ ID NO: 1123247 - RNA, 22 nt, Human
agaagcugacagaugcagcagg

SEQ ID NO: 1123248 - RNA, 22 nt, Human
agauacauuaguaguuacuugu

SEQ ID NO: 1123249 - RNA, 22 nt, Human
aggcugccaaagcuucugucuc

SEQ ID NO: 1123250 - RNA, 22 nt, Human
uuacaaagagaaguuguagaau

SEQ ID NO: 1123251 - RNA, 22 nt, Human
uuacaaagcguugagacaagua

SEQ ID NO: 1123252 - RNA, 22 nt, Human
aggaggccgauuucagaggucg

SEQ ID NO: 1123253 - RNA, 22 nt, Human
gcagagccccauugcuggcggg

SEQ ID NO: 1123254 - RNA, 22 nt, Human
cugccucugcgucccacagagu

SEQ ID NO: 1123255 - RNA, 22 nt, Human
aaugaacaaaauaugcuuugca

SEQ ID NO: 1123256 - RNA, 22 nt, Human
cuagucacucagcacugacaaa

SEQ ID NO: 1123257 - RNA, 22 nt, Human
uaucuacuccucuuucagaugc

SEQ ID NO: 1123258 - RNA, 22 nt, Human
gagccaggucgggccgcggcga

SEQ ID NO: 1123259 - RNA, 18 nt, Human
uacaugcauaaaugaagc

SEQ ID NO: 1123260 - RNA, 22 nt, Human
acauacauaugacaacuuuccu

SEQ ID NO: 1123261 - RNA, 22 nt, Human
acauuuaaugauccuacuguga

SEQ ID NO: 1123262 - RNA, 22 nt, Human
gcugccacgaucucugcuguag

SEQ ID NO: 1123263 - RNA, 22 nt, Human
uggagcuggaauuugagcugga

SEQ ID NO: 1123264 - RNA, 17 nt, Human
gcuuccucaugcaguuc

SEQ ID NO: 1123265 - RNA, 22 nt, Human
aagccagguuccauggaggagc

SEQ ID NO: 1123266 - RNA, 22 nt, Human
ccagcuggugggucuuucucug

SEQ ID NO: 1123267 - RNA, 22 nt, Human
gggcugcuguagagaacauguu

SEQ ID NO: 1123268 - RNA, 22 nt, Human
ugaggcaggaguucaggcugcg

SEQ ID NO: 1123269 - RNA, 22 nt, Human
gcucugcucuugacuuaccagg

SEQ ID NO: 1123270 - RNA, 22 nt, Human
gggacagcuguagugcuuggcu

SEQ ID NO: 1123271 - RNA, 22 nt, Human
cuguccugauggugccacuggu

SEQ ID NO: 1123272 - RNA, 22 nt, Human
gccagcugguaggcaccuagcc

SEQ ID NO: 1123273 - RNA, 22 nt, Human
acagguggggaggcugagguuc

SEQ ID NO: 1123274 - RNA, 22 nt, Human
auugaaagcauggauuuggauu

SEQ ID NO: 1123275 - RNA, 19 nt, Human
acucaagucuaaugaaauc

SEQ ID NO: 1123276 - RNA, 22 nt, Human
cugccucugguuuuggucccug

SEQ ID NO: 1123277 - RNA, 22 nt, Human
gccaggugggagacagacagca

SEQ ID NO: 1123278 - RNA, 22 nt, Human
uagggcagaguccaggaugggc

SEQ ID NO: 1123279 - RNA, 22 nt, Human
uagcaggguaaauguagaugga

SEQ ID NO: 1123280 - RNA, 23 nt, Human
aguuuuucugcaugguucuguau

SEQ ID NO: 1123281 - RNA, 22 nt, Human
agauuucacaugcugcucuauu

SEQ ID NO: 1123282 - RNA, 22 nt, Human
uguuuuauuucuccaagaggga

SEQ ID NO: 1123283 - RNA, 22 nt, Human
cugagucucccggcaguggagg

SEQ ID NO: 1123284 - RNA, 22 nt, Human
uuucuguagggauuucacaguu

SEQ ID NO: 1123285 - RNA, 22 nt, Human
gugucauguagaaauugaugaa

SEQ ID NO: 1123286 - RNA, 22 nt, Human
aaggagaaaugguagaugugca

SEQ ID NO: 1123287 - RNA, 22 nt, Human
cuggagccugcaguuuucacuu

SEQ ID NO: 1123288 - RNA, 22 nt, Human
aggguauguuuuuaucuacugu

SEQ ID NO: 1123289 - RNA, 22 nt, Human
ugcuggcuguauaugugagagu

SEQ ID NO: 1123290 - RNA, 22 nt, Human
auguaguguagagauuagucuc

SEQ ID NO: 1123291 - RNA, 22 nt, Human
acagcaagccagcuugucacug

SEQ ID NO: 1123292 - RNA, 22 nt, Human
uaugcacauugguuuccucauu

SEQ ID NO: 1123293 - RNA, 22 nt, Human
ucccagagacaucauuucuccg

SEQ ID NO: 1123294 - RNA, 22 nt, Human
guccucugcccaggucaagguu

SEQ ID NO: 1123295 - RNA, 22 nt, Human
cacagaguggaggcuuggccug

SEQ ID NO: 1123296 - RNA, 22 nt, Human
uuagaaaucugcugccaugcaa

SEQ ID NO: 1123297 - RNA, 22 nt, Human
uuguuuucuccacugcaucuua

SEQ ID NO: 1123298 - RNA, 22 nt, Human
cugacucagcagcugaugaucc

SEQ ID NO: 1123299 - RNA, 21 nt, Human
ccucugcucgggcaugcguuu

SEQ ID NO: 1123300 - RNA, 22 nt, Human
acagaaauaacuuuuuauguuu

SEQ ID NO: 1123301 - RNA, 22 nt, Human
uaugcauaauuggauaaguaga

SEQ ID NO: 1123302 - RNA, 17 nt, Human
acacagccagguucucc

SEQ ID NO: 1123303 - RNA, 22 nt, Human
uccaguggguugcugagggagg

SEQ ID NO: 1123304 - RNA, 22 nt, Human
aagucauugguagcuugauagg

SEQ ID NO: 1123305 - RNA, 22 nt, Human
ccucuggggugagugggccacu

SEQ ID NO: 1123306 - RNA, 22 nt, Human
cugagguggaacagaggugaag

SEQ ID NO: 1123307 - RNA, 22 nt, Human
gcagcugccuauucagggcuug

SEQ ID NO: 1123308 - RNA, 22 nt, Human
aguaacuaugcuugagaaucag

SEQ ID NO: 1123309 - RNA, 22 nt, Human
ucagaggacgcacuaggguugu

SEQ ID NO: 1123310 - RNA, 22 nt, Human
gaggagcuggcagcgucuccgc

SEQ ID NO: 1123311 - RNA, 22 nt, Human
gggcccuggggccugauuugca

SEQ ID NO: 1123312 - RNA, 22 nt, Human
cacagaggacuguagcggggag

SEQ ID NO: 1123313 - RNA, 22 nt, Human
agcugguuagcaaucuaaguga

SEQ ID NO: 1123314 - RNA, 22 nt, Human
gggcccagcgugguuccaucug

SEQ ID NO: 1123315 - RNA, 22 nt, Human
gcugucugggaggccuccacuu

SEQ ID NO: 1123316 - RNA, 22 nt, Human
aauuccugucuuaacaguucug

SEQ ID NO: 1123317 - RNA, 22 nt, Human
aggagcugcaaauauuaguaau

SEQ ID NO: 1123318 - RNA, 22 nt, Human
accuuucaaaguggcuaucacu

SEQ ID NO: 1123319 - RNA, 22 nt, Human
acuccuggggcugccaucacag

SEQ ID NO: 1123320 - RNA, 22 nt, Human
aagagguugucugugaugaguu

SEQ ID NO: 1123321 - RNA, 22 nt, Human
guccucugggcagcugccccac

SEQ ID NO: 1123322 - RNA, 22 nt, Human
caguaugucuacuggacaaagu

SEQ ID NO: 1123323 - RNA, 22 nt, Human
uccuugaaaagaaugucuccau

SEQ ID NO: 1123324 - RNA, 22 nt, Human
cccaccccuggacaggugagug

SEQ ID NO: 1123325 - RNA, 22 nt, Human
uccuugaaugaagagaggugac

SEQ ID NO: 1123326 - RNA, 22 nt, Human
gcuggccucaucacugacuucu

SEQ ID NO: 1123327 - RNA, 22 nt, Human
uaccaggcagcugcacagaggc

SEQ ID NO: 1123328 - RNA, 20 nt, Human
ggguggaguugcggucugug

SEQ ID NO: 1123329 - RNA, 22 nt, Human
ccacagaaaguugucuagagua

SEQ ID NO: 1123330 - RNA, 22 nt, Human
cagcccuggccccagguggucu

SEQ ID NO: 1123331 - RNA, 22 nt, Human
guauguguugaauucagggguc

SEQ ID NO: 1123332 - RNA, 22 nt, Human
uaugcacgucuauuuaugaaga

SEQ ID NO: 1123333 - RNA, 22 nt, Human
acagagcuguacaugugccaug

SEQ ID NO: 1123334 - RNA, 22 nt, Human
ugguugaauguagcauuuaugg

SEQ ID NO: 1123335 - RNA, 22 nt, Human
ccagcuggcacuguggcugccc

SEQ ID NO: 1123336 - RNA, 22 nt, Human
gggcugggauggcuugaagauu

SEQ ID NO: 1123337 - RNA, 22 nt, Human
ugaagccaucccucagauggcc

SEQ ID NO: 1123338 - RNA, 22 nt, Human
ccagaggcuggguucaccucag

SEQ ID NO: 1123339 - RNA, 22 nt, Human
uagcagggaagaugaucagaau

SEQ ID NO: 1123340 - RNA, 23 nt, Human
ucucagaggauuccugggccuug

SEQ ID NO: 1123341 - RNA, 22 nt, Human
uaaauguguuagucaugguuuu

SEQ ID NO: 1123342 - RNA, 19 nt, Human
gcugucugaugcugagguc

SEQ ID NO: 1123343 - RNA, 22 nt, Human
acuuucuccagaaaaccaagga

SEQ ID NO: 1123344 - RNA, 22 nt, Human
ccuggcagcuccuccccggcgg

SEQ ID NO: 1123345 - RNA, 22 nt, Human
cagagacagggcagggagugug

SEQ ID NO: 1123346 - RNA, 22 nt, Human
gcugcagcagcugcaggguugu

SEQ ID NO: 1123347 - RNA, 22 nt, Human
gcugugcuggaaggggaccugc

SEQ ID NO: 1123348 - RNA, 22 nt, Human
aggucaaaccacagcucuaggc

SEQ ID NO: 1123349 - RNA, 22 nt, Human
guaaaguucuacuagaaucaac

SEQ ID NO: 1123350 - RNA, 22 nt, Human
ucucagggcgcagugaggcagu

SEQ ID NO: 1123351 - RNA, 19 nt, Human
ccagguggaacugagguag

SEQ ID NO: 1123352 - RNA, 22 nt, Human
cuugcugggguaagucugugcu

SEQ ID NO: 1123353 - RNA, 22 nt, Human
aggcugccuguuccaaucuccu

SEQ ID NO: 1123354 - RNA, 22 nt, Human
aaaagacauaugugggcauucu

SEQ ID NO: 1123355 - RNA, 22 nt, Human
aagcagccagccaucaugcccg

SEQ ID NO: 1123356 - RNA, 22 nt, Human
aaugggagagaacacaaagucc

SEQ ID NO: 1123357 - RNA, 22 nt, Human
gcagggucuugagaggcagcca

SEQ ID NO: 1123358 - RNA, 22 nt, Human
ugggccugggucuuugcugcca

SEQ ID NO: 1123359 - RNA, 22 nt, Human
ggaggggcagccauggaacucc

SEQ ID NO: 1123360 - RNA, 22 nt, Human
aagggcaggugggcauuucugg

SEQ ID NO: 1123361 - RNA, 22 nt, Human
guccucaguaagagggccucug

SEQ ID NO: 1123362 - RNA, 22 nt, Human
gcagggcagcuuagucccuguc

SEQ ID NO: 1123363 - RNA, 22 nt, Human
uggcuggcuagugggcaggauu

SEQ ID NO: 1123364 - RNA, 22 nt, Human
cccucugccugcgcccuggugu

SEQ ID NO: 1123365 - RNA, 22 nt, Human
gaguggggcccacugcugggug

SEQ ID NO: 1123366 - RNA, 22 nt, Human
cccagcuccuuacagggccgaa

SEQ ID NO: 1123367 - RNA, 22 nt, Human
ccuggcagcgccgaagcuggcc

SEQ ID NO: 1123368 - RNA, 22 nt, Human
uggaagcacuuggguuuuguug

SEQ ID NO: 1123369 - RNA, 22 nt, Human
aggagcagaccguaguccugca

SEQ ID NO: 1123370 - RNA, 22 nt, Human
ucucagaguuccucuggagucc

SEQ ID NO: 1123371 - RNA, 22 nt, Human
acaaagucugaaaccugaggca

SEQ ID NO: 1123372 - RNA, 22 nt, Human
auauauauugcccaggcugguu

SEQ ID NO: 1123373 - RNA, 22 nt, Human
gguggguauugaauacaggugu

SEQ ID NO: 1123374 - RNA, 22 nt, Human
uccuugaaaaucuugguuuaga

SEQ ID NO: 1123375 - RNA, 22 nt, Human
caggaggcuccuagggcucugu

SEQ ID NO: 1123376 - RNA, 23 nt, Human
aggagaagagauuuccacaugca

SEQ ID NO: 1123377 - RNA, 22 nt, Human
uuugggcaguagauguaucacu

SEQ ID NO: 1123378 - RNA, 22 nt, Human
uaauacuuugaaugagagcuaa

SEQ ID NO: 1123379 - RNA, 22 nt, Human
ggggcagauggaacagagcaca

SEQ ID NO: 1123380 - RNA, 22 nt, Human
aagcagccacuggccaguuaua

SEQ ID NO: 1123381 - RNA, 22 nt, Human
caggccucuauggucagcugag

SEQ ID NO: 1123382 - RNA, 22 nt, Human
cucugugauuuugugagccaga

SEQ ID NO: 1123383 - RNA, 20 nt, Human
gggcuggcgcauggggaaag

SEQ ID NO: 1123384 - RNA, 20 nt, Human
uucuuucaucuacacguugu

SEQ ID NO: 1123385 - RNA, 22 nt, Human
gagcuuccugaugccgaccagu

SEQ ID NO: 1123386 - RNA, 22 nt, Human
caggccucagagaguggcgggg

SEQ ID NO: 1123387 - RNA, 22 nt, Human
uggaaagagguagaggaucugg

SEQ ID NO: 1123388 - RNA, 22 nt, Human
cagagugaaauaggggaucaag

SEQ ID NO: 1123389 - RNA, 22 nt, Human
auauuucuccaaauguuuucaa

SEQ ID NO: 1123390 - RNA, 22 nt, Human
cacaguggauugggugaugccc

SEQ ID NO: 1123391 - RNA, 22 nt, Human
uccagcagggaauuaguagucu

SEQ ID NO: 1123392 - RNA, 21 nt, Human
uucaaaguuugccuaaagauu

SEQ ID NO: 1123393 - RNA, 22 nt, Human
uugugucccccuuugagagcca

SEQ ID NO: 1123394 - RNA, 22 nt, Human
cuggugccauucuguggccuag

SEQ ID NO: 1123395 - RNA, 22 nt, Human
ugaaccaggaggcagccagcac

SEQ ID NO: 1123396 - RNA, 22 nt, Human
aagcugccuugcugaggagaaa

SEQ ID NO: 1123397 - RNA, 22 nt, Human
cuguguggacugguugaggccc

SEQ ID NO: 1123398 - RNA, 22 nt, Human
ucucagggcagcaaggaagcau

SEQ ID NO: 1123399 - RNA, 22 nt, Human
ucugggggcgaccagggacugc

SEQ ID NO: 1123400 - RNA, 22 nt, Human
ugggagaagcagcagccaagug

SEQ ID NO: 1123401 - RNA, 22 nt, Human
aauguuuucucugugaacacau

SEQ ID NO: 1123402 - RNA, 22 nt, Human
ggcagugaaaaaguauguuucc

SEQ ID NO: 1123403 - RNA, 22 nt, Human
acacuuuguuguggcauauacg

SEQ ID NO: 1123404 - RNA, 22 nt, Human
uccuggccugucuggaguagcu

SEQ ID NO: 1123405 - RNA, 22 nt, Human
acugugcaaugaguaauaaacu

SEQ ID NO: 1123406 - RNA, 22 nt, Human
aggagcuggaguccaggcaagu

SEQ ID NO: 1123407 - RNA, 22 nt, Human
ucugagaguacgggcugcgcgc

SEQ ID NO: 1123408 - RNA, 23 nt, Human
cauguacacacagcuguacagug

SEQ ID NO: 1123409 - RNA, 22 nt, Human
aaaaaugcugugguagcugugu

SEQ ID NO: 1123410 - RNA, 22 nt, Human
agggcagaccacgugcaaggau

SEQ ID NO: 1123411 - RNA, 22 nt, Human
uucuaguguccuuggacuugcu

SEQ ID NO: 1123412 - RNA, 22 nt, Human
gggccugacugagagcuccuca

SEQ ID NO: 1123413 - RNA, 22 nt, Human
gcagcugggacacugaggccag

SEQ ID NO: 1123414 - RNA, 22 nt, Human
gauggggaugagaagugagcag

SEQ ID NO: 1123415 - RNA, 15 nt, Human
aggcacugugggacc

SEQ ID NO: 1123416 - RNA, 22 nt, Human
ccucccaccauuuagagagagc

SEQ ID NO: 1123417 - RNA, 22 nt, Human
cagggccaugaggcacaggguc

SEQ ID NO: 1123418 - RNA, 17 nt, Human
ucaggcugggugcagug

SEQ ID NO: 1123419 - RNA, 23 nt, Human
gcagagcugcccuauugccuugg

SEQ ID NO: 1123420 - RNA, 22 nt, Human
gccugggugaauuugauccuaa

SEQ ID NO: 1123421 - RNA, 22 nt, Human
acaauucucucauaucuuauua

SEQ ID NO: 1123422 - RNA, 22 nt, Human
ggcuucagugagcugagcucac

SEQ ID NO: 1123423 - RNA, 22 nt, Human
cugggcacaggggagcagaguc

SEQ ID NO: 1123424 - RNA, 18 nt, Human
ucagcuggggcugcagcc

SEQ ID NO: 1123425 - RNA, 22 nt, Human
gugauugcccagcaccauuguu

SEQ ID NO: 1123426 - RNA, 18 nt, Human
aaaugcuaggcuacauga

SEQ ID NO: 1123427 - RNA, 22 nt, Human
agauuucaaugugagcauuagu

SEQ ID NO: 1123428 - RNA, 22 nt, Human
auugaaaguccuaucuaaggga

SEQ ID NO: 1123429 - RNA, 23 nt, Human
uaagaacagacaagcauuuacau

SEQ ID NO: 1123430 - RNA, 22 nt, Human
caguacuugggaaugcugggga

SEQ ID NO: 1123431 - RNA, 18 nt, Human
aggcacagagcauacaua

SEQ ID NO: 1123432 - RNA, 22 nt, Human
ucccagacaaucauuggccacc

SEQ ID NO: 1123433 - RNA, 22 nt, Human
agcagaacugaugagacuugag

SEQ ID NO: 1123434 - RNA, 22 nt, Human
caggggcugagaaggaacgucc

SEQ ID NO: 1123435 - RNA, 22 nt, Human
aaagacuagcauuuauauguac

SEQ ID NO: 1123436 - RNA, 22 nt, Human
cccagcaucccagugggcagca

SEQ ID NO: 1123437 - RNA, 22 nt, Human
aaaugcauguagaauaauagag

SEQ ID NO: 1123438 - RNA, 22 nt, Human
ccucauggaccucagacugucc

SEQ ID NO: 1123439 - RNA, 22 nt, Human
aguccaugguucugacucaucu

SEQ ID NO: 1123440 - RNA, 22 nt, Human
aagauuuacuagcauaauagcu

SEQ ID NO: 1123441 - RNA, 22 nt, Human
cugccugugccaaugcuccuuu

SEQ ID NO: 1123442 - RNA, 22 nt, Human
cagaaguaagauuacugugagu

SEQ ID NO: 1123443 - RNA, 22 nt, Human
aucagcaagauugugucuugua

SEQ ID NO: 1123444 - RNA, 22 nt, Human
uuguggcucgugagauguuagg

SEQ ID NO: 1123445 - RNA, 22 nt, Human
gcagggcugggugggagacaga

SEQ ID NO: 1123446 - RNA, 22 nt, Human
agccuggccugggcaggcacau

SEQ ID NO: 1123447 - RNA, 22 nt, Human
gaggcagagucacaaagagucu

SEQ ID NO: 1123448 - RNA, 22 nt, Human
agcaccuguggcucaugcucgu

SEQ ID NO: 1123449 - RNA, 22 nt, Human
uaugcacauuaucuaauccauu

SEQ ID NO: 1123450 - RNA, 22 nt, Human
uugaaaggugaacaugaugcac

SEQ ID NO: 1123451 - RNA, 22 nt, Human
ugauuuccuggcuuuggaguuc

SEQ ID NO: 1123452 - RNA, 22 nt, Human
cucuuuccucagccacagucua

SEQ ID NO: 1123453 - RNA, 22 nt, Human
gaggcuggcagaaaagcacagg

SEQ ID NO: 1123454 - RNA, 21 nt, Human
gcaggcuggucaaaccucagu

SEQ ID NO: 1123455 - RNA, 22 nt, Human
uagagcugauaaugaggccaag

SEQ ID NO: 1123456 - RNA, 22 nt, Human
agcucccagaguccucugccca

SEQ ID NO: 1123457 - RNA, 19 nt, Human
gagcccucuccauggccac

SEQ ID NO: 1123458 - RNA, 22 nt, Human
ucagcaaugugauacugugcaa

SEQ ID NO: 1123459 - RNA, 22 nt, Human
ucagaacauugacauucuuauu

SEQ ID NO: 1123460 - RNA, 22 nt, Human
acuggagcccguggaggcgcag

SEQ ID NO: 1123461 - RNA, 22 nt, Human
caagagcuggagaggcagucua

SEQ ID NO: 1123462 - RNA, 22 nt, Human
uuugaauaaucacugggcauua

SEQ ID NO: 1123463 - RNA, 22 nt, Human
auucaguucuaaggucagugcc

SEQ ID NO: 1123464 - RNA, 22 nt, Human
agaccacagucaggcuccuggu

SEQ ID NO: 1123465 - RNA, 22 nt, Human
gcuuagucaauuauaaauaggc

SEQ ID NO: 1123466 - RNA, 22 nt, Human
ucauugcaguagggagagaccc

SEQ ID NO: 1123467 - RNA, 22 nt, Human
cugagcugcggcaggcaccugg

SEQ ID NO: 1123468 - RNA, 21 nt, Human
aggcagcucaggcccagagag

SEQ ID NO: 1123469 - RNA, 22 nt, Human
ggcugaaacagauuucaagaca

SEQ ID NO: 1123470 - RNA, 21 nt, Human
agcugcuccagggagcucagg

SEQ ID NO: 1123471 - RNA, 22 nt, Human
uguauguguggauagauguaua

SEQ ID NO: 1123472 - RNA, 22 nt, Human
cagcuuccaucuccacugcccu

SEQ ID NO: 1123473 - RNA, 22 nt, Human
guuagaaagugucugcuugggu

SEQ ID NO: 1123474 - RNA, 22 nt, Human
acagugucuccugguacccagu

SEQ ID NO: 1123475 - RNA, 22 nt, Human
uguaugcagggcuuguaugcag

SEQ ID NO: 1123476 - RNA, 22 nt, Human
cuggagcccugaaugggcagga

SEQ ID NO: 1123477 - RNA, 22 nt, Human
uggggacaggagacuuacagcu

SEQ ID NO: 1123478 - RNA, 22 nt, Human
uauguacaguccuuaacuuaaa

SEQ ID NO: 1123479 - RNA, 22 nt, Human
ugcugcucaaugagaugccauc

SEQ ID NO: 1123480 - RNA, 22 nt, Human
gaaggagacccugaagaugcug

SEQ ID NO: 1123481 - RNA, 22 nt, Human
uugauaaaaugauaucuucuuu

SEQ ID NO: 1123482 - RNA, 22 nt, Human
gccuucccacccugcgaggcug

SEQ ID NO: 1123483 - RNA, 22 nt, Human
gaagcagcuaggaucuucauuu

SEQ ID NO: 1123484 - RNA, 22 nt, Human
ccaggacuuuaaguccagcacu

SEQ ID NO: 1123485 - RNA, 22 nt, Human
gggcaugguggcaggcaccugu

SEQ ID NO: 1123486 - RNA, 22 nt, Human
uucuggaguauuccuggcaccu

SEQ ID NO: 1123487 - RNA, 22 nt, Human
agccagggacgcugcaggcuac

SEQ ID NO: 1123488 - RNA, 22 nt, Human
caggccagguggcaggcaaaac

SEQ ID NO: 1123489 - RNA, 22 nt, Human
gucuugaucuccugaccuugug

SEQ ID NO: 1123490 - RNA, 21 nt, Human
gcaggaugcaucuuggugucu

SEQ ID NO: 1123491 - RNA, 22 nt, Human
uaccugagcccagugcagcaua

SEQ ID NO: 1123492 - RNA, 20 nt, Human
uccagccacuuccgcugguc

SEQ ID NO: 1123493 - RNA, 22 nt, Human
agcugcccccagggcugugcuu

SEQ ID NO: 1123494 - RNA, 22 nt, Human
cuuccucccggcccaugcucug

SEQ ID NO: 1123495 - RNA, 19 nt, Human
gcugcuggcucuggcugga

SEQ ID NO: 1123496 - RNA, 22 nt, Human
acuggcugaaguuuacuuuuug

SEQ ID NO: 1123497 - RNA, 22 nt, Human
acauuucucagggaguuuugcu

SEQ ID NO: 1123498 - RNA, 22 nt, Human
gccugccuucggugcgcagcgg

SEQ ID NO: 1123499 - RNA, 22 nt, Human
gccagcuggagacuggcagggg

SEQ ID NO: 1123500 - RNA, 22 nt, Human
aagaauuauugcaauacuagau

SEQ ID NO: 1123501 - RNA, 22 nt, Human
ugucugguggguugacaggcag

SEQ ID NO: 1123502 - RNA, 22 nt, Human
aaaugcacugaacacauguugu

SEQ ID NO: 1123503 - RNA, 19 nt, Human
ggcucucuuaaagcuguuu

SEQ ID NO: 1123504 - RNA, 22 nt, Human
aaguauauuuuuugaagcauau

SEQ ID NO: 1123505 - RNA, 22 nt, Human
cugagccagggccacacaugga

SEQ ID NO: 1123506 - RNA, 22 nt, Human
agcccaagcauaggagggaggc

SEQ ID NO: 1123507 - RNA, 22 nt, Human
auuucuuuucaagagggugcuu

SEQ ID NO: 1123508 - RNA, 22 nt, Human
ugagccugaguucaaggcugca

SEQ ID NO: 1123509 - RNA, 22 nt, Human
auguuauuuuggaaaauacaaa

SEQ ID NO: 1123510 - RNA, 22 nt, Human
agaggccuccgaaaggugggcu

SEQ ID NO: 1123511 - RNA, 22 nt, Human
gaagcagccacggggagacaga

SEQ ID NO: 1123512 - RNA, 18 nt, Human
cggcagagugcuucuagc

SEQ ID NO: 1123513 - RNA, 22 nt, Human
ggugaaggucuacugugugcca

SEQ ID NO: 1123514 - RNA, 20 nt, Human
acugcuucuuucucugaccu

SEQ ID NO: 1123515 - RNA, 22 nt, Human
cccuucccuucugggagaucca

SEQ ID NO: 1123516 - RNA, 22 nt, Human
gcagagcugggucuguauccaa

SEQ ID NO: 1123517 - RNA, 22 nt, Human
ugccaggcauauggccucuuug

SEQ ID NO: 1123518 - RNA, 22 nt, Human
uaaaugugucuauggacccgcc

SEQ ID NO: 1123519 - RNA, 18 nt, Human
gcagcugcaguuguagcu

SEQ ID NO: 1123520 - RNA, 22 nt, Human
aggcccugcuuuccagagcuca

SEQ ID NO: 1123521 - RNA, 22 nt, Human
uggccuggcagagcaaggccug

SEQ ID NO: 1123522 - RNA, 22 nt, Human
uugagucaguaauuccauuucu

SEQ ID NO: 1123523 - RNA, 22 nt, Human
ggaggccuagccagcuccaguu

SEQ ID NO: 1123524 - RNA, 22 nt, Human
uguucguagcacguaguuucuu

SEQ ID NO: 1123525 - RNA, 22 nt, Human
gggccacacagaaccuccuggu

SEQ ID NO: 1123526 - RNA, 22 nt, Human
uuuugucuaagaacuuugcaaa

SEQ ID NO: 1123527 - RNA, 19 nt, Human
ugucucugaaagaugagcu

SEQ ID NO: 1123528 - RNA, 22 nt, Human
uggggugguaauacaccguucu

SEQ ID NO: 1123529 - RNA, 22 nt, Human
ccuccaggaacuugagagacac

SEQ ID NO: 1123530 - RNA, 22 nt, Human
gccagagcugagugagguucuu

SEQ ID NO: 1123531 - RNA, 22 nt, Human
ucucacucauuuccuaggucuu

SEQ ID NO: 1123532 - RNA, 22 nt, Human
ugaacagaucaauagaacugac

SEQ ID NO: 1123533 - RNA, 22 nt, Human
ugacacagauuagagacauacc

SEQ ID NO: 1123534 - RNA, 22 nt, Human
agcagggcugcagugugucuuu

SEQ ID NO: 1123535 - RNA, 20 nt, Human
uccuugaaagugggguauau

SEQ ID NO: 1123536 - RNA, 22 nt, Human
uccuccaggucuaggguggcuu

SEQ ID NO: 1123537 - RNA, 22 nt, Human
agcacaggaccaaggaagcugu

SEQ ID NO: 1123538 - RNA, 22 nt, Human
ggcuggcuuucucuccgcaccu

SEQ ID NO: 1123539 - RNA, 22 nt, Human
ucagcagauggguuguguuggc

SEQ ID NO: 1123540 - RNA, 21 nt, Human
ugcccacagcaaaugcagagg

SEQ ID NO: 1123541 - RNA, 22 nt, Human
gaagagcugugauucaggcuua

SEQ ID NO: 1123542 - RNA, 22 nt, Human
agggcagccugagugcuggccc

SEQ ID NO: 1123543 - RNA, 22 nt, Human
gugcauguuaaugguguacaaa

SEQ ID NO: 1123544 - RNA, 22 nt, Human
caagagcugugaccucauucac

SEQ ID NO: 1123545 - RNA, 22 nt, Human
ugaaauauuuagagaguaaguu

SEQ ID NO: 1123546 - RNA, 20 nt, Human
gaagcagcuucauguagaca

SEQ ID NO: 1123547 - RNA, 22 nt, Human
ccagagccagagaggugccugc

SEQ ID NO: 1123548 - RNA, 22 nt, Human
uggcacuggaaucguagccuug

SEQ ID NO: 1123549 - RNA, 22 nt, Human
gucacuggggccacaugcagaa

SEQ ID NO: 1123550 - RNA, 18 nt, Human
cucugcuaaugggcagcu

SEQ ID NO: 1123551 - RNA, 20 nt, Human
cugggcagguguuugaucuc

SEQ ID NO: 1123552 - RNA, 22 nt, Human
cacugaguucccugacauuuca

SEQ ID NO: 1123553 - RNA, 22 nt, Human
agcuaggaaauugaggcugaga

SEQ ID NO: 1123554 - RNA, 22 nt, Human
gcucugagagugggugauucug

SEQ ID NO: 1123555 - RNA, 22 nt, Human
caguagcacuagauaugugugg

SEQ ID NO: 1123556 - RNA, 22 nt, Human
ugugccagaaaauaugcugagg

SEQ ID NO: 1123557 - RNA, 20 nt, Human
caguagcaauaauuagaagc

SEQ ID NO: 1123558 - RNA, 22 nt, Human
uagacagauuuaaaggaaugga

SEQ ID NO: 1123559 - RNA, 22 nt, Human
ucugagagucucugaggcagau

SEQ ID NO: 1123560 - RNA, 22 nt, Human
aaaaguguccagauuaugaaga

SEQ ID NO: 1123561 - RNA, 22 nt, Human
uccagggcuuggcugggacggu

SEQ ID NO: 1123562 - RNA, 19 nt, Human
gugaggauacugcucagag

SEQ ID NO: 1123563 - RNA, 22 nt, Human
uguaugcuuuccaaaaaugcug

SEQ ID NO: 1123564 - RNA, 22 nt, Human
uuaucguacgcuucagaaauuu

SEQ ID NO: 1123565 - RNA, 22 nt, Human
cuucccuuggugaacagagcau

SEQ ID NO: 1123566 - RNA, 22 nt, Human
gagcugucucuauaugaaugcu

SEQ ID NO: 1123567 - RNA, 22 nt, Human
gcagaagcugggcagcgaggug

SEQ ID NO: 1123568 - RNA, 22 nt, Human
gaggcaggguguugauuacaga

SEQ ID NO: 1123569 - RNA, 22 nt, Human
ccucucccacguggcagaggcu

SEQ ID NO: 1123570 - RNA, 22 nt, Human
gcucucugucguuaugcuucau

SEQ ID NO: 1123571 - RNA, 22 nt, Human
aucccuggacggcgccucccca

SEQ ID NO: 1123572 - RNA, 22 nt, Human
acaaacuaccuacagauguuca

SEQ ID NO: 1123573 - RNA, 19 nt, Human
caugagcugcucacuuccc

SEQ ID NO: 1123574 - RNA, 22 nt, Human
cuuguacaggaauccaugguau

SEQ ID NO: 1123575 - RNA, 22 nt, Human
aggagagaauguuccaggcuug

SEQ ID NO: 1123576 - RNA, 22 nt, Human
uguguacacaaugauugcagag

SEQ ID NO: 1123577 - RNA, 22 nt, Human
uggccagguguggguucucaga

SEQ ID NO: 1123578 - RNA, 22 nt, Human
ugacacagaaauuaagcuguca

SEQ ID NO: 1123579 - RNA, 22 nt, Human
gccuguccuggaugcucugcaa

SEQ ID NO: 1123580 - RNA, 22 nt, Human
aucagcaagcaugguuaggugu

SEQ ID NO: 1123581 - RNA, 21 nt, Human
aaggcagaagcauggaaugag

SEQ ID NO: 1123582 - RNA, 22 nt, Human
gcagcuggugcaaaugucacuc

SEQ ID NO: 1123583 - RNA, 21 nt, Human
aguucauacugaguaacaaaa

SEQ ID NO: 1123584 - RNA, 22 nt, Human
aggcagaggagaaugaucuucc

SEQ ID NO: 1123585 - RNA, 22 nt, Human
uauguacaugauuucauuugcu

SEQ ID NO: 1123586 - RNA, 21 nt, Human
gcugagagguugggaaguuca

SEQ ID NO: 1123587 - RNA, 22 nt, Human
gcaccuggcugcccagguggag

SEQ ID NO: 1123588 - RNA, 19 nt, Human
acacagggaucagaggguu

SEQ ID NO: 1123589 - RNA, 22 nt, Human
ggcuggucacaccacugcaggg

SEQ ID NO: 1123590 - RNA, 22 nt, Human
gagauguacaauguguauuaau

SEQ ID NO: 1123591 - RNA, 22 nt, Human
cccuccagcucaaagcaaccgg

SEQ ID NO: 1123592 - RNA, 22 nt, Human
uaaaauguagcuucuaggcugg

SEQ ID NO: 1123593 - RNA, 22 nt, Human
uggcagcagggccccuggagga

SEQ ID NO: 1123594 - RNA, 22 nt, Human
gcucccugaaaagaacaaaguc

SEQ ID NO: 1123595 - RNA, 22 nt, Human
gcaggugguccccguggagugg

SEQ ID NO: 1123596 - RNA, 22 nt, Human
guggaggacaaaagaagccuuu

SEQ ID NO: 1123597 - RNA, 22 nt, Human
acuuccugcuaugagcuucugu

SEQ ID NO: 1123598 - RNA, 22 nt, Human
cugggccuuggauugacacugu

SEQ ID NO: 1123599 - RNA, 22 nt, Human
ucugugcucuucucaguaucac

SEQ ID NO: 1123600 - RNA, 19 nt, Human
uggcagggagaguuugaag

SEQ ID NO: 1123601 - RNA, 22 nt, Human
uccucugcuggaagggcaagag

SEQ ID NO: 1123602 - RNA, 23 nt, Human
ugcauuauccucucugaagacca

SEQ ID NO: 1123603 - RNA, 22 nt, Human
cacccaggcagguggcugagaa

SEQ ID NO: 1123604 - RNA, 22 nt, Human
ccugugccauccugagcauccc

SEQ ID NO: 1123605 - RNA, 22 nt, Human
ugagaggccccagcucuuggcc

SEQ ID NO: 1123606 - RNA, 22 nt, Human
gcugucugucucugucccacca

SEQ ID NO: 1123607 - RNA, 22 nt, Human
uuuuuaagcuccuuugauguca

SEQ ID NO: 1123608 - RNA, 22 nt, Human
cccuggaguccuggcaguugau

SEQ ID NO: 1123609 - RNA, 22 nt, Human
gaagagcugacagugucauccu

SEQ ID NO: 1123610 - RNA, 22 nt, Human
acagcugugaaaauccacagga

SEQ ID NO: 1123611 - RNA, 22 nt, Human
uggcagcuugaaugcagucuuu

SEQ ID NO: 1123612 - RNA, 22 nt, Human
gcugucacucaccaggccugca

SEQ ID NO: 1123613 - RNA, 22 nt, Human
caggguggggcuggcuaucaaa

SEQ ID NO: 1123614 - RNA, 19 nt, Human
ccucuccgcccaccagccc

SEQ ID NO: 1123615 - RNA, 22 nt, Human
uguuuugugcacuucuauagca

SEQ ID NO: 1123616 - RNA, 22 nt, Human
gcucugugcaguucagggacac

SEQ ID NO: 1123617 - RNA, 21 nt, Human
cagagcuguccaaacccugac

SEQ ID NO: 1123618 - RNA, 22 nt, Human
gacuguguccaugugcuggauu

SEQ ID NO: 1123619 - RNA, 22 nt, Human
uauuggugggggcagagagaga

SEQ ID NO: 1123620 - RNA, 22 nt, Human
cuggcucucugagauauugagu

SEQ ID NO: 1123621 - RNA, 22 nt, Human
gaggugggaugugugugcuacu

SEQ ID NO: 1123622 - RNA, 20 nt, Human
agugccagggcaggugagag

SEQ ID NO: 1123623 - RNA, 22 nt, Human
guguggcuaccucagaggagca

SEQ ID NO: 1123624 - RNA, 22 nt, Human
agauguguuucuaguuccugca

SEQ ID NO: 1123625 - RNA, 22 nt, Human
gcucccugccuacacggaccuu

SEQ ID NO: 1123626 - RNA, 22 nt, Human
ucagggacauuuagacacugau

SEQ ID NO: 1123627 - RNA, 22 nt, Human
gacagggcgcccagccuguuuc

SEQ ID NO: 1123628 - RNA, 22 nt, Human
agcugccaggccccugagaacc

SEQ ID NO: 1123629 - RNA, 21 nt, Human
aggcacuguuugugguuuggg

SEQ ID NO: 1123630 - RNA, 22 nt, Human
ucccagagcagaugugcuaaag

SEQ ID NO: 1123631 - RNA, 22 nt, Human
uggcucuguugugcugagccag

SEQ ID NO: 1123632 - RNA, 22 nt, Human
uuugacagcuuguuacaaaguu

SEQ ID NO: 1123633 - RNA, 22 nt, Human
ggucucagacuggcaggcagug

SEQ ID NO: 1123634 - RNA, 22 nt, Human
uugacaauguccuuugaauuuc

SEQ ID NO: 1123635 - RNA, 22 nt, Human
aggcccugcccagagcuccucg

SEQ ID NO: 1123636 - RNA, 21 nt, Human
aagagcugucaggaaggcugc

SEQ ID NO: 1123637 - RNA, 21 nt, Human
cugcucugacagugaggccag

SEQ ID NO: 1123638 - RNA, 22 nt, Human
cccucccaggaguggccagaga

SEQ ID NO: 1123639 - RNA, 22 nt, Human
auugucuuuggugcuuccagga

SEQ ID NO: 1123640 - RNA, 22 nt, Human
gugugcaguagagaaagagcag

SEQ ID NO: 1123641 - RNA, 22 nt, Human
accacugggcgggcagccugcu

SEQ ID NO: 1123642 - RNA, 22 nt, Human
agaauucugacaauagaauugg

SEQ ID NO: 1123643 - RNA, 22 nt, Human
gcucugucaacagcuagcugug

SEQ ID NO: 1123644 - RNA, 22 nt, Human
ucagcagggaggcucugugccc

SEQ ID NO: 1123645 - RNA, 22 nt, Human
aggguggagggagucccugagc

SEQ ID NO: 1123646 - RNA, 22 nt, Human
aucuggcuuuuacugaauugcu

SEQ ID NO: 1123647 - RNA, 22 nt, Human
uacaguaaccuuauuugucauu

SEQ ID NO: 1123648 - RNA, 22 nt, Human
aggcucaggcaggaauggcgga

SEQ ID NO: 1123649 - RNA, 17 nt, Human
ugcauuguuggaaauuu

SEQ ID NO: 1123650 - RNA, 22 nt, Human
agaggugacauaggagaggcuc

SEQ ID NO: 1123651 - RNA, 22 nt, Human
ucugucaccauucagcuugaau

SEQ ID NO: 1123652 - RNA, 22 nt, Human
ucccugggccacagcugugagc

SEQ ID NO: 1123653 - RNA, 22 nt, Human
ucuaggagaaccaucagggagg

SEQ ID NO: 1123654 - RNA, 22 nt, Human
ggagcugcauuuagggagccuu

SEQ ID NO: 1123655 - RNA, 22 nt, Human
aagacaagcaucaaaucaggca

SEQ ID NO: 1123656 - RNA, 22 nt, Human
cuggccagcauuuuugcuuuag

SEQ ID NO: 1123657 - RNA, 22 nt, Human
gcccucagaguuccccacagug

SEQ ID NO: 1123658 - RNA, 22 nt, Human
gagucaguaauggauaugucau

SEQ ID NO: 1123659 - RNA, 22 nt, Human
ggcucagguugggucacaugac

SEQ ID NO: 1123660 - RNA, 22 nt, Human
ugcccugucuaagcugucagua

SEQ ID NO: 1123661 - RNA, 22 nt, Human
gcuggagcugaguucccugggc

SEQ ID NO: 1123662 - RNA, 22 nt, Human
ucaaagucacaacucucuaauu

SEQ ID NO: 1123663 - RNA, 22 nt, Human
auggcagcaaaugucuggcugg

SEQ ID NO: 1123664 - RNA, 22 nt, Human
ggcugcagguugguuggcagcu

SEQ ID NO: 1123665 - RNA, 22 nt, Human
aaucaguuucuuggcaaguuua

SEQ ID NO: 1123666 - RNA, 22 nt, Human
ggucccaguccucucccugcua

SEQ ID NO: 1123667 - RNA, 22 nt, Human
ucagguguuagaagaaauuuca

SEQ ID NO: 1123668 - RNA, 22 nt, Human
ggaaggucgagcugcaucuggc

SEQ ID NO: 1123669 - RNA, 22 nt, Human
ggcucuggugaggguaggagau

SEQ ID NO: 1123670 - RNA, 22 nt, Human
ccagcugguguuccuuaggacc

SEQ ID NO: 1123671 - RNA, 22 nt, Human
cuggugucugcucccucacagc

SEQ ID NO: 1123672 - RNA, 22 nt, Human
gcuggaaggcuaggcucaguug

SEQ ID NO: 1123673 - RNA, 22 nt, Human
auuucugauaaacguaagcugc

SEQ ID NO: 1123674 - RNA, 22 nt, Human
uuaauaaaguaugaauuggaaa

SEQ ID NO: 1123675 - RNA, 22 nt, Human
uugggugcugucauggggcacg

SEQ ID NO: 1123676 - RNA, 22 nt, Human
cagcaaaauuugaggauugccu

SEQ ID NO: 1123677 - RNA, 22 nt, Human
uucaaaacagcuagauauugga

SEQ ID NO: 1123678 - RNA, 22 nt, Human
ggggcugguggugguuucucca

SEQ ID NO: 1123679 - RNA, 21 nt, Human
cagaggcagguccugggacgg

SEQ ID NO: 1123680 - RNA, 22 nt, Human
gcauguguggaggagaugugcu

SEQ ID NO: 1123681 - RNA, 22 nt, Human
auuucuucaggucagaaauaga

SEQ ID NO: 1123682 - RNA, 20 nt, Human
agcuggagaagggcccuucc

SEQ ID NO: 1123683 - RNA, 22 nt, Human
aggcagugcagaguccucuucu

SEQ ID NO: 1123684 - RNA, 22 nt, Human
ccaggcuggauuuugcaguuca

SEQ ID NO: 1123685 - RNA, 22 nt, Human
acuggcaguuugagaaugcauu

SEQ ID NO: 1123686 - RNA, 22 nt, Human
gauuucaauccagcuuucuucu

SEQ ID NO: 1123687 - RNA, 22 nt, Human
uauuuuguaauuggucauagcu

SEQ ID NO: 1123688 - RNA, 22 nt, Human
uccuuggcaugccgucuucucc

SEQ ID NO: 1123689 - RNA, 22 nt, Human
auguuuuaaauauguguguaaa

SEQ ID NO: 1123690 - RNA, 22 nt, Human
uuccaaagucauguugcugaua

SEQ ID NO: 1123691 - RNA, 22 nt, Human
agcaggaaagaaaaaucugugu

SEQ ID NO: 1123692 - RNA, 22 nt, Human
cuggagcugucuucacaggccu

SEQ ID NO: 1123693 - RNA, 22 nt, Human
ccagcucugccaagcgucagcu

SEQ ID NO: 1123694 - RNA, 22 nt, Human
augggaggaugcucgggugcuc

SEQ ID NO: 1123695 - RNA, 22 nt, Human
agcuggcauacuuugcuaggaa

SEQ ID NO: 1123696 - RNA, 22 nt, Human
uucuucaaaauccagcaugauu

SEQ ID NO: 1123697 - RNA, 22 nt, Human
auuguaaguagaaauguuaugg

SEQ ID NO: 1123698 - RNA, 22 nt, Human
acaaaugcaaguuuuaugucaa

SEQ ID NO: 1123699 - RNA, 22 nt, Human
acacugaauauacaaugaauau

SEQ ID NO: 1123700 - RNA, 22 nt, Human
cccacucccugcacgccugccg

SEQ ID NO: 1123701 - RNA, 22 nt, Human
ucaguuuugaaaacauugaaug

SEQ ID NO: 1123702 - RNA, 22 nt, Human
cagugccucuuaagugucaccc

SEQ ID NO: 1123703 - RNA, 22 nt, Human
agcagcuggugagcaagcucag

SEQ ID NO: 1123704 - RNA, 22 nt, Human
cagcuggcccuuugguagccuu

SEQ ID NO: 1123705 - RNA, 21 nt, Human
ucccacucuaaauggacugaa

SEQ ID NO: 1123706 - RNA, 22 nt, Human
ugccuggguucccaccccaaag

SEQ ID NO: 1123707 - RNA, 22 nt, Human
cucugucccagacccaccucuc

SEQ ID NO: 1123708 - RNA, 22 nt, Human
acucugccaucccaggugcugu

SEQ ID NO: 1123709 - RNA, 22 nt, Human
cagaaaaccugacucuagaacu

SEQ ID NO: 1123710 - RNA, 22 nt, Human
ccaaaauguuugaaugcaugug

SEQ ID NO: 1123711 - RNA, 22 nt, Human
guaagggauuugaacauagguu

SEQ ID NO: 1123712 - RNA, 19 nt, Human
aagaagcaauaagcuguga

SEQ ID NO: 1123713 - RNA, 22 nt, Human
gagaggccauggcugugcagug

SEQ ID NO: 1123714 - RNA, 18 nt, Human
uggcucuggacuugcucc

SEQ ID NO: 1123715 - RNA, 21 nt, Human
gagcauggcuuacaucagcag

SEQ ID NO: 1123716 - RNA, 22 nt, Human
cugcaggcaucuaacugugggc

SEQ ID NO: 1123717 - RNA, 22 nt, Human
aaaggucaaaaucgugacauug

SEQ ID NO: 1123718 - RNA, 22 nt, Human
acugugcacaauucuaaguccu

SEQ ID NO: 1123719 - RNA, 22 nt, Human
agccauugaguuuuaugugcua

SEQ ID NO: 1123720 - RNA, 22 nt, Human
ggaggccaaggcagguggaucg

SEQ ID NO: 1123721 - RNA, 22 nt, Human
agccugagugcuuaggacuguu

SEQ ID NO: 1123722 - RNA, 22 nt, Human
gucucuggguuaagcagugcau

SEQ ID NO: 1123723 - RNA, 22 nt, Human
aggccugagccccagguuuguu

SEQ ID NO: 1123724 - RNA, 20 nt, Human
cagagccaagagcagcaucu

SEQ ID NO: 1123725 - RNA, 22 nt, Human
gaggccugguagccgagcccca

SEQ ID NO: 1123726 - RNA, 22 nt, Human
ugaaauguuugaagaccacuga

SEQ ID NO: 1123727 - RNA, 22 nt, Human
gcauuauuaauagcugcaugag

SEQ ID NO: 1123728 - RNA, 22 nt, Human
ucccagagcucuggagguugga

SEQ ID NO: 1123729 - RNA, 19 nt, Human
uaugugugcauuugugcau

SEQ ID NO: 1123730 - RNA, 22 nt, Human
agcagccacacgccuccuucuc

SEQ ID NO: 1123731 - RNA, 22 nt, Human
uguaacaguaagccugugagcu

SEQ ID NO: 1123732 - RNA, 22 nt, Human
aauauguucaaaauagaucacu

SEQ ID NO: 1123733 - RNA, 18 nt, Human
cagcagagacauucaaaa

SEQ ID NO: 1123734 - RNA, 22 nt, Human
ucauugcaguugaguuguguua

SEQ ID NO: 1123735 - RNA, 22 nt, Human
ccuggccucuccgaguaaccug

SEQ ID NO: 1123736 - RNA, 22 nt, Human
gcucucugaggugcuggcagag

SEQ ID NO: 1123737 - RNA, 22 nt, Human
agcugggucuugggccaggaga

SEQ ID NO: 1123738 - RNA, 22 nt, Human
acugaaggucucagcaaggaug

SEQ ID NO: 1123739 - RNA, 22 nt, Human
cugcccugccuggccagugugg

SEQ ID NO: 1123740 - RNA, 22 nt, Human
aacaugaaguuuucuauaguga

SEQ ID NO: 1123741 - RNA, 22 nt, Human
gcagccaggaaagcuggacccu

SEQ ID NO: 1123742 - RNA, 22 nt, Human
aaaaguaauugaugcaaucgua

SEQ ID NO: 1123743 - RNA, 22 nt, Human
cugagaggugacagcgugcugg

SEQ ID NO: 1123744 - RNA, 22 nt, Human
cggcagcaaaggaagccagguc

SEQ ID NO: 1123745 - RNA, 22 nt, Human
uuccauaauaggcuuaagugaa

SEQ ID NO: 1123746 - RNA, 22 nt, Human
gcccagcacauugcugaggacc

SEQ ID NO: 1123747 - RNA, 22 nt, Human
ucagggcaaagggcagaguuug

SEQ ID NO: 1123748 - RNA, 22 nt, Human
gagagugaugaaugguuaaaca

SEQ ID NO: 1123749 - RNA, 22 nt, Human
ggcccacuugaaauggagcuca

SEQ ID NO: 1123750 - RNA, 22 nt, Human
aucaguuuuuauuaauguagcu

SEQ ID NO: 1123751 - RNA, 22 nt, Human
uccccagccgugaaggagagga

SEQ ID NO: 1123752 - RNA, 23 nt, Human
uugaaggagaaagcuuucuuggu

SEQ ID NO: 1123753 - RNA, 22 nt, Human
uuuauuccaugugucuaugacc

SEQ ID NO: 1123754 - RNA, 22 nt, Human
aagagcuggaagugaagauaac

SEQ ID NO: 1123755 - RNA, 22 nt, Human
caaaguauauuggauugaaugg

SEQ ID NO: 1123756 - RNA, 22 nt, Human
cucuccagaauaugccgccgug

SEQ ID NO: 1123757 - RNA, 22 nt, Human
gcauuuauuucuuuacugcauc

SEQ ID NO: 1123758 - RNA, 22 nt, Human
ccugagagagaagcgaccuggu

SEQ ID NO: 1123759 - RNA, 22 nt, Human
cagagguacaagcuaaguuggg

SEQ ID NO: 1123760 - RNA, 22 nt, Human
gugugccaacaaaagacagugc

SEQ ID NO: 1123761 - RNA, 22 nt, Human
agccccaguaagggagggccug

SEQ ID NO: 1123762 - RNA, 22 nt, Human
gaagaacacuucaugauucauu

SEQ ID NO: 1123763 - RNA, 21 nt, Human
ccugagccuguuuauccagaa

SEQ ID NO: 1123764 - RNA, 22 nt, Human
ucugccugccagucugguccuc

SEQ ID NO: 1123765 - RNA, 22 nt, Human
cuacuuuaauuuucugcagaga

SEQ ID NO: 1123766 - RNA, 22 nt, Human
cucaggguaaugaaagacgaau

SEQ ID NO: 1123767 - RNA, 22 nt, Human
gucucagauaacauguauucua

SEQ ID NO: 1123768 - RNA, 22 nt, Human
cacauguaguaagcaggcaaug

SEQ ID NO: 1123769 - RNA, 22 nt, Human
caggugcucccagagaagugcu

SEQ ID NO: 1123770 - RNA, 20 nt, Human
cccuccagcaaccaggacuu

SEQ ID NO: 1123771 - RNA, 22 nt, Human
cugggcacauuuugacuagugu

SEQ ID NO: 1123772 - RNA, 22 nt, Human
gaggccugggagccuguccucc

SEQ ID NO: 1123773 - RNA, 22 nt, Human
gcagcagaguuugggagauggu

SEQ ID NO: 1123774 - RNA, 22 nt, Human
aguggcaguagaugagcugguu

SEQ ID NO: 1123775 - RNA, 22 nt, Human
guguccaucagcagccacugug

SEQ ID NO: 1123776 - RNA, 22 nt, Human
uaaaucacuccuaauaaucagu

SEQ ID NO: 1123777 - RNA, 22 nt, Human
gcuugggauaugcugauguaaa

SEQ ID NO: 1123778 - RNA, 22 nt, Human
aaaaucugcuuccuuuuacaga

SEQ ID NO: 1123779 - RNA, 22 nt, Human
gggagcugagggaccucugugg

SEQ ID NO: 1123780 - RNA, 22 nt, Human
ggcagggguccugguguugacu

SEQ ID NO: 1123781 - RNA, 23 nt, Human
acaguuauagcugugaauaacau

SEQ ID NO: 1123782 - RNA, 17 nt, Human
auccccagcaucuagaa

SEQ ID NO: 1123783 - RNA, 22 nt, Human
gugccugggcaugagcuuguug

SEQ ID NO: 1123784 - RNA, 22 nt, Human
gcagcugguuaaugggagaauu

SEQ ID NO: 1123785 - RNA, 23 nt, Human
guggagccacaucacaggcuccu

SEQ ID NO: 1123786 - RNA, 22 nt, Human
gggcugcugccaccagguggau

SEQ ID NO: 1123787 - RNA, 22 nt, Human
uuccaugugaguacacugugau

SEQ ID NO: 1123788 - RNA, 17 nt, Human
ucugggcuucagugguc

SEQ ID NO: 1123789 - RNA, 22 nt, Human
gugcuaggauuacaggcauggg

SEQ ID NO: 1123790 - RNA, 22 nt, Human
cugcucuggcuguguacuucag

SEQ ID NO: 1123791 - RNA, 22 nt, Human
gggagggacacaaagaguuccc

SEQ ID NO: 1123792 - RNA, 22 nt, Human
aacagcaugcuggguaacauug

SEQ ID NO: 1123793 - RNA, 22 nt, Human
ucugccuggaugauggcagggc

SEQ ID NO: 1123794 - RNA, 22 nt, Human
agacaucagcuugugugcaggg

SEQ ID NO: 1123795 - RNA, 22 nt, Human
cucuccuugcagauggcugccu

SEQ ID NO: 1123796 - RNA, 22 nt, Human
gggcaguggcucacgccuguaa

SEQ ID NO: 1123797 - RNA, 22 nt, Human
ccaucagcaugggagcaugggc

SEQ ID NO: 1123798 - RNA, 22 nt, Human
ccucagagguuuucauucugua

SEQ ID NO: 1123799 - RNA, 22 nt, Human
ucagagaaaugaaguagggauu

SEQ ID NO: 1123800 - RNA, 22 nt, Human
uggagcccagggugagaaggag

SEQ ID NO: 1123801 - RNA, 22 nt, Human
ggcagcugugaagugccucaca

SEQ ID NO: 1123802 - RNA, 22 nt, Human
agcaggaaguagucuguaagca

SEQ ID NO: 1123803 - RNA, 22 nt, Human
aucuggcuccuacacuugaaga

SEQ ID NO: 1123804 - RNA, 22 nt, Human
ugucaccucuuuggcugcagcu

SEQ ID NO: 1123805 - RNA, 22 nt, Human
cucuuaguuuaucuuugacaaa

SEQ ID NO: 1123806 - RNA, 22 nt, Human
accucugcuucccggguucaag

SEQ ID NO: 1123807 - RNA, 22 nt, Human
uggcccugcugggucagagcug

SEQ ID NO: 1123808 - RNA, 22 nt, Human
cagcugccccauaaaucacagu

SEQ ID NO: 1123809 - RNA, 22 nt, Human
gugggccuugcagggugcaggg

SEQ ID NO: 1123810 - RNA, 22 nt, Human
uugggaaggcguggaagcagaa

SEQ ID NO: 1123811 - RNA, 18 nt, Human
gugacagcugcuagcuca

SEQ ID NO: 1123812 - RNA, 22 nt, Human
auggcucauuuaucuugcagcc

SEQ ID NO: 1123813 - RNA, 22 nt, Human
ucuguagcaagugagaggcauu

SEQ ID NO: 1123814 - RNA, 22 nt, Human
ugcauuauaacugaauguuguu

SEQ ID NO: 1123815 - RNA, 22 nt, Human
gccagcuggagugagagugggc

SEQ ID NO: 1123816 - RNA, 22 nt, Human
uggcacugagcagccgcggcag

SEQ ID NO: 1123817 - RNA, 22 nt, Human
ugaagcagagaauuugacaguc

SEQ ID NO: 1123818 - RNA, 22 nt, Human
agccacagcgaaccucucuucc

SEQ ID NO: 1123819 - RNA, 22 nt, Human
ccagagccucgcccggagccuc

SEQ ID NO: 1123820 - RNA, 17 nt, Human
ucaggcugugccuggua

SEQ ID NO: 1123821 - RNA, 22 nt, Human
ugucaugcuuauguuacauacu

SEQ ID NO: 1123822 - RNA, 22 nt, Human
acagccugagaguggagcuggc

SEQ ID NO: 1123823 - RNA, 22 nt, Human
uacauuguucaugcaugagaaa

SEQ ID NO: 1123824 - RNA, 22 nt, Human
ccaauguuuuauacagaaguac

SEQ ID NO: 1123825 - RNA, 23 nt, Human
ucacagggcacuggcugggguug

SEQ ID NO: 1123826 - RNA, 17 nt, Human
cuggagccuccaacucc

SEQ ID NO: 1123827 - RNA, 22 nt, Human
uggcgugcccuccagacuuggc

SEQ ID NO: 1123828 - RNA, 22 nt, Human
gaaugcacacgugugugcaugc

SEQ ID NO: 1123829 - RNA, 22 nt, Human
ucaucacucauuggacaacaga

SEQ ID NO: 1123830 - RNA, 22 nt, Human
gcagugcuuuagucuguccuuu

SEQ ID NO: 1123831 - RNA, 22 nt, Human
gucagcagugucagcucugggg

SEQ ID NO: 1123832 - RNA, 22 nt, Human
uggcagaggaggcucagauuga

SEQ ID NO: 1123833 - RNA, 22 nt, Human
cccucagcuucucccugcagcu

SEQ ID NO: 1123834 - RNA, 21 nt, Human
gcacagggacagaucaucaca

SEQ ID NO: 1123835 - RNA, 22 nt, Human
ucagggcacauucugcaguggc

SEQ ID NO: 1123836 - RNA, 21 nt, Human
ucagcagcuuuugcagucccu

SEQ ID NO: 1123837 - RNA, 22 nt, Human
gaaggcuugcagcucuguggca

SEQ ID NO: 1123838 - RNA, 22 nt, Human
gugcauuugacgaauacucacu

SEQ ID NO: 1123839 - RNA, 21 nt, Human
agaaaaguagaguuuucagag

SEQ ID NO: 1123840 - RNA, 22 nt, Human
uacaaaugaguuguaugaacca

SEQ ID NO: 1123841 - RNA, 22 nt, Human
ccuccugggccuugcucuguga

SEQ ID NO: 1123842 - RNA, 22 nt, Human
uauauguaagcuauguaagagu

SEQ ID NO: 1123843 - RNA, 22 nt, Human
ugugugugaguccuggcuuucc

SEQ ID NO: 1123844 - RNA, 22 nt, Human
uuuguaaagucuguucugaguu

SEQ ID NO: 1123845 - RNA, 21 nt, Human
cagaggggcuagccuggcugc

SEQ ID NO: 1123846 - RNA, 19 nt, Human
uggggccuccugucccugg

SEQ ID NO: 1123847 - RNA, 22 nt, Human
uccauuuacuauucucauaucg

SEQ ID NO: 1123848 - RNA, 22 nt, Human
aagggagacaguugugugagga

SEQ ID NO: 1123849 - RNA, 23 nt, Human
agccagggcacugguggagauug

SEQ ID NO: 1123850 - RNA, 18 nt, Human
gccugcaggcacgggggu

SEQ ID NO: 1123851 - RNA, 22 nt, Human
ggguggaguagaaagaugaauu

SEQ ID NO: 1123852 - RNA, 22 nt, Human
aagggcagcuuaaauugguagc

SEQ ID NO: 1123853 - RNA, 22 nt, Human
ucagaacaauugggaaccauua

SEQ ID NO: 1123854 - RNA, 22 nt, Human
ccugagcuggaagagcuugugc

SEQ ID NO: 1123855 - RNA, 22 nt, Human
gcucugagucucagcuaccaca

SEQ ID NO: 1123856 - RNA, 22 nt, Human
ccagagcuccagggcuacagaa

SEQ ID NO: 1123857 - RNA, 22 nt, Human
cauuucugauuacagaauacua

SEQ ID NO: 1123858 - RNA, 22 nt, Human
gcugagagaaaagugagguucu

SEQ ID NO: 1123859 - RNA, 22 nt, Human
agcauuuaguuaguaaauguuu

SEQ ID NO: 1123860 - RNA, 21 nt, Human
ggagggcagcccagacuggcu

SEQ ID NO: 1123861 - RNA, 22 nt, Human
uccuugaagcaacgugcagaca

SEQ ID NO: 1123862 - RNA, 22 nt, Human
aacaaaugaccugauuucuucc

SEQ ID NO: 1123863 - RNA, 22 nt, Human
ugcugucugcaacaguacuaca

SEQ ID NO: 1123864 - RNA, 22 nt, Human
gggagcaggagccugccugcca

SEQ ID NO: 1123865 - RNA, 22 nt, Human
ccagggugggguccaggaacca

SEQ ID NO: 1123866 - RNA, 22 nt, Human
acauuguagacuuuucauaugu

SEQ ID NO: 1123867 - RNA, 22 nt, Human
gugcccaggcccaaggcaccac

SEQ ID NO: 1123868 - RNA, 22 nt, Human
aagaagagaaaugugcugcugg

SEQ ID NO: 1123869 - RNA, 22 nt, Human
gccacaggcacuuaagggcugg

SEQ ID NO: 1123870 - RNA, 22 nt, Human
auccaauggggagugaguucuu

SEQ ID NO: 1123871 - RNA, 22 nt, Human
gcccuggaaucucuccauggga

SEQ ID NO: 1123872 - RNA, 20 nt, Human
caggccucugggggcccugg

SEQ ID NO: 1123873 - RNA, 22 nt, Human
agaaaucauucccaaacccaua

SEQ ID NO: 1123874 - RNA, 22 nt, Human
aguguuccuugcuuucccagag

SEQ ID NO: 1123875 - RNA, 22 nt, Human
acauuuaaauaccuauguuucu

SEQ ID NO: 1123876 - RNA, 22 nt, Human
agauuucccacuccauguauug

SEQ ID NO: 1123877 - RNA, 22 nt, Human
ucccagagugagccaggggcag

SEQ ID NO: 1123878 - RNA, 22 nt, Human
ccucccuuggccauagccagcc

SEQ ID NO: 1123879 - RNA, 22 nt, Human
ccuguguguaggccaggggagu

SEQ ID NO: 1123880 - RNA, 22 nt, Human
cccagcaguuguuggugcacau

SEQ ID NO: 1123881 - RNA, 22 nt, Human
cuugcaggcagggccuccugga

SEQ ID NO: 1123882 - RNA, 22 nt, Human
agagcaggcauaaagcuuugaa

SEQ ID NO: 1123883 - RNA, 22 nt, Human
gagcucugggaaacaaagugua

SEQ ID NO: 1123884 - RNA, 17 nt, Human
agcagcuggcacaggag

SEQ ID NO: 1123885 - RNA, 22 nt, Human
aagccuuggggcuccucuguau

SEQ ID NO: 1123886 - RNA, 22 nt, Human
acagggcaccugagguaggaag

SEQ ID NO: 1123887 - RNA, 22 nt, Human
ggucucagcuggaguccuuggu

SEQ ID NO: 1123888 - RNA, 22 nt, Human
agggcuggccacaugauuuggu

SEQ ID NO: 1123889 - RNA, 22 nt, Human
uucaggagcuggcugcgaagga

SEQ ID NO: 1123890 - RNA, 22 nt, Human
ugggcagacgggagcuugccuu

SEQ ID NO: 1123891 - RNA, 22 nt, Human
aaguucaaggugauaguggcag

SEQ ID NO: 1123892 - RNA, 22 nt, Human
ucauucagguugggcaaguguc

SEQ ID NO: 1123893 - RNA, 22 nt, Human
caguacuuggucaaggaagcag

SEQ ID NO: 1123894 - RNA, 22 nt, Human
aauguauaaaguguuaauaacu

SEQ ID NO: 1123895 - RNA, 22 nt, Human
cucuguccuugcacaguuccua

SEQ ID NO: 1123896 - RNA, 22 nt, Human
ccagcccugccucucagggccc

SEQ ID NO: 1123897 - RNA, 22 nt, Human
cccagcccaucucaaaggucua

SEQ ID NO: 1123898 - RNA, 22 nt, Human
ucccagggucaguggugaggcc

SEQ ID NO: 1123899 - RNA, 22 nt, Human
agcacagguacggagaugcuac

SEQ ID NO: 1123900 - RNA, 22 nt, Human
cucuggccgcagcucagcucug

SEQ ID NO: 1123901 - RNA, 22 nt, Human
uggcucuggggacaguaagucc

SEQ ID NO: 1123902 - RNA, 22 nt, Human
cucaggagacaguguccacaug

SEQ ID NO: 1123903 - RNA, 22 nt, Human
ggccuugguaaagggaugcaug

SEQ ID NO: 1123904 - RNA, 21 nt, Human
gcugccaccgcgugcuccagg

SEQ ID NO: 1123905 - RNA, 22 nt, Human
agagccagcauuugggcccugc

SEQ ID NO: 1123906 - RNA, 20 nt, Human
acuuucucgguuucucaccu

SEQ ID NO: 1123907 - RNA, 22 nt, Human
gcagccaccucccauggcgggg

SEQ ID NO: 1123908 - RNA, 21 nt, Human
ggagucagggucuggcugggg

SEQ ID NO: 1123909 - RNA, 21 nt, Human
gccagccuguuuaccuguggu

SEQ ID NO: 1123910 - RNA, 22 nt, Human
ggcugccuucagacuccagcuu

SEQ ID NO: 1123911 - RNA, 22 nt, Human
aagggcagaauagagaagaugg

SEQ ID NO: 1123912 - RNA, 22 nt, Human
aggcuccuuguucaucauccau

SEQ ID NO: 1123913 - RNA, 22 nt, Human
gucaccagucccagcuccugaa

SEQ ID NO: 1123914 - RNA, 22 nt, Human
agucucagaguaccugagggac

SEQ ID NO: 1123915 - RNA, 22 nt, Human
gcaggcagagaaggaacauuua

SEQ ID NO: 1123916 - RNA, 22 nt, Human
cugcaggaauucaaagugagcu

SEQ ID NO: 1123917 - RNA, 22 nt, Human
cagggccucauccucagagauu

SEQ ID NO: 1123918 - RNA, 22 nt, Human
caggaaagggaugggcugccac

SEQ ID NO: 1123919 - RNA, 21 nt, Human
uaaauaauaaguugcugagau

SEQ ID NO: 1123920 - RNA, 21 nt, Human
agaugcugugcuccaggagca

SEQ ID NO: 1123921 - RNA, 22 nt, Human
uacauuaacuuacguccacaug

SEQ ID NO: 1123922 - RNA, 22 nt, Human
acauuucucuugaugucucuau

SEQ ID NO: 1123923 - RNA, 19 nt, Human
ccaggccaucccaguuccc

SEQ ID NO: 1123924 - RNA, 21 nt, Human
agagaauugccuuagauguuc

SEQ ID NO: 1123925 - RNA, 22 nt, Human
ucaggcugagaaaaucuggacc

SEQ ID NO: 1123926 - RNA, 22 nt, Human
gaacagcuucuugggagcuggg

SEQ ID NO: 1123927 - RNA, 20 nt, Human
ugcagcuucaccugugucau

SEQ ID NO: 1123928 - RNA, 22 nt, Human
ggccucugggguccugagccca

SEQ ID NO: 1123929 - RNA, 22 nt, Human
auguguguauauauagucauuu

SEQ ID NO: 1123930 - RNA, 22 nt, Human
ucaggcuggaaugcaguggggc

SEQ ID NO: 1123931 - RNA, 22 nt, Human
uagaaauguuagauguauugag

SEQ ID NO: 1123932 - RNA, 22 nt, Human
ggagugaguacuggaguagcug

SEQ ID NO: 1123933 - RNA, 22 nt, Human
ucagcagggagaggagaaugca

SEQ ID NO: 1123934 - RNA, 22 nt, Human
ccugggugucaugggcagcugg

SEQ ID NO: 1123935 - RNA, 22 nt, Human
cccucugccugggaccaagucc

SEQ ID NO: 1123936 - RNA, 22 nt, Human
aggcugggaaaccugaaguugu

SEQ ID NO: 1123937 - RNA, 22 nt, Human
uguagcauguaaauugguuauu

SEQ ID NO: 1123938 - RNA, 22 nt, Human
ugggaccaagucauuucuuuag

SEQ ID NO: 1123939 - RNA, 22 nt, Human
cagacacagauaugcauauggc

SEQ ID NO: 1123940 - RNA, 22 nt, Human
caugagauaauuuuucuccagu

SEQ ID NO: 1123941 - RNA, 23 nt, Human
aggcacugaaugugucagugagu

SEQ ID NO: 1123942 - RNA, 22 nt, Human
ugcucuccggcuuccguggccu

SEQ ID NO: 1123943 - RNA, 22 nt, Human
ggagacagugguagggccuaag

SEQ ID NO: 1123944 - RNA, 22 nt, Human
gcugcccucccagggcaagcuu

SEQ ID NO: 1123945 - RNA, 22 nt, Human
caggagugcagguggugaggca

SEQ ID NO: 1123946 - RNA, 22 nt, Human
gcaagcugcuuaagcucauugu

SEQ ID NO: 1123947 - RNA, 22 nt, Human
auuugucuuugagugcccugcu

SEQ ID NO: 1123948 - RNA, 22 nt, Human
gccuggugugcgccgcgcagcu

SEQ ID NO: 1123949 - RNA, 22 nt, Human
guaucuuuugguggaaaaauaa

SEQ ID NO: 1123950 - RNA, 22 nt, Human
cggcagcuccgcgccguaggac

SEQ ID NO: 1123951 - RNA, 22 nt, Human
cuguccccgcgaguccagagcu

SEQ ID NO: 1123952 - RNA, 22 nt, Human
gcucccaccuccagccugaguu

SEQ ID NO: 1123953 - RNA, 22 nt, Human
ccaggugggaggaaagcagaga

SEQ ID NO: 1123954 - RNA, 22 nt, Human
caggagugaguuggggucuaca

SEQ ID NO: 1123955 - RNA, 22 nt, Human
gauuuauuggucuuucauuggu

SEQ ID NO: 1123956 - RNA, 22 nt, Human
aagcuggagaguuaggugaaua

SEQ ID NO: 1123957 - RNA, 23 nt, Human
cccagagcacagccuccagaugc

SEQ ID NO: 1123958 - RNA, 22 nt, Human
auguuacagaaagcaaagauga

SEQ ID NO: 1123959 - RNA, 22 nt, Human
gcuccacuugcagcuaggcuug

SEQ ID NO: 1123960 - RNA, 22 nt, Human
agggucuguggaugcaucuggg

SEQ ID NO: 1123961 - RNA, 22 nt, Human
aagcaauaagccagauuuggau

SEQ ID NO: 1123962 - RNA, 22 nt, Human
ugggagcugggguuggacgucu

SEQ ID NO: 1123963 - RNA, 22 nt, Human
ugugaaagucaaauuaauugaa

SEQ ID NO: 1123964 - RNA, 22 nt, Human
agaagccauguuuaguaggaug

SEQ ID NO: 1123965 - RNA, 22 nt, Human
uguuacacagcagaauagcaag

SEQ ID NO: 1123966 - RNA, 22 nt, Human
ugaaaggugacauuucuuggau

SEQ ID NO: 1123967 - RNA, 22 nt, Human
cacagggcuaaaugaaggguug

SEQ ID NO: 1123968 - RNA, 22 nt, Human
aggagccaagauggggcaagua

SEQ ID NO: 1123969 - RNA, 22 nt, Human
aaggccuggauuuagguuguga

SEQ ID NO: 1123970 - RNA, 22 nt, Human
cacagcuggugcacuagcucug

SEQ ID NO: 1123971 - RNA, 22 nt, Human
cugccuggcuaaacucaagucg

SEQ ID NO: 1123972 - RNA, 18 nt, Human
aaauguacuguccauggc

SEQ ID NO: 1123973 - RNA, 22 nt, Human
aggccuggccccaguugcuagg

SEQ ID NO: 1123974 - RNA, 23 nt, Human
ggccauggagacuuagaaugggc

SEQ ID NO: 1123975 - RNA, 22 nt, Human
aaagcccauguggaaguacagg

SEQ ID NO: 1123976 - RNA, 22 nt, Human
cugccuuugcccuugacacugu

SEQ ID NO: 1123977 - RNA, 22 nt, Human
agcagaugagccucaugacugg

SEQ ID NO: 1123978 - RNA, 22 nt, Human
auuuagaaguuggagggcaaga

SEQ ID NO: 1123979 - RNA, 22 nt, Human
agagccaggugcugcuguuuga

SEQ ID NO: 1123980 - RNA, 21 nt, Human
gagugcaggucugaugccauc

SEQ ID NO: 1123981 - RNA, 22 nt, Human
uggcucucaggccugcugcguu

SEQ ID NO: 1123982 - RNA, 22 nt, Human
uagaaauguugguauuaacauu

SEQ ID NO: 1123983 - RNA, 22 nt, Human
uggcucaggccacuucuuuuau

SEQ ID NO: 1123984 - RNA, 22 nt, Human
agggucaggagacacuggcaac

SEQ ID NO: 1123985 - RNA, 22 nt, Human
agagcugcaggguggacccagg

SEQ ID NO: 1123986 - RNA, 22 nt, Human
agucuucagagaaauuaacucu

SEQ ID NO: 1123987 - RNA, 22 nt, Human
aggcugcuuccuuacguggcug

SEQ ID NO: 1123988 - RNA, 22 nt, Human
uuauaaagauccuuccagaguu

SEQ ID NO: 1123989 - RNA, 22 nt, Human
gcaccugggacccagaggcacc

SEQ ID NO: 1123990 - RNA, 18 nt, Human
uggacaggguggagaaaa

SEQ ID NO: 1123991 - RNA, 22 nt, Human
aagcagugcgcucaucuaaggg

SEQ ID NO: 1123992 - RNA, 20 nt, Human
agauggugaaggccagggag

SEQ ID NO: 1123993 - RNA, 22 nt, Human
gagcuuaggccagggacaggga

SEQ ID NO: 1123994 - RNA, 22 nt, Human
aagugaaacauguaucucuuua

SEQ ID NO: 1123995 - RNA, 22 nt, Human
gccaggcauuuguuaggugcug

SEQ ID NO: 1123996 - RNA, 22 nt, Human
ugaagcaggaaccagcagcauu

SEQ ID NO: 1123997 - RNA, 22 nt, Human
gcaggcaggagcccaacugccu

SEQ ID NO: 1123998 - RNA, 22 nt, Human
uggcagggccuaccccaauauc

SEQ ID NO: 1123999 - RNA, 22 nt, Human
ccugagaggcccucucacuguc

SEQ ID NO: 1124000 - RNA, 22 nt, Human
guggcucuccauugacauggaa

SEQ ID NO: 1124001 - RNA, 22 nt, Human
caaaugaagaaccuucucaccu

SEQ ID NO: 1124002 - RNA, 22 nt, Human
aguucuuuugugaacauaugcu

SEQ ID NO: 1124003 - RNA, 22 nt, Human
gcaggaguguauuugcauguaa

SEQ ID NO: 1124004 - RNA, 22 nt, Human
cccuggagugugacgaggcauu

SEQ ID NO: 1124005 - RNA, 22 nt, Human
gacagggccgcagauggagacu

SEQ ID NO: 1124006 - RNA, 22 nt, Human
aaaugucuuucuucugcuacgu

SEQ ID NO: 1124007 - RNA, 22 nt, Human
ugcugccauggucgcugguguc

SEQ ID NO: 1124008 - RNA, 21 nt, Human
aaguuuguucuuguauagucu

SEQ ID NO: 1124009 - RNA, 22 nt, Human
ugcagaguaaaagcagaugcua

SEQ ID NO: 1124010 - RNA, 21 nt, Human
gccagagcaguacaaugaggu

SEQ ID NO: 1124011 - RNA, 22 nt, Human
uuacaguaugaucaacuuuuca

SEQ ID NO: 1124012 - RNA, 22 nt, Human
cacaggcuccggccuugcagcc

SEQ ID NO: 1124013 - RNA, 22 nt, Human
ucccugggccuccugcuaugca

SEQ ID NO: 1124014 - RNA, 22 nt, Human
ugggagcaagcuggugcuggag

SEQ ID NO: 1124015 - RNA, 22 nt, Human
gggcauggaggucugucugcag

SEQ ID NO: 1124016 - RNA, 22 nt, Human
cugaaggacacgugaggagcca

SEQ ID NO: 1124017 - RNA, 22 nt, Human
accuggcacuacaggcaccugu

SEQ ID NO: 1124018 - RNA, 22 nt, Human
uggcucagcuuacuuuugaggg

SEQ ID NO: 1124019 - RNA, 22 nt, Human
cuggguggaaagugcugagaau

SEQ ID NO: 1124020 - RNA, 22 nt, Human
cccagggaaugacucuggccuu

SEQ ID NO: 1124021 - RNA, 22 nt, Human
uggcagcaaaaccagaaucaga

SEQ ID NO: 1124022 - RNA, 22 nt, Human
uaugcauagguaucuauacuca

SEQ ID NO: 1124023 - RNA, 22 nt, Human
gggcccuggauuuaagcaugga

SEQ ID NO: 1124024 - RNA, 22 nt, Human
gccugagagacccauggggcaa

SEQ ID NO: 1124025 - RNA, 22 nt, Human
uacauguaauuuucauaguaag

SEQ ID NO: 1124026 - RNA, 22 nt, Human
cagcaagauuuuuaaagcaagg

SEQ ID NO: 1124027 - RNA, 22 nt, Human
ucuuuucuggacucugcaugga

SEQ ID NO: 1124028 - RNA, 22 nt, Human
ucuuuuguacucaguauugaca

SEQ ID NO: 1124029 - RNA, 22 nt, Human
gggcugugcugaguaggaggug

SEQ ID NO: 1124030 - RNA, 22 nt, Human
ucaggcaguagaauugcuugaa

SEQ ID NO: 1124031 - RNA, 22 nt, Human
ugaugguuuuauuaauaggacc

SEQ ID NO: 1124032 - RNA, 22 nt, Human
ccuuuuucaauauagaauugca

SEQ ID NO: 1124033 - RNA, 22 nt, Human
gcaggggcuaaggacacagaga

SEQ ID NO: 1124034 - RNA, 22 nt, Human
guagcuuauuagggauaauagu

SEQ ID NO: 1124035 - RNA, 22 nt, Human
agaucaaagccaugagagauuu

SEQ ID NO: 1124036 - RNA, 22 nt, Human
agagucuuccaggcagccugag

SEQ ID NO: 1124037 - RNA, 19 nt, Human
ggaaacaggggccagagga

SEQ ID NO: 1124038 - RNA, 22 nt, Human
cagcccagcacuaaguagauuu

SEQ ID NO: 1124039 - RNA, 22 nt, Human
cucaccaggaacagcugcggag

SEQ ID NO: 1124040 - RNA, 22 nt, Human
acacagggcaaugcuuugaccu

SEQ ID NO: 1124041 - RNA, 22 nt, Human
agcagagcggggccuccggaag

SEQ ID NO: 1124042 - RNA, 22 nt, Human
ugcagugguguccagguguacu

SEQ ID NO: 1124043 - RNA, 22 nt, Human
uacuuuggauccuuacaauagc

SEQ ID NO: 1124044 - RNA, 22 nt, Human
uggcucagccagcccuaggaac

SEQ ID NO: 1124045 - RNA, 22 nt, Human
gcagcuggaagugacacucugu

SEQ ID NO: 1124046 - RNA, 22 nt, Human
caggcagcauuuacucugauga

SEQ ID NO: 1124047 - RNA, 22 nt, Human
ggcccuguuagagcucccacaa

SEQ ID NO: 1124048 - RNA, 22 nt, Human
auuguguaauuuucagcucaua

SEQ ID NO: 1124049 - RNA, 22 nt, Human
ugcagcagguuccaaaggguua

SEQ ID NO: 1124050 - RNA, 22 nt, Human
gcagugccuugcuucucugucu

SEQ ID NO: 1124051 - RNA, 22 nt, Human
cuuccugguuugaagcucgccg

SEQ ID NO: 1124052 - RNA, 22 nt, Human
gcugccaguaguuggagcucca

SEQ ID NO: 1124053 - RNA, 22 nt, Human
cucaggaggugguagaggcccu

SEQ ID NO: 1124054 - RNA, 22 nt, Human
ucccagcagagccagcaagccg

SEQ ID NO: 1124055 - RNA, 20 nt, Human
gccugagcuccgccuccugu

SEQ ID NO: 1124056 - RNA, 22 nt, Human
gggcugcacguauucugcucac

SEQ ID NO: 1124057 - RNA, 22 nt, Human
gaugcagggcuggcaggagcuu

SEQ ID NO: 1124058 - RNA, 22 nt, Human
gaggggcuggguagggcaaccc

SEQ ID NO: 1124059 - RNA, 18 nt, Human
ugucucaggcugaaacag

SEQ ID NO: 1124060 - RNA, 22 nt, Human
gaagccccaaacccucgccauc

SEQ ID NO: 1124061 - RNA, 22 nt, Human
cuccagggcagcauggcagugg

SEQ ID NO: 1124062 - RNA, 22 nt, Human
acucugggccccagguggagcu

SEQ ID NO: 1124063 - RNA, 22 nt, Human
guccucugacucagccuuggga

SEQ ID NO: 1124064 - RNA, 22 nt, Human
uagacacaucaaguauaguuaa

SEQ ID NO: 1124065 - RNA, 22 nt, Human
uggcuagcccuuguggggagag

SEQ ID NO: 1124066 - RNA, 22 nt, Human
cacuacuugaaagaauuacaga

SEQ ID NO: 1124067 - RNA, 22 nt, Human
uggaaggcaacggagugagcug

SEQ ID NO: 1124068 - RNA, 22 nt, Human
agagccugcagcugugaagaaa

SEQ ID NO: 1124069 - RNA, 22 nt, Human
cccagagcuccgguccugccca

SEQ ID NO: 1124070 - RNA, 22 nt, Human
auccuugagccaaugacugauu

SEQ ID NO: 1124071 - RNA, 22 nt, Human
gagcuggcaggaggcuccccga

SEQ ID NO: 1124072 - RNA, 22 nt, Human
cugugcaguaggucagggcugg

SEQ ID NO: 1124073 - RNA, 22 nt, Human
ggcagauggaagaggcuggguc

SEQ ID NO: 1124074 - RNA, 22 nt, Human
ggaggaugagcuacgaggagcu

SEQ ID NO: 1124075 - RNA, 22 nt, Human
cccaggcagagagcuggugagc

SEQ ID NO: 1124076 - RNA, 22 nt, Human
ggaggcugcugccucacguggg

SEQ ID NO: 1124077 - RNA, 21 nt, Human
agcuuguguguaucacagugu

SEQ ID NO: 1124078 - RNA, 22 nt, Human
ggccuuggugccauggccaguu

SEQ ID NO: 1124079 - RNA, 22 nt, Human
aucaguuuguauaugaaacacu

SEQ ID NO: 1124080 - RNA, 22 nt, Human
gauuucaaaaguagauccauca

SEQ ID NO: 1124081 - RNA, 22 nt, Human
acauucuagaagucuuugcaau

SEQ ID NO: 1124082 - RNA, 22 nt, Human
aaagagcuucauuuccauuuau

SEQ ID NO: 1124083 - RNA, 22 nt, Human
cuggcucccguuguccuugaag

SEQ ID NO: 1124084 - RNA, 22 nt, Human
ccaggcugggcuacaaguugag

SEQ ID NO: 1124085 - RNA, 22 nt, Human
gcagggcugcagagggcacugu

SEQ ID NO: 1124086 - RNA, 22 nt, Human
cugcagcuccccugagaucaag

SEQ ID NO: 1124087 - RNA, 22 nt, Human
gcaggcaggcuuccuugaacug

SEQ ID NO: 1124088 - RNA, 22 nt, Human
ccugaggggcugcaggccagcu

SEQ ID NO: 1124089 - RNA, 22 nt, Human
gugucacaagagcccaggaaac

SEQ ID NO: 1124090 - RNA, 22 nt, Human
aguguccccuacagaggcauuc

SEQ ID NO: 1124091 - RNA, 22 nt, Human
aguguuucuggcaaaugaaagu

SEQ ID NO: 1124092 - RNA, 22 nt, Human
auucauucugaccucaagagaa

SEQ ID NO: 1124093 - RNA, 19 nt, Human
ucuggcuccugccaggcug

SEQ ID NO: 1124094 - RNA, 22 nt, Human
ucagggacugcagagggaagcu

SEQ ID NO: 1124095 - RNA, 22 nt, Human
ugggcuguggagcaccuuugca

SEQ ID NO: 1124096 - RNA, 22 nt, Human
ucaugcacaugugucaccauca

SEQ ID NO: 1124097 - RNA, 22 nt, Human
uaaaugugcacuuuacuuuuca

SEQ ID NO: 1124098 - RNA, 22 nt, Human
aucuuucaguuucauaccaauu

SEQ ID NO: 1124099 - RNA, 22 nt, Human
gagcagggccacuucuguaccu

SEQ ID NO: 1124100 - RNA, 22 nt, Human
cagggccuccccggcagucuuu

SEQ ID NO: 1124101 - RNA, 22 nt, Human
caauguuugugaucuacugacu

SEQ ID NO: 1124102 - RNA, 22 nt, Human
aucuggcuuacgaagcacuggu

SEQ ID NO: 1124103 - RNA, 22 nt, Human
gcucucuggaggccauggacag

SEQ ID NO: 1124104 - RNA, 22 nt, Human
aggagaaagacuggacagccaa

SEQ ID NO: 1124105 - RNA, 22 nt, Human
cugcugggaaggucugcucagu

SEQ ID NO: 1124106 - RNA, 22 nt, Human
aaggcccuggcaggaagcagga

SEQ ID NO: 1124107 - RNA, 22 nt, Human
ggguguccugugccaagcuggg

SEQ ID NO: 1124108 - RNA, 22 nt, Human
gcuggccauggggagugaggag

SEQ ID NO: 1124109 - RNA, 22 nt, Human
uuacaaagagugccagagugug

SEQ ID NO: 1124110 - RNA, 22 nt, Human
ucaccagucuuucuuaccauug

SEQ ID NO: 1124111 - RNA, 18 nt, Human
caggucagccuggccuca

SEQ ID NO: 1124112 - RNA, 20 nt, Human
uacugggcaagcccacagac

SEQ ID NO: 1124113 - RNA, 22 nt, Human
agagaauuuuaaaagccuugaa

SEQ ID NO: 1124114 - RNA, 22 nt, Human
cuggcagcagcuucuggaucga

SEQ ID NO: 1124115 - RNA, 23 nt, Human
ucuggcucuaugugacagcucuc

SEQ ID NO: 1124116 - RNA, 21 nt, Human
gggccuggcugcgcaggacgg

SEQ ID NO: 1124117 - RNA, 22 nt, Human
ggccauggaccccgagcugacc

SEQ ID NO: 1124118 - RNA, 22 nt, Human
ugcuccagugagcuggccaucc

SEQ ID NO: 1124119 - RNA, 22 nt, Human
gaguggagcaaaagagguagau

SEQ ID NO: 1124120 - RNA, 22 nt, Human
uaagacaauucuucagucacaa

SEQ ID NO: 1124121 - RNA, 22 nt, Human
ugucuguaagguguuuauguua

SEQ ID NO: 1124122 - RNA, 22 nt, Human
acugaaggaaacuuuuguguuu

SEQ ID NO: 1124123 - RNA, 22 nt, Human
ucuggcuccacucugugcaugc

SEQ ID NO: 1124124 - RNA, 22 nt, Human
gcacaugagcugcugggauggg

SEQ ID NO: 1124125 - RNA, 22 nt, Human
auguuuuauguuccacucaagg

SEQ ID NO: 1124126 - RNA, 22 nt, Human
cccaaggcugcagugagcauga

SEQ ID NO: 1124127 - RNA, 22 nt, Human
agugaaauacugucguuuuuag

SEQ ID NO: 1124128 - RNA, 19 nt, Human
cagaccuguccagccugug

SEQ ID NO: 1124129 - RNA, 22 nt, Human
cagugcaguugguggcaggggu

SEQ ID NO: 1124130 - RNA, 22 nt, Human
gggcugugggacccggcacuuu

SEQ ID NO: 1124131 - RNA, 22 nt, Human
gcuggcuguaucaccuggccag

SEQ ID NO: 1124132 - RNA, 22 nt, Human
uauguguaggaggaggacaggg

SEQ ID NO: 1124133 - RNA, 22 nt, Human
cacagaaguuucauagucucga

SEQ ID NO: 1124134 - RNA, 22 nt, Human
gcugagggcuguaacagcagag

SEQ ID NO: 1124135 - RNA, 23 nt, Human
cccagcagagaugaggagggguc

SEQ ID NO: 1124136 - RNA, 22 nt, Human
gccuggcaaggcccuguugacu

SEQ ID NO: 1124137 - RNA, 20 nt, Human
gauuucaaagcagaguggcc

SEQ ID NO: 1124138 - RNA, 22 nt, Human
cagcucugcugggaggaugcag

SEQ ID NO: 1124139 - RNA, 22 nt, Human
acuuaguauuuuucagcuuuga

SEQ ID NO: 1124140 - RNA, 22 nt, Human
acuguguggaccacucugaggc

SEQ ID NO: 1124141 - RNA, 22 nt, Human
aggcagagagcaguggccgucu

SEQ ID NO: 1124142 - RNA, 22 nt, Human
cuuuggaagugaccacaauccu

SEQ ID NO: 1124143 - RNA, 22 nt, Human
ugucccagguccuagaugacca

SEQ ID NO: 1124144 - RNA, 22 nt, Human
uggaagccaggcccgcuccuaa

SEQ ID NO: 1124145 - RNA, 22 nt, Human
cacugcucgcugcagcauggcc

SEQ ID NO: 1124146 - RNA, 22 nt, Human
uuagcugcauuaucaaaguuau

SEQ ID NO: 1124147 - RNA, 22 nt, Human
ucucucuccuaguuuuuagugg

SEQ ID NO: 1124148 - RNA, 22 nt, Human
uaaagguagugugacauauugu

SEQ ID NO: 1124149 - RNA, 22 nt, Human
caguacuuaguucucaugguuu

SEQ ID NO: 1124150 - RNA, 22 nt, Human
cagccugcccuggaagcccagc

SEQ ID NO: 1124151 - RNA, 22 nt, Human
cccagccugucuuucccaauga

SEQ ID NO: 1124152 - RNA, 18 nt, Human
ccagagcuggcuccucgc

SEQ ID NO: 1124153 - RNA, 22 nt, Human
ccagcccugucaccaacuggag

SEQ ID NO: 1124154 - RNA, 22 nt, Human
gggcuuggcacaugggcucagc

SEQ ID NO: 1124155 - RNA, 22 nt, Human
cagcaauaagccagguuagaca

SEQ ID NO: 1124156 - RNA, 22 nt, Human
ucagaggagccaaaguucugag

SEQ ID NO: 1124157 - RNA, 22 nt, Human
acacaggaagucagcacugaug

SEQ ID NO: 1124158 - RNA, 22 nt, Human
uccaugguuucagucuggcugg

SEQ ID NO: 1124159 - RNA, 22 nt, Human
ugucucaggggcauugaaauaa

SEQ ID NO: 1124160 - RNA, 22 nt, Human
cucuggaauguuuacaugcccu

SEQ ID NO: 1124161 - RNA, 22 nt, Human
caagagcucaccggagagcauu

SEQ ID NO: 1124162 - RNA, 22 nt, Human
gcucaggaccgaggggugggaa

SEQ ID NO: 1124163 - RNA, 22 nt, Human
uaaaaguggauaagcuguagga

SEQ ID NO: 1124164 - RNA, 22 nt, Human
ugggggugugccagggaccucc

SEQ ID NO: 1124165 - RNA, 22 nt, Human
ccagcugauucgguggugguug

SEQ ID NO: 1124166 - RNA, 22 nt, Human
ccaggcucugucuggucagaag

SEQ ID NO: 1124167 - RNA, 22 nt, Human
uuaaacagguuuuugaauggcc

SEQ ID NO: 1124168 - RNA, 22 nt, Human
cagagacauuaagugccaugau

SEQ ID NO: 1124169 - RNA, 22 nt, Human
ggacacagauaaucacacagau

SEQ ID NO: 1124170 - RNA, 22 nt, Human
cacauugaaaugacccaauaau

SEQ ID NO: 1124171 - RNA, 22 nt, Human
acagacagauuuugucugaugu

SEQ ID NO: 1124172 - RNA, 17 nt, Human
cugcuuugugcaacgcu

SEQ ID NO: 1124173 - RNA, 22 nt, Human
gauuucaaggauguuagaggug

SEQ ID NO: 1124174 - RNA, 22 nt, Human
ucacuguaucauguugcacuua

SEQ ID NO: 1124175 - RNA, 22 nt, Human
uggagcagccaugaugacagag

SEQ ID NO: 1124176 - RNA, 22 nt, Human
gagcagcucugggugacccagu

SEQ ID NO: 1124177 - RNA, 22 nt, Human
caaauguguagagcuuuugggg

SEQ ID NO: 1124178 - RNA, 22 nt, Human
guggcugguuuccugcaugcaa

SEQ ID NO: 1124179 - RNA, 22 nt, Human
gcuggcuguuggagguaccugc

SEQ ID NO: 1124180 - RNA, 22 nt, Human
uggcuucugggacuugugagca

SEQ ID NO: 1124181 - RNA, 22 nt, Human
aggcagaaaauagucauccaaa

SEQ ID NO: 1124182 - RNA, 22 nt, Human
uaaaauguguuucuguaugguu

SEQ ID NO: 1124183 - RNA, 22 nt, Human
guucuccauucagcuuccugug

SEQ ID NO: 1124184 - RNA, 22 nt, Human
ugcccaagcagaggagugauuc

SEQ ID NO: 1124185 - RNA, 22 nt, Human
uggcucaggcuugaaaauagau

SEQ ID NO: 1124186 - RNA, 22 nt, Human
caggggcuagcacuuaauguuu

SEQ ID NO: 1124187 - RNA, 22 nt, Human
gcagcugaaagggaucucuaca

SEQ ID NO: 1124188 - RNA, 22 nt, Human
ucagcagaggggaaggcaucug

SEQ ID NO: 1124189 - RNA, 22 nt, Human
guggcucuaggugagcauggag

SEQ ID NO: 1124190 - RNA, 19 nt, Human
gggcuuggggcugaagccu

SEQ ID NO: 1124191 - RNA, 22 nt, Human
gcagggugugucucauacaguu

SEQ ID NO: 1124192 - RNA, 22 nt, Human
ggaggggccggcugccugccac

SEQ ID NO: 1124193 - RNA, 22 nt, Human
caggagugaaaugaggcccagg

SEQ ID NO: 1124194 - RNA, 22 nt, Human
aucagcaagauguaauuucuau

SEQ ID NO: 1124195 - RNA, 22 nt, Human
uguggcugacuccuggucccca

SEQ ID NO: 1124196 - RNA, 21 nt, Human
cagcaaaucauugggcagacu

SEQ ID NO: 1124197 - RNA, 22 nt, Human
cugggcacagcguugggcucuu

SEQ ID NO: 1124198 - RNA, 21 nt, Human
ccugagggugguugugaagau

SEQ ID NO: 1124199 - RNA, 22 nt, Human
gucagaggggcagcugccaggc

SEQ ID NO: 1124200 - RNA, 22 nt, Human
agagugggccucugagucccag

SEQ ID NO: 1124201 - RNA, 22 nt, Human
cagagcugcagauugaaggcau

SEQ ID NO: 1124202 - RNA, 22 nt, Human
gugcucuguguauuaggauguc

SEQ ID NO: 1124203 - RNA, 22 nt, Human
agaaaaggauugauggaucaga

SEQ ID NO: 1124204 - RNA, 22 nt, Human
agccucugcuuaugcaaaggua

SEQ ID NO: 1124205 - RNA, 22 nt, Human
ggacucagcagccaggaguggc

SEQ ID NO: 1124206 - RNA, 22 nt, Human
guuuucuuugaaugcuucuaga

SEQ ID NO: 1124207 - RNA, 22 nt, Human
gcucucuggguggugggcaaca

SEQ ID NO: 1124208 - RNA, 22 nt, Human
ccaagggcucugacuugccugc

SEQ ID NO: 1124209 - RNA, 22 nt, Human
ucucagagaccugaacucccug

SEQ ID NO: 1124210 - RNA, 19 nt, Human
caagugaagccugggaugg

SEQ ID NO: 1124211 - RNA, 22 nt, Human
cugaaggauuagagagcacuua

SEQ ID NO: 1124212 - RNA, 22 nt, Human
ucccagggacaccaagcuguuu

SEQ ID NO: 1124213 - RNA, 22 nt, Human
gcacugaacuuuaaucauuucu

SEQ ID NO: 1124214 - RNA, 22 nt, Human
uggcugggggugcuauagcugc

SEQ ID NO: 1124215 - RNA, 22 nt, Human
auaaggcagucacuggaauguu

SEQ ID NO: 1124216 - RNA, 22 nt, Human
aggcccugcccagugccacaag

SEQ ID NO: 1124217 - RNA, 22 nt, Human
uccuggauucugcccugaaggc

SEQ ID NO: 1124218 - RNA, 22 nt, Human
agggaggagaauggacuccuuc

SEQ ID NO: 1124219 - RNA, 23 nt, Human
uucaagauacgguuuccaggcug

SEQ ID NO: 1124220 - RNA, 22 nt, Human
aguuuuuccugauuuuacagaa

SEQ ID NO: 1124221 - RNA, 22 nt, Human
caggggcuguuugccucaggcc

SEQ ID NO: 1124222 - RNA, 22 nt, Human
agcugccacauggugucacugu

SEQ ID NO: 1124223 - RNA, 22 nt, Human
uuuccuucaucaucugagagcu

SEQ ID NO: 1124224 - RNA, 22 nt, Human
ugcugcacgauaaauaauuucu

SEQ ID NO: 1124225 - RNA, 22 nt, Human
gcacccagaauaaggacaggac

SEQ ID NO: 1124226 - RNA, 22 nt, Human
ccacagggaacaugacagccuu

SEQ ID NO: 1124227 - RNA, 22 nt, Human
cuggccaacuugcuuguuggca

SEQ ID NO: 1124228 - RNA, 22 nt, Human
cagcccuggaacagcugacuca

SEQ ID NO: 1124229 - RNA, 22 nt, Human
gagccuggggacccuccugagu

SEQ ID NO: 1124230 - RNA, 22 nt, Human
gccuccugguugcuucuccaac

SEQ ID NO: 1124231 - RNA, 22 nt, Human
gggagcugagcuggaagagaau

SEQ ID NO: 1124232 - RNA, 19 nt, Human
aggcucugagcuccuggag

SEQ ID NO: 1124233 - RNA, 22 nt, Human
ucucagaggugcccuggcaucu

SEQ ID NO: 1124234 - RNA, 22 nt, Human
cagaggccuauccaguguccau

SEQ ID NO: 1124235 - RNA, 22 nt, Human
uguacaugugucuguauaucuu

SEQ ID NO: 1124236 - RNA, 22 nt, Human
cugcugagguccuugcucagac

SEQ ID NO: 1124237 - RNA, 22 nt, Human
uggcagcagccauggaaggccc

SEQ ID NO: 1124238 - RNA, 22 nt, Human
cagggccauaucuugugcacca

SEQ ID NO: 1124239 - RNA, 22 nt, Human
ucugucaggagauuggcagcug

SEQ ID NO: 1124240 - RNA, 22 nt, Human
caguggcaugguugacugcagu

SEQ ID NO: 1124241 - RNA, 22 nt, Human
uacaaacuuguuuuaaguaagu

SEQ ID NO: 1124242 - RNA, 22 nt, Human
ucccagagaagagcuggaugga

SEQ ID NO: 1124243 - RNA, 22 nt, Human
cugcagccuccugggguacaug

SEQ ID NO: 1124244 - RNA, 19 nt, Human
ucugucacuggggguauuc

SEQ ID NO: 1124245 - RNA, 22 nt, Human
gccaggcuguggggaacuugaa

SEQ ID NO: 1124246 - RNA, 22 nt, Human
aaaaguuuaagacucauucuag

SEQ ID NO: 1124247 - RNA, 22 nt, Human
aagcacagaaaaggagcaugga

SEQ ID NO: 1124248 - RNA, 22 nt, Human
acagaguaucuaucaggaguau

SEQ ID NO: 1124249 - RNA, 22 nt, Human
gcucccacaaccuucuugcucc

SEQ ID NO: 1124250 - RNA, 22 nt, Human
aucuagaaguggcaugaauuac

SEQ ID NO: 1124251 - RNA, 22 nt, Human
agagccuugaagaucuggaaaa

SEQ ID NO: 1124252 - RNA, 23 nt, Human
gcccaugcuguugggcccgagca

SEQ ID NO: 1124253 - RNA, 22 nt, Human
gccacagggcagaugcgcagag

SEQ ID NO: 1124254 - RNA, 22 nt, Human
ugcacacacaugaaguagcaug

SEQ ID NO: 1124255 - RNA, 22 nt, Human
ccucugaguccucccugguugc

SEQ ID NO: 1124256 - RNA, 22 nt, Human
gcuggccauggccugcgccauc

SEQ ID NO: 1124257 - RNA, 22 nt, Human
auucacagggacaaugggagag

SEQ ID NO: 1124258 - RNA, 22 nt, Human
caucacuguccucagcauucca

SEQ ID NO: 1124259 - RNA, 22 nt, Human
ugucccaggccucauguugcca

SEQ ID NO: 1124260 - RNA, 22 nt, Human
uccugccuugccugggacauca

SEQ ID NO: 1124261 - RNA, 22 nt, Human
cagggccuccuaaggcaucuaa

SEQ ID NO: 1124262 - RNA, 23 nt, Human
aguguuccaguugguugagagug

SEQ ID NO: 1124263 - RNA, 22 nt, Human
augucuuucgcaucaguagcua

SEQ ID NO: 1124264 - RNA, 22 nt, Human
ucugagagccucuagccuaagu

SEQ ID NO: 1124265 - RNA, 22 nt, Human
augucuaaaagauaaaguuuaa

SEQ ID NO: 1124266 - RNA, 22 nt, Human
uuccuguauucuaaagggaaag

SEQ ID NO: 1124267 - RNA, 22 nt, Human
cuacauuucccagcugccuucc

SEQ ID NO: 1124268 - RNA, 22 nt, Human
ucagggacuaggugcugccuga

SEQ ID NO: 1124269 - RNA, 22 nt, Human
aggagagagaacacuugggucc

SEQ ID NO: 1124270 - RNA, 22 nt, Human
gccagggagucugggccacaga

SEQ ID NO: 1124271 - RNA, 22 nt, Human
uucaaucauuagaaucucaggc

SEQ ID NO: 1124272 - RNA, 21 nt, Human
uagcacuucgcuguaauuggg

SEQ ID NO: 1124273 - RNA, 22 nt, Human
acuuuguauaagacaauaaaga

SEQ ID NO: 1124274 - RNA, 22 nt, Human
ucuggccaggauggcaagacca

SEQ ID NO: 1124275 - RNA, 22 nt, Human
ucuuuccuuagaauaauucuuu

SEQ ID NO: 1124276 - RNA, 22 nt, Human
gggcaugagagggcagcuggca

SEQ ID NO: 1124277 - RNA, 22 nt, Human
caggcuggagugcaguugugca

SEQ ID NO: 1124278 - RNA, 22 nt, Human
ucugccagugguuuggcccuga

SEQ ID NO: 1124279 - RNA, 22 nt, Human
cauuaucugccauugacaccau

SEQ ID NO: 1124280 - RNA, 22 nt, Human
ccuggcagcagcacaugccuuc

SEQ ID NO: 1124281 - RNA, 22 nt, Human
ucagaaauacuaucagcuuuug

SEQ ID NO: 1124282 - RNA, 22 nt, Human
gccagcccagcuccaggggaaa

SEQ ID NO: 1124283 - RNA, 22 nt, Human
uggggcuguggauucucacgaa

SEQ ID NO: 1124284 - RNA, 22 nt, Human
uggcuccuaggauggugccugg

SEQ ID NO: 1124285 - RNA, 21 nt, Human
gcagccagccgagaccaugcc

SEQ ID NO: 1124286 - RNA, 22 nt, Human
ucuccaagcagggcugcaaggc

SEQ ID NO: 1124287 - RNA, 22 nt, Human
cauuuagaaacuguuuuuaaca

SEQ ID NO: 1124288 - RNA, 22 nt, Human
gauucugagcugguguuuuacg

SEQ ID NO: 1124289 - RNA, 22 nt, Human
ugcuagaauaccuaccuggagg

SEQ ID NO: 1124290 - RNA, 22 nt, Human
ggcuggcucagggcuugagaga

SEQ ID NO: 1124291 - RNA, 22 nt, Human
cucaggauucucgacacucaca

SEQ ID NO: 1124292 - RNA, 22 nt, Human
agagcagcacguuguccccaca

SEQ ID NO: 1124293 - RNA, 22 nt, Human
uccagcagaccaucaaggcuca

SEQ ID NO: 1124294 - RNA, 22 nt, Human
cagcuccugccugggcagcugu

SEQ ID NO: 1124295 - RNA, 20 nt, Human
accauaauguuaauuacaaa

SEQ ID NO: 1124296 - RNA, 22 nt, Human
ucuggagaacuugcaagaggau

SEQ ID NO: 1124297 - RNA, 22 nt, Human
uugaagauggaucgccacucuc

SEQ ID NO: 1124298 - RNA, 22 nt, Human
guggagacgggacagaagcuaa

SEQ ID NO: 1124299 - RNA, 18 nt, Human
gagguccugcucuagccc

SEQ ID NO: 1124300 - RNA, 22 nt, Human
ggcucaggaccugggauugcca

SEQ ID NO: 1124301 - RNA, 22 nt, Human
gcagagccugggggucugcgga

SEQ ID NO: 1124302 - RNA, 22 nt, Human
ggagcauguggggugagcaggg

SEQ ID NO: 1124303 - RNA, 22 nt, Human
cauugcugugggcauuugcugc

SEQ ID NO: 1124304 - RNA, 22 nt, Human
agcugcaguaaagcucuccagg

SEQ ID NO: 1124305 - RNA, 22 nt, Human
cacauuucugugagucaauauu

SEQ ID NO: 1124306 - RNA, 21 nt, Human
ugcaugcuauguuuuuauuuc

SEQ ID NO: 1124307 - RNA, 22 nt, Human
gggagccuugggagugccagcc

SEQ ID NO: 1124308 - RNA, 22 nt, Human
cagcuugggaguuugguuuuau

SEQ ID NO: 1124309 - RNA, 22 nt, Human
gaaggaagucauuagugcagac

SEQ ID NO: 1124310 - RNA, 22 nt, Human
ugccuucaaucaggauggucuc

SEQ ID NO: 1124311 - RNA, 22 nt, Human
auguaucaugcaggguccauga

SEQ ID NO: 1124312 - RNA, 22 nt, Human
acuccuggguugcaguccucaa

SEQ ID NO: 1124313 - RNA, 22 nt, Human
gcuggagccaagcugcucuugg

SEQ ID NO: 1124314 - RNA, 22 nt, Human
cauggaaggcaaaagacacaga

SEQ ID NO: 1124315 - RNA, 22 nt, Human
ccagggcuccauugcucauccu

SEQ ID NO: 1124316 - RNA, 22 nt, Human
uccuucagggggccgccugcac

SEQ ID NO: 1124317 - RNA, 22 nt, Human
ucucagagaggggccgggccuu

SEQ ID NO: 1124318 - RNA, 22 nt, Human
gugcuuaauacaugucaauaac

SEQ ID NO: 1124319 - RNA, 22 nt, Human
uucaaugauuuuuagggaucau

SEQ ID NO: 1124320 - RNA, 22 nt, Human
cucuggacagcaggugcugugg

SEQ ID NO: 1124321 - RNA, 22 nt, Human
cuggcagcauuaacagagagca

SEQ ID NO: 1124322 - RNA, 22 nt, Human
cucuccagaucugcugagccag

SEQ ID NO: 1124323 - RNA, 22 nt, Human
uggccacccagcugacgccuuc

SEQ ID NO: 1124324 - RNA, 22 nt, Human
guggcucucgccagccugcggg

SEQ ID NO: 1124325 - RNA, 22 nt, Human
augaagucugcacaugcaugug

SEQ ID NO: 1124326 - RNA, 22 nt, Human
aaaagggacuacucucagcucc

SEQ ID NO: 1124327 - RNA, 22 nt, Human
guuuguaugaauguuuuaugcu

SEQ ID NO: 1124328 - RNA, 22 nt, Human
aggcagcaugcucugcuucuac

SEQ ID NO: 1124329 - RNA, 22 nt, Human
gcagagcuguuaauggagcuga

SEQ ID NO: 1124330 - RNA, 19 nt, Human
agcaaauauaauaguguuc

SEQ ID NO: 1124331 - RNA, 22 nt, Human
agccagagagccccagguucua

SEQ ID NO: 1124332 - RNA, 22 nt, Human
gcagccacucucauuccacgug

SEQ ID NO: 1124333 - RNA, 22 nt, Human
ucacugaagacugggcucuaaa

SEQ ID NO: 1124334 - RNA, 22 nt, Human
aaaauaucagcaaagggugaca

SEQ ID NO: 1124335 - RNA, 22 nt, Human
gggcuggucuggcuuagucagg

SEQ ID NO: 1124336 - RNA, 22 nt, Human
ugauuucccuguagccucugaa

SEQ ID NO: 1124337 - RNA, 22 nt, Human
guauuuucaagagcaguaguau

SEQ ID NO: 1124338 - RNA, 22 nt, Human
agugugggugagggaggcccuc

SEQ ID NO: 1124339 - RNA, 22 nt, Human
agccuggaggaggaguugagca

SEQ ID NO: 1124340 - RNA, 22 nt, Human
acugcuuuagaccuagagcucu

SEQ ID NO: 1124341 - RNA, 22 nt, Human
acagaauuaucaggaaauguua

SEQ ID NO: 1124342 - RNA, 22 nt, Human
acaaaugcagcauaaagugaac

SEQ ID NO: 1124343 - RNA, 22 nt, Human
cugaaggagaaggccacuguuc

SEQ ID NO: 1124344 - RNA, 22 nt, Human
cuggccgguauuugccucuggg

SEQ ID NO: 1124345 - RNA, 22 nt, Human
cucugggcuuguugaccugcac

SEQ ID NO: 1124346 - RNA, 22 nt, Human
aggcccuggguuagggcccacu

SEQ ID NO: 1124347 - RNA, 22 nt, Human
uggccuggcugcccugucugga

SEQ ID NO: 1124348 - RNA, 22 nt, Human
auggcagccuguggacagucaa

SEQ ID NO: 1124349 - RNA, 22 nt, Human
gucccagggagguucagggcuu

SEQ ID NO: 1124350 - RNA, 22 nt, Human
ucauugcagugauguuguaugu

SEQ ID NO: 1124351 - RNA, 22 nt, Human
ucuccuggucaccucagaaguc

SEQ ID NO: 1124352 - RNA, 22 nt, Human
guggccagcaagugcugccucu

SEQ ID NO: 1124353 - RNA, 20 nt, Human
aggcagagcgcacuuuuaga

SEQ ID NO: 1124354 - RNA, 22 nt, Human
ccucagagccuccagaaggaau

SEQ ID NO: 1124355 - RNA, 22 nt, Human
gugcugcucacaucuggaggua

SEQ ID NO: 1124356 - RNA, 22 nt, Human
acaaagucuuuuacaacaguca

SEQ ID NO: 1124357 - RNA, 22 nt, Human
cuugccuguggcuaguuggcuc

SEQ ID NO: 1124358 - RNA, 22 nt, Human
cacacaggaugaagcagcagaa

SEQ ID NO: 1124359 - RNA, 22 nt, Human
agcaguggaccucagugcuauu

SEQ ID NO: 1124360 - RNA, 22 nt, Human
guguguccucaguaguggcaug

SEQ ID NO: 1124361 - RNA, 22 nt, Human
ucucauucauacccuacaugcu

SEQ ID NO: 1124362 - RNA, 22 nt, Human
ucccagagccucugccacucug

SEQ ID NO: 1124363 - RNA, 22 nt, Human
gcacacaguauaugcucauuaa

SEQ ID NO: 1124364 - RNA, 22 nt, Human
ggugcucaagagggcauccucu

SEQ ID NO: 1124365 - RNA, 22 nt, Human
aaguuugugucagagcuguuac

SEQ ID NO: 1124366 - RNA, 22 nt, Human
cagagcugcacauucuaugaug

SEQ ID NO: 1124367 - RNA, 22 nt, Human
cugggaggcagucucucuagaa

SEQ ID NO: 1124368 - RNA, 22 nt, Human
gaugcacuugccccuccucaga

SEQ ID NO: 1124369 - RNA, 22 nt, Human
ugcuguagcccugcacagugca

SEQ ID NO: 1124370 - RNA, 22 nt, Human
gggagcuguaguccagauaccg

SEQ ID NO: 1124371 - RNA, 22 nt, Human
gccuaggaguacagaaugguuu

SEQ ID NO: 1124372 - RNA, 22 nt, Human
caaggagaaaacggcuucugaa

SEQ ID NO: 1124373 - RNA, 22 nt, Human
accucuggccuucaggcaucau

SEQ ID NO: 1124374 - RNA, 22 nt, Human
caggcagccugagggaucuggg

SEQ ID NO: 1124375 - RNA, 22 nt, Human
uggguagagacacagucugggg

SEQ ID NO: 1124376 - RNA, 22 nt, Human
cuggcucagugccuucagaagu

SEQ ID NO: 1124377 - RNA, 22 nt, Human
uacuguauuugauaagugaagu

SEQ ID NO: 1124378 - RNA, 22 nt, Human
ggcaccuggauguagcagugaa

SEQ ID NO: 1124379 - RNA, 22 nt, Human
uauaucuuauaugugcagguac

SEQ ID NO: 1124380 - RNA, 22 nt, Human
agaauuguaagcaauuugauua

SEQ ID NO: 1124381 - RNA, 22 nt, Human
aggaagccaugguggacgucua

SEQ ID NO: 1124382 - RNA, 22 nt, Human
ugcuauugugaacagugccaca

SEQ ID NO: 1124383 - RNA, 22 nt, Human
cuucaucaacucuaacaaaugu

SEQ ID NO: 1124384 - RNA, 22 nt, Human
cagucacauggaugauggauag

SEQ ID NO: 1124385 - RNA, 22 nt, Human
ugcucagggacaauggagaggg

SEQ ID NO: 1124386 - RNA, 22 nt, Human
uuuaaauaggacuccugggggu

SEQ ID NO: 1124387 - RNA, 22 nt, Human
aacaaauguaaaaugcagaugc

SEQ ID NO: 1124388 - RNA, 22 nt, Human
ugagccagaguggagugugccu

SEQ ID NO: 1124389 - RNA, 22 nt, Human
ccuggugccacuagagaauguc

SEQ ID NO: 1124390 - RNA, 22 nt, Human
gcuuuguguagaaggaggaugg

SEQ ID NO: 1124391 - RNA, 22 nt, Human
cauugaaaccuaacauaggcug

SEQ ID NO: 1124392 - RNA, 23 nt, Human
uggagaugccccacucccugucu

SEQ ID NO: 1124393 - RNA, 22 nt, Human
gcaggggcugcugggaacucgg

SEQ ID NO: 1124394 - RNA, 22 nt, Human
ugccucagaguugucccuacca

SEQ ID NO: 1124395 - RNA, 19 nt, Human
ugaagcagcaaacucucag

SEQ ID NO: 1124396 - RNA, 22 nt, Human
aacauuuaugguagucauugca

SEQ ID NO: 1124397 - RNA, 22 nt, Human
ggaccagagaagugagcaccug

SEQ ID NO: 1124398 - RNA, 22 nt, Human
cucucugcuguauccuuaggcu

SEQ ID NO: 1124399 - RNA, 22 nt, Human
cucaccacagagccuguccagc

SEQ ID NO: 1124400 - RNA, 22 nt, Human
acuuggagagcauugcugggga

SEQ ID NO: 1124401 - RNA, 22 nt, Human
aagucagagcaacugagacauu

SEQ ID NO: 1124402 - RNA, 22 nt, Human
uccugagauaaaucucauguga

SEQ ID NO: 1124403 - RNA, 23 nt, Human
aggcccugccugucccucuuuuu

SEQ ID NO: 1124404 - RNA, 22 nt, Human
aaauguguuccuuugcuacaga

SEQ ID NO: 1124405 - RNA, 22 nt, Human
ugccaggcccugugcuggaugc

SEQ ID NO: 1124406 - RNA, 22 nt, Human
uguaagauauucagcuuauuga

SEQ ID NO: 1124407 - RNA, 22 nt, Human
agugcacagcgugauguauugg

SEQ ID NO: 1124408 - RNA, 22 nt, Human
cuggagaggcugggaacagguu

SEQ ID NO: 1124409 - RNA, 23 nt, Human
gccaggcuccggucuguggccac

SEQ ID NO: 1124410 - RNA, 22 nt, Human
uuugcauugcagugguuuacag

SEQ ID NO: 1124411 - RNA, 22 nt, Human
gggccuguguguucaggagccu

SEQ ID NO: 1124412 - RNA, 19 nt, Human
guggccagggcaggggcug

SEQ ID NO: 1124413 - RNA, 22 nt, Human
auucagcauaaucaguagcuug

SEQ ID NO: 1124414 - RNA, 22 nt, Human
aggccugagguuccugugcuca

SEQ ID NO: 1124415 - RNA, 22 nt, Human
ccugccugcagaaaguaucucc

SEQ ID NO: 1124416 - RNA, 22 nt, Human
guuggccugaauggucaagagg

SEQ ID NO: 1124417 - RNA, 22 nt, Human
ugcagucuuccagcugcacaaa

SEQ ID NO: 1124418 - RNA, 22 nt, Human
caugaagcacagcucucuuuuu

SEQ ID NO: 1124419 - RNA, 22 nt, Human
uggcucagaugcucuuccagug

SEQ ID NO: 1124420 - RNA, 22 nt, Human
agcagggcuucugugccugugc

SEQ ID NO: 1124421 - RNA, 22 nt, Human
agcugguucagaaauuagaugg

SEQ ID NO: 1124422 - RNA, 22 nt, Human
uuccaguuaaggaagcuauucu

SEQ ID NO: 1124423 - RNA, 22 nt, Human
cugugcccuggccaggccucuc

SEQ ID NO: 1124424 - RNA, 22 nt, Human
ggcaggcaggagcgugcuuggg

SEQ ID NO: 1124425 - RNA, 22 nt, Human
uauaaaguuggggcugaaguaa

SEQ ID NO: 1124426 - RNA, 22 nt, Human
guggcagcggcccaggccgucu

SEQ ID NO: 1124427 - RNA, 22 nt, Human
caggcuggaguuaccuuuaggg

SEQ ID NO: 1124428 - RNA, 22 nt, Human
caaagguauucucauuuuggaa

SEQ ID NO: 1124429 - RNA, 22 nt, Human
auguuaaaugguuuauuauuaa

SEQ ID NO: 1124430 - RNA, 22 nt, Human
acagaaugcguagugcauguug

SEQ ID NO: 1124431 - RNA, 22 nt, Human
cacagcuuguuuagugacucac

SEQ ID NO: 1124432 - RNA, 22 nt, Human
uccuucagucuucugagccaua

SEQ ID NO: 1124433 - RNA, 22 nt, Human
uucaacacaggaacaugauaua

SEQ ID NO: 1124434 - RNA, 20 nt, Human
uacagaaacaggacuuuugg

SEQ ID NO: 1124435 - RNA, 22 nt, Human
cugggggcaauggucagagugu

SEQ ID NO: 1124436 - RNA, 22 nt, Human
ccagcagacacacaggcguggg

SEQ ID NO: 1124437 - RNA, 22 nt, Human
auacaguauuaccuguucagga

SEQ ID NO: 1124438 - RNA, 22 nt, Human
caggcagccuucucgucucaca

SEQ ID NO: 1124439 - RNA, 22 nt, Human
aaaucacuaaguuauagugugg

SEQ ID NO: 1124440 - RNA, 22 nt, Human
ggccugagucacaucaggagag

SEQ ID NO: 1124441 - RNA, 22 nt, Human
uccuuucaccaaaaaguguugu

SEQ ID NO: 1124442 - RNA, 22 nt, Human
gaaugcagauggcugguguaug

SEQ ID NO: 1124443 - RNA, 19 nt, Human
gcccugcaggagguggggc

SEQ ID NO: 1124444 - RNA, 22 nt, Human
ucucagagagcuguguuuuccu

SEQ ID NO: 1124445 - RNA, 22 nt, Human
agaggcuccaccuucucugucc

SEQ ID NO: 1124446 - RNA, 22 nt, Human
ggccucuguuuggagccaggau

SEQ ID NO: 1124447 - RNA, 22 nt, Human
gccugccucaaaaucccaguuc

SEQ ID NO: 1124448 - RNA, 22 nt, Human
uucauucauuacgugccaggca

SEQ ID NO: 1124449 - RNA, 23 nt, Human
aaucuggcugauguuuuuucucu

SEQ ID NO: 1124450 - RNA, 20 nt, Human
ugucagugccugaggcacag

SEQ ID NO: 1124451 - RNA, 22 nt, Human
gcugccugauguccagcaggac

SEQ ID NO: 1124452 - RNA, 19 nt, Human
ggcugccuggagcgagggc

SEQ ID NO: 1124453 - RNA, 23 nt, Human
aaaguugauuugcaguuuaagag

SEQ ID NO: 1124454 - RNA, 22 nt, Human
guuugaaaaaagcaguauguaa

SEQ ID NO: 1124455 - RNA, 22 nt, Human
aaggccaugcacauccuaggca

SEQ ID NO: 1124456 - RNA, 22 nt, Human
uuaugcuaaaugaaucaaguca

SEQ ID NO: 1124457 - RNA, 22 nt, Human
ccugccugggcucacuugccag

SEQ ID NO: 1124458 - RNA, 20 nt, Human
cagcugccuggcucugggau

SEQ ID NO: 1124459 - RNA, 22 nt, Human
gcuggccugcgagggcaggcug

SEQ ID NO: 1124460 - RNA, 22 nt, Human
aagccaggcaugcuuggacagu

SEQ ID NO: 1124461 - RNA, 22 nt, Human
uacaguaaccagucuacuuaga

SEQ ID NO: 1124462 - RNA, 22 nt, Human
guaacacagaaaugaaauucca

SEQ ID NO: 1124463 - RNA, 22 nt, Human
auaugugugccauuucagcagu

SEQ ID NO: 1124464 - RNA, 22 nt, Human
aucuuuuacuacaaaucaggug

SEQ ID NO: 1124465 - RNA, 22 nt, Human
ccugcagguugcagaggcggaa

SEQ ID NO: 1124466 - RNA, 22 nt, Human
ucauggcacuuagcacaguccu

SEQ ID NO: 1124467 - RNA, 22 nt, Human
cugucucuguugccuguaggug

SEQ ID NO: 1124468 - RNA, 22 nt, Human
ucaugcccagagcaguaaauua

SEQ ID NO: 1124469 - RNA, 22 nt, Human
cuguccuguggaccugaggacg

SEQ ID NO: 1124470 - RNA, 23 nt, Human
ucccagccucuucucuugcauac

SEQ ID NO: 1124471 - RNA, 23 nt, Human
agggcugaugccauugcagcucu

SEQ ID NO: 1124472 - RNA, 22 nt, Human
ucuguuccauguuuuguuccau

SEQ ID NO: 1124473 - RNA, 22 nt, Human
auuuaucaccaguuagcugacu

SEQ ID NO: 1124474 - RNA, 22 nt, Human
ggcucuggagcacagacgucug

SEQ ID NO: 1124475 - RNA, 22 nt, Human
uuuuccuaguaggccuauuaga

SEQ ID NO: 1124476 - RNA, 21 nt, Human
ugcagcugacacugguaugcc

SEQ ID NO: 1124477 - RNA, 22 nt, Human
ugggguggauagaaagugaugu

SEQ ID NO: 1124478 - RNA, 22 nt, Human
aaggcacuagcaagcugccugg

SEQ ID NO: 1124479 - RNA, 22 nt, Human
caagagcuacccugugccauau

SEQ ID NO: 1124480 - RNA, 22 nt, Human
ugagccagauaagggcucacgc

SEQ ID NO: 1124481 - RNA, 22 nt, Human
cucugggcaaguaugauagaaa

SEQ ID NO: 1124482 - RNA, 22 nt, Human
gccuggagugguccugcugccc

SEQ ID NO: 1124483 - RNA, 22 nt, Human
cacaccuguaauaccagcuacu

SEQ ID NO: 1124484 - RNA, 22 nt, Human
gagcacagcuggagguagcauu

SEQ ID NO: 1124485 - RNA, 22 nt, Human
cugcccugagggccuguguguu

SEQ ID NO: 1124486 - RNA, 22 nt, Human
cacagugcaugaugggcagaag

SEQ ID NO: 1124487 - RNA, 22 nt, Human
ugggccugaguuugggaacugg

SEQ ID NO: 1124488 - RNA, 22 nt, Human
ucucagagugguggucccucug

SEQ ID NO: 1124489 - RNA, 22 nt, Human
agccuguggaucccugcacugg

SEQ ID NO: 1124490 - RNA, 22 nt, Human
gagaaagauguaggcugggagg

SEQ ID NO: 1124491 - RNA, 22 nt, Human
gccagagcagaauagaguggcc

SEQ ID NO: 1124492 - RNA, 22 nt, Human
uugaagcagagaaauacuugaa

SEQ ID NO: 1124493 - RNA, 19 nt, Human
uccuuugaauaucaguuga

SEQ ID NO: 1124494 - RNA, 22 nt, Human
cacugaagccugggaguaagac

SEQ ID NO: 1124495 - RNA, 22 nt, Human
acagcaggauuuggcgauguug

SEQ ID NO: 1124496 - RNA, 18 nt, Human
aggcccuggccucgaaca

SEQ ID NO: 1124497 - RNA, 19 nt, Human
uggcagcauugguaccuug

SEQ ID NO: 1124498 - RNA, 22 nt, Human
ucacaugcucaccuaagccaca

SEQ ID NO: 1124499 - RNA, 22 nt, Human
gagcucauucauucauugccug

SEQ ID NO: 1124500 - RNA, 22 nt, Human
gggcuggaucuccugcaggcag

SEQ ID NO: 1124501 - RNA, 22 nt, Human
uccagggacacagaguccuucu

SEQ ID NO: 1124502 - RNA, 22 nt, Human
gcagagugggagcccagggcug

SEQ ID NO: 1124503 - RNA, 22 nt, Human
ugcagagggacagccacagcuc

SEQ ID NO: 1124504 - RNA, 22 nt, Human
agcagagccaggucucucugua

SEQ ID NO: 1124505 - RNA, 22 nt, Human
ccaggcagccaagugugugugu

SEQ ID NO: 1124506 - RNA, 19 nt, Human
ugaaggagggggauggcca

SEQ ID NO: 1124507 - RNA, 22 nt, Human
uuguccuuaccucaaucuggaa

SEQ ID NO: 1124508 - RNA, 22 nt, Human
gcagagaaaguuuuguccucag

SEQ ID NO: 1124509 - RNA, 23 nt, Human
uuucauaugguguggaugaagaa

SEQ ID NO: 1124510 - RNA, 22 nt, Human
gaggcugccccuuccucagcug

SEQ ID NO: 1124511 - RNA, 22 nt, Human
gcaggagagccagcaggcuucc

SEQ ID NO: 1124512 - RNA, 23 nt, Human
auaagccuuuucuuucugcccca

SEQ ID NO: 1124513 - RNA, 21 nt, Human
ugcagcagaguaagcagggga

SEQ ID NO: 1124514 - RNA, 22 nt, Human
gcuggagcugcagccugggccu

SEQ ID NO: 1124515 - RNA, 22 nt, Human
uccagccuaauguucuucccac

SEQ ID NO: 1124516 - RNA, 22 nt, Human
uggccacagccucugccaguuc

SEQ ID NO: 1124517 - RNA, 22 nt, Human
aaaguucagauuagacucaaga

SEQ ID NO: 1124518 - RNA, 22 nt, Human
agcagcugaucaaagcacuuau

SEQ ID NO: 1124519 - RNA, 22 nt, Human
aguguuucucagaagggccuau

SEQ ID NO: 1124520 - RNA, 22 nt, Human
aacagcagggggaccugcuggu

SEQ ID NO: 1124521 - RNA, 22 nt, Human
agcugguucauucauucauggu

SEQ ID NO: 1124522 - RNA, 22 nt, Human
uggcuggggccugaauccugca

SEQ ID NO: 1124523 - RNA, 22 nt, Human
caagaacaguuugccaaauugg

SEQ ID NO: 1124524 - RNA, 22 nt, Human
gggcucuggaaggugcaccaug

SEQ ID NO: 1124525 - RNA, 22 nt, Human
uguccucuaauuggccucuugc

SEQ ID NO: 1124526 - RNA, 22 nt, Human
cagcccuggugccaagguuccc

SEQ ID NO: 1124527 - RNA, 22 nt, Human
ggcccucccugagccagguggg

SEQ ID NO: 1124528 - RNA, 22 nt, Human
uuacuuuguucucaagauaugu

SEQ ID NO: 1124529 - RNA, 20 nt, Human
uauauuuucucuuuggccuu

SEQ ID NO: 1124530 - RNA, 22 nt, Human
ucugugacuugcgggaggagaa

SEQ ID NO: 1124531 - RNA, 22 nt, Human
ugcacccucaucagucaaaugg

SEQ ID NO: 1124532 - RNA, 22 nt, Human
gcagauggugccaugucuugug

SEQ ID NO: 1124533 - RNA, 22 nt, Human
gcaguggcuaagcucgcaugca

SEQ ID NO: 1124534 - RNA, 22 nt, Human
uauccuuguacuauaguauuua

SEQ ID NO: 1124535 - RNA, 22 nt, Human
agggcagcagcuccuccuagcu

SEQ ID NO: 1124536 - RNA, 22 nt, Human
aaaaauguuaucuacuguccga

SEQ ID NO: 1124537 - RNA, 22 nt, Human
gcauaauauacaugcuugaucc

SEQ ID NO: 1124538 - RNA, 22 nt, Human
aaguuucauguggagguagacu

SEQ ID NO: 1124539 - RNA, 22 nt, Human
guggagccaggggcuguaggua

SEQ ID NO: 1124540 - RNA, 22 nt, Human
cacuucaauuaacuucagcauu

SEQ ID NO: 1124541 - RNA, 22 nt, Human
cauguacaaaaggcaaaugccu

SEQ ID NO: 1124542 - RNA, 22 nt, Human
gagcuggugaucagcuggagga

SEQ ID NO: 1124543 - RNA, 22 nt, Human
caagagcucccagaccugggca

SEQ ID NO: 1124544 - RNA, 22 nt, Human
ucugccuugagguccucagcuc

SEQ ID NO: 1124545 - RNA, 22 nt, Human
cugggcaguuuuacaucauugc

SEQ ID NO: 1124546 - RNA, 22 nt, Human
ucucagaguuuuuuuccaggac

SEQ ID NO: 1124547 - RNA, 22 nt, Human
agccacaggaaacagagacagc

SEQ ID NO: 1124548 - RNA, 19 nt, Human
uggcuuccaucucucucau

SEQ ID NO: 1124549 - RNA, 22 nt, Human
cugcccugacugaccuuuugaa

SEQ ID NO: 1124550 - RNA, 22 nt, Human
gguggccucucaugcaagguag

SEQ ID NO: 1124551 - RNA, 22 nt, Human
gagcagagacaguacaacuggc

SEQ ID NO: 1124552 - RNA, 17 nt, Human
uguuccauuugaccacc

SEQ ID NO: 1124553 - RNA, 22 nt, Human
agcuggaggggccagcaggugu

SEQ ID NO: 1124554 - RNA, 22 nt, Human
agggacacaugugauuauuuau

SEQ ID NO: 1124555 - RNA, 22 nt, Human
ccagggucuuggagaggagugc

SEQ ID NO: 1124556 - RNA, 22 nt, Human
acagggcagguggcuacugguc

SEQ ID NO: 1124557 - RNA, 22 nt, Human
ggggacccucaggacugcgucu

SEQ ID NO: 1124558 - RNA, 22 nt, Human
ccugggcaggaugggcccggug

SEQ ID NO: 1124559 - RNA, 22 nt, Human
cagcuggggcagccacgugcgg

SEQ ID NO: 1124560 - RNA, 22 nt, Human
ccugccagugaagcugacgggc

SEQ ID NO: 1124561 - RNA, 22 nt, Human
agcaccugcacaguggaggaaa

SEQ ID NO: 1124562 - RNA, 22 nt, Human
ugugccagccucuggcuguguc

SEQ ID NO: 1124563 - RNA, 22 nt, Human
uaaauucuacaacuucaaagau

SEQ ID NO: 1124564 - RNA, 22 nt, Human
uucaagaugcacaguggcauuc

SEQ ID NO: 1124565 - RNA, 22 nt, Human
ccagcccugaacccugcugcau

SEQ ID NO: 1124566 - RNA, 22 nt, Human
ugacuucaaaggcucuacuccu

SEQ ID NO: 1124567 - RNA, 22 nt, Human
cagaguguuucuuugggugggu

SEQ ID NO: 1124568 - RNA, 22 nt, Human
acuuucucccacccacccgucu

SEQ ID NO: 1124569 - RNA, 22 nt, Human
gcugccucugcgacucugggcg

SEQ ID NO: 1124570 - RNA, 17 nt, Human
ggcugcugugcuggugc

SEQ ID NO: 1124571 - RNA, 22 nt, Human
ccagggcaacgcugucucagag

SEQ ID NO: 1124572 - RNA, 22 nt, Human
gagcucagcacuaaaaucaugu

SEQ ID NO: 1124573 - RNA, 22 nt, Human
ggagagagaugccgccuugcuc

SEQ ID NO: 1124574 - RNA, 22 nt, Human
gcucugaggcugugaggugcug

SEQ ID NO: 1124575 - RNA, 22 nt, Human
ugcaggagcagagauggcugga

SEQ ID NO: 1124576 - RNA, 22 nt, Human
ucuggcagggguucugcacuug

SEQ ID NO: 1124577 - RNA, 22 nt, Human
cauuccuuaacguggggagucu

SEQ ID NO: 1124578 - RNA, 22 nt, Human
guccucuggaagaugaguucuu

SEQ ID NO: 1124579 - RNA, 22 nt, Human
acuggcucagaguuccuagaga

SEQ ID NO: 1124580 - RNA, 22 nt, Human
cugagcugggaguagagacucu

SEQ ID NO: 1124581 - RNA, 22 nt, Human
acucagaguuugcguuccauac

SEQ ID NO: 1124582 - RNA, 22 nt, Human
gagcagaacuacucacauaucg

SEQ ID NO: 1124583 - RNA, 22 nt, Human
aggugcugccccgagaaggaug

SEQ ID NO: 1124584 - RNA, 22 nt, Human
uucacagggccacuggcaggag

SEQ ID NO: 1124585 - RNA, 22 nt, Human
caguggccaugguggcaggggu

SEQ ID NO: 1124586 - RNA, 22 nt, Human
ggcaggugugagaucgaggcca

SEQ ID NO: 1124587 - RNA, 22 nt, Human
acagggucaagggugcuacaag

SEQ ID NO: 1124588 - RNA, 22 nt, Human
aggcugggaaauguagucuucc

SEQ ID NO: 1124589 - RNA, 22 nt, Human
uagcuuuaccauagaagaguau

SEQ ID NO: 1124590 - RNA, 22 nt, Human
acuuugcaaugggcagaaccca

SEQ ID NO: 1124591 - RNA, 22 nt, Human
caguaugagaguugaaucaagg

SEQ ID NO: 1124592 - RNA, 22 nt, Human
caaaugugguuucucagcauuc

SEQ ID NO: 1124593 - RNA, 22 nt, Human
uaugcacacaucgcagcaggaa

SEQ ID NO: 1124594 - RNA, 22 nt, Human
acugucuguccugcucuccgug

SEQ ID NO: 1124595 - RNA, 22 nt, Human
ucacugcucucuaagcaucgcc

SEQ ID NO: 1124596 - RNA, 22 nt, Human
agaaauguggaucguuuuaaaa

SEQ ID NO: 1124597 - RNA, 22 nt, Human
uuucagugcuucuguuuaccgg

SEQ ID NO: 1124598 - RNA, 22 nt, Human
gcccagcacagcuggaagaguc

SEQ ID NO: 1124599 - RNA, 22 nt, Human
gcuuccucgcugggcagaggca

SEQ ID NO: 1124600 - RNA, 22 nt, Human
uugcauguuauuuaaucuguau

SEQ ID NO: 1124601 - RNA, 22 nt, Human
caagaaauguuuacugagcauc

SEQ ID NO: 1124602 - RNA, 22 nt, Human
uccaggagguuuggaggaagca

SEQ ID NO: 1124603 - RNA, 22 nt, Human
gccugccuuugugaggaagcgg

SEQ ID NO: 1124604 - RNA, 22 nt, Human
ccuaagaauuaaugaauacacc

SEQ ID NO: 1124605 - RNA, 22 nt, Human
auaaacagcuccauuuagugcc

SEQ ID NO: 1124606 - RNA, 19 nt, Human
ucucacaucagcuccuagc

SEQ ID NO: 1124607 - RNA, 22 nt, Human
agcagcauucucugguaugggg

SEQ ID NO: 1124608 - RNA, 22 nt, Human
uugcucuguaauaaucuggggu

SEQ ID NO: 1124609 - RNA, 22 nt, Human
uccugagauucugcauuucuaa

SEQ ID NO: 1124610 - RNA, 22 nt, Human
gccugagagucugcauuucuaa

SEQ ID NO: 1124611 - RNA, 22 nt, Human
gguggagcuguggacaggaagg

SEQ ID NO: 1124612 - RNA, 22 nt, Human
ggcuuauauugcucuauucaca

SEQ ID NO: 1124613 - RNA, 22 nt, Human
ugcugccuuugggaccuggccu

SEQ ID NO: 1124614 - RNA, 18 nt, Human
ccuggcagccaugcgcgc

SEQ ID NO: 1124615 - RNA, 22 nt, Human
gagaggucaucucccaucagca

SEQ ID NO: 1124616 - RNA, 22 nt, Human
cuucuggggauggagcccagaa

SEQ ID NO: 1124617 - RNA, 22 nt, Human
cagaaauggaauuuuccaucac

SEQ ID NO: 1124618 - RNA, 22 nt, Human
agcugauuccacuuuuucccca

SEQ ID NO: 1124619 - RNA, 17 nt, Human
accagccucuccugggg

SEQ ID NO: 1124620 - RNA, 22 nt, Human
uggagaugaauauguguaccug

SEQ ID NO: 1124621 - RNA, 19 nt, Human
ugaagcaauaccauuuuug

SEQ ID NO: 1124622 - RNA, 19 nt, Human
cagcugccuuuucuuugca

SEQ ID NO: 1124623 - RNA, 20 nt, Human
cuucaggacccauccucccc

SEQ ID NO: 1124624 - RNA, 22 nt, Human
uaucuguuccaggcacucagcu

SEQ ID NO: 1124625 - RNA, 22 nt, Human
gcugucaguuuuacccacagac

SEQ ID NO: 1124626 - RNA, 22 nt, Human
aaggccaugaccacuugcugug

SEQ ID NO: 1124627 - RNA, 22 nt, Human
cagcuucucagaaagcugaggu

SEQ ID NO: 1124628 - RNA, 22 nt, Human
uucucuucaucucaguaaaugu

SEQ ID NO: 1124629 - RNA, 22 nt, Human
auauauuuuuugagacagaguc

SEQ ID NO: 1124630 - RNA, 22 nt, Human
cugagggcccugaagcuuggca

SEQ ID NO: 1124631 - RNA, 22 nt, Human
cuccugagcucugaggaagcuu

SEQ ID NO: 1124632 - RNA, 22 nt, Human
cucuccagccacagaagcugcu

SEQ ID NO: 1124633 - RNA, 21 nt, Human
gcucccuggcugugugaccug

SEQ ID NO: 1124634 - RNA, 22 nt, Human
ggcuucuguccucuggaucugu

SEQ ID NO: 1124635 - RNA, 22 nt, Human
guacucucuugaaggccuuucu

SEQ ID NO: 1124636 - RNA, 21 nt, Human
cacucaggguaugugccaggc

SEQ ID NO: 1124637 - RNA, 22 nt, Human
uguggcucucagauccuccaau

SEQ ID NO: 1124638 - RNA, 22 nt, Human
gggcugggauugcuugcuguga

SEQ ID NO: 1124639 - RNA, 22 nt, Human
uugggcugaaguagagggcaga

SEQ ID NO: 1124640 - RNA, 22 nt, Human
uuuuccucugcagagcaguuag

SEQ ID NO: 1124641 - RNA, 22 nt, Human
acugugugcccugacgccaggg

SEQ ID NO: 1124642 - RNA, 22 nt, Human
cucccuggaggugagcuggcac

SEQ ID NO: 1124643 - RNA, 22 nt, Human
uggcugcucaagggaggaggcu

SEQ ID NO: 1124644 - RNA, 22 nt, Human
ccugggagagccaucuguggcc

SEQ ID NO: 1124645 - RNA, 22 nt, Human
agcagcuuacauguggccuauc

SEQ ID NO: 1124646 - RNA, 22 nt, Human
cggcuggggcuguccccaugac

SEQ ID NO: 1124647 - RNA, 23 nt, Human
ggccuccuggucuaggcuagacu

SEQ ID NO: 1124648 - RNA, 22 nt, Human
gcaguggcuaggagucuggcgu

SEQ ID NO: 1124649 - RNA, 21 nt, Human
cacaggugggucagugaggcc

SEQ ID NO: 1124650 - RNA, 22 nt, Human
gacccugccaugagugacaggg

SEQ ID NO: 1124651 - RNA, 22 nt, Human
gcaaggcagcgcggaguagcua

SEQ ID NO: 1124652 - RNA, 22 nt, Human
ucuuccucucuaauugaucaga

SEQ ID NO: 1124653 - RNA, 22 nt, Human
gccucugcucggacuuugccuc

SEQ ID NO: 1124654 - RNA, 22 nt, Human
ggggccugcgagguucaacuuc

SEQ ID NO: 1124655 - RNA, 17 nt, Human
ccucacagggaccagac

SEQ ID NO: 1124656 - RNA, 19 nt, Human
guuuuucccagacgaggca

SEQ ID NO: 1124657 - RNA, 22 nt, Human
gauggguggucucagacuugcc

SEQ ID NO: 1124658 - RNA, 22 nt, Human
gcagccacuaguuuuccuguuu

SEQ ID NO: 1124659 - RNA, 22 nt, Human
cagggguggcugcagcagaggu

SEQ ID NO: 1124660 - RNA, 22 nt, Human
gagccagguuugaaucucaguc

SEQ ID NO: 1124661 - RNA, 22 nt, Human
gugucauggaaaauugcaaugg

SEQ ID NO: 1124662 - RNA, 22 nt, Human
uuguuuuggagaugagcuaaaa

SEQ ID NO: 1124663 - RNA, 22 nt, Human
uggaggagggcuggugucugua

SEQ ID NO: 1124664 - RNA, 22 nt, Human
uuuauuugucuugccauuuagu

SEQ ID NO: 1124665 - RNA, 22 nt, Human
aaggaaagacauauaaaugacu

SEQ ID NO: 1124666 - RNA, 19 nt, Human
ccugcagggaugagagguu

SEQ ID NO: 1124667 - RNA, 23 nt, Human
acuuuagauaaauuaugugcaca

SEQ ID NO: 1124668 - RNA, 22 nt, Human
uacauugugauguuucaauaca

SEQ ID NO: 1124669 - RNA, 22 nt, Human
caaaguuuaaaguagauuucag

SEQ ID NO: 1124670 - RNA, 22 nt, Human
ugcagcucauugcuggggucug

SEQ ID NO: 1124671 - RNA, 20 nt, Human
uaggcagagcugugcagccu

SEQ ID NO: 1124672 - RNA, 22 nt, Human
agcagggcaaagucaggcuaac

SEQ ID NO: 1124673 - RNA, 22 nt, Human
aguuucuaccgguacauucagg

SEQ ID NO: 1124674 - RNA, 22 nt, Human
ucaguuuucaauuucaucagag

SEQ ID NO: 1124675 - RNA, 22 nt, Human
ccaaaguccacaguuuacauua

SEQ ID NO: 1124676 - RNA, 22 nt, Human
aggcuggggaauugaauuugcu

SEQ ID NO: 1124677 - RNA, 21 nt, Human
cgggcuggccgggcccucacc

SEQ ID NO: 1124678 - RNA, 22 nt, Human
ucugagaggcagaccuuccuaa

SEQ ID NO: 1124679 - RNA, 22 nt, Human
gugcauuuggugacucucaccc

SEQ ID NO: 1124680 - RNA, 22 nt, Human
ggaugcuggggaccaaucucug

SEQ ID NO: 1124681 - RNA, 22 nt, Human
acccagaggcggagguugcagu

SEQ ID NO: 1124682 - RNA, 22 nt, Human
caguggcgugaucucugcucac

SEQ ID NO: 1124683 - RNA, 22 nt, Human
ugggcagcagcaaagccagacu

SEQ ID NO: 1124684 - RNA, 22 nt, Human
ugucaguguauacauacaguau

SEQ ID NO: 1124685 - RNA, 18 nt, Human
gagaggcccggcugugcc

SEQ ID NO: 1124686 - RNA, 22 nt, Human
aaaaguaauugcaauuuuguag

SEQ ID NO: 1124687 - RNA, 22 nt, Human
cacagaauuaagggagaaauau

SEQ ID NO: 1124688 - RNA, 22 nt, Human
ucuggcucccuggagcuccaca

SEQ ID NO: 1124689 - RNA, 22 nt, Human
gccuuuuuuguugcucugucac

SEQ ID NO: 1124690 - RNA, 22 nt, Human
ugcagcuucuccaucuccuugu

SEQ ID NO: 1124691 - RNA, 20 nt, Human
uccagggcuagggagcucau

SEQ ID NO: 1124692 - RNA, 22 nt, Human
ugcuuuuaagaacaaugcugcu

SEQ ID NO: 1124693 - RNA, 22 nt, Human
ugugacaucgcugugucuguuu

SEQ ID NO: 1124694 - RNA, 22 nt, Human
ugagcuuacgugggaacagacu

SEQ ID NO: 1124695 - RNA, 22 nt, Human
cagcucugugggagcguaugug

SEQ ID NO: 1124696 - RNA, 22 nt, Human
uggcagcuggagggcaauggcc

SEQ ID NO: 1124697 - RNA, 22 nt, Human
uuuccucugcugccauugcccc

SEQ ID NO: 1124698 - RNA, 22 nt, Human
agcuuccuacaaccaucucaga

SEQ ID NO: 1124699 - RNA, 21 nt, Human
gugucaugguugacuuuggca

SEQ ID NO: 1124700 - RNA, 22 nt, Human
agcaggugaauuccuggaugug

SEQ ID NO: 1124701 - RNA, 22 nt, Human
agaaaagggcaggagggauaca

SEQ ID NO: 1124702 - RNA, 22 nt, Human
ccagcugaggcagccacacagg

SEQ ID NO: 1124703 - RNA, 22 nt, Human
cagcugaguuuccaagucugcc

SEQ ID NO: 1124704 - RNA, 21 nt, Human
ugcaggcaggcagagaugcug

SEQ ID NO: 1124705 - RNA, 22 nt, Human
agucucugagguucagaugccu

SEQ ID NO: 1124706 - RNA, 22 nt, Human
agaaaugcucuuccugaccaga

SEQ ID NO: 1124707 - RNA, 17 nt, Human
ucagagggaugagcagg

SEQ ID NO: 1124708 - RNA, 22 nt, Human
gccagacacuccccugggcagg

SEQ ID NO: 1124709 - RNA, 20 nt, Human
accccagccccucuaucuga

SEQ ID NO: 1124710 - RNA, 22 nt, Human
acugcaggagacacagcugcug

SEQ ID NO: 1124711 - RNA, 22 nt, Human
uaugugaauacagcaguggaug

SEQ ID NO: 1124712 - RNA, 21 nt, Human
uccauuguuuucccaggguuu

SEQ ID NO: 1124713 - RNA, 20 nt, Human
cugccaugauugauagagug

SEQ ID NO: 1124714 - RNA, 19 nt, Human
uagucuuuauucuuaauuu

SEQ ID NO: 1124715 - RNA, 22 nt, Human
ugaagcaggugaauggaugucg

SEQ ID NO: 1124716 - RNA, 22 nt, Human
ugaaggagcucaaugaugaugc

SEQ ID NO: 1124717 - RNA, 19 nt, Human
augucccaccgccccugag

SEQ ID NO: 1124718 - RNA, 22 nt, Human
gggacuggaguagaggccggug

SEQ ID NO: 1124719 - RNA, 22 nt, Human
uaagauaugguaggaaguuugg

SEQ ID NO: 1124720 - RNA, 22 nt, Human
uauguacaaucagcaguucaua

SEQ ID NO: 1124721 - RNA, 22 nt, Human
gagagcuguaauagucaugucu

SEQ ID NO: 1124722 - RNA, 22 nt, Human
uguagaaagaauauguuucaua

SEQ ID NO: 1124723 - RNA, 21 nt, Human
aaauguguuccauaaugcuuu

SEQ ID NO: 1124724 - RNA, 22 nt, Human
agcucacaguguccuuccucaa

SEQ ID NO: 1124725 - RNA, 22 nt, Human
cugcccuggucccauggcugau

SEQ ID NO: 1124726 - RNA, 22 nt, Human
ugcuggcccaguauggacugca

SEQ ID NO: 1124727 - RNA, 20 nt, Human
ggcugugcccuuccguggcc

SEQ ID NO: 1124728 - RNA, 22 nt, Human
ucugcagcuugcacaggcaggc

SEQ ID NO: 1124729 - RNA, 22 nt, Human
auguaacaggugaagcucugag

SEQ ID NO: 1124730 - RNA, 22 nt, Human
ugggcacaaacaucugccuguu

SEQ ID NO: 1124731 - RNA, 22 nt, Human
agcagcauagaagcugggagga

SEQ ID NO: 1124732 - RNA, 21 nt, Human
gcugucucuggcuccugggaa

SEQ ID NO: 1124733 - RNA, 22 nt, Human
cagggccauuggcguggcuguc

SEQ ID NO: 1124734 - RNA, 20 nt, Human
cagcaguggaugagaguuuu

SEQ ID NO: 1124735 - RNA, 22 nt, Human
cugcagugcaagcccagaugga

SEQ ID NO: 1124736 - RNA, 22 nt, Human
auugucuucuggucuuaucuuu

SEQ ID NO: 1124737 - RNA, 22 nt, Human
uggcugcuuguuuuagugaggc

SEQ ID NO: 1124738 - RNA, 22 nt, Human
gcccugucggaacugcgaccuc

SEQ ID NO: 1124739 - RNA, 19 nt, Human
ucccuuccugucgggcucc

SEQ ID NO: 1124740 - RNA, 21 nt, Human
agcuggugucagagcucuggg

SEQ ID NO: 1124741 - RNA, 22 nt, Human
cuccuuccugccccagugauaa

SEQ ID NO: 1124742 - RNA, 22 nt, Human
aaggagagguuguccguguugu

SEQ ID NO: 1124743 - RNA, 22 nt, Human
uaagaacauuuucggaaagaua

SEQ ID NO: 1124744 - RNA, 22 nt, Human
ggagacaguauggcuuguagcu

SEQ ID NO: 1124745 - RNA, 22 nt, Human
ccaucuccacugucccugucaa

SEQ ID NO: 1124746 - RNA, 22 nt, Human
uagcugucaccagaaauggcca

SEQ ID NO: 1124747 - RNA, 22 nt, Human
acacccagagcgccagugccga

SEQ ID NO: 1124748 - RNA, 20 nt, Human
aaaauauguauaacucuucu

SEQ ID NO: 1124749 - RNA, 22 nt, Human
gaggcugcuuugaugacaggag

SEQ ID NO: 1124750 - RNA, 22 nt, Human
aaguuugucgaaauuaucagca

SEQ ID NO: 1124751 - RNA, 21 nt, Human
acaugucucuaaucucaguga

SEQ ID NO: 1124752 - RNA, 22 nt, Human
cccagcccugaccuauuggaaa

SEQ ID NO: 1124753 - RNA, 17 nt, Human
uuagcaaaauagcacuu

SEQ ID NO: 1124754 - RNA, 22 nt, Human
ucaguuuuuguuugccagauag

SEQ ID NO: 1124755 - RNA, 22 nt, Human
gagugugucggucagcguggcg

SEQ ID NO: 1124756 - RNA, 22 nt, Human
uaacagaaguuguucauugugg

SEQ ID NO: 1124757 - RNA, 22 nt, Human
gagucccaugaugauagccaca

SEQ ID NO: 1124758 - RNA, 22 nt, Human
cauuugaugacucaacucauaa

SEQ ID NO: 1124759 - RNA, 19 nt, Human
agccuggcuuugcucugcu

SEQ ID NO: 1124760 - RNA, 17 nt, Human
uuccuggaagucauucc

SEQ ID NO: 1124761 - RNA, 23 nt, Human
uggccucuccccaccuggcagaa

SEQ ID NO: 1124762 - RNA, 22 nt, Human
cagagccugcucacgucucugu

SEQ ID NO: 1124763 - RNA, 22 nt, Human
caggcagcugaggacuuugcua

SEQ ID NO: 1124764 - RNA, 22 nt, Human
gcacagggcugccaggcggcuu

SEQ ID NO: 1124765 - RNA, 22 nt, Human
ggugcccaccugucuuccugga

SEQ ID NO: 1124766 - RNA, 20 nt, Human
aagggcagagggaacagacu

SEQ ID NO: 1124767 - RNA, 22 nt, Human
ggagagaaauugagguagcaag

SEQ ID NO: 1124768 - RNA, 22 nt, Human
ucagcagucacauguuguccca

SEQ ID NO: 1124769 - RNA, 22 nt, Human
agcccuagagcuggaggucagu

SEQ ID NO: 1124770 - RNA, 22 nt, Human
uuccuguauuuugcgaauuuuc

SEQ ID NO: 1124771 - RNA, 22 nt, Human
cucucaggcuugggucguggca

SEQ ID NO: 1124772 - RNA, 22 nt, Human
gagggggagaugugcacacacu

SEQ ID NO: 1124773 - RNA, 22 nt, Human
ugaucagucccaugaucuucca

SEQ ID NO: 1124774 - RNA, 18 nt, Human
aaggcuucaaagaguaga

SEQ ID NO: 1124775 - RNA, 22 nt, Human
gcugcagcaagcccuccagggg

SEQ ID NO: 1124776 - RNA, 22 nt, Human
acagcuguggccacuugcaucc

SEQ ID NO: 1124777 - RNA, 23 nt, Human
agucucagcuggaaacauguguc

SEQ ID NO: 1124778 - RNA, 22 nt, Human
ccaggccuuccaguacgcagaa

SEQ ID NO: 1124779 - RNA, 22 nt, Human
gggcagaggggcgcuucccucu

SEQ ID NO: 1124780 - RNA, 22 nt, Human
cauucugugauucuaaaucccu

SEQ ID NO: 1124781 - RNA, 22 nt, Human
gccuugccucagccauggaaac

SEQ ID NO: 1124782 - RNA, 22 nt, Human
cugaggccucucuccugggcuu

SEQ ID NO: 1124783 - RNA, 22 nt, Human
gcagcguggggcugagucagcu

SEQ ID NO: 1124784 - RNA, 22 nt, Human
aggccugaaggaagaugagcug

SEQ ID NO: 1124785 - RNA, 22 nt, Human
uuaugcuaagugcaacaagcca

SEQ ID NO: 1124786 - RNA, 22 nt, Human
ucaggggaaaucucucagcgaa

SEQ ID NO: 1124787 - RNA, 22 nt, Human
gcuuccuaaaugcacagggcag

SEQ ID NO: 1124788 - RNA, 21 nt, Human
gagcucucaggcaagaagcag

SEQ ID NO: 1124789 - RNA, 22 nt, Human
cagcaggcugcgauugcucauu

SEQ ID NO: 1124790 - RNA, 22 nt, Human
agggugccuggaagccacucac

SEQ ID NO: 1124791 - RNA, 22 nt, Human
aguggcaggaaaguggaagaga

SEQ ID NO: 1124792 - RNA, 22 nt, Human
auguacaaaaugccacugaauu

SEQ ID NO: 1124793 - RNA, 22 nt, Human
ugcagcauucuuggccacuacu

SEQ ID NO: 1124794 - RNA, 22 nt, Human
gggaaauugucaacacucucaa

SEQ ID NO: 1124795 - RNA, 22 nt, Human
gguggguauaguuagggccucu

SEQ ID NO: 1124796 - RNA, 22 nt, Human
uggagggcaugcuguccauggg

SEQ ID NO: 1124797 - RNA, 22 nt, Human
gcucugggugaacuuggagcaa

SEQ ID NO: 1124798 - RNA, 22 nt, Human
agagugggugaucucuguuguc

SEQ ID NO: 1124799 - RNA, 22 nt, Human
ucugucuccugccagugccucu

SEQ ID NO: 1124800 - RNA, 18 nt, Human
uucagcagcagacacacu

SEQ ID NO: 1124801 - RNA, 22 nt, Human
uuagaaacccagacucuuaggu

SEQ ID NO: 1124802 - RNA, 22 nt, Human
cacugcauggaugauggcugua

SEQ ID NO: 1124803 - RNA, 22 nt, Human
uuaggaaauuaugguuucagau

SEQ ID NO: 1124804 - RNA, 22 nt, Human
ucagagcuuaucucuugcugga

SEQ ID NO: 1124805 - RNA, 22 nt, Human
gaaaaaugcuccaaaucugugg

SEQ ID NO: 1124806 - RNA, 22 nt, Human
ggucccaggaaucuguguucua

SEQ ID NO: 1124807 - RNA, 21 nt, Human
uccuuccuugagguccuuucc

SEQ ID NO: 1124808 - RNA, 22 nt, Human
uggccugguuguugcugccguu

SEQ ID NO: 1124809 - RNA, 22 nt, Human
gugcagggcuggcaccggaggc

SEQ ID NO: 1124810 - RNA, 22 nt, Human
uuuccuuccagguuccuaaggc

SEQ ID NO: 1124811 - RNA, 22 nt, Human
cugagcccaggcgggagcugag

SEQ ID NO: 1124812 - RNA, 20 nt, Human
cagaaggucuaagcuuuaga

SEQ ID NO: 1124813 - RNA, 22 nt, Human
cagcccagcagggucuggcccu

SEQ ID NO: 1124814 - RNA, 18 nt, Human
gguggccuugacuucucu

SEQ ID NO: 1124815 - RNA, 22 nt, Human
ugucauuuaguccucugugugu

SEQ ID NO: 1124816 - RNA, 22 nt, Human
gagagugagauccuccugggga

SEQ ID NO: 1124817 - RNA, 22 nt, Human
ugggaggcuuccagaccuugcu

SEQ ID NO: 1124818 - RNA, 22 nt, Human
ccagagccggcucccucagcuu

SEQ ID NO: 1124819 - RNA, 22 nt, Human
gcugccugguuucucagcugca

SEQ ID NO: 1124820 - RNA, 22 nt, Human
ucaggcacugcuuucugauaug

SEQ ID NO: 1124821 - RNA, 22 nt, Human
ggccagggccuggggacugucc

SEQ ID NO: 1124822 - RNA, 22 nt, Human
guuacacaggaaaacauuagca

SEQ ID NO: 1124823 - RNA, 22 nt, Human
aguagaaagaaggcacugggcc

SEQ ID NO: 1124824 - RNA, 22 nt, Human
auaauccaugucuagaguaaag

SEQ ID NO: 1124825 - RNA, 22 nt, Human
auguagcaucuauccugauaaa

SEQ ID NO: 1124826 - RNA, 22 nt, Human
ccccagcucagugcagggacau

SEQ ID NO: 1124827 - RNA, 22 nt, Human
ugcucuguaaggucagaaaagg

SEQ ID NO: 1124828 - RNA, 22 nt, Human
gcuggugcauuagcugcaguuc

SEQ ID NO: 1124829 - RNA, 22 nt, Human
ucucagagagaugaaacuucca

SEQ ID NO: 1124830 - RNA, 20 nt, Human
cccugagaccagagagcagc

SEQ ID NO: 1124831 - RNA, 22 nt, Human
ugugugcagccucugucuuugg

SEQ ID NO: 1124832 - RNA, 22 nt, Human
gguggcagucuuaagagaucuu

SEQ ID NO: 1124833 - RNA, 19 nt, Human
agggagaauuccaagagga

SEQ ID NO: 1124834 - RNA, 22 nt, Human
aagaaaagaaaccugaggcuuu

SEQ ID NO: 1124835 - RNA, 22 nt, Human
gcagagcaguacucucuugacu

SEQ ID NO: 1124836 - RNA, 16 nt, Human
ccuuucucugccuucc

SEQ ID NO: 1124837 - RNA, 22 nt, Human
uagggcaggggaggaaucugaa

SEQ ID NO: 1124838 - RNA, 22 nt, Human
cagagguagaaggcaugcagug

SEQ ID NO: 1124839 - RNA, 22 nt, Human
agagaaaacucauugagguguc

SEQ ID NO: 1124840 - RNA, 22 nt, Human
aguggcagaagucacuggguag

SEQ ID NO: 1124841 - RNA, 22 nt, Human
ccagggcagggaccacgugucu

SEQ ID NO: 1124842 - RNA, 22 nt, Human
cuggugugauugagcccaggug

SEQ ID NO: 1124843 - RNA, 22 nt, Human
cuggccuuuagccccagugucu

SEQ ID NO: 1124844 - RNA, 22 nt, Human
agcagccacagucugggacagg

SEQ ID NO: 1124845 - RNA, 22 nt, Human
caagagcauuuaguuagcuggu

SEQ ID NO: 1124846 - RNA, 22 nt, Human
agcugccaaguuucucaguuua

SEQ ID NO: 1124847 - RNA, 22 nt, Human
ggccucugguucacagggagga

SEQ ID NO: 1124848 - RNA, 22 nt, Human
ggcucuggaaaguguccuugau

SEQ ID NO: 1124849 - RNA, 22 nt, Human
aagauuucuuacuuauugaugc

SEQ ID NO: 1124850 - RNA, 22 nt, Human
uuuccucuuauacaguguuuau

SEQ ID NO: 1124851 - RNA, 22 nt, Human
ugcaauaaguuguguuaucacu

SEQ ID NO: 1124852 - RNA, 22 nt, Human
aagccagccagugccagucuua

SEQ ID NO: 1124853 - RNA, 22 nt, Human
ucugucuccucugaggugccag

SEQ ID NO: 1124854 - RNA, 22 nt, Human
gggcaugguggugcacaccugu

SEQ ID NO: 1124855 - RNA, 22 nt, Human
uaccuugggguuuuguugcucu

SEQ ID NO: 1124856 - RNA, 22 nt, Human
aggcuggaguacaguggcuauu

SEQ ID NO: 1124857 - RNA, 22 nt, Human
aaaugcauuuuuaauuagaccc

SEQ ID NO: 1124858 - RNA, 22 nt, Human
ggcccagcugugcuuccagccc

SEQ ID NO: 1124859 - RNA, 22 nt, Human
ccaccagcuuugccacccugcu

SEQ ID NO: 1124860 - RNA, 22 nt, Human
agcagagcgccugcucagaggg

SEQ ID NO: 1124861 - RNA, 19 nt, Human
uacauuuguguacacuugu

SEQ ID NO: 1124862 - RNA, 22 nt, Human
ucucuggccgagagucccuggg

SEQ ID NO: 1124863 - RNA, 22 nt, Human
agcugggaggugggcagugaga

SEQ ID NO: 1124864 - RNA, 22 nt, Human
uggcucaguuaggucagaaaca

SEQ ID NO: 1124865 - RNA, 22 nt, Human
cuccaggagcugugucuuucuu

SEQ ID NO: 1124866 - RNA, 22 nt, Human
agggauggaagcucgucugcaa

SEQ ID NO: 1124867 - RNA, 18 nt, Human
uggugaaggguggaggag

SEQ ID NO: 1124868 - RNA, 22 nt, Human
cuggcucuaucuccaaggcugg

SEQ ID NO: 1124869 - RNA, 22 nt, Human
ucucagagggaggauuacugcc

SEQ ID NO: 1124870 - RNA, 22 nt, Human
uguaggaguccaaucaggagac

SEQ ID NO: 1124871 - RNA, 22 nt, Human
agagcagagggcucugggacaa

SEQ ID NO: 1124872 - RNA, 22 nt, Human
caguacuuuucaaccaguauga

SEQ ID NO: 1124873 - RNA, 22 nt, Human
ucauugaauuucacagcuuuau

SEQ ID NO: 1124874 - RNA, 22 nt, Human
auucuccacacauccagaccuu

SEQ ID NO: 1124875 - RNA, 22 nt, Human
ggcuuccuggggccuccugcaa

SEQ ID NO: 1124876 - RNA, 22 nt, Human
ucacaucuuauuagaguaucuc

SEQ ID NO: 1124877 - RNA, 22 nt, Human
uccagcagguccgagacaaguu

SEQ ID NO: 1124878 - RNA, 22 nt, Human
cuuaacagagagaaguguugcu

SEQ ID NO: 1124879 - RNA, 22 nt, Human
gcugucccgaaccccugguaau

SEQ ID NO: 1124880 - RNA, 22 nt, Human
gcugucacacauggccccagcu

SEQ ID NO: 1124881 - RNA, 22 nt, Human
gcugggaggaauuuggggaaua

SEQ ID NO: 1124882 - RNA, 22 nt, Human
auguaguauuuggaaauguaaa

SEQ ID NO: 1124883 - RNA, 22 nt, Human
agugugaccuuauuuggaaaca

SEQ ID NO: 1124884 - RNA, 22 nt, Human
aucuggcuuucuuaaugacuua

SEQ ID NO: 1124885 - RNA, 22 nt, Human
uagaaagugaagguuaauuaau

SEQ ID NO: 1124886 - RNA, 22 nt, Human
gcuggccugggcagccugucgg

SEQ ID NO: 1124887 - RNA, 22 nt, Human
gggccucucccuucucacgcau

SEQ ID NO: 1124888 - RNA, 22 nt, Human
cagaggcucaccagccuuucac

SEQ ID NO: 1124889 - RNA, 22 nt, Human
gcugauccuuuuaugucuagcu

SEQ ID NO: 1124890 - RNA, 22 nt, Human
guguaaggccccagguucuuua

SEQ ID NO: 1124891 - RNA, 22 nt, Human
cgagaguggacagggcgcagcu

SEQ ID NO: 1124892 - RNA, 22 nt, Human
uccagucaucucccuucacauu

SEQ ID NO: 1124893 - RNA, 22 nt, Human
ucaagauaccaccauuauaugu

SEQ ID NO: 1124894 - RNA, 22 nt, Human
ucuuccucuagaucugaggccc

SEQ ID NO: 1124895 - RNA, 22 nt, Human
gguagcacauugcauuaggaga

SEQ ID NO: 1124896 - RNA, 19 nt, Human
cugcugggugcugagggag

SEQ ID NO: 1124897 - RNA, 20 nt, Human
cacguuuuuccacuagcaaa

SEQ ID NO: 1124898 - RNA, 22 nt, Human
auugacaauuagcccuuaggug

SEQ ID NO: 1124899 - RNA, 22 nt, Human
gccaggcagcugggagggugcc

SEQ ID NO: 1124900 - RNA, 22 nt, Human
cuuuggcaaugaaacacaagaa

SEQ ID NO: 1124901 - RNA, 22 nt, Human
ucacaggaaccaucagagaaau

SEQ ID NO: 1124902 - RNA, 20 nt, Human
uguugauuggugucaucuca

SEQ ID NO: 1124903 - RNA, 22 nt, Human
gggcuggaggaccggccucgga

SEQ ID NO: 1124904 - RNA, 22 nt, Human
ugcaggagcugugcggugaggg

SEQ ID NO: 1124905 - RNA, 22 nt, Human
uggaggaaucagggcuuaggcu

SEQ ID NO: 1124906 - RNA, 22 nt, Human
uagcagggaaggugugcugagc

SEQ ID NO: 1124907 - RNA, 22 nt, Human
uucaagaucgaguuuaaaguga

SEQ ID NO: 1124908 - RNA, 22 nt, Human
ugaaggaaugaguauacuguuu

SEQ ID NO: 1124909 - RNA, 22 nt, Human
uagaaacauguucuguucuguu

SEQ ID NO: 1124910 - RNA, 21 nt, Human
acaggcuuuagaaaaugacuc

SEQ ID NO: 1124911 - RNA, 22 nt, Human
cagccagggagcaaagaguuga

SEQ ID NO: 1124912 - RNA, 22 nt, Human
cccagagcugagucugauauau

SEQ ID NO: 1124913 - RNA, 22 nt, Human
cuggggcuucaaugcuucggug

SEQ ID NO: 1124914 - RNA, 22 nt, Human
ggcagggaggaggugaaaguga

SEQ ID NO: 1124915 - RNA, 22 nt, Human
ucccagaggcuccagucucuau

SEQ ID NO: 1124916 - RNA, 23 nt, Human
ggccucuguguucugcccacaug

SEQ ID NO: 1124917 - RNA, 22 nt, Human
gcugagagugagcacuggauau

SEQ ID NO: 1124918 - RNA, 22 nt, Human
cuuugaaaacuuaaauaacagc

SEQ ID NO: 1124919 - RNA, 22 nt, Human
ccagucugaggccuggugaggg

SEQ ID NO: 1124920 - RNA, 22 nt, Human
gccagguggucuggcuccagag

SEQ ID NO: 1124921 - RNA, 22 nt, Human
cucagaguucuccugggaggug

SEQ ID NO: 1124922 - RNA, 22 nt, Human
uguggcugcucaggugcagacc

SEQ ID NO: 1124923 - RNA, 22 nt, Human
ucuggcaggcaaucggcucugg

SEQ ID NO: 1124924 - RNA, 22 nt, Human
ccagcugcaggggagcagugga

SEQ ID NO: 1124925 - RNA, 22 nt, Human
ccacagaguuacaaaacaguca

SEQ ID NO: 1124926 - RNA, 22 nt, Human
aaggagaguacaggaguuggua

SEQ ID NO: 1124927 - RNA, 22 nt, Human
uaugugcaguuugcucuuaaca

SEQ ID NO: 1124928 - RNA, 22 nt, Human
gcagcaugagcuauacaaagua

SEQ ID NO: 1124929 - RNA, 22 nt, Human
aaugcacauauauguguauaca

SEQ ID NO: 1124930 - RNA, 22 nt, Human
acugggaggcaucuggagcuga

SEQ ID NO: 1124931 - RNA, 22 nt, Human
cuguuuauacgacagguggagg

SEQ ID NO: 1124932 - RNA, 22 nt, Human
ucagaacagaagcuggcuauaa

SEQ ID NO: 1124933 - RNA, 22 nt, Human
agcauggggcuccgcaaugaac

SEQ ID NO: 1124934 - RNA, 22 nt, Human
gcacccaggcuugggcagcaac

SEQ ID NO: 1124935 - RNA, 22 nt, Human
aauguguguauuucuaggcgag

SEQ ID NO: 1124936 - RNA, 22 nt, Human
aaauguguuucgaaaacuggug

SEQ ID NO: 1124937 - RNA, 22 nt, Human
auucaagagcccauguuuccug

SEQ ID NO: 1124938 - RNA, 22 nt, Human
ugggccacggggguggagagcu

SEQ ID NO: 1124939 - RNA, 22 nt, Human
gcagauggcugagccugcagau

SEQ ID NO: 1124940 - RNA, 22 nt, Human
aagccagguguugugguaagag

SEQ ID NO: 1124941 - RNA, 22 nt, Human
uauguacauaacaugaaaugca

SEQ ID NO: 1124942 - RNA, 20 nt, Human
cucaguguggccugaguguu

SEQ ID NO: 1124943 - RNA, 22 nt, Human
ugcuguuauacuuagcugguua

SEQ ID NO: 1124944 - RNA, 22 nt, Human
aaaguccagagggcacacugaa

SEQ ID NO: 1124945 - RNA, 18 nt, Human
cagucccaaaccuuagga

SEQ ID NO: 1124946 - RNA, 22 nt, Human
agcugccugggcuuguacaccu

SEQ ID NO: 1124947 - RNA, 22 nt, Human
augcacgccccacacuggugug

SEQ ID NO: 1124948 - RNA, 22 nt, Human
auuuuucucuccacuccauuaa

SEQ ID NO: 1124949 - RNA, 22 nt, Human
agcugcugagagucugccgggc

SEQ ID NO: 1124950 - RNA, 22 nt, Human
aacaaauguguggcaguguggg

SEQ ID NO: 1124951 - RNA, 22 nt, Human
agcauugccugccuauugcuaa

SEQ ID NO: 1124952 - RNA, 22 nt, Human
aagacagagggaagcaaugaug

SEQ ID NO: 1124953 - RNA, 22 nt, Human
gaaugcacucacccaucacuca

SEQ ID NO: 1124954 - RNA, 22 nt, Human
cugggcucagcccaugcugucc

SEQ ID NO: 1124955 - RNA, 22 nt, Human
cuggcaggucucgcugacgugu

SEQ ID NO: 1124956 - RNA, 20 nt, Human
caccacagaauuggggacag

SEQ ID NO: 1124957 - RNA, 22 nt, Human
aaauaauuauagcgagucuauc

SEQ ID NO: 1124958 - RNA, 22 nt, Human
caugcuuugggucagaaaugcc

SEQ ID NO: 1124959 - RNA, 22 nt, Human
ccugucuguccucucaugagcc

SEQ ID NO: 1124960 - RNA, 19 nt, Human
cugccuguuauggagagaa

SEQ ID NO: 1124961 - RNA, 22 nt, Human
uccauuuuguagguaugcuaca

SEQ ID NO: 1124962 - RNA, 23 nt, Human
ugcugguguuuuugggaccaggg

SEQ ID NO: 1124963 - RNA, 22 nt, Human
gggcaggaugcaguuucagaga

SEQ ID NO: 1124964 - RNA, 22 nt, Human
cgcugccaggauccccugccgg

SEQ ID NO: 1124965 - RNA, 22 nt, Human
cugaggaugguguggucuucuc

SEQ ID NO: 1124966 - RNA, 22 nt, Human
auguagcaugaggcacugugcc

SEQ ID NO: 1124967 - RNA, 22 nt, Human
gugucccaaagauuagaaauca

SEQ ID NO: 1124968 - RNA, 22 nt, Human
cacaggggcaaacuguagggga

SEQ ID NO: 1124969 - RNA, 22 nt, Human
cuggccuggggccucagcugcu

SEQ ID NO: 1124970 - RNA, 22 nt, Human
aacaaaugauuguugguuggag

SEQ ID NO: 1124971 - RNA, 22 nt, Human
ccuuccaggagucucugcaggu

SEQ ID NO: 1124972 - RNA, 22 nt, Human
gugcaugucggggugcauguca

SEQ ID NO: 1124973 - RNA, 22 nt, Human
aagcgccacgagaagcuggacc

SEQ ID NO: 1124974 - RNA, 22 nt, Human
gccaccucuuugucucugccgc

SEQ ID NO: 1124975 - RNA, 22 nt, Human
augcuauacucaaagaaauuca

SEQ ID NO: 1124976 - RNA, 22 nt, Human
auggccuggccagagcucugcu

SEQ ID NO: 1124977 - RNA, 22 nt, Human
uacauguaggugacauuuuaau

SEQ ID NO: 1124978 - RNA, 23 nt, Human
ccaggccucucagagggugugcc

SEQ ID NO: 1124979 - RNA, 22 nt, Human
aggucaaguuuagauagaguua

SEQ ID NO: 1124980 - RNA, 22 nt, Human
ucaggcugccuaucagacugug

SEQ ID NO: 1124981 - RNA, 22 nt, Human
agagccaggaugucuucugggg

SEQ ID NO: 1124982 - RNA, 22 nt, Human
uagcccagagucccaauuccag

SEQ ID NO: 1124983 - RNA, 22 nt, Human
ucugcugcugagcacacuccua

SEQ ID NO: 1124984 - RNA, 22 nt, Human
acacaguaugaaaagucuaguu

SEQ ID NO: 1124985 - RNA, 22 nt, Human
caggauaacagaaaauagcuga

SEQ ID NO: 1124986 - RNA, 22 nt, Human
gaggccuggcucugcccuccug

SEQ ID NO: 1124987 - RNA, 22 nt, Human
ugggccugccccaggcuucagc

SEQ ID NO: 1124988 - RNA, 22 nt, Human
auaucacaaacaagucuguacu

SEQ ID NO: 1124989 - RNA, 22 nt, Human
ccacagaggacaacugccuggc

SEQ ID NO: 1124990 - RNA, 22 nt, Human
agagcugcaccuaugcagaccu

SEQ ID NO: 1124991 - RNA, 22 nt, Human
agguuuucagcuguauccugag

SEQ ID NO: 1124992 - RNA, 22 nt, Human
uuuccucuccaccaggaggucu

SEQ ID NO: 1124993 - RNA, 22 nt, Human
uaugcacauauaaccugcacug

SEQ ID NO: 1124994 - RNA, 22 nt, Human
cagagcagaaaccugggugauu

SEQ ID NO: 1124995 - RNA, 22 nt, Human
gaaaugcaaauucucucucgcu

SEQ ID NO: 1124996 - RNA, 22 nt, Human
ggaggccaaggagggcggauca

SEQ ID NO: 1124997 - RNA, 22 nt, Human
caguacuuugcaucauuccacu

SEQ ID NO: 1124998 - RNA, 21 nt, Human
ggcagcccgcccucuccuggc

SEQ ID NO: 1124999 - RNA, 22 nt, Human
cuggaugcuuccucucugcuag

SEQ ID NO: 1125000 - RNA, 22 nt, Human
uggagccugagucagcggaggc

SEQ ID NO: 1125001 - RNA, 22 nt, Human
ugggccagcaauugcugcucag

SEQ ID NO: 1125002 - RNA, 22 nt, Human
cagcccucagguccucagcagc

SEQ ID NO: 1125003 - RNA, 22 nt, Human
acaggugaccugcucauaugaa

SEQ ID NO: 1125004 - RNA, 22 nt, Human
cagcccuguccagcagagggug

SEQ ID NO: 1125005 - RNA, 20 nt, Human
gccugagcuauugccaggau

SEQ ID NO: 1125006 - RNA, 22 nt, Human
aggagccaugagugacaucaca

SEQ ID NO: 1125007 - RNA, 22 nt, Human
agguggagacccagagaaggcg

SEQ ID NO: 1125008 - RNA, 22 nt, Human
ggcaaaaacagcaaugacuuuu

SEQ ID NO: 1125009 - RNA, 22 nt, Human
gcugccaauccagcugugggag

SEQ ID NO: 1125010 - RNA, 22 nt, Human
acuguguguuugucuagcacag

SEQ ID NO: 1125011 - RNA, 22 nt, Human
agcugccagggacugggcaugg

SEQ ID NO: 1125012 - RNA, 23 nt, Human
aggauccugguacaggagcagag

SEQ ID NO: 1125013 - RNA, 22 nt, Human
uauugaaauccauuacguucuu

SEQ ID NO: 1125014 - RNA, 22 nt, Human
aggugaaguugaggaggcagaa

SEQ ID NO: 1125015 - RNA, 19 nt, Human
ccugugugggguagagauc

SEQ ID NO: 1125016 - RNA, 22 nt, Human
uccagggagauggcagaggcug

SEQ ID NO: 1125017 - RNA, 22 nt, Human
agagaagagcaaugauaaauuu

SEQ ID NO: 1125018 - RNA, 22 nt, Human
ggacacagcugcagccacaccc

SEQ ID NO: 1125019 - RNA, 22 nt, Human
gcagggucugaggccacagagg

SEQ ID NO: 1125020 - RNA, 22 nt, Human
ucugguaaccuuuaucccuccu

SEQ ID NO: 1125021 - RNA, 22 nt, Human
aagauucucagagugaaagaau

SEQ ID NO: 1125022 - RNA, 22 nt, Human
ucccacucccaggcaggccucu

SEQ ID NO: 1125023 - RNA, 18 nt, Human
ucugagggugcgggagcu

SEQ ID NO: 1125024 - RNA, 22 nt, Human
acauuucuuagccuaguuccag

SEQ ID NO: 1125025 - RNA, 20 nt, Human
agugcaagaaagcacagcug

SEQ ID NO: 1125026 - RNA, 22 nt, Human
agggccagggaagcuguauuuu

SEQ ID NO: 1125027 - RNA, 22 nt, Human
cucucugggggccaugccaaga

SEQ ID NO: 1125028 - RNA, 23 nt, Human
ggcugagacuacaggcgcuugcc

SEQ ID NO: 1125029 - RNA, 22 nt, Human
agagcccuuucuccaggcaccu

SEQ ID NO: 1125030 - RNA, 22 nt, Human
caugugugaagacugcgggcca

SEQ ID NO: 1125031 - RNA, 22 nt, Human
aggagucacucagggcuucauc

SEQ ID NO: 1125032 - RNA, 22 nt, Human
acaaagucacaauaauuaaccu

SEQ ID NO: 1125033 - RNA, 22 nt, Human
gugccagcaguuauggugauuu

SEQ ID NO: 1125034 - RNA, 22 nt, Human
agggccagcacuccuggcagga

SEQ ID NO: 1125035 - RNA, 22 nt, Human
ucuggcucuccagugcucuuag

SEQ ID NO: 1125036 - RNA, 22 nt, Human
gccuggagggucccucucugga

SEQ ID NO: 1125037 - RNA, 22 nt, Human
aaugaacacagcccucuacuuu

SEQ ID NO: 1125038 - RNA, 22 nt, Human
cagaagcauugacuccuugcuc

SEQ ID NO: 1125039 - RNA, 21 nt, Human
acagcagacaggcuuaggacc

SEQ ID NO: 1125040 - RNA, 22 nt, Human
gagccuccuccuggugugccga

SEQ ID NO: 1125041 - RNA, 22 nt, Human
cagugucuuauuuguagcucag

SEQ ID NO: 1125042 - RNA, 22 nt, Human
uccagucauuuccauuguuccc

SEQ ID NO: 1125043 - RNA, 22 nt, Human
aagugagauuauauguacggga

SEQ ID NO: 1125044 - RNA, 22 nt, Human
cuggccacaugugugcugagca

SEQ ID NO: 1125045 - RNA, 22 nt, Human
caaauguguaaggaaguguuag

SEQ ID NO: 1125046 - RNA, 22 nt, Human
gugcaugugucuuuauaguaga

SEQ ID NO: 1125047 - RNA, 22 nt, Human
guggcugcagcccagcggcacg

SEQ ID NO: 1125048 - RNA, 22 nt, Human
uauuuguauuucaugcaguaaa

SEQ ID NO: 1125049 - RNA, 22 nt, Human
ggcugccauaacagaguaccac

SEQ ID NO: 1125050 - RNA, 22 nt, Human
cugccucucagccugaccgcca

SEQ ID NO: 1125051 - RNA, 22 nt, Human
ggccccaggaccuccacggucc

SEQ ID NO: 1125052 - RNA, 22 nt, Human
guggagcccugccuugcucaug

SEQ ID NO: 1125053 - RNA, 22 nt, Human
gccucugcaugcucagcaccca

SEQ ID NO: 1125054 - RNA, 22 nt, Human
uuggaggcaaugggaaggaggc

SEQ ID NO: 1125055 - RNA, 22 nt, Human
cuuacauugugugcaugagggg

SEQ ID NO: 1125056 - RNA, 20 nt, Human
aauaaaagaagccuucaccc

SEQ ID NO: 1125057 - RNA, 22 nt, Human
cugggcugcaguuccugguccu

SEQ ID NO: 1125058 - RNA, 22 nt, Human
ccaggacucaguggggaaaggg

SEQ ID NO: 1125059 - RNA, 23 nt, Human
aggcugcagaagaauagggucau

SEQ ID NO: 1125060 - RNA, 22 nt, Human
auggacaggaacucccuuggca

SEQ ID NO: 1125061 - RNA, 22 nt, Human
gcacugaaaauguuggauucca

SEQ ID NO: 1125062 - RNA, 22 nt, Human
ccucucuguaagggucccuccc

SEQ ID NO: 1125063 - RNA, 22 nt, Human
ugcucugguccucccucggcgc

SEQ ID NO: 1125064 - RNA, 22 nt, Human
cccaggccagaacuugguugcu

SEQ ID NO: 1125065 - RNA, 22 nt, Human
auauucuuccaaaacaucauuu

SEQ ID NO: 1125066 - RNA, 22 nt, Human
uauuucuggcuuugagggugau

SEQ ID NO: 1125067 - RNA, 22 nt, Human
aggagucauaaaugugaacaaa

SEQ ID NO: 1125068 - RNA, 22 nt, Human
agggcacaucugcugggaaugg

SEQ ID NO: 1125069 - RNA, 22 nt, Human
ugagcuuccucccugcauccau

SEQ ID NO: 1125070 - RNA, 22 nt, Human
ccugucuggaacauggccuguu

SEQ ID NO: 1125071 - RNA, 22 nt, Human
gaggcaggcagauugcuugagg

SEQ ID NO: 1125072 - RNA, 22 nt, Human
aacagcaauagcacuauucauu

SEQ ID NO: 1125073 - RNA, 22 nt, Human
gugugugcuccccaggagagcu

SEQ ID NO: 1125074 - RNA, 22 nt, Human
agggagaacaguugcagcagac

SEQ ID NO: 1125075 - RNA, 22 nt, Human
gagcugcugguugcuggugccu

SEQ ID NO: 1125076 - RNA, 22 nt, Human
cugugucccuugucccagagcc

SEQ ID NO: 1125077 - RNA, 22 nt, Human
agcugcucccuauccuuuccuu

SEQ ID NO: 1125078 - RNA, 22 nt, Human
gugccucagcaccgccugcagc

SEQ ID NO: 1125079 - RNA, 22 nt, Human
aggauaauaauaaucucguuua

SEQ ID NO: 1125080 - RNA, 22 nt, Human
aucaguuuaaaugggcuguugg

SEQ ID NO: 1125081 - RNA, 22 nt, Human
uaguccaguaaaacagcuaacg

SEQ ID NO: 1125082 - RNA, 22 nt, Human
guaagagcacugucuccugcug

SEQ ID NO: 1125083 - RNA, 22 nt, Human
ugaggcaggagguugagaacug

SEQ ID NO: 1125084 - RNA, 22 nt, Human
auugcacaaacacagucagacu

SEQ ID NO: 1125085 - RNA, 22 nt, Human
uuggccuuaaccucucugugcc

SEQ ID NO: 1125086 - RNA, 22 nt, Human
aggacaggauugagcugaacug

SEQ ID NO: 1125087 - RNA, 22 nt, Human
caggcuugggagcagagccacu

SEQ ID NO: 1125088 - RNA, 22 nt, Human
gucccuuggcucacaaacagcu

SEQ ID NO: 1125089 - RNA, 22 nt, Human
aggucccaggcauagcuggucu

SEQ ID NO: 1125090 - RNA, 22 nt, Human
ccucccaccguaucucaguggc

SEQ ID NO: 1125091 - RNA, 22 nt, Human
gaaaggagggaaacagagcggu

SEQ ID NO: 1125092 - RNA, 22 nt, Human
ugucucuggcccaugagcagag

SEQ ID NO: 1125093 - RNA, 22 nt, Human
ccuuaaaagaacuaucucuucu

SEQ ID NO: 1125094 - RNA, 22 nt, Human
gcuggagauaguaggauccaua

SEQ ID NO: 1125095 - RNA, 18 nt, Human
cagggcuguggggucacu

SEQ ID NO: 1125096 - RNA, 18 nt, Human
aucucccauuggccaagg

SEQ ID NO: 1125097 - RNA, 22 nt, Human
agaggccaucugcucugugggg

SEQ ID NO: 1125098 - RNA, 22 nt, Human
ucucugggauaaacugggccag

SEQ ID NO: 1125099 - RNA, 22 nt, Human
ugccagcacaaguuaagagauc

SEQ ID NO: 1125100 - RNA, 22 nt, Human
uagaaacucaggauacucuucc

SEQ ID NO: 1125101 - RNA, 22 nt, Human
aggcacugugcagucccaagca

SEQ ID NO: 1125102 - RNA, 22 nt, Human
uuagaaaauuugcuucuuugga

SEQ ID NO: 1125103 - RNA, 22 nt, Human
cccuggagucagguuggccugg

SEQ ID NO: 1125104 - RNA, 18 nt, Human
acauuucucucugcguga

SEQ ID NO: 1125105 - RNA, 19 nt, Human
cccagcuugaccaccugcu

SEQ ID NO: 1125106 - RNA, 22 nt, Human
ccugaagcaaggguaggcaggu

SEQ ID NO: 1125107 - RNA, 22 nt, Human
gagcagugacuggagcaugaga

SEQ ID NO: 1125108 - RNA, 22 nt, Human
uggcagagaacacggcugaucu

SEQ ID NO: 1125109 - RNA, 22 nt, Human
ugcucccaaacgaccuacugug

SEQ ID NO: 1125110 - RNA, 22 nt, Human
agugcagccgagaucaggugcu

SEQ ID NO: 1125111 - RNA, 22 nt, Human
agauuucagaugcucggcaguu

SEQ ID NO: 1125112 - RNA, 20 nt, Human
ccugucuggagacaaagaga

SEQ ID NO: 1125113 - RNA, 22 nt, Human
uugucugugaaauggaaauagu

SEQ ID NO: 1125114 - RNA, 22 nt, Human
ccugcuucagggaugauggcac

SEQ ID NO: 1125115 - RNA, 22 nt, Human
caggucccgccccgggcugacc

SEQ ID NO: 1125116 - RNA, 22 nt, Human
cuggcaggcagacuucugcaag

SEQ ID NO: 1125117 - RNA, 22 nt, Human
guggguggaucaccugagguca

SEQ ID NO: 1125118 - RNA, 22 nt, Human
cagagcucagagcagggcacuc

SEQ ID NO: 1125119 - RNA, 21 nt, Human
uucuuuccccagaggacuaaa

SEQ ID NO: 1125120 - RNA, 22 nt, Human
caaagugcugagauuacaggua

SEQ ID NO: 1125121 - RNA, 16 nt, Human
gggcugggggauucug

SEQ ID NO: 1125122 - RNA, 22 nt, Human
agggugcauguuugcaagagug

SEQ ID NO: 1125123 - RNA, 22 nt, Human
cucagagaagucuuugcuaaac

SEQ ID NO: 1125124 - RNA, 22 nt, Human
aucaguuuauacuuauaaaucu

SEQ ID NO: 1125125 - RNA, 18 nt, Human
gugagcagagagcaucac

SEQ ID NO: 1125126 - RNA, 22 nt, Human
aggggcuggcuuaucugagagu

SEQ ID NO: 1125127 - RNA, 22 nt, Human
aucagcaagacuaggggaauac

SEQ ID NO: 1125128 - RNA, 22 nt, Human
cccuggaguccggagcucaccu

SEQ ID NO: 1125129 - RNA, 22 nt, Human
acuucuggugucauacugcauu

SEQ ID NO: 1125130 - RNA, 22 nt, Human
agccccugggaguagcugcugc

SEQ ID NO: 1125131 - RNA, 22 nt, Human
guacauguugguuguuuccagu

SEQ ID NO: 1125132 - RNA, 22 nt, Human
ccugugugcugaugacgacaga

SEQ ID NO: 1125133 - RNA, 22 nt, Human
ggcuccuguggcaagacagcuu

SEQ ID NO: 1125134 - RNA, 22 nt, Human
cugcaguguucuggaaugcauu

SEQ ID NO: 1125135 - RNA, 22 nt, Human
aggcaggugggucacuugaguc

SEQ ID NO: 1125136 - RNA, 22 nt, Human
aagaguuaagcaacagauacca

SEQ ID NO: 1125137 - RNA, 20 nt, Human
cucuccuugccgacuuggca

SEQ ID NO: 1125138 - RNA, 22 nt, Human
ucugccuuuucacugccacuaa

SEQ ID NO: 1125139 - RNA, 22 nt, Human
ucagggcucaccagccucugcc

SEQ ID NO: 1125140 - RNA, 22 nt, Human
cugugccuuuguagcugugccu

SEQ ID NO: 1125141 - RNA, 22 nt, Human
cuggcugguuacuauuucuggu

SEQ ID NO: 1125142 - RNA, 22 nt, Human
aagagagagcauucuucuguua

SEQ ID NO: 1125143 - RNA, 22 nt, Human
acaaaguuugugguauuccaag

SEQ ID NO: 1125144 - RNA, 22 nt, Human
agacaaaggauuaaugaugaug

SEQ ID NO: 1125145 - RNA, 22 nt, Human
aggacccugagcgggcaugccg

SEQ ID NO: 1125146 - RNA, 22 nt, Human
cuggcucacaggugagaugcau

SEQ ID NO: 1125147 - RNA, 22 nt, Human
gcucccagacugaccagaggug

SEQ ID NO: 1125148 - RNA, 22 nt, Human
ucuggccacccgaggccccugc

SEQ ID NO: 1125149 - RNA, 22 nt, Human
gccucugcaacuccgccuuggu

SEQ ID NO: 1125150 - RNA, 17 nt, Human
cucugcagugcauggcu

SEQ ID NO: 1125151 - RNA, 22 nt, Human
agggcugcaccggggcuucgcg

SEQ ID NO: 1125152 - RNA, 20 nt, Human
uagaaaucuuauaaaagacu

SEQ ID NO: 1125153 - RNA, 22 nt, Human
ggcagaaggccucccagcuccu

SEQ ID NO: 1125154 - RNA, 22 nt, Human
uccuucagcucucuauuuagau

SEQ ID NO: 1125155 - RNA, 22 nt, Human
aaucagaauuuauugaaucuuu

SEQ ID NO: 1125156 - RNA, 22 nt, Human
caaggagauaaaauguugagcu

SEQ ID NO: 1125157 - RNA, 22 nt, Human
aaaguguggagauugaacuaaa

SEQ ID NO: 1125158 - RNA, 22 nt, Human
gcuggugccuuguuguuguuac

SEQ ID NO: 1125159 - RNA, 19 nt, Human
acagaaauguaagugagac

SEQ ID NO: 1125160 - RNA, 22 nt, Human
gagcugggacauggguccucuc

SEQ ID NO: 1125161 - RNA, 22 nt, Human
gucacacucagaaugacuagag

SEQ ID NO: 1125162 - RNA, 19 nt, Human
uggcucugucgaaggcaca

SEQ ID NO: 1125163 - RNA, 22 nt, Human
caagcuccuuacauccacaggg

SEQ ID NO: 1125164 - RNA, 22 nt, Human
cuggugcaggaaggagcuggca

SEQ ID NO: 1125165 - RNA, 22 nt, Human
ccuggaugauccaugucaugga

SEQ ID NO: 1125166 - RNA, 22 nt, Human
ugcaaacuauugguagagaugg

SEQ ID NO: 1125167 - RNA, 22 nt, Human
gccugccugcugugugcaaguu

SEQ ID NO: 1125168 - RNA, 22 nt, Human
gagagcuggguucaaguagcug

SEQ ID NO: 1125169 - RNA, 23 nt, Human
agagcuuagggaauucacaugag

SEQ ID NO: 1125170 - RNA, 19 nt, Human
guauauuuauauggcugua

SEQ ID NO: 1125171 - RNA, 20 nt, Human
uggggccuguuucugugguu

SEQ ID NO: 1125172 - RNA, 20 nt, Human
ggggcccaagcccucuugcc

SEQ ID NO: 1125173 - RNA, 20 nt, Human
uccaggagaacugggagccg

SEQ ID NO: 1125174 - RNA, 23 nt, Human
agaugaggcuucuccauguuggu

SEQ ID NO: 1125175 - RNA, 22 nt, Human
gcagggcaaugaucccgagagg

SEQ ID NO: 1125176 - RNA, 22 nt, Human
gugcagugacccuggagagcug

SEQ ID NO: 1125177 - RNA, 22 nt, Human
ggugggcaggucacucugccuc

SEQ ID NO: 1125178 - RNA, 22 nt, Human
ugucccuggaacuauggcucca

SEQ ID NO: 1125179 - RNA, 18 nt, Human
gggcuguguucaugccca

SEQ ID NO: 1125180 - RNA, 22 nt, Human
uuugggaacucuaucauggaaa

SEQ ID NO: 1125181 - RNA, 22 nt, Human
cucugagcuccuggaagcgugc

SEQ ID NO: 1125182 - RNA, 22 nt, Human
acucacauuucaucaggccaag

SEQ ID NO: 1125183 - RNA, 22 nt, Human
aggagucagauaugggaaaguu

SEQ ID NO: 1125184 - RNA, 22 nt, Human
ccugucagaugaaguaauugug

SEQ ID NO: 1125185 - RNA, 22 nt, Human
ugugugccagccuacgaggagc

SEQ ID NO: 1125186 - RNA, 22 nt, Human
ucuggagcuuccucauuuacag

SEQ ID NO: 1125187 - RNA, 22 nt, Human
aagugacacauggcacuucuau

SEQ ID NO: 1125188 - RNA, 22 nt, Human
gagauggggucagcugggacau

SEQ ID NO: 1125189 - RNA, 22 nt, Human
cuacauuuuucaccgagccucu

SEQ ID NO: 1125190 - RNA, 22 nt, Human
aauacaaucaaauucacuagca

SEQ ID NO: 1125191 - RNA, 22 nt, Human
ggcugcuggggacgugggagag

SEQ ID NO: 1125192 - RNA, 22 nt, Human
caagaacauugugaucacuuca

SEQ ID NO: 1125193 - RNA, 22 nt, Human
cuggcagcgugagcagcaucca

SEQ ID NO: 1125194 - RNA, 22 nt, Human
aguccaugcugucuacagaauc

SEQ ID NO: 1125195 - RNA, 22 nt, Human
uaaggcacgcauaagagggggc

SEQ ID NO: 1125196 - RNA, 22 nt, Human
ggggaugguagaccggugacgu

SEQ ID NO: 1125197 - RNA, 22 nt, Human
cuggaagggucuacuuagcaga

SEQ ID NO: 1125198 - RNA, 22 nt, Human
gcuggcuguguuccuucugcca

SEQ ID NO: 1125199 - RNA, 22 nt, Human
auacaugucaucauauguuugu

SEQ ID NO: 1125200 - RNA, 22 nt, Human
aaauguagaccuauagggaccu

SEQ ID NO: 1125201 - RNA, 22 nt, Human
agugcuguccaguuucacaggu

SEQ ID NO: 1125202 - RNA, 21 nt, Human
cucaggaucuuauauauuagu

SEQ ID NO: 1125203 - RNA, 22 nt, Human
aaguccauucuuccagccagcu

SEQ ID NO: 1125204 - RNA, 22 nt, Human
uaacagaaauagaaaugagagu

SEQ ID NO: 1125205 - RNA, 22 nt, Human
aauguguauaugaacauacagg

SEQ ID NO: 1125206 - RNA, 20 nt, Human
uucuggaggcuacaagucug

SEQ ID NO: 1125207 - RNA, 22 nt, Human
gcuuccugauauucauacuguu

SEQ ID NO: 1125208 - RNA, 22 nt, Human
cugagcugggacucaguagcaa

SEQ ID NO: 1125209 - RNA, 21 nt, Human
ugccagcauguaggcuaguug

SEQ ID NO: 1125210 - RNA, 22 nt, Human
cugaggaguuuggguuguucaa

SEQ ID NO: 1125211 - RNA, 22 nt, Human
ugugucagaaggcaauggggau

SEQ ID NO: 1125212 - RNA, 22 nt, Human
gccccagguugccugucccagg

SEQ ID NO: 1125213 - RNA, 22 nt, Human
caggcugccgugaagcaggccu

SEQ ID NO: 1125214 - RNA, 22 nt, Human
cuccuuccugguuagcaccuua

SEQ ID NO: 1125215 - RNA, 22 nt, Human
caauguuuucaacugacaagua

SEQ ID NO: 1125216 - RNA, 22 nt, Human
cuggcagcugcccgagaugccc

SEQ ID NO: 1125217 - RNA, 22 nt, Human
ggccucugguucguggugaccu

SEQ ID NO: 1125218 - RNA, 22 nt, Human
uucuuacagcccuauuacuaaa

SEQ ID NO: 1125219 - RNA, 22 nt, Human
aucugacaaccuauugacuuga

SEQ ID NO: 1125220 - RNA, 22 nt, Human
uggcucugcaccucaguguacc

SEQ ID NO: 1125221 - RNA, 22 nt, Human
caugaagcauguuuugucauga

SEQ ID NO: 1125222 - RNA, 22 nt, Human
gagcugccuguugcauagcaac

SEQ ID NO: 1125223 - RNA, 22 nt, Human
ggcccagccggcgagucucgcg

SEQ ID NO: 1125224 - RNA, 22 nt, Human
uggguggcggccugguucugag

SEQ ID NO: 1125225 - RNA, 22 nt, Human
ugcucacagcccagaacauaau

SEQ ID NO: 1125226 - RNA, 20 nt, Human
gaaaugugaccucuucugug

SEQ ID NO: 1125227 - RNA, 22 nt, Human
ucagcuccucaugcaggggaua

SEQ ID NO: 1125228 - RNA, 22 nt, Human
gcugagugagguccagagcuug

SEQ ID NO: 1125229 - RNA, 22 nt, Human
uaugcauaugaccccaagcuug

SEQ ID NO: 1125230 - RNA, 22 nt, Human
uggugugggcguggcaggcaag

SEQ ID NO: 1125231 - RNA, 21 nt, Human
uggcucugcucagagcagucc

SEQ ID NO: 1125232 - RNA, 22 nt, Human
cagcugcccaggccaccuggag

SEQ ID NO: 1125233 - RNA, 22 nt, Human
aucuuucagagcuccaucaggg

SEQ ID NO: 1125234 - RNA, 22 nt, Human
gcuguauuuaacaacuggcuca

SEQ ID NO: 1125235 - RNA, 22 nt, Human
ugaacauauucaccucuaaaua

SEQ ID NO: 1125236 - RNA, 22 nt, Human
caggucagaggcgcagccccca

SEQ ID NO: 1125237 - RNA, 22 nt, Human
uggcaggguuggccaccuuacc

SEQ ID NO: 1125238 - RNA, 22 nt, Human
ucugucacucuagagauggcag

SEQ ID NO: 1125239 - RNA, 22 nt, Human
uccuugaauccuagcauccuau

SEQ ID NO: 1125240 - RNA, 21 nt, Human
acagcaagccuuccuuucagg

SEQ ID NO: 1125241 - RNA, 19 nt, Human
gcuguauuaaagauacaug

SEQ ID NO: 1125242 - RNA, 22 nt, Human
acagggcaugugcaagagacau

SEQ ID NO: 1125243 - RNA, 22 nt, Human
gucucccaaccccugugcccag

SEQ ID NO: 1125244 - RNA, 22 nt, Human
ugagccaguggaagauggcagu

SEQ ID NO: 1125245 - RNA, 22 nt, Human
gugcccugguccccagcauaua

SEQ ID NO: 1125246 - RNA, 22 nt, Human
ccagcccuugagauggaaggga

SEQ ID NO: 1125247 - RNA, 18 nt, Human
gucaccuggaucagauua

SEQ ID NO: 1125248 - RNA, 22 nt, Human
uguaugugcaauguuuauaugu

SEQ ID NO: 1125249 - RNA, 22 nt, Human
uuugugaaaugaagucacaacu

SEQ ID NO: 1125250 - RNA, 22 nt, Human
gcucaggagcucuugguggcgc

SEQ ID NO: 1125251 - RNA, 22 nt, Human
gugcucacugugagacguccug

SEQ ID NO: 1125252 - RNA, 22 nt, Human
cccuuccucccaggcuucugug

SEQ ID NO: 1125253 - RNA, 22 nt, Human
uuccauauguauauagcuguua

SEQ ID NO: 1125254 - RNA, 22 nt, Human
ugcagcauuauucacaguagcc

SEQ ID NO: 1125255 - RNA, 22 nt, Human
accuuucauuaaagucuguagu

SEQ ID NO: 1125256 - RNA, 22 nt, Human
augcaguauaaaucauuucugg

SEQ ID NO: 1125257 - RNA, 22 nt, Human
ggcuccagggaguggagagaag

SEQ ID NO: 1125258 - RNA, 22 nt, Human
gcagcccagguguagcucuuug

SEQ ID NO: 1125259 - RNA, 22 nt, Human
cugugaggcccugggugcugga

SEQ ID NO: 1125260 - RNA, 22 nt, Human
cugucacacugauaucaggcuu

SEQ ID NO: 1125261 - RNA, 22 nt, Human
aacaugaagguaggaugguuuu

SEQ ID NO: 1125262 - RNA, 22 nt, Human
aaugauggucauggcaacuuuu

SEQ ID NO: 1125263 - RNA, 22 nt, Human
ccuuuuucccuggagggacagc

SEQ ID NO: 1125264 - RNA, 22 nt, Human
agcucccagggcugggcaaguu

SEQ ID NO: 1125265 - RNA, 22 nt, Human
uggcucagucauggaugaguaa

SEQ ID NO: 1125266 - RNA, 19 nt, Human
gcagccaggugcucuaccu

SEQ ID NO: 1125267 - RNA, 22 nt, Human
ucagaggaccuuacugagaacc

SEQ ID NO: 1125268 - RNA, 22 nt, Human
uccaucagauucccuccugaga

SEQ ID NO: 1125269 - RNA, 22 nt, Human
caggagcccguugcuccggcgg

SEQ ID NO: 1125270 - RNA, 22 nt, Human
uaaucacaucaggguaaauggg

SEQ ID NO: 1125271 - RNA, 22 nt, Human
uaauacuuaccuugcagagucu

SEQ ID NO: 1125272 - RNA, 22 nt, Human
gggagcuggagcuggaagacuc

SEQ ID NO: 1125273 - RNA, 21 nt, Human
agggagcuauuuauaguaagc

SEQ ID NO: 1125274 - RNA, 22 nt, Human
caggcaggagccagggauucca

SEQ ID NO: 1125275 - RNA, 22 nt, Human
ggcccuguccuggcugucuccg

SEQ ID NO: 1125276 - RNA, 22 nt, Human
aauguuuucccagugcagacga

SEQ ID NO: 1125277 - RNA, 22 nt, Human
cuuucacaguccugacugagcg

SEQ ID NO: 1125278 - RNA, 22 nt, Human
uugggguguuggauggagcaag

SEQ ID NO: 1125279 - RNA, 20 nt, Human
ugccaugguaacagagugug

SEQ ID NO: 1125280 - RNA, 22 nt, Human
cgcuggccauagccuccugugu

SEQ ID NO: 1125281 - RNA, 22 nt, Human
gacauucacaguuuccgauggu

SEQ ID NO: 1125282 - RNA, 22 nt, Human
agcaauauuuaaagguuugcaa

SEQ ID NO: 1125283 - RNA, 22 nt, Human
acguuuucuagagaauaugcag

SEQ ID NO: 1125284 - RNA, 22 nt, Human
cucuggaguucucaugaggaac

SEQ ID NO: 1125285 - RNA, 22 nt, Human
guucguauuuaugucgcagaag

SEQ ID NO: 1125286 - RNA, 23 nt, Human
uagagcagggaaaucugucagag

SEQ ID NO: 1125287 - RNA, 22 nt, Human
gcagauggcagcccaggcuggg

SEQ ID NO: 1125288 - RNA, 22 nt, Human
aaaugcacaaaguaaguguaau

SEQ ID NO: 1125289 - RNA, 22 nt, Human
ucccagcgcggggggaggaucc

SEQ ID NO: 1125290 - RNA, 22 nt, Human
cuuguauuccccuaucucuaaa

SEQ ID NO: 1125291 - RNA, 22 nt, Human
ggccagaaaguuaagcuguggc

SEQ ID NO: 1125292 - RNA, 22 nt, Human
ggucccaggaagugcggcggcg

SEQ ID NO: 1125293 - RNA, 22 nt, Human
uguuccuaaauaugaauggaga

SEQ ID NO: 1125294 - RNA, 22 nt, Human
ggaugcugcuaucaggcuucga

SEQ ID NO: 1125295 - RNA, 22 nt, Human
gagcugcccugagcuuugcaug

SEQ ID NO: 1125296 - RNA, 22 nt, Human
ugcucuggggagcuccucugcg

SEQ ID NO: 1125297 - RNA, 22 nt, Human
cagcugagucugagguucuuug

SEQ ID NO: 1125298 - RNA, 22 nt, Human
ugugacaugugucaucuuuucu

SEQ ID NO: 1125299 - RNA, 22 nt, Human
aagccucuggggccucaucugu

SEQ ID NO: 1125300 - RNA, 22 nt, Human
agcucugggccaggaacccuaa

SEQ ID NO: 1125301 - RNA, 22 nt, Human
gaggucaauaauaugugcuuua

SEQ ID NO: 1125302 - RNA, 22 nt, Human
ccaaagucagugcucagucguc

SEQ ID NO: 1125303 - RNA, 22 nt, Human
uggcugccuuucaccucaucuc

SEQ ID NO: 1125304 - RNA, 22 nt, Human
uugcuuuguggugguucuucca

SEQ ID NO: 1125305 - RNA, 22 nt, Human
caucugccuaaguggcccuguu

SEQ ID NO: 1125306 - RNA, 22 nt, Human
ugggccugggagggcagacgcu

SEQ ID NO: 1125307 - RNA, 22 nt, Human
ugaggcaguucuuacuuguauu

SEQ ID NO: 1125308 - RNA, 22 nt, Human
aagaugcagcuuccacuuuugc

SEQ ID NO: 1125309 - RNA, 21 nt, Human
ccugccaggaaacugaguguc

SEQ ID NO: 1125310 - RNA, 20 nt, Human
cugugcuuuggaaccuggaa

SEQ ID NO: 1125311 - RNA, 22 nt, Human
gagagaagaauguuccgaggcc

SEQ ID NO: 1125312 - RNA, 22 nt, Human
gguuugcacgauauuuccaugg

SEQ ID NO: 1125313 - RNA, 22 nt, Human
cacagcuuccauuagaaugaga

SEQ ID NO: 1125314 - RNA, 22 nt, Human
aagaauguucuuguagucauga

SEQ ID NO: 1125315 - RNA, 22 nt, Human
ggggagugacgcagggccauag

SEQ ID NO: 1125316 - RNA, 22 nt, Human
ugacacauuaaaugcucacaaa

SEQ ID NO: 1125317 - RNA, 22 nt, Human
gugugcgccgacacagccaggu

SEQ ID NO: 1125318 - RNA, 22 nt, Human
cuguggcuaggaagcuguggga

SEQ ID NO: 1125319 - RNA, 22 nt, Human
ggcccagcacagugcuuggggg

SEQ ID NO: 1125320 - RNA, 20 nt, Human
aggcugggguguuuugccca

SEQ ID NO: 1125321 - RNA, 23 nt, Human
aaccagauaaauggcuccagggc

SEQ ID NO: 1125322 - RNA, 22 nt, Human
cccucagcuccacccucagcag

SEQ ID NO: 1125323 - RNA, 22 nt, Human
auuuauguaucuguguagauca

SEQ ID NO: 1125324 - RNA, 22 nt, Human
ccaggcugggcggggaaccugg

SEQ ID NO: 1125325 - RNA, 22 nt, Human
cuggagcaggcuugucccagcu

SEQ ID NO: 1125326 - RNA, 22 nt, Human
gcugccuguccugaggaguccg

SEQ ID NO: 1125327 - RNA, 22 nt, Human
cuucaagaagacagcagagcau

SEQ ID NO: 1125328 - RNA, 22 nt, Human
aggguggcaguuacuggagcaa

SEQ ID NO: 1125329 - RNA, 22 nt, Human
gaggaggcuggcgccgccugcc

SEQ ID NO: 1125330 - RNA, 22 nt, Human
uggaggcauaggccugggcccu

SEQ ID NO: 1125331 - RNA, 22 nt, Human
ccuggaaggcaggcauggauug

SEQ ID NO: 1125332 - RNA, 22 nt, Human
gccuggcacauugcaguggauu

SEQ ID NO: 1125333 - RNA, 22 nt, Human
agaagccaacagggcaggagag

SEQ ID NO: 1125334 - RNA, 22 nt, Human
gaaaauguuuccuguuauuugc

SEQ ID NO: 1125335 - RNA, 21 nt, Human
uuuuuucuugcgugaggccug

SEQ ID NO: 1125336 - RNA, 22 nt, Human
uaugaagaaguucugugaaaug

SEQ ID NO: 1125337 - RNA, 22 nt, Human
gcucagagggaacaaggggcug

SEQ ID NO: 1125338 - RNA, 22 nt, Human
auagaaaacagauguccuuaaa

SEQ ID NO: 1125339 - RNA, 18 nt, Human
gcccugguggagcuggug

SEQ ID NO: 1125340 - RNA, 22 nt, Human
aguacuucagaggcugcccagg

SEQ ID NO: 1125341 - RNA, 18 nt, Human
agagcagcggcaucacac

SEQ ID NO: 1125342 - RNA, 22 nt, Human
gaggccuggcugucagucccca

SEQ ID NO: 1125343 - RNA, 22 nt, Human
auugcaccuuggguuuugaaag

SEQ ID NO: 1125344 - RNA, 22 nt, Human
ugcagauucaaaugaaaugcaa

SEQ ID NO: 1125345 - RNA, 22 nt, Human
cugucucucuaggacacugggg

SEQ ID NO: 1125346 - RNA, 22 nt, Human
ugcauuguuuagaacucuuugg

SEQ ID NO: 1125347 - RNA, 22 nt, Human
gcugccuugaacuuggccuggg

SEQ ID NO: 1125348 - RNA, 22 nt, Human
agggguggccugccuuacuccc

SEQ ID NO: 1125349 - RNA, 18 nt, Human
agagaugguguagaguuu

SEQ ID NO: 1125350 - RNA, 22 nt, Human
ugaaggcuguuggauggggaag

SEQ ID NO: 1125351 - RNA, 22 nt, Human
ugguugaauaagauaguuuuau

SEQ ID NO: 1125352 - RNA, 22 nt, Human
agccuggacagcuacggagaac

SEQ ID NO: 1125353 - RNA, 22 nt, Human
uuuuccucugagcuuugaauaa

SEQ ID NO: 1125354 - RNA, 22 nt, Human
ccagggcauguccaagacuuag

SEQ ID NO: 1125355 - RNA, 22 nt, Human
uagcaggguccaaugugaggca

SEQ ID NO: 1125356 - RNA, 22 nt, Human
caauaauauccugugcuguuug

SEQ ID NO: 1125357 - RNA, 22 nt, Human
cugggcugucccaaccccaucc

SEQ ID NO: 1125358 - RNA, 22 nt, Human
aauuucaagucuugaagaagua

SEQ ID NO: 1125359 - RNA, 22 nt, Human
uagggcagauucgguggaguuu

SEQ ID NO: 1125360 - RNA, 22 nt, Human
uaacagaauccuguuauugcca

SEQ ID NO: 1125361 - RNA, 22 nt, Human
ugggcagacuaaggucaaagcu

SEQ ID NO: 1125362 - RNA, 20 nt, Human
cugggcugcccagcuauggg

SEQ ID NO: 1125363 - RNA, 22 nt, Human
gcaggcugugaggcucagaugg

SEQ ID NO: 1125364 - RNA, 22 nt, Human
agacagcugcucgcagagcuau

SEQ ID NO: 1125365 - RNA, 22 nt, Human
ugcuccuuccucauccugugca

SEQ ID NO: 1125366 - RNA, 22 nt, Human
uggcagcuacagacagagguga

SEQ ID NO: 1125367 - RNA, 20 nt, Human
cuuggccuacuuagcuuugu

SEQ ID NO: 1125368 - RNA, 22 nt, Human
uugugucugggggagugacauc

SEQ ID NO: 1125369 - RNA, 22 nt, Human
agcaccugcuuaaugugcagug

SEQ ID NO: 1125370 - RNA, 22 nt, Human
ccagagccugcugagccccauu

SEQ ID NO: 1125371 - RNA, 22 nt, Human
agaaugcaguuugaaauaaggu

SEQ ID NO: 1125372 - RNA, 20 nt, Human
acugagcugcauggagagga

SEQ ID NO: 1125373 - RNA, 22 nt, Human
gaugcugaagugaagugaucuu

SEQ ID NO: 1125374 - RNA, 22 nt, Human
aggugcuuggcucgugcacaca

SEQ ID NO: 1125375 - RNA, 22 nt, Human
ugcuuccuugagcucuccaauc

SEQ ID NO: 1125376 - RNA, 22 nt, Human
gcccagcaccucucucaggguu

SEQ ID NO: 1125377 - RNA, 22 nt, Human
ucugggugaugaaaugcacugu

SEQ ID NO: 1125378 - RNA, 22 nt, Human
aauguacaaaagucagccaacu

SEQ ID NO: 1125379 - RNA, 18 nt, Human
cccagcuccacuucccuc

SEQ ID NO: 1125380 - RNA, 22 nt, Human
auguagcagauauuugugcaca

SEQ ID NO: 1125381 - RNA, 22 nt, Human
ucugcucagugcuuaucucuaa

SEQ ID NO: 1125382 - RNA, 22 nt, Human
ggcagugacuguucagacgucc

SEQ ID NO: 1125383 - RNA, 23 nt, Human
uugcauguagcccaugaguaacu

SEQ ID NO: 1125384 - RNA, 22 nt, Human
ucaggagucugugcaguuccac

SEQ ID NO: 1125385 - RNA, 22 nt, Human
aaucaguuaggguguuaaugag

SEQ ID NO: 1125386 - RNA, 22 nt, Human
acagggcauuuccucuaugugu

SEQ ID NO: 1125387 - RNA, 22 nt, Human
cugugcuggcagaccuggaguu

SEQ ID NO: 1125388 - RNA, 22 nt, Human
cccccuggcaggcuggccucuc

SEQ ID NO: 1125389 - RNA, 23 nt, Human
agacccagagacuggcucugcuc

SEQ ID NO: 1125390 - RNA, 22 nt, Human
cugugcaagcccaagauaaaac

SEQ ID NO: 1125391 - RNA, 22 nt, Human
agguaagggucacaguucauau

SEQ ID NO: 1125392 - RNA, 22 nt, Human
cagcucugaggaacacuccuuu

SEQ ID NO: 1125393 - RNA, 22 nt, Human
agccaaagaucagugugcaagu

SEQ ID NO: 1125394 - RNA, 22 nt, Human
ugcauuguuugauaggugaauu

SEQ ID NO: 1125395 - RNA, 22 nt, Human
ccagccagccuugaucugagua

SEQ ID NO: 1125396 - RNA, 22 nt, Human
gcagcugagagaagaacagggc

SEQ ID NO: 1125397 - RNA, 22 nt, Human
ggaggccacgguuuagcaccga

SEQ ID NO: 1125398 - RNA, 19 nt, Human
agacacacuugauaugugu

SEQ ID NO: 1125399 - RNA, 22 nt, Human
ggagagcugguagcuggcucca

SEQ ID NO: 1125400 - RNA, 21 nt, Human
ucugggcccaugcugccucac

SEQ ID NO: 1125401 - RNA, 22 nt, Human
ugggggagauuagagcuucuua

SEQ ID NO: 1125402 - RNA, 22 nt, Human
cucuggagcaccgggcuaucca

SEQ ID NO: 1125403 - RNA, 22 nt, Human
gcucuggaagcaucugagagga

SEQ ID NO: 1125404 - RNA, 22 nt, Human
gcagcugaauguccauugcugc

SEQ ID NO: 1125405 - RNA, 20 nt, Human
gugggcagaugugugcaugg

SEQ ID NO: 1125406 - RNA, 22 nt, Human
agcugucuccagauacaggauu

SEQ ID NO: 1125407 - RNA, 22 nt, Human
ucuuggagacucuuguauauuu

SEQ ID NO: 1125408 - RNA, 22 nt, Human
aaagcugcugccaaucaggcuu

SEQ ID NO: 1125409 - RNA, 22 nt, Human
uggcccuguguccugcugccag

SEQ ID NO: 1125410 - RNA, 17 nt, Human
aggugcuggagcaucag

SEQ ID NO: 1125411 - RNA, 22 nt, Human
agugaaaugacugaaucagaua

SEQ ID NO: 1125412 - RNA, 20 nt, Human
uaucaaucagaaagaagacu

SEQ ID NO: 1125413 - RNA, 22 nt, Human
aagauucuacaguagguacauu

SEQ ID NO: 1125414 - RNA, 22 nt, Human
gccuggagccucagcaaggagg

SEQ ID NO: 1125415 - RNA, 22 nt, Human
ugaaagaacuagcaucuucaag

SEQ ID NO: 1125416 - RNA, 22 nt, Human
gccagagcacaggcugguagua

SEQ ID NO: 1125417 - RNA, 22 nt, Human
agggcagcauugccuuucucca

SEQ ID NO: 1125418 - RNA, 22 nt, Human
auacaucuuccuuuuaaaaugc

SEQ ID NO: 1125419 - RNA, 22 nt, Human
aggugcagcugguggagucugg

SEQ ID NO: 1125420 - RNA, 22 nt, Human
gagcuggcuaauacugacuuau

SEQ ID NO: 1125421 - RNA, 22 nt, Human
ggagaggugaauggcugcucua

SEQ ID NO: 1125422 - RNA, 22 nt, Human
agcagggcagugaucagaaagg

SEQ ID NO: 1125423 - RNA, 20 nt, Human
ggccuuggccucuuugcagc

SEQ ID NO: 1125424 - RNA, 22 nt, Human
cagcccugcacgcugccuccgc

SEQ ID NO: 1125425 - RNA, 23 nt, Human
ugggccuggccucccaguccagc

SEQ ID NO: 1125426 - RNA, 22 nt, Human
gaugcacugcaguauauacugu

SEQ ID NO: 1125427 - RNA, 22 nt, Human
ggugcuggacacguggcacucc

SEQ ID NO: 1125428 - RNA, 22 nt, Human
acauuuacagugcuagacaauc

SEQ ID NO: 1125429 - RNA, 22 nt, Human
ggcgaggccgggacaggcugga

SEQ ID NO: 1125430 - RNA, 22 nt, Human
cggagcugccugccaagccugc

SEQ ID NO: 1125431 - RNA, 22 nt, Human
uggccuugggcagguggccugc

SEQ ID NO: 1125432 - RNA, 22 nt, Human
cccugggacccgcugcagaggc

SEQ ID NO: 1125433 - RNA, 22 nt, Human
aaguccugccaccuauaagccu

SEQ ID NO: 1125434 - RNA, 22 nt, Human
cagcaggguauacagggaauuu

SEQ ID NO: 1125435 - RNA, 22 nt, Human
uggcaguggcucagagugcaga

SEQ ID NO: 1125436 - RNA, 22 nt, Human
agaggccagcagugccuaucug

SEQ ID NO: 1125437 - RNA, 22 nt, Human
ucaguauccacaaaugcucaaa

SEQ ID NO: 1125438 - RNA, 22 nt, Human
ugccaggaggaggugggacaga

SEQ ID NO: 1125439 - RNA, 22 nt, Human
caguggugaagagcaggggcuc

SEQ ID NO: 1125440 - RNA, 20 nt, Human
cucuggcuccgcgugaccgc

SEQ ID NO: 1125441 - RNA, 22 nt, Human
cccaggagguagagguugcagu

SEQ ID NO: 1125442 - RNA, 22 nt, Human
acauuucuuccacaugcugcug

SEQ ID NO: 1125443 - RNA, 22 nt, Human
gccuggcccagggcucuuguug

SEQ ID NO: 1125444 - RNA, 22 nt, Human
ggagggcugccagguggagcgg

SEQ ID NO: 1125445 - RNA, 22 nt, Human
gcccagcagaucucagugucuc

SEQ ID NO: 1125446 - RNA, 19 nt, Human
cucugccucccuccugggu

SEQ ID NO: 1125447 - RNA, 22 nt, Human
ucucagaguuugaaucuggagu

SEQ ID NO: 1125448 - RNA, 22 nt, Human
gcugccuguggcccuucugggu

SEQ ID NO: 1125449 - RNA, 22 nt, Human
guguaugugccuuacauuuuau

SEQ ID NO: 1125450 - RNA, 22 nt, Human
cccagggucccugcucucugug

SEQ ID NO: 1125451 - RNA, 22 nt, Human
gagaaacuuggaguuauucugg

SEQ ID NO: 1125452 - RNA, 22 nt, Human
agcagugaugcaugacagccua

SEQ ID NO: 1125453 - RNA, 22 nt, Human
cuaaaugcccuacaaugacugg

SEQ ID NO: 1125454 - RNA, 22 nt, Human
gagcucugacugcugggugaca

SEQ ID NO: 1125455 - RNA, 22 nt, Human
agagcugggugaagugccauca

SEQ ID NO: 1125456 - RNA, 20 nt, Human
caggccagagguuugauggc

SEQ ID NO: 1125457 - RNA, 22 nt, Human
acauauuuccaugcagcauguc

SEQ ID NO: 1125458 - RNA, 22 nt, Human
guguggcugugggagauguuca

SEQ ID NO: 1125459 - RNA, 22 nt, Human
gaacagcugcuagagaucugug

SEQ ID NO: 1125460 - RNA, 22 nt, Human
augaugguaaauucaguauccg

SEQ ID NO: 1125461 - RNA, 22 nt, Human
aagagcuguaugccauaugauu

SEQ ID NO: 1125462 - RNA, 21 nt, Human
aagagcuggaucaaggauaag

SEQ ID NO: 1125463 - RNA, 22 nt, Human
gaggccuggugugucucccgcu

SEQ ID NO: 1125464 - RNA, 20 nt, Human
agguggcuccugcugggggu

SEQ ID NO: 1125465 - RNA, 22 nt, Human
gcugccuucaguucugauucau

SEQ ID NO: 1125466 - RNA, 22 nt, Human
cccaggcuggauuucgguggca

SEQ ID NO: 1125467 - RNA, 20 nt, Human
ggcugccuccuuccuuuccu

SEQ ID NO: 1125468 - RNA, 22 nt, Human
cucagcagcagggaagagguca

SEQ ID NO: 1125469 - RNA, 20 nt, Human
cugcucugcuuugcaggugg

SEQ ID NO: 1125470 - RNA, 22 nt, Human
aggcugcucugcgaagucagcu

SEQ ID NO: 1125471 - RNA, 22 nt, Human
acauuucugagcagggagcugu

SEQ ID NO: 1125472 - RNA, 22 nt, Human
ugccuggcaaugccagaagcca

SEQ ID NO: 1125473 - RNA, 22 nt, Human
uuugcaaauaccaugaaacuug

SEQ ID NO: 1125474 - RNA, 22 nt, Human
cuggcagggugggcuuugcuuu

SEQ ID NO: 1125475 - RNA, 22 nt, Human
uccucugcucagcauuccucac

SEQ ID NO: 1125476 - RNA, 22 nt, Human
ugucccagcacuuugggagucu

SEQ ID NO: 1125477 - RNA, 23 nt, Human
cccagcagauuguaaagugucca

SEQ ID NO: 1125478 - RNA, 22 nt, Human
ucuggccaacaaaaacuaaguc

SEQ ID NO: 1125479 - RNA, 20 nt, Human
caggcacacucauuccugcu

SEQ ID NO: 1125480 - RNA, 17 nt, Human
gagauggguggaucacc

SEQ ID NO: 1125481 - RNA, 22 nt, Human
cccugccugugggcaucaacau

SEQ ID NO: 1125482 - RNA, 22 nt, Human
cuggcagcucuacucagagccu

SEQ ID NO: 1125483 - RNA, 22 nt, Human
gccucugcucucagguagccuc

SEQ ID NO: 1125484 - RNA, 22 nt, Human
uccagagguauguagagaguau

SEQ ID NO: 1125485 - RNA, 22 nt, Human
gcucugggauuaccagccuuag

SEQ ID NO: 1125486 - RNA, 22 nt, Human
ugguccagacauuucugaggua

SEQ ID NO: 1125487 - RNA, 22 nt, Human
ccugcacuaccuggggcugcug

SEQ ID NO: 1125488 - RNA, 22 nt, Human
ggaggccauaguuugggaguca

SEQ ID NO: 1125489 - RNA, 22 nt, Human
acaugcauucucuaaaagcaaa

SEQ ID NO: 1125490 - RNA, 22 nt, Human
ugaagcaacuggacaaguuggc

SEQ ID NO: 1125491 - RNA, 22 nt, Human
uaccuuuugcuuauuaugacac

SEQ ID NO: 1125492 - RNA, 22 nt, Human
ccugccagucacuaugucaccu

SEQ ID NO: 1125493 - RNA, 22 nt, Human
gcucccuguucucagccaugau

SEQ ID NO: 1125494 - RNA, 22 nt, Human
cugcucuguuucuuagcugggu

SEQ ID NO: 1125495 - RNA, 22 nt, Human
gccuggagcucaugugggcauu

SEQ ID NO: 1125496 - RNA, 22 nt, Human
cauugaaauauggaaacugaug

SEQ ID NO: 1125497 - RNA, 22 nt, Human
ccagggcagcagaauuggggca

SEQ ID NO: 1125498 - RNA, 22 nt, Human
cagaggccuuucuacagugaua

SEQ ID NO: 1125499 - RNA, 22 nt, Human
ucucccacagccgugcuucaag

SEQ ID NO: 1125500 - RNA, 19 nt, Human
accucugcagagauguuua

SEQ ID NO: 1125501 - RNA, 22 nt, Human
gucugcugcagagcauggcuuu

SEQ ID NO: 1125502 - RNA, 22 nt, Human
ccugggcaacauagugagaccc

SEQ ID NO: 1125503 - RNA, 22 nt, Human
agaauucuuggugguuagaaua

SEQ ID NO: 1125504 - RNA, 19 nt, Human
cagagcagugguuccugaa

SEQ ID NO: 1125505 - RNA, 22 nt, Human
aaaagucagucucuccuagcuc

SEQ ID NO: 1125506 - RNA, 22 nt, Human
gacuuucucuccucccaggugu

SEQ ID NO: 1125507 - RNA, 22 nt, Human
gggcugagucugcugccuguca

SEQ ID NO: 1125508 - RNA, 21 nt, Human
uuagcaaagcaaacacaugcu

SEQ ID NO: 1125509 - RNA, 22 nt, Human
ggccugugucugugccuguccu

SEQ ID NO: 1125510 - RNA, 22 nt, Human
gcugggagugggcaagaugaga

SEQ ID NO: 1125511 - RNA, 22 nt, Human
gaugaggggucauuggcuggga

SEQ ID NO: 1125512 - RNA, 17 nt, Human
aggccucccuccaggcc

SEQ ID NO: 1125513 - RNA, 22 nt, Human
gcaggaugccagggcagcagcg

SEQ ID NO: 1125514 - RNA, 22 nt, Human
gggccuggggacaccaccauga

SEQ ID NO: 1125515 - RNA, 22 nt, Human
ugaggcucaaggucugguggag

SEQ ID NO: 1125516 - RNA, 22 nt, Human
auucccaucgucaacuucacug

SEQ ID NO: 1125517 - RNA, 21 nt, Human
ucuguacaucauugagucccc

SEQ ID NO: 1125518 - RNA, 22 nt, Human
ccugccaggagcuggugcugca

SEQ ID NO: 1125519 - RNA, 21 nt, Human
ugggagagggcucagcuaccc

SEQ ID NO: 1125520 - RNA, 20 nt, Human
ccagcugagccaaggggaga

SEQ ID NO: 1125521 - RNA, 22 nt, Human
ucagcaauccucccacaggugg

SEQ ID NO: 1125522 - RNA, 22 nt, Human
gagagcuguccggcugagcagc

SEQ ID NO: 1125523 - RNA, 22 nt, Human
cugguccuugacgcgugggagg

SEQ ID NO: 1125524 - RNA, 22 nt, Human
ugcugucuuccaggauggugaa

SEQ ID NO: 1125525 - RNA, 22 nt, Human
aggugauguccacagcuugcag

SEQ ID NO: 1125526 - RNA, 22 nt, Human
uuccauaaugagauucccagcc

SEQ ID NO: 1125527 - RNA, 22 nt, Human
uggccugggccugccggugcaa

SEQ ID NO: 1125528 - RNA, 22 nt, Human
ggcacugauuccauucaugaag

SEQ ID NO: 1125529 - RNA, 22 nt, Human
gugugcagugagcaaaagaucu

SEQ ID NO: 1125530 - RNA, 18 nt, Human
aaagaaggauuggagagc

SEQ ID NO: 1125531 - RNA, 22 nt, Human
aauuaguauugcgauucauuag

SEQ ID NO: 1125532 - RNA, 22 nt, Human
ccugccugcguccucugagggc

SEQ ID NO: 1125533 - RNA, 22 nt, Human
gccugagccgccugagcggcgg

SEQ ID NO: 1125534 - RNA, 22 nt, Human
ggccuguguccuccuugcccug

SEQ ID NO: 1125535 - RNA, 22 nt, Human
cuggggugagcagaaacagggg

SEQ ID NO: 1125536 - RNA, 22 nt, Human
acguuuucagccuuaauguaga

SEQ ID NO: 1125537 - RNA, 22 nt, Human
cccugccuuguuggagccuaug

SEQ ID NO: 1125538 - RNA, 22 nt, Human
gucucagaccacccucuuuggc

SEQ ID NO: 1125539 - RNA, 19 nt, Human
gcugugccucucuccugcu

SEQ ID NO: 1125540 - RNA, 22 nt, Human
ucucagagauguuagggaagag

SEQ ID NO: 1125541 - RNA, 22 nt, Human
gcagagcagugcuugcccagcg

SEQ ID NO: 1125542 - RNA, 22 nt, Human
aguguggguuuuauggagcccu

SEQ ID NO: 1125543 - RNA, 22 nt, Human
ucagcaguuuuauaugcagcuu

SEQ ID NO: 1125544 - RNA, 22 nt, Human
cuuacauuuaaucaugugucau

SEQ ID NO: 1125545 - RNA, 19 nt, Human
ucaggacugacuugaaguc

SEQ ID NO: 1125546 - RNA, 22 nt, Human
acucucucacagcuuggcugau

SEQ ID NO: 1125547 - RNA, 22 nt, Human
gggcugugagaguggggcugcu

SEQ ID NO: 1125548 - RNA, 22 nt, Human
cuacauuaaauuggcuuacuua

SEQ ID NO: 1125549 - RNA, 22 nt, Human
aggugccagcucucaggcagga

SEQ ID NO: 1125550 - RNA, 21 nt, Human
agcugagcccagaagacuggu

SEQ ID NO: 1125551 - RNA, 22 nt, Human
aaaaaugcuuggacuuaauaaa

SEQ ID NO: 1125552 - RNA, 22 nt, Human
cccagccugugacagccguccu

SEQ ID NO: 1125553 - RNA, 22 nt, Human
gggggcucugacucccucagcu

SEQ ID NO: 1125554 - RNA, 22 nt, Human
cugcagcuauauuuucccacag

SEQ ID NO: 1125555 - RNA, 21 nt, Human
aaaguucaugcuuuaauauuc

SEQ ID NO: 1125556 - RNA, 22 nt, Human
gcuggagcuugagaggacaggg

SEQ ID NO: 1125557 - RNA, 22 nt, Human
gcucugaggcugggagcacucu

SEQ ID NO: 1125558 - RNA, 22 nt, Human
ugucucugccagcuagcagaau

SEQ ID NO: 1125559 - RNA, 22 nt, Human
cuggggcucucuggaaugcuug

SEQ ID NO: 1125560 - RNA, 22 nt, Human
cuacauuuguucuauagcuuuu

SEQ ID NO: 1125561 - RNA, 22 nt, Human
gaguuguucaacgugugugaaa

SEQ ID NO: 1125562 - RNA, 23 nt, Human
ggcagcucucaucugaugacuga

SEQ ID NO: 1125563 - RNA, 22 nt, Human
aggucauuuccuuagaggcaga

SEQ ID NO: 1125564 - RNA, 23 nt, Human
ugggaguguugggaucucugcuc

SEQ ID NO: 1125565 - RNA, 22 nt, Human
caguggggaggccaggauagaa

SEQ ID NO: 1125566 - RNA, 22 nt, Human
aaucaguuaaauauugaguaca

SEQ ID NO: 1125567 - RNA, 22 nt, Human
ggcugcugguggaaugguaggc

SEQ ID NO: 1125568 - RNA, 22 nt, Human
uggagcaggugcucaggguaau

SEQ ID NO: 1125569 - RNA, 22 nt, Human
uggcugccuagucccucagccu

SEQ ID NO: 1125570 - RNA, 22 nt, Human
aggagcugcagauucugccuug

SEQ ID NO: 1125571 - RNA, 22 nt, Human
cugcccugucugcagccuggcu

SEQ ID NO: 1125572 - RNA, 23 nt, Human
gggauauggaccuuggaggaguc

SEQ ID NO: 1125573 - RNA, 23 nt, Human
cagaagcaccuguugacugcugc

SEQ ID NO: 1125574 - RNA, 23 nt, Human
uggaccugaaccagugccucugu

SEQ ID NO: 1125575 - RNA, 22 nt, Human
ugaaaucuuagccauucugccu

SEQ ID NO: 1125576 - RNA, 22 nt, Human
gccuggagggauagaaugcaag

SEQ ID NO: 1125577 - RNA, 22 nt, Human
aaggcaggaugggaaaagauuu

SEQ ID NO: 1125578 - RNA, 22 nt, Human
ggagggagucagcugauuagaa

SEQ ID NO: 1125579 - RNA, 20 nt, Human
gucaucgccggcagcaaaga

SEQ ID NO: 1125580 - RNA, 22 nt, Human
auauauaugcugauggcugcca

SEQ ID NO: 1125581 - RNA, 22 nt, Human
ccugccugacagagaagguuca

SEQ ID NO: 1125582 - RNA, 22 nt, Human
ggccuguccagccugccuggcu

SEQ ID NO: 1125583 - RNA, 22 nt, Human
augugugugugcgcgcgcagga

SEQ ID NO: 1125584 - RNA, 22 nt, Human
ccauggaguuccucuggucuau

SEQ ID NO: 1125585 - RNA, 22 nt, Human
agaugauggccauguccucucc

SEQ ID NO: 1125586 - RNA, 21 nt, Human
acccuggguucuccauacccu

SEQ ID NO: 1125587 - RNA, 22 nt, Human
gcucccagaaccaaggcugggg

SEQ ID NO: 1125588 - RNA, 18 nt, Human
uggcucugcagccagaug

SEQ ID NO: 1125589 - RNA, 22 nt, Human
cuggggugugcucagagcaggg

SEQ ID NO: 1125590 - RNA, 23 nt, Human
uguguguguauucuacgcaaggu

SEQ ID NO: 1125591 - RNA, 22 nt, Human
gcugcagccaaauucauuguca

SEQ ID NO: 1125592 - RNA, 20 nt, Human
ugggcagcacugcuggcugg

SEQ ID NO: 1125593 - RNA, 22 nt, Human
caggggcucccugggugccagu

SEQ ID NO: 1125594 - RNA, 21 nt, Human
ccagcuccaggaccuuggauc

SEQ ID NO: 1125595 - RNA, 22 nt, Human
aguggcagaucucuggucugga

SEQ ID NO: 1125596 - RNA, 22 nt, Human
agaggccacuuugccugugaug

SEQ ID NO: 1125597 - RNA, 22 nt, Human
agaauucucuuccauugaaaca

SEQ ID NO: 1125598 - RNA, 22 nt, Human
ugugcuucaucacuucucaguu

SEQ ID NO: 1125599 - RNA, 22 nt, Human
ucccccacucuaaaggagccuu

SEQ ID NO: 1125600 - RNA, 21 nt, Human
agagaagggacucuuccaguc

SEQ ID NO: 1125601 - RNA, 22 nt, Human
uucucuuauucuggauaugcag

SEQ ID NO: 1125602 - RNA, 22 nt, Human
gagcccucucuguaggcaagua

SEQ ID NO: 1125603 - RNA, 22 nt, Human
cccagccucugggcucacccaa

SEQ ID NO: 1125604 - RNA, 22 nt, Human
ugggcuccucgucacucgcugu

SEQ ID NO: 1125605 - RNA, 22 nt, Human
aauguuuuauagcucaagcaau

SEQ ID NO: 1125606 - RNA, 22 nt, Human
cagagccuaaaacgacuccacu

SEQ ID NO: 1125607 - RNA, 22 nt, Human
agagcugcaauuucauguggug

SEQ ID NO: 1125608 - RNA, 17 nt, Human
ugcauuguaggcuagcc

SEQ ID NO: 1125609 - RNA, 22 nt, Human
cuggcucaccuccgcuccagca

SEQ ID NO: 1125610 - RNA, 22 nt, Human
aauaauuuugagagccuggaaa

SEQ ID NO: 1125611 - RNA, 22 nt, Human
gucccugggaugcccuucuggg

SEQ ID NO: 1125612 - RNA, 22 nt, Human
auaaaaacugacccauccuuug

SEQ ID NO: 1125613 - RNA, 22 nt, Human
cacauuucucuaccucacacaa

SEQ ID NO: 1125614 - RNA, 22 nt, Human
cucagcagugacaagagaguau

SEQ ID NO: 1125615 - RNA, 22 nt, Human
uggcagcugaggggaggcuuug

SEQ ID NO: 1125616 - RNA, 18 nt, Human
acauuucuccuucugacc

SEQ ID NO: 1125617 - RNA, 22 nt, Human
ccuggagcaaaaaucuaaggag

SEQ ID NO: 1125618 - RNA, 22 nt, Human
gaguuauuuguagggauuauau

SEQ ID NO: 1125619 - RNA, 22 nt, Human
gggcuccaacggugagcaugga

SEQ ID NO: 1125620 - RNA, 18 nt, Human
aagccagagaccacugcc

SEQ ID NO: 1125621 - RNA, 22 nt, Human
ccuuuugcucucccauccagaa

SEQ ID NO: 1125622 - RNA, 22 nt, Human
aagcugccaaugguaagcugcu

SEQ ID NO: 1125623 - RNA, 22 nt, Human
agccucugauggcucccaagga

SEQ ID NO: 1125624 - RNA, 22 nt, Human
ugaaguccuagaacuccuggua

SEQ ID NO: 1125625 - RNA, 22 nt, Human
uccugagauguggagcuccaug

SEQ ID NO: 1125626 - RNA, 22 nt, Human
caccaggcuggagugcagaggu

SEQ ID NO: 1125627 - RNA, 22 nt, Human
gggagggaucugcuaggcaaug

SEQ ID NO: 1125628 - RNA, 22 nt, Human
cauaucccauuggccaggacau

SEQ ID NO: 1125629 - RNA, 22 nt, Human
agccagcagggcuuagaggaca

SEQ ID NO: 1125630 - RNA, 22 nt, Human
agauaugacuagaagcucauuu

SEQ ID NO: 1125631 - RNA, 22 nt, Human
agagcccucucauuggcuuauu

SEQ ID NO: 1125632 - RNA, 23 nt, Human
ucccuggaggcagguccagggcc

SEQ ID NO: 1125633 - RNA, 22 nt, Human
caggcagcugggucaccguccc

SEQ ID NO: 1125634 - RNA, 22 nt, Human
uccuuccucggggacccagauc

SEQ ID NO: 1125635 - RNA, 22 nt, Human
cagaaugagauaacccagauug

SEQ ID NO: 1125636 - RNA, 22 nt, Human
aaggcacucagccuugggacag

SEQ ID NO: 1125637 - RNA, 22 nt, Human
uuccucaucugugcaccucacu

SEQ ID NO: 1125638 - RNA, 23 nt, Human
cacugcagcguggucuggcagga

SEQ ID NO: 1125639 - RNA, 22 nt, Human
ggaugcugacuuuggagcaugg

SEQ ID NO: 1125640 - RNA, 22 nt, Human
caggaaagguagucacaaugua

SEQ ID NO: 1125641 - RNA, 22 nt, Human
gucccuggaauggacucugcgc

SEQ ID NO: 1125642 - RNA, 22 nt, Human
cuggcagcuuccuuugcaucug

SEQ ID NO: 1125643 - RNA, 22 nt, Human
uccugccuaccuugcggaggug

SEQ ID NO: 1125644 - RNA, 22 nt, Human
acauguuagaaaugcagaaucu

SEQ ID NO: 1125645 - RNA, 22 nt, Human
uuguuacagcagugauuucaga

SEQ ID NO: 1125646 - RNA, 22 nt, Human
cagaggcucuuccucacugccc

SEQ ID NO: 1125647 - RNA, 22 nt, Human
agucccagaugacccagcuacu

SEQ ID NO: 1125648 - RNA, 22 nt, Human
cagccagguaugggcgugcggg

SEQ ID NO: 1125649 - RNA, 22 nt, Human
caggguggcaggcaccauggcc

SEQ ID NO: 1125650 - RNA, 22 nt, Human
gucauuucuguuucuucagugc

SEQ ID NO: 1125651 - RNA, 22 nt, Human
ugucccauggacacaacuucuu

SEQ ID NO: 1125652 - RNA, 22 nt, Human
aucacaggugguaggaaaagaa

SEQ ID NO: 1125653 - RNA, 22 nt, Human
ggagccaguauuuaguggucuu

SEQ ID NO: 1125654 - RNA, 22 nt, Human
aaauaauguuaggccuuugcuc

SEQ ID NO: 1125655 - RNA, 22 nt, Human
uuucuuauauucugucauuguu

SEQ ID NO: 1125656 - RNA, 22 nt, Human
aagcugcccaagacugaagcau

SEQ ID NO: 1125657 - RNA, 22 nt, Human
aaguaugacauuuaagacaauu

SEQ ID NO: 1125658 - RNA, 22 nt, Human
agaauccugaugaaaaggagag

SEQ ID NO: 1125659 - RNA, 22 nt, Human
uccuuccuggggucucugcugc

SEQ ID NO: 1125660 - RNA, 22 nt, Human
ugggcuguccagcaccugggcu

SEQ ID NO: 1125661 - RNA, 19 nt, Human
ugagagugaggaaggcuuc

SEQ ID NO: 1125662 - RNA, 22 nt, Human
uugaagcaaauucugugcagua

SEQ ID NO: 1125663 - RNA, 22 nt, Human
cccuggcaaaacacucucuuga

SEQ ID NO: 1125664 - RNA, 22 nt, Human
cuuggcugucuauaggaaagag

SEQ ID NO: 1125665 - RNA, 22 nt, Human
gcucuggacccuggaguggcug

SEQ ID NO: 1125666 - RNA, 22 nt, Human
aagcacuuagaagagugccugc

SEQ ID NO: 1125667 - RNA, 22 nt, Human
agggucccgaaggagacagcaa

SEQ ID NO: 1125668 - RNA, 22 nt, Human
caggguccaucuuucaucacug

SEQ ID NO: 1125669 - RNA, 22 nt, Human
acugggccggugcagaguaguu

SEQ ID NO: 1125670 - RNA, 22 nt, Human
ggccucugccucaucugggcac

SEQ ID NO: 1125671 - RNA, 22 nt, Human
cagaaauucccauuucagauuc

SEQ ID NO: 1125672 - RNA, 22 nt, Human
uuauuaaugaguacaaguuauu

SEQ ID NO: 1125673 - RNA, 22 nt, Human
uucaagaugccagggacgcggc

SEQ ID NO: 1125674 - RNA, 22 nt, Human
gugugcgcgcgcgucccgggug

SEQ ID NO: 1125675 - RNA, 22 nt, Human
ggucccugguucccucugagcu

SEQ ID NO: 1125676 - RNA, 22 nt, Human
cacagaggcaaccuucuggggu

SEQ ID NO: 1125677 - RNA, 22 nt, Human
ugcagcugauuaaagggcagac

SEQ ID NO: 1125678 - RNA, 22 nt, Human
caugggcuuuggaggcuggagg

SEQ ID NO: 1125679 - RNA, 22 nt, Human
cuggccuuuuguuucuggagaa

SEQ ID NO: 1125680 - RNA, 22 nt, Human
gccagcaguccugcugugugcc

SEQ ID NO: 1125681 - RNA, 21 nt, Human
acaugcauagagagauuucug

SEQ ID NO: 1125682 - RNA, 22 nt, Human
cuggcagguuuggugucuggug

SEQ ID NO: 1125683 - RNA, 22 nt, Human
caggcagcucgaugccuuguug

SEQ ID NO: 1125684 - RNA, 22 nt, Human
gcccuuccuuagacagcaggau

SEQ ID NO: 1125685 - RNA, 22 nt, Human
gcuggcagagacaagaagacua

SEQ ID NO: 1125686 - RNA, 22 nt, Human
ucuggccugaaaguccaugcuu

SEQ ID NO: 1125687 - RNA, 22 nt, Human
aggaccaguaugagagcaucug

SEQ ID NO: 1125688 - RNA, 22 nt, Human
uuucacaaguuucaggauucug

SEQ ID NO: 1125689 - RNA, 22 nt, Human
cauuuagacauuugauuugggg

SEQ ID NO: 1125690 - RNA, 22 nt, Human
uuucucugaggcuggccucccu

SEQ ID NO: 1125691 - RNA, 22 nt, Human
ucaaaguuuuugagaauuacau

SEQ ID NO: 1125692 - RNA, 22 nt, Human
cagcagcuucuguugaucagaa

SEQ ID NO: 1125693 - RNA, 22 nt, Human
uuugcuauuuuucugugcagcu

SEQ ID NO: 1125694 - RNA, 22 nt, Human
gaggcagcuuggggcugugggu

SEQ ID NO: 1125695 - RNA, 22 nt, Human
auucugucuuuuuaaaauaaua

SEQ ID NO: 1125696 - RNA, 22 nt, Human
aggcacuguggaagacaugguu

SEQ ID NO: 1125697 - RNA, 22 nt, Human
gcucagaaaagugaggcucagu

SEQ ID NO: 1125698 - RNA, 22 nt, Human
ucagcugaaguggagaagcaga

SEQ ID NO: 1125699 - RNA, 22 nt, Human
aaauauguaagauuagcacuag

SEQ ID NO: 1125700 - RNA, 22 nt, Human
acuuuuuacaggguguauacca

SEQ ID NO: 1125701 - RNA, 22 nt, Human
uuucagaugcaauuaauuuuca

SEQ ID NO: 1125702 - RNA, 22 nt, Human
uggcagaguggaccauacucaa

SEQ ID NO: 1125703 - RNA, 22 nt, Human
cagcacuggggggauucggagc

SEQ ID NO: 1125704 - RNA, 22 nt, Human
aggaccagaggccagagucagc

SEQ ID NO: 1125705 - RNA, 22 nt, Human
aaacagaaggguagguaaacau

SEQ ID NO: 1125706 - RNA, 17 nt, Human
uuuguucguuaguccgg

SEQ ID NO: 1125707 - RNA, 19 nt, Human
agugucaucagcuacucag

SEQ ID NO: 1125708 - RNA, 22 nt, Human
gccugugcuuaacugacgugag

SEQ ID NO: 1125709 - RNA, 20 nt, Human
accucugcaucaauccuuug

SEQ ID NO: 1125710 - RNA, 22 nt, Human
aguauuucuaguugguucuacu

SEQ ID NO: 1125711 - RNA, 22 nt, Human
gcagggacaccuuugugaagcu

SEQ ID NO: 1125712 - RNA, 23 nt, Human
gcaggugguucgaacagaaguuu

SEQ ID NO: 1125713 - RNA, 19 nt, Human
uugcauuguaguuggacug

SEQ ID NO: 1125714 - RNA, 22 nt, Human
ucuagaaauuuugccuuguauu

SEQ ID NO: 1125715 - RNA, 20 nt, Human
cucugcagcaaggccugggu

SEQ ID NO: 1125716 - RNA, 22 nt, Human
acaugcuuucuagguccuucug

SEQ ID NO: 1125717 - RNA, 21 nt, Human
gcagacugcccugcugucccc

SEQ ID NO: 1125718 - RNA, 22 nt, Human
uauagaaguaagcauugugaug

SEQ ID NO: 1125719 - RNA, 22 nt, Human
agcuuccucaccucagaggucu

SEQ ID NO: 1125720 - RNA, 22 nt, Human
ucaaguauaucuagucauuagg

SEQ ID NO: 1125721 - RNA, 22 nt, Human
agagcucaagacgcucacagua

SEQ ID NO: 1125722 - RNA, 22 nt, Human
aggacuucaucaccuguauaaa

SEQ ID NO: 1125723 - RNA, 18 nt, Human
augggaggggccaagaga

SEQ ID NO: 1125724 - RNA, 20 nt, Human
gcaggcagggaaugggggug

SEQ ID NO: 1125725 - RNA, 22 nt, Human
cugcagaggguuugagcauccu

SEQ ID NO: 1125726 - RNA, 22 nt, Human
aaugcuguauaucuuagcuaau

SEQ ID NO: 1125727 - RNA, 19 nt, Human
ucaaaugccaaugucacag

SEQ ID NO: 1125728 - RNA, 22 nt, Human
ggcagcuggguuggccagaaac

SEQ ID NO: 1125729 - RNA, 22 nt, Human
agaaaucacaggaggcagaagg

SEQ ID NO: 1125730 - RNA, 22 nt, Human
accagagcuggcagaguaucaa

SEQ ID NO: 1125731 - RNA, 22 nt, Human
aagggaggaggauuuauuguac

SEQ ID NO: 1125732 - RNA, 22 nt, Human
uucaagaucuggguuuucagcu

SEQ ID NO: 1125733 - RNA, 22 nt, Human
agagccuggaccugagcuacaa

SEQ ID NO: 1125734 - RNA, 22 nt, Human
cccuggagggacagcugcucua

SEQ ID NO: 1125735 - RNA, 22 nt, Human
uuuaauacuauggggaugaaca

SEQ ID NO: 1125736 - RNA, 22 nt, Human
auuuccucaugaucauaaugca

SEQ ID NO: 1125737 - RNA, 22 nt, Human
gagggaaagguuaauacaugau

SEQ ID NO: 1125738 - RNA, 22 nt, Human
guacuuccagccaagugagaca

SEQ ID NO: 1125739 - RNA, 22 nt, Human
aggcagagcuggguuuugaaau

SEQ ID NO: 1125740 - RNA, 22 nt, Human
ccaggcccugcuccucacacca

SEQ ID NO: 1125741 - RNA, 22 nt, Human
caggccugggcuucggggcuga

SEQ ID NO: 1125742 - RNA, 22 nt, Human
gcaaaugaguuguaacauaaaa

SEQ ID NO: 1125743 - RNA, 22 nt, Human
uucacaggauauaugugcaggg

SEQ ID NO: 1125744 - RNA, 22 nt, Human
guguggcugccagccaagaggc

SEQ ID NO: 1125745 - RNA, 22 nt, Human
caugcuuuaccaaagcagugau

SEQ ID NO: 1125746 - RNA, 22 nt, Human
gccuggagggcucuagagaggc

SEQ ID NO: 1125747 - RNA, 22 nt, Human
auaaggcauauagucacuuuuu

SEQ ID NO: 1125748 - RNA, 22 nt, Human
uugauacaggcucuauuucauc

SEQ ID NO: 1125749 - RNA, 22 nt, Human
uccucugccaaagggaguugcc

SEQ ID NO: 1125750 - RNA, 22 nt, Human
cccaagcagggugcagaggcau

SEQ ID NO: 1125751 - RNA, 22 nt, Human
cauuauguucaguagcuuaaaa

SEQ ID NO: 1125752 - RNA, 22 nt, Human
acuuccuggcguagcugacauu

SEQ ID NO: 1125753 - RNA, 22 nt, Human
cagccaggccuggugaccaaag

SEQ ID NO: 1125754 - RNA, 22 nt, Human
ucugggagauccaagcagaacu

SEQ ID NO: 1125755 - RNA, 21 nt, Human
accaggcuugugggagggagc

SEQ ID NO: 1125756 - RNA, 22 nt, Human
accaaggagacaaagguguauu

SEQ ID NO: 1125757 - RNA, 19 nt, Human
ccuuugaaucaggacacuu

SEQ ID NO: 1125758 - RNA, 21 nt, Human
gagugcagcaagguagagucu

SEQ ID NO: 1125759 - RNA, 22 nt, Human
agccaaggagugcagguggcuu

SEQ ID NO: 1125760 - RNA, 22 nt, Human
cuguuuauuacacuggauagca

SEQ ID NO: 1125761 - RNA, 22 nt, Human
uccagugguuugaaaggggugu

SEQ ID NO: 1125762 - RNA, 22 nt, Human
ccuggagcacauggcaggaggc

SEQ ID NO: 1125763 - RNA, 22 nt, Human
uaagaacauaaauucauacggg

SEQ ID NO: 1125764 - RNA, 22 nt, Human
uggagcugggaguccugggcug

SEQ ID NO: 1125765 - RNA, 22 nt, Human
aggggccuggacauggacgcgc

SEQ ID NO: 1125766 - RNA, 21 nt, Human
uaagaacauuaucuucuuccu

SEQ ID NO: 1125767 - RNA, 22 nt, Human
ccagguggcuucugcccgaugu

SEQ ID NO: 1125768 - RNA, 22 nt, Human
uaacagaaaagaacugaguuug

SEQ ID NO: 1125769 - RNA, 22 nt, Human
uaagacacaugcguacaagaua

SEQ ID NO: 1125770 - RNA, 22 nt, Human
aauaguguuguucacucaggag

SEQ ID NO: 1125771 - RNA, 22 nt, Human
aacucaguuacauauuagaaua

SEQ ID NO: 1125772 - RNA, 22 nt, Human
aggccuggugugccggaugcag

SEQ ID NO: 1125773 - RNA, 22 nt, Human
ucuucucccaucuccaggcagg

SEQ ID NO: 1125774 - RNA, 22 nt, Human
cugcuuugauuagaagaguaca

SEQ ID NO: 1125775 - RNA, 21 nt, Human
uggcucuggguaggagagugc

SEQ ID NO: 1125776 - RNA, 22 nt, Human
uaauuuaauuccauggauucua

SEQ ID NO: 1125777 - RNA, 22 nt, Human
ccagggugggaggcugaaggcg

SEQ ID NO: 1125778 - RNA, 22 nt, Human
cucaggaucgcuugcccuaggg

SEQ ID NO: 1125779 - RNA, 22 nt, Human
ccuguggcucucuuuggagguc

SEQ ID NO: 1125780 - RNA, 18 nt, Human
cagaaguccuucaaggcc

SEQ ID NO: 1125781 - RNA, 22 nt, Human
uaaauguguguagccaucugug

SEQ ID NO: 1125782 - RNA, 22 nt, Human
gagcccuggcagucugggaugg

SEQ ID NO: 1125783 - RNA, 22 nt, Human
augaguaagaccauaauuuuug

SEQ ID NO: 1125784 - RNA, 22 nt, Human
aucuggcucauucagggaacgg

SEQ ID NO: 1125785 - RNA, 22 nt, Human
cugcuucuaagaaccugcagcu

SEQ ID NO: 1125786 - RNA, 22 nt, Human
ugccugaguuuaacccucagag

SEQ ID NO: 1125787 - RNA, 17 nt, Human
agugacuuggaaagagc

SEQ ID NO: 1125788 - RNA, 22 nt, Human
ccagccaggcauugcaaacuga

SEQ ID NO: 1125789 - RNA, 22 nt, Human
ccuggagcacagcccaguccca

SEQ ID NO: 1125790 - RNA, 22 nt, Human
ugucccauggauaccaggcuau

SEQ ID NO: 1125791 - RNA, 22 nt, Human
ccugcaggggagagacuucuag

SEQ ID NO: 1125792 - RNA, 22 nt, Human
acccucccauuuccauguagca

SEQ ID NO: 1125793 - RNA, 22 nt, Human
uggcucagagagggagugugga

SEQ ID NO: 1125794 - RNA, 20 nt, Human
cagggccacgcuccaaggca

SEQ ID NO: 1125795 - RNA, 21 nt, Human
ugggcacugagggugcugcuc

SEQ ID NO: 1125796 - RNA, 22 nt, Human
gcacagaacagagaaauagcca

SEQ ID NO: 1125797 - RNA, 22 nt, Human
ccugccugcggcccgcggggag

SEQ ID NO: 1125798 - RNA, 22 nt, Human
cuguccucuguccucagcagga

SEQ ID NO: 1125799 - RNA, 18 nt, Human
gagacacaagggccugga

SEQ ID NO: 1125800 - RNA, 22 nt, Human
uauauauaugcacacacaccua

SEQ ID NO: 1125801 - RNA, 20 nt, Human
ucacaucuggcagcugauga

SEQ ID NO: 1125802 - RNA, 22 nt, Human
aucuggcuuaccuagggugccu

SEQ ID NO: 1125803 - RNA, 22 nt, Human
gacagagugcagggcuagaaga

SEQ ID NO: 1125804 - RNA, 22 nt, Human
caggguagacaguaggugucug

SEQ ID NO: 1125805 - RNA, 22 nt, Human
ugcugccaccugguggcugaag

SEQ ID NO: 1125806 - RNA, 22 nt, Human
uguauuuuuaggaaugcgcuau

SEQ ID NO: 1125807 - RNA, 22 nt, Human
cagcagugugcaggugugcugg

SEQ ID NO: 1125808 - RNA, 22 nt, Human
cucaggauuuaaaggggcacuc

SEQ ID NO: 1125809 - RNA, 21 nt, Human
ggucuuccaaauaaggagaaa

SEQ ID NO: 1125810 - RNA, 19 nt, Human
ugucuuaauuaacucagag

SEQ ID NO: 1125811 - RNA, 22 nt, Human
guggcccugucccaggccuccu

SEQ ID NO: 1125812 - RNA, 22 nt, Human
aaaugcaauuguauguacucca

SEQ ID NO: 1125813 - RNA, 22 nt, Human
gcacugaaugcuuuuacuguaa

SEQ ID NO: 1125814 - RNA, 22 nt, Human
ccuggcagacugugagggcagg

SEQ ID NO: 1125815 - RNA, 22 nt, Human
uuugaauagggcuuugcaggga

SEQ ID NO: 1125816 - RNA, 22 nt, Human
aggcucugcagaccccagcugu

SEQ ID NO: 1125817 - RNA, 19 nt, Human
ugcuuccucaccaucuccc

SEQ ID NO: 1125818 - RNA, 22 nt, Human
uggccuggugcucaggcaguag

SEQ ID NO: 1125819 - RNA, 22 nt, Human
agagacaggguuuugccauguu

SEQ ID NO: 1125820 - RNA, 22 nt, Human
accacugcccauggugaaaacu

SEQ ID NO: 1125821 - RNA, 22 nt, Human
cugugcuugcggguguggagcc

SEQ ID NO: 1125822 - RNA, 22 nt, Human
gggcuggcaggaccugggcuga

SEQ ID NO: 1125823 - RNA, 22 nt, Human
uuaggcaaagcuggaauccagg

SEQ ID NO: 1125824 - RNA, 22 nt, Human
ggggauggugggaaggcaaucu

SEQ ID NO: 1125825 - RNA, 22 nt, Human
aaaaguauuggccaccauuucu

SEQ ID NO: 1125826 - RNA, 22 nt, Human
auuuguuccacacauauuuacu

SEQ ID NO: 1125827 - RNA, 22 nt, Human
caggggcuguggcacauggugu

SEQ ID NO: 1125828 - RNA, 22 nt, Human
auugacaagugagcugggcugc

SEQ ID NO: 1125829 - RNA, 22 nt, Human
cccucugaccuccugccacagu

SEQ ID NO: 1125830 - RNA, 22 nt, Human
caagaugaaacuacagggagga

SEQ ID NO: 1125831 - RNA, 22 nt, Human
cacauguacagaagcaggcugg

SEQ ID NO: 1125832 - RNA, 22 nt, Human
agcagggcagugcuucagcucu

SEQ ID NO: 1125833 - RNA, 22 nt, Human
augguugaaucaagguagacaa

SEQ ID NO: 1125834 - RNA, 22 nt, Human
aguggccagugcugcucugggg

SEQ ID NO: 1125835 - RNA, 22 nt, Human
caggcagaagaaguggaaggac

SEQ ID NO: 1125836 - RNA, 22 nt, Human
auguguccacaggugugagaga

SEQ ID NO: 1125837 - RNA, 22 nt, Human
gagggucccgagcccugucaga

SEQ ID NO: 1125838 - RNA, 22 nt, Human
uagcugccagaccauucuuacu

SEQ ID NO: 1125839 - RNA, 22 nt, Human
uuacauuuuaguuaaccuguga

SEQ ID NO: 1125840 - RNA, 22 nt, Human
cuggagcuggcuuccuuccacu

SEQ ID NO: 1125841 - RNA, 22 nt, Human
cugggagauugcuagagaugca

SEQ ID NO: 1125842 - RNA, 22 nt, Human
gccaggcucagcagucaaccug

SEQ ID NO: 1125843 - RNA, 22 nt, Human
cuaucuuucgauucuagcuuaa

SEQ ID NO: 1125844 - RNA, 22 nt, Human
gcagggcacagacagugccaag

SEQ ID NO: 1125845 - RNA, 22 nt, Human
gcaaugauauugaagugaugaa

SEQ ID NO: 1125846 - RNA, 20 nt, Human
uggagcuguaaucuugucug

SEQ ID NO: 1125847 - RNA, 22 nt, Human
ggcaggcugcuugggucauguc

SEQ ID NO: 1125848 - RNA, 22 nt, Human
uagauuucaggcuggcuugcgg

SEQ ID NO: 1125849 - RNA, 22 nt, Human
ggcaugggccgaggugccuccu

SEQ ID NO: 1125850 - RNA, 22 nt, Human
ucucccacagucucccauggcu

SEQ ID NO: 1125851 - RNA, 22 nt, Human
agggcugcugcuccgggcccag

SEQ ID NO: 1125852 - RNA, 22 nt, Human
cgucccaguuccagccgcgcug

SEQ ID NO: 1125853 - RNA, 22 nt, Human
cauacuuugggauaagagugga

SEQ ID NO: 1125854 - RNA, 22 nt, Human
cugacccauauaagaguggagg

SEQ ID NO: 1125855 - RNA, 22 nt, Human
ucagcugcucuguugagcugaa

SEQ ID NO: 1125856 - RNA, 18 nt, Human
agaguguucucagugaaa

SEQ ID NO: 1125857 - RNA, 22 nt, Human
auguuucugaguguauauacau

SEQ ID NO: 1125858 - RNA, 22 nt, Human
cagcuggcauaccugggcccgg

SEQ ID NO: 1125859 - RNA, 22 nt, Human
cugcuuuguaaaauagacauaa

SEQ ID NO: 1125860 - RNA, 20 nt, Human
cugugccuaaaccuccgggu

SEQ ID NO: 1125861 - RNA, 22 nt, Human
ugggccacuugaaaguggaugu

SEQ ID NO: 1125862 - RNA, 22 nt, Human
auaauguagguauguguauuua

SEQ ID NO: 1125863 - RNA, 22 nt, Human
cugggagcggcugucacugguu

SEQ ID NO: 1125864 - RNA, 22 nt, Human
gcagcugggccccagccucucc

SEQ ID NO: 1125865 - RNA, 22 nt, Human
ggccugagcagacagcaugaug

SEQ ID NO: 1125866 - RNA, 22 nt, Human
ugcuggggagugauugaccauc

SEQ ID NO: 1125867 - RNA, 22 nt, Human
uuuuaaucaugcuucuaugucc

SEQ ID NO: 1125868 - RNA, 22 nt, Human
ucucucagaggccaggguccug

SEQ ID NO: 1125869 - RNA, 21 nt, Human
uccaggaguggcugggcaggg

SEQ ID NO: 1125870 - RNA, 22 nt, Human
cagggagcuggcuggcgugagu

SEQ ID NO: 1125871 - RNA, 22 nt, Human
aauccagguggcggagguugug

SEQ ID NO: 1125872 - RNA, 22 nt, Human
uaggcaggugugcacugcccac

SEQ ID NO: 1125873 - RNA, 22 nt, Human
ggcucugggucuguggggagcg

SEQ ID NO: 1125874 - RNA, 22 nt, Human
ggcucccugccuguccucaguc

SEQ ID NO: 1125875 - RNA, 22 nt, Human
agggacagucuacuguucacug

SEQ ID NO: 1125876 - RNA, 22 nt, Human
gaagcccauuuguacagcacau

SEQ ID NO: 1125877 - RNA, 22 nt, Human
ccaggagucaauaaaggaagcu

SEQ ID NO: 1125878 - RNA, 22 nt, Human
acagaaauauucguggugcuug

SEQ ID NO: 1125879 - RNA, 22 nt, Human
cagccccucacagagcuguccu

SEQ ID NO: 1125880 - RNA, 22 nt, Human
auacaucucauguaagagauaa

SEQ ID NO: 1125881 - RNA, 22 nt, Human
ucuggccauggcaagccgagug

SEQ ID NO: 1125882 - RNA, 22 nt, Human
gaugcacagugacccugccagu

SEQ ID NO: 1125883 - RNA, 22 nt, Human
ucugccugcuaacuccugcacc

SEQ ID NO: 1125884 - RNA, 22 nt, Human
uugccaggagcucaucugaggg

SEQ ID NO: 1125885 - RNA, 21 nt, Human
uccuucaguucugcacuuucu

SEQ ID NO: 1125886 - RNA, 22 nt, Human
ccuggccugugaaucugagagc

SEQ ID NO: 1125887 - RNA, 22 nt, Human
ucucagagaaaugugucaccau

SEQ ID NO: 1125888 - RNA, 22 nt, Human
ucaggaucggccuuuuuuuaag

SEQ ID NO: 1125889 - RNA, 18 nt, Human
ccuggcuuccaucuuggu

SEQ ID NO: 1125890 - RNA, 22 nt, Human
uccaggagagguguggggacug

SEQ ID NO: 1125891 - RNA, 22 nt, Human
auauguguacgugcaguauaua

SEQ ID NO: 1125892 - RNA, 22 nt, Human
gccaggcuggaaagaacagaca

SEQ ID NO: 1125893 - RNA, 22 nt, Human
ggcagagcugcaugagcacuca

SEQ ID NO: 1125894 - RNA, 22 nt, Human
gcagcugccccgacugugaguc

SEQ ID NO: 1125895 - RNA, 22 nt, Human
agcagcagauccaaaaaaugug

SEQ ID NO: 1125896 - RNA, 22 nt, Human
ucaacagaagugauagcuauua

SEQ ID NO: 1125897 - RNA, 23 nt, Human
ucugucacuuucugcuguggagu

SEQ ID NO: 1125898 - RNA, 22 nt, Human
agaugcugccucuccucacaag

SEQ ID NO: 1125899 - RNA, 22 nt, Human
ggcacugggagaggugagacgg

SEQ ID NO: 1125900 - RNA, 22 nt, Human
accagguggccccagcgugguu

SEQ ID NO: 1125901 - RNA, 22 nt, Human
auuuuuccaauuaggauaaaga

SEQ ID NO: 1125902 - RNA, 22 nt, Human
auacaucuaugccuuucugaca

SEQ ID NO: 1125903 - RNA, 22 nt, Human
uuccucuccucccaccagguga

SEQ ID NO: 1125904 - RNA, 22 nt, Human
uggaaagaaaaacaggccauga

SEQ ID NO: 1125905 - RNA, 18 nt, Human
gggcaucauucacaaagu

SEQ ID NO: 1125906 - RNA, 22 nt, Human
aaaguuuguugcuuacaaagaa

SEQ ID NO: 1125907 - RNA, 21 nt, Human
guguuuccuguuuauggcuug

SEQ ID NO: 1125908 - RNA, 22 nt, Human
uccaauguguuuguggcaugga

SEQ ID NO: 1125909 - RNA, 21 nt, Human
gcaggggauagaaauggucug

SEQ ID NO: 1125910 - RNA, 22 nt, Human
ugaaaaggagccuuagguaggu

SEQ ID NO: 1125911 - RNA, 22 nt, Human
acagcagcuaaaggugucuccu

SEQ ID NO: 1125912 - RNA, 22 nt, Human
uauguguguuucaguggaaaug

SEQ ID NO: 1125913 - RNA, 22 nt, Human
agaagccacuggagguugagau

SEQ ID NO: 1125914 - RNA, 22 nt, Human
uggcuuccaaaggaaugggccu

SEQ ID NO: 1125915 - RNA, 22 nt, Human
agauaauuugaguaaauuaauu

SEQ ID NO: 1125916 - RNA, 16 nt, Human
gagccaggugccuuga

SEQ ID NO: 1125917 - RNA, 22 nt, Human
accaaggaagagauucucaguu

SEQ ID NO: 1125918 - RNA, 22 nt, Human
accccagaggcggaggcugcag

SEQ ID NO: 1125919 - RNA, 22 nt, Human
aaaugcagcagcuaauugaaaa

SEQ ID NO: 1125920 - RNA, 22 nt, Human
uaugagcuuccaguguugcaug

SEQ ID NO: 1125921 - RNA, 22 nt, Human
agccacaccuguccugccagcu

SEQ ID NO: 1125922 - RNA, 22 nt, Human
uuagauaauguuauuguaauuu

SEQ ID NO: 1125923 - RNA, 22 nt, Human
agcuggccuucggugucacugg

SEQ ID NO: 1125924 - RNA, 22 nt, Human
gcaggaagaugagcucagguaa

SEQ ID NO: 1125925 - RNA, 22 nt, Human
aguuucauauuaccaugucacc

SEQ ID NO: 1125926 - RNA, 20 nt, Human
gucagugucuucaguaguga

SEQ ID NO: 1125927 - RNA, 22 nt, Human
ggguguguuccuaaggaaacca

SEQ ID NO: 1125928 - RNA, 22 nt, Human
cagaggaggccaccgcauaggc

SEQ ID NO: 1125929 - RNA, 22 nt, Human
ugcauuguaggauguuuagcag

SEQ ID NO: 1125930 - RNA, 22 nt, Human
gaguuauuaauggcugaguuug

SEQ ID NO: 1125931 - RNA, 22 nt, Human
cagcugaauucuucagacucca

SEQ ID NO: 1125932 - RNA, 22 nt, Human
cugucaguaggcucccaucauu

SEQ ID NO: 1125933 - RNA, 22 nt, Human
gcugugugacugagagccuggc

SEQ ID NO: 1125934 - RNA, 22 nt, Human
uggcucagcuuuccccaucugg

SEQ ID NO: 1125935 - RNA, 22 nt, Human
gacagaggcaagaccagaagcc

SEQ ID NO: 1125936 - RNA, 22 nt, Human
cucagaguccauaguuuacagu

SEQ ID NO: 1125937 - RNA, 22 nt, Human
gcugccuuugugagccaagggg

SEQ ID NO: 1125938 - RNA, 22 nt, Human
ccagcacugcucucagacugag

SEQ ID NO: 1125939 - RNA, 22 nt, Human
ugcaagagguaaaaugaaagga

SEQ ID NO: 1125940 - RNA, 22 nt, Human
augggaugaacuugaucugcuu

SEQ ID NO: 1125941 - RNA, 22 nt, Human
caggcagagugagguggucuaa

SEQ ID NO: 1125942 - RNA, 22 nt, Human
cugaagaggacgcagcagcaag

SEQ ID NO: 1125943 - RNA, 22 nt, Human
gcagcaggcacggucucgacau

SEQ ID NO: 1125944 - RNA, 20 nt, Human
gucugaggagcagugggaaa

SEQ ID NO: 1125945 - RNA, 22 nt, Human
acagaauugauggaaaucucag

SEQ ID NO: 1125946 - RNA, 22 nt, Human
ggcaugggagugagcaaccuua

SEQ ID NO: 1125947 - RNA, 19 nt, Human
auuugaaagcugugcuugc

SEQ ID NO: 1125948 - RNA, 22 nt, Human
aggaaaugcugaugcuccugga

SEQ ID NO: 1125949 - RNA, 22 nt, Human
aaaauguguuuaugcauuucgu

SEQ ID NO: 1125950 - RNA, 22 nt, Human
aguauacauauauuagccuucg

SEQ ID NO: 1125951 - RNA, 22 nt, Human
aagggaaaucauauggugcagu

SEQ ID NO: 1125952 - RNA, 18 nt, Human
ucuggcucaggacugaac

SEQ ID NO: 1125953 - RNA, 22 nt, Human
uaaguaaauuuauaaugugauu

SEQ ID NO: 1125954 - RNA, 22 nt, Human
agcccuucaaccugccuacucc

SEQ ID NO: 1125955 - RNA, 22 nt, Human
gcagggacaacugugcaccuga

SEQ ID NO: 1125956 - RNA, 22 nt, Human
acagcuuuucaauucugcugag

SEQ ID NO: 1125957 - RNA, 22 nt, Human
gcucuguacgcaggaugagggg

SEQ ID NO: 1125958 - RNA, 22 nt, Human
ggcuggccuguguggccgccac

SEQ ID NO: 1125959 - RNA, 22 nt, Human
ggcugccuggaccuccucuuuc

SEQ ID NO: 1125960 - RNA, 22 nt, Human
cagggcaggaauuugacauugc

SEQ ID NO: 1125961 - RNA, 22 nt, Human
cucuggagcgcugcuucccgcg

SEQ ID NO: 1125962 - RNA, 22 nt, Human
aagggcugccagggggugccag

SEQ ID NO: 1125963 - RNA, 22 nt, Human
cagagggagcccuccaggagca

SEQ ID NO: 1125964 - RNA, 20 nt, Human
uaugaguauuacuuucagga

SEQ ID NO: 1125965 - RNA, 22 nt, Human
agagaaaagaguucaggcuuug

SEQ ID NO: 1125966 - RNA, 22 nt, Human
ccacagagacagagcccagggu

SEQ ID NO: 1125967 - RNA, 22 nt, Human
gagggauggugugagaggcuca

SEQ ID NO: 1125968 - RNA, 22 nt, Human
ugauggcuaucccuggaagggc

SEQ ID NO: 1125969 - RNA, 22 nt, Human
aggcucagagaugaguaagcac

SEQ ID NO: 1125970 - RNA, 22 nt, Human
cccagcuugcccaggacugagg

SEQ ID NO: 1125971 - RNA, 22 nt, Human
ggagcagagcugggcuuggcug

SEQ ID NO: 1125972 - RNA, 22 nt, Human
auguaucaacaaauuguacagu

SEQ ID NO: 1125973 - RNA, 22 nt, Human
guguauguguuuauagggaggu

SEQ ID NO: 1125974 - RNA, 22 nt, Human
aaaguccaggggcuggaggcgg

SEQ ID NO: 1125975 - RNA, 22 nt, Human
ccugucugaaggcagggggaug

SEQ ID NO: 1125976 - RNA, 22 nt, Human
cuugcuuuguccagaaauucag

SEQ ID NO: 1125977 - RNA, 20 nt, Human
cagcaggaaaagugccucag

SEQ ID NO: 1125978 - RNA, 23 nt, Human
agaggcaggaguggcuugcccgg

SEQ ID NO: 1125979 - RNA, 22 nt, Human
ucccagaguucaaugggaaggu

SEQ ID NO: 1125980 - RNA, 22 nt, Human
aguauguauuuuauacuuacag

SEQ ID NO: 1125981 - RNA, 22 nt, Human
cagaauuuagcacaauguaugg

SEQ ID NO: 1125982 - RNA, 22 nt, Human
ccuuucucuggcagcaggacag

SEQ ID NO: 1125983 - RNA, 22 nt, Human
aggcacugacaauucuggacug

SEQ ID NO: 1125984 - RNA, 22 nt, Human
agcuggugcugaagcucuugag

SEQ ID NO: 1125985 - RNA, 22 nt, Human
ggccucucuggcauggcugccc

SEQ ID NO: 1125986 - RNA, 22 nt, Human
cagccagagaaagggcacugcc

SEQ ID NO: 1125987 - RNA, 22 nt, Human
aaaugucuguuagucauaucau

SEQ ID NO: 1125988 - RNA, 22 nt, Human
cauugcacuccaucuugggcaa

SEQ ID NO: 1125989 - RNA, 22 nt, Human
agcuuuaugggagcuuagauaa

SEQ ID NO: 1125990 - RNA, 22 nt, Human
ugagggcugcuuccagagcuag

SEQ ID NO: 1125991 - RNA, 23 nt, Human
acuuaaaugguucuuuaucucag

SEQ ID NO: 1125992 - RNA, 22 nt, Human
ugucaccaguuccaggaaauaa

SEQ ID NO: 1125993 - RNA, 22 nt, Human
cugccucuccccagaguggccc

SEQ ID NO: 1125994 - RNA, 20 nt, Human
gcucccugguagaaauguuu

SEQ ID NO: 1125995 - RNA, 22 nt, Human
ugcagucuggauguccucagau

SEQ ID NO: 1125996 - RNA, 22 nt, Human
cucaguuucuucauauuguagg

SEQ ID NO: 1125997 - RNA, 22 nt, Human
cccaggcuggagugcaauggca

SEQ ID NO: 1125998 - RNA, 22 nt, Human
uggcuuccugcacagugucugc

SEQ ID NO: 1125999 - RNA, 22 nt, Human
uggcucugaccagguagaggag

SEQ ID NO: 1126000 - RNA, 22 nt, Human
cuuggcagauccaaaaaugaca

SEQ ID NO: 1126001 - RNA, 22 nt, Human
agacuucucaguuuuauuagua

SEQ ID NO: 1126002 - RNA, 22 nt, Human
gcagcccagagcgcaggacccc

SEQ ID NO: 1126003 - RNA, 22 nt, Human
ugcugucccccgugucugggcu

SEQ ID NO: 1126004 - RNA, 22 nt, Human
cugcucugaagccaggauucug

SEQ ID NO: 1126005 - RNA, 22 nt, Human
cacaguggcagguguggguugu

SEQ ID NO: 1126006 - RNA, 22 nt, Human
agccacagcccacaggacucuu

SEQ ID NO: 1126007 - RNA, 22 nt, Human
uggaugcuguaggacacgcucu

SEQ ID NO: 1126008 - RNA, 22 nt, Human
cagagcugagaauguugaugcu

SEQ ID NO: 1126009 - RNA, 22 nt, Human
gcauugucaaaagugguaugac

SEQ ID NO: 1126010 - RNA, 22 nt, Human
acccuggggguggccagugcca

SEQ ID NO: 1126011 - RNA, 22 nt, Human
cugugcuuccaggauggcagcu

SEQ ID NO: 1126012 - RNA, 22 nt, Human
uguaugugcuugagaagguggg

SEQ ID NO: 1126013 - RNA, 22 nt, Human
agcucacagaaauccugcagga

SEQ ID NO: 1126014 - RNA, 22 nt, Human
auggccuggggagcaugggaag

SEQ ID NO: 1126015 - RNA, 22 nt, Human
gccacaugcaauugcagcacgu

SEQ ID NO: 1126016 - RNA, 22 nt, Human
agcuuuauuugucauucacggc

SEQ ID NO: 1126017 - RNA, 22 nt, Human
gcuggccauagaagccaaagag

SEQ ID NO: 1126018 - RNA, 22 nt, Human
augggcugugagguccggcagg

SEQ ID NO: 1126019 - RNA, 22 nt, Human
aagauuucucuccuggaaagca

SEQ ID NO: 1126020 - RNA, 22 nt, Human
acagaccaaguuuccagcaggu

SEQ ID NO: 1126021 - RNA, 22 nt, Human
gugcauuugugcaugcacaugu

SEQ ID NO: 1126022 - RNA, 22 nt, Human
caggccugauacacugaacucu

SEQ ID NO: 1126023 - RNA, 22 nt, Human
accugagcaugccaggagagug

SEQ ID NO: 1126024 - RNA, 22 nt, Human
uguacaguaggaacuuguuauu

SEQ ID NO: 1126025 - RNA, 22 nt, Human
aaacagcugucauuguuuuaaa

SEQ ID NO: 1126026 - RNA, 22 nt, Human
ccugggaggcggagguugcagg

SEQ ID NO: 1126027 - RNA, 22 nt, Human
gcuggagguuucaccugaguuu

SEQ ID NO: 1126028 - RNA, 22 nt, Human
guucucucugcuuccaagaugg

SEQ ID NO: 1126029 - RNA, 19 nt, Human
uucacauuggaagaaguag

SEQ ID NO: 1126030 - RNA, 22 nt, Human
uaauguguugaauauuuguaca

SEQ ID NO: 1126031 - RNA, 22 nt, Human
ccugccaggcuuugggcuucug

SEQ ID NO: 1126032 - RNA, 22 nt, Human
cagagccuuccuagcagacucu

SEQ ID NO: 1126033 - RNA, 22 nt, Human
aacagugagaagguggacagga

SEQ ID NO: 1126034 - RNA, 22 nt, Human
agaggcugagaaacccucuucu

SEQ ID NO: 1126035 - RNA, 22 nt, Human
gaaauguguuguucauuucuaa

SEQ ID NO: 1126036 - RNA, 22 nt, Human
ucuuugcaucccuuccauaguu

SEQ ID NO: 1126037 - RNA, 22 nt, Human
ggccucagaccggagcuggcca

SEQ ID NO: 1126038 - RNA, 22 nt, Human
gaguuauucuagguccuuugua

SEQ ID NO: 1126039 - RNA, 20 nt, Human
ucagagucaucaaagauggu

SEQ ID NO: 1126040 - RNA, 22 nt, Human
cugccagcucgccacaaugaca

SEQ ID NO: 1126041 - RNA, 19 nt, Human
uuucaauggcuuagagaaa

SEQ ID NO: 1126042 - RNA, 22 nt, Human
ccugcugugaaacuggcauaug

SEQ ID NO: 1126043 - RNA, 22 nt, Human
uggcucuguugagguauggauu

SEQ ID NO: 1126044 - RNA, 22 nt, Human
uguuuuguuagcacucugggaa

SEQ ID NO: 1126045 - RNA, 22 nt, Human
aguggcagagguugacugcagu

SEQ ID NO: 1126046 - RNA, 22 nt, Human
agccaaggacacggagccuccu

SEQ ID NO: 1126047 - RNA, 22 nt, Human
aaagcaaugaugguagacacgu

SEQ ID NO: 1126048 - RNA, 22 nt, Human
cagagguagccgagugcaaucg

SEQ ID NO: 1126049 - RNA, 22 nt, Human
ccauuugucaccucugcacucc

SEQ ID NO: 1126050 - RNA, 17 nt, Human
cccagcuggcagugccg

SEQ ID NO: 1126051 - RNA, 22 nt, Human
cuggguggaucgcagccccagg

SEQ ID NO: 1126052 - RNA, 22 nt, Human
uucacaggaggguggaugcaug

SEQ ID NO: 1126053 - RNA, 22 nt, Human
ggaagagccuggggugucaggc

SEQ ID NO: 1126054 - RNA, 22 nt, Human
cuuauuauaaaauccuguuuga

SEQ ID NO: 1126055 - RNA, 22 nt, Human
gcagccagaagacucagaacaa

SEQ ID NO: 1126056 - RNA, 22 nt, Human
cccaccaguacagaugguagau

SEQ ID NO: 1126057 - RNA, 22 nt, Human
aagagcuggauggaaucuggga

SEQ ID NO: 1126058 - RNA, 22 nt, Human
agugcauuauauguuucaaugg

SEQ ID NO: 1126059 - RNA, 22 nt, Human
ccagagccuaagaucugauccu

SEQ ID NO: 1126060 - RNA, 22 nt, Human
uggccugcagcucucagggaag

SEQ ID NO: 1126061 - RNA, 22 nt, Human
cucugagagagcuggugagcac

SEQ ID NO: 1126062 - RNA, 22 nt, Human
uugaaaggcacaggcaccuggg

SEQ ID NO: 1126063 - RNA, 22 nt, Human
ccccuuccaggaagcagaaucg

SEQ ID NO: 1126064 - RNA, 22 nt, Human
agugaccaacaaugcugagaag

SEQ ID NO: 1126065 - RNA, 21 nt, Human
cucuggagucaagagcuucca

SEQ ID NO: 1126066 - RNA, 22 nt, Human
cagucccacaagaucuccacaa

SEQ ID NO: 1126067 - RNA, 22 nt, Human
uacuuaggugagauauuuucuu

SEQ ID NO: 1126068 - RNA, 18 nt, Human
cagaugagaugcaaucuc

SEQ ID NO: 1126069 - RNA, 22 nt, Human
cagaagcagugagagaugugca

SEQ ID NO: 1126070 - RNA, 22 nt, Human
aaggagugcaugacucagagua

SEQ ID NO: 1126071 - RNA, 22 nt, Human
aagcagccuggcaugaugcuuu

SEQ ID NO: 1126072 - RNA, 22 nt, Human
caaagguaguauauauauuguu

SEQ ID NO: 1126073 - RNA, 22 nt, Human
aagauuucagaguuugggggaa

SEQ ID NO: 1126074 - RNA, 22 nt, Human
agcagcuguggaaaaguaacua

SEQ ID NO: 1126075 - RNA, 22 nt, Human
caggcugaggcaguaggguuug

SEQ ID NO: 1126076 - RNA, 22 nt, Human
caggugggccgggguuuguucu

SEQ ID NO: 1126077 - RNA, 22 nt, Human
cucccuggaggcccagaccugg

SEQ ID NO: 1126078 - RNA, 22 nt, Human
ugggcagaauugugguaguuaa

SEQ ID NO: 1126079 - RNA, 22 nt, Human
cugcuuccaugcaauggcaguc

SEQ ID NO: 1126080 - RNA, 22 nt, Human
gcugcaggggggucuggacuug

SEQ ID NO: 1126081 - RNA, 22 nt, Human
gcuggagccuucugcucuguug

SEQ ID NO: 1126082 - RNA, 18 nt, Human
gcugagguggugucagag

SEQ ID NO: 1126083 - RNA, 22 nt, Human
ggagcuggcuacagagaacucc

SEQ ID NO: 1126084 - RNA, 22 nt, Human
gugccuggcacacagaaggcaa

SEQ ID NO: 1126085 - RNA, 22 nt, Human
gacaaaggaucagagguuggga

SEQ ID NO: 1126086 - RNA, 22 nt, Human
aaguuaugaaauuuggacagcu

SEQ ID NO: 1126087 - RNA, 22 nt, Human
uguaggacauguacuuguaaca

SEQ ID NO: 1126088 - RNA, 22 nt, Human
cagggacugagauccagacugu

SEQ ID NO: 1126089 - RNA, 22 nt, Human
cagcugccacaggacuuucuga

SEQ ID NO: 1126090 - RNA, 22 nt, Human
cagaggcugggaccucaggcau

SEQ ID NO: 1126091 - RNA, 22 nt, Human
guccugggaaggaagccaggga

SEQ ID NO: 1126092 - RNA, 22 nt, Human
ugucccagaucacaggagggga

SEQ ID NO: 1126093 - RNA, 22 nt, Human
gccuggagcagacgugucccgg

SEQ ID NO: 1126094 - RNA, 22 nt, Human
gaggccagaaugagcugaaugc

SEQ ID NO: 1126095 - RNA, 22 nt, Human
guaagcaucugucucuucugca

SEQ ID NO: 1126096 - RNA, 19 nt, Human
uguggccaugguucagcug

SEQ ID NO: 1126097 - RNA, 22 nt, Human
gagggcaguagccucguacccu

SEQ ID NO: 1126098 - RNA, 22 nt, Human
uccagggaugccagccauguug

SEQ ID NO: 1126099 - RNA, 20 nt, Human
gugccuggagaagaggcugu

SEQ ID NO: 1126100 - RNA, 22 nt, Human
uaguaucuuucuauauuuccca

SEQ ID NO: 1126101 - RNA, 22 nt, Human
aaguugaaugcguacgugacau

SEQ ID NO: 1126102 - RNA, 22 nt, Human
gcagcuuuguggagaggcccau

SEQ ID NO: 1126103 - RNA, 22 nt, Human
aggacuccauguguccuggaga

SEQ ID NO: 1126104 - RNA, 22 nt, Human
cccagcauccucagggagcggg

SEQ ID NO: 1126105 - RNA, 22 nt, Human
cagcugagcaucacuagucugg

SEQ ID NO: 1126106 - RNA, 22 nt, Human
agaauuuuugauuaucuacucg

SEQ ID NO: 1126107 - RNA, 22 nt, Human
ccucacuggccagccaggggug

SEQ ID NO: 1126108 - RNA, 22 nt, Human
gcugccaccguggagaugagug

SEQ ID NO: 1126109 - RNA, 22 nt, Human
gcagggagguuugcugaccugg

SEQ ID NO: 1126110 - RNA, 17 nt, Human
uauguaguacuuauaaa

SEQ ID NO: 1126111 - RNA, 22 nt, Human
aucuggcuuggguguggguagc

SEQ ID NO: 1126112 - RNA, 22 nt, Human
gcugcucuggcucugcaguguc

SEQ ID NO: 1126113 - RNA, 22 nt, Human
acagggccauuaucuguucuag

SEQ ID NO: 1126114 - RNA, 22 nt, Human
uaguaaaaguuuaguugaaagu

SEQ ID NO: 1126115 - RNA, 22 nt, Human
uacccaggagaaacagcagggc

SEQ ID NO: 1126116 - RNA, 22 nt, Human
gcagagcucuguucuuaucucc

SEQ ID NO: 1126117 - RNA, 22 nt, Human
gccuucaguagugucagcugua

SEQ ID NO: 1126118 - RNA, 22 nt, Human
ggaggccaguccuggccgggcu

SEQ ID NO: 1126119 - RNA, 22 nt, Human
aggcugagauagguggaucauu

SEQ ID NO: 1126120 - RNA, 22 nt, Human
uagucuuuugagaaguauaucu

SEQ ID NO: 1126121 - RNA, 22 nt, Human
cuccccagguucaggagguggg

SEQ ID NO: 1126122 - RNA, 22 nt, Human
cagggcacaguuauggaggugg

SEQ ID NO: 1126123 - RNA, 22 nt, Human
cuggcuucugggccagggcaga

SEQ ID NO: 1126124 - RNA, 22 nt, Human
guggggggacguuggucacuuu

SEQ ID NO: 1126125 - RNA, 22 nt, Human
aaaguguagagacuuuggaacc

SEQ ID NO: 1126126 - RNA, 22 nt, Human
aucuuccuucacuuucucccac

SEQ ID NO: 1126127 - RNA, 22 nt, Human
agcugcucucacuggacgccug

SEQ ID NO: 1126128 - RNA, 22 nt, Human
ucucuucuugauuuucacugga

SEQ ID NO: 1126129 - RNA, 22 nt, Human
uggcccugacagguccugggca

SEQ ID NO: 1126130 - RNA, 22 nt, Human
ggucuuccgagaggccugugcu

SEQ ID NO: 1126131 - RNA, 23 nt, Human
ugccucugccucccuagucugca

SEQ ID NO: 1126132 - RNA, 22 nt, Human
uacaaaguauauuucuagcugu

SEQ ID NO: 1126133 - RNA, 22 nt, Human
uaucuuuaacuugcaguauuua

SEQ ID NO: 1126134 - RNA, 22 nt, Human
gcagcuguguaaugagcccaca

SEQ ID NO: 1126135 - RNA, 22 nt, Human
uggagcugauacagcuggcuuu

SEQ ID NO: 1126136 - RNA, 22 nt, Human
uugaacagcuguuacauuguua

SEQ ID NO: 1126137 - RNA, 22 nt, Human
aaaugcacaauaaaguaaaggc

SEQ ID NO: 1126138 - RNA, 22 nt, Human
aauguuuuacagaucccauuag

SEQ ID NO: 1126139 - RNA, 19 nt, Human
uguuggugcggauguggag

SEQ ID NO: 1126140 - RNA, 22 nt, Human
gggccaugagagguucaucaac

SEQ ID NO: 1126141 - RNA, 22 nt, Human
caaaguccuagaacagugcuug

SEQ ID NO: 1126142 - RNA, 22 nt, Human
gcugggcuugguuucccugcuu

SEQ ID NO: 1126143 - RNA, 22 nt, Human
acugucaccaucagagcgggaa

SEQ ID NO: 1126144 - RNA, 22 nt, Human
gaauauauuauucagcuuuuca

SEQ ID NO: 1126145 - RNA, 22 nt, Human
guuuuuccuugcugaggacccg

SEQ ID NO: 1126146 - RNA, 22 nt, Human
cugggugaguugaugaaggaga

SEQ ID NO: 1126147 - RNA, 22 nt, Human
ugucucaguacacuccgauguu

SEQ ID NO: 1126148 - RNA, 22 nt, Human
gcugcagcagaaguucucagag

SEQ ID NO: 1126149 - RNA, 22 nt, Human
ugaggccaaugacccugggcag

SEQ ID NO: 1126150 - RNA, 22 nt, Human
gagcuggugugugcccgagcac

SEQ ID NO: 1126151 - RNA, 22 nt, Human
ggcagccagagggcagcuggau

SEQ ID NO: 1126152 - RNA, 22 nt, Human
ugugcccaucccucuggagugu

SEQ ID NO: 1126153 - RNA, 22 nt, Human
agcuucucaggagucugaggca

SEQ ID NO: 1126154 - RNA, 22 nt, Human
guucagggagggacagaugaag

SEQ ID NO: 1126155 - RNA, 22 nt, Human
uuccucagaaaauacuguccaa

SEQ ID NO: 1126156 - RNA, 22 nt, Human
acugucacuccaacugagucgu

SEQ ID NO: 1126157 - RNA, 22 nt, Human
ucccacacagcccgcucaccgg

SEQ ID NO: 1126158 - RNA, 22 nt, Human
uuuguucguucaugcacgguag

SEQ ID NO: 1126159 - RNA, 22 nt, Human
cacagggcagugauuguccaca

SEQ ID NO: 1126160 - RNA, 22 nt, Human
uuuuccucugcaauaaaagcag

SEQ ID NO: 1126161 - RNA, 22 nt, Human
ucagggacuuacaaaccagaag

SEQ ID NO: 1126162 - RNA, 22 nt, Human
agggcagcacagcugugcuccu

SEQ ID NO: 1126163 - RNA, 22 nt, Human
ucacaggcuccagggccuggau

SEQ ID NO: 1126164 - RNA, 22 nt, Human
guggcagcugguaugcagacag

SEQ ID NO: 1126165 - RNA, 22 nt, Human
gaguccaguuguucacagaggc

SEQ ID NO: 1126166 - RNA, 22 nt, Human
ucaaaaguuucacauagagaua

SEQ ID NO: 1126167 - RNA, 17 nt, Human
aggagucucagaugagc

SEQ ID NO: 1126168 - RNA, 22 nt, Human
uggcucugucacugugagcuau

SEQ ID NO: 1126169 - RNA, 19 nt, Human
ggcucagggcgcugccgcc

SEQ ID NO: 1126170 - RNA, 22 nt, Human
ugcaagaggaauucuagaagca

SEQ ID NO: 1126171 - RNA, 22 nt, Human
gcuggccucgcaggcaggaugu

SEQ ID NO: 1126172 - RNA, 22 nt, Human
gcugcagcccggcgcgccugag

SEQ ID NO: 1126173 - RNA, 22 nt, Human
ggcugccuucccugagccccgg

SEQ ID NO: 1126174 - RNA, 23 nt, Human
uccagcagagccuuccaggaggg

SEQ ID NO: 1126175 - RNA, 22 nt, Human
agggcuggagccacagcuggga

SEQ ID NO: 1126176 - RNA, 22 nt, Human
caggguuucaccauguuagcag

SEQ ID NO: 1126177 - RNA, 22 nt, Human
aggcagggucuugcuauguugc

SEQ ID NO: 1126178 - RNA, 22 nt, Human
uccuucaaagcuccuagugagc

SEQ ID NO: 1126179 - RNA, 22 nt, Human
aguccaugguuguaguucucuc

SEQ ID NO: 1126180 - RNA, 22 nt, Human
ggucagccuuggauuugguagc

SEQ ID NO: 1126181 - RNA, 22 nt, Human
cagucccagacauaguaaggga

SEQ ID NO: 1126182 - RNA, 22 nt, Human
aggcaggggagcuggaagggua

SEQ ID NO: 1126183 - RNA, 22 nt, Human
cuuuauguccuugaagaguugu

SEQ ID NO: 1126184 - RNA, 22 nt, Human
accaaggagaaggugcaagcuu

SEQ ID NO: 1126185 - RNA, 22 nt, Human
cagaacauuccaugugcccugc

SEQ ID NO: 1126186 - RNA, 22 nt, Human
gcucagggaacuuuuugcaggc

SEQ ID NO: 1126187 - RNA, 22 nt, Human
ucaaaguccuugcuuuuucugu

SEQ ID NO: 1126188 - RNA, 22 nt, Human
ugguugaaaaacauuggcuuuu

SEQ ID NO: 1126189 - RNA, 22 nt, Human
cccaggagauggagguugcagu

SEQ ID NO: 1126190 - RNA, 22 nt, Human
cacagggccuugugugacugca

SEQ ID NO: 1126191 - RNA, 22 nt, Human
gccggggcuggggagagacaug

SEQ ID NO: 1126192 - RNA, 22 nt, Human
cuucaagagaaugcagggaugu

SEQ ID NO: 1126193 - RNA, 21 nt, Human
ggcccugguuacgccuccucu

SEQ ID NO: 1126194 - RNA, 22 nt, Human
ccagccuucugagcugccugga

SEQ ID NO: 1126195 - RNA, 22 nt, Human
cucagcccagcccaggaccagg

SEQ ID NO: 1126196 - RNA, 22 nt, Human
cacccagcagcacuuaagacua

SEQ ID NO: 1126197 - RNA, 22 nt, Human
aguguuucccaguaggaugaaa

SEQ ID NO: 1126198 - RNA, 22 nt, Human
acaugcauacaagcacauguag

SEQ ID NO: 1126199 - RNA, 22 nt, Human
cugucccaggagcuguaagaca

SEQ ID NO: 1126200 - RNA, 22 nt, Human
ccugggcaucucaugcaccugc

SEQ ID NO: 1126201 - RNA, 22 nt, Human
acuuucuaggucucaguccuuu

SEQ ID NO: 1126202 - RNA, 22 nt, Human
ucugagagagggucagaugcua

SEQ ID NO: 1126203 - RNA, 22 nt, Human
gugcauauaugcacauaugugu

SEQ ID NO: 1126204 - RNA, 22 nt, Human
aggagcugagggagcgcccuug

SEQ ID NO: 1126205 - RNA, 22 nt, Human
uugacagcuauuuugcuuugau

SEQ ID NO: 1126206 - RNA, 22 nt, Human
gugucauuaaccaccaugcaaa

SEQ ID NO: 1126207 - RNA, 22 nt, Human
gugugccaggaacuggcugcug

SEQ ID NO: 1126208 - RNA, 22 nt, Human
gguccuggaaauugacggaaag

SEQ ID NO: 1126209 - RNA, 22 nt, Human
cugaaggauucaaaauggcagg

SEQ ID NO: 1126210 - RNA, 22 nt, Human
agacccagaaagcagcugcauu

SEQ ID NO: 1126211 - RNA, 22 nt, Human
ccuggcagaauauuaaagugca

SEQ ID NO: 1126212 - RNA, 22 nt, Human
uuguuucugaguuuucauguau

SEQ ID NO: 1126213 - RNA, 22 nt, Human
ucagagugugagacauauugga

SEQ ID NO: 1126214 - RNA, 22 nt, Human
uuuccucuuuguaccuugacua

SEQ ID NO: 1126215 - RNA, 22 nt, Human
agcaugaaagcauaggacaguc

SEQ ID NO: 1126216 - RNA, 22 nt, Human
uaggggugaggccaggcaucag

SEQ ID NO: 1126217 - RNA, 22 nt, Human
acagagcacauagauuggaguu

SEQ ID NO: 1126218 - RNA, 22 nt, Human
ugccuuggugcuucuucaugug

SEQ ID NO: 1126219 - RNA, 22 nt, Human
ggugaggggagagugaaagaaa

SEQ ID NO: 1126220 - RNA, 18 nt, Human
gaggccugagaaccaggu

SEQ ID NO: 1126221 - RNA, 22 nt, Human
ucagaagcaaacaucacucuag

SEQ ID NO: 1126222 - RNA, 22 nt, Human
ccacagggccuuuccugcuggc

SEQ ID NO: 1126223 - RNA, 22 nt, Human
gggugggccacugagcagcgug

SEQ ID NO: 1126224 - RNA, 18 nt, Human
cucucuggucuggauccc

SEQ ID NO: 1126225 - RNA, 21 nt, Human
aaggagccuaggaggcucagg

SEQ ID NO: 1126226 - RNA, 22 nt, Human
acugggaggcaaagagcaagga

SEQ ID NO: 1126227 - RNA, 22 nt, Human
ggauggagguucucagaugcuc

SEQ ID NO: 1126228 - RNA, 22 nt, Human
ucucagagcuucagaaagcacc

SEQ ID NO: 1126229 - RNA, 22 nt, Human
aggguccaucaaggacugcaca

SEQ ID NO: 1126230 - RNA, 22 nt, Human
cauuucuguacauguuuuggug

SEQ ID NO: 1126231 - RNA, 22 nt, Human
caggggcugugggcggagccuc

SEQ ID NO: 1126232 - RNA, 22 nt, Human
aagcugcagacccccugucuca

SEQ ID NO: 1126233 - RNA, 22 nt, Human
auaaaacuuauuagaauugugu

SEQ ID NO: 1126234 - RNA, 22 nt, Human
gcccagagagaugcuguagacc

SEQ ID NO: 1126235 - RNA, 22 nt, Human
ugggcugcuguuacaggggcug

SEQ ID NO: 1126236 - RNA, 21 nt, Human
aggggacagaguagcuccagg

SEQ ID NO: 1126237 - RNA, 22 nt, Human
ucucuccuuaucauuguguuua

SEQ ID NO: 1126238 - RNA, 22 nt, Human
gcauccagagguagccacugug

SEQ ID NO: 1126239 - RNA, 22 nt, Human
ucaguggagcuaagcaugagau

SEQ ID NO: 1126240 - RNA, 22 nt, Human
uaggaaaaauacagaauuauau

SEQ ID NO: 1126241 - RNA, 21 nt, Human
gcaggguccuuuccauuccua

SEQ ID NO: 1126242 - RNA, 22 nt, Human
aaaugcagauuuugaugcagca

SEQ ID NO: 1126243 - RNA, 22 nt, Human
gcucugcugagauaucugggag

SEQ ID NO: 1126244 - RNA, 22 nt, Human
ccacaggggucucuguagcuga

SEQ ID NO: 1126245 - RNA, 22 nt, Human
auagugguuggauaugucagag

SEQ ID NO: 1126246 - RNA, 22 nt, Human
ucucagggagggcgagucagcg

SEQ ID NO: 1126247 - RNA, 22 nt, Human
uugcauugugauuacagaggug

SEQ ID NO: 1126248 - RNA, 20 nt, Human
aagaaacuugaaaguacaag

SEQ ID NO: 1126249 - RNA, 22 nt, Human
agugacugacaccuguaauccc

SEQ ID NO: 1126250 - RNA, 19 nt, Human
ugcagcucagggcaggggc

SEQ ID NO: 1126251 - RNA, 22 nt, Human
ucucuuucuauugcaccaugcu

SEQ ID NO: 1126252 - RNA, 22 nt, Human
cugggugguuuugaugugaauu

SEQ ID NO: 1126253 - RNA, 22 nt, Human
cucuggaaaaccacuagcagga

SEQ ID NO: 1126254 - RNA, 22 nt, Human
ucaguuuucucaucuguaauuu

SEQ ID NO: 1126255 - RNA, 22 nt, Human
gagccuggauugucaccgacuu

SEQ ID NO: 1126256 - RNA, 22 nt, Human
cagagguaccagcagccucugg

SEQ ID NO: 1126257 - RNA, 22 nt, Human
ugugugugacucauacuagaac

SEQ ID NO: 1126258 - RNA, 22 nt, Human
agcagccaaaugaagauuuuac

SEQ ID NO: 1126259 - RNA, 21 nt, Human
aaagaacaggcagauguucuu

SEQ ID NO: 1126260 - RNA, 21 nt, Human
agccuggcccagggggaggcu

SEQ ID NO: 1126261 - RNA, 22 nt, Human
acauuugaggauguuaagaaug

SEQ ID NO: 1126262 - RNA, 22 nt, Human
uucugaggcacuggcucuccca

SEQ ID NO: 1126263 - RNA, 22 nt, Human
auuucacucuuaauugcuuccu

SEQ ID NO: 1126264 - RNA, 20 nt, Human
gccuggaggcagagauaaag

SEQ ID NO: 1126265 - RNA, 22 nt, Human
agcagccaauuggaggaugaag

SEQ ID NO: 1126266 - RNA, 22 nt, Human
cagccucucuguaucucaggau

SEQ ID NO: 1126267 - RNA, 22 nt, Human
cccccaaggccaggcugagacc

SEQ ID NO: 1126268 - RNA, 22 nt, Human
uuauguaccugaauuaguaaag

SEQ ID NO: 1126269 - RNA, 22 nt, Human
acauuucugcaucucagagcua

SEQ ID NO: 1126270 - RNA, 22 nt, Human
gagcagugagugaauguugccu

SEQ ID NO: 1126271 - RNA, 23 nt, Human
gacagagugagaccuugucuuac

SEQ ID NO: 1126272 - RNA, 22 nt, Human
uggcacugaccccaggccugug

SEQ ID NO: 1126273 - RNA, 22 nt, Human
ggagcugucuguagggcacagg

SEQ ID NO: 1126274 - RNA, 22 nt, Human
cauaacuagagugaaauguuga

SEQ ID NO: 1126275 - RNA, 21 nt, Human
ucuuugcaucaguuguuuucu

SEQ ID NO: 1126276 - RNA, 22 nt, Human
gugucccaaucuacuuuucccu

SEQ ID NO: 1126277 - RNA, 22 nt, Human
caugggcucuucuggacugcac

SEQ ID NO: 1126278 - RNA, 17 nt, Human
acagggcagaaacagcu

SEQ ID NO: 1126279 - RNA, 22 nt, Human
guguuuccuaguuuaaugaaug

SEQ ID NO: 1126280 - RNA, 22 nt, Human
gucauuguguggacauggagaa

SEQ ID NO: 1126281 - RNA, 22 nt, Human
ugggcagaggcucugaagucca

SEQ ID NO: 1126282 - RNA, 22 nt, Human
aaugaugguuaaacacuggagg

SEQ ID NO: 1126283 - RNA, 22 nt, Human
guccuggguccccgcaggucag

SEQ ID NO: 1126284 - RNA, 22 nt, Human
gagggguguggagccaucaguu

SEQ ID NO: 1126285 - RNA, 22 nt, Human
cuggcucccagcuuucagggag

SEQ ID NO: 1126286 - RNA, 22 nt, Human
agcagcugcagggagggucugc

SEQ ID NO: 1126287 - RNA, 20 nt, Human
ugcagggcugccucccagcu

SEQ ID NO: 1126288 - RNA, 22 nt, Human
ugccugaggagucagggcaggu

SEQ ID NO: 1126289 - RNA, 22 nt, Human
auaguaacuggcauguuuauga

SEQ ID NO: 1126290 - RNA, 21 nt, Human
ugggcagauggcaguguggcu

SEQ ID NO: 1126291 - RNA, 22 nt, Human
auacauacguacauacguaugu

SEQ ID NO: 1126292 - RNA, 22 nt, Human
ggguggcuccuaugggcauagc

SEQ ID NO: 1126293 - RNA, 22 nt, Human
gcucagaggagcaucauaagga

SEQ ID NO: 1126294 - RNA, 18 nt, Human
uggagccauugccaccau

SEQ ID NO: 1126295 - RNA, 22 nt, Human
agccugagccccauccagcuga

SEQ ID NO: 1126296 - RNA, 19 nt, Human
ccugggaggcggagguugc

SEQ ID NO: 1126297 - RNA, 22 nt, Human
gggcugcacagaucuucaaggg

SEQ ID NO: 1126298 - RNA, 23 nt, Human
cauguacagaguuugauaaagug

SEQ ID NO: 1126299 - RNA, 19 nt, Human
uggcagaggcaguuuguac

SEQ ID NO: 1126300 - RNA, 22 nt, Human
ggugcugguucaggguggcugu

SEQ ID NO: 1126301 - RNA, 22 nt, Human
cucagagcaaugaacaugcaaa

SEQ ID NO: 1126302 - RNA, 22 nt, Human
agggcagagacaugcuuccuga

SEQ ID NO: 1126303 - RNA, 22 nt, Human
cagucccagaagagccugggag

SEQ ID NO: 1126304 - RNA, 22 nt, Human
gcauuccuacaggcugcuauga

SEQ ID NO: 1126305 - RNA, 22 nt, Human
cccuggaggaaaaucugaggcu

SEQ ID NO: 1126306 - RNA, 22 nt, Human
ugaaagguagcuggccucauag

SEQ ID NO: 1126307 - RNA, 21 nt, Human
ccagagccugcugagcccccu

SEQ ID NO: 1126308 - RNA, 22 nt, Human
acagagcacugcccugugccgc

SEQ ID NO: 1126309 - RNA, 22 nt, Human
agcagcugucccuuaacaucag

SEQ ID NO: 1126310 - RNA, 22 nt, Human
uuaguaauguguuaauaugaau

SEQ ID NO: 1126311 - RNA, 22 nt, Human
guugaauaauucauagaagcua

SEQ ID NO: 1126312 - RNA, 22 nt, Human
uaauccaauggcacaauguaug

SEQ ID NO: 1126313 - RNA, 22 nt, Human
uugcacagaugagggugaugcu

SEQ ID NO: 1126314 - RNA, 22 nt, Human
uagggcaguuucauguuaucuu

SEQ ID NO: 1126315 - RNA, 22 nt, Human
agggaaaguaagcauuucauua

SEQ ID NO: 1126316 - RNA, 22 nt, Human
aggccuccugcagggaugagug

SEQ ID NO: 1126317 - RNA, 17 nt, Human
ggccuguguggcugcag

SEQ ID NO: 1126318 - RNA, 22 nt, Human
aucacaaaggcugcuucaugau

SEQ ID NO: 1126319 - RNA, 21 nt, Human
aggcucagagaucaaacagua

SEQ ID NO: 1126320 - RNA, 22 nt, Human
aggcacugaccugcuuccuuga

SEQ ID NO: 1126321 - RNA, 22 nt, Human
gggccccaaaaugccaggcucu

SEQ ID NO: 1126322 - RNA, 22 nt, Human
agcagggcuuugcagacuuggg

SEQ ID NO: 1126323 - RNA, 22 nt, Human
aagcagcugauuucacagcuca

SEQ ID NO: 1126324 - RNA, 20 nt, Human
uggagccacagucagguucc

SEQ ID NO: 1126325 - RNA, 19 nt, Human
ucaaagcaagcauguucug

SEQ ID NO: 1126326 - RNA, 22 nt, Human
uggcucaggguccccaaauggu

SEQ ID NO: 1126327 - RNA, 22 nt, Human
aagggcaggaaaagauggaugu

SEQ ID NO: 1126328 - RNA, 22 nt, Human
agcaggagcugugggaagaugg

SEQ ID NO: 1126329 - RNA, 22 nt, Human
agcagaagaaagccacaugacu

SEQ ID NO: 1126330 - RNA, 22 nt, Human
gccugggagagggauagugcag

SEQ ID NO: 1126331 - RNA, 22 nt, Human
agcagccacccagcugcucauu

SEQ ID NO: 1126332 - RNA, 22 nt, Human
uuucucaucuggaaacagugcu

SEQ ID NO: 1126333 - RNA, 22 nt, Human
uggaggcauuuuagguugucac

SEQ ID NO: 1126334 - RNA, 22 nt, Human
aggacugggugcagagggcauc

SEQ ID NO: 1126335 - RNA, 22 nt, Human
agcagacaacccagaugaccca

SEQ ID NO: 1126336 - RNA, 22 nt, Human
auguaucagauaaagcaugugg

SEQ ID NO: 1126337 - RNA, 22 nt, Human
uaguaucuauuaguaacaagag

SEQ ID NO: 1126338 - RNA, 22 nt, Human
cucugcuuggaacuggacagaa

SEQ ID NO: 1126339 - RNA, 22 nt, Human
cuccuuccccuacucagcaucc

SEQ ID NO: 1126340 - RNA, 23 nt, Human
agaugaaagcuucccaucacagu

SEQ ID NO: 1126341 - RNA, 22 nt, Human
agagguagagguugcagugagc

SEQ ID NO: 1126342 - RNA, 22 nt, Human
cugcugcauuccucuuuaugag

SEQ ID NO: 1126343 - RNA, 22 nt, Human
uaaugcacagaauugacauggg

SEQ ID NO: 1126344 - RNA, 22 nt, Human
aggccuggccuuuauguucaag

SEQ ID NO: 1126345 - RNA, 22 nt, Human
aaagaucagucugaagcaacau

SEQ ID NO: 1126346 - RNA, 22 nt, Human
cuuaggcaguuuaggaaagaga

SEQ ID NO: 1126347 - RNA, 22 nt, Human
auggggugaccaugagcauuua

SEQ ID NO: 1126348 - RNA, 22 nt, Human
cuguccuccggccaccuacagu

SEQ ID NO: 1126349 - RNA, 22 nt, Human
ugucagugaguuaguugcaagu

SEQ ID NO: 1126350 - RNA, 22 nt, Human
agcuggccuuagugagcaccug

SEQ ID NO: 1126351 - RNA, 19 nt, Human
caaggguugggucugucau

SEQ ID NO: 1126352 - RNA, 22 nt, Human
ugcugccagggcucugcccaca

SEQ ID NO: 1126353 - RNA, 22 nt, Human
cccaaggccucuccuuggcuug

SEQ ID NO: 1126354 - RNA, 22 nt, Human
ugcucuguugugcaugugggau

SEQ ID NO: 1126355 - RNA, 22 nt, Human
uuccugagggacuuuugagauu

SEQ ID NO: 1126356 - RNA, 22 nt, Human
aggugccagaugcacagcugaa

SEQ ID NO: 1126357 - RNA, 22 nt, Human
cagaguggcagucccaggccca

SEQ ID NO: 1126358 - RNA, 22 nt, Human
ccagcugcugugcagggaggcu

SEQ ID NO: 1126359 - RNA, 22 nt, Human
ucccagcagggccgaccagccu

SEQ ID NO: 1126360 - RNA, 22 nt, Human
acagcagcuggguucccaccau

SEQ ID NO: 1126361 - RNA, 22 nt, Human
auggaaaggcuguggaaacuua

SEQ ID NO: 1126362 - RNA, 19 nt, Human
uugaggggccaggggagau

SEQ ID NO: 1126363 - RNA, 22 nt, Human
uggcccugucccuggagccugg

SEQ ID NO: 1126364 - RNA, 22 nt, Human
uauuuauaaucugccaaagaga

SEQ ID NO: 1126365 - RNA, 22 nt, Human
ucccagccugacagugcaucaa

SEQ ID NO: 1126366 - RNA, 22 nt, Human
ugggcagaaaucaguaucagau

SEQ ID NO: 1126367 - RNA, 22 nt, Human
cccucccaagcacucugacaua

SEQ ID NO: 1126368 - RNA, 22 nt, Human
uuggaaggugagucccuggguu

SEQ ID NO: 1126369 - RNA, 22 nt, Human
cuguacaucucugaggacagua

SEQ ID NO: 1126370 - RNA, 22 nt, Human
ggagauuuauagcacacuucag

SEQ ID NO: 1126371 - RNA, 22 nt, Human
uggcucugccacuaacuuggua

SEQ ID NO: 1126372 - RNA, 22 nt, Human
uaugcauauagaugcacacaca

SEQ ID NO: 1126373 - RNA, 22 nt, Human
agcuucuggaaggcaaggcuug

SEQ ID NO: 1126374 - RNA, 22 nt, Human
gcucaggaaaacagucuaguaa

SEQ ID NO: 1126375 - RNA, 22 nt, Human
ucuggccuuaucuguccaagcc

SEQ ID NO: 1126376 - RNA, 23 nt, Human
aagccuuguggaggcucucauuu

SEQ ID NO: 1126377 - RNA, 22 nt, Human
agaauaaaucaaauguccugag

SEQ ID NO: 1126378 - RNA, 22 nt, Human
caggccucuccuuagucuggca

SEQ ID NO: 1126379 - RNA, 22 nt, Human
gccaggcucucagugacugccc

SEQ ID NO: 1126380 - RNA, 22 nt, Human
ugugccuuaugaauucuuucug

SEQ ID NO: 1126381 - RNA, 22 nt, Human
agagccaggaucuguuuugggg

SEQ ID NO: 1126382 - RNA, 22 nt, Human
aucaaaguucguaacugauaac

SEQ ID NO: 1126383 - RNA, 22 nt, Human
agcagccagaaauccagaggug

SEQ ID NO: 1126384 - RNA, 22 nt, Human
ugcucuggaguggcuugugcac

SEQ ID NO: 1126385 - RNA, 22 nt, Human
ggcacagggaggcccuggugug

SEQ ID NO: 1126386 - RNA, 22 nt, Human
uguauacauuuaacuagauaga

SEQ ID NO: 1126387 - RNA, 22 nt, Human
acagcagcaauagcagugacau

SEQ ID NO: 1126388 - RNA, 22 nt, Human
ucccagagugugggcaucaagg

SEQ ID NO: 1126389 - RNA, 22 nt, Human
uagaaaagauaacauucugugc

SEQ ID NO: 1126390 - RNA, 22 nt, Human
ucuguggccuguguccaagugc

SEQ ID NO: 1126391 - RNA, 22 nt, Human
ugugcugguacaugugaggaug

SEQ ID NO: 1126392 - RNA, 22 nt, Human
uucuuacuaguauguuucagca

SEQ ID NO: 1126393 - RNA, 22 nt, Human
caagaugccccugguagggauc

SEQ ID NO: 1126394 - RNA, 23 nt, Human
aggaacugaggccuagggaggua

SEQ ID NO: 1126395 - RNA, 22 nt, Human
cggcuggguucggcugcaggcc

SEQ ID NO: 1126396 - RNA, 22 nt, Human
aauguguacaugacagauagaa

SEQ ID NO: 1126397 - RNA, 22 nt, Human
cuguagccagaagcagaaggcc

SEQ ID NO: 1126398 - RNA, 22 nt, Human
gaauguaauagucaguagaaca

SEQ ID NO: 1126399 - RNA, 22 nt, Human
aggcucugaucagguggcugug

SEQ ID NO: 1126400 - RNA, 22 nt, Human
guugggaaggcaagaaguagaa

SEQ ID NO: 1126401 - RNA, 22 nt, Human
agauggggcucaguguggaggc

SEQ ID NO: 1126402 - RNA, 22 nt, Human
ccagcaugagacgaugaugaag

SEQ ID NO: 1126403 - RNA, 22 nt, Human
ucaguaacuuacuuauucaccu

SEQ ID NO: 1126404 - RNA, 22 nt, Human
agcucccaggcagucaugagga

SEQ ID NO: 1126405 - RNA, 22 nt, Human
caaauaucuuuggcaaagagaa

SEQ ID NO: 1126406 - RNA, 22 nt, Human
uuguggaaauacagacuccaag

SEQ ID NO: 1126407 - RNA, 21 nt, Human
ccagaggccucucuuggccac

SEQ ID NO: 1126408 - RNA, 22 nt, Human
acacagggcagagagcuggcuc

SEQ ID NO: 1126409 - RNA, 22 nt, Human
cugccgaguacagccauagaaa

SEQ ID NO: 1126410 - RNA, 22 nt, Human
gagcagcugagcuggaaugaga

SEQ ID NO: 1126411 - RNA, 22 nt, Human
ccugccuggcugucagcagagc

SEQ ID NO: 1126412 - RNA, 23 nt, Human
ccuggcuggauucucugcauuca

SEQ ID NO: 1126413 - RNA, 23 nt, Human
aggaggaaaaguuaucugcugag

SEQ ID NO: 1126414 - RNA, 22 nt, Human
ucaggauaccucaguuuuagcu

SEQ ID NO: 1126415 - RNA, 22 nt, Human
aucaguuuggaacauucaggcc

SEQ ID NO: 1126416 - RNA, 19 nt, Human
ugucccagacuccgugucu

SEQ ID NO: 1126417 - RNA, 19 nt, Human
acccagagcccuuugcagg

SEQ ID NO: 1126418 - RNA, 21 nt, Human
cugcuuuacuucagaggaucu

SEQ ID NO: 1126419 - RNA, 21 nt, Human
agcagaggcagaauguaugca

SEQ ID NO: 1126420 - RNA, 22 nt, Human
uggcagggucuugcuguguugc

SEQ ID NO: 1126421 - RNA, 22 nt, Human
acauuuaaauaugccuuauauu

SEQ ID NO: 1126422 - RNA, 22 nt, Human
cagagccucagaauccugugga

SEQ ID NO: 1126423 - RNA, 22 nt, Human
agcaguggagcgagauguuuaa

SEQ ID NO: 1126424 - RNA, 22 nt, Human
aaaguuagaaugauaucaacga

SEQ ID NO: 1126425 - RNA, 23 nt, Human
ggaaagagaggaguugugcauag

SEQ ID NO: 1126426 - RNA, 22 nt, Human
cugugggcugaaagugcucccg

SEQ ID NO: 1126427 - RNA, 22 nt, Human
aggcacugauucucagaguuac

SEQ ID NO: 1126428 - RNA, 22 nt, Human
ugaggccaggaucccaggcucu

SEQ ID NO: 1126429 - RNA, 22 nt, Human
gcuuucucuucacugauguuca

SEQ ID NO: 1126430 - RNA, 20 nt, Human
cccagccccuaccuguugcc

SEQ ID NO: 1126431 - RNA, 22 nt, Human
uauugaaauucuucauguccuc

SEQ ID NO: 1126432 - RNA, 22 nt, Human
aagggcagccugacucacgguc

SEQ ID NO: 1126433 - RNA, 22 nt, Human
agggucugacaaugugacuuag

SEQ ID NO: 1126434 - RNA, 22 nt, Human
auugacaaggaaacuauaccag

SEQ ID NO: 1126435 - RNA, 22 nt, Human
aagguacaguuuuaagaauaag

SEQ ID NO: 1126436 - RNA, 22 nt, Human
ggacagaggguugacagaguau

SEQ ID NO: 1126437 - RNA, 22 nt, Human
ccugcagacacuuguccagcaa

SEQ ID NO: 1126438 - RNA, 22 nt, Human
cagcugccuucugcgggaaguc

SEQ ID NO: 1126439 - RNA, 22 nt, Human
ucaggggacagccagcuggagg

SEQ ID NO: 1126440 - RNA, 22 nt, Human
cucaggauauugggcuggagca

SEQ ID NO: 1126441 - RNA, 22 nt, Human
gggacuggcacagggcugggag

SEQ ID NO: 1126442 - RNA, 22 nt, Human
aaggcccuggccccagcuucuu

SEQ ID NO: 1126443 - RNA, 22 nt, Human
uuuguuuucaaugugucauuca

SEQ ID NO: 1126444 - RNA, 22 nt, Human
ucugggcuuuacacugugcuua

SEQ ID NO: 1126445 - RNA, 21 nt, Human
uugaaggaucacuucuguacc

SEQ ID NO: 1126446 - RNA, 22 nt, Human
ggcucagguuuaaagugcuuua

SEQ ID NO: 1126447 - RNA, 22 nt, Human
cuauugaauuaacuauuaaagu

SEQ ID NO: 1126448 - RNA, 22 nt, Human
uggcucugaucagauguccagu

SEQ ID NO: 1126449 - RNA, 22 nt, Human
ggcuggguuauuuauggccaag

SEQ ID NO: 1126450 - RNA, 22 nt, Human
ccugucuguauugguuugcuau

SEQ ID NO: 1126451 - RNA, 22 nt, Human
agagcugugcuuugcaccacgu

SEQ ID NO: 1126452 - RNA, 22 nt, Human
agagcagccugugaugaugcac

SEQ ID NO: 1126453 - RNA, 22 nt, Human
auucuccaucaccacuggcacu

SEQ ID NO: 1126454 - RNA, 22 nt, Human
cccuggaagguucucuggcuca

SEQ ID NO: 1126455 - RNA, 22 nt, Human
ucugucacccagagugcagugg

SEQ ID NO: 1126456 - RNA, 22 nt, Human
aagggacuuugucagcuuucca

SEQ ID NO: 1126457 - RNA, 22 nt, Human
accagagcgcucaagccuuccc

SEQ ID NO: 1126458 - RNA, 22 nt, Human
gugaccaucagagaauaacaaa

SEQ ID NO: 1126459 - RNA, 22 nt, Human
cagugccaugucugagccccua

SEQ ID NO: 1126460 - RNA, 22 nt, Human
cagggccaagcugcagcaucug

SEQ ID NO: 1126461 - RNA, 22 nt, Human
acagagcuucccagccugagca

SEQ ID NO: 1126462 - RNA, 22 nt, Human
agccacgucccugucaggguca

SEQ ID NO: 1126463 - RNA, 22 nt, Human
ccagccaggcuggcuguggagg

SEQ ID NO: 1126464 - RNA, 22 nt, Human
gcugcaggcauuuuccugggca

SEQ ID NO: 1126465 - RNA, 23 nt, Human
ugucccagagggagggauaggcu

SEQ ID NO: 1126466 - RNA, 22 nt, Human
uuuaucuuuaggacuuugcaga

SEQ ID NO: 1126467 - RNA, 22 nt, Human
cauuacauuucaaaauguuucc

SEQ ID NO: 1126468 - RNA, 22 nt, Human
ugggccugaaggagcugcgccc

SEQ ID NO: 1126469 - RNA, 23 nt, Human
aguuuguaaagaaauauuugcac

SEQ ID NO: 1126470 - RNA, 22 nt, Human
agaaauuccuaagguacacaag

SEQ ID NO: 1126471 - RNA, 22 nt, Human
gagcugagccuggguggaccgc

SEQ ID NO: 1126472 - RNA, 22 nt, Human
auaaagucauggcagcuagaau

SEQ ID NO: 1126473 - RNA, 22 nt, Human
caauagcagcuucugaaugcaa

SEQ ID NO: 1126474 - RNA, 22 nt, Human
caaaugcauagaaagaugaaac

SEQ ID NO: 1126475 - RNA, 22 nt, Human
gagccuggauugaagugggugg

SEQ ID NO: 1126476 - RNA, 22 nt, Human
uccucagaaaccccugugaggu

SEQ ID NO: 1126477 - RNA, 22 nt, Human
ucaguuuuuacggucacaggga

SEQ ID NO: 1126478 - RNA, 22 nt, Human
aaggcugauuagacugauagcu

SEQ ID NO: 1126479 - RNA, 22 nt, Human
ggagcugggacccugucaucug

SEQ ID NO: 1126480 - RNA, 21 nt, Human
ucuuguccuugcucucccacu

SEQ ID NO: 1126481 - RNA, 22 nt, Human
uuguuuuuaugaacauccagga

SEQ ID NO: 1126482 - RNA, 22 nt, Human
aggagccaguuccaccccagga

SEQ ID NO: 1126483 - RNA, 22 nt, Human
guuagaaacacauucuuauuga

SEQ ID NO: 1126484 - RNA, 20 nt, Human
ucauugcacauaauggaagc

SEQ ID NO: 1126485 - RNA, 22 nt, Human
caggggcagucugugugcgugg

SEQ ID NO: 1126486 - RNA, 22 nt, Human
cacagcugcccuacuccaugug

SEQ ID NO: 1126487 - RNA, 22 nt, Human
cagcuggcuggucagugcacaa

SEQ ID NO: 1126488 - RNA, 22 nt, Human
agcagcucuuaacaaagcaugg

SEQ ID NO: 1126489 - RNA, 22 nt, Human
aggucacacaacugucagaggc

SEQ ID NO: 1126490 - RNA, 20 nt, Human
gcccuggagccuuguccugg

SEQ ID NO: 1126491 - RNA, 23 nt, Human
cagggcugggcuugguguuaggc

SEQ ID NO: 1126492 - RNA, 22 nt, Human
uuuccuuccuugcuagccugag

SEQ ID NO: 1126493 - RNA, 22 nt, Human
guuuuguucaugaacauugggu

SEQ ID NO: 1126494 - RNA, 22 nt, Human
aggguggccaugagggagagau

SEQ ID NO: 1126495 - RNA, 22 nt, Human
agguacaguagacagacaguua

SEQ ID NO: 1126496 - RNA, 22 nt, Human
agagcugugaaaaugagguuug

SEQ ID NO: 1126497 - RNA, 22 nt, Human
ggcugcaggcaggguauccacu

SEQ ID NO: 1126498 - RNA, 22 nt, Human
aaagucauguaaugauaugauu

SEQ ID NO: 1126499 - RNA, 22 nt, Human
ucacaggguaucugggauggau

SEQ ID NO: 1126500 - RNA, 20 nt, Human
gagccuuccccucaccacug

SEQ ID NO: 1126501 - RNA, 22 nt, Human
gggcuggcucugucuagaaagg

SEQ ID NO: 1126502 - RNA, 22 nt, Human
ccagucagccaagcugcagcgg

SEQ ID NO: 1126503 - RNA, 20 nt, Human
gccagcacagggagcaguuc

SEQ ID NO: 1126504 - RNA, 22 nt, Human
uaacagaaaggcucaggugcuc

SEQ ID NO: 1126505 - RNA, 21 nt, Human
cccagggaagccgcagucacc

SEQ ID NO: 1126506 - RNA, 22 nt, Human
gcagugugaccgagcuugcuuc

SEQ ID NO: 1126507 - RNA, 22 nt, Human
uugcauguguaauuuuucuaaa

SEQ ID NO: 1126508 - RNA, 19 nt, Human
gggcuucugggaucaagag

SEQ ID NO: 1126509 - RNA, 22 nt, Human
auuuuucucuuuccacugagau

SEQ ID NO: 1126510 - RNA, 22 nt, Human
gggaguguugagcgcccugcca

SEQ ID NO: 1126511 - RNA, 22 nt, Human
ccagacuguggaguuccuggug

SEQ ID NO: 1126512 - RNA, 22 nt, Human
auaugcacauacauacauaggu

SEQ ID NO: 1126513 - RNA, 22 nt, Human
agggccagaaucccucagucua

SEQ ID NO: 1126514 - RNA, 22 nt, Human
ucugagcuggagcccaucaccu

SEQ ID NO: 1126515 - RNA, 22 nt, Human
uacaaaguuugggguccucaaa

SEQ ID NO: 1126516 - RNA, 22 nt, Human
cacugaaggacaguaggaaggg

SEQ ID NO: 1126517 - RNA, 22 nt, Human
ucacacgugagguucuauccug

SEQ ID NO: 1126518 - RNA, 22 nt, Human
cugcucuguucccccaucaucu

SEQ ID NO: 1126519 - RNA, 22 nt, Human
acaggugugagaacaugccuug

SEQ ID NO: 1126520 - RNA, 22 nt, Human
gccuggugaaaggcagagagcg

SEQ ID NO: 1126521 - RNA, 23 nt, Human
ucagagaaguuguaggcugggga

SEQ ID NO: 1126522 - RNA, 22 nt, Human
uccugggcuugcuccuccagcu

SEQ ID NO: 1126523 - RNA, 22 nt, Human
ggcugccugaacuuuggggaaa

SEQ ID NO: 1126524 - RNA, 22 nt, Human
cucugggcaaguuucuucauga

SEQ ID NO: 1126525 - RNA, 22 nt, Human
aaucuggcucagaagaagauga

SEQ ID NO: 1126526 - RNA, 22 nt, Human
ggcagcagaacuggcccuguau

SEQ ID NO: 1126527 - RNA, 22 nt, Human
ugccugucagggggagugggaa

SEQ ID NO: 1126528 - RNA, 22 nt, Human
agugaccaaucaugguuagauu

SEQ ID NO: 1126529 - RNA, 22 nt, Human
agggaguguaaauggugcucag

SEQ ID NO: 1126530 - RNA, 22 nt, Human
ugucauguguucuuaaauacau

SEQ ID NO: 1126531 - RNA, 22 nt, Human
aggcucagauccuuguguccug

SEQ ID NO: 1126532 - RNA, 22 nt, Human
acauugaugaaaagguaucauu

SEQ ID NO: 1126533 - RNA, 22 nt, Human
uccuuuccaugcuucuagaggc

SEQ ID NO: 1126534 - RNA, 22 nt, Human
gagguacaugaggauacacagg

SEQ ID NO: 1126535 - RNA, 22 nt, Human
acagcagcauaaacugacuaag

SEQ ID NO: 1126536 - RNA, 22 nt, Human
agcugcaggccucuccugggga

SEQ ID NO: 1126537 - RNA, 22 nt, Human
aggcacugggaauaugcugagg

SEQ ID NO: 1126538 - RNA, 22 nt, Human
ugcccaggaucuggcgaugcuc

SEQ ID NO: 1126539 - RNA, 22 nt, Human
caaaugcuaacuucuuuccaaa

SEQ ID NO: 1126540 - RNA, 22 nt, Human
uggacaggugagugacucaggg

SEQ ID NO: 1126541 - RNA, 21 nt, Human
aaggccugcuuacugcuaguu

SEQ ID NO: 1126542 - RNA, 22 nt, Human
gccugaggaaugcuccugacuu

SEQ ID NO: 1126543 - RNA, 22 nt, Human
agaaaugugagccccuuaucaa

SEQ ID NO: 1126544 - RNA, 20 nt, Human
gacauucauaguuauuacca

SEQ ID NO: 1126545 - RNA, 22 nt, Human
ccuggcugcuauagcagcaugu

SEQ ID NO: 1126546 - RNA, 22 nt, Human
aaggcagcaccgccuccugaaa

SEQ ID NO: 1126547 - RNA, 22 nt, Human
gcauuuguguucuuccuagagc

SEQ ID NO: 1126548 - RNA, 22 nt, Human
aggcccaguagugcugccuuua

SEQ ID NO: 1126549 - RNA, 22 nt, Human
uuacugaaaauucuucaggauu

SEQ ID NO: 1126550 - RNA, 22 nt, Human
agggccuggaacugugggcagg

SEQ ID NO: 1126551 - RNA, 18 nt, Human
ugggcugccuggccucug

SEQ ID NO: 1126552 - RNA, 22 nt, Human
gguggccucgguggugcacagg

SEQ ID NO: 1126553 - RNA, 22 nt, Human
gagauuucuuuugaugccuguc

SEQ ID NO: 1126554 - RNA, 17 nt, Human
cugucugcgcaugaggu

SEQ ID NO: 1126555 - RNA, 22 nt, Human
caguggaggccuugggaccuuu

SEQ ID NO: 1126556 - RNA, 22 nt, Human
aggcucagcccaagguggagag

SEQ ID NO: 1126557 - RNA, 20 nt, Human
ccugucuccucuuaccuggc

SEQ ID NO: 1126558 - RNA, 23 nt, Human
agucaguguaaguuuggaaugca

SEQ ID NO: 1126559 - RNA, 22 nt, Human
uucaagguaugguagcugguca

SEQ ID NO: 1126560 - RNA, 22 nt, Human
uggcccugcagaacuagccugg

SEQ ID NO: 1126561 - RNA, 22 nt, Human
ccauggccgccgcugcucagga

SEQ ID NO: 1126562 - RNA, 22 nt, Human
gcuggcaucacuggcuucggug

SEQ ID NO: 1126563 - RNA, 22 nt, Human
cuggaagaggaagccagcugga

SEQ ID NO: 1126564 - RNA, 22 nt, Human
agggcagagaucugagugggca

SEQ ID NO: 1126565 - RNA, 22 nt, Human
aaguucaaguaguguuacaugg

SEQ ID NO: 1126566 - RNA, 22 nt, Human
auccagggauaaaaguaagguu

SEQ ID NO: 1126567 - RNA, 21 nt, Human
ucucugggcccuccugugggg

SEQ ID NO: 1126568 - RNA, 19 nt, Human
gcaggguguugacuguccc

SEQ ID NO: 1126569 - RNA, 22 nt, Human
uugaaaggaauacagaggccua

SEQ ID NO: 1126570 - RNA, 23 nt, Human
ggagccuggcauaugagacgcau

SEQ ID NO: 1126571 - RNA, 22 nt, Human
aggagcugacuuguaaagcauu

SEQ ID NO: 1126572 - RNA, 21 nt, Human
gacaggggaagaagcaaggag

SEQ ID NO: 1126573 - RNA, 22 nt, Human
agcuugaguuuuggaugaagug

SEQ ID NO: 1126574 - RNA, 22 nt, Human
uugggcaaaguguuucuggagc

SEQ ID NO: 1126575 - RNA, 22 nt, Human
gcugcccugugguccagcaggu

SEQ ID NO: 1126576 - RNA, 22 nt, Human
ccagcuccucuucccaguguca

SEQ ID NO: 1126577 - RNA, 22 nt, Human
aagaacaguguccugggacucg

SEQ ID NO: 1126578 - RNA, 22 nt, Human
ucucuuuuauguacacccugac

SEQ ID NO: 1126579 - RNA, 22 nt, Human
ggcugggcaaacaagacucuuc

SEQ ID NO: 1126580 - RNA, 18 nt, Human
aguaguggguuuagcuuc

SEQ ID NO: 1126581 - RNA, 22 nt, Human
gggcagcucuggcugugggaag

SEQ ID NO: 1126582 - RNA, 20 nt, Human
cccuggccuguuucaugccc

SEQ ID NO: 1126583 - RNA, 22 nt, Human
cacaggagcuguggggcagugu

SEQ ID NO: 1126584 - RNA, 22 nt, Human
uuaaguccuugguaauuuucuu

SEQ ID NO: 1126585 - RNA, 22 nt, Human
acugagcugcaagucagggagg

SEQ ID NO: 1126586 - RNA, 22 nt, Human
cugucaccuguucacugcagca

SEQ ID NO: 1126587 - RNA, 22 nt, Human
ucucagggugaggaaagaauuu

SEQ ID NO: 1126588 - RNA, 22 nt, Human
gccucuggggcagcugagucau

SEQ ID NO: 1126589 - RNA, 19 nt, Human
gccugggaugggcagaacu

SEQ ID NO: 1126590 - RNA, 21 nt, Human
gcucuuggaaggggcucagcu

SEQ ID NO: 1126591 - RNA, 22 nt, Human
agggcugagacuaaggccagau

SEQ ID NO: 1126592 - RNA, 22 nt, Human
caggcugcagcagcaguggccc

SEQ ID NO: 1126593 - RNA, 22 nt, Human
agaguguuuuucugucaaggac

SEQ ID NO: 1126594 - RNA, 22 nt, Human
auccuugagaaaauaaaugacc

SEQ ID NO: 1126595 - RNA, 23 nt, Human
aaguaacagggauaauagcaguu

SEQ ID NO: 1126596 - RNA, 22 nt, Human
ucuggagcgaggucccugucug

SEQ ID NO: 1126597 - RNA, 22 nt, Human
acuuccugcagcuucucagccc

SEQ ID NO: 1126598 - RNA, 22 nt, Human
gcugccaugguccaggcuccag

SEQ ID NO: 1126599 - RNA, 22 nt, Human
cagugucuccagaugcuccaau

SEQ ID NO: 1126600 - RNA, 22 nt, Human
agccagcaggugagugcagccu

SEQ ID NO: 1126601 - RNA, 22 nt, Human
ccugguguugugaaguagccgu

SEQ ID NO: 1126602 - RNA, 22 nt, Human
uggcagagcccagacuccaguc

SEQ ID NO: 1126603 - RNA, 22 nt, Human
ggcucaggacugcagcguagag

SEQ ID NO: 1126604 - RNA, 17 nt, Human
cuggagccaagagggcc

SEQ ID NO: 1126605 - RNA, 19 nt, Human
ugggccugcaucugggucu

SEQ ID NO: 1126606 - RNA, 22 nt, Human
gcugucagcgcccaaggagcuc

SEQ ID NO: 1126607 - RNA, 22 nt, Human
cccaggucuaugccagcucuga

SEQ ID NO: 1126608 - RNA, 22 nt, Human
uaauccacaauagagauuaucu

SEQ ID NO: 1126609 - RNA, 22 nt, Human
aaaucugggagcagcucggcca

SEQ ID NO: 1126610 - RNA, 22 nt, Human
ggggcagagaauaaaaaccuaa

SEQ ID NO: 1126611 - RNA, 22 nt, Human
ggcaaaaaccacaauuacuuuu

SEQ ID NO: 1126612 - RNA, 20 nt, Human
uacuugaauguugcagcagu

SEQ ID NO: 1126613 - RNA, 22 nt, Human
aaugcugcaagaggugaaaaga

SEQ ID NO: 1126614 - RNA, 22 nt, Human
gcuggccuugugucugaggaag

SEQ ID NO: 1126615 - RNA, 22 nt, Human
aguaaaaucuuaagcacagugg

SEQ ID NO: 1126616 - RNA, 22 nt, Human
acaggcucuggggcaggauggc

SEQ ID NO: 1126617 - RNA, 20 nt, Human
gcuuccuucccagcccccac

SEQ ID NO: 1126618 - RNA, 19 nt, Human
ccuggguccacucagacua

SEQ ID NO: 1126619 - RNA, 22 nt, Human
cagcaguggccaucuguguggu

SEQ ID NO: 1126620 - RNA, 22 nt, Human
cccucugccucugaguaggaca

SEQ ID NO: 1126621 - RNA, 22 nt, Human
uugcauugaaaauauauuuuaa

SEQ ID NO: 1126622 - RNA, 22 nt, Human
cucacugucuguacuagcugau

SEQ ID NO: 1126623 - RNA, 22 nt, Human
aagccuugcucuugaaaaaguu

SEQ ID NO: 1126624 - RNA, 22 nt, Human
gccagcucagugccaggccccu

SEQ ID NO: 1126625 - RNA, 22 nt, Human
agcugccagaugacagugcuau

SEQ ID NO: 1126626 - RNA, 22 nt, Human
gccucugcgccucagccgaccu

SEQ ID NO: 1126627 - RNA, 22 nt, Human
caggaugugaggaggccauuug

SEQ ID NO: 1126628 - RNA, 22 nt, Human
ucucagagaagugaugagcaau

SEQ ID NO: 1126629 - RNA, 22 nt, Human
ugggggagauugugcaucucua

SEQ ID NO: 1126630 - RNA, 22 nt, Human
cagccugacaccagcuuugggc

SEQ ID NO: 1126631 - RNA, 22 nt, Human
cagggcaggacagauacauuac

SEQ ID NO: 1126632 - RNA, 22 nt, Human
guggcugcuaagucuccuuccu

SEQ ID NO: 1126633 - RNA, 22 nt, Human
ugaggcuggcaaggcugguauu

SEQ ID NO: 1126634 - RNA, 18 nt, Human
ggagagugacagagucgu

SEQ ID NO: 1126635 - RNA, 22 nt, Human
ugcagaagaauguaggcauaag

SEQ ID NO: 1126636 - RNA, 22 nt, Human
auguauuugcgagguuaggaaa

SEQ ID NO: 1126637 - RNA, 22 nt, Human
gcugggcaccggagagacccca

SEQ ID NO: 1126638 - RNA, 22 nt, Human
uuauuuuuaaaaguucacacag

SEQ ID NO: 1126639 - RNA, 23 nt, Human
gugcaugugucuuuacaguagca

SEQ ID NO: 1126640 - RNA, 22 nt, Human
cagagccagcaguggggacagg

SEQ ID NO: 1126641 - RNA, 22 nt, Human
aauugugcuaugauuaugaaag

SEQ ID NO: 1126642 - RNA, 22 nt, Human
gcccaggcuagcguagagugca

SEQ ID NO: 1126643 - RNA, 22 nt, Human
auggaaagcuaagccauuuacc

SEQ ID NO: 1126644 - RNA, 22 nt, Human
gucccuggggaaucagcuggag

SEQ ID NO: 1126645 - RNA, 22 nt, Human
gagggacagcuaaagagaaauu

SEQ ID NO: 1126646 - RNA, 22 nt, Human
uaagaacagauaaaguuucccc

SEQ ID NO: 1126647 - RNA, 22 nt, Human
aacugcauuugcauaaguccau

SEQ ID NO: 1126648 - RNA, 22 nt, Human
ccuggaggagcgcugaccagcu

SEQ ID NO: 1126649 - RNA, 21 nt, Human
agucccaggggugagugaugu

SEQ ID NO: 1126650 - RNA, 22 nt, Human
acuuccugcaaucguccacucc

SEQ ID NO: 1126651 - RNA, 22 nt, Human
gggaucagcaagccacugcacc

SEQ ID NO: 1126652 - RNA, 22 nt, Human
gcaggagcuggaaagugauguu

SEQ ID NO: 1126653 - RNA, 22 nt, Human
ggaggcaggaaagacagguuca

SEQ ID NO: 1126654 - RNA, 22 nt, Human
ccuggcagacagcacugaagcu

SEQ ID NO: 1126655 - RNA, 22 nt, Human
ggucagggcucuuccaguggcu

SEQ ID NO: 1126656 - RNA, 22 nt, Human
ggccuggccuccagaugugggc

SEQ ID NO: 1126657 - RNA, 22 nt, Human
ggcuggcuggcugguagacaag

SEQ ID NO: 1126658 - RNA, 22 nt, Human
aucaguuuuguucacuacuaua

SEQ ID NO: 1126659 - RNA, 22 nt, Human
aggagcugagucagcccgacag

SEQ ID NO: 1126660 - RNA, 19 nt, Human
cugagcagcggcagcacuu

SEQ ID NO: 1126661 - RNA, 22 nt, Human
uuugcauuuuagauuuaggccu

SEQ ID NO: 1126662 - RNA, 22 nt, Human
ggaccagagcucgggcuucuca

SEQ ID NO: 1126663 - RNA, 23 nt, Human
acagagaucuugacuuguaugga

SEQ ID NO: 1126664 - RNA, 22 nt, Human
cgcuggggcuuuuugcuugaga

SEQ ID NO: 1126665 - RNA, 22 nt, Human
gcugcugcgcuugucuacuguu

SEQ ID NO: 1126666 - RNA, 22 nt, Human
acuugauuuugaaccuuucuac

SEQ ID NO: 1126667 - RNA, 22 nt, Human
agaggcaggagguugacuugag

SEQ ID NO: 1126668 - RNA, 22 nt, Human
cugucuguuuuaccuucuccag

SEQ ID NO: 1126669 - RNA, 22 nt, Human
ccgggccucgggacaccgggua

SEQ ID NO: 1126670 - RNA, 22 nt, Human
gcuggcagggacagcugcgugu

SEQ ID NO: 1126671 - RNA, 20 nt, Human
gcagcugcccccagucccug

SEQ ID NO: 1126672 - RNA, 20 nt, Human
cuccagggaacagacuggag

SEQ ID NO: 1126673 - RNA, 22 nt, Human
guuugcauuccaauuuagggga

SEQ ID NO: 1126674 - RNA, 22 nt, Human
gauuucaaguaucuugggcgag

SEQ ID NO: 1126675 - RNA, 22 nt, Human
gaugaagccugacuucucggug

SEQ ID NO: 1126676 - RNA, 22 nt, Human
cccuggcauaaaacuucuccag

SEQ ID NO: 1126677 - RNA, 22 nt, Human
gcucaggaaauaguuuaguguu

SEQ ID NO: 1126678 - RNA, 18 nt, Human
cugaggcuggcaggagcc

SEQ ID NO: 1126679 - RNA, 22 nt, Human
ccaggguggaggcuggauggag

SEQ ID NO: 1126680 - RNA, 22 nt, Human
agggcuggaggguacuaguuua

SEQ ID NO: 1126681 - RNA, 22 nt, Human
gcuccagaugaaaggccagagg

SEQ ID NO: 1126682 - RNA, 22 nt, Human
ucugaagaacugaguaaacaug

SEQ ID NO: 1126683 - RNA, 22 nt, Human
gccuucagcggccgcucgcugc

SEQ ID NO: 1126684 - RNA, 22 nt, Human
cagggugggcacccagccucca

SEQ ID NO: 1126685 - RNA, 22 nt, Human
ggguccagcgacagcaggcuca

SEQ ID NO: 1126686 - RNA, 22 nt, Human
guuuacaaauauuuuaaauggu

SEQ ID NO: 1126687 - RNA, 22 nt, Human
aaaucuaggcucauccuggucc

SEQ ID NO: 1126688 - RNA, 22 nt, Human
uugggcuggcagagguggucuu

SEQ ID NO: 1126689 - RNA, 22 nt, Human
aacagaaaagguagguggcuuu

SEQ ID NO: 1126690 - RNA, 22 nt, Human
aaugcacacauuugguacugaa

SEQ ID NO: 1126691 - RNA, 23 nt, Human
agaagcagcuucuggaguaucgg

SEQ ID NO: 1126692 - RNA, 22 nt, Human
aguuauucauuuauucuguaca

SEQ ID NO: 1126693 - RNA, 22 nt, Human
acacagggauauuucagguggu

SEQ ID NO: 1126694 - RNA, 22 nt, Human
aaggugucacugggacaggaaa

SEQ ID NO: 1126695 - RNA, 22 nt, Human
ugcagaggagucagccugggca

SEQ ID NO: 1126696 - RNA, 22 nt, Human
agccccacacucucucugagaa

SEQ ID NO: 1126697 - RNA, 22 nt, Human
gucugaggaagaugcaggggga

SEQ ID NO: 1126698 - RNA, 22 nt, Human
guguccacggcugagaaugauu

SEQ ID NO: 1126699 - RNA, 21 nt, Human
aacauuucugggagaacucac

SEQ ID NO: 1126700 - RNA, 22 nt, Human
uggccugguuauauugcuauca

SEQ ID NO: 1126701 - RNA, 22 nt, Human
uggcaggguggcaacuuuuggu

SEQ ID NO: 1126702 - RNA, 22 nt, Human
agucccagugacuuggccagaa

SEQ ID NO: 1126703 - RNA, 22 nt, Human
gcuguucccauguggggcucag

SEQ ID NO: 1126704 - RNA, 22 nt, Human
cauuuucucaaugaacccucuu

SEQ ID NO: 1126705 - RNA, 22 nt, Human
gaggaaugucagcacaggccuc

SEQ ID NO: 1126706 - RNA, 21 nt, Human
agauuguauggaggugagagg

SEQ ID NO: 1126707 - RNA, 22 nt, Human
uuuccuuccaaaugcccgggag

SEQ ID NO: 1126708 - RNA, 22 nt, Human
aggcugcuucagcugcagggag

SEQ ID NO: 1126709 - RNA, 22 nt, Human
ugggcucugcaucagugcccau

SEQ ID NO: 1126710 - RNA, 22 nt, Human
ggccucugcccucacuccuguc

SEQ ID NO: 1126711 - RNA, 22 nt, Human
uugaaggacaucuuguuucuag

SEQ ID NO: 1126712 - RNA, 22 nt, Human
ucacuuaaaaauucuaguuaug

SEQ ID NO: 1126713 - RNA, 22 nt, Human
uggcaggagguuuucuccagga

SEQ ID NO: 1126714 - RNA, 22 nt, Human
cuggcagcucugagucccuucu

SEQ ID NO: 1126715 - RNA, 22 nt, Human
gagcugccaguguaugaauucu

SEQ ID NO: 1126716 - RNA, 20 nt, Human
agugucuggugcagggccuc

SEQ ID NO: 1126717 - RNA, 22 nt, Human
cauggcaggugcagauucugug

SEQ ID NO: 1126718 - RNA, 22 nt, Human
acagcagcgucaacuuaaaauu

SEQ ID NO: 1126719 - RNA, 22 nt, Human
uccagggaaggugugaggcugg

SEQ ID NO: 1126720 - RNA, 22 nt, Human
ccagcucuuuuggcugagugag

SEQ ID NO: 1126721 - RNA, 22 nt, Human
uuugcauuucucguaaggaaac

SEQ ID NO: 1126722 - RNA, 22 nt, Human
caggaacacaaugagucucaaa

SEQ ID NO: 1126723 - RNA, 22 nt, Human
uucagagaugacaccugguguu

SEQ ID NO: 1126724 - RNA, 22 nt, Human
gagcaacaguuuaugguuuuuc

SEQ ID NO: 1126725 - RNA, 22 nt, Human
agaguggggaagguguugagaa

SEQ ID NO: 1126726 - RNA, 22 nt, Human
caagcccaggauuccccaguua

SEQ ID NO: 1126727 - RNA, 23 nt, Human
gccucugcagccuaguuaguguc

SEQ ID NO: 1126728 - RNA, 22 nt, Human
cacccaggcuggagugcagggg

SEQ ID NO: 1126729 - RNA, 22 nt, Human
cccacucuggcucccuucuagu

SEQ ID NO: 1126730 - RNA, 22 nt, Human
gaaaggugccccauaggcagga

SEQ ID NO: 1126731 - RNA, 22 nt, Human
ccagugcacagccaggcaggug

SEQ ID NO: 1126732 - RNA, 22 nt, Human
cagagccauuauggagacuugc

SEQ ID NO: 1126733 - RNA, 22 nt, Human
ucccagcagcauagcucagaau

SEQ ID NO: 1126734 - RNA, 22 nt, Human
aaucuggcauuugagaguagga

SEQ ID NO: 1126735 - RNA, 23 nt, Human
acaaaugcccauacaucuaguuc

SEQ ID NO: 1126736 - RNA, 22 nt, Human
uauuacugagguuuuauggagu

SEQ ID NO: 1126737 - RNA, 22 nt, Human
ccagggugagaaaaggcuggau

SEQ ID NO: 1126738 - RNA, 22 nt, Human
caggcagauuugcugcccucca

SEQ ID NO: 1126739 - RNA, 22 nt, Human
aaaugucuuucaauagagaaau

SEQ ID NO: 1126740 - RNA, 22 nt, Human
ggagggagcauccccuugcuga

SEQ ID NO: 1126741 - RNA, 22 nt, Human
auucaguaggucuagaauaaga

SEQ ID NO: 1126742 - RNA, 22 nt, Human
cagagcagagugauuguucugg

SEQ ID NO: 1126743 - RNA, 18 nt, Human
ccagguggugacagagau

SEQ ID NO: 1126744 - RNA, 22 nt, Human
gcagacuguaucaaugucagua

SEQ ID NO: 1126745 - RNA, 22 nt, Human
uagggcagccuuauagcuccca

SEQ ID NO: 1126746 - RNA, 22 nt, Human
uggaagcaucacuucuugccug

SEQ ID NO: 1126747 - RNA, 22 nt, Human
ccacugucugcaggccucagca

SEQ ID NO: 1126748 - RNA, 22 nt, Human
uugggcugaacccugcagcuga

SEQ ID NO: 1126749 - RNA, 22 nt, Human
cguguacagucuaucuuuuuuc

SEQ ID NO: 1126750 - RNA, 22 nt, Human
ggccagaggccacagcuguguc

SEQ ID NO: 1126751 - RNA, 22 nt, Human
ggcagcugaccuagcaccaucc

SEQ ID NO: 1126752 - RNA, 22 nt, Human
ccagucacuggaaaaugggaau

SEQ ID NO: 1126753 - RNA, 22 nt, Human
uuuuauuggagugauaccaagc

SEQ ID NO: 1126754 - RNA, 22 nt, Human
ugggcaagucacuucugucuuu

SEQ ID NO: 1126755 - RNA, 22 nt, Human
auuucuuccucugucaguaacu

SEQ ID NO: 1126756 - RNA, 22 nt, Human
aauguuuuaaaagagauugaga

SEQ ID NO: 1126757 - RNA, 22 nt, Human
uggagcuggaauuucugggccu

SEQ ID NO: 1126758 - RNA, 22 nt, Human
acauuucuaucauccuguaaug

SEQ ID NO: 1126759 - RNA, 22 nt, Human
cccuggagcaucucugcugucu

SEQ ID NO: 1126760 - RNA, 22 nt, Human
gcaaagcugggugugaaugcac

SEQ ID NO: 1126761 - RNA, 22 nt, Human
ccagggugaggaggcucccacg

SEQ ID NO: 1126762 - RNA, 22 nt, Human
accugagaaugggggcaugugu

SEQ ID NO: 1126763 - RNA, 22 nt, Human
cucucuggcuuggcacggagau

SEQ ID NO: 1126764 - RNA, 22 nt, Human
aggcugaggcagguggaucacc

SEQ ID NO: 1126765 - RNA, 22 nt, Human
uguaugcagcaaaacaauuagu

SEQ ID NO: 1126766 - RNA, 22 nt, Human
aggcuucccaagcagcugcaaa

SEQ ID NO: 1126767 - RNA, 22 nt, Human
ccuggcugggguagaagugagg

SEQ ID NO: 1126768 - RNA, 22 nt, Human
augaagcugaccuugucuugcu

SEQ ID NO: 1126769 - RNA, 22 nt, Human
ccagcuccugggucuuagucag

SEQ ID NO: 1126770 - RNA, 22 nt, Human
uuauacauguguuuugagauga

SEQ ID NO: 1126771 - RNA, 17 nt, Human
aggcuggcucacaggga

SEQ ID NO: 1126772 - RNA, 22 nt, Human
augugucaauuuucaaaugcuu

SEQ ID NO: 1126773 - RNA, 22 nt, Human
gccaggugcuaucccugcgcug

SEQ ID NO: 1126774 - RNA, 22 nt, Human
cagaagaaaguggggagacaag

SEQ ID NO: 1126775 - RNA, 22 nt, Human
aggggcuguggaaaccaacucu

SEQ ID NO: 1126776 - RNA, 22 nt, Human
agaaacugaauuauuucugagg

SEQ ID NO: 1126777 - RNA, 22 nt, Human
ucucagagaugucaagagucua

SEQ ID NO: 1126778 - RNA, 22 nt, Human
cuuguagaauugaaauggucuc

SEQ ID NO: 1126779 - RNA, 22 nt, Human
cacugugucaguuugguuagac

SEQ ID NO: 1126780 - RNA, 22 nt, Human
uccuuggcuuucuggagcuucu

SEQ ID NO: 1126781 - RNA, 21 nt, Human
ucagaacaauuccaugccucc

SEQ ID NO: 1126782 - RNA, 22 nt, Human
cagggcugagaauuuagagaca

SEQ ID NO: 1126783 - RNA, 22 nt, Human
ugcagcugcuugauucaucuug

SEQ ID NO: 1126784 - RNA, 16 nt, Human
gggagggaguuggugg

SEQ ID NO: 1126785 - RNA, 21 nt, Human
uccucagggccccagagcacu

SEQ ID NO: 1126786 - RNA, 22 nt, Human
ccucugggugggaggccgggcg

SEQ ID NO: 1126787 - RNA, 22 nt, Human
ggaggccaggguggguggaucg

SEQ ID NO: 1126788 - RNA, 22 nt, Human
auucuucacuguuucagaauga

SEQ ID NO: 1126789 - RNA, 22 nt, Human
cauuucugggagacaugcuaga

SEQ ID NO: 1126790 - RNA, 22 nt, Human
cuaauacucauuucuguaacuc

SEQ ID NO: 1126791 - RNA, 22 nt, Human
cccagagccucauucuguuggg

SEQ ID NO: 1126792 - RNA, 22 nt, Human
gcauacagagaggauguggcau

SEQ ID NO: 1126793 - RNA, 22 nt, Human
ugacagaaauaguucuuaauuu

SEQ ID NO: 1126794 - RNA, 22 nt, Human
augagcugugggauuccagagg

SEQ ID NO: 1126795 - RNA, 23 nt, Human
gccucagagaaacagcugcacac

SEQ ID NO: 1126796 - RNA, 22 nt, Human
cagguggggcgcccucaggcag

SEQ ID NO: 1126797 - RNA, 22 nt, Human
gcucaggacccaggugugaccu

SEQ ID NO: 1126798 - RNA, 22 nt, Human
caguagccacuagacacaugua

SEQ ID NO: 1126799 - RNA, 19 nt, Human
aggaaagguggccuuagca

SEQ ID NO: 1126800 - RNA, 22 nt, Human
aagcagcuuaaauuagagccug

SEQ ID NO: 1126801 - RNA, 22 nt, Human
cugggcacuugcucacagcucu

SEQ ID NO: 1126802 - RNA, 22 nt, Human
auauacuuggagacuaucauug

SEQ ID NO: 1126803 - RNA, 22 nt, Human
acagagcaauaacagggagagg

SEQ ID NO: 1126804 - RNA, 20 nt, Human
ggucccugcccucugucauc

SEQ ID NO: 1126805 - RNA, 22 nt, Human
uccaggcugggcugaagggugc

SEQ ID NO: 1126806 - RNA, 23 nt, Human
cagugcagggcaacucagacucc

SEQ ID NO: 1126807 - RNA, 22 nt, Human
cucaggauguacuacagaaggc

SEQ ID NO: 1126808 - RNA, 22 nt, Human
ugugcuucagguugucgccacg

SEQ ID NO: 1126809 - RNA, 22 nt, Human
gccugggugucgaucacuagug

SEQ ID NO: 1126810 - RNA, 22 nt, Human
cucugaacucuugggcagcaug

SEQ ID NO: 1126811 - RNA, 22 nt, Human
agagcagauggagcuggaagag

SEQ ID NO: 1126812 - RNA, 22 nt, Human
acugcagccuagggaccacagu

SEQ ID NO: 1126813 - RNA, 22 nt, Human
uugaagcaggaaaauuucuauu

SEQ ID NO: 1126814 - RNA, 22 nt, Human
aggcugcaggucugggucaugu

SEQ ID NO: 1126815 - RNA, 22 nt, Human
uuaugggagcaauuggggaggu

SEQ ID NO: 1126816 - RNA, 22 nt, Human
cacacagaugguaagggaggga

SEQ ID NO: 1126817 - RNA, 22 nt, Human
uaacaucuuuagcagcucgaac

SEQ ID NO: 1126818 - RNA, 22 nt, Human
aaguuauaucaucucauugacg

SEQ ID NO: 1126819 - RNA, 22 nt, Human
caaggccugccucuggcagaaa

SEQ ID NO: 1126820 - RNA, 22 nt, Human
gaaaagggcaagagagagggca

SEQ ID NO: 1126821 - RNA, 22 nt, Human
agagugaucagauaucaggugu

SEQ ID NO: 1126822 - RNA, 22 nt, Human
uagaaaucuacuuagacuuucu

SEQ ID NO: 1126823 - RNA, 20 nt, Human
cguaaggcaagugcugcauc

SEQ ID NO: 1126824 - RNA, 22 nt, Human
gggcucugcgcucagcuccagc

SEQ ID NO: 1126825 - RNA, 22 nt, Human
uaaguccacaggaguuguguuc

SEQ ID NO: 1126826 - RNA, 22 nt, Human
cagcccugagagaaccaucuau

SEQ ID NO: 1126827 - RNA, 22 nt, Human
aucagugcuaaagcaaaugccc

SEQ ID NO: 1126828 - RNA, 22 nt, Human
cccagcauggagugaggacuca

SEQ ID NO: 1126829 - RNA, 22 nt, Human
uccagggaucuuuagagucuuu

SEQ ID NO: 1126830 - RNA, 22 nt, Human
uaacacacugaaggugagaugg

SEQ ID NO: 1126831 - RNA, 22 nt, Human
cauugaaaaacguugacugagu

SEQ ID NO: 1126832 - RNA, 22 nt, Human
ccugucugcagauaucucaggu

SEQ ID NO: 1126833 - RNA, 22 nt, Human
agucuucccugugccagagugu

SEQ ID NO: 1126834 - RNA, 22 nt, Human
ccagggcaggggcuggaguuca

SEQ ID NO: 1126835 - RNA, 22 nt, Human
ugucacauaggcaaaauguuuu

SEQ ID NO: 1126836 - RNA, 23 nt, Human
aguacauucgaaaaauucuguga

SEQ ID NO: 1126837 - RNA, 22 nt, Human
cacugcuuaguugguaaaugug

SEQ ID NO: 1126838 - RNA, 18 nt, Human
cugaaggauccaggugua

SEQ ID NO: 1126839 - RNA, 22 nt, Human
cagcaauauacacagucuaugg

SEQ ID NO: 1126840 - RNA, 23 nt, Human
auaauaacgucugucuugucucu

SEQ ID NO: 1126841 - RNA, 22 nt, Human
gcccugcugucuucagaguaua

SEQ ID NO: 1126842 - RNA, 22 nt, Human
agcagccagagucugaacauua

SEQ ID NO: 1126843 - RNA, 22 nt, Human
augggagugacagggccacugg

SEQ ID NO: 1126844 - RNA, 22 nt, Human
ccuccugguccagcaucucuuu

SEQ ID NO: 1126845 - RNA, 21 nt, Human
gcuccuggugcugcguggcgc

SEQ ID NO: 1126846 - RNA, 22 nt, Human
gcagcaaucuucacagugucau

SEQ ID NO: 1126847 - RNA, 22 nt, Human
cucuggagcauuucaccuacau

SEQ ID NO: 1126848 - RNA, 20 nt, Human
ugcagagcuggcuggcuccu

SEQ ID NO: 1126849 - RNA, 17 nt, Human
gauuuccugaaguucuu

SEQ ID NO: 1126850 - RNA, 22 nt, Human
gcaggcuccaggccggccccuu

SEQ ID NO: 1126851 - RNA, 23 nt, Human
ggucccaguggagaggccucacc

SEQ ID NO: 1126852 - RNA, 22 nt, Human
cucagcagagaccagggaggaa

SEQ ID NO: 1126853 - RNA, 22 nt, Human
uagaaauccccagucucauagu

SEQ ID NO: 1126854 - RNA, 19 nt, Human
agucucaguguacagaggc

SEQ ID NO: 1126855 - RNA, 22 nt, Human
cauugcucaggcccagcaggaa

SEQ ID NO: 1126856 - RNA, 22 nt, Human
ugcaggcuuuagccccauggcu

SEQ ID NO: 1126857 - RNA, 22 nt, Human
ugggaggaucgcuugagcccag

SEQ ID NO: 1126858 - RNA, 22 nt, Human
caccagcuacagacuacugugu

SEQ ID NO: 1126859 - RNA, 22 nt, Human
cauacauugcucauucaguauc

SEQ ID NO: 1126860 - RNA, 22 nt, Human
auacagaagaacuauagccacu

SEQ ID NO: 1126861 - RNA, 22 nt, Human
agucccagugagaugaaccagg

SEQ ID NO: 1126862 - RNA, 22 nt, Human
uggcugaacuaaugugcuguuu

SEQ ID NO: 1126863 - RNA, 22 nt, Human
cacagcuucugagugaggauuu

SEQ ID NO: 1126864 - RNA, 22 nt, Human
uguggccuccccacuucugggg

SEQ ID NO: 1126865 - RNA, 22 nt, Human
cugagccaguagucagggacaa

SEQ ID NO: 1126866 - RNA, 22 nt, Human
cauugcuguuaauugucucuag

SEQ ID NO: 1126867 - RNA, 22 nt, Human
ucagaagagcuggugcugccug

SEQ ID NO: 1126868 - RNA, 22 nt, Human
uccuggguccauggcagccgaa

SEQ ID NO: 1126869 - RNA, 22 nt, Human
ugccucagucuaaagucucuca

SEQ ID NO: 1126870 - RNA, 20 nt, Human
ucacauccucucccaacaug

SEQ ID NO: 1126871 - RNA, 22 nt, Human
agugucugccagcugccaggug

SEQ ID NO: 1126872 - RNA, 22 nt, Human
uuucaauguaacauuuccaggc

SEQ ID NO: 1126873 - RNA, 22 nt, Human
agugucugccaacugcaugguc

SEQ ID NO: 1126874 - RNA, 22 nt, Human
ggggauggaauguaguagugau

SEQ ID NO: 1126875 - RNA, 22 nt, Human
uucauuccuucccuaagcaacu

SEQ ID NO: 1126876 - RNA, 22 nt, Human
acagcagcuaaccccugggcca

SEQ ID NO: 1126877 - RNA, 22 nt, Human
caaaagcaguucuaucugaguu

SEQ ID NO: 1126878 - RNA, 22 nt, Human
cggggcuguagcacagcugagc

SEQ ID NO: 1126879 - RNA, 22 nt, Human
cauguacauucuguagauggag

SEQ ID NO: 1126880 - RNA, 20 nt, Human
aagcagaagcugcucucagc

SEQ ID NO: 1126881 - RNA, 22 nt, Human
ccagcagcccucuuccaagacu

SEQ ID NO: 1126882 - RNA, 20 nt, Human
ccagcauguacacaugugga

SEQ ID NO: 1126883 - RNA, 21 nt, Human
uugcaccaugauaaauucaga

SEQ ID NO: 1126884 - RNA, 22 nt, Human
gacagaagaggaacuuggacag

SEQ ID NO: 1126885 - RNA, 22 nt, Human
auugagaauccauuugagauga

SEQ ID NO: 1126886 - RNA, 22 nt, Human
gaaaucugucuuuguuugaaua

SEQ ID NO: 1126887 - RNA, 22 nt, Human
cagcugcccauccugggaaaug

SEQ ID NO: 1126888 - RNA, 22 nt, Human
aauuagagaucaguucuuugac

SEQ ID NO: 1126889 - RNA, 22 nt, Human
cagggcccaggccacuggguug

SEQ ID NO: 1126890 - RNA, 22 nt, Human
gcugucuguucgagcguguguu

SEQ ID NO: 1126891 - RNA, 22 nt, Human
ugugcuucugcagagacuauuu

SEQ ID NO: 1126892 - RNA, 22 nt, Human
caggaacauuuaaccacagggu

SEQ ID NO: 1126893 - RNA, 22 nt, Human
ggagcugcacgcucugaagccu

SEQ ID NO: 1126894 - RNA, 22 nt, Human
ccugggagguggagguugcagu

SEQ ID NO: 1126895 - RNA, 22 nt, Human
ugcagaagauggucugagcacc

SEQ ID NO: 1126896 - RNA, 22 nt, Human
acucaagauagggaaaguacaa

SEQ ID NO: 1126897 - RNA, 20 nt, Human
cagcuuggaugagaggcuga

SEQ ID NO: 1126898 - RNA, 17 nt, Human
agguggguggaucaccu

SEQ ID NO: 1126899 - RNA, 22 nt, Human
cuggcucuucagugcuugguuc

SEQ ID NO: 1126900 - RNA, 22 nt, Human
ugagguguguccccagggaggu

SEQ ID NO: 1126901 - RNA, 22 nt, Human
uccagagcagguggucagaagg

SEQ ID NO: 1126902 - RNA, 22 nt, Human
gccaggcagcaggaagccagug

SEQ ID NO: 1126903 - RNA, 22 nt, Human
aggucauuggggacuaucuccg

SEQ ID NO: 1126904 - RNA, 21 nt, Human
cccuugccugcacuccucggc

SEQ ID NO: 1126905 - RNA, 22 nt, Human
ggugaggcagguggcugcugag

SEQ ID NO: 1126906 - RNA, 22 nt, Human
uggacagguugaguaggaggag

SEQ ID NO: 1126907 - RNA, 22 nt, Human
uggcccugacacgugguacugg

SEQ ID NO: 1126908 - RNA, 22 nt, Human
agucucagcaagcauggcuagu

SEQ ID NO: 1126909 - RNA, 22 nt, Human
cuggagggugagccucaucucu

SEQ ID NO: 1126910 - RNA, 22 nt, Human
ccauaagguugaaaacuguaca

SEQ ID NO: 1126911 - RNA, 22 nt, Human
uugcauugcuuggucuucaaga

SEQ ID NO: 1126912 - RNA, 22 nt, Human
acacagggucuagaguuaggcc

SEQ ID NO: 1126913 - RNA, 22 nt, Human
accaaggagccacauacaaccu

SEQ ID NO: 1126914 - RNA, 22 nt, Human
agggaggaucugcuccuugucu

SEQ ID NO: 1126915 - RNA, 22 nt, Human
ccugggcaaaugccagagacaa

SEQ ID NO: 1126916 - RNA, 21 nt, Human
aggcccagcuuuccucuugcu

SEQ ID NO: 1126917 - RNA, 22 nt, Human
gcucucugggugugucuagaua

SEQ ID NO: 1126918 - RNA, 22 nt, Human
aauaauuuccagccaacuggaa

SEQ ID NO: 1126919 - RNA, 22 nt, Human
uccuuuuuauaguuagagaaac

SEQ ID NO: 1126920 - RNA, 22 nt, Human
cccugccuucuuggccuuuaaa

SEQ ID NO: 1126921 - RNA, 22 nt, Human
aggcacuguucccaguuauccu

SEQ ID NO: 1126922 - RNA, 22 nt, Human
gccaggcagccacccucugcga

SEQ ID NO: 1126923 - RNA, 22 nt, Human
aagugguagacaaagauaauug

SEQ ID NO: 1126924 - RNA, 22 nt, Human
aagcgccaugguuccugcgcag

SEQ ID NO: 1126925 - RNA, 22 nt, Human
agcccuggcccggcugugcuuu

SEQ ID NO: 1126926 - RNA, 22 nt, Human
agaaggaguguacaggucaugc

SEQ ID NO: 1126927 - RNA, 22 nt, Human
caacagaagguguacuacugaa

SEQ ID NO: 1126928 - RNA, 22 nt, Human
uggcaguguauagguggcuccu

SEQ ID NO: 1126929 - RNA, 22 nt, Human
auugucgcuuauuuaggugcuu

SEQ ID NO: 1126930 - RNA, 22 nt, Human
gcucccagcuggagccucaaca

SEQ ID NO: 1126931 - RNA, 22 nt, Human
caggccuccacuccacgcagac

SEQ ID NO: 1126932 - RNA, 22 nt, Human
accucugcaaugcaaugucaug

SEQ ID NO: 1126933 - RNA, 19 nt, Human
ucccgcccacugagcgugc

SEQ ID NO: 1126934 - RNA, 22 nt, Human
uuccagaauuuuguucugcuug

SEQ ID NO: 1126935 - RNA, 22 nt, Human
caguggccugagccaggcuucc

SEQ ID NO: 1126936 - RNA, 22 nt, Human
gagccugaaauacaggucacug

SEQ ID NO: 1126937 - RNA, 22 nt, Human
uuaauacagucuccagaaguaa

SEQ ID NO: 1126938 - RNA, 22 nt, Human
aagccuugauucacucugugga

SEQ ID NO: 1126939 - RNA, 22 nt, Human
gcucccaggaugaggagccagg

SEQ ID NO: 1126940 - RNA, 22 nt, Human
acaagagacaagagguucuucu

SEQ ID NO: 1126941 - RNA, 22 nt, Human
cagucacauugcccugcauuua

SEQ ID NO: 1126942 - RNA, 22 nt, Human
acagccaggaauucuggagaag

SEQ ID NO: 1126943 - RNA, 22 nt, Human
cugagccagcuggcaugugcua

SEQ ID NO: 1126944 - RNA, 22 nt, Human
gagggcugccacguugggcgag

SEQ ID NO: 1126945 - RNA, 22 nt, Human
ggccucaguuucuccauggguu

SEQ ID NO: 1126946 - RNA, 22 nt, Human
uccucagacacccugcuggcuu

SEQ ID NO: 1126947 - RNA, 22 nt, Human
gcagugggaagguuggcacaug

SEQ ID NO: 1126948 - RNA, 22 nt, Human
gcauuguccugcuucugagugu

SEQ ID NO: 1126949 - RNA, 22 nt, Human
uugacaauugggagauauaaag

SEQ ID NO: 1126950 - RNA, 22 nt, Human
ugcagcugcuggcccaggugcu

SEQ ID NO: 1126951 - RNA, 22 nt, Human
ccugccuggcuuccagaagaga

SEQ ID NO: 1126952 - RNA, 22 nt, Human
accaucaguacuggaugcugac

SEQ ID NO: 1126953 - RNA, 22 nt, Human
ucacauuuguuccucugcacuu

SEQ ID NO: 1126954 - RNA, 22 nt, Human
ggcuucuuccugugaacauguu

SEQ ID NO: 1126955 - RNA, 22 nt, Human
ggccuugggaggagggucagaa

SEQ ID NO: 1126956 - RNA, 22 nt, Human
ucaggagauggucuuuauaggc

SEQ ID NO: 1126957 - RNA, 22 nt, Human
agcuccuccugugccaggccag

SEQ ID NO: 1126958 - RNA, 23 nt, Human
cuggggcuuucaaaucugggcag

SEQ ID NO: 1126959 - RNA, 22 nt, Human
gcagggcaugggcccugucugc

SEQ ID NO: 1126960 - RNA, 22 nt, Human
gcucuggcuacuguggcuaccg

SEQ ID NO: 1126961 - RNA, 22 nt, Human
aagaaauguagagccuaguaaa

SEQ ID NO: 1126962 - RNA, 22 nt, Human
aaguccauuaggccccugccug

SEQ ID NO: 1126963 - RNA, 22 nt, Human
aggcucuguuauucuagagggc

SEQ ID NO: 1126964 - RNA, 22 nt, Human
agcagccagaaagggcagucga

SEQ ID NO: 1126965 - RNA, 22 nt, Human
cagagcagggugcaccuugggc

SEQ ID NO: 1126966 - RNA, 22 nt, Human
uaagaaauuuaguuauagaaug

SEQ ID NO: 1126967 - RNA, 22 nt, Human
ggucccagaauugguuagcaca

SEQ ID NO: 1126968 - RNA, 22 nt, Human
cuugaaagauuuggccucugug

SEQ ID NO: 1126969 - RNA, 22 nt, Human
auguccuuccauuuugaucugu

SEQ ID NO: 1126970 - RNA, 22 nt, Human
acaugauuggacuccuuccccu

SEQ ID NO: 1126971 - RNA, 22 nt, Human
ucucuucugaaaccugucuuua

SEQ ID NO: 1126972 - RNA, 22 nt, Human
ucuccugugcacccucccugug

SEQ ID NO: 1126973 - RNA, 22 nt, Human
uuccaaaggaauggggagcuau

SEQ ID NO: 1126974 - RNA, 22 nt, Human
ugcaccauacccauuccccucu

SEQ ID NO: 1126975 - RNA, 22 nt, Human
ccucagggucugaggagaccgu

SEQ ID NO: 1126976 - RNA, 22 nt, Human
uguuaucugagcaacgucgacg

SEQ ID NO: 1126977 - RNA, 22 nt, Human
ccaguggguaggccauggugag

SEQ ID NO: 1126978 - RNA, 21 nt, Human
gagacagcccagugccagggc

SEQ ID NO: 1126979 - RNA, 22 nt, Human
caggggcucuaaugcaugauca

SEQ ID NO: 1126980 - RNA, 22 nt, Human
cagcuggcaaguggagcagggu

SEQ ID NO: 1126981 - RNA, 22 nt, Human
uccuauugguagacauuucugu

SEQ ID NO: 1126982 - RNA, 22 nt, Human
uugcauugauguuccuucuugc

SEQ ID NO: 1126983 - RNA, 22 nt, Human
agaugaagacucaggagcaggu

SEQ ID NO: 1126984 - RNA, 22 nt, Human
ggucaggggcugcucuacagag

SEQ ID NO: 1126985 - RNA, 22 nt, Human
cacuguaucuuuuccaaagucu

SEQ ID NO: 1126986 - RNA, 22 nt, Human
ucucucagcuuugagaccugcu

SEQ ID NO: 1126987 - RNA, 22 nt, Human
cugccucuauucacugaggcag

SEQ ID NO: 1126988 - RNA, 22 nt, Human
augugugccccuuuuacucuuu

SEQ ID NO: 1126989 - RNA, 22 nt, Human
cagccuguagaauacaguaaau

SEQ ID NO: 1126990 - RNA, 22 nt, Human
uugaaaggugcugugugcugau

SEQ ID NO: 1126991 - RNA, 22 nt, Human
uuugacagacauuuacuacauu

SEQ ID NO: 1126992 - RNA, 22 nt, Human
gcucagagaugucugcugccuu

SEQ ID NO: 1126993 - RNA, 22 nt, Human
aaacaaguguaaacuagucugu

SEQ ID NO: 1126994 - RNA, 22 nt, Human
uggcagucggacuucuaucuca

SEQ ID NO: 1126995 - RNA, 18 nt, Human
agccuggaggguugaagu

SEQ ID NO: 1126996 - RNA, 22 nt, Human
uuuagaguugaguauucauugg

SEQ ID NO: 1126997 - RNA, 22 nt, Human
ugcugccuugaccuccugggcu

SEQ ID NO: 1126998 - RNA, 22 nt, Human
cauggcagaaaccugagcugcu

SEQ ID NO: 1126999 - RNA, 22 nt, Human
uggaggccagagguacugggac

SEQ ID NO: 1127000 - RNA, 22 nt, Human
agguggccggugccagccgggc

SEQ ID NO: 1127001 - RNA, 22 nt, Human
gcuucauuacugacagucugug

SEQ ID NO: 1127002 - RNA, 22 nt, Human
uaaaugcaagugcuccugggag

SEQ ID NO: 1127003 - RNA, 22 nt, Human
gcucugcucuaacauuccugac

SEQ ID NO: 1127004 - RNA, 22 nt, Human
ucacugggagaugugggaaggg

SEQ ID NO: 1127005 - RNA, 22 nt, Human
ggcugugccucaaggcuacuca

SEQ ID NO: 1127006 - RNA, 20 nt, Human
gggugagauguaggagaggg

SEQ ID NO: 1127007 - RNA, 22 nt, Human
gcagugggagcuuaggcagugc

SEQ ID NO: 1127008 - RNA, 22 nt, Human
aauguacaauaagacaaagagg

SEQ ID NO: 1127009 - RNA, 22 nt, Human
aaaucaaaagacauguguuuua

SEQ ID NO: 1127010 - RNA, 22 nt, Human
ucuuggagaauggcagagaagc

SEQ ID NO: 1127011 - RNA, 22 nt, Human
agcagcuguacuuucaucuguu

SEQ ID NO: 1127012 - RNA, 22 nt, Human
guguauguucuacuuaauauua

SEQ ID NO: 1127013 - RNA, 22 nt, Human
uucugucacuuaggaggucaua

SEQ ID NO: 1127014 - RNA, 22 nt, Human
cugccugugugugccugcagaa

SEQ ID NO: 1127015 - RNA, 22 nt, Human
caguguggagggagagagccug

SEQ ID NO: 1127016 - RNA, 22 nt, Human
agccagacauggcuccugcucc

SEQ ID NO: 1127017 - RNA, 22 nt, Human
ggaaagaggauaguggguaggu

SEQ ID NO: 1127018 - RNA, 22 nt, Human
uccugccugagcguggaggagg

SEQ ID NO: 1127019 - RNA, 22 nt, Human
ggagaccagaaggaagcuucga

SEQ ID NO: 1127020 - RNA, 23 nt, Human
uggcucugagagguucagaugcu

SEQ ID NO: 1127021 - RNA, 22 nt, Human
cugcuuugaaaauaaacuuguc

SEQ ID NO: 1127022 - RNA, 22 nt, Human
ccugggaggcuguuuccagccu

SEQ ID NO: 1127023 - RNA, 22 nt, Human
agcuugccucuuaaucaccuca

SEQ ID NO: 1127024 - RNA, 22 nt, Human
agcugccaccucugccuuuggg

SEQ ID NO: 1127025 - RNA, 23 nt, Human
acugagccagggccugggucagc

SEQ ID NO: 1127026 - RNA, 22 nt, Human
auuauguauuugguauaguuug

SEQ ID NO: 1127027 - RNA, 22 nt, Human
acaaagguggaccauguggcuu

SEQ ID NO: 1127028 - RNA, 22 nt, Human
cccuggaggagcuuagagcuug

SEQ ID NO: 1127029 - RNA, 22 nt, Human
aagagagaacucccuucgccag

SEQ ID NO: 1127030 - RNA, 22 nt, Human
aaaguuuggauuagcaguuaga

SEQ ID NO: 1127031 - RNA, 22 nt, Human
ugucucagaggcaggaagagcc

SEQ ID NO: 1127032 - RNA, 23 nt, Human
gggaccagcuagggcugugaccu

SEQ ID NO: 1127033 - RNA, 22 nt, Human
gcaguggcaccgcuggcucugg

SEQ ID NO: 1127034 - RNA, 18 nt, Human
cagggccccagaauuauc

SEQ ID NO: 1127035 - RNA, 22 nt, Human
agcuuuauucaugauuucaggg

SEQ ID NO: 1127036 - RNA, 21 nt, Human
ucugucucuccacugcccugc

SEQ ID NO: 1127037 - RNA, 22 nt, Human
cuugggagacacaagaagacau

SEQ ID NO: 1127038 - RNA, 22 nt, Human
guccucaggaaagcagauaaca

SEQ ID NO: 1127039 - RNA, 22 nt, Human
ugggccugggcuccuguccucu

SEQ ID NO: 1127040 - RNA, 22 nt, Human
aagagguaaccauagcaaccac

SEQ ID NO: 1127041 - RNA, 22 nt, Human
ucacacguccuugcuacuccuc

SEQ ID NO: 1127042 - RNA, 22 nt, Human
guugaguggguuaggaugcuga

SEQ ID NO: 1127043 - RNA, 22 nt, Human
ugcaauaaggaguaauaguaaa

SEQ ID NO: 1127044 - RNA, 22 nt, Human
cagagcugugauaaauagauau

SEQ ID NO: 1127045 - RNA, 22 nt, Human
agcagggguaacagaaggaaag

SEQ ID NO: 1127046 - RNA, 22 nt, Human
gcuccuggucuggagcuucaag

SEQ ID NO: 1127047 - RNA, 22 nt, Human
ucuucuuccucauuuauacaua

SEQ ID NO: 1127048 - RNA, 22 nt, Human
agccacagcuccuugguggaga

SEQ ID NO: 1127049 - RNA, 17 nt, Human
ugagaaguaggcaucau

SEQ ID NO: 1127050 - RNA, 22 nt, Human
uccagggagauacuggcugcca

SEQ ID NO: 1127051 - RNA, 22 nt, Human
uggcucuguucgccaucaggag

SEQ ID NO: 1127052 - RNA, 22 nt, Human
uucagaaagugaaucuuguuau

SEQ ID NO: 1127053 - RNA, 22 nt, Human
aaaauguaaagcuugaguguag

SEQ ID NO: 1127054 - RNA, 18 nt, Human
ccucaggggaccuggcag

SEQ ID NO: 1127055 - RNA, 22 nt, Human
cugugucucuccuuacaagacu

SEQ ID NO: 1127056 - RNA, 22 nt, Human
uacauggguagguuaagucaua

SEQ ID NO: 1127057 - RNA, 22 nt, Human
gggucuggcaugcugagaugga

SEQ ID NO: 1127058 - RNA, 22 nt, Human
gagccaggguuugaaacuagac

SEQ ID NO: 1127059 - RNA, 22 nt, Human
auccaguuuaugucauauucuu

SEQ ID NO: 1127060 - RNA, 23 nt, Human
gccucuggagccccagugcucag

SEQ ID NO: 1127061 - RNA, 19 nt, Human
cugaggcccauguaccaug

SEQ ID NO: 1127062 - RNA, 22 nt, Human
ugcuggggucauggggcgcccg

SEQ ID NO: 1127063 - RNA, 22 nt, Human
uguguguguuccuccucagcua

SEQ ID NO: 1127064 - RNA, 22 nt, Human
cuuauguaaaacggaaagggaa

SEQ ID NO: 1127065 - RNA, 20 nt, Human
aucagcaacugccacucagu

SEQ ID NO: 1127066 - RNA, 22 nt, Human
cugccugcuucugagccagagg

SEQ ID NO: 1127067 - RNA, 22 nt, Human
gucugucucucuccagagugca

SEQ ID NO: 1127068 - RNA, 22 nt, Human
acaguggagaaggcaugaggcu

SEQ ID NO: 1127069 - RNA, 18 nt, Human
ccuggaccugucuccuuu

SEQ ID NO: 1127070 - RNA, 22 nt, Human
ugacaauacagagagagcaaaa

SEQ ID NO: 1127071 - RNA, 23 nt, Human
aucagucuugguagcugugccca

SEQ ID NO: 1127072 - RNA, 22 nt, Human
gaaaucugcggugaggccugag

SEQ ID NO: 1127073 - RNA, 22 nt, Human
ggggauggauuccgggucccug

SEQ ID NO: 1127074 - RNA, 22 nt, Human
gaagaacaccugcugcccagug

SEQ ID NO: 1127075 - RNA, 23 nt, Human
gagguacagcaccagugaauagg

SEQ ID NO: 1127076 - RNA, 22 nt, Human
aggcaugugacccuggacucag

SEQ ID NO: 1127077 - RNA, 22 nt, Human
uggcagagagagugcagucgac

SEQ ID NO: 1127078 - RNA, 23 nt, Human
ccagccucugggucuucauccag

SEQ ID NO: 1127079 - RNA, 22 nt, Human
auaauuuacaacugcuuuuaau

SEQ ID NO: 1127080 - RNA, 22 nt, Human
uugauacagcagccugugaucc

SEQ ID NO: 1127081 - RNA, 22 nt, Human
ugccugucuucaggagugucac

SEQ ID NO: 1127082 - RNA, 22 nt, Human
agucucugugagcucccaaugg

SEQ ID NO: 1127083 - RNA, 22 nt, Human
aggaaucccgcaccagcugcug

SEQ ID NO: 1127084 - RNA, 22 nt, Human
agcuccugaaaagcgcuugcuu

SEQ ID NO: 1127085 - RNA, 22 nt, Human
uuauguacucugcaauguuuga

SEQ ID NO: 1127086 - RNA, 22 nt, Human
cuccucugucuaccacgagggu

SEQ ID NO: 1127087 - RNA, 22 nt, Human
cugagauggaguuucgcucuuc

SEQ ID NO: 1127088 - RNA, 22 nt, Human
cagccagggagggcaaaugaga

SEQ ID NO: 1127089 - RNA, 22 nt, Human
ucagcaggcgguuccuuguggg

SEQ ID NO: 1127090 - RNA, 22 nt, Human
uguuuauaccuugguauaacca

SEQ ID NO: 1127091 - RNA, 22 nt, Human
caucugcuguuccuuggacuca

SEQ ID NO: 1127092 - RNA, 22 nt, Human
aacucagcauccugcacagaga

SEQ ID NO: 1127093 - RNA, 22 nt, Human
ugggcuggcccaccacaccucg

SEQ ID NO: 1127094 - RNA, 22 nt, Human
gaagaagcaggaguguguagca

SEQ ID NO: 1127095 - RNA, 22 nt, Human
ucuggcuccaccuccuuuacua

SEQ ID NO: 1127096 - RNA, 22 nt, Human
cugagcauggccgguccauggu

SEQ ID NO: 1127097 - RNA, 22 nt, Human
acagcuguauccccagagcuca

SEQ ID NO: 1127098 - RNA, 16 nt, Human
agaggccuugaggaag

SEQ ID NO: 1127099 - RNA, 22 nt, Human
auaauccauuaauuaaugacca

SEQ ID NO: 1127100 - RNA, 22 nt, Human
agccacagucugaugccugaga

SEQ ID NO: 1127101 - RNA, 22 nt, Human
cagcucucuaaggucuugcuuu

SEQ ID NO: 1127102 - RNA, 22 nt, Human
auuucauugaaguuaauucuuc

SEQ ID NO: 1127103 - RNA, 19 nt, Human
ugucacugucauggcccag

SEQ ID NO: 1127104 - RNA, 22 nt, Human
cuggaaugccucccugucagag

SEQ ID NO: 1127105 - RNA, 22 nt, Human
ugugugugaaccauugagggcu

SEQ ID NO: 1127106 - RNA, 22 nt, Human
ggcacugaaccaggacacaagc

SEQ ID NO: 1127107 - RNA, 22 nt, Human
ugucacaaacauacauuauaga

SEQ ID NO: 1127108 - RNA, 22 nt, Human
gccugcuggauguggccaggcc

SEQ ID NO: 1127109 - RNA, 23 nt, Human
gccuggagaaaagcugcaguuca

SEQ ID NO: 1127110 - RNA, 22 nt, Human
cagccagaaccuaggaugagcu

SEQ ID NO: 1127111 - RNA, 19 nt, Human
ggcugucuggcguguggau

SEQ ID NO: 1127112 - RNA, 22 nt, Human
uuauaaagguuugugcauauuu

SEQ ID NO: 1127113 - RNA, 22 nt, Human
aauguguagauguugcauuccu

SEQ ID NO: 1127114 - RNA, 22 nt, Human
acauuucuccuugcaggaguca

SEQ ID NO: 1127115 - RNA, 22 nt, Human
aggagagagcugagcuuugcug

SEQ ID NO: 1127116 - RNA, 22 nt, Human
uuuggaaaguugucacuuuaga

SEQ ID NO: 1127117 - RNA, 22 nt, Human
uucauguauuuaucauguaaau

SEQ ID NO: 1127118 - RNA, 22 nt, Human
accagcucagaagccagaaaga

SEQ ID NO: 1127119 - RNA, 22 nt, Human
agagccuggggauuggcaaggg

SEQ ID NO: 1127120 - RNA, 22 nt, Human
caggaaauaucuccuggcagag

SEQ ID NO: 1127121 - RNA, 22 nt, Human
acauuucucaucuaguagagua

SEQ ID NO: 1127122 - RNA, 22 nt, Human
aagugacaccucuucccuuucc

SEQ ID NO: 1127123 - RNA, 22 nt, Human
aucaguuugagugcugugucaa

SEQ ID NO: 1127124 - RNA, 22 nt, Human
ugggggacugcacuggcgucag

SEQ ID NO: 1127125 - RNA, 22 nt, Human
uccagugguaguaaagaggucu

SEQ ID NO: 1127126 - RNA, 22 nt, Human
ugguuuauuucucugaaagguu

SEQ ID NO: 1127127 - RNA, 22 nt, Human
ggccugucucacccccgggugc

SEQ ID NO: 1127128 - RNA, 22 nt, Human
cauugcacuuuggguccaggac

SEQ ID NO: 1127129 - RNA, 22 nt, Human
acagaguauuggaaaggcagug

SEQ ID NO: 1127130 - RNA, 22 nt, Human
caaaguuaucaacugcaacauu

SEQ ID NO: 1127131 - RNA, 22 nt, Human
ccaggggaaacagggagcacuc

SEQ ID NO: 1127132 - RNA, 17 nt, Human
aagacagaagccaugag

SEQ ID NO: 1127133 - RNA, 21 nt, Human
agcagcagaucuggugagggc

SEQ ID NO: 1127134 - RNA, 21 nt, Human
gccaccccuggcacaggugcu

SEQ ID NO: 1127135 - RNA, 22 nt, Human
ugugcgcguguauauauguaua

SEQ ID NO: 1127136 - RNA, 22 nt, Human
uucuuaaagaggcaaaacacag

SEQ ID NO: 1127137 - RNA, 22 nt, Human
caguggguccuaaguacaguuc

SEQ ID NO: 1127138 - RNA, 22 nt, Human
gccuggagaggaagccggugga

SEQ ID NO: 1127139 - RNA, 22 nt, Human
cagugggcugugauggauucac

SEQ ID NO: 1127140 - RNA, 22 nt, Human
gugccagcucuccccacaucug

SEQ ID NO: 1127141 - RNA, 18 nt, Human
acugugguuuauguguag

SEQ ID NO: 1127142 - RNA, 21 nt, Human
ugguuugcggccaaaguuaaa

SEQ ID NO: 1127143 - RNA, 22 nt, Human
cucuggaguucuucaagcuacu

SEQ ID NO: 1127144 - RNA, 22 nt, Human
ugcugugagguugagaaggaag

SEQ ID NO: 1127145 - RNA, 22 nt, Human
gggcagagacucagaaacagaa

SEQ ID NO: 1127146 - RNA, 22 nt, Human
ggcacugagcgggcucugagcg

SEQ ID NO: 1127147 - RNA, 22 nt, Human
aagccaggcugcacuugcuggg

SEQ ID NO: 1127148 - RNA, 18 nt, Human
gagcugccauauuuaguu

SEQ ID NO: 1127149 - RNA, 22 nt, Human
ucagagccccuccgcuguccca

SEQ ID NO: 1127150 - RNA, 22 nt, Human
ucccacugcuuugcucugcuca

SEQ ID NO: 1127151 - RNA, 22 nt, Human
gcugccacucugagcuugcuuc

SEQ ID NO: 1127152 - RNA, 22 nt, Human
uggagcugagaaguggagcucu

SEQ ID NO: 1127153 - RNA, 22 nt, Human
cagcagcugcgugcccaggccg

SEQ ID NO: 1127154 - RNA, 20 nt, Human
gugugaagcccucaggagga

SEQ ID NO: 1127155 - RNA, 22 nt, Human
cugcugcucagugucaucaugu

SEQ ID NO: 1127156 - RNA, 22 nt, Human
agaucucaccucuguguauuau

SEQ ID NO: 1127157 - RNA, 21 nt, Human
uggaaagauucaaagaccagg

SEQ ID NO: 1127158 - RNA, 22 nt, Human
agcugccagcaucccggaaggg

SEQ ID NO: 1127159 - RNA, 22 nt, Human
gccagcagguggagagaucaag

SEQ ID NO: 1127160 - RNA, 21 nt, Human
ccagacuggccuaugugguag

SEQ ID NO: 1127161 - RNA, 22 nt, Human
ccaggagucuggaugagguguc

SEQ ID NO: 1127162 - RNA, 22 nt, Human
gaggccugcuuuggcacucugg

SEQ ID NO: 1127163 - RNA, 23 nt, Human
ccugucugugcuggguggacaca

SEQ ID NO: 1127164 - RNA, 22 nt, Human
uggcagggccugcucaucaucc

SEQ ID NO: 1127165 - RNA, 22 nt, Human
ucagaggauugccucagcgagc

SEQ ID NO: 1127166 - RNA, 22 nt, Human
gcugucacaucaaggcacuaaa

SEQ ID NO: 1127167 - RNA, 22 nt, Human
gcucuccaaacccuguggcuuu

SEQ ID NO: 1127168 - RNA, 22 nt, Human
auugacaagacaauggcucuua

SEQ ID NO: 1127169 - RNA, 21 nt, Human
accagcaggagaucagaagga

SEQ ID NO: 1127170 - RNA, 22 nt, Human
aauguguagcauuuaaugcagu

SEQ ID NO: 1127171 - RNA, 22 nt, Human
ccagaggugccacagaaagagc

SEQ ID NO: 1127172 - RNA, 22 nt, Human
cagggcuguaaauuagugcuga

SEQ ID NO: 1127173 - RNA, 22 nt, Human
uccucacauggugagccacaca

SEQ ID NO: 1127174 - RNA, 22 nt, Human
auaaagucaaggcauuuuauga

SEQ ID NO: 1127175 - RNA, 22 nt, Human
gccuggagcucggcugagggcg

SEQ ID NO: 1127176 - RNA, 17 nt, Human
ugaggccugcaucagug

SEQ ID NO: 1127177 - RNA, 22 nt, Human
gccagagccggcuucacaggau

SEQ ID NO: 1127178 - RNA, 22 nt, Human
ggcucagguuaccagucccucc

SEQ ID NO: 1127179 - RNA, 20 nt, Human
ggccugagcauggcuggcag

SEQ ID NO: 1127180 - RNA, 22 nt, Human
augaacacauguacacauuucu

SEQ ID NO: 1127181 - RNA, 22 nt, Human
uugaggaguguuuagggugagg

SEQ ID NO: 1127182 - RNA, 22 nt, Human
aggucaaggccaaaagaguggu

SEQ ID NO: 1127183 - RNA, 22 nt, Human
gcagcugcuggaaguuccugcc

SEQ ID NO: 1127184 - RNA, 22 nt, Human
caugccaguuuugagaugcacc

SEQ ID NO: 1127185 - RNA, 22 nt, Human
acauuucucccugcaugccugc

SEQ ID NO: 1127186 - RNA, 22 nt, Human
ugggccugugaugcugggcuau

SEQ ID NO: 1127187 - RNA, 22 nt, Human
agcaguggcugaagauguuccu

SEQ ID NO: 1127188 - RNA, 22 nt, Human
gcuccuggcuccaggcagccaa

SEQ ID NO: 1127189 - RNA, 22 nt, Human
cgggcagauugggaagguucau

SEQ ID NO: 1127190 - RNA, 22 nt, Human
ugagaaagugggugccuagcaa

SEQ ID NO: 1127191 - RNA, 22 nt, Human
cagcagagacgguaagcagaac

SEQ ID NO: 1127192 - RNA, 22 nt, Human
cugcagcugucucuacugggca

SEQ ID NO: 1127193 - RNA, 22 nt, Human
aaacucuggagauguuuaugca

SEQ ID NO: 1127194 - RNA, 22 nt, Human
uggcuuccuccagagcaggagg

SEQ ID NO: 1127195 - RNA, 22 nt, Human
agaaggccuaacuugggggcaa

SEQ ID NO: 1127196 - RNA, 22 nt, Human
agccaaggcagcuagagcucug

SEQ ID NO: 1127197 - RNA, 22 nt, Human
guauauauuggauaaaccagag

SEQ ID NO: 1127198 - RNA, 22 nt, Human
gacagcauggugucuguucagg

SEQ ID NO: 1127199 - RNA, 22 nt, Human
gugucccaggagaggagacaau

SEQ ID NO: 1127200 - RNA, 22 nt, Human
uccugccuagcaggugaccuau

SEQ ID NO: 1127201 - RNA, 22 nt, Human
ugcagccaucuuucuuggagga

SEQ ID NO: 1127202 - RNA, 22 nt, Human
aggccugggcaagaaggggcgu

SEQ ID NO: 1127203 - RNA, 22 nt, Human
cucaggauugugccuagggaga

SEQ ID NO: 1127204 - RNA, 22 nt, Human
ugcccacauggugccauggcca

SEQ ID NO: 1127205 - RNA, 20 nt, Human
guaaaauauggucuuugggu

SEQ ID NO: 1127206 - RNA, 21 nt, Human
uggcucugaaagagugcugca

SEQ ID NO: 1127207 - RNA, 22 nt, Human
ccucauggccuugagcugaggg

SEQ ID NO: 1127208 - RNA, 22 nt, Human
cugccucuguugggcauggucu

SEQ ID NO: 1127209 - RNA, 22 nt, Human
uggcagcugauuagauggugcc

SEQ ID NO: 1127210 - RNA, 22 nt, Human
cagggcagagccaggauuucaa

SEQ ID NO: 1127211 - RNA, 22 nt, Human
guuauguaugagggaaugauua

SEQ ID NO: 1127212 - RNA, 22 nt, Human
uggagcagggcaucacugugcg

SEQ ID NO: 1127213 - RNA, 22 nt, Human
aaggcugagggcuguaccuggc

SEQ ID NO: 1127214 - RNA, 22 nt, Human
aucauguuccagaaacagugau

SEQ ID NO: 1127215 - RNA, 22 nt, Human
auaguggugagcugcauuuaug

SEQ ID NO: 1127216 - RNA, 22 nt, Human
ucuuccaguguagacaucugcc

SEQ ID NO: 1127217 - RNA, 22 nt, Human
auguuacacauaggcauaaaug

SEQ ID NO: 1127218 - RNA, 22 nt, Human
gagagugucgggggccccagga

SEQ ID NO: 1127219 - RNA, 22 nt, Human
uuauuuucagcuaggaaagcca

SEQ ID NO: 1127220 - RNA, 22 nt, Human
aggaguggaauuacuggguucu

SEQ ID NO: 1127221 - RNA, 19 nt, Human
gaaggagagcugaguuagg

SEQ ID NO: 1127222 - RNA, 22 nt, Human
gcugugugaaaacugggccugg

SEQ ID NO: 1127223 - RNA, 22 nt, Human
uccuuggcagcagggagcauga

SEQ ID NO: 1127224 - RNA, 22 nt, Human
agaaauguauagugaauuuuuc

SEQ ID NO: 1127225 - RNA, 22 nt, Human
auaauuuacuaagcucuaccuu

SEQ ID NO: 1127226 - RNA, 22 nt, Human
agagcagugcugaagaguaggg

SEQ ID NO: 1127227 - RNA, 22 nt, Human
cucuggaggccuaaggaagugg

SEQ ID NO: 1127228 - RNA, 22 nt, Human
ucaucuucuauuaauagggaga

SEQ ID NO: 1127229 - RNA, 22 nt, Human
ggcagcaguaggagcuaaucuu

SEQ ID NO: 1127230 - RNA, 22 nt, Human
agcaggcuaagggaccuguuua

SEQ ID NO: 1127231 - RNA, 22 nt, Human
ggcagagcuuguuccuucuguu

SEQ ID NO: 1127232 - RNA, 22 nt, Human
ccauuguuuauuuagacuuaau

SEQ ID NO: 1127233 - RNA, 22 nt, Human
agcaggcuccuuccuucucugg

SEQ ID NO: 1127234 - RNA, 22 nt, Human
caaagguaaagaucugcugugg

SEQ ID NO: 1127235 - RNA, 22 nt, Human
gagaagguggaccugaaggagc

SEQ ID NO: 1127236 - RNA, 16 nt, Human
ccaccugcagcucuca

SEQ ID NO: 1127237 - RNA, 22 nt, Human
acuggcaguggcagcagaaaga

SEQ ID NO: 1127238 - RNA, 17 nt, Human
gcagccagugcagcagg

SEQ ID NO: 1127239 - RNA, 22 nt, Human
ggccucucuccagucagugcag

SEQ ID NO: 1127240 - RNA, 22 nt, Human
cuuggccucuucucaggguggg

SEQ ID NO: 1127241 - RNA, 22 nt, Human
auggcccaggccuccuguggcu

SEQ ID NO: 1127242 - RNA, 22 nt, Human
gaaaucugcccagugcacuggu

SEQ ID NO: 1127243 - RNA, 22 nt, Human
ggguggggcccaggaaaucuau

SEQ ID NO: 1127244 - RNA, 21 nt, Human
augaagucuaugcuucugugu

SEQ ID NO: 1127245 - RNA, 22 nt, Human
acaggggauugauuggaagucu

SEQ ID NO: 1127246 - RNA, 22 nt, Human
ucugagaguagagcugccucuu

SEQ ID NO: 1127247 - RNA, 22 nt, Human
uaaggcacacaguugcugcaug

SEQ ID NO: 1127248 - RNA, 22 nt, Human
ccuggccuggcacucccucugc

SEQ ID NO: 1127249 - RNA, 22 nt, Human
gaaaaugugccuuuggguauug

SEQ ID NO: 1127250 - RNA, 22 nt, Human
uggcagcacuugaacuugagcc

SEQ ID NO: 1127251 - RNA, 22 nt, Human
guucauuuaugauguaacaugu

SEQ ID NO: 1127252 - RNA, 22 nt, Human
uuuuggucagguuggucucgaa

SEQ ID NO: 1127253 - RNA, 22 nt, Human
ggagcugaugacgucaccaugg

SEQ ID NO: 1127254 - RNA, 22 nt, Human
uuacaggggacauuggggacau

SEQ ID NO: 1127255 - RNA, 22 nt, Human
ggcuucugagugcucugcuguu

SEQ ID NO: 1127256 - RNA, 22 nt, Human
agccagcugccuuucacaucug

SEQ ID NO: 1127257 - RNA, 22 nt, Human
gggcugagggguaucucauggg

SEQ ID NO: 1127258 - RNA, 18 nt, Human
agcugcagaccaggaggu

SEQ ID NO: 1127259 - RNA, 22 nt, Human
auuuacagaugaugcuauuuga

SEQ ID NO: 1127260 - RNA, 22 nt, Human
uuucaaugacacaaaagagaaa

SEQ ID NO: 1127261 - RNA, 22 nt, Human
cagggacaauggcagagccuga

SEQ ID NO: 1127262 - RNA, 17 nt, Human
aagauuucauuagcuga

SEQ ID NO: 1127263 - RNA, 22 nt, Human
ucauacaucuuguauaucuauc

SEQ ID NO: 1127264 - RNA, 22 nt, Human
acugaaagauaaaucaguuagc

SEQ ID NO: 1127265 - RNA, 22 nt, Human
uuaacagagugccuggcaugua

SEQ ID NO: 1127266 - RNA, 22 nt, Human
gaaagagaaccugggccuagau

SEQ ID NO: 1127267 - RNA, 22 nt, Human
uguggccuugcagccuggaggu

SEQ ID NO: 1127268 - RNA, 22 nt, Human
ccuggcugccgagugugcagcg

SEQ ID NO: 1127269 - RNA, 22 nt, Human
agaggccaguggcugugcuguc

SEQ ID NO: 1127270 - RNA, 22 nt, Human
agcagccacagcagaucugagu

SEQ ID NO: 1127271 - RNA, 22 nt, Human
ggagccagggaagcugcuuccu

SEQ ID NO: 1127272 - RNA, 22 nt, Human
gcagagcugucuaagucacuuc

SEQ ID NO: 1127273 - RNA, 22 nt, Human
gagaggccaccugacgagcagu

SEQ ID NO: 1127274 - RNA, 22 nt, Human
uacagaaaucacaucgcuuuga

SEQ ID NO: 1127275 - RNA, 21 nt, Human
aaggaaaagcuuggucucuga

SEQ ID NO: 1127276 - RNA, 22 nt, Human
aaggcacuacgcugcuggggcg

SEQ ID NO: 1127277 - RNA, 22 nt, Human
uuacaucuaaacugugaacaau

SEQ ID NO: 1127278 - RNA, 22 nt, Human
ccuuucucuuugcugaucaugu

SEQ ID NO: 1127279 - RNA, 22 nt, Human
caggguccggcugccuggcugu

SEQ ID NO: 1127280 - RNA, 22 nt, Human
cugggccugucagggcuuuuug

SEQ ID NO: 1127281 - RNA, 22 nt, Human
uaugaagacaaugauagcauga

SEQ ID NO: 1127282 - RNA, 22 nt, Human
uccuccagugucuggggccuug

SEQ ID NO: 1127283 - RNA, 21 nt, Human
ccuccaggagcagagcccuga

SEQ ID NO: 1127284 - RNA, 22 nt, Human
ccugcagcuguaggagaaggcg

SEQ ID NO: 1127285 - RNA, 22 nt, Human
cugccucuauaggaguccacca

SEQ ID NO: 1127286 - RNA, 22 nt, Human
gcagcuuggugaaaggugaugg

SEQ ID NO: 1127287 - RNA, 22 nt, Human
ggagaaggugcuggucacugug

SEQ ID NO: 1127288 - RNA, 22 nt, Human
cuggcuccauccuugagcucug

SEQ ID NO: 1127289 - RNA, 22 nt, Human
ucaaguguaguggugucagguc

SEQ ID NO: 1127290 - RNA, 22 nt, Human
ucugugaacaucacauugacag

SEQ ID NO: 1127291 - RNA, 21 nt, Human
ugaggcuguuguaccagggag

SEQ ID NO: 1127292 - RNA, 22 nt, Human
uggccuguggcuuaaggucugu

SEQ ID NO: 1127293 - RNA, 22 nt, Human
ggcagcuccucaaaaaauuaaa

SEQ ID NO: 1127294 - RNA, 22 nt, Human
ccucagggccaucucugucccu

SEQ ID NO: 1127295 - RNA, 22 nt, Human
acagagguguuccagaccuagg

SEQ ID NO: 1127296 - RNA, 22 nt, Human
cuggggugucucgucugccauu

SEQ ID NO: 1127297 - RNA, 22 nt, Human
auguaacuguuauauuuuguug

SEQ ID NO: 1127298 - RNA, 22 nt, Human
uugggcucaggaguuugagacc

SEQ ID NO: 1127299 - RNA, 22 nt, Human
cuucuugcugggggccucagug

SEQ ID NO: 1127300 - RNA, 22 nt, Human
caggcagccaggggaccugucc

SEQ ID NO: 1127301 - RNA, 22 nt, Human
gaagagcuguagccugcucuuu

SEQ ID NO: 1127302 - RNA, 22 nt, Human
gcagagccagaauggccaggac

SEQ ID NO: 1127303 - RNA, 22 nt, Human
ccugucugagccagggugggca

SEQ ID NO: 1127304 - RNA, 22 nt, Human
caggcaccccaggugagcacug

SEQ ID NO: 1127305 - RNA, 22 nt, Human
agccaagcaccacuggcacucg

SEQ ID NO: 1127306 - RNA, 22 nt, Human
cacaagacuuauuuguguagaa

SEQ ID NO: 1127307 - RNA, 22 nt, Human
ggauaaucugggagaaaacuga

SEQ ID NO: 1127308 - RNA, 22 nt, Human
cauggggagacaccuagggaaa

SEQ ID NO: 1127309 - RNA, 22 nt, Human
accugccucuaagcagcaggug

SEQ ID NO: 1127310 - RNA, 22 nt, Human
gccugccuuuuggaggcacauu

SEQ ID NO: 1127311 - RNA, 22 nt, Human
ucacaacucuuuccauuuaaua

SEQ ID NO: 1127312 - RNA, 22 nt, Human
aagaagaugguuaacuuucagu

SEQ ID NO: 1127313 - RNA, 22 nt, Human
agggcucugggguggcagagau

SEQ ID NO: 1127314 - RNA, 22 nt, Human
auuguacuuuuauuacauguag

SEQ ID NO: 1127315 - RNA, 22 nt, Human
uccucacagucaacacuuugag

SEQ ID NO: 1127316 - RNA, 22 nt, Human
ugucccagucaaggcugucauc

SEQ ID NO: 1127317 - RNA, 22 nt, Human
ugcuggaggaguuuacuguggc

SEQ ID NO: 1127318 - RNA, 22 nt, Human
ugugccuggcauucugggcuuc

SEQ ID NO: 1127319 - RNA, 22 nt, Human
aggagcugucagagugccagag

SEQ ID NO: 1127320 - RNA, 22 nt, Human
guggagaccuccuaggaugugu

SEQ ID NO: 1127321 - RNA, 22 nt, Human
aagaacaacugcuuuaaaagca

SEQ ID NO: 1127322 - RNA, 22 nt, Human
agccuccuggaguuucugggau

SEQ ID NO: 1127323 - RNA, 22 nt, Human
uuagaaaggaaucuucauuuca

SEQ ID NO: 1127324 - RNA, 22 nt, Human
agagugaagguugacacuucac

SEQ ID NO: 1127325 - RNA, 22 nt, Human
acugagcucuugacugggaguu

SEQ ID NO: 1127326 - RNA, 22 nt, Human
uggccuggaagagaggucgagg

SEQ ID NO: 1127327 - RNA, 22 nt, Human
gaggcaugucuggccuguccca

SEQ ID NO: 1127328 - RNA, 22 nt, Human
aagaugauagaucugucaaugu

SEQ ID NO: 1127329 - RNA, 22 nt, Human
ccugccuguaagauggguacaa

SEQ ID NO: 1127330 - RNA, 22 nt, Human
auucuguauuucuaauaagauc

SEQ ID NO: 1127331 - RNA, 22 nt, Human
gccucccuguucuuccacaaua

SEQ ID NO: 1127332 - RNA, 22 nt, Human
gccuucaggaggguuccagaca

SEQ ID NO: 1127333 - RNA, 22 nt, Human
ggaagggccucgggcgugggac

SEQ ID NO: 1127334 - RNA, 22 nt, Human
augcucugggcaggagcccugg

SEQ ID NO: 1127335 - RNA, 22 nt, Human
agcuggguguguaucagauaaa

SEQ ID NO: 1127336 - RNA, 22 nt, Human
ggugacuggagggacccaggcc

SEQ ID NO: 1127337 - RNA, 22 nt, Human
cucaggaugcaauuccaucaag

SEQ ID NO: 1127338 - RNA, 22 nt, Human
gagagugaaggcuucccagcaa

SEQ ID NO: 1127339 - RNA, 20 nt, Human
gacaggagaguuagguaggu

SEQ ID NO: 1127340 - RNA, 22 nt, Human
caggaagagaacauggaggcug

SEQ ID NO: 1127341 - RNA, 22 nt, Human
aaaugcaucagcucauaagaga

SEQ ID NO: 1127342 - RNA, 22 nt, Human
uuugcauuugcaaauaaugaaa

SEQ ID NO: 1127343 - RNA, 22 nt, Human
uccugucagugaggcagaugaa

SEQ ID NO: 1127344 - RNA, 22 nt, Human
uaaauguguaaaccuccauuac

SEQ ID NO: 1127345 - RNA, 22 nt, Human
aaaguucagugccuucuauaca

SEQ ID NO: 1127346 - RNA, 22 nt, Human
ggaggaccugcuggcccugcaa

SEQ ID NO: 1127347 - RNA, 22 nt, Human
uucucucauucaaauuaaagug

SEQ ID NO: 1127348 - RNA, 22 nt, Human
gcugagagcggccagcugggaa

SEQ ID NO: 1127349 - RNA, 22 nt, Human
gcagcccaauggacugagacag

SEQ ID NO: 1127350 - RNA, 22 nt, Human
gacauuucaaucucauuauggg

SEQ ID NO: 1127351 - RNA, 22 nt, Human
gagccugaauuugaccugcuua

SEQ ID NO: 1127352 - RNA, 22 nt, Human
agcaauauaaauguuggguaga

SEQ ID NO: 1127353 - RNA, 22 nt, Human
uuauugccugauugaggucauu

SEQ ID NO: 1127354 - RNA, 23 nt, Human
cuuuccuuucuuugacacccagc

SEQ ID NO: 1127355 - RNA, 22 nt, Human
ucucagaggcccgacguucucc

SEQ ID NO: 1127356 - RNA, 22 nt, Human
uauaguaaaauuuucauuuaug

SEQ ID NO: 1127357 - RNA, 22 nt, Human
gcccauggcagaacugugagca

SEQ ID NO: 1127358 - RNA, 22 nt, Human
aaagcaguauauugguaguugu

SEQ ID NO: 1127359 - RNA, 22 nt, Human
uagucaaaccucagaauacccc

SEQ ID NO: 1127360 - RNA, 22 nt, Human
aaugauguauuaguacaacaca

SEQ ID NO: 1127361 - RNA, 22 nt, Human
cccugccucugaagcugcucag

SEQ ID NO: 1127362 - RNA, 22 nt, Human
cgggcagaucacacagggcuug

SEQ ID NO: 1127363 - RNA, 21 nt, Human
cugagggccgcagcugggcuc

SEQ ID NO: 1127364 - RNA, 22 nt, Human
gcugccugaucauacaccaggg

SEQ ID NO: 1127365 - RNA, 22 nt, Human
ucugccugaaauucacauguaa

SEQ ID NO: 1127366 - RNA, 21 nt, Human
acagacagggccagugucccc

SEQ ID NO: 1127367 - RNA, 22 nt, Human
ugauuucaaguagugacaugcu

SEQ ID NO: 1127368 - RNA, 22 nt, Human
ccccagccuuccaugggaauug

SEQ ID NO: 1127369 - RNA, 23 nt, Human
uggcuucugccccauucucucca

SEQ ID NO: 1127370 - RNA, 22 nt, Human
accauguuggccaagcuggucu

SEQ ID NO: 1127371 - RNA, 22 nt, Human
cuggccugaggccgccuucaga

SEQ ID NO: 1127372 - RNA, 22 nt, Human
gaugugagugguagcugggauu

SEQ ID NO: 1127373 - RNA, 22 nt, Human
uccucuggauauaagccucacc

SEQ ID NO: 1127374 - RNA, 22 nt, Human
ccugggcuggaguacagcagug

SEQ ID NO: 1127375 - RNA, 22 nt, Human
ucucacugcaaauauuauguau

SEQ ID NO: 1127376 - RNA, 22 nt, Human
ugaccaaaggugguuuauuugg

SEQ ID NO: 1127377 - RNA, 22 nt, Human
ugcuggggguucagaugaguaa

SEQ ID NO: 1127378 - RNA, 22 nt, Human
uggagcugggguuugaaucugg

SEQ ID NO: 1127379 - RNA, 22 nt, Human
ugagccuguggggugacaacca

SEQ ID NO: 1127380 - RNA, 22 nt, Human
uucugggacaucuggacaguuu

SEQ ID NO: 1127381 - RNA, 22 nt, Human
ccugugaggucaucugugguaa

SEQ ID NO: 1127382 - RNA, 17 nt, Human
ggagagugggaauggcc

SEQ ID NO: 1127383 - RNA, 22 nt, Human
cccagggagguagcaggagaaa

SEQ ID NO: 1127384 - RNA, 22 nt, Human
gccuggagagcacugugcgcuu

SEQ ID NO: 1127385 - RNA, 22 nt, Human
ucccagaggaaauggcagcuga

SEQ ID NO: 1127386 - RNA, 22 nt, Human
accaaggaguuugguauuuuag

SEQ ID NO: 1127387 - RNA, 22 nt, Human
ucugggcccuaaaccagcucua

SEQ ID NO: 1127388 - RNA, 22 nt, Human
ucuggcucauaggaaggccauu

SEQ ID NO: 1127389 - RNA, 22 nt, Human
caggcugggaacgccacccgcu

SEQ ID NO: 1127390 - RNA, 22 nt, Human
uggcagggaguugcaggauuuc

SEQ ID NO: 1127391 - RNA, 22 nt, Human
cugaaugucgaucagcuugggu

SEQ ID NO: 1127392 - RNA, 19 nt, Human
gccaggagggcucuggcug

SEQ ID NO: 1127393 - RNA, 20 nt, Human
cuuagaaauuuuuacccugg

SEQ ID NO: 1127394 - RNA, 21 nt, Human
agggccugugcucuccagguc

SEQ ID NO: 1127395 - RNA, 22 nt, Human
gcagggucgcucuaggagauca

SEQ ID NO: 1127396 - RNA, 22 nt, Human
caaugguucucaaacuaucaug

SEQ ID NO: 1127397 - RNA, 21 nt, Human
ccaggguccagcugccauggu

SEQ ID NO: 1127398 - RNA, 21 nt, Human
ucaggcaggcgcagagggaag

SEQ ID NO: 1127399 - RNA, 22 nt, Human
ggcaccuggagguuuacuggau

SEQ ID NO: 1127400 - RNA, 22 nt, Human
uggugcaagucucugaggaggg

SEQ ID NO: 1127401 - RNA, 22 nt, Human
gcgaaaaauguguaaauauguu

SEQ ID NO: 1127402 - RNA, 22 nt, Human
agccuggcacugaggcagggcg

SEQ ID NO: 1127403 - RNA, 22 nt, Human
cuagaaaaauacuuuauuguga

SEQ ID NO: 1127404 - RNA, 22 nt, Human
gugcagagaaaugagaagucga

SEQ ID NO: 1127405 - RNA, 22 nt, Human
aacaggagaguaaauauaugau

SEQ ID NO: 1127406 - RNA, 22 nt, Human
accaggcugugaagugagacua

SEQ ID NO: 1127407 - RNA, 22 nt, Human
agggagaaugaccaagguauau

SEQ ID NO: 1127408 - RNA, 22 nt, Human
aggagcugggcugcugcuggga

SEQ ID NO: 1127409 - RNA, 22 nt, Human
ggagccuggcaaugcugcgucc

SEQ ID NO: 1127410 - RNA, 22 nt, Human
gcuggcagaagagcugguucaa

SEQ ID NO: 1127411 - RNA, 20 nt, Human
aggagcugaauuagaggguu

SEQ ID NO: 1127412 - RNA, 22 nt, Human
caggcagccugcggucugcaca

SEQ ID NO: 1127413 - RNA, 20 nt, Human
cacugaagacuucuugcuca

SEQ ID NO: 1127414 - RNA, 18 nt, Human
ggagagugagaucaaaca

SEQ ID NO: 1127415 - RNA, 22 nt, Human
ccagggcagcgccccuccacgc

SEQ ID NO: 1127416 - RNA, 22 nt, Human
aauguacaaggguuccaguuuu

SEQ ID NO: 1127417 - RNA, 22 nt, Human
aaugcacagcuaaagugguucc

SEQ ID NO: 1127418 - RNA, 22 nt, Human
ccaggccucccuuuuccagcca

SEQ ID NO: 1127419 - RNA, 22 nt, Human
uuccucaugggguuccuucaga

SEQ ID NO: 1127420 - RNA, 19 nt, Human
acagaaauuaguuauuuuc

SEQ ID NO: 1127421 - RNA, 22 nt, Human
caguggcugugaccagggaccu

SEQ ID NO: 1127422 - RNA, 22 nt, Human
acaguaauuaaaauggaucugc

SEQ ID NO: 1127423 - RNA, 22 nt, Human
caauguuuguuagagcucuaga

SEQ ID NO: 1127424 - RNA, 21 nt, Human
aggugggagaccauguagguc

SEQ ID NO: 1127425 - RNA, 22 nt, Human
cagcauggagacaaagugggca

SEQ ID NO: 1127426 - RNA, 22 nt, Human
ugcaugcagcuggugauaagaa

SEQ ID NO: 1127427 - RNA, 22 nt, Human
uucagagccacuucaagucuaa

SEQ ID NO: 1127428 - RNA, 22 nt, Human
acauguguauagccuguauaga

SEQ ID NO: 1127429 - RNA, 22 nt, Human
agagccagcaacucuagcccug

SEQ ID NO: 1127430 - RNA, 22 nt, Human
caaauccagaucccagucguag

SEQ ID NO: 1127431 - RNA, 22 nt, Human
gcagggcagccacaggcccccu

SEQ ID NO: 1127432 - RNA, 23 nt, Human
uggcagcagaucuuaaagugacc

SEQ ID NO: 1127433 - RNA, 22 nt, Human
uggggcuggcacagucucuauu

SEQ ID NO: 1127434 - RNA, 19 nt, Human
ggaccagguccugggcagc

SEQ ID NO: 1127435 - RNA, 22 nt, Human
ggcugccucuggaagcuggaga

SEQ ID NO: 1127436 - RNA, 22 nt, Human
ccugacgaaaggcgugcuggag

SEQ ID NO: 1127437 - RNA, 21 nt, Human
cugugcuuuuuaagugugaug

SEQ ID NO: 1127438 - RNA, 22 nt, Human
ggcacugacugugcagcgcacc

SEQ ID NO: 1127439 - RNA, 22 nt, Human
ggcaguggcuccucucuacucc

SEQ ID NO: 1127440 - RNA, 22 nt, Human
ccuggcaggccccuccuggauu

SEQ ID NO: 1127441 - RNA, 22 nt, Human
aauauuuuaggcuuuccaggcu

SEQ ID NO: 1127442 - RNA, 22 nt, Human
aggcuuccucgugccuuagaua

SEQ ID NO: 1127443 - RNA, 22 nt, Human
caccuggcuggaagugcuccgg

SEQ ID NO: 1127444 - RNA, 22 nt, Human
ugcagggcuacaggacuacaac

SEQ ID NO: 1127445 - RNA, 23 nt, Human
agccuucaggcaaugucaguaga

SEQ ID NO: 1127446 - RNA, 20 nt, Human
aauguauauuuuaugccagg

SEQ ID NO: 1127447 - RNA, 22 nt, Human
cuacauuuuaauaagcugcuua

SEQ ID NO: 1127448 - RNA, 22 nt, Human
ugucucagaauggcucauaaua

SEQ ID NO: 1127449 - RNA, 22 nt, Human
agcaggaguuugaugcuuuuau

SEQ ID NO: 1127450 - RNA, 22 nt, Human
ggcaguggaggacccugugucu

SEQ ID NO: 1127451 - RNA, 22 nt, Human
agagccagcauuugacacuggc

SEQ ID NO: 1127452 - RNA, 22 nt, Human
ucccagcccagauuugugugac

SEQ ID NO: 1127453 - RNA, 22 nt, Human
aaaugaacucuuccugcauccc

SEQ ID NO: 1127454 - RNA, 22 nt, Human
uucaguuucagucuugcaaaaa

SEQ ID NO: 1127455 - RNA, 22 nt, Human
agucccagaucuccauucgguc

SEQ ID NO: 1127456 - RNA, 22 nt, Human
cacaggcuugucagcaugaggc

SEQ ID NO: 1127457 - RNA, 22 nt, Human
ccaggccuggccaggggaugcc

SEQ ID NO: 1127458 - RNA, 22 nt, Human
gcugucacaagcaucuggggca

SEQ ID NO: 1127459 - RNA, 19 nt, Human
cucuggagcagacacugga

SEQ ID NO: 1127460 - RNA, 22 nt, Human
cuuaagaauauugaaguugugg

SEQ ID NO: 1127461 - RNA, 22 nt, Human
caagagcuuuagaaaugcucau

SEQ ID NO: 1127462 - RNA, 22 nt, Human
ggcuggagugggcuccagaguu

SEQ ID NO: 1127463 - RNA, 22 nt, Human
uccucuggcucuuucccuagga

SEQ ID NO: 1127464 - RNA, 22 nt, Human
ucaaaugcuguauuguaguaau

SEQ ID NO: 1127465 - RNA, 22 nt, Human
uaacagaauuugcuaaacuccg

SEQ ID NO: 1127466 - RNA, 22 nt, Human
gccaccagguuagauccagccu

SEQ ID NO: 1127467 - RNA, 22 nt, Human
aagggcugcuguagaagcagag

SEQ ID NO: 1127468 - RNA, 22 nt, Human
cuggagccggaccagggacggu

SEQ ID NO: 1127469 - RNA, 22 nt, Human
ggcucugcccagguggacagca

SEQ ID NO: 1127470 - RNA, 22 nt, Human
guggcccucugauagggucagg

SEQ ID NO: 1127471 - RNA, 22 nt, Human
ggcaggagggcggacaaugacc

SEQ ID NO: 1127472 - RNA, 23 nt, Human
agggaaaguaguaauggccuuug

SEQ ID NO: 1127473 - RNA, 22 nt, Human
cacauggggcgcugcauuggcc

SEQ ID NO: 1127474 - RNA, 22 nt, Human
guggccuggaguuugauguagg

SEQ ID NO: 1127475 - RNA, 22 nt, Human
cuucugggcauucagcugcaca

SEQ ID NO: 1127476 - RNA, 22 nt, Human
uaugcacacaggcuuaauucau

SEQ ID NO: 1127477 - RNA, 22 nt, Human
caggaugggauguagugggccc

SEQ ID NO: 1127478 - RNA, 22 nt, Human
gcugggcagccuggccgcugcc

SEQ ID NO: 1127479 - RNA, 22 nt, Human
aaauauguauggaguucaugaa

SEQ ID NO: 1127480 - RNA, 22 nt, Human
aaugugguuaacccauuuaaga

SEQ ID NO: 1127481 - RNA, 22 nt, Human
augcugaggacaaagagaucaa

SEQ ID NO: 1127482 - RNA, 22 nt, Human
ccucugcaccauagccuucagc

SEQ ID NO: 1127483 - RNA, 20 nt, Human
ugggccuguggcagaagucu

SEQ ID NO: 1127484 - RNA, 22 nt, Human
cuggggaggcagggcugccccu

SEQ ID NO: 1127485 - RNA, 22 nt, Human
uggcugcugagaaggcagcugu

SEQ ID NO: 1127486 - RNA, 22 nt, Human
cugggcagcuaccaccacugcu

SEQ ID NO: 1127487 - RNA, 19 nt, Human
uuggaaggagccagagugg

SEQ ID NO: 1127488 - RNA, 22 nt, Human
cuccugaguaguagcauuguca

SEQ ID NO: 1127489 - RNA, 22 nt, Human
uguguccuucugggagucccag

SEQ ID NO: 1127490 - RNA, 22 nt, Human
uauguacagggauagaacuuga

SEQ ID NO: 1127491 - RNA, 22 nt, Human
ggugcagaaggaagggagcugg

SEQ ID NO: 1127492 - RNA, 22 nt, Human
gcugagagcaguguggccuuaa

SEQ ID NO: 1127493 - RNA, 22 nt, Human
agauacauugaguuuccuccug

SEQ ID NO: 1127494 - RNA, 22 nt, Human
ggccucugccccagccacaccu

SEQ ID NO: 1127495 - RNA, 21 nt, Human
gggccacaccuucugcagacc

SEQ ID NO: 1127496 - RNA, 22 nt, Human
gugcagcagggggaagacagug

SEQ ID NO: 1127497 - RNA, 22 nt, Human
uauuucaugugcaccauaauuc

SEQ ID NO: 1127498 - RNA, 23 nt, Human
auggagcugguacuagcuaccuc

SEQ ID NO: 1127499 - RNA, 22 nt, Human
gccaggcuggccagcaccuucu

SEQ ID NO: 1127500 - RNA, 22 nt, Human
aggugcuggagucugggcagga

SEQ ID NO: 1127501 - RNA, 18 nt, Human
aucuuuccauagcauguu

SEQ ID NO: 1127502 - RNA, 22 nt, Human
ccugggcucuauccugacccag

SEQ ID NO: 1127503 - RNA, 22 nt, Human
gcagcuuggauuucuguaguuu

SEQ ID NO: 1127504 - RNA, 22 nt, Human
gcucuggacuggggccugagaa

SEQ ID NO: 1127505 - RNA, 22 nt, Human
uggagugaaguaaagaggacaa

SEQ ID NO: 1127506 - RNA, 22 nt, Human
uuugaaaauuuaagugcuacac

SEQ ID NO: 1127507 - RNA, 19 nt, Human
agggaaggauucugucauu

SEQ ID NO: 1127508 - RNA, 22 nt, Human
uguguguguuuauaaaucuaaa

SEQ ID NO: 1127509 - RNA, 19 nt, Human
gagaggccugugcuugaag

SEQ ID NO: 1127510 - RNA, 22 nt, Human
gccaggcugaggcucuggaaga

SEQ ID NO: 1127511 - RNA, 22 nt, Human
cuggcucagacagcugugcagu

SEQ ID NO: 1127512 - RNA, 22 nt, Human
acauuucuggaguuucucaaca

SEQ ID NO: 1127513 - RNA, 22 nt, Human
ucagaggucccuagcaggagug

SEQ ID NO: 1127514 - RNA, 22 nt, Human
ucaauuaugccauugcaauauu

SEQ ID NO: 1127515 - RNA, 22 nt, Human
aaugcagugagccauuaaaugg

SEQ ID NO: 1127516 - RNA, 22 nt, Human
ugucucugugacuccuuccgcc

SEQ ID NO: 1127517 - RNA, 17 nt, Human
auuucacuuagcaugag

SEQ ID NO: 1127518 - RNA, 22 nt, Human
gcacccaggccggcgacugcag

SEQ ID NO: 1127519 - RNA, 22 nt, Human
acaguuucuccauuuacaccuu

SEQ ID NO: 1127520 - RNA, 20 nt, Human
gaggcugcggacugcuggac

SEQ ID NO: 1127521 - RNA, 19 nt, Human
ggacacagaaagcugcauu

SEQ ID NO: 1127522 - RNA, 22 nt, Human
gcuggccucuacaggccggcca

SEQ ID NO: 1127523 - RNA, 22 nt, Human
cccagcccagcguucgaggggu

SEQ ID NO: 1127524 - RNA, 22 nt, Human
ucuggccagugaaaugcagaau

SEQ ID NO: 1127525 - RNA, 22 nt, Human
acuggcagcuguaggaugcaug

SEQ ID NO: 1127526 - RNA, 22 nt, Human
gcugucacacaugggaucucag

SEQ ID NO: 1127527 - RNA, 22 nt, Human
gcuggccugaccugaggcuggg

SEQ ID NO: 1127528 - RNA, 22 nt, Human
gcaggagucacugacuuggucc

SEQ ID NO: 1127529 - RNA, 22 nt, Human
ucagggcaaugucccucagaag

SEQ ID NO: 1127530 - RNA, 22 nt, Human
cucuuccuacagucugcuaugc

SEQ ID NO: 1127531 - RNA, 22 nt, Human
gagagcugcaagguagggcggg

SEQ ID NO: 1127532 - RNA, 22 nt, Human
gccugagauucccggagccgug

SEQ ID NO: 1127533 - RNA, 22 nt, Human
acagaguaggugcugucgacug

SEQ ID NO: 1127534 - RNA, 17 nt, Human
gucugggcuuuagagac

SEQ ID NO: 1127535 - RNA, 22 nt, Human
cucugcagaggcccaaggcuga

SEQ ID NO: 1127536 - RNA, 22 nt, Human
agagucugaggcagcugcagcc

SEQ ID NO: 1127537 - RNA, 22 nt, Human
guguuccauguuugagguaguu

SEQ ID NO: 1127538 - RNA, 22 nt, Human
cuggccagacuacacaugugug

SEQ ID NO: 1127539 - RNA, 21 nt, Human
ugcuccuuagcugccccugcc

SEQ ID NO: 1127540 - RNA, 22 nt, Human
ggcucuggugcccuggcuccca

SEQ ID NO: 1127541 - RNA, 22 nt, Human
uggcucucagcucccagcagcc

SEQ ID NO: 1127542 - RNA, 22 nt, Human
auccuuggaugugucuuuuugu

SEQ ID NO: 1127543 - RNA, 22 nt, Human
gcagccacacuguuacagaaug

SEQ ID NO: 1127544 - RNA, 22 nt, Human
agagccagcaagugaauaguga

SEQ ID NO: 1127545 - RNA, 22 nt, Human
caaggaaaacagaugaucaaca

SEQ ID NO: 1127546 - RNA, 22 nt, Human
gcccagaaguugaggcugcagu

SEQ ID NO: 1127547 - RNA, 22 nt, Human
ccacugggggcugcaggcacuc

SEQ ID NO: 1127548 - RNA, 22 nt, Human
auugucuguacuuuaaaaaugu

SEQ ID NO: 1127549 - RNA, 18 nt, Human
ccauuucaugauuauuac

SEQ ID NO: 1127550 - RNA, 22 nt, Human
cuuauguauauuuggaacguac

SEQ ID NO: 1127551 - RNA, 22 nt, Human
gaggccuggguuggaggugcau

SEQ ID NO: 1127552 - RNA, 22 nt, Human
cagagcaguccuugucaaucag

SEQ ID NO: 1127553 - RNA, 22 nt, Human
ggcauggcuggguucuggugag

SEQ ID NO: 1127554 - RNA, 22 nt, Human
gguggcuggaggagcugaugga

SEQ ID NO: 1127555 - RNA, 22 nt, Human
gcacagguugcaaaaguucaca

SEQ ID NO: 1127556 - RNA, 22 nt, Human
ucugccuggauuccauucucca

SEQ ID NO: 1127557 - RNA, 22 nt, Human
acucugccccgaguucugggaa

SEQ ID NO: 1127558 - RNA, 22 nt, Human
uacuuucuagcucuccccaguu

SEQ ID NO: 1127559 - RNA, 22 nt, Human
agaggccuaaccaagauguccu

SEQ ID NO: 1127560 - RNA, 22 nt, Human
ccagcagcuuuauuggcucucc

SEQ ID NO: 1127561 - RNA, 22 nt, Human
ggaccugccagaacucaggcua

SEQ ID NO: 1127562 - RNA, 22 nt, Human
ugugaugguucacugggcauga

SEQ ID NO: 1127563 - RNA, 22 nt, Human
cuuugcaauagaggcacacaug

SEQ ID NO: 1127564 - RNA, 23 nt, Human
ugcugggcagagcuggugcugag

SEQ ID NO: 1127565 - RNA, 22 nt, Human
aaggcugagacagcacaggucc

SEQ ID NO: 1127566 - RNA, 22 nt, Human
gcaggauggugcccuuucugcc

SEQ ID NO: 1127567 - RNA, 22 nt, Human
uacauuuauaaggcuucucugu

SEQ ID NO: 1127568 - RNA, 22 nt, Human
ugacucuguaccugucugccuu

SEQ ID NO: 1127569 - RNA, 23 nt, Human
gaagcagaugucugaguaggcag

SEQ ID NO: 1127570 - RNA, 22 nt, Human
agggaauguagcaagaugccaa

SEQ ID NO: 1127571 - RNA, 22 nt, Human
gcagggcuaauggggcaaguag

SEQ ID NO: 1127572 - RNA, 22 nt, Human
cagcauugaucccaggcugugg

SEQ ID NO: 1127573 - RNA, 22 nt, Human
agcagccaguucucugugguag

SEQ ID NO: 1127574 - RNA, 22 nt, Human
ucagagaugcagugccaccuac

SEQ ID NO: 1127575 - RNA, 22 nt, Human
ccaaagagcuagaauuauaggc

SEQ ID NO: 1127576 - RNA, 22 nt, Human
ugcaggcuguaaucugaggcua

SEQ ID NO: 1127577 - RNA, 22 nt, Human
gcugccagcucacucuccugag

SEQ ID NO: 1127578 - RNA, 22 nt, Human
gagcccagguucugcuuccagc

SEQ ID NO: 1127579 - RNA, 22 nt, Human
uggugaagucagcggagcccgg

SEQ ID NO: 1127580 - RNA, 22 nt, Human
gccuggcaggggccugggagug

SEQ ID NO: 1127581 - RNA, 22 nt, Human
acagaacugcaggaggaaaagc

SEQ ID NO: 1127582 - RNA, 22 nt, Human
uggcuuccgccgcgggccucgg

SEQ ID NO: 1127583 - RNA, 20 nt, Human
gcaaauggaucccacaagcc

SEQ ID NO: 1127584 - RNA, 22 nt, Human
gcugccugcucggcuccuggga

SEQ ID NO: 1127585 - RNA, 22 nt, Human
agccagaggccagccugccuca

SEQ ID NO: 1127586 - RNA, 22 nt, Human
uggagcagagaugggagcccaa

SEQ ID NO: 1127587 - RNA, 22 nt, Human
aggcuggcuuggcucuccugug

SEQ ID NO: 1127588 - RNA, 22 nt, Human
gaugcagaaaguagacaccauc

SEQ ID NO: 1127589 - RNA, 20 nt, Human
gcacugaaauucaauguuug

SEQ ID NO: 1127590 - RNA, 22 nt, Human
agccacagggggugagggacaa

SEQ ID NO: 1127591 - RNA, 22 nt, Human
uuggcucaggaccccugugacu

SEQ ID NO: 1127592 - RNA, 20 nt, Human
gcugcucuccacggucugca

SEQ ID NO: 1127593 - RNA, 22 nt, Human
ugcaggagaaaguacggagcgu

SEQ ID NO: 1127594 - RNA, 17 nt, Human
ccagguggaaucgugga

SEQ ID NO: 1127595 - RNA, 22 nt, Human
cuuuauguuggggugucuuagu

SEQ ID NO: 1127596 - RNA, 22 nt, Human
ucucaggaguagugggauccau

SEQ ID NO: 1127597 - RNA, 22 nt, Human
uguguuccugccuggcucuggu

SEQ ID NO: 1127598 - RNA, 22 nt, Human
aagaacugugcuccaggcucca

SEQ ID NO: 1127599 - RNA, 22 nt, Human
agggcagaaguacagacacuua

SEQ ID NO: 1127600 - RNA, 22 nt, Human
ucugccuuggcaaccacagcuu

SEQ ID NO: 1127601 - RNA, 22 nt, Human
ucugucaccgagggcauccaaa

SEQ ID NO: 1127602 - RNA, 22 nt, Human
gugcagugagcagugcagcacc

SEQ ID NO: 1127603 - RNA, 23 nt, Human
gccucugcucugcguuggggacu

SEQ ID NO: 1127604 - RNA, 22 nt, Human
gcccacagcucguuccucuccu

SEQ ID NO: 1127605 - RNA, 20 nt, Human
gcaaggcacagugaggaggg

SEQ ID NO: 1127606 - RNA, 22 nt, Human
aguuuauagcccagauucaugg

SEQ ID NO: 1127607 - RNA, 22 nt, Human
ggagccuugggcgcucucccau

SEQ ID NO: 1127608 - RNA, 22 nt, Human
cagccagccucucaaccaugca

SEQ ID NO: 1127609 - RNA, 19 nt, Human
agaaaucucgagauuuguu

SEQ ID NO: 1127610 - RNA, 19 nt, Human
gaucuuugccaauuuaagc

SEQ ID NO: 1127611 - RNA, 22 nt, Human
agggcugcaucugccuggugaa

SEQ ID NO: 1127612 - RNA, 22 nt, Human
uuccaggaauucagcucucagu

SEQ ID NO: 1127613 - RNA, 19 nt, Human
acacagggcuagaguuaca

SEQ ID NO: 1127614 - RNA, 22 nt, Human
ccagagccccugagcuucccug

SEQ ID NO: 1127615 - RNA, 22 nt, Human
caauaugcaagcuauuaaguau

SEQ ID NO: 1127616 - RNA, 22 nt, Human
aaugcacaaaaauuguauguaa

SEQ ID NO: 1127617 - RNA, 22 nt, Human
uuagugucuucuucauccucug

SEQ ID NO: 1127618 - RNA, 22 nt, Human
gagggcagagacagugauucac

SEQ ID NO: 1127619 - RNA, 19 nt, Human
ugccuggcaccagcuccac

SEQ ID NO: 1127620 - RNA, 22 nt, Human
gcuggggaggcagcagagaaca

SEQ ID NO: 1127621 - RNA, 22 nt, Human
acugcuuuucuaagauucugug

SEQ ID NO: 1127622 - RNA, 22 nt, Human
auauauuugagaauauucauga

SEQ ID NO: 1127623 - RNA, 22 nt, Human
agaaauguuacaguuguuauuu

SEQ ID NO: 1127624 - RNA, 23 nt, Human
uggcagagacccagaaucuacau

SEQ ID NO: 1127625 - RNA, 21 nt, Human
ucuccaguauccuucucugag

SEQ ID NO: 1127626 - RNA, 22 nt, Human
aaaagacaucuauuucaggcag

SEQ ID NO: 1127627 - RNA, 22 nt, Human
ugcuauaagaauuauauuacuc

SEQ ID NO: 1127628 - RNA, 22 nt, Human
ccacagagacaggguccuugcu

SEQ ID NO: 1127629 - RNA, 22 nt, Human
cugagaggcacaaggcauuucg

SEQ ID NO: 1127630 - RNA, 22 nt, Human
ucccagggacucucugccuucc

SEQ ID NO: 1127631 - RNA, 22 nt, Human
ggcagcucaccucugguccagg

SEQ ID NO: 1127632 - RNA, 22 nt, Human
gggcucagccccauugaaccag

SEQ ID NO: 1127633 - RNA, 22 nt, Human
ggcagccaugcacgcugccugg

SEQ ID NO: 1127634 - RNA, 22 nt, Human
agaugaagauaucugcaggggc

SEQ ID NO: 1127635 - RNA, 22 nt, Human
cagccugggcuccagagucccu

SEQ ID NO: 1127636 - RNA, 22 nt, Human
acaaaaauuagcugggcauggu

SEQ ID NO: 1127637 - RNA, 22 nt, Human
augauggugagguugagcacag

SEQ ID NO: 1127638 - RNA, 21 nt, Human
ugucagaaauaagcaugugau

SEQ ID NO: 1127639 - RNA, 22 nt, Human
agugcauauaugaagaguauga

SEQ ID NO: 1127640 - RNA, 22 nt, Human
guucacaucacuucacugaacc

SEQ ID NO: 1127641 - RNA, 22 nt, Human
uggcagagucugggcuugggca

SEQ ID NO: 1127642 - RNA, 22 nt, Human
uagauaaauuagaaaguuuacu

SEQ ID NO: 1127643 - RNA, 19 nt, Human
auagucuuuccaauuauac

SEQ ID NO: 1127644 - RNA, 22 nt, Human
agggcugcccagugugagagcu

SEQ ID NO: 1127645 - RNA, 22 nt, Human
auccuugaaugacucugcccuc

SEQ ID NO: 1127646 - RNA, 22 nt, Human
ggccuggcucuugcccagccug

SEQ ID NO: 1127647 - RNA, 22 nt, Human
uuucaugugcaauuagcaauau

SEQ ID NO: 1127648 - RNA, 22 nt, Human
ugccugcuaggcccugcugggu

SEQ ID NO: 1127649 - RNA, 22 nt, Human
uuccuuguuuguagcucuggga

SEQ ID NO: 1127650 - RNA, 22 nt, Human
aagaaauauugggccuuauaaa

SEQ ID NO: 1127651 - RNA, 22 nt, Human
aaauuguugaucuacaguaagg

SEQ ID NO: 1127652 - RNA, 21 nt, Human
gagccuucccucugcccuuuc

SEQ ID NO: 1127653 - RNA, 22 nt, Human
augaagcugguuuuggcuuggg

SEQ ID NO: 1127654 - RNA, 18 nt, Human
ugucucugaauuccagug

SEQ ID NO: 1127655 - RNA, 22 nt, Human
uccucaggauguggaguagaau

SEQ ID NO: 1127656 - RNA, 22 nt, Human
gcugccuggcuuuaguccacuu

SEQ ID NO: 1127657 - RNA, 22 nt, Human
agggccucugacgcccccagcc

SEQ ID NO: 1127658 - RNA, 22 nt, Human
uuugcauuuguuuagaaccuga

SEQ ID NO: 1127659 - RNA, 22 nt, Human
ugcagcucugaacagucaugaa

SEQ ID NO: 1127660 - RNA, 22 nt, Human
cagguaagagacggauuggccc

SEQ ID NO: 1127661 - RNA, 22 nt, Human
ggagccuguggccgucacgacu

SEQ ID NO: 1127662 - RNA, 22 nt, Human
ggccugagcuugggcagcguau

SEQ ID NO: 1127663 - RNA, 22 nt, Human
ucccagggcagcuguccagaag

SEQ ID NO: 1127664 - RNA, 22 nt, Human
ucuggcucuauaacuccuagcu

SEQ ID NO: 1127665 - RNA, 22 nt, Human
uguaucaaaccaaauuaauucu

SEQ ID NO: 1127666 - RNA, 21 nt, Human
uauacaugugugcauacgugu

SEQ ID NO: 1127667 - RNA, 22 nt, Human
ugcugggcuugaaagcugcuaa

SEQ ID NO: 1127668 - RNA, 22 nt, Human
auaacagagagcuacugaacug

SEQ ID NO: 1127669 - RNA, 22 nt, Human
uugcauugaaugcacauuuuua

SEQ ID NO: 1127670 - RNA, 23 nt, Human
uugauacagaagaaucaguuugu

SEQ ID NO: 1127671 - RNA, 22 nt, Human
gguggggccugcuccagcggcc

SEQ ID NO: 1127672 - RNA, 22 nt, Human
ucuuuacaguccucugucaauc

SEQ ID NO: 1127673 - RNA, 22 nt, Human
ugcagagguguugcugagauaa

SEQ ID NO: 1127674 - RNA, 22 nt, Human
cugccagcucucuggaggcucu

SEQ ID NO: 1127675 - RNA, 22 nt, Human
ugauuuuuagcuauucugaaga

SEQ ID NO: 1127676 - RNA, 22 nt, Human
aagggcugaaugaaggguugaa

SEQ ID NO: 1127677 - RNA, 22 nt, Human
aggauaauaauagugcucacuc

SEQ ID NO: 1127678 - RNA, 18 nt, Human
gaaaugugauucuagggc

SEQ ID NO: 1127679 - RNA, 22 nt, Human
accuuaaaacugacacauggag

SEQ ID NO: 1127680 - RNA, 22 nt, Human
cagcugccuaugaccuagccuc

SEQ ID NO: 1127681 - RNA, 22 nt, Human
uuggccuucccuaccugggcca

SEQ ID NO: 1127682 - RNA, 22 nt, Human
gcccagccuccaagcuccaagg

SEQ ID NO: 1127683 - RNA, 22 nt, Human
acagaaauugggcaaauggaag

SEQ ID NO: 1127684 - RNA, 22 nt, Human
uggagcaggugggaugucguga

SEQ ID NO: 1127685 - RNA, 21 nt, Human
gcugcugccccuagugaggcc

SEQ ID NO: 1127686 - RNA, 22 nt, Human
aacaaauggaacacaaaucuuu

SEQ ID NO: 1127687 - RNA, 19 nt, Human
ucuaacagaagugucgucc

SEQ ID NO: 1127688 - RNA, 19 nt, Human
agccagggugagaaggagc

SEQ ID NO: 1127689 - RNA, 18 nt, Human
uccagagguguuggagcc

SEQ ID NO: 1127690 - RNA, 22 nt, Human
acugaaggaagcgggcaggggu

SEQ ID NO: 1127691 - RNA, 22 nt, Human
ccaccuccaccuauugccagcc

SEQ ID NO: 1127692 - RNA, 22 nt, Human
uuuacuuugugucaagucaaga

SEQ ID NO: 1127693 - RNA, 22 nt, Human
aaaauggucucagcuggcacca

SEQ ID NO: 1127694 - RNA, 22 nt, Human
aaguguguauuguuuaugcugc

SEQ ID NO: 1127695 - RNA, 22 nt, Human
gucacaggccuggaugaggggc

SEQ ID NO: 1127696 - RNA, 22 nt, Human
ggcagcugggucacaccgaucu

SEQ ID NO: 1127697 - RNA, 22 nt, Human
acugaaggaaagccuuugcaug

SEQ ID NO: 1127698 - RNA, 22 nt, Human
aggucauuuuugccuucuauuu

SEQ ID NO: 1127699 - RNA, 22 nt, Human
gcaggcuggaggcuguucuggg

SEQ ID NO: 1127700 - RNA, 22 nt, Human
aagauuuagggccaguuuacau

SEQ ID NO: 1127701 - RNA, 22 nt, Human
aaucaguuguccaaaguucaca

SEQ ID NO: 1127702 - RNA, 17 nt, Human
auuuccucagggcugag

SEQ ID NO: 1127703 - RNA, 22 nt, Human
acauuucuaauuuaauguaaca

SEQ ID NO: 1127704 - RNA, 22 nt, Human
cugccuggaaggagcaagggga

SEQ ID NO: 1127705 - RNA, 19 nt, Human
ccucugccagcccgccucu

SEQ ID NO: 1127706 - RNA, 22 nt, Human
ggcugugcgggcagccguggga

SEQ ID NO: 1127707 - RNA, 22 nt, Human
gaaaaugugucaucccuacugu

SEQ ID NO: 1127708 - RNA, 22 nt, Human
uagggcagcugcaucaggcacu

SEQ ID NO: 1127709 - RNA, 22 nt, Human
gccagccccuuagggcucuccc

SEQ ID NO: 1127710 - RNA, 18 nt, Human
ugacucacccugucagug

SEQ ID NO: 1127711 - RNA, 22 nt, Human
cagugcaguuucccagaugcug

SEQ ID NO: 1127712 - RNA, 22 nt, Human
uggcccugcuggccaaaggcua

SEQ ID NO: 1127713 - RNA, 19 nt, Human
gcugugugaccuugggcaa

SEQ ID NO: 1127714 - RNA, 22 nt, Human
agaaaguucacugguauauuuu

SEQ ID NO: 1127715 - RNA, 21 nt, Human
aggugccaaggagaagcaggc

SEQ ID NO: 1127716 - RNA, 22 nt, Human
auguuacauaguccuuauuugu

SEQ ID NO: 1127717 - RNA, 22 nt, Human
uggguggcacuucuggggucca

SEQ ID NO: 1127718 - RNA, 22 nt, Human
aaguuuguuuuagucuaaugau

SEQ ID NO: 1127719 - RNA, 22 nt, Human
auggccugggcccgcuucagau

SEQ ID NO: 1127720 - RNA, 22 nt, Human
gcaguaaaaaaggauaugugca

SEQ ID NO: 1127721 - RNA, 23 nt, Human
uccuuccuuugagaggcuccauc

SEQ ID NO: 1127722 - RNA, 22 nt, Human
uggcucagaguucaucuuuuag

SEQ ID NO: 1127723 - RNA, 22 nt, Human
gccucugcaggugcgguuaucc

SEQ ID NO: 1127724 - RNA, 22 nt, Human
cagcagcugggaaggaggcuga

SEQ ID NO: 1127725 - RNA, 22 nt, Human
acacaggagauauguaauggcu

SEQ ID NO: 1127726 - RNA, 22 nt, Human
aaguuauugcagcaauccaagu

SEQ ID NO: 1127727 - RNA, 22 nt, Human
aguuuauguagaauuggcaaua

SEQ ID NO: 1127728 - RNA, 22 nt, Human
gccuugcuuugcuucuggacag

SEQ ID NO: 1127729 - RNA, 22 nt, Human
aacaucuuuuuguuugcugaaa

SEQ ID NO: 1127730 - RNA, 22 nt, Human
gugacucacacaggccugggcu

SEQ ID NO: 1127731 - RNA, 19 nt, Human
agugaaauggaguauucaa

SEQ ID NO: 1127732 - RNA, 22 nt, Human
ggcugccacgucgaggguccaa

SEQ ID NO: 1127733 - RNA, 22 nt, Human
cguuggagacacuugaggacuu

SEQ ID NO: 1127734 - RNA, 22 nt, Human
cacugaagcuuucauucucuug

SEQ ID NO: 1127735 - RNA, 22 nt, Human
gcugucugcugggucgcucagg

SEQ ID NO: 1127736 - RNA, 22 nt, Human
cagcucucacacccuccuccca

SEQ ID NO: 1127737 - RNA, 22 nt, Human
aggcuggcccuacuggcugccu

SEQ ID NO: 1127738 - RNA, 22 nt, Human
uccucagggaagaugagccuca

SEQ ID NO: 1127739 - RNA, 22 nt, Human
cucaggauccaucuccugcccu

SEQ ID NO: 1127740 - RNA, 22 nt, Human
ugggcugcuucuauuggugguc

SEQ ID NO: 1127741 - RNA, 22 nt, Human
ugaaagguguccaauauuucuc

SEQ ID NO: 1127742 - RNA, 22 nt, Human
agguggguaucaugagagauua

SEQ ID NO: 1127743 - RNA, 22 nt, Human
ucugucacucccugaugaugaa

SEQ ID NO: 1127744 - RNA, 22 nt, Human
ccuccuggugggcgcuucuggc

SEQ ID NO: 1127745 - RNA, 22 nt, Human
ccugggaguggcacucacagca

SEQ ID NO: 1127746 - RNA, 22 nt, Human
aggccagcuguuacuagagcca

SEQ ID NO: 1127747 - RNA, 22 nt, Human
agcugccacagagccuggccag

SEQ ID NO: 1127748 - RNA, 23 nt, Human
aggugcagcccuggaccugcccc

SEQ ID NO: 1127749 - RNA, 22 nt, Human
uugaagcagcucaggaggcuua

SEQ ID NO: 1127750 - RNA, 22 nt, Human
cucacaggagaaagucaugguc

SEQ ID NO: 1127751 - RNA, 23 nt, Human
ucuggcuccauccuuggggaucc

SEQ ID NO: 1127752 - RNA, 22 nt, Human
gcuuuccuggcccugucccugc

SEQ ID NO: 1127753 - RNA, 22 nt, Human
gggcauggugaugugcaccugu

SEQ ID NO: 1127754 - RNA, 22 nt, Human
uauuucugaauccaaaagguca

SEQ ID NO: 1127755 - RNA, 18 nt, Human
gguggcucagucaugggg

SEQ ID NO: 1127756 - RNA, 22 nt, Human
agggccugcaucaggagcuugg

SEQ ID NO: 1127757 - RNA, 20 nt, Human
cacaagagaauacacacugg

SEQ ID NO: 1127758 - RNA, 22 nt, Human
uugacaagaaucguugccuugg

SEQ ID NO: 1127759 - RNA, 22 nt, Human
aaugucugagucucuguauccc

SEQ ID NO: 1127760 - RNA, 22 nt, Human
ucucaggaagauuagggcuaag

SEQ ID NO: 1127761 - RNA, 22 nt, Human
agcagaaccugcagaccugucu

SEQ ID NO: 1127762 - RNA, 22 nt, Human
uggcagagcuggcugcggauga

SEQ ID NO: 1127763 - RNA, 22 nt, Human
ggccucggcccacugcugcggu

SEQ ID NO: 1127764 - RNA, 22 nt, Human
uaaaugugucuuuuuaaggccu

SEQ ID NO: 1127765 - RNA, 22 nt, Human
uuccaggggcagcagugauggu

SEQ ID NO: 1127766 - RNA, 22 nt, Human
gaggugggagggcagucccuaa

SEQ ID NO: 1127767 - RNA, 22 nt, Human
ugauuuccccagucuugcugcu

SEQ ID NO: 1127768 - RNA, 22 nt, Human
cugcugggucuaugcaagugga

SEQ ID NO: 1127769 - RNA, 22 nt, Human
agcugagagguggcaagcugua

SEQ ID NO: 1127770 - RNA, 22 nt, Human
agcccccaaaagugcuuaugau

SEQ ID NO: 1127771 - RNA, 22 nt, Human
ugacagcugagccccaggcaag

SEQ ID NO: 1127772 - RNA, 20 nt, Human
gucucaaguaucucacaguc

SEQ ID NO: 1127773 - RNA, 22 nt, Human
aggcagaauguuggaaaggaag

SEQ ID NO: 1127774 - RNA, 22 nt, Human
aggaaaaagaguugcugccuuc

SEQ ID NO: 1127775 - RNA, 22 nt, Human
guuauugcaguauagaggucua

SEQ ID NO: 1127776 - RNA, 22 nt, Human
gggcuccagcccgggaccaggu

SEQ ID NO: 1127777 - RNA, 22 nt, Human
agggaaagguagugaggucaca

SEQ ID NO: 1127778 - RNA, 22 nt, Human
gggcuguggagccgcgagggcu

SEQ ID NO: 1127779 - RNA, 22 nt, Human
cucuggccugcuuccucaggua

SEQ ID NO: 1127780 - RNA, 22 nt, Human
ggaugcugggagacagcaggca

SEQ ID NO: 1127781 - RNA, 18 nt, Human
agggaucaucacugcagc

SEQ ID NO: 1127782 - RNA, 22 nt, Human
uguuccauaaguggugcuuugu

SEQ ID NO: 1127783 - RNA, 22 nt, Human
cccuguccuuggcugugaggcu

SEQ ID NO: 1127784 - RNA, 18 nt, Human
ccugagcccugcuuacuu

SEQ ID NO: 1127785 - RNA, 22 nt, Human
gcucacuggccugaagaggacg

SEQ ID NO: 1127786 - RNA, 22 nt, Human
ccagguggaaggucugugcucu

SEQ ID NO: 1127787 - RNA, 21 nt, Human
ccuccaggugauuccgugcuc

SEQ ID NO: 1127788 - RNA, 22 nt, Human
gcugucacaaauauuucucagc

SEQ ID NO: 1127789 - RNA, 22 nt, Human
cagauaaaggcuuacuaguagu

SEQ ID NO: 1127790 - RNA, 22 nt, Human
cuguguccucccgcugcaccca

SEQ ID NO: 1127791 - RNA, 22 nt, Human
agggggaggcugugcugcgucu

SEQ ID NO: 1127792 - RNA, 22 nt, Human
ggcugccugaggcugaggcccg

SEQ ID NO: 1127793 - RNA, 22 nt, Human
cugggcugcagcgggagcgacg

SEQ ID NO: 1127794 - RNA, 22 nt, Human
acagggcccuugccagcacaag

SEQ ID NO: 1127795 - RNA, 20 nt, Human
gcagagcuguucugugggga

SEQ ID NO: 1127796 - RNA, 22 nt, Human
acuuccuggcugggugaccugg

SEQ ID NO: 1127797 - RNA, 22 nt, Human
ugagaggcagaauggugccugc

SEQ ID NO: 1127798 - RNA, 22 nt, Human
ucacugcagacaaccucaguca

SEQ ID NO: 1127799 - RNA, 20 nt, Human
ugugcccaauguccagguuc

SEQ ID NO: 1127800 - RNA, 21 nt, Human
agaaaaaccagcauguuuuca

SEQ ID NO: 1127801 - RNA, 18 nt, Human
gaggauggaaggagaugc

SEQ ID NO: 1127802 - RNA, 22 nt, Human
cugggcagccucacacaauguu

SEQ ID NO: 1127803 - RNA, 22 nt, Human
acacugaauguuuaagaacuug

SEQ ID NO: 1127804 - RNA, 22 nt, Human
ugcuggaggccugacuguguuu

SEQ ID NO: 1127805 - RNA, 22 nt, Human
gcuggcuguguuucaucucuga

SEQ ID NO: 1127806 - RNA, 22 nt, Human
ucagaagcauguggggagccug

SEQ ID NO: 1127807 - RNA, 22 nt, Human
uggcacugccaaccugcuaggu

SEQ ID NO: 1127808 - RNA, 22 nt, Human
cagagagcuuagugugcugcau

SEQ ID NO: 1127809 - RNA, 22 nt, Human
agagcugaggauccagcugagc

SEQ ID NO: 1127810 - RNA, 21 nt, Human
uuugaauagaaauagugcuua

SEQ ID NO: 1127811 - RNA, 22 nt, Human
ccuggguggcagagguugcagu

SEQ ID NO: 1127812 - RNA, 22 nt, Human
ucugagggcuugaggggaagua

SEQ ID NO: 1127813 - RNA, 22 nt, Human
ucucucuucaacccuuaacuag

SEQ ID NO: 1127814 - RNA, 20 nt, Human
ccagucccugagcaccaggg

SEQ ID NO: 1127815 - RNA, 22 nt, Human
gaggacagcuuagggcuuccug

SEQ ID NO: 1127816 - RNA, 22 nt, Human
auucagcaguuccugcuucagu

SEQ ID NO: 1127817 - RNA, 19 nt, Human
cucuggccucuggaugcug

SEQ ID NO: 1127818 - RNA, 22 nt, Human
ccugcccuagagaugacacaau

SEQ ID NO: 1127819 - RNA, 22 nt, Human
uucacauuaucaggauuguuuc

SEQ ID NO: 1127820 - RNA, 22 nt, Human
aaaguguugauaugugacaucc

SEQ ID NO: 1127821 - RNA, 22 nt, Human
cacugaaggcuaggauuagaug

SEQ ID NO: 1127822 - RNA, 22 nt, Human
acagaauauugguuacuguugc

SEQ ID NO: 1127823 - RNA, 22 nt, Human
acagagauguggaugagggauu

SEQ ID NO: 1127824 - RNA, 22 nt, Human
aggagcagaacuguuguggagg

SEQ ID NO: 1127825 - RNA, 22 nt, Human
agaaagaacguugguuaucuua

SEQ ID NO: 1127826 - RNA, 22 nt, Human
uguuuuaugagccauauaaccu

SEQ ID NO: 1127827 - RNA, 22 nt, Human
ggcagccaugucccagggcuuc

SEQ ID NO: 1127828 - RNA, 22 nt, Human
cuccuucccuucaaguguuccu

SEQ ID NO: 1127829 - RNA, 22 nt, Human
acccagagcugggcuuggcaaa

SEQ ID NO: 1127830 - RNA, 22 nt, Human
cucuggcuucuaccuugcaguu

SEQ ID NO: 1127831 - RNA, 22 nt, Human
cuccucacacccacugcaacca

SEQ ID NO: 1127832 - RNA, 19 nt, Human
cuugguuaugguaugaugc

SEQ ID NO: 1127833 - RNA, 23 nt, Human
cauggcagcaagagcucauggcc

SEQ ID NO: 1127834 - RNA, 22 nt, Human
ucuacuuuucccuauacaguuu

SEQ ID NO: 1127835 - RNA, 22 nt, Human
gggagccaugcuggucuucuuu

SEQ ID NO: 1127836 - RNA, 22 nt, Human
ccaaggagcucauauucuuguu

SEQ ID NO: 1127837 - RNA, 22 nt, Human
ucagggcaggacaguguaggcc

SEQ ID NO: 1127838 - RNA, 22 nt, Human
guguauaacuaucuaucuagua

SEQ ID NO: 1127839 - RNA, 22 nt, Human
agagugaaggccagguuacagu

SEQ ID NO: 1127840 - RNA, 19 nt, Human
uauauauuuugggguugug

SEQ ID NO: 1127841 - RNA, 22 nt, Human
gacagggcaagacucugucuaa

SEQ ID NO: 1127842 - RNA, 22 nt, Human
ucugggcucuuaguguacccuc

SEQ ID NO: 1127843 - RNA, 22 nt, Human
ggcugcagcggauuggggauug

SEQ ID NO: 1127844 - RNA, 22 nt, Human
ucagagucucccccaguuuggg

SEQ ID NO: 1127845 - RNA, 22 nt, Human
uaacacugguauuucauuuagu

SEQ ID NO: 1127846 - RNA, 22 nt, Human
cauuaugugggaaaauguucuu

SEQ ID NO: 1127847 - RNA, 20 nt, Human
aggaacuggaagggaggaaa

SEQ ID NO: 1127848 - RNA, 17 nt, Human
ucaugcccaacuauuac

SEQ ID NO: 1127849 - RNA, 22 nt, Human
ugugccugucacccucagagag

SEQ ID NO: 1127850 - RNA, 22 nt, Human
ugccugggagugaccaagacuc

SEQ ID NO: 1127851 - RNA, 22 nt, Human
ucagggcauccauugccuguug

SEQ ID NO: 1127852 - RNA, 22 nt, Human
gcucacugccauucucuagaug

SEQ ID NO: 1127853 - RNA, 22 nt, Human
ugcugcacucaccaacagauaa

SEQ ID NO: 1127854 - RNA, 22 nt, Human
agagccuggcucccagcuaccg

SEQ ID NO: 1127855 - RNA, 22 nt, Human
aggccagggucccacacucgca

SEQ ID NO: 1127856 - RNA, 22 nt, Human
gucccaggugggcuccaccucu

SEQ ID NO: 1127857 - RNA, 22 nt, Human
agaacuuaggaacaacagcuua

SEQ ID NO: 1127858 - RNA, 21 nt, Human
acagaacuguauagugauaaa

SEQ ID NO: 1127859 - RNA, 22 nt, Human
uaggccagaggagcagcuuugg

SEQ ID NO: 1127860 - RNA, 22 nt, Human
gggccuggggugacguaccccu

SEQ ID NO: 1127861 - RNA, 22 nt, Human
gggcagugguccaggcuacagc

SEQ ID NO: 1127862 - RNA, 22 nt, Human
augcacccagugucuggacuau

SEQ ID NO: 1127863 - RNA, 22 nt, Human
aaggagcucccggcagaccagg

SEQ ID NO: 1127864 - RNA, 22 nt, Human
cuucccacuaguaucacagagc

SEQ ID NO: 1127865 - RNA, 22 nt, Human
aggcccugaagucggccccuca

SEQ ID NO: 1127866 - RNA, 22 nt, Human
aucucagacauguuguccauga

SEQ ID NO: 1127867 - RNA, 22 nt, Human
gugccugggguugagcuaugaa

SEQ ID NO: 1127868 - RNA, 22 nt, Human
acuuccugggcaugcagagucc

SEQ ID NO: 1127869 - RNA, 22 nt, Human
aggacuucuccgauaagucaga

SEQ ID NO: 1127870 - RNA, 22 nt, Human
ggcacugagaggcucuuccuaa

SEQ ID NO: 1127871 - RNA, 22 nt, Human
auaugcacacucugcccacaga

SEQ ID NO: 1127872 - RNA, 21 nt, Human
ugcaggaaagugcugcgaccc

SEQ ID NO: 1127873 - RNA, 22 nt, Human
cuccucuggcuuccuggaggca

SEQ ID NO: 1127874 - RNA, 22 nt, Human
uggcucugucaaacugcacaca

SEQ ID NO: 1127875 - RNA, 22 nt, Human
cacugggcaauucugagccuaa

SEQ ID NO: 1127876 - RNA, 22 nt, Human
ccucaugguacuuacuguagcu

SEQ ID NO: 1127877 - RNA, 22 nt, Human
ggcccugggaugcucagcagug

SEQ ID NO: 1127878 - RNA, 22 nt, Human
agauggguaacuggagucugcu

SEQ ID NO: 1127879 - RNA, 22 nt, Human
cccugagaugccucacccuagu

SEQ ID NO: 1127880 - RNA, 19 nt, Human
uuacaucugcaacacuggu

SEQ ID NO: 1127881 - RNA, 22 nt, Human
acaacaggguaaggcaggccau

SEQ ID NO: 1127882 - RNA, 22 nt, Human
gaugguuuggaaugaaguagcu

SEQ ID NO: 1127883 - RNA, 22 nt, Human
aguaaaaauugaggugcaaaau

SEQ ID NO: 1127884 - RNA, 22 nt, Human
agcuggcuccagaaggagucgu

SEQ ID NO: 1127885 - RNA, 22 nt, Human
cuugccuucuguuccuauagaa

SEQ ID NO: 1127886 - RNA, 22 nt, Human
aaccaggacaauuugaauagaa

SEQ ID NO: 1127887 - RNA, 22 nt, Human
ucuugggauugcccugcaguuc

SEQ ID NO: 1127888 - RNA, 22 nt, Human
ccuguggcacaugcagggauuc

SEQ ID NO: 1127889 - RNA, 22 nt, Human
gggcacugugcuaggugcugag

SEQ ID NO: 1127890 - RNA, 22 nt, Human
gguggccucugcaggccucgac

SEQ ID NO: 1127891 - RNA, 22 nt, Human
ggcaguggugggaggcucgcuc

SEQ ID NO: 1127892 - RNA, 22 nt, Human
auuguauuuccagcuugaaugu

SEQ ID NO: 1127893 - RNA, 22 nt, Human
ugugccuggaucucugugacaa

SEQ ID NO: 1127894 - RNA, 22 nt, Human
agcuccugcacccagccuugag

SEQ ID NO: 1127895 - RNA, 22 nt, Human
aucaaaguggaaguuuacuagg

SEQ ID NO: 1127896 - RNA, 22 nt, Human
ugguuugcccacucgagugauu

SEQ ID NO: 1127897 - RNA, 22 nt, Human
cucugagcugaaacaugagcau

SEQ ID NO: 1127898 - RNA, 22 nt, Human
gcacagggaggcuggccuggcc

SEQ ID NO: 1127899 - RNA, 22 nt, Human
aaaugcagguucuugagccaag

SEQ ID NO: 1127900 - RNA, 22 nt, Human
ggugggugagcccugggagcug

SEQ ID NO: 1127901 - RNA, 22 nt, Human
uaagaacaagcuggggguucca

SEQ ID NO: 1127902 - RNA, 22 nt, Human
agggcagcuagcuguagaaaga

SEQ ID NO: 1127903 - RNA, 17 nt, Human
ucagcaaagacaaagga

SEQ ID NO: 1127904 - RNA, 22 nt, Human
uucucuggaacugaaacaagau

SEQ ID NO: 1127905 - RNA, 23 nt, Human
uuguuuuuagagguggcaugaga

SEQ ID NO: 1127906 - RNA, 22 nt, Human
ggcugcuguuucagagacuguu

SEQ ID NO: 1127907 - RNA, 22 nt, Human
ccagcuucucucugaugcagcu

SEQ ID NO: 1127908 - RNA, 22 nt, Human
agcaggguuccaggaguugcag

SEQ ID NO: 1127909 - RNA, 23 nt, Human
uuacuuuugcaccaaccuaauau

SEQ ID NO: 1127910 - RNA, 22 nt, Human
acccugggucauauacagugug

SEQ ID NO: 1127911 - RNA, 22 nt, Human
ugagcccuaagggucaagcagg

SEQ ID NO: 1127912 - RNA, 22 nt, Human
agccaggauggucucgaucggc

SEQ ID NO: 1127913 - RNA, 22 nt, Human
auuaggcauauaugcuuuuaau

SEQ ID NO: 1127914 - RNA, 22 nt, Human
uucaagauaauaggaaugaaaa

SEQ ID NO: 1127915 - RNA, 22 nt, Human
aucaaaguccaucagaagguag

SEQ ID NO: 1127916 - RNA, 22 nt, Human
ccuccaaguuugacucaggaca

SEQ ID NO: 1127917 - RNA, 21 nt, Human
gcagggacaaagcuucaggag

SEQ ID NO: 1127918 - RNA, 22 nt, Human
gcugucagugaggugagacaug

SEQ ID NO: 1127919 - RNA, 22 nt, Human
aggggccucgcaggaccgcucc

SEQ ID NO: 1127920 - RNA, 22 nt, Human
uuucuaauaguugagucagcua

SEQ ID NO: 1127921 - RNA, 22 nt, Human
ugccaaggguaugggcaagaua

SEQ ID NO: 1127922 - RNA, 22 nt, Human
caucacuguccaaaguucaguu

SEQ ID NO: 1127923 - RNA, 22 nt, Human
cagccagcuggcacugugagua

SEQ ID NO: 1127924 - RNA, 22 nt, Human
uggccugggugcugcugacauc

SEQ ID NO: 1127925 - RNA, 22 nt, Human
guguggcugauugacaugguca

SEQ ID NO: 1127926 - RNA, 22 nt, Human
uugugcauuucucugagugugu

SEQ ID NO: 1127927 - RNA, 22 nt, Human
ucuggagagucacagugccaga

SEQ ID NO: 1127928 - RNA, 22 nt, Human
ugaaagguuauuuaggucugcu

SEQ ID NO: 1127929 - RNA, 22 nt, Human
ggcagccuccagggcacuggug

SEQ ID NO: 1127930 - RNA, 20 nt, Human
acauugauuauguuuguaga

SEQ ID NO: 1127931 - RNA, 22 nt, Human
ccucugcagcagagagccagag

SEQ ID NO: 1127932 - RNA, 22 nt, Human
aacagaauaguugauguacagu

SEQ ID NO: 1127933 - RNA, 22 nt, Human
ggcugcugguagggguaggaag

SEQ ID NO: 1127934 - RNA, 21 nt, Human
uggagcugaauuuuuggcauc

SEQ ID NO: 1127935 - RNA, 22 nt, Human
cauugcacucuggcuggaacgg

SEQ ID NO: 1127936 - RNA, 22 nt, Human
guuugcauguguacuuaauugg

SEQ ID NO: 1127937 - RNA, 22 nt, Human
uacacauguuuggcaaguaugu

SEQ ID NO: 1127938 - RNA, 22 nt, Human
ccugggucacucaggcaggcgg

SEQ ID NO: 1127939 - RNA, 22 nt, Human
acagagguguguguaggacagu

SEQ ID NO: 1127940 - RNA, 22 nt, Human
agccugcaggaugggcagcacc

SEQ ID NO: 1127941 - RNA, 22 nt, Human
ugauuucccucaucauaacaga

SEQ ID NO: 1127942 - RNA, 22 nt, Human
ccugcagguaaggcuaacugcc

SEQ ID NO: 1127943 - RNA, 22 nt, Human
cccaugccuucugacucacagg

SEQ ID NO: 1127944 - RNA, 22 nt, Human
gaaugugucacccugucccaug

SEQ ID NO: 1127945 - RNA, 19 nt, Human
ccuggcccugcugcgcggg

SEQ ID NO: 1127946 - RNA, 22 nt, Human
ucuaaaaaagucuguucacuug

SEQ ID NO: 1127947 - RNA, 22 nt, Human
aucuacaggcugaggugggagg

SEQ ID NO: 1127948 - RNA, 22 nt, Human
ucccagagucuucuccuguaau

SEQ ID NO: 1127949 - RNA, 22 nt, Human
cauuuguauguuccuccuuagg

SEQ ID NO: 1127950 - RNA, 22 nt, Human
gagcugccugaacaagcagcag

SEQ ID NO: 1127951 - RNA, 22 nt, Human
acagccuguguaccagcuggga

SEQ ID NO: 1127952 - RNA, 22 nt, Human
uuaggcaaugcucucaaauuug

SEQ ID NO: 1127953 - RNA, 22 nt, Human
ucagggcagguuaacuugggug

SEQ ID NO: 1127954 - RNA, 22 nt, Human
augaaaacggaccagagcuauu

SEQ ID NO: 1127955 - RNA, 22 nt, Human
auaagagcuagucuuuuccuug

SEQ ID NO: 1127956 - RNA, 22 nt, Human
cacuuaagcaguuaauuuaucu

SEQ ID NO: 1127957 - RNA, 22 nt, Human
caaggaaacaugaaaugcauug

SEQ ID NO: 1127958 - RNA, 22 nt, Human
gggagcugguuccugcccucca

SEQ ID NO: 1127959 - RNA, 22 nt, Human
augucuuuggcuuugacauggc

SEQ ID NO: 1127960 - RNA, 22 nt, Human
acagccagaggugguccugggu

SEQ ID NO: 1127961 - RNA, 22 nt, Human
uuauuauaaugagggauaaaaa

SEQ ID NO: 1127962 - RNA, 22 nt, Human
caggaccccauauucacugaac

SEQ ID NO: 1127963 - RNA, 23 nt, Human
auacauacagucuuacugacuuu

SEQ ID NO: 1127964 - RNA, 22 nt, Human
cacaugggugugccuggaggaa

SEQ ID NO: 1127965 - RNA, 18 nt, Human
cucucuuuccacucuuug

SEQ ID NO: 1127966 - RNA, 22 nt, Human
ccagagccucuuaugaagaucg

SEQ ID NO: 1127967 - RNA, 22 nt, Human
agccccaggcccggacgccucu

SEQ ID NO: 1127968 - RNA, 19 nt, Human
gcuuuuuguugucaaaggu

SEQ ID NO: 1127969 - RNA, 22 nt, Human
aggcuucccagcugagcucagc

SEQ ID NO: 1127970 - RNA, 22 nt, Human
aaaucagugcucauuugaaagg

SEQ ID NO: 1127971 - RNA, 20 nt, Human
agggucaguagcacagagcu

SEQ ID NO: 1127972 - RNA, 22 nt, Human
agcugcuguggggcucggccug

SEQ ID NO: 1127973 - RNA, 22 nt, Human
ucuggcuccguguccgcuccca

SEQ ID NO: 1127974 - RNA, 22 nt, Human
ugugaggagaggcccagcuccc

SEQ ID NO: 1127975 - RNA, 22 nt, Human
guccugggcccaggggcugccu

SEQ ID NO: 1127976 - RNA, 22 nt, Human
caugugucaaaugauguagcug

SEQ ID NO: 1127977 - RNA, 22 nt, Human
ggcagcuccuccuagucugccc

SEQ ID NO: 1127978 - RNA, 20 nt, Human
cuuuggcaaugagaacaggg

SEQ ID NO: 1127979 - RNA, 22 nt, Human
caguauuuauggcuugaguauu

SEQ ID NO: 1127980 - RNA, 22 nt, Human
uuagucuucuuccuuauauguu

SEQ ID NO: 1127981 - RNA, 22 nt, Human
ugguaaagaaggcuagaucuga

SEQ ID NO: 1127982 - RNA, 22 nt, Human
uacaguagaauuuuuaguaacu

SEQ ID NO: 1127983 - RNA, 22 nt, Human
gaaaugcagaaccugagaccau

SEQ ID NO: 1127984 - RNA, 22 nt, Human
cugcugucuuuauuucacugcu

SEQ ID NO: 1127985 - RNA, 22 nt, Human
ucuuuggauaucgcuagaccgu

SEQ ID NO: 1127986 - RNA, 22 nt, Human
gggcuggcgggaaaggcaauuc

SEQ ID NO: 1127987 - RNA, 22 nt, Human
ucauugcagacuaacaaucuca

SEQ ID NO: 1127988 - RNA, 22 nt, Human
ccccuuccuuccucagacagcc

SEQ ID NO: 1127989 - RNA, 22 nt, Human
uuagaaaugauuucaccucuuu

SEQ ID NO: 1127990 - RNA, 22 nt, Human
ucuggcuccacaccucacugca

SEQ ID NO: 1127991 - RNA, 22 nt, Human
ugagggaguuggguguauagga

SEQ ID NO: 1127992 - RNA, 22 nt, Human
ccaggcugcuuagccuuaucuu

SEQ ID NO: 1127993 - RNA, 22 nt, Human
gaggccacagcuaucagggaca

SEQ ID NO: 1127994 - RNA, 22 nt, Human
aaauguguguauguacauauau

SEQ ID NO: 1127995 - RNA, 22 nt, Human
gcccucagcuccuggacacaug

SEQ ID NO: 1127996 - RNA, 22 nt, Human
uuaauuuauguccaaaccagau

SEQ ID NO: 1127997 - RNA, 22 nt, Human
gggcuugcugauuugggcagga

SEQ ID NO: 1127998 - RNA, 22 nt, Human
cuuccuguugucacagucugcg

SEQ ID NO: 1127999 - RNA, 22 nt, Human
gacucagugauuugacaugccu

SEQ ID NO: 1128000 - RNA, 22 nt, Human
cagcuccagcccaggcagcucc

SEQ ID NO: 1128001 - RNA, 22 nt, Human
ggccugaggcaauagucagaca

SEQ ID NO: 1128002 - RNA, 22 nt, Human
auguccuuugcuucucuggucc

SEQ ID NO: 1128003 - RNA, 22 nt, Human
acaauguuucucuuuagucauu

SEQ ID NO: 1128004 - RNA, 22 nt, Human
agagcuggggccagagucaagg

SEQ ID NO: 1128005 - RNA, 22 nt, Human
aaggcacuuuucuaaagaccuu

SEQ ID NO: 1128006 - RNA, 20 nt, Human
aggaaaaggguggugguaga

SEQ ID NO: 1128007 - RNA, 22 nt, Human
caaagcaaggcucaguuugaac

SEQ ID NO: 1128008 - RNA, 22 nt, Human
aagcagcacaguaauauuggug

SEQ ID NO: 1128009 - RNA, 22 nt, Human
aucuaggauuugaaugcacagu

SEQ ID NO: 1128010 - RNA, 22 nt, Human
cuuccaaacccaggguaugggc

SEQ ID NO: 1128011 - RNA, 22 nt, Human
guaucuuuuacaccaggaaauu

SEQ ID NO: 1128012 - RNA, 22 nt, Human
ccacugucuuuuccaggcugaa

SEQ ID NO: 1128013 - RNA, 19 nt, Human
ggcugcugguuacagaggc

SEQ ID NO: 1128014 - RNA, 22 nt, Human
gaaggagagggucaaggauaau

SEQ ID NO: 1128015 - RNA, 18 nt, Human
caauguuuuagaucucua

SEQ ID NO: 1128016 - RNA, 22 nt, Human
gcagcuggucuggccuagagua

SEQ ID NO: 1128017 - RNA, 22 nt, Human
cuggccuuggugcuugcagaca

SEQ ID NO: 1128018 - RNA, 22 nt, Human
gcacacagauuaggaaacagaa

SEQ ID NO: 1128019 - RNA, 22 nt, Human
aggcucagagagcuguguccau

SEQ ID NO: 1128020 - RNA, 23 nt, Human
ggcucugugcugggccugcagga

SEQ ID NO: 1128021 - RNA, 22 nt, Human
agcagcugguaggaguggccac

SEQ ID NO: 1128022 - RNA, 20 nt, Human
ugaaaggugggaauuguggg

SEQ ID NO: 1128023 - RNA, 22 nt, Human
uucacaggugacuggggauaac

SEQ ID NO: 1128024 - RNA, 22 nt, Human
ggguggaggagaacaggcccca

SEQ ID NO: 1128025 - RNA, 22 nt, Human
agagccuggacuuuucugagcc

SEQ ID NO: 1128026 - RNA, 22 nt, Human
cuuguacauagagaagaagccu

SEQ ID NO: 1128027 - RNA, 22 nt, Human
ugcucuggguccugggccuccu

SEQ ID NO: 1128028 - RNA, 22 nt, Human
cagagcugauuggauccagaga

SEQ ID NO: 1128029 - RNA, 22 nt, Human
uugaggagcacuagucagguau

SEQ ID NO: 1128030 - RNA, 22 nt, Human
cuucuugcaauuuucaucuuau

SEQ ID NO: 1128031 - RNA, 22 nt, Human
uuugcauuccugccugcauuca

SEQ ID NO: 1128032 - RNA, 22 nt, Human
cugggccagucucggccgcucu

SEQ ID NO: 1128033 - RNA, 22 nt, Human
ccucacagggccaggccccuca

SEQ ID NO: 1128034 - RNA, 22 nt, Human
gagcccaggcagagguugcagu

SEQ ID NO: 1128035 - RNA, 22 nt, Human
uggcucagugcauucacaguaa

SEQ ID NO: 1128036 - RNA, 22 nt, Human
ugaagcaggaaacuucuuguuu

SEQ ID NO: 1128037 - RNA, 22 nt, Human
gagauucuguagucaggcaucu

SEQ ID NO: 1128038 - RNA, 22 nt, Human
auaacagauacucucugugagg

SEQ ID NO: 1128039 - RNA, 22 nt, Human
ccacagggacuguuaaaacccu

SEQ ID NO: 1128040 - RNA, 22 nt, Human
ggcugccugcuccuccugcacg

SEQ ID NO: 1128041 - RNA, 22 nt, Human
uugaacaguuuugucagguuca

SEQ ID NO: 1128042 - RNA, 22 nt, Human
aagcugccagauucagucugcu

SEQ ID NO: 1128043 - RNA, 22 nt, Human
ugaacgcagguccacauggcuc

SEQ ID NO: 1128044 - RNA, 22 nt, Human
gaggaccacagaugagccugca

SEQ ID NO: 1128045 - RNA, 22 nt, Human
uuugucagucaugucugcuuuu

SEQ ID NO: 1128046 - RNA, 22 nt, Human
ucucagagggaaacaugaguga

SEQ ID NO: 1128047 - RNA, 22 nt, Human
gcuccugggcucuaccuugcua

SEQ ID NO: 1128048 - RNA, 22 nt, Human
gagcucuguguagccugagggu

SEQ ID NO: 1128049 - RNA, 22 nt, Human
ugucuuuucuacuguaagcaua

SEQ ID NO: 1128050 - RNA, 22 nt, Human
accugagccuagggagguugag

SEQ ID NO: 1128051 - RNA, 22 nt, Human
ccugucugaggaggugcucuuu

SEQ ID NO: 1128052 - RNA, 22 nt, Human
gcuggccaggugcuuugguucu

SEQ ID NO: 1128053 - RNA, 22 nt, Human
ucaggaguccugccugcagccu

SEQ ID NO: 1128054 - RNA, 22 nt, Human
ugacagaaagaauaugucaauc

SEQ ID NO: 1128055 - RNA, 22 nt, Human
gccagccugugcuuggccaggc

SEQ ID NO: 1128056 - RNA, 22 nt, Human
agucccagcccaguccuguaag

SEQ ID NO: 1128057 - RNA, 22 nt, Human
ucaaaguagggguaagccaggc

SEQ ID NO: 1128058 - RNA, 22 nt, Human
guggguggaggcgucgagggca

SEQ ID NO: 1128059 - RNA, 22 nt, Human
uugaaaggugacauuguuagag

SEQ ID NO: 1128060 - RNA, 22 nt, Human
ccagcuggucugugcucauguu

SEQ ID NO: 1128061 - RNA, 22 nt, Human
cuccucccugcgauugcucugc

SEQ ID NO: 1128062 - RNA, 22 nt, Human
gcagugcugaucccauggcaga

SEQ ID NO: 1128063 - RNA, 22 nt, Human
gcagcaggcuuuucauaccuug

SEQ ID NO: 1128064 - RNA, 22 nt, Human
ugucuuccucuuggcuugagcu

SEQ ID NO: 1128065 - RNA, 22 nt, Human
agggaucaaaaaauguacaugc

SEQ ID NO: 1128066 - RNA, 22 nt, Human
uccagccaagggagguuacuag

SEQ ID NO: 1128067 - RNA, 22 nt, Human
gggcucugguacuuccuggcuc

SEQ ID NO: 1128068 - RNA, 22 nt, Human
agagaacaaauuaaaggugguu

SEQ ID NO: 1128069 - RNA, 22 nt, Human
cacugcaguuccccagugcgca

SEQ ID NO: 1128070 - RNA, 22 nt, Human
auaaggcagaaaugauucuagu

SEQ ID NO: 1128071 - RNA, 22 nt, Human
ugggggugacuaucucgggaau

SEQ ID NO: 1128072 - RNA, 22 nt, Human
cugggccugggaggccaggucu

SEQ ID NO: 1128073 - RNA, 22 nt, Human
guuuuguugcugcagagcucaa

SEQ ID NO: 1128074 - RNA, 22 nt, Human
caggauaaauaguaaauguaag

SEQ ID NO: 1128075 - RNA, 22 nt, Human
ggcccugagcugaaguacugug

SEQ ID NO: 1128076 - RNA, 22 nt, Human
aauuaacagagggcuuauuacu

SEQ ID NO: 1128077 - RNA, 22 nt, Human
agggauguaaauucuucuucuu

SEQ ID NO: 1128078 - RNA, 22 nt, Human
ggccucucauguccugggcuuc

SEQ ID NO: 1128079 - RNA, 19 nt, Human
gccugcagaaaaggcaggg

SEQ ID NO: 1128080 - RNA, 22 nt, Human
cacugcuucuggaggaauuugg

SEQ ID NO: 1128081 - RNA, 22 nt, Human
uuauuauuuuguguacagcaaa

SEQ ID NO: 1128082 - RNA, 22 nt, Human
cuggcaggaaguuagaugguaa

SEQ ID NO: 1128083 - RNA, 22 nt, Human
uuaauacuauaauuugaaguac

SEQ ID NO: 1128084 - RNA, 22 nt, Human
gcaugugucuccccaguggagg

SEQ ID NO: 1128085 - RNA, 22 nt, Human
auucuaggcuugaaacaugaag

SEQ ID NO: 1128086 - RNA, 21 nt, Human
cucacaggaugcaguguuacu

SEQ ID NO: 1128087 - RNA, 20 nt, Human
uggcuccucuuggcuguggc

SEQ ID NO: 1128088 - RNA, 22 nt, Human
gcugcccuaauaucacauguua

SEQ ID NO: 1128089 - RNA, 22 nt, Human
ucauaauacaaagaguucugca

SEQ ID NO: 1128090 - RNA, 22 nt, Human
gggcucucaugaguguguggua

SEQ ID NO: 1128091 - RNA, 22 nt, Human
auauaaagagcuuaguauagug

SEQ ID NO: 1128092 - RNA, 22 nt, Human
aaacuguaagagaauaaacuac

SEQ ID NO: 1128093 - RNA, 22 nt, Human
gcaggcagucaucuuucauauu

SEQ ID NO: 1128094 - RNA, 22 nt, Human
ucucccaggugggugccuggag

SEQ ID NO: 1128095 - RNA, 22 nt, Human
cagcuggcuccaccucugggcu

SEQ ID NO: 1128096 - RNA, 20 nt, Human
cuguggcucaugcaucugcc

SEQ ID NO: 1128097 - RNA, 22 nt, Human
cugcucugagaggcucuuccua

SEQ ID NO: 1128098 - RNA, 23 nt, Human
ugucauugugacuacagaaccag

SEQ ID NO: 1128099 - RNA, 22 nt, Human
aucaguuucacuugcuugcaaa

SEQ ID NO: 1128100 - RNA, 22 nt, Human
caagauggacauaaggagagaa

SEQ ID NO: 1128101 - RNA, 22 nt, Human
auaaagucucauggguaaaugu

SEQ ID NO: 1128102 - RNA, 22 nt, Human
cacaaaaguaggaggcaggcgg

SEQ ID NO: 1128103 - RNA, 22 nt, Human
ugaggaggucagagucuggcug

SEQ ID NO: 1128104 - RNA, 22 nt, Human
aaggcacucauucaaggagaua

SEQ ID NO: 1128105 - RNA, 22 nt, Human
ugcaaucucggcacuuugggag

SEQ ID NO: 1128106 - RNA, 22 nt, Human
gggugggguucaggaaucuuca

SEQ ID NO: 1128107 - RNA, 22 nt, Human
caggaacaauguaagucucauu

SEQ ID NO: 1128108 - RNA, 20 nt, Human
aggagaaauucgggacaccu

SEQ ID NO: 1128109 - RNA, 22 nt, Human
ggucauuguucuuuucugugau

SEQ ID NO: 1128110 - RNA, 22 nt, Human
uugaagcacaaugucuuuuauc

SEQ ID NO: 1128111 - RNA, 22 nt, Human
ugaaaaggaguccuuguuuuca

SEQ ID NO: 1128112 - RNA, 22 nt, Human
gucagugucuuaacagagauua

SEQ ID NO: 1128113 - RNA, 22 nt, Human
aauguguacuuuuucaugcuca

SEQ ID NO: 1128114 - RNA, 23 nt, Human
ucacaggggccagcgcucugugg

SEQ ID NO: 1128115 - RNA, 23 nt, Human
gcagauggccccagagugcugcc

SEQ ID NO: 1128116 - RNA, 22 nt, Human
gugugcgcuggugcuuggucaa

SEQ ID NO: 1128117 - RNA, 22 nt, Human
gaagcccaggcuuccuuggcuu

SEQ ID NO: 1128118 - RNA, 22 nt, Human
agucaguguagaaagcccaggc

SEQ ID NO: 1128119 - RNA, 22 nt, Human
ggcagggcuugucucugugaug

SEQ ID NO: 1128120 - RNA, 22 nt, Human
gacugucauucuagugcccaug

SEQ ID NO: 1128121 - RNA, 22 nt, Human
cagcccaaagccccaggcuaga

SEQ ID NO: 1128122 - RNA, 22 nt, Human
cccucugcucaggugcauaggc

SEQ ID NO: 1128123 - RNA, 22 nt, Human
gcugagugauugauauuuuagu

SEQ ID NO: 1128124 - RNA, 22 nt, Human
uggccuggggaagaccaugggc

SEQ ID NO: 1128125 - RNA, 22 nt, Human
gccuggcaggccugggccagca

SEQ ID NO: 1128126 - RNA, 16 nt, Human
uaugugugugggagug

SEQ ID NO: 1128127 - RNA, 22 nt, Human
ggguacaaagauuucauaagau

SEQ ID NO: 1128128 - RNA, 22 nt, Human
ggacacaguggaagacagcuug

SEQ ID NO: 1128129 - RNA, 22 nt, Human
ggauggagaugaccauggugac

SEQ ID NO: 1128130 - RNA, 22 nt, Human
aaaucagucccucuuggaauuu

SEQ ID NO: 1128131 - RNA, 22 nt, Human
cacacaugucucuccaugcucu

SEQ ID NO: 1128132 - RNA, 22 nt, Human
acagggucauuuuaugaucugu

SEQ ID NO: 1128133 - RNA, 22 nt, Human
ggagucaggagcaggcugggcu

SEQ ID NO: 1128134 - RNA, 22 nt, Human
caggaaaaaugccaggagucag

SEQ ID NO: 1128135 - RNA, 22 nt, Human
acagacauuuucuguauugccu

SEQ ID NO: 1128136 - RNA, 22 nt, Human
gagguggguguaucacagguca

SEQ ID NO: 1128137 - RNA, 22 nt, Human
augggaggguggaaaggcucug

SEQ ID NO: 1128138 - RNA, 22 nt, Human
agaugcuucaguguuuaauuua

SEQ ID NO: 1128139 - RNA, 22 nt, Human
uuuaagaugguauuuuauaaag

SEQ ID NO: 1128140 - RNA, 22 nt, Human
cugggagcccgcguccuggugg

SEQ ID NO: 1128141 - RNA, 22 nt, Human
uaagaacagugucugucucaca

SEQ ID NO: 1128142 - RNA, 22 nt, Human
uuuuuccuagcgauuugucagc

SEQ ID NO: 1128143 - RNA, 22 nt, Human
cugggcugcaucaaagaggcau

SEQ ID NO: 1128144 - RNA, 22 nt, Human
ccucugaggucauggacuuggc

SEQ ID NO: 1128145 - RNA, 22 nt, Human
ccugggcauaaaucacuccaag

SEQ ID NO: 1128146 - RNA, 22 nt, Human
ccucagcucuucccugugcaca

SEQ ID NO: 1128147 - RNA, 22 nt, Human
caaugguugauuaaaauuuagc

SEQ ID NO: 1128148 - RNA, 20 nt, Human
uuugagaccagucugcccaa

SEQ ID NO: 1128149 - RNA, 22 nt, Human
cccaggcuggagugcaauggug

SEQ ID NO: 1128150 - RNA, 22 nt, Human
caggugggccaugaaaaaugac

SEQ ID NO: 1128151 - RNA, 22 nt, Human
ucacugaauacuugucucaucc

SEQ ID NO: 1128152 - RNA, 22 nt, Human
gaacagcccuguuaagucuguu

SEQ ID NO: 1128153 - RNA, 22 nt, Human
uauugacaauuugugaaacuau

SEQ ID NO: 1128154 - RNA, 22 nt, Human
caggggcaagaaugcugucagc

SEQ ID NO: 1128155 - RNA, 22 nt, Human
caguuuuucaaaauuacaugau

SEQ ID NO: 1128156 - RNA, 22 nt, Human
agacagagauacuauguuguca

SEQ ID NO: 1128157 - RNA, 22 nt, Human
ugccugucuuuccucccucgua

SEQ ID NO: 1128158 - RNA, 22 nt, Human
cugaaggagguagagugacaua

SEQ ID NO: 1128159 - RNA, 22 nt, Human
aaugcuagugugauauguaagg

SEQ ID NO: 1128160 - RNA, 22 nt, Human
uauuuugacuauuaaaccaaca

SEQ ID NO: 1128161 - RNA, 22 nt, Human
aguguccccuccaagggccugg

SEQ ID NO: 1128162 - RNA, 22 nt, Human
aguauuuccuggcuuaucugcu

SEQ ID NO: 1128163 - RNA, 22 nt, Human
ugagcuggucuugaguguagcu

SEQ ID NO: 1128164 - RNA, 22 nt, Human
aagcugccaccagcccagggca

SEQ ID NO: 1128165 - RNA, 22 nt, Human
ucccaaggcacagggcagggac

SEQ ID NO: 1128166 - RNA, 22 nt, Human
aaaugguaagacaacacauuau

SEQ ID NO: 1128167 - RNA, 22 nt, Human
cagccaucccagccugugguuc

SEQ ID NO: 1128168 - RNA, 22 nt, Human
uuacuuugaugaucaaugagcg

SEQ ID NO: 1128169 - RNA, 22 nt, Human
cugugagcuggguggccaggac

SEQ ID NO: 1128170 - RNA, 22 nt, Human
cccugcagccggccagcucauu

SEQ ID NO: 1128171 - RNA, 22 nt, Human
cugcucugaguauuaacggagg

SEQ ID NO: 1128172 - RNA, 22 nt, Human
ugggccuguugccugaguccau

SEQ ID NO: 1128173 - RNA, 19 nt, Human
guggccugcgcugggugcg

SEQ ID NO: 1128174 - RNA, 21 nt, Human
aggaaguggccagauugggaa

SEQ ID NO: 1128175 - RNA, 22 nt, Human
cagguggcaugacugccuacaa

SEQ ID NO: 1128176 - RNA, 22 nt, Human
ccaggguggggcaggcccacug

SEQ ID NO: 1128177 - RNA, 22 nt, Human
gaggcugcuguuagcccugggc

SEQ ID NO: 1128178 - RNA, 22 nt, Human
acagagcugggaucugaaccca

SEQ ID NO: 1128179 - RNA, 22 nt, Human
cacucugcgcugggcgccagcg

SEQ ID NO: 1128180 - RNA, 18 nt, Human
ggcugccuguuccugaag

SEQ ID NO: 1128181 - RNA, 23 nt, Human
uugucugugcuuuuccaguugcu

SEQ ID NO: 1128182 - RNA, 22 nt, Human
ccucagaggugaacaucagugc

SEQ ID NO: 1128183 - RNA, 22 nt, Human
ucagaacagaagaaggaacacg

SEQ ID NO: 1128184 - RNA, 22 nt, Human
agagaacacgugcaucugcaau

SEQ ID NO: 1128185 - RNA, 22 nt, Human
cucugagcagaggccguggcua

SEQ ID NO: 1128186 - RNA, 22 nt, Human
agggagcuguggucagcucagu

SEQ ID NO: 1128187 - RNA, 22 nt, Human
ccucccacauugaggacaugcu

SEQ ID NO: 1128188 - RNA, 22 nt, Human
uccagcagguuggucaggugca

SEQ ID NO: 1128189 - RNA, 22 nt, Human
uuuguaaaaggaggaagcaugg

SEQ ID NO: 1128190 - RNA, 22 nt, Human
ccacaggaccagaggagaucac

SEQ ID NO: 1128191 - RNA, 22 nt, Human
ugauuuccucuacuagcaauua

SEQ ID NO: 1128192 - RNA, 22 nt, Human
auaaaaguaggaccaacuuaca

SEQ ID NO: 1128193 - RNA, 19 nt, Human
cuggggcuuugguacugcc

SEQ ID NO: 1128194 - RNA, 22 nt, Human
aaagccuuggucaucugguucc

SEQ ID NO: 1128195 - RNA, 22 nt, Human
ggucccaggcucccucuugucc

SEQ ID NO: 1128196 - RNA, 22 nt, Human
uggcuuucucccccagcuucuc

SEQ ID NO: 1128197 - RNA, 22 nt, Human
cacuggcaugugaggcgguggc

SEQ ID NO: 1128198 - RNA, 22 nt, Human
agacagcaugauacaugaugcu

SEQ ID NO: 1128199 - RNA, 22 nt, Human
gugugugcaagagguuuauuga

SEQ ID NO: 1128200 - RNA, 22 nt, Human
agggggcaggagagaccugcug

SEQ ID NO: 1128201 - RNA, 21 nt, Human
uccucugcucucauaccacaa

SEQ ID NO: 1128202 - RNA, 22 nt, Human
auguacaguuucuagacucaaa

SEQ ID NO: 1128203 - RNA, 22 nt, Human
acaugucaauuuaguacucuua

SEQ ID NO: 1128204 - RNA, 17 nt, Human
ucagcaggggccaagcu

SEQ ID NO: 1128205 - RNA, 22 nt, Human
auggauaagaacaaauaucuga

SEQ ID NO: 1128206 - RNA, 22 nt, Human
agggaagagcuugcaagaaacc

SEQ ID NO: 1128207 - RNA, 22 nt, Human
gagacaaaaguuggagugcaag

SEQ ID NO: 1128208 - RNA, 22 nt, Human
gggccugggaacuugcauuuag

SEQ ID NO: 1128209 - RNA, 19 nt, Human
auuuacugccuaaaaucuc

SEQ ID NO: 1128210 - RNA, 22 nt, Human
uucauuccuucuguaccuugcc

SEQ ID NO: 1128211 - RNA, 22 nt, Human
cuggagcuaauaauccaucuga

SEQ ID NO: 1128212 - RNA, 22 nt, Human
ugagacaguucugcagcugggu

SEQ ID NO: 1128213 - RNA, 23 nt, Human
agggguggucaguacccgcagug

SEQ ID NO: 1128214 - RNA, 19 nt, Human
uagcagcugccaaaggaga

SEQ ID NO: 1128215 - RNA, 22 nt, Human
gugcugucaauugcuuucagua

SEQ ID NO: 1128216 - RNA, 22 nt, Human
gaugauggacaaagcauuggug

SEQ ID NO: 1128217 - RNA, 22 nt, Human
caggcacuagcagaaugaggcu

SEQ ID NO: 1128218 - RNA, 22 nt, Human
accagcagaguugaggaggaca

SEQ ID NO: 1128219 - RNA, 22 nt, Human
accuggcaugaagcaugccuua

SEQ ID NO: 1128220 - RNA, 22 nt, Human
cagcaggggaacugugggccag

SEQ ID NO: 1128221 - RNA, 22 nt, Human
augggugugaaaauggucaucu

SEQ ID NO: 1128222 - RNA, 22 nt, Human
augucccagcugagagacaacu

SEQ ID NO: 1128223 - RNA, 19 nt, Human
uggcugggugccaauggcc

SEQ ID NO: 1128224 - RNA, 20 nt, Human
acugccuugguucaguaggu

SEQ ID NO: 1128225 - RNA, 22 nt, Human
cagagcuggagcuugaauggag

SEQ ID NO: 1128226 - RNA, 21 nt, Human
agcuggcagauauggugucug

SEQ ID NO: 1128227 - RNA, 22 nt, Human
aaggcucucugauggcagcagu

SEQ ID NO: 1128228 - RNA, 18 nt, Human
cauuguacaaugcuuuau

SEQ ID NO: 1128229 - RNA, 22 nt, Human
acagcuggaggccccauugucc

SEQ ID NO: 1128230 - RNA, 22 nt, Human
gagcucagauucuggugucaga

SEQ ID NO: 1128231 - RNA, 23 nt, Human
gucagggcuggggucagagugac

SEQ ID NO: 1128232 - RNA, 22 nt, Human
uggcucaguuuagcagcucagu

SEQ ID NO: 1128233 - RNA, 18 nt, Human
cagcugccagcucaugga

SEQ ID NO: 1128234 - RNA, 22 nt, Human
uauuucuguaacucagggucug

SEQ ID NO: 1128235 - RNA, 22 nt, Human
cugaggcaugaaugugggcuuu

SEQ ID NO: 1128236 - RNA, 17 nt, Human
agaugcuggccacaugu

SEQ ID NO: 1128237 - RNA, 22 nt, Human
gcugguuagaaaacagagcuca

SEQ ID NO: 1128238 - RNA, 22 nt, Human
ucaggaucaggggccuuuccuu

SEQ ID NO: 1128239 - RNA, 22 nt, Human
gccugucugcgucacgcuuauu

SEQ ID NO: 1128240 - RNA, 22 nt, Human
uggcuccuaucaaggagugggu

SEQ ID NO: 1128241 - RNA, 22 nt, Human
ucagcugagcuccagcucauag

SEQ ID NO: 1128242 - RNA, 22 nt, Human
gauaccagacagggagggagaa

SEQ ID NO: 1128243 - RNA, 22 nt, Human
agcagcugcagagggcuccccc

SEQ ID NO: 1128244 - RNA, 22 nt, Human
ggaaaaggccacagggacacau

SEQ ID NO: 1128245 - RNA, 22 nt, Human
ccuggugcuuaccagagcuuuu

SEQ ID NO: 1128246 - RNA, 22 nt, Human
aauacuuaugugaccucauuuu

SEQ ID NO: 1128247 - RNA, 22 nt, Human
gugggcuggacccuccugcucc

SEQ ID NO: 1128248 - RNA, 19 nt, Human
ccagucccauacaggagau

SEQ ID NO: 1128249 - RNA, 22 nt, Human
acugcagccuuugggcucauaa

SEQ ID NO: 1128250 - RNA, 22 nt, Human
caggcacugugcaagggucucg

SEQ ID NO: 1128251 - RNA, 22 nt, Human
ugagcuggucacuccuucugaa

SEQ ID NO: 1128252 - RNA, 22 nt, Human
ucagagugugacuuggucauga

SEQ ID NO: 1128253 - RNA, 22 nt, Human
ccuggagguggagguugcagug

SEQ ID NO: 1128254 - RNA, 22 nt, Human
caaagguauaaguuaauauaca

SEQ ID NO: 1128255 - RNA, 22 nt, Human
uggcuucugcuuucaguggagg

SEQ ID NO: 1128256 - RNA, 22 nt, Human
ugaagcagauggucuggucauu

SEQ ID NO: 1128257 - RNA, 22 nt, Human
gcuggcagguccaagauagagc

SEQ ID NO: 1128258 - RNA, 22 nt, Human
auuguaauuuuagagaaagugg

SEQ ID NO: 1128259 - RNA, 22 nt, Human
uuccuguccgcaauggccuggg

SEQ ID NO: 1128260 - RNA, 22 nt, Human
cagcagcccacgcgugcugucc

SEQ ID NO: 1128261 - RNA, 17 nt, Human
aaaauucuguaaagagg

SEQ ID NO: 1128262 - RNA, 22 nt, Human
agccuucaaccuagcuagagca

SEQ ID NO: 1128263 - RNA, 22 nt, Human
auaaauuuauaauuguuuccug

SEQ ID NO: 1128264 - RNA, 22 nt, Human
ucaaaugcacguagagaaaaua

SEQ ID NO: 1128265 - RNA, 22 nt, Human
augccacugacauggacaauuu

SEQ ID NO: 1128266 - RNA, 22 nt, Human
gaguggggcguggauccagcgu

SEQ ID NO: 1128267 - RNA, 22 nt, Human
aaaacucugcaguuaguuucua

SEQ ID NO: 1128268 - RNA, 22 nt, Human
aggcucugguuggcaaguaaag

SEQ ID NO: 1128269 - RNA, 22 nt, Human
ucacugcagagaccucuaguca

SEQ ID NO: 1128270 - RNA, 22 nt, Human
aucagcaaggcaaucacugcag

SEQ ID NO: 1128271 - RNA, 22 nt, Human
uggugcugauaauggcaggauu

SEQ ID NO: 1128272 - RNA, 22 nt, Human
cauacauaugcauguguguaua

SEQ ID NO: 1128273 - RNA, 22 nt, Human
aggcuggguaccugucauaugc

SEQ ID NO: 1128274 - RNA, 22 nt, Human
gcagaggcauuucugacgcugc

SEQ ID NO: 1128275 - RNA, 22 nt, Human
uggcucaggggucuggcucugu

SEQ ID NO: 1128276 - RNA, 22 nt, Human
gcucuccacugaccacggggca

SEQ ID NO: 1128277 - RNA, 22 nt, Human
aggggugaaagagggcccucaa

SEQ ID NO: 1128278 - RNA, 22 nt, Human
aaugcaguuucauuuguagaau

SEQ ID NO: 1128279 - RNA, 22 nt, Human
gcugcuccgucugagcucuggu

SEQ ID NO: 1128280 - RNA, 23 nt, Human
uccuccuuuugcuugugcuuccc

SEQ ID NO: 1128281 - RNA, 22 nt, Human
gacacagagauaggccuguguu

SEQ ID NO: 1128282 - RNA, 18 nt, Human
aggcacuggaauuaaggg

SEQ ID NO: 1128283 - RNA, 19 nt, Human
gaguuauugccagggcaug

SEQ ID NO: 1128284 - RNA, 22 nt, Human
cagcugccccuccagggcuggg

SEQ ID NO: 1128285 - RNA, 22 nt, Human
cagcugaggucaaagaagcagg

SEQ ID NO: 1128286 - RNA, 20 nt, Human
ccagguggugccuggagagg

SEQ ID NO: 1128287 - RNA, 22 nt, Human
acugccaggauggcacuagagg

SEQ ID NO: 1128288 - RNA, 22 nt, Human
ggggcagcucccgagggcagga

SEQ ID NO: 1128289 - RNA, 22 nt, Human
acuccagggcuccaucccuugu

SEQ ID NO: 1128290 - RNA, 22 nt, Human
uuaggcaauuuugucauugugu

SEQ ID NO: 1128291 - RNA, 17 nt, Human
aggcagcucagaacauc

SEQ ID NO: 1128292 - RNA, 22 nt, Human
uauucacaaaaugagguccuca

SEQ ID NO: 1128293 - RNA, 19 nt, Human
cagcaauaaugccagaugg

SEQ ID NO: 1128294 - RNA, 19 nt, Human
ggccaggcugacugugguc

SEQ ID NO: 1128295 - RNA, 19 nt, Human
ugaggccaaggucacagau

SEQ ID NO: 1128296 - RNA, 22 nt, Human
cugaggcuuugugugcaugccu

SEQ ID NO: 1128297 - RNA, 22 nt, Human
acagaauucucucugcagaggc

SEQ ID NO: 1128298 - RNA, 18 nt, Human
uuaagagcugaaagggga

SEQ ID NO: 1128299 - RNA, 22 nt, Human
aaugcacagcguuccaugcuug

SEQ ID NO: 1128300 - RNA, 22 nt, Human
ugguccugagcaccagccugac

SEQ ID NO: 1128301 - RNA, 22 nt, Human
caggccugugacaccgugucug

SEQ ID NO: 1128302 - RNA, 22 nt, Human
caguggucugugcuucuguaca

SEQ ID NO: 1128303 - RNA, 19 nt, Human
aggccugggguuuugcacu

SEQ ID NO: 1128304 - RNA, 22 nt, Human
cagcuugcuaauuuugacuuca

SEQ ID NO: 1128305 - RNA, 22 nt, Human
ugggcagacugagcccuguccc

SEQ ID NO: 1128306 - RNA, 22 nt, Human
cucagagucccuucccucgugg

SEQ ID NO: 1128307 - RNA, 22 nt, Human
gucaaguuuauccgcucauuca

SEQ ID NO: 1128308 - RNA, 22 nt, Human
ugacaccacaacuagccauuga

SEQ ID NO: 1128309 - RNA, 22 nt, Human
uccuuucccuuuccauccuggc

SEQ ID NO: 1128310 - RNA, 22 nt, Human
ccaggcucaggugcgagagaca

SEQ ID NO: 1128311 - RNA, 22 nt, Human
aggugagguuugggagguguca

SEQ ID NO: 1128312 - RNA, 22 nt, Human
acuccuggggauccauuccuuu

SEQ ID NO: 1128313 - RNA, 22 nt, Human
ucaggcaggcagagggcaaaug

SEQ ID NO: 1128314 - RNA, 22 nt, Human
uuucacauaaauauuaugccua

SEQ ID NO: 1128315 - RNA, 20 nt, Human
uauaacaguguugggugugu

SEQ ID NO: 1128316 - RNA, 20 nt, Human
agacccuguguccuguggcc

SEQ ID NO: 1128317 - RNA, 22 nt, Human
acauuucugcuagaauagguga

SEQ ID NO: 1128318 - RNA, 22 nt, Human
cagggcugguuugucgaagaaa

SEQ ID NO: 1128319 - RNA, 22 nt, Human
aggcagagaaaaaccagauaug

SEQ ID NO: 1128320 - RNA, 22 nt, Human
cgcagcagccccgugguaggug

SEQ ID NO: 1128321 - RNA, 21 nt, Human
gccuggcagguggaagggcuc

SEQ ID NO: 1128322 - RNA, 22 nt, Human
ucuggagccuuggaugggaaag

SEQ ID NO: 1128323 - RNA, 22 nt, Human
auggaagguccuacagagcgca

SEQ ID NO: 1128324 - RNA, 22 nt, Human
uguguguggggaggcagcagau

SEQ ID NO: 1128325 - RNA, 22 nt, Human
agauacaugucaagagacuuau

SEQ ID NO: 1128326 - RNA, 22 nt, Human
gacagcaggagaucaugauaga

SEQ ID NO: 1128327 - RNA, 22 nt, Human
cugaggcucaagggcagguggg

SEQ ID NO: 1128328 - RNA, 22 nt, Human
ccaggcauccauugcuuccucu

SEQ ID NO: 1128329 - RNA, 22 nt, Human
gugggcuucuguuagggaggcu

SEQ ID NO: 1128330 - RNA, 22 nt, Human
cagggcugugcccaucuucccc

SEQ ID NO: 1128331 - RNA, 22 nt, Human
ccugugugcacacgaggccaug

SEQ ID NO: 1128332 - RNA, 22 nt, Human
auuugucucugcacuuuacuca

SEQ ID NO: 1128333 - RNA, 22 nt, Human
caggcugcagaggccuuucaug

SEQ ID NO: 1128334 - RNA, 22 nt, Human
ccccuuccacagugcuuccuaa

SEQ ID NO: 1128335 - RNA, 22 nt, Human
cagagcugcaaaugccccuccg

SEQ ID NO: 1128336 - RNA, 22 nt, Human
gcugucugggaugucacugcug

SEQ ID NO: 1128337 - RNA, 22 nt, Human
cugagcugggcucucuugaggg

SEQ ID NO: 1128338 - RNA, 22 nt, Human
ucaccacugaacagaccuuugg

SEQ ID NO: 1128339 - RNA, 22 nt, Human
cugagggcaugaacauuccaua

SEQ ID NO: 1128340 - RNA, 22 nt, Human
gagccaggcaccuucuguguug

SEQ ID NO: 1128341 - RNA, 22 nt, Human
uugacagcaaagauugugccua

SEQ ID NO: 1128342 - RNA, 22 nt, Human
gcugcucucagagcucaugcug

SEQ ID NO: 1128343 - RNA, 22 nt, Human
agagugauucuaguuagggaau

SEQ ID NO: 1128344 - RNA, 22 nt, Human
gggugcugacuggggccugaaa

SEQ ID NO: 1128345 - RNA, 22 nt, Human
ucuggccugggccugccggugc

SEQ ID NO: 1128346 - RNA, 20 nt, Human
ggcagagcuaugucuguugc

SEQ ID NO: 1128347 - RNA, 22 nt, Human
caaaugcuggcccugcuacuua

SEQ ID NO: 1128348 - RNA, 22 nt, Human
ugcacagagagaugagacacgu

SEQ ID NO: 1128349 - RNA, 18 nt, Human
uucaccagugugaugggu

SEQ ID NO: 1128350 - RNA, 22 nt, Human
aggccucacucucagagcuucu

SEQ ID NO: 1128351 - RNA, 22 nt, Human
uuuugaaagaguccugcuacag

SEQ ID NO: 1128352 - RNA, 22 nt, Human
gcaggccuuggcaaugagccug

SEQ ID NO: 1128353 - RNA, 22 nt, Human
gcucaggauuucauccaugugu

SEQ ID NO: 1128354 - RNA, 22 nt, Human
uguacauugucacucaucaagu

SEQ ID NO: 1128355 - RNA, 22 nt, Human
uggcucagccuggcccuuucau

SEQ ID NO: 1128356 - RNA, 22 nt, Human
cugaagcacagcauauaaauaa

SEQ ID NO: 1128357 - RNA, 22 nt, Human
uucuuucccagaagauauguuu

SEQ ID NO: 1128358 - RNA, 22 nt, Human
gcucagagcacucagacucagc

SEQ ID NO: 1128359 - RNA, 22 nt, Human
uacauuccacuagugacuggcg

SEQ ID NO: 1128360 - RNA, 22 nt, Human
ggagugacucucggggccacua

SEQ ID NO: 1128361 - RNA, 18 nt, Human
acauacauucugucugca

SEQ ID NO: 1128362 - RNA, 22 nt, Human
aagacauuacuggaaucugacu

SEQ ID NO: 1128363 - RNA, 17 nt, Human
uucaaugauuaaugcau

SEQ ID NO: 1128364 - RNA, 22 nt, Human
aaagaggaaccaagagcacgug

SEQ ID NO: 1128365 - RNA, 22 nt, Human
cauggccugccuccuccuggug

SEQ ID NO: 1128366 - RNA, 22 nt, Human
cuggugguucaggagaauggcu

SEQ ID NO: 1128367 - RNA, 22 nt, Human
cagucccaaggaggaagcaguc

SEQ ID NO: 1128368 - RNA, 22 nt, Human
uccagggacagcgcuggagcua

SEQ ID NO: 1128369 - RNA, 22 nt, Human
acauuucuauagugcaucuguu

SEQ ID NO: 1128370 - RNA, 22 nt, Human
gcugucacauuuggagcacugg

SEQ ID NO: 1128371 - RNA, 22 nt, Human
ucuuugcaugcauuuucccuua

SEQ ID NO: 1128372 - RNA, 22 nt, Human
ugcuagaaaucugaaacuagca

SEQ ID NO: 1128373 - RNA, 20 nt, Human
cagagaccugucuucacaga

SEQ ID NO: 1128374 - RNA, 23 nt, Human
ccugggcauuggcugcagcuucu

SEQ ID NO: 1128375 - RNA, 22 nt, Human
uccagggccaagucauggaacc

SEQ ID NO: 1128376 - RNA, 22 nt, Human
cagagccagcccacuguucccg

SEQ ID NO: 1128377 - RNA, 22 nt, Human
auacaucuugucagauucaugu

SEQ ID NO: 1128378 - RNA, 22 nt, Human
cccagcucaagcagagagcuaa

SEQ ID NO: 1128379 - RNA, 22 nt, Human
agucagugaaggcauugcucaa

SEQ ID NO: 1128380 - RNA, 22 nt, Human
ugggcagagaguagaggcaacg

SEQ ID NO: 1128381 - RNA, 22 nt, Human
uccucagggggccaacccagcc

SEQ ID NO: 1128382 - RNA, 22 nt, Human
gcccagcuccucugcagacccu

SEQ ID NO: 1128383 - RNA, 22 nt, Human
cuguacaucccgagagccagua

SEQ ID NO: 1128384 - RNA, 22 nt, Human
accccagcccugcuucugggag

SEQ ID NO: 1128385 - RNA, 22 nt, Human
uggagcaggcaucuuucucucu

SEQ ID NO: 1128386 - RNA, 22 nt, Human
uccaugugccaaggggcagagg

SEQ ID NO: 1128387 - RNA, 22 nt, Human
ugggcugcccaagguggccaug

SEQ ID NO: 1128388 - RNA, 22 nt, Human
aauucauccaugaacaauucca

SEQ ID NO: 1128389 - RNA, 22 nt, Human
uauuuugagguauuuuugagcu

SEQ ID NO: 1128390 - RNA, 22 nt, Human
caugggcuacagaagcaugcug

SEQ ID NO: 1128391 - RNA, 22 nt, Human
acaggagugaaucuggcacuua

SEQ ID NO: 1128392 - RNA, 22 nt, Human
aaauguauccuacuuccugagu

SEQ ID NO: 1128393 - RNA, 17 nt, Human
uuccaguuuaguauugu

SEQ ID NO: 1128394 - RNA, 22 nt, Human
cucugcugcccaggccugcuag

SEQ ID NO: 1128395 - RNA, 22 nt, Human
augguguagcaugugauaugac

SEQ ID NO: 1128396 - RNA, 22 nt, Human
agaauuguugggguaauaaaag

SEQ ID NO: 1128397 - RNA, 18 nt, Human
uccagcgugcuccagggc

SEQ ID NO: 1128398 - RNA, 22 nt, Human
gcuggcccagggucaccuagga

SEQ ID NO: 1128399 - RNA, 22 nt, Human
agucuccuuggccucaaugccu

SEQ ID NO: 1128400 - RNA, 22 nt, Human
gcagcuuuuuggaugucaguua

SEQ ID NO: 1128401 - RNA, 19 nt, Human
agagaggcugugugaggga

SEQ ID NO: 1128402 - RNA, 22 nt, Human
cuggagccagccagggcccucu

SEQ ID NO: 1128403 - RNA, 22 nt, Human
gcagagugauggaaugugggug

SEQ ID NO: 1128404 - RNA, 18 nt, Human
cugagggcagccccuggg

SEQ ID NO: 1128405 - RNA, 22 nt, Human
ggucccugcugaagccuuggug

SEQ ID NO: 1128406 - RNA, 22 nt, Human
ugggggagccuucacaguagcu

SEQ ID NO: 1128407 - RNA, 22 nt, Human
augccuggacugacaugcacug

SEQ ID NO: 1128408 - RNA, 22 nt, Human
gggccagagcuuggcagcuggg

SEQ ID NO: 1128409 - RNA, 22 nt, Human
uuaguaaauaaagucuacuuuc

SEQ ID NO: 1128410 - RNA, 22 nt, Human
aaagauuuaagaauaauuugug

SEQ ID NO: 1128411 - RNA, 22 nt, Human
ucccagaggucucugcugguuc

SEQ ID NO: 1128412 - RNA, 22 nt, Human
gcucaagagagaugcaguucuu

SEQ ID NO: 1128413 - RNA, 22 nt, Human
ggcagcuggccuccucgcccac

SEQ ID NO: 1128414 - RNA, 22 nt, Human
ccccaccugugcgucugccgca

SEQ ID NO: 1128415 - RNA, 19 nt, Human
gcuccugggccucacucau

SEQ ID NO: 1128416 - RNA, 22 nt, Human
uggagcagcaucacuuugagcu

SEQ ID NO: 1128417 - RNA, 19 nt, Human
gcucugugaugcugagggg

SEQ ID NO: 1128418 - RNA, 22 nt, Human
gcagggaggaagagaugcuucc

SEQ ID NO: 1128419 - RNA, 19 nt, Human
aggcugcaagguggugggc

SEQ ID NO: 1128420 - RNA, 22 nt, Human
acaguaccugcucucaagcaaa

SEQ ID NO: 1128421 - RNA, 22 nt, Human
uucuuuccacagaggggaugau

SEQ ID NO: 1128422 - RNA, 22 nt, Human
gaagcagcuggugagauggagc

SEQ ID NO: 1128423 - RNA, 22 nt, Human
guaugugugcaaauguaaauau

SEQ ID NO: 1128424 - RNA, 22 nt, Human
uuuuucaugagacuagaaguca

SEQ ID NO: 1128425 - RNA, 22 nt, Human
caggcuggagugaguguagugg

SEQ ID NO: 1128426 - RNA, 22 nt, Human
auguacauuuuccuaauguuuu

SEQ ID NO: 1128427 - RNA, 22 nt, Human
cucucuggaagggggagcugau

SEQ ID NO: 1128428 - RNA, 22 nt, Human
ugggaauggaugcuaagugcua

SEQ ID NO: 1128429 - RNA, 22 nt, Human
uggaaagaauuccuaugguuca

SEQ ID NO: 1128430 - RNA, 22 nt, Human
auccaaaucaugucagaagaac

SEQ ID NO: 1128431 - RNA, 22 nt, Human
uugcaccaaaugaguuaaaauu

SEQ ID NO: 1128432 - RNA, 22 nt, Human
gcagggccuuagcagcggcugc

SEQ ID NO: 1128433 - RNA, 22 nt, Human
uggcccugcuaugauccugcaa

SEQ ID NO: 1128434 - RNA, 22 nt, Human
caagagcuagaaauugguuaga

SEQ ID NO: 1128435 - RNA, 22 nt, Human
auguguguacacacgugacucu

SEQ ID NO: 1128436 - RNA, 22 nt, Human
ggggugggguuacucauugugc

SEQ ID NO: 1128437 - RNA, 22 nt, Human
gaggggcuggcuguggucccau

SEQ ID NO: 1128438 - RNA, 19 nt, Human
uagcugccuguuaccucca

SEQ ID NO: 1128439 - RNA, 22 nt, Human
agugggcaugaucuggugucug

SEQ ID NO: 1128440 - RNA, 22 nt, Human
cucccugguguccccuccagga

SEQ ID NO: 1128441 - RNA, 19 nt, Human
uagaaugcccacuuaaaaa

SEQ ID NO: 1128442 - RNA, 22 nt, Human
uugaccauaccuccaggcaguu

SEQ ID NO: 1128443 - RNA, 22 nt, Human
cugaagcaaaugaaacagcucu

SEQ ID NO: 1128444 - RNA, 23 nt, Human
gcugucugucaucucugcgggag

SEQ ID NO: 1128445 - RNA, 22 nt, Human
cagguacacucccuugugcuga

SEQ ID NO: 1128446 - RNA, 22 nt, Human
ccaaaguccauaguuuacuuua

SEQ ID NO: 1128447 - RNA, 22 nt, Human
ccuccugggcuccugucugcac

SEQ ID NO: 1128448 - RNA, 22 nt, Human
ccagucccagcucugccaugcu

SEQ ID NO: 1128449 - RNA, 22 nt, Human
cacucugacuggcccugcagga

SEQ ID NO: 1128450 - RNA, 22 nt, Human
uagcagagcagggaucagagcc

SEQ ID NO: 1128451 - RNA, 22 nt, Human
agaggcagcagucauacuacag

SEQ ID NO: 1128452 - RNA, 22 nt, Human
ucucagaguuuagagcugagcc

SEQ ID NO: 1128453 - RNA, 22 nt, Human
ggcagcagcaagguuggagcug

SEQ ID NO: 1128454 - RNA, 22 nt, Human
ucaaaugcugccuuugugugcc

SEQ ID NO: 1128455 - RNA, 22 nt, Human
uggccugcagaggcuguggggc

SEQ ID NO: 1128456 - RNA, 22 nt, Human
agcaggaggguuuuguagaguc

SEQ ID NO: 1128457 - RNA, 22 nt, Human
uccucugcuccaggcuggacuu

SEQ ID NO: 1128458 - RNA, 22 nt, Human
ccaucagcuccaguaucuucug

SEQ ID NO: 1128459 - RNA, 21 nt, Human
gggugggaggacacagcaggc

SEQ ID NO: 1128460 - RNA, 20 nt, Human
ugcagcugcaggaggguggg

SEQ ID NO: 1128461 - RNA, 23 nt, Human
cagggcugguagggaagagcgug

SEQ ID NO: 1128462 - RNA, 22 nt, Human
augaaggauggcuggcugcccu

SEQ ID NO: 1128463 - RNA, 22 nt, Human
caagggaguuacugagggcggg

SEQ ID NO: 1128464 - RNA, 22 nt, Human
ugauuuccaaaaggcuucuaag

SEQ ID NO: 1128465 - RNA, 22 nt, Human
guggccugggguuuguucugag

SEQ ID NO: 1128466 - RNA, 19 nt, Human
uguagcaguuuaaaacaac

SEQ ID NO: 1128467 - RNA, 22 nt, Human
guuugcauggaagacagugagu

SEQ ID NO: 1128468 - RNA, 22 nt, Human
caggguggcacucagcgcaucu

SEQ ID NO: 1128469 - RNA, 22 nt, Human
uuugcauucuagaaaaauuucu

SEQ ID NO: 1128470 - RNA, 22 nt, Human
cuuaacagcaagaucuguguca

SEQ ID NO: 1128471 - RNA, 22 nt, Human
aaguuacuggcaagggcugcag

SEQ ID NO: 1128472 - RNA, 22 nt, Human
uacuuuaaaaacugauaauuca

SEQ ID NO: 1128473 - RNA, 22 nt, Human
uguauagaguuggaagaugacu

SEQ ID NO: 1128474 - RNA, 22 nt, Human
gaguuauuggguggaaagguag

SEQ ID NO: 1128475 - RNA, 22 nt, Human
cugggccauggaagucucugcc

SEQ ID NO: 1128476 - RNA, 22 nt, Human
auguguaaaaagugcuuaauau

SEQ ID NO: 1128477 - RNA, 22 nt, Human
cagggcagaaggcacucuacuc

SEQ ID NO: 1128478 - RNA, 20 nt, Human
aggaaaaauggaaacuggag

SEQ ID NO: 1128479 - RNA, 22 nt, Human
aggugcagcugacaccaugugg

SEQ ID NO: 1128480 - RNA, 22 nt, Human
uccuggcccacuaugccagcau

SEQ ID NO: 1128481 - RNA, 22 nt, Human
caauguguuugcauauuaaaau

SEQ ID NO: 1128482 - RNA, 22 nt, Human
aagacauuuauuugaaucaauu

SEQ ID NO: 1128483 - RNA, 22 nt, Human
ggcugccuugacccuggcuccg

SEQ ID NO: 1128484 - RNA, 23 nt, Human
aggagccaggaaccagcuucccc

SEQ ID NO: 1128485 - RNA, 22 nt, Human
aggcugcuuucauggccgcccc

SEQ ID NO: 1128486 - RNA, 22 nt, Human
auguguaggugaaucgaggcug

SEQ ID NO: 1128487 - RNA, 22 nt, Human
acaggggaauuuacugucauua

SEQ ID NO: 1128488 - RNA, 22 nt, Human
ugucucagggcagcagcagggg

SEQ ID NO: 1128489 - RNA, 22 nt, Human
gaaggagggugcggaucugagc

SEQ ID NO: 1128490 - RNA, 22 nt, Human
aaugcacauguuguaauaaaua

SEQ ID NO: 1128491 - RNA, 22 nt, Human
gaagagcuuaguuguccuagaa

SEQ ID NO: 1128492 - RNA, 22 nt, Human
ugagaauuacaaaugagucaca

SEQ ID NO: 1128493 - RNA, 22 nt, Human
gugcagguguuuuggcugccag

SEQ ID NO: 1128494 - RNA, 22 nt, Human
cuggcuuccaugcuguaguggc

SEQ ID NO: 1128495 - RNA, 20 nt, Human
uguuccaugacuauuuggau

SEQ ID NO: 1128496 - RNA, 22 nt, Human
cucugggcaaagaugccucauc

SEQ ID NO: 1128497 - RNA, 22 nt, Human
cugcuggggucagagcacuggg

SEQ ID NO: 1128498 - RNA, 22 nt, Human
ccucuggggguccucagagucu

SEQ ID NO: 1128499 - RNA, 22 nt, Human
gggcuucucuuuagugagcuga

SEQ ID NO: 1128500 - RNA, 22 nt, Human
cuggaggcugaguugggucucc

SEQ ID NO: 1128501 - RNA, 22 nt, Human
uagaaaugcaguguacuguguc

SEQ ID NO: 1128502 - RNA, 22 nt, Human
ggccucuggcaggcaggcccuc

SEQ ID NO: 1128503 - RNA, 22 nt, Human
ccaggugguucaggucaccaua

SEQ ID NO: 1128504 - RNA, 22 nt, Human
guaugugucuuagaacuuggga

SEQ ID NO: 1128505 - RNA, 22 nt, Human
gaggccugaggcugccuggagc

SEQ ID NO: 1128506 - RNA, 19 nt, Human
ugcagccacgugagagacu

SEQ ID NO: 1128507 - RNA, 17 nt, Human
cauguguaugugggagu

SEQ ID NO: 1128508 - RNA, 22 nt, Human
gggaaggagccugcuugcuaga

SEQ ID NO: 1128509 - RNA, 22 nt, Human
aaaguguugggauuacaggugu

SEQ ID NO: 1128510 - RNA, 22 nt, Human
uguagcacagagcuuugacacu

SEQ ID NO: 1128511 - RNA, 22 nt, Human
aaggcugaggagggccugcagg

SEQ ID NO: 1128512 - RNA, 22 nt, Human
ggcagcucugugucugggaagc

SEQ ID NO: 1128513 - RNA, 22 nt, Human
cagaauuuuucgaauguacugu

SEQ ID NO: 1128514 - RNA, 22 nt, Human
ugugucccuuggaaccucagcu

SEQ ID NO: 1128515 - RNA, 22 nt, Human
caggaggaaaugugacccugcu

SEQ ID NO: 1128516 - RNA, 22 nt, Human
gucucagauucagacaucuaca

SEQ ID NO: 1128517 - RNA, 22 nt, Human
agggcccaggacagcaucaggg

SEQ ID NO: 1128518 - RNA, 22 nt, Human
cagccuucugaaugaacguacu

SEQ ID NO: 1128519 - RNA, 22 nt, Human
ugcacacaaguuggagaaugaa

SEQ ID NO: 1128520 - RNA, 18 nt, Human
ccaauguuggccccaagg

SEQ ID NO: 1128521 - RNA, 22 nt, Human
uacaguuuguuacauuguuagu

SEQ ID NO: 1128522 - RNA, 22 nt, Human
aaguaaaagcuuuaccaugcgc

SEQ ID NO: 1128523 - RNA, 22 nt, Human
cagaaguaagauuacugugaga

SEQ ID NO: 1128524 - RNA, 22 nt, Human
uucuuuccaaccagauauuggu

SEQ ID NO: 1128525 - RNA, 19 nt, Human
ucaguuuuagucaucaguu

SEQ ID NO: 1128526 - RNA, 22 nt, Human
uguacacugcaggaugcauugc

SEQ ID NO: 1128527 - RNA, 22 nt, Human
gagacagcagggccagggccug

SEQ ID NO: 1128528 - RNA, 22 nt, Human
ucuguaucuaauuuuacaguag

SEQ ID NO: 1128529 - RNA, 20 nt, Human
ccugaggguuuguguucuuu

SEQ ID NO: 1128530 - RNA, 18 nt, Human
ucuuggaguaaugaucaa

SEQ ID NO: 1128531 - RNA, 21 nt, Human
uccucugcagugagguggccu

SEQ ID NO: 1128532 - RNA, 22 nt, Human
agcucccagucuccucuccaug

SEQ ID NO: 1128533 - RNA, 22 nt, Human
aguccuucaagaaaucuggaaa

SEQ ID NO: 1128534 - RNA, 22 nt, Human
cugugugugucugcagcauacu

SEQ ID NO: 1128535 - RNA, 22 nt, Human
cagcagagcugugugggaaggg

SEQ ID NO: 1128536 - RNA, 22 nt, Human
acaggcugcccgcuccccaccu

SEQ ID NO: 1128537 - RNA, 21 nt, Human
agcagaggggacauguuugau

SEQ ID NO: 1128538 - RNA, 22 nt, Human
cagagccaggccugcccucuuu

SEQ ID NO: 1128539 - RNA, 22 nt, Human
ggccucuguucugcauuccucc

SEQ ID NO: 1128540 - RNA, 22 nt, Human
ucucugauguauaucagagaac

SEQ ID NO: 1128541 - RNA, 19 nt, Human
ugagaaggcaguggggagc

SEQ ID NO: 1128542 - RNA, 21 nt, Human
uggcucaguugcugggcacag

SEQ ID NO: 1128543 - RNA, 22 nt, Human
ccuggaaguuggagguugcagu

SEQ ID NO: 1128544 - RNA, 22 nt, Human
ccagagacgucggucagggcgc

SEQ ID NO: 1128545 - RNA, 22 nt, Human
cuggcugggagcgagcugcuca

SEQ ID NO: 1128546 - RNA, 22 nt, Human
ccugggugacccgugagcgucc

SEQ ID NO: 1128547 - RNA, 22 nt, Human
uggcuaggcuccaagagcugga

SEQ ID NO: 1128548 - RNA, 22 nt, Human
uuucaguggguuuauuucaugu

SEQ ID NO: 1128549 - RNA, 22 nt, Human
cagcaguggaacuacccaggga

SEQ ID NO: 1128550 - RNA, 22 nt, Human
gcucaggaaacagcagggcuug

SEQ ID NO: 1128551 - RNA, 22 nt, Human
gggcugcugccaaucacagccu

SEQ ID NO: 1128552 - RNA, 22 nt, Human
aagccuugccuauuugaugaca

SEQ ID NO: 1128553 - RNA, 22 nt, Human
uaugcacauucacacaaaaaug

SEQ ID NO: 1128554 - RNA, 22 nt, Human
caauguuuacuggggacccaga

SEQ ID NO: 1128555 - RNA, 23 nt, Human
ugcucugggaggcccuggagagc

SEQ ID NO: 1128556 - RNA, 22 nt, Human
auguucaaacuuuuuacacacc

SEQ ID NO: 1128557 - RNA, 22 nt, Human
uggagcugagagccaggcuggc

SEQ ID NO: 1128558 - RNA, 23 nt, Human
cuugcagggcuggaggcuuagaa

SEQ ID NO: 1128559 - RNA, 22 nt, Human
gugagcaggauuucauggugua

SEQ ID NO: 1128560 - RNA, 22 nt, Human
agggccagcccauaaugccaaa

SEQ ID NO: 1128561 - RNA, 22 nt, Human
ugcuuccugaggccgucuucuc

SEQ ID NO: 1128562 - RNA, 22 nt, Human
agugaaauccuggucaacaggu

SEQ ID NO: 1128563 - RNA, 22 nt, Human
cuggagccaugucuugacugcu

SEQ ID NO: 1128564 - RNA, 21 nt, Human
ucacuuauaauguauuugcug

SEQ ID NO: 1128565 - RNA, 19 nt, Human
acaaagcugugagcagcuu

SEQ ID NO: 1128566 - RNA, 22 nt, Human
ggaggaugccaagcugugcaca

SEQ ID NO: 1128567 - RNA, 22 nt, Human
agccucucugaugugacagcua

SEQ ID NO: 1128568 - RNA, 22 nt, Human
uuaaacagacaguaaaugaaac

SEQ ID NO: 1128569 - RNA, 22 nt, Human
gggagggaaagcuugaucuguc

SEQ ID NO: 1128570 - RNA, 22 nt, Human
ccugggcaacauagugagaccu

SEQ ID NO: 1128571 - RNA, 22 nt, Human
gcucccagcaauugaggcagcc

SEQ ID NO: 1128572 - RNA, 21 nt, Human
gggcuggacaugguggcucau

SEQ ID NO: 1128573 - RNA, 20 nt, Human
cccugagacaaaggaggggc

SEQ ID NO: 1128574 - RNA, 22 nt, Human
uggagcucaaaggccuguggga

SEQ ID NO: 1128575 - RNA, 22 nt, Human
aagagcuggcucuugcagcagc

SEQ ID NO: 1128576 - RNA, 22 nt, Human
gcagaacauuucacaguaucuu

SEQ ID NO: 1128577 - RNA, 22 nt, Human
ucccagagcucugacaccagcu

SEQ ID NO: 1128578 - RNA, 22 nt, Human
aucauuccacauguaccacuag

SEQ ID NO: 1128579 - RNA, 22 nt, Human
ugggacaguuguccuccacucu

SEQ ID NO: 1128580 - RNA, 22 nt, Human
ggcagcaguccauggcccaagg

SEQ ID NO: 1128581 - RNA, 22 nt, Human
ccucugagagaaggccuucagc

SEQ ID NO: 1128582 - RNA, 22 nt, Human
ggagccaguuuagaccucaguu

SEQ ID NO: 1128583 - RNA, 22 nt, Human
uauguagaagcugcucaaagaa

SEQ ID NO: 1128584 - RNA, 22 nt, Human
gcagagguggcaucugggcucu

SEQ ID NO: 1128585 - RNA, 22 nt, Human
aggucauuguuaagucaccaua

SEQ ID NO: 1128586 - RNA, 22 nt, Human
ucacauuuucuacuacuguacg

SEQ ID NO: 1128587 - RNA, 22 nt, Human
cgcaccacugaauuccagccug

SEQ ID NO: 1128588 - RNA, 22 nt, Human
ucagugcagaauagugaugcau

SEQ ID NO: 1128589 - RNA, 22 nt, Human
agugucauuuuguccaucuucu

SEQ ID NO: 1128590 - RNA, 22 nt, Human
ccuggccucgugcucacggcuc

SEQ ID NO: 1128591 - RNA, 22 nt, Human
gagagcugauagaugagcuacu

SEQ ID NO: 1128592 - RNA, 22 nt, Human
auaugcauaugucaaaacuuau

SEQ ID NO: 1128593 - RNA, 22 nt, Human
agcccagccggauucccaguuc

SEQ ID NO: 1128594 - RNA, 19 nt, Human
gcauuucucuuuacagcca

SEQ ID NO: 1128595 - RNA, 22 nt, Human
ucauccuuuugcaugggaaggc

SEQ ID NO: 1128596 - RNA, 20 nt, Human
cucugcugcccgccggcugc

SEQ ID NO: 1128597 - RNA, 22 nt, Human
auguguauacuugugcuuacuc

SEQ ID NO: 1128598 - RNA, 22 nt, Human
uggagccagcccaggccccucu

SEQ ID NO: 1128599 - RNA, 22 nt, Human
uugucugaaagaucauuacauu

SEQ ID NO: 1128600 - RNA, 22 nt, Human
uguuccaugucuuuguaggacu

SEQ ID NO: 1128601 - RNA, 22 nt, Human
acuuuauuuccuauugcaucca

SEQ ID NO: 1128602 - RNA, 22 nt, Human
agcagccaaccuuacauucauc

SEQ ID NO: 1128603 - RNA, 22 nt, Human
cccaggcucccaggugggacaa

SEQ ID NO: 1128604 - RNA, 22 nt, Human
ccaggccaaauucagucagcag

SEQ ID NO: 1128605 - RNA, 22 nt, Human
guucacauccuugugaggauuu

SEQ ID NO: 1128606 - RNA, 22 nt, Human
ugaagacagaccaaggagaaug

SEQ ID NO: 1128607 - RNA, 22 nt, Human
gccugagcccaggugugcagag

SEQ ID NO: 1128608 - RNA, 22 nt, Human
cugcccugggauggucugugcg

SEQ ID NO: 1128609 - RNA, 22 nt, Human
ugggcuggagcuuguugcuucc

SEQ ID NO: 1128610 - RNA, 22 nt, Human
uccuccuucgggacugcuugac

SEQ ID NO: 1128611 - RNA, 22 nt, Human
ugcugggcuagaagcugaggcc

SEQ ID NO: 1128612 - RNA, 22 nt, Human
uaaugcacauagaaguacuuag

SEQ ID NO: 1128613 - RNA, 22 nt, Human
uccuucagcuacucaguuucca

SEQ ID NO: 1128614 - RNA, 22 nt, Human
cagggcagugaagaacacacgu

SEQ ID NO: 1128615 - RNA, 19 nt, Human
ugucucagugucccuuccu

SEQ ID NO: 1128616 - RNA, 22 nt, Human
caagagcuggguggcaagcuag

SEQ ID NO: 1128617 - RNA, 22 nt, Human
ucaaggaggugcuuggcuucac

SEQ ID NO: 1128618 - RNA, 22 nt, Human
gaagcagcagcuggggacaguu

SEQ ID NO: 1128619 - RNA, 20 nt, Human
ugcuguaagauuagagagcu

SEQ ID NO: 1128620 - RNA, 22 nt, Human
cacugcaguaacucuaggacug

SEQ ID NO: 1128621 - RNA, 22 nt, Human
ugugugugugcgcgcacgcaua

SEQ ID NO: 1128622 - RNA, 22 nt, Human
ugcugcuccugccuggcuccca

SEQ ID NO: 1128623 - RNA, 22 nt, Human
uggccugaauuauggcagaucu

SEQ ID NO: 1128624 - RNA, 22 nt, Human
uguauguaaaguuuguaauaga

SEQ ID NO: 1128625 - RNA, 22 nt, Human
gaacaguaaauuuaugcagcac

SEQ ID NO: 1128626 - RNA, 22 nt, Human
gcugcucuugaggggcucacug

SEQ ID NO: 1128627 - RNA, 22 nt, Human
aggaggccgggauucuggagau

SEQ ID NO: 1128628 - RNA, 22 nt, Human
cccagcacaggcaauuccauac

SEQ ID NO: 1128629 - RNA, 22 nt, Human
aagauacauaaagguagagucu

SEQ ID NO: 1128630 - RNA, 22 nt, Human
gagcugccaagauuacaaucag

SEQ ID NO: 1128631 - RNA, 22 nt, Human
acagcagccuuguugguuucga

SEQ ID NO: 1128632 - RNA, 22 nt, Human
caguugaugggacucauguggg

SEQ ID NO: 1128633 - RNA, 22 nt, Human
agaggagguggugaugcuuuaa

SEQ ID NO: 1128634 - RNA, 19 nt, Human
ggcugucucggcccagcca

SEQ ID NO: 1128635 - RNA, 22 nt, Human
caggagccccaggcugacaaua

SEQ ID NO: 1128636 - RNA, 22 nt, Human
aggcuggcgacaucuggcgggc

SEQ ID NO: 1128637 - RNA, 22 nt, Human
caaugauucugcaacugugugc

SEQ ID NO: 1128638 - RNA, 22 nt, Human
ggcugagggccagggcuagucu

SEQ ID NO: 1128639 - RNA, 22 nt, Human
ggucucaggagacuggagagca

SEQ ID NO: 1128640 - RNA, 22 nt, Human
aacaugaaaguugcuaagugca

SEQ ID NO: 1128641 - RNA, 22 nt, Human
gggcugccaagccugccugccu

SEQ ID NO: 1128642 - RNA, 22 nt, Human
ucagaguggugguuuugccuuc

SEQ ID NO: 1128643 - RNA, 22 nt, Human
auguguguaaacaaguauaauu

SEQ ID NO: 1128644 - RNA, 22 nt, Human
aaggcagcccuggcucagccug

SEQ ID NO: 1128645 - RNA, 20 nt, Human
uuguuucugcuauuuucuaa

SEQ ID NO: 1128646 - RNA, 22 nt, Human
ugcucuggagggugaagcuuuu

SEQ ID NO: 1128647 - RNA, 22 nt, Human
cugcucuggggaagccagaugu

SEQ ID NO: 1128648 - RNA, 22 nt, Human
ucuucuccagugcuucugcaca

SEQ ID NO: 1128649 - RNA, 22 nt, Human
uagagugguuaacaguuuagaa

SEQ ID NO: 1128650 - RNA, 22 nt, Human
cugcucuggcguacucggcauc

SEQ ID NO: 1128651 - RNA, 23 nt, Human
cuguggcugaguccuguuggagu

SEQ ID NO: 1128652 - RNA, 22 nt, Human
gugccugcagcaauccauggca

SEQ ID NO: 1128653 - RNA, 22 nt, Human
ucugucacaauuugcuuacucu

SEQ ID NO: 1128654 - RNA, 21 nt, Human
cugugcuucuuccuaagccag

SEQ ID NO: 1128655 - RNA, 22 nt, Human
aaguuuguuguacauguuagua

SEQ ID NO: 1128656 - RNA, 22 nt, Human
gucaaacaaauuaacauaucca

SEQ ID NO: 1128657 - RNA, 22 nt, Human
aagagcugcaucuaagccauga

SEQ ID NO: 1128658 - RNA, 22 nt, Human
agaaauguauucuguauguuuu

SEQ ID NO: 1128659 - RNA, 22 nt, Human
gccuuggccuuccuaggccuga

SEQ ID NO: 1128660 - RNA, 22 nt, Human
ugccucagagugggcuugcuau

SEQ ID NO: 1128661 - RNA, 22 nt, Human
aaagguaguacuucuagaaggg

SEQ ID NO: 1128662 - RNA, 22 nt, Human
augaaaacuuuagccucauuag

SEQ ID NO: 1128663 - RNA, 22 nt, Human
aggccagagaggggaccagccu

SEQ ID NO: 1128664 - RNA, 22 nt, Human
gccagcucccaagugagccccu

SEQ ID NO: 1128665 - RNA, 22 nt, Human
ccagcugacgaugccuggucuc

SEQ ID NO: 1128666 - RNA, 22 nt, Human
gccagcagguugucaaggagcu

SEQ ID NO: 1128667 - RNA, 22 nt, Human
accucccagcucugagcuuggg

SEQ ID NO: 1128668 - RNA, 22 nt, Human
ugcugaggucaccuugcugcua

SEQ ID NO: 1128669 - RNA, 22 nt, Human
agagugauggguugugcugacc

SEQ ID NO: 1128670 - RNA, 22 nt, Human
cugagcuuccaguuccuccagg

SEQ ID NO: 1128671 - RNA, 21 nt, Human
gccugccugcgugacccucuu

SEQ ID NO: 1128672 - RNA, 22 nt, Human
uggccuggaaccuggcagggac

SEQ ID NO: 1128673 - RNA, 22 nt, Human
cuguccauuuucgugccuccuu

SEQ ID NO: 1128674 - RNA, 22 nt, Human
caggccuggcccccggcacacc

SEQ ID NO: 1128675 - RNA, 22 nt, Human
agcagccaagguaaccugugcu

SEQ ID NO: 1128676 - RNA, 22 nt, Human
ccagcaccuugaucuuggaguu

SEQ ID NO: 1128677 - RNA, 22 nt, Human
ugcuaucucuauauccauuuau

SEQ ID NO: 1128678 - RNA, 22 nt, Human
gccaggcuggucuugaacuccu

SEQ ID NO: 1128679 - RNA, 22 nt, Human
caggaaagaaaugagaacacca

SEQ ID NO: 1128680 - RNA, 22 nt, Human
cugugcuggagaugggccagag

SEQ ID NO: 1128681 - RNA, 22 nt, Human
caugucuguguacacaugcaca

SEQ ID NO: 1128682 - RNA, 22 nt, Human
agggcuggcaagggauugaaau

SEQ ID NO: 1128683 - RNA, 22 nt, Human
cucuguccuaugcuugauagaa

SEQ ID NO: 1128684 - RNA, 22 nt, Human
guauccuuugcggaaauuucua

SEQ ID NO: 1128685 - RNA, 21 nt, Human
agugaaaugaaguguaugcuc

SEQ ID NO: 1128686 - RNA, 22 nt, Human
gcugccucuguagcuuuggacc

SEQ ID NO: 1128687 - RNA, 22 nt, Human
gccaccagccccaugcgcugug

SEQ ID NO: 1128688 - RNA, 22 nt, Human
cuucacauguuggaguccuuug

SEQ ID NO: 1128689 - RNA, 22 nt, Human
uccugccucacaguugaaguuu

SEQ ID NO: 1128690 - RNA, 22 nt, Human
ccuucugcucccuggccagggc

SEQ ID NO: 1128691 - RNA, 22 nt, Human
aaaucaguuguuauauuaaaga

SEQ ID NO: 1128692 - RNA, 22 nt, Human
uguuuugucuaaucuaaauucu

SEQ ID NO: 1128693 - RNA, 20 nt, Human
aggcacuggauuucuuauau

SEQ ID NO: 1128694 - RNA, 22 nt, Human
augguuuguguggcccagauga

SEQ ID NO: 1128695 - RNA, 22 nt, Human
agccacagcaacaagugcaauu

SEQ ID NO: 1128696 - RNA, 22 nt, Human
ucagggcagaauccaaagaauu

SEQ ID NO: 1128697 - RNA, 22 nt, Human
ucucaggccccugaguuucucu

SEQ ID NO: 1128698 - RNA, 20 nt, Human
uccaagcccuccuuccauuc

SEQ ID NO: 1128699 - RNA, 22 nt, Human
caggugccucaggaugagacaa

SEQ ID NO: 1128700 - RNA, 22 nt, Human
gcugccuguguggccacucacu

SEQ ID NO: 1128701 - RNA, 23 nt, Human
ugcucugugaauaguuggugacu

SEQ ID NO: 1128702 - RNA, 22 nt, Human
auauucguggucaaguaaggcc

SEQ ID NO: 1128703 - RNA, 22 nt, Human
agcugagccagcagcaacagga

SEQ ID NO: 1128704 - RNA, 22 nt, Human
gcagcagcccagggcucucaga

SEQ ID NO: 1128705 - RNA, 22 nt, Human
agcugguggauuaugcuguaca

SEQ ID NO: 1128706 - RNA, 22 nt, Human
gccugagcaggcguggaccaug

SEQ ID NO: 1128707 - RNA, 22 nt, Human
aacagaacccgagugugaaucu

SEQ ID NO: 1128708 - RNA, 22 nt, Human
gcugagcucccagcaguaucug

SEQ ID NO: 1128709 - RNA, 22 nt, Human
cuuacauugucuuaguuuucaa

SEQ ID NO: 1128710 - RNA, 22 nt, Human
gccugcagaacugugaggcaau

SEQ ID NO: 1128711 - RNA, 22 nt, Human
ucuggagcaacagagcaggaca

SEQ ID NO: 1128712 - RNA, 22 nt, Human
cccaggcagggacgugcucugg

SEQ ID NO: 1128713 - RNA, 22 nt, Human
ugcccaaguguuuggcugaguc

SEQ ID NO: 1128714 - RNA, 22 nt, Human
gggauggggucaacauguaccu

SEQ ID NO: 1128715 - RNA, 23 nt, Human
aggauguaggauguauggcagag

SEQ ID NO: 1128716 - RNA, 22 nt, Human
ggugaggcccagugaucugugu

SEQ ID NO: 1128717 - RNA, 22 nt, Human
cagccugcauuuguaucuguau

SEQ ID NO: 1128718 - RNA, 22 nt, Human
cagugcagaacacauggaaaau

SEQ ID NO: 1128719 - RNA, 22 nt, Human
cugcugagcaucagggcugccc

SEQ ID NO: 1128720 - RNA, 23 nt, Human
aagcugccagucugaagccuggg

SEQ ID NO: 1128721 - RNA, 22 nt, Human
cagggguguuuuuggccaggag

SEQ ID NO: 1128722 - RNA, 22 nt, Human
uucuuuccccauggaguucgga

SEQ ID NO: 1128723 - RNA, 22 nt, Human
agccaggcugcaguuggcuggc

SEQ ID NO: 1128724 - RNA, 22 nt, Human
uuauguauggauggcugaaagu

SEQ ID NO: 1128725 - RNA, 22 nt, Human
ugcucucucaggccuggcccac

SEQ ID NO: 1128726 - RNA, 22 nt, Human
gugcauugcgaugcagacgacc

SEQ ID NO: 1128727 - RNA, 17 nt, Human
aguggcaggcagauggg

SEQ ID NO: 1128728 - RNA, 22 nt, Human
gcucucuguuauuaagaucuuu

SEQ ID NO: 1128729 - RNA, 22 nt, Human
cagcugagcucccaggccauca

SEQ ID NO: 1128730 - RNA, 22 nt, Human
ucuggcucaaaauacguacucu

SEQ ID NO: 1128731 - RNA, 22 nt, Human
agugugcugcuuaaacaguugu

SEQ ID NO: 1128732 - RNA, 22 nt, Human
ucccagaggcaguugguaacuu

SEQ ID NO: 1128733 - RNA, 22 nt, Human
aggagguggccugagcgugccc

SEQ ID NO: 1128734 - RNA, 22 nt, Human
gccucacugcagccccaggaag

SEQ ID NO: 1128735 - RNA, 22 nt, Human
cagggaguuuuuguuccucuag

SEQ ID NO: 1128736 - RNA, 22 nt, Human
uagugaaauuuaugcacagcua

SEQ ID NO: 1128737 - RNA, 22 nt, Human
cauugcacaucugagaagagau

SEQ ID NO: 1128738 - RNA, 18 nt, Human
gggcauggaugcagcauc

SEQ ID NO: 1128739 - RNA, 22 nt, Human
gugcuuccugccuggugccuuu

SEQ ID NO: 1128740 - RNA, 22 nt, Human
acaaagcuagagaagagaauug

SEQ ID NO: 1128741 - RNA, 21 nt, Human
ccaggcuccugaggcugguca

SEQ ID NO: 1128742 - RNA, 22 nt, Human
uagauuuccucuuccucauucc

SEQ ID NO: 1128743 - RNA, 22 nt, Human
cuggcagcuuagcacucugguu

SEQ ID NO: 1128744 - RNA, 23 nt, Human
ucaugcccaggcuccagauguca

SEQ ID NO: 1128745 - RNA, 22 nt, Human
ugcauuguugaccaguugugca

SEQ ID NO: 1128746 - RNA, 22 nt, Human
caaaugcaaaauauaacccugu

SEQ ID NO: 1128747 - RNA, 22 nt, Human
aaaagagguuaaccaggugugu

SEQ ID NO: 1128748 - RNA, 22 nt, Human
aggccagcucacccuggcuccu

SEQ ID NO: 1128749 - RNA, 19 nt, Human
ggugaccaccuggucagug

SEQ ID NO: 1128750 - RNA, 22 nt, Human
uaacagaauagcagaaacagaa

SEQ ID NO: 1128751 - RNA, 22 nt, Human
uguccugcaacugaaggagaag

SEQ ID NO: 1128752 - RNA, 22 nt, Human
gaagaacaagcagugcuuuccu

SEQ ID NO: 1128753 - RNA, 22 nt, Human
uggcucagcagguuagaaacua

SEQ ID NO: 1128754 - RNA, 22 nt, Human
ucuuugcagaauuuaacuuugc

SEQ ID NO: 1128755 - RNA, 22 nt, Human
auacauguucguguacauguuc

SEQ ID NO: 1128756 - RNA, 22 nt, Human
cauugcacuucugcuuuuccuc

SEQ ID NO: 1128757 - RNA, 22 nt, Human
acaggcuucucacagaaaaggg

SEQ ID NO: 1128758 - RNA, 22 nt, Human
aaaugucuuugaguauuucugc

SEQ ID NO: 1128759 - RNA, 22 nt, Human
gccugggaagacuaagugggag

SEQ ID NO: 1128760 - RNA, 23 nt, Human
aaagacugcugagaauuuuagga

SEQ ID NO: 1128761 - RNA, 22 nt, Human
ggcagaagaaaggcuaagucuc

SEQ ID NO: 1128762 - RNA, 22 nt, Human
ugccucugugugcaggugagca

SEQ ID NO: 1128763 - RNA, 22 nt, Human
cucuuuccaggguaccccaggu

SEQ ID NO: 1128764 - RNA, 22 nt, Human
acaggcugccuaccaaguauca

SEQ ID NO: 1128765 - RNA, 22 nt, Human
ugcaggccucacaccuggcacc

SEQ ID NO: 1128766 - RNA, 22 nt, Human
uugucuguaaagacggccacca

SEQ ID NO: 1128767 - RNA, 22 nt, Human
uaguacuuaucucugucauugu

SEQ ID NO: 1128768 - RNA, 22 nt, Human
ccugggagcuguggaaaggcug

SEQ ID NO: 1128769 - RNA, 22 nt, Human
agcuucuugaccaagccuguaa

SEQ ID NO: 1128770 - RNA, 22 nt, Human
ccccuuccgucucuugaguguc

SEQ ID NO: 1128771 - RNA, 22 nt, Human
gcccucucggcauagcaggggc

SEQ ID NO: 1128772 - RNA, 22 nt, Human
gaagagcuaaaggcacaggcuu

SEQ ID NO: 1128773 - RNA, 22 nt, Human
cugccuuggaaaaugugguaau

SEQ ID NO: 1128774 - RNA, 22 nt, Human
auuauguaacugugguucagca

SEQ ID NO: 1128775 - RNA, 22 nt, Human
cucagggggaaucaggucacag

SEQ ID NO: 1128776 - RNA, 22 nt, Human
gcuguuccugcuuagaggucgg

SEQ ID NO: 1128777 - RNA, 17 nt, Human
cucuccuuccucugagg

SEQ ID NO: 1128778 - RNA, 22 nt, Human
ucacagaaauaagauaguuauu

SEQ ID NO: 1128779 - RNA, 22 nt, Human
ccugccugcaaaaugggacaag

SEQ ID NO: 1128780 - RNA, 22 nt, Human
gcaggaugaaggcagaggcuga

SEQ ID NO: 1128781 - RNA, 22 nt, Human
agccaagcacucaacuccugga

SEQ ID NO: 1128782 - RNA, 22 nt, Human
cuccaggccagggaaguggaca

SEQ ID NO: 1128783 - RNA, 22 nt, Human
gaagccaacauuccaaguagaa

SEQ ID NO: 1128784 - RNA, 22 nt, Human
aguguccaacucagcuugucaa

SEQ ID NO: 1128785 - RNA, 22 nt, Human
agaagcagacucugaggcaagg

SEQ ID NO: 1128786 - RNA, 22 nt, Human
caugcuuucuguccaaauguua

SEQ ID NO: 1128787 - RNA, 22 nt, Human
cucaggaugucggugacuauug

SEQ ID NO: 1128788 - RNA, 22 nt, Human
ggcugccugggagcccuccucu

SEQ ID NO: 1128789 - RNA, 22 nt, Human
guuugcauguauuaagucaaua

SEQ ID NO: 1128790 - RNA, 22 nt, Human
uuucuaaaugguggcugcauug

SEQ ID NO: 1128791 - RNA, 22 nt, Human
guugaauaucguguucuuguuu

SEQ ID NO: 1128792 - RNA, 22 nt, Human
cagguggggcagcugugggagc

SEQ ID NO: 1128793 - RNA, 22 nt, Human
ggcuucugguaaagaccacacc

SEQ ID NO: 1128794 - RNA, 22 nt, Human
ccaggaggcggaagguacagug

SEQ ID NO: 1128795 - RNA, 22 nt, Human
gcacccagccagcaucucagag

SEQ ID NO: 1128796 - RNA, 18 nt, Human
caggagcaggaguugaac

SEQ ID NO: 1128797 - RNA, 22 nt, Human
uggcuucaucugcagcacugcc

SEQ ID NO: 1128798 - RNA, 22 nt, Human
aucuggcuauugacauguuaua

SEQ ID NO: 1128799 - RNA, 22 nt, Human
ugucacauugaauaugauuuau

SEQ ID NO: 1128800 - RNA, 22 nt, Human
acacugaauaauugagaguuga

SEQ ID NO: 1128801 - RNA, 22 nt, Human
aaagcucacaguaauacaaggc

SEQ ID NO: 1128802 - RNA, 22 nt, Human
ucugccagaaguucugagagua

SEQ ID NO: 1128803 - RNA, 22 nt, Human
gucccagagagcacuaguccau

SEQ ID NO: 1128804 - RNA, 22 nt, Human
uuuucauuuacauuagggaaga

SEQ ID NO: 1128805 - RNA, 21 nt, Human
aagccucaagcagaagacaga

SEQ ID NO: 1128806 - RNA, 22 nt, Human
ccacaaguuucagcacccagag

SEQ ID NO: 1128807 - RNA, 18 nt, Human
guccauggccuccaccca

SEQ ID NO: 1128808 - RNA, 21 nt, Human
uaaaugugagcagggcugggc

SEQ ID NO: 1128809 - RNA, 22 nt, Human
agaggcugucccuugcuauucc

SEQ ID NO: 1128810 - RNA, 22 nt, Human
gauuucuguaacacuucagaua

SEQ ID NO: 1128811 - RNA, 22 nt, Human
gcucuguguccacagcuggaaa

SEQ ID NO: 1128812 - RNA, 22 nt, Human
ccagggccaagagaccucgagg

SEQ ID NO: 1128813 - RNA, 22 nt, Human
uccaggacuagcauuucugaua

SEQ ID NO: 1128814 - RNA, 22 nt, Human
gaaggagagagacaucgucccu

SEQ ID NO: 1128815 - RNA, 22 nt, Human
gggugacauuucccaaugagcc

SEQ ID NO: 1128816 - RNA, 22 nt, Human
uugcagagaucagcagguuuga

SEQ ID NO: 1128817 - RNA, 22 nt, Human
acagugucaugucguguucccc

SEQ ID NO: 1128818 - RNA, 19 nt, Human
gcagcugugggaagagcca

SEQ ID NO: 1128819 - RNA, 20 nt, Human
cugagcugagcuccaugggu

SEQ ID NO: 1128820 - RNA, 22 nt, Human
aguacuuuacuucuuacaguuu

SEQ ID NO: 1128821 - RNA, 22 nt, Human
acagccagaggagccaggcugg

SEQ ID NO: 1128822 - RNA, 20 nt, Human
cagcccuccaguggaggcag

SEQ ID NO: 1128823 - RNA, 22 nt, Human
gaggggcuugaggcccugaugg

SEQ ID NO: 1128824 - RNA, 22 nt, Human
cugggcagagcuaacaccugag

SEQ ID NO: 1128825 - RNA, 22 nt, Human
cugucaggggcggguggagcgg

SEQ ID NO: 1128826 - RNA, 22 nt, Human
guugaauauaccugcauuugug

SEQ ID NO: 1128827 - RNA, 22 nt, Human
aauguuuuuuggucugaugaau

SEQ ID NO: 1128828 - RNA, 23 nt, Human
aagcuuccuucacgucuccuggg

SEQ ID NO: 1128829 - RNA, 21 nt, Human
ccagcagcucaaggaucucuu

SEQ ID NO: 1128830 - RNA, 22 nt, Human
ccucucuguguggccucuccau

SEQ ID NO: 1128831 - RNA, 22 nt, Human
uacagucuuuggaaagagauag

SEQ ID NO: 1128832 - RNA, 20 nt, Human
ugggccugagccugugggcu

SEQ ID NO: 1128833 - RNA, 22 nt, Human
acagggccucagcugauucugg

SEQ ID NO: 1128834 - RNA, 22 nt, Human
uauucacauucucaggccuggu

SEQ ID NO: 1128835 - RNA, 22 nt, Human
cccaggaggcagagguugcagu

SEQ ID NO: 1128836 - RNA, 22 nt, Human
uuuaauacagaacuugucaggg

SEQ ID NO: 1128837 - RNA, 22 nt, Human
uugcauuguugcaaugaaguau

SEQ ID NO: 1128838 - RNA, 22 nt, Human
uguacaguauauuucaaagcca

SEQ ID NO: 1128839 - RNA, 22 nt, Human
gaggugaguggaucacgagguc

SEQ ID NO: 1128840 - RNA, 22 nt, Human
agcugguaugaacaggauagga

SEQ ID NO: 1128841 - RNA, 22 nt, Human
aaggcagagggcuggaucagag

SEQ ID NO: 1128842 - RNA, 22 nt, Human
uggccuuggacagagcgcuccu

SEQ ID NO: 1128843 - RNA, 22 nt, Human
gggguugguuuaaaugcuugag

SEQ ID NO: 1128844 - RNA, 22 nt, Human
gcucaggaaggcucaaccagga

SEQ ID NO: 1128845 - RNA, 20 nt, Human
ccuccuggucaggugugcag

SEQ ID NO: 1128846 - RNA, 22 nt, Human
uauccaauucaccauugauggg

SEQ ID NO: 1128847 - RNA, 22 nt, Human
gccuucaggaaaucaguccuug

SEQ ID NO: 1128848 - RNA, 19 nt, Human
gguaaaagugagcuucagg

SEQ ID NO: 1128849 - RNA, 22 nt, Human
ccaggaagcggugagggcugcc

SEQ ID NO: 1128850 - RNA, 22 nt, Human
agaguguuauuugcucuguauu

SEQ ID NO: 1128851 - RNA, 22 nt, Human
gucuggagccacccuaagcauu

SEQ ID NO: 1128852 - RNA, 22 nt, Human
ugcagaaguauuccaggcccca

SEQ ID NO: 1128853 - RNA, 22 nt, Human
caguuucuucaucaguuaagca

SEQ ID NO: 1128854 - RNA, 22 nt, Human
uccugagggcgauucagcaggu

SEQ ID NO: 1128855 - RNA, 22 nt, Human
ucccuggaacagagagacaacg

SEQ ID NO: 1128856 - RNA, 22 nt, Human
gcucuguguugucagaggcacc

SEQ ID NO: 1128857 - RNA, 22 nt, Human
uugagggucuggaucugcugcu

SEQ ID NO: 1128858 - RNA, 22 nt, Human
cccagggacagaugggcagcua

SEQ ID NO: 1128859 - RNA, 22 nt, Human
ggugcagugguguggcaaaggg

SEQ ID NO: 1128860 - RNA, 22 nt, Human
ggggacaguuaaagaccaagac

SEQ ID NO: 1128861 - RNA, 22 nt, Human
uguguuuuacaaauucucuuaa

SEQ ID NO: 1128862 - RNA, 22 nt, Human
auagaacagaaacagaugcaca

SEQ ID NO: 1128863 - RNA, 22 nt, Human
gucuuucuuaauucaagugcuu

SEQ ID NO: 1128864 - RNA, 22 nt, Human
ccauggcauuuuaugugucuua

SEQ ID NO: 1128865 - RNA, 21 nt, Human
acaggcucuggggaugcuggg

SEQ ID NO: 1128866 - RNA, 22 nt, Human
caggugggagcgaggagcuacu

SEQ ID NO: 1128867 - RNA, 22 nt, Human
uagaggugacacugagaccaua

SEQ ID NO: 1128868 - RNA, 23 nt, Human
gccugggacugguagugugaccu

SEQ ID NO: 1128869 - RNA, 19 nt, Human
ugcagaagacacaguggug

SEQ ID NO: 1128870 - RNA, 22 nt, Human
gccuggaggggccaggguggua

SEQ ID NO: 1128871 - RNA, 22 nt, Human
aguucacauuccgagguacugg

SEQ ID NO: 1128872 - RNA, 22 nt, Human
acagggccaggugagaggugcu

SEQ ID NO: 1128873 - RNA, 22 nt, Human
ggccugugagcccuugcaugua

SEQ ID NO: 1128874 - RNA, 22 nt, Human
ucagguggcuucggggaguggc

SEQ ID NO: 1128875 - RNA, 16 nt, Human
ugggcagaugagaaga

SEQ ID NO: 1128876 - RNA, 20 nt, Human
ccucucugaagaggucaucu

SEQ ID NO: 1128877 - RNA, 22 nt, Human
aaaggcuccuucucccaugacc

SEQ ID NO: 1128878 - RNA, 22 nt, Human
caggcagcugcuggguucagcc

SEQ ID NO: 1128879 - RNA, 22 nt, Human
ucacgagaggcacagaauagag

SEQ ID NO: 1128880 - RNA, 20 nt, Human
gcugccuguuucuguaagua

SEQ ID NO: 1128881 - RNA, 22 nt, Human
ccuuugggugaauuccucucuu

SEQ ID NO: 1128882 - RNA, 22 nt, Human
cacagcagagggagccauugaa

SEQ ID NO: 1128883 - RNA, 21 nt, Human
aggcucagcagguguauaaag

SEQ ID NO: 1128884 - RNA, 22 nt, Human
aggcugggaagguaaaguugua

SEQ ID NO: 1128885 - RNA, 22 nt, Human
uggagcaggacugcugcccuca

SEQ ID NO: 1128886 - RNA, 22 nt, Human
cucuggacacuggcaugggguc

SEQ ID NO: 1128887 - RNA, 22 nt, Human
cagggcuguggcuuugugcugu

SEQ ID NO: 1128888 - RNA, 22 nt, Human
uggcagagaacacacaugauuc

SEQ ID NO: 1128889 - RNA, 22 nt, Human
ggugccaggcuguagucagggu

SEQ ID NO: 1128890 - RNA, 22 nt, Human
caaugauguuuagauaaaaucc

SEQ ID NO: 1128891 - RNA, 22 nt, Human
aggggccauuguucugcccgcu

SEQ ID NO: 1128892 - RNA, 22 nt, Human
ccuuccuggagcccaugcagau

SEQ ID NO: 1128893 - RNA, 22 nt, Human
gcuggaccaggugugcacaggc

SEQ ID NO: 1128894 - RNA, 22 nt, Human
uguauuuucuucuggaagcuua

SEQ ID NO: 1128895 - RNA, 22 nt, Human
ccucugcugcuguugagcaccg

SEQ ID NO: 1128896 - RNA, 22 nt, Human
cuggagcuaggaaguccaagau

SEQ ID NO: 1128897 - RNA, 22 nt, Human
cuguaauucacuagggucagcg

SEQ ID NO: 1128898 - RNA, 22 nt, Human
agggaaauuaaugugagcaaug

SEQ ID NO: 1128899 - RNA, 22 nt, Human
guggcugcuguccucucugguu

SEQ ID NO: 1128900 - RNA, 22 nt, Human
uagcugccaaaagggugggcua

SEQ ID NO: 1128901 - RNA, 22 nt, Human
uuuuaaguuaauauaauugagg

SEQ ID NO: 1128902 - RNA, 22 nt, Human
auucuguauggaaaagcacuau

SEQ ID NO: 1128903 - RNA, 22 nt, Human
uucaagucaaggaaagaggucu

SEQ ID NO: 1128904 - RNA, 22 nt, Human
cgucuuccucuuacgaugcgcu

SEQ ID NO: 1128905 - RNA, 22 nt, Human
gggugaggagcugccagucaug

SEQ ID NO: 1128906 - RNA, 22 nt, Human
uuucuguuaggcaucauuuuaa

SEQ ID NO: 1128907 - RNA, 22 nt, Human
acauuucuaguuguucaucucc

SEQ ID NO: 1128908 - RNA, 19 nt, Human
ccugggagucagcugaagg

SEQ ID NO: 1128909 - RNA, 22 nt, Human
cugggguggauggguccaaguu

SEQ ID NO: 1128910 - RNA, 22 nt, Human
gccugccuguuggcugaggugc

SEQ ID NO: 1128911 - RNA, 22 nt, Human
uuccuccacgugacaggagcca

SEQ ID NO: 1128912 - RNA, 22 nt, Human
uaaagguaguuuuaaaggugcu

SEQ ID NO: 1128913 - RNA, 22 nt, Human
ucaugcaaggcugaaacauggu

SEQ ID NO: 1128914 - RNA, 22 nt, Human
aaaguuacuaucacaaugaaau

SEQ ID NO: 1128915 - RNA, 20 nt, Human
agugucugggccucaggccc

SEQ ID NO: 1128916 - RNA, 22 nt, Human
ggcagcuccaaaaggaaacacu

SEQ ID NO: 1128917 - RNA, 22 nt, Human
ggcagggagagcaugcugauaa

SEQ ID NO: 1128918 - RNA, 22 nt, Human
aagcagaaguugaucuaccaua

SEQ ID NO: 1128919 - RNA, 22 nt, Human
uaggagaggugaauggcacacu

SEQ ID NO: 1128920 - RNA, 22 nt, Human
gggcugggcaugguguucccuc

SEQ ID NO: 1128921 - RNA, 22 nt, Human
ucagggcacaggccuguggguu

SEQ ID NO: 1128922 - RNA, 22 nt, Human
uacaaaugaaccaacuuugaug

SEQ ID NO: 1128923 - RNA, 22 nt, Human
agauaacuuuuggguauucaug

SEQ ID NO: 1128924 - RNA, 22 nt, Human
uggcuggcaaggcuggagucag

SEQ ID NO: 1128925 - RNA, 20 nt, Human
gcuuuuucuaauagcagucc

SEQ ID NO: 1128926 - RNA, 22 nt, Human
gaagcagcuuucuggugaggag

SEQ ID NO: 1128927 - RNA, 22 nt, Human
caugcacaacauacucaagagg

SEQ ID NO: 1128928 - RNA, 18 nt, Human
cugccuguugcugagagg

SEQ ID NO: 1128929 - RNA, 22 nt, Human
uuugcauugcauuaaguauucu

SEQ ID NO: 1128930 - RNA, 22 nt, Human
gagcagugggaaggaacagggu

SEQ ID NO: 1128931 - RNA, 22 nt, Human
uauguuaaauguuugauguuua

SEQ ID NO: 1128932 - RNA, 22 nt, Human
cuuccugcauugugccagaguu

SEQ ID NO: 1128933 - RNA, 22 nt, Human
cuggccuucagacucggacuga

SEQ ID NO: 1128934 - RNA, 22 nt, Human
ugaaaucuuuaguuucuguccc

SEQ ID NO: 1128935 - RNA, 22 nt, Human
gucccacaccuugaggggucuu

SEQ ID NO: 1128936 - RNA, 22 nt, Human
ucucagagaacaguuggugcuu

SEQ ID NO: 1128937 - RNA, 22 nt, Human
guggcuucugcggugugcgcag

SEQ ID NO: 1128938 - RNA, 22 nt, Human
ugggcucucuggcaggaaggcu

SEQ ID NO: 1128939 - RNA, 22 nt, Human
ggcugggcuccgggagcaugcg

SEQ ID NO: 1128940 - RNA, 22 nt, Human
uugucccaggacuugcauagau

SEQ ID NO: 1128941 - RNA, 22 nt, Human
agguaacacuacuuaguauacu

SEQ ID NO: 1128942 - RNA, 22 nt, Human
ggcagcagggcugucucccuac

SEQ ID NO: 1128943 - RNA, 22 nt, Human
ucuaggagcaugaagggaaggc

SEQ ID NO: 1128944 - RNA, 22 nt, Human
caggagugagaugcgaucacuu

SEQ ID NO: 1128945 - RNA, 22 nt, Human
acaaagugcacaagaugagaac

SEQ ID NO: 1128946 - RNA, 22 nt, Human
ugucucugugagaucugacgau

SEQ ID NO: 1128947 - RNA, 22 nt, Human
ugaccaaagaguugcuuguauu

SEQ ID NO: 1128948 - RNA, 22 nt, Human
cauugcacagcccuguggugau

SEQ ID NO: 1128949 - RNA, 22 nt, Human
aguuauauuccauagauucaga

SEQ ID NO: 1128950 - RNA, 22 nt, Human
gcaguggcaugaugugggcuca

SEQ ID NO: 1128951 - RNA, 22 nt, Human
agcugccauccuguucagcacc

SEQ ID NO: 1128952 - RNA, 22 nt, Human
uauugacaauaggcaacugagg

SEQ ID NO: 1128953 - RNA, 22 nt, Human
ugguccagaugccuuggcuuua

SEQ ID NO: 1128954 - RNA, 22 nt, Human
ggaggcuccacugcucuuccug

SEQ ID NO: 1128955 - RNA, 21 nt, Human
ugcugccauagaccugaggga

SEQ ID NO: 1128956 - RNA, 22 nt, Human
ccggggacuuaaagugaaggaa

SEQ ID NO: 1128957 - RNA, 22 nt, Human
gucagcaggguccccuugagug

SEQ ID NO: 1128958 - RNA, 22 nt, Human
cagcagagguuggaacaguucu

SEQ ID NO: 1128959 - RNA, 22 nt, Human
uuccagaaaucuuucagcucaa

SEQ ID NO: 1128960 - RNA, 22 nt, Human
cccacaggcuagggguagggca

SEQ ID NO: 1128961 - RNA, 22 nt, Human
aaguccaucucugccccacaca

SEQ ID NO: 1128962 - RNA, 22 nt, Human
auaacagaugugaagugcuaau

SEQ ID NO: 1128963 - RNA, 22 nt, Human
guccucugggcuuugagcaguc

SEQ ID NO: 1128964 - RNA, 19 nt, Human
ucugaggguccagaugcau

SEQ ID NO: 1128965 - RNA, 22 nt, Human
aaugcacauaaauauggucuua

SEQ ID NO: 1128966 - RNA, 22 nt, Human
ugcagcucauugguguccuggu

SEQ ID NO: 1128967 - RNA, 22 nt, Human
gccuguguggaugcgccggugc

SEQ ID NO: 1128968 - RNA, 22 nt, Human
acauuucuucccuuuagcagaa

SEQ ID NO: 1128969 - RNA, 18 nt, Human
cuuguucuucucuuggcg

SEQ ID NO: 1128970 - RNA, 22 nt, Human
uuuauucuugagagugagaaga

SEQ ID NO: 1128971 - RNA, 22 nt, Human
gccaggcuccaggcccuccuga

SEQ ID NO: 1128972 - RNA, 22 nt, Human
aaaaauagcuucucuugucccu

SEQ ID NO: 1128973 - RNA, 22 nt, Human
caugcacaaagguaagaugcgu

SEQ ID NO: 1128974 - RNA, 22 nt, Human
cagacaggcuagccagacucac

SEQ ID NO: 1128975 - RNA, 22 nt, Human
uccucagggcggccuccgucuu

SEQ ID NO: 1128976 - RNA, 22 nt, Human
gggcuggcaucgguugcugaga

SEQ ID NO: 1128977 - RNA, 22 nt, Human
gaaggccuagggaugcucugcg

SEQ ID NO: 1128978 - RNA, 19 nt, Human
aggcagaggcuuggcuagc

SEQ ID NO: 1128979 - RNA, 22 nt, Human
cacucaggcugugucaggagga

SEQ ID NO: 1128980 - RNA, 22 nt, Human
gugccugguuuggggaauguuc

SEQ ID NO: 1128981 - RNA, 22 nt, Human
aggcacuguggguguggccgga

SEQ ID NO: 1128982 - RNA, 22 nt, Human
ugggcagacauugaguuuguuc

SEQ ID NO: 1128983 - RNA, 22 nt, Human
cacauaaguggguuccauugca

SEQ ID NO: 1128984 - RNA, 22 nt, Human
ucagaccauccugcuguuagug

SEQ ID NO: 1128985 - RNA, 22 nt, Human
caggggcucugagauugucuaa

SEQ ID NO: 1128986 - RNA, 22 nt, Human
auaaaaguuuccaaucaugccu

SEQ ID NO: 1128987 - RNA, 22 nt, Human
ugcagcugaggccagcuaugcc

SEQ ID NO: 1128988 - RNA, 22 nt, Human
aggccugggacgggagccguga

SEQ ID NO: 1128989 - RNA, 22 nt, Human
ccucugccugcacaucauccug

SEQ ID NO: 1128990 - RNA, 22 nt, Human
augcacagacccaaaggccauc

SEQ ID NO: 1128991 - RNA, 19 nt, Human
gcucagagggcccugugcu

SEQ ID NO: 1128992 - RNA, 22 nt, Human
uggcagggugccaguugcgagu

SEQ ID NO: 1128993 - RNA, 22 nt, Human
aucauaaagugcuaucugauug

SEQ ID NO: 1128994 - RNA, 22 nt, Human
agagugaaguucaucgugcagc

SEQ ID NO: 1128995 - RNA, 17 nt, Human
gagaguguauuggaugc

SEQ ID NO: 1128996 - RNA, 19 nt, Human
uuuggcacucugaaguguu

SEQ ID NO: 1128997 - RNA, 22 nt, Human
acacugaaugcuguuuagaaau

SEQ ID NO: 1128998 - RNA, 22 nt, Human
aggcucagauucacauuugguu

SEQ ID NO: 1128999 - RNA, 22 nt, Human
uggcccugugugcaggcugcac

SEQ ID NO: 1129000 - RNA, 22 nt, Human
aaaguccagggaaagagcgucu

SEQ ID NO: 1129001 - RNA, 19 nt, Human
agcauccagucaugggauc

SEQ ID NO: 1129002 - RNA, 22 nt, Human
uuaauccauggcaguuauuaaa

SEQ ID NO: 1129003 - RNA, 22 nt, Human
cagccagguucaaguccuuaua

SEQ ID NO: 1129004 - RNA, 22 nt, Human
agggccugucagcgguguccug

SEQ ID NO: 1129005 - RNA, 22 nt, Human
gccagagcugagacacgagucc

SEQ ID NO: 1129006 - RNA, 22 nt, Human
aaucuggcauguaagcuuagag

SEQ ID NO: 1129007 - RNA, 22 nt, Human
agccucucuuuauucccagcua

SEQ ID NO: 1129008 - RNA, 20 nt, Human
ugccagggccagcagaggcu

SEQ ID NO: 1129009 - RNA, 22 nt, Human
agagcuggccagggaucacucu

SEQ ID NO: 1129010 - RNA, 22 nt, Human
cuuuauguccaccagacugcaa

SEQ ID NO: 1129011 - RNA, 22 nt, Human
uaagcauucaaugcuuagcacu

SEQ ID NO: 1129012 - RNA, 22 nt, Human
auauauaucgaguucaugucuc

SEQ ID NO: 1129013 - RNA, 22 nt, Human
uccagggcugacuugggagagg

SEQ ID NO: 1129014 - RNA, 22 nt, Human
ugugccauuucuauucugcagc

SEQ ID NO: 1129015 - RNA, 22 nt, Human
ugaagguggcauaggagagaug

SEQ ID NO: 1129016 - RNA, 22 nt, Human
guauuuauaggggaaugagagu

SEQ ID NO: 1129017 - RNA, 22 nt, Human
caaaagauacuugcaucuaacu

SEQ ID NO: 1129018 - RNA, 22 nt, Human
augugcaugcacuuacaugugu

SEQ ID NO: 1129019 - RNA, 22 nt, Human
cugggcuacguguugacagcau

SEQ ID NO: 1129020 - RNA, 22 nt, Human
aagacagaccacgugacagggc

SEQ ID NO: 1129021 - RNA, 22 nt, Human
cccagcucucgcacuuacuagc

SEQ ID NO: 1129022 - RNA, 22 nt, Human
ggucccugaagaggccuggggu

SEQ ID NO: 1129023 - RNA, 22 nt, Human
gcugggcuucucaaugcugccu

SEQ ID NO: 1129024 - RNA, 17 nt, Human
gggcagggacuccuggg

SEQ ID NO: 1129025 - RNA, 22 nt, Human
caagccugucucaccagugcua

SEQ ID NO: 1129026 - RNA, 22 nt, Human
ugcagggcacacgcacgggugu

SEQ ID NO: 1129027 - RNA, 22 nt, Human
guccugggccugcugaggcuga

SEQ ID NO: 1129028 - RNA, 22 nt, Human
ucugggagguaaccaugcugau

SEQ ID NO: 1129029 - RNA, 22 nt, Human
aaaaguucccugguuagaaaag

SEQ ID NO: 1129030 - RNA, 22 nt, Human
uaaaauguuugcaagagaccag

SEQ ID NO: 1129031 - RNA, 22 nt, Human
gggcuucucccuaaggacucug

SEQ ID NO: 1129032 - RNA, 22 nt, Human
guccugucccccaaggcugugg

SEQ ID NO: 1129033 - RNA, 22 nt, Human
gcucaagggaugggagugggug

SEQ ID NO: 1129034 - RNA, 22 nt, Human
uacaaagugugcccaugcugag

SEQ ID NO: 1129035 - RNA, 22 nt, Human
ccucuccuugcacccgucccgc

SEQ ID NO: 1129036 - RNA, 22 nt, Human
gagagcugucagcguagcaccg

SEQ ID NO: 1129037 - RNA, 22 nt, Human
auuuaugacuggugaauagaac

SEQ ID NO: 1129038 - RNA, 19 nt, Human
aggacucuggaggcaugag

SEQ ID NO: 1129039 - RNA, 22 nt, Human
uccucaggaucuaggagugcuu

SEQ ID NO: 1129040 - RNA, 21 nt, Human
gucagcagauccagcacuugu

SEQ ID NO: 1129041 - RNA, 22 nt, Human
uggacucagugcugccauuccc

SEQ ID NO: 1129042 - RNA, 20 nt, Human
agcaggaaugaugcuuucau

SEQ ID NO: 1129043 - RNA, 22 nt, Human
cugugccaggcccagcugacuu

SEQ ID NO: 1129044 - RNA, 22 nt, Human
augcaguacagauaauucuaca

SEQ ID NO: 1129045 - RNA, 22 nt, Human
agcaugcacaugacuggcuuaa

SEQ ID NO: 1129046 - RNA, 22 nt, Human
cagacagaaggcuccuugaggu

SEQ ID NO: 1129047 - RNA, 22 nt, Human
ugcaguggaaagacucagacuu

SEQ ID NO: 1129048 - RNA, 22 nt, Human
uggggcuggcuauugucucccu

SEQ ID NO: 1129049 - RNA, 22 nt, Human
uagagcuguaucaaagagccuu

SEQ ID NO: 1129050 - RNA, 19 nt, Human
ggcugccuuuccuuaccag

SEQ ID NO: 1129051 - RNA, 22 nt, Human
cacguuuuaugacagaagaagc

SEQ ID NO: 1129052 - RNA, 22 nt, Human
cagcugccacuugcucucggcu

SEQ ID NO: 1129053 - RNA, 22 nt, Human
gcaggccuccccugcuggagcu

SEQ ID NO: 1129054 - RNA, 22 nt, Human
uguucuuucaguuagacacagu

SEQ ID NO: 1129055 - RNA, 22 nt, Human
cagagcaguaaaucuggggcac

SEQ ID NO: 1129056 - RNA, 22 nt, Human
aaaggugacugcagcagcuauu

SEQ ID NO: 1129057 - RNA, 20 nt, Human
cuguccccgaggucaccagg

SEQ ID NO: 1129058 - RNA, 22 nt, Human
ucugaggcccugcaggcagugu

SEQ ID NO: 1129059 - RNA, 22 nt, Human
uaagaacagugacagccaacau

SEQ ID NO: 1129060 - RNA, 18 nt, Human
acaaauguagugucuuaa

SEQ ID NO: 1129061 - RNA, 22 nt, Human
uggccuggcccugaggcccugu

SEQ ID NO: 1129062 - RNA, 22 nt, Human
auuguacaaugccuggaacauu

SEQ ID NO: 1129063 - RNA, 22 nt, Human
agggcugccugacuccagagcc

SEQ ID NO: 1129064 - RNA, 22 nt, Human
gcugggaggaucucucccuguc

SEQ ID NO: 1129065 - RNA, 23 nt, Human
acacaaggguaacugccagccau

SEQ ID NO: 1129066 - RNA, 21 nt, Human
cugguguagcacucaggugcu

SEQ ID NO: 1129067 - RNA, 20 nt, Human
gccuggcacccggggcuggc

SEQ ID NO: 1129068 - RNA, 23 nt, Human
cccagcgcugagcccugcaggca

SEQ ID NO: 1129069 - RNA, 22 nt, Human
ccuggcagguggcgcccucggc

SEQ ID NO: 1129070 - RNA, 22 nt, Human
ugcagcaggagccaggccuggu

SEQ ID NO: 1129071 - RNA, 23 nt, Human
gaguguucauagcaggcucuugc

SEQ ID NO: 1129072 - RNA, 22 nt, Human
caaaguuuggcucucaugacau

SEQ ID NO: 1129073 - RNA, 22 nt, Human
aagagggaggugcgggugcaga

SEQ ID NO: 1129074 - RNA, 22 nt, Human
ugugcccauuacacagaggcau

SEQ ID NO: 1129075 - RNA, 23 nt, Human
ggcagagagcauggcuggggccc

SEQ ID NO: 1129076 - RNA, 22 nt, Human
aauggacaggagagcauaguca

SEQ ID NO: 1129077 - RNA, 22 nt, Human
cuguggcuaugguguacauacu

SEQ ID NO: 1129078 - RNA, 22 nt, Human
ucucuggagcugcagauccagg

SEQ ID NO: 1129079 - RNA, 22 nt, Human
aaauguguuugauaggaauauu

SEQ ID NO: 1129080 - RNA, 22 nt, Human
aaaaacuguaauuacuuuugca

SEQ ID NO: 1129081 - RNA, 22 nt, Human
cccagaggugcuucagaggugc

SEQ ID NO: 1129082 - RNA, 22 nt, Human
aagcagaaaaacugagcuccaa

SEQ ID NO: 1129083 - RNA, 22 nt, Human
acagguggaggcuuuaggaggu

SEQ ID NO: 1129084 - RNA, 22 nt, Human
uccugcagagacagaggccuca

SEQ ID NO: 1129085 - RNA, 22 nt, Human
agcugagcugcagaugacugua

SEQ ID NO: 1129086 - RNA, 22 nt, Human
uggcagcaauuugugauguuga

SEQ ID NO: 1129087 - RNA, 19 nt, Human
ggaagagaggaaaggugga

SEQ ID NO: 1129088 - RNA, 22 nt, Human
gagccugaugaaacaggcagac

SEQ ID NO: 1129089 - RNA, 22 nt, Human
ucagggcauggcugcacuuggc

SEQ ID NO: 1129090 - RNA, 22 nt, Human
uggcagagucaucacaucugga

SEQ ID NO: 1129091 - RNA, 23 nt, Human
uccugagaugagacagugcugcc

SEQ ID NO: 1129092 - RNA, 22 nt, Human
ugguaaaguguacugaauauga

SEQ ID NO: 1129093 - RNA, 22 nt, Human
ugggcaaguaucggacucugag

SEQ ID NO: 1129094 - RNA, 18 nt, Human
gucuggaggucaggagcu

SEQ ID NO: 1129095 - RNA, 22 nt, Human
ccaggaggcagagguuacagug

SEQ ID NO: 1129096 - RNA, 22 nt, Human
gaggaguguauuccacaccacu

SEQ ID NO: 1129097 - RNA, 20 nt, Human
gcugccuuguccugcuuggu

SEQ ID NO: 1129098 - RNA, 22 nt, Human
agagccugggaauuugcauguu

SEQ ID NO: 1129099 - RNA, 17 nt, Human
agaaagaggauccacag

SEQ ID NO: 1129100 - RNA, 22 nt, Human
ucucccagaggaucccagugga

SEQ ID NO: 1129101 - RNA, 22 nt, Human
auuuccauacacccauuucuga

SEQ ID NO: 1129102 - RNA, 21 nt, Human
uucaagauauuuaaaaggugg

SEQ ID NO: 1129103 - RNA, 21 nt, Human
aagcaggacauaugaugcccu

SEQ ID NO: 1129104 - RNA, 22 nt, Human
uggagggaacccaggcugcucu

SEQ ID NO: 1129105 - RNA, 22 nt, Human
ccuuggcccuagccucaggcaa

SEQ ID NO: 1129106 - RNA, 22 nt, Human
gcacagggccuggcacauaaga

SEQ ID NO: 1129107 - RNA, 22 nt, Human
uuucuucucacccaggacagag

SEQ ID NO: 1129108 - RNA, 22 nt, Human
cauugacaucaggcuuggccaa

SEQ ID NO: 1129109 - RNA, 22 nt, Human
ugucucugagaugacucccacc

SEQ ID NO: 1129110 - RNA, 22 nt, Human
aagcugcccucauucccagugc

SEQ ID NO: 1129111 - RNA, 23 nt, Human
gggggcugguugacucucugcag

SEQ ID NO: 1129112 - RNA, 22 nt, Human
ccucuuccacugggccccaucc

SEQ ID NO: 1129113 - RNA, 21 nt, Human
acagaguaguugaaacagaga

SEQ ID NO: 1129114 - RNA, 22 nt, Human
cugggaugucuauagaacacuu

SEQ ID NO: 1129115 - RNA, 22 nt, Human
cagagacagaaaauggaucuag

SEQ ID NO: 1129116 - RNA, 22 nt, Human
ggcucaggaugagccuucucau

SEQ ID NO: 1129117 - RNA, 22 nt, Human
gcugagcugcuguucauccugc

SEQ ID NO: 1129118 - RNA, 22 nt, Human
gggcuggugaggcugcccugca

SEQ ID NO: 1129119 - RNA, 22 nt, Human
ggaggcccagagaggugaagug

SEQ ID NO: 1129120 - RNA, 22 nt, Human
augggguggaguccgggcagcg

SEQ ID NO: 1129121 - RNA, 22 nt, Human
ggcacucagagauucaggcugu

SEQ ID NO: 1129122 - RNA, 22 nt, Human
cauacuuuugcccugacauucu

SEQ ID NO: 1129123 - RNA, 21 nt, Human
ccagccucagaucagggagcu

SEQ ID NO: 1129124 - RNA, 22 nt, Human
uccauggggcccaggaugagag

SEQ ID NO: 1129125 - RNA, 23 nt, Human
aacaccaaggcucagagagauaa

SEQ ID NO: 1129126 - RNA, 22 nt, Human
uugugugguagcuucauugaac

SEQ ID NO: 1129127 - RNA, 22 nt, Human
caggugcuguccugcacauguc

SEQ ID NO: 1129128 - RNA, 22 nt, Human
uagagaaaagcagggaucagga

SEQ ID NO: 1129129 - RNA, 22 nt, Human
cccagcucucugcucuuagccu

SEQ ID NO: 1129130 - RNA, 21 nt, Human
ugaaaguuggagucaaaugua

SEQ ID NO: 1129131 - RNA, 22 nt, Human
ugcuuuauguuaucagaagggu

SEQ ID NO: 1129132 - RNA, 22 nt, Human
cucuggcuuugcucaugcaucc

SEQ ID NO: 1129133 - RNA, 22 nt, Human
uggccugucuuguugugcuaga

SEQ ID NO: 1129134 - RNA, 22 nt, Human
cccaagaucuuucgugcacuaa

SEQ ID NO: 1129135 - RNA, 22 nt, Human
ugcuggcucaguuugcagacuc

SEQ ID NO: 1129136 - RNA, 22 nt, Human
augguugacccaugugaguuag

SEQ ID NO: 1129137 - RNA, 22 nt, Human
ccaccaggacagcccugagggg

SEQ ID NO: 1129138 - RNA, 22 nt, Human
cagacagaccugcaagggcaca

SEQ ID NO: 1129139 - RNA, 22 nt, Human
ucuggagcuggagggcaaggca

SEQ ID NO: 1129140 - RNA, 22 nt, Human
auaguauuuaauaguuagcuca

SEQ ID NO: 1129141 - RNA, 22 nt, Human
ucaugucaguuucuucuauaaa

SEQ ID NO: 1129142 - RNA, 22 nt, Human
caggcagcugacugucagauau

SEQ ID NO: 1129143 - RNA, 22 nt, Human
caaaugcaugagaaauaagagg

SEQ ID NO: 1129144 - RNA, 22 nt, Human
agggcagagcugucuaaauggc

SEQ ID NO: 1129145 - RNA, 22 nt, Human
gggccuggugcuucugacuccu

SEQ ID NO: 1129146 - RNA, 22 nt, Human
aggacucaucccugcuugucag

SEQ ID NO: 1129147 - RNA, 22 nt, Human
gagguagcaugcuggaagggac

SEQ ID NO: 1129148 - RNA, 22 nt, Human
acccagcuggaugcauggaggc

SEQ ID NO: 1129149 - RNA, 22 nt, Human
gcagagccaggagcccaggauc

SEQ ID NO: 1129150 - RNA, 22 nt, Human
cccaggagguggagguugcagu

SEQ ID NO: 1129151 - RNA, 22 nt, Human
ccugucauacuaacguaguggg

SEQ ID NO: 1129152 - RNA, 22 nt, Human
gcucugugccacaugcaguguu

SEQ ID NO: 1129153 - RNA, 20 nt, Human
uccaagggcagcagaaucag

SEQ ID NO: 1129154 - RNA, 22 nt, Human
ugcucccagggacucuggcugg

SEQ ID NO: 1129155 - RNA, 22 nt, Human
ggccugccucacagucagcacc

SEQ ID NO: 1129156 - RNA, 22 nt, Human
cauaagaaauaaugaugaugac

SEQ ID NO: 1129157 - RNA, 22 nt, Human
ccagagcccagcacacggugcu

SEQ ID NO: 1129158 - RNA, 22 nt, Human
aagggaggccagagguuuugca

SEQ ID NO: 1129159 - RNA, 22 nt, Human
cacugcagaucagaggcugaga

SEQ ID NO: 1129160 - RNA, 22 nt, Human
ugccugagugauguggcagcca

SEQ ID NO: 1129161 - RNA, 22 nt, Human
gcccagaguucaaggcugcagu

SEQ ID NO: 1129162 - RNA, 18 nt, Human
agcuggcccuggcugccg

SEQ ID NO: 1129163 - RNA, 22 nt, Human
uagcugcccaucuuuccuuuag

SEQ ID NO: 1129164 - RNA, 22 nt, Human
agggaagaagcugguaguaggu

SEQ ID NO: 1129165 - RNA, 22 nt, Human
uaguccauuuucacacugcuga

SEQ ID NO: 1129166 - RNA, 22 nt, Human
ucccagccuuucuuuucugcug

SEQ ID NO: 1129167 - RNA, 22 nt, Human
ggcuucccaaggagccaggaug

SEQ ID NO: 1129168 - RNA, 22 nt, Human
ggcucuggcguccaauggagcg

SEQ ID NO: 1129169 - RNA, 19 nt, Human
guggccucggagcgcgcgg

SEQ ID NO: 1129170 - RNA, 22 nt, Human
agccucugugacucacagguca

SEQ ID NO: 1129171 - RNA, 22 nt, Human
aacagcuuugcuucuggagaca

SEQ ID NO: 1129172 - RNA, 22 nt, Human
gacccagcuuaagucacauguu

SEQ ID NO: 1129173 - RNA, 22 nt, Human
gaggugagaagggggucagaug

SEQ ID NO: 1129174 - RNA, 20 nt, Human
ugcuccaucuaaagugauua

SEQ ID NO: 1129175 - RNA, 22 nt, Human
ucaaugauaguacaaucagccu

SEQ ID NO: 1129176 - RNA, 22 nt, Human
gagaggcuaugagguucugugu

SEQ ID NO: 1129177 - RNA, 22 nt, Human
uguguauuucuggaacagacua

SEQ ID NO: 1129178 - RNA, 22 nt, Human
cagaaauggagcccaggaaucu

SEQ ID NO: 1129179 - RNA, 22 nt, Human
ucagcuuggacagcuugguuga

SEQ ID NO: 1129180 - RNA, 22 nt, Human
ugaggggagaagcagcagccug

SEQ ID NO: 1129181 - RNA, 22 nt, Human
cauaccuuucucaagcacaugu

SEQ ID NO: 1129182 - RNA, 22 nt, Human
ggcucuggugugaagcagccuc

SEQ ID NO: 1129183 - RNA, 22 nt, Human
agucccagacuccaguuuucug

SEQ ID NO: 1129184 - RNA, 22 nt, Human
uugucugucccagcuugugcau

SEQ ID NO: 1129185 - RNA, 22 nt, Human
uguguuccuucgucuucccuuc

SEQ ID NO: 1129186 - RNA, 22 nt, Human
cuuccaaagcacuuuauggacc

SEQ ID NO: 1129187 - RNA, 20 nt, Human
cuuccacacaagaagcacag

SEQ ID NO: 1129188 - RNA, 22 nt, Human
agucauaauuauaaacaucagu

SEQ ID NO: 1129189 - RNA, 22 nt, Human
cagaauuugaaguaauauucca

SEQ ID NO: 1129190 - RNA, 22 nt, Human
caauguguguguuuuucucaac

SEQ ID NO: 1129191 - RNA, 22 nt, Human
cccagccaaggugcugguguug

SEQ ID NO: 1129192 - RNA, 22 nt, Human
ugugccugaguuggcugaguac

SEQ ID NO: 1129193 - RNA, 22 nt, Human
ccugccuggagcugagugugga

SEQ ID NO: 1129194 - RNA, 22 nt, Human
agcagccauagauagcaugcaa

SEQ ID NO: 1129195 - RNA, 22 nt, Human
gcuggccugaccagccacaggc

SEQ ID NO: 1129196 - RNA, 22 nt, Human
gucucccaucguuugugaggaa

SEQ ID NO: 1129197 - RNA, 18 nt, Human
gcuggcugcacuucugcu

SEQ ID NO: 1129198 - RNA, 22 nt, Human
aaguucaaguguaaucuuuauu

SEQ ID NO: 1129199 - RNA, 21 nt, Human
uguaugcacgcacaugcacac

SEQ ID NO: 1129200 - RNA, 19 nt, Human
ccuuccuccccagggccau

SEQ ID NO: 1129201 - RNA, 22 nt, Human
aagcaggcauuccagagacaau

SEQ ID NO: 1129202 - RNA, 22 nt, Human
gaggggcucuuuaauaguaaca

SEQ ID NO: 1129203 - RNA, 22 nt, Human
ggggcagagucuggacuguugu

SEQ ID NO: 1129204 - RNA, 19 nt, Human
gggaugggcccucacccuc

SEQ ID NO: 1129205 - RNA, 22 nt, Human
uucagucagugacuaagcaguu

SEQ ID NO: 1129206 - RNA, 22 nt, Human
acagcuggaggucugugagcac

SEQ ID NO: 1129207 - RNA, 22 nt, Human
ugugugugcaggagagcaggug

SEQ ID NO: 1129208 - RNA, 22 nt, Human
cuggagaggccccaagauauuu

SEQ ID NO: 1129209 - RNA, 22 nt, Human
acugaguguaggacuuugaguu

SEQ ID NO: 1129210 - RNA, 22 nt, Human
uggcagaguaggauggcccugu

SEQ ID NO: 1129211 - RNA, 22 nt, Human
cugugcugauucagcacaggcc

SEQ ID NO: 1129212 - RNA, 22 nt, Human
ugcaaacaggagaguaaguaua

SEQ ID NO: 1129213 - RNA, 22 nt, Human
uccugagaugagacagugcugc

SEQ ID NO: 1129214 - RNA, 22 nt, Human
aucccugcccucauggagcuua

SEQ ID NO: 1129215 - RNA, 22 nt, Human
aggcacugaaagguggccagag

SEQ ID NO: 1129216 - RNA, 21 nt, Human
gggcagaggggccuccugggu

SEQ ID NO: 1129217 - RNA, 22 nt, Human
acacagccaggguaguaaggcu

SEQ ID NO: 1129218 - RNA, 22 nt, Human
uccuggagagugggcgagcaca

SEQ ID NO: 1129219 - RNA, 22 nt, Human
augcaguacauacaaacacuga

SEQ ID NO: 1129220 - RNA, 22 nt, Human
aauaacaggcucaucagaugcu

SEQ ID NO: 1129221 - RNA, 22 nt, Human
gaaggaaaucugugauuuaugc

SEQ ID NO: 1129222 - RNA, 22 nt, Human
gcuggcuccucuguccucacgg

SEQ ID NO: 1129223 - RNA, 22 nt, Human
aggcugaggcagguggaucacu

SEQ ID NO: 1129224 - RNA, 22 nt, Human
gcuucccacagcuggacugggg

SEQ ID NO: 1129225 - RNA, 22 nt, Human
augauacaucuucaugucagug

SEQ ID NO: 1129226 - RNA, 22 nt, Human
aaggcgacacaggcagcaggcc

SEQ ID NO: 1129227 - RNA, 22 nt, Human
gcaggcagagagggguuuccag

SEQ ID NO: 1129228 - RNA, 22 nt, Human
gcaggagagucugugccagguu

SEQ ID NO: 1129229 - RNA, 22 nt, Human
gcugaguguaaugauggcagag

SEQ ID NO: 1129230 - RNA, 22 nt, Human
uggggacacagagccaaacuau

SEQ ID NO: 1129231 - RNA, 22 nt, Human
auguacauuuagaucauuucug

SEQ ID NO: 1129232 - RNA, 22 nt, Human
acuggacagaggaaauauggag

SEQ ID NO: 1129233 - RNA, 22 nt, Human
agaauucuccuucagggcagga

SEQ ID NO: 1129234 - RNA, 22 nt, Human
auugacaaucuacuauguucug

SEQ ID NO: 1129235 - RNA, 22 nt, Human
ccacagcugaccgcaggugagc

SEQ ID NO: 1129236 - RNA, 20 nt, Human
aagagcauaguacaggaaga

SEQ ID NO: 1129237 - RNA, 21 nt, Human
cugaggcagcacagcuaguca

SEQ ID NO: 1129238 - RNA, 22 nt, Human
gaggcagagugcaccccaggag

SEQ ID NO: 1129239 - RNA, 18 nt, Human
cagaagcaggcagugcag

SEQ ID NO: 1129240 - RNA, 22 nt, Human
gugaggugguacaauauuaacu

SEQ ID NO: 1129241 - RNA, 22 nt, Human
gggcuggcaucaguugccgaga

SEQ ID NO: 1129242 - RNA, 21 nt, Human
aaacugaccuugccugagaca

SEQ ID NO: 1129243 - RNA, 22 nt, Human
aggggcugacuggaaagugcca

SEQ ID NO: 1129244 - RNA, 19 nt, Human
uccucaggggcucacagac

SEQ ID NO: 1129245 - RNA, 22 nt, Human
cuggaagguucuuugugugccu

SEQ ID NO: 1129246 - RNA, 20 nt, Human
gucucagaauggauuugcau

SEQ ID NO: 1129247 - RNA, 20 nt, Human
cucucccagcacagcuuccu

SEQ ID NO: 1129248 - RNA, 22 nt, Human
uggcagcuguguccagguagaa

SEQ ID NO: 1129249 - RNA, 22 nt, Human
gcugcucuacccaugcaucugu

SEQ ID NO: 1129250 - RNA, 17 nt, Human
aggcugcugggccaggg

SEQ ID NO: 1129251 - RNA, 22 nt, Human
aaugagcugcugcuguuccacc

SEQ ID NO: 1129252 - RNA, 22 nt, Human
agagcccugaagcagagcuaaa

SEQ ID NO: 1129253 - RNA, 20 nt, Human
ugucaugcauuagaugaaga

SEQ ID NO: 1129254 - RNA, 22 nt, Human
ucucagaggucuucagccucug

SEQ ID NO: 1129255 - RNA, 22 nt, Human
cagucacacaaguggacuuggg

SEQ ID NO: 1129256 - RNA, 22 nt, Human
cugcccugcuugaugacagcga

SEQ ID NO: 1129257 - RNA, 22 nt, Human
uccagccacucagcagggauug

SEQ ID NO: 1129258 - RNA, 22 nt, Human
aggcuucuuagauuggcuggag

SEQ ID NO: 1129259 - RNA, 22 nt, Human
ugcugccagccaggccauggag

SEQ ID NO: 1129260 - RNA, 22 nt, Human
aguuuauguaaaauuaguaaug

SEQ ID NO: 1129261 - RNA, 22 nt, Human
ucugucacccgagcaggcgaga

SEQ ID NO: 1129262 - RNA, 22 nt, Human
aaacuuuaagacaguccucaag

SEQ ID NO: 1129263 - RNA, 22 nt, Human
ggagcuguugcgcaugcgcucg

SEQ ID NO: 1129264 - RNA, 22 nt, Human
aggcacugauucuguuuuccau

SEQ ID NO: 1129265 - RNA, 22 nt, Human
uuccaaagaaauugaccaagac

SEQ ID NO: 1129266 - RNA, 22 nt, Human
uuuagaaauugcagagugggug

SEQ ID NO: 1129267 - RNA, 21 nt, Human
gcagccacugccuucaacaau

SEQ ID NO: 1129268 - RNA, 22 nt, Human
gagcucccaggccccagcaagg

SEQ ID NO: 1129269 - RNA, 20 nt, Human
agucucuguagugccugaga

SEQ ID NO: 1129270 - RNA, 22 nt, Human
gagugcagaugaacagaagauu

SEQ ID NO: 1129271 - RNA, 18 nt, Human
cguuuuuccgggauugca

SEQ ID NO: 1129272 - RNA, 22 nt, Human
aggaagccuggggcugcccucg

SEQ ID NO: 1129273 - RNA, 22 nt, Human
gggagagagagcucauguugaa

SEQ ID NO: 1129274 - RNA, 20 nt, Human
aggcagacaaggagucuguu

SEQ ID NO: 1129275 - RNA, 22 nt, Human
gaggagagggcugcgggcccac

SEQ ID NO: 1129276 - RNA, 22 nt, Human
ccagcuggagcucgcagauagg

SEQ ID NO: 1129277 - RNA, 22 nt, Human
ggcuuucuagaucuagcucugu

SEQ ID NO: 1129278 - RNA, 22 nt, Human
cagcugccagcuucucuccauc

SEQ ID NO: 1129279 - RNA, 22 nt, Human
ugggauaguggccaggaccccc

SEQ ID NO: 1129280 - RNA, 22 nt, Human
uagcaguggaaucuuuugucca

SEQ ID NO: 1129281 - RNA, 22 nt, Human
uccagucaagcuugagaauuuc

SEQ ID NO: 1129282 - RNA, 22 nt, Human
gcaggccagcugugcagauggg

SEQ ID NO: 1129283 - RNA, 22 nt, Human
gcaagcaagcagguagagcuga

SEQ ID NO: 1129284 - RNA, 23 nt, Human
acagcaagaggaccagaugugag

SEQ ID NO: 1129285 - RNA, 23 nt, Human
ccuccugggcacaggccugaugg

SEQ ID NO: 1129286 - RNA, 22 nt, Human
uguguacaagaguguuuacugu

SEQ ID NO: 1129287 - RNA, 22 nt, Human
ucuggcucggauuugucuagca

SEQ ID NO: 1129288 - RNA, 20 nt, Human
gcccacucuaauccacuguc

SEQ ID NO: 1129289 - RNA, 22 nt, Human
ccacaggggcccacgagccgcu

SEQ ID NO: 1129290 - RNA, 22 nt, Human
uccaguggcacuggagacuaga

SEQ ID NO: 1129291 - RNA, 22 nt, Human
uagggcagagcuuguacacgau

SEQ ID NO: 1129292 - RNA, 22 nt, Human
uggaaggcaugggaacuguucu

SEQ ID NO: 1129293 - RNA, 22 nt, Human
ccucugcucugguccaugugcu

SEQ ID NO: 1129294 - RNA, 22 nt, Human
cagagaccccgcugcccuucug

SEQ ID NO: 1129295 - RNA, 22 nt, Human
aggcagagcugauguucuguga

SEQ ID NO: 1129296 - RNA, 22 nt, Human
cugcccuguggcucugagucau

SEQ ID NO: 1129297 - RNA, 22 nt, Human
aucuacagugcacaggacagcc

SEQ ID NO: 1129298 - RNA, 22 nt, Human
ugggcagagucguggggaauag

SEQ ID NO: 1129299 - RNA, 22 nt, Human
cugaggugagcuucccugggcu

SEQ ID NO: 1129300 - RNA, 22 nt, Human
ucugggcacugcugagccugua

SEQ ID NO: 1129301 - RNA, 22 nt, Human
aauuucaaacuaauaggaacca

SEQ ID NO: 1129302 - RNA, 20 nt, Human
ggcucugcuugugagcagcc

SEQ ID NO: 1129303 - RNA, 23 nt, Human
gccagccuugcucuccugcagcc

SEQ ID NO: 1129304 - RNA, 22 nt, Human
ucugagaguccaucuccaagcc

SEQ ID NO: 1129305 - RNA, 22 nt, Human
ccaaaguccauaguuuacauaa

SEQ ID NO: 1129306 - RNA, 22 nt, Human
caaggaaaaagcgagcucgggg

SEQ ID NO: 1129307 - RNA, 22 nt, Human
ggcucugcagugacuugagggg

SEQ ID NO: 1129308 - RNA, 22 nt, Human
uggcagaguuggagguggaaga

SEQ ID NO: 1129309 - RNA, 22 nt, Human
ggcaggagcucuccaguuugcc

SEQ ID NO: 1129310 - RNA, 22 nt, Human
uccuggaguauuucuguggugu

SEQ ID NO: 1129311 - RNA, 22 nt, Human
ggcucaggagaggggcuaaaag

SEQ ID NO: 1129312 - RNA, 22 nt, Human
ggccucacccaucggugccuuu

SEQ ID NO: 1129313 - RNA, 22 nt, Human
gccuggaguucagccaaguccc

SEQ ID NO: 1129314 - RNA, 19 nt, Human
uccuucagucagaucuggg

SEQ ID NO: 1129315 - RNA, 22 nt, Human
auacuuacuuuucuucagacua

SEQ ID NO: 1129316 - RNA, 22 nt, Human
ggcacugggcaccggcugaggg

SEQ ID NO: 1129317 - RNA, 21 nt, Human
ggagucauuagucauuuccuu

SEQ ID NO: 1129318 - RNA, 22 nt, Human
aguacagaccugucucuuccug

SEQ ID NO: 1129319 - RNA, 22 nt, Human
agagcagauggccagggggccu

SEQ ID NO: 1129320 - RNA, 22 nt, Human
aggagaaguaaggcuagaugau

SEQ ID NO: 1129321 - RNA, 22 nt, Human
uggccugcuuucauuugaugcu

SEQ ID NO: 1129322 - RNA, 23 nt, Human
cuggcucuguagguggcauccuu

SEQ ID NO: 1129323 - RNA, 22 nt, Human
agugaaauaaagcugccuaugg

SEQ ID NO: 1129324 - RNA, 22 nt, Human
gccagguggcugagugacugag

SEQ ID NO: 1129325 - RNA, 19 nt, Human
gugauuucuuuccacaagc

SEQ ID NO: 1129326 - RNA, 22 nt, Human
aacaucagaauauccauguugg

SEQ ID NO: 1129327 - RNA, 20 nt, Human
uaagaacaagacuaggaagc

SEQ ID NO: 1129328 - RNA, 22 nt, Human
acccugagucagacagccugac

SEQ ID NO: 1129329 - RNA, 21 nt, Human
gccagggaagagaguuggcug

SEQ ID NO: 1129330 - RNA, 22 nt, Human
aagccgggccugagaaaugaca

SEQ ID NO: 1129331 - RNA, 22 nt, Human
ugugcgcgugcacgcauacuug

SEQ ID NO: 1129332 - RNA, 22 nt, Human
ggugggcagcucuuggcaggca

SEQ ID NO: 1129333 - RNA, 23 nt, Human
gcucagagguuuuucucuggaug

SEQ ID NO: 1129334 - RNA, 19 nt, Human
cugggagguguucagagaa

SEQ ID NO: 1129335 - RNA, 19 nt, Human
gccucugcuggggacaggc

SEQ ID NO: 1129336 - RNA, 22 nt, Human
gcuccaggagagggaagcagau

SEQ ID NO: 1129337 - RNA, 22 nt, Human
ccugcccagcuucaccucaggc

SEQ ID NO: 1129338 - RNA, 22 nt, Human
gggggcuguccugugcauugua

SEQ ID NO: 1129339 - RNA, 22 nt, Human
auccaggguguggagagagcuc

SEQ ID NO: 1129340 - RNA, 22 nt, Human
uccaggaggaggaaggcugcca

SEQ ID NO: 1129341 - RNA, 22 nt, Human
aaauacagaguugcuuaaaagc

SEQ ID NO: 1129342 - RNA, 22 nt, Human
ccuggagcgcgggucaagcugg

SEQ ID NO: 1129343 - RNA, 22 nt, Human
uacauauagacaguuacucuag

SEQ ID NO: 1129344 - RNA, 22 nt, Human
aacucagucauaaagcgaaugc

SEQ ID NO: 1129345 - RNA, 22 nt, Human
uucauuccugagcccauauuua

SEQ ID NO: 1129346 - RNA, 18 nt, Human
acccucuggcuucugagc

SEQ ID NO: 1129347 - RNA, 22 nt, Human
uccauaagcagguucuuccuga

SEQ ID NO: 1129348 - RNA, 22 nt, Human
ugcugucaguuggcaggaugag

SEQ ID NO: 1129349 - RNA, 22 nt, Human
uggcugcugcuuggucuucuuc

SEQ ID NO: 1129350 - RNA, 22 nt, Human
ucccagaguuuccuguguccca

SEQ ID NO: 1129351 - RNA, 22 nt, Human
ugagaguauuuuggcauuauca

SEQ ID NO: 1129352 - RNA, 22 nt, Human
gcaagcaguuguggcuucugag

SEQ ID NO: 1129353 - RNA, 22 nt, Human
aaaggugacacucugccagcug

SEQ ID NO: 1129354 - RNA, 22 nt, Human
aaggcacuuaacgugggaggau

SEQ ID NO: 1129355 - RNA, 22 nt, Human
ccgggcgggggcucucgucacc

SEQ ID NO: 1129356 - RNA, 22 nt, Human
ugcauuauuugcaugugccugu

SEQ ID NO: 1129357 - RNA, 22 nt, Human
uauucacaguugauuuacaguu

SEQ ID NO: 1129358 - RNA, 22 nt, Human
uguauauucugccuaaaagcuu

SEQ ID NO: 1129359 - RNA, 22 nt, Human
uccuucagauuccugcuucugg

SEQ ID NO: 1129360 - RNA, 22 nt, Human
ggggauggaggcgugugguccu

SEQ ID NO: 1129361 - RNA, 22 nt, Human
ucacagaauagcacuguaagcg

SEQ ID NO: 1129362 - RNA, 22 nt, Human
ccaaagucuggagcagcagagc

SEQ ID NO: 1129363 - RNA, 23 nt, Human
acucacaaagcaggaucauguug

SEQ ID NO: 1129364 - RNA, 17 nt, Human
agcugccagggagugug

SEQ ID NO: 1129365 - RNA, 22 nt, Human
ucaggcugugggcacuggccau

SEQ ID NO: 1129366 - RNA, 22 nt, Human
ggcuucugaaaucucugugcgu

SEQ ID NO: 1129367 - RNA, 20 nt, Human
uugcauuggaugugcaggug

SEQ ID NO: 1129368 - RNA, 22 nt, Human
gaggcagcagggcugguuccuu

SEQ ID NO: 1129369 - RNA, 22 nt, Human
acguguucaauuuccaucugac

SEQ ID NO: 1129370 - RNA, 22 nt, Human
agcauuuaugacuaauguaaaa

SEQ ID NO: 1129371 - RNA, 22 nt, Human
gggcugccuuucuucugggagc

SEQ ID NO: 1129372 - RNA, 22 nt, Human
ugcugcucuguaaagugaugag

SEQ ID NO: 1129373 - RNA, 22 nt, Human
ccugagcugaacuaagcaguuu

SEQ ID NO: 1129374 - RNA, 22 nt, Human
cagggugccucccgcucgccgg

SEQ ID NO: 1129375 - RNA, 22 nt, Human
agcuguguguuuccacugagcu

SEQ ID NO: 1129376 - RNA, 22 nt, Human
gcugggagcaaguacucaucuu

SEQ ID NO: 1129377 - RNA, 23 nt, Human
ggaguuggauuguacuugcugcu

SEQ ID NO: 1129378 - RNA, 22 nt, Human
uuguaacaaucugucauaaaug

SEQ ID NO: 1129379 - RNA, 23 nt, Human
cugcagccgcguggggacgugga

SEQ ID NO: 1129380 - RNA, 22 nt, Human
uggcucugugucucccagcagc

SEQ ID NO: 1129381 - RNA, 22 nt, Human
guggcagcaaaauccugcauuc

SEQ ID NO: 1129382 - RNA, 22 nt, Human
accagcuguguccuggcugcag

SEQ ID NO: 1129383 - RNA, 22 nt, Human
cuguggcugcagccuugguccu

SEQ ID NO: 1129384 - RNA, 22 nt, Human
ggcagcaggcgacuucccuauu

SEQ ID NO: 1129385 - RNA, 21 nt, Human
aggcugcuggcucaggguccu

SEQ ID NO: 1129386 - RNA, 22 nt, Human
agcugucuaccugcagaguccu

SEQ ID NO: 1129387 - RNA, 22 nt, Human
ugggcugcugagaaugagagag

SEQ ID NO: 1129388 - RNA, 22 nt, Human
cagcugccaugacauguccugc

SEQ ID NO: 1129389 - RNA, 22 nt, Human
acagacagggcaccugccuccu

SEQ ID NO: 1129390 - RNA, 22 nt, Human
gcagcuggggaggucgugggga

SEQ ID NO: 1129391 - RNA, 22 nt, Human
uagcagggucucaggagucagg

SEQ ID NO: 1129392 - RNA, 22 nt, Human
aaugaugguauugaugagcuaa

SEQ ID NO: 1129393 - RNA, 22 nt, Human
cugagcugguggaagcaugcag

SEQ ID NO: 1129394 - RNA, 22 nt, Human
agugaguggacccugcaaggaa

SEQ ID NO: 1129395 - RNA, 19 nt, Human
cugguccugacugaggggu

SEQ ID NO: 1129396 - RNA, 22 nt, Human
gcccaucaucacuguggaggcu

SEQ ID NO: 1129397 - RNA, 22 nt, Human
uccugccuuagagcaaggaaaa

SEQ ID NO: 1129398 - RNA, 22 nt, Human
guggccagaagacugcaaugcu

SEQ ID NO: 1129399 - RNA, 22 nt, Human
uauauauucuuaaguaguguag

SEQ ID NO: 1129400 - RNA, 22 nt, Human
gaggaaaagagacagguuauug

SEQ ID NO: 1129401 - RNA, 22 nt, Human
uuuccucugaugcugacuugga

SEQ ID NO: 1129402 - RNA, 22 nt, Human
ugggcagauuaaugcaguggcu

SEQ ID NO: 1129403 - RNA, 17 nt, Human
agcugagcuggccaggg

SEQ ID NO: 1129404 - RNA, 22 nt, Human
gagguucacaggcuaucacagu

SEQ ID NO: 1129405 - RNA, 22 nt, Human
uagucccauuuugagguauuug

SEQ ID NO: 1129406 - RNA, 22 nt, Human
ucagagugaccuuacauggucu

SEQ ID NO: 1129407 - RNA, 22 nt, Human
gugucaugggagucagaaguga

SEQ ID NO: 1129408 - RNA, 22 nt, Human
ugagcccaggaguaugaggcug

SEQ ID NO: 1129409 - RNA, 22 nt, Human
gagcugccagacaugggaauga

SEQ ID NO: 1129410 - RNA, 22 nt, Human
ucuggcucucucaucacccaau

SEQ ID NO: 1129411 - RNA, 20 nt, Human
agaagcugauacugauggaa

SEQ ID NO: 1129412 - RNA, 22 nt, Human
agaaaucucaguaucucaggga

SEQ ID NO: 1129413 - RNA, 22 nt, Human
gcacugaaauuauaugcauuug

SEQ ID NO: 1129414 - RNA, 22 nt, Human
agcaguggccuggggcucugug

SEQ ID NO: 1129415 - RNA, 17 nt, Human
ccuuucucuuucaucuc

SEQ ID NO: 1129416 - RNA, 22 nt, Human
gcaggagccaggccgagcuggu

SEQ ID NO: 1129417 - RNA, 22 nt, Human
gaaccaaguaggauacaaggag

SEQ ID NO: 1129418 - RNA, 22 nt, Human
aggucauuccagccauuccccu

SEQ ID NO: 1129419 - RNA, 20 nt, Human
uuccuguauacaaagaguuc

SEQ ID NO: 1129420 - RNA, 22 nt, Human
gccugagauucugcauuucuaa

SEQ ID NO: 1129421 - RNA, 21 nt, Human
ugcugccaucaugcagagaug

SEQ ID NO: 1129422 - RNA, 22 nt, Human
agcucccagagcucgagaguaa

SEQ ID NO: 1129423 - RNA, 22 nt, Human
auaaggcaagcugucaguuugu

SEQ ID NO: 1129424 - RNA, 23 nt, Human
agcuggguggccugcgugaagcu

SEQ ID NO: 1129425 - RNA, 22 nt, Human
uuuguaaauagcaguacucaug

SEQ ID NO: 1129426 - RNA, 22 nt, Human
acagauauaaacuauaguagug

SEQ ID NO: 1129427 - RNA, 22 nt, Human
caaggcaggaagccugucuuau

SEQ ID NO: 1129428 - RNA, 21 nt, Human
ugcuggccucaagggugacuu

SEQ ID NO: 1129429 - RNA, 22 nt, Human
ggcgcuggccacgguggcucug

SEQ ID NO: 1129430 - RNA, 22 nt, Human
accagagcagacuacuggaggu

SEQ ID NO: 1129431 - RNA, 22 nt, Human
ccugucagcugauggcuaugua

SEQ ID NO: 1129432 - RNA, 23 nt, Human
ccuucagaagaaguaacaggggc

SEQ ID NO: 1129433 - RNA, 16 nt, Human
gccuggaguggcaggg

SEQ ID NO: 1129434 - RNA, 19 nt, Human
cugaggugcaguaagaggc

SEQ ID NO: 1129435 - RNA, 22 nt, Human
cccuucagcugagugggacagc

SEQ ID NO: 1129436 - RNA, 22 nt, Human
agcagaacauuuucagggcugu

SEQ ID NO: 1129437 - RNA, 22 nt, Human
accauuuaauaaguauuuccau

SEQ ID NO: 1129438 - RNA, 22 nt, Human
ugggcagaggacagggaagauc

SEQ ID NO: 1129439 - RNA, 22 nt, Human
ggcccacacugacagcugagcu

SEQ ID NO: 1129440 - RNA, 22 nt, Human
ugcccagcacugugccagucac

SEQ ID NO: 1129441 - RNA, 22 nt, Human
gcagguggcagaggugggaucu

SEQ ID NO: 1129442 - RNA, 18 nt, Human
uaaaugcauguuaauaac

SEQ ID NO: 1129443 - RNA, 22 nt, Human
aauaugcauguauacaugugua

SEQ ID NO: 1129444 - RNA, 22 nt, Human
gcuggcucccauugguccuucc

SEQ ID NO: 1129445 - RNA, 22 nt, Human
agcuggguggagggcccacggu

SEQ ID NO: 1129446 - RNA, 16 nt, Human
uggaaggggucuccgg

SEQ ID NO: 1129447 - RNA, 22 nt, Human
ugcucugcaagcaggagcaaga

SEQ ID NO: 1129448 - RNA, 21 nt, Human
agcagaacagucgagcacugc

SEQ ID NO: 1129449 - RNA, 19 nt, Human
ucaaugcaugaaaucagcc

SEQ ID NO: 1129450 - RNA, 22 nt, Human
cuuagaaauuguuacucauuca

SEQ ID NO: 1129451 - RNA, 22 nt, Human
cacucugcagcugaagggcugg

SEQ ID NO: 1129452 - RNA, 22 nt, Human
uccugccuguuuaccuguacuu

SEQ ID NO: 1129453 - RNA, 22 nt, Human
uuauccaaacuggugaaucauu

SEQ ID NO: 1129454 - RNA, 21 nt, Human
ucucuggaguuagcagagaga

SEQ ID NO: 1129455 - RNA, 22 nt, Human
aguaaacauaauuuaccuguag

SEQ ID NO: 1129456 - RNA, 22 nt, Human
cagggccaguucucgcagcagu

SEQ ID NO: 1129457 - RNA, 22 nt, Human
gcagcugcuguggcaucaagcu

SEQ ID NO: 1129458 - RNA, 22 nt, Human
uggggcugugagacuacaggau

SEQ ID NO: 1129459 - RNA, 22 nt, Human
cugcuuuguggaaucacacugg

SEQ ID NO: 1129460 - RNA, 22 nt, Human
ugccugaugcaggaguaucaga

SEQ ID NO: 1129461 - RNA, 22 nt, Human
cuggcccauggugagcucuggg

SEQ ID NO: 1129462 - RNA, 23 nt, Human
uggccuggagagaaaagaugagu

SEQ ID NO: 1129463 - RNA, 22 nt, Human
cgggcuggcugcagcugcugga

SEQ ID NO: 1129464 - RNA, 22 nt, Human
acccaggagcaggcugggcagu

SEQ ID NO: 1129465 - RNA, 22 nt, Human
auauaaaguguuuagaaagcug

SEQ ID NO: 1129466 - RNA, 22 nt, Human
uguggccuggaaggggcugcuc

SEQ ID NO: 1129467 - RNA, 22 nt, Human
aaagagcuaacauugccgagau

SEQ ID NO: 1129468 - RNA, 22 nt, Human
ucuggaaguuagaggaggaaag

SEQ ID NO: 1129469 - RNA, 22 nt, Human
agaaaugugaauuucauuuccu

SEQ ID NO: 1129470 - RNA, 22 nt, Human
uguuuugugcauuuacaacaug

SEQ ID NO: 1129471 - RNA, 22 nt, Human
cacacaugagucuccccauugg

SEQ ID NO: 1129472 - RNA, 22 nt, Human
acugaaauacugcucuuggauu

SEQ ID NO: 1129473 - RNA, 21 nt, Human
agugaaauugcaucagaggga

SEQ ID NO: 1129474 - RNA, 22 nt, Human
aggcagcuggcagcacccaggg

SEQ ID NO: 1129475 - RNA, 22 nt, Human
agggacaguuacaucaucagac

SEQ ID NO: 1129476 - RNA, 22 nt, Human
gccaggccugcaagugcuggug

SEQ ID NO: 1129477 - RNA, 22 nt, Human
ucacaccuguaaucccaggccu

SEQ ID NO: 1129478 - RNA, 22 nt, Human
cccagccuggugcacugugggg

SEQ ID NO: 1129479 - RNA, 22 nt, Human
acccugagggguauagcagaag

SEQ ID NO: 1129480 - RNA, 22 nt, Human
ggggcacacuuuugguagauau

SEQ ID NO: 1129481 - RNA, 22 nt, Human
ggcugccucugaugugcagacg

SEQ ID NO: 1129482 - RNA, 22 nt, Human
caggcagcagccacucugguau

SEQ ID NO: 1129483 - RNA, 22 nt, Human
cauucauuagaauagauaugua

SEQ ID NO: 1129484 - RNA, 22 nt, Human
aaggcagccgugugacugcaug

SEQ ID NO: 1129485 - RNA, 22 nt, Human
cugggagcccugacuagccugg

SEQ ID NO: 1129486 - RNA, 22 nt, Human
uggagaagucaaagugaacagg

SEQ ID NO: 1129487 - RNA, 22 nt, Human
cuuucucugugugguaaagggc

SEQ ID NO: 1129488 - RNA, 22 nt, Human
uccuucagaggacggcagccag

SEQ ID NO: 1129489 - RNA, 22 nt, Human
ugaugcugagccugggacugac

SEQ ID NO: 1129490 - RNA, 22 nt, Human
ggccccugcggacugccuagag

SEQ ID NO: 1129491 - RNA, 22 nt, Human
caguggguggcuaaguggcuga

SEQ ID NO: 1129492 - RNA, 21 nt, Human
gggagcuggaaacugggugac

SEQ ID NO: 1129493 - RNA, 22 nt, Human
agggcugccugcucugcauuga

SEQ ID NO: 1129494 - RNA, 22 nt, Human
caguggcuguuucuggaaggca

SEQ ID NO: 1129495 - RNA, 22 nt, Human
ccucuucugagugagacucccu

SEQ ID NO: 1129496 - RNA, 22 nt, Human
cacaagucuguggucuccaaca

SEQ ID NO: 1129497 - RNA, 22 nt, Human
gcagggaccugccacugcuguc

SEQ ID NO: 1129498 - RNA, 23 nt, Human
gcagaggagcaagcuggacacca

SEQ ID NO: 1129499 - RNA, 22 nt, Human
gcaggcugauagaggauuccau

SEQ ID NO: 1129500 - RNA, 22 nt, Human
uggacagcgaaagugccuggga

SEQ ID NO: 1129501 - RNA, 22 nt, Human
uggugccuugggccuacagcgc

SEQ ID NO: 1129502 - RNA, 22 nt, Human
cagugcauaaucuaaauggggg

SEQ ID NO: 1129503 - RNA, 22 nt, Human
gggcagcugccaagugcaucgc

SEQ ID NO: 1129504 - RNA, 22 nt, Human
gcagacagccagacugcacugg

SEQ ID NO: 1129505 - RNA, 22 nt, Human
gggcagugguuacacagcugag

SEQ ID NO: 1129506 - RNA, 22 nt, Human
cucacagaugcugugggucagg

SEQ ID NO: 1129507 - RNA, 22 nt, Human
ccuggagcuuuuccauccugga

SEQ ID NO: 1129508 - RNA, 22 nt, Human
cagucccaguuugagacucugg

SEQ ID NO: 1129509 - RNA, 22 nt, Human
aaagguuaagguguucaagaaa

SEQ ID NO: 1129510 - RNA, 22 nt, Human
cucacugcaaguuccaccuacc

SEQ ID NO: 1129511 - RNA, 22 nt, Human
gagccuggagcuggaacgaagc

SEQ ID NO: 1129512 - RNA, 17 nt, Human
gcucccugaggacagcu

SEQ ID NO: 1129513 - RNA, 21 nt, Human
ccccugggagcccugucagua

SEQ ID NO: 1129514 - RNA, 22 nt, Human
gcagcuguggguuccaagucua

SEQ ID NO: 1129515 - RNA, 22 nt, Human
cugaaggaagcagaagcgaggu

SEQ ID NO: 1129516 - RNA, 22 nt, Human
cuggggccacaacggcgcacgc

SEQ ID NO: 1129517 - RNA, 22 nt, Human
cugaaggagcauagucaguuuu

SEQ ID NO: 1129518 - RNA, 22 nt, Human
uccucaggagagcuccuaugcc

SEQ ID NO: 1129519 - RNA, 19 nt, Human
uaaaaugucuguggucagu

SEQ ID NO: 1129520 - RNA, 22 nt, Human
gccuuggccaacaccuugcaaa

SEQ ID NO: 1129521 - RNA, 23 nt, Human
ugcuguccaacagacuggccaug

SEQ ID NO: 1129522 - RNA, 22 nt, Human
acagagcuuaauucaggagcuu

SEQ ID NO: 1129523 - RNA, 22 nt, Human
uaggcagcugcaaacuucgguc

SEQ ID NO: 1129524 - RNA, 22 nt, Human
cagcagggggcagcgcagauca

SEQ ID NO: 1129525 - RNA, 22 nt, Human
ugcuggaggggccugaccagga

SEQ ID NO: 1129526 - RNA, 22 nt, Human
agcugccacaugcccaagggca

SEQ ID NO: 1129527 - RNA, 22 nt, Human
cagcagguauguuuguucagca

SEQ ID NO: 1129528 - RNA, 22 nt, Human
cacugaaggcugcagcucagcc

SEQ ID NO: 1129529 - RNA, 22 nt, Human
gagcagcuguccccaaagcuuc

SEQ ID NO: 1129530 - RNA, 19 nt, Human
aucagcaagguaggaugug

SEQ ID NO: 1129531 - RNA, 21 nt, Human
aggcagaaagagcccaggcug

SEQ ID NO: 1129532 - RNA, 22 nt, Human
aaucaguuguucacucugaaaa

SEQ ID NO: 1129533 - RNA, 19 nt, Human
cugcucaggucagucuguc

SEQ ID NO: 1129534 - RNA, 22 nt, Human
agaaaucugacugcugugcaca

SEQ ID NO: 1129535 - RNA, 22 nt, Human
uuugacagauccuuaacucagc

SEQ ID NO: 1129536 - RNA, 20 nt, Human
cccaggagugagcagcuuua

SEQ ID NO: 1129537 - RNA, 22 nt, Human
uauuucuugaguggucaguuuc

SEQ ID NO: 1129538 - RNA, 22 nt, Human
gccugaugagcuuccagcugag

SEQ ID NO: 1129539 - RNA, 20 nt, Human
acaaaugcauucugugacau

SEQ ID NO: 1129540 - RNA, 22 nt, Human
ugaaccagagucuccagugguu

SEQ ID NO: 1129541 - RNA, 22 nt, Human
gagaccaggaaguacagcagcc

SEQ ID NO: 1129542 - RNA, 22 nt, Human
cagcugccacaccucuuucucu

SEQ ID NO: 1129543 - RNA, 22 nt, Human
auaccuuuuagacauguaguug

SEQ ID NO: 1129544 - RNA, 23 nt, Human
ccugcagcugcuggggcuccacc

SEQ ID NO: 1129545 - RNA, 20 nt, Human
accuugaacccgccagccau

SEQ ID NO: 1129546 - RNA, 23 nt, Human
acagggcauugcuggccucgagg

SEQ ID NO: 1129547 - RNA, 22 nt, Human
ugcaguggaagagguggagauc

SEQ ID NO: 1129548 - RNA, 23 nt, Human
uggggcugauggagacggaccag

SEQ ID NO: 1129549 - RNA, 22 nt, Human
cuucccagaccuuagagugcag

SEQ ID NO: 1129550 - RNA, 22 nt, Human
gugccuggcaugcgccggugcu

SEQ ID NO: 1129551 - RNA, 19 nt, Human
guguauguaaguugugagg

SEQ ID NO: 1129552 - RNA, 22 nt, Human
cccuggagguggagguugcagg

SEQ ID NO: 1129553 - RNA, 22 nt, Human
aaggcucuuggagugaaugcag

SEQ ID NO: 1129554 - RNA, 22 nt, Human
gcaaggaccuuugagcgugcca

SEQ ID NO: 1129555 - RNA, 22 nt, Human
auacauauaugguacuuccugg

SEQ ID NO: 1129556 - RNA, 22 nt, Human
ccuggcagcgugccgagcugcg

SEQ ID NO: 1129557 - RNA, 22 nt, Human
uaaggcagaaauaugagcaggg

SEQ ID NO: 1129558 - RNA, 22 nt, Human
cugaaggauuuaguucuuugcu

SEQ ID NO: 1129559 - RNA, 22 nt, Human
agcaccuggucuccuggcgcug

SEQ ID NO: 1129560 - RNA, 22 nt, Human
agagcuggaaucagaccucagg

SEQ ID NO: 1129561 - RNA, 22 nt, Human
cccuggggcugagggauggccg

SEQ ID NO: 1129562 - RNA, 22 nt, Human
gcuugcucaacccccgucucuc

SEQ ID NO: 1129563 - RNA, 22 nt, Human
gcagcccaaaaaagagguagau

SEQ ID NO: 1129564 - RNA, 22 nt, Human
ucugaggcuaagagacagaggc

SEQ ID NO: 1129565 - RNA, 22 nt, Human
guuauaaaggugauaaugguca

SEQ ID NO: 1129566 - RNA, 22 nt, Human
aagcccagcugaaagcauuuuu

SEQ ID NO: 1129567 - RNA, 22 nt, Human
ucugagcauugaauuuucuucc

SEQ ID NO: 1129568 - RNA, 22 nt, Human
ugccagcuccgaggagcugcag

SEQ ID NO: 1129569 - RNA, 22 nt, Human
ucacugcaaggaggcuucucaa

SEQ ID NO: 1129570 - RNA, 22 nt, Human
ucagaagcaggagugugcacaa

SEQ ID NO: 1129571 - RNA, 22 nt, Human
cuacauuuggagaguauaggaa

SEQ ID NO: 1129572 - RNA, 22 nt, Human
uccauguugagaaugcuauaau

SEQ ID NO: 1129573 - RNA, 22 nt, Human
aagcacaaugaacaucuuagau

SEQ ID NO: 1129574 - RNA, 22 nt, Human
cuguagcaaguuauucaauaaa

SEQ ID NO: 1129575 - RNA, 22 nt, Human
cagugcaugaaacaauaugcag

SEQ ID NO: 1129576 - RNA, 22 nt, Human
gcagaggcuccauuuuacagau

SEQ ID NO: 1129577 - RNA, 22 nt, Human
aaaaucugguaauuugaaugug

SEQ ID NO: 1129578 - RNA, 19 nt, Human
ucccuggcgccucucgggc

SEQ ID NO: 1129579 - RNA, 22 nt, Human
agcauuuauuucuuagaaauug

SEQ ID NO: 1129580 - RNA, 22 nt, Human
aggacuuagaacauuauguacu

SEQ ID NO: 1129581 - RNA, 22 nt, Human
aaagaacaaauuagcuguuuua

SEQ ID NO: 1129582 - RNA, 22 nt, Human
cuggagccgcauggagcaggga

SEQ ID NO: 1129583 - RNA, 22 nt, Human
ccaaggagcaaggcucaacaag

SEQ ID NO: 1129584 - RNA, 20 nt, Human
ccuaggcaugcugagucucc

SEQ ID NO: 1129585 - RNA, 20 nt, Human
gagccugggaagucuaaggu

SEQ ID NO: 1129586 - RNA, 22 nt, Human
uugaagcauuucuuugagcuuc

SEQ ID NO: 1129587 - RNA, 23 nt, Human
ugcugggguaguuuguggcacag

SEQ ID NO: 1129588 - RNA, 22 nt, Human
gauaauccaagauugccucacu

SEQ ID NO: 1129589 - RNA, 22 nt, Human
ggauccuuaacuaucacaguga

SEQ ID NO: 1129590 - RNA, 22 nt, Human
cuggcuggccggagcgaggcgg

SEQ ID NO: 1129591 - RNA, 22 nt, Human
ugcccuguuaucuuggaagagu

SEQ ID NO: 1129592 - RNA, 22 nt, Human
ggcuuccuuucacuacccucag

SEQ ID NO: 1129593 - RNA, 23 nt, Human
cuggccuccgacacuggccaaga

SEQ ID NO: 1129594 - RNA, 22 nt, Human
uggcuuccugcauggauccucu

SEQ ID NO: 1129595 - RNA, 22 nt, Human
cacagcuugggcucugacaaua

SEQ ID NO: 1129596 - RNA, 22 nt, Human
ggccccuggcaccaggcugauu

SEQ ID NO: 1129597 - RNA, 20 nt, Human
ccugggguacacuggcaugu

SEQ ID NO: 1129598 - RNA, 22 nt, Human
gcuggccuccugcuagauggaa

SEQ ID NO: 1129599 - RNA, 22 nt, Human
ggcaggugcaccugagccaucu

SEQ ID NO: 1129600 - RNA, 22 nt, Human
uaguccagccuuggguguagcc

SEQ ID NO: 1129601 - RNA, 22 nt, Human
uuguuacacauaauaacauuuu

SEQ ID NO: 1129602 - RNA, 19 nt, Human
uggcuccugccugccuucu

SEQ ID NO: 1129603 - RNA, 22 nt, Human
aaaguuuggauccagcaaaaga

SEQ ID NO: 1129604 - RNA, 21 nt, Human
ccucuggcuugugcugugccc

SEQ ID NO: 1129605 - RNA, 22 nt, Human
ggcugccaggagggaggccagu

SEQ ID NO: 1129606 - RNA, 19 nt, Human
cccaaggcccugggcaggc

SEQ ID NO: 1129607 - RNA, 22 nt, Human
gcagagcauguccucaggacag

SEQ ID NO: 1129608 - RNA, 22 nt, Human
aauguguagggugccuguuuuu

SEQ ID NO: 1129609 - RNA, 22 nt, Human
agagcuguagcuuccuagagcc

SEQ ID NO: 1129610 - RNA, 22 nt, Human
uugucuguccaggcaccccaag

SEQ ID NO: 1129611 - RNA, 22 nt, Human
ugggacacccucacgccugcac

SEQ ID NO: 1129612 - RNA, 22 nt, Human
ccagcuccaaguuugggcauca

SEQ ID NO: 1129613 - RNA, 22 nt, Human
aggccagguggucaugcuugcu

SEQ ID NO: 1129614 - RNA, 22 nt, Human
cccagcuaccucugcuaggaga

SEQ ID NO: 1129615 - RNA, 22 nt, Human
uccuuuuuaagucguuguggua

SEQ ID NO: 1129616 - RNA, 22 nt, Human
ugauuuccacgugcacccaggu

SEQ ID NO: 1129617 - RNA, 22 nt, Human
cacaggagagcugggaggugcc

SEQ ID NO: 1129618 - RNA, 22 nt, Human
aacaacugaaaagcuuuuucug

SEQ ID NO: 1129619 - RNA, 22 nt, Human
ggcugcucuucuuggcgaccuc

SEQ ID NO: 1129620 - RNA, 22 nt, Human
agcagcugccagagagaguucc

SEQ ID NO: 1129621 - RNA, 22 nt, Human
ccuggccuccuggccuucucau

SEQ ID NO: 1129622 - RNA, 22 nt, Human
ucaaugauaucagcaggaugug

SEQ ID NO: 1129623 - RNA, 22 nt, Human
cucagggacguuagaggacagg

SEQ ID NO: 1129624 - RNA, 22 nt, Human
acuuccuguguuggucuugcug

SEQ ID NO: 1129625 - RNA, 22 nt, Human
agccagccaguucacuaggaaa

SEQ ID NO: 1129626 - RNA, 22 nt, Human
uucauucccaagaguaaacaua

SEQ ID NO: 1129627 - RNA, 22 nt, Human
aaauguguauaugaaacaugau

SEQ ID NO: 1129628 - RNA, 22 nt, Human
cugagagucagcuucuccuccu

SEQ ID NO: 1129629 - RNA, 22 nt, Human
aaaugugucaguuucauucucu

SEQ ID NO: 1129630 - RNA, 22 nt, Human
uccagcagaaaagagguaggga

SEQ ID NO: 1129631 - RNA, 22 nt, Human
ccuggcuggcaagaucgugaag

SEQ ID NO: 1129632 - RNA, 22 nt, Human
ugggcagaguugugaugaacug

SEQ ID NO: 1129633 - RNA, 22 nt, Human
ugagccuggggccugggcagcg

SEQ ID NO: 1129634 - RNA, 22 nt, Human
auguuuuauauuuugcagcagu

SEQ ID NO: 1129635 - RNA, 22 nt, Human
aguuuuuccguggcuacgauaa

SEQ ID NO: 1129636 - RNA, 22 nt, Human
ggcccugggcagaggagugggc

SEQ ID NO: 1129637 - RNA, 22 nt, Human
aguggggaagagcaugggcccu

SEQ ID NO: 1129638 - RNA, 19 nt, Human
ggcugggucuggcagguuc

SEQ ID NO: 1129639 - RNA, 22 nt, Human
cugcuuugaggggcucuguaua

SEQ ID NO: 1129640 - RNA, 22 nt, Human
uaauaucuacuucauagaguuu

SEQ ID NO: 1129641 - RNA, 22 nt, Human
agcuucuguucaucuuccaggc

SEQ ID NO: 1129642 - RNA, 19 nt, Human
auaaggcagugacuuuuuu

SEQ ID NO: 1129643 - RNA, 22 nt, Human
ggcuccucucuggccgcucccg

SEQ ID NO: 1129644 - RNA, 22 nt, Human
cauuacaugguccaggauauau

SEQ ID NO: 1129645 - RNA, 18 nt, Human
ucaagacaucaugaaaua

SEQ ID NO: 1129646 - RNA, 22 nt, Human
aagccaggaagagagccuucac

SEQ ID NO: 1129647 - RNA, 22 nt, Human
gcagggcuguggacacuuuggu

SEQ ID NO: 1129648 - RNA, 22 nt, Human
cacugcaggucugagauggggg

SEQ ID NO: 1129649 - RNA, 21 nt, Human
agaaaauggcguuuuagauuu

SEQ ID NO: 1129650 - RNA, 22 nt, Human
auacaaagacaaaucucaaucu

SEQ ID NO: 1129651 - RNA, 22 nt, Human
cggggacacacuggcagcuccu

SEQ ID NO: 1129652 - RNA, 22 nt, Human
augcuuuacaguuuuccaaaca

SEQ ID NO: 1129653 - RNA, 22 nt, Human
ggcaguggguuccccaaggcac

SEQ ID NO: 1129654 - RNA, 22 nt, Human
uccucaggugacuagguaucuu

SEQ ID NO: 1129655 - RNA, 22 nt, Human
cacaggcugcccgcagcuggga

SEQ ID NO: 1129656 - RNA, 22 nt, Human
uaugcacaccuggguccuuguc

SEQ ID NO: 1129657 - RNA, 22 nt, Human
ugggcagaguagcucagaagaa

SEQ ID NO: 1129658 - RNA, 22 nt, Human
aguuuagaguucaaauuaguuc

SEQ ID NO: 1129659 - RNA, 22 nt, Human
cagaggugcauacaggucauua

SEQ ID NO: 1129660 - RNA, 22 nt, Human
ugggcugcugcggugcucuugg

SEQ ID NO: 1129661 - RNA, 22 nt, Human
uauguguggcagcugggagugu

SEQ ID NO: 1129662 - RNA, 19 nt, Human
gagguggguccccgcagcc

SEQ ID NO: 1129663 - RNA, 22 nt, Human
ggagcagacauaaccuuacaga

SEQ ID NO: 1129664 - RNA, 22 nt, Human
cagggcagagggaaacuccuuu

SEQ ID NO: 1129665 - RNA, 17 nt, Human
agauggcaggaggcaga

SEQ ID NO: 1129666 - RNA, 22 nt, Human
aaagaacaaaugauauaugguu

SEQ ID NO: 1129667 - RNA, 22 nt, Human
gaggcaggcccugaaugaguca

SEQ ID NO: 1129668 - RNA, 22 nt, Human
ugcaucuguucagagcugucga

SEQ ID NO: 1129669 - RNA, 22 nt, Human
ccagcagaggggcggagugcag

SEQ ID NO: 1129670 - RNA, 22 nt, Human
ucaagagaaggggaaauagacu

SEQ ID NO: 1129671 - RNA, 22 nt, Human
ggccuagggaguggccaugccu

SEQ ID NO: 1129672 - RNA, 22 nt, Human
auagaaauggcagcuggugcua

SEQ ID NO: 1129673 - RNA, 20 nt, Human
ccuggaagagcuccccaggc

SEQ ID NO: 1129674 - RNA, 22 nt, Human
agcuguguggugucugacagcu

SEQ ID NO: 1129675 - RNA, 19 nt, Human
aggucauugauagugcagg

SEQ ID NO: 1129676 - RNA, 22 nt, Human
ugaaaucuccucuuuauauauc

SEQ ID NO: 1129677 - RNA, 22 nt, Human
ccucuguccuggggaguggagc

SEQ ID NO: 1129678 - RNA, 22 nt, Human
aggccugaggaccuucuggagg

SEQ ID NO: 1129679 - RNA, 22 nt, Human
uauuucugaggcccaggaagug

SEQ ID NO: 1129680 - RNA, 22 nt, Human
uaugaagugaguuaugguugcu

SEQ ID NO: 1129681 - RNA, 22 nt, Human
cacagagagcuacgugcagcgu

SEQ ID NO: 1129682 - RNA, 22 nt, Human
cagacaugauguaagcagaggc

SEQ ID NO: 1129683 - RNA, 22 nt, Human
ggcuggcuugccaagcucaggg

SEQ ID NO: 1129684 - RNA, 22 nt, Human
gguuggaggugggaauagcuag

SEQ ID NO: 1129685 - RNA, 22 nt, Human
ccacucugauuuuggcuccacu

SEQ ID NO: 1129686 - RNA, 20 nt, Human
gccuggaggcaaugggaaga

SEQ ID NO: 1129687 - RNA, 22 nt, Human
aaaaugugcaguuuuuaagcug

SEQ ID NO: 1129688 - RNA, 22 nt, Human
agccuucagcaguucaggugcc

SEQ ID NO: 1129689 - RNA, 22 nt, Human
caguguccucagccagcagcua

SEQ ID NO: 1129690 - RNA, 23 nt, Human
agccacuucuaucuugcuccugg

SEQ ID NO: 1129691 - RNA, 22 nt, Human
acaaagucaaauugcagccgcc

SEQ ID NO: 1129692 - RNA, 22 nt, Human
ucaggccacuucacaggugauu

SEQ ID NO: 1129693 - RNA, 22 nt, Human
acugucucucuagcaguucagg

SEQ ID NO: 1129694 - RNA, 22 nt, Human
gaacaauagugguaacaaagcc

SEQ ID NO: 1129695 - RNA, 22 nt, Human
cagagcugcgcuuuuuccuggu

SEQ ID NO: 1129696 - RNA, 22 nt, Human
auuugagaugguaaauaacuuu

SEQ ID NO: 1129697 - RNA, 22 nt, Human
ugcugcauuuaucuucucaaac

SEQ ID NO: 1129698 - RNA, 22 nt, Human
uacuuagagcgauaauuuauac

SEQ ID NO: 1129699 - RNA, 19 nt, Human
ccauggcaaugaucugaug

SEQ ID NO: 1129700 - RNA, 22 nt, Human
uacauguauugauuucucuucu

SEQ ID NO: 1129701 - RNA, 22 nt, Human
acagggccucagccagggcaga

SEQ ID NO: 1129702 - RNA, 22 nt, Human
agagccugugggagaugcagcu

SEQ ID NO: 1129703 - RNA, 22 nt, Human
ugcuggcuacugauggcaggcc

SEQ ID NO: 1129704 - RNA, 22 nt, Human
ucucaggggauucacuggcacc

SEQ ID NO: 1129705 - RNA, 22 nt, Human
ggcagcuuuuaucccugacaga

SEQ ID NO: 1129706 - RNA, 22 nt, Human
cagcaggcccaggugcugguga

SEQ ID NO: 1129707 - RNA, 22 nt, Human
gcagggccagguacaagaagca

SEQ ID NO: 1129708 - RNA, 22 nt, Human
ucccaggaucugagggcagaga

SEQ ID NO: 1129709 - RNA, 22 nt, Human
gccucugcccuccugggacugc

SEQ ID NO: 1129710 - RNA, 22 nt, Human
ucccagccuuccuuguggugaa

SEQ ID NO: 1129711 - RNA, 18 nt, Human
agugugugcccuuucagg

SEQ ID NO: 1129712 - RNA, 21 nt, Human
ugcucacagaugugcucagug

SEQ ID NO: 1129713 - RNA, 22 nt, Human
guagcccaccuggggagggcga

SEQ ID NO: 1129714 - RNA, 22 nt, Human
gcacagccacugagugagaacc

SEQ ID NO: 1129715 - RNA, 22 nt, Human
ucagcagcagcucagcauguuu

SEQ ID NO: 1129716 - RNA, 22 nt, Human
gaggagggagcuggaagcucuu

SEQ ID NO: 1129717 - RNA, 22 nt, Human
gguggccuccagggcauaggug

SEQ ID NO: 1129718 - RNA, 22 nt, Human
uugcauaaagauuuuauugcau

SEQ ID NO: 1129719 - RNA, 22 nt, Human
cugggguggaggagcuccccug

SEQ ID NO: 1129720 - RNA, 22 nt, Human
aggcugcagaacagucaggugc

SEQ ID NO: 1129721 - RNA, 19 nt, Human
auacacauacguaaacuga

SEQ ID NO: 1129722 - RNA, 22 nt, Human
auccugggaagcugacauugaa

SEQ ID NO: 1129723 - RNA, 22 nt, Human
aggcccuguccauggugcugaa

SEQ ID NO: 1129724 - RNA, 22 nt, Human
augggaugcauggcuguggcca

SEQ ID NO: 1129725 - RNA, 22 nt, Human
agccuggaguucccaggagaag

SEQ ID NO: 1129726 - RNA, 22 nt, Human
agaggucagaacaggaaagugu

SEQ ID NO: 1129727 - RNA, 22 nt, Human
ggcuucaccgcgggguugcagg

SEQ ID NO: 1129728 - RNA, 22 nt, Human
cagcuggguuuaguggggugug

SEQ ID NO: 1129729 - RNA, 22 nt, Human
ggcaggugcucugugggccugg

SEQ ID NO: 1129730 - RNA, 21 nt, Human
ugaaaucugaugggacaaaug

SEQ ID NO: 1129731 - RNA, 22 nt, Human
uggggacauagccagucuggcu

SEQ ID NO: 1129732 - RNA, 22 nt, Human
gagaggccaaaaucccugcccc

SEQ ID NO: 1129733 - RNA, 22 nt, Human
gacagccucaugaggagcaaaa

SEQ ID NO: 1129734 - RNA, 22 nt, Human
auggauaauggugauaguugca

SEQ ID NO: 1129735 - RNA, 22 nt, Human
ccaaaugcuccacugacuuugg

SEQ ID NO: 1129736 - RNA, 22 nt, Human
ucuccucaccaccagcagcaga

SEQ ID NO: 1129737 - RNA, 22 nt, Human
uccugaggaaaguucaugaaug

SEQ ID NO: 1129738 - RNA, 22 nt, Human
ucuuuacaucacaauuguaugg

SEQ ID NO: 1129739 - RNA, 22 nt, Human
uuaaaaccaucagcuguaagau

SEQ ID NO: 1129740 - RNA, 22 nt, Human
uggcucagccauucguguugcc

SEQ ID NO: 1129741 - RNA, 22 nt, Human
gauuuccucacuaacauccauc

SEQ ID NO: 1129742 - RNA, 22 nt, Human
gaguguggugaacaggagcacc

SEQ ID NO: 1129743 - RNA, 22 nt, Human
ugggcuggcugaggcauucacu

SEQ ID NO: 1129744 - RNA, 22 nt, Human
aagagcugauuaagucaugagg

SEQ ID NO: 1129745 - RNA, 22 nt, Human
agcucagcuuccucuccaugcu

SEQ ID NO: 1129746 - RNA, 22 nt, Human
gggcagauggggcacaggcuga

SEQ ID NO: 1129747 - RNA, 22 nt, Human
ucuggcuccacuuucuucauuu

SEQ ID NO: 1129748 - RNA, 20 nt, Human
ggagagcagggaagacagua

SEQ ID NO: 1129749 - RNA, 22 nt, Human
gccaccagugggggccugggca

SEQ ID NO: 1129750 - RNA, 22 nt, Human
caguuauuaugaggucauuagg

SEQ ID NO: 1129751 - RNA, 22 nt, Human
ccagagccggauugugaagugc

SEQ ID NO: 1129752 - RNA, 22 nt, Human
aggccagguuccucaaucuuga

SEQ ID NO: 1129753 - RNA, 22 nt, Human
aaugcacaugccacauguggua

SEQ ID NO: 1129754 - RNA, 22 nt, Human
gccagcucagaugcaggaagga

SEQ ID NO: 1129755 - RNA, 22 nt, Human
gagggcaggggucuugcacggu

SEQ ID NO: 1129756 - RNA, 22 nt, Human
ugcccugcagugagugcgucug

SEQ ID NO: 1129757 - RNA, 22 nt, Human
cacagaauaaauugguaucaga

SEQ ID NO: 1129758 - RNA, 22 nt, Human
ucauugucuugauaugauuguc

SEQ ID NO: 1129759 - RNA, 22 nt, Human
guccucuguguaggcugcagac

SEQ ID NO: 1129760 - RNA, 22 nt, Human
aauguguguucggggcccagag

SEQ ID NO: 1129761 - RNA, 20 nt, Human
cacagcuugccuuuuaugac

SEQ ID NO: 1129762 - RNA, 22 nt, Human
gcacagaagagcuuuggaauga

SEQ ID NO: 1129763 - RNA, 23 nt, Human
gugagcagcccacuaggaaugcc

SEQ ID NO: 1129764 - RNA, 22 nt, Human
ucccagagguugagucacuuau

SEQ ID NO: 1129765 - RNA, 22 nt, Human
aauuucaaugcacucaugguug

SEQ ID NO: 1129766 - RNA, 22 nt, Human
gcagcuggacccacacggcuua

SEQ ID NO: 1129767 - RNA, 22 nt, Human
agagaauuacagaagaauguca

SEQ ID NO: 1129768 - RNA, 22 nt, Human
ggcugggagcuggacaggccgg

SEQ ID NO: 1129769 - RNA, 22 nt, Human
gccugaagaacagcugugagga

SEQ ID NO: 1129770 - RNA, 22 nt, Human
ucaaagcaucagucaauuuagg

SEQ ID NO: 1129771 - RNA, 22 nt, Human
ucuggcuccuggcuccacugcc

SEQ ID NO: 1129772 - RNA, 22 nt, Human
ggcuucuccagguacugagcau

SEQ ID NO: 1129773 - RNA, 20 nt, Human
gaggcucugggcauggcgcc

SEQ ID NO: 1129774 - RNA, 22 nt, Human
cauggcccucuucuggagcaau

SEQ ID NO: 1129775 - RNA, 22 nt, Human
gcccugggauuggguggaggcu

SEQ ID NO: 1129776 - RNA, 22 nt, Human
acauuucuuccuaauuaucccu

SEQ ID NO: 1129777 - RNA, 22 nt, Human
uggcccugcuuaugucucucuu

SEQ ID NO: 1129778 - RNA, 22 nt, Human
cagcagcuggugagacacagcc

SEQ ID NO: 1129779 - RNA, 22 nt, Human
ggagccagaggcugcugcugug

SEQ ID NO: 1129780 - RNA, 22 nt, Human
gcagagccuugcgucaugugcc

SEQ ID NO: 1129781 - RNA, 22 nt, Human
cuuaggcaaccaggucaaugcu

SEQ ID NO: 1129782 - RNA, 22 nt, Human
aaggagagagcuuugcuggaac

SEQ ID NO: 1129783 - RNA, 22 nt, Human
cuuugcauacaauuuuuagaaa

SEQ ID NO: 1129784 - RNA, 22 nt, Human
ucaagagauugaauaauaacug

SEQ ID NO: 1129785 - RNA, 22 nt, Human
agggccagagucuguguagaua

SEQ ID NO: 1129786 - RNA, 22 nt, Human
cuguguccugcgucaagccaau

SEQ ID NO: 1129787 - RNA, 22 nt, Human
caggccugugaguugaggcccc

SEQ ID NO: 1129788 - RNA, 22 nt, Human
ugagugaggaagcgguggagga

SEQ ID NO: 1129789 - RNA, 22 nt, Human
cugggcaggagggcucuaugga

SEQ ID NO: 1129790 - RNA, 22 nt, Human
cugccuugaaaaugaagcuuua

SEQ ID NO: 1129791 - RNA, 22 nt, Human
agccugccuugggcugcuugag

SEQ ID NO: 1129792 - RNA, 22 nt, Human
cugagcuuggccaggaaugaau

SEQ ID NO: 1129793 - RNA, 22 nt, Human
uuuagaaauucaucuauggccu

SEQ ID NO: 1129794 - RNA, 22 nt, Human
ggagaguggauuccagcuguau

SEQ ID NO: 1129795 - RNA, 22 nt, Human
ggcuccugauaggagaaugcgg

SEQ ID NO: 1129796 - RNA, 22 nt, Human
ucagagcugcccaugcaagggg

SEQ ID NO: 1129797 - RNA, 22 nt, Human
cggggcugcucguccuccugug

SEQ ID NO: 1129798 - RNA, 22 nt, Human
ggggggugcugaucaguggagc

SEQ ID NO: 1129799 - RNA, 22 nt, Human
uggcaccugaacuuagaggugu

SEQ ID NO: 1129800 - RNA, 22 nt, Human
ugggcuacucugggagccuaac

SEQ ID NO: 1129801 - RNA, 22 nt, Human
ggacuggccggcgcugaggccc

SEQ ID NO: 1129802 - RNA, 18 nt, Human
agaaggagcuaugggcag

SEQ ID NO: 1129803 - RNA, 22 nt, Human
caggagacaauggcuguggggc

SEQ ID NO: 1129804 - RNA, 21 nt, Human
agcagccauuucacagagacu

SEQ ID NO: 1129805 - RNA, 22 nt, Human
gggcguggauggucagugcagg

SEQ ID NO: 1129806 - RNA, 22 nt, Human
gaggcaggcacuguuaucagca

SEQ ID NO: 1129807 - RNA, 22 nt, Human
aacagacagaaaaaugugaucu

SEQ ID NO: 1129808 - RNA, 22 nt, Human
uauguuuuuaagagaaugcauu

SEQ ID NO: 1129809 - RNA, 20 nt, Human
agcccaggccugugugaguc

SEQ ID NO: 1129810 - RNA, 22 nt, Human
aagaggaacugggggcugaguc

SEQ ID NO: 1129811 - RNA, 22 nt, Human
cagagaaacucagauagcugau

SEQ ID NO: 1129812 - RNA, 22 nt, Human
agggcccucuggcaggccaggc

SEQ ID NO: 1129813 - RNA, 22 nt, Human
gccaggcuccccggaucccugg

SEQ ID NO: 1129814 - RNA, 22 nt, Human
caggaccuggaaugcuugugaa

SEQ ID NO: 1129815 - RNA, 22 nt, Human
cagugguggaaugaggaauugu

SEQ ID NO: 1129816 - RNA, 22 nt, Human
agccucucuguuagucacuggg

SEQ ID NO: 1129817 - RNA, 22 nt, Human
cacagguguucuugcagugaaa

SEQ ID NO: 1129818 - RNA, 22 nt, Human
aggucauugaaguuauuuucuu

SEQ ID NO: 1129819 - RNA, 22 nt, Human
gcucaggacuggaggagcgggg

SEQ ID NO: 1129820 - RNA, 22 nt, Human
aguggcaggcggagauguagga

SEQ ID NO: 1129821 - RNA, 22 nt, Human
uuccucuccucacaugagucac

SEQ ID NO: 1129822 - RNA, 22 nt, Human
gugugccaccagucaaggugaa

SEQ ID NO: 1129823 - RNA, 22 nt, Human
uuccauaaaggugauaguauac

SEQ ID NO: 1129824 - RNA, 22 nt, Human
ucauccaguuguggagagggaa

SEQ ID NO: 1129825 - RNA, 22 nt, Human
gcugcccauuccacuggauggu

SEQ ID NO: 1129826 - RNA, 22 nt, Human
ccuccagggcagacggggagca

SEQ ID NO: 1129827 - RNA, 22 nt, Human
ugcagggcuaagucagagccug

SEQ ID NO: 1129828 - RNA, 22 nt, Human
cagagcagcagagcuuccaugg

SEQ ID NO: 1129829 - RNA, 22 nt, Human
gcacccagggacuuggcuggcc

SEQ ID NO: 1129830 - RNA, 21 nt, Human
uccauaagagaccaucuccua

SEQ ID NO: 1129831 - RNA, 22 nt, Human
ggaaccaguggaaugauaugcu

SEQ ID NO: 1129832 - RNA, 22 nt, Human
uggccuggcucacagugagauu

SEQ ID NO: 1129833 - RNA, 22 nt, Human
cugggcagugguggcccuuccc

SEQ ID NO: 1129834 - RNA, 22 nt, Human
agccucugcacgggcacgggug

SEQ ID NO: 1129835 - RNA, 22 nt, Human
uggguggaauaaaucaguucug

SEQ ID NO: 1129836 - RNA, 22 nt, Human
aggggacacggcuucuccaggg

SEQ ID NO: 1129837 - RNA, 22 nt, Human
aggagcugcauggauaccuggu

SEQ ID NO: 1129838 - RNA, 22 nt, Human
ggcuucccagcagagggcgcac

SEQ ID NO: 1129839 - RNA, 22 nt, Human
aggagggugauccgggcugguc

SEQ ID NO: 1129840 - RNA, 19 nt, Human
augauacaggugaaaauug

SEQ ID NO: 1129841 - RNA, 22 nt, Human
acagccauagaugcuuauguaa

SEQ ID NO: 1129842 - RNA, 21 nt, Human
ggucagggggugccuccaggu

SEQ ID NO: 1129843 - RNA, 22 nt, Human
auacuuaguuuuaauccauuag

SEQ ID NO: 1129844 - RNA, 22 nt, Human
agcagccagugggagugauaca

SEQ ID NO: 1129845 - RNA, 22 nt, Human
cucaggaugcaggucacaggac

SEQ ID NO: 1129846 - RNA, 22 nt, Human
cagcuggcguggagugauugca

SEQ ID NO: 1129847 - RNA, 22 nt, Human
ugaaggugucuuugugaacauc

SEQ ID NO: 1129848 - RNA, 22 nt, Human
cugucugucaaguucaucucca

SEQ ID NO: 1129849 - RNA, 18 nt, Human
cucagggcaucagucugg

SEQ ID NO: 1129850 - RNA, 22 nt, Human
cugggccuagaggaagcugaca

SEQ ID NO: 1129851 - RNA, 22 nt, Human
ugacagaaugugacucucagau

SEQ ID NO: 1129852 - RNA, 22 nt, Human
caggggacauuaaagcuccaua

SEQ ID NO: 1129853 - RNA, 22 nt, Human
aaaucuggccccuugccuauuu

SEQ ID NO: 1129854 - RNA, 22 nt, Human
gggaccaggugggugcauuccg

SEQ ID NO: 1129855 - RNA, 22 nt, Human
uuccuucucagcccucgaggau

SEQ ID NO: 1129856 - RNA, 22 nt, Human
gcaagcuggcuguuagaggaug

SEQ ID NO: 1129857 - RNA, 22 nt, Human
ccuggggcucaagauggcgccg

SEQ ID NO: 1129858 - RNA, 20 nt, Human
agcuggccuguccuaggccu

SEQ ID NO: 1129859 - RNA, 22 nt, Human
cugcugcugagagcucagccug

SEQ ID NO: 1129860 - RNA, 22 nt, Human
ucuuguccuaagagcuggauuc

SEQ ID NO: 1129861 - RNA, 22 nt, Human
gggaguggauuauguggaccca

SEQ ID NO: 1129862 - RNA, 22 nt, Human
guggugcauccuugaguaagcu

SEQ ID NO: 1129863 - RNA, 22 nt, Human
cagagagagugggguguggauu

SEQ ID NO: 1129864 - RNA, 21 nt, Human
agagccugagaucuuccagca

SEQ ID NO: 1129865 - RNA, 22 nt, Human
gacaggggucccucugggcugu

SEQ ID NO: 1129866 - RNA, 20 nt, Human
gaggccucagccucagcucc

SEQ ID NO: 1129867 - RNA, 22 nt, Human
cagcaaaagccagcauaagcuc

SEQ ID NO: 1129868 - RNA, 22 nt, Human
gccuggcuccuaaggacuggcu

SEQ ID NO: 1129869 - RNA, 22 nt, Human
cagcuucugagcaagccagggg

SEQ ID NO: 1129870 - RNA, 22 nt, Human
aucuggcugagcgaggcccaca

SEQ ID NO: 1129871 - RNA, 22 nt, Human
cccugggcaagcccuauuuucc

SEQ ID NO: 1129872 - RNA, 22 nt, Human
augguugaacuuaaagggaaug

SEQ ID NO: 1129873 - RNA, 22 nt, Human
ucuggcugcugcgugagugcuu

SEQ ID NO: 1129874 - RNA, 21 nt, Human
guggcccugguguggcugcac

SEQ ID NO: 1129875 - RNA, 22 nt, Human
acaaaguccugguguauggcca

SEQ ID NO: 1129876 - RNA, 22 nt, Human
uuugggaaacuuaggggucaga

SEQ ID NO: 1129877 - RNA, 22 nt, Human
ggcagcugauuagcaucaagga

SEQ ID NO: 1129878 - RNA, 22 nt, Human
agggcagcagcccauggcucug

SEQ ID NO: 1129879 - RNA, 22 nt, Human
cuuccucccccacacacucacu

SEQ ID NO: 1129880 - RNA, 22 nt, Human
uagcagugccaggauuuugcug

SEQ ID NO: 1129881 - RNA, 17 nt, Human
gcuggcugacccaugcc

SEQ ID NO: 1129882 - RNA, 22 nt, Human
ucuuuccucugagcuccuguag

SEQ ID NO: 1129883 - RNA, 22 nt, Human
uuugggaagaggaaucucugga

SEQ ID NO: 1129884 - RNA, 22 nt, Human
uacuuuagaaggaaauaaguuc

SEQ ID NO: 1129885 - RNA, 22 nt, Human
cuacugaguccuucagcugcca

SEQ ID NO: 1129886 - RNA, 22 nt, Human
ccugccuguacuagagacccag

SEQ ID NO: 1129887 - RNA, 22 nt, Human
cucuugaagcaggggccaguuc

SEQ ID NO: 1129888 - RNA, 22 nt, Human
gccagaaacauacacaucacuu

SEQ ID NO: 1129889 - RNA, 22 nt, Human
gaauuguagagggaacagaagc

SEQ ID NO: 1129890 - RNA, 22 nt, Human
ccagccucacuggcaucaccua

SEQ ID NO: 1129891 - RNA, 22 nt, Human
gcugggagcccuggucugcucc

SEQ ID NO: 1129892 - RNA, 19 nt, Human
acaagggcaggcaagguga

SEQ ID NO: 1129893 - RNA, 22 nt, Human
cugccacuuucacccagugcuc

SEQ ID NO: 1129894 - RNA, 22 nt, Human
cccacagguccccaugaacucg

SEQ ID NO: 1129895 - RNA, 20 nt, Human
uccagcugucuuucagagac

SEQ ID NO: 1129896 - RNA, 23 nt, Human
ugacacauuuccuuuccacugca

SEQ ID NO: 1129897 - RNA, 22 nt, Human
cugccaggacugacgucuucag

SEQ ID NO: 1129898 - RNA, 22 nt, Human
ucccacugugaauccaaggccu

SEQ ID NO: 1129899 - RNA, 22 nt, Human
gcagcagagaacacaaugaugg

SEQ ID NO: 1129900 - RNA, 22 nt, Human
uggggugggcaugcgcuguccu

SEQ ID NO: 1129901 - RNA, 22 nt, Human
gccauuuagggaggcaagguga

SEQ ID NO: 1129902 - RNA, 22 nt, Human
uggcuggcgccgggcuagccac

SEQ ID NO: 1129903 - RNA, 22 nt, Human
guggcugggcuccgagcggcuu

SEQ ID NO: 1129904 - RNA, 22 nt, Human
agccuguccagaggacagggcu

SEQ ID NO: 1129905 - RNA, 22 nt, Human
agggcagaaaucgauuacaccu

SEQ ID NO: 1129906 - RNA, 22 nt, Human
uuaaugcagaaaucaaacugac

SEQ ID NO: 1129907 - RNA, 22 nt, Human
ucagaggucacacagcaaguuu

SEQ ID NO: 1129908 - RNA, 22 nt, Human
uuaugacaggaaaaucacagaa

SEQ ID NO: 1129909 - RNA, 22 nt, Human
ugaaaucugcaugcaaaguccu

SEQ ID NO: 1129910 - RNA, 21 nt, Human
ugugucacuaacuagaggcua

SEQ ID NO: 1129911 - RNA, 22 nt, Human
caggcagcaucagucugcugua

SEQ ID NO: 1129912 - RNA, 22 nt, Human
agcucccugagaugccacagca

SEQ ID NO: 1129913 - RNA, 22 nt, Human
uccuugaauggacauuacacug

SEQ ID NO: 1129914 - RNA, 22 nt, Human
gaugauuuuaugucuugucauu

SEQ ID NO: 1129915 - RNA, 22 nt, Human
ggcuucauggaggaggugaguc

SEQ ID NO: 1129916 - RNA, 22 nt, Human
aaagauuugaguucugcuuaua

SEQ ID NO: 1129917 - RNA, 22 nt, Human
caggagcagaggguggucagca

SEQ ID NO: 1129918 - RNA, 23 nt, Human
agggcccaagccuggacagcagg

SEQ ID NO: 1129919 - RNA, 22 nt, Human
agguaaagacagugaaagaggg

SEQ ID NO: 1129920 - RNA, 22 nt, Human
ggcagaggaagcuggaaguggg

SEQ ID NO: 1129921 - RNA, 22 nt, Human
augcacuugcguguuugcaaau

SEQ ID NO: 1129922 - RNA, 20 nt, Human
cccagggaccugagcuccau

SEQ ID NO: 1129923 - RNA, 22 nt, Human
uauuucugggaguucagaaauu

SEQ ID NO: 1129924 - RNA, 22 nt, Human
cucucuuucugaaugaggacua

SEQ ID NO: 1129925 - RNA, 22 nt, Human
agguacagaugaaagucuaguu

SEQ ID NO: 1129926 - RNA, 21 nt, Human
ugauuuccaucuuaaaauaaa

SEQ ID NO: 1129927 - RNA, 22 nt, Human
ccugugcauccgguggucauug

SEQ ID NO: 1129928 - RNA, 22 nt, Human
ugcauauugugaaaauguagau

SEQ ID NO: 1129929 - RNA, 18 nt, Human
ggaaaaggagugucuagc

SEQ ID NO: 1129930 - RNA, 22 nt, Human
ccaguugguuucaaugggacag

SEQ ID NO: 1129931 - RNA, 22 nt, Human
ggaggcucccacgcagcucaca

SEQ ID NO: 1129932 - RNA, 22 nt, Human
uggucucuucuuccaagauggc

SEQ ID NO: 1129933 - RNA, 22 nt, Human
caaaguuaugaaugauaagauu

SEQ ID NO: 1129934 - RNA, 22 nt, Human
cagucccacuagugccaauacc

SEQ ID NO: 1129935 - RNA, 22 nt, Human
aagguacagaaauuaacaagga

SEQ ID NO: 1129936 - RNA, 22 nt, Human
acuguacacgugucauuuacag

SEQ ID NO: 1129937 - RNA, 19 nt, Human
ugccugucaguagaucuca

SEQ ID NO: 1129938 - RNA, 22 nt, Human
cccaggaggcagaaguugcagu

SEQ ID NO: 1129939 - RNA, 22 nt, Human
gagcuucccucugcagucccug

SEQ ID NO: 1129940 - RNA, 22 nt, Human
ccauuguaaagaguauacuuug

SEQ ID NO: 1129941 - RNA, 22 nt, Human
agauguaguagugggucuuuua

SEQ ID NO: 1129942 - RNA, 22 nt, Human
ucuuugcaggagcccuuugaac

SEQ ID NO: 1129943 - RNA, 22 nt, Human
uaauaaaugaaagugcuggcau

SEQ ID NO: 1129944 - RNA, 21 nt, Human
gagugucuaauccaggcuguc

SEQ ID NO: 1129945 - RNA, 22 nt, Human
cagucccagacccagaaggugg

SEQ ID NO: 1129946 - RNA, 22 nt, Human
uauugaguuacagaaaauacuu

SEQ ID NO: 1129947 - RNA, 22 nt, Human
agaacagaggccuuauguuuca

SEQ ID NO: 1129948 - RNA, 22 nt, Human
ugaggccacuuccccacagccc

SEQ ID NO: 1129949 - RNA, 22 nt, Human
gcaaagucugcaucuggaucag

SEQ ID NO: 1129950 - RNA, 23 nt, Human
aggaggccugaaacugaggcuga

SEQ ID NO: 1129951 - RNA, 22 nt, Human
aaagccuugggauuugugauca

SEQ ID NO: 1129952 - RNA, 22 nt, Human
ucaaugauagacaagaucuaag

SEQ ID NO: 1129953 - RNA, 20 nt, Human
uagauuucauacuucucuuu

SEQ ID NO: 1129954 - RNA, 20 nt, Human
ccacaggaguccagucgacc

SEQ ID NO: 1129955 - RNA, 22 nt, Human
ccuuuccuuuuuagugugggag

SEQ ID NO: 1129956 - RNA, 22 nt, Human
auuaaaagcuucccaagaguua

SEQ ID NO: 1129957 - RNA, 22 nt, Human
uacagaguggugagaucuuuug

SEQ ID NO: 1129958 - RNA, 22 nt, Human
ugggugcuucgucagcucugag

SEQ ID NO: 1129959 - RNA, 22 nt, Human
uggcugucagcugccuggugcg

SEQ ID NO: 1129960 - RNA, 22 nt, Human
augcugcacaagccacauguag

SEQ ID NO: 1129961 - RNA, 20 nt, Human
uauuucugggcaaccauuua

SEQ ID NO: 1129962 - RNA, 22 nt, Human
cagcagugcuucagugugagau

SEQ ID NO: 1129963 - RNA, 22 nt, Human
gguuggggcgagcuggaggccc

SEQ ID NO: 1129964 - RNA, 22 nt, Human
cuggcagcaguuaugaaacaau

SEQ ID NO: 1129965 - RNA, 22 nt, Human
gcugccugauuuacauagugaa

SEQ ID NO: 1129966 - RNA, 22 nt, Human
cccagccagccucuucccauau

SEQ ID NO: 1129967 - RNA, 22 nt, Human
ggucacugcucuaaacaaaagu

SEQ ID NO: 1129968 - RNA, 22 nt, Human
uuuuccuauaugcaaagaaugc

SEQ ID NO: 1129969 - RNA, 22 nt, Human
ucagaaauuuucucaguaguuc

SEQ ID NO: 1129970 - RNA, 22 nt, Human
guggcccaggcuuggcgcuggc

SEQ ID NO: 1129971 - RNA, 22 nt, Human
ggcagugguuagaaacaugagc

SEQ ID NO: 1129972 - RNA, 22 nt, Human
gcugcagcuuuaggauccagug

SEQ ID NO: 1129973 - RNA, 22 nt, Human
ugccaggcuaaguggaggacuu

SEQ ID NO: 1129974 - RNA, 22 nt, Human
uccugucugcucacagagcugg

SEQ ID NO: 1129975 - RNA, 20 nt, Human
ugugugcacacaugacauuc

SEQ ID NO: 1129976 - RNA, 22 nt, Human
auuguauuagcacaauacaauu

SEQ ID NO: 1129977 - RNA, 22 nt, Human
ucccagaguauuagcaauugcu

SEQ ID NO: 1129978 - RNA, 22 nt, Human
ccugccuggaucagccauccug

SEQ ID NO: 1129979 - RNA, 22 nt, Human
gugccugguuuggggaguguuc

SEQ ID NO: 1129980 - RNA, 22 nt, Human
cucugugccucaguuuucuucu

SEQ ID NO: 1129981 - RNA, 22 nt, Human
aucuagaaaguguugaagauca

SEQ ID NO: 1129982 - RNA, 21 nt, Human
uuacuuuugcaccaaccuaau

SEQ ID NO: 1129983 - RNA, 22 nt, Human
caggcauaaguaauguuuuaug

SEQ ID NO: 1129984 - RNA, 20 nt, Human
uggagcuccagcguccaugu

SEQ ID NO: 1129985 - RNA, 22 nt, Human
auguaucaauuaucugucugca

SEQ ID NO: 1129986 - RNA, 22 nt, Human
ucaaagucuaucuguaauuacu

SEQ ID NO: 1129987 - RNA, 22 nt, Human
gugcugcagagucucgugccgc

SEQ ID NO: 1129988 - RNA, 22 nt, Human
ccagagcaauucucacagaacu

SEQ ID NO: 1129989 - RNA, 19 nt, Human
gggcuccuugggccucucu

SEQ ID NO: 1129990 - RNA, 22 nt, Human
caguuucuacgacuuaagcaca

SEQ ID NO: 1129991 - RNA, 22 nt, Human
guuuuuccugcugacuuggguc

SEQ ID NO: 1129992 - RNA, 22 nt, Human
gccugccuuuguaugacccuga

SEQ ID NO: 1129993 - RNA, 22 nt, Human
agggcacagccuaaagccuaug

SEQ ID NO: 1129994 - RNA, 22 nt, Human
ccaggcucugcgcuggacaugg

SEQ ID NO: 1129995 - RNA, 20 nt, Human
agagccuugaggaagaugau

SEQ ID NO: 1129996 - RNA, 22 nt, Human
ccugucuggccuuccacggggg

SEQ ID NO: 1129997 - RNA, 22 nt, Human
ucaccuuagcuagaggaagaga

SEQ ID NO: 1129998 - RNA, 22 nt, Human
uuugacaggacuaacauauggc

SEQ ID NO: 1129999 - RNA, 22 nt, Human
gcugcucucucccuaaguuggg

SEQ ID NO: 1130000 - RNA, 22 nt, Human
agaaacauuuagauuauauguc

SEQ ID NO: 1130001 - RNA, 22 nt, Human
ccucacuuuccuuucuccuggg

SEQ ID NO: 1130002 - RNA, 22 nt, Human
gagguauguaugcuacauucuu

SEQ ID NO: 1130003 - RNA, 22 nt, Human
cacagguguaugaauaugucca

SEQ ID NO: 1130004 - RNA, 22 nt, Human
gccucugcaauuacauugugcc

SEQ ID NO: 1130005 - RNA, 22 nt, Human
agaggccuaauugcuacccuuu

SEQ ID NO: 1130006 - RNA, 22 nt, Human
cagcucuggcgucagggagcga

SEQ ID NO: 1130007 - RNA, 22 nt, Human
gcugguccacucccuggaggcu

SEQ ID NO: 1130008 - RNA, 22 nt, Human
gggcuggaggugagcaggacag

SEQ ID NO: 1130009 - RNA, 20 nt, Human
aguagcagugugacauugac

SEQ ID NO: 1130010 - RNA, 22 nt, Human
gggccuggcaugcagccccguu

SEQ ID NO: 1130011 - RNA, 22 nt, Human
gccagcaguauguccuggcagu

SEQ ID NO: 1130012 - RNA, 22 nt, Human
guagaagugaugucauguuaua

SEQ ID NO: 1130013 - RNA, 22 nt, Human
cucagaaucugccaaguucagg

SEQ ID NO: 1130014 - RNA, 22 nt, Human
gcucccaggaagagaagggcca

SEQ ID NO: 1130015 - RNA, 22 nt, Human
gcucugcuggagggaaagagaa

SEQ ID NO: 1130016 - RNA, 22 nt, Human
gcuguucugcgucccaggcugg

SEQ ID NO: 1130017 - RNA, 22 nt, Human
gggcacagcugcuacccagugc

SEQ ID NO: 1130018 - RNA, 21 nt, Human
gccauuguuuucuaccuggag

SEQ ID NO: 1130019 - RNA, 19 nt, Human
ucaaggcucccugagggau

SEQ ID NO: 1130020 - RNA, 22 nt, Human
gcucccuccaugaggcagaccg

SEQ ID NO: 1130021 - RNA, 22 nt, Human
ucagaggguggcugggagcauc

SEQ ID NO: 1130022 - RNA, 18 nt, Human
gggcccuggcguccgccc

SEQ ID NO: 1130023 - RNA, 22 nt, Human
gaggccuggucuaugagauguu

SEQ ID NO: 1130024 - RNA, 22 nt, Human
uggcucugggcaccguguccac

SEQ ID NO: 1130025 - RNA, 22 nt, Human
auuuccuagccucucuugcagu

SEQ ID NO: 1130026 - RNA, 22 nt, Human
uaguuacagcaggcaggauaua

SEQ ID NO: 1130027 - RNA, 22 nt, Human
cugaggcuggggaagggaagug

SEQ ID NO: 1130028 - RNA, 22 nt, Human
aggcucauucuugccucugagc

SEQ ID NO: 1130029 - RNA, 21 nt, Human
aaagugguaaggauuauuuug

SEQ ID NO: 1130030 - RNA, 22 nt, Human
uccucuggggucagggcacuac

SEQ ID NO: 1130031 - RNA, 22 nt, Human
augaagcuaaacccugcagcca

SEQ ID NO: 1130032 - RNA, 20 nt, Human
uggcuccugcgguggaacca

SEQ ID NO: 1130033 - RNA, 22 nt, Human
ggagugaaucacuagaugcaga

SEQ ID NO: 1130034 - RNA, 22 nt, Human
agguaaggcuguaagcuaagcc

SEQ ID NO: 1130035 - RNA, 22 nt, Human
uuuuaagaugcuaguauuucag

SEQ ID NO: 1130036 - RNA, 22 nt, Human
ucagggcaaaagggaaaccauu

SEQ ID NO: 1130037 - RNA, 22 nt, Human
ccaggcugcucacaagcugccc

SEQ ID NO: 1130038 - RNA, 22 nt, Human
aagcucugcucagcagacuagg

SEQ ID NO: 1130039 - RNA, 22 nt, Human
uggaagcagugauucuugucug

SEQ ID NO: 1130040 - RNA, 22 nt, Human
aggccucagugaucaucaucag

SEQ ID NO: 1130041 - RNA, 22 nt, Human
acagagauggcacagagaaggu

SEQ ID NO: 1130042 - RNA, 22 nt, Human
gccuggccgcuccgagcuccgc

SEQ ID NO: 1130043 - RNA, 22 nt, Human
aguguauugauuggaacagccu

SEQ ID NO: 1130044 - RNA, 22 nt, Human
gggcaguggguggcugcagccu

SEQ ID NO: 1130045 - RNA, 22 nt, Human
uguucaauccccagguccugaa

SEQ ID NO: 1130046 - RNA, 22 nt, Human
ccucccagugccuccagagcag

SEQ ID NO: 1130047 - RNA, 22 nt, Human
ggucccaggauugguugcgcag

SEQ ID NO: 1130048 - RNA, 19 nt, Human
ugcucauggggacuucucc

SEQ ID NO: 1130049 - RNA, 22 nt, Human
agugaaauuccuggucuuuguu

SEQ ID NO: 1130050 - RNA, 22 nt, Human
uaaauguguuguggaugaaguu

SEQ ID NO: 1130051 - RNA, 22 nt, Human
agucucagccacacagaccuau

SEQ ID NO: 1130052 - RNA, 22 nt, Human
uuauguacaauguuaauguaaa

SEQ ID NO: 1130053 - RNA, 22 nt, Human
ucccagagcugauaagccuuua

SEQ ID NO: 1130054 - RNA, 22 nt, Human
ccucaggcuuacgggcaaugga

SEQ ID NO: 1130055 - RNA, 22 nt, Human
uuguaacacuuuucuauuaaua

SEQ ID NO: 1130056 - RNA, 22 nt, Human
cuguccugcaguugggggcagg

SEQ ID NO: 1130057 - RNA, 22 nt, Human
ugagguaggugguaagagauac

SEQ ID NO: 1130058 - RNA, 22 nt, Human
cugggcuccuaaccauccaggu

SEQ ID NO: 1130059 - RNA, 22 nt, Human
auuugcagagcucugaauuuug

SEQ ID NO: 1130060 - RNA, 22 nt, Human
aguccaggaguugggugacauu

SEQ ID NO: 1130061 - RNA, 22 nt, Human
accucugccacuuucuaacucu

SEQ ID NO: 1130062 - RNA, 22 nt, Human
caggcacugugcuagauccuug

SEQ ID NO: 1130063 - RNA, 20 nt, Human
uccucagaagacauuugggg

SEQ ID NO: 1130064 - RNA, 22 nt, Human
uuucaaauaccauaaaccuaau

SEQ ID NO: 1130065 - RNA, 22 nt, Human
cugugucccaguaccuugggua

SEQ ID NO: 1130066 - RNA, 22 nt, Human
acagaauuaaaguguuugugga

SEQ ID NO: 1130067 - RNA, 23 nt, Human
cccuguagcccaggacaggcuuu

SEQ ID NO: 1130068 - RNA, 22 nt, Human
cccaggucugugccagcucuga

SEQ ID NO: 1130069 - RNA, 22 nt, Human
cugcacagagcagggcagacac

SEQ ID NO: 1130070 - RNA, 22 nt, Human
uagggcaggugaagaaaagcua

SEQ ID NO: 1130071 - RNA, 22 nt, Human
caaggcaggcaguucacuugag

SEQ ID NO: 1130072 - RNA, 22 nt, Human
acucacuuuccauucaagcacc

SEQ ID NO: 1130073 - RNA, 22 nt, Human
uuucauaugggcauuggcaaua

SEQ ID NO: 1130074 - RNA, 22 nt, Human
cuggagagaaaugacaaagcua

SEQ ID NO: 1130075 - RNA, 22 nt, Human
gccaccaggagcccaguccaaa

SEQ ID NO: 1130076 - RNA, 23 nt, Human
cucugcaggagagugggcagggc

SEQ ID NO: 1130077 - RNA, 22 nt, Human
cugccucuggccucaggcccag

SEQ ID NO: 1130078 - RNA, 22 nt, Human
aauccaauccuacucagaaagu

SEQ ID NO: 1130079 - RNA, 22 nt, Human
caaggcugcugcgggucgcacc

SEQ ID NO: 1130080 - RNA, 18 nt, Human
caugucugcgccacaagg

SEQ ID NO: 1130081 - RNA, 22 nt, Human
ugccagggugucaggagagcua

SEQ ID NO: 1130082 - RNA, 22 nt, Human
uggugcuguggaggggcagaag

SEQ ID NO: 1130083 - RNA, 22 nt, Human
cucauggauauaagaacuguuu

SEQ ID NO: 1130084 - RNA, 18 nt, Human
uggcagcaggaagccauu

SEQ ID NO: 1130085 - RNA, 22 nt, Human
ggagccugcgggagcucccauu

SEQ ID NO: 1130086 - RNA, 22 nt, Human
uucagcagugcagacacccagu

SEQ ID NO: 1130087 - RNA, 22 nt, Human
ugcauuaugcuugugcuguaua

SEQ ID NO: 1130088 - RNA, 22 nt, Human
ugaugauguuuaucuugguauu

SEQ ID NO: 1130089 - RNA, 22 nt, Human
ccagagccuggcaucugcauaa

SEQ ID NO: 1130090 - RNA, 20 nt, Human
uguauauuuucugguguaaa

SEQ ID NO: 1130091 - RNA, 19 nt, Human
ucucuggggacacuuucac

SEQ ID NO: 1130092 - RNA, 20 nt, Human
gccugcagguuggaugggau

SEQ ID NO: 1130093 - RNA, 19 nt, Human
aguguguacugaaagcacu

SEQ ID NO: 1130094 - RNA, 22 nt, Human
cagaggccucacuuccagccag

SEQ ID NO: 1130095 - RNA, 22 nt, Human
uagagcuagcuucaaaaugcga

SEQ ID NO: 1130096 - RNA, 22 nt, Human
gugugcagaagacacaagacau

SEQ ID NO: 1130097 - RNA, 22 nt, Human
cuucuuuccuuccuccaguggc

SEQ ID NO: 1130098 - RNA, 22 nt, Human
uggccucaagucugagggccuu

SEQ ID NO: 1130099 - RNA, 22 nt, Human
uccagggagagccgcugcucca

SEQ ID NO: 1130100 - RNA, 22 nt, Human
aaaaagguugauccagauuagg

SEQ ID NO: 1130101 - RNA, 22 nt, Human
cuuucacauaauugaccuugaa

SEQ ID NO: 1130102 - RNA, 22 nt, Human
uaugcacagaaguuugcugaau

SEQ ID NO: 1130103 - RNA, 22 nt, Human
gcuuccuagaucugugguacuc

SEQ ID NO: 1130104 - RNA, 22 nt, Human
ggcuccugaaagacuaugggaa

SEQ ID NO: 1130105 - RNA, 22 nt, Human
uagaaacauauaggauggcagg

SEQ ID NO: 1130106 - RNA, 22 nt, Human
ugggcuccagcaccugugcucu

SEQ ID NO: 1130107 - RNA, 22 nt, Human
guggccuuuccugaagaaauga

SEQ ID NO: 1130108 - RNA, 19 nt, Human
ggcuggcaagugacagugu

SEQ ID NO: 1130109 - RNA, 22 nt, Human
gccuggcaggccucaugagggg

SEQ ID NO: 1130110 - RNA, 22 nt, Human
aucuaagauguauugagcacuu

SEQ ID NO: 1130111 - RNA, 22 nt, Human
cugucagguuggucucagagcu

SEQ ID NO: 1130112 - RNA, 22 nt, Human
cagcauggugccagugagucca

SEQ ID NO: 1130113 - RNA, 22 nt, Human
ggcaccugcucaucuggacuca

SEQ ID NO: 1130114 - RNA, 22 nt, Human
uggagcccagacacuggcauug

SEQ ID NO: 1130115 - RNA, 19 nt, Human
agcagagcccugaagaucc

SEQ ID NO: 1130116 - RNA, 22 nt, Human
gcagagugagccgaggcugcuc

SEQ ID NO: 1130117 - RNA, 22 nt, Human
ccagcucucagcgggagacuca

SEQ ID NO: 1130118 - RNA, 22 nt, Human
ugcucugggcaacagccucccu

SEQ ID NO: 1130119 - RNA, 22 nt, Human
ucccagccacagguguagcccu

SEQ ID NO: 1130120 - RNA, 22 nt, Human
uggccucugggaaagcagauuc

SEQ ID NO: 1130121 - RNA, 22 nt, Human
gccugggagugcacagugaggu

SEQ ID NO: 1130122 - RNA, 22 nt, Human
ccagugcaggugagcaccaggu

SEQ ID NO: 1130123 - RNA, 22 nt, Human
gcugcugguccucagagcucau

SEQ ID NO: 1130124 - RNA, 22 nt, Human
aucaaaaugcuccagugauggu

SEQ ID NO: 1130125 - RNA, 22 nt, Human
ucuucagagacucugagccccu

SEQ ID NO: 1130126 - RNA, 22 nt, Human
cugcuuuguguggucccuccag

SEQ ID NO: 1130127 - RNA, 22 nt, Human
cacauguuuggcaugucaccaa

SEQ ID NO: 1130128 - RNA, 22 nt, Human
cagcugccuguauuguccucau

SEQ ID NO: 1130129 - RNA, 22 nt, Human
uuuucucuacaaaauaaccagc

SEQ ID NO: 1130130 - RNA, 22 nt, Human
gggcugcuuuuuucuuagcaga

SEQ ID NO: 1130131 - RNA, 22 nt, Human
uggccugccuucgcugagcuga

SEQ ID NO: 1130132 - RNA, 22 nt, Human
ugguugaacaaguuggguauau

SEQ ID NO: 1130133 - RNA, 22 nt, Human
gucugcccucacgccagcuggg

SEQ ID NO: 1130134 - RNA, 22 nt, Human
ggcugccucaaagcucaagcuc

SEQ ID NO: 1130135 - RNA, 22 nt, Human
uuccaguugguagaauguaagg

SEQ ID NO: 1130136 - RNA, 20 nt, Human
gucagaggacccuagagcga

SEQ ID NO: 1130137 - RNA, 22 nt, Human
ggcaguagccagggacuggcag

SEQ ID NO: 1130138 - RNA, 22 nt, Human
cugggcacacagugacucugca

SEQ ID NO: 1130139 - RNA, 22 nt, Human
ucagggcauucaagaggccugg

SEQ ID NO: 1130140 - RNA, 22 nt, Human
agaugggcgcccuggacugagg

SEQ ID NO: 1130141 - RNA, 22 nt, Human
cugcagaguggagccucggcug

SEQ ID NO: 1130142 - RNA, 22 nt, Human
ccuggcagucaggggaguccuu

SEQ ID NO: 1130143 - RNA, 22 nt, Human
cccagggcccuggacagcuaca

SEQ ID NO: 1130144 - RNA, 22 nt, Human
cauuuacagugagaguuuuuac

SEQ ID NO: 1130145 - RNA, 22 nt, Human
agagccagagaccuggguucac

SEQ ID NO: 1130146 - RNA, 22 nt, Human
gagccagcugagcugcacuguc

SEQ ID NO: 1130147 - RNA, 23 nt, Human
cuggcuccgaagacuccaggauc

SEQ ID NO: 1130148 - RNA, 22 nt, Human
acacugaagagcacuuucaaag

SEQ ID NO: 1130149 - RNA, 22 nt, Human
cagagcugguaagugguagagg

SEQ ID NO: 1130150 - RNA, 23 nt, Human
agcagggccagaauacuugcugu

SEQ ID NO: 1130151 - RNA, 22 nt, Human
gaagcagcugccagagaugucu

SEQ ID NO: 1130152 - RNA, 22 nt, Human
uucuggaggccccuuccuucuc

SEQ ID NO: 1130153 - RNA, 22 nt, Human
caagugucuauaucagugcuug

SEQ ID NO: 1130154 - RNA, 22 nt, Human
gcugagguggagauugcaguga

SEQ ID NO: 1130155 - RNA, 22 nt, Human
cuggcugccacuucagggucuu

SEQ ID NO: 1130156 - RNA, 20 nt, Human
acccagcucugugcccuggg

SEQ ID NO: 1130157 - RNA, 22 nt, Human
ccaggcugcuguugguguccgc

SEQ ID NO: 1130158 - RNA, 22 nt, Human
uagaaacugauagucuugugcu

SEQ ID NO: 1130159 - RNA, 22 nt, Human
uugaaaggccuguuuauccagc

SEQ ID NO: 1130160 - RNA, 22 nt, Human
gggcuggggcucaauaauuugu

SEQ ID NO: 1130161 - RNA, 22 nt, Human
aguggcagagcugugucuugaa

SEQ ID NO: 1130162 - RNA, 22 nt, Human
acuuaggcuugguucagcuaga

SEQ ID NO: 1130163 - RNA, 22 nt, Human
uggacagguuugggugccuguu

SEQ ID NO: 1130164 - RNA, 22 nt, Human
gggaguggagagcaauggauga

SEQ ID NO: 1130165 - RNA, 20 nt, Human
uucaggauucuagaccacac

SEQ ID NO: 1130166 - RNA, 22 nt, Human
guuauguauugggaaauccaag

SEQ ID NO: 1130167 - RNA, 22 nt, Human
gaggccugguuugcaugagaau

SEQ ID NO: 1130168 - RNA, 22 nt, Human
ucugcucuaguugcuuccugcc

SEQ ID NO: 1130169 - RNA, 22 nt, Human
cucagggccaaggaugcuguug

SEQ ID NO: 1130170 - RNA, 22 nt, Human
ggcugccugaggcagugagaga

SEQ ID NO: 1130171 - RNA, 22 nt, Human
cugggccaucagaggggcugga

SEQ ID NO: 1130172 - RNA, 22 nt, Human
auugacaagcaguaugucuuag

SEQ ID NO: 1130173 - RNA, 22 nt, Human
auacauguuguaccauauguuu

SEQ ID NO: 1130174 - RNA, 22 nt, Human
ucucagagugacaaugagaauu

SEQ ID NO: 1130175 - RNA, 22 nt, Human
uccucugccccagaugaaauuu

SEQ ID NO: 1130176 - RNA, 17 nt, Human
cagugcagagcccuuuc

SEQ ID NO: 1130177 - RNA, 22 nt, Human
ugaagcagagugaaggugaauu

SEQ ID NO: 1130178 - RNA, 22 nt, Human
aguguuccacacaucuggggaa

SEQ ID NO: 1130179 - RNA, 22 nt, Human
uaugagaaaauaaauaucuguu

SEQ ID NO: 1130180 - RNA, 22 nt, Human
cccagggcuuuucucacuagac

SEQ ID NO: 1130181 - RNA, 22 nt, Human
aggggcugccuggcuuggcacu

SEQ ID NO: 1130182 - RNA, 22 nt, Human
uuuaucuuuggaucuucagaaa

SEQ ID NO: 1130183 - RNA, 22 nt, Human
cagagccccccuucugaucaca

SEQ ID NO: 1130184 - RNA, 22 nt, Human
gcugccugcacagagcugcuuu

SEQ ID NO: 1130185 - RNA, 22 nt, Human
ugggccuguggcuuggcucuag

SEQ ID NO: 1130186 - RNA, 20 nt, Human
agagaauucccuuuggagau

SEQ ID NO: 1130187 - RNA, 22 nt, Human
uuucauguuuauggaaaaugag

SEQ ID NO: 1130188 - RNA, 22 nt, Human
gcccucagaugggaaaggaggg

SEQ ID NO: 1130189 - RNA, 18 nt, Human
uggcagccagcugcuccu

SEQ ID NO: 1130190 - RNA, 22 nt, Human
agucccuguacuuuccacugcc

SEQ ID NO: 1130191 - RNA, 21 nt, Human
aaugugugcuauuuaucuuuu

SEQ ID NO: 1130192 - RNA, 22 nt, Human
cagcucccuauggugaggcgac

SEQ ID NO: 1130193 - RNA, 22 nt, Human
gaggcugggaaguccaagacca

SEQ ID NO: 1130194 - RNA, 22 nt, Human
agcagccauccuuagagaaaga

SEQ ID NO: 1130195 - RNA, 22 nt, Human
aucucccagccacagcauucuu

SEQ ID NO: 1130196 - RNA, 22 nt, Human
cugggccuggcguuccaggcug

SEQ ID NO: 1130197 - RNA, 22 nt, Human
agaggagcugggaggcccucgu

SEQ ID NO: 1130198 - RNA, 22 nt, Human
cugccugugcaugcagucagaa

SEQ ID NO: 1130199 - RNA, 22 nt, Human
gcagccacugggagugcuuaua

SEQ ID NO: 1130200 - RNA, 22 nt, Human
cuuguggcccauggcuuccugc

SEQ ID NO: 1130201 - RNA, 23 nt, Human
gggcugcuccaggccaaggcugg

SEQ ID NO: 1130202 - RNA, 22 nt, Human
cagggccuuuuagcaucuucuc

SEQ ID NO: 1130203 - RNA, 22 nt, Human
uccuucaggguugaggccgacu

SEQ ID NO: 1130204 - RNA, 22 nt, Human
ugcucauuggcgaucugaggga

SEQ ID NO: 1130205 - RNA, 22 nt, Human
uguccacaucacucacuuguca

SEQ ID NO: 1130206 - RNA, 22 nt, Human
uuggaaggcccugccuagcagg

SEQ ID NO: 1130207 - RNA, 22 nt, Human
aagccagguguuuaggccagcg

SEQ ID NO: 1130208 - RNA, 22 nt, Human
ucuggcccagccccugagguca

SEQ ID NO: 1130209 - RNA, 22 nt, Human
ugagccaggcucaagugauccu

SEQ ID NO: 1130210 - RNA, 22 nt, Human
ugucccaguuuugcagguuaga

SEQ ID NO: 1130211 - RNA, 22 nt, Human
agaggccuuucuguugagugaa

SEQ ID NO: 1130212 - RNA, 22 nt, Human
ugucaugccaccguuucccaga

SEQ ID NO: 1130213 - RNA, 22 nt, Human
ggcacugaaguggguguugggu

SEQ ID NO: 1130214 - RNA, 22 nt, Human
caggcacuucugcugcuugucu

SEQ ID NO: 1130215 - RNA, 22 nt, Human
acagaaggcggggacaaggcgg

SEQ ID NO: 1130216 - RNA, 22 nt, Human
ugugugugcacgugcgcgcgag

SEQ ID NO: 1130217 - RNA, 22 nt, Human
ucugucugcaccuaagcacagu

SEQ ID NO: 1130218 - RNA, 22 nt, Human
auuuuucucucacacuuaccag

SEQ ID NO: 1130219 - RNA, 20 nt, Human
ccaagagcaugcaugaggaa

SEQ ID NO: 1130220 - RNA, 22 nt, Human
gcugggcagccccuacagagag

SEQ ID NO: 1130221 - RNA, 22 nt, Human
uuauaaagugagaagugcuaug

SEQ ID NO: 1130222 - RNA, 22 nt, Human
gggagccaaggagagaggccuu

SEQ ID NO: 1130223 - RNA, 22 nt, Human
cucaggauagcugcgcagccug

SEQ ID NO: 1130224 - RNA, 22 nt, Human
uccaggcuggacaugaggcggg

SEQ ID NO: 1130225 - RNA, 22 nt, Human
guuuuuaucuaauagcaguuau

SEQ ID NO: 1130226 - RNA, 21 nt, Human
acagggcaugcagcuggcugu

SEQ ID NO: 1130227 - RNA, 22 nt, Human
uacuacauuaauaaaacauuca

SEQ ID NO: 1130228 - RNA, 22 nt, Human
aguuuaugaaacacagauuuga

SEQ ID NO: 1130229 - RNA, 22 nt, Human
auugacaaauggauguugacau

SEQ ID NO: 1130230 - RNA, 22 nt, Human
ccagggcugcugugggacucca

SEQ ID NO: 1130231 - RNA, 22 nt, Human
caggcugcagugcaguggcuau

SEQ ID NO: 1130232 - RNA, 22 nt, Human
acaaugcaccagcaucuucacc

SEQ ID NO: 1130233 - RNA, 20 nt, Human
auauguguacguguauacau

SEQ ID NO: 1130234 - RNA, 18 nt, Human
ggagccagucugucucug

SEQ ID NO: 1130235 - RNA, 18 nt, Human
aagaggaggagcagguug

SEQ ID NO: 1130236 - RNA, 22 nt, Human
aagaauucacugguagagucaa

SEQ ID NO: 1130237 - RNA, 22 nt, Human
uccuuuuugguccaaggugacc

SEQ ID NO: 1130238 - RNA, 22 nt, Human
auguuuauguugggcuauauuu

SEQ ID NO: 1130239 - RNA, 22 nt, Human
cucucucuaugcguuguuccua

SEQ ID NO: 1130240 - RNA, 22 nt, Human
ggucaggguuccagguaucuuc

SEQ ID NO: 1130241 - RNA, 22 nt, Human
auaaggcacacauagauagggu

SEQ ID NO: 1130242 - RNA, 22 nt, Human
gggucucucucggcuccacgcg

SEQ ID NO: 1130243 - RNA, 22 nt, Human
uucaaagugcauguuccucaga

SEQ ID NO: 1130244 - RNA, 19 nt, Human
ucucagaggaaaaauugcu

SEQ ID NO: 1130245 - RNA, 22 nt, Human
gggugggagucuggcccucaaa

SEQ ID NO: 1130246 - RNA, 22 nt, Human
gacccaggguuucugcacaggg

SEQ ID NO: 1130247 - RNA, 22 nt, Human
gccuaauaugcaaaauugauac

SEQ ID NO: 1130248 - RNA, 22 nt, Human
cugggccuagcaacagaggagu

SEQ ID NO: 1130249 - RNA, 21 nt, Human
ugcaggagucugugagucagg

SEQ ID NO: 1130250 - RNA, 22 nt, Human
uuaacagauguuuauggagcau

SEQ ID NO: 1130251 - RNA, 22 nt, Human
gcagaggccaucaacuuugcca

SEQ ID NO: 1130252 - RNA, 22 nt, Human
acagaggaaggcugagcugccc

SEQ ID NO: 1130253 - RNA, 23 nt, Human
agcagccagagauccucggcccu

SEQ ID NO: 1130254 - RNA, 22 nt, Human
cacugcuuucacaguuuguucc

SEQ ID NO: 1130255 - RNA, 22 nt, Human
acaggcuuuuuuagaaugacau

SEQ ID NO: 1130256 - RNA, 22 nt, Human
uucuccgcuaaguucucugcag

SEQ ID NO: 1130257 - RNA, 22 nt, Human
uucacaggaauguaggggucuu

SEQ ID NO: 1130258 - RNA, 22 nt, Human
aggcuuccgaguagcugggacu

SEQ ID NO: 1130259 - RNA, 22 nt, Human
uacaaaguagaaauucaguaaa

SEQ ID NO: 1130260 - RNA, 22 nt, Human
cuccaggggccagaagccuggc

SEQ ID NO: 1130261 - RNA, 22 nt, Human
uaaaucccuacaucuguguuuu

SEQ ID NO: 1130262 - RNA, 22 nt, Human
agagcugaaaaagcugacccgg

SEQ ID NO: 1130263 - RNA, 22 nt, Human
aagaaugucguugguauuuuaa

SEQ ID NO: 1130264 - RNA, 22 nt, Human
agguuauaugucauacugaagu

SEQ ID NO: 1130265 - RNA, 22 nt, Human
ggcuucccuuuccgagaggaga

SEQ ID NO: 1130266 - RNA, 22 nt, Human
gagcuuugcuggaagccugggg

SEQ ID NO: 1130267 - RNA, 22 nt, Human
gggcucugggauucagagcaag

SEQ ID NO: 1130268 - RNA, 22 nt, Human
gccugcaguucugugcuaggca

SEQ ID NO: 1130269 - RNA, 22 nt, Human
cagcugccccgcuggcugacca

SEQ ID NO: 1130270 - RNA, 22 nt, Human
ccugggugaugugcugcccucg

SEQ ID NO: 1130271 - RNA, 22 nt, Human
uccaaagggaagcgcuuucugu

SEQ ID NO: 1130272 - RNA, 22 nt, Human
auuuaguguguauugcuauuau

SEQ ID NO: 1130273 - RNA, 22 nt, Human
cccuggaggaccccaauguggc

SEQ ID NO: 1130274 - RNA, 22 nt, Human
uccauguuagguaaaggcacug

SEQ ID NO: 1130275 - RNA, 20 nt, Human
cucaggauugucuagccccu

SEQ ID NO: 1130276 - RNA, 22 nt, Human
cuuccugcaggacagccaucug

SEQ ID NO: 1130277 - RNA, 22 nt, Human
ggacucuguuuuccugaucacu

SEQ ID NO: 1130278 - RNA, 22 nt, Human
gucccagggaagaaggcagcac

SEQ ID NO: 1130279 - RNA, 22 nt, Human
gcaggaugagugaguacauuua

SEQ ID NO: 1130280 - RNA, 22 nt, Human
aggccuggccugggcggcauug

SEQ ID NO: 1130281 - RNA, 22 nt, Human
cagggcaguaacgggaacaucu

SEQ ID NO: 1130282 - RNA, 22 nt, Human
aaagaaggaccuggaggaggau

SEQ ID NO: 1130283 - RNA, 22 nt, Human
guaaaucccauccuuucucugg

SEQ ID NO: 1130284 - RNA, 22 nt, Human
ucagccugcgucauggugacac

SEQ ID NO: 1130285 - RNA, 22 nt, Human
uuccauaauaaccugagagaaa

SEQ ID NO: 1130286 - RNA, 22 nt, Human
ugaagcagcaccauuuuagagc

SEQ ID NO: 1130287 - RNA, 22 nt, Human
cugauuccugauucaugcucuu

SEQ ID NO: 1130288 - RNA, 22 nt, Human
cugccuggaccggcagcccucc

SEQ ID NO: 1130289 - RNA, 22 nt, Human
auugaauagaugcauuauacua

SEQ ID NO: 1130290 - RNA, 22 nt, Human
guuaauaaagguauagaaucag

SEQ ID NO: 1130291 - RNA, 22 nt, Human
ucccuggcugggggcugccuug

SEQ ID NO: 1130292 - RNA, 22 nt, Human
uuguuuugcuaaagggucauca

SEQ ID NO: 1130293 - RNA, 22 nt, Human
cauugcuuugugcauauuuaaa

SEQ ID NO: 1130294 - RNA, 22 nt, Human
uugaagcauuugcuauagcauu

SEQ ID NO: 1130295 - RNA, 18 nt, Human
guccugagcucugcugua

SEQ ID NO: 1130296 - RNA, 22 nt, Human
uugccuugauucuucucaugug

SEQ ID NO: 1130297 - RNA, 22 nt, Human
gcucccacugcagcccugagcc

SEQ ID NO: 1130298 - RNA, 22 nt, Human
gauuucaaagguucugcaugcc

SEQ ID NO: 1130299 - RNA, 22 nt, Human
ucaggcagcuccaggaauggua

SEQ ID NO: 1130300 - RNA, 22 nt, Human
agcagcucaaagccugcaagga

SEQ ID NO: 1130301 - RNA, 17 nt, Human
ugccagccugucccagg

SEQ ID NO: 1130302 - RNA, 22 nt, Human
auaaagucauuucaaaaguuga

SEQ ID NO: 1130303 - RNA, 22 nt, Human
guggccucaugucuauaaagag

SEQ ID NO: 1130304 - RNA, 22 nt, Human
cugagccaaccacagcaggagc

SEQ ID NO: 1130305 - RNA, 22 nt, Human
ucagaagcugguguccuuugaa

SEQ ID NO: 1130306 - RNA, 22 nt, Human
cuccuguauguugggcuucaca

SEQ ID NO: 1130307 - RNA, 22 nt, Human
auaucuuuguuuuugccaagau

SEQ ID NO: 1130308 - RNA, 22 nt, Human
acagaaauauagaagguaggaa

SEQ ID NO: 1130309 - RNA, 22 nt, Human
aagaaauuaaugugccauuacu

SEQ ID NO: 1130310 - RNA, 22 nt, Human
ggcaggaggugaguggcgggug

SEQ ID NO: 1130311 - RNA, 22 nt, Human
ugaguagcggcuauguguaacu

SEQ ID NO: 1130312 - RNA, 22 nt, Human
aaaguuugagugauuugacaca

SEQ ID NO: 1130313 - RNA, 22 nt, Human
gcagacagcauguugggcuauu

SEQ ID NO: 1130314 - RNA, 22 nt, Human
aagaaucauccugcaagagucu

SEQ ID NO: 1130315 - RNA, 22 nt, Human
uggcagcaguggagguagaaag

SEQ ID NO: 1130316 - RNA, 22 nt, Human
cggcuggguagaggugccgggu

SEQ ID NO: 1130317 - RNA, 22 nt, Human
gccucugccaagggggcugcgg

SEQ ID NO: 1130318 - RNA, 22 nt, Human
agauuucccaaauacuuguuau

SEQ ID NO: 1130319 - RNA, 22 nt, Human
gaagcccacguuuggugaugua

SEQ ID NO: 1130320 - RNA, 22 nt, Human
gcaggcaguugcaguuuucuag

SEQ ID NO: 1130321 - RNA, 22 nt, Human
cugcuggagguuggagcaugca

SEQ ID NO: 1130322 - RNA, 22 nt, Human
uugaggagcaggaugggaggcu

SEQ ID NO: 1130323 - RNA, 22 nt, Human
ugggacagugugccuugcuccu

SEQ ID NO: 1130324 - RNA, 22 nt, Human
uuuauguaauuucauaggugug

SEQ ID NO: 1130325 - RNA, 22 nt, Human
aagggaggggauguaagccugg

SEQ ID NO: 1130326 - RNA, 22 nt, Human
gcagugacagggcugcugccuu

SEQ ID NO: 1130327 - RNA, 22 nt, Human
gcuggccuucugcagaguucug

SEQ ID NO: 1130328 - RNA, 22 nt, Human
ugaagccaucaggaagccagca

SEQ ID NO: 1130329 - RNA, 22 nt, Human
uccugcugagcgucugucauuu

SEQ ID NO: 1130330 - RNA, 22 nt, Human
uggccucugugggagcugagca

SEQ ID NO: 1130331 - RNA, 22 nt, Human
cagcaugcaaguccagaugugg

SEQ ID NO: 1130332 - RNA, 22 nt, Human
auguguacaaccaagcacuaaa

SEQ ID NO: 1130333 - RNA, 22 nt, Human
agagccuguuuugugggagaug

SEQ ID NO: 1130334 - RNA, 22 nt, Human
uggaagggggaagacagcucug

SEQ ID NO: 1130335 - RNA, 22 nt, Human
cuuaggcagacugcugaugcag

SEQ ID NO: 1130336 - RNA, 22 nt, Human
agucagcagccuggccaggaga

SEQ ID NO: 1130337 - RNA, 22 nt, Human
uuuauguacauauccacaagga

SEQ ID NO: 1130338 - RNA, 22 nt, Human
ucuuuccuacuuuauugugaac

SEQ ID NO: 1130339 - RNA, 22 nt, Human
ugaaagcacucacuucugcucu

SEQ ID NO: 1130340 - RNA, 22 nt, Human
ccauuguaguaucuguuuuagu

SEQ ID NO: 1130341 - RNA, 22 nt, Human
gcuucucuggccugcagggcau

SEQ ID NO: 1130342 - RNA, 19 nt, Human
ggccccucucacaggaguu

SEQ ID NO: 1130343 - RNA, 22 nt, Human
gcuggucacucugggagcugcu

SEQ ID NO: 1130344 - RNA, 22 nt, Human
gacagaguuguugauguaugcu

SEQ ID NO: 1130345 - RNA, 22 nt, Human
ccucugggagacugcuacugag

SEQ ID NO: 1130346 - RNA, 22 nt, Human
gaauucuuuucuuucugaaagu

SEQ ID NO: 1130347 - RNA, 17 nt, Human
uccuucagugccucugc

SEQ ID NO: 1130348 - RNA, 22 nt, Human
agaugagggguagaaaggacuu

SEQ ID NO: 1130349 - RNA, 22 nt, Human
gaccugccugagcugccucugc

SEQ ID NO: 1130350 - RNA, 22 nt, Human
guuccuauauagccuuaaggau

SEQ ID NO: 1130351 - RNA, 22 nt, Human
aucuggcucgcuaggcucuggg

SEQ ID NO: 1130352 - RNA, 22 nt, Human
ugccaggcccagcuccagagcu

SEQ ID NO: 1130353 - RNA, 22 nt, Human
agcuggggcugcagagaacagg

SEQ ID NO: 1130354 - RNA, 22 nt, Human
augcaguaaaauaggagguaau

SEQ ID NO: 1130355 - RNA, 22 nt, Human
gagaagccgagucagcugagcc

SEQ ID NO: 1130356 - RNA, 22 nt, Human
ucuguuccaguagaaaggugca

SEQ ID NO: 1130357 - RNA, 22 nt, Human
ucuguaucacccguucccagaa

SEQ ID NO: 1130358 - RNA, 22 nt, Human
gcuggcucuucaguggagauag

SEQ ID NO: 1130359 - RNA, 22 nt, Human
ugggccugauucuugaauccug

SEQ ID NO: 1130360 - RNA, 22 nt, Human
gccuggucucuuucaugucagu

SEQ ID NO: 1130361 - RNA, 22 nt, Human
aggucaccauggcaugcuccac

SEQ ID NO: 1130362 - RNA, 22 nt, Human
uauaagaaacaaggcaaauuuu

SEQ ID NO: 1130363 - RNA, 22 nt, Human
augauggugggagaugacccag

SEQ ID NO: 1130364 - RNA, 22 nt, Human
caaaauguucuggcaccuuuaa

SEQ ID NO: 1130365 - RNA, 22 nt, Human
agguauagaauugaaaggguuu

SEQ ID NO: 1130366 - RNA, 22 nt, Human
cagggccucuccuccaggaacu

SEQ ID NO: 1130367 - RNA, 20 nt, Human
gccugccucagcuagcugag

SEQ ID NO: 1130368 - RNA, 22 nt, Human
aagaauguuaguuucugauaca

SEQ ID NO: 1130369 - RNA, 22 nt, Human
augcaucauggaaaacucaguu

SEQ ID NO: 1130370 - RNA, 22 nt, Human
aggaggccccuccuggguugcu

SEQ ID NO: 1130371 - RNA, 22 nt, Human
cguggccuuugagugagcuccc

SEQ ID NO: 1130372 - RNA, 22 nt, Human
guucccauacaguaucagugcu

SEQ ID NO: 1130373 - RNA, 22 nt, Human
cagggugcgccacucagaugua

SEQ ID NO: 1130374 - RNA, 22 nt, Human
ugccugucucugacugccauua

SEQ ID NO: 1130375 - RNA, 22 nt, Human
aaaguuuuagaacuaggaagca

SEQ ID NO: 1130376 - RNA, 22 nt, Human
cucaaggacuuauucaugccug

SEQ ID NO: 1130377 - RNA, 22 nt, Human
ugccaggccucaggagucucca

SEQ ID NO: 1130378 - RNA, 22 nt, Human
gcugagaguguaggauguuuac

SEQ ID NO: 1130379 - RNA, 22 nt, Human
ggcuuccuaauacucccuacac

SEQ ID NO: 1130380 - RNA, 22 nt, Human
uguguuuugaacucaucuacug

SEQ ID NO: 1130381 - RNA, 22 nt, Human
cugagauggccacugggucuca

SEQ ID NO: 1130382 - RNA, 22 nt, Human
ccuggcugaaccaaugaagugg

SEQ ID NO: 1130383 - RNA, 22 nt, Human
agagccugucugccuuucuacc

SEQ ID NO: 1130384 - RNA, 22 nt, Human
agcaaagucaguggaaccaucc

SEQ ID NO: 1130385 - RNA, 22 nt, Human
uuguuuuggaagaacuuacucu

SEQ ID NO: 1130386 - RNA, 22 nt, Human
augccaggccccacgcugggca

SEQ ID NO: 1130387 - RNA, 22 nt, Human
cagggagggacaauugucaccu

SEQ ID NO: 1130388 - RNA, 22 nt, Human
ggcucuggucagugaggggccu

SEQ ID NO: 1130389 - RNA, 22 nt, Human
cugcccugucuuuuucugauga

SEQ ID NO: 1130390 - RNA, 19 nt, Human
ggucucagugcagcugcag

SEQ ID NO: 1130391 - RNA, 22 nt, Human
ugcuggggauccguaccaaccc

SEQ ID NO: 1130392 - RNA, 22 nt, Human
aaauguaguauguugcauguau

SEQ ID NO: 1130393 - RNA, 22 nt, Human
agagaugaaaaguggagacugg

SEQ ID NO: 1130394 - RNA, 22 nt, Human
gaacccaguccaggugcagccu

SEQ ID NO: 1130395 - RNA, 22 nt, Human
ugcucugucaagaaaagaugcc

SEQ ID NO: 1130396 - RNA, 22 nt, Human
gccuucaguaguauccucauga

SEQ ID NO: 1130397 - RNA, 19 nt, Human
gagcugccuuuugaagacc

SEQ ID NO: 1130398 - RNA, 22 nt, Human
cuggggcucacuuuggucaggc

SEQ ID NO: 1130399 - RNA, 22 nt, Human
agggagguaggagcuucuagcu

SEQ ID NO: 1130400 - RNA, 22 nt, Human
uaagaagcuucugcuaaugccu

SEQ ID NO: 1130401 - RNA, 22 nt, Human
uugcagcagggugaauucacuc

SEQ ID NO: 1130402 - RNA, 22 nt, Human
uggcucugcugaaccuagugca

SEQ ID NO: 1130403 - RNA, 22 nt, Human
caggcagcaggagcccugcucg

SEQ ID NO: 1130404 - RNA, 22 nt, Human
ucucagagggaaaggccaauuu

SEQ ID NO: 1130405 - RNA, 22 nt, Human
gcuggccauucucuuugagaug

SEQ ID NO: 1130406 - RNA, 22 nt, Human
aggaaagcucccaguagggcuc

SEQ ID NO: 1130407 - RNA, 22 nt, Human
cucaggccauucuuccagcugc

SEQ ID NO: 1130408 - RNA, 22 nt, Human
agggcagccaugagccuucagg

SEQ ID NO: 1130409 - RNA, 22 nt, Human
gagcugccggcccacaguacua

SEQ ID NO: 1130410 - RNA, 22 nt, Human
cugggcugucaauggcccucug

SEQ ID NO: 1130411 - RNA, 22 nt, Human
agccaacuaggagauuaaggua

SEQ ID NO: 1130412 - RNA, 22 nt, Human
ucugggagacguguguugucag

SEQ ID NO: 1130413 - RNA, 22 nt, Human
ucagugucuugggcuugaaugc

SEQ ID NO: 1130414 - RNA, 22 nt, Human
cagcagcuuugccaagucagcc

SEQ ID NO: 1130415 - RNA, 22 nt, Human
cuggagcucuguguguuccuga

SEQ ID NO: 1130416 - RNA, 20 nt, Human
uccagcugggaacagcugau

SEQ ID NO: 1130417 - RNA, 22 nt, Human
ugaaggaaagagggaacauccc

SEQ ID NO: 1130418 - RNA, 21 nt, Human
ccuucuccacagggucuccgg

SEQ ID NO: 1130419 - RNA, 22 nt, Human
uggggaggacgggcgccuuccu

SEQ ID NO: 1130420 - RNA, 22 nt, Human
gggcacuggaaggcucucaggc

SEQ ID NO: 1130421 - RNA, 22 nt, Human
uucucuagguuuuagaugaaga

SEQ ID NO: 1130422 - RNA, 22 nt, Human
cccaggcugaugggaugggcca

SEQ ID NO: 1130423 - RNA, 22 nt, Human
agagcccucuucacugccccuu

SEQ ID NO: 1130424 - RNA, 22 nt, Human
guuuagaauucuaacuuuaagg

SEQ ID NO: 1130425 - RNA, 22 nt, Human
ggggccuguagagcuucaggga

SEQ ID NO: 1130426 - RNA, 22 nt, Human
ucaggggacuuaggagagaagu

SEQ ID NO: 1130427 - RNA, 20 nt, Human
gggguuggcuggcacaggga

SEQ ID NO: 1130428 - RNA, 23 nt, Human
uccaagggcuacaaacacagacc

SEQ ID NO: 1130429 - RNA, 22 nt, Human
uauguuuuucagacguccuaca

SEQ ID NO: 1130430 - RNA, 22 nt, Human
ggccugagucccaccuggcugu

SEQ ID NO: 1130431 - RNA, 22 nt, Human
ucaagcaucuuggucuacgauc

SEQ ID NO: 1130432 - RNA, 22 nt, Human
auuuguacaaauuuauguuagu

SEQ ID NO: 1130433 - RNA, 22 nt, Human
ccuuccuggcuguccgccugau

SEQ ID NO: 1130434 - RNA, 22 nt, Human
ugauuuccugugcgcccuuagg

SEQ ID NO: 1130435 - RNA, 22 nt, Human
gggcucuguccauuccuucaua

SEQ ID NO: 1130436 - RNA, 23 nt, Human
gcauugucuccccacuucugggc

SEQ ID NO: 1130437 - RNA, 22 nt, Human
caguacuuugaagauauuuuag

SEQ ID NO: 1130438 - RNA, 22 nt, Human
cagagugaaaacugagcucaaa

SEQ ID NO: 1130439 - RNA, 19 nt, Human
acacugaauguagaauugg

SEQ ID NO: 1130440 - RNA, 23 nt, Human
uaguuauuuucucuguaauuugc

SEQ ID NO: 1130441 - RNA, 23 nt, Human
cccagcuuucccacugccgagag

SEQ ID NO: 1130442 - RNA, 22 nt, Human
cuguguggccucaagccagccu

SEQ ID NO: 1130443 - RNA, 22 nt, Human
acauuucuuucuauucaguagc

SEQ ID NO: 1130444 - RNA, 22 nt, Human
uccaguggagugugggggugaa

SEQ ID NO: 1130445 - RNA, 22 nt, Human
ugaugguugauuauaaaucagu

SEQ ID NO: 1130446 - RNA, 22 nt, Human
aagucacagcuaaauagcuaag

SEQ ID NO: 1130447 - RNA, 22 nt, Human
ugguacacauguccaaggucag

SEQ ID NO: 1130448 - RNA, 22 nt, Human
uuguuaaaaugcauauucuggu

SEQ ID NO: 1130449 - RNA, 22 nt, Human
uggcucuguuuuaugaguacca

SEQ ID NO: 1130450 - RNA, 22 nt, Human
cccugcagcuuuugcauaguca

SEQ ID NO: 1130451 - RNA, 22 nt, Human
ugccucugcugcuguggcauca

SEQ ID NO: 1130452 - RNA, 22 nt, Human
cugggagagaagcgaagcuggg

SEQ ID NO: 1130453 - RNA, 22 nt, Human
uggcucaggugugagcugaaga

SEQ ID NO: 1130454 - RNA, 22 nt, Human
ggaggugaggccguagggugug

SEQ ID NO: 1130455 - RNA, 22 nt, Human
cugggagaugacucagagcagg

SEQ ID NO: 1130456 - RNA, 22 nt, Human
auaaacaguagagaaagguggu

SEQ ID NO: 1130457 - RNA, 17 nt, Human
uggcuucccugggccac

SEQ ID NO: 1130458 - RNA, 22 nt, Human
ccugaggcccuggcugugcuga

SEQ ID NO: 1130459 - RNA, 22 nt, Human
ccaaggaggccccaggucagcu

SEQ ID NO: 1130460 - RNA, 20 nt, Human
cagagacccaggcuucagcu

SEQ ID NO: 1130461 - RNA, 22 nt, Human
cauuucugugacacuuccaucu

SEQ ID NO: 1130462 - RNA, 22 nt, Human
ucuccucuauuucuguauguau

SEQ ID NO: 1130463 - RNA, 20 nt, Human
agcugaggcaccugagguua

SEQ ID NO: 1130464 - RNA, 22 nt, Human
agggccagcugaugagaaugag

SEQ ID NO: 1130465 - RNA, 22 nt, Human
uagcagggguagauagagugug

SEQ ID NO: 1130466 - RNA, 22 nt, Human
uccagggauguccuguagcacu

SEQ ID NO: 1130467 - RNA, 20 nt, Human
ucagccagcuaacaugggga

SEQ ID NO: 1130468 - RNA, 15 nt, Human
aaucuggcggcaagu

SEQ ID NO: 1130469 - RNA, 22 nt, Human
ugucacauaauuuaucuguagg

SEQ ID NO: 1130470 - RNA, 17 nt, Human
gguguauggggagggaa

SEQ ID NO: 1130471 - RNA, 22 nt, Human
agagcugaauuuggguggugga

SEQ ID NO: 1130472 - RNA, 22 nt, Human
aaagguuugcauggaauuuacc

SEQ ID NO: 1130473 - RNA, 22 nt, Human
gaggcugguaggaaaggaaaca

SEQ ID NO: 1130474 - RNA, 18 nt, Human
aaguaacagaagagcaca

SEQ ID NO: 1130475 - RNA, 22 nt, Human
cuccagaagacccauccucaug

SEQ ID NO: 1130476 - RNA, 22 nt, Human
ccacccuuggguucggaggccg

SEQ ID NO: 1130477 - RNA, 19 nt, Human
cugucaggggcuggauguu

SEQ ID NO: 1130478 - RNA, 22 nt, Human
aggccuguuccuuccugggcac

SEQ ID NO: 1130479 - RNA, 22 nt, Human
guuauguaaucuaacacucagu

SEQ ID NO: 1130480 - RNA, 22 nt, Human
cagcccugagaaggaggaucuc

SEQ ID NO: 1130481 - RNA, 22 nt, Human
cuggagcagguuuaggaguccc

SEQ ID NO: 1130482 - RNA, 22 nt, Human
cacaggcucuucucacuugauu

SEQ ID NO: 1130483 - RNA, 22 nt, Human
ugcauauuauguguaucugucu

SEQ ID NO: 1130484 - RNA, 22 nt, Human
aagagcuggagcugcuacagga

SEQ ID NO: 1130485 - RNA, 22 nt, Human
ggugcagaggagccagcugggg

SEQ ID NO: 1130486 - RNA, 20 nt, Human
ugaaaaggucaggagacaug

SEQ ID NO: 1130487 - RNA, 22 nt, Human
uuucacauguggaaugccaggu

SEQ ID NO: 1130488 - RNA, 22 nt, Human
ucuggagccacaaaccucagcu

SEQ ID NO: 1130489 - RNA, 22 nt, Human
ugaagccagcuuuggaagacac

SEQ ID NO: 1130490 - RNA, 22 nt, Human
gcagaaggucuggcacuucagg

SEQ ID NO: 1130491 - RNA, 22 nt, Human
cccuggugguacggcacuggca

SEQ ID NO: 1130492 - RNA, 23 nt, Human
auuugagaaaguauuuuuaagac

SEQ ID NO: 1130493 - RNA, 22 nt, Human
ggucaugcugugaaucagugcu

SEQ ID NO: 1130494 - RNA, 22 nt, Human
ccaggaaugaaauguagauaaa

SEQ ID NO: 1130495 - RNA, 17 nt, Human
gcugagugcagggaguc

SEQ ID NO: 1130496 - RNA, 22 nt, Human
cuuucacagcugugcuuaugau

SEQ ID NO: 1130497 - RNA, 22 nt, Human
agaugcugugaggaagcuagga

SEQ ID NO: 1130498 - RNA, 22 nt, Human
cuguuuaucccuuuggucagca

SEQ ID NO: 1130499 - RNA, 22 nt, Human
cccaggagguggagguugcagc

SEQ ID NO: 1130500 - RNA, 22 nt, Human
gaugagggccugguggcugugc

SEQ ID NO: 1130501 - RNA, 22 nt, Human
uacaguaaagcugcuaugaauu

SEQ ID NO: 1130502 - RNA, 22 nt, Human
cuggagcuccagggucuccucu

SEQ ID NO: 1130503 - RNA, 22 nt, Human
ugcuggcccaugaagacgcagu

SEQ ID NO: 1130504 - RNA, 22 nt, Human
gggcagcugcagggauggugac

SEQ ID NO: 1130505 - RNA, 22 nt, Human
gccucuggucccucaugcugug

SEQ ID NO: 1130506 - RNA, 22 nt, Human
ucaguuuuuaaaugauauaauu

SEQ ID NO: 1130507 - RNA, 22 nt, Human
gaggccuguagucauggaugua

SEQ ID NO: 1130508 - RNA, 22 nt, Human
auugaaaggcaaaguaggaagc

SEQ ID NO: 1130509 - RNA, 22 nt, Human
uccuugaaaggggcugcagggc

SEQ ID NO: 1130510 - RNA, 22 nt, Human
cagcuccccaugguuccugaag

SEQ ID NO: 1130511 - RNA, 22 nt, Human
ucaggugguccuaagugccauc

SEQ ID NO: 1130512 - RNA, 22 nt, Human
gcuguccaugucuggccucagu

SEQ ID NO: 1130513 - RNA, 22 nt, Human
augugcauuaaaugucaauguu

SEQ ID NO: 1130514 - RNA, 22 nt, Human
acacaugcugauaagaauauaa

SEQ ID NO: 1130515 - RNA, 22 nt, Human
ccaccagcagugugcaaggauu

SEQ ID NO: 1130516 - RNA, 22 nt, Human
uuagauaacaguagaauaucaa

SEQ ID NO: 1130517 - RNA, 22 nt, Human
uagacagauuucuuguuagaca

SEQ ID NO: 1130518 - RNA, 22 nt, Human
ugucagugguagacccagaggu

SEQ ID NO: 1130519 - RNA, 22 nt, Human
caggguggaaaagcuaguugga

SEQ ID NO: 1130520 - RNA, 22 nt, Human
ccagcugcgggcaucgagaguu

SEQ ID NO: 1130521 - RNA, 22 nt, Human
acacacagguaaaggagccugg

SEQ ID NO: 1130522 - RNA, 22 nt, Human
gucccagggaugcagacaugag

SEQ ID NO: 1130523 - RNA, 22 nt, Human
cugccacuuacuaggcauggug

SEQ ID NO: 1130524 - RNA, 22 nt, Human
aggccaaguagcuagcauugaa

SEQ ID NO: 1130525 - RNA, 22 nt, Human
gggucccaggaaggagcagugu

SEQ ID NO: 1130526 - RNA, 22 nt, Human
aaagccuugagauccuauaguu

SEQ ID NO: 1130527 - RNA, 23 nt, Human
ucugagagaacaaugccuccuau

SEQ ID NO: 1130528 - RNA, 22 nt, Human
guggcugcucgggcuccggccc

SEQ ID NO: 1130529 - RNA, 17 nt, Human
uuccucucacauuuuuu

SEQ ID NO: 1130530 - RNA, 22 nt, Human
agcagaaccacagcacuguuga

SEQ ID NO: 1130531 - RNA, 22 nt, Human
cagcacugcugcuguacacaca

SEQ ID NO: 1130532 - RNA, 22 nt, Human
auguaacuucugugaaucugac

SEQ ID NO: 1130533 - RNA, 22 nt, Human
ugcucagacaagcugaacagua

SEQ ID NO: 1130534 - RNA, 22 nt, Human
cacagggcagguacucucagag

SEQ ID NO: 1130535 - RNA, 22 nt, Human
ggagauagacuuggugagccac

SEQ ID NO: 1130536 - RNA, 22 nt, Human
aaugccaguguguugauuccag

SEQ ID NO: 1130537 - RNA, 22 nt, Human
ccugagagcagcuuccugcuua

SEQ ID NO: 1130538 - RNA, 22 nt, Human
aggggagcuaacaccagagccc

SEQ ID NO: 1130539 - RNA, 22 nt, Human
ggcaggguggcccuccagugag

SEQ ID NO: 1130540 - RNA, 22 nt, Human
ucugucugcucauuuaccucag

SEQ ID NO: 1130541 - RNA, 20 nt, Human
cccucugcuacacugggagc

SEQ ID NO: 1130542 - RNA, 22 nt, Human
uagcagcucugauucugggccc

SEQ ID NO: 1130543 - RNA, 22 nt, Human
ggaggccaaggcgggcggauca

SEQ ID NO: 1130544 - RNA, 22 nt, Human
ccagucccaggcagaaauccag

SEQ ID NO: 1130545 - RNA, 22 nt, Human
uuauaaagauuguuauguaucu

SEQ ID NO: 1130546 - RNA, 22 nt, Human
ucaaggugcugugcugugcuag

SEQ ID NO: 1130547 - RNA, 21 nt, Human
aggagggcacaaggccaggaa

SEQ ID NO: 1130548 - RNA, 22 nt, Human
agggagcuuccgaacuacagcu

SEQ ID NO: 1130549 - RNA, 22 nt, Human
gcagauggugggggaggaguac

SEQ ID NO: 1130550 - RNA, 20 nt, Human
ggcucuggaaucuggugggc

SEQ ID NO: 1130551 - RNA, 22 nt, Human
uagcuuuacaaagugcugcacc

SEQ ID NO: 1130552 - RNA, 16 nt, Human
agcagggcgggaagga

SEQ ID NO: 1130553 - RNA, 22 nt, Human
ucucacuggguauaaaugagua

SEQ ID NO: 1130554 - RNA, 18 nt, Human
gcaggagauggguggggu

SEQ ID NO: 1130555 - RNA, 22 nt, Human
cagcuggaucccugcagaacuu

SEQ ID NO: 1130556 - RNA, 22 nt, Human
uauuuuguuaauaauccagucc

SEQ ID NO: 1130557 - RNA, 22 nt, Human
ccugucugcggaggaguggaag

SEQ ID NO: 1130558 - RNA, 22 nt, Human
agguaaagacugcaaggagaau

SEQ ID NO: 1130559 - RNA, 22 nt, Human
acaguaauauugaugcucguca

SEQ ID NO: 1130560 - RNA, 22 nt, Human
ugcucuucggggccacugcuug

SEQ ID NO: 1130561 - RNA, 22 nt, Human
agagccugcaucaggcuugggg

SEQ ID NO: 1130562 - RNA, 22 nt, Human
ugcaguggcgccaucucagcuc

SEQ ID NO: 1130563 - RNA, 22 nt, Human
agcagcuucuuucacuccugga

SEQ ID NO: 1130564 - RNA, 22 nt, Human
cuggccugagaaugcuacccuu

SEQ ID NO: 1130565 - RNA, 22 nt, Human
agggguggagaguguugccagu

SEQ ID NO: 1130566 - RNA, 21 nt, Human
cugcaucucauagaacauguc

SEQ ID NO: 1130567 - RNA, 22 nt, Human
ggccugagcucuggggaggcaa

SEQ ID NO: 1130568 - RNA, 22 nt, Human
aguuacaaccaugacacaagca

SEQ ID NO: 1130569 - RNA, 22 nt, Human
ggcagggucuggacugaaagcu

SEQ ID NO: 1130570 - RNA, 22 nt, Human
agcagggccaacaguaaacacc

SEQ ID NO: 1130571 - RNA, 22 nt, Human
uccucacaagcaagcacaggua

SEQ ID NO: 1130572 - RNA, 22 nt, Human
gcugggagccccgagccagcgc

SEQ ID NO: 1130573 - RNA, 22 nt, Human
gccuucugauugcuggacugac

SEQ ID NO: 1130574 - RNA, 22 nt, Human
aggcaucugaguuugcaagcuu

SEQ ID NO: 1130575 - RNA, 22 nt, Human
gaugguuugguaaaaguauguu

SEQ ID NO: 1130576 - RNA, 19 nt, Human
acuuucuccaggaccuguu

SEQ ID NO: 1130577 - RNA, 22 nt, Human
uggagcaggccggaaguggcuu

SEQ ID NO: 1130578 - RNA, 22 nt, Human
gacaggaggcagagcucaggug

SEQ ID NO: 1130579 - RNA, 22 nt, Human
aggugaguuacaggaggagguc

SEQ ID NO: 1130580 - RNA, 21 nt, Human
ccugggagaucagcugccuuc

SEQ ID NO: 1130581 - RNA, 22 nt, Human
uuuauaaacaguaccacggugc

SEQ ID NO: 1130582 - RNA, 22 nt, Human
aaucagucauuagcucugaccu

SEQ ID NO: 1130583 - RNA, 22 nt, Human
cagggccugccugguuccugga

SEQ ID NO: 1130584 - RNA, 19 nt, Human
caucuggaugauucuccug

SEQ ID NO: 1130585 - RNA, 22 nt, Human
aagggcuggcccugggaagagu

SEQ ID NO: 1130586 - RNA, 23 nt, Human
uguaaaaugggguaguguuacca

SEQ ID NO: 1130587 - RNA, 22 nt, Human
guccuggcccacuggcaggcug

SEQ ID NO: 1130588 - RNA, 17 nt, Human
agcuccugcccauggcu

SEQ ID NO: 1130589 - RNA, 22 nt, Human
gagauauguuagaaagcuauug

SEQ ID NO: 1130590 - RNA, 22 nt, Human
ugaagcaggguggccagauugu

SEQ ID NO: 1130591 - RNA, 22 nt, Human
uaaaugcagauuccugagccua

SEQ ID NO: 1130592 - RNA, 22 nt, Human
guuugcauaaaguggaugcagg

SEQ ID NO: 1130593 - RNA, 22 nt, Human
ucuuugcaugugcuucuuggcc

SEQ ID NO: 1130594 - RNA, 22 nt, Human
aggccuggcuuugguuugcuga

SEQ ID NO: 1130595 - RNA, 22 nt, Human
aucuggcuggauucuuagcguu

SEQ ID NO: 1130596 - RNA, 22 nt, Human
uguacacaauucuuaacauaca

SEQ ID NO: 1130597 - RNA, 22 nt, Human
ccaaagugcugagauuacaggu

SEQ ID NO: 1130598 - RNA, 22 nt, Human
agccaagcugaucuccugcuga

SEQ ID NO: 1130599 - RNA, 22 nt, Human
uuccuguaguugugcaauguac

SEQ ID NO: 1130600 - RNA, 22 nt, Human
gcuggccugucuagagccuuac

SEQ ID NO: 1130601 - RNA, 22 nt, Human
gugcucuggcuggucucccggu

SEQ ID NO: 1130602 - RNA, 22 nt, Human
ggccucucuccuuggcuugcag

SEQ ID NO: 1130603 - RNA, 18 nt, Human
aaugcacacauuuacucc

SEQ ID NO: 1130604 - RNA, 22 nt, Human
auggggagagaagggcugagcu

SEQ ID NO: 1130605 - RNA, 22 nt, Human
uccaauguuauuaucuagaggc

SEQ ID NO: 1130606 - RNA, 22 nt, Human
uuagauaaauuaagacuuuaca

SEQ ID NO: 1130607 - RNA, 22 nt, Human
gcucugggcugcccucuggaca

SEQ ID NO: 1130608 - RNA, 22 nt, Human
cagcugaguguuggcauguuca

SEQ ID NO: 1130609 - RNA, 22 nt, Human
guuccaggcaagugggauagga

SEQ ID NO: 1130610 - RNA, 22 nt, Human
aaaggcuaugagauagaagaua

SEQ ID NO: 1130611 - RNA, 22 nt, Human
uagaaaugauuuugaugcuuca

SEQ ID NO: 1130612 - RNA, 22 nt, Human
ggggugggcgugcagggacacc

SEQ ID NO: 1130613 - RNA, 22 nt, Human
ggagcugaaggggugggcucag

SEQ ID NO: 1130614 - RNA, 23 nt, Human
aucaaaguggaaaucaauuaucu

SEQ ID NO: 1130615 - RNA, 22 nt, Human
ugcaguggaggccgugagacag

SEQ ID NO: 1130616 - RNA, 22 nt, Human
agaaguaggcagggcuguauca

SEQ ID NO: 1130617 - RNA, 22 nt, Human
uuaaaaugcagauucugauuca

SEQ ID NO: 1130618 - RNA, 22 nt, Human
cugggccagcaacugcaaugga

SEQ ID NO: 1130619 - RNA, 22 nt, Human
gcucagagaaucagcagacacc

SEQ ID NO: 1130620 - RNA, 22 nt, Human
uuagucaauagugaauauagag

SEQ ID NO: 1130621 - RNA, 22 nt, Human
agcaguggcuggauggugugcu

SEQ ID NO: 1130622 - RNA, 22 nt, Human
ugugcagggaagggcaugcuau

SEQ ID NO: 1130623 - RNA, 22 nt, Human
gggagggaaggaccuuaugaau

SEQ ID NO: 1130624 - RNA, 22 nt, Human
cccagcauuucugggcugcacu

SEQ ID NO: 1130625 - RNA, 22 nt, Human
cagagccaacgccaccugccca

SEQ ID NO: 1130626 - RNA, 22 nt, Human
gucccucugugucccugcaguc

SEQ ID NO: 1130627 - RNA, 22 nt, Human
caggaugggugucggccagcac

SEQ ID NO: 1130628 - RNA, 22 nt, Human
cagcauggcuugaguguuuccu

SEQ ID NO: 1130629 - RNA, 22 nt, Human
ugccugugucacagugauguuu

SEQ ID NO: 1130630 - RNA, 22 nt, Human
cagggccuucguaaguguccgg

SEQ ID NO: 1130631 - RNA, 20 nt, Human
ggcagcucacuacuuucugu

SEQ ID NO: 1130632 - RNA, 22 nt, Human
gucugagaaucuugcauaucau

SEQ ID NO: 1130633 - RNA, 22 nt, Human
ggggacugccuuccacagacac

SEQ ID NO: 1130634 - RNA, 22 nt, Human
ggcagcuguggacgucgucauu

SEQ ID NO: 1130635 - RNA, 22 nt, Human
aaaaugaggucaauauccuuuu

SEQ ID NO: 1130636 - RNA, 22 nt, Human
aaggucauggcaaauuacuuuu

SEQ ID NO: 1130637 - RNA, 20 nt, Human
agaguaacuggcacauaggg

SEQ ID NO: 1130638 - RNA, 22 nt, Human
ucugagcuacgaugccugucac

SEQ ID NO: 1130639 - RNA, 22 nt, Human
gauuuccuagacauggggcaga

SEQ ID NO: 1130640 - RNA, 22 nt, Human
ggcugcugugaccucaggugau

SEQ ID NO: 1130641 - RNA, 22 nt, Human
guggauggauugaggcaguggg

SEQ ID NO: 1130642 - RNA, 17 nt, Human
ugcauguccuuuguucc

SEQ ID NO: 1130643 - RNA, 22 nt, Human
accugaggcuguuagucuaggu

SEQ ID NO: 1130644 - RNA, 18 nt, Human
gggcacuggggacuggag

SEQ ID NO: 1130645 - RNA, 22 nt, Human
uagaaaugcccagauucugcua

SEQ ID NO: 1130646 - RNA, 22 nt, Human
aaguguguugacugaauugggg

SEQ ID NO: 1130647 - RNA, 22 nt, Human
ucugucucaaguucuugcacuc

SEQ ID NO: 1130648 - RNA, 19 nt, Human
gggcagaauggcaucucag

SEQ ID NO: 1130649 - RNA, 22 nt, Human
ggcucaggacacagugguuuag

SEQ ID NO: 1130650 - RNA, 22 nt, Human
uaaguucaguuggucgaaguag

SEQ ID NO: 1130651 - RNA, 22 nt, Human
agacagcaggggagucugguuu

SEQ ID NO: 1130652 - RNA, 20 nt, Human
aguaggggaaugcaagagca

SEQ ID NO: 1130653 - RNA, 22 nt, Human
ucagaacauuuaaaaagugguu

SEQ ID NO: 1130654 - RNA, 22 nt, Human
uuucaagcauaacugggaagag

SEQ ID NO: 1130655 - RNA, 22 nt, Human
guccuggggauacagaagugaa

SEQ ID NO: 1130656 - RNA, 22 nt, Human
agggcagagaaauguaguugag

SEQ ID NO: 1130657 - RNA, 22 nt, Human
aaaugugucauauucaaaguca

SEQ ID NO: 1130658 - RNA, 22 nt, Human
uacaaaaguaauuacgguuuuu

SEQ ID NO: 1130659 - RNA, 22 nt, Human
cagguggagcugacugagggca

SEQ ID NO: 1130660 - RNA, 22 nt, Human
uacaaagcuguauagccugguc

SEQ ID NO: 1130661 - RNA, 22 nt, Human
caauauucaguggaaaagccau

SEQ ID NO: 1130662 - RNA, 22 nt, Human
ccagcuggagccaagguggacu

SEQ ID NO: 1130663 - RNA, 20 nt, Human
gcagagccucacugcaaggg

SEQ ID NO: 1130664 - RNA, 22 nt, Human
cugagcugaaacuugagaggcu

SEQ ID NO: 1130665 - RNA, 22 nt, Human
cagacacaccaggcccauucug

SEQ ID NO: 1130666 - RNA, 22 nt, Human
cacugaagguaggaccaaggcu

SEQ ID NO: 1130667 - RNA, 22 nt, Human
cugaugcuauaagccacagugg

SEQ ID NO: 1130668 - RNA, 22 nt, Human
cagugcauagauccugaggccu

SEQ ID NO: 1130669 - RNA, 22 nt, Human
ucuguggauuuuaguguucaug

SEQ ID NO: 1130670 - RNA, 22 nt, Human
ucuuuugucgguguaucaugga

SEQ ID NO: 1130671 - RNA, 22 nt, Human
ccagccaguccagcauuggugu

SEQ ID NO: 1130672 - RNA, 22 nt, Human
ucagugcuucggcgagcaccua

SEQ ID NO: 1130673 - RNA, 22 nt, Human
ucuucucaguuucucuaggaug

SEQ ID NO: 1130674 - RNA, 22 nt, Human
uaaguucauaagcuuauucuua

SEQ ID NO: 1130675 - RNA, 22 nt, Human
ugagagugaaaugucacauguc

SEQ ID NO: 1130676 - RNA, 22 nt, Human
ugugaaagauacuaggcagagg

SEQ ID NO: 1130677 - RNA, 22 nt, Human
gcugagcuagcuaucucagucu

SEQ ID NO: 1130678 - RNA, 22 nt, Human
ugagcccagagaucugagcuau

SEQ ID NO: 1130679 - RNA, 22 nt, Human
ggcucuggcaaggggaggcuac

SEQ ID NO: 1130680 - RNA, 17 nt, Human
gccuggcccagccuggc

SEQ ID NO: 1130681 - RNA, 22 nt, Human
gcugggagcaaagccaugcaua

SEQ ID NO: 1130682 - RNA, 22 nt, Human
uaaaguucuggugagagguaag

SEQ ID NO: 1130683 - RNA, 22 nt, Human
uuacaaagaguguucuuuucca

SEQ ID NO: 1130684 - RNA, 22 nt, Human
ugccugggggacuaaggccaaa

SEQ ID NO: 1130685 - RNA, 22 nt, Human
gcaccacaucaaugaggggagc

SEQ ID NO: 1130686 - RNA, 22 nt, Human
gaggccuggaauuccagccugg

SEQ ID NO: 1130687 - RNA, 22 nt, Human
aagggcaggagaagacggauau

SEQ ID NO: 1130688 - RNA, 19 nt, Human
cuggcagccugucuguguc

SEQ ID NO: 1130689 - RNA, 22 nt, Human
gcagugguccaguucacaccca

SEQ ID NO: 1130690 - RNA, 22 nt, Human
ccagcugcuugggaaaaugucu

SEQ ID NO: 1130691 - RNA, 22 nt, Human
agcuuccuuggcgcugaggccu

SEQ ID NO: 1130692 - RNA, 22 nt, Human
cugggcugcaggaguggggcaa

SEQ ID NO: 1130693 - RNA, 16 nt, Human
ccacagggcaaggggc

SEQ ID NO: 1130694 - RNA, 22 nt, Human
aggugcagcaugaguccaacgg

SEQ ID NO: 1130695 - RNA, 22 nt, Human
auuugucuucaguagguucuuc

SEQ ID NO: 1130696 - RNA, 20 nt, Human
auuccauaguuggcacuuuu

SEQ ID NO: 1130697 - RNA, 19 nt, Human
agucccaggcccgaaagag

SEQ ID NO: 1130698 - RNA, 22 nt, Human
augguacaaaauguauaaaguc

SEQ ID NO: 1130699 - RNA, 22 nt, Human
agauuuagugguggaauuuugg

SEQ ID NO: 1130700 - RNA, 22 nt, Human
gcaggggaguccacucuaugca

SEQ ID NO: 1130701 - RNA, 21 nt, Human
uccugccuuaguccagagcag

SEQ ID NO: 1130702 - RNA, 22 nt, Human
ucauacauaacuuguacaguga

SEQ ID NO: 1130703 - RNA, 22 nt, Human
aaaaagauguccugaaguuuag

SEQ ID NO: 1130704 - RNA, 22 nt, Human
cuggccacuggagguggcaccc

SEQ ID NO: 1130705 - RNA, 22 nt, Human
ccagcgcuucccaucagggagg

SEQ ID NO: 1130706 - RNA, 22 nt, Human
uggcagagcaaaaagauagaau

SEQ ID NO: 1130707 - RNA, 22 nt, Human
caggagcuacucagguuggguu

SEQ ID NO: 1130708 - RNA, 22 nt, Human
gcagagcucaagguguucagcu

SEQ ID NO: 1130709 - RNA, 22 nt, Human
ucuuuacacaagacaagaauaa

SEQ ID NO: 1130710 - RNA, 22 nt, Human
aucaguuuaacugucaagagcc

SEQ ID NO: 1130711 - RNA, 20 nt, Human
uguucacaguaguugcugcu

SEQ ID NO: 1130712 - RNA, 22 nt, Human
caccaggcugaaccagagggga

SEQ ID NO: 1130713 - RNA, 18 nt, Human
ugcuggcaacuacuauug

SEQ ID NO: 1130714 - RNA, 22 nt, Human
cugggagucaccaggagcaagg

SEQ ID NO: 1130715 - RNA, 22 nt, Human
aaaugcuugcucuugauuauuu

SEQ ID NO: 1130716 - RNA, 20 nt, Human
ugacucugcaaccgucucuc

SEQ ID NO: 1130717 - RNA, 22 nt, Human
cucaaguaagaaacagaauugg

SEQ ID NO: 1130718 - RNA, 22 nt, Human
guguacaugagaaaucaacuuu

SEQ ID NO: 1130719 - RNA, 22 nt, Human
ugggccacaagccaugggacca

SEQ ID NO: 1130720 - RNA, 22 nt, Human
uggcagcauguuauguaaggaa

SEQ ID NO: 1130721 - RNA, 20 nt, Human
ucugcccaccccggcuccca

SEQ ID NO: 1130722 - RNA, 22 nt, Human
gcaggaugggagcuucacucug

SEQ ID NO: 1130723 - RNA, 22 nt, Human
cucagggcaguauggcugagag

SEQ ID NO: 1130724 - RNA, 22 nt, Human
cugcagaggccucgccuccucu

SEQ ID NO: 1130725 - RNA, 22 nt, Human
uuggcugagagaggaaaagggc

SEQ ID NO: 1130726 - RNA, 22 nt, Human
auaaagucugggccaggcaugg

SEQ ID NO: 1130727 - RNA, 22 nt, Human
agagggcccauguugggcugcu

SEQ ID NO: 1130728 - RNA, 22 nt, Human
uuccuguaugucagugaagagc

SEQ ID NO: 1130729 - RNA, 22 nt, Human
gggucuggacggcugcaggaag

SEQ ID NO: 1130730 - RNA, 22 nt, Human
agccuccacagaugcaaagggc

SEQ ID NO: 1130731 - RNA, 22 nt, Human
caugcuccaaaaacaagagaau

SEQ ID NO: 1130732 - RNA, 22 nt, Human
gaggggcucuugggcaugaagg

SEQ ID NO: 1130733 - RNA, 22 nt, Human
gaaaugcaggcuuggauucagc

SEQ ID NO: 1130734 - RNA, 22 nt, Human
ugcccuuggguaacuugcugau

SEQ ID NO: 1130735 - RNA, 22 nt, Human
cuucuuaaugacagauuaaaau

SEQ ID NO: 1130736 - RNA, 22 nt, Human
uuugcagcaaggagagagcauu

SEQ ID NO: 1130737 - RNA, 22 nt, Human
gccucugcaucaucacuccagc

SEQ ID NO: 1130738 - RNA, 22 nt, Human
uuccucucaacaugccugccgg

SEQ ID NO: 1130739 - RNA, 22 nt, Human
ugcagccuugccuccucccagc

SEQ ID NO: 1130740 - RNA, 22 nt, Human
agaggcuccuucacucuggcac

SEQ ID NO: 1130741 - RNA, 22 nt, Human
cagcuccugcagcugcugccgu

SEQ ID NO: 1130742 - RNA, 22 nt, Human
ccaaggagcaaguuuacaccug

SEQ ID NO: 1130743 - RNA, 21 nt, Human
agggaaagaaaaugagcuaau

SEQ ID NO: 1130744 - RNA, 22 nt, Human
ucucagggccccaaaggcuagu

SEQ ID NO: 1130745 - RNA, 16 nt, Human
cagaguguaaacagga

SEQ ID NO: 1130746 - RNA, 22 nt, Human
uaauccaaaacugaaucugugg

SEQ ID NO: 1130747 - RNA, 22 nt, Human
gagaugaauguaaacaaaggca

SEQ ID NO: 1130748 - RNA, 21 nt, Human
ggccugaguauaggacaggcc

SEQ ID NO: 1130749 - RNA, 22 nt, Human
gcacagagggcagugagccucu

SEQ ID NO: 1130750 - RNA, 22 nt, Human
gcugucugucuucacaucucgc

SEQ ID NO: 1130751 - RNA, 22 nt, Human
auggggcucugcggcugcuccc

SEQ ID NO: 1130752 - RNA, 22 nt, Human
uuagaaaucaccucugaagauc

SEQ ID NO: 1130753 - RNA, 18 nt, Human
uccucucuuuccccaggg

SEQ ID NO: 1130754 - RNA, 22 nt, Human
uaaauucugaucaaguuccuuc

SEQ ID NO: 1130755 - RNA, 22 nt, Human
gugucccaauguucaggacggc

SEQ ID NO: 1130756 - RNA, 22 nt, Human
ugcagccaucgcagagucugua

SEQ ID NO: 1130757 - RNA, 22 nt, Human
agcaccugcuaugugucaggga

SEQ ID NO: 1130758 - RNA, 23 nt, Human
ccagcccuccaccagcucuaggc

SEQ ID NO: 1130759 - RNA, 22 nt, Human
agggcagaggcggacacggaag

SEQ ID NO: 1130760 - RNA, 22 nt, Human
gcuggcaccugcaccaagcagg

SEQ ID NO: 1130761 - RNA, 22 nt, Human
ccagcagagucuaggaaggagg

SEQ ID NO: 1130762 - RNA, 22 nt, Human
gucaccagugcuaagaggugga

SEQ ID NO: 1130763 - RNA, 17 nt, Human
uugggagagaaagguau

SEQ ID NO: 1130764 - RNA, 22 nt, Human
gcagcagaugcuuucauggaca

SEQ ID NO: 1130765 - RNA, 22 nt, Human
uggcagccacaucucguggauu

SEQ ID NO: 1130766 - RNA, 22 nt, Human
ugaagcagcuucuuucugucaa

SEQ ID NO: 1130767 - RNA, 22 nt, Human
agaagccagcuucagcugcccg

SEQ ID NO: 1130768 - RNA, 22 nt, Human
agagcugagaauguggcuuccu

SEQ ID NO: 1130769 - RNA, 22 nt, Human
gugccugcugcagagucgcugu

SEQ ID NO: 1130770 - RNA, 22 nt, Human
gacucugcuacaggccgagguu

SEQ ID NO: 1130771 - RNA, 22 nt, Human
auguaucagaaauagcauuggc

SEQ ID NO: 1130772 - RNA, 22 nt, Human
ccagccuggguguuagaagaca

SEQ ID NO: 1130773 - RNA, 22 nt, Human
ggggcagagcauagcuccaauu

SEQ ID NO: 1130774 - RNA, 22 nt, Human
gaaaugugggucaugacccauu

SEQ ID NO: 1130775 - RNA, 22 nt, Human
gcacacaggcaguuuccagcca

SEQ ID NO: 1130776 - RNA, 22 nt, Human
ccuggcuguggcggugcucuca

SEQ ID NO: 1130777 - RNA, 22 nt, Human
cuggggacuugcagacacaauu

SEQ ID NO: 1130778 - RNA, 22 nt, Human
aaucgguugaacccaggaagug

SEQ ID NO: 1130779 - RNA, 22 nt, Human
aaguugaagcaugaaccaaggu

SEQ ID NO: 1130780 - RNA, 22 nt, Human
gguagcagggcugugagucaga

SEQ ID NO: 1130781 - RNA, 22 nt, Human
ucucucuucuuuguuaagaaug

SEQ ID NO: 1130782 - RNA, 22 nt, Human
gaaggccucacucugcagcaua

SEQ ID NO: 1130783 - RNA, 22 nt, Human
caggcagggagcuggaaaggau

SEQ ID NO: 1130784 - RNA, 23 nt, Human
uggcucugagcuuccugguggcc

SEQ ID NO: 1130785 - RNA, 20 nt, Human
ccugccugccucggcucauu

SEQ ID NO: 1130786 - RNA, 22 nt, Human
uuaaaguucauuaaaugagcca

SEQ ID NO: 1130787 - RNA, 23 nt, Human
ucugucaccuauggcugcucuuc

SEQ ID NO: 1130788 - RNA, 22 nt, Human
uguaugcuuguguauaauauaa

SEQ ID NO: 1130789 - RNA, 22 nt, Human
auggacaggcugagcuuccuca

SEQ ID NO: 1130790 - RNA, 22 nt, Human
uuaggcaaauaaaauguuucca

SEQ ID NO: 1130791 - RNA, 22 nt, Human
agcuguucccucacugcaguca

SEQ ID NO: 1130792 - RNA, 22 nt, Human
gagcugccugugugccaugaug

SEQ ID NO: 1130793 - RNA, 22 nt, Human
aggcuccuaucgcuuucagcaa

SEQ ID NO: 1130794 - RNA, 22 nt, Human
ucaggcugcccguucagggcuc

SEQ ID NO: 1130795 - RNA, 22 nt, Human
ccuggagcaggagcugcagagg

SEQ ID NO: 1130796 - RNA, 22 nt, Human
ggucagggggaucugugaggua

SEQ ID NO: 1130797 - RNA, 22 nt, Human
ggcuggccucaggguccucgcu

SEQ ID NO: 1130798 - RNA, 22 nt, Human
gguccccagcaguggcugcuuc

SEQ ID NO: 1130799 - RNA, 19 nt, Human
agggcugcucuggccuggg

SEQ ID NO: 1130800 - RNA, 20 nt, Human
gugaccagaagacagugggu

SEQ ID NO: 1130801 - RNA, 22 nt, Human
cugcugcauuacucuucucaag

SEQ ID NO: 1130802 - RNA, 20 nt, Human
uguuucuuuuaaugagcggc

SEQ ID NO: 1130803 - RNA, 22 nt, Human
uuaagucauuucugauuauaga

SEQ ID NO: 1130804 - RNA, 22 nt, Human
aaacagaaauuuccucaugcuc

SEQ ID NO: 1130805 - RNA, 22 nt, Human
acagcagccugcagcccugugu

SEQ ID NO: 1130806 - RNA, 22 nt, Human
aagagcauauuaauaguggaga

SEQ ID NO: 1130807 - RNA, 22 nt, Human
gccagcagcccagaaggacuuu

SEQ ID NO: 1130808 - RNA, 22 nt, Human
agcugcccuggcggagcugcuc

SEQ ID NO: 1130809 - RNA, 22 nt, Human
agagggagcccagucauagcug

SEQ ID NO: 1130810 - RNA, 22 nt, Human
cccuccagccauggacccaggu

SEQ ID NO: 1130811 - RNA, 22 nt, Human
gcucugagauugagccuuuggu

SEQ ID NO: 1130812 - RNA, 22 nt, Human
ggagagcaggguccugagauac

SEQ ID NO: 1130813 - RNA, 22 nt, Human
uggcuggcccugggagugcaga

SEQ ID NO: 1130814 - RNA, 22 nt, Human
ccaggacuucgaggcuacagug

SEQ ID NO: 1130815 - RNA, 22 nt, Human
ucccaggauguuggcggcaggu

SEQ ID NO: 1130816 - RNA, 22 nt, Human
ucucucuucaugcuuuuagaau

SEQ ID NO: 1130817 - RNA, 22 nt, Human
ccugagggaaggaugcuaccca

SEQ ID NO: 1130818 - RNA, 22 nt, Human
uuuucauuuuuguagaugcaag

SEQ ID NO: 1130819 - RNA, 20 nt, Human
cuggcaggagcgagucuacc

SEQ ID NO: 1130820 - RNA, 22 nt, Human
agggcuggcuccguuaccuuga

SEQ ID NO: 1130821 - RNA, 22 nt, Human
cucccucugucuuguccagaaa

SEQ ID NO: 1130822 - RNA, 20 nt, Human
gaggaaaagcugccaggccu

SEQ ID NO: 1130823 - RNA, 22 nt, Human
cccaggagagaggccaguuggc

SEQ ID NO: 1130824 - RNA, 23 nt, Human
gcugucaguuguuuuugucucua

SEQ ID NO: 1130825 - RNA, 22 nt, Human
gguggcagcgucuaucugacau

SEQ ID NO: 1130826 - RNA, 22 nt, Human
cugucuccuccacugcauggga

SEQ ID NO: 1130827 - RNA, 22 nt, Human
agagcuguggauaguccuggau

SEQ ID NO: 1130828 - RNA, 22 nt, Human
uggcagggugggcuucagcccc

SEQ ID NO: 1130829 - RNA, 22 nt, Human
agaacagaagggaggaaggccu

SEQ ID NO: 1130830 - RNA, 22 nt, Human
cagcagcucccauccgcugagc

SEQ ID NO: 1130831 - RNA, 21 nt, Human
gugguuauuuucauuagcauc

SEQ ID NO: 1130832 - RNA, 22 nt, Human
cuccucuggaaauuccucugcc

SEQ ID NO: 1130833 - RNA, 19 nt, Human
gggcucuggccucaguggg

SEQ ID NO: 1130834 - RNA, 22 nt, Human
auagucuuagaucagauaaagu

SEQ ID NO: 1130835 - RNA, 22 nt, Human
agcugagcauuugauccaccuc

SEQ ID NO: 1130836 - RNA, 19 nt, Human
uccccagcaccucugaguc

SEQ ID NO: 1130837 - RNA, 23 nt, Human
cugaggccugcugcguucagguu

SEQ ID NO: 1130838 - RNA, 22 nt, Human
gagagugauucccucccauaga

SEQ ID NO: 1130839 - RNA, 22 nt, Human
cugaggucucuuuccauaguga

SEQ ID NO: 1130840 - RNA, 22 nt, Human
uaaauguaccuucugccuuacu

SEQ ID NO: 1130841 - RNA, 22 nt, Human
ggcuggaaguccaagaucaaga

SEQ ID NO: 1130842 - RNA, 22 nt, Human
aaaguguugggaagaaagugca

SEQ ID NO: 1130843 - RNA, 22 nt, Human
aucuggcuugacuuugcgacuu

SEQ ID NO: 1130844 - RNA, 22 nt, Human
uacauuugcuuugauuuucagc

SEQ ID NO: 1130845 - RNA, 22 nt, Human
gagaaggggugauguggguaau

SEQ ID NO: 1130846 - RNA, 22 nt, Human
gacagcagacagaacuaccugc

SEQ ID NO: 1130847 - RNA, 22 nt, Human
ugaaggaaaugacggcagaaga

SEQ ID NO: 1130848 - RNA, 22 nt, Human
cucugggcaccaaagagcagcu

SEQ ID NO: 1130849 - RNA, 22 nt, Human
agagugaaaagcuagagcagua

SEQ ID NO: 1130850 - RNA, 22 nt, Human
caggcacuggggaugcugggau

SEQ ID NO: 1130851 - RNA, 22 nt, Human
ggagaugguggaagcuggugca

SEQ ID NO: 1130852 - RNA, 22 nt, Human
gggagagagaaaacguggcgca

SEQ ID NO: 1130853 - RNA, 22 nt, Human
uaaacauggauucugaucacag

SEQ ID NO: 1130854 - RNA, 22 nt, Human
cuucugugcuucacaguugcca

SEQ ID NO: 1130855 - RNA, 22 nt, Human
gcaggagcucguuuccaggcug

SEQ ID NO: 1130856 - RNA, 22 nt, Human
aacuuuauuguuaggggcuaaa

SEQ ID NO: 1130857 - RNA, 22 nt, Human
uaaguuuaaauguacaugaagc

SEQ ID NO: 1130858 - RNA, 22 nt, Human
gggacuguaaauucauauggcc

SEQ ID NO: 1130859 - RNA, 23 nt, Human
ccacagagcugccaauuccugug

SEQ ID NO: 1130860 - RNA, 19 nt, Human
ucucagagcccuagaggcc

SEQ ID NO: 1130861 - RNA, 21 nt, Human
gggugcuguggucaugcagga

SEQ ID NO: 1130862 - RNA, 22 nt, Human
agggccuggugaccuggguccu

SEQ ID NO: 1130863 - RNA, 22 nt, Human
acagagccaaaaggacauagua

SEQ ID NO: 1130864 - RNA, 22 nt, Human
agcaggguauguuagagcugua

SEQ ID NO: 1130865 - RNA, 22 nt, Human
uuagcucagaaaauuuaaacuu

SEQ ID NO: 1130866 - RNA, 22 nt, Human
gccccuggcuggccagcuccuc

SEQ ID NO: 1130867 - RNA, 22 nt, Human
acagauauaugauuguguaaau

SEQ ID NO: 1130868 - RNA, 17 nt, Human
gagugcugguggagcuc

SEQ ID NO: 1130869 - RNA, 22 nt, Human
agaaauguuguggguuuuguua

SEQ ID NO: 1130870 - RNA, 22 nt, Human
gacagggcauggugcagaguuc

SEQ ID NO: 1130871 - RNA, 22 nt, Human
ugcccugugugugcaagcacug

SEQ ID NO: 1130872 - RNA, 22 nt, Human
aacuagaaccacuuguauuucc

SEQ ID NO: 1130873 - RNA, 22 nt, Human
cuggccugugggcugucuccgg

SEQ ID NO: 1130874 - RNA, 22 nt, Human
agccuggaauuaaggaaaugca

SEQ ID NO: 1130875 - RNA, 21 nt, Human
aaagagguuaauauuguaagu

SEQ ID NO: 1130876 - RNA, 22 nt, Human
uggaggagaauuuauggucgaa

SEQ ID NO: 1130877 - RNA, 22 nt, Human
cuggagccccaggcugugcaga

SEQ ID NO: 1130878 - RNA, 22 nt, Human
cccagacauaacagcagagagg

SEQ ID NO: 1130879 - RNA, 22 nt, Human
ccacagccauuccagggaggcu

SEQ ID NO: 1130880 - RNA, 22 nt, Human
guuauguaucuugauugggugg

SEQ ID NO: 1130881 - RNA, 22 nt, Human
augcaguacugauacaugccac

SEQ ID NO: 1130882 - RNA, 22 nt, Human
agcugcuguccuaggcacugua

SEQ ID NO: 1130883 - RNA, 22 nt, Human
gaacagaagaggcuggugccac

SEQ ID NO: 1130884 - RNA, 22 nt, Human
ucuucuuccuccacagggccca

SEQ ID NO: 1130885 - RNA, 22 nt, Human
cucuggccagagccugcgggaa

SEQ ID NO: 1130886 - RNA, 22 nt, Human
gcccugugccagucacgcugug

SEQ ID NO: 1130887 - RNA, 22 nt, Human
uggccugccucccggcuucuuu

SEQ ID NO: 1130888 - RNA, 22 nt, Human
gccuaggagacaagcgugaaag

SEQ ID NO: 1130889 - RNA, 22 nt, Human
agugggaggcggcugacgggcg

SEQ ID NO: 1130890 - RNA, 22 nt, Human
ugucucaguucccuucucugga

SEQ ID NO: 1130891 - RNA, 17 nt, Human
gcugcagcgguaggcag

SEQ ID NO: 1130892 - RNA, 22 nt, Human
aaugcacaugucuuggccucac

SEQ ID NO: 1130893 - RNA, 22 nt, Human
agucucagaaaauaugcuuuuu

SEQ ID NO: 1130894 - RNA, 22 nt, Human
cuggugcuggagccuagucccu

SEQ ID NO: 1130895 - RNA, 22 nt, Human
aggaggcugguucaggccauau

SEQ ID NO: 1130896 - RNA, 22 nt, Human
uaauacuugcuuuggauguaug

SEQ ID NO: 1130897 - RNA, 22 nt, Human
ugcuugagacacauaugaauuu

SEQ ID NO: 1130898 - RNA, 22 nt, Human
acccuggguucccgcagcacca

SEQ ID NO: 1130899 - RNA, 22 nt, Human
gccugcagaggugcugcuagcu

SEQ ID NO: 1130900 - RNA, 22 nt, Human
acauagcuuaaaugagaagaua

SEQ ID NO: 1130901 - RNA, 22 nt, Human
guaucuuuccacaucuucagua

SEQ ID NO: 1130902 - RNA, 22 nt, Human
auggauaagucaaagaguaucc

SEQ ID NO: 1130903 - RNA, 22 nt, Human
acagugucugacacauuguagc

SEQ ID NO: 1130904 - RNA, 22 nt, Human
augcaccugaacuccaucagcu

SEQ ID NO: 1130905 - RNA, 21 nt, Human
gcagcagaggcuugacagaca

SEQ ID NO: 1130906 - RNA, 20 nt, Human
ccugucugcaauggagguca

SEQ ID NO: 1130907 - RNA, 22 nt, Human
ccuggcugugcauugccggccc

SEQ ID NO: 1130908 - RNA, 22 nt, Human
uagaacagaggguugcccagau

SEQ ID NO: 1130909 - RNA, 22 nt, Human
caggaaaggugugucaugaugg

SEQ ID NO: 1130910 - RNA, 22 nt, Human
cagagagagucaaaucuuugcu

SEQ ID NO: 1130911 - RNA, 22 nt, Human
cugcagagaauuguggggcuuc

SEQ ID NO: 1130912 - RNA, 22 nt, Human
guguaaggugaaaucaacaaau

SEQ ID NO: 1130913 - RNA, 22 nt, Human
gggcacugcuggaggcucccug

SEQ ID NO: 1130914 - RNA, 22 nt, Human
aaggcccuaauagagcacauau

SEQ ID NO: 1130915 - RNA, 22 nt, Human
ugccacccagccaggaguggga

SEQ ID NO: 1130916 - RNA, 22 nt, Human
guacauuggcaacucucuuaga

SEQ ID NO: 1130917 - RNA, 22 nt, Human
cuuccucaugugcaaugcaagc

SEQ ID NO: 1130918 - RNA, 22 nt, Human
uguaugcaaauuuauuagcaca

SEQ ID NO: 1130919 - RNA, 22 nt, Human
accucugccaagaugugcuccc

SEQ ID NO: 1130920 - RNA, 22 nt, Human
uguguacaggccuugcuagacu

SEQ ID NO: 1130921 - RNA, 22 nt, Human
cugagguguugaugaccuaugc

SEQ ID NO: 1130922 - RNA, 23 nt, Human
ccagcuccgugagccucgggcuc

SEQ ID NO: 1130923 - RNA, 22 nt, Human
cacacuagucuauccauuagcu

SEQ ID NO: 1130924 - RNA, 22 nt, Human
uguuuguucccucucuuuccug

SEQ ID NO: 1130925 - RNA, 22 nt, Human
cagggagaagucuggucagucc

SEQ ID NO: 1130926 - RNA, 22 nt, Human
gcugucuuccuugcuccaaggg

SEQ ID NO: 1130927 - RNA, 22 nt, Human
gcuccagguauuugcccuuuua

SEQ ID NO: 1130928 - RNA, 22 nt, Human
ggagugggaacaaugacauggu

SEQ ID NO: 1130929 - RNA, 22 nt, Human
cugggacacccaaggaaagagc

SEQ ID NO: 1130930 - RNA, 22 nt, Human
uagaaguuaaaggaauacagaa

SEQ ID NO: 1130931 - RNA, 22 nt, Human
uagauuucgcugcaucucaauc

SEQ ID NO: 1130932 - RNA, 22 nt, Human
aaaaaguuucaacugccaacuc

SEQ ID NO: 1130933 - RNA, 22 nt, Human
aaggcugcuuuuaacaugcaua

SEQ ID NO: 1130934 - RNA, 22 nt, Human
agugaaauugcuguaagaggaa

SEQ ID NO: 1130935 - RNA, 22 nt, Human
aaaugcacagaggccagagagg

SEQ ID NO: 1130936 - RNA, 22 nt, Human
ucaaaugcaggucuggucuugg

SEQ ID NO: 1130937 - RNA, 22 nt, Human
uacauucaacaugucacuaugu

SEQ ID NO: 1130938 - RNA, 22 nt, Human
uccucugcuccaucuuuacugu

SEQ ID NO: 1130939 - RNA, 22 nt, Human
accaguccgcggagcuccgggg

SEQ ID NO: 1130940 - RNA, 22 nt, Human
ucauugcauuuauucacuggca

SEQ ID NO: 1130941 - RNA, 23 nt, Human
ccuggcagcaaacgaggagguua

SEQ ID NO: 1130942 - RNA, 22 nt, Human
uguuuaaucuauaaaauggaga

SEQ ID NO: 1130943 - RNA, 22 nt, Human
caguuuuugccauuaagaguaa

SEQ ID NO: 1130944 - RNA, 22 nt, Human
uggccugccccgagauccuggc

SEQ ID NO: 1130945 - RNA, 22 nt, Human
gagagaagaaagccaugguccu

SEQ ID NO: 1130946 - RNA, 22 nt, Human
auacauguaacugcauuguaau

SEQ ID NO: 1130947 - RNA, 23 nt, Human
ucaggauauugugugccaaggug

SEQ ID NO: 1130948 - RNA, 22 nt, Human
uagccggguguugugucaugca

SEQ ID NO: 1130949 - RNA, 22 nt, Human
guccacauaggaacccagcuuc

SEQ ID NO: 1130950 - RNA, 22 nt, Human
uggcucaguagcagugugguca

SEQ ID NO: 1130951 - RNA, 22 nt, Human
uccagggaccucccugagagcu

SEQ ID NO: 1130952 - RNA, 22 nt, Human
cuggccacaacuagcccaggac

SEQ ID NO: 1130953 - RNA, 20 nt, Human
agucccagaucaaauuucug

SEQ ID NO: 1130954 - RNA, 18 nt, Human
gggaagaggaucuggccc

SEQ ID NO: 1130955 - RNA, 22 nt, Human
uccucuucugcccaucagaggc

SEQ ID NO: 1130956 - RNA, 22 nt, Human
accagagauggggcuucucugu

SEQ ID NO: 1130957 - RNA, 22 nt, Human
uguguauuaccauuuuacagcu

SEQ ID NO: 1130958 - RNA, 22 nt, Human
ucucuggguuuuuguccuguac

SEQ ID NO: 1130959 - RNA, 22 nt, Human
uggcccugcuguaucaucugcu

SEQ ID NO: 1130960 - RNA, 22 nt, Human
ccuggcugguggcagcgacaag

SEQ ID NO: 1130961 - RNA, 22 nt, Human
cagaguguauucugcaguugca

SEQ ID NO: 1130962 - RNA, 22 nt, Human
agcucccaauugacuugaacua

SEQ ID NO: 1130963 - RNA, 22 nt, Human
cucuuucaguucugauagucuc

SEQ ID NO: 1130964 - RNA, 22 nt, Human
gcugugcuauaucucugagugu

SEQ ID NO: 1130965 - RNA, 22 nt, Human
acacuuuacagcuuccuuugca

SEQ ID NO: 1130966 - RNA, 22 nt, Human
ugggugggagcacccugucugg

SEQ ID NO: 1130967 - RNA, 22 nt, Human
uugcucagcacuggagccagcu

SEQ ID NO: 1130968 - RNA, 22 nt, Human
cagaggccauauuucuucacuc

SEQ ID NO: 1130969 - RNA, 22 nt, Human
guaucuuucccaccaaucacaa

SEQ ID NO: 1130970 - RNA, 21 nt, Human
ccuggcugcacaguugcuggu

SEQ ID NO: 1130971 - RNA, 22 nt, Human
ucaugacaucuguuuaucucaa

SEQ ID NO: 1130972 - RNA, 22 nt, Human
ugcuggggcucugaccacucca

SEQ ID NO: 1130973 - RNA, 22 nt, Human
gagaggagucccuaucacaguu

SEQ ID NO: 1130974 - RNA, 19 nt, Human
cucugccucuggcuguggc

SEQ ID NO: 1130975 - RNA, 22 nt, Human
cagcucugggugacaggagggc

SEQ ID NO: 1130976 - RNA, 22 nt, Human
gcagggacaucuuugucuagua

SEQ ID NO: 1130977 - RNA, 22 nt, Human
gccaggcacaguucuaggugcu

SEQ ID NO: 1130978 - RNA, 22 nt, Human
cuuucaaugugccugccuuggg

SEQ ID NO: 1130979 - RNA, 22 nt, Human
gggcugcugcccaggaggcacc

SEQ ID NO: 1130980 - RNA, 22 nt, Human
gagaagcaauuuccaacugugc

SEQ ID NO: 1130981 - RNA, 22 nt, Human
ucagagugcagggaguagcagc

SEQ ID NO: 1130982 - RNA, 22 nt, Human
gauuucaagcccccagagauuc

SEQ ID NO: 1130983 - RNA, 20 nt, Human
cuguagggugcagcaggcuc

SEQ ID NO: 1130984 - RNA, 18 nt, Human
uggcagggaggaaauaua

SEQ ID NO: 1130985 - RNA, 21 nt, Human
uucaaagagugggcauuguca

SEQ ID NO: 1130986 - RNA, 22 nt, Human
ugucucugaacagcuuacuaaa

SEQ ID NO: 1130987 - RNA, 22 nt, Human
ucagccuggcaggauggccugg

SEQ ID NO: 1130988 - RNA, 22 nt, Human
uacaaaugaccauagccacuua

SEQ ID NO: 1130989 - RNA, 22 nt, Human
ggcuguccuuggccaaggcacu

SEQ ID NO: 1130990 - RNA, 22 nt, Human
gcccucagaggacagcugacuu

SEQ ID NO: 1130991 - RNA, 20 nt, Human
ggcugcugugggcagagagg

SEQ ID NO: 1130992 - RNA, 22 nt, Human
ccucugcucccuggugucugag

SEQ ID NO: 1130993 - RNA, 22 nt, Human
uacaaaguuuucuuggauugag

SEQ ID NO: 1130994 - RNA, 21 nt, Human
cuggacugaggagacagucgc

SEQ ID NO: 1130995 - RNA, 22 nt, Human
gcugccaugccacagcacucac

SEQ ID NO: 1130996 - RNA, 22 nt, Human
auaauaaaccaggaugggucug

SEQ ID NO: 1130997 - RNA, 22 nt, Human
gcuggcugcgucaucacagggc

SEQ ID NO: 1130998 - RNA, 22 nt, Human
cugcugcaggaugggcacucug

SEQ ID NO: 1130999 - RNA, 22 nt, Human
cgugucaucugagccuugggcg

SEQ ID NO: 1131000 - RNA, 22 nt, Human
ggucccaggagaauaggugcaa

SEQ ID NO: 1131001 - RNA, 22 nt, Human
ccagcagcagcguccaaggaga

SEQ ID NO: 1131002 - RNA, 22 nt, Human
cagucccaggguugguucagcu

SEQ ID NO: 1131003 - RNA, 22 nt, Human
cccccaggcucugacacaggag

SEQ ID NO: 1131004 - RNA, 17 nt, Human
ccucccacaccgcccug

SEQ ID NO: 1131005 - RNA, 22 nt, Human
augggaggcagacacuaaguuc

SEQ ID NO: 1131006 - RNA, 22 nt, Human
uggcugaauaauauucuguugu

SEQ ID NO: 1131007 - RNA, 22 nt, Human
gcauuucuuccuggugugagcc

SEQ ID NO: 1131008 - RNA, 22 nt, Human
caggucagagucccccuguccu

SEQ ID NO: 1131009 - RNA, 22 nt, Human
uuuccauauuuggucuuuggga

SEQ ID NO: 1131010 - RNA, 22 nt, Human
aggggcugggacagagccaagc

SEQ ID NO: 1131011 - RNA, 22 nt, Human
aaagacugguguguuacauaua

SEQ ID NO: 1131012 - RNA, 22 nt, Human
uacuuuuugucucuuugaaugu

SEQ ID NO: 1131013 - RNA, 22 nt, Human
cagggucuuauaaggccaauuu

SEQ ID NO: 1131014 - RNA, 22 nt, Human
caguggaggcucaagugugcuu

SEQ ID NO: 1131015 - RNA, 22 nt, Human
ccaggagcaaagaucacuggga

SEQ ID NO: 1131016 - RNA, 22 nt, Human
acagccuggacuggcucucugc

SEQ ID NO: 1131017 - RNA, 22 nt, Human
uggagcauauucuggagcuugg

SEQ ID NO: 1131018 - RNA, 22 nt, Human
aaggccaggacaccaggggacu

SEQ ID NO: 1131019 - RNA, 22 nt, Human
acagaauuaaugaaaauuacaa

SEQ ID NO: 1131020 - RNA, 21 nt, Human
uuguucuuccagaagcaaagu

SEQ ID NO: 1131021 - RNA, 22 nt, Human
ccugccagcccgcguucaugcc

SEQ ID NO: 1131022 - RNA, 22 nt, Human
uccagccaugacucggacagug

SEQ ID NO: 1131023 - RNA, 22 nt, Human
cuguccuguagcuccaucaguc

SEQ ID NO: 1131024 - RNA, 22 nt, Human
aggcugcagugcagguaggauu

SEQ ID NO: 1131025 - RNA, 22 nt, Human
aggcuuccuggaggaagaggua

SEQ ID NO: 1131026 - RNA, 22 nt, Human
gggccugugcacaguucuguua

SEQ ID NO: 1131027 - RNA, 21 nt, Human
gagacagacuuucguccccug

SEQ ID NO: 1131028 - RNA, 22 nt, Human
cuagagggauguuaggauagca

SEQ ID NO: 1131029 - RNA, 21 nt, Human
acaguucaugauaacuccauc

SEQ ID NO: 1131030 - RNA, 22 nt, Human
acagggccagccugggaccugg

SEQ ID NO: 1131031 - RNA, 22 nt, Human
cugccuggguucaaguccuguu

SEQ ID NO: 1131032 - RNA, 22 nt, Human
ccucccuggccagagcagcagc

SEQ ID NO: 1131033 - RNA, 22 nt, Human
agcucccagaagccagagucgg

SEQ ID NO: 1131034 - RNA, 22 nt, Human
acacaguaccccaaggcugggc

SEQ ID NO: 1131035 - RNA, 22 nt, Human
uuauuuauuguguaccuacugu

SEQ ID NO: 1131036 - RNA, 22 nt, Human
augacagaggagugcaggugau

SEQ ID NO: 1131037 - RNA, 22 nt, Human
gcagagccugugucugagcaaa

SEQ ID NO: 1131038 - RNA, 20 nt, Human
gccugcagagaaggucagag

SEQ ID NO: 1131039 - RNA, 22 nt, Human
ggcugccuccugcugggcugga

SEQ ID NO: 1131040 - RNA, 22 nt, Human
auguagcagaagauguuuuccu

SEQ ID NO: 1131041 - RNA, 22 nt, Human
acugagcugugacaaugcuuaa

SEQ ID NO: 1131042 - RNA, 22 nt, Human
uggcuucuuagaccaguggccu

SEQ ID NO: 1131043 - RNA, 20 nt, Human
uggcccuguuuucuccaggc

SEQ ID NO: 1131044 - RNA, 21 nt, Human
ggccucugccuugccccacuc

SEQ ID NO: 1131045 - RNA, 22 nt, Human
gcuuccuggagggagagagcug

SEQ ID NO: 1131046 - RNA, 22 nt, Human
gucucagagagcuacucucuua

SEQ ID NO: 1131047 - RNA, 22 nt, Human
auuucagcccaguaugagcccc

SEQ ID NO: 1131048 - RNA, 22 nt, Human
uucuuccucagcagggcugccu

SEQ ID NO: 1131049 - RNA, 22 nt, Human
uagagaaauaagcuuugccuug

SEQ ID NO: 1131050 - RNA, 22 nt, Human
aucaguuuggugcuuucaguga

SEQ ID NO: 1131051 - RNA, 22 nt, Human
cagcucccagagugaccagcag

SEQ ID NO: 1131052 - RNA, 21 nt, Human
agcagcugcaguuucuaucug

SEQ ID NO: 1131053 - RNA, 22 nt, Human
cagagcugcuucccaguuugug

SEQ ID NO: 1131054 - RNA, 22 nt, Human
ugguccugccccgugcacagag

SEQ ID NO: 1131055 - RNA, 22 nt, Human
acagugaaugcccaagaaaagu

SEQ ID NO: 1131056 - RNA, 21 nt, Human
uggcucugagccucauggcug

SEQ ID NO: 1131057 - RNA, 22 nt, Human
ccaguccagugccaugcauggc

SEQ ID NO: 1131058 - RNA, 22 nt, Human
gagagcugcagccgagaggggg

SEQ ID NO: 1131059 - RNA, 22 nt, Human
cagagccagcuguccuuggcau

SEQ ID NO: 1131060 - RNA, 22 nt, Human
cucucucuucuuuguaggggcc

SEQ ID NO: 1131061 - RNA, 19 nt, Human
uguguaaagucugugguca

SEQ ID NO: 1131062 - RNA, 22 nt, Human
gcagauggacuguaugaccuga

SEQ ID NO: 1131063 - RNA, 22 nt, Human
augcccgauaccuaguuaacuc

SEQ ID NO: 1131064 - RNA, 22 nt, Human
cuuucauucuuagauauuagug

SEQ ID NO: 1131065 - RNA, 22 nt, Human
ucagggcauacucuucaagguc

SEQ ID NO: 1131066 - RNA, 22 nt, Human
cccuggagcugcuugcauguug

SEQ ID NO: 1131067 - RNA, 22 nt, Human
ugagccuggcggaagcagcgug

SEQ ID NO: 1131068 - RNA, 19 nt, Human
acccucucagugccugagg

SEQ ID NO: 1131069 - RNA, 22 nt, Human
gggaucagaaacauagcccuga

SEQ ID NO: 1131070 - RNA, 22 nt, Human
cuggagagggagcccuggcagu

SEQ ID NO: 1131071 - RNA, 22 nt, Human
uguaguaagugcgcaauaaaua

SEQ ID NO: 1131072 - RNA, 22 nt, Human
uuccauaaucaccuuauucuuu

SEQ ID NO: 1131073 - RNA, 21 nt, Human
uggccucccacacuuccaugg

SEQ ID NO: 1131074 - RNA, 22 nt, Human
cugccgagugggucaugaggca

SEQ ID NO: 1131075 - RNA, 22 nt, Human
gagagugaggccugggaaucua

SEQ ID NO: 1131076 - RNA, 22 nt, Human
guauuugauagauuucaaagga

SEQ ID NO: 1131077 - RNA, 17 nt, Human
ggccuugggcugcucuu

SEQ ID NO: 1131078 - RNA, 22 nt, Human
ucuguccucuuugaagcugcuc

SEQ ID NO: 1131079 - RNA, 22 nt, Human
gagcagcugguaggugaaccca

SEQ ID NO: 1131080 - RNA, 22 nt, Human
aagccuuccugagugcaaggcc

SEQ ID NO: 1131081 - RNA, 18 nt, Human
uccauuguucuacuguga

SEQ ID NO: 1131082 - RNA, 22 nt, Human
gcagcaggagaguuuguccugc

SEQ ID NO: 1131083 - RNA, 22 nt, Human
ucugguuagccaauaaugccaa

SEQ ID NO: 1131084 - RNA, 22 nt, Human
gcaggccugacuguagggggca

SEQ ID NO: 1131085 - RNA, 19 nt, Human
acauuuagaauguacuugc

SEQ ID NO: 1131086 - RNA, 22 nt, Human
ucacaugcuugaggaaagaaaa

SEQ ID NO: 1131087 - RNA, 22 nt, Human
cugggcucagaugagaggaagg

SEQ ID NO: 1131088 - RNA, 22 nt, Human
cccauuuagauaacaguucaaa

SEQ ID NO: 1131089 - RNA, 22 nt, Human
ggagacagugacuuagagacug

SEQ ID NO: 1131090 - RNA, 22 nt, Human
agucucagaaaagaagcaugga

SEQ ID NO: 1131091 - RNA, 22 nt, Human
gcugccugggcaggaggcgcug

SEQ ID NO: 1131092 - RNA, 22 nt, Human
ccucuugccaaucagcuacaga

SEQ ID NO: 1131093 - RNA, 22 nt, Human
uggcagaguuauggguauuuau

SEQ ID NO: 1131094 - RNA, 22 nt, Human
ugcugguggagaaaguggaggu

SEQ ID NO: 1131095 - RNA, 22 nt, Human
agggcagauggaacuuccccga

SEQ ID NO: 1131096 - RNA, 22 nt, Human
gguacaaggagugaagguuugg

SEQ ID NO: 1131097 - RNA, 22 nt, Human
agggaggauaguagucaguuua

SEQ ID NO: 1131098 - RNA, 22 nt, Human
uaagaacaguguuucaucucua

SEQ ID NO: 1131099 - RNA, 22 nt, Human
ccugagaccaaguugcagccau

SEQ ID NO: 1131100 - RNA, 22 nt, Human
cacugcuuuuuuggcuauguac

SEQ ID NO: 1131101 - RNA, 22 nt, Human
caggcuugauuauucagacaau

SEQ ID NO: 1131102 - RNA, 22 nt, Human
uguuucagucccuguguucaau

SEQ ID NO: 1131103 - RNA, 22 nt, Human
caggcugucugaauggaggccc

SEQ ID NO: 1131104 - RNA, 22 nt, Human
gcuguauuuauuuucuaggguu

SEQ ID NO: 1131105 - RNA, 22 nt, Human
gaggcagcaaaauauaucauaa

SEQ ID NO: 1131106 - RNA, 22 nt, Human
ugaacccaggagguugcaguga

SEQ ID NO: 1131107 - RNA, 22 nt, Human
ggcagauggagaagcagcaggu

SEQ ID NO: 1131108 - RNA, 22 nt, Human
cuccagggagcuguggagguuu

SEQ ID NO: 1131109 - RNA, 22 nt, Human
uguuaacaucuuggacucguga

SEQ ID NO: 1131110 - RNA, 22 nt, Human
gcacagaaguaaaauacaaguc

SEQ ID NO: 1131111 - RNA, 22 nt, Human
ggcugcagagcugggugggccu

SEQ ID NO: 1131112 - RNA, 20 nt, Human
uuuuuccuucucuacaggca

SEQ ID NO: 1131113 - RNA, 18 nt, Human
aguccaugcauggcuaua

SEQ ID NO: 1131114 - RNA, 22 nt, Human
uggcucaggaucuaagcagaau

SEQ ID NO: 1131115 - RNA, 22 nt, Human
uuuccucuccggggccuccagg

SEQ ID NO: 1131116 - RNA, 22 nt, Human
ugggcugccagcucuccagaug

SEQ ID NO: 1131117 - RNA, 22 nt, Human
uccugcagaccucagucagguc

SEQ ID NO: 1131118 - RNA, 22 nt, Human
ugaugcugcugggaguggugcu

SEQ ID NO: 1131119 - RNA, 22 nt, Human
ucuucacaccgggcagcaggaa

SEQ ID NO: 1131120 - RNA, 22 nt, Human
auguguguguuuaauccucaaa

SEQ ID NO: 1131121 - RNA, 21 nt, Human
cagagcagcguucugcugugg

SEQ ID NO: 1131122 - RNA, 22 nt, Human
ugaacagauggcccagcagagg

SEQ ID NO: 1131123 - RNA, 20 nt, Human
gacaucauguacacauugcc

SEQ ID NO: 1131124 - RNA, 22 nt, Human
acacagggcggaaagcaugaga

SEQ ID NO: 1131125 - RNA, 22 nt, Human
agggagcucaguuggaagcggu

SEQ ID NO: 1131126 - RNA, 22 nt, Human
gcagguguggaguggggugagc

SEQ ID NO: 1131127 - RNA, 22 nt, Human
gcuggccucuggagaagggcuu

SEQ ID NO: 1131128 - RNA, 22 nt, Human
cugggcuggcgcauccgacacg

SEQ ID NO: 1131129 - RNA, 22 nt, Human
cugggcagugcagcuauagaac

SEQ ID NO: 1131130 - RNA, 22 nt, Human
cacugggcguguccugggugag

SEQ ID NO: 1131131 - RNA, 22 nt, Human
cagcucaaguuucccaggucag

SEQ ID NO: 1131132 - RNA, 22 nt, Human
aagucacacuagacaacugagg

SEQ ID NO: 1131133 - RNA, 19 nt, Human
ggcuccuguggcugcagcc

SEQ ID NO: 1131134 - RNA, 22 nt, Human
gcugcucugaaaaugacuguug

SEQ ID NO: 1131135 - RNA, 22 nt, Human
ggauaagaaaauuguaauaacu

SEQ ID NO: 1131136 - RNA, 22 nt, Human
aguguugucaaacggcucagca

SEQ ID NO: 1131137 - RNA, 22 nt, Human
ucaggggcuugaggugcauguc

SEQ ID NO: 1131138 - RNA, 22 nt, Human
caggagacaaguuagcagcuga

SEQ ID NO: 1131139 - RNA, 22 nt, Human
agaaaucagaacccugaaguuc

SEQ ID NO: 1131140 - RNA, 22 nt, Human
ucucccaggcugcccuguggac

SEQ ID NO: 1131141 - RNA, 22 nt, Human
ccagcauggcaccugagaugag

SEQ ID NO: 1131142 - RNA, 22 nt, Human
uccaggcuagguuuacaggaca

SEQ ID NO: 1131143 - RNA, 22 nt, Human
uuagauaauguagagauaugag

SEQ ID NO: 1131144 - RNA, 22 nt, Human
cuggcuccuccaaggccuggag

SEQ ID NO: 1131145 - RNA, 22 nt, Human
gaugggggccagggccugcuuu

SEQ ID NO: 1131146 - RNA, 20 nt, Human
auaaaauaacugccacaaga

SEQ ID NO: 1131147 - RNA, 22 nt, Human
ggcagagguagcuggaaccagg

SEQ ID NO: 1131148 - RNA, 22 nt, Human
uauuucuuguuauucucguuga

SEQ ID NO: 1131149 - RNA, 22 nt, Human
cuggcucauuuuagcaucaggu

SEQ ID NO: 1131150 - RNA, 22 nt, Human
ccuggcaguuuugcccaggauu

SEQ ID NO: 1131151 - RNA, 21 nt, Human
caugaagccgguucccuguuu

SEQ ID NO: 1131152 - RNA, 22 nt, Human
auuauguagcuaaaaauugugu

SEQ ID NO: 1131153 - RNA, 22 nt, Human
cuucaagauauuucuagaauca

SEQ ID NO: 1131154 - RNA, 22 nt, Human
ggcugagccuggagcaucuggu

SEQ ID NO: 1131155 - RNA, 22 nt, Human
ggugggcaggcgaggcccaggu

SEQ ID NO: 1131156 - RNA, 22 nt, Human
gagcagcuagauaaagcccuuc

SEQ ID NO: 1131157 - RNA, 22 nt, Human
uggggcugucccgguuuggcga

SEQ ID NO: 1131158 - RNA, 22 nt, Human
cccagcucaucaggagccgccc

SEQ ID NO: 1131159 - RNA, 22 nt, Human
uguguacuugaaagggcagguc

SEQ ID NO: 1131160 - RNA, 23 nt, Human
aaaugcagggucgcagguuacag

SEQ ID NO: 1131161 - RNA, 22 nt, Human
gaugugugcuuuucgcaguguc

SEQ ID NO: 1131162 - RNA, 22 nt, Human
uggcagugccccuugaccagug

SEQ ID NO: 1131163 - RNA, 22 nt, Human
ggcucaggccagaccacgacuc

SEQ ID NO: 1131164 - RNA, 22 nt, Human
augagcuguaagguggcuuccu

SEQ ID NO: 1131165 - RNA, 22 nt, Human
gcugcagcuguaggacacaauu

SEQ ID NO: 1131166 - RNA, 22 nt, Human
cugagaaggaagccuccacucu

SEQ ID NO: 1131167 - RNA, 22 nt, Human
cucccuggcuuuguccugaggc

SEQ ID NO: 1131168 - RNA, 22 nt, Human
agcagggcucuguggagggugg

SEQ ID NO: 1131169 - RNA, 22 nt, Human
ggcccugugguuuugcaaaguc

SEQ ID NO: 1131170 - RNA, 22 nt, Human
caggccaggcugcauuugcccc

SEQ ID NO: 1131171 - RNA, 22 nt, Human
aaaugcacagagccuuagagau

SEQ ID NO: 1131172 - RNA, 22 nt, Human
cagcagcaaaucuagaagagga

SEQ ID NO: 1131173 - RNA, 22 nt, Human
guccagggaaauagcgacaggg

SEQ ID NO: 1131174 - RNA, 23 nt, Human
uggcucagcuaguuuuccauuuc

SEQ ID NO: 1131175 - RNA, 22 nt, Human
ucaguuuuuaagaguuaugcga

SEQ ID NO: 1131176 - RNA, 22 nt, Human
uaugaagauauaucugaucucu

SEQ ID NO: 1131177 - RNA, 22 nt, Human
gccaggugcauggcugagucuc

SEQ ID NO: 1131178 - RNA, 22 nt, Human
gccagccuucuguggccugcaa

SEQ ID NO: 1131179 - RNA, 22 nt, Human
uauaagccucgaugguaagccu

SEQ ID NO: 1131180 - RNA, 22 nt, Human
cagaggccaccuguggccacug

SEQ ID NO: 1131181 - RNA, 22 nt, Human
gugcucuccuggcugcccugac

SEQ ID NO: 1131182 - RNA, 23 nt, Human
uggcucucucagugcugcagagg

SEQ ID NO: 1131183 - RNA, 22 nt, Human
uggccugggucacaccaggguc

SEQ ID NO: 1131184 - RNA, 22 nt, Human
agaagccaauucugugugaguc

SEQ ID NO: 1131185 - RNA, 22 nt, Human
gaaaugugcagaauguguuaga

SEQ ID NO: 1131186 - RNA, 22 nt, Human
ccugucuguaucgguucagagu

SEQ ID NO: 1131187 - RNA, 22 nt, Human
accugccuauggagccacaugg

SEQ ID NO: 1131188 - RNA, 22 nt, Human
ucaaacuguuuacagugagaua

SEQ ID NO: 1131189 - RNA, 22 nt, Human
uggcucuggcgugaagcccaga

SEQ ID NO: 1131190 - RNA, 22 nt, Human
aaaucaguuagugguaggauug

SEQ ID NO: 1131191 - RNA, 22 nt, Human
cccaggagguggagcuugcagu

SEQ ID NO: 1131192 - RNA, 20 nt, Human
auguagaugaaagcaaaggc

SEQ ID NO: 1131193 - RNA, 20 nt, Human
ugggagcuggugaggucuca

SEQ ID NO: 1131194 - RNA, 22 nt, Human
augggcagcagcugccauucau

SEQ ID NO: 1131195 - RNA, 22 nt, Human
cucaggcccacagcagacccac

SEQ ID NO: 1131196 - RNA, 22 nt, Human
agcuggagaucaugcugauacu

SEQ ID NO: 1131197 - RNA, 22 nt, Human
ccagugggugcugggcucugcc

SEQ ID NO: 1131198 - RNA, 22 nt, Human
guggaggagaggcgccuugcgg

SEQ ID NO: 1131199 - RNA, 22 nt, Human
ucugcuguaaagaauuucugcc

SEQ ID NO: 1131200 - RNA, 22 nt, Human
ucagccagguaauguggagaug

SEQ ID NO: 1131201 - RNA, 22 nt, Human
cuuaacagauacaucugugguu

SEQ ID NO: 1131202 - RNA, 21 nt, Human
ggugggcacaggagagcagag

SEQ ID NO: 1131203 - RNA, 22 nt, Human
uauuauguagaguaaggguuaa

SEQ ID NO: 1131204 - RNA, 17 nt, Human
cccagagaugcugccuu

SEQ ID NO: 1131205 - RNA, 17 nt, Human
uguggccuucugagcuu

SEQ ID NO: 1131206 - RNA, 22 nt, Human
ucucccacuggccuuguaugau

SEQ ID NO: 1131207 - RNA, 22 nt, Human
ggcagagcuugcagugagccga

SEQ ID NO: 1131208 - RNA, 22 nt, Human
ccuggcuccugccucugcaggg

SEQ ID NO: 1131209 - RNA, 22 nt, Human
uuucauuacguguuugacuugu

SEQ ID NO: 1131210 - RNA, 18 nt, Human
ugggauggagaguaacug

SEQ ID NO: 1131211 - RNA, 22 nt, Human
ucuccuuuaagauuuccucagg

SEQ ID NO: 1131212 - RNA, 21 nt, Human
aucagcaaaugccugucuccc

SEQ ID NO: 1131213 - RNA, 22 nt, Human
cucagaguggggcucccugagg

SEQ ID NO: 1131214 - RNA, 22 nt, Human
ugguccaggguguaguacagag

SEQ ID NO: 1131215 - RNA, 20 nt, Human
gcugaccccugcugucaugc

SEQ ID NO: 1131216 - RNA, 22 nt, Human
cauguguugucucauuuaaucc

SEQ ID NO: 1131217 - RNA, 22 nt, Human
agcagcaggagccgugggguga

SEQ ID NO: 1131218 - RNA, 20 nt, Human
uuucagugguuugugccuag

SEQ ID NO: 1131219 - RNA, 22 nt, Human
acacaggggcucggcugggugc

SEQ ID NO: 1131220 - RNA, 22 nt, Human
ccucugagaccagcucugcacc

SEQ ID NO: 1131221 - RNA, 21 nt, Human
uggcagaguugaguaguuaug

SEQ ID NO: 1131222 - RNA, 22 nt, Human
uggagcagcuaagccucugaga

SEQ ID NO: 1131223 - RNA, 22 nt, Human
uucaaucauuuuuacauagucc

SEQ ID NO: 1131224 - RNA, 22 nt, Human
ggccuucacgugaccuggcgug

SEQ ID NO: 1131225 - RNA, 22 nt, Human
cccuggcagaaugucucugggc

SEQ ID NO: 1131226 - RNA, 22 nt, Human
cacagccugcugcacucaagaa

SEQ ID NO: 1131227 - RNA, 22 nt, Human
aagugacaaaaggguauccaaa

SEQ ID NO: 1131228 - RNA, 22 nt, Human
aagaacauuuuguagaaugaca

SEQ ID NO: 1131229 - RNA, 21 nt, Human
agcucagccgggcacaguggc

SEQ ID NO: 1131230 - RNA, 22 nt, Human
acagaaagaagguguauuugag

SEQ ID NO: 1131231 - RNA, 22 nt, Human
ucccagagucagagguggggcc

SEQ ID NO: 1131232 - RNA, 22 nt, Human
cagagggcucaguccugcugga

SEQ ID NO: 1131233 - RNA, 22 nt, Human
ggagccugacagugcccagcau

SEQ ID NO: 1131234 - RNA, 22 nt, Human
aacagaauugcugcugccaaug

SEQ ID NO: 1131235 - RNA, 22 nt, Human
cugggcugcgggcgccccucca

SEQ ID NO: 1131236 - RNA, 22 nt, Human
uaaguccaccucauucuucagc

SEQ ID NO: 1131237 - RNA, 22 nt, Human
uagacacauccguggaagcuuc

SEQ ID NO: 1131238 - RNA, 22 nt, Human
agagccacugggagacagagca

SEQ ID NO: 1131239 - RNA, 18 nt, Human
uugagggaggggcagagu

SEQ ID NO: 1131240 - RNA, 21 nt, Human
augacagaugcugcagaucgu

SEQ ID NO: 1131241 - RNA, 22 nt, Human
cuccucacuuuccagacugggc

SEQ ID NO: 1131242 - RNA, 22 nt, Human
acaaaugccauauauaaauucu

SEQ ID NO: 1131243 - RNA, 21 nt, Human
gcaugccugcaucuuaguguu

SEQ ID NO: 1131244 - RNA, 18 nt, Human
auccuugaugagaggucu

SEQ ID NO: 1131245 - RNA, 22 nt, Human
gcagggcucauucuaguacaau

SEQ ID NO: 1131246 - RNA, 22 nt, Human
cuggcagguccagcuggacuca

SEQ ID NO: 1131247 - RNA, 22 nt, Human
auuguaucuugucauuaugcau

SEQ ID NO: 1131248 - RNA, 22 nt, Human
gggcagaggcucuggcccaucc

SEQ ID NO: 1131249 - RNA, 22 nt, Human
gauacauuuuaucuccuaacag

SEQ ID NO: 1131250 - RNA, 22 nt, Human
ucacagacaauuguuuuggugu

SEQ ID NO: 1131251 - RNA, 20 nt, Human
ucagggcaugggacagcccc

SEQ ID NO: 1131252 - RNA, 22 nt, Human
ucacuuauugcucaucucaugc

SEQ ID NO: 1131253 - RNA, 22 nt, Human
caggccuggggcuggcuuccag

SEQ ID NO: 1131254 - RNA, 22 nt, Human
ucagccagugccuugaucuugc

SEQ ID NO: 1131255 - RNA, 22 nt, Human
ccugccagauccccugagcuga

SEQ ID NO: 1131256 - RNA, 22 nt, Human
aagaguuuucuauaaucuuggc

SEQ ID NO: 1131257 - RNA, 22 nt, Human
gacagccaugcacuucugcugu

SEQ ID NO: 1131258 - RNA, 22 nt, Human
gcacugcaucuacuggcaagua

SEQ ID NO: 1131259 - RNA, 22 nt, Human
ggagugacucacagcugggaca

SEQ ID NO: 1131260 - RNA, 22 nt, Human
aagcaauauacugauaugauua

SEQ ID NO: 1131261 - RNA, 22 nt, Human
ugagagagccugaaucucuuac

SEQ ID NO: 1131262 - RNA, 19 nt, Human
cgcaggagccgaggugacc

SEQ ID NO: 1131263 - RNA, 22 nt, Human
gagcagcuggacaggccucccu

SEQ ID NO: 1131264 - RNA, 19 nt, Human
uggcugggcgugccuccgu

SEQ ID NO: 1131265 - RNA, 22 nt, Human
ugcaccauguaaguggccacgu

SEQ ID NO: 1131266 - RNA, 22 nt, Human
ucagggcagccuaaggcaccuc

SEQ ID NO: 1131267 - RNA, 18 nt, Human
ugagagugugugcucuug

SEQ ID NO: 1131268 - RNA, 22 nt, Human
uggccucugcaauggauucacc

SEQ ID NO: 1131269 - RNA, 22 nt, Human
agggcugcugaggaagccuugc

SEQ ID NO: 1131270 - RNA, 21 nt, Human
acagccugucaucucaugguc

SEQ ID NO: 1131271 - RNA, 21 nt, Human
uggcucuguucaauauaugga

SEQ ID NO: 1131272 - RNA, 22 nt, Human
agagggaucacccuguuucugg

SEQ ID NO: 1131273 - RNA, 22 nt, Human
cgcagaagagguugucuagucc

SEQ ID NO: 1131274 - RNA, 22 nt, Human
gccugugacucgucuugggcca

SEQ ID NO: 1131275 - RNA, 22 nt, Human
uugaagcauuguggcuuguauu

SEQ ID NO: 1131276 - RNA, 22 nt, Human
cagacagcugcuuucuugcugu

SEQ ID NO: 1131277 - RNA, 22 nt, Human
gauggcagucaaccaggugagg

SEQ ID NO: 1131278 - RNA, 22 nt, Human
aacacaaagaagcugcaggauc

SEQ ID NO: 1131279 - RNA, 22 nt, Human
agcuggaggauaacucacuucu

SEQ ID NO: 1131280 - RNA, 22 nt, Human
cuggcaggagcauucacagagg

SEQ ID NO: 1131281 - RNA, 23 nt, Human
ccucccaccuauuucacuuucuu

SEQ ID NO: 1131282 - RNA, 22 nt, Human
ccuccaggauaagucagggccu

SEQ ID NO: 1131283 - RNA, 21 nt, Human
agcugcuuucagcuccuagag

SEQ ID NO: 1131284 - RNA, 22 nt, Human
ucagcugaguucuagagcacuc

SEQ ID NO: 1131285 - RNA, 22 nt, Human
uggagccaaggccaguucucag

SEQ ID NO: 1131286 - RNA, 22 nt, Human
agucucugcaugccugcugugc

SEQ ID NO: 1131287 - RNA, 22 nt, Human
gagccagcgccuugccucuggg

SEQ ID NO: 1131288 - RNA, 22 nt, Human
ccacacagucaguuuccaagaa

SEQ ID NO: 1131289 - RNA, 22 nt, Human
aaugaugggaaggagaaaagca

SEQ ID NO: 1131290 - RNA, 22 nt, Human
gggcugcuuccuggggaaugcu

SEQ ID NO: 1131291 - RNA, 21 nt, Human
agguggggcugcaccucugcu

SEQ ID NO: 1131292 - RNA, 22 nt, Human
ucucauguauugcccuggugug

SEQ ID NO: 1131293 - RNA, 22 nt, Human
agugacugggcagggcagggcc

SEQ ID NO: 1131294 - RNA, 22 nt, Human
ggaguucacugugcaggcucug

SEQ ID NO: 1131295 - RNA, 22 nt, Human
gccuuccuuuuaccaccagcca

SEQ ID NO: 1131296 - RNA, 22 nt, Human
ugagagugguucagcucagaag

SEQ ID NO: 1131297 - RNA, 22 nt, Human
auccuugagccuuaucuuuugu

SEQ ID NO: 1131298 - RNA, 22 nt, Human
agugguaacuaaguccugcuua

SEQ ID NO: 1131299 - RNA, 22 nt, Human
cuggccaggcuugggacagaca

SEQ ID NO: 1131300 - RNA, 22 nt, Human
uggaggugagugugguacagca

SEQ ID NO: 1131301 - RNA, 22 nt, Human
agugagggaugaagaacugcgg

SEQ ID NO: 1131302 - RNA, 22 nt, Human
ccugugucagccccugccucca

SEQ ID NO: 1131303 - RNA, 22 nt, Human
ggagcugcuuugaucugaagaa

SEQ ID NO: 1131304 - RNA, 22 nt, Human
ccacagggcacaagggagguug

SEQ ID NO: 1131305 - RNA, 22 nt, Human
uggugcugacaguucugagugc

SEQ ID NO: 1131306 - RNA, 22 nt, Human
ugcaggcaggggaugagcagcc

SEQ ID NO: 1131307 - RNA, 22 nt, Human
cucugagaggugagaagcagca

SEQ ID NO: 1131308 - RNA, 22 nt, Human
cauuucuguucucuuccuguac

SEQ ID NO: 1131309 - RNA, 23 nt, Human
ggacagggcccugcccuauggcc

SEQ ID NO: 1131310 - RNA, 22 nt, Human
ggaagggcaaaagagaugaacu

SEQ ID NO: 1131311 - RNA, 22 nt, Human
cugccuggucucaggcaugggg

SEQ ID NO: 1131312 - RNA, 22 nt, Human
auguguguaugugccuauaucu

SEQ ID NO: 1131313 - RNA, 22 nt, Human
ccugcagguccccggaugcgca

SEQ ID NO: 1131314 - RNA, 22 nt, Human
cacugcagcaccaugcagggcu

SEQ ID NO: 1131315 - RNA, 22 nt, Human
ggcaguggguggaucucaggga

SEQ ID NO: 1131316 - RNA, 22 nt, Human
uggucaggcugcucugcggcgu

SEQ ID NO: 1131317 - RNA, 22 nt, Human
ucuggccuacuggaguccauga

SEQ ID NO: 1131318 - RNA, 18 nt, Human
ccuggagcuccacagcaa

SEQ ID NO: 1131319 - RNA, 22 nt, Human
cagagcagguaucuuuggugaa

SEQ ID NO: 1131320 - RNA, 22 nt, Human
ucgugucagaucagagguuccu

SEQ ID NO: 1131321 - RNA, 22 nt, Human
gccaggcugcuggcugcugucc

SEQ ID NO: 1131322 - RNA, 22 nt, Human
gccucugcacuguggcacacca

SEQ ID NO: 1131323 - RNA, 22 nt, Human
gcugccugccuugccuggagga

SEQ ID NO: 1131324 - RNA, 22 nt, Human
ucugagcuuuuauuaucaaccu

SEQ ID NO: 1131325 - RNA, 22 nt, Human
aaguuacaggagaaagagauca

SEQ ID NO: 1131326 - RNA, 22 nt, Human
gcugucucggggcuuucuccug

SEQ ID NO: 1131327 - RNA, 22 nt, Human
aaucacaauuacuuuugcacca

SEQ ID NO: 1131328 - RNA, 22 nt, Human
ccagcuggcaggagagucaggg

SEQ ID NO: 1131329 - RNA, 22 nt, Human
aaggcacuugcccagagcugca

SEQ ID NO: 1131330 - RNA, 22 nt, Human
cuugaaagcuuugcgucuucua

SEQ ID NO: 1131331 - RNA, 22 nt, Human
cccaggaguuugaguucagcau

SEQ ID NO: 1131332 - RNA, 20 nt, Human
aaaguguaagcauauaauua

SEQ ID NO: 1131333 - RNA, 22 nt, Human
uguuacuuaucucacgugaugc

SEQ ID NO: 1131334 - RNA, 22 nt, Human
uccugggaagagaccugagcau

SEQ ID NO: 1131335 - RNA, 22 nt, Human
cacugaaucucaaggggagggu

SEQ ID NO: 1131336 - RNA, 22 nt, Human
ugucccagcagcuggguucucu

SEQ ID NO: 1131337 - RNA, 21 nt, Human
uguucacauggagcagaaugu

SEQ ID NO: 1131338 - RNA, 22 nt, Human
gagcacagccaaaguaagaagg

SEQ ID NO: 1131339 - RNA, 22 nt, Human
ugggugaggaugaugaggcagc

SEQ ID NO: 1131340 - RNA, 22 nt, Human
cugccuggagcauucugaaggu

SEQ ID NO: 1131341 - RNA, 22 nt, Human
ucaguuuucauuucaugagcag

SEQ ID NO: 1131342 - RNA, 22 nt, Human
gagccugagugcugccuccccu

SEQ ID NO: 1131343 - RNA, 20 nt, Human
cccugcagccaugggagugg

SEQ ID NO: 1131344 - RNA, 22 nt, Human
acaggcagcacuaaucucuggu

SEQ ID NO: 1131345 - RNA, 22 nt, Human
ggcuucucucccccagcuccac

SEQ ID NO: 1131346 - RNA, 22 nt, Human
ggcacugaucugauuucccucc

SEQ ID NO: 1131347 - RNA, 22 nt, Human
ucacuguauuugcugaugcaua

SEQ ID NO: 1131348 - RNA, 22 nt, Human
auugaaagauauacuguucuca

SEQ ID NO: 1131349 - RNA, 22 nt, Human
ucacauuuuaucuauuuuaagu

SEQ ID NO: 1131350 - RNA, 22 nt, Human
agcauuuaggagaauuugagaa

SEQ ID NO: 1131351 - RNA, 22 nt, Human
agggagccagaguugggagcuc

SEQ ID NO: 1131352 - RNA, 22 nt, Human
cagaagaauggugucugagcuc

SEQ ID NO: 1131353 - RNA, 22 nt, Human
ggggaugguggcauuuguaaaa

SEQ ID NO: 1131354 - RNA, 22 nt, Human
gggcagccucggugccugcugc

SEQ ID NO: 1131355 - RNA, 19 nt, Human
cuggugcuugagugaguca

SEQ ID NO: 1131356 - RNA, 22 nt, Human
cuuuauguucaguacaaugcuu

SEQ ID NO: 1131357 - RNA, 22 nt, Human
aguaacaagugccaacguuaga

SEQ ID NO: 1131358 - RNA, 22 nt, Human
gaggccuggcugggaggaggug

SEQ ID NO: 1131359 - RNA, 22 nt, Human
uucauucccuuauauuagcauu

SEQ ID NO: 1131360 - RNA, 23 nt, Human
ugagcccaggaggucaaggcugc

SEQ ID NO: 1131361 - RNA, 22 nt, Human
aggcucugcagugcuggaggac

SEQ ID NO: 1131362 - RNA, 22 nt, Human
ugcccaggguggagugcagcgg

SEQ ID NO: 1131363 - RNA, 22 nt, Human
ugcuggccaacaaggcuccaag

SEQ ID NO: 1131364 - RNA, 22 nt, Human
gcucugagaggugcagcaguaa

SEQ ID NO: 1131365 - RNA, 22 nt, Human
gcugccugaagugucuacacug

SEQ ID NO: 1131366 - RNA, 22 nt, Human
ugauuucauaguauauacauga

SEQ ID NO: 1131367 - RNA, 22 nt, Human
auugacaauguauuuguaucug

SEQ ID NO: 1131368 - RNA, 22 nt, Human
ugaagcaguuacuggguguuaa

SEQ ID NO: 1131369 - RNA, 22 nt, Human
aaagauuucagaagccugugcc

SEQ ID NO: 1131370 - RNA, 21 nt, Human
gcacagugccaggcacacagu

SEQ ID NO: 1131371 - RNA, 21 nt, Human
ucccagagugcuugggacugc

SEQ ID NO: 1131372 - RNA, 22 nt, Human
agcaggagcccuuaucaccagg

SEQ ID NO: 1131373 - RNA, 21 nt, Human
ggccuuggcgggggccgaauu

SEQ ID NO: 1131374 - RNA, 22 nt, Human
gagcagcugcagugcagacccu

SEQ ID NO: 1131375 - RNA, 22 nt, Human
uucccaguauuaccuucaggaa

SEQ ID NO: 1131376 - RNA, 22 nt, Human
agaggcuguuacacucccagau

SEQ ID NO: 1131377 - RNA, 22 nt, Human
cagagcuguuacuauucaugaa

SEQ ID NO: 1131378 - RNA, 22 nt, Human
uccuggaggcaaaugaagacuc

SEQ ID NO: 1131379 - RNA, 20 nt, Human
cagagcuguuauggaugaug

SEQ ID NO: 1131380 - RNA, 22 nt, Human
cagccagcuucagauccaagcc

SEQ ID NO: 1131381 - RNA, 22 nt, Human
cauagcaacagcaucaagucaa

SEQ ID NO: 1131382 - RNA, 22 nt, Human
augaagauaagaccaggcugga

SEQ ID NO: 1131383 - RNA, 22 nt, Human
gaugcacuuucuuuucaacagu

SEQ ID NO: 1131384 - RNA, 22 nt, Human
gugcuuuccauccucccugcug

SEQ ID NO: 1131385 - RNA, 22 nt, Human
ucccagaggacuguuggugcua

SEQ ID NO: 1131386 - RNA, 22 nt, Human
gucucccacuuucuggccucuu

SEQ ID NO: 1131387 - RNA, 22 nt, Human
cauuuacauuuaagguuaauau

SEQ ID NO: 1131388 - RNA, 22 nt, Human
gcugcccaggguggagccggcu

SEQ ID NO: 1131389 - RNA, 21 nt, Human
cagaggcugagagggcaaucu

SEQ ID NO: 1131390 - RNA, 22 nt, Human
ugccucugaggaagauuguguu

SEQ ID NO: 1131391 - RNA, 22 nt, Human
gcugaaggaggcucugguacua

SEQ ID NO: 1131392 - RNA, 22 nt, Human
uguacuuccccaaugacagcac

SEQ ID NO: 1131393 - RNA, 22 nt, Human
ucuguaguagguuguaguucuu

SEQ ID NO: 1131394 - RNA, 22 nt, Human
cuggccugcugggugagguccu

SEQ ID NO: 1131395 - RNA, 22 nt, Human
cuggcccagucucagaguguca

SEQ ID NO: 1131396 - RNA, 22 nt, Human
ugagugccugaacauagaguag

SEQ ID NO: 1131397 - RNA, 22 nt, Human
ugagccugggagauggaggcug

SEQ ID NO: 1131398 - RNA, 22 nt, Human
cccagcucuuuuagcggcaucu

SEQ ID NO: 1131399 - RNA, 22 nt, Human
accuuucacgguaucagacauc

SEQ ID NO: 1131400 - RNA, 22 nt, Human
ccaggaggcagaaguugcagug

SEQ ID NO: 1131401 - RNA, 22 nt, Human
ccagucccaucucugucgcuua

SEQ ID NO: 1131402 - RNA, 22 nt, Human
cagaagcauuccagcaaauagu

SEQ ID NO: 1131403 - RNA, 22 nt, Human
aauguuuucugacugcuaacuu

SEQ ID NO: 1131404 - RNA, 21 nt, Human
ugagccaggcugacggcugug

SEQ ID NO: 1131405 - RNA, 22 nt, Human
cugcagcuuuggaaaccuguuu

SEQ ID NO: 1131406 - RNA, 21 nt, Human
uuucugucucugccacuaguu

SEQ ID NO: 1131407 - RNA, 22 nt, Human
cucucccccacagcagccuucu

SEQ ID NO: 1131408 - RNA, 22 nt, Human
ugacagcauaacacuggucuug

SEQ ID NO: 1131409 - RNA, 22 nt, Human
ccuguguggccaggcuggaguc

SEQ ID NO: 1131410 - RNA, 22 nt, Human
aguuaaagucugaaauagagaa

SEQ ID NO: 1131411 - RNA, 19 nt, Human
agguggucuaggcuggaga

SEQ ID NO: 1131412 - RNA, 22 nt, Human
accccaagacaguagaagagaa

SEQ ID NO: 1131413 - RNA, 22 nt, Human
aaaucugggucaagguggagug

SEQ ID NO: 1131414 - RNA, 22 nt, Human
gggaaggagguggcuugaagug

SEQ ID NO: 1131415 - RNA, 22 nt, Human
cccccagccagcagugcucagc

SEQ ID NO: 1131416 - RNA, 22 nt, Human
auuauaaagaacaugugugugg

SEQ ID NO: 1131417 - RNA, 22 nt, Human
cuacauggagaagaaaauucuu

SEQ ID NO: 1131418 - RNA, 22 nt, Human
aggagaguaccauugggccgca

SEQ ID NO: 1131419 - RNA, 22 nt, Human
gagaggcugacuggcuguccug

SEQ ID NO: 1131420 - RNA, 22 nt, Human
ggcugccauaacugauaccaua

SEQ ID NO: 1131421 - RNA, 22 nt, Human
ccagcccuugcugaaggguggc

SEQ ID NO: 1131422 - RNA, 22 nt, Human
gcuggcauuacaggagagaacc

SEQ ID NO: 1131423 - RNA, 22 nt, Human
cucccugggcagauguggcucu

SEQ ID NO: 1131424 - RNA, 22 nt, Human
acagaccaaaaaaggauauugg

SEQ ID NO: 1131425 - RNA, 22 nt, Human
uuccuauuuccaugaaacacaa

SEQ ID NO: 1131426 - RNA, 22 nt, Human
acugcuuacaaaaggaaagaau

SEQ ID NO: 1131427 - RNA, 22 nt, Human
uggccuggugucugcgaggccu

SEQ ID NO: 1131428 - RNA, 22 nt, Human
cauucauuuacuuucaacagcu

SEQ ID NO: 1131429 - RNA, 22 nt, Human
caagggugguauugggagcaua

SEQ ID NO: 1131430 - RNA, 22 nt, Human
aggauccuguauggagaagcug

SEQ ID NO: 1131431 - RNA, 22 nt, Human
gcccucugcacagcucugagca

SEQ ID NO: 1131432 - RNA, 17 nt, Human
gccaaaggguuccaauc

SEQ ID NO: 1131433 - RNA, 22 nt, Human
ugggcacuggaagccugcugug

SEQ ID NO: 1131434 - RNA, 22 nt, Human
cuggcagcuucaggacacucgg

SEQ ID NO: 1131435 - RNA, 22 nt, Human
augguuuguaacccaauacucc

SEQ ID NO: 1131436 - RNA, 22 nt, Human
ucuuaaaaguaugccaauugga

SEQ ID NO: 1131437 - RNA, 22 nt, Human
ucagugucuugaccugggugug

SEQ ID NO: 1131438 - RNA, 22 nt, Human
aggugagugugacugcaagaga

SEQ ID NO: 1131439 - RNA, 23 nt, Human
cucucucuaccaugugaggacac

SEQ ID NO: 1131440 - RNA, 22 nt, Human
guggauggauuuugaggaaugg

SEQ ID NO: 1131441 - RNA, 22 nt, Human
aaaguuucaauagaggaagugg

SEQ ID NO: 1131442 - RNA, 22 nt, Human
agggccuggcgcguggccgccg

SEQ ID NO: 1131443 - RNA, 22 nt, Human
uccaagaagucaucuaaacugu

SEQ ID NO: 1131444 - RNA, 18 nt, Human
aggccagcccugcuacug

SEQ ID NO: 1131445 - RNA, 22 nt, Human
acugugugggccgcucacuggg

SEQ ID NO: 1131446 - RNA, 22 nt, Human
ucuccuuugaaaguuaggacug

SEQ ID NO: 1131447 - RNA, 22 nt, Human
aaaaaugaauucuucaguggca

SEQ ID NO: 1131448 - RNA, 22 nt, Human
ucuugccucuuccccuuuccau

SEQ ID NO: 1131449 - RNA, 22 nt, Human
uaacagaagagcaggcagcccu

SEQ ID NO: 1131450 - RNA, 22 nt, Human
ccagggccaguaagauuggcau

SEQ ID NO: 1131451 - RNA, 22 nt, Human
cuuccuggccauugccauggca

SEQ ID NO: 1131452 - RNA, 22 nt, Human
gcuuccugucccucagccauga

SEQ ID NO: 1131453 - RNA, 22 nt, Human
augcaguagauaggcacuuuua

SEQ ID NO: 1131454 - RNA, 23 nt, Human
ugauuuccagugagucaguggga

SEQ ID NO: 1131455 - RNA, 22 nt, Human
aggaggcccuagagcucuagag

SEQ ID NO: 1131456 - RNA, 22 nt, Human
aagggcagaaagggacgcuuug

SEQ ID NO: 1131457 - RNA, 22 nt, Human
uuagauauguuuuugcuaaugc

SEQ ID NO: 1131458 - RNA, 22 nt, Human
agucaguggcuccgagccuggu

SEQ ID NO: 1131459 - RNA, 22 nt, Human
gccuggagcccaguguggggcu

SEQ ID NO: 1131460 - RNA, 20 nt, Human
gagagcuggggaugaggcug

SEQ ID NO: 1131461 - RNA, 19 nt, Human
aguagcagaaagugcagug

SEQ ID NO: 1131462 - RNA, 22 nt, Human
cagagcuggagggaacccuggc

SEQ ID NO: 1131463 - RNA, 22 nt, Human
gccucugcggagcuguacauca

SEQ ID NO: 1131464 - RNA, 22 nt, Human
gcaggcucuucuuucugcccag

SEQ ID NO: 1131465 - RNA, 22 nt, Human
aagcaucucuauguggagagug

SEQ ID NO: 1131466 - RNA, 22 nt, Human
aaaauacacauacuaggggaaa

SEQ ID NO: 1131467 - RNA, 21 nt, Human
uagaaaucagcuggugccucu

SEQ ID NO: 1131468 - RNA, 22 nt, Human
agucccaguucgguucuuccuc

SEQ ID NO: 1131469 - RNA, 22 nt, Human
aaguccaugaucaagauguggc

SEQ ID NO: 1131470 - RNA, 22 nt, Human
ugagccugcugucgcuggaccc

SEQ ID NO: 1131471 - RNA, 22 nt, Human
gcccucuggcagccuuggcugg

SEQ ID NO: 1131472 - RNA, 19 nt, Human
uuugaauauaaugcagcua

SEQ ID NO: 1131473 - RNA, 22 nt, Human
uucaagauggcaccagugagug

SEQ ID NO: 1131474 - RNA, 22 nt, Human
uaggccagcccuuaguccuguc

SEQ ID NO: 1131475 - RNA, 22 nt, Human
uggaaagacauucagccgcugg

SEQ ID NO: 1131476 - RNA, 22 nt, Human
cauuuacuguugaaucccuagc

SEQ ID NO: 1131477 - RNA, 22 nt, Human
uauucacaggcuggagugaugu

SEQ ID NO: 1131478 - RNA, 18 nt, Human
aagcugcccucaggcagg

SEQ ID NO: 1131479 - RNA, 22 nt, Human
ucucugucugagccuggcagac

SEQ ID NO: 1131480 - RNA, 22 nt, Human
accugccuaucagcugccugcu

SEQ ID NO: 1131481 - RNA, 22 nt, Human
gccugcuguuaacugcaggaau

SEQ ID NO: 1131482 - RNA, 22 nt, Human
ggucagguuuuuaggagugacc

SEQ ID NO: 1131483 - RNA, 22 nt, Human
gcugagggcauguguggcgacu

SEQ ID NO: 1131484 - RNA, 22 nt, Human
agagaagacuuacagccacagu

SEQ ID NO: 1131485 - RNA, 22 nt, Human
ccagcuccagguagaugggcag

SEQ ID NO: 1131486 - RNA, 22 nt, Human
guccauggcauuuccgucacau

SEQ ID NO: 1131487 - RNA, 22 nt, Human
cagcaggcagccauuucacugu

SEQ ID NO: 1131488 - RNA, 22 nt, Human
gggcagcagagcccugccgagu

SEQ ID NO: 1131489 - RNA, 22 nt, Human
augggcuguccuaguccagccc

SEQ ID NO: 1131490 - RNA, 22 nt, Human
gcagccccaggagacgcccagg

SEQ ID NO: 1131491 - RNA, 22 nt, Human
gcuguggccaacaaaccacuuu

SEQ ID NO: 1131492 - RNA, 22 nt, Human
gcaugcugcaccagagccucuc

SEQ ID NO: 1131493 - RNA, 22 nt, Human
cuguggagcuuguggcaguggg

SEQ ID NO: 1131494 - RNA, 22 nt, Human
cagcucccgccaucgggaggca

SEQ ID NO: 1131495 - RNA, 22 nt, Human
uuuuuccuagugcuuucuggua

SEQ ID NO: 1131496 - RNA, 22 nt, Human
aggucauuccuugucuucuugc

SEQ ID NO: 1131497 - RNA, 22 nt, Human
cucaggauuuacuaauuucaag

SEQ ID NO: 1131498 - RNA, 18 nt, Human
gcugucugaggucugagg

SEQ ID NO: 1131499 - RNA, 17 nt, Human
ggaaaaggaugauacag

SEQ ID NO: 1131500 - RNA, 22 nt, Human
ccuggccuuaagggcagggagc

SEQ ID NO: 1131501 - RNA, 23 nt, Human
aggcagagccaaggucaaaaccc

SEQ ID NO: 1131502 - RNA, 22 nt, Human
gugugugccaucaagagcuuuc

SEQ ID NO: 1131503 - RNA, 22 nt, Human
cugccucuugacagaucguggc

SEQ ID NO: 1131504 - RNA, 22 nt, Human
ugcaucuuacguuuugaaaggg

SEQ ID NO: 1131505 - RNA, 22 nt, Human
cccagccucagcuuuacuucca

SEQ ID NO: 1131506 - RNA, 22 nt, Human
gcuggcaggguucucacugaaa

SEQ ID NO: 1131507 - RNA, 22 nt, Human
cagggcaguaccgcccucuggc

SEQ ID NO: 1131508 - RNA, 22 nt, Human
gagggugguggcuuaaggugcu

SEQ ID NO: 1131509 - RNA, 22 nt, Human
cccagcuccaagggacagcgaa

SEQ ID NO: 1131510 - RNA, 22 nt, Human
uuccauaauuaaguggagagaa

SEQ ID NO: 1131511 - RNA, 22 nt, Human
uucaggaucauuuguuuuaucu

SEQ ID NO: 1131512 - RNA, 21 nt, Human
agaagccuggguggagguggg

SEQ ID NO: 1131513 - RNA, 22 nt, Human
ucccagauuguugauggcuuaa

SEQ ID NO: 1131514 - RNA, 22 nt, Human
ucagcuggagaugagaaccgaa

SEQ ID NO: 1131515 - RNA, 22 nt, Human
ugcucccaggcauucucuguug

SEQ ID NO: 1131516 - RNA, 22 nt, Human
ucugcagcuuuuugguggggug

SEQ ID NO: 1131517 - RNA, 22 nt, Human
ugagaaccaugaaaagcuguca

SEQ ID NO: 1131518 - RNA, 22 nt, Human
auggggcuguucucugcccugc

SEQ ID NO: 1131519 - RNA, 22 nt, Human
uaucuugagagacaacacagca

SEQ ID NO: 1131520 - RNA, 22 nt, Human
agccaggauuggcugagccuua

SEQ ID NO: 1131521 - RNA, 22 nt, Human
aggacccagaggcagaggacgu

SEQ ID NO: 1131522 - RNA, 22 nt, Human
auugaaagcacaaagaacaagu

SEQ ID NO: 1131523 - RNA, 22 nt, Human
cugggcaguuuauucaguucug

SEQ ID NO: 1131524 - RNA, 22 nt, Human
gucaggggccaugggccaagga

SEQ ID NO: 1131525 - RNA, 22 nt, Human
aaaugcauugguuucuacuugu

SEQ ID NO: 1131526 - RNA, 22 nt, Human
ggaggccuugaggccaggagcu

SEQ ID NO: 1131527 - RNA, 22 nt, Human
cugcagaggucuugcugauggu

SEQ ID NO: 1131528 - RNA, 22 nt, Human
cugaggugcuauggaggauacg

SEQ ID NO: 1131529 - RNA, 22 nt, Human
cuggcucauagagcagcuccaa

SEQ ID NO: 1131530 - RNA, 22 nt, Human
ggcugggccagggccuguggac

SEQ ID NO: 1131531 - RNA, 22 nt, Human
cugcugcucgaccagucccagg

SEQ ID NO: 1131532 - RNA, 22 nt, Human
cacaugggcguaauguccaugg

SEQ ID NO: 1131533 - RNA, 22 nt, Human
cagcaauaagguaagcuucucc

SEQ ID NO: 1131534 - RNA, 22 nt, Human
aagguacaccaaaguucaaguu

SEQ ID NO: 1131535 - RNA, 22 nt, Human
uggcucagugaagagauaacuu

SEQ ID NO: 1131536 - RNA, 22 nt, Human
uuugaacaugcugcaugauaau

SEQ ID NO: 1131537 - RNA, 22 nt, Human
gcaggguccauggaggcagccc

SEQ ID NO: 1131538 - RNA, 22 nt, Human
gagaaguuucugguuugcauag

SEQ ID NO: 1131539 - RNA, 22 nt, Human
guggccugccgugugguauggg

SEQ ID NO: 1131540 - RNA, 22 nt, Human
aauuugcaugaugagaacaaua

SEQ ID NO: 1131541 - RNA, 21 nt, Human
ucauuuuuauugcuaccuugc

SEQ ID NO: 1131542 - RNA, 22 nt, Human
auaugugugaugcauggacuaa

SEQ ID NO: 1131543 - RNA, 22 nt, Human
uggagccaggagccugggaguc

SEQ ID NO: 1131544 - RNA, 22 nt, Human
cuggcagcgcagcaugaagucg

SEQ ID NO: 1131545 - RNA, 22 nt, Human
gucuggaguggggccugagaau

SEQ ID NO: 1131546 - RNA, 22 nt, Human
cacauuuaauccuuuauaagua

SEQ ID NO: 1131547 - RNA, 20 nt, Human
agagccuggaaaaagacauc

SEQ ID NO: 1131548 - RNA, 22 nt, Human
auggaaagccaguguuccauca

SEQ ID NO: 1131549 - RNA, 22 nt, Human
cugcuccacaccuccauuuccu

SEQ ID NO: 1131550 - RNA, 22 nt, Human
ugagagucucagaccuccuggu

SEQ ID NO: 1131551 - RNA, 22 nt, Human
gcagguggauuaucagaagugc

SEQ ID NO: 1131552 - RNA, 23 nt, Human
uuucuguuggguauauauccaag

SEQ ID NO: 1131553 - RNA, 22 nt, Human
aguguacauguuuacagcaucu

SEQ ID NO: 1131554 - RNA, 22 nt, Human
caguuucucucaauaagcaucg

SEQ ID NO: 1131555 - RNA, 22 nt, Human
aagcccagaugugagaacugag

SEQ ID NO: 1131556 - RNA, 22 nt, Human
uccguauuugacuauugcaccg

SEQ ID NO: 1131557 - RNA, 22 nt, Human
ugucucagauacgccaucaagg

SEQ ID NO: 1131558 - RNA, 22 nt, Human
cccuggagggauuucucaauca

SEQ ID NO: 1131559 - RNA, 22 nt, Human
cuggcucauccagguguugcuc

SEQ ID NO: 1131560 - RNA, 21 nt, Human
agcugccacccuagcuucuga

SEQ ID NO: 1131561 - RNA, 22 nt, Human
uucagcagucguccaggaaaag

SEQ ID NO: 1131562 - RNA, 22 nt, Human
cagccugcuagggcaaugccuu

SEQ ID NO: 1131563 - RNA, 22 nt, Human
agccagggagguggagguugca

SEQ ID NO: 1131564 - RNA, 22 nt, Human
aaaugcaggaaauuaugcuuuu

SEQ ID NO: 1131565 - RNA, 22 nt, Human
ccuggccugcucggcucuuaag

SEQ ID NO: 1131566 - RNA, 22 nt, Human
ggcucagaaacuaaaggcgcug

SEQ ID NO: 1131567 - RNA, 22 nt, Human
ucuggcucuguguccccaccca

SEQ ID NO: 1131568 - RNA, 21 nt, Human
aggagcuguguuagcuggucg

SEQ ID NO: 1131569 - RNA, 22 nt, Human
ugaggcagcaauuguauuguau

SEQ ID NO: 1131570 - RNA, 22 nt, Human
agcaggcuuucaagagucuucu

SEQ ID NO: 1131571 - RNA, 22 nt, Human
ccaggccagcaggcacaccugc

SEQ ID NO: 1131572 - RNA, 22 nt, Human
gagagcugggaaagccguggag

SEQ ID NO: 1131573 - RNA, 22 nt, Human
aggcacuggucuaccccuuagu

SEQ ID NO: 1131574 - RNA, 22 nt, Human
ggggcugggauuugaacccagg

SEQ ID NO: 1131575 - RNA, 22 nt, Human
uggcugaaggaagauucuucua

SEQ ID NO: 1131576 - RNA, 22 nt, Human
cuauugaauagcccaaaucauu

SEQ ID NO: 1131577 - RNA, 22 nt, Human
gugucccaggccucuggaauua

SEQ ID NO: 1131578 - RNA, 22 nt, Human
uagcagcuuaaguaauuagaau

SEQ ID NO: 1131579 - RNA, 20 nt, Human
aggcucagagcaguaguaca

SEQ ID NO: 1131580 - RNA, 22 nt, Human
gccacguugccacccgggugac

SEQ ID NO: 1131581 - RNA, 22 nt, Human
cagaguguuagcgcugguuggg

SEQ ID NO: 1131582 - RNA, 22 nt, Human
gccuucugauaucucuuggcau

SEQ ID NO: 1131583 - RNA, 22 nt, Human
uccuugaagaaugauucuugga

SEQ ID NO: 1131584 - RNA, 22 nt, Human
gggaagggagggaccucagucu

SEQ ID NO: 1131585 - RNA, 21 nt, Human
aggucccagguuugggcagca

SEQ ID NO: 1131586 - RNA, 22 nt, Human
cuggccucauagccaagcugug

SEQ ID NO: 1131587 - RNA, 21 nt, Human
uauuucuuugacucucucccu

SEQ ID NO: 1131588 - RNA, 22 nt, Human
agcugggaugauaaccucaguc

SEQ ID NO: 1131589 - RNA, 22 nt, Human
ugggccuguugggguugaguua

SEQ ID NO: 1131590 - RNA, 22 nt, Human
ugagcaguaggucugaauagug

SEQ ID NO: 1131591 - RNA, 22 nt, Human
uacauggugguggcacuugacu

SEQ ID NO: 1131592 - RNA, 22 nt, Human
acagggcagagaggcaggcuug

SEQ ID NO: 1131593 - RNA, 22 nt, Human
auguaagguucagaguauguga

SEQ ID NO: 1131594 - RNA, 22 nt, Human
ccugagagcgaguggccucaug

SEQ ID NO: 1131595 - RNA, 22 nt, Human
uagaggugucacuuugggaagu

SEQ ID NO: 1131596 - RNA, 22 nt, Human
uuuaguaaguucacugcaaagc

SEQ ID NO: 1131597 - RNA, 22 nt, Human
ccagaaaaugcagaacauagaa

SEQ ID NO: 1131598 - RNA, 22 nt, Human
agcaggguuuggggauuggcac

SEQ ID NO: 1131599 - RNA, 22 nt, Human
gaaaguuugccucucucuugag

SEQ ID NO: 1131600 - RNA, 22 nt, Human
ggcagcaugagccuggugaauu

SEQ ID NO: 1131601 - RNA, 22 nt, Human
agaggaugauuuuaaggacacu

SEQ ID NO: 1131602 - RNA, 22 nt, Human
caguagcaggcacucagcacgu

SEQ ID NO: 1131603 - RNA, 22 nt, Human
uucuuucccuuccagcagcucc

SEQ ID NO: 1131604 - RNA, 22 nt, Human
ccucagagaaagguauggcuga

SEQ ID NO: 1131605 - RNA, 22 nt, Human
agcucccagaaggcccugcgcc

SEQ ID NO: 1131606 - RNA, 22 nt, Human
aaugcuguaaagaugcuaucug

SEQ ID NO: 1131607 - RNA, 22 nt, Human
gccuggcacucacugaagaggc

SEQ ID NO: 1131608 - RNA, 22 nt, Human
gagagggccgggggccagcucc

SEQ ID NO: 1131609 - RNA, 22 nt, Human
gcucugagccgggggccugucc

SEQ ID NO: 1131610 - RNA, 22 nt, Human
uaaggucauggugaauaauaag

SEQ ID NO: 1131611 - RNA, 22 nt, Human
ucagaaauagucuuuaaaauga

SEQ ID NO: 1131612 - RNA, 23 nt, Human
cacaccaggagccgucugggcca

SEQ ID NO: 1131613 - RNA, 22 nt, Human
aaaugcacacaccaggaaacua

SEQ ID NO: 1131614 - RNA, 22 nt, Human
ggcugccaggagaagcucagug

SEQ ID NO: 1131615 - RNA, 22 nt, Human
uguccucacaggaaugaacuuu

SEQ ID NO: 1131616 - RNA, 22 nt, Human
ucaguguagcagacuuguagcc

SEQ ID NO: 1131617 - RNA, 22 nt, Human
agagagcccgggccagggcaca

SEQ ID NO: 1131618 - RNA, 23 nt, Human
ggguccagagacaggcaugggug

SEQ ID NO: 1131619 - RNA, 23 nt, Human
uggcucagggucucuuaugaagu

SEQ ID NO: 1131620 - RNA, 22 nt, Human
cucugagcccgcugcagcccca

SEQ ID NO: 1131621 - RNA, 22 nt, Human
gaugcacaugugaguauagaag

SEQ ID NO: 1131622 - RNA, 22 nt, Human
aaaaaaucagaucuuugguuaa

SEQ ID NO: 1131623 - RNA, 22 nt, Human
aaaaaugaaacggcugguuggc

SEQ ID NO: 1131624 - RNA, 22 nt, Human
uauaacaguuuaggugguguca

SEQ ID NO: 1131625 - RNA, 22 nt, Human
cuguggcuuucucugccuccuu

SEQ ID NO: 1131626 - RNA, 22 nt, Human
ugccagcacuucuggcugucug

SEQ ID NO: 1131627 - RNA, 21 nt, Human
guggccugauuaugaaugggu

SEQ ID NO: 1131628 - RNA, 22 nt, Human
aucuggcucccuuggaauccgu

SEQ ID NO: 1131629 - RNA, 22 nt, Human
ucccagagauuuccucuccuuc

SEQ ID NO: 1131630 - RNA, 22 nt, Human
uggacucaaguccaaguucacg

SEQ ID NO: 1131631 - RNA, 22 nt, Human
agggcagcucucaccucuggcc

SEQ ID NO: 1131632 - RNA, 22 nt, Human
gcaaggcugcugccacccaucu

SEQ ID NO: 1131633 - RNA, 22 nt, Human
gaggggcagaaugugaucaggg

SEQ ID NO: 1131634 - RNA, 22 nt, Human
cuugccuucuuuuccuauagaa

SEQ ID NO: 1131635 - RNA, 22 nt, Human
guguacauauugagucugcuga

SEQ ID NO: 1131636 - RNA, 22 nt, Human
gccucugcaccaguacugugcc

SEQ ID NO: 1131637 - RNA, 22 nt, Human
gccuggagacagcagaggcggc

SEQ ID NO: 1131638 - RNA, 22 nt, Human
gacaggguacgggcuaggcaca

SEQ ID NO: 1131639 - RNA, 22 nt, Human
aacuagaaaacaagaugcugau

SEQ ID NO: 1131640 - RNA, 22 nt, Human
acagggcagaaauguugcaucu

SEQ ID NO: 1131641 - RNA, 22 nt, Human
ucaggugggaccugcuaggaca

SEQ ID NO: 1131642 - RNA, 22 nt, Human
gccuccuggccuuugcuccuca

SEQ ID NO: 1131643 - RNA, 22 nt, Human
ccagggucucugcugccugaga

SEQ ID NO: 1131644 - RNA, 22 nt, Human
cugccacuagcuuucacaucuu

SEQ ID NO: 1131645 - RNA, 22 nt, Human
uccagagccuauauguucaacu

SEQ ID NO: 1131646 - RNA, 22 nt, Human
uaugcacacauguaugcaugug

SEQ ID NO: 1131647 - RNA, 22 nt, Human
cuuauguaugcuacuuuguggu

SEQ ID NO: 1131648 - RNA, 22 nt, Human
gggcagagagcuggaacuccuu

SEQ ID NO: 1131649 - RNA, 22 nt, Human
ugagccuggccugcagagacca

SEQ ID NO: 1131650 - RNA, 22 nt, Human
ccagccuggagggcaguggugg

SEQ ID NO: 1131651 - RNA, 22 nt, Human
gccugccuggagcuugagguga

SEQ ID NO: 1131652 - RNA, 22 nt, Human
caggguggcccuguggucucau

SEQ ID NO: 1131653 - RNA, 22 nt, Human
cagcauggggaucacuguaggc

SEQ ID NO: 1131654 - RNA, 22 nt, Human
ccagcugcagguguuccagaug

SEQ ID NO: 1131655 - RNA, 22 nt, Human
gccugcagccucaagggcugag

SEQ ID NO: 1131656 - RNA, 21 nt, Human
aauaaaacaguuggugucaau

SEQ ID NO: 1131657 - RNA, 22 nt, Human
augaguaaaaccacuauuuaca

SEQ ID NO: 1131658 - RNA, 22 nt, Human
ccagaggcauguucaaagcaau

SEQ ID NO: 1131659 - RNA, 22 nt, Human
ugugacagaucuuuaaauaaug

SEQ ID NO: 1131660 - RNA, 17 nt, Human
cugaggcccagggccca

SEQ ID NO: 1131661 - RNA, 22 nt, Human
ucagcagugcagggugaggcag

SEQ ID NO: 1131662 - RNA, 22 nt, Human
gagagcuguguucauucuacca

SEQ ID NO: 1131663 - RNA, 23 nt, Human
gugauuucagggaacagaaucag

SEQ ID NO: 1131664 - RNA, 22 nt, Human
agaggggcucaagcaguggucu

SEQ ID NO: 1131665 - RNA, 22 nt, Human
ucagcaguguaguuuaucauuc

SEQ ID NO: 1131666 - RNA, 22 nt, Human
auaucuuuguaugguucagcag

SEQ ID NO: 1131667 - RNA, 22 nt, Human
aaguucaaggcucuagaguucc

SEQ ID NO: 1131668 - RNA, 22 nt, Human
ucacugcaaccucugccuuccg

SEQ ID NO: 1131669 - RNA, 22 nt, Human
cugggagucuggccucuggucc

SEQ ID NO: 1131670 - RNA, 22 nt, Human
ugcugccacaaauucagcugcc

SEQ ID NO: 1131671 - RNA, 20 nt, Human
cucugcuuuaggagagucag

SEQ ID NO: 1131672 - RNA, 23 nt, Human
uguagcaucucuuauuucucagc

SEQ ID NO: 1131673 - RNA, 22 nt, Human
acagaacuuccugcuggagugg

SEQ ID NO: 1131674 - RNA, 22 nt, Human
cucagagaaaaggagcaagggu

SEQ ID NO: 1131675 - RNA, 19 nt, Human
gggaaauucacuugcuucc

SEQ ID NO: 1131676 - RNA, 22 nt, Human
gacccuguuucuacaaauaauu

SEQ ID NO: 1131677 - RNA, 18 nt, Human
cagagcagagguggagcg

SEQ ID NO: 1131678 - RNA, 22 nt, Human
caaaugugacuuuugggcuucu

SEQ ID NO: 1131679 - RNA, 22 nt, Human
gaaggagcuaaagggagcccug

SEQ ID NO: 1131680 - RNA, 22 nt, Human
ucucagaguaauucuuuaaggu

SEQ ID NO: 1131681 - RNA, 22 nt, Human
cugggccagauccagccucaca

SEQ ID NO: 1131682 - RNA, 22 nt, Human
ggcaggcuggcuuuguuccagg

SEQ ID NO: 1131683 - RNA, 22 nt, Human
agcucauggugcuaucucaggg

SEQ ID NO: 1131684 - RNA, 22 nt, Human
cccuccccacaaagcuucacac

SEQ ID NO: 1131685 - RNA, 22 nt, Human
agaugcugugucuguucccuug

SEQ ID NO: 1131686 - RNA, 22 nt, Human
caaagccucugauuucacuugu

SEQ ID NO: 1131687 - RNA, 22 nt, Human
agguaggguuaauggagauaua

SEQ ID NO: 1131688 - RNA, 22 nt, Human
cacagcugccauggcugcacuu

SEQ ID NO: 1131689 - RNA, 22 nt, Human
aaaugcaccuugcugugagacu

SEQ ID NO: 1131690 - RNA, 22 nt, Human
ggcucaagcagucugccugccu

SEQ ID NO: 1131691 - RNA, 22 nt, Human
ugggcucauggcccagcacugg

SEQ ID NO: 1131692 - RNA, 22 nt, Human
gcucucugccauaugaggauac

SEQ ID NO: 1131693 - RNA, 22 nt, Human
aggggugauuugggacaggaca

SEQ ID NO: 1131694 - RNA, 22 nt, Human
aguggcagagcaggugcuggaa

SEQ ID NO: 1131695 - RNA, 23 nt, Human
gggagccaggaccucgcgcccca

SEQ ID NO: 1131696 - RNA, 22 nt, Human
agacagggucuugaucagagcu

SEQ ID NO: 1131697 - RNA, 22 nt, Human
guggccuggaaaggcuggucug

SEQ ID NO: 1131698 - RNA, 20 nt, Human
uaugaagauaugugaacagc

SEQ ID NO: 1131699 - RNA, 22 nt, Human
gccuggaguacuccuugaagug

SEQ ID NO: 1131700 - RNA, 22 nt, Human
agcagggcagguaaggaucaga

SEQ ID NO: 1131701 - RNA, 22 nt, Human
agagcuguucaacguagcaaug

SEQ ID NO: 1131702 - RNA, 21 nt, Human
ugugugugcaggcacacacac

SEQ ID NO: 1131703 - RNA, 22 nt, Human
cucucugaggcaggccuguggg

SEQ ID NO: 1131704 - RNA, 22 nt, Human
aagggagguaaagcuauuuaaa

SEQ ID NO: 1131705 - RNA, 18 nt, Human
ucucagaggccauccuag

SEQ ID NO: 1131706 - RNA, 22 nt, Human
ucaucaaagucaaagaaugacu

SEQ ID NO: 1131707 - RNA, 22 nt, Human
agcagagcugcaguggccugcu

SEQ ID NO: 1131708 - RNA, 22 nt, Human
cagccaggagcucccccugcuc

SEQ ID NO: 1131709 - RNA, 22 nt, Human
agcugucuuucugccuccugau

SEQ ID NO: 1131710 - RNA, 22 nt, Human
cagcaggcucugaguggcugcc

SEQ ID NO: 1131711 - RNA, 22 nt, Human
cucaggagaugacagaagguau

SEQ ID NO: 1131712 - RNA, 22 nt, Human
gagcacaggcuuugguggacac

SEQ ID NO: 1131713 - RNA, 22 nt, Human
gccugggagggcagcagugugg

SEQ ID NO: 1131714 - RNA, 22 nt, Human
uggcagaggcucugugauguug

SEQ ID NO: 1131715 - RNA, 22 nt, Human
ugauuuccuagcugacaugaaa

SEQ ID NO: 1131716 - RNA, 22 nt, Human
ugguaucagagccaucuguauu

SEQ ID NO: 1131717 - RNA, 22 nt, Human
ggccaagauggaaggagagaug

SEQ ID NO: 1131718 - RNA, 22 nt, Human
ucaaugauuagaguuuagugug

SEQ ID NO: 1131719 - RNA, 22 nt, Human
aaggagcuuguucgccuuccuc

SEQ ID NO: 1131720 - RNA, 22 nt, Human
ugcugcucuucaccauggccuc

SEQ ID NO: 1131721 - RNA, 22 nt, Human
acagaauacuacagacugguua

SEQ ID NO: 1131722 - RNA, 20 nt, Human
acauguacuaaugaauacag

SEQ ID NO: 1131723 - RNA, 22 nt, Human
aggccuccuggcuccaggccuu

SEQ ID NO: 1131724 - RNA, 22 nt, Human
uuuuagaaauacugauuuagug

SEQ ID NO: 1131725 - RNA, 22 nt, Human
cucugggcacauuuuccaggac

SEQ ID NO: 1131726 - RNA, 22 nt, Human
ugacaugcuuguuuuccuugaa

SEQ ID NO: 1131727 - RNA, 22 nt, Human
uaaauguggagacucaggaguc

SEQ ID NO: 1131728 - RNA, 20 nt, Human
ucucugcuguccacauuugc

SEQ ID NO: 1131729 - RNA, 22 nt, Human
gccuguccacuaaacagccaag

SEQ ID NO: 1131730 - RNA, 22 nt, Human
gcagaagcccggucagcgcacg

SEQ ID NO: 1131731 - RNA, 22 nt, Human
ccugccugucaucgccugcgcc

SEQ ID NO: 1131732 - RNA, 22 nt, Human
cacagggcagaggguccguggc

SEQ ID NO: 1131733 - RNA, 22 nt, Human
cagccaucaguaaagacagcuu

SEQ ID NO: 1131734 - RNA, 22 nt, Human
gcugucaggccaugugggccuu

SEQ ID NO: 1131735 - RNA, 22 nt, Human
uccuucaguucaauuaguccgu

SEQ ID NO: 1131736 - RNA, 22 nt, Human
cagcagcuacuuggagcagcag

SEQ ID NO: 1131737 - RNA, 22 nt, Human
agcucucaagauaagaaagaac

SEQ ID NO: 1131738 - RNA, 22 nt, Human
gggcagagaaauggacaguugg

SEQ ID NO: 1131739 - RNA, 22 nt, Human
aacaaauggggccuuguaugaa

SEQ ID NO: 1131740 - RNA, 22 nt, Human
aaaagguuuugaguacaaauau

SEQ ID NO: 1131741 - RNA, 22 nt, Human
caucuggcuagcuaucauugug

SEQ ID NO: 1131742 - RNA, 19 nt, Human
agcagccaucgaccaugga

SEQ ID NO: 1131743 - RNA, 19 nt, Human
ucagaggauuuggcuauga

SEQ ID NO: 1131744 - RNA, 22 nt, Human
cuggccuggagccucugggugg

SEQ ID NO: 1131745 - RNA, 22 nt, Human
ugaaaaggguagaucccuaagu

SEQ ID NO: 1131746 - RNA, 22 nt, Human
uuugcaauuugugcugcaaaug

SEQ ID NO: 1131747 - RNA, 22 nt, Human
ugggaggagcccucugggaagg

SEQ ID NO: 1131748 - RNA, 22 nt, Human
ccuggcucuucagagguuccua

SEQ ID NO: 1131749 - RNA, 22 nt, Human
aucuggcuuuuaccccacggcc

SEQ ID NO: 1131750 - RNA, 22 nt, Human
guauacauagaugaugaacaag

SEQ ID NO: 1131751 - RNA, 22 nt, Human
uugauacauagcacaguuuagg

SEQ ID NO: 1131752 - RNA, 22 nt, Human
ugugccaugaggcucugauaug

SEQ ID NO: 1131753 - RNA, 22 nt, Human
uuuauuauguacaggcacuaua

SEQ ID NO: 1131754 - RNA, 21 nt, Human
ccaccaggucuucugcucggg

SEQ ID NO: 1131755 - RNA, 22 nt, Human
acccagagccagggucaggagc

SEQ ID NO: 1131756 - RNA, 22 nt, Human
ggguccagaguugaagagguua

SEQ ID NO: 1131757 - RNA, 22 nt, Human
ugucucaguauacgaaacacuu

SEQ ID NO: 1131758 - RNA, 22 nt, Human
uggucaguugcaucagagaagu

SEQ ID NO: 1131759 - RNA, 22 nt, Human
agcauuuaauuacaguuuaauu

SEQ ID NO: 1131760 - RNA, 22 nt, Human
cagguggaucucuaaggacuga

SEQ ID NO: 1131761 - RNA, 22 nt, Human
ucuucagauugcacugagcaag

SEQ ID NO: 1131762 - RNA, 22 nt, Human
ugcguugcgcuccugcagcagg

SEQ ID NO: 1131763 - RNA, 22 nt, Human
aaguucaaggaagccuccaguu

SEQ ID NO: 1131764 - RNA, 22 nt, Human
ggcuggcacugaggagagcucu

SEQ ID NO: 1131765 - RNA, 19 nt, Human
gcagccaccgcggcggccg

SEQ ID NO: 1131766 - RNA, 22 nt, Human
agcagccaggaaucugcagagc

SEQ ID NO: 1131767 - RNA, 22 nt, Human
uuaacagagaacauagaaguag

SEQ ID NO: 1131768 - RNA, 22 nt, Human
agggaugguggagguugcaagu

SEQ ID NO: 1131769 - RNA, 22 nt, Human
accaggaggccuggagcacaaa

SEQ ID NO: 1131770 - RNA, 22 nt, Human
uggcucagaagaaaagguaaac

SEQ ID NO: 1131771 - RNA, 22 nt, Human
aaggccugcucagcugucugug

SEQ ID NO: 1131772 - RNA, 22 nt, Human
guuugcauaucugugaaaugga

SEQ ID NO: 1131773 - RNA, 22 nt, Human
gccagagcaugcacugccugca

SEQ ID NO: 1131774 - RNA, 22 nt, Human
augggaguuuucucugaugcuc

SEQ ID NO: 1131775 - RNA, 18 nt, Human
gcagagugcgucucugug

SEQ ID NO: 1131776 - RNA, 22 nt, Human
ggccuugggcuggcugcaguau

SEQ ID NO: 1131777 - RNA, 19 nt, Human
gcauaaaaugucaaugugu

SEQ ID NO: 1131778 - RNA, 22 nt, Human
agaggcccucucucuccugaug

SEQ ID NO: 1131779 - RNA, 22 nt, Human
aaggucauuuaacaauuuauga

SEQ ID NO: 1131780 - RNA, 22 nt, Human
ccagccuggacugggucuugug

SEQ ID NO: 1131781 - RNA, 22 nt, Human
gcuggccugggcucaagaccag

SEQ ID NO: 1131782 - RNA, 22 nt, Human
uugaaucauuacaauagauaag

SEQ ID NO: 1131783 - RNA, 18 nt, Human
aggcuucccaggcaggcc

SEQ ID NO: 1131784 - RNA, 22 nt, Human
caguacuugggggguucuaagu

SEQ ID NO: 1131785 - RNA, 23 nt, Human
aagaauaaaugacauuaaaggug

SEQ ID NO: 1131786 - RNA, 22 nt, Human
gucaccaggucugaugcagcca

SEQ ID NO: 1131787 - RNA, 22 nt, Human
gccaguuccuguggagucagag

SEQ ID NO: 1131788 - RNA, 22 nt, Human
gugccuggagcuaauguguaua

SEQ ID NO: 1131789 - RNA, 22 nt, Human
cguguggucccggcaaggcaag

SEQ ID NO: 1131790 - RNA, 22 nt, Human
cugccuguuuucugauagauuu

SEQ ID NO: 1131791 - RNA, 22 nt, Human
cuggcugcuggccugaggaugc

SEQ ID NO: 1131792 - RNA, 22 nt, Human
ucccagagccaagcuauggaug

SEQ ID NO: 1131793 - RNA, 22 nt, Human
ucucagagaucuuucugcaugu

SEQ ID NO: 1131794 - RNA, 22 nt, Human
ggucccagguugacagggagac

SEQ ID NO: 1131795 - RNA, 22 nt, Human
gccaccucggcuuucucugcuc

SEQ ID NO: 1131796 - RNA, 20 nt, Human
ugaugguucuuuccggguug

SEQ ID NO: 1131797 - RNA, 22 nt, Human
uggcccuguggaggucagugag

SEQ ID NO: 1131798 - RNA, 19 nt, Human
agaggcugucaccuguagc

SEQ ID NO: 1131799 - RNA, 22 nt, Human
cacagggccacuuucccaguaa

SEQ ID NO: 1131800 - RNA, 22 nt, Human
ccagcccuucccaacuggccag

SEQ ID NO: 1131801 - RNA, 21 nt, Human
gcagcaguguucuagaauacu

SEQ ID NO: 1131802 - RNA, 23 nt, Human
aaaguguagccagguuaagaacc

SEQ ID NO: 1131803 - RNA, 22 nt, Human
gcaggagcugcucuccugacga

SEQ ID NO: 1131804 - RNA, 20 nt, Human
aagagaagaagucuuugaaa

SEQ ID NO: 1131805 - RNA, 22 nt, Human
ugcagcauugcaaagcagucuu

SEQ ID NO: 1131806 - RNA, 22 nt, Human
ugcagaggaccauuguccugga

SEQ ID NO: 1131807 - RNA, 22 nt, Human
uagaaaucauuuagaaguauug

SEQ ID NO: 1131808 - RNA, 22 nt, Human
gguggccaggccagcucuggcc

SEQ ID NO: 1131809 - RNA, 22 nt, Human
guccucugggagccuugagccu

SEQ ID NO: 1131810 - RNA, 22 nt, Human
uccugccucaggcucuggagua

SEQ ID NO: 1131811 - RNA, 22 nt, Human
ucuuugcaacucccauuuccau

SEQ ID NO: 1131812 - RNA, 19 nt, Human
aagggcugggcaccucacu

SEQ ID NO: 1131813 - RNA, 22 nt, Human
caggugcccagcuccugcugug

SEQ ID NO: 1131814 - RNA, 22 nt, Human
aggccucuucagggagcaugga

SEQ ID NO: 1131815 - RNA, 22 nt, Human
uuaggcaauaucauuggaguug

SEQ ID NO: 1131816 - RNA, 22 nt, Human
agcugcugcggaaagaugccac

SEQ ID NO: 1131817 - RNA, 20 nt, Human
uccuggccuucucgggcagu

SEQ ID NO: 1131818 - RNA, 22 nt, Human
ucccuggccauuccucuaggcc

SEQ ID NO: 1131819 - RNA, 22 nt, Human
aggcagccagauggcagccugc

SEQ ID NO: 1131820 - RNA, 21 nt, Human
ugccaggccugagcugggguc

SEQ ID NO: 1131821 - RNA, 22 nt, Human
uaaguucaaugaacucaguucu

SEQ ID NO: 1131822 - RNA, 22 nt, Human
cagaggccccagaacuagcucu

SEQ ID NO: 1131823 - RNA, 22 nt, Human
gagcagugguugaacagaggca

SEQ ID NO: 1131824 - RNA, 22 nt, Human
uacaguucacaguaucauaaau

SEQ ID NO: 1131825 - RNA, 22 nt, Human
acagaggccccgugggagagcc

SEQ ID NO: 1131826 - RNA, 22 nt, Human
ugggcagacgcuguuggaaggc

SEQ ID NO: 1131827 - RNA, 22 nt, Human
uuggcugaagguuaagugcugg

SEQ ID NO: 1131828 - RNA, 21 nt, Human
gcucccugcucagcuccuggg

SEQ ID NO: 1131829 - RNA, 22 nt, Human
cugagagcagggacuugagcca

SEQ ID NO: 1131830 - RNA, 22 nt, Human
uggaaagaaaguaaaggcguau

SEQ ID NO: 1131831 - RNA, 22 nt, Human
ggaggccaaggcagguggauca

SEQ ID NO: 1131832 - RNA, 23 nt, Human
auuuccuacuauaaaagagguaa

SEQ ID NO: 1131833 - RNA, 22 nt, Human
ucucuucuagcuucuugugguu

SEQ ID NO: 1131834 - RNA, 22 nt, Human
uaaaguccuugaaccggaugua

SEQ ID NO: 1131835 - RNA, 22 nt, Human
ucauugcagaaauaaaggugaa

SEQ ID NO: 1131836 - RNA, 22 nt, Human
gagcugcuucugugugccgggu

SEQ ID NO: 1131837 - RNA, 22 nt, Human
gaaagaggaaggagauguauua

SEQ ID NO: 1131838 - RNA, 21 nt, Human
ccugcagcaccagaaggagau

SEQ ID NO: 1131839 - RNA, 22 nt, Human
ucuccucugcgcggcagugccc

SEQ ID NO: 1131840 - RNA, 22 nt, Human
ucccaguguggcaggccaugga

SEQ ID NO: 1131841 - RNA, 22 nt, Human
uugcagggcaggaccauggaca

SEQ ID NO: 1131842 - RNA, 20 nt, Human
ccagagcagccacugaaguu

SEQ ID NO: 1131843 - RNA, 22 nt, Human
cucagagcccaggguacacccg

SEQ ID NO: 1131844 - RNA, 22 nt, Human
cuuaggcaagcagagcccaucc

SEQ ID NO: 1131845 - RNA, 22 nt, Human
uccauggguagcccugguugag

SEQ ID NO: 1131846 - RNA, 22 nt, Human
aagccaggggcugcuuaggaga

SEQ ID NO: 1131847 - RNA, 22 nt, Human
aaauucuuucauggcuaauaag

SEQ ID NO: 1131848 - RNA, 22 nt, Human
ccacccagccagaugcaggaag

SEQ ID NO: 1131849 - RNA, 22 nt, Human
aagccagauagaagaacucauu

SEQ ID NO: 1131850 - RNA, 22 nt, Human
uccauuguguuacagagcauuc

SEQ ID NO: 1131851 - RNA, 22 nt, Human
ggccaggcuggucucagacuuc

SEQ ID NO: 1131852 - RNA, 22 nt, Human
caggacaguuugcuuugcccug

SEQ ID NO: 1131853 - RNA, 22 nt, Human
cugcccuguuuggacagcccgg

SEQ ID NO: 1131854 - RNA, 22 nt, Human
ucccagccauuccuuuaggugu

SEQ ID NO: 1131855 - RNA, 22 nt, Human
ucugccugagggagcugaggaa

SEQ ID NO: 1131856 - RNA, 22 nt, Human
agcaccuucacaggcucucagg

SEQ ID NO: 1131857 - RNA, 22 nt, Human
gccuucagcccugacuggccag

SEQ ID NO: 1131858 - RNA, 22 nt, Human
uuagauaaauugcaacuugauu

SEQ ID NO: 1131859 - RNA, 22 nt, Human
uuccucucgcucuccggggccc

SEQ ID NO: 1131860 - RNA, 22 nt, Human
cugccagcaaugugaccaugcu

SEQ ID NO: 1131861 - RNA, 22 nt, Human
ccugagggcgccgagcucccag

SEQ ID NO: 1131862 - RNA, 22 nt, Human
ugaaacagucuccagacuugga

SEQ ID NO: 1131863 - RNA, 22 nt, Human
cccugagcccauaguugacauu

SEQ ID NO: 1131864 - RNA, 17 nt, Human
acacagggagagggagc

SEQ ID NO: 1131865 - RNA, 22 nt, Human
ccugggcagguguggcuucccc

SEQ ID NO: 1131866 - RNA, 22 nt, Human
gcaccugcaggaugagccaggg

SEQ ID NO: 1131867 - RNA, 22 nt, Human
cacagggcagagaccugggugc

SEQ ID NO: 1131868 - RNA, 22 nt, Human
ucaaagucauggcuaguaauga

SEQ ID NO: 1131869 - RNA, 22 nt, Human
ccugaggacacacgcugcagga

SEQ ID NO: 1131870 - RNA, 18 nt, Human
agcagcugugccacacug

SEQ ID NO: 1131871 - RNA, 22 nt, Human
agccauugaauuuagugccuuu

SEQ ID NO: 1131872 - RNA, 22 nt, Human
agagccugcuguguaagucaca

SEQ ID NO: 1131873 - RNA, 19 nt, Human
agcaccugugagagccugg

SEQ ID NO: 1131874 - RNA, 22 nt, Human
ugcugccacugguagucucauu

SEQ ID NO: 1131875 - RNA, 19 nt, Human
caguggagauuggaggagg

SEQ ID NO: 1131876 - RNA, 23 nt, Human
ucaguuuuggcuguucaguguug

SEQ ID NO: 1131877 - RNA, 22 nt, Human
caaaguccauaguuuacaauag

SEQ ID NO: 1131878 - RNA, 22 nt, Human
gcaggggcaggagaucucaggc

SEQ ID NO: 1131879 - RNA, 22 nt, Human
aacccagccguguagcugccgc

SEQ ID NO: 1131880 - RNA, 22 nt, Human
ugggcugccggcaggcucugcc

SEQ ID NO: 1131881 - RNA, 22 nt, Human
agggugcagaaggagccuagga

SEQ ID NO: 1131882 - RNA, 23 nt, Human
auucuucauuaucuucuagaaaa

SEQ ID NO: 1131883 - RNA, 22 nt, Human
uccuucaguuaucacaguacug

SEQ ID NO: 1131884 - RNA, 22 nt, Human
gugggcaaggucccugccagcu

SEQ ID NO: 1131885 - RNA, 22 nt, Human
uagccuucucaagacaaaguug

SEQ ID NO: 1131886 - RNA, 22 nt, Human
augcugagacuggagcagcugg

SEQ ID NO: 1131887 - RNA, 22 nt, Human
cacuggggaaaacaggcuucuu

SEQ ID NO: 1131888 - RNA, 22 nt, Human
ugggacagggaaucugaucccc

SEQ ID NO: 1131889 - RNA, 22 nt, Human
ucucacugggucacagcagagg

SEQ ID NO: 1131890 - RNA, 22 nt, Human
uaagaacaagauguuccuguuu

SEQ ID NO: 1131891 - RNA, 22 nt, Human
gaggggcugcccuggugucagg

SEQ ID NO: 1131892 - RNA, 22 nt, Human
agucucugcacaguaagaagca

SEQ ID NO: 1131893 - RNA, 20 nt, Human
cuguaucagguuacaaagua

SEQ ID NO: 1131894 - RNA, 22 nt, Human
agggcagagauuaauuaagaca

SEQ ID NO: 1131895 - RNA, 22 nt, Human
acauuguauaaugauuaucaca

SEQ ID NO: 1131896 - RNA, 22 nt, Human
cugguucauccccuuccaggaa

SEQ ID NO: 1131897 - RNA, 22 nt, Human
uagcagcucacagccucccauu

SEQ ID NO: 1131898 - RNA, 22 nt, Human
cuggagccacuuuuuauccuuu

SEQ ID NO: 1131899 - RNA, 22 nt, Human
cagggugccaaagaacaaauau

SEQ ID NO: 1131900 - RNA, 22 nt, Human
uggggcugaggagccucacucu

SEQ ID NO: 1131901 - RNA, 22 nt, Human
cagggccaagccccuuuggcug

SEQ ID NO: 1131902 - RNA, 22 nt, Human
cagaguguggcaucuuccaacu

SEQ ID NO: 1131903 - RNA, 22 nt, Human
auuagcugaccucuaaggagcc

SEQ ID NO: 1131904 - RNA, 22 nt, Human
uguaaucauuacaguacaugga

SEQ ID NO: 1131905 - RNA, 22 nt, Human
gcagugggcaacaagagcugga

SEQ ID NO: 1131906 - RNA, 22 nt, Human
acugccuuauaugcugugugug

SEQ ID NO: 1131907 - RNA, 22 nt, Human
agcugcccugggucuugcugcu

SEQ ID NO: 1131908 - RNA, 22 nt, Human
guaacagaggguuugcagauau

SEQ ID NO: 1131909 - RNA, 22 nt, Human
ugcccuguuccugccuccagcu

SEQ ID NO: 1131910 - RNA, 22 nt, Human
aaucaguuagaaggaagagaau

SEQ ID NO: 1131911 - RNA, 22 nt, Human
acugcuuuuagaaaucuauaga

SEQ ID NO: 1131912 - RNA, 22 nt, Human
gggugcaggcagcccaggcagg

SEQ ID NO: 1131913 - RNA, 22 nt, Human
cacccagccuucacacaggagu

SEQ ID NO: 1131914 - RNA, 22 nt, Human
uggaagagggagcuggguggcc

SEQ ID NO: 1131915 - RNA, 22 nt, Human
aagaacagauucagccugaacu

SEQ ID NO: 1131916 - RNA, 21 nt, Human
ggccugagcaccuguccaccu

SEQ ID NO: 1131917 - RNA, 22 nt, Human
uuagaaaaaggcuguggucuua

SEQ ID NO: 1131918 - RNA, 22 nt, Human
ucagcagggcugugguguggcu

SEQ ID NO: 1131919 - RNA, 22 nt, Human
agcucuggaauaaugaugugau

SEQ ID NO: 1131920 - RNA, 22 nt, Human
acagggcagagugaaaugcuau

SEQ ID NO: 1131921 - RNA, 22 nt, Human
uggcucagcaagacauugaccu

SEQ ID NO: 1131922 - RNA, 19 nt, Human
gcaggcaguggcauucgga

SEQ ID NO: 1131923 - RNA, 22 nt, Human
ggcaaaaaccgcaauaacuucu

SEQ ID NO: 1131924 - RNA, 22 nt, Human
cucuggaauuaaggaagccugu

SEQ ID NO: 1131925 - RNA, 22 nt, Human
gaaaggucuuccggucuuccag

SEQ ID NO: 1131926 - RNA, 22 nt, Human
ucuggcucagggcucugaggga

SEQ ID NO: 1131927 - RNA, 22 nt, Human
cucccaggcacagggaggagcc

SEQ ID NO: 1131928 - RNA, 22 nt, Human
augauucagcaauuuuauaucu

SEQ ID NO: 1131929 - RNA, 22 nt, Human
ccuccaggcugaauaucuagaa

SEQ ID NO: 1131930 - RNA, 22 nt, Human
cagggugccuguccucagcaaa

SEQ ID NO: 1131931 - RNA, 22 nt, Human
cacauccuucagcugagcccag

SEQ ID NO: 1131932 - RNA, 22 nt, Human
gggcuggaggagauccagaggc

SEQ ID NO: 1131933 - RNA, 22 nt, Human
ugagcuuacuucuguacacaga

SEQ ID NO: 1131934 - RNA, 22 nt, Human
uacaugcuccacuuucuccugu

SEQ ID NO: 1131935 - RNA, 22 nt, Human
caggccuggcugcagcucgccu

SEQ ID NO: 1131936 - RNA, 22 nt, Human
uaguuuuuucaacaaauggugc

SEQ ID NO: 1131937 - RNA, 22 nt, Human
ugccagggcugcuacuggcuga

SEQ ID NO: 1131938 - RNA, 22 nt, Human
gucaggaugcuauuguuauuaa

SEQ ID NO: 1131939 - RNA, 21 nt, Human
ccacaggggcuccccugucag

SEQ ID NO: 1131940 - RNA, 22 nt, Human
uggcaggggaggugcuugcuua

SEQ ID NO: 1131941 - RNA, 22 nt, Human
ucuuccagcaaugugaaaucac

SEQ ID NO: 1131942 - RNA, 22 nt, Human
gucccugcccuccugggacuca

SEQ ID NO: 1131943 - RNA, 22 nt, Human
ggguccagcuacaucagggugg

SEQ ID NO: 1131944 - RNA, 22 nt, Human
ugggggugaaagucuggacagu

SEQ ID NO: 1131945 - RNA, 22 nt, Human
uauaguacauggaaucuucaua

SEQ ID NO: 1131946 - RNA, 22 nt, Human
acugcagccuugaacucugggc

SEQ ID NO: 1131947 - RNA, 22 nt, Human
agcugcccuucucuugcccuug

SEQ ID NO: 1131948 - RNA, 22 nt, Human
cucugugggggagaggcagcug

SEQ ID NO: 1131949 - RNA, 22 nt, Human
uauguacauggagagcaauuga

SEQ ID NO: 1131950 - RNA, 22 nt, Human
cugcaggauucucccaguugga

SEQ ID NO: 1131951 - RNA, 22 nt, Human
uggcccucagucuugcuccugc

SEQ ID NO: 1131952 - RNA, 22 nt, Human
agugaaaugauucugagcaaga

SEQ ID NO: 1131953 - RNA, 22 nt, Human
ccuggagcacucucccuggcug

SEQ ID NO: 1131954 - RNA, 22 nt, Human
caauguuugaguaggagcauaa

SEQ ID NO: 1131955 - RNA, 22 nt, Human
acagguggcauaggcaguuuga

SEQ ID NO: 1131956 - RNA, 22 nt, Human
gaagagcugcucagaacaugau

SEQ ID NO: 1131957 - RNA, 19 nt, Human
uacuuuuucaggacagagu

SEQ ID NO: 1131958 - RNA, 22 nt, Human
auaaagucauuaugaagaucua

SEQ ID NO: 1131959 - RNA, 22 nt, Human
cagcaggguagguuguaucagu

SEQ ID NO: 1131960 - RNA, 22 nt, Human
gcccagcuggcuuccagcacau

SEQ ID NO: 1131961 - RNA, 22 nt, Human
gagcugucuggggacucugggu

SEQ ID NO: 1131962 - RNA, 22 nt, Human
gcugcagcucgccuuccggccu

SEQ ID NO: 1131963 - RNA, 17 nt, Human
ucaggauccaggguucu

SEQ ID NO: 1131964 - RNA, 22 nt, Human
uguacauuuagagcucaauaga

SEQ ID NO: 1131965 - RNA, 22 nt, Human
acacagggaggaggugcugugc

SEQ ID NO: 1131966 - RNA, 22 nt, Human
cugugucggacgugggcagcag

SEQ ID NO: 1131967 - RNA, 22 nt, Human
cccaaggcauggcaugguggca

SEQ ID NO: 1131968 - RNA, 21 nt, Human
ccuggcagaagccugauaugc

SEQ ID NO: 1131969 - RNA, 19 nt, Human
acaggcagaauugggugug

SEQ ID NO: 1131970 - RNA, 22 nt, Human
cuucuaggcuucucagggggca

SEQ ID NO: 1131971 - RNA, 22 nt, Human
uggcucaguuucaguccugguu

SEQ ID NO: 1131972 - RNA, 21 nt, Human
gagcugggcgaggcuccgggg

SEQ ID NO: 1131973 - RNA, 22 nt, Human
auccaaagcccuaaguuaacug

SEQ ID NO: 1131974 - RNA, 22 nt, Human
ccugccugcaccuucucugggg

SEQ ID NO: 1131975 - RNA, 22 nt, Human
uggccugccugggagcagcagg

SEQ ID NO: 1131976 - RNA, 22 nt, Human
gcuuuauguaaguccaaaggca

SEQ ID NO: 1131977 - RNA, 22 nt, Human
agaaaaaucuuggcgcuugucu

SEQ ID NO: 1131978 - RNA, 22 nt, Human
caguacuucuuggaaacuggau

SEQ ID NO: 1131979 - RNA, 22 nt, Human
cagggccagagagggcuggcug

SEQ ID NO: 1131980 - RNA, 22 nt, Human
uaugaguacaaggacucugucu

SEQ ID NO: 1131981 - RNA, 22 nt, Human
caggccuggguucaaaucccuu

SEQ ID NO: 1131982 - RNA, 22 nt, Human
gugggccucuugaggguggcua

SEQ ID NO: 1131983 - RNA, 22 nt, Human
cugcagccucaaccuccugagc

SEQ ID NO: 1131984 - RNA, 22 nt, Human
uguauguggcuacuuuucuugc

SEQ ID NO: 1131985 - RNA, 22 nt, Human
agggacacugaugagaaauucu

SEQ ID NO: 1131986 - RNA, 20 nt, Human
uauuuagauucaaguaugga

SEQ ID NO: 1131987 - RNA, 22 nt, Human
ucccuggcuguguucaggugcg

SEQ ID NO: 1131988 - RNA, 22 nt, Human
ccugccagcauggcuuaucucc

SEQ ID NO: 1131989 - RNA, 22 nt, Human
gcugagcuagaaaaggaccaca

SEQ ID NO: 1131990 - RNA, 22 nt, Human
uugcacuccagcccgagcaaca

SEQ ID NO: 1131991 - RNA, 22 nt, Human
cacugccuccccaggcuccaca

SEQ ID NO: 1131992 - RNA, 22 nt, Human
uuucaaauggagucgugaaaug

SEQ ID NO: 1131993 - RNA, 22 nt, Human
cgcugggcgccgaccugcuggc

SEQ ID NO: 1131994 - RNA, 22 nt, Human
uggcucagaggggaagugguuu

SEQ ID NO: 1131995 - RNA, 22 nt, Human
gguggccugcccugaucccugg

SEQ ID NO: 1131996 - RNA, 22 nt, Human
agaugguguuuccccaggugga

SEQ ID NO: 1131997 - RNA, 22 nt, Human
cucccuggcacagcgagagguu

SEQ ID NO: 1131998 - RNA, 20 nt, Human
uucauucauuccacaacuuc

SEQ ID NO: 1131999 - RNA, 22 nt, Human
acugugcaugaaccgaaacaaa

SEQ ID NO: 1132000 - RNA, 22 nt, Human
ucugucugcgcuugcccuggug

SEQ ID NO: 1132001 - RNA, 22 nt, Human
accuuuuuguucuguucucagc

SEQ ID NO: 1132002 - RNA, 22 nt, Human
ccaauguuuauuuuccugcugc

SEQ ID NO: 1132003 - RNA, 22 nt, Human
cauuaagauuuuuuucuacugg

SEQ ID NO: 1132004 - RNA, 22 nt, Human
uggcucaggccuacgacgccuu

SEQ ID NO: 1132005 - RNA, 22 nt, Human
uggcccugaggggcugugcccc

SEQ ID NO: 1132006 - RNA, 22 nt, Human
gcugucccaugguugcaagaug

SEQ ID NO: 1132007 - RNA, 22 nt, Human
uaacagaaauauuuccagguga

SEQ ID NO: 1132008 - RNA, 22 nt, Human
gagcaggcauucuaguggcuga

SEQ ID NO: 1132009 - RNA, 22 nt, Human
acucugcuuauugcugcaggca

SEQ ID NO: 1132010 - RNA, 22 nt, Human
aagaugcuuauugcuccugcag

SEQ ID NO: 1132011 - RNA, 21 nt, Human
ccuauugaauauaggaagauu

SEQ ID NO: 1132012 - RNA, 22 nt, Human
aucacgucaugguuugaucugg

SEQ ID NO: 1132013 - RNA, 22 nt, Human
cagagagaggccacugcuauua

SEQ ID NO: 1132014 - RNA, 22 nt, Human
cagccccucccucaggcaggug

SEQ ID NO: 1132015 - RNA, 22 nt, Human
ccuccagguguuacauaugacu

SEQ ID NO: 1132016 - RNA, 22 nt, Human
ggcuugcuucuuguccaggaau

SEQ ID NO: 1132017 - RNA, 22 nt, Human
uuuccucugagugagcugggag

SEQ ID NO: 1132018 - RNA, 22 nt, Human
auguuuugcuggauguuggcua

SEQ ID NO: 1132019 - RNA, 22 nt, Human
uucuggagagaaaccuuacaaa

SEQ ID NO: 1132020 - RNA, 22 nt, Human
cucaggacccgguccagguggg

SEQ ID NO: 1132021 - RNA, 23 nt, Human
uggcaccaggcauucuaggggua

SEQ ID NO: 1132022 - RNA, 22 nt, Human
guuuggggucugcagagcggcg

SEQ ID NO: 1132023 - RNA, 22 nt, Human
acucccagguugccuggcaggc

SEQ ID NO: 1132024 - RNA, 22 nt, Human
ugccaggagagugcaugcaggg

SEQ ID NO: 1132025 - RNA, 22 nt, Human
uuccucucucuugccagaaugu

SEQ ID NO: 1132026 - RNA, 18 nt, Human
gggcucugauccuucacc

SEQ ID NO: 1132027 - RNA, 22 nt, Human
ucucugcucugugccucaguuu

SEQ ID NO: 1132028 - RNA, 22 nt, Human
ucugucacuuauuaagauggau

SEQ ID NO: 1132029 - RNA, 22 nt, Human
gccugucucuuggaacuuggua

SEQ ID NO: 1132030 - RNA, 19 nt, Human
cugagagaugcuucacaca

SEQ ID NO: 1132031 - RNA, 22 nt, Human
auaugaagaauuccaauuugga

SEQ ID NO: 1132032 - RNA, 22 nt, Human
gggcugucaugugucagugacc

SEQ ID NO: 1132033 - RNA, 22 nt, Human
uauaaaguuucgaaagauguau

SEQ ID NO: 1132034 - RNA, 22 nt, Human
uggcagggaauacagauguuua

SEQ ID NO: 1132035 - RNA, 22 nt, Human
cugucugcuagaacaucuauac

SEQ ID NO: 1132036 - RNA, 22 nt, Human
guggccuggauagacuccaucu

SEQ ID NO: 1132037 - RNA, 22 nt, Human
guaauugacucagcucuguuca

SEQ ID NO: 1132038 - RNA, 22 nt, Human
ucuagaaaaaaacugcugugga

SEQ ID NO: 1132039 - RNA, 22 nt, Human
ggaggccaaggcaggcggauca

SEQ ID NO: 1132040 - RNA, 22 nt, Human
gccagggcucgcggucccucgu

SEQ ID NO: 1132041 - RNA, 22 nt, Human
aggcugggcaccguuuugaucc

SEQ ID NO: 1132042 - RNA, 22 nt, Human
caggcaggugcagauuccucuu

SEQ ID NO: 1132043 - RNA, 22 nt, Human
agcucccagcuccuuugagaga

SEQ ID NO: 1132044 - RNA, 22 nt, Human
uacagggguaacaguggggaau

SEQ ID NO: 1132045 - RNA, 17 nt, Human
gguggccugcaguggcu

SEQ ID NO: 1132046 - RNA, 18 nt, Human
ucugucuguacaaguauc

SEQ ID NO: 1132047 - RNA, 22 nt, Human
gcagggccagggcucaggcugu

SEQ ID NO: 1132048 - RNA, 22 nt, Human
agcugcagucaagcugggccac

SEQ ID NO: 1132049 - RNA, 22 nt, Human
acagggcaaccucugggagacu

SEQ ID NO: 1132050 - RNA, 22 nt, Human
ccagggcauguaacuaauggug

SEQ ID NO: 1132051 - RNA, 22 nt, Human
cuggagagaccgaaagaggcug

SEQ ID NO: 1132052 - RNA, 22 nt, Human
uccugggcccaggcugccaggg

SEQ ID NO: 1132053 - RNA, 22 nt, Human
cagguggguguaugaaugcaaa

SEQ ID NO: 1132054 - RNA, 22 nt, Human
ugaagcugugggcaguggagcc

SEQ ID NO: 1132055 - RNA, 22 nt, Human
ucuuugcaaauguuauuaucuu

SEQ ID NO: 1132056 - RNA, 22 nt, Human
aaggcagccucugccagccggg

SEQ ID NO: 1132057 - RNA, 22 nt, Human
uccauugucuuugguccuagcc

SEQ ID NO: 1132058 - RNA, 22 nt, Human
ccagaggugcugggagaggucu

SEQ ID NO: 1132059 - RNA, 22 nt, Human
acugcagcaaagcccgugucuu

SEQ ID NO: 1132060 - RNA, 16 nt, Human
ggagagugucugcaaa

SEQ ID NO: 1132061 - RNA, 22 nt, Human
ucacuggggccuuuggucagga

SEQ ID NO: 1132062 - RNA, 22 nt, Human
caguauguuugggagacaugac

SEQ ID NO: 1132063 - RNA, 22 nt, Human
acuccugguuuguguccuggcu

SEQ ID NO: 1132064 - RNA, 22 nt, Human
gccuuugcaccaucagugcaau

SEQ ID NO: 1132065 - RNA, 22 nt, Human
caggcugggcagccuccccggc

SEQ ID NO: 1132066 - RNA, 23 nt, Human
agcuggaggcugucuacucccaa

SEQ ID NO: 1132067 - RNA, 20 nt, Human
gcauugaguauagacagaug

SEQ ID NO: 1132068 - RNA, 22 nt, Human
agggccaggaacaccugaaggg

SEQ ID NO: 1132069 - RNA, 22 nt, Human
ggagccaggcaaucuguacuuu

SEQ ID NO: 1132070 - RNA, 21 nt, Human
ggagcugcaggagccgaaggc

SEQ ID NO: 1132071 - RNA, 22 nt, Human
cugaggagagaucacguggugu

SEQ ID NO: 1132072 - RNA, 19 nt, Human
cacagggcaggucucaugu

SEQ ID NO: 1132073 - RNA, 22 nt, Human
ugggaggaaugucacugagcca

SEQ ID NO: 1132074 - RNA, 22 nt, Human
ucugccuggauuuuggaaagcu

SEQ ID NO: 1132075 - RNA, 22 nt, Human
aagcagaugggacuccaaggca

SEQ ID NO: 1132076 - RNA, 22 nt, Human
aggcacuggguaauuaguagcu

SEQ ID NO: 1132077 - RNA, 22 nt, Human
uacauuccauguguguguauuc

SEQ ID NO: 1132078 - RNA, 22 nt, Human
agggacagaugaaugacugagu

SEQ ID NO: 1132079 - RNA, 22 nt, Human
uccugcagccacugcaggcaga

SEQ ID NO: 1132080 - RNA, 22 nt, Human
cagaguacugggagaacagaag

SEQ ID NO: 1132081 - RNA, 22 nt, Human
aagguacaaaguauuauuuaaa

SEQ ID NO: 1132082 - RNA, 22 nt, Human
uaaugcacaugacugaacuauu

SEQ ID NO: 1132083 - RNA, 22 nt, Human
aguugaaauuagaguccuggcu

SEQ ID NO: 1132084 - RNA, 22 nt, Human
gcagcugagcgugaggaagagu

SEQ ID NO: 1132085 - RNA, 22 nt, Human
auccauggcuaaguauauagag

SEQ ID NO: 1132086 - RNA, 22 nt, Human
guuugcauuucuugaacuauau

SEQ ID NO: 1132087 - RNA, 22 nt, Human
aaaguuugaaugauauauuagu

SEQ ID NO: 1132088 - RNA, 22 nt, Human
ucuuuccuguaacugcuguuca

SEQ ID NO: 1132089 - RNA, 22 nt, Human
cagcuggaugggagaccauguu

SEQ ID NO: 1132090 - RNA, 22 nt, Human
ugaugggacugccagcugcuga

SEQ ID NO: 1132091 - RNA, 22 nt, Human
ugccaggcgugguggugcgcac

SEQ ID NO: 1132092 - RNA, 22 nt, Human
acagccagggucucaggaggcg

SEQ ID NO: 1132093 - RNA, 22 nt, Human
ggccaggaagggaagaucagca

SEQ ID NO: 1132094 - RNA, 22 nt, Human
uccagugguacauggagacacu

SEQ ID NO: 1132095 - RNA, 22 nt, Human
gcucugcugaagccccuugcau

SEQ ID NO: 1132096 - RNA, 22 nt, Human
ccuggcagcauugguagagauu

SEQ ID NO: 1132097 - RNA, 22 nt, Human
ucaccugggagggcugugguag

SEQ ID NO: 1132098 - RNA, 22 nt, Human
uuuuccucuguauuugaaaugc

SEQ ID NO: 1132099 - RNA, 22 nt, Human
auggcaggcccagguguucauu

SEQ ID NO: 1132100 - RNA, 22 nt, Human
gggacuggaacuacuggugcag

SEQ ID NO: 1132101 - RNA, 19 nt, Human
aggguccagggagcggcuc

SEQ ID NO: 1132102 - RNA, 22 nt, Human
uaagaacaguagaacaguaggu

SEQ ID NO: 1132103 - RNA, 22 nt, Human
gcugggagaggcccugaaguga

SEQ ID NO: 1132104 - RNA, 21 nt, Human
gcucucugcaugguggcucag

SEQ ID NO: 1132105 - RNA, 22 nt, Human
ccaggcagagggauccccaucc

SEQ ID NO: 1132106 - RNA, 22 nt, Human
caaagaugcugauguuggauca

SEQ ID NO: 1132107 - RNA, 22 nt, Human
uguuuuguuuaugagagcacag

SEQ ID NO: 1132108 - RNA, 22 nt, Human
uacauauuugucuuuguacugu

SEQ ID NO: 1132109 - RNA, 22 nt, Human
gggagggaaggaggcgccgugu

SEQ ID NO: 1132110 - RNA, 22 nt, Human
uaaauucccaacucugcucuuc

SEQ ID NO: 1132111 - RNA, 22 nt, Human
ggcugcuucucacucauuugca

SEQ ID NO: 1132112 - RNA, 22 nt, Human
gcagcacauauaaacaaagaga

SEQ ID NO: 1132113 - RNA, 22 nt, Human
cagcaggcguugggagaaagac

SEQ ID NO: 1132114 - RNA, 22 nt, Human
gcauuucugugcauacacauga

SEQ ID NO: 1132115 - RNA, 22 nt, Human
uguguguguaaaagcauuuaua

SEQ ID NO: 1132116 - RNA, 21 nt, Human
gcagagccggggcgagaaggc

SEQ ID NO: 1132117 - RNA, 22 nt, Human
ggguggcacaggugcagagggu

SEQ ID NO: 1132118 - RNA, 22 nt, Human
ccuggccucagacagagggugg

SEQ ID NO: 1132119 - RNA, 22 nt, Human
agugggcagcccaggaggucuu

SEQ ID NO: 1132120 - RNA, 22 nt, Human
cugggugguucuaacuguugau

SEQ ID NO: 1132121 - RNA, 22 nt, Human
cagccagcugaauguaccauga

SEQ ID NO: 1132122 - RNA, 22 nt, Human
ugccuggaugugcuggccucac

SEQ ID NO: 1132123 - RNA, 22 nt, Human
ggaugcaggacggcauggaugu

SEQ ID NO: 1132124 - RNA, 22 nt, Human
cuuauguacacacauauauugu

SEQ ID NO: 1132125 - RNA, 22 nt, Human
ccagcuugaagaugugcugguu

SEQ ID NO: 1132126 - RNA, 22 nt, Human
cuucccugauaagagccucaga

SEQ ID NO: 1132127 - RNA, 17 nt, Human
agaggcagauacuugga

SEQ ID NO: 1132128 - RNA, 22 nt, Human
ggagucccagcaaagccuuccc

SEQ ID NO: 1132129 - RNA, 22 nt, Human
agcacuuuccuggcaaaugugg

SEQ ID NO: 1132130 - RNA, 22 nt, Human
agagcuguucagcagccagguu

SEQ ID NO: 1132131 - RNA, 22 nt, Human
ugcugggcuaggguggagcucu

SEQ ID NO: 1132132 - RNA, 22 nt, Human
ugggcucugaagucagucugcu

SEQ ID NO: 1132133 - RNA, 22 nt, Human
caaauguguuuuuucuucuaca

SEQ ID NO: 1132134 - RNA, 22 nt, Human
cuggguggcuguccagccagcc

SEQ ID NO: 1132135 - RNA, 17 nt, Human
uuccccugaccaagccu

SEQ ID NO: 1132136 - RNA, 22 nt, Human
aggaaaaaccuguuaaugguag

SEQ ID NO: 1132137 - RNA, 22 nt, Human
ggacacaagcuccggggcugca

SEQ ID NO: 1132138 - RNA, 22 nt, Human
ccugccugguguaagucuaagg

SEQ ID NO: 1132139 - RNA, 22 nt, Human
ugggcucuccuggaggacaaca

SEQ ID NO: 1132140 - RNA, 22 nt, Human
uccaguggugguuugaagggca

SEQ ID NO: 1132141 - RNA, 22 nt, Human
uagcugccuuugggcuccugcu

SEQ ID NO: 1132142 - RNA, 22 nt, Human
aaggcacuguacuaguuaguua

SEQ ID NO: 1132143 - RNA, 22 nt, Human
uagcugccuaugugauaagaga

SEQ ID NO: 1132144 - RNA, 17 nt, Human
cagggcugucugccuag

SEQ ID NO: 1132145 - RNA, 22 nt, Human
aagggcagcugacagaugcuua

SEQ ID NO: 1132146 - RNA, 22 nt, Human
caaggagaguaauugaaugaga

SEQ ID NO: 1132147 - RNA, 23 nt, Human
acagcugcaccuggccgccuggc

SEQ ID NO: 1132148 - RNA, 22 nt, Human
uggcucugggaaucuguugcuu

SEQ ID NO: 1132149 - RNA, 22 nt, Human
ugcuggcccuggcucagggaac

SEQ ID NO: 1132150 - RNA, 21 nt, Human
ucaggggcuguguuuuccauc

SEQ ID NO: 1132151 - RNA, 22 nt, Human
uuauuuaauuuucucacucaga

SEQ ID NO: 1132152 - RNA, 22 nt, Human
acuccugggugcugaccagcgu

SEQ ID NO: 1132153 - RNA, 22 nt, Human
caggugggcuugggagaacacu

SEQ ID NO: 1132154 - RNA, 18 nt, Human
ugucauugccagggaagc

SEQ ID NO: 1132155 - RNA, 22 nt, Human
uuuuccuacugauaaacaguua

SEQ ID NO: 1132156 - RNA, 22 nt, Human
uggcagagaaccugggcuuugu

SEQ ID NO: 1132157 - RNA, 22 nt, Human
ugcugucuguuuacuggcuaua

SEQ ID NO: 1132158 - RNA, 22 nt, Human
caggcacugugcugagcucugc

SEQ ID NO: 1132159 - RNA, 22 nt, Human
agcugcugagccaggcugaugu

SEQ ID NO: 1132160 - RNA, 22 nt, Human
gccuccuggauuuuagugccau

SEQ ID NO: 1132161 - RNA, 22 nt, Human
ggcugucucugugacugccacc

SEQ ID NO: 1132162 - RNA, 22 nt, Human
uggcccugaggacccagugugg

SEQ ID NO: 1132163 - RNA, 22 nt, Human
ggccagaggccauccuccugcu

SEQ ID NO: 1132164 - RNA, 22 nt, Human
aggccugagcagaggaguggac

SEQ ID NO: 1132165 - RNA, 22 nt, Human
ccuggagggcgccgcacagucc

SEQ ID NO: 1132166 - RNA, 17 nt, Human
uggcucugaggcugaau

SEQ ID NO: 1132167 - RNA, 22 nt, Human
ggaaagagcccagcagugcuug

SEQ ID NO: 1132168 - RNA, 22 nt, Human
gccuggagaagauggaacuagc

SEQ ID NO: 1132169 - RNA, 22 nt, Human
gugcugucguggaacugggcug

SEQ ID NO: 1132170 - RNA, 22 nt, Human
gcuguauuccugcacuguauag

SEQ ID NO: 1132171 - RNA, 22 nt, Human
aagggccuccuggggagccugg

SEQ ID NO: 1132172 - RNA, 22 nt, Human
caugagcugcugggagccuguc

SEQ ID NO: 1132173 - RNA, 22 nt, Human
agaggccagguccagaguuugu

SEQ ID NO: 1132174 - RNA, 22 nt, Human
guguuuccucuagaagccaugg

SEQ ID NO: 1132175 - RNA, 22 nt, Human
ucuggcucauacaagccugcaa

SEQ ID NO: 1132176 - RNA, 22 nt, Human
aguauguagugcaaucagucag

SEQ ID NO: 1132177 - RNA, 23 nt, Human
ucagcugcuuccuccugccugcc

SEQ ID NO: 1132178 - RNA, 19 nt, Human
uggcaggcccaggauggac

SEQ ID NO: 1132179 - RNA, 22 nt, Human
agaugcugcuccacaggccagg

SEQ ID NO: 1132180 - RNA, 22 nt, Human
uguggcuguguccaccugcugc

SEQ ID NO: 1132181 - RNA, 22 nt, Human
guuugucuuaauuaggcaucga

SEQ ID NO: 1132182 - RNA, 22 nt, Human
cagccucuaagcacagccucuc

SEQ ID NO: 1132183 - RNA, 21 nt, Human
ugauccuuucccccauguugc

SEQ ID NO: 1132184 - RNA, 22 nt, Human
ggugacugguuuaucuggcagu

SEQ ID NO: 1132185 - RNA, 22 nt, Human
aagauuucugcuccugagagaa

SEQ ID NO: 1132186 - RNA, 22 nt, Human
agaauguagucuuggagauuua

SEQ ID NO: 1132187 - RNA, 22 nt, Human
cagcaguguggaagcugagggg

SEQ ID NO: 1132188 - RNA, 22 nt, Human
ugaaaguuacaggaaaacagau

SEQ ID NO: 1132189 - RNA, 17 nt, Human
ucuguccagggagugug

SEQ ID NO: 1132190 - RNA, 22 nt, Human
gagcuguccgccccugggccga

SEQ ID NO: 1132191 - RNA, 22 nt, Human
ugugaaaggagccauagacagu

SEQ ID NO: 1132192 - RNA, 22 nt, Human
agaaaugacacacaugagacau

SEQ ID NO: 1132193 - RNA, 22 nt, Human
gggagggauuaguucugccugg

SEQ ID NO: 1132194 - RNA, 22 nt, Human
ccugggagugugccaucucugu

SEQ ID NO: 1132195 - RNA, 22 nt, Human
gcaaggcugagcacauuugcau

SEQ ID NO: 1132196 - RNA, 22 nt, Human
aggcaguguauugcuagcggcu

SEQ ID NO: 1132197 - RNA, 22 nt, Human
ccaggacuuauuacaguauaac

SEQ ID NO: 1132198 - RNA, 17 nt, Human
guccugggaggagagag

SEQ ID NO: 1132199 - RNA, 22 nt, Human
gcugguuaggugagggugcgcc

SEQ ID NO: 1132200 - RNA, 22 nt, Human
gccucugcaucuucgccgcacu

SEQ ID NO: 1132201 - RNA, 22 nt, Human
ccucagagguguggcaucucug

SEQ ID NO: 1132202 - RNA, 22 nt, Human
aggcagcaaagaaaugaugcug

SEQ ID NO: 1132203 - RNA, 22 nt, Human
augcaagauguauagaagacuu

SEQ ID NO: 1132204 - RNA, 22 nt, Human
cagcauuggguuaccuuuguuu

SEQ ID NO: 1132205 - RNA, 22 nt, Human
cagagcugacccaaggauugaa

SEQ ID NO: 1132206 - RNA, 22 nt, Human
gccucugcccauccaccaucag

SEQ ID NO: 1132207 - RNA, 22 nt, Human
agcuggcccucgagagccaauu

SEQ ID NO: 1132208 - RNA, 22 nt, Human
uguucuugagccuuuagaccua

SEQ ID NO: 1132209 - RNA, 22 nt, Human
uggagcaggugccaggugugug

SEQ ID NO: 1132210 - RNA, 22 nt, Human
agaccagcugccucccagggcc

SEQ ID NO: 1132211 - RNA, 22 nt, Human
aggagccuccuucucaugugca

SEQ ID NO: 1132212 - RNA, 22 nt, Human
gggacagacccaugggccaggu

SEQ ID NO: 1132213 - RNA, 22 nt, Human
gugauuucaaauauagagugag

SEQ ID NO: 1132214 - RNA, 23 nt, Human
uggagcugacagucagagggagg

SEQ ID NO: 1132215 - RNA, 22 nt, Human
caagagcugcaaauagcgugac

SEQ ID NO: 1132216 - RNA, 18 nt, Human
ggccugaggauuucagca

SEQ ID NO: 1132217 - RNA, 18 nt, Human
cuuucagauggauaugcu

SEQ ID NO: 1132218 - RNA, 22 nt, Human
uguguguguuucugcucauaca

SEQ ID NO: 1132219 - RNA, 22 nt, Human
guucaaagcuccugguacagua

SEQ ID NO: 1132220 - RNA, 22 nt, Human
ccagccagcugcccuuggggcc

SEQ ID NO: 1132221 - RNA, 22 nt, Human
aagagggcugcaaucuuauugc

SEQ ID NO: 1132222 - RNA, 22 nt, Human
gcugggagucgcgucuguggcc

SEQ ID NO: 1132223 - RNA, 22 nt, Human
aaaguuuguuauaugauaagga

SEQ ID NO: 1132224 - RNA, 22 nt, Human
cauguaaaacacucagaacagu

SEQ ID NO: 1132225 - RNA, 22 nt, Human
caggaaccuaaagagacauuac

SEQ ID NO: 1132226 - RNA, 22 nt, Human
gcugaagggagugcugagucug

SEQ ID NO: 1132227 - RNA, 22 nt, Human
cauuucugcagaauugcucuuc

SEQ ID NO: 1132228 - RNA, 22 nt, Human
ucugccuuccccauaaucugau

SEQ ID NO: 1132229 - RNA, 22 nt, Human
uggcucuggugcgggcuccugc

SEQ ID NO: 1132230 - RNA, 22 nt, Human
uuugaacaagagcuucacauua

SEQ ID NO: 1132231 - RNA, 22 nt, Human
uucaaugaggauagaacuggau

SEQ ID NO: 1132232 - RNA, 23 nt, Human
uuugcaaauuggacacaaccaca

SEQ ID NO: 1132233 - RNA, 22 nt, Human
aaaagguagauucuccuucuau

SEQ ID NO: 1132234 - RNA, 22 nt, Human
acagccagggcauugucgccga

SEQ ID NO: 1132235 - RNA, 22 nt, Human
agccuggauucgugcauccaca

SEQ ID NO: 1132236 - RNA, 22 nt, Human
gaagcucucaaacucuccccuu

SEQ ID NO: 1132237 - RNA, 22 nt, Human
auugaaagaguuuucugcugca

SEQ ID NO: 1132238 - RNA, 22 nt, Human
uggaggaugccuggggaggccu

SEQ ID NO: 1132239 - RNA, 19 nt, Human
agcagcuggagguggagug

SEQ ID NO: 1132240 - RNA, 22 nt, Human
cuuugaaagcucccaggacuua

SEQ ID NO: 1132241 - RNA, 21 nt, Human
aacaaagggaugcucaucuuu

SEQ ID NO: 1132242 - RNA, 22 nt, Human
uagggaggcuacuucuuguagg

SEQ ID NO: 1132243 - RNA, 21 nt, Human
ucccagggccaggugccauca

SEQ ID NO: 1132244 - RNA, 19 nt, Human
cugugcuuuaaacuccuau

SEQ ID NO: 1132245 - RNA, 22 nt, Human
cuugucugugucggauaaaacu

SEQ ID NO: 1132246 - RNA, 22 nt, Human
cgcugccaggucaccaggggua

SEQ ID NO: 1132247 - RNA, 22 nt, Human
cagcaggguuaagugacucacc

SEQ ID NO: 1132248 - RNA, 22 nt, Human
ugcauuaucuuuaauguucuca

SEQ ID NO: 1132249 - RNA, 22 nt, Human
cauucacucagcgaugccagua

SEQ ID NO: 1132250 - RNA, 22 nt, Human
caaacugagcaucagaaaguuu

SEQ ID NO: 1132251 - RNA, 22 nt, Human
agcugucagugcugugccugua

SEQ ID NO: 1132252 - RNA, 22 nt, Human
ggcuccuggcaucuggugggua

SEQ ID NO: 1132253 - RNA, 22 nt, Human
gcccacacaccagcucaggagg

SEQ ID NO: 1132254 - RNA, 22 nt, Human
ggccucuggucaagacaagcau

SEQ ID NO: 1132255 - RNA, 22 nt, Human
auaaggcaucucucaguuagca

SEQ ID NO: 1132256 - RNA, 22 nt, Human
gcuggccugcaaagcccggcug

SEQ ID NO: 1132257 - RNA, 22 nt, Human
agggcagaaaccaccuugaugg

SEQ ID NO: 1132258 - RNA, 20 nt, Human
ccaggcacugucccaugcag

SEQ ID NO: 1132259 - RNA, 22 nt, Human
cagaguccuggacacagagaca

SEQ ID NO: 1132260 - RNA, 22 nt, Human
ggaugcaggggcagcagagccu

SEQ ID NO: 1132261 - RNA, 22 nt, Human
uagugauuaaaggcagaauguu

SEQ ID NO: 1132262 - RNA, 22 nt, Human
ucucuggaauuggcugaggcaa

SEQ ID NO: 1132263 - RNA, 22 nt, Human
aaucuuucccuauuaaaugugg

SEQ ID NO: 1132264 - RNA, 22 nt, Human
augugugugcauuucucucccu

SEQ ID NO: 1132265 - RNA, 22 nt, Human
agggagcaugggugaagcaggc

SEQ ID NO: 1132266 - RNA, 22 nt, Human
gagacugauggggcucccagaa

SEQ ID NO: 1132267 - RNA, 22 nt, Human
cugcagagcauaaaucugaaua

SEQ ID NO: 1132268 - RNA, 22 nt, Human
auacauuagaaucugguacuca

SEQ ID NO: 1132269 - RNA, 22 nt, Human
caggaaagagcugccaggcagg

SEQ ID NO: 1132270 - RNA, 22 nt, Human
cuacacaguucugccuaauggc

SEQ ID NO: 1132271 - RNA, 22 nt, Human
aaugucugccugaacuuuauau

SEQ ID NO: 1132272 - RNA, 22 nt, Human
ggggcccagcaccccuccucgc

SEQ ID NO: 1132273 - RNA, 22 nt, Human
gcagcugcaggcaggcuugcug

SEQ ID NO: 1132274 - RNA, 22 nt, Human
cuggacagaaaaggccacugga

SEQ ID NO: 1132275 - RNA, 22 nt, Human
ucaucacauaugucaugauuug

SEQ ID NO: 1132276 - RNA, 22 nt, Human
aacccuggggcagcugcuaggg

SEQ ID NO: 1132277 - RNA, 18 nt, Human
ccugcagcccaggaggcc

SEQ ID NO: 1132278 - RNA, 22 nt, Human
agaacagcaguuaugguucauu

SEQ ID NO: 1132279 - RNA, 18 nt, Human
auggucucauacugggag

SEQ ID NO: 1132280 - RNA, 22 nt, Human
auuuuuaugacaaaccauccuc

SEQ ID NO: 1132281 - RNA, 22 nt, Human
ccagaccacccuggccaugcac

SEQ ID NO: 1132282 - RNA, 22 nt, Human
auagacuugguuaguaaauuug

SEQ ID NO: 1132283 - RNA, 20 nt, Human
gcacugaagguuccagggga

SEQ ID NO: 1132284 - RNA, 22 nt, Human
aaggagucucagcugggccuga

SEQ ID NO: 1132285 - RNA, 22 nt, Human
ucacagggcauuauggcuccag

SEQ ID NO: 1132286 - RNA, 22 nt, Human
cuucucucugcauaggcauggg

SEQ ID NO: 1132287 - RNA, 22 nt, Human
ugcauuugucuugucucaugaa

SEQ ID NO: 1132288 - RNA, 22 nt, Human
uggagcaagcuggagagaacau

SEQ ID NO: 1132289 - RNA, 22 nt, Human
caguccuggggaccaggcugag

SEQ ID NO: 1132290 - RNA, 23 nt, Human
uggcagugaucaaaagcuuacau

SEQ ID NO: 1132291 - RNA, 22 nt, Human
auuauaggcuugagccaccgug

SEQ ID NO: 1132292 - RNA, 22 nt, Human
ccagcuggaagagugcagaacu

SEQ ID NO: 1132293 - RNA, 22 nt, Human
cagggcagggauguugcggcag

SEQ ID NO: 1132294 - RNA, 22 nt, Human
ccacagggugucaucagcuuga

SEQ ID NO: 1132295 - RNA, 22 nt, Human
agugcacaccuuaguacaaagu

SEQ ID NO: 1132296 - RNA, 22 nt, Human
uccagagggcgauggcuggggg

SEQ ID NO: 1132297 - RNA, 22 nt, Human
ccuggagcccaaggcagugaga

SEQ ID NO: 1132298 - RNA, 22 nt, Human
gagcucuggcagggcaggucug

SEQ ID NO: 1132299 - RNA, 22 nt, Human
aaguucuaauuuugcauucagg

SEQ ID NO: 1132300 - RNA, 22 nt, Human
agaggcugaaugaugucaucau

SEQ ID NO: 1132301 - RNA, 19 nt, Human
cagaguacaccagauagga

SEQ ID NO: 1132302 - RNA, 22 nt, Human
ccaaaguccauaguuuacauua

SEQ ID NO: 1132303 - RNA, 23 nt, Human
agcagccauagggaagcaauaca

SEQ ID NO: 1132304 - RNA, 22 nt, Human
gagaagcaaucaguggccaccc

SEQ ID NO: 1132305 - RNA, 17 nt, Human
uguauguggauacacua

SEQ ID NO: 1132306 - RNA, 22 nt, Human
cuggccucaccucagacuuacu

SEQ ID NO: 1132307 - RNA, 22 nt, Human
ccucccucuuucagucccacag

SEQ ID NO: 1132308 - RNA, 22 nt, Human
caccagggcucugagcucugaa

SEQ ID NO: 1132309 - RNA, 22 nt, Human
cagagcugcucaugguggccag

SEQ ID NO: 1132310 - RNA, 19 nt, Human
agcagagcagggccguggg

SEQ ID NO: 1132311 - RNA, 22 nt, Human
ugggcacuguagcuggugcugg

SEQ ID NO: 1132312 - RNA, 22 nt, Human
agcugcuccuuuccugcaggcg

SEQ ID NO: 1132313 - RNA, 22 nt, Human
gcagaggcaaucagguaugugg

SEQ ID NO: 1132314 - RNA, 22 nt, Human
cuuaggcagggcuggaagaucu

SEQ ID NO: 1132315 - RNA, 22 nt, Human
gcaaagucucaagacccaagug

SEQ ID NO: 1132316 - RNA, 22 nt, Human
cugagccagagggagucggguc

SEQ ID NO: 1132317 - RNA, 22 nt, Human
uacauaguauucacauuguuuu

SEQ ID NO: 1132318 - RNA, 22 nt, Human
cauacauuuugcauauuuacca

SEQ ID NO: 1132319 - RNA, 21 nt, Human
agcagcugggcaacauggagg

SEQ ID NO: 1132320 - RNA, 23 nt, Human
ucagaaugcacugaauuuacccu

SEQ ID NO: 1132321 - RNA, 22 nt, Human
aagggcagagggaaucccacau

SEQ ID NO: 1132322 - RNA, 22 nt, Human
ucauaaaacacaccagguaguu

SEQ ID NO: 1132323 - RNA, 22 nt, Human
cuacuucugugaugaaacuaca

SEQ ID NO: 1132324 - RNA, 22 nt, Human
uucuguguggguagcuccuguu

SEQ ID NO: 1132325 - RNA, 22 nt, Human
cagcugccugucuggaggcaau

SEQ ID NO: 1132326 - RNA, 22 nt, Human
uaaugaauaaacuugagaguca

SEQ ID NO: 1132327 - RNA, 22 nt, Human
acuguguccuauuuccuugaca

SEQ ID NO: 1132328 - RNA, 20 nt, Human
aguaccuuuuguauguuacc

SEQ ID NO: 1132329 - RNA, 22 nt, Human
ccagcccucacugaggccucuc

SEQ ID NO: 1132330 - RNA, 22 nt, Human
aaaaaugugaccacaggguguu

SEQ ID NO: 1132331 - RNA, 22 nt, Human
uguuuuguccuuuucuauauac

SEQ ID NO: 1132332 - RNA, 17 nt, Human
ccagagcuacugagacu

SEQ ID NO: 1132333 - RNA, 22 nt, Human
agagccaggcaggcaauguuga

SEQ ID NO: 1132334 - RNA, 22 nt, Human
acuguguccucauguggcagaa

SEQ ID NO: 1132335 - RNA, 22 nt, Human
ggcugcugcccaccccugcaug

SEQ ID NO: 1132336 - RNA, 22 nt, Human
agugccaggagcaaggagcucc

SEQ ID NO: 1132337 - RNA, 22 nt, Human
caguggguaggaaaggcucuuc

SEQ ID NO: 1132338 - RNA, 22 nt, Human
augacagaaggccucccugaca

SEQ ID NO: 1132339 - RNA, 22 nt, Human
augcacagcagugaguucagug

SEQ ID NO: 1132340 - RNA, 22 nt, Human
uagagcuauuuagagcauuuua

SEQ ID NO: 1132341 - RNA, 22 nt, Human
accuuuuuucagaacucuaaag

SEQ ID NO: 1132342 - RNA, 22 nt, Human
cagcuugcaguacuuguuuuug

SEQ ID NO: 1132343 - RNA, 22 nt, Human
caugggaggucugcaaggugcu

SEQ ID NO: 1132344 - RNA, 22 nt, Human
ggcuuauauauuuucacuugcc

SEQ ID NO: 1132345 - RNA, 22 nt, Human
uuuuuccuuagggguuacucac

SEQ ID NO: 1132346 - RNA, 22 nt, Human
agauuucccucuuguauuugca

SEQ ID NO: 1132347 - RNA, 22 nt, Human
gcucagccgaacuucagagcag

SEQ ID NO: 1132348 - RNA, 22 nt, Human
uggcuggggccacaguuuuccu

SEQ ID NO: 1132349 - RNA, 22 nt, Human
cagcaauaacucaaagccauuu

SEQ ID NO: 1132350 - RNA, 19 nt, Human
aucuuacagagcagaguac

SEQ ID NO: 1132351 - RNA, 22 nt, Human
uagaaacacagaucugguguca

SEQ ID NO: 1132352 - RNA, 22 nt, Human
gcaggagugacauggaugugga

SEQ ID NO: 1132353 - RNA, 22 nt, Human
ccugacucuggccaggccagcu

SEQ ID NO: 1132354 - RNA, 22 nt, Human
ccuuucagaugggcauggaccg

SEQ ID NO: 1132355 - RNA, 20 nt, Human
ucagaggcugccagcugggg

SEQ ID NO: 1132356 - RNA, 22 nt, Human
aaggccagcuuguagggcuggu

SEQ ID NO: 1132357 - RNA, 22 nt, Human
uuucacaauuuuaaggagcaaa

SEQ ID NO: 1132358 - RNA, 22 nt, Human
gauuauauaauggaagcucuug

SEQ ID NO: 1132359 - RNA, 22 nt, Human
gcagacagacugcagugauuuu

SEQ ID NO: 1132360 - RNA, 22 nt, Human
cucacuggcaagacuacaggug

SEQ ID NO: 1132361 - RNA, 22 nt, Human
gcucugugggugaguagaaucu

SEQ ID NO: 1132362 - RNA, 22 nt, Human
cugggacuuuacccuguggccc

SEQ ID NO: 1132363 - RNA, 22 nt, Human
caagagcuagacuuugucagga

SEQ ID NO: 1132364 - RNA, 20 nt, Human
uaaggcuguuuuguauuccu

SEQ ID NO: 1132365 - RNA, 21 nt, Human
guauucuuuaugaagugaaaa

SEQ ID NO: 1132366 - RNA, 22 nt, Human
cgcugggggaacagcgagggug

SEQ ID NO: 1132367 - RNA, 22 nt, Human
uggccucuggcugaggacuaac

SEQ ID NO: 1132368 - RNA, 22 nt, Human
gcugccacauuuucaggacuaa

SEQ ID NO: 1132369 - RNA, 22 nt, Human
uacuuugucauucuaaccuucc

SEQ ID NO: 1132370 - RNA, 22 nt, Human
ugccagaagauucucuaucaga

SEQ ID NO: 1132371 - RNA, 22 nt, Human
uccugagagcagaguccaggug

SEQ ID NO: 1132372 - RNA, 22 nt, Human
gcugagguggcugccuuaguaa

SEQ ID NO: 1132373 - RNA, 22 nt, Human
ucaggggagguugaaucgucuc

SEQ ID NO: 1132374 - RNA, 22 nt, Human
gcucccagauuucagccuugug

SEQ ID NO: 1132375 - RNA, 22 nt, Human
agucccagcuucccccaugcag

SEQ ID NO: 1132376 - RNA, 22 nt, Human
gcaaagguagccaaggagcuca

SEQ ID NO: 1132377 - RNA, 19 nt, Human
ucaaagucugagucacuuu

SEQ ID NO: 1132378 - RNA, 22 nt, Human
cagacccucgggugaguuggcc

SEQ ID NO: 1132379 - RNA, 22 nt, Human
aggaccuguagggccugcaucc

SEQ ID NO: 1132380 - RNA, 22 nt, Human
ucuuuacaaucuaagcauaguu

SEQ ID NO: 1132381 - RNA, 22 nt, Human
uuucacaaugcaauccuacuuc

SEQ ID NO: 1132382 - RNA, 22 nt, Human
gaggcccaggucaagcagccac

SEQ ID NO: 1132383 - RNA, 22 nt, Human
guugggaagcagauggaugagc

SEQ ID NO: 1132384 - RNA, 22 nt, Human
agcccagaggcugggcgugcau

SEQ ID NO: 1132385 - RNA, 21 nt, Human
agacagaacaacugcucucca

SEQ ID NO: 1132386 - RNA, 22 nt, Human
agaagcugccuacaugaccagc

SEQ ID NO: 1132387 - RNA, 22 nt, Human
ggcuucaccaggugcaugcaug

SEQ ID NO: 1132388 - RNA, 22 nt, Human
cagggcuccccgcaccgcagcc

SEQ ID NO: 1132389 - RNA, 22 nt, Human
aagcccagaugggagcauuuca

SEQ ID NO: 1132390 - RNA, 22 nt, Human
uacacuuuuuacuacagauucu

SEQ ID NO: 1132391 - RNA, 22 nt, Human
aggcagcagccacaaggccuga

SEQ ID NO: 1132392 - RNA, 18 nt, Human
uggagccagcucuaggau

SEQ ID NO: 1132393 - RNA, 22 nt, Human
ggaggccaaggaggagcuugcc

SEQ ID NO: 1132394 - RNA, 22 nt, Human
gguggccuuucaguggaucagg

SEQ ID NO: 1132395 - RNA, 22 nt, Human
ucucuggggauggaccugggag

SEQ ID NO: 1132396 - RNA, 22 nt, Human
uaucuuugcaaauaucucuaag

SEQ ID NO: 1132397 - RNA, 22 nt, Human
uuaugcuaguauaguccuuaga

SEQ ID NO: 1132398 - RNA, 22 nt, Human
aguugcagacgcagagauguug

SEQ ID NO: 1132399 - RNA, 22 nt, Human
agguggagaagagaugggcagu

SEQ ID NO: 1132400 - RNA, 23 nt, Human
ccugaagggucaggguccucagc

SEQ ID NO: 1132401 - RNA, 22 nt, Human
agcugcagauucuaucuagaag

SEQ ID NO: 1132402 - RNA, 22 nt, Human
uauguacauguuaaagggcaaa

SEQ ID NO: 1132403 - RNA, 22 nt, Human
aagcuccccgaaacccaccucu

SEQ ID NO: 1132404 - RNA, 22 nt, Human
acugggaguucuccaugucccu

SEQ ID NO: 1132405 - RNA, 22 nt, Human
gaggagguuccggguggagaag

SEQ ID NO: 1132406 - RNA, 22 nt, Human
acagaauucuaguauguggcuu

SEQ ID NO: 1132407 - RNA, 22 nt, Human
gaggcccuccagcugucagcug

SEQ ID NO: 1132408 - RNA, 22 nt, Human
gagcucccuggagguucagaua

SEQ ID NO: 1132409 - RNA, 22 nt, Human
uaaacagaaagcagauguacuu

SEQ ID NO: 1132410 - RNA, 22 nt, Human
uucuuucacucaagaaggaucu

SEQ ID NO: 1132411 - RNA, 19 nt, Human
aagcagcccuggcaagagc

SEQ ID NO: 1132412 - RNA, 22 nt, Human
cagaggcuguguaggcagacug

SEQ ID NO: 1132413 - RNA, 22 nt, Human
cacaggugcuccucggggagcu

SEQ ID NO: 1132414 - RNA, 22 nt, Human
agcagcugggcucagagcuggg

SEQ ID NO: 1132415 - RNA, 22 nt, Human
acucugaggcaggucagggcag

SEQ ID NO: 1132416 - RNA, 22 nt, Human
gccuggguuccaugaucuccag

SEQ ID NO: 1132417 - RNA, 17 nt, Human
aggcauggucuggggug

SEQ ID NO: 1132418 - RNA, 22 nt, Human
gaaggccauugcguccugggau

SEQ ID NO: 1132419 - RNA, 23 nt, Human
aggugccaacugagagcugagag

SEQ ID NO: 1132420 - RNA, 22 nt, Human
acuuugcagagccagaagagaa

SEQ ID NO: 1132421 - RNA, 22 nt, Human
aggaccagccuccaggucucuu

SEQ ID NO: 1132422 - RNA, 22 nt, Human
gcagagccgugaauggauuuca

SEQ ID NO: 1132423 - RNA, 20 nt, Human
acagaauaugcugguugugg

SEQ ID NO: 1132424 - RNA, 22 nt, Human
ugguccuggggaucugcaguga

SEQ ID NO: 1132425 - RNA, 22 nt, Human
ucucuucuuguguuuuccugcc

SEQ ID NO: 1132426 - RNA, 22 nt, Human
ggcucugcccagaugaagagga

SEQ ID NO: 1132427 - RNA, 22 nt, Human
gcauuuagcuuuaaaauauuuc

SEQ ID NO: 1132428 - RNA, 21 nt, Human
ggcagaaguagcauggacggg

SEQ ID NO: 1132429 - RNA, 22 nt, Human
acauguggucaaucuguguagg

SEQ ID NO: 1132430 - RNA, 22 nt, Human
gccccagcucugccacaacuag

SEQ ID NO: 1132431 - RNA, 22 nt, Human
cuggugggagcagcaggcagcu

SEQ ID NO: 1132432 - RNA, 22 nt, Human
agccuggaagaaccugaagucu

SEQ ID NO: 1132433 - RNA, 22 nt, Human
uaaccauauuuuccauuaaguu

SEQ ID NO: 1132434 - RNA, 19 nt, Human
aauguaguguuaugucaac

SEQ ID NO: 1132435 - RNA, 22 nt, Human
acaugcaugucuaugggcaggu

SEQ ID NO: 1132436 - RNA, 22 nt, Human
caggaacagcaccaggagcuag

SEQ ID NO: 1132437 - RNA, 22 nt, Human
ggagccuguggcugcuugaagc

SEQ ID NO: 1132438 - RNA, 22 nt, Human
uuuugaaagggugauuuggcuu

SEQ ID NO: 1132439 - RNA, 22 nt, Human
aaagccuugcccgucacuggga

SEQ ID NO: 1132440 - RNA, 22 nt, Human
ggaggccaaggugggcggauca

SEQ ID NO: 1132441 - RNA, 22 nt, Human
gagagcugggggacuguggaug

SEQ ID NO: 1132442 - RNA, 22 nt, Human
agccaggaaugcaugcucugcu

SEQ ID NO: 1132443 - RNA, 22 nt, Human
uagccaggcgaggucagugucg

SEQ ID NO: 1132444 - RNA, 22 nt, Human
gguggcaggcccugagcauccc

SEQ ID NO: 1132445 - RNA, 22 nt, Human
cugcucuggucucuucauguuu

SEQ ID NO: 1132446 - RNA, 22 nt, Human
agugaaaucagguuuugacugc

SEQ ID NO: 1132447 - RNA, 22 nt, Human
uuuuccucuguuauuaguguga

SEQ ID NO: 1132448 - RNA, 23 nt, Human
ugggcaucuccucugugccaggc

SEQ ID NO: 1132449 - RNA, 22 nt, Human
gcagcguggggacaggagcuca

SEQ ID NO: 1132450 - RNA, 22 nt, Human
cugucuccagggcaggugcagg

SEQ ID NO: 1132451 - RNA, 22 nt, Human
cuggcuccacucccugccugac

SEQ ID NO: 1132452 - RNA, 22 nt, Human
aaauguauugcauaggauauuu

SEQ ID NO: 1132453 - RNA, 22 nt, Human
cccagcagccagaaugaggagc

SEQ ID NO: 1132454 - RNA, 22 nt, Human
ggugaagggugucauggcauuu

SEQ ID NO: 1132455 - RNA, 22 nt, Human
gggcaagcucuucagaagcucu

SEQ ID NO: 1132456 - RNA, 18 nt, Human
cugcugcaggcacucagg

SEQ ID NO: 1132457 - RNA, 22 nt, Human
aucagcaagcauuuauugagug

SEQ ID NO: 1132458 - RNA, 22 nt, Human
agcagagcuauucuugugcaau

SEQ ID NO: 1132459 - RNA, 22 nt, Human
cccaggcagucuggcucuaaag

SEQ ID NO: 1132460 - RNA, 22 nt, Human
ugccagcccaccuuggggccuc

SEQ ID NO: 1132461 - RNA, 22 nt, Human
gcaguggauccaaugguaucuu

SEQ ID NO: 1132462 - RNA, 22 nt, Human
acaaggaggucuggggggcccu

SEQ ID NO: 1132463 - RNA, 22 nt, Human
aguuuguaucaauuugcuuuau

SEQ ID NO: 1132464 - RNA, 22 nt, Human
uucauuacugcgguagucacac

SEQ ID NO: 1132465 - RNA, 22 nt, Human
cuguuuucaaagagagagaaug

SEQ ID NO: 1132466 - RNA, 22 nt, Human
augcccaaugucacaauuuuug

SEQ ID NO: 1132467 - RNA, 22 nt, Human
aaaugugcuugugaucagcugu

SEQ ID NO: 1132468 - RNA, 22 nt, Human
ucagaggagaaguugggaaaau

SEQ ID NO: 1132469 - RNA, 20 nt, Human
aacagggggcugcagagggc

SEQ ID NO: 1132470 - RNA, 22 nt, Human
ccagggcagccaacccagaugc

SEQ ID NO: 1132471 - RNA, 20 nt, Human
ccuggcuuugcaucugugau

SEQ ID NO: 1132472 - RNA, 22 nt, Human
cuggagccacugggucuuguau

SEQ ID NO: 1132473 - RNA, 22 nt, Human
aaaugcagaucccugaaucuca

SEQ ID NO: 1132474 - RNA, 21 nt, Human
ugccagcauuaaacagucauu

SEQ ID NO: 1132475 - RNA, 22 nt, Human
caagggcucuuuugaggaaugu

SEQ ID NO: 1132476 - RNA, 22 nt, Human
ugcugccacauuuaaagagggg

SEQ ID NO: 1132477 - RNA, 22 nt, Human
uaucuacaggugucagguaaga

SEQ ID NO: 1132478 - RNA, 19 nt, Human
uauguguguguauuuacau

SEQ ID NO: 1132479 - RNA, 22 nt, Human
ggccucgcggcuucugguggcu

SEQ ID NO: 1132480 - RNA, 22 nt, Human
ccagcuuguuugaagcucguca

SEQ ID NO: 1132481 - RNA, 17 nt, Human
uccuggcucugccacug

SEQ ID NO: 1132482 - RNA, 22 nt, Human
uggcucagauuuuuguaggcuu

SEQ ID NO: 1132483 - RNA, 22 nt, Human
gcccucucuucugcagccucca

SEQ ID NO: 1132484 - RNA, 22 nt, Human
ggcccaaggcccaggucgagcu

SEQ ID NO: 1132485 - RNA, 22 nt, Human
ugucccagggaaggcccagcac

SEQ ID NO: 1132486 - RNA, 22 nt, Human
aagcugaggcccauggcaaggu

SEQ ID NO: 1132487 - RNA, 22 nt, Human
cagaguguaucuguguaagcau

SEQ ID NO: 1132488 - RNA, 22 nt, Human
ggugugccuggggcuuagcugc

SEQ ID NO: 1132489 - RNA, 22 nt, Human
uucuuucagaacacaagugauu

SEQ ID NO: 1132490 - RNA, 22 nt, Human
gugcuuucugcaugguuccuac

SEQ ID NO: 1132491 - RNA, 22 nt, Human
aagagcugcccaaggugaacag

SEQ ID NO: 1132492 - RNA, 22 nt, Human
gcugugcacuaccuauacaucc

SEQ ID NO: 1132493 - RNA, 20 nt, Human
uccugcaguuccuaggaggg

SEQ ID NO: 1132494 - RNA, 22 nt, Human
gcagggccagugcagagaggaa

SEQ ID NO: 1132495 - RNA, 22 nt, Human
uauguguguaugacagacagag

SEQ ID NO: 1132496 - RNA, 22 nt, Human
uauugacagagggucagaagag

SEQ ID NO: 1132497 - RNA, 19 nt, Human
uuagaaacuguugacacug

SEQ ID NO: 1132498 - RNA, 22 nt, Human
guaacagaaagucaugcucauu

SEQ ID NO: 1132499 - RNA, 22 nt, Human
ucucagagauucagggagaagu

SEQ ID NO: 1132500 - RNA, 21 nt, Human
cuguuucuugugaagugacac

SEQ ID NO: 1132501 - RNA, 19 nt, Human
ucauaaggagagaggaaau

SEQ ID NO: 1132502 - RNA, 22 nt, Human
cagggcuggcucaugaaaaguu

SEQ ID NO: 1132503 - RNA, 20 nt, Human
cugagcgucuaagaggugag

SEQ ID NO: 1132504 - RNA, 22 nt, Human
ucaaugaugcugaagguagcgu

SEQ ID NO: 1132505 - RNA, 22 nt, Human
agggacugagcuaggaucuagu

SEQ ID NO: 1132506 - RNA, 22 nt, Human
acauuugagaugccuuuuaggu

SEQ ID NO: 1132507 - RNA, 22 nt, Human
uucucauucugacucaguguag

SEQ ID NO: 1132508 - RNA, 22 nt, Human
ucucucagggggaaggcugaag

SEQ ID NO: 1132509 - RNA, 22 nt, Human
cugcaggggccucgagcacagg

SEQ ID NO: 1132510 - RNA, 22 nt, Human
ggagucagccugucagagugua

SEQ ID NO: 1132511 - RNA, 22 nt, Human
agggcugcuauguugauucaga

SEQ ID NO: 1132512 - RNA, 22 nt, Human
ugcucccaggcucuguggucug

SEQ ID NO: 1132513 - RNA, 22 nt, Human
gcagggacagggcagggccuuu

SEQ ID NO: 1132514 - RNA, 22 nt, Human
ggccugaggcgucccagcugug

SEQ ID NO: 1132515 - RNA, 22 nt, Human
cuacauuuugugauuaugaaau

SEQ ID NO: 1132516 - RNA, 22 nt, Human
acauacuaugaauacauguguc

SEQ ID NO: 1132517 - RNA, 23 nt, Human
agccucuuuucuccugcccugca

SEQ ID NO: 1132518 - RNA, 22 nt, Human
uggcucagaaggcugccuucac

SEQ ID NO: 1132519 - RNA, 22 nt, Human
ggcugaguugagaggauuacuu

SEQ ID NO: 1132520 - RNA, 22 nt, Human
aggugcagaaaaaaguccuuua

SEQ ID NO: 1132521 - RNA, 20 nt, Human
gugcauuucaccuguacugu

SEQ ID NO: 1132522 - RNA, 21 nt, Human
agaaauguaucauucuuuucc

SEQ ID NO: 1132523 - RNA, 22 nt, Human
aaguguauauaugacuuauaaa

SEQ ID NO: 1132524 - RNA, 22 nt, Human
aaaugcacucugcuucugugac

SEQ ID NO: 1132525 - RNA, 22 nt, Human
agaaaucaauaucuauauguug

SEQ ID NO: 1132526 - RNA, 22 nt, Human
uguccucaaggagcuucagucu

SEQ ID NO: 1132527 - RNA, 22 nt, Human
cccuggaggcaaagguugcagu

SEQ ID NO: 1132528 - RNA, 22 nt, Human
gcugucaccaaagcaggcacug

SEQ ID NO: 1132529 - RNA, 22 nt, Human
acaggcuuacaggcugcaagua

SEQ ID NO: 1132530 - RNA, 22 nt, Human
ugggcagaggcagcagaaaccu

SEQ ID NO: 1132531 - RNA, 22 nt, Human
gcagcuggggccacacuuaggc

SEQ ID NO: 1132532 - RNA, 22 nt, Human
uggagcugguaaacagugacau

SEQ ID NO: 1132533 - RNA, 22 nt, Human
guggcuucacauggcauuuggc

SEQ ID NO: 1132534 - RNA, 22 nt, Human
gagagcuggccagcuucaguau

SEQ ID NO: 1132535 - RNA, 22 nt, Human
aggccugaaguguggagugggg

SEQ ID NO: 1132536 - RNA, 20 nt, Human
caaugcacacagcugcuucu

SEQ ID NO: 1132537 - RNA, 22 nt, Human
cagguggcuucucccuaggcca

SEQ ID NO: 1132538 - RNA, 22 nt, Human
gggucagcugcugggggcugac

SEQ ID NO: 1132539 - RNA, 22 nt, Human
agacagcauggagcugauaaca

SEQ ID NO: 1132540 - RNA, 22 nt, Human
aggagaguucacacuggucaga

SEQ ID NO: 1132541 - RNA, 22 nt, Human
gcucccucugcucaggcacuug

SEQ ID NO: 1132542 - RNA, 22 nt, Human
uuaacagacauauauauuugua

SEQ ID NO: 1132543 - RNA, 22 nt, Human
agaugaaaagauaagcagcaau

SEQ ID NO: 1132544 - RNA, 22 nt, Human
caguagcauguaauaaagacag

SEQ ID NO: 1132545 - RNA, 22 nt, Human
cucuuccucucaugcggucaua

SEQ ID NO: 1132546 - RNA, 22 nt, Human
cccagcucugcagaccugcccu

SEQ ID NO: 1132547 - RNA, 22 nt, Human
uucacauugguucuugauagcu

SEQ ID NO: 1132548 - RNA, 22 nt, Human
agauuuagacugccuuaaucau

SEQ ID NO: 1132549 - RNA, 22 nt, Human
cuggucugagggcucuugaggc

SEQ ID NO: 1132550 - RNA, 22 nt, Human
aggcccagggcugcucucugaa

SEQ ID NO: 1132551 - RNA, 18 nt, Human
uuccauaauguauguaac

SEQ ID NO: 1132552 - RNA, 22 nt, Human
gagaaccucuccacaagucugg

SEQ ID NO: 1132553 - RNA, 22 nt, Human
ugcuugggaauguggagucaga

SEQ ID NO: 1132554 - RNA, 22 nt, Human
aggaagcccuugucauuucugu

SEQ ID NO: 1132555 - RNA, 22 nt, Human
uccuucagcuuauuucuuagga

SEQ ID NO: 1132556 - RNA, 22 nt, Human
cagcagaggaaagcaaaucuaa

SEQ ID NO: 1132557 - RNA, 22 nt, Human
ugggcaggaugcguugauucuu

SEQ ID NO: 1132558 - RNA, 18 nt, Human
acaaaggucugcaagacc

SEQ ID NO: 1132559 - RNA, 22 nt, Human
ucccugggcaucacguugcuuc

SEQ ID NO: 1132560 - RNA, 22 nt, Human
gcagcugcagguggucccaugc

SEQ ID NO: 1132561 - RNA, 22 nt, Human
acagagcauauaaagugcuuug

SEQ ID NO: 1132562 - RNA, 22 nt, Human
auccugggcagugugucacucu

SEQ ID NO: 1132563 - RNA, 22 nt, Human
ucagagugcagcgggaggcugg

SEQ ID NO: 1132564 - RNA, 22 nt, Human
gaaggcuggcuuucugagagca

SEQ ID NO: 1132565 - RNA, 22 nt, Human
agagcuggacgucugagcccua

SEQ ID NO: 1132566 - RNA, 22 nt, Human
caggagacuauggcccaaggcc

SEQ ID NO: 1132567 - RNA, 22 nt, Human
cagaaauguucuaaugauucag

SEQ ID NO: 1132568 - RNA, 22 nt, Human
gcagauggaaagugcuugaggg

SEQ ID NO: 1132569 - RNA, 19 nt, Human
gcuggggccugaccagaca

SEQ ID NO: 1132570 - RNA, 22 nt, Human
cuggggcccaucgagggcugag

SEQ ID NO: 1132571 - RNA, 22 nt, Human
cugugcuucgcaacuccaaggu

SEQ ID NO: 1132572 - RNA, 22 nt, Human
aucucagggcuggagcccugga

SEQ ID NO: 1132573 - RNA, 22 nt, Human
caccagcuuugcccacugccca

SEQ ID NO: 1132574 - RNA, 22 nt, Human
gcugcuucucugauggagucca

SEQ ID NO: 1132575 - RNA, 22 nt, Human
cucugcaggggaggcaugcacu

SEQ ID NO: 1132576 - RNA, 22 nt, Human
gcucccugcagcugagaguucc

SEQ ID NO: 1132577 - RNA, 22 nt, Human
aagggcagggaguuugugucua

SEQ ID NO: 1132578 - RNA, 22 nt, Human
acaauguaggauauguacuugu

SEQ ID NO: 1132579 - RNA, 20 nt, Human
aauuuacucacagaaugaau

SEQ ID NO: 1132580 - RNA, 22 nt, Human
ggcucagggaaugaggaagaau

SEQ ID NO: 1132581 - RNA, 22 nt, Human
uggccuccccuaacagccucuu

SEQ ID NO: 1132582 - RNA, 22 nt, Human
aauaauguugacgauagucuua

SEQ ID NO: 1132583 - RNA, 22 nt, Human
gcuggcuuugcacugggugcau

SEQ ID NO: 1132584 - RNA, 20 nt, Human
gugugugcuccaugcaugcu

SEQ ID NO: 1132585 - RNA, 22 nt, Human
gagaggaguaggcugauggugc

SEQ ID NO: 1132586 - RNA, 22 nt, Human
auaaguucagguaaagaaauca

SEQ ID NO: 1132587 - RNA, 22 nt, Human
cagcuggcgggcagagccgcca

SEQ ID NO: 1132588 - RNA, 22 nt, Human
ggcugcuuuaucggcugcugaa

SEQ ID NO: 1132589 - RNA, 22 nt, Human
ggcuccuguccuccuggagcuc

SEQ ID NO: 1132590 - RNA, 22 nt, Human
cuggcucaggguggucuggguc

SEQ ID NO: 1132591 - RNA, 17 nt, Human
agguggcugcugcgccu

SEQ ID NO: 1132592 - RNA, 22 nt, Human
cuggcucaauaaauauuagcug

SEQ ID NO: 1132593 - RNA, 22 nt, Human
aguuuuucugggaggcacugcu

SEQ ID NO: 1132594 - RNA, 22 nt, Human
aagaggaagucuccauggagag

SEQ ID NO: 1132595 - RNA, 22 nt, Human
augcuuuuccuaaaaugaugcc

SEQ ID NO: 1132596 - RNA, 22 nt, Human
gagggcugcaaugagacagaga

SEQ ID NO: 1132597 - RNA, 22 nt, Human
uugcuuccaguccaagucuguu

SEQ ID NO: 1132598 - RNA, 22 nt, Human
ucaggcagaugcagggauggau

SEQ ID NO: 1132599 - RNA, 22 nt, Human
cugggagguggagguugcauug

SEQ ID NO: 1132600 - RNA, 22 nt, Human
aggccugaggaccagauaaaug

SEQ ID NO: 1132601 - RNA, 22 nt, Human
ugucuccucauacugucauauu

SEQ ID NO: 1132602 - RNA, 22 nt, Human
auggaaagggaagcaaggaaca

SEQ ID NO: 1132603 - RNA, 22 nt, Human
ccuggcaguggugaagaagagg

SEQ ID NO: 1132604 - RNA, 22 nt, Human
uggcucaggagggaucuuugcu

SEQ ID NO: 1132605 - RNA, 22 nt, Human
guuuccauggcucuguuaaugg

SEQ ID NO: 1132606 - RNA, 22 nt, Human
ggagggugcauuuuacccugug

SEQ ID NO: 1132607 - RNA, 22 nt, Human
ugcccacaggaagacaccagcg

SEQ ID NO: 1132608 - RNA, 22 nt, Human
cugccuggaaugccagcuucuc

SEQ ID NO: 1132609 - RNA, 22 nt, Human
ugggcagaaggaagagccaccu

SEQ ID NO: 1132610 - RNA, 22 nt, Human
agaaauaugcugauuagaugaa

SEQ ID NO: 1132611 - RNA, 22 nt, Human
ucuguggcacgauugcacugca

SEQ ID NO: 1132612 - RNA, 22 nt, Human
gcugcaggagcuggagcugugg

SEQ ID NO: 1132613 - RNA, 20 nt, Human
uacuuaggcuuguuuuggcc

SEQ ID NO: 1132614 - RNA, 22 nt, Human
ugggcugcggauaggccucgga

SEQ ID NO: 1132615 - RNA, 22 nt, Human
augucuuuauaaauguauaaug

SEQ ID NO: 1132616 - RNA, 22 nt, Human
agggcugcaggcaagauauggc

SEQ ID NO: 1132617 - RNA, 22 nt, Human
aggcaguguguagcuggaagag

SEQ ID NO: 1132618 - RNA, 22 nt, Human
gaaaguuuauagguuauauaau

SEQ ID NO: 1132619 - RNA, 22 nt, Human
agccucucuccagcuuggcaga

SEQ ID NO: 1132620 - RNA, 22 nt, Human
gcccugagacugagcauggguu

SEQ ID NO: 1132621 - RNA, 22 nt, Human
gagcugugagggacacauugcu

SEQ ID NO: 1132622 - RNA, 22 nt, Human
uuucagauggagguuuaggaca

SEQ ID NO: 1132623 - RNA, 22 nt, Human
cugcucuguuaauuaaacuuug

SEQ ID NO: 1132624 - RNA, 22 nt, Human
ucucaggggccuggaguccugg

SEQ ID NO: 1132625 - RNA, 22 nt, Human
guggccucugugcuccugccua

SEQ ID NO: 1132626 - RNA, 20 nt, Human
cccucugcacauggcugugg

SEQ ID NO: 1132627 - RNA, 22 nt, Human
uggcuuaucacauuguccaugg

SEQ ID NO: 1132628 - RNA, 22 nt, Human
gcaaaugcucuccuuggucagg

SEQ ID NO: 1132629 - RNA, 22 nt, Human
gccagggaggcuguaggguccu

SEQ ID NO: 1132630 - RNA, 22 nt, Human
uccagaguacggaagagucauc

SEQ ID NO: 1132631 - RNA, 22 nt, Human
guuguauucuucaauaucagag

SEQ ID NO: 1132632 - RNA, 23 nt, Human
uggggccaagugaggaagggucu

SEQ ID NO: 1132633 - RNA, 22 nt, Human
gauggcacacagacauccccgc

SEQ ID NO: 1132634 - RNA, 22 nt, Human
aguuuuucuccccuggcuucau

SEQ ID NO: 1132635 - RNA, 22 nt, Human
cugcugcugcuaucuacccagg

SEQ ID NO: 1132636 - RNA, 22 nt, Human
gaaaucugaaucuucuguuggu

SEQ ID NO: 1132637 - RNA, 22 nt, Human
ucuuucucucuaaucaagcaca

SEQ ID NO: 1132638 - RNA, 22 nt, Human
uuuucuaacaucuaguaauuug

SEQ ID NO: 1132639 - RNA, 20 nt, Human
ucugcucagcccucaguggc

SEQ ID NO: 1132640 - RNA, 22 nt, Human
aagcugcccuguguuagaguuc

SEQ ID NO: 1132641 - RNA, 22 nt, Human
acuggaagccaguugacaauca

SEQ ID NO: 1132642 - RNA, 22 nt, Human
gugacagaguuuuagaucucau

SEQ ID NO: 1132643 - RNA, 22 nt, Human
gcugucugcaagccaggaaaug

SEQ ID NO: 1132644 - RNA, 22 nt, Human
cucuucagauaaaagggauauu

SEQ ID NO: 1132645 - RNA, 22 nt, Human
uuugcauuucuaaugagcuccg

SEQ ID NO: 1132646 - RNA, 22 nt, Human
gcagggcucaacaggacacccc

SEQ ID NO: 1132647 - RNA, 22 nt, Human
agggcacaagacucugagcccc

SEQ ID NO: 1132648 - RNA, 22 nt, Human
gcacugcagguggguggagagg

SEQ ID NO: 1132649 - RNA, 22 nt, Human
cuggggcugcagcgaucuucau

SEQ ID NO: 1132650 - RNA, 22 nt, Human
ccagagcugcauccagcagguu

SEQ ID NO: 1132651 - RNA, 22 nt, Human
gcucagagauggggaaugaaaa

SEQ ID NO: 1132652 - RNA, 18 nt, Human
ccgggcuuuggugacaca

SEQ ID NO: 1132653 - RNA, 22 nt, Human
ugaaggcauugaugaaggaauc

SEQ ID NO: 1132654 - RNA, 22 nt, Human
ucagagugggagaaugugccaa

SEQ ID NO: 1132655 - RNA, 22 nt, Human
uccuugaagcuuguaucuaaua

SEQ ID NO: 1132656 - RNA, 22 nt, Human
uagcacauaacuuagaauaguu

SEQ ID NO: 1132657 - RNA, 22 nt, Human
ggcucugguugaccaugauggc

SEQ ID NO: 1132658 - RNA, 22 nt, Human
guuccauaucacagcagacgaa

SEQ ID NO: 1132659 - RNA, 21 nt, Human
uugaagcaaggguggcucuga

SEQ ID NO: 1132660 - RNA, 21 nt, Human
ugguacaccuugccugucaga

SEQ ID NO: 1132661 - RNA, 22 nt, Human
gccugcagauauauaggauggu

SEQ ID NO: 1132662 - RNA, 19 nt, Human
cagagccucagagcuagaa

SEQ ID NO: 1132663 - RNA, 22 nt, Human
agcaauauuucagcuagcaggu

SEQ ID NO: 1132664 - RNA, 22 nt, Human
caggggccggcuguccgugccc

SEQ ID NO: 1132665 - RNA, 22 nt, Human
ugccagugggugugcagagacu

SEQ ID NO: 1132666 - RNA, 22 nt, Human
ugcauugcauuugucaugaaga

SEQ ID NO: 1132667 - RNA, 23 nt, Human
ugcucccaggugacgcugcuguu

SEQ ID NO: 1132668 - RNA, 22 nt, Human
cugagcucuaaugucagccuug

SEQ ID NO: 1132669 - RNA, 22 nt, Human
gaggcccaguccugcaagcacg

SEQ ID NO: 1132670 - RNA, 21 nt, Human
uaucuacuggugucuuucaga

SEQ ID NO: 1132671 - RNA, 22 nt, Human
gcacagccagcaucugagggau

SEQ ID NO: 1132672 - RNA, 22 nt, Human
cagcagugucuccagcaucaca

SEQ ID NO: 1132673 - RNA, 22 nt, Human
gggauggacuuggggacuccag

SEQ ID NO: 1132674 - RNA, 22 nt, Human
uuuggaaaguguacaaauuuga

SEQ ID NO: 1132675 - RNA, 22 nt, Human
cuucagaacuauaaaaaguacu

SEQ ID NO: 1132676 - RNA, 22 nt, Human
cagggccacuguagaugaggag

SEQ ID NO: 1132677 - RNA, 22 nt, Human
cugaaggauguguggugggagu

SEQ ID NO: 1132678 - RNA, 22 nt, Human
uuacaguauuguuaaacucuuu

SEQ ID NO: 1132679 - RNA, 22 nt, Human
augggaggaagagaagaugucu

SEQ ID NO: 1132680 - RNA, 22 nt, Human
ggggcagaaagcccacagagug

SEQ ID NO: 1132681 - RNA, 22 nt, Human
ggcuagaauaauugacuucauu

SEQ ID NO: 1132682 - RNA, 22 nt, Human
ugucucaggcccaagccaguaa

SEQ ID NO: 1132683 - RNA, 22 nt, Human
gcugucuucacuuccugguuuc

SEQ ID NO: 1132684 - RNA, 22 nt, Human
ucuggagcuuguuucagauggu

SEQ ID NO: 1132685 - RNA, 22 nt, Human
cccagggacagcuagguggggc

SEQ ID NO: 1132686 - RNA, 21 nt, Human
aaguaaaucagagaaauaacc

SEQ ID NO: 1132687 - RNA, 17 nt, Human
uucucuuccuggauagu

SEQ ID NO: 1132688 - RNA, 22 nt, Human
guauguguaaguaugccaccuu

SEQ ID NO: 1132689 - RNA, 22 nt, Human
acacugcagaugaaagcauaag

SEQ ID NO: 1132690 - RNA, 22 nt, Human
agcugaguuaauucaucacuua

SEQ ID NO: 1132691 - RNA, 22 nt, Human
cagcuggcagaaccugcaucca

SEQ ID NO: 1132692 - RNA, 22 nt, Human
acagggcagugucuugaaaaau

SEQ ID NO: 1132693 - RNA, 22 nt, Human
uuaugaaagacauuucuguugg

SEQ ID NO: 1132694 - RNA, 22 nt, Human
uggcucagcugacucggcuucu

SEQ ID NO: 1132695 - RNA, 22 nt, Human
ugguggcuucugaggauggcga

SEQ ID NO: 1132696 - RNA, 22 nt, Human
aggauccuccuuagaaaagacc

SEQ ID NO: 1132697 - RNA, 22 nt, Human
cacagggccuggggcagcugcu

SEQ ID NO: 1132698 - RNA, 22 nt, Human
gggacaggccccucgcuagcuu

SEQ ID NO: 1132699 - RNA, 22 nt, Human
ccagcccuccuccaucagagga

SEQ ID NO: 1132700 - RNA, 22 nt, Human
uucaagauggcugcaaauacuu

SEQ ID NO: 1132701 - RNA, 22 nt, Human
gcaggagcagucaggggcagcu

SEQ ID NO: 1132702 - RNA, 22 nt, Human
aaguuugacagaaguuucuaau

SEQ ID NO: 1132703 - RNA, 22 nt, Human
gaaaauguuuguccggagcuga

SEQ ID NO: 1132704 - RNA, 22 nt, Human
ugcuggagaucauuaauguuca

SEQ ID NO: 1132705 - RNA, 22 nt, Human
acugugcuuucucuggaggcau

SEQ ID NO: 1132706 - RNA, 22 nt, Human
cugggaggcaccgcgucgugcu

SEQ ID NO: 1132707 - RNA, 22 nt, Human
guccucugaaguugugcaaugc

SEQ ID NO: 1132708 - RNA, 19 nt, Human
ggccuggauuuagggcucc

SEQ ID NO: 1132709 - RNA, 22 nt, Human
gcaggagcccuggcauguucuu

SEQ ID NO: 1132710 - RNA, 22 nt, Human
ucacaugcccuguauuuaccag

SEQ ID NO: 1132711 - RNA, 22 nt, Human
cccaggaggucgaagcugcagu

SEQ ID NO: 1132712 - RNA, 22 nt, Human
cccagaaggucgaggcugcagu

SEQ ID NO: 1132713 - RNA, 22 nt, Human
caucacugacgcugagauucca

SEQ ID NO: 1132714 - RNA, 22 nt, Human
uaaaugcaaugugcuuuaccag

SEQ ID NO: 1132715 - RNA, 22 nt, Human
acugcuuuucagagucugccug

SEQ ID NO: 1132716 - RNA, 22 nt, Human
ucuuacauauagcaugaguaca

SEQ ID NO: 1132717 - RNA, 22 nt, Human
aaauugcaaaaguacuuuuagg

SEQ ID NO: 1132718 - RNA, 22 nt, Human
uggcagcagggaggccaguguu

SEQ ID NO: 1132719 - RNA, 19 nt, Human
caggagagcaugcacuuug

SEQ ID NO: 1132720 - RNA, 22 nt, Human
cagcaucuaaucuucaugccgg

SEQ ID NO: 1132721 - RNA, 22 nt, Human
ccauaaggagccagacauucca

SEQ ID NO: 1132722 - RNA, 22 nt, Human
ugcauuccuccaccuccugcac

SEQ ID NO: 1132723 - RNA, 22 nt, Human
ugucccagacauaaguggacau

SEQ ID NO: 1132724 - RNA, 22 nt, Human
gcaggugggggucggugcaucu

SEQ ID NO: 1132725 - RNA, 22 nt, Human
agaagccauucccuguaggcuc

SEQ ID NO: 1132726 - RNA, 22 nt, Human
uccugucugucuuuggucccuu

SEQ ID NO: 1132727 - RNA, 22 nt, Human
cugucccagauguucucagcac

SEQ ID NO: 1132728 - RNA, 22 nt, Human
agccucugacugucagcaaggu

SEQ ID NO: 1132729 - RNA, 22 nt, Human
ccuguccuccaagagcacaucu

SEQ ID NO: 1132730 - RNA, 22 nt, Human
agugacucacuagcucucagug

SEQ ID NO: 1132731 - RNA, 22 nt, Human
agccuggauccuaggcucagcu

SEQ ID NO: 1132732 - RNA, 22 nt, Human
aucuucaacuugaucauuugaa

SEQ ID NO: 1132733 - RNA, 22 nt, Human
acagaaauuagcagugaguuua

SEQ ID NO: 1132734 - RNA, 22 nt, Human
agcugggagcagagccacagcc

SEQ ID NO: 1132735 - RNA, 20 nt, Human
ccagacagcaccugccuggu

SEQ ID NO: 1132736 - RNA, 22 nt, Human
cagguggguacaucacagagac

SEQ ID NO: 1132737 - RNA, 22 nt, Human
uggagcagagaugguggccuuc

SEQ ID NO: 1132738 - RNA, 22 nt, Human
uuagaaaacauaagugguaaag

SEQ ID NO: 1132739 - RNA, 22 nt, Human
aggagaaggaagugcaucacua

SEQ ID NO: 1132740 - RNA, 22 nt, Human
gcaggcaguuauuuaguagaau

SEQ ID NO: 1132741 - RNA, 22 nt, Human
cugggaggcggagguuguagug
